United States Patent Application Publication US 2014/0004565 A1 - sequence listing, part 8

SEQ ID NO: 62874 - RNA, 19 nt, Artificial Sequence
  Description of Artificial Sequence: Synthetic oligonucleotide
cugccaguaaugguccacu

SEQ ID NO: 62875 - RNA, 19 nt, Artificial Sequence
  Description of Artificial Sequence: Synthetic oligonucleotide
gcagggcaucgccaaucug

SEQ ID NO: 62876 - RNA, 19 nt, Artificial Sequence
  Description of Artificial Sequence: Synthetic oligonucleotide
auccacguucaugcuucaa

SEQ ID NO: 62877 - RNA, 19 nt, Artificial Sequence
  Description of Artificial Sequence: Synthetic oligonucleotide
cguuccuacuagcagauau

SEQ ID NO: 62878 - RNA, 19 nt, Artificial Sequence
  Description of Artificial Sequence: Synthetic oligonucleotide
ggaccccaauucuguguuc

SEQ ID NO: 62879 - RNA, 19 nt, Artificial Sequence
  Description of Artificial Sequence: Synthetic oligonucleotide
cgcaaguuaauguaacauu

SEQ ID NO: 62880 - RNA, 19 nt, Artificial Sequence
  Description of Artificial Sequence: Synthetic oligonucleotide
cucaggcagaaaacauguu

SEQ ID NO: 62881 - RNA, 19 nt, Artificial Sequence
  Description of Artificial Sequence: Synthetic oligonucleotide
cggaacuaaucucauugua

SEQ ID NO: 62882 - RNA, 19 nt, Artificial Sequence
  Description of Artificial Sequence: Synthetic oligonucleotide
gcccuuauccagucuacuu

SEQ ID NO: 62883 - RNA, 19 nt, Artificial Sequence
  Description of Artificial Sequence: Synthetic oligonucleotide
caaaccgauacuggcccuu

SEQ ID NO: 62884 - RNA, 19 nt, Artificial Sequence
  Description of Artificial Sequence: Synthetic oligonucleotide
gcggguugccauuccccaa

SEQ ID NO: 62885 - RNA, 19 nt, Artificial Sequence
  Description of Artificial Sequence: Synthetic oligonucleotide
gcauugcgccucacaucug

SEQ ID NO: 62886 - RNA, 19 nt, Artificial Sequence
  Description of Artificial Sequence: Synthetic oligonucleotide
ccauugauauaaggagacu

SEQ ID NO: 62887 - RNA, 19 nt, Artificial Sequence
  Description of Artificial Sequence: Synthetic oligonucleotide
ggcccuuauccagucuacu

SEQ ID NO: 62888 - RNA, 19 nt, Artificial Sequence
  Description of Artificial Sequence: Synthetic oligonucleotide
gccugauguugucuuucau

SEQ ID NO: 62889 - RNA, 19 nt, Artificial Sequence
  Description of Artificial Sequence: Synthetic oligonucleotide
cagagacauucagggaguu

SEQ ID NO: 62890 - RNA, 19 nt, Artificial Sequence
  Description of Artificial Sequence: Synthetic oligonucleotide
gguccacuguauagcuggu

SEQ ID NO: 62891 - RNA, 19 nt, Artificial Sequence
  Description of Artificial Sequence: Synthetic oligonucleotide
gcguuccuacuagcagaua

SEQ ID NO: 62892 - RNA, 19 nt, Artificial Sequence
  Description of Artificial Sequence: Synthetic oligonucleotide
aauguuagcauauauagag

SEQ ID NO: 62893 - RNA, 19 nt, Artificial Sequence
  Description of Artificial Sequence: Synthetic oligonucleotide
acgaaauucaacuugauag

SEQ ID NO: 62894 - RNA, 19 nt, Artificial Sequence
  Description of Artificial Sequence: Synthetic oligonucleotide
aacuagaacaacgagagac

SEQ ID NO: 62895 - RNA, 19 nt, Artificial Sequence
  Description of Artificial Sequence: Synthetic oligonucleotide
augauuauugcucaucugc

SEQ ID NO: 62896 - RNA, 19 nt, Artificial Sequence
  Description of Artificial Sequence: Synthetic oligonucleotide
aacaacacaucucugcgcc

SEQ ID NO: 62897 - RNA, 19 nt, Artificial Sequence
  Description of Artificial Sequence: Synthetic oligonucleotide
uucuuauaaacccaguggg

SEQ ID NO: 62898 - RNA, 19 nt, Artificial Sequence
  Description of Artificial Sequence: Synthetic oligonucleotide
agaauuaacgcauaacccg

SEQ ID NO: 62899 - RNA, 19 nt, Artificial Sequence
  Description of Artificial Sequence: Synthetic oligonucleotide
aacaacgagagacuggugg

SEQ ID NO: 62900 - RNA, 19 nt, Artificial Sequence
  Description of Artificial Sequence: Synthetic oligonucleotide
auagaguucuaucagugcc

SEQ ID NO: 62901 - RNA, 19 nt, Artificial Sequence
  Description of Artificial Sequence: Synthetic oligonucleotide
uuaaacaggaaacagggcu

SEQ ID NO: 62902 - RNA, 19 nt, Artificial Sequence
  Description of Artificial Sequence: Synthetic oligonucleotide
aagugucucaaucaauacc

SEQ ID NO: 62903 - RNA, 19 nt, Artificial Sequence
  Description of Artificial Sequence: Synthetic oligonucleotide
cuuggaauuaucuuggagc

SEQ ID NO: 62904 - RNA, 19 nt, Artificial Sequence
  Description of Artificial Sequence: Synthetic oligonucleotide
auuaagauacaacagaaau

SEQ ID NO: 62905 - RNA, 19 nt, Artificial Sequence
  Description of Artificial Sequence: Synthetic oligonucleotide
gauuauauaguuaucguug

SEQ ID NO: 62906 - RNA, 19 nt, Artificial Sequence
  Description of Artificial Sequence: Synthetic oligonucleotide
uaaacuaugggcuggaaac

SEQ ID NO: 62907 - RNA, 19 nt, Artificial Sequence
  Description of Artificial Sequence: Synthetic oligonucleotide
uuggaauuaucuuggagcg

SEQ ID NO: 62908 - RNA, 19 nt, Artificial Sequence
  Description of Artificial Sequence: Synthetic oligonucleotide
aaacuggcucuuuuaaggc

SEQ ID NO: 62909 - RNA, 19 nt, Artificial Sequence
  Description of Artificial Sequence: Synthetic oligonucleotide
acagauuauauaguuaucg

SEQ ID NO: 62910 - RNA, 19 nt, Artificial Sequence
  Description of Artificial Sequence: Synthetic oligonucleotide
gcuauaauaaacuaugggc

SEQ ID NO: 62911 - RNA, 19 nt, Artificial Sequence
  Description of Artificial Sequence: Synthetic oligonucleotide
aaucagagcagacaugucu

SEQ ID NO: 62912 - RNA, 19 nt, Artificial Sequence
  Description of Artificial Sequence: Synthetic oligonucleotide
aaaucucucaucguuagag

SEQ ID NO: 62913 - RNA, 19 nt, Artificial Sequence
  Description of Artificial Sequence: Synthetic oligonucleotide
ugaguuuaacaacacaucu

SEQ ID NO: 62914 - RNA, 19 nt, Artificial Sequence
  Description of Artificial Sequence: Synthetic oligonucleotide
auacuuaaagcuugugagc

SEQ ID NO: 62915 - RNA, 19 nt, Artificial Sequence
  Description of Artificial Sequence: Synthetic oligonucleotide
aauugaguaaacgacccuc

SEQ ID NO: 62916 - RNA, 19 nt, Artificial Sequence
  Description of Artificial Sequence: Synthetic oligonucleotide
uuagcauauauagagaaga

SEQ ID NO: 62917 - RNA, 19 nt, Artificial Sequence
  Description of Artificial Sequence: Synthetic oligonucleotide
aauuagguuugaauggccc

SEQ ID NO: 62918 - RNA, 19 nt, Artificial Sequence
  Description of Artificial Sequence: Synthetic oligonucleotide
uuucauucgguccaagugc

SEQ ID NO: 62919 - RNA, 19 nt, Artificial Sequence
  Description of Artificial Sequence: Synthetic oligonucleotide
gaguaaacgacccucugcg

SEQ ID NO: 62920 - RNA, 19 nt, Artificial Sequence
  Description of Artificial Sequence: Synthetic oligonucleotide
uauaauaaacuaugggcug

SEQ ID NO: 62921 - RNA, 19 nt, Artificial Sequence
  Description of Artificial Sequence: Synthetic oligonucleotide
uuauagaguucuaucagug

SEQ ID NO: 62922 - RNA, 19 nt, Artificial Sequence
  Description of Artificial Sequence: Synthetic oligonucleotide
uuucuuaggaaguaaguac

SEQ ID NO: 62923 - RNA, 19 nt, Artificial Sequence
  Description of Artificial Sequence: Synthetic oligonucleotide
ugugauguagacaauugcu

SEQ ID NO: 62924 - RNA, 19 nt, Artificial Sequence
  Description of Artificial Sequence: Synthetic oligonucleotide
cucaaauugaguaaacgac

SEQ ID NO: 62925 - RNA, 19 nt, Artificial Sequence
  Description of Artificial Sequence: Synthetic oligonucleotide
agacaauugcuccaagggc

SEQ ID NO: 62926 - RNA, 19 nt, Artificial Sequence
  Description of Artificial Sequence: Synthetic oligonucleotide
uguagcgucccucaggugc

SEQ ID NO: 62927 - RNA, 19 nt, Artificial Sequence
  Description of Artificial Sequence: Synthetic oligonucleotide
uuaucguuguuucacguug

SEQ ID NO: 62928 - RNA, 19 nt, Artificial Sequence
  Description of Artificial Sequence: Synthetic oligonucleotide
auaguuaucguuguuucac

SEQ ID NO: 62929 - RNA, 19 nt, Artificial Sequence
  Description of Artificial Sequence: Synthetic oligonucleotide
aauauuuuccucccaaguu

SEQ ID NO: 62930 - RNA, 19 nt, Artificial Sequence
  Description of Artificial Sequence: Synthetic oligonucleotide
cucuauuagaguugggugg

SEQ ID NO: 62931 - RNA, 19 nt, Artificial Sequence
  Description of Artificial Sequence: Synthetic oligonucleotide
aauaccgcugucugggccg

SEQ ID NO: 62932 - RNA, 19 nt, Artificial Sequence
  Description of Artificial Sequence: Synthetic oligonucleotide
agauguugcaagcagacca

SEQ ID NO: 62933 - RNA, 19 nt, Artificial Sequence
  Description of Artificial Sequence: Synthetic oligonucleotide
uggagcgugaaucaggaug

SEQ ID NO: 62934 - RNA, 19 nt, Artificial Sequence
  Description of Artificial Sequence: Synthetic oligonucleotide
acauagacgauaccuuagc

SEQ ID NO: 62935 - RNA, 19 nt, Artificial Sequence
  Description of Artificial Sequence: Synthetic oligonucleotide
agcuagaacacguugagga

SEQ ID NO: 62936 - RNA, 19 nt, Artificial Sequence
  Description of Artificial Sequence: Synthetic oligonucleotide
agaaggacgacccguuugc

SEQ ID NO: 62937 - RNA, 19 nt, Artificial Sequence
  Description of Artificial Sequence: Synthetic oligonucleotide
accuauuauuccuauggac

SEQ ID NO: 62938 - RNA, 19 nt, Artificial Sequence
  Description of Artificial Sequence: Synthetic oligonucleotide
aaucucucaucguuagagg

SEQ ID NO: 62939 - RNA, 19 nt, Artificial Sequence
  Description of Artificial Sequence: Synthetic oligonucleotide
cuaguaccuagaauuaacg

SEQ ID NO: 62940 - RNA, 19 nt, Artificial Sequence
  Description of Artificial Sequence: Synthetic oligonucleotide
aauuauauacuuaaagcuu

SEQ ID NO: 62941 - RNA, 19 nt, Artificial Sequence
  Description of Artificial Sequence: Synthetic oligonucleotide
aguucuaucagugccaaag

SEQ ID NO: 62942 - RNA, 19 nt, Artificial Sequence
  Description of Artificial Sequence: Synthetic oligonucleotide
uacaaguuaucaaacuucu

SEQ ID NO: 62943 - RNA, 19 nt, Artificial Sequence
  Description of Artificial Sequence: Synthetic oligonucleotide
cuuaguagggaauuuggug

SEQ ID NO: 62944 - RNA, 19 nt, Artificial Sequence
  Description of Artificial Sequence: Synthetic oligonucleotide
cacuauuuuagcaccagcc

SEQ ID NO: 62945 - RNA, 19 nt, Artificial Sequence
  Description of Artificial Sequence: Synthetic oligonucleotide
ucuauaaaacuaacaccag

SEQ ID NO: 62946 - RNA, 19 nt, Artificial Sequence
  Description of Artificial Sequence: Synthetic oligonucleotide
aucauguuagcuugccacc

SEQ ID NO: 62947 - RNA, 19 nt, Artificial Sequence
  Description of Artificial Sequence: Synthetic oligonucleotide
ugcuuauggcuccaguucg

SEQ ID NO: 62948 - RNA, 19 nt, Artificial Sequence
  Description of Artificial Sequence: Synthetic oligonucleotide
ucauuuagcuucaccaccc

SEQ ID NO: 62949 - RNA, 19 nt, Artificial Sequence
  Description of Artificial Sequence: Synthetic oligonucleotide
acaugcaccaccuacgucu

SEQ ID NO: 62950 - RNA, 19 nt, Artificial Sequence
  Description of Artificial Sequence: Synthetic oligonucleotide
gcauauauagagaagaaag

SEQ ID NO: 62951 - RNA, 19 nt, Artificial Sequence
  Description of Artificial Sequence: Synthetic oligonucleotide
aagauaauuguucccugcu

SEQ ID NO: 62952 - RNA, 19 nt, Artificial Sequence
  Description of Artificial Sequence: Synthetic oligonucleotide
cuacgucuaaccuaccugg

SEQ ID NO: 62953 - RNA, 19 nt, Artificial Sequence
  Description of Artificial Sequence: Synthetic oligonucleotide
aacccaguggguuaagucu

SEQ ID NO: 62954 - RNA, 19 nt, Artificial Sequence
  Description of Artificial Sequence: Synthetic oligonucleotide
auuauagaguucuaucagu

SEQ ID NO: 62955 - RNA, 19 nt, Artificial Sequence
  Description of Artificial Sequence: Synthetic oligonucleotide
uuaucuuggagcgugaauc

SEQ ID NO: 62956 - RNA, 19 nt, Artificial Sequence
  Description of Artificial Sequence: Synthetic oligonucleotide
uguaauugacuuuaaugau

SEQ ID NO: 62957 - RNA, 19 nt, Artificial Sequence
  Description of Artificial Sequence: Synthetic oligonucleotide
uuuguagcgucccucaggu

SEQ ID NO: 62958 - RNA, 19 nt, Artificial Sequence
  Description of Artificial Sequence: Synthetic oligonucleotide
uucgcugaugcuauaauaa

SEQ ID NO: 62959 - RNA, 19 nt, Artificial Sequence
  Description of Artificial Sequence: Synthetic oligonucleotide
aucaauaccgcugucuggg

SEQ ID NO: 62960 - RNA, 19 nt, Artificial Sequence
  Description of Artificial Sequence: Synthetic oligonucleotide
uuauacugaguaauggcuc

SEQ ID NO: 62961 - RNA, 19 nt, Artificial Sequence
  Description of Artificial Sequence: Synthetic oligonucleotide
ugaguaaacgacccucugc

SEQ ID NO: 62962 - RNA, 19 nt, Artificial Sequence
  Description of Artificial Sequence: Synthetic oligonucleotide
acucuauuagaguugggug

SEQ ID NO: 62963 - RNA, 19 nt, Artificial Sequence
  Description of Artificial Sequence: Synthetic oligonucleotide
auagaaugcaguuuaguua

SEQ ID NO: 62964 - RNA, 19 nt, Artificial Sequence
  Description of Artificial Sequence: Synthetic oligonucleotide
uaguaucuguaauaauuag

SEQ ID NO: 62965 - RNA, 19 nt, Artificial Sequence
  Description of Artificial Sequence: Synthetic oligonucleotide
agcccuuaccuauuauucc

SEQ ID NO: 62966 - RNA, 19 nt, Artificial Sequence
  Description of Artificial Sequence: Synthetic oligonucleotide
ugaaugaugagaugagaaa

SEQ ID NO: 62967 - RNA, 19 nt, Artificial Sequence
  Description of Artificial Sequence: Synthetic oligonucleotide
accuacugaguuuaacaac

SEQ ID NO: 62968 - RNA, 19 nt, Artificial Sequence
  Description of Artificial Sequence: Synthetic oligonucleotide
uauagaguucuaucagugc

SEQ ID NO: 62969 - RNA, 19 nt, Artificial Sequence
  Description of Artificial Sequence: Synthetic oligonucleotide
cagauuaaagggcagcaag

SEQ ID NO: 62970 - RNA, 19 nt, Artificial Sequence
  Description of Artificial Sequence: Synthetic oligonucleotide
aucucugcgccagacaugc

SEQ ID NO: 62971 - RNA, 19 nt, Artificial Sequence
  Description of Artificial Sequence: Synthetic oligonucleotide
uaguaccuagaauuaacgc

SEQ ID NO: 62972 - RNA, 19 nt, Artificial Sequence
  Description of Artificial Sequence: Synthetic oligonucleotide
ucaaucaaaaguggcacca

SEQ ID NO: 62973 - RNA, 19 nt, Artificial Sequence
  Description of Artificial Sequence: Synthetic oligonucleotide
uaauuagguuugaauggcc

SEQ ID NO: 62974 - RNA, 19 nt, Artificial Sequence
  Description of Artificial Sequence: Synthetic oligonucleotide
agcccacuauuuuagcacc

SEQ ID NO: 62975 - RNA, 19 nt, Artificial Sequence
  Description of Artificial Sequence: Synthetic oligonucleotide
ugcuaagggacgaaauuca

SEQ ID NO: 62976 - RNA, 19 nt, Artificial Sequence
  Description of Artificial Sequence: Synthetic oligonucleotide
uccuuuguuacauggcuug

SEQ ID NO: 62977 - RNA, 19 nt, Artificial Sequence
  Description of Artificial Sequence: Synthetic oligonucleotide
agauuauauaguuaucguu

SEQ ID NO: 62978 - RNA, 19 nt, Artificial Sequence
  Description of Artificial Sequence: Synthetic oligonucleotide
uaucguuguuucacguugg

SEQ ID NO: 62979 - RNA, 19 nt, Artificial Sequence
  Description of Artificial Sequence: Synthetic oligonucleotide
ucguuagagggccucuugg

SEQ ID NO: 62980 - RNA, 19 nt, Artificial Sequence
  Description of Artificial Sequence: Synthetic oligonucleotide
uaguuaucguuguuucacg

SEQ ID NO: 62981 - RNA, 19 nt, Artificial Sequence
  Description of Artificial Sequence: Synthetic oligonucleotide
guaaacgacccucugcgag

SEQ ID NO: 62982 - RNA, 19 nt, Artificial Sequence
  Description of Artificial Sequence: Synthetic oligonucleotide
aaacagggcuuagagguuc

SEQ ID NO: 62983 - RNA, 19 nt, Artificial Sequence
  Description of Artificial Sequence: Synthetic oligonucleotide
ucuuaguagggaauuuggu

SEQ ID NO: 62984 - RNA, 19 nt, Artificial Sequence
  Description of Artificial Sequence: Synthetic oligonucleotide
aggccaaaugacauggucc

SEQ ID NO: 62985 - RNA, 19 nt, Artificial Sequence
  Description of Artificial Sequence: Synthetic oligonucleotide
uaaugcguccauuaguauc

SEQ ID NO: 62986 - RNA, 19 nt, Artificial Sequence
  Description of Artificial Sequence: Synthetic oligonucleotide
uugcucuuaaaggauaagc

SEQ ID NO: 62987 - RNA, 19 nt, Artificial Sequence
  Description of Artificial Sequence: Synthetic oligonucleotide
cuugugagcaugaagcuca

SEQ ID NO: 62988 - RNA, 19 nt, Artificial Sequence
  Description of Artificial Sequence: Synthetic oligonucleotide
uauugcauacgaugcaacu

SEQ ID NO: 62989 - RNA, 19 nt, Artificial Sequence
  Description of Artificial Sequence: Synthetic oligonucleotide
acuguaaugcguccauuag

SEQ ID NO: 62990 - RNA, 19 nt, Artificial Sequence
  Description of Artificial Sequence: Synthetic oligonucleotide
uagacgauaccuuagcauu

SEQ ID NO: 62991 - RNA, 19 nt, Artificial Sequence
  Description of Artificial Sequence: Synthetic oligonucleotide
aacguacucgcucccaugu

SEQ ID NO: 62992 - RNA, 19 nt, Artificial Sequence
  Description of Artificial Sequence: Synthetic oligonucleotide
uucacguuggcccaauuua

SEQ ID NO: 62993 - RNA, 19 nt, Artificial Sequence
  Description of Artificial Sequence: Synthetic oligonucleotide
agggacgaaauucaacuug

SEQ ID NO: 62994 - RNA, 19 nt, Artificial Sequence
  Description of Artificial Sequence: Synthetic oligonucleotide
aaaaguggcaccaugucua

SEQ ID NO: 62995 - RNA, 19 nt, Artificial Sequence
  Description of Artificial Sequence: Synthetic oligonucleotide
uuagugacuagggugagaa

SEQ ID NO: 62996 - RNA, 19 nt, Artificial Sequence
  Description of Artificial Sequence: Synthetic oligonucleotide
cuuuaaugauuauugcuca

SEQ ID NO: 62997 - RNA, 19 nt, Artificial Sequence
  Description of Artificial Sequence: Synthetic oligonucleotide
augcuaagggacgaaauuc

SEQ ID NO: 62998 - RNA, 19 nt, Artificial Sequence
  Description of Artificial Sequence: Synthetic oligonucleotide
acccgucugucuuugaagg

SEQ ID NO: 62999 - RNA, 19 nt, Artificial Sequence
  Description of Artificial Sequence: Synthetic oligonucleotide
aaugccucggaucuucuua

SEQ ID NO: 63000 - RNA, 19 nt, Artificial Sequence
  Description of Artificial Sequence: Synthetic oligonucleotide
uucccugcuaggaagguac

SEQ ID NO: 63001 - RNA, 19 nt, Artificial Sequence
  Description of Artificial Sequence: Synthetic oligonucleotide
cauucaaccaugcagagcu

SEQ ID NO: 63002 - RNA, 19 nt, Artificial Sequence
  Description of Artificial Sequence: Synthetic oligonucleotide
auagacgauaccuuagcau

SEQ ID NO: 63003 - RNA, 19 nt, Artificial Sequence
  Description of Artificial Sequence: Synthetic oligonucleotide
agaacaacgagagacuggu

SEQ ID NO: 63004 - RNA, 19 nt, Artificial Sequence
  Description of Artificial Sequence: Synthetic oligonucleotide
gauaaagaucuccggccag

SEQ ID NO: 63005 - RNA, 19 nt, Artificial Sequence
  Description of Artificial Sequence: Synthetic oligonucleotide
uagaguucuaucagugcca

SEQ ID NO: 63006 - RNA, 19 nt, Artificial Sequence
  Description of Artificial Sequence: Synthetic oligonucleotide
accuuaaacaggaaacagg

SEQ ID NO: 63007 - RNA, 19 nt, Artificial Sequence
  Description of Artificial Sequence: Synthetic oligonucleotide
aucucaaucucccggcguc

SEQ ID NO: 63008 - RNA, 19 nt, Artificial Sequence
  Description of Artificial Sequence: Synthetic oligonucleotide
uuuguggcaagugucaauc

SEQ ID NO: 63009 - RNA, 19 nt, Artificial Sequence
  Description of Artificial Sequence: Synthetic oligonucleotide
cugagaacguacucgcucc

SEQ ID NO: 63010 - RNA, 19 nt, Artificial Sequence
  Description of Artificial Sequence: Synthetic oligonucleotide
cuugauagaaugcaguuua

SEQ ID NO: 63011 - RNA, 19 nt, Artificial Sequence
  Description of Artificial Sequence: Synthetic oligonucleotide
caaucaauaccgcugucug

SEQ ID NO: 63012 - RNA, 19 nt, Artificial Sequence
  Description of Artificial Sequence: Synthetic oligonucleotide
agaguuaaacccuucuuua

SEQ ID NO: 63013 - RNA, 19 nt, Artificial Sequence
  Description of Artificial Sequence: Synthetic oligonucleotide
agcgagauaaagaucuccg

SEQ ID NO: 63014 - RNA, 19 nt, Artificial Sequence
  Description of Artificial Sequence: Synthetic oligonucleotide
uugauagaaugcaguuuag

SEQ ID NO: 63015 - RNA, 19 nt, Artificial Sequence
  Description of Artificial Sequence: Synthetic oligonucleotide
uaacgcauaacccgucugu

SEQ ID NO: 63016 - RNA, 19 nt, Artificial Sequence
  Description of Artificial Sequence: Synthetic oligonucleotide
agcucaaauugaguaaacg

SEQ ID NO: 63017 - RNA, 19 nt, Artificial Sequence
  Description of Artificial Sequence: Synthetic oligonucleotide
caugguccaccugagaacg

SEQ ID NO: 63018 - RNA, 19 nt, Artificial Sequence
  Description of Artificial Sequence: Synthetic oligonucleotide
cugaguuuaacaacacauc

SEQ ID NO: 63019 - RNA, 19 nt, Artificial Sequence
  Description of Artificial Sequence: Synthetic oligonucleotide
auuagguuugaauggccca

SEQ ID NO: 63020 - RNA, 19 nt, Artificial Sequence
  Description of Artificial Sequence: Synthetic oligonucleotide
uuaacgcauaacccgucug

SEQ ID NO: 63021 - RNA, 19 nt, Artificial Sequence
  Description of Artificial Sequence: Synthetic oligonucleotide
guuaagugcccuaggaaag

SEQ ID NO: 63022 - RNA, 19 nt, Artificial Sequence
  Description of Artificial Sequence: Synthetic oligonucleotide
gauggagcgagauaaagau

SEQ ID NO: 63023 - RNA, 19 nt, Artificial Sequence
  Description of Artificial Sequence: Synthetic oligonucleotide
caagcuagaacacguugag

SEQ ID NO: 63024 - RNA, 19 nt, Artificial Sequence
  Description of Artificial Sequence: Synthetic oligonucleotide
aauuaacgcauaacccguc

SEQ ID NO: 63025 - RNA, 19 nt, Artificial Sequence
  Description of Artificial Sequence: Synthetic oligonucleotide
uacugaguuuaacaacaca

SEQ ID NO: 63026 - RNA, 19 nt, Artificial Sequence
  Description of Artificial Sequence: Synthetic oligonucleotide
ugagcacguuuccugagug

SEQ ID NO: 63027 - RNA, 19 nt, Artificial Sequence
  Description of Artificial Sequence: Synthetic oligonucleotide
auaaacuaugggcuggaaa

SEQ ID NO: 63028 - RNA, 19 nt, Artificial Sequence
  Description of Artificial Sequence: Synthetic oligonucleotide
cugugauguagacaauugc

SEQ ID NO: 63029 - RNA, 19 nt, Artificial Sequence
  Description of Artificial Sequence: Synthetic oligonucleotide
caaauccaaguaaaccuac

SEQ ID NO: 63030 - RNA, 19 nt, Artificial Sequence
  Description of Artificial Sequence: Synthetic oligonucleotide
ugcaaggauuaauauugca

SEQ ID NO: 63031 - RNA, 19 nt, Artificial Sequence
  Description of Artificial Sequence: Synthetic oligonucleotide
ggauaagcccuaaagacag

SEQ ID NO: 63032 - RNA, 19 nt, Artificial Sequence
  Description of Artificial Sequence: Synthetic oligonucleotide
gaaaucagagcagacaugu

SEQ ID NO: 63033 - RNA, 19 nt, Artificial Sequence
  Description of Artificial Sequence: Synthetic oligonucleotide
uggucugcaaaacuugaau

SEQ ID NO: 63034 - RNA, 19 nt, Artificial Sequence
  Description of Artificial Sequence: Synthetic oligonucleotide
aacgcauaacccgucuguc

SEQ ID NO: 63035 - RNA, 19 nt, Artificial Sequence
  Description of Artificial Sequence: Synthetic oligonucleotide
gauagaaugcaguuuaguu

SEQ ID NO: 63036 - RNA, 19 nt, Artificial Sequence
  Description of Artificial Sequence: Synthetic oligonucleotide
uggcccauauugcauacga

SEQ ID NO: 63037 - RNA, 19 nt, Artificial Sequence
  Description of Artificial Sequence: Synthetic oligonucleotide
aguaaguacacauccuguu

SEQ ID NO: 63038 - RNA, 19 nt, Artificial Sequence
  Description of Artificial Sequence: Synthetic oligonucleotide
agagcacuaguuccagccg

SEQ ID NO: 63039 - RNA, 19 nt, Artificial Sequence
  Description of Artificial Sequence: Synthetic oligonucleotide
uaaccuaccuggcugggaa

SEQ ID NO: 63040 - RNA, 19 nt, Artificial Sequence
  Description of Artificial Sequence: Synthetic oligonucleotide
aauuuagacacugcagauu

SEQ ID NO: 63041 - RNA, 19 nt, Artificial Sequence
  Description of Artificial Sequence: Synthetic oligonucleotide
guaauaauuagguuugaau

SEQ ID NO: 63042 - RNA, 19 nt, Artificial Sequence
  Description of Artificial Sequence: Synthetic oligonucleotide
ugucucaaucaauaccgcu

SEQ ID NO: 63043 - RNA, 19 nt, Artificial Sequence
  Description of Artificial Sequence: Synthetic oligonucleotide
uuuccuaccucaccauaac

SEQ ID NO: 63044 - RNA, 19 nt, Artificial Sequence
  Description of Artificial Sequence: Synthetic oligonucleotide
ugaacaccagucacgcucu

SEQ ID NO: 63045 - RNA, 19 nt, Artificial Sequence
  Description of Artificial Sequence: Synthetic oligonucleotide
uagcauauauagagaagaa

SEQ ID NO: 63046 - RNA, 19 nt, Artificial Sequence
  Description of Artificial Sequence: Synthetic oligonucleotide
uugaguaaacgacccucug

SEQ ID NO: 63047 - RNA, 19 nt, Artificial Sequence
  Description of Artificial Sequence: Synthetic oligonucleotide
auuaacgcauaacccgucu

SEQ ID NO: 63048 - RNA, 19 nt, Artificial Sequence
  Description of Artificial Sequence: Synthetic oligonucleotide
aguuaucguuguuucacgu

SEQ ID NO: 63049 - RNA, 19 nt, Artificial Sequence
  Description of Artificial Sequence: Synthetic oligonucleotide
gcaaguuaucacaacaucc

SEQ ID NO: 63050 - RNA, 19 nt, Artificial Sequence
  Description of Artificial Sequence: Synthetic oligonucleotide
ugcccuucgaguugguuug

SEQ ID NO: 63051 - RNA, 19 nt, Artificial Sequence
  Description of Artificial Sequence: Synthetic oligonucleotide
acugaguaauggcucaaga

SEQ ID NO: 63052 - RNA, 19 nt, Artificial Sequence
  Description of Artificial Sequence: Synthetic oligonucleotide
aggguaaaagcuuuccuuu

SEQ ID NO: 63053 - RNA, 19 nt, Artificial Sequence
  Description of Artificial Sequence: Synthetic oligonucleotide
cauguuaacucuggagugc

SEQ ID NO: 63054 - RNA, 19 nt, Artificial Sequence
  Description of Artificial Sequence: Synthetic oligonucleotide
uuccuaccucaccauaacc

SEQ ID NO: 63055 - RNA, 19 nt, Artificial Sequence
  Description of Artificial Sequence: Synthetic oligonucleotide
aaacuaugggcuggaaaca

SEQ ID NO: 63056 - RNA, 19 nt, Artificial Sequence
  Description of Artificial Sequence: Synthetic oligonucleotide
agacaaggccuacaguucu

SEQ ID NO: 63057 - RNA, 19 nt, Artificial Sequence
  Description of Artificial Sequence: Synthetic oligonucleotide
uccaagcgaacacugcaac

SEQ ID NO: 63058 - RNA, 19 nt, Artificial Sequence
  Description of Artificial Sequence: Synthetic oligonucleotide
gucuaaccuaccuggcugg

SEQ ID NO: 63059 - RNA, 19 nt, Artificial Sequence
  Description of Artificial Sequence: Synthetic oligonucleotide
ucauguuagcuugccaccc

SEQ ID NO: 63060 - RNA, 19 nt, Artificial Sequence
  Description of Artificial Sequence: Synthetic oligonucleotide
ggaauuaucuuggagcgug

SEQ ID NO: 63061 - RNA, 19 nt, Artificial Sequence
  Description of Artificial Sequence: Synthetic oligonucleotide
ugauagaaugcaguuuagu

SEQ ID NO: 63062 - RNA, 19 nt, Artificial Sequence
  Description of Artificial Sequence: Synthetic oligonucleotide
uggacagauuauauaguua

SEQ ID NO: 63063 - RNA, 19 nt, Artificial Sequence
  Description of Artificial Sequence: Synthetic oligonucleotide
uguuuguagcgucccucag

SEQ ID NO: 63064 - RNA, 19 nt, Artificial Sequence
  Description of Artificial Sequence: Synthetic oligonucleotide
aaacuagaacaacgagaga

SEQ ID NO: 63065 - RNA, 19 nt, Artificial Sequence
  Description of Artificial Sequence: Synthetic oligonucleotide
ccuauuauuccuauggaca

SEQ ID NO: 63066 - RNA, 19 nt, Artificial Sequence
  Description of Artificial Sequence: Synthetic oligonucleotide
caccugagaacguacucgc

SEQ ID NO: 63067 - RNA, 19 nt, Artificial Sequence
  Description of Artificial Sequence: Synthetic oligonucleotide
aguaaaccuacugaguuua

SEQ ID NO: 63068 - RNA, 19 nt, Artificial Sequence
  Description of Artificial Sequence: Synthetic oligonucleotide
cacaagcuagaacacguug

SEQ ID NO: 63069 - RNA, 19 nt, Artificial Sequence
  Description of Artificial Sequence: Synthetic oligonucleotide
uuagcuugccacccaucca

SEQ ID NO: 63070 - RNA, 19 nt, Artificial Sequence
  Description of Artificial Sequence: Synthetic oligonucleotide
gcucaaauugaguaaacga

SEQ ID NO: 63071 - RNA, 19 nt, Artificial Sequence
  Description of Artificial Sequence: Synthetic oligonucleotide
agucuuaguagggaauuug

SEQ ID NO: 63072 - RNA, 19 nt, Artificial Sequence
  Description of Artificial Sequence: Synthetic oligonucleotide
aagucccuacugaaugugg

SEQ ID NO: 63073 - RNA, 19 nt, Artificial Sequence
  Description of Artificial Sequence: Synthetic oligonucleotide
gccucuuggaauuaucuug

SEQ ID NO: 63074 - RNA, 19 nt, Artificial Sequence
  Description of Artificial Sequence: Synthetic oligonucleotide
cagcccacuauuuuagcac

SEQ ID NO: 63075 - RNA, 19 nt, Artificial Sequence
  Description of Artificial Sequence: Synthetic oligonucleotide
uaauaaacuaugggcugga

SEQ ID NO: 63076 - RNA, 19 nt, Artificial Sequence
  Description of Artificial Sequence: Synthetic oligonucleotide
uauuauuccuauggacaca

SEQ ID NO: 63077 - RNA, 19 nt, Artificial Sequence
  Description of Artificial Sequence: Synthetic oligonucleotide
agauuaaagggcagcaaga

SEQ ID NO: 63078 - RNA, 19 nt, Artificial Sequence
  Description of Artificial Sequence: Synthetic oligonucleotide
uuauauaguuaucguuguu

SEQ ID NO: 63079 - RNA, 19 nt, Artificial Sequence
  Description of Artificial Sequence: Synthetic oligonucleotide
aggauaagcccuaaagaca

SEQ ID NO: 63080 - RNA, 19 nt, Artificial Sequence
  Description of Artificial Sequence: Synthetic oligonucleotide
uaaaccuacugaguuuaac

SEQ ID NO: 63081 - RNA, 19 nt, Artificial Sequence
  Description of Artificial Sequence: Synthetic oligonucleotide
aagggacgaaauucaacuu

SEQ ID NO: 63082 - RNA, 19 nt, Artificial Sequence
  Description of Artificial Sequence: Synthetic oligonucleotide
aaauuggccgucagcauaa

SEQ ID NO: 63083 - RNA, 19 nt, Artificial Sequence
  Description of Artificial Sequence: Synthetic oligonucleotide
acacguugaggacuuaaaa

SEQ ID NO: 63084 - RNA, 19 nt, Artificial Sequence
  Description of Artificial Sequence: Synthetic oligonucleotide
acaagcuagaacacguuga

SEQ ID NO: 63085 - RNA, 19 nt, Artificial Sequence
  Description of Artificial Sequence: Synthetic oligonucleotide
uacgucuaaccuaccuggc

SEQ ID NO: 63086 - RNA, 19 nt, Artificial Sequence
  Description of Artificial Sequence: Synthetic oligonucleotide
ggcuuagagguucuagggg

SEQ ID NO: 63087 - RNA, 19 nt, Artificial Sequence
  Description of Artificial Sequence: Synthetic oligonucleotide
agcauauauagagaagaaa

SEQ ID NO: 63088 - RNA, 19 nt, Artificial Sequence
  Description of Artificial Sequence: Synthetic oligonucleotide
aagcagaccagcggcacug

SEQ ID NO: 63089 - RNA, 19 nt, Artificial Sequence
  Description of Artificial Sequence: Synthetic oligonucleotide
cucgcucccauguuaacuc

SEQ ID NO: 63090 - RNA, 19 nt, Artificial Sequence
  Description of Artificial Sequence: Synthetic oligonucleotide
ugagaacguacucgcuccc

SEQ ID NO: 63091 - RNA, 19 nt, Artificial Sequence
  Description of Artificial Sequence: Synthetic oligonucleotide
gacgaaauucaacuugaua

SEQ ID NO: 63092 - RNA, 19 nt, Artificial Sequence
  Description of Artificial Sequence: Synthetic oligonucleotide
acuagaacaacgagagacu

SEQ ID NO: 63093 - RNA, 19 nt, Artificial Sequence
  Description of Artificial Sequence: Synthetic oligonucleotide
gagcgagauaaagaucucc

SEQ ID NO: 63094 - RNA, 19 nt, Artificial Sequence
  Description of Artificial Sequence: Synthetic oligonucleotide
caucaaaugauggcaggug

SEQ ID NO: 63095 - RNA, 19 nt, Artificial Sequence
  Description of Artificial Sequence: Synthetic oligonucleotide
uuuagacacugcagauugu

SEQ ID NO: 63096 - RNA, 19 nt, Artificial Sequence
  Description of Artificial Sequence: Synthetic oligonucleotide
ucccugagcacguuuccug

SEQ ID NO: 63097 - RNA, 19 nt, Artificial Sequence
  Description of Artificial Sequence: Synthetic oligonucleotide
cuuggagcgugaaucagga

SEQ ID NO: 63098 - RNA, 19 nt, Artificial Sequence
  Description of Artificial Sequence: Synthetic oligonucleotide
gagcccuuaccuauuauuc

SEQ ID NO: 63099 - RNA, 19 nt, Artificial Sequence
  Description of Artificial Sequence: Synthetic oligonucleotide
cuacugaguuuaacaacac

SEQ ID NO: 63100 - RNA, 19 nt, Artificial Sequence
  Description of Artificial Sequence: Synthetic oligonucleotide
ucgcugaugcuauaauaaa

SEQ ID NO: 63101 - RNA, 19 nt, Artificial Sequence
  Description of Artificial Sequence: Synthetic oligonucleotide
gaagugaaagagcacuagu

SEQ ID NO: 63102 - RNA, 19 nt, Artificial Sequence
  Description of Artificial Sequence: Synthetic oligonucleotide
aacuaugggcuggaaacau

SEQ ID NO: 63103 - RNA, 19 nt, Artificial Sequence
  Description of Artificial Sequence: Synthetic oligonucleotide
agcgugaaucaggauguac

SEQ ID NO: 63104 - RNA, 19 nt, Artificial Sequence
  Description of Artificial Sequence: Synthetic oligonucleotide
cugaguaauggcucaagaa

SEQ ID NO: 63105 - RNA, 19 nt, Artificial Sequence
  Description of Artificial Sequence: Synthetic oligonucleotide
uuggucuccgcauguuccc

SEQ ID NO: 63106 - RNA, 19 nt, Artificial Sequence
  Description of Artificial Sequence: Synthetic oligonucleotide
agauaauuguucccugcua

SEQ ID NO: 63107 - RNA, 19 nt, Artificial Sequence
  Description of Artificial Sequence: Synthetic oligonucleotide
auugaguaaacgacccucu

SEQ ID NO: 63108 - RNA, 19 nt, Artificial Sequence
  Description of Artificial Sequence: Synthetic oligonucleotide
caauaccgcugucugggcc

SEQ ID NO: 63109 - RNA, 19 nt, Artificial Sequence
  Description of Artificial Sequence: Synthetic oligonucleotide
gaauuaacgcauaacccgu

SEQ ID NO: 63110 - RNA, 19 nt, Artificial Sequence
  Description of Artificial Sequence: Synthetic oligonucleotide
agauggagcgagauaaaga

SEQ ID NO: 63111 - RNA, 19 nt, Artificial Sequence
  Description of Artificial Sequence: Synthetic oligonucleotide
gaguaaaucucucaucguu

SEQ ID NO: 63112 - RNA, 19 nt, Artificial Sequence
  Description of Artificial Sequence: Synthetic oligonucleotide
aucguuagagggccucuug

SEQ ID NO: 63113 - RNA, 19 nt, Artificial Sequence
  Description of Artificial Sequence: Synthetic oligonucleotide
accuacgucuaaccuaccu

SEQ ID NO: 63114 - RNA, 19 nt, Artificial Sequence
  Description of Artificial Sequence: Synthetic oligonucleotide
uccaccugagaacguacuc

SEQ ID NO: 63115 - RNA, 19 nt, Artificial Sequence
  Description of Artificial Sequence: Synthetic oligonucleotide
ugacuagggugagaaaccu

SEQ ID NO: 63116 - RNA, 19 nt, Artificial Sequence
  Description of Artificial Sequence: Synthetic oligonucleotide
aguagggaauuuggugaac

SEQ ID NO: 63117 - RNA, 19 nt, Artificial Sequence
  Description of Artificial Sequence: Synthetic oligonucleotide
gauaagcccuaaagacagg

SEQ ID NO: 63118 - RNA, 19 nt, Artificial Sequence
  Description of Artificial Sequence: Synthetic oligonucleotide
agaaauuggccgucagcau

SEQ ID NO: 63119 - RNA, 19 nt, Artificial Sequence
  Description of Artificial Sequence: Synthetic oligonucleotide
auaaagaucuccggccagu

SEQ ID NO: 63120 - RNA, 19 nt, Artificial Sequence
  Description of Artificial Sequence: Synthetic oligonucleotide
ucuaaccuaccuggcuggg

SEQ ID NO: 63121 - RNA, 19 nt, Artificial Sequence
  Description of Artificial Sequence: Synthetic oligonucleotide
gaacguacucgcucccaug

SEQ ID NO: 63122 - RNA, 19 nt, Artificial Sequence
  Description of Artificial Sequence: Synthetic oligonucleotide
gccgcuaagaaacuggcuc

SEQ ID NO: 63123 - RNA, 19 nt, Artificial Sequence
  Description of Artificial Sequence: Synthetic oligonucleotide
ugaacauuucuaguaccua

SEQ ID NO: 63124 - RNA, 19 nt, Artificial Sequence
  Description of Artificial Sequence: Synthetic oligonucleotide
cagaccagcggcacugggc

SEQ ID NO: 63125 - RNA, 19 nt, Artificial Sequence
  Description of Artificial Sequence: Synthetic oligonucleotide
cauagacgauaccuuagca

SEQ ID NO: 63126 - RNA, 19 nt, Artificial Sequence
  Description of Artificial Sequence: Synthetic oligonucleotide
ucguuguuucacguuggcc

SEQ ID NO: 63127 - RNA, 19 nt, Artificial Sequence
  Description of Artificial Sequence: Synthetic oligonucleotide
aguaaacgacccucugcga

SEQ ID NO: 63128 - RNA, 19 nt, Artificial Sequence
  Description of Artificial Sequence: Synthetic oligonucleotide
ucaauaccgcugucugggc

SEQ ID NO: 63129 - RNA, 19 nt, Artificial Sequence
  Description of Artificial Sequence: Synthetic oligonucleotide
cuuuccuaccucaccauaa

SEQ ID NO: 63130 - RNA, 19 nt, Artificial Sequence
  Description of Artificial Sequence: Synthetic oligonucleotide
ugcgagaaggacgacccgu

SEQ ID NO: 63131 - RNA, 19 nt, Artificial Sequence
  Description of Artificial Sequence: Synthetic oligonucleotide
ggauacacuguuguuggcc

SEQ ID NO: 63132 - RNA, 19 nt, Artificial Sequence
  Description of Artificial Sequence: Synthetic oligonucleotide
guuaacucuggagugcgga

SEQ ID NO: 63133 - RNA, 19 nt, Artificial Sequence
  Description of Artificial Sequence: Synthetic oligonucleotide
aacacguugaggacuuaaa

SEQ ID NO: 63134 - RNA, 19 nt, Artificial Sequence
  Description of Artificial Sequence: Synthetic oligonucleotide
acguuuggauacuucuuau

SEQ ID NO: 63135 - RNA, 19 nt, Artificial Sequence
  Description of Artificial Sequence: Synthetic oligonucleotide
caggccaaaugacaugguc

SEQ ID NO: 63136 - RNA, 19 nt, Artificial Sequence
  Description of Artificial Sequence: Synthetic oligonucleotide
caaguaaaccuacugaguu

SEQ ID NO: 63137 - RNA, 19 nt, Artificial Sequence
  Description of Artificial Sequence: Synthetic oligonucleotide
aauaaacuaugggcuggaa

SEQ ID NO: 63138 - RNA, 19 nt, Artificial Sequence
  Description of Artificial Sequence: Synthetic oligonucleotide
cauauugcauacgaugcaa

SEQ ID NO: 63139 - RNA, 19 nt, Artificial Sequence
  Description of Artificial Sequence: Synthetic oligonucleotide
ggcaagugucaaucaaaag

SEQ ID NO: 63140 - RNA, 19 nt, Artificial Sequence
  Description of Artificial Sequence: Synthetic oligonucleotide
gcaagauaauuguucccug

SEQ ID NO: 63141 - RNA, 19 nt, Artificial Sequence
  Description of Artificial Sequence: Synthetic oligonucleotide
ucacaagcuagaacacguu

SEQ ID NO: 63142 - RNA, 19 nt, Artificial Sequence
  Description of Artificial Sequence: Synthetic oligonucleotide
ucucggcagcaguacaagu

SEQ ID NO: 63143 - RNA, 19 nt, Artificial Sequence
  Description of Artificial Sequence: Synthetic oligonucleotide
ugguucauguggacugguc

SEQ ID NO: 63144 - RNA, 19 nt, Artificial Sequence
  Description of Artificial Sequence: Synthetic oligonucleotide
agcacguuuccugagugaa

SEQ ID NO: 63145 - RNA, 19 nt, Artificial Sequence
  Description of Artificial Sequence: Synthetic oligonucleotide
agagacgagcccuuaccua

SEQ ID NO: 63146 - RNA, 19 nt, Artificial Sequence
  Description of Artificial Sequence: Synthetic oligonucleotide
agguucuaggggaaguuga

SEQ ID NO: 63147 - RNA, 19 nt, Artificial Sequence
  Description of Artificial Sequence: Synthetic oligonucleotide
aacaccagucacgcucucu

SEQ ID NO: 63148 - RNA, 19 nt, Artificial Sequence
  Description of Artificial Sequence: Synthetic oligonucleotide
acucgcucccauguuaacu

SEQ ID NO: 63149 - RNA, 19 nt, Artificial Sequence
  Description of Artificial Sequence: Synthetic oligonucleotide
cauaacccgucugucuuug

SEQ ID NO: 63150 - RNA, 19 nt, Artificial Sequence
  Description of Artificial Sequence: Synthetic oligonucleotide
ucaggccaaaugacauggu

SEQ ID NO: 63151 - RNA, 19 nt, Artificial Sequence
  Description of Artificial Sequence: Synthetic oligonucleotide
cuacauucuuauuuccugu

SEQ ID NO: 63152 - RNA, 19 nt, Artificial Sequence
  Description of Artificial Sequence: Synthetic oligonucleotide
guaauugacuuuaaugauu

SEQ ID NO: 63153 - RNA, 19 nt, Artificial Sequence
  Description of Artificial Sequence: Synthetic oligonucleotide
uggaauuaucuuggagcgu

SEQ ID NO: 63154 - RNA, 19 nt, Artificial Sequence
  Description of Artificial Sequence: Synthetic oligonucleotide
ugcauacgaugcaacuauu

SEQ ID NO: 63155 - RNA, 19 nt, Artificial Sequence
  Description of Artificial Sequence: Synthetic oligonucleotide
ccuacgucuaaccuaccug

SEQ ID NO: 63156 - RNA, 19 nt, Artificial Sequence
  Description of Artificial Sequence: Synthetic oligonucleotide
gcugguuaagugcccuagg

SEQ ID NO: 63157 - RNA, 19 nt, Artificial Sequence
  Description of Artificial Sequence: Synthetic oligonucleotide
uccagccgcuaagaaacug

SEQ ID NO: 63158 - RNA, 19 nt, Artificial Sequence
  Description of Artificial Sequence: Synthetic oligonucleotide
agaguucuaucagugccaa

SEQ ID NO: 63159 - RNA, 19 nt, Artificial Sequence
  Description of Artificial Sequence: Synthetic oligonucleotide
cuccggccagucuuaguag

SEQ ID NO: 63160 - RNA, 19 nt, Artificial Sequence
  Description of Artificial Sequence: Synthetic oligonucleotide
gaguuggagacuaaguauu

SEQ ID NO: 63161 - RNA, 19 nt, Artificial Sequence
  Description of Artificial Sequence: Synthetic oligonucleotide
ucaucguuagagggccucu

SEQ ID NO: 63162 - RNA, 19 nt, Artificial Sequence
  Description of Artificial Sequence: Synthetic oligonucleotide
ccaccugagaacguacucg

SEQ ID NO: 63163 - RNA, 19 nt, Artificial Sequence
  Description of Artificial Sequence: Synthetic oligonucleotide
uggguacagcccacuauuu

SEQ ID NO: 63164 - RNA, 19 nt, Artificial Sequence
  Description of Artificial Sequence: Synthetic oligonucleotide
gaguggcccauauugcaua

SEQ ID NO: 63165 - RNA, 19 nt, Artificial Sequence
  Description of Artificial Sequence: Synthetic oligonucleotide
gaaggacgacccguuugcc

SEQ ID NO: 63166 - RNA, 19 nt, Artificial Sequence
  Description of Artificial Sequence: Synthetic oligonucleotide
ccugagaacguacucgcuc

SEQ ID NO: 63167 - RNA, 19 nt, Artificial Sequence
  Description of Artificial Sequence: Synthetic oligonucleotide
agguuugaauggcccauuu

SEQ ID NO: 63168 - RNA, 19 nt, Artificial Sequence
  Description of Artificial Sequence: Synthetic oligonucleotide
ccaugucuauaaaacuaac

SEQ ID NO: 63169 - RNA, 19 nt, Artificial Sequence
  Description of Artificial Sequence: Synthetic oligonucleotide
gaauuaucuuggagcguga

SEQ ID NO: 63170 - RNA, 19 nt, Artificial Sequence
  Description of Artificial Sequence: Synthetic oligonucleotide
ccgugauguggguacagcc

SEQ ID NO: 63171 - RNA, 19 nt, Artificial Sequence
  Description of Artificial Sequence: Synthetic oligonucleotide
ucgcucccauguuaacucu

SEQ ID NO: 63172 - RNA, 19 nt, Artificial Sequence
  Description of Artificial Sequence: Synthetic oligonucleotide
gaacacguugaggacuuaa

SEQ ID NO: 63173 - RNA, 19 nt, Artificial Sequence
  Description of Artificial Sequence: Synthetic oligonucleotide
ggaaagguaaagaaguuuu

SEQ ID NO: 63174 - RNA, 19 nt, Artificial Sequence
  Description of Artificial Sequence: Synthetic oligonucleotide
ucaaucucccggcguccaa

SEQ ID NO: 63175 - RNA, 19 nt, Artificial Sequence
  Description of Artificial Sequence: Synthetic oligonucleotide
gggacgaaauucaacuuga

SEQ ID NO: 63176 - RNA, 19 nt, Artificial Sequence
  Description of Artificial Sequence: Synthetic oligonucleotide
gagcacguuuccugaguga

SEQ ID NO: 63177 - RNA, 19 nt, Artificial Sequence
  Description of Artificial Sequence: Synthetic oligonucleotide
cauacgaugcaacuauuuu

SEQ ID NO: 63178 - RNA, 19 nt, Artificial Sequence
  Description of Artificial Sequence: Synthetic oligonucleotide
cuguaaugcguccauuagu

SEQ ID NO: 63179 - RNA, 19 nt, Artificial Sequence
  Description of Artificial Sequence: Synthetic oligonucleotide
cauguuagcuugccaccca

SEQ ID NO: 63180 - RNA, 19 nt, Artificial Sequence
  Description of Artificial Sequence: Synthetic oligonucleotide
gagugcggaggcuggucac

SEQ ID NO: 63181 - RNA, 19 nt, Artificial Sequence
  Description of Artificial Sequence: Synthetic oligonucleotide
cucaucguuagagggccuc

SEQ ID NO: 63182 - RNA, 19 nt, Artificial Sequence
  Description of Artificial Sequence: Synthetic oligonucleotide
gacucgcccuuccaagcga

SEQ ID NO: 63183 - RNA, 19 nt, Artificial Sequence
  Description of Artificial Sequence: Synthetic oligonucleotide
cagacaugucuugcucugc

SEQ ID NO: 63184 - RNA, 19 nt, Artificial Sequence
  Description of Artificial Sequence: Synthetic oligonucleotide
gaacaacgagagacuggug

SEQ ID NO: 63185 - RNA, 19 nt, Artificial Sequence
  Description of Artificial Sequence: Synthetic oligonucleotide
uuguagcgucccucaggug

SEQ ID NO: 63186 - RNA, 19 nt, Artificial Sequence
  Description of Artificial Sequence: Synthetic oligonucleotide
cugcgagaaggacgacccg

SEQ ID NO: 63187 - RNA, 19 nt, Artificial Sequence
  Description of Artificial Sequence: Synthetic oligonucleotide
guuaucguuguuucacguu

SEQ ID NO: 63188 - RNA, 19 nt, Artificial Sequence
  Description of Artificial Sequence: Synthetic oligonucleotide
cgucuaaccuaccuggcug

SEQ ID NO: 63189 - RNA, 19 nt, Artificial Sequence
  Description of Artificial Sequence: Synthetic oligonucleotide
auaacccgucugucuuuga

SEQ ID NO: 63190 - RNA, 19 nt, Artificial Sequence
  Description of Artificial Sequence: Synthetic oligonucleotide
ggcugguuaagugcccuag

SEQ ID NO: 63191 - RNA, 19 nt, Artificial Sequence
  Description of Artificial Sequence: Synthetic oligonucleotide
gagaacguacucgcuccca

SEQ ID NO: 63192 - RNA, 19 nt, Artificial Sequence
  Description of Artificial Sequence: Synthetic oligonucleotide
cccauguuaacucuggagu

SEQ ID NO: 63193 - RNA, 19 nt, Artificial Sequence
  Description of Artificial Sequence: Synthetic oligonucleotide
gguucuaggggaaguugac

SEQ ID NO: 63194 - RNA, 19 nt, Artificial Sequence
  Description of Artificial Sequence: Synthetic oligonucleotide
ccggcguccaaacucugcc

SEQ ID NO: 63195 - RNA, 19 nt, Artificial Sequence
  Description of Artificial Sequence: Synthetic oligonucleotide
guggcccauauugcauacg

SEQ ID NO: 63196 - RNA, 19 nt, Artificial Sequence
  Description of Artificial Sequence: Synthetic oligonucleotide
ucgguccaagugcucccgu

SEQ ID NO: 63197 - RNA, 19 nt, Artificial Sequence
  Description of Artificial Sequence: Synthetic oligonucleotide
ugcucccgugucacuacau

SEQ ID NO: 63198 - RNA, 19 nt, Artificial Sequence
  Description of Artificial Sequence: Synthetic oligonucleotide
ggcucaagaaauuggccgu

SEQ ID NO: 63199 - RNA, 19 nt, Artificial Sequence
  Description of Artificial Sequence: Synthetic oligonucleotide
gccaagauaagucccuacu

SEQ ID NO: 63200 - RNA, 19 nt, Artificial Sequence
  Description of Artificial Sequence: Synthetic oligonucleotide
uguuucacguuggcccaau

SEQ ID NO: 63201 - RNA, 19 nt, Artificial Sequence
  Description of Artificial Sequence: Synthetic oligonucleotide
ggagcgugaaucaggaugu

SEQ ID NO: 63202 - RNA, 19 nt, Artificial Sequence
  Description of Artificial Sequence: Synthetic oligonucleotide
cugcgccagacaugccacc

SEQ ID NO: 63203 - RNA, 19 nt, Artificial Sequence
  Description of Artificial Sequence: Synthetic oligonucleotide
acucucggcagcaguacaa

SEQ ID NO: 63204 - RNA, 19 nt, Artificial Sequence
  Description of Artificial Sequence: Synthetic oligonucleotide
agugcggaggcuggucaca

SEQ ID NO: 63205 - RNA, 19 nt, Artificial Sequence
  Description of Artificial Sequence: Synthetic oligonucleotide
guagcgucccucaggugca

SEQ ID NO: 63206 - RNA, 19 nt, Artificial Sequence
  Description of Artificial Sequence: Synthetic oligonucleotide
ggccaagauaagucccuac

SEQ ID NO: 63207 - RNA, 19 nt, Artificial Sequence
  Description of Artificial Sequence: Synthetic oligonucleotide
uuggagcgugaaucaggau

SEQ ID NO: 63208 - RNA, 19 nt, Artificial Sequence
  Description of Artificial Sequence: Synthetic oligonucleotide
ucucugcgccagacaugcc

SEQ ID NO: 63209 - RNA, 19 nt, Artificial Sequence
  Description of Artificial Sequence: Synthetic oligonucleotide
ccauauugcauacgaugca

SEQ ID NO: 63210 - RNA, 19 nt, Artificial Sequence
  Description of Artificial Sequence: Synthetic oligonucleotide
uccucccaaguuggucucc

SEQ ID NO: 63211 - RNA, 19 nt, Artificial Sequence
  Description of Artificial Sequence: Synthetic oligonucleotide
gcuugugagcaugaagcuc

SEQ ID NO: 63212 - RNA, 19 nt, Artificial Sequence
  Description of Artificial Sequence: Synthetic oligonucleotide
gcccuuaccuauuauuccu

SEQ ID NO: 63213 - RNA, 19 nt, Artificial Sequence
  Description of Artificial Sequence: Synthetic oligonucleotide
caguucuggacagauuaua

SEQ ID NO: 63214 - RNA, 19 nt, Artificial Sequence
  Description of Artificial Sequence: Synthetic oligonucleotide
caggugggcaucaaaugau

SEQ ID NO: 63215 - RNA, 19 nt, Artificial Sequence
  Description of Artificial Sequence: Synthetic oligonucleotide
cacuaguuccagccgcuaa

SEQ ID NO: 63216 - RNA, 19 nt, Artificial Sequence
  Description of Artificial Sequence: Synthetic oligonucleotide
cguuggcccaauuuauuuc

SEQ ID NO: 63217 - RNA, 19 nt, Artificial Sequence
  Description of Artificial Sequence: Synthetic oligonucleotide
ccugagcacguuuccugag

SEQ ID NO: 63218 - RNA, 19 nt, Artificial Sequence
  Description of Artificial Sequence: Synthetic oligonucleotide
ggaguaaaucucucaucgu

SEQ ID NO: 63219 - RNA, 19 nt, Artificial Sequence
  Description of Artificial Sequence: Synthetic oligonucleotide
cuaaccuaccuggcuggga

SEQ ID NO: 63220 - RNA, 19 nt, Artificial Sequence
  Description of Artificial Sequence: Synthetic oligonucleotide
cucgcccuuccaagcgaac

SEQ ID NO: 63221 - RNA, 19 nt, Artificial Sequence
  Description of Artificial Sequence: Synthetic oligonucleotide
ccuggauaauuauauacuu

SEQ ID NO: 63222 - RNA, 19 nt, Artificial Sequence
  Description of Artificial Sequence: Synthetic oligonucleotide
ccaaguaaaccuacugagu

SEQ ID NO: 63223 - RNA, 19 nt, Artificial Sequence
  Description of Artificial Sequence: Synthetic oligonucleotide
acguacucgcucccauguu

SEQ ID NO: 63224 - RNA, 19 nt, Artificial Sequence
  Description of Artificial Sequence: Synthetic oligonucleotide
aaguggcaccaugucuaua

SEQ ID NO: 63225 - RNA, 19 nt, Artificial Sequence
  Description of Artificial Sequence: Synthetic oligonucleotide
ccacauagacgauaccuua

SEQ ID NO: 63226 - RNA, 19 nt, Artificial Sequence
  Description of Artificial Sequence: Synthetic oligonucleotide
caccuacgucuaaccuacc

SEQ ID NO: 63227 - RNA, 19 nt, Artificial Sequence
  Description of Artificial Sequence: Synthetic oligonucleotide
agccauggagcaaguuccu

SEQ ID NO: 63228 - RNA, 19 nt, Artificial Sequence
  Description of Artificial Sequence: Synthetic oligonucleotide
gacuguggagcagcucaaa

SEQ ID NO: 63229 - RNA, 19 nt, Artificial Sequence
  Description of Artificial Sequence: Synthetic oligonucleotide
gguccaccugagaacguac

SEQ ID NO: 63230 - RNA, 19 nt, Artificial Sequence
  Description of Artificial Sequence: Synthetic oligonucleotide
cugagcacguuuccugagu

SEQ ID NO: 63231 - RNA, 19 nt, Artificial Sequence
  Description of Artificial Sequence: Synthetic oligonucleotide
cugccggaugacuucauuu

SEQ ID NO: 63232 - RNA, 19 nt, Artificial Sequence
  Description of Artificial Sequence: Synthetic oligonucleotide
cuuauggcuccaguucgcu

SEQ ID NO: 63233 - RNA, 19 nt, Artificial Sequence
  Description of Artificial Sequence: Synthetic oligonucleotide
gcuaagggacgaaauucaa

SEQ ID NO: 63234 - RNA, 19 nt, Artificial Sequence
  Description of Artificial Sequence: Synthetic oligonucleotide
gaacaaagguagggacugu

SEQ ID NO: 63235 - RNA, 19 nt, Artificial Sequence
  Description of Artificial Sequence: Synthetic oligonucleotide
gugcucccgugucacuaca

SEQ ID NO: 63236 - RNA, 19 nt, Artificial Sequence
  Description of Artificial Sequence: Synthetic oligonucleotide
cuucucucccugagcacgu

SEQ ID NO: 63237 - RNA, 19 nt, Artificial Sequence
  Description of Artificial Sequence: Synthetic oligonucleotide
auaccgcugucugggccgu

SEQ ID NO: 63238 - RNA, 19 nt, Artificial Sequence
  Description of Artificial Sequence: Synthetic oligonucleotide
ccgcauguucccucugaug

SEQ ID NO: 63239 - RNA, 19 nt, Artificial Sequence
  Description of Artificial Sequence: Synthetic oligonucleotide
gcagaguuaaacccuucuu

SEQ ID NO: 63240 - RNA, 19 nt, Artificial Sequence
  Description of Artificial Sequence: Synthetic oligonucleotide
gccgugauguggguacagc

SEQ ID NO: 63241 - RNA, 19 nt, Artificial Sequence
  Description of Artificial Sequence: Synthetic oligonucleotide
acgacccguuugccaucag

SEQ ID NO: 63242 - RNA, 19 nt, Artificial Sequence
  Description of Artificial Sequence: Synthetic oligonucleotide
caccaccuacgucuaaccu

SEQ ID NO: 63243 - RNA, 19 nt, Artificial Sequence
  Description of Artificial Sequence: Synthetic oligonucleotide
cccggcguccaaacucugc

SEQ ID NO: 63244 - RNA, 19 nt, Artificial Sequence
  Description of Artificial Sequence: Synthetic oligonucleotide
cguuagagggccucuugga

SEQ ID NO: 63245 - RNA, 19 nt, Artificial Sequence
  Description of Artificial Sequence: Synthetic oligonucleotide
gcuaucuguguaggaugca

SEQ ID NO: 63246 - RNA, 19 nt, Artificial Sequence
  Description of Artificial Sequence: Synthetic oligonucleotide
gacuagggugagaaaccuu

SEQ ID NO: 63247 - RNA, 19 nt, Artificial Sequence
  Description of Artificial Sequence: Synthetic oligonucleotide
ggccucuuggaauuaucuu

SEQ ID NO: 63248 - RNA, 19 nt, Artificial Sequence
  Description of Artificial Sequence: Synthetic oligonucleotide
agaacacguugaggacuua

SEQ ID NO: 63249 - RNA, 19 nt, Artificial Sequence
  Description of Artificial Sequence: Synthetic oligonucleotide
gcauacgaugcaacuauuu

SEQ ID NO: 63250 - RNA, 19 nt, Artificial Sequence
  Description of Artificial Sequence: Synthetic oligonucleotide
cccuuaccuauuauuccua

SEQ ID NO: 63251 - RNA, 19 nt, Artificial Sequence
  Description of Artificial Sequence: Synthetic oligonucleotide
gcccacuauuuuagcacca

SEQ ID NO: 63252 - RNA, 19 nt, Artificial Sequence
  Description of Artificial Sequence: Synthetic oligonucleotide
gcgucccucaggugcauua

SEQ ID NO: 63253 - RNA, 19 nt, Artificial Sequence
  Description of Artificial Sequence: Synthetic oligonucleotide
cccgucugucuuugaagga

SEQ ID NO: 63254 - RNA, 19 nt, Artificial Sequence
  Description of Artificial Sequence: Synthetic oligonucleotide
ggaguggcccauauugcau

SEQ ID NO: 63255 - RNA, 19 nt, Artificial Sequence
  Description of Artificial Sequence: Synthetic oligonucleotide
cguacucgcucccauguua

SEQ ID NO: 63256 - RNA, 19 nt, Artificial Sequence
  Description of Artificial Sequence: Synthetic oligonucleotide
uagcgucccucaggugcau

SEQ ID NO: 63257 - RNA, 19 nt, Artificial Sequence
  Description of Artificial Sequence: Synthetic oligonucleotide
gagggccucuuggaauuau

SEQ ID NO: 63258 - RNA, 19 nt, Artificial Sequence
  Description of Artificial Sequence: Synthetic oligonucleotide
caaugccucggaucuucuu

SEQ ID NO: 63259 - RNA, 19 nt, Artificial Sequence
  Description of Artificial Sequence: Synthetic oligonucleotide
gcacguuuccugagugaaa

SEQ ID NO: 63260 - RNA, 19 nt, Artificial Sequence
  Description of Artificial Sequence: Synthetic oligonucleotide
caggugcaagcuggccaca

SEQ ID NO: 63261 - RNA, 19 nt, Artificial Sequence
  Description of Artificial Sequence: Synthetic oligonucleotide
gcauaacccgucugucuuu

SEQ ID NO: 63262 - RNA, 19 nt, Artificial Sequence
  Description of Artificial Sequence: Synthetic oligonucleotide
ccgugucacuacauucuua

SEQ ID NO: 63263 - RNA, 19 nt, Artificial Sequence
  Description of Artificial Sequence: Synthetic oligonucleotide
agcgucccucaggugcauu

SEQ ID NO: 63264 - RNA, 19 nt, Artificial Sequence
  Description of Artificial Sequence: Synthetic oligonucleotide
gcccuucgaguugguuugc

SEQ ID NO: 63265 - RNA, 19 nt, Artificial Sequence
  Description of Artificial Sequence: Synthetic oligonucleotide
caucguuagagggccucuu

SEQ ID NO: 63266 - RNA, 19 nt, Artificial Sequence
  Description of Artificial Sequence: Synthetic oligonucleotide
gccagacaugccaccuuaa

SEQ ID NO: 63267 - RNA, 19 nt, Artificial Sequence
  Description of Artificial Sequence: Synthetic oligonucleotide
gcgagaaggacgacccguu

SEQ ID NO: 63268 - RNA, 19 nt, Artificial Sequence
  Description of Artificial Sequence: Synthetic oligonucleotide
cccuacugaaugugguguu

SEQ ID NO: 63269 - RNA, 19 nt, Artificial Sequence
  Description of Artificial Sequence: Synthetic oligonucleotide
ucuauuauuaaguaaaccc

SEQ ID NO: 63270 - RNA, 19 nt, Artificial Sequence
  Description of Artificial Sequence: Synthetic oligonucleotide
uuuugaaguauccagaucc

SEQ ID NO: 63271 - RNA, 19 nt, Artificial Sequence
  Description of Artificial Sequence: Synthetic oligonucleotide
aagguuauuauauauucag

SEQ ID NO: 63272 - RNA, 19 nt, Artificial Sequence
  Description of Artificial Sequence: Synthetic oligonucleotide
aauggucaaagcccgaacc

SEQ ID NO: 63273 - RNA, 19 nt, Artificial Sequence
  Description of Artificial Sequence: Synthetic oligonucleotide
uuuucgguaacauacaagc

SEQ ID NO: 63274 - RNA, 19 nt, Artificial Sequence
  Description of Artificial Sequence: Synthetic oligonucleotide
cuauuauuaaguaaacccg

SEQ ID NO: 63275 - RNA, 19 nt, Artificial Sequence
  Description of Artificial Sequence: Synthetic oligonucleotide
aauuaacccucccugagac

SEQ ID NO: 63276 - RNA, 19 nt, Artificial Sequence
  Description of Artificial Sequence: Synthetic oligonucleotide
gaauuaguagccuaugagg

SEQ ID NO: 63277 - RNA, 19 nt, Artificial Sequence
  Description of Artificial Sequence: Synthetic oligonucleotide
aauguuaacauguaaccgu

SEQ ID NO: 63278 - RNA, 19 nt, Artificial Sequence
  Description of Artificial Sequence: Synthetic oligonucleotide
aaaccuaacagacugucag

SEQ ID NO: 63279 - RNA, 19 nt, Artificial Sequence
  Description of Artificial Sequence: Synthetic oligonucleotide
auacuuaacaagcauucgc

SEQ ID NO: 63280 - RNA, 19 nt, Artificial Sequence
  Description of Artificial Sequence: Synthetic oligonucleotide
ugugaucaaauaaaggaag

SEQ ID NO: 63281 - RNA, 19 nt, Artificial Sequence
  Description of Artificial Sequence: Synthetic oligonucleotide
ucuaauaacauagucgugc

SEQ ID NO: 63282 - RNA, 19 nt, Artificial Sequence
  Description of Artificial Sequence: Synthetic oligonucleotide
aagacguuaacaaaaguuc

SEQ ID NO: 63283 - RNA, 19 nt, Artificial Sequence
  Description of Artificial Sequence: Synthetic oligonucleotide
uuguugaguaaaaugaacc

SEQ ID NO: 63284 - RNA, 19 nt, Artificial Sequence
  Description of Artificial Sequence: Synthetic oligonucleotide
ugaauuaguagccuaugag

SEQ ID NO: 63285 - RNA, 19 nt, Artificial Sequence
  Description of Artificial Sequence: Synthetic oligonucleotide
aaaugcacuacugcaaccc

SEQ ID NO: 63286 - RNA, 19 nt, Artificial Sequence
  Description of Artificial Sequence: Synthetic oligonucleotide
aaauagagcucguauaaga

SEQ ID NO: 63287 - RNA, 19 nt, Artificial Sequence
  Description of Artificial Sequence: Synthetic oligonucleotide
aaucccaaaagccuucguc

SEQ ID NO: 63288 - RNA, 19 nt, Artificial Sequence
  Description of Artificial Sequence: Synthetic oligonucleotide
uuucccacuaaucuagggg

SEQ ID NO: 63289 - RNA, 19 nt, Artificial Sequence
  Description of Artificial Sequence: Synthetic oligonucleotide
agucagauaggagagauac

SEQ ID NO: 63290 - RNA, 19 nt, Artificial Sequence
  Description of Artificial Sequence: Synthetic oligonucleotide
agaugugugguugacaacc

SEQ ID NO: 63291 - RNA, 19 nt, Artificial Sequence
  Description of Artificial Sequence: Synthetic oligonucleotide
ugaguaaaaugaaccauag

SEQ ID NO: 63292 - RNA, 19 nt, Artificial Sequence
  Description of Artificial Sequence: Synthetic oligonucleotide
gacacuuuagcaugaagag

SEQ ID NO: 63293 - RNA, 19 nt, Artificial Sequence
  Description of Artificial Sequence: Synthetic oligonucleotide
aacuugcaagccuuaacac

SEQ ID NO: 63294 - RNA, 19 nt, Artificial Sequence
  Description of Artificial Sequence: Synthetic oligonucleotide
guaaccguaauuuacacga

SEQ ID NO: 63295 - RNA, 19 nt, Artificial Sequence
  Description of Artificial Sequence: Synthetic oligonucleotide
aaaccaccgacacuuuagc

SEQ ID NO: 63296 - RNA, 19 nt, Artificial Sequence
  Description of Artificial Sequence: Synthetic oligonucleotide
guaaaugugaauggaaccg

SEQ ID NO: 63297 - RNA, 19 nt, Artificial Sequence
  Description of Artificial Sequence: Synthetic oligonucleotide
ucaugagugcuuaauaaga

SEQ ID NO: 63298 - RNA, 19 nt, Artificial Sequence
  Description of Artificial Sequence: Synthetic oligonucleotide
uguuguagcauuagcagac

SEQ ID NO: 63299 - RNA, 19 nt, Artificial Sequence
  Description of Artificial Sequence: Synthetic oligonucleotide
uauuaaguaaacccgguua

SEQ ID NO: 63300 - RNA, 19 nt, Artificial Sequence
  Description of Artificial Sequence: Synthetic oligonucleotide
aauuaguagccuaugagga

SEQ ID NO: 63301 - RNA, 19 nt, Artificial Sequence
  Description of Artificial Sequence: Synthetic oligonucleotide
ucguauaagacguuaacaa

SEQ ID NO: 63302 - RNA, 19 nt, Artificial Sequence
  Description of Artificial Sequence: Synthetic oligonucleotide
gaugaaugaauuaguagcc

SEQ ID NO: 63303 - RNA, 19 nt, Artificial Sequence
  Description of Artificial Sequence: Synthetic oligonucleotide
uacccugaaucuaagagca

SEQ ID NO: 63304 - RNA, 19 nt, Artificial Sequence
  Description of Artificial Sequence: Synthetic oligonucleotide
aaauggucaaagcccgaac

SEQ ID NO: 63305 - RNA, 19 nt, Artificial Sequence
  Description of Artificial Sequence: Synthetic oligonucleotide
uuagcaugaagagaaaaca

SEQ ID NO: 63306 - RNA, 19 nt, Artificial Sequence
  Description of Artificial Sequence: Synthetic oligonucleotide
auuugcuagacaaagagca

SEQ ID NO: 63307 - RNA, 19 nt, Artificial Sequence
  Description of Artificial Sequence: Synthetic oligonucleotide
gacuaauuaacccucccug

SEQ ID NO: 63308 - RNA, 19 nt, Artificial Sequence
  Description of Artificial Sequence: Synthetic oligonucleotide
gaaguauccagauccaaac

SEQ ID NO: 63309 - RNA, 19 nt, Artificial Sequence
  Description of Artificial Sequence: Synthetic oligonucleotide
uguccaauauaaauuuccc

SEQ ID NO: 63310 - RNA, 19 nt, Artificial Sequence
  Description of Artificial Sequence: Synthetic oligonucleotide
uguaaccguaauuuacacg

SEQ ID NO: 63311 - RNA, 19 nt, Artificial Sequence
  Description of Artificial Sequence: Synthetic oligonucleotide
uucgguaacauacaagcaa

SEQ ID NO: 63312 - RNA, 19 nt, Artificial Sequence
  Description of Artificial Sequence: Synthetic oligonucleotide
uguacuaaacauacgggaa

SEQ ID NO: 63313 - RNA, 19 nt, Artificial Sequence
  Description of Artificial Sequence: Synthetic oligonucleotide
auacagaacacguauuuca

SEQ ID NO: 63314 - RNA, 19 nt, Artificial Sequence
  Description of Artificial Sequence: Synthetic oligonucleotide
cagaacguagacuacggcg

SEQ ID NO: 63315 - RNA, 19 nt, Artificial Sequence
  Description of Artificial Sequence: Synthetic oligonucleotide
ucguuuagcaccuaccaca

SEQ ID NO: 63316 - RNA, 19 nt, Artificial Sequence
  Description of Artificial Sequence: Synthetic oligonucleotide
cacuauguauuauauauuc

SEQ ID NO: 63317 - RNA, 19 nt, Artificial Sequence
  Description of Artificial Sequence: Synthetic oligonucleotide
agacggacggagcagaaac

SEQ ID NO: 63318 - RNA, 19 nt, Artificial Sequence
  Description of Artificial Sequence: Synthetic oligonucleotide
uauaguagggcaaacugua

SEQ ID NO: 63319 - RNA, 19 nt, Artificial Sequence
  Description of Artificial Sequence: Synthetic oligonucleotide
uagagcucguauaagacgu

SEQ ID NO: 63320 - RNA, 19 nt, Artificial Sequence
  Description of Artificial Sequence: Synthetic oligonucleotide
uuugcaauaccccacuaau

SEQ ID NO: 63321 - RNA, 19 nt, Artificial Sequence
  Description of Artificial Sequence: Synthetic oligonucleotide
agauuauguucugacauac

SEQ ID NO: 63322 - RNA, 19 nt, Artificial Sequence
  Description of Artificial Sequence: Synthetic oligonucleotide
agaacguagacuacggcgc

SEQ ID NO: 63323 - RNA, 19 nt, Artificial Sequence
  Description of Artificial Sequence: Synthetic oligonucleotide
cauacgggaaacuugcaag

SEQ ID NO: 63324 - RNA, 19 nt, Artificial Sequence
  Description of Artificial Sequence: Synthetic oligonucleotide
  modified_base (3)..(3): a, c, u, g, unknown or other
gancuaguuuguuacuucc

SEQ ID NO: 63325 - RNA, 19 nt, Artificial Sequence
  Description of Artificial Sequence: Synthetic oligonucleotide
aacuuuagaaggaaugucu

SEQ ID NO: 63326 - RNA, 19 nt, Artificial Sequence
  Description of Artificial Sequence: Synthetic oligonucleotide
auguacuaaacauacggga

SEQ ID NO: 63327 - RNA, 19 nt, Artificial Sequence
  Description of Artificial Sequence: Synthetic oligonucleotide
uggauaugaagguaaaguc

SEQ ID NO: 63328 - RNA, 19 nt, Artificial Sequence
  Description of Artificial Sequence: Synthetic oligonucleotide
aaaaggccggaauucaaga

SEQ ID NO: 63329 - RNA, 19 nt, Artificial Sequence
  Description of Artificial Sequence: Synthetic oligonucleotide
aaagugacuuaaguacuac

SEQ ID NO: 63330 - RNA, 19 nt, Artificial Sequence
  Description of Artificial Sequence: Synthetic oligonucleotide
agcuuacaaauguagacug

SEQ ID NO: 63331 - RNA, 19 nt, Artificial Sequence
  Description of Artificial Sequence: Synthetic oligonucleotide
acacucuaaauguuggcuc

SEQ ID NO: 63332 - RNA, 19 nt, Artificial Sequence
  Description of Artificial Sequence: Synthetic oligonucleotide
aaaaguacacaguguuucu

SEQ ID NO: 63333 - RNA, 19 nt, Artificial Sequence
  Description of Artificial Sequence: Synthetic oligonucleotide
aagguuaacaccacguucu

SEQ ID NO: 63334 - RNA, 19 nt, Artificial Sequence
  Description of Artificial Sequence: Synthetic oligonucleotide
uaucacggaggcaaaacug

SEQ ID NO: 63335 - RNA, 19 nt, Artificial Sequence
  Description of Artificial Sequence: Synthetic oligonucleotide
cuuagcaauuccuuacacc

SEQ ID NO: 63336 - RNA, 19 nt, Artificial Sequence
  Description of Artificial Sequence: Synthetic oligonucleotide
aaggaagguuaacaccacg

SEQ ID NO: 63337 - RNA, 19 nt, Artificial Sequence
  Description of Artificial Sequence: Synthetic oligonucleotide
auuguugaguaaaaugaac

SEQ ID NO: 63338 - RNA, 19 nt, Artificial Sequence
  Description of Artificial Sequence: Synthetic oligonucleotide
uccauugucacacucuaaa

SEQ ID NO: 63339 - RNA, 19 nt, Artificial Sequence
  Description of Artificial Sequence: Synthetic oligonucleotide
gacaugucgcccuuuggcg

SEQ ID NO: 63340 - RNA, 19 nt, Artificial Sequence
  Description of Artificial Sequence: Synthetic oligonucleotide
ugauuuguuucgcuggucu

SEQ ID NO: 63341 - RNA, 19 nt, Artificial Sequence
  Description of Artificial Sequence: Synthetic oligonucleotide
ugacaugucgcccuuuggc

SEQ ID NO: 63342 - RNA, 19 nt, Artificial Sequence
  Description of Artificial Sequence: Synthetic oligonucleotide
uuguaagcuacacuagugu

SEQ ID NO: 63343 - RNA, 19 nt, Artificial Sequence
  Description of Artificial Sequence: Synthetic oligonucleotide
accauagaagguuuuaaga

SEQ ID NO: 63344 - RNA, 19 nt, Artificial Sequence
  Description of Artificial Sequence: Synthetic oligonucleotide
uuaacaagcauucgcuauc

SEQ ID NO: 63345 - RNA, 19 nt, Artificial Sequence
  Description of Artificial Sequence: Synthetic oligonucleotide
aggagcgaagaaaugaccc

SEQ ID NO: 63346 - RNA, 19 nt, Artificial Sequence
  Description of Artificial Sequence: Synthetic oligonucleotide
agcgacaaauagcacugcc

SEQ ID NO: 63347 - RNA, 19 nt, Artificial Sequence
  Description of Artificial Sequence: Synthetic oligonucleotide
auguaaccguaauuuacac

SEQ ID NO: 63348 - RNA, 19 nt, Artificial Sequence
  Description of Artificial Sequence: Synthetic oligonucleotide
auugaugcgagguuuccug

SEQ ID NO: 63349 - RNA, 19 nt, Artificial Sequence
  Description of Artificial Sequence: Synthetic oligonucleotide
uaccuacugaguacuauag

SEQ ID NO: 63350 - RNA, 19 nt, Artificial Sequence
  Description of Artificial Sequence: Synthetic oligonucleotide
auuaguagccuaugaggag

SEQ ID NO: 63351 - RNA, 19 nt, Artificial Sequence
  Description of Artificial Sequence: Synthetic oligonucleotide
gauacgguagcuuacaaau

SEQ ID NO: 63352 - RNA, 19 nt, Artificial Sequence
  Description of Artificial Sequence: Synthetic oligonucleotide
uggaguggcauacuguugu

SEQ ID NO: 63353 - RNA, 19 nt, Artificial Sequence
  Description of Artificial Sequence: Synthetic oligonucleotide
aacuuagcaauuccuuaca

SEQ ID NO: 63354 - RNA, 19 nt, Artificial Sequence
  Description of Artificial Sequence: Synthetic oligonucleotide
ucugauugcuuagacuccg

SEQ ID NO: 63355 - RNA, 19 nt, Artificial Sequence
  Description of Artificial Sequence: Synthetic oligonucleotide
ugaaguauccagauccaaa

SEQ ID NO: 63356 - RNA, 19 nt, Artificial Sequence
  Description of Artificial Sequence: Synthetic oligonucleotide
aggcgagacaucuuagugg

SEQ ID NO: 63357 - RNA, 19 nt, Artificial Sequence
  Description of Artificial Sequence: Synthetic oligonucleotide
ucuugauaaggcaggcgag

SEQ ID NO: 63358 - RNA, 19 nt, Artificial Sequence
  Description of Artificial Sequence: Synthetic oligonucleotide
aaccguuccuguuggcuac

SEQ ID NO: 63359 - RNA, 19 nt, Artificial Sequence
  Description of Artificial Sequence: Synthetic oligonucleotide
ugcuuaauaagaacagcaa

SEQ ID NO: 63360 - RNA, 19 nt, Artificial Sequence
  Description of Artificial Sequence: Synthetic oligonucleotide
aaugugaauggaaccguuc

SEQ ID NO: 63361 - RNA, 19 nt, Artificial Sequence
  Description of Artificial Sequence: Synthetic oligonucleotide
uaaguaaacccgguuaaca

SEQ ID NO: 63362 - RNA, 19 nt, Artificial Sequence
  Description of Artificial Sequence: Synthetic oligonucleotide
uucauagucaaaucacuau

SEQ ID NO: 63363 - RNA, 19 nt, Artificial Sequence
  Description of Artificial Sequence: Synthetic oligonucleotide
agcaguguccaauauaaau

SEQ ID NO: 63364 - RNA, 19 nt, Artificial Sequence
  Description of Artificial Sequence: Synthetic oligonucleotide
uucgcuaucugucuccaac

SEQ ID NO: 63365 - RNA, 19 nt, Artificial Sequence
  Description of Artificial Sequence: Synthetic oligonucleotide
ucaucguuuagcaccuacc

SEQ ID NO: 63366 - RNA, 19 nt, Artificial Sequence
  Description of Artificial Sequence: Synthetic oligonucleotide
agcaagucaggucagcucu

SEQ ID NO: 63367 - RNA, 19 nt, Artificial Sequence
  Description of Artificial Sequence: Synthetic oligonucleotide
aucguuuagcaccuaccac

SEQ ID NO: 63368 - RNA, 19 nt, Artificial Sequence
  Description of Artificial Sequence: Synthetic oligonucleotide
aaagguuauuauauauuca

SEQ ID NO: 63369 - RNA, 19 nt, Artificial Sequence
  Description of Artificial Sequence: Synthetic oligonucleotide
cuaaacucacagaagcuuc

SEQ ID NO: 63370 - RNA, 19 nt, Artificial Sequence
  Description of Artificial Sequence: Synthetic oligonucleotide
aaagucagauaggagagau

SEQ ID NO: 63371 - RNA, 19 nt, Artificial Sequence
  Description of Artificial Sequence: Synthetic oligonucleotide
uaauuaacccucccugaga

SEQ ID NO: 63372 - RNA, 19 nt, Artificial Sequence
  Description of Artificial Sequence: Synthetic oligonucleotide
ucgguaacauacaagcaaa

SEQ ID NO: 63373 - RNA, 19 nt, Artificial Sequence
  Description of Artificial Sequence: Synthetic oligonucleotide
acaagcauucgcuaucugu

SEQ ID NO: 63374 - RNA, 19 nt, Artificial Sequence
  Description of Artificial Sequence: Synthetic oligonucleotide
acagaacguagacuacggc

SEQ ID NO: 63375 - RNA, 19 nt, Artificial Sequence
  Description of Artificial Sequence: Synthetic oligonucleotide
acuaauuaacccucccuga

SEQ ID NO: 63376 - RNA, 19 nt, Artificial Sequence
  Description of Artificial Sequence: Synthetic oligonucleotide
acaaauagcacugccuuug

SEQ ID NO: 63377 - RNA, 19 nt, Artificial Sequence
  Description of Artificial Sequence: Synthetic oligonucleotide
auaaugacggugacauugc

SEQ ID NO: 63378 - RNA, 19 nt, Artificial Sequence
  Description of Artificial Sequence: Synthetic oligonucleotide
cacaguuacggccaacugc

SEQ ID NO: 63379 - RNA, 19 nt, Artificial Sequence
  Description of Artificial Sequence: Synthetic oligonucleotide
ugugcaugugcacacgagu

SEQ ID NO: 63380 - RNA, 19 nt, Artificial Sequence
  Description of Artificial Sequence: Synthetic oligonucleotide
ugcucucugaccccgagcu

SEQ ID NO: 63381 - RNA, 19 nt, Artificial Sequence
  Description of Artificial Sequence: Synthetic oligonucleotide
uagacuacggcgcaucaaa

SEQ ID NO: 63382 - RNA, 19 nt, Artificial Sequence
  Description of Artificial Sequence: Synthetic oligonucleotide
acaaaccuaacagacuguc

SEQ ID NO: 63383 - RNA, 19 nt, Artificial Sequence
  Description of Artificial Sequence: Synthetic oligonucleotide
aagauuauguucugacaua

SEQ ID NO: 63384 - RNA, 19 nt, Artificial Sequence
  Description of Artificial Sequence: Synthetic oligonucleotide
uagucaaaucacuauguau

SEQ ID NO: 63385 - RNA, 19 nt, Artificial Sequence
  Description of Artificial Sequence: Synthetic oligonucleotide
aaagauacgguagcuuaca

SEQ ID NO: 63386 - RNA, 19 nt, Artificial Sequence
  Description of Artificial Sequence: Synthetic oligonucleotide
uggcucuuaaaccauuuuc

SEQ ID NO: 63387 - RNA, 19 nt, Artificial Sequence
  Description of Artificial Sequence: Synthetic oligonucleotide
uuucgguaacauacaagca

SEQ ID NO: 63388 - RNA, 19 nt, Artificial Sequence
  Description of Artificial Sequence: Synthetic oligonucleotide
ugacauacuuaacaagcau

SEQ ID NO: 63389 - RNA, 19 nt, Artificial Sequence
  Description of Artificial Sequence: Synthetic oligonucleotide
accugugaauuucugacca

SEQ ID NO: 63390 - RNA, 19 nt, Artificial Sequence
  Description of Artificial Sequence: Synthetic oligonucleotide
aacauguaaccguaauuua

SEQ ID NO: 63391 - RNA, 19 nt, Artificial Sequence
  Description of Artificial Sequence: Synthetic oligonucleotide
ugaaugaauuaguagccua

SEQ ID NO: 63392 - RNA, 19 nt, Artificial Sequence
  Description of Artificial Sequence: Synthetic oligonucleotide
cagcuuguaucccagacac

SEQ ID NO: 63393 - RNA, 19 nt, Artificial Sequence
  Description of Artificial Sequence: Synthetic oligonucleotide
augaauuaguagccuauga

SEQ ID NO: 63394 - RNA, 19 nt, Artificial Sequence
  Description of Artificial Sequence: Synthetic oligonucleotide
uagcuuacaaauguagacu

SEQ ID NO: 63395 - RNA, 19 nt, Artificial Sequence
  Description of Artificial Sequence: Synthetic oligonucleotide
auuaacccucccugagacc

SEQ ID NO: 63396 - RNA, 19 nt, Artificial Sequence
  Description of Artificial Sequence: Synthetic oligonucleotide
ggcucuuaaaccauuuucg

SEQ ID NO: 63397 - RNA, 19 nt, Artificial Sequence
  Description of Artificial Sequence: Synthetic oligonucleotide
uucacuucuccucauuaau

SEQ ID NO: 63398 - RNA, 19 nt, Artificial Sequence
  Description of Artificial Sequence: Synthetic oligonucleotide
ugauucauaguuucacaau

SEQ ID NO: 63399 - RNA, 19 nt, Artificial Sequence
  Description of Artificial Sequence: Synthetic oligonucleotide
gacagaacguagacuacgg

SEQ ID NO: 63400 - RNA, 19 nt, Artificial Sequence
  Description of Artificial Sequence: Synthetic oligonucleotide
agcucuaagacggacggag

SEQ ID NO: 63401 - RNA, 19 nt, Artificial Sequence
  Description of Artificial Sequence: Synthetic oligonucleotide
cugcuugcgcguuagaaac

SEQ ID NO: 63402 - RNA, 19 nt, Artificial Sequence
  Description of Artificial Sequence: Synthetic oligonucleotide
uaguucuauuauuaaguaa

SEQ ID NO: 63403 - RNA, 19 nt, Artificial Sequence
  Description of Artificial Sequence: Synthetic oligonucleotide
ucaagauacagaacacgua

SEQ ID NO: 63404 - RNA, 19 nt, Artificial Sequence
  Description of Artificial Sequence: Synthetic oligonucleotide
uugaugcgagguuuccugg

SEQ ID NO: 63405 - RNA, 19 nt, Artificial Sequence
  Description of Artificial Sequence: Synthetic oligonucleotide
ucaagcuguuaauauguuc

SEQ ID NO: 63406 - RNA, 19 nt, Artificial Sequence
  Description of Artificial Sequence: Synthetic oligonucleotide
aaccguaauuuacacgaau

SEQ ID NO: 63407 - RNA, 19 nt, Artificial Sequence
  Description of Artificial Sequence: Synthetic oligonucleotide
guugacaaccauuguugag

SEQ ID NO: 63408 - RNA, 19 nt, Artificial Sequence
  Description of Artificial Sequence: Synthetic oligonucleotide
uuugucgggcuuuuccacc

SEQ ID NO: 63409 - RNA, 19 nt, Artificial Sequence
  Description of Artificial Sequence: Synthetic oligonucleotide
ugugcggugcuccugucca

SEQ ID NO: 63410 - RNA, 19 nt, Artificial Sequence
  Description of Artificial Sequence: Synthetic oligonucleotide
aagcauucgcuaucugucu

SEQ ID NO: 63411 - RNA, 19 nt, Artificial Sequence
  Description of Artificial Sequence: Synthetic oligonucleotide
aaaggccggaauucaagau

SEQ ID NO: 63412 - RNA, 19 nt, Artificial Sequence
  Description of Artificial Sequence: Synthetic oligonucleotide
uguaagcuacacuaguguu

SEQ ID NO: 63413 - RNA, 19 nt, Artificial Sequence
  Description of Artificial Sequence: Synthetic oligonucleotide
uacagaacacguauuucau

SEQ ID NO: 63414 - RNA, 19 nt, Artificial Sequence
  Description of Artificial Sequence: Synthetic oligonucleotide
aggggagcauuguccaugc

SEQ ID NO: 63415 - RNA, 19 nt, Artificial Sequence
  Description of Artificial Sequence: Synthetic oligonucleotide
uuucgcuggucuuuguugu

SEQ ID NO: 63416 - RNA, 19 nt, Artificial Sequence
  Description of Artificial Sequence: Synthetic oligonucleotide
guuaacaccaaaauguggu

SEQ ID NO: 63417 - RNA, 19 nt, Artificial Sequence
  Description of Artificial Sequence: Synthetic oligonucleotide
aggacguagaggaggaucg

SEQ ID NO: 63418 - RNA, 19 nt, Artificial Sequence
  Description of Artificial Sequence: Synthetic oligonucleotide
cuuucccacuaaucuaggg

SEQ ID NO: 63419 - RNA, 19 nt, Artificial Sequence
  Description of Artificial Sequence: Synthetic oligonucleotide
uuacacgaauacuuggcau

SEQ ID NO: 63420 - RNA, 19 nt, Artificial Sequence
  Description of Artificial Sequence: Synthetic oligonucleotide
cugaaucuaagagcaaagc

SEQ ID NO: 63421 - RNA, 19 nt, Artificial Sequence
  Description of Artificial Sequence: Synthetic oligonucleotide
cuguuaauauguucuuaac

SEQ ID NO: 63422 - RNA, 19 nt, Artificial Sequence
  Description of Artificial Sequence: Synthetic oligonucleotide
guuagaaacuguucagcuc

SEQ ID NO: 63423 - RNA, 19 nt, Artificial Sequence
  Description of Artificial Sequence: Synthetic oligonucleotide
acaguuacggccaacugcu

SEQ ID NO: 63424 - RNA, 19 nt, Artificial Sequence
  Description of Artificial Sequence: Synthetic oligonucleotide
uccacgaguccuuaagagu

SEQ ID NO: 63425 - RNA, 19 nt, Artificial Sequence
  Description of Artificial Sequence: Synthetic oligonucleotide
uuaccuacugaguacuaua

SEQ ID NO: 63426 - RNA, 19 nt, Artificial Sequence
  Description of Artificial Sequence: Synthetic oligonucleotide
uaauaacauagucgugcac

SEQ ID NO: 63427 - RNA, 19 nt, Artificial Sequence
  Description of Artificial Sequence: Synthetic oligonucleotide
ucuaagacggacggagcag

SEQ ID NO: 63428 - RNA, 19 nt, Artificial Sequence
  Description of Artificial Sequence: Synthetic oligonucleotide
caauaccccacuaauauua

SEQ ID NO: 63429 - RNA, 19 nt, Artificial Sequence
  Description of Artificial Sequence: Synthetic oligonucleotide
aggccggaauucaagauac

SEQ ID NO: 63430 - RNA, 19 nt, Artificial Sequence
  Description of Artificial Sequence: Synthetic oligonucleotide
cuaauaacauagucgugca

SEQ ID NO: 63431 - RNA, 19 nt, Artificial Sequence
  Description of Artificial Sequence: Synthetic oligonucleotide
agcauucgcuaucugucuc

SEQ ID NO: 63432 - RNA, 19 nt, Artificial Sequence
  Description of Artificial Sequence: Synthetic oligonucleotide
aagagcaguguccaauaua

SEQ ID NO: 63433 - RNA, 19 nt, Artificial Sequence
  Description of Artificial Sequence: Synthetic oligonucleotide
gacuacggcgcaucaaaug

SEQ ID NO: 63434 - RNA, 19 nt, Artificial Sequence
  Description of Artificial Sequence: Synthetic oligonucleotide
agugacuuaaguacuacaa

SEQ ID NO: 63435 - RNA, 19 nt, Artificial Sequence
  Description of Artificial Sequence: Synthetic oligonucleotide
acgaauacuuggcauucug

SEQ ID NO: 63436 - RNA, 19 nt, Artificial Sequence
  Description of Artificial Sequence: Synthetic oligonucleotide
uacacgaauacuuggcauu

SEQ ID NO: 63437 - RNA, 19 nt, Artificial Sequence
  Description of Artificial Sequence: Synthetic oligonucleotide
ucacuauguauuauauauu

SEQ ID NO: 63438 - RNA, 19 nt, Artificial Sequence
  Description of Artificial Sequence: Synthetic oligonucleotide
uugaaucucauacccugau

SEQ ID NO: 63439 - RNA, 19 nt, Artificial Sequence
  Description of Artificial Sequence: Synthetic oligonucleotide
gacguuaacaaaaguucac

SEQ ID NO: 63440 - RNA, 19 nt, Artificial Sequence
  Description of Artificial Sequence: Synthetic oligonucleotide
uauuucaugagugcuuaau

SEQ ID NO: 63441 - RNA, 19 nt, Artificial Sequence
  Description of Artificial Sequence: Synthetic oligonucleotide
caagcaaagguuauuauau

SEQ ID NO: 63442 - RNA, 19 nt, Artificial Sequence
  Description of Artificial Sequence: Synthetic oligonucleotide
caacccuagaacuaagaga

SEQ ID NO: 63443 - RNA, 19 nt, Artificial Sequence
  Description of Artificial Sequence: Synthetic oligonucleotide
aaggccguccacagaagac

SEQ ID NO: 63444 - RNA, 19 nt, Artificial Sequence
  Description of Artificial Sequence: Synthetic oligonucleotide
ugcaugugcacacgagugu

SEQ ID NO: 63445 - RNA, 19 nt, Artificial Sequence
  Description of Artificial Sequence: Synthetic oligonucleotide
auuauuaaguaaacccggu

SEQ ID NO: 63446 - RNA, 19 nt, Artificial Sequence
  Description of Artificial Sequence: Synthetic oligonucleotide
uaaugacggugacauugcc

SEQ ID NO: 63447 - RNA, 19 nt, Artificial Sequence
  Description of Artificial Sequence: Synthetic oligonucleotide
auggucaaagcccgaaccu

SEQ ID NO: 63448 - RNA, 19 nt, Artificial Sequence
  Description of Artificial Sequence: Synthetic oligonucleotide
ugauaaggcaggcgagaca

SEQ ID NO: 63449 - RNA, 19 nt, Artificial Sequence
  Description of Artificial Sequence: Synthetic oligonucleotide
acacgaauacuuggcauuc

SEQ ID NO: 63450 - RNA, 19 nt, Artificial Sequence
  Description of Artificial Sequence: Synthetic oligonucleotide
ugcaacccuagaacuaaga

SEQ ID NO: 63451 - RNA, 19 nt, Artificial Sequence
  Description of Artificial Sequence: Synthetic oligonucleotide
uacuauaguagggcaaacu

SEQ ID NO: 63452 - RNA, 19 nt, Artificial Sequence
  Description of Artificial Sequence: Synthetic oligonucleotide
uuaaguaaacccgguuaac

SEQ ID NO: 63453 - RNA, 19 nt, Artificial Sequence
  Description of Artificial Sequence: Synthetic oligonucleotide
aguacuauaguagggcaaa

SEQ ID NO: 63454 - RNA, 19 nt, Artificial Sequence
  Description of Artificial Sequence: Synthetic oligonucleotide
ucucgagggcgcaagcagc

SEQ ID NO: 63455 - RNA, 19 nt, Artificial Sequence
  Description of Artificial Sequence: Synthetic oligonucleotide
gugugguugacaaccauug

SEQ ID NO: 63456 - RNA, 19 nt, Artificial Sequence
  Description of Artificial Sequence: Synthetic oligonucleotide
aaccaccgacacuuuagca

SEQ ID NO: 63457 - RNA, 19 nt, Artificial Sequence
  Description of Artificial Sequence: Synthetic oligonucleotide
gaugcgagguuuccuggug

SEQ ID NO: 63458 - RNA, 19 nt, Artificial Sequence
  Description of Artificial Sequence: Synthetic oligonucleotide
uacggcgcaucaaaugacu

SEQ ID NO: 63459 - RNA, 19 nt, Artificial Sequence
  Description of Artificial Sequence: Synthetic oligonucleotide
agacguuaacaaaaguuca

SEQ ID NO: 63460 - RNA, 19 nt, Artificial Sequence
  Description of Artificial Sequence: Synthetic oligonucleotide
cacacgagugugaaggauc

SEQ ID NO: 63461 - RNA, 19 nt, Artificial Sequence
  Description of Artificial Sequence: Synthetic oligonucleotide
agcuaaggaaauaauguaa

SEQ ID NO: 63462 - RNA, 19 nt, Artificial Sequence
  Description of Artificial Sequence: Synthetic oligonucleotide
acauacgggaaacuugcaa

SEQ ID NO: 63463 - RNA, 19 nt, Artificial Sequence
  Description of Artificial Sequence: Synthetic oligonucleotide
guacuaaacauacgggaaa

SEQ ID NO: 63464 - RNA, 19 nt, Artificial Sequence
  Description of Artificial Sequence: Synthetic oligonucleotide
acugcuugcgcguuagaaa

SEQ ID NO: 63465 - RNA, 19 nt, Artificial Sequence
  Description of Artificial Sequence: Synthetic oligonucleotide
aguggcuucuaauaacaua

SEQ ID NO: 63466 - RNA, 19 nt, Artificial Sequence
  Description of Artificial Sequence: Synthetic oligonucleotide
ucucauacccugauucaua

SEQ ID NO: 63467 - RNA, 19 nt, Artificial Sequence
  Description of Artificial Sequence: Synthetic oligonucleotide
uuagacuccgcagcuguca

SEQ ID NO: 63468 - RNA, 19 nt, Artificial Sequence
  Description of Artificial Sequence: Synthetic oligonucleotide
aagauacgguagcuuacaa

SEQ ID NO: 63469 - RNA, 19 nt, Artificial Sequence
  Description of Artificial Sequence: Synthetic oligonucleotide
  modified_base (2)..(2): a, c, u, g, unknown or other
ancuaguuuguuacuucca

SEQ ID NO: 63470 - RNA, 19 nt, Artificial Sequence
  Description of Artificial Sequence: Synthetic oligonucleotide
uugcuuagacuccgcagcu

SEQ ID NO: 63471 - RNA, 19 nt, Artificial Sequence
  Description of Artificial Sequence: Synthetic oligonucleotide
uuaacaccacguucucaug

SEQ ID NO: 63472 - RNA, 19 nt, Artificial Sequence
  Description of Artificial Sequence: Synthetic oligonucleotide
agauacgguagcuuacaaa

SEQ ID NO: 63473 - RNA, 19 nt, Artificial Sequence
  Description of Artificial Sequence: Synthetic oligonucleotide
ggcaaacagaccaugauca

SEQ ID NO: 63474 - RNA, 19 nt, Artificial Sequence
  Description of Artificial Sequence: Synthetic oligonucleotide
gguuaacaccaaaaugugg

SEQ ID NO: 63475 - RNA, 19 nt, Artificial Sequence
  Description of Artificial Sequence: Synthetic oligonucleotide
gcaacccuagaacuaagag

SEQ ID NO: 63476 - RNA, 19 nt, Artificial Sequence
  Description of Artificial Sequence: Synthetic oligonucleotide
  modified_base (8)..(8): a, c, u, g, unknown or other
uucuggancuaguuuguua

SEQ ID NO: 63477 - RNA, 19 nt, Artificial Sequence
  Description of Artificial Sequence: Synthetic oligonucleotide
ucgcuaucugucuccaaca

SEQ ID NO: 63478 - RNA, 19 nt, Artificial Sequence
  Description of Artificial Sequence: Synthetic oligonucleotide
uaacaagcauucgcuaucu

SEQ ID NO: 63479 - RNA, 19 nt, Artificial Sequence
  Description of Artificial Sequence: Synthetic oligonucleotide
cuuugucgggcuuuuccac

SEQ ID NO: 63480 - RNA, 19 nt, Artificial Sequence
  Description of Artificial Sequence: Synthetic oligonucleotide
aaacucacagaagcuucug

SEQ ID NO: 63481 - RNA, 19 nt, Artificial Sequence
  Description of Artificial Sequence: Synthetic oligonucleotide
gcuaaggaaauaauguaac

SEQ ID NO: 63482 - RNA, 19 nt, Artificial Sequence
  Description of Artificial Sequence: Synthetic oligonucleotide
ugcgcguuagaaacuguuc

SEQ ID NO: 63483 - RNA, 19 nt, Artificial Sequence
  Description of Artificial Sequence: Synthetic oligonucleotide
uuuaccuacugaguacuau

SEQ ID NO: 63484 - RNA, 19 nt, Artificial Sequence
  Description of Artificial Sequence: Synthetic oligonucleotide
uagccuaugaggagcuggu

SEQ ID NO: 63485 - RNA, 19 nt, Artificial Sequence
  Description of Artificial Sequence: Synthetic oligonucleotide
acgagugugaaggaucaug

SEQ ID NO: 63486 - RNA, 19 nt, Artificial Sequence
  Description of Artificial Sequence: Synthetic oligonucleotide
caucguuuagcaccuacca

SEQ ID NO: 63487 - RNA, 19 nt, Artificial Sequence
  Description of Artificial Sequence: Synthetic oligonucleotide
agguuaacaccacguucuc

SEQ ID NO: 63488 - RNA, 19 nt, Artificial Sequence
  Description of Artificial Sequence: Synthetic oligonucleotide
gucagcucuaagacggacg

SEQ ID NO: 63489 - RNA, 19 nt, Artificial Sequence
  Description of Artificial Sequence: Synthetic oligonucleotide
gauaaggcaggcgagacau

SEQ ID NO: 63490 - RNA, 19 nt, Artificial Sequence
  Description of Artificial Sequence: Synthetic oligonucleotide
acuuaacaagcauucgcua

SEQ ID NO: 63491 - RNA, 19 nt, Artificial Sequence
  Description of Artificial Sequence: Synthetic oligonucleotide
cacuaggaggaucuuucag

SEQ ID NO: 63492 - RNA, 19 nt, Artificial Sequence
  Description of Artificial Sequence: Synthetic oligonucleotide
gaaguagacacgggacugc

SEQ ID NO: 63493 - RNA, 19 nt, Artificial Sequence
  Description of Artificial Sequence: Synthetic oligonucleotide
gacaucuuaguggagcuaa

SEQ ID NO: 63494 - RNA, 19 nt, Artificial Sequence
  Description of Artificial Sequence: Synthetic oligonucleotide
gacuuaaguacuacaaacu

SEQ ID NO: 63495 - RNA, 19 nt, Artificial Sequence
  Description of Artificial Sequence: Synthetic oligonucleotide
cauagucaaaucacuaugu

SEQ ID NO: 63496 - RNA, 19 nt, Artificial Sequence
  Description of Artificial Sequence: Synthetic oligonucleotide
agccuuaacacugugcuuu

SEQ ID NO: 63497 - RNA, 19 nt, Artificial Sequence
  Description of Artificial Sequence: Synthetic oligonucleotide
aguacagcuuguaucccag

SEQ ID NO: 63498 - RNA, 19 nt, Artificial Sequence
  Description of Artificial Sequence: Synthetic oligonucleotide
ccacgaguccuuaagagug

SEQ ID NO: 63499 - RNA, 19 nt, Artificial Sequence
  Description of Artificial Sequence: Synthetic oligonucleotide
cucguauaagacguuaaca

SEQ ID NO: 63500 - RNA, 19 nt, Artificial Sequence
  Description of Artificial Sequence: Synthetic oligonucleotide
ggacagaacguagacuacg

SEQ ID NO: 63501 - RNA, 19 nt, Artificial Sequence
  Description of Artificial Sequence: Synthetic oligonucleotide
aggaagguuaacaccacgu

SEQ ID NO: 63502 - RNA, 19 nt, Artificial Sequence
  Description of Artificial Sequence: Synthetic oligonucleotide
agacacgggacugcuuccc

SEQ ID NO: 63503 - RNA, 19 nt, Artificial Sequence
  Description of Artificial Sequence: Synthetic oligonucleotide
ggaaaauagagcucguaua

SEQ ID NO: 63504 - RNA, 19 nt, Artificial Sequence
  Description of Artificial Sequence: Synthetic oligonucleotide
  modified_base (5)..(5): a, c, u, g, unknown or other
uggancuaguuuguuacuu

SEQ ID NO: 63505 - RNA, 19 nt, Artificial Sequence
  Description of Artificial Sequence: Synthetic oligonucleotide
cucucgagggcgcaagcag

SEQ ID NO: 63506 - RNA, 19 nt, Artificial Sequence
  Description of Artificial Sequence: Synthetic oligonucleotide
cucauuaauuuaucacgga

SEQ ID NO: 63507 - RNA, 19 nt, Artificial Sequence
  Description of Artificial Sequence: Synthetic oligonucleotide
gcuaauaggaauuccauuu

SEQ ID NO: 63508 - RNA, 19 nt, Artificial Sequence
  Description of Artificial Sequence: Synthetic oligonucleotide
accuacugaguacuauagu

SEQ ID NO: 63509 - RNA, 19 nt, Artificial Sequence
  Description of Artificial Sequence: Synthetic oligonucleotide
  modified_base (4)..(4): a, c, u, g, unknown or other
ggancuaguuuguuacuuc

SEQ ID NO: 63510 - RNA, 19 nt, Artificial Sequence
  Description of Artificial Sequence: Synthetic oligonucleotide
ugaugcgagguuuccuggu

SEQ ID NO: 63511 - RNA, 19 nt, Artificial Sequence
  Description of Artificial Sequence: Synthetic oligonucleotide
cuauaguagggcaaacugu

SEQ ID NO: 63512 - RNA, 19 nt, Artificial Sequence
  Description of Artificial Sequence: Synthetic oligonucleotide
agacuccgcagcugucagc

SEQ ID NO: 63513 - RNA, 19 nt, Artificial Sequence
  Description of Artificial Sequence: Synthetic oligonucleotide
aauaccccacuaauauuaa

SEQ ID NO: 63514 - RNA, 19 nt, Artificial Sequence
  Description of Artificial Sequence: Synthetic oligonucleotide
ggcgagacaucuuagugga

SEQ ID NO: 63515 - RNA, 19 nt, Artificial Sequence
  Description of Artificial Sequence: Synthetic oligonucleotide
uuuuaccuacugaguacua

SEQ ID NO: 63516 - RNA, 19 nt, Artificial Sequence
  Description of Artificial Sequence: Synthetic oligonucleotide
acccgguuaacaccaaaau

SEQ ID NO: 63517 - RNA, 19 nt, Artificial Sequence
  Description of Artificial Sequence: Synthetic oligonucleotide
ccagcgacaaauagcacug

SEQ ID NO: 63518 - RNA, 19 nt, Artificial Sequence
  Description of Artificial Sequence: Synthetic oligonucleotide
cucuaagacggacggagca

SEQ ID NO: 63519 - RNA, 19 nt, Artificial Sequence
  Description of Artificial Sequence: Synthetic oligonucleotide
cuacggcgcaucaaaugac

SEQ ID NO: 63520 - RNA, 19 nt, Artificial Sequence
  Description of Artificial Sequence: Synthetic oligonucleotide
uugcgcguuagaaacuguu

SEQ ID NO: 63521 - RNA, 19 nt, Artificial Sequence
  Description of Artificial Sequence: Synthetic oligonucleotide
ccgguuaacaccaaaaugu

SEQ ID NO: 63522 - RNA, 19 nt, Artificial Sequence
  Description of Artificial Sequence: Synthetic oligonucleotide
ucgucugcggcagguuucg

SEQ ID NO: 63523 - RNA, 19 nt, Artificial Sequence
  Description of Artificial Sequence: Synthetic oligonucleotide
cugacaugucgcccuuugg

SEQ ID NO: 63524 - RNA, 19 nt, Artificial Sequence
  Description of Artificial Sequence: Synthetic oligonucleotide
gauccaaacugaaagguuu

SEQ ID NO: 63525 - RNA, 19 nt, Artificial Sequence
  Description of Artificial Sequence: Synthetic oligonucleotide
ucccaacugcaugacucgg

SEQ ID NO: 63526 - RNA, 19 nt, Artificial Sequence
  Description of Artificial Sequence: Synthetic oligonucleotide
cgcuacaaucccaaaagcc

SEQ ID NO: 63527 - RNA, 19 nt, Artificial Sequence
  Description of Artificial Sequence: Synthetic oligonucleotide
cuuugcaauaccccacuaa

SEQ ID NO: 63528 - RNA, 19 nt, Artificial Sequence
  Description of Artificial Sequence: Synthetic oligonucleotide
gaacguagacuacggcgca

SEQ ID NO: 63529 - RNA, 19 nt, Artificial Sequence
  Description of Artificial Sequence: Synthetic oligonucleotide
gaaccguuccuguuggcua

SEQ ID NO: 63530 - RNA, 19 nt, Artificial Sequence
  Description of Artificial Sequence: Synthetic oligonucleotide
guagcauuagcagacugua

SEQ ID NO: 63531 - RNA, 19 nt, Artificial Sequence
  Description of Artificial Sequence: Synthetic oligonucleotide
auuaagguuacaagucaua

SEQ ID NO: 63532 - RNA, 19 nt, Artificial Sequence
  Description of Artificial Sequence: Synthetic oligonucleotide
cugauugcuuagacuccgc

SEQ ID NO: 63533 - RNA, 19 nt, Artificial Sequence
  Description of Artificial Sequence: Synthetic oligonucleotide
ugcacacgagugugaagga

SEQ ID NO: 63534 - RNA, 19 nt, Artificial Sequence
  Description of Artificial Sequence: Synthetic oligonucleotide
aaaugaccccagagacugg

SEQ ID NO: 63535 - RNA, 19 nt, Artificial Sequence
  Description of Artificial Sequence: Synthetic oligonucleotide
uaagacggacggagcagaa

SEQ ID NO: 63536 - RNA, 19 nt, Artificial Sequence
  Description of Artificial Sequence: Synthetic oligonucleotide
acguagacuacggcgcauc

SEQ ID NO: 63537 - RNA, 19 nt, Artificial Sequence
  Description of Artificial Sequence: Synthetic oligonucleotide
accguaauuuacacgaaua

SEQ ID NO: 63538 - RNA, 19 nt, Artificial Sequence
  Description of Artificial Sequence: Synthetic oligonucleotide
ugcuugcgcguuagaaacu

SEQ ID NO: 63539 - RNA, 19 nt, Artificial Sequence
  Description of Artificial Sequence: Synthetic oligonucleotide
uguauacuguuagcuucac

SEQ ID NO: 63540 - RNA, 19 nt, Artificial Sequence
  Description of Artificial Sequence: Synthetic oligonucleotide
auguuaacauguaaccgua

SEQ ID NO: 63541 - RNA, 19 nt, Artificial Sequence
  Description of Artificial Sequence: Synthetic oligonucleotide
gcuucugcgaacaggggcc

SEQ ID NO: 63542 - RNA, 19 nt, Artificial Sequence
  Description of Artificial Sequence: Synthetic oligonucleotide
gacauacuuaacaagcauu

SEQ ID NO: 63543 - RNA, 19 nt, Artificial Sequence
  Description of Artificial Sequence: Synthetic oligonucleotide
gaguacuauaguagggcaa

SEQ ID NO: 63544 - RNA, 19 nt, Artificial Sequence
  Description of Artificial Sequence: Synthetic oligonucleotide
agcauuguccaugcuucug

SEQ ID NO: 63545 - RNA, 19 nt, Artificial Sequence
  Description of Artificial Sequence: Synthetic oligonucleotide
ugucagcucuaagacggac

SEQ ID NO: 63546 - RNA, 19 nt, Artificial Sequence
  Description of Artificial Sequence: Synthetic oligonucleotide
gcucguauaagacguuaac

SEQ ID NO: 63547 - RNA, 19 nt, Artificial Sequence
  Description of Artificial Sequence: Synthetic oligonucleotide
cuuccacgaguccuuaaga

SEQ ID NO: 63548 - RNA, 19 nt, Artificial Sequence
  Description of Artificial Sequence: Synthetic oligonucleotide
accagcgaugaaugaauua

SEQ ID NO: 63549 - RNA, 19 nt, Artificial Sequence
  Description of Artificial Sequence: Synthetic oligonucleotide
ccagaaugcaugccugagg

SEQ ID NO: 63550 - RNA, 19 nt, Artificial Sequence
  Description of Artificial Sequence: Synthetic oligonucleotide
cccgguuaacaccaaaaug

SEQ ID NO: 63551 - RNA, 19 nt, Artificial Sequence
  Description of Artificial Sequence: Synthetic oligonucleotide
cuacugcaacccuagaacu

SEQ ID NO: 63552 - RNA, 19 nt, Artificial Sequence
  Description of Artificial Sequence: Synthetic oligonucleotide
gcauucgcuaucugucucc

SEQ ID NO: 63553 - RNA, 19 nt, Artificial Sequence
  Description of Artificial Sequence: Synthetic oligonucleotide
agacacaagcacuguuuua

SEQ ID NO: 63554 - RNA, 19 nt, Artificial Sequence
  Description of Artificial Sequence: Synthetic oligonucleotide
gcaugacucgggcagagca

SEQ ID NO: 63555 - RNA, 19 nt, Artificial Sequence
  Description of Artificial Sequence: Synthetic oligonucleotide
ccaccgacacuuuagcaug

SEQ ID NO: 63556 - RNA, 19 nt, Artificial Sequence
  Description of Artificial Sequence: Synthetic oligonucleotide
acaccagcgaugaaugaau

SEQ ID NO: 63557 - RNA, 19 nt, Artificial Sequence
  Description of Artificial Sequence: Synthetic oligonucleotide
gcuuaauaagaacagcaau

SEQ ID NO: 63558 - RNA, 19 nt, Artificial Sequence
  Description of Artificial Sequence: Synthetic oligonucleotide
gcuacaaucccaaaagccu

SEQ ID NO: 63559 - RNA, 19 nt, Artificial Sequence
  Description of Artificial Sequence: Synthetic oligonucleotide
cugcaacccuagaacuaag

SEQ ID NO: 63560 - RNA, 19 nt, Artificial Sequence
  Description of Artificial Sequence: Synthetic oligonucleotide
gcgcguuagaaacuguuca

SEQ ID NO: 63561 - RNA, 19 nt, Artificial Sequence
  Description of Artificial Sequence: Synthetic oligonucleotide
ugcuuagacuccgcagcug

SEQ ID NO: 63562 - RNA, 19 nt, Artificial Sequence
  Description of Artificial Sequence: Synthetic oligonucleotide
gacucucgagggcgcaagc

SEQ ID NO: 63563 - RNA, 19 nt, Artificial Sequence
  Description of Artificial Sequence: Synthetic oligonucleotide
gcguuagaaacuguucagc

SEQ ID NO: 63564 - RNA, 19 nt, Artificial Sequence
  Description of Artificial Sequence: Synthetic oligonucleotide
cuaagacggacggagcaga

SEQ ID NO: 63565 - RNA, 19 nt, Artificial Sequence
  Description of Artificial Sequence: Synthetic oligonucleotide
agacucucgagggcgcaag

SEQ ID NO: 63566 - RNA, 19 nt, Artificial Sequence
  Description of Artificial Sequence: Synthetic oligonucleotide
cugugcggugcuccugucc

SEQ ID NO: 63567 - RNA, 19 nt, Artificial Sequence
  Description of Artificial Sequence: Synthetic oligonucleotide
aacagacugucagcucuaa

SEQ ID NO: 63568 - RNA, 19 nt, Artificial Sequence
  Description of Artificial Sequence: Synthetic oligonucleotide
ucacuacaaggccguccac

SEQ ID NO: 63569 - RNA, 19 nt, Artificial Sequence
  Description of Artificial Sequence: Synthetic oligonucleotide
cacuacaaggccguccaca

SEQ ID NO: 63570 - RNA, 19 nt, Artificial Sequence
  Description of Artificial Sequence: Synthetic oligonucleotide
guacuauaguagggcaaac

SEQ ID NO: 63571 - RNA, 19 nt, Artificial Sequence
  Description of Artificial Sequence: Synthetic oligonucleotide
cucgagggcgcaagcagca

SEQ ID NO: 63572 - RNA, 19 nt, Artificial Sequence
  Description of Artificial Sequence: Synthetic oligonucleotide
agggcgcaagcagcaaggg

SEQ ID NO: 63573 - RNA, 19 nt, Artificial Sequence
  Description of Artificial Sequence: Synthetic oligonucleotide
gauuauguucugacauacu

SEQ ID NO: 63574 - RNA, 19 nt, Artificial Sequence
  Description of Artificial Sequence: Synthetic oligonucleotide
cuucugcgaacaggggccc

SEQ ID NO: 63575 - RNA, 19 nt, Artificial Sequence
  Description of Artificial Sequence: Synthetic oligonucleotide
cguagaggaggaucgaguc

SEQ ID NO: 63576 - RNA, 19 nt, Artificial Sequence
  Description of Artificial Sequence: Synthetic oligonucleotide
aagucagauaggagagaua

SEQ ID NO: 63577 - RNA, 19 nt, Artificial Sequence
  Description of Artificial Sequence: Synthetic oligonucleotide
acucucgagggcgcaagca

SEQ ID NO: 63578 - RNA, 19 nt, Artificial Sequence
  Description of Artificial Sequence: Synthetic oligonucleotide
gucuagaugugugguugac

SEQ ID NO: 63579 - RNA, 19 nt, Artificial Sequence
  Description of Artificial Sequence: Synthetic oligonucleotide
gcuugcgcguuagaaacug

SEQ ID NO: 63580 - RNA, 19 nt, Artificial Sequence
  Description of Artificial Sequence: Synthetic oligonucleotide
uagcuucacuaggaggauc

SEQ ID NO: 63581 - RNA, 19 nt, Artificial Sequence
  Description of Artificial Sequence: Synthetic oligonucleotide
auacccugauucauaguuu

SEQ ID NO: 63582 - RNA, 19 nt, Artificial Sequence
  Description of Artificial Sequence: Synthetic oligonucleotide
ggcugacuaauuaacccuc

SEQ ID NO: 63583 - RNA, 19 nt, Artificial Sequence
  Description of Artificial Sequence: Synthetic oligonucleotide
agcucguauaagacguuaa

SEQ ID NO: 63584 - RNA, 19 nt, Artificial Sequence
  Description of Artificial Sequence: Synthetic oligonucleotide
aagacucucgagggcgcaa

SEQ ID NO: 63585 - RNA, 19 nt, Artificial Sequence
  Description of Artificial Sequence: Synthetic oligonucleotide
acggcgcaucaaaugacug

SEQ ID NO: 63586 - RNA, 19 nt, Artificial Sequence
  Description of Artificial Sequence: Synthetic oligonucleotide
ggaguggcauacuguugug

SEQ ID NO: 63587 - RNA, 19 nt, Artificial Sequence
  Description of Artificial Sequence: Synthetic oligonucleotide
cguauaagacguuaacaaa

SEQ ID NO: 63588 - RNA, 19 nt, Artificial Sequence
  Description of Artificial Sequence: Synthetic oligonucleotide
gaagacucucgagggcgca

SEQ ID NO: 63589 - RNA, 19 nt, Artificial Sequence
  Description of Artificial Sequence: Synthetic oligonucleotide
gagcucguauaagacguua

SEQ ID NO: 63590 - RNA, 19 nt, Artificial Sequence
  Description of Artificial Sequence: Synthetic oligonucleotide
guauacuguuagcuucacu

SEQ ID NO: 63591 - RNA, 19 nt, Artificial Sequence
  Description of Artificial Sequence: Synthetic oligonucleotide
cauucgcuaucugucucca

SEQ ID NO: 63592 - RNA, 19 nt, Artificial Sequence
  Description of Artificial Sequence: Synthetic oligonucleotide
agucgugcacaugccaaua

SEQ ID NO: 63593 - RNA, 19 nt, Artificial Sequence
  Description of Artificial Sequence: Synthetic oligonucleotide
cugugaauuucugaccagu

SEQ ID NO: 63594 - RNA, 19 nt, Artificial Sequence
  Description of Artificial Sequence: Synthetic oligonucleotide
caguuacggccaacugcug

SEQ ID NO: 63595 - RNA, 19 nt, Artificial Sequence
  Description of Artificial Sequence: Synthetic oligonucleotide
acacgggacugcuucccua

SEQ ID NO: 63596 - RNA, 19 nt, Artificial Sequence
  Description of Artificial Sequence: Synthetic oligonucleotide
gcuuagacuccgcagcugu

SEQ ID NO: 63597 - RNA, 19 nt, Artificial Sequence
  Description of Artificial Sequence: Synthetic oligonucleotide
  modified_base (6)..(6): a, c, u, g, unknown or other
cuggancuaguuuguuacu

SEQ ID NO: 63598 - RNA, 19 nt, Artificial Sequence
  Description of Artificial Sequence: Synthetic oligonucleotide
guagacuacggcgcaucaa

SEQ ID NO: 63599 - RNA, 19 nt, Artificial Sequence
  Description of Artificial Sequence: Synthetic oligonucleotide
acgguagcuuacaaaugua

SEQ ID NO: 63600 - RNA, 19 nt, Artificial Sequence
  Description of Artificial Sequence: Synthetic oligonucleotide
caccgacacuuuagcauga

SEQ ID NO: 63601 - RNA, 19 nt, Artificial Sequence
  Description of Artificial Sequence: Synthetic oligonucleotide
ccgacacuuuagcaugaag

SEQ ID NO: 63602 - RNA, 19 nt, Artificial Sequence
  Description of Artificial Sequence: Synthetic oligonucleotide
ggcgcaucaaaugacuggu

SEQ ID NO: 63603 - RNA, 19 nt, Artificial Sequence
  Description of Artificial Sequence: Synthetic oligonucleotide
cuucagccggggccuugag

SEQ ID NO: 63604 - RNA, 19 nt, Artificial Sequence
  Description of Artificial Sequence: Synthetic oligonucleotide
cauugguagggugaggguu

SEQ ID NO: 63605 - RNA, 19 nt, Artificial Sequence
  Description of Artificial Sequence: Synthetic oligonucleotide
gcaaagguuauuauauauu

SEQ ID NO: 63606 - RNA, 19 nt, Artificial Sequence
  Description of Artificial Sequence: Synthetic oligonucleotide
gcuaaacucacagaagcuu

SEQ ID NO: 63607 - RNA, 19 nt, Artificial Sequence
  Description of Artificial Sequence: Synthetic oligonucleotide
gcucuaagacggacggagc

SEQ ID NO: 63608 - RNA, 19 nt, Artificial Sequence
  Description of Artificial Sequence: Synthetic oligonucleotide
gucugcggcagguuucgcu

SEQ ID NO: 63609 - RNA, 19 nt, Artificial Sequence
  Description of Artificial Sequence: Synthetic oligonucleotide
gguuugaaucucauacccu

SEQ ID NO: 63610 - RNA, 19 nt, Artificial Sequence
  Description of Artificial Sequence: Synthetic oligonucleotide
agcuuguaucccagacaca

SEQ ID NO: 63611 - RNA, 19 nt, Artificial Sequence
  Description of Artificial Sequence: Synthetic oligonucleotide
ggaacgggaggagccuuug

SEQ ID NO: 63612 - RNA, 19 nt, Artificial Sequence
  Description of Artificial Sequence: Synthetic oligonucleotide
gacggacggagcagaaacu

SEQ ID NO: 63613 - RNA, 19 nt, Artificial Sequence
  Description of Artificial Sequence: Synthetic oligonucleotide
acccuagaacuaagagaca

SEQ ID NO: 63614 - RNA, 19 nt, Artificial Sequence
  Description of Artificial Sequence: Synthetic oligonucleotide
gaacgggaggagccuuugu

SEQ ID NO: 63615 - RNA, 19 nt, Artificial Sequence
  Description of Artificial Sequence: Synthetic oligonucleotide
ggucaaagcccgaaccucu

SEQ ID NO: 63616 - RNA, 19 nt, Artificial Sequence
  Description of Artificial Sequence: Synthetic oligonucleotide
cacgaguccuuaagagugu

SEQ ID NO: 63617 - RNA, 19 nt, Artificial Sequence
  Description of Artificial Sequence: Synthetic oligonucleotide
accgacacuuuagcaugaa

SEQ ID NO: 63618 - RNA, 19 nt, Artificial Sequence
  Description of Artificial Sequence: Synthetic oligonucleotide
guuggcucuuaaaccauuu

SEQ ID NO: 63619 - RNA, 19 nt, Artificial Sequence
  Description of Artificial Sequence: Synthetic oligonucleotide
ggaaccguuccuguuggcu

SEQ ID NO: 63620 - RNA, 19 nt, Artificial Sequence
  Description of Artificial Sequence: Synthetic oligonucleotide
agagcucguauaagacguu

SEQ ID NO: 63621 - RNA, 19 nt, Artificial Sequence
  Description of Artificial Sequence: Synthetic oligonucleotide
gcgacaaauagcacugccu

SEQ ID NO: 63622 - RNA, 19 nt, Artificial Sequence
  Description of Artificial Sequence: Synthetic oligonucleotide
gcaggcgagacaucuuagu

SEQ ID NO: 63623 - RNA, 19 nt, Artificial Sequence
  Description of Artificial Sequence: Synthetic oligonucleotide
cuugcgcguuagaaacugu

SEQ ID NO: 63624 - RNA, 19 nt, Artificial Sequence
  Description of Artificial Sequence: Synthetic oligonucleotide
ggccguccacagaagacuc

SEQ ID NO: 63625 - RNA, 19 nt, Artificial Sequence
  Description of Artificial Sequence: Synthetic oligonucleotide
accguuccuguuggcuacu

SEQ ID NO: 63626 - RNA, 19 nt, Artificial Sequence
  Description of Artificial Sequence: Synthetic oligonucleotide
aggaacgggaggagccuuu

SEQ ID NO: 63627 - RNA, 19 nt, Artificial Sequence
  Description of Artificial Sequence: Synthetic oligonucleotide
cggacagaacguagacuac

SEQ ID NO: 63628 - RNA, 19 nt, Artificial Sequence
  Description of Artificial Sequence: Synthetic oligonucleotide
cagaacugcuugcgcguua

SEQ ID NO: 63629 - RNA, 19 nt, Artificial Sequence
  Description of Artificial Sequence: Synthetic oligonucleotide
cuacucaauucaagcuguu

SEQ ID NO: 63630 - RNA, 19 nt, Artificial Sequence
  Description of Artificial Sequence: Synthetic oligonucleotide
cggacggagcagaaacuuc

SEQ ID NO: 63631 - RNA, 19 nt, Artificial Sequence
  Description of Artificial Sequence: Synthetic oligonucleotide
acccugcacuggaggucac

SEQ ID NO: 63632 - RNA, 19 nt, Artificial Sequence
  Description of Artificial Sequence: Synthetic oligonucleotide
ugucgcccuuuggcgugga

SEQ ID NO: 63633 - RNA, 19 nt, Artificial Sequence
  Description of Artificial Sequence: Synthetic oligonucleotide
cacgaauacuuggcauucu

SEQ ID NO: 63634 - RNA, 19 nt, Artificial Sequence
  Description of Artificial Sequence: Synthetic oligonucleotide
gaggaacgggaggagccuu

SEQ ID NO: 63635 - RNA, 19 nt, Artificial Sequence
  Description of Artificial Sequence: Synthetic oligonucleotide
cguagacuacggcgcauca

SEQ ID NO: 63636 - RNA, 19 nt, Artificial Sequence
  Description of Artificial Sequence: Synthetic oligonucleotide
cgaguccuuaagaguguga

SEQ ID NO: 63637 - RNA, 19 nt, Artificial Sequence
  Description of Artificial Sequence: Synthetic oligonucleotide
cccacaguuacggccaacu

SEQ ID NO: 63638 - RNA, 19 nt, Artificial Sequence
  Description of Artificial Sequence: Synthetic oligonucleotide
gcaucacuacaaggccguc

SEQ ID NO: 63639 - RNA, 19 nt, Artificial Sequence
  Description of Artificial Sequence: Synthetic oligonucleotide
ccuuugcggacagaacgua

SEQ ID NO: 63640 - RNA, 19 nt, Artificial Sequence
  Description of Artificial Sequence: Synthetic oligonucleotide
gcacacgagugugaaggau

SEQ ID NO: 63641 - RNA, 19 nt, Artificial Sequence
  Description of Artificial Sequence: Synthetic oligonucleotide
ccguuccuguuggcuacuc

SEQ ID NO: 63642 - RNA, 19 nt, Artificial Sequence
  Description of Artificial Sequence: Synthetic oligonucleotide
ccaagacaccagcgaugaa

SEQ ID NO: 63643 - RNA, 19 nt, Artificial Sequence
  Description of Artificial Sequence: Synthetic oligonucleotide
gcggcagguuucgcuuguc

SEQ ID NO: 63644 - RNA, 19 nt, Artificial Sequence
  Description of Artificial Sequence: Synthetic oligonucleotide
gcgcaucaaaugacugguu

SEQ ID NO: 63645 - RNA, 19 nt, Artificial Sequence
  Description of Artificial Sequence: Synthetic oligonucleotide
aaagcaauuacaauuugcg

SEQ ID NO: 63646 - RNA, 19 nt, Artificial Sequence
  Description of Artificial Sequence: Synthetic oligonucleotide
ucuuacacgagccucuugg

SEQ ID NO: 63647 - RNA, 19 nt, Artificial Sequence
  Description of Artificial Sequence: Synthetic oligonucleotide
aacguuuacgcagucaggc

SEQ ID NO: 63648 - RNA, 19 nt, Artificial Sequence
  Description of Artificial Sequence: Synthetic oligonucleotide
aauauugguaugcuuucuc

SEQ ID NO: 63649 - RNA, 19 nt, Artificial Sequence
  Description of Artificial Sequence: Synthetic oligonucleotide
aauaagucauaguagggga

SEQ ID NO: 63650 - RNA, 19 nt, Artificial Sequence
  Description of Artificial Sequence: Synthetic oligonucleotide
agaacaauuggguuauuac

SEQ ID NO: 63651 - RNA, 19 nt, Artificial Sequence
  Description of Artificial Sequence: Synthetic oligonucleotide
ucaacguuuacgcagucag

SEQ ID NO: 63652 - RNA, 19 nt, Artificial Sequence
  Description of Artificial Sequence: Synthetic oligonucleotide
uugaguguaaaauaucuga

SEQ ID NO: 63653 - RNA, 19 nt, Artificial Sequence
  Description of Artificial Sequence: Synthetic oligonucleotide
uuuaacuugccgcaauucc

SEQ ID NO: 63654 - RNA, 19 nt, Artificial Sequence
  Description of Artificial Sequence: Synthetic oligonucleotide
agaaaccuaaacaaaaggg

SEQ ID NO: 63655 - RNA, 19 nt, Artificial Sequence
  Description of Artificial Sequence: Synthetic oligonucleotide
aacucucacaagcaguggg

SEQ ID NO: 63656 - RNA, 19 nt, Artificial Sequence
  Description of Artificial Sequence: Synthetic oligonucleotide
uuggccuuaagaaauauuc

SEQ ID NO: 63657 - RNA, 19 nt, Artificial Sequence
  Description of Artificial Sequence: Synthetic oligonucleotide
aauugaguguaaaauaucu

SEQ ID NO: 63658 - RNA, 19 nt, Artificial Sequence
  Description of Artificial Sequence: Synthetic oligonucleotide
uguaguggaagccaagaca

SEQ ID NO: 63659 - RNA, 19 nt, Artificial Sequence
  Description of Artificial Sequence: Synthetic oligonucleotide
aacaauccuaguuuuaaaa

SEQ ID NO: 63660 - RNA, 19 nt, Artificial Sequence
  Description of Artificial Sequence: Synthetic oligonucleotide
auuaaggccguccaucagg

SEQ ID NO: 63661 - RNA, 19 nt, Artificial Sequence
  Description of Artificial Sequence: Synthetic oligonucleotide
uugugaacagaauagucgc

SEQ ID NO: 63662 - RNA, 19 nt, Artificial Sequence
  Description of Artificial Sequence: Synthetic oligonucleotide
agaauagucgcaucauaac

SEQ ID NO: 63663 - RNA, 19 nt, Artificial Sequence
  Description of Artificial Sequence: Synthetic oligonucleotide
uugaggaccauaauggagu

SEQ ID NO: 63664 - RNA, 19 nt, Artificial Sequence
  Description of Artificial Sequence: Synthetic oligonucleotide
ucugcaacugaugcgaugg

SEQ ID NO: 63665 - RNA, 19 nt, Artificial Sequence
  Description of Artificial Sequence: Synthetic oligonucleotide
acgagacacacuuucaagg

SEQ ID NO: 63666 - RNA, 19 nt, Artificial Sequence
  Description of Artificial Sequence: Synthetic oligonucleotide
gacugaauaacucucacaa

SEQ ID NO: 63667 - RNA, 19 nt, Artificial Sequence
  Description of Artificial Sequence: Synthetic oligonucleotide
uuugcaaaagagugcauga

SEQ ID NO: 63668 - RNA, 19 nt, Artificial Sequence
  Description of Artificial Sequence: Synthetic oligonucleotide
uuauaccgaauauuuuggg

SEQ ID NO: 63669 - RNA, 19 nt, Artificial Sequence
  Description of Artificial Sequence: Synthetic oligonucleotide
uccuuccgcaauuauaccg

SEQ ID NO: 63670 - RNA, 19 nt, Artificial Sequence
  Description of Artificial Sequence: Synthetic oligonucleotide
cagguuaucuaaauagggg

SEQ ID NO: 63671 - RNA, 19 nt, Artificial Sequence
  Description of Artificial Sequence: Synthetic oligonucleotide
aagacaaccagugugguaa

SEQ ID NO: 63672 - RNA, 19 nt, Artificial Sequence
  Description of Artificial Sequence: Synthetic oligonucleotide
cauuaauccugcaugccgg

SEQ ID NO: 63673 - RNA, 19 nt, Artificial Sequence
  Description of Artificial Sequence: Synthetic oligonucleotide
ucuaugaagaucccuuaga

SEQ ID NO: 63674 - RNA, 19 nt, Artificial Sequence
  Description of Artificial Sequence: Synthetic oligonucleotide
uuauugaggagugaaugag

SEQ ID NO: 63675 - RNA, 19 nt, Artificial Sequence
  Description of Artificial Sequence: Synthetic oligonucleotide
auuauaccgaauauuuugg

SEQ ID NO: 63676 - RNA, 19 nt, Artificial Sequence
  Description of Artificial Sequence: Synthetic oligonucleotide
agguuaucuaaauagggga

SEQ ID NO: 63677 - RNA, 19 nt, Artificial Sequence
  Description of Artificial Sequence: Synthetic oligonucleotide
aaggccguccaucaggcag

SEQ ID NO: 63678 - RNA, 19 nt, Artificial Sequence
  Description of Artificial Sequence: Synthetic oligonucleotide
ucaggcuuaauugaagcag

SEQ ID NO: 63679 - RNA, 19 nt, Artificial Sequence
  Description of Artificial Sequence: Synthetic oligonucleotide
aacaauauugguaugcuuu

SEQ ID NO: 63680 - RNA, 19 nt, Artificial Sequence
  Description of Artificial Sequence: Synthetic oligonucleotide
uuaacuugccgcaauuccu

SEQ ID NO: 63681 - RNA, 19 nt, Artificial Sequence
  Description of Artificial Sequence: Synthetic oligonucleotide
aaucacuucgagggcaagc

SEQ ID NO: 63682 - RNA, 19 nt, Artificial Sequence
  Description of Artificial Sequence: Synthetic oligonucleotide
agaucugagggucaucguc

SEQ ID NO: 63683 - RNA, 19 nt, Artificial Sequence
  Description of Artificial Sequence: Synthetic oligonucleotide
ucuaaucagaacaauccua

SEQ ID NO: 63684 - RNA, 19 nt, Artificial Sequence
  Description of Artificial Sequence: Synthetic oligonucleotide
gguagauugguauuguuug

SEQ ID NO: 63685 - RNA, 19 nt, Artificial Sequence
  Description of Artificial Sequence: Synthetic oligonucleotide
aagugcucgcugcuaagac

SEQ ID NO: 63686 - RNA, 19 nt, Artificial Sequence
  Description of Artificial Sequence: Synthetic oligonucleotide
aagcaauuacaauuugcga

SEQ ID NO: 63687 - RNA, 19 nt, Artificial Sequence
  Description of Artificial Sequence: Synthetic oligonucleotide
uuggcgaacgacauuggcc

SEQ ID NO: 63688 - RNA, 19 nt, Artificial Sequence
  Description of Artificial Sequence: Synthetic oligonucleotide
aguuccuuagcauagcaaa

SEQ ID NO: 63689 - RNA, 19 nt, Artificial Sequence
  Description of Artificial Sequence: Synthetic oligonucleotide
aacaugaaaggagccaaag

SEQ ID NO: 63690 - RNA, 19 nt, Artificial Sequence
  Description of Artificial Sequence: Synthetic oligonucleotide
uccgcaauuauaccgaaua

SEQ ID NO: 63691 - RNA, 19 nt, Artificial Sequence
  Description of Artificial Sequence: Synthetic oligonucleotide
uagauugguauuguuuggg

SEQ ID NO: 63692 - RNA, 19 nt, Artificial Sequence
  Description of Artificial Sequence: Synthetic oligonucleotide
uggauuugcaaaccucaag

SEQ ID NO: 63693 - RNA, 19 nt, Artificial Sequence
  Description of Artificial Sequence: Synthetic oligonucleotide
gagggcgucacacaugaag

SEQ ID NO: 63694 - RNA, 19 nt, Artificial Sequence
  Description of Artificial Sequence: Synthetic oligonucleotide
aagcugacgcugcauauug

SEQ ID NO: 63695 - RNA, 19 nt, Artificial Sequence
  Description of Artificial Sequence: Synthetic oligonucleotide
uaccgaauauuuuggguag

SEQ ID NO: 63696 - RNA, 19 nt, Artificial Sequence
  Description of Artificial Sequence: Synthetic oligonucleotide
uuagaaaaccaggugacaa

SEQ ID NO: 63697 - RNA, 19 nt, Artificial Sequence
  Description of Artificial Sequence: Synthetic oligonucleotide
aguugugcuaugcauucag

SEQ ID NO: 63698 - RNA, 19 nt, Artificial Sequence
  Description of Artificial Sequence: Synthetic oligonucleotide
ggauuuugcacauucuugc

SEQ ID NO: 63699 - RNA, 19 nt, Artificial Sequence
  Description of Artificial Sequence: Synthetic oligonucleotide
aaaucuaugaagaucccuu

SEQ ID NO: 63700 - RNA, 19 nt, Artificial Sequence
  Description of Artificial Sequence: Synthetic oligonucleotide
uauugaggagugaaugaga

SEQ ID NO: 63701 - RNA, 19 nt, Artificial Sequence
  Description of Artificial Sequence: Synthetic oligonucleotide
uacuuggcgaacgacauug

SEQ ID NO: 63702 - RNA, 19 nt, Artificial Sequence
  Description of Artificial Sequence: Synthetic oligonucleotide
uggcgaacgacauuggcca

SEQ ID NO: 63703 - RNA, 19 nt, Artificial Sequence
  Description of Artificial Sequence: Synthetic oligonucleotide
uuaaggccguccaucaggc

SEQ ID NO: 63704 - RNA, 19 nt, Artificial Sequence
  Description of Artificial Sequence: Synthetic oligonucleotide
aacaauuggguuauuacuu

SEQ ID NO: 63705 - RNA, 19 nt, Artificial Sequence
  Description of Artificial Sequence: Synthetic oligonucleotide
cucaagucuuacacgagcc

SEQ ID NO: 63706 - RNA, 19 nt, Artificial Sequence
  Description of Artificial Sequence: Synthetic oligonucleotide
uuaguuccuuagcauagca

SEQ ID NO: 63707 - RNA, 19 nt, Artificial Sequence
  Description of Artificial Sequence: Synthetic oligonucleotide
ugucaucgaagauacacaa

SEQ ID NO: 63708 - RNA, 19 nt, Artificial Sequence
  Description of Artificial Sequence: Synthetic oligonucleotide
guagauugguauuguuugg

SEQ ID NO: 63709 - RNA, 19 nt, Artificial Sequence
  Description of Artificial Sequence: Synthetic oligonucleotide
aagcauuugcauaaugugu

SEQ ID NO: 63710 - RNA, 19 nt, Artificial Sequence
  Description of Artificial Sequence: Synthetic oligonucleotide
ucuucaacguuuacgcagu

SEQ ID NO: 63711 - RNA, 19 nt, Artificial Sequence
  Description of Artificial Sequence: Synthetic oligonucleotide
aggccauuaauccugcaug

SEQ ID NO: 63712 - RNA, 19 nt, Artificial Sequence
  Description of Artificial Sequence: Synthetic oligonucleotide
ugaaucaggcuccgugccg

SEQ ID NO: 63713 - RNA, 19 nt, Artificial Sequence
  Description of Artificial Sequence: Synthetic oligonucleotide
aaaccuaaacaaaagggua

SEQ ID NO: 63714 - RNA, 19 nt, Artificial Sequence
  Description of Artificial Sequence: Synthetic oligonucleotide
uccacacaacuuuagacuc

SEQ ID NO: 63715 - RNA, 19 nt, Artificial Sequence
  Description of Artificial Sequence: Synthetic oligonucleotide
ugaugcauccugcaugaac

SEQ ID NO: 63716 - RNA, 19 nt, Artificial Sequence
  Description of Artificial Sequence: Synthetic oligonucleotide
uuaucuccaccauacugug

SEQ ID NO: 63717 - RNA, 19 nt, Artificial Sequence
  Description of Artificial Sequence: Synthetic oligonucleotide
ugcauagcggacucuuggg

SEQ ID NO: 63718 - RNA, 19 nt, Artificial Sequence
  Description of Artificial Sequence: Synthetic oligonucleotide
cuuucaaucaggucgcaca

SEQ ID NO: 63719 - RNA, 19 nt, Artificial Sequence
  Description of Artificial Sequence: Synthetic oligonucleotide
cauaaccacgggaagguac

SEQ ID NO: 63720 - RNA, 19 nt, Artificial Sequence
  Description of Artificial Sequence: Synthetic oligonucleotide
aggugacaaaaucuaguag

SEQ ID NO: 63721 - RNA, 19 nt, Artificial Sequence
  Description of Artificial Sequence: Synthetic oligonucleotide
auagucgcaucauaacuga

SEQ ID NO: 63722 - RNA, 19 nt, Artificial Sequence
  Description of Artificial Sequence: Synthetic oligonucleotide
aauuggguuauuacuuuca

SEQ ID NO: 63723 - RNA, 19 nt, Artificial Sequence
  Description of Artificial Sequence: Synthetic oligonucleotide
aaucuaugaagaucccuua

SEQ ID NO: 63724 - RNA, 19 nt, Artificial Sequence
  Description of Artificial Sequence: Synthetic oligonucleotide
cauacugugccaugacacc

SEQ ID NO: 63725 - RNA, 19 nt, Artificial Sequence
  Description of Artificial Sequence: Synthetic oligonucleotide
uguuuauugaggagugaau

SEQ ID NO: 63726 - RNA, 19 nt, Artificial Sequence
  Description of Artificial Sequence: Synthetic oligonucleotide
ucauaguaggggacaaacu

SEQ ID NO: 63727 - RNA, 19 nt, Artificial Sequence
  Description of Artificial Sequence: Synthetic oligonucleotide
gaacaauuggguuauuacu

SEQ ID NO: 63728 - RNA, 19 nt, Artificial Sequence
  Description of Artificial Sequence: Synthetic oligonucleotide
agccauaauacuugcaaaa

SEQ ID NO: 63729 - RNA, 19 nt, Artificial Sequence
  Description of Artificial Sequence: Synthetic oligonucleotide
auaagucauaguaggggac

SEQ ID NO: 63730 - RNA, 19 nt, Artificial Sequence
  Description of Artificial Sequence: Synthetic oligonucleotide
gaauagucgcaucauaacu

SEQ ID NO: 63731 - RNA, 19 nt, Artificial Sequence
  Description of Artificial Sequence: Synthetic oligonucleotide
ugugaacagaauagucgca

SEQ ID NO: 63732 - RNA, 19 nt, Artificial Sequence
  Description of Artificial Sequence: Synthetic oligonucleotide
ugcaaaagagugcaugauu

SEQ ID NO: 63733 - RNA, 19 nt, Artificial Sequence
  Description of Artificial Sequence: Synthetic oligonucleotide
gugacaaaaucuaguagcc

SEQ ID NO: 63734 - RNA, 19 nt, Artificial Sequence
  Description of Artificial Sequence: Synthetic oligonucleotide
uugugcuaugcauucaguc

SEQ ID NO: 63735 - RNA, 19 nt, Artificial Sequence
  Description of Artificial Sequence: Synthetic oligonucleotide
cauuggcagaacaagcuuc

SEQ ID NO: 63736 - RNA, 19 nt, Artificial Sequence
  Description of Artificial Sequence: Synthetic oligonucleotide
aggaccauaauggagugca

SEQ ID NO: 63737 - RNA, 19 nt, Artificial Sequence
  Description of Artificial Sequence: Synthetic oligonucleotide
uauuaaggccguccaucag

SEQ ID NO: 63738 - RNA, 19 nt, Artificial Sequence
  Description of Artificial Sequence: Synthetic oligonucleotide
acaugaaaggagccaaaga

SEQ ID NO: 63739 - RNA, 19 nt, Artificial Sequence
  Description of Artificial Sequence: Synthetic oligonucleotide
ucaagucuuacacgagccu

SEQ ID NO: 63740 - RNA, 19 nt, Artificial Sequence
  Description of Artificial Sequence: Synthetic oligonucleotide
augagggcgucacacauga

SEQ ID NO: 63741 - RNA, 19 nt, Artificial Sequence
  Description of Artificial Sequence: Synthetic oligonucleotide
aaauaggggaugagcagug

SEQ ID NO: 63742 - RNA, 19 nt, Artificial Sequence
  Description of Artificial Sequence: Synthetic oligonucleotide
ccagguuaucuaaauaggg

SEQ ID NO: 63743 - RNA, 19 nt, Artificial Sequence
  Description of Artificial Sequence: Synthetic oligonucleotide
uggaguuaguuuucuggca

SEQ ID NO: 63744 - RNA, 19 nt, Artificial Sequence
  Description of Artificial Sequence: Synthetic oligonucleotide
acaauuaauggaagcagcu

SEQ ID NO: 63745 - RNA, 19 nt, Artificial Sequence
  Description of Artificial Sequence: Synthetic oligonucleotide
uuuaguuccuuagcauagc

SEQ ID NO: 63746 - RNA, 19 nt, Artificial Sequence
  Description of Artificial Sequence: Synthetic oligonucleotide
accacggcaacaccuuuuc

SEQ ID NO: 63747 - RNA, 19 nt, Artificial Sequence
  Description of Artificial Sequence: Synthetic oligonucleotide
acaugccaaacacacuuca

SEQ ID NO: 63748 - RNA, 19 nt, Artificial Sequence
  Description of Artificial Sequence: Synthetic oligonucleotide
cuuaaaugaggauggacua

SEQ ID NO: 63749 - RNA, 19 nt, Artificial Sequence
  Description of Artificial Sequence: Synthetic oligonucleotide
gaggguagugucuccacac

SEQ ID NO: 63750 - RNA, 19 nt, Artificial Sequence
  Description of Artificial Sequence: Synthetic oligonucleotide
cuagaucaaccaucauugc

SEQ ID NO: 63751 - RNA, 19 nt, Artificial Sequence
  Description of Artificial Sequence: Synthetic oligonucleotide
cuaccauggggcuuacaag

SEQ ID NO: 63752 - RNA, 19 nt, Artificial Sequence
  Description of Artificial Sequence: Synthetic oligonucleotide
uaagacacccgucucccau

SEQ ID NO: 63753 - RNA, 19 nt, Artificial Sequence
  Description of Artificial Sequence: Synthetic oligonucleotide
aaucagguugacaauuaau

SEQ ID NO: 63754 - RNA, 19 nt, Artificial Sequence
  Description of Artificial Sequence: Synthetic oligonucleotide
guaaacguuuauuuggagu

SEQ ID NO: 63755 - RNA, 19 nt, Artificial Sequence
  Description of Artificial Sequence: Synthetic oligonucleotide
guauuaaggccguccauca

SEQ ID NO: 63756 - RNA, 19 nt, Artificial Sequence
  Description of Artificial Sequence: Synthetic oligonucleotide
ucaguauuccucccagcuc

SEQ ID NO: 63757 - RNA, 19 nt, Artificial Sequence
  Description of Artificial Sequence: Synthetic oligonucleotide
ucauuggcagaacaagcuu

SEQ ID NO: 63758 - RNA, 19 nt, Artificial Sequence
  Description of Artificial Sequence: Synthetic oligonucleotide
agacaggcggcacucaagu

SEQ ID NO: 63759 - RNA, 19 nt, Artificial Sequence
  Description of Artificial Sequence: Synthetic oligonucleotide
auagcggacucuuggguga

SEQ ID NO: 63760 - RNA, 19 nt, Artificial Sequence
  Description of Artificial Sequence: Synthetic oligonucleotide
aacagaauagucgcaucau

SEQ ID NO: 63761 - RNA, 19 nt, Artificial Sequence
  Description of Artificial Sequence: Synthetic oligonucleotide
aagaacaauuggguuauua

SEQ ID NO: 63762 - RNA, 19 nt, Artificial Sequence
  Description of Artificial Sequence: Synthetic oligonucleotide
ugcaacugaugcgauggag

SEQ ID NO: 63763 - RNA, 19 nt, Artificial Sequence
  Description of Artificial Sequence: Synthetic oligonucleotide
cagaauagucgcaucauaa

SEQ ID NO: 63764 - RNA, 19 nt, Artificial Sequence
  Description of Artificial Sequence: Synthetic oligonucleotide
agagugcaugauuuccgag

SEQ ID NO: 63765 - RNA, 19 nt, Artificial Sequence
  Description of Artificial Sequence: Synthetic oligonucleotide
ccauuaauccugcaugccg

SEQ ID NO: 63766 - RNA, 19 nt, Artificial Sequence
  Description of Artificial Sequence: Synthetic oligonucleotide
acaauuggguuauuacuuu

SEQ ID NO: 63767 - RNA, 19 nt, Artificial Sequence
  Description of Artificial Sequence: Synthetic oligonucleotide
augagacuacugcagacau

SEQ ID NO: 63768 - RNA, 19 nt, Artificial Sequence
  Description of Artificial Sequence: Synthetic oligonucleotide
uuuuggguagauugguauu

SEQ ID NO: 63769 - RNA, 19 nt, Artificial Sequence
  Description of Artificial Sequence: Synthetic oligonucleotide
caaugcuguuuauugagga

SEQ ID NO: 63770 - RNA, 19 nt, Artificial Sequence
  Description of Artificial Sequence: Synthetic oligonucleotide
ugccgguauuuccagucag

SEQ ID NO: 63771 - RNA, 19 nt, Artificial Sequence
  Description of Artificial Sequence: Synthetic oligonucleotide
uaucuaaauaggggaugag

SEQ ID NO: 63772 - RNA, 19 nt, Artificial Sequence
  Description of Artificial Sequence: Synthetic oligonucleotide
ugagacuacugcagacaug

SEQ ID NO: 63773 - RNA, 19 nt, Artificial Sequence
  Description of Artificial Sequence: Synthetic oligonucleotide
aagucuuacacgagccucu

SEQ ID NO: 63774 - RNA, 19 nt, Artificial Sequence
  Description of Artificial Sequence: Synthetic oligonucleotide
cuuggcgaacgacauuggc

SEQ ID NO: 63775 - RNA, 19 nt, Artificial Sequence
  Description of Artificial Sequence: Synthetic oligonucleotide
gaaagggcgguaauuaucu

SEQ ID NO: 63776 - RNA, 19 nt, Artificial Sequence
  Description of Artificial Sequence: Synthetic oligonucleotide
caacguuuacgcagucagg

SEQ ID NO: 63777 - RNA, 19 nt, Artificial Sequence
  Description of Artificial Sequence: Synthetic oligonucleotide
agggacggcauaaauaagu

SEQ ID NO: 63778 - RNA, 19 nt, Artificial Sequence
  Description of Artificial Sequence: Synthetic oligonucleotide
auuaauccugcaugccggu

SEQ ID NO: 63779 - RNA, 19 nt, Artificial Sequence
  Description of Artificial Sequence: Synthetic oligonucleotide
uggaggucacaacuuguuc

SEQ ID NO: 63780 - RNA, 19 nt, Artificial Sequence
  Description of Artificial Sequence: Synthetic oligonucleotide
agugcucgcugcuaagaca

SEQ ID NO: 63781 - RNA, 19 nt, Artificial Sequence
  Description of Artificial Sequence: Synthetic oligonucleotide
agcauuugcauaauguguu

SEQ ID NO: 63782 - RNA, 19 nt, Artificial Sequence
  Description of Artificial Sequence: Synthetic oligonucleotide
gcaacugaugcgauggagg

SEQ ID NO: 63783 - RNA, 19 nt, Artificial Sequence
  Description of Artificial Sequence: Synthetic oligonucleotide
cacuuuagucagaauauaa

SEQ ID NO: 63784 - RNA, 19 nt, Artificial Sequence
  Description of Artificial Sequence: Synthetic oligonucleotide
acuccaacagaagaggcau

SEQ ID NO: 63785 - RNA, 19 nt, Artificial Sequence
  Description of Artificial Sequence: Synthetic oligonucleotide
uaacucucacaagcagugg

SEQ ID NO: 63786 - RNA, 19 nt, Artificial Sequence
  Description of Artificial Sequence: Synthetic oligonucleotide
uccgagaggacaucugaau

SEQ ID NO: 63787 - RNA, 19 nt, Artificial Sequence
  Description of Artificial Sequence: Synthetic oligonucleotide
uuacacgagccucuuggua

SEQ ID NO: 63788 - RNA, 19 nt, Artificial Sequence
  Description of Artificial Sequence: Synthetic oligonucleotide
aaccagugugguaagacuu

SEQ ID NO: 63789 - RNA, 19 nt, Artificial Sequence
  Description of Artificial Sequence: Synthetic oligonucleotide
aacuugccgcaauuccuga

SEQ ID NO: 63790 - RNA, 19 nt, Artificial Sequence
  Description of Artificial Sequence: Synthetic oligonucleotide
agcuggguggauuugcaaa

SEQ ID NO: 63791 - RNA, 19 nt, Artificial Sequence
  Description of Artificial Sequence: Synthetic oligonucleotide
ugcauacuuaaaugaggau

SEQ ID NO: 63792 - RNA, 19 nt, Artificial Sequence
  Description of Artificial Sequence: Synthetic oligonucleotide
cuuuuccugugcacucgcg

SEQ ID NO: 63793 - RNA, 19 nt, Artificial Sequence
  Description of Artificial Sequence: Synthetic oligonucleotide
ggucuuagagucugcagac

SEQ ID NO: 63794 - RNA, 19 nt, Artificial Sequence
  Description of Artificial Sequence: Synthetic oligonucleotide
auuguugaggguagugucu

SEQ ID NO: 63795 - RNA, 19 nt, Artificial Sequence
  Description of Artificial Sequence: Synthetic oligonucleotide
caagucuuacacgagccuc

SEQ ID NO: 63796 - RNA, 19 nt, Artificial Sequence
  Description of Artificial Sequence: Synthetic oligonucleotide
cagugaaguuaaugagugc

SEQ ID NO: 63797 - RNA, 19 nt, Artificial Sequence
  Description of Artificial Sequence: Synthetic oligonucleotide
uugaucuaaucagaacaau

SEQ ID NO: 63798 - RNA, 19 nt, Artificial Sequence
  Description of Artificial Sequence: Synthetic oligonucleotide
auaaccacgggaagguacu

SEQ ID NO: 63799 - RNA, 19 nt, Artificial Sequence
  Description of Artificial Sequence: Synthetic oligonucleotide
cauacgguccaacgcacuc

SEQ ID NO: 63800 - RNA, 19 nt, Artificial Sequence
  Description of Artificial Sequence: Synthetic oligonucleotide
uucaacguuuacgcaguca

SEQ ID NO: 63801 - RNA, 19 nt, Artificial Sequence
  Description of Artificial Sequence: Synthetic oligonucleotide
agaauggccuacacacaac

SEQ ID NO: 63802 - RNA, 19 nt, Artificial Sequence
  Description of Artificial Sequence: Synthetic oligonucleotide
gacacuuuagucagaauau

SEQ ID NO: 63803 - RNA, 19 nt, Artificial Sequence
  Description of Artificial Sequence: Synthetic oligonucleotide
gugugagguacucgggacc

SEQ ID NO: 63804 - RNA, 19 nt, Artificial Sequence
  Description of Artificial Sequence: Synthetic oligonucleotide
ucgcggcuccagaagaaug

SEQ ID NO: 63805 - RNA, 19 nt, Artificial Sequence
  Description of Artificial Sequence: Synthetic oligonucleotide
cuacugaaaauugagugua

SEQ ID NO: 63806 - RNA, 19 nt, Artificial Sequence
  Description of Artificial Sequence: Synthetic oligonucleotide
auaugccgcggcuugccug

SEQ ID NO: 63807 - RNA, 19 nt, Artificial Sequence
  Description of Artificial Sequence: Synthetic oligonucleotide
uaauugaagcagucuucau

SEQ ID NO: 63808 - RNA, 19 nt, Artificial Sequence
  Description of Artificial Sequence: Synthetic oligonucleotide
aguggccccauaaccacgg

SEQ ID NO: 63809 - RNA, 19 nt, Artificial Sequence
  Description of Artificial Sequence: Synthetic oligonucleotide
ggccauuaauccugcaugc

SEQ ID NO: 63810 - RNA, 19 nt, Artificial Sequence
  Description of Artificial Sequence: Synthetic oligonucleotide
gccaaugaggcugauacac

SEQ ID NO: 63811 - RNA, 19 nt, Artificial Sequence
  Description of Artificial Sequence: Synthetic oligonucleotide
ggugguauuaaggccgucc

SEQ ID NO: 63812 - RNA, 19 nt, Artificial Sequence
  Description of Artificial Sequence: Synthetic oligonucleotide
caggugacaaaaucuagua

SEQ ID NO: 63813 - RNA, 19 nt, Artificial Sequence
  Description of Artificial Sequence: Synthetic oligonucleotide
aauaggggaugagcaguga

SEQ ID NO: 63814 - RNA, 19 nt, Artificial Sequence
  Description of Artificial Sequence: Synthetic oligonucleotide
guuaacacugagguuucca

SEQ ID NO: 63815 - RNA, 19 nt, Artificial Sequence
  Description of Artificial Sequence: Synthetic oligonucleotide
guccaacgcacucucacca

SEQ ID NO: 63816 - RNA, 19 nt, Artificial Sequence
  Description of Artificial Sequence: Synthetic oligonucleotide
ugguauuaaggccguccau

SEQ ID NO: 63817 - RNA, 19 nt, Artificial Sequence
  Description of Artificial Sequence: Synthetic oligonucleotide
acguuuacgcagucaggcu

SEQ ID NO: 63818 - RNA, 19 nt, Artificial Sequence
  Description of Artificial Sequence: Synthetic oligonucleotide
uaagagaucugagggucau

SEQ ID NO: 63819 - RNA, 19 nt, Artificial Sequence
  Description of Artificial Sequence: Synthetic oligonucleotide
uacagaaagggcgguaauu

SEQ ID NO: 63820 - RNA, 19 nt, Artificial Sequence
  Description of Artificial Sequence: Synthetic oligonucleotide
uugcaaaagagugcaugau

SEQ ID NO: 63821 - RNA, 19 nt, Artificial Sequence
  Description of Artificial Sequence: Synthetic oligonucleotide
ugccgauagccuugaugag

SEQ ID NO: 63822 - RNA, 19 nt, Artificial Sequence
  Description of Artificial Sequence: Synthetic oligonucleotide
ugcaaaccucaagaacacc

SEQ ID NO: 63823 - RNA, 19 nt, Artificial Sequence
  Description of Artificial Sequence: Synthetic oligonucleotide
ggcgguaauuaucuccacc

SEQ ID NO: 63824 - RNA, 19 nt, Artificial Sequence
  Description of Artificial Sequence: Synthetic oligonucleotide
ucgcugcuaagacacccgu

SEQ ID NO: 63825 - RNA, 19 nt, Artificial Sequence
  Description of Artificial Sequence: Synthetic oligonucleotide
agggcgucacacaugaagu

SEQ ID NO: 63826 - RNA, 19 nt, Artificial Sequence
  Description of Artificial Sequence: Synthetic oligonucleotide
gaugagggcgucacacaug

SEQ ID NO: 63827 - RNA, 19 nt, Artificial Sequence
  Description of Artificial Sequence: Synthetic oligonucleotide
guccacaagccuccagaag

SEQ ID NO: 63828 - RNA, 19 nt, Artificial Sequence
  Description of Artificial Sequence: Synthetic oligonucleotide
gcaaaccucaagaacacca

SEQ ID NO: 63829 - RNA, 19 nt, Artificial Sequence
  Description of Artificial Sequence: Synthetic oligonucleotide
aggcuuaauugaagcaguc

SEQ ID NO: 63830 - RNA, 19 nt, Artificial Sequence
  Description of Artificial Sequence: Synthetic oligonucleotide
uugccgcaauuccugauuu

SEQ ID NO: 63831 - RNA, 19 nt, Artificial Sequence
  Description of Artificial Sequence: Synthetic oligonucleotide
uggccccauaaccacggga

SEQ ID NO: 63832 - RNA, 19 nt, Artificial Sequence
  Description of Artificial Sequence: Synthetic oligonucleotide
uccgugggucagaugagau

SEQ ID NO: 63833 - RNA, 19 nt, Artificial Sequence
  Description of Artificial Sequence: Synthetic oligonucleotide
cgugggucagaugagaucc

SEQ ID NO: 63834 - RNA, 19 nt, Artificial Sequence
  Description of Artificial Sequence: Synthetic oligonucleotide
cauguaguggaagccaaga

SEQ ID NO: 63835 - RNA, 19 nt, Artificial Sequence
  Description of Artificial Sequence: Synthetic oligonucleotide
gcuaccauggggcuuacaa

SEQ ID NO: 63836 - RNA, 19 nt, Artificial Sequence
  Description of Artificial Sequence: Synthetic oligonucleotide
cagcuaaucaguuacuuuu

SEQ ID NO: 63837 - RNA, 19 nt, Artificial Sequence
  Description of Artificial Sequence: Synthetic oligonucleotide
gccgauagccuugaugagg

SEQ ID NO: 63838 - RNA, 19 nt, Artificial Sequence
  Description of Artificial Sequence: Synthetic oligonucleotide
gaaucaggcuccgugccga

SEQ ID NO: 63839 - RNA, 19 nt, Artificial Sequence
  Description of Artificial Sequence: Synthetic oligonucleotide
gguugacaauuaauggaag

SEQ ID NO: 63840 - RNA, 19 nt, Artificial Sequence
  Description of Artificial Sequence: Synthetic oligonucleotide
accccggacucucgcacac

SEQ ID NO: 63841 - RNA, 19 nt, Artificial Sequence
  Description of Artificial Sequence: Synthetic oligonucleotide
agaucccuuagaaaauuaa

SEQ ID NO: 63842 - RNA, 19 nt, Artificial Sequence
  Description of Artificial Sequence: Synthetic oligonucleotide
uguuaacacugagguuucc

SEQ ID NO: 63843 - RNA, 19 nt, Artificial Sequence
  Description of Artificial Sequence: Synthetic oligonucleotide
auaucagaucacucuugua

SEQ ID NO: 63844 - RNA, 19 nt, Artificial Sequence
  Description of Artificial Sequence: Synthetic oligonucleotide
gcuacugaaaauugagugu

SEQ ID NO: 63845 - RNA, 19 nt, Artificial Sequence
  Description of Artificial Sequence: Synthetic oligonucleotide
uacucgggaccccggacuc

SEQ ID NO: 63846 - RNA, 19 nt, Artificial Sequence
  Description of Artificial Sequence: Synthetic oligonucleotide
cuuccaugguuugaaguca

SEQ ID NO: 63847 - RNA, 19 nt, Artificial Sequence
  Description of Artificial Sequence: Synthetic oligonucleotide
auaauggagugcaggugcu

SEQ ID NO: 63848 - RNA, 19 nt, Artificial Sequence
  Description of Artificial Sequence: Synthetic oligonucleotide
agacacccgucucccauca

SEQ ID NO: 63849 - RNA, 19 nt, Artificial Sequence
  Description of Artificial Sequence: Synthetic oligonucleotide
gucugcaacugaugcgaug

SEQ ID NO: 63850 - RNA, 19 nt, Artificial Sequence
  Description of Artificial Sequence: Synthetic oligonucleotide
augccgguauuuccaguca

SEQ ID NO: 63851 - RNA, 19 nt, Artificial Sequence
  Description of Artificial Sequence: Synthetic oligonucleotide
cagggacggcauaaauaag

SEQ ID NO: 63852 - RNA, 19 nt, Artificial Sequence
  Description of Artificial Sequence: Synthetic oligonucleotide
uuccgcaauuauaccgaau

SEQ ID NO: 63853 - RNA, 19 nt, Artificial Sequence
  Description of Artificial Sequence: Synthetic oligonucleotide
gguccaacgcacucucacc

SEQ ID NO: 63854 - RNA, 19 nt, Artificial Sequence
  Description of Artificial Sequence: Synthetic oligonucleotide
ggcgucacacaugaagugc

SEQ ID NO: 63855 - RNA, 19 nt, Artificial Sequence
  Description of Artificial Sequence: Synthetic oligonucleotide
gaggaccauaauggagugc

SEQ ID NO: 63856 - RNA, 19 nt, Artificial Sequence
  Description of Artificial Sequence: Synthetic oligonucleotide
uguuugggccaagaacaau

SEQ ID NO: 63857 - RNA, 19 nt, Artificial Sequence
  Description of Artificial Sequence: Synthetic oligonucleotide
acacuuuagucagaauaua

SEQ ID NO: 63858 - RNA, 19 nt, Artificial Sequence
  Description of Artificial Sequence: Synthetic oligonucleotide
gacuacaguguucuaugau

SEQ ID NO: 63859 - RNA, 19 nt, Artificial Sequence
  Description of Artificial Sequence: Synthetic oligonucleotide
uccacucgacacagcaaua

SEQ ID NO: 63860 - RNA, 19 nt, Artificial Sequence
  Description of Artificial Sequence: Synthetic oligonucleotide
uggguagauugguauuguu

SEQ ID NO: 63861 - RNA, 19 nt, Artificial Sequence
  Description of Artificial Sequence: Synthetic oligonucleotide
acccgucucccaucacuuc

SEQ ID NO: 63862 - RNA, 19 nt, Artificial Sequence
  Description of Artificial Sequence: Synthetic oligonucleotide
cuccaacagaagaggcaug

SEQ ID NO: 63863 - RNA, 19 nt, Artificial Sequence
  Description of Artificial Sequence: Synthetic oligonucleotide
ugucugcaacugaugcgau

SEQ ID NO: 63864 - RNA, 19 nt, Artificial Sequence
  Description of Artificial Sequence: Synthetic oligonucleotide
ggacggcauaaauaaguca

SEQ ID NO: 63865 - RNA, 19 nt, Artificial Sequence
  Description of Artificial Sequence: Synthetic oligonucleotide
gguagugucuccacacaac

SEQ ID NO: 63866 - RNA, 19 nt, Artificial Sequence
  Description of Artificial Sequence: Synthetic oligonucleotide
uuuacgcagucaggcuuga

SEQ ID NO: 63867 - RNA, 19 nt, Artificial Sequence
  Description of Artificial Sequence: Synthetic oligonucleotide
gauuuccgagaggacaucu

SEQ ID NO: 63868 - RNA, 19 nt, Artificial Sequence
  Description of Artificial Sequence: Synthetic oligonucleotide
acuuggcgaacgacauugg

SEQ ID NO: 63869 - RNA, 19 nt, Artificial Sequence
  Description of Artificial Sequence: Synthetic oligonucleotide
acuugccgcaauuccugau

SEQ ID NO: 63870 - RNA, 19 nt, Artificial Sequence
  Description of Artificial Sequence: Synthetic oligonucleotide
ccgguauuuccagucaggg

SEQ ID NO: 63871 - RNA, 19 nt, Artificial Sequence
  Description of Artificial Sequence: Synthetic oligonucleotide
uaaccacgggaagguacug

SEQ ID NO: 63872 - RNA, 19 nt, Artificial Sequence
  Description of Artificial Sequence: Synthetic oligonucleotide
caccccaucguggaaauaa

SEQ ID NO: 63873 - RNA, 19 nt, Artificial Sequence
  Description of Artificial Sequence: Synthetic oligonucleotide
guuugggccaagaacaauu

SEQ ID NO: 63874 - RNA, 19 nt, Artificial Sequence
  Description of Artificial Sequence: Synthetic oligonucleotide
gucuguacuuggcgaacga

SEQ ID NO: 63875 - RNA, 19 nt, Artificial Sequence
  Description of Artificial Sequence: Synthetic oligonucleotide
caaccgucaucaucacuca

SEQ ID NO: 63876 - RNA, 19 nt, Artificial Sequence
  Description of Artificial Sequence: Synthetic oligonucleotide
cacucgacacagcaauaga

SEQ ID NO: 63877 - RNA, 19 nt, Artificial Sequence
  Description of Artificial Sequence: Synthetic oligonucleotide
agguacucgggaccccgga

SEQ ID NO: 63878 - RNA, 19 nt, Artificial Sequence
  Description of Artificial Sequence: Synthetic oligonucleotide
ccgagaggacaucugaauc

SEQ ID NO: 63879 - RNA, 19 nt, Artificial Sequence
  Description of Artificial Sequence: Synthetic oligonucleotide
accgaauauuuuggguaga

SEQ ID NO: 63880 - RNA, 19 nt, Artificial Sequence
  Description of Artificial Sequence: Synthetic oligonucleotide
ccuuccgcaauuauaccga

SEQ ID NO: 63881 - RNA, 19 nt, Artificial Sequence
  Description of Artificial Sequence: Synthetic oligonucleotide
aaccacggcaacaccuuuu

SEQ ID NO: 63882 - RNA, 19 nt, Artificial Sequence
  Description of Artificial Sequence: Synthetic oligonucleotide
ucgcaccccaucguggaaa

SEQ ID NO: 63883 - RNA, 19 nt, Artificial Sequence
  Description of Artificial Sequence: Synthetic oligonucleotide
cuucaacguuuacgcaguc

SEQ ID NO: 63884 - RNA, 19 nt, Artificial Sequence
  Description of Artificial Sequence: Synthetic oligonucleotide
gggacggcauaaauaaguc

SEQ ID NO: 63885 - RNA, 19 nt, Artificial Sequence
  Description of Artificial Sequence: Synthetic oligonucleotide
ccccauaaccacgggaagg

SEQ ID NO: 63886 - RNA, 19 nt, Artificial Sequence
  Description of Artificial Sequence: Synthetic oligonucleotide
ugguauuguuugggccaag

SEQ ID NO: 63887 - RNA, 19 nt, Artificial Sequence
  Description of Artificial Sequence: Synthetic oligonucleotide
cacggcaacaccuuuucuu

SEQ ID NO: 63888 - RNA, 19 nt, Artificial Sequence
  Description of Artificial Sequence: Synthetic oligonucleotide
agucaggguuuugaagcau

SEQ ID NO: 63889 - RNA, 19 nt, Artificial Sequence
  Description of Artificial Sequence: Synthetic oligonucleotide
gcgaacgacauuggccagg

SEQ ID NO: 63890 - RNA, 19 nt, Artificial Sequence
  Description of Artificial Sequence: Synthetic oligonucleotide
acggucuguguggacaaau

SEQ ID NO: 63891 - RNA, 19 nt, Artificial Sequence
  Description of Artificial Sequence: Synthetic oligonucleotide
guacucgggaccccggacu

SEQ ID NO: 63892 - RNA, 19 nt, Artificial Sequence
  Description of Artificial Sequence: Synthetic oligonucleotide
ugcuccggacugaguugug

SEQ ID NO: 63893 - RNA, 19 nt, Artificial Sequence
  Description of Artificial Sequence: Synthetic oligonucleotide
caaucacuucgagggcaag

SEQ ID NO: 63894 - RNA, 19 nt, Artificial Sequence
  Description of Artificial Sequence: Synthetic oligonucleotide
cuaagacacccgucuccca

SEQ ID NO: 63895 - RNA, 19 nt, Artificial Sequence
  Description of Artificial Sequence: Synthetic oligonucleotide
acguuuauuuggaguuagu

SEQ ID NO: 63896 - RNA, 19 nt, Artificial Sequence
  Description of Artificial Sequence: Synthetic oligonucleotide
gguacucgggaccccggac

SEQ ID NO: 63897 - RNA, 19 nt, Artificial Sequence
  Description of Artificial Sequence: Synthetic oligonucleotide
gguuaucuaaauaggggau

SEQ ID NO: 63898 - RNA, 19 nt, Artificial Sequence
  Description of Artificial Sequence: Synthetic oligonucleotide
cuuacacgagccucuuggu

SEQ ID NO: 63899 - RNA, 19 nt, Artificial Sequence
  Description of Artificial Sequence: Synthetic oligonucleotide
acggcauaaauaagucaua

SEQ ID NO: 63900 - RNA, 19 nt, Artificial Sequence
  Description of Artificial Sequence: Synthetic oligonucleotide
ggccccauaaccacgggaa

SEQ ID NO: 63901 - RNA, 19 nt, Artificial Sequence
  Description of Artificial Sequence: Synthetic oligonucleotide
caauauugguaugcuuucu

SEQ ID NO: 63902 - RNA, 19 nt, Artificial Sequence
  Description of Artificial Sequence: Synthetic oligonucleotide
ggcgaacgacauuggccag

SEQ ID NO: 63903 - RNA, 19 nt, Artificial Sequence
  Description of Artificial Sequence: Synthetic oligonucleotide
ggaccccggacucucgcac

SEQ ID NO: 63904 - RNA, 19 nt, Artificial Sequence
  Description of Artificial Sequence: Synthetic oligonucleotide
agucuuacacgagccucuu

SEQ ID NO: 63905 - RNA, 19 nt, Artificial Sequence
  Description of Artificial Sequence: Synthetic oligonucleotide
aggugguauuaaggccguc

SEQ ID NO: 63906 - RNA, 19 nt, Artificial Sequence
  Description of Artificial Sequence: Synthetic oligonucleotide
ugagggcgucacacaugaa

SEQ ID NO: 63907 - RNA, 19 nt, Artificial Sequence
  Description of Artificial Sequence: Synthetic oligonucleotide
cuugccgcaauuccugauu

SEQ ID NO: 63908 - RNA, 19 nt, Artificial Sequence
  Description of Artificial Sequence: Synthetic oligonucleotide
cagcguugcaggcugcaua

SEQ ID NO: 63909 - RNA, 19 nt, Artificial Sequence
  Description of Artificial Sequence: Synthetic oligonucleotide
gacacccgucucccaucac

SEQ ID NO: 63910 - RNA, 19 nt, Artificial Sequence
  Description of Artificial Sequence: Synthetic oligonucleotide
guacagaaagggcgguaau

SEQ ID NO: 63911 - RNA, 19 nt, Artificial Sequence
  Description of Artificial Sequence: Synthetic oligonucleotide
ggcugauacacucgauggu

SEQ ID NO: 63912 - RNA, 19 nt, Artificial Sequence
  Description of Artificial Sequence: Synthetic oligonucleotide
agcugacgcugcauauugu

SEQ ID NO: 63913 - RNA, 19 nt, Artificial Sequence
  Description of Artificial Sequence: Synthetic oligonucleotide
caaucaggucgcacagaua

SEQ ID NO: 63914 - RNA, 19 nt, Artificial Sequence
  Description of Artificial Sequence: Synthetic oligonucleotide
cccaucguggaaauaaaau

SEQ ID NO: 63915 - RNA, 19 nt, Artificial Sequence
  Description of Artificial Sequence: Synthetic oligonucleotide
cugcaacugaugcgaugga

SEQ ID NO: 63916 - RNA, 19 nt, Artificial Sequence
  Description of Artificial Sequence: Synthetic oligonucleotide
accccaucguggaaauaaa

SEQ ID NO: 63917 - RNA, 19 nt, Artificial Sequence
  Description of Artificial Sequence: Synthetic oligonucleotide
uggggcuuacaaggaccuc

SEQ ID NO: 63918 - RNA, 19 nt, Artificial Sequence
  Description of Artificial Sequence: Synthetic oligonucleotide
uuacgcagucaggcuugaa

SEQ ID NO: 63919 - RNA, 19 nt, Artificial Sequence
  Description of Artificial Sequence: Synthetic oligonucleotide
ccgugggucagaugagauc

SEQ ID NO: 63920 - RNA, 19 nt, Artificial Sequence
  Description of Artificial Sequence: Synthetic oligonucleotide
ggguagauugguauuguuu

SEQ ID NO: 63921 - RNA, 19 nt, Artificial Sequence
  Description of Artificial Sequence: Synthetic oligonucleotide
gcggcuccagaagaauggc

SEQ ID NO: 63922 - RNA, 19 nt, Artificial Sequence
  Description of Artificial Sequence: Synthetic oligonucleotide
gccauacgguccaacgcac

SEQ ID NO: 63923 - RNA, 19 nt, Artificial Sequence
  Description of Artificial Sequence: Synthetic oligonucleotide
ggauucggcagcugccacu

SEQ ID NO: 63924 - RNA, 19 nt, Artificial Sequence
  Description of Artificial Sequence: Synthetic oligonucleotide
cccggacucucgcacacuc

SEQ ID NO: 63925 - RNA, 19 nt, Artificial Sequence
  Description of Artificial Sequence: Synthetic oligonucleotide
gggcgguaauuaucuccac

SEQ ID NO: 63926 - RNA, 19 nt, Artificial Sequence
  Description of Artificial Sequence: Synthetic oligonucleotide
guagccugacccacagcgu

SEQ ID NO: 63927 - RNA, 19 nt, Artificial Sequence
  Description of Artificial Sequence: Synthetic oligonucleotide
cauaugccgcggcuugccu

SEQ ID NO: 63928 - RNA, 19 nt, Artificial Sequence
  Description of Artificial Sequence: Synthetic oligonucleotide
guacuuggcgaacgacauu

SEQ ID NO: 63929 - RNA, 19 nt, Artificial Sequence
  Description of Artificial Sequence: Synthetic oligonucleotide
ccccaucguggaaauaaaa

SEQ ID NO: 63930 - RNA, 19 nt, Artificial Sequence
  Description of Artificial Sequence: Synthetic oligonucleotide
cacccgucucccaucacuu

SEQ ID NO: 63931 - RNA, 19 nt, Artificial Sequence
  Description of Artificial Sequence: Synthetic oligonucleotide
gggaccccggacucucgca

SEQ ID NO: 63932 - RNA, 19 nt, Artificial Sequence
  Description of Artificial Sequence: Synthetic oligonucleotide
cucgcaccccaucguggaa

SEQ ID NO: 63933 - RNA, 19 nt, Artificial Sequence
  Description of Artificial Sequence: Synthetic oligonucleotide
gccuuggucuuccaugguu

SEQ ID NO: 63934 - RNA, 19 nt, Artificial Sequence
  Description of Artificial Sequence: Synthetic oligonucleotide
ccacagcguugcaggcugc

SEQ ID NO: 63935 - RNA, 19 nt, Artificial Sequence
  Description of Artificial Sequence: Synthetic oligonucleotide
cccaugcugagaucaugua

SEQ ID NO: 63936 - RNA, 19 nt, Artificial Sequence
  Description of Artificial Sequence: Synthetic oligonucleotide
gcggcuugccugacuucug

SEQ ID NO: 63937 - RNA, 19 nt, Artificial Sequence
  Description of Artificial Sequence: Synthetic oligonucleotide
gcauauuguugaggguagu

SEQ ID NO: 63938 - RNA, 19 nt, Artificial Sequence
  Description of Artificial Sequence: Synthetic oligonucleotide
ccgcaauuauaccgaauau

SEQ ID NO: 63939 - RNA, 19 nt, Artificial Sequence
  Description of Artificial Sequence: Synthetic oligonucleotide
cguuuacgcagucaggcuu

SEQ ID NO: 63940 - RNA, 19 nt, Artificial Sequence
  Description of Artificial Sequence: Synthetic oligonucleotide
ggcuccgugccgauagccu

SEQ ID NO: 63941 - RNA, 19 nt, Artificial Sequence
  Description of Artificial Sequence: Synthetic oligonucleotide
cucgcggcuccagaagaau

SEQ ID NO: 63942 - RNA, 19 nt, Artificial Sequence
  Description of Artificial Sequence: Synthetic oligonucleotide
gccgacggccaggccaaug

SEQ ID NO: 63943 - RNA, 19 nt, Artificial Sequence
  Description of Artificial Sequence: Synthetic oligonucleotide
ccgaauauuuuggguagau

SEQ ID NO: 63944 - RNA, 19 nt, Artificial Sequence
  Description of Artificial Sequence: Synthetic oligonucleotide
ccauacgguccaacgcacu

SEQ ID NO: 63945 - RNA, 19 nt, Artificial Sequence
  Description of Artificial Sequence: Synthetic oligonucleotide
ccggacugaguugugcuau

SEQ ID NO: 63946 - RNA, 19 nt, Artificial Sequence
  Description of Artificial Sequence: Synthetic oligonucleotide
ugccgacggccaggccaau

SEQ ID NO: 63947 - RNA, 19 nt, Artificial Sequence
  Description of Artificial Sequence: Synthetic oligonucleotide
gccguccaucaggcagagu

SEQ ID NO: 63948 - RNA, 19 nt, Artificial Sequence
  Description of Artificial Sequence: Synthetic oligonucleotide
ccccggacucucgcacacu

SEQ ID NO: 63949 - RNA, 19 nt, Artificial Sequence
  Description of Artificial Sequence: Synthetic oligonucleotide
ccgugccgauagccuugau

SEQ ID NO: 63950 - RNA, 19 nt, Artificial Sequence
  Description of Artificial Sequence: Synthetic oligonucleotide
acuaauacuaaauucaacc

SEQ ID NO: 63951 - RNA, 19 nt, Artificial Sequence
  Description of Artificial Sequence: Synthetic oligonucleotide
ugaaauguaaucaaacucg

SEQ ID NO: 63952 - RNA, 19 nt, Artificial Sequence
  Description of Artificial Sequence: Synthetic oligonucleotide
aaauugauacuauaaggcg

SEQ ID NO: 63953 - RNA, 19 nt, Artificial Sequence
  Description of Artificial Sequence: Synthetic oligonucleotide
uaaauugauacuauaaggc

SEQ ID NO: 63954 - RNA, 19 nt, Artificial Sequence
  Description of Artificial Sequence: Synthetic oligonucleotide
aaagcauaauguuacgagc

SEQ ID NO: 63955 - RNA, 19 nt, Artificial Sequence
  Description of Artificial Sequence: Synthetic oligonucleotide
uaaguugugaggaacagcg

SEQ ID NO: 63956 - RNA, 19 nt, Artificial Sequence
  Description of Artificial Sequence: Synthetic oligonucleotide
aaacugaucuuucacacac

SEQ ID NO: 63957 - RNA, 19 nt, Artificial Sequence
  Description of Artificial Sequence: Synthetic oligonucleotide
agaauuacgaccuaaaagu

SEQ ID NO: 63958 - RNA, 19 nt, Artificial Sequence
  Description of Artificial Sequence: Synthetic oligonucleotide
aauaaagccaaacgccucc

SEQ ID NO: 63959 - RNA, 19 nt, Artificial Sequence
  Description of Artificial Sequence: Synthetic oligonucleotide
uuauuguuaucaauuacgg

SEQ ID NO: 63960 - RNA, 19 nt, Artificial Sequence
  Description of Artificial Sequence: Synthetic oligonucleotide
ucuaaaagcauaauguuac

SEQ ID NO: 63961 - RNA, 19 nt, Artificial Sequence
  Description of Artificial Sequence: Synthetic oligonucleotide
aauugauacuauaaggcgc

SEQ ID NO: 63962 - RNA, 19 nt, Artificial Sequence
  Description of Artificial Sequence: Synthetic oligonucleotide
guauauacugaauagagug

SEQ ID NO: 63963 - RNA, 19 nt, Artificial Sequence
  Description of Artificial Sequence: Synthetic oligonucleotide
uuugauagaacuucuaugu

SEQ ID NO: 63964 - RNA, 19 nt, Artificial Sequence
  Description of Artificial Sequence: Synthetic oligonucleotide
uuugcaauuaccaguugcg

SEQ ID NO: 63965 - RNA, 19 nt, Artificial Sequence
  Description of Artificial Sequence: Synthetic oligonucleotide
augaagguagaguauauac

SEQ ID NO: 63966 - RNA, 19 nt, Artificial Sequence
  Description of Artificial Sequence: Synthetic oligonucleotide
acuuuaccagaauagaugg

SEQ ID NO: 63967 - RNA, 19 nt, Artificial Sequence
  Description of Artificial Sequence: Synthetic oligonucleotide
auauguuuaaauuaucaca

SEQ ID NO: 63968 - RNA, 19 nt, Artificial Sequence
  Description of Artificial Sequence: Synthetic oligonucleotide
aaacauaacacgaggaagg

SEQ ID NO: 63969 - RNA, 19 nt, Artificial Sequence
  Description of Artificial Sequence: Synthetic oligonucleotide
aaauggauacacuucaccu

SEQ ID NO: 63970 - RNA, 19 nt, Artificial Sequence
  Description of Artificial Sequence: Synthetic oligonucleotide
aauaacacccauuucucug

SEQ ID NO: 63971 - RNA, 19 nt, Artificial Sequence
  Description of Artificial Sequence: Synthetic oligonucleotide
aaauguucaaugcuaauau

SEQ ID NO: 63972 - RNA, 19 nt, Artificial Sequence
  Description of Artificial Sequence: Synthetic oligonucleotide
uuuuaauccuaauagcaug

SEQ ID NO: 63973 - RNA, 19 nt, Artificial Sequence
  Description of Artificial Sequence: Synthetic oligonucleotide
uuuaaacauaacacgagga

SEQ ID NO: 63974 - RNA, 19 nt, Artificial Sequence
  Description of Artificial Sequence: Synthetic oligonucleotide
aucaauuacgggcagcugg

SEQ ID NO: 63975 - RNA, 19 nt, Artificial Sequence
  Description of Artificial Sequence: Synthetic oligonucleotide
uuuaggauuugaaaaggug

SEQ ID NO: 63976 - RNA, 19 nt, Artificial Sequence
  Description of Artificial Sequence: Synthetic oligonucleotide
aaucguuugcuauauaaau

SEQ ID NO: 63977 - RNA, 19 nt, Artificial Sequence
  Description of Artificial Sequence: Synthetic oligonucleotide
ugauagaacuucuauguug

SEQ ID NO: 63978 - RNA, 19 nt, Artificial Sequence
  Description of Artificial Sequence: Synthetic oligonucleotide
uuuaauccuaauagcauga

SEQ ID NO: 63979 - RNA, 19 nt, Artificial Sequence
  Description of Artificial Sequence: Synthetic oligonucleotide
ugacgaagaaccauuagac

SEQ ID NO: 63980 - RNA, 19 nt, Artificial Sequence
  Description of Artificial Sequence: Synthetic oligonucleotide
aaacauuacaggcacugca

SEQ ID NO: 63981 - RNA, 19 nt, Artificial Sequence
  Description of Artificial Sequence: Synthetic oligonucleotide
aaacucguuaaguggauug

SEQ ID NO: 63982 - RNA, 19 nt, Artificial Sequence
  Description of Artificial Sequence: Synthetic oligonucleotide
uauuaaaccuaacaugguc

SEQ ID NO: 63983 - RNA, 19 nt, Artificial Sequence
  Description of Artificial Sequence: Synthetic oligonucleotide
agaacauacgagcaucacg

SEQ ID NO: 63984 - RNA, 19 nt, Artificial Sequence
  Description of Artificial Sequence: Synthetic oligonucleotide
aauguuacgagcaacuuaa

SEQ ID NO: 63985 - RNA, 19 nt, Artificial Sequence
  Description of Artificial Sequence: Synthetic oligonucleotide
ucuguguuggaucaacacc

SEQ ID NO: 63986 - RNA, 19 nt, Artificial Sequence
  Description of Artificial Sequence: Synthetic oligonucleotide
aaaugacuguuccuugagg

SEQ ID NO: 63987 - RNA, 19 nt, Artificial Sequence
  Description of Artificial Sequence: Synthetic oligonucleotide
uucuaauuugucacgccgg

SEQ ID NO: 63988 - RNA, 19 nt, Artificial Sequence
  Description of Artificial Sequence: Synthetic oligonucleotide
acgaagaaccauuagacga

SEQ ID NO: 63989 - RNA, 19 nt, Artificial Sequence
  Description of Artificial Sequence: Synthetic oligonucleotide
ugguuuuaggauuugaaaa

SEQ ID NO: 63990 - RNA, 19 nt, Artificial Sequence
  Description of Artificial Sequence: Synthetic oligonucleotide
uuuggggccaauucaagag

SEQ ID NO: 63991 - RNA, 19 nt, Artificial Sequence
  Description of Artificial Sequence: Synthetic oligonucleotide
acuucauaguuaauaaagc

SEQ ID NO: 63992 - RNA, 19 nt, Artificial Sequence
  Description of Artificial Sequence: Synthetic oligonucleotide
agcauaaugaacaggaaag

SEQ ID NO: 63993 - RNA, 19 nt, Artificial Sequence
  Description of Artificial Sequence: Synthetic oligonucleotide
gauacuauaaggcgccacc

SEQ ID NO: 63994 - RNA, 19 nt, Artificial Sequence
  Description of Artificial Sequence: Synthetic oligonucleotide
ugaaauguauuugauagaa

SEQ ID NO: 63995 - RNA, 19 nt, Artificial Sequence
  Description of Artificial Sequence: Synthetic oligonucleotide
uuguuaucaauuacgggca

SEQ ID NO: 63996 - RNA, 19 nt, Artificial Sequence
  Description of Artificial Sequence: Synthetic oligonucleotide
aauaaauccguaagagguc

SEQ ID NO: 63997 - RNA, 19 nt, Artificial Sequence
  Description of Artificial Sequence: Synthetic oligonucleotide
uagaauaaguauuccaggu

SEQ ID NO: 63998 - RNA, 19 nt, Artificial Sequence
  Description of Artificial Sequence: Synthetic oligonucleotide
uguaauagcucaauagaau

SEQ ID NO: 63999 - RNA, 19 nt, Artificial Sequence
  Description of Artificial Sequence: Synthetic oligonucleotide
aaaccuaacauggucaccu

SEQ ID NO: 64000 - RNA, 19 nt, Artificial Sequence
  Description of Artificial Sequence: Synthetic oligonucleotide
ugauuaagaaucacugaga

SEQ ID NO: 64001 - RNA, 19 nt, Artificial Sequence
  Description of Artificial Sequence: Synthetic oligonucleotide
uuuuacaacaucaccucgu

SEQ ID NO: 64002 - RNA, 19 nt, Artificial Sequence
  Description of Artificial Sequence: Synthetic oligonucleotide
auuuaauagcaauagguuu

SEQ ID NO: 64003 - RNA, 19 nt, Artificial Sequence
  Description of Artificial Sequence: Synthetic oligonucleotide
uaccaguugcguuaaaugc

SEQ ID NO: 64004 - RNA, 19 nt, Artificial Sequence
  Description of Artificial Sequence: Synthetic oligonucleotide
gacgaagaaccauuagacg

SEQ ID NO: 64005 - RNA, 19 nt, Artificial Sequence
  Description of Artificial Sequence: Synthetic oligonucleotide
agugcgcugauuaagaauc

SEQ ID NO: 64006 - RNA, 19 nt, Artificial Sequence
  Description of Artificial Sequence: Synthetic oligonucleotide
aguggaauuugcaauuacc

SEQ ID NO: 64007 - RNA, 19 nt, Artificial Sequence
  Description of Artificial Sequence: Synthetic oligonucleotide
auucauucguucuucagga

SEQ ID NO: 64008 - RNA, 19 nt, Artificial Sequence
  Description of Artificial Sequence: Synthetic oligonucleotide
aaucccauugaguuaucug

SEQ ID NO: 64009 - RNA, 19 nt, Artificial Sequence
  Description of Artificial Sequence: Synthetic oligonucleotide
ucauucguucuucaggaug

SEQ ID NO: 64010 - RNA, 19 nt, Artificial Sequence
  Description of Artificial Sequence: Synthetic oligonucleotide
auuacgaccuaaaagucuc

SEQ ID NO: 64011 - RNA, 19 nt, Artificial Sequence
  Description of Artificial Sequence: Synthetic oligonucleotide
ucaacuuaagaaaaucguu

SEQ ID NO: 64012 - RNA, 19 nt, Artificial Sequence
  Description of Artificial Sequence: Synthetic oligonucleotide
uuaccaguugcguuaaaug

SEQ ID NO: 64013 - RNA, 19 nt, Artificial Sequence
  Description of Artificial Sequence: Synthetic oligonucleotide
agcucaauagaauaaguau

SEQ ID NO: 64014 - RNA, 19 nt, Artificial Sequence
  Description of Artificial Sequence: Synthetic oligonucleotide
uuagugaacugaaauguau

SEQ ID NO: 64015 - RNA, 19 nt, Artificial Sequence
  Description of Artificial Sequence: Synthetic oligonucleotide
uaguggauuaaugaugugc

SEQ ID NO: 64016 - RNA, 19 nt, Artificial Sequence
  Description of Artificial Sequence: Synthetic oligonucleotide
agucaacuuugauucgucc

SEQ ID NO: 64017 - RNA, 19 nt, Artificial Sequence
  Description of Artificial Sequence: Synthetic oligonucleotide
uaauagcucaauagaauaa

SEQ ID NO: 64018 - RNA, 19 nt, Artificial Sequence
  Description of Artificial Sequence: Synthetic oligonucleotide
ucaagcgauugaccaaucg

SEQ ID NO: 64019 - RNA, 19 nt, Artificial Sequence
  Description of Artificial Sequence: Synthetic oligonucleotide
auuauauugugaacagugg

SEQ ID NO: 64020 - RNA, 19 nt, Artificial Sequence
  Description of Artificial Sequence: Synthetic oligonucleotide
ucguuugcuauauaaauuu

SEQ ID NO: 64021 - RNA, 19 nt, Artificial Sequence
  Description of Artificial Sequence: Synthetic oligonucleotide
acucaaucuguguuggauc

SEQ ID NO: 64022 - RNA, 19 nt, Artificial Sequence
  Description of Artificial Sequence: Synthetic oligonucleotide
aggacgaaugacuuuacca

SEQ ID NO: 64023 - RNA, 19 nt, Artificial Sequence
  Description of Artificial Sequence: Synthetic oligonucleotide
cauugaguuaucugguccc

SEQ ID NO: 64024 - RNA, 19 nt, Artificial Sequence
  Description of Artificial Sequence: Synthetic oligonucleotide
uacucucuaaguugugagg

SEQ ID NO: 64025 - RNA, 19 nt, Artificial Sequence
  Description of Artificial Sequence: Synthetic oligonucleotide
uaguaaaguuauuuacccc

SEQ ID NO: 64026 - RNA, 19 nt, Artificial Sequence
  Description of Artificial Sequence: Synthetic oligonucleotide
ucccgugauacaaaguuga

SEQ ID NO: 64027 - RNA, 19 nt, Artificial Sequence
  Description of Artificial Sequence: Synthetic oligonucleotide
agcgcuuguccauucauuc

SEQ ID NO: 64028 - RNA, 19 nt, Artificial Sequence
  Description of Artificial Sequence: Synthetic oligonucleotide
aagcauaauguuacgagca

SEQ ID NO: 64029 - RNA, 19 nt, Artificial Sequence
  Description of Artificial Sequence: Synthetic oligonucleotide
uacuaauuguaguaaaguu

SEQ ID NO: 64030 - RNA, 19 nt, Artificial Sequence
  Description of Artificial Sequence: Synthetic oligonucleotide
uaccagaauagaugguggg

SEQ ID NO: 64031 - RNA, 19 nt, Artificial Sequence
  Description of Artificial Sequence: Synthetic oligonucleotide
cuguauucaaccauaucuc

SEQ ID NO: 64032 - RNA, 19 nt, Artificial Sequence
  Description of Artificial Sequence: Synthetic oligonucleotide
aaauccguaagaggucaac

SEQ ID NO: 64033 - RNA, 19 nt, Artificial Sequence
  Description of Artificial Sequence: Synthetic oligonucleotide
ucaauuacgggcagcugga

SEQ ID NO: 64034 - RNA, 19 nt, Artificial Sequence
  Description of Artificial Sequence: Synthetic oligonucleotide
acauacgagcaucacgauc

SEQ ID NO: 64035 - RNA, 19 nt, Artificial Sequence
  Description of Artificial Sequence: Synthetic oligonucleotide
aaucgaucaggucgaggag

SEQ ID NO: 64036 - RNA, 19 nt, Artificial Sequence
  Description of Artificial Sequence: Synthetic oligonucleotide
ugacuuuaccagaauagau

SEQ ID NO: 64037 - RNA, 19 nt, Artificial Sequence
  Description of Artificial Sequence: Synthetic oligonucleotide
gaccauaguggauuaauga

SEQ ID NO: 64038 - RNA, 19 nt, Artificial Sequence
  Description of Artificial Sequence: Synthetic oligonucleotide
gauugaccaaucgaucagg

SEQ ID NO: 64039 - RNA, 19 nt, Artificial Sequence
  Description of Artificial Sequence: Synthetic oligonucleotide
ucaaccuuaucuccuauuu

SEQ ID NO: 64040 - RNA, 19 nt, Artificial Sequence
  Description of Artificial Sequence: Synthetic oligonucleotide
ugaccauaguggauuaaug

SEQ ID NO: 64041 - RNA, 19 nt, Artificial Sequence
  Description of Artificial Sequence: Synthetic oligonucleotide
uaaggcgccaccuuaaguu

SEQ ID NO: 64042 - RNA, 19 nt, Artificial Sequence
  Description of Artificial Sequence: Synthetic oligonucleotide
uacccagagaucaaauacu

SEQ ID NO: 64043 - RNA, 19 nt, Artificial Sequence
  Description of Artificial Sequence: Synthetic oligonucleotide
aauuaucacacugcuggca

SEQ ID NO: 64044 - RNA, 19 nt, Artificial Sequence
  Description of Artificial Sequence: Synthetic oligonucleotide
ucaaacgacaacggggaag

SEQ ID NO: 64045 - RNA, 19 nt, Artificial Sequence
  Description of Artificial Sequence: Synthetic oligonucleotide
cuucauaugguccucagaa

SEQ ID NO: 64046 - RNA, 19 nt, Artificial Sequence
  Description of Artificial Sequence: Synthetic oligonucleotide
ccuaaauugauacuauaag

SEQ ID NO: 64047 - RNA, 19 nt, Artificial Sequence
  Description of Artificial Sequence: Synthetic oligonucleotide
guaauagcucaauagaaua

SEQ ID NO: 64048 - RNA, 19 nt, Artificial Sequence
  Description of Artificial Sequence: Synthetic oligonucleotide
uguaacucaaugccauccu

SEQ ID NO: 64049 - RNA, 19 nt, Artificial Sequence
  Description of Artificial Sequence: Synthetic oligonucleotide
acaacggggaagaugaaag

SEQ ID NO: 64050 - RNA, 19 nt, Artificial Sequence
  Description of Artificial Sequence: Synthetic oligonucleotide
accauaguggauuaaugau

SEQ ID NO: 64051 - RNA, 19 nt, Artificial Sequence
  Description of Artificial Sequence: Synthetic oligonucleotide
aagugccuauauucaacag

SEQ ID NO: 64052 - RNA, 19 nt, Artificial Sequence
  Description of Artificial Sequence: Synthetic oligonucleotide
ugcucguucuaauuuguca

SEQ ID NO: 64053 - RNA, 19 nt, Artificial Sequence
  Description of Artificial Sequence: Synthetic oligonucleotide
caaucgaucaggucgagga

SEQ ID NO: 64054 - RNA, 19 nt, Artificial Sequence
  Description of Artificial Sequence: Synthetic oligonucleotide
auuacgggcagcuggagau

SEQ ID NO: 64055 - RNA, 19 nt, Artificial Sequence
  Description of Artificial Sequence: Synthetic oligonucleotide
aauuacgggcagcuggaga

SEQ ID NO: 64056 - RNA, 19 nt, Artificial Sequence
  Description of Artificial Sequence: Synthetic oligonucleotide
aaccauuagacgaggagca

SEQ ID NO: 64057 - RNA, 19 nt, Artificial Sequence
  Description of Artificial Sequence: Synthetic oligonucleotide
uagcucaauagaauaagua

SEQ ID NO: 64058 - RNA, 19 nt, Artificial Sequence
  Description of Artificial Sequence: Synthetic oligonucleotide
uguaagguuucuaggucac

SEQ ID NO: 64059 - RNA, 19 nt, Artificial Sequence
  Description of Artificial Sequence: Synthetic oligonucleotide
guuaaguggauugugacaa

SEQ ID NO: 64060 - RNA, 19 nt, Artificial Sequence
  Description of Artificial Sequence: Synthetic oligonucleotide
uacgagcaacuuaacagca

SEQ ID NO: 64061 - RNA, 19 nt, Artificial Sequence
  Description of Artificial Sequence: Synthetic oligonucleotide
gaaaagucuagcuugccgu

SEQ ID NO: 64062 - RNA, 19 nt, Artificial Sequence
  Description of Artificial Sequence: Synthetic oligonucleotide
aguugcguuaaaugcacca

SEQ ID NO: 64063 - RNA, 19 nt, Artificial Sequence
  Description of Artificial Sequence: Synthetic oligonucleotide
uauaaggcgccaccuuaag

SEQ ID NO: 64064 - RNA, 19 nt, Artificial Sequence
  Description of Artificial Sequence: Synthetic oligonucleotide
cauaacacgaggaaggugu

SEQ ID NO: 64065 - RNA, 19 nt, Artificial Sequence
  Description of Artificial Sequence: Synthetic oligonucleotide
aaaccgugcccuugggaag

SEQ ID NO: 64066 - RNA, 19 nt, Artificial Sequence
  Description of Artificial Sequence: Synthetic oligonucleotide
uccguaagaggucaacagu

SEQ ID NO: 64067 - RNA, 19 nt, Artificial Sequence
  Description of Artificial Sequence: Synthetic oligonucleotide
aauuugucacgccggucug

SEQ ID NO: 64068 - RNA, 19 nt, Artificial Sequence
  Description of Artificial Sequence: Synthetic oligonucleotide
uccuauuugaggagaagua

SEQ ID NO: 64069 - RNA, 19 nt, Artificial Sequence
  Description of Artificial Sequence: Synthetic oligonucleotide
ugguacucaaucuguguug

SEQ ID NO: 64070 - RNA, 19 nt, Artificial Sequence
  Description of Artificial Sequence: Synthetic oligonucleotide
uagacgaggagcacuggca

SEQ ID NO: 64071 - RNA, 19 nt, Artificial Sequence
  Description of Artificial Sequence: Synthetic oligonucleotide
ucguuaaguggauugugac

SEQ ID NO: 64072 - RNA, 19 nt, Artificial Sequence
  Description of Artificial Sequence: Synthetic oligonucleotide
ggugugauuagucaaugac

SEQ ID NO: 64073 - RNA, 19 nt, Artificial Sequence
  Description of Artificial Sequence: Synthetic oligonucleotide
uccuuaucaugauuagcug

SEQ ID NO: 64074 - RNA, 19 nt, Artificial Sequence
  Description of Artificial Sequence: Synthetic oligonucleotide
aacucacuauaauggaaaa

SEQ ID NO: 64075 - RNA, 19 nt, Artificial Sequence
  Description of Artificial Sequence: Synthetic oligonucleotide
aagaggacgaaugacuuua

SEQ ID NO: 64076 - RNA, 19 nt, Artificial Sequence
  Description of Artificial Sequence: Synthetic oligonucleotide
auaaauccguaagagguca

SEQ ID NO: 64077 - RNA, 19 nt, Artificial Sequence
  Description of Artificial Sequence: Synthetic oligonucleotide
aaagucuagcuugccguuc

SEQ ID NO: 64078 - RNA, 19 nt, Artificial Sequence
  Description of Artificial Sequence: Synthetic oligonucleotide
uaucaugauuagcuguuuc

SEQ ID NO: 64079 - RNA, 19 nt, Artificial Sequence
  Description of Artificial Sequence: Synthetic oligonucleotide
acgacaacggggaagauga

SEQ ID NO: 64080 - RNA, 19 nt, Artificial Sequence
  Description of Artificial Sequence: Synthetic oligonucleotide
uguuuggggccaauucaag

SEQ ID NO: 64081 - RNA, 19 nt, Artificial Sequence
  Description of Artificial Sequence: Synthetic oligonucleotide
aauccguaagaggucaaca

SEQ ID NO: 64082 - RNA, 19 nt, Artificial Sequence
  Description of Artificial Sequence: Synthetic oligonucleotide
uuugauucguccuggcaau

SEQ ID NO: 64083 - RNA, 19 nt, Artificial Sequence
  Description of Artificial Sequence: Synthetic oligonucleotide
cuaaaagucucacacaagu

SEQ ID NO: 64084 - RNA, 19 nt, Artificial Sequence
  Description of Artificial Sequence: Synthetic oligonucleotide
uaacauggucaccuuccag

SEQ ID NO: 64085 - RNA, 19 nt, Artificial Sequence
  Description of Artificial Sequence: Synthetic oligonucleotide
ugcguuaaaugcaccaaau

SEQ ID NO: 64086 - RNA, 19 nt, Artificial Sequence
  Description of Artificial Sequence: Synthetic oligonucleotide
acgagcaucacgauccacg

SEQ ID NO: 64087 - RNA, 19 nt, Artificial Sequence
  Description of Artificial Sequence: Synthetic oligonucleotide
aacauaacacgaggaaggu

SEQ ID NO: 64088 - RNA, 19 nt, Artificial Sequence
  Description of Artificial Sequence: Synthetic oligonucleotide
uucccgugauacaaaguug

SEQ ID NO: 64089 - RNA, 19 nt, Artificial Sequence
  Description of Artificial Sequence: Synthetic oligonucleotide
agacucgccaaacauuaca

SEQ ID NO: 64090 - RNA, 19 nt, Artificial Sequence
  Description of Artificial Sequence: Synthetic oligonucleotide
uuggaucaacaccucuaag

SEQ ID NO: 64091 - RNA, 19 nt, Artificial Sequence
  Description of Artificial Sequence: Synthetic oligonucleotide
uggcuugaaaagcaauagu

SEQ ID NO: 64092 - RNA, 19 nt, Artificial Sequence
  Description of Artificial Sequence: Synthetic oligonucleotide
agguagaguauauacugaa

SEQ ID NO: 64093 - RNA, 19 nt, Artificial Sequence
  Description of Artificial Sequence: Synthetic oligonucleotide
augaaagcgcccuccccac

SEQ ID NO: 64094 - RNA, 19 nt, Artificial Sequence
  Description of Artificial Sequence: Synthetic oligonucleotide
cuaauacuaaauucaaccu

SEQ ID NO: 64095 - RNA, 19 nt, Artificial Sequence
  Description of Artificial Sequence: Synthetic oligonucleotide
guucaaugcuaauaucuuc

SEQ ID NO: 64096 - RNA, 19 nt, Artificial Sequence
  Description of Artificial Sequence: Synthetic oligonucleotide
cugacgaagaaccauuaga

SEQ ID NO: 64097 - RNA, 19 nt, Artificial Sequence
  Description of Artificial Sequence: Synthetic oligonucleotide
uauguugguugcucguucu

SEQ ID NO: 64098 - RNA, 19 nt, Artificial Sequence
  Description of Artificial Sequence: Synthetic oligonucleotide
aguauauacugaauagagu

SEQ ID NO: 64099 - RNA, 19 nt, Artificial Sequence
  Description of Artificial Sequence: Synthetic oligonucleotide
uugcguuaaaugcaccaaa

SEQ ID NO: 64100 - RNA, 19 nt, Artificial Sequence
  Description of Artificial Sequence: Synthetic oligonucleotide
acucucuaaguugugagga

SEQ ID NO: 64101 - RNA, 19 nt, Artificial Sequence
  Description of Artificial Sequence: Synthetic oligonucleotide
uuaaguggauugugacaag

SEQ ID NO: 64102 - RNA, 19 nt, Artificial Sequence
  Description of Artificial Sequence: Synthetic oligonucleotide
cauaguggauuaaugaugu

SEQ ID NO: 64103 - RNA, 19 nt, Artificial Sequence
  Description of Artificial Sequence: Synthetic oligonucleotide
gaaucacugagaauuccac

SEQ ID NO: 64104 - RNA, 19 nt, Artificial Sequence
  Description of Artificial Sequence: Synthetic oligonucleotide
accucuaagaggacgaaug

SEQ ID NO: 64105 - RNA, 19 nt, Artificial Sequence
  Description of Artificial Sequence: Synthetic oligonucleotide
gaauuacgaccuaaaaguc

SEQ ID NO: 64106 - RNA, 19 nt, Artificial Sequence
  Description of Artificial Sequence: Synthetic oligonucleotide
guggaauuugcaauuacca

SEQ ID NO: 64107 - RNA, 19 nt, Artificial Sequence
  Description of Artificial Sequence: Synthetic oligonucleotide
gaauagauggugggauuag

SEQ ID NO: 64108 - RNA, 19 nt, Artificial Sequence
  Description of Artificial Sequence: Synthetic oligonucleotide
aacauuacaggcacugcau

SEQ ID NO: 64109 - RNA, 19 nt, Artificial Sequence
  Description of Artificial Sequence: Synthetic oligonucleotide
cccaucuagaauuucacug

SEQ ID NO: 64110 - RNA, 19 nt, Artificial Sequence
  Description of Artificial Sequence: Synthetic oligonucleotide
ucucuaaguugugaggaac

SEQ ID NO: 64111 - RNA, 19 nt, Artificial Sequence
  Description of Artificial Sequence: Synthetic oligonucleotide
ggugugauauuguaggcca

SEQ ID NO: 64112 - RNA, 19 nt, Artificial Sequence
  Description of Artificial Sequence: Synthetic oligonucleotide
aguggauugugacaagauu

SEQ ID NO: 64113 - RNA, 19 nt, Artificial Sequence
  Description of Artificial Sequence: Synthetic oligonucleotide
uugauagaacuucuauguu

SEQ ID NO: 64114 - RNA, 19 nt, Artificial Sequence
  Description of Artificial Sequence: Synthetic oligonucleotide
ccuaacauggucaccuucc

SEQ ID NO: 64115 - RNA, 19 nt, Artificial Sequence
  Description of Artificial Sequence: Synthetic oligonucleotide
ugccuguaacucaaugcca

SEQ ID NO: 64116 - RNA, 19 nt, Artificial Sequence
  Description of Artificial Sequence: Synthetic oligonucleotide
ugaaaccgugcccuuggga

SEQ ID NO: 64117 - RNA, 19 nt, Artificial Sequence
  Description of Artificial Sequence: Synthetic oligonucleotide
aacucguuaaguggauugu

SEQ ID NO: 64118 - RNA, 19 nt, Artificial Sequence
  Description of Artificial Sequence: Synthetic oligonucleotide
uucguccuggcaauggauc

SEQ ID NO: 64119 - RNA, 19 nt, Artificial Sequence
  Description of Artificial Sequence: Synthetic oligonucleotide
cuaaguugugaggaacagc

SEQ ID NO: 64120 - RNA, 19 nt, Artificial Sequence
  Description of Artificial Sequence: Synthetic oligonucleotide
ccauaguggauuaaugaug

SEQ ID NO: 64121 - RNA, 19 nt, Artificial Sequence
  Description of Artificial Sequence: Synthetic oligonucleotide
gaggacgaaugacuuuacc

SEQ ID NO: 64122 - RNA, 19 nt, Artificial Sequence
  Description of Artificial Sequence: Synthetic oligonucleotide
uacucaaucuguguuggau

SEQ ID NO: 64123 - RNA, 19 nt, Artificial Sequence
  Description of Artificial Sequence: Synthetic oligonucleotide
gugugauuagucaaugaca

SEQ ID NO: 64124 - RNA, 19 nt, Artificial Sequence
  Description of Artificial Sequence: Synthetic oligonucleotide
auagauggugggauuagcu

SEQ ID NO: 64125 - RNA, 19 nt, Artificial Sequence
  Description of Artificial Sequence: Synthetic oligonucleotide
uugaccauaguggauuaau

SEQ ID NO: 64126 - RNA, 19 nt, Artificial Sequence
  Description of Artificial Sequence: Synthetic oligonucleotide
caagcgauugaccaaucga

SEQ ID NO: 64127 - RNA, 19 nt, Artificial Sequence
  Description of Artificial Sequence: Synthetic oligonucleotide
agagcauaucaggaaccac

SEQ ID NO: 64128 - RNA, 19 nt, Artificial Sequence
  Description of Artificial Sequence: Synthetic oligonucleotide
uucauaugguccucagaau

SEQ ID NO: 64129 - RNA, 19 nt, Artificial Sequence
  Description of Artificial Sequence: Synthetic oligonucleotide
agcuccuaaauugauacua

SEQ ID NO: 64130 - RNA, 19 nt, Artificial Sequence
  Description of Artificial Sequence: Synthetic oligonucleotide
auuaccaguugcguuaaau

SEQ ID NO: 64131 - RNA, 19 nt, Artificial Sequence
  Description of Artificial Sequence: Synthetic oligonucleotide
auaaggcgccaccuuaagu

SEQ ID NO: 64132 - RNA, 19 nt, Artificial Sequence
  Description of Artificial Sequence: Synthetic oligonucleotide
uaaaccuaacauggucacc

SEQ ID NO: 64133 - RNA, 19 nt, Artificial Sequence
  Description of Artificial Sequence: Synthetic oligonucleotide
ccuuuauuugggcuugugg

SEQ ID NO: 64134 - RNA, 19 nt, Artificial Sequence
  Description of Artificial Sequence: Synthetic oligonucleotide
agcauaauguuacgagcaa

SEQ ID NO: 64135 - RNA, 19 nt, Artificial Sequence
  Description of Artificial Sequence: Synthetic oligonucleotide
agcgauugaccaaucgauc

SEQ ID NO: 64136 - RNA, 19 nt, Artificial Sequence
  Description of Artificial Sequence: Synthetic oligonucleotide
aguaaugaagguagaguau

SEQ ID NO: 64137 - RNA, 19 nt, Artificial Sequence
  Description of Artificial Sequence: Synthetic oligonucleotide
gccuauauucaacaggaca

SEQ ID NO: 64138 - RNA, 19 nt, Artificial Sequence
  Description of Artificial Sequence: Synthetic oligonucleotide
aacauacgagcaucacgau

SEQ ID NO: 64139 - RNA, 19 nt, Artificial Sequence
  Description of Artificial Sequence: Synthetic oligonucleotide
cucguuaaguggauuguga

SEQ ID NO: 64140 - RNA, 19 nt, Artificial Sequence
  Description of Artificial Sequence: Synthetic oligonucleotide
ucuccuauuugaggagaag

SEQ ID NO: 64141 - RNA, 19 nt, Artificial Sequence
  Description of Artificial Sequence: Synthetic oligonucleotide
accaguugcguuaaaugca

SEQ ID NO: 64142 - RNA, 19 nt, Artificial Sequence
  Description of Artificial Sequence: Synthetic oligonucleotide
aacacugaauaaauccgua

SEQ ID NO: 64143 - RNA, 19 nt, Artificial Sequence
  Description of Artificial Sequence: Synthetic oligonucleotide
acgaccuaaaagucucaca

SEQ ID NO: 64144 - RNA, 19 nt, Artificial Sequence
  Description of Artificial Sequence: Synthetic oligonucleotide
aguuagaauuacgaccuaa

SEQ ID NO: 64145 - RNA, 19 nt, Artificial Sequence
  Description of Artificial Sequence: Synthetic oligonucleotide
guuaucaauuacgggcagc

SEQ ID NO: 64146 - RNA, 19 nt, Artificial Sequence
  Description of Artificial Sequence: Synthetic oligonucleotide
acgaaggggugugauauug

SEQ ID NO: 64147 - RNA, 19 nt, Artificial Sequence
  Description of Artificial Sequence: Synthetic oligonucleotide
caaacgacaacggggaaga

SEQ ID NO: 64148 - RNA, 19 nt, Artificial Sequence
  Description of Artificial Sequence: Synthetic oligonucleotide
caguccgccggucagauga

SEQ ID NO: 64149 - RNA, 19 nt, Artificial Sequence
  Description of Artificial Sequence: Synthetic oligonucleotide
ugggauuagcuuccucagu

SEQ ID NO: 64150 - RNA, 19 nt, Artificial Sequence
  Description of Artificial Sequence: Synthetic oligonucleotide
aacagcgcuuguccauuca

SEQ ID NO: 64151 - RNA, 19 nt, Artificial Sequence
  Description of Artificial Sequence: Synthetic oligonucleotide
cuauguugguugcucguuc

SEQ ID NO: 64152 - RNA, 19 nt, Artificial Sequence
  Description of Artificial Sequence: Synthetic oligonucleotide
uugcaauuaccaguugcgu

SEQ ID NO: 64153 - RNA, 19 nt, Artificial Sequence
  Description of Artificial Sequence: Synthetic oligonucleotide
ugauacuauaaggcgccac

SEQ ID NO: 64154 - RNA, 19 nt, Artificial Sequence
  Description of Artificial Sequence: Synthetic oligonucleotide
agaauagauggugggauua

SEQ ID NO: 64155 - RNA, 19 nt, Artificial Sequence
  Description of Artificial Sequence: Synthetic oligonucleotide
auacuauaaggcgccaccu

SEQ ID NO: 64156 - RNA, 19 nt, Artificial Sequence
  Description of Artificial Sequence: Synthetic oligonucleotide
guaaucaaacucguuaagu

SEQ ID NO: 64157 - RNA, 19 nt, Artificial Sequence
  Description of Artificial Sequence: Synthetic oligonucleotide
ccuauuugaggagaaguag

SEQ ID NO: 64158 - RNA, 19 nt, Artificial Sequence
  Description of Artificial Sequence: Synthetic oligonucleotide
cugaauagagugcagaauu

SEQ ID NO: 64159 - RNA, 19 nt, Artificial Sequence
  Description of Artificial Sequence: Synthetic oligonucleotide
ugaguuaucugguccccuu

SEQ ID NO: 64160 - RNA, 19 nt, Artificial Sequence
  Description of Artificial Sequence: Synthetic oligonucleotide
ugugauauuguaggccaua

SEQ ID NO: 64161 - RNA, 19 nt, Artificial Sequence
  Description of Artificial Sequence: Synthetic oligonucleotide
uguugguugcucguucuaa

SEQ ID NO: 64162 - RNA, 19 nt, Artificial Sequence
  Description of Artificial Sequence: Synthetic oligonucleotide
acucguuaaguggauugug

SEQ ID NO: 64163 - RNA, 19 nt, Artificial Sequence
  Description of Artificial Sequence: Synthetic oligonucleotide
uaaauccguaagaggucaa

SEQ ID NO: 64164 - RNA, 19 nt, Artificial Sequence
  Description of Artificial Sequence: Synthetic oligonucleotide
uacgaccuaaaagucucac

SEQ ID NO: 64165 - RNA, 19 nt, Artificial Sequence
  Description of Artificial Sequence: Synthetic oligonucleotide
aucguuugcuauauaaauu

SEQ ID NO: 64166 - RNA, 19 nt, Artificial Sequence
  Description of Artificial Sequence: Synthetic oligonucleotide
accauuagacgaggagcac

SEQ ID NO: 64167 - RNA, 19 nt, Artificial Sequence
  Description of Artificial Sequence: Synthetic oligonucleotide
uucaaccuuaucuccuauu

SEQ ID NO: 64168 - RNA, 19 nt, Artificial Sequence
  Description of Artificial Sequence: Synthetic oligonucleotide
agguugccauuauauugug

SEQ ID NO: 64169 - RNA, 19 nt, Artificial Sequence
  Description of Artificial Sequence: Synthetic oligonucleotide
ugcuaucuccuacuucaua

SEQ ID NO: 64170 - RNA, 19 nt, Artificial Sequence
  Description of Artificial Sequence: Synthetic oligonucleotide
cuuaucaugauuagcuguu

SEQ ID NO: 64171 - RNA, 19 nt, Artificial Sequence
  Description of Artificial Sequence: Synthetic oligonucleotide
gcgauugaccaaucgauca

SEQ ID NO: 64172 - RNA, 19 nt, Artificial Sequence
  Description of Artificial Sequence: Synthetic oligonucleotide
aucacgauccacgcacuug

SEQ ID NO: 64173 - RNA, 19 nt, Artificial Sequence
  Description of Artificial Sequence: Synthetic oligonucleotide
ugcggcugagugcuaagua

SEQ ID NO: 64174 - RNA, 19 nt, Artificial Sequence
  Description of Artificial Sequence: Synthetic oligonucleotide
ucuauguugguugcucguu

SEQ ID NO: 64175 - RNA, 19 nt, Artificial Sequence
  Description of Artificial Sequence: Synthetic oligonucleotide
ccaaacauuacaggcacug

SEQ ID NO: 64176 - RNA, 19 nt, Artificial Sequence
  Description of Artificial Sequence: Synthetic oligonucleotide
auugaccaaucgaucaggu

SEQ ID NO: 64177 - RNA, 19 nt, Artificial Sequence
  Description of Artificial Sequence: Synthetic oligonucleotide
uugcucguucuaauuuguc

SEQ ID NO: 64178 - RNA, 19 nt, Artificial Sequence
  Description of Artificial Sequence: Synthetic oligonucleotide
gaccaaucgaucaggucga

SEQ ID NO: 64179 - RNA, 19 nt, Artificial Sequence
  Description of Artificial Sequence: Synthetic oligonucleotide
gaaagcgcccuccccacaa

SEQ ID NO: 64180 - RNA, 19 nt, Artificial Sequence
  Description of Artificial Sequence: Synthetic oligonucleotide
gauuagcuuccucaguaau

SEQ ID NO: 64181 - RNA, 19 nt, Artificial Sequence
  Description of Artificial Sequence: Synthetic oligonucleotide
guguguuuauuguuaucaa

SEQ ID NO: 64182 - RNA, 19 nt, Artificial Sequence
  Description of Artificial Sequence: Synthetic oligonucleotide
agaggacgaaugacuuuac

SEQ ID NO: 64183 - RNA, 19 nt, Artificial Sequence
  Description of Artificial Sequence: Synthetic oligonucleotide
ugcgcugauuaagaaucac

SEQ ID NO: 64184 - RNA, 19 nt, Artificial Sequence
  Description of Artificial Sequence: Synthetic oligonucleotide
caucuagaauuucacugaa

SEQ ID NO: 64185 - RNA, 19 nt, Artificial Sequence
  Description of Artificial Sequence: Synthetic oligonucleotide
ugguuacaguuccuucaaa

SEQ ID NO: 64186 - RNA, 19 nt, Artificial Sequence
  Description of Artificial Sequence: Synthetic oligonucleotide
uucaagcgauugaccaauc

SEQ ID NO: 64187 - RNA, 19 nt, Artificial Sequence
  Description of Artificial Sequence: Synthetic oligonucleotide
ggcuucauuagugaacuga

SEQ ID NO: 64188 - RNA, 19 nt, Artificial Sequence
  Description of Artificial Sequence: Synthetic oligonucleotide
cagcaauuuugugcauucg

SEQ ID NO: 64189 - RNA, 19 nt, Artificial Sequence
  Description of Artificial Sequence: Synthetic oligonucleotide
gggauuagcuuccucagua

SEQ ID NO: 64190 - RNA, 19 nt, Artificial Sequence
  Description of Artificial Sequence: Synthetic oligonucleotide
cacugagaauuccaccuca

SEQ ID NO: 64191 - RNA, 19 nt, Artificial Sequence
  Description of Artificial Sequence: Synthetic oligonucleotide
uuaucaugauuagcuguuu

SEQ ID NO: 64192 - RNA, 19 nt, Artificial Sequence
  Description of Artificial Sequence: Synthetic oligonucleotide
uugaguuaucugguccccu

SEQ ID NO: 64193 - RNA, 19 nt, Artificial Sequence
  Description of Artificial Sequence: Synthetic oligonucleotide
gcaauuuugugcauucguc

SEQ ID NO: 64194 - RNA, 19 nt, Artificial Sequence
  Description of Artificial Sequence: Synthetic oligonucleotide
acuugaccauaguggauua

SEQ ID NO: 64195 - RNA, 19 nt, Artificial Sequence
  Description of Artificial Sequence: Synthetic oligonucleotide
cuacuccuugacagcgagc

SEQ ID NO: 64196 - RNA, 19 nt, Artificial Sequence
  Description of Artificial Sequence: Synthetic oligonucleotide
gacaacggggaagaugaaa

SEQ ID NO: 64197 - RNA, 19 nt, Artificial Sequence
  Description of Artificial Sequence: Synthetic oligonucleotide
uccauucuuucgccauuaa

SEQ ID NO: 64198 - RNA, 19 nt, Artificial Sequence
  Description of Artificial Sequence: Synthetic oligonucleotide
cuaagaggacgaaugacuu

SEQ ID NO: 64199 - RNA, 19 nt, Artificial Sequence
  Description of Artificial Sequence: Synthetic oligonucleotide
uugauacuauaaggcgcca

SEQ ID NO: 64200 - RNA, 19 nt, Artificial Sequence
  Description of Artificial Sequence: Synthetic oligonucleotide
guugcguuaaaugcaccaa

SEQ ID NO: 64201 - RNA, 19 nt, Artificial Sequence
  Description of Artificial Sequence: Synthetic oligonucleotide
gcgcuuguccauucauucg

SEQ ID NO: 64202 - RNA, 19 nt, Artificial Sequence
  Description of Artificial Sequence: Synthetic oligonucleotide
uugauucguccuggcaaug

SEQ ID NO: 64203 - RNA, 19 nt, Artificial Sequence
  Description of Artificial Sequence: Synthetic oligonucleotide
ggccaauucaagagggcag

SEQ ID NO: 64204 - RNA, 19 nt, Artificial Sequence
  Description of Artificial Sequence: Synthetic oligonucleotide
auguuacgagcaacuuaac

SEQ ID NO: 64205 - RNA, 19 nt, Artificial Sequence
  Description of Artificial Sequence: Synthetic oligonucleotide
cuugguacucaaucugugu

SEQ ID NO: 64206 - RNA, 19 nt, Artificial Sequence
  Description of Artificial Sequence: Synthetic oligonucleotide
guaagguuucuaggucacc

SEQ ID NO: 64207 - RNA, 19 nt, Artificial Sequence
  Description of Artificial Sequence: Synthetic oligonucleotide
uugaggcaauagucugaca

SEQ ID NO: 64208 - RNA, 19 nt, Artificial Sequence
  Description of Artificial Sequence: Synthetic oligonucleotide
cacgcacuugaugaaacca

SEQ ID NO: 64209 - RNA, 19 nt, Artificial Sequence
  Description of Artificial Sequence: Synthetic oligonucleotide
uuugucacgccggucuguu

SEQ ID NO: 64210 - RNA, 19 nt, Artificial Sequence
  Description of Artificial Sequence: Synthetic oligonucleotide
accagagaacucacuauaa

SEQ ID NO: 64211 - RNA, 19 nt, Artificial Sequence
  Description of Artificial Sequence: Synthetic oligonucleotide
cgauccacgcacuugauga

SEQ ID NO: 64212 - RNA, 19 nt, Artificial Sequence
  Description of Artificial Sequence: Synthetic oligonucleotide
gaacagcgcuuguccauuc

SEQ ID NO: 64213 - RNA, 19 nt, Artificial Sequence
  Description of Artificial Sequence: Synthetic oligonucleotide
gcauaauguuacgagcaac

SEQ ID NO: 64214 - RNA, 19 nt, Artificial Sequence
  Description of Artificial Sequence: Synthetic oligonucleotide
cagacucgccaaacauuac

SEQ ID NO: 64215 - RNA, 19 nt, Artificial Sequence
  Description of Artificial Sequence: Synthetic oligonucleotide
gaagcuacaccaggaucaa

SEQ ID NO: 64216 - RNA, 19 nt, Artificial Sequence
  Description of Artificial Sequence: Synthetic oligonucleotide
agccaaacgccuccuucau

SEQ ID NO: 64217 - RNA, 19 nt, Artificial Sequence
  Description of Artificial Sequence: Synthetic oligonucleotide
caugauuagcuguuucaau

SEQ ID NO: 64218 - RNA, 19 nt, Artificial Sequence
  Description of Artificial Sequence: Synthetic oligonucleotide
acgcacuugaugaaaccaa

SEQ ID NO: 64219 - RNA, 19 nt, Artificial Sequence
  Description of Artificial Sequence: Synthetic oligonucleotide
cuacgaaggggugugauau

SEQ ID NO: 64220 - RNA, 19 nt, Artificial Sequence
  Description of Artificial Sequence: Synthetic oligonucleotide
auuugucacgccggucugu

SEQ ID NO: 64221 - RNA, 19 nt, Artificial Sequence
  Description of Artificial Sequence: Synthetic oligonucleotide
caauuacgggcagcuggag

SEQ ID NO: 64222 - RNA, 19 nt, Artificial Sequence
  Description of Artificial Sequence: Synthetic oligonucleotide
uugucacgccggucuguug

SEQ ID NO: 64223 - RNA, 19 nt, Artificial Sequence
  Description of Artificial Sequence: Synthetic oligonucleotide
cgauugaccaaucgaucag

SEQ ID NO: 64224 - RNA, 19 nt, Artificial Sequence
  Description of Artificial Sequence: Synthetic oligonucleotide
uaacacgaggaagguguua

SEQ ID NO: 64225 - RNA, 19 nt, Artificial Sequence
  Description of Artificial Sequence: Synthetic oligonucleotide
acugagaauuccaccucau

SEQ ID NO: 64226 - RNA, 19 nt, Artificial Sequence
  Description of Artificial Sequence: Synthetic oligonucleotide
auguugguugcucguucua

SEQ ID NO: 64227 - RNA, 19 nt, Artificial Sequence
  Description of Artificial Sequence: Synthetic oligonucleotide
cccaacuaugccaaaugga

SEQ ID NO: 64228 - RNA, 19 nt, Artificial Sequence
  Description of Artificial Sequence: Synthetic oligonucleotide
auucguccuggcaauggau

SEQ ID NO: 64229 - RNA, 19 nt, Artificial Sequence
  Description of Artificial Sequence: Synthetic oligonucleotide
aaccuaucuggaagauaau

SEQ ID NO: 64230 - RNA, 19 nt, Artificial Sequence
  Description of Artificial Sequence: Synthetic oligonucleotide
ggauuagcuuccucaguaa

SEQ ID NO: 64231 - RNA, 19 nt, Artificial Sequence
  Description of Artificial Sequence: Synthetic oligonucleotide
ccccaacuugaccauagug

SEQ ID NO: 64232 - RNA, 19 nt, Artificial Sequence
  Description of Artificial Sequence: Synthetic oligonucleotide
ggcaauccccuuuguuggc

SEQ ID NO: 64233 - RNA, 19 nt, Artificial Sequence
  Description of Artificial Sequence: Synthetic oligonucleotide
uacgaaggggugugauauu

SEQ ID NO: 64234 - RNA, 19 nt, Artificial Sequence
  Description of Artificial Sequence: Synthetic oligonucleotide
ccgugauacaaaguugaac

SEQ ID NO: 64235 - RNA, 19 nt, Artificial Sequence
  Description of Artificial Sequence: Synthetic oligonucleotide
uggcccuacgaaggggugu

SEQ ID NO: 64236 - RNA, 19 nt, Artificial Sequence
  Description of Artificial Sequence: Synthetic oligonucleotide
cuucaagcgauugaccaau

SEQ ID NO: 64237 - RNA, 19 nt, Artificial Sequence
  Description of Artificial Sequence: Synthetic oligonucleotide
gcgaaguggaauuugcaau

SEQ ID NO: 64238 - RNA, 19 nt, Artificial Sequence
  Description of Artificial Sequence: Synthetic oligonucleotide
ggccaacaagguaacaguc

SEQ ID NO: 64239 - RNA, 19 nt, Artificial Sequence
  Description of Artificial Sequence: Synthetic oligonucleotide
gggugugauuagucaauga

SEQ ID NO: 64240 - RNA, 19 nt, Artificial Sequence
  Description of Artificial Sequence: Synthetic oligonucleotide
gcguuaaaugcaccaaaua

SEQ ID NO: 64241 - RNA, 19 nt, Artificial Sequence
  Description of Artificial Sequence: Synthetic oligonucleotide
acgccggucuguugaaaua

SEQ ID NO: 64242 - RNA, 19 nt, Artificial Sequence
  Description of Artificial Sequence: Synthetic oligonucleotide
guugcucguucuaauuugu

SEQ ID NO: 64243 - RNA, 19 nt, Artificial Sequence
  Description of Artificial Sequence: Synthetic oligonucleotide
gcggcugagugcuaaguaa

SEQ ID NO: 64244 - RNA, 19 nt, Artificial Sequence
  Description of Artificial Sequence: Synthetic oligonucleotide
cguuaaguggauugugaca

SEQ ID NO: 64245 - RNA, 19 nt, Artificial Sequence
  Description of Artificial Sequence: Synthetic oligonucleotide
aggauucauuucaggcaca

SEQ ID NO: 64246 - RNA, 19 nt, Artificial Sequence
  Description of Artificial Sequence: Synthetic oligonucleotide
gugaucuaagcagcagcaa

SEQ ID NO: 64247 - RNA, 19 nt, Artificial Sequence
  Description of Artificial Sequence: Synthetic oligonucleotide
accaaucgaucaggucgag

SEQ ID NO: 64248 - RNA, 19 nt, Artificial Sequence
  Description of Artificial Sequence: Synthetic oligonucleotide
gcaauccccuuuguuggcc

SEQ ID NO: 64249 - RNA, 19 nt, Artificial Sequence
  Description of Artificial Sequence: Synthetic oligonucleotide
auaacacgaggaagguguu

SEQ ID NO: 64250 - RNA, 19 nt, Artificial Sequence
  Description of Artificial Sequence: Synthetic oligonucleotide
aaacgacaacggggaagau

SEQ ID NO: 64251 - RNA, 19 nt, Artificial Sequence
  Description of Artificial Sequence: Synthetic oligonucleotide
gggaauggaaugaaaccgu

SEQ ID NO: 64252 - RNA, 19 nt, Artificial Sequence
  Description of Artificial Sequence: Synthetic oligonucleotide
ccauaucucccaguuccag

SEQ ID NO: 64253 - RNA, 19 nt, Artificial Sequence
  Description of Artificial Sequence: Synthetic oligonucleotide
ccaauucaagagggcagag

SEQ ID NO: 64254 - RNA, 19 nt, Artificial Sequence
  Description of Artificial Sequence: Synthetic oligonucleotide
ccaaucgaucaggucgagg

SEQ ID NO: 64255 - RNA, 19 nt, Artificial Sequence
  Description of Artificial Sequence: Synthetic oligonucleotide
uuacgggcagcuggagauu

SEQ ID NO: 64256 - RNA, 19 nt, Artificial Sequence
  Description of Artificial Sequence: Synthetic oligonucleotide
ugccuuuauuugggcuugu

SEQ ID NO: 64257 - RNA, 19 nt, Artificial Sequence
  Description of Artificial Sequence: Synthetic oligonucleotide
cucaaacgacaacggggaa

SEQ ID NO: 64258 - RNA, 19 nt, Artificial Sequence
  Description of Artificial Sequence: Synthetic oligonucleotide
gugcgcugauuaagaauca

SEQ ID NO: 64259 - RNA, 19 nt, Artificial Sequence
  Description of Artificial Sequence: Synthetic oligonucleotide
ggcccuacgaaggggugug

SEQ ID NO: 64260 - RNA, 19 nt, Artificial Sequence
  Description of Artificial Sequence: Synthetic oligonucleotide
cuugaccauaguggauuaa

SEQ ID NO: 64261 - RNA, 19 nt, Artificial Sequence
  Description of Artificial Sequence: Synthetic oligonucleotide
cucguucaauaaagccaaa

SEQ ID NO: 64262 - RNA, 19 nt, Artificial Sequence
  Description of Artificial Sequence: Synthetic oligonucleotide
ucacgccggucuguugaaa

SEQ ID NO: 64263 - RNA, 19 nt, Artificial Sequence
  Description of Artificial Sequence: Synthetic oligonucleotide
gucacgccggucuguugaa

SEQ ID NO: 64264 - RNA, 19 nt, Artificial Sequence
  Description of Artificial Sequence: Synthetic oligonucleotide
caaccccugagcugacucu

SEQ ID NO: 64265 - RNA, 19 nt, Artificial Sequence
  Description of Artificial Sequence: Synthetic oligonucleotide
gccuuuauuugggcuugug

SEQ ID NO: 64266 - RNA, 19 nt, Artificial Sequence
  Description of Artificial Sequence: Synthetic oligonucleotide
ccguaagaggucaacaguu

SEQ ID NO: 64267 - RNA, 19 nt, Artificial Sequence
  Description of Artificial Sequence: Synthetic oligonucleotide
accccugagcugacucuug

SEQ ID NO: 64268 - RNA, 19 nt, Artificial Sequence
  Description of Artificial Sequence: Synthetic oligonucleotide
cacgccggucuguugaaau

SEQ ID NO: 64269 - RNA, 19 nt, Artificial Sequence
  Description of Artificial Sequence: Synthetic oligonucleotide
gccggucagaugauacuuc

SEQ ID NO: 64270 - RNA, 19 nt, Artificial Sequence
  Description of Artificial Sequence: Synthetic oligonucleotide
gcgcugauuaagaaucacu

SEQ ID NO: 64271 - RNA, 19 nt, Artificial Sequence
  Description of Artificial Sequence: Synthetic oligonucleotide
gacagcgagcuuguuucuu

SEQ ID NO: 64272 - RNA, 19 nt, Artificial Sequence
  Description of Artificial Sequence: Synthetic oligonucleotide
gcuccuaaauugauacuau

SEQ ID NO: 64273 - RNA, 19 nt, Artificial Sequence
  Description of Artificial Sequence: Synthetic oligonucleotide
ccagugcgcugauuaagaa

SEQ ID NO: 64274 - RNA, 19 nt, Artificial Sequence
  Description of Artificial Sequence: Synthetic oligonucleotide
caaacucguuaaguggauu

SEQ ID NO: 64275 - RNA, 19 nt, Artificial Sequence
  Description of Artificial Sequence: Synthetic oligonucleotide
cauaacccaagagccuuuu

SEQ ID NO: 64276 - RNA, 19 nt, Artificial Sequence
  Description of Artificial Sequence: Synthetic oligonucleotide
cagcgcuuguccauucauu

SEQ ID NO: 64277 - RNA, 19 nt, Artificial Sequence
  Description of Artificial Sequence: Synthetic oligonucleotide
cccgugauacaaaguugaa

SEQ ID NO: 64278 - RNA, 19 nt, Artificial Sequence
  Description of Artificial Sequence: Synthetic oligonucleotide
gugugauauuguaggccau

SEQ ID NO: 64279 - RNA, 19 nt, Artificial Sequence
  Description of Artificial Sequence: Synthetic oligonucleotide
caucacgauccacgcacuu

SEQ ID NO: 64280 - RNA, 19 nt, Artificial Sequence
  Description of Artificial Sequence: Synthetic oligonucleotide
aguccgccggucagaugau

SEQ ID NO: 64281 - RNA, 19 nt, Artificial Sequence
  Description of Artificial Sequence: Synthetic oligonucleotide
ggaacagcgcuuguccauu

SEQ ID NO: 64282 - RNA, 19 nt, Artificial Sequence
  Description of Artificial Sequence: Synthetic oligonucleotide
cguaagaggucaacaguuu

SEQ ID NO: 64283 - RNA, 19 nt, Artificial Sequence
  Description of Artificial Sequence: Synthetic oligonucleotide
cuccuacuucauaguuaau

SEQ ID NO: 64284 - RNA, 19 nt, Artificial Sequence
  Description of Artificial Sequence: Synthetic oligonucleotide
ccaguccgccggucagaug

SEQ ID NO: 64285 - RNA, 19 nt, Artificial Sequence
  Description of Artificial Sequence: Synthetic oligonucleotide
gccaaacauuacaggcacu

SEQ ID NO: 64286 - RNA, 19 nt, Artificial Sequence
  Description of Artificial Sequence: Synthetic oligonucleotide
gcaucacgauccacgcacu

SEQ ID NO: 64287 - RNA, 19 nt, Artificial Sequence
  Description of Artificial Sequence: Synthetic oligonucleotide
cgaaggggugugauauugu

SEQ ID NO: 64288 - RNA, 19 nt, Artificial Sequence
  Description of Artificial Sequence: Synthetic oligonucleotide
gcuugccguucugaacacu

SEQ ID NO: 64289 - RNA, 19 nt, Artificial Sequence
  Description of Artificial Sequence: Synthetic oligonucleotide
gcccuacgaagggguguga

SEQ ID NO: 64290 - RNA, 19 nt, Artificial Sequence
  Description of Artificial Sequence: Synthetic oligonucleotide
cgccggucagaugauacuu

SEQ ID NO: 64291 - RNA, 19 nt, Artificial Sequence
  Description of Artificial Sequence: Synthetic oligonucleotide
aauuaaguagucaaaaugc

SEQ ID NO: 64292 - RNA, 19 nt, Artificial Sequence
  Description of Artificial Sequence: Synthetic oligonucleotide
aagggauaccauuaaaucc

SEQ ID NO: 64293 - RNA, 19 nt, Artificial Sequence
  Description of Artificial Sequence: Synthetic oligonucleotide
aacauaacaccauucauuc

SEQ ID NO: 64294 - RNA, 19 nt, Artificial Sequence
  Description of Artificial Sequence: Synthetic oligonucleotide
aaagcuccuacgcaaaucc

SEQ ID NO: 64295 - RNA, 19 nt, Artificial Sequence
  Description of Artificial Sequence: Synthetic oligonucleotide
aacccuauaauucacaugu

SEQ ID NO: 64296 - RNA, 19 nt, Artificial Sequence
  Description of Artificial Sequence: Synthetic oligonucleotide
uuuauauuagaccugucag

SEQ ID NO: 64297 - RNA, 19 nt, Artificial Sequence
  Description of Artificial Sequence: Synthetic oligonucleotide
aaguaguuaagucuuguuc

SEQ ID NO: 64298 - RNA, 19 nt, Artificial Sequence
  Description of Artificial Sequence: Synthetic oligonucleotide
aagcuuaugauacagugug

SEQ ID NO: 64299 - RNA, 19 nt, Artificial Sequence
  Description of Artificial Sequence: Synthetic oligonucleotide
uuacucuaugaacaaaugg

SEQ ID NO: 64300 - RNA, 19 nt, Artificial Sequence
  Description of Artificial Sequence: Synthetic oligonucleotide
uuuuggucgauuaaguggc

SEQ ID NO: 64301 - RNA, 19 nt, Artificial Sequence
  Description of Artificial Sequence: Synthetic oligonucleotide
uacucuaugaacaaaugga

SEQ ID NO: 64302 - RNA, 19 nt, Artificial Sequence
  Description of Artificial Sequence: Synthetic oligonucleotide
ucaacguucaauuuuauua

SEQ ID NO: 64303 - RNA, 19 nt, Artificial Sequence
  Description of Artificial Sequence: Synthetic oligonucleotide
ugagaaauuugucuguucc

SEQ ID NO: 64304 - RNA, 19 nt, Artificial Sequence
  Description of Artificial Sequence: Synthetic oligonucleotide
uuuagaguaguaaccauug

SEQ ID NO: 64305 - RNA, 19 nt, Artificial Sequence
  Description of Artificial Sequence: Synthetic oligonucleotide
uuacaaaugguccauggca

SEQ ID NO: 64306 - RNA, 19 nt, Artificial Sequence
  Description of Artificial Sequence: Synthetic oligonucleotide
uaucaaaagguacagcuga

SEQ ID NO: 64307 - RNA, 19 nt, Artificial Sequence
  Description of Artificial Sequence: Synthetic oligonucleotide
uauacaauuauaccgcuuc

SEQ ID NO: 64308 - RNA, 19 nt, Artificial Sequence
  Description of Artificial Sequence: Synthetic oligonucleotide
uguauugaaagcccaagca

SEQ ID NO: 64309 - RNA, 19 nt, Artificial Sequence
  Description of Artificial Sequence: Synthetic oligonucleotide
uuucuaaguaguuaagucu

SEQ ID NO: 64310 - RNA, 19 nt, Artificial Sequence
  Description of Artificial Sequence: Synthetic oligonucleotide
aacaaaguaucuucugaag

SEQ ID NO: 64311 - RNA, 19 nt, Artificial Sequence
  Description of Artificial Sequence: Synthetic oligonucleotide
aaccacuacucacagcccc

SEQ ID NO: 64312 - RNA, 19 nt, Artificial Sequence
  Description of Artificial Sequence: Synthetic oligonucleotide
auaaagacuaucaaagguc

SEQ ID NO: 64313 - RNA, 19 nt, Artificial Sequence
  Description of Artificial Sequence: Synthetic oligonucleotide
ugagcuaaagcuccuacgc

SEQ ID NO: 64314 - RNA, 19 nt, Artificial Sequence
  Description of Artificial Sequence: Synthetic oligonucleotide
ucauauauugucuggcugc

SEQ ID NO: 64315 - RNA, 19 nt, Artificial Sequence
  Description of Artificial Sequence: Synthetic oligonucleotide
uuugaguacaccaggaaaa

SEQ ID NO: 64316 - RNA, 19 nt, Artificial Sequence
  Description of Artificial Sequence: Synthetic oligonucleotide
aauuuuaguuugcacagau

SEQ ID NO: 64317 - RNA, 19 nt, Artificial Sequence
  Description of Artificial Sequence: Synthetic oligonucleotide
uagaguaguaaccauugug

SEQ ID NO: 64318 - RNA, 19 nt, Artificial Sequence
  Description of Artificial Sequence: Synthetic oligonucleotide
uacgcaaaucccaagauaa

SEQ ID NO: 64319 - RNA, 19 nt, Artificial Sequence
  Description of Artificial Sequence: Synthetic oligonucleotide
aauagaguaacagguccac

SEQ ID NO: 64320 - RNA, 19 nt, Artificial Sequence
  Description of Artificial Sequence: Synthetic oligonucleotide
ugaauaguaaaagggauac

SEQ ID NO: 64321 - RNA, 19 nt, Artificial Sequence
  Description of Artificial Sequence: Synthetic oligonucleotide
uauccuaaggaaaaccugu

SEQ ID NO: 64322 - RNA, 19 nt, Artificial Sequence
  Description of Artificial Sequence: Synthetic oligonucleotide
auucgauuuaaacuauuag

SEQ ID NO: 64323 - RNA, 19 nt, Artificial Sequence
  Description of Artificial Sequence: Synthetic oligonucleotide
acucgaauauuucauaaca

SEQ ID NO: 64324 - RNA, 19 nt, Artificial Sequence
  Description of Artificial Sequence: Synthetic oligonucleotide
ugcaaagauagcaauugca

SEQ ID NO: 64325 - RNA, 19 nt, Artificial Sequence
  Description of Artificial Sequence: Synthetic oligonucleotide
uauauugucuggcugcugu

SEQ ID NO: 64326 - RNA, 19 nt, Artificial Sequence
  Description of Artificial Sequence: Synthetic oligonucleotide
ugugcauacaggauaacuc

SEQ ID NO: 64327 - RNA, 19 nt, Artificial Sequence
  Description of Artificial Sequence: Synthetic oligonucleotide
uuaugauacagugugagau

SEQ ID NO: 64328 - RNA, 19 nt, Artificial Sequence
  Description of Artificial Sequence: Synthetic oligonucleotide
uaauucacauguuaacaug

SEQ ID NO: 64329 - RNA, 19 nt, Artificial Sequence
  Description of Artificial Sequence: Synthetic oligonucleotide
uacuauaaguccaucugug

SEQ ID NO: 64330 - RNA, 19 nt, Artificial Sequence
  Description of Artificial Sequence: Synthetic oligonucleotide
ugcaucaccuacuauaagu

SEQ ID NO: 64331 - RNA, 19 nt, Artificial Sequence
  Description of Artificial Sequence: Synthetic oligonucleotide
uuaaccugguauuugaaua

SEQ ID NO: 64332 - RNA, 19 nt, Artificial Sequence
  Description of Artificial Sequence: Synthetic oligonucleotide
guauauuacucuaugaaca

SEQ ID NO: 64333 - RNA, 19 nt, Artificial Sequence
  Description of Artificial Sequence: Synthetic oligonucleotide
agaguaacagguccacuac

SEQ ID NO: 64334 - RNA, 19 nt, Artificial Sequence
  Description of Artificial Sequence: Synthetic oligonucleotide
ugauuuguuuacaaauggu

SEQ ID NO: 64335 - RNA, 19 nt, Artificial Sequence
  Description of Artificial Sequence: Synthetic oligonucleotide
ucagucaguaguauauuac

SEQ ID NO: 64336 - RNA, 19 nt, Artificial Sequence
  Description of Artificial Sequence: Synthetic oligonucleotide
aagugaaacguuaggggac

SEQ ID NO: 64337 - RNA, 19 nt, Artificial Sequence
  Description of Artificial Sequence: Synthetic oligonucleotide
ugcuuuauaugaauacugu

SEQ ID NO: 64338 - RNA, 19 nt, Artificial Sequence
  Description of Artificial Sequence: Synthetic oligonucleotide
uucuaaguaguuaagucuu

SEQ ID NO: 64339 - RNA, 19 nt, Artificial Sequence
  Description of Artificial Sequence: Synthetic oligonucleotide
acgcacaacucuuucaggg

SEQ ID NO: 64340 - RNA, 19 nt, Artificial Sequence
  Description of Artificial Sequence: Synthetic oligonucleotide
uauuagaccugucaguaua

SEQ ID NO: 64341 - RNA, 19 nt, Artificial Sequence
  Description of Artificial Sequence: Synthetic oligonucleotide
uauugaaagcccaagcauu

SEQ ID NO: 64342 - RNA, 19 nt, Artificial Sequence
  Description of Artificial Sequence: Synthetic oligonucleotide
aaucugaaaccacaugaaa

SEQ ID NO: 64343 - RNA, 19 nt, Artificial Sequence
  Description of Artificial Sequence: Synthetic oligonucleotide
ugaauacuguauugaaagc

SEQ ID NO: 64344 - RNA, 19 nt, Artificial Sequence
  Description of Artificial Sequence: Synthetic oligonucleotide
agacccaucagaguccucc

SEQ ID NO: 64345 - RNA, 19 nt, Artificial Sequence
  Description of Artificial Sequence: Synthetic oligonucleotide
acaauuauaccgcuucaca

SEQ ID NO: 64346 - RNA, 19 nt, Artificial Sequence
  Description of Artificial Sequence: Synthetic oligonucleotide
uagacucauauauugucug

SEQ ID NO: 64347 - RNA, 19 nt, Artificial Sequence
  Description of Artificial Sequence: Synthetic oligonucleotide
agcucuucgacgcacaacu

SEQ ID NO: 64348 - RNA, 19 nt, Artificial Sequence
  Description of Artificial Sequence: Synthetic oligonucleotide
uucaaacuaugacugaaau

SEQ ID NO: 64349 - RNA, 19 nt, Artificial Sequence
  Description of Artificial Sequence: Synthetic oligonucleotide
agugagcuaaagcuccuac

SEQ ID NO: 64350 - RNA, 19 nt, Artificial Sequence
  Description of Artificial Sequence: Synthetic oligonucleotide
agguauaaauuuggcagcc

SEQ ID NO: 64351 - RNA, 19 nt, Artificial Sequence
  Description of Artificial Sequence: Synthetic oligonucleotide
uggguacaguaaaucaacg

SEQ ID NO: 64352 - RNA, 19 nt, Artificial Sequence
  Description of Artificial Sequence: Synthetic oligonucleotide
auaaguccaucuguguacc

SEQ ID NO: 64353 - RNA, 19 nt, Artificial Sequence
  Description of Artificial Sequence: Synthetic oligonucleotide
aaagguccacuuuauuacu

SEQ ID NO: 64354 - RNA, 19 nt, Artificial Sequence
  Description of Artificial Sequence: Synthetic oligonucleotide
gagcgagaccgacagagcg

SEQ ID NO: 64355 - RNA, 19 nt, Artificial Sequence
  Description of Artificial Sequence: Synthetic oligonucleotide
cuuguguauguauaaacca

SEQ ID NO: 64356 - RNA, 19 nt, Artificial Sequence
  Description of Artificial Sequence: Synthetic oligonucleotide
cauaaauauccuaaggaaa

SEQ ID NO: 64357 - RNA, 19 nt, Artificial Sequence
  Description of Artificial Sequence: Synthetic oligonucleotide
aacguuaggggaccugcag

SEQ ID NO: 64358 - RNA, 19 nt, Artificial Sequence
  Description of Artificial Sequence: Synthetic oligonucleotide
aacguucaauuuuauuaga

SEQ ID NO: 64359 - RNA, 19 nt, Artificial Sequence
  Description of Artificial Sequence: Synthetic oligonucleotide
agugaaacguuaggggacc

SEQ ID NO: 64360 - RNA, 19 nt, Artificial Sequence
  Description of Artificial Sequence: Synthetic oligonucleotide
acacggagacacuuucucc

SEQ ID NO: 64361 - RNA, 19 nt, Artificial Sequence
  Description of Artificial Sequence: Synthetic oligonucleotide
ucuaaaccuaaaauaguuu

SEQ ID NO: 64362 - RNA, 19 nt, Artificial Sequence
  Description of Artificial Sequence: Synthetic oligonucleotide
auaugaaugucacauccaa

SEQ ID NO: 64363 - RNA, 19 nt, Artificial Sequence
  Description of Artificial Sequence: Synthetic oligonucleotide
gagaccauuucucucggug

SEQ ID NO: 64364 - RNA, 19 nt, Artificial Sequence
  Description of Artificial Sequence: Synthetic oligonucleotide
aaccgcuagagacaagaca

SEQ ID NO: 64365 - RNA, 19 nt, Artificial Sequence
  Description of Artificial Sequence: Synthetic oligonucleotide
acucuaugaacaaauggag

SEQ ID NO: 64366 - RNA, 19 nt, Artificial Sequence
  Description of Artificial Sequence: Synthetic oligonucleotide
auacauuuucccuugcaaa

SEQ ID NO: 64367 - RNA, 19 nt, Artificial Sequence
  Description of Artificial Sequence: Synthetic oligonucleotide
uugcaaagauagcaauugc

SEQ ID NO: 64368 - RNA, 19 nt, Artificial Sequence
  Description of Artificial Sequence: Synthetic oligonucleotide
cacggagacacuuucuccc

SEQ ID NO: 64369 - RNA, 19 nt, Artificial Sequence
  Description of Artificial Sequence: Synthetic oligonucleotide
uccuacgcaaaucccaaga

SEQ ID NO: 64370 - RNA, 19 nt, Artificial Sequence
  Description of Artificial Sequence: Synthetic oligonucleotide
aaauagaguaacaggucca

SEQ ID NO: 64371 - RNA, 19 nt, Artificial Sequence
  Description of Artificial Sequence: Synthetic oligonucleotide
uaguuuaaaaccugcucuc

SEQ ID NO: 64372 - RNA, 19 nt, Artificial Sequence
  Description of Artificial Sequence: Synthetic oligonucleotide
aaaucaacguucaauuuua

SEQ ID NO: 64373 - RNA, 19 nt, Artificial Sequence
  Description of Artificial Sequence: Synthetic oligonucleotide
uagaguaacagguccacua

SEQ ID NO: 64374 - RNA, 19 nt, Artificial Sequence
  Description of Artificial Sequence: Synthetic oligonucleotide
cuguauugaaagcccaagc

SEQ ID NO: 64375 - RNA, 19 nt, Artificial Sequence
  Description of Artificial Sequence: Synthetic oligonucleotide
acugauuugaguacaccag

SEQ ID NO: 64376 - RNA, 19 nt, Artificial Sequence
  Description of Artificial Sequence: Synthetic oligonucleotide
caucaaagguuucuuccgg

SEQ ID NO: 64377 - RNA, 19 nt, Artificial Sequence
  Description of Artificial Sequence: Synthetic oligonucleotide
aaagacuaucaaaggucac

SEQ ID NO: 64378 - RNA, 19 nt, Artificial Sequence
  Description of Artificial Sequence: Synthetic oligonucleotide
agacuaucaaaggucacag

SEQ ID NO: 64379 - RNA, 19 nt, Artificial Sequence
  Description of Artificial Sequence: Synthetic oligonucleotide
guauucacagcucuucgac

SEQ ID NO: 64380 - RNA, 19 nt, Artificial Sequence
  Description of Artificial Sequence: Synthetic oligonucleotide
aaguccaucuguguaccuc

SEQ ID NO: 64381 - RNA, 19 nt, Artificial Sequence
  Description of Artificial Sequence: Synthetic oligonucleotide
agucaguaguauauuacuc

SEQ ID NO: 64382 - RNA, 19 nt, Artificial Sequence
  Description of Artificial Sequence: Synthetic oligonucleotide
auuaaguagucaaaaugca

SEQ ID NO: 64383 - RNA, 19 nt, Artificial Sequence
  Description of Artificial Sequence: Synthetic oligonucleotide
uggacaguugaacaauaaa

SEQ ID NO: 64384 - RNA, 19 nt, Artificial Sequence
  Description of Artificial Sequence: Synthetic oligonucleotide
ucaaacuaugacugaaaua

SEQ ID NO: 64385 - RNA, 19 nt, Artificial Sequence
  Description of Artificial Sequence: Synthetic oligonucleotide
acuauaaguccaucugugu

SEQ ID NO: 64386 - RNA, 19 nt, Artificial Sequence
  Description of Artificial Sequence: Synthetic oligonucleotide
gugagcuaaagcuccuacg

SEQ ID NO: 64387 - RNA, 19 nt, Artificial Sequence
  Description of Artificial Sequence: Synthetic oligonucleotide
gaaaccgcuagagacaaga

SEQ ID NO: 64388 - RNA, 19 nt, Artificial Sequence
  Description of Artificial Sequence: Synthetic oligonucleotide
cucauauauugucuggcug

SEQ ID NO: 64389 - RNA, 19 nt, Artificial Sequence
  Description of Artificial Sequence: Synthetic oligonucleotide
uacucgaauauuucauaac

SEQ ID NO: 64390 - RNA, 19 nt, Artificial Sequence
  Description of Artificial Sequence: Synthetic oligonucleotide
acagucguugaauaguaaa

SEQ ID NO: 64391 - RNA, 19 nt, Artificial Sequence
  Description of Artificial Sequence: Synthetic oligonucleotide
cucucgacguccauggcgc

SEQ ID NO: 64392 - RNA, 19 nt, Artificial Sequence
  Description of Artificial Sequence: Synthetic oligonucleotide
uuaaacuauuagaacuguu

SEQ ID NO: 64393 - RNA, 19 nt, Artificial Sequence
  Description of Artificial Sequence: Synthetic oligonucleotide
ggaagcgagagacggagcg

SEQ ID NO: 64394 - RNA, 19 nt, Artificial Sequence
  Description of Artificial Sequence: Synthetic oligonucleotide
agguccacuacauaugaau

SEQ ID NO: 64395 - RNA, 19 nt, Artificial Sequence
  Description of Artificial Sequence: Synthetic oligonucleotide
uccuguauaauuucuucuu

SEQ ID NO: 64396 - RNA, 19 nt, Artificial Sequence
  Description of Artificial Sequence: Synthetic oligonucleotide
uuagaguaguaaccauugu

SEQ ID NO: 64397 - RNA, 19 nt, Artificial Sequence
  Description of Artificial Sequence: Synthetic oligonucleotide
acguuaggggaccugcagg

SEQ ID NO: 64398 - RNA, 19 nt, Artificial Sequence
  Description of Artificial Sequence: Synthetic oligonucleotide
agguacauuacugaaguaa

SEQ ID NO: 64399 - RNA, 19 nt, Artificial Sequence
  Description of Artificial Sequence: Synthetic oligonucleotide
cuguguaccccuaaagcuc

SEQ ID NO: 64400 - RNA, 19 nt, Artificial Sequence
  Description of Artificial Sequence: Synthetic oligonucleotide
uggcugucuaagaagcaug

SEQ ID NO: 64401 - RNA, 19 nt, Artificial Sequence
  Description of Artificial Sequence: Synthetic oligonucleotide
cuaaauuacucagaagaga

SEQ ID NO: 64402 - RNA, 19 nt, Artificial Sequence
  Description of Artificial Sequence: Synthetic oligonucleotide
acuguauugaaagcccaag

SEQ ID NO: 64403 - RNA, 19 nt, Artificial Sequence
  Description of Artificial Sequence: Synthetic oligonucleotide
aguaaaagggauaccauua

SEQ ID NO: 64404 - RNA, 19 nt, Artificial Sequence
  Description of Artificial Sequence: Synthetic oligonucleotide
gugcauacaggauaacuca

SEQ ID NO: 64405 - RNA, 19 nt, Artificial Sequence
  Description of Artificial Sequence: Synthetic oligonucleotide
agcuaaagcuccuacgcaa

SEQ ID NO: 64406 - RNA, 19 nt, Artificial Sequence
  Description of Artificial Sequence: Synthetic oligonucleotide
uucauucgauuuaaacuau

SEQ ID NO: 64407 - RNA, 19 nt, Artificial Sequence
  Description of Artificial Sequence: Synthetic oligonucleotide
uccucgucuguacagugcu

SEQ ID NO: 64408 - RNA, 19 nt, Artificial Sequence
  Description of Artificial Sequence: Synthetic oligonucleotide
acuuaaagauucccagggu

SEQ ID NO: 64409 - RNA, 19 nt, Artificial Sequence
  Description of Artificial Sequence: Synthetic oligonucleotide
uacaaaucaugguggucug

SEQ ID NO: 64410 - RNA, 19 nt, Artificial Sequence
  Description of Artificial Sequence: Synthetic oligonucleotide
uccggucuucgcuacauga

SEQ ID NO: 64411 - RNA, 19 nt, Artificial Sequence
  Description of Artificial Sequence: Synthetic oligonucleotide
gacacggagacacuuucuc

SEQ ID NO: 64412 - RNA, 19 nt, Artificial Sequence
  Description of Artificial Sequence: Synthetic oligonucleotide
cacugauuugaguacacca

SEQ ID NO: 64413 - RNA, 19 nt, Artificial Sequence
  Description of Artificial Sequence: Synthetic oligonucleotide
uuuccauggaugacacgga

SEQ ID NO: 64414 - RNA, 19 nt, Artificial Sequence
  Description of Artificial Sequence: Synthetic oligonucleotide
cagagcgagaaccuccccg

SEQ ID NO: 64415 - RNA, 19 nt, Artificial Sequence
  Description of Artificial Sequence: Synthetic oligonucleotide
gcuugcaugacuuuaaaua

SEQ ID NO: 64416 - RNA, 19 nt, Artificial Sequence
  Description of Artificial Sequence: Synthetic oligonucleotide
aaaccgcuagagacaagac

SEQ ID NO: 64417 - RNA, 19 nt, Artificial Sequence
  Description of Artificial Sequence: Synthetic oligonucleotide
uccuaagcacuccuucuac

SEQ ID NO: 64418 - RNA, 19 nt, Artificial Sequence
  Description of Artificial Sequence: Synthetic oligonucleotide
gauagcaauugcaaguuua

SEQ ID NO: 64419 - RNA, 19 nt, Artificial Sequence
  Description of Artificial Sequence: Synthetic oligonucleotide
agcaauaaccaggacccag

SEQ ID NO: 64420 - RNA, 19 nt, Artificial Sequence
  Description of Artificial Sequence: Synthetic oligonucleotide
uuuuaaccagcagcaaacu

SEQ ID NO: 64421 - RNA, 19 nt, Artificial Sequence
  Description of Artificial Sequence: Synthetic oligonucleotide
ggcccauuuauauuagacc

SEQ ID NO: 64422 - RNA, 19 nt, Artificial Sequence
  Description of Artificial Sequence: Synthetic oligonucleotide
gauuugaguacaccaggaa

SEQ ID NO: 64423 - RNA, 19 nt, Artificial Sequence
  Description of Artificial Sequence: Synthetic oligonucleotide
acggagacacuuucucccg

SEQ ID NO: 64424 - RNA, 19 nt, Artificial Sequence
  Description of Artificial Sequence: Synthetic oligonucleotide
gcuuaugauacagugugag

SEQ ID NO: 64425 - RNA, 19 nt, Artificial Sequence
  Description of Artificial Sequence: Synthetic oligonucleotide
uucauccggauguuuauuu

SEQ ID NO: 64426 - RNA, 19 nt, Artificial Sequence
  Description of Artificial Sequence: Synthetic oligonucleotide
aagcuccuacgcaaauccc

SEQ ID NO: 64427 - RNA, 19 nt, Artificial Sequence
  Description of Artificial Sequence: Synthetic oligonucleotide
agagcgagaaccuccccga

SEQ ID NO: 64428 - RNA, 19 nt, Artificial Sequence
  Description of Artificial Sequence: Synthetic oligonucleotide
gacacggacaaaccuccug

SEQ ID NO: 64429 - RNA, 19 nt, Artificial Sequence
  Description of Artificial Sequence: Synthetic oligonucleotide
guacucgaauauuucauaa

SEQ ID NO: 64430 - RNA, 19 nt, Artificial Sequence
  Description of Artificial Sequence: Synthetic oligonucleotide
ucccuugcaaagauagcaa

SEQ ID NO: 64431 - RNA, 19 nt, Artificial Sequence
  Description of Artificial Sequence: Synthetic oligonucleotide
ugugcguacccuccucuga

SEQ ID NO: 64432 - RNA, 19 nt, Artificial Sequence
  Description of Artificial Sequence: Synthetic oligonucleotide
auuuagaguaguaaccauu

SEQ ID NO: 64433 - RNA, 19 nt, Artificial Sequence
  Description of Artificial Sequence: Synthetic oligonucleotide
auuagaccugucaguauag

SEQ ID NO: 64434 - RNA, 19 nt, Artificial Sequence
  Description of Artificial Sequence: Synthetic oligonucleotide
aguuaagucuuguuccauu

SEQ ID NO: 64435 - RNA, 19 nt, Artificial Sequence
  Description of Artificial Sequence: Synthetic oligonucleotide
ugccucuaaauguuucuaa

SEQ ID NO: 64436 - RNA, 19 nt, Artificial Sequence
  Description of Artificial Sequence: Synthetic oligonucleotide
uuuggucgauuaaguggcc

SEQ ID NO: 64437 - RNA, 19 nt, Artificial Sequence
  Description of Artificial Sequence: Synthetic oligonucleotide
gugacaauuuucaguauuc

SEQ ID NO: 64438 - RNA, 19 nt, Artificial Sequence
  Description of Artificial Sequence: Synthetic oligonucleotide
cuuaugauacagugugaga

SEQ ID NO: 64439 - RNA, 19 nt, Artificial Sequence
  Description of Artificial Sequence: Synthetic oligonucleotide
cucgucuguacagugcugc

SEQ ID NO: 64440 - RNA, 19 nt, Artificial Sequence
  Description of Artificial Sequence: Synthetic oligonucleotide
agaccgacagagcgagaac

SEQ ID NO: 64441 - RNA, 19 nt, Artificial Sequence
  Description of Artificial Sequence: Synthetic oligonucleotide
cauacaggauaacucagaa

SEQ ID NO: 64442 - RNA, 19 nt, Artificial Sequence
  Description of Artificial Sequence: Synthetic oligonucleotide
ggaucuguuagcaauucac

SEQ ID NO: 64443 - RNA, 19 nt, Artificial Sequence
  Description of Artificial Sequence: Synthetic oligonucleotide
aauuuggcagccaguaauu

SEQ ID NO: 64444 - RNA, 19 nt, Artificial Sequence
  Description of Artificial Sequence: Synthetic oligonucleotide
ugcucucacuagcaauccc

SEQ ID NO: 64445 - RNA, 19 nt, Artificial Sequence
  Description of Artificial Sequence: Synthetic oligonucleotide
gaccauuucucucgguguc

SEQ ID NO: 64446 - RNA, 19 nt, Artificial Sequence
  Description of Artificial Sequence: Synthetic oligonucleotide
ucgacgcacaacucuuuca

SEQ ID NO: 64447 - RNA, 19 nt, Artificial Sequence
  Description of Artificial Sequence: Synthetic oligonucleotide
agggccagauuuuaucuaa

SEQ ID NO: 64448 - RNA, 19 nt, Artificial Sequence
  Description of Artificial Sequence: Synthetic oligonucleotide
cauucgauuuaaacuauua

SEQ ID NO: 64449 - RNA, 19 nt, Artificial Sequence
  Description of Artificial Sequence: Synthetic oligonucleotide
gaguaacagguccacuaca

SEQ ID NO: 64450 - RNA, 19 nt, Artificial Sequence
  Description of Artificial Sequence: Synthetic oligonucleotide
auauuagaccugucaguau

SEQ ID NO: 64451 - RNA, 19 nt, Artificial Sequence
  Description of Artificial Sequence: Synthetic oligonucleotide
uaaagcuccuacgcaaauc

SEQ ID NO: 64452 - RNA, 19 nt, Artificial Sequence
  Description of Artificial Sequence: Synthetic oligonucleotide
uucgacgcacaacucuuuc

SEQ ID NO: 64453 - RNA, 19 nt, Artificial Sequence
  Description of Artificial Sequence: Synthetic oligonucleotide
gacagagcgagaaccuccc

SEQ ID NO: 64454 - RNA, 19 nt, Artificial Sequence
  Description of Artificial Sequence: Synthetic oligonucleotide
guauugaaagcccaagcau

SEQ ID NO: 64455 - RNA, 19 nt, Artificial Sequence
  Description of Artificial Sequence: Synthetic oligonucleotide
ugacacggagacacuuucu

SEQ ID NO: 64456 - RNA, 19 nt, Artificial Sequence
  Description of Artificial Sequence: Synthetic oligonucleotide
cuccaugugcguacccucc

SEQ ID NO: 64457 - RNA, 19 nt, Artificial Sequence
  Description of Artificial Sequence: Synthetic oligonucleotide
aguaacagguccacuacau

SEQ ID NO: 64458 - RNA, 19 nt, Artificial Sequence
  Description of Artificial Sequence: Synthetic oligonucleotide
ccaagcauucaguuuacac

SEQ ID NO: 64459 - RNA, 19 nt, Artificial Sequence
  Description of Artificial Sequence: Synthetic oligonucleotide
acacacuccgccacacgcc

SEQ ID NO: 64460 - RNA, 19 nt, Artificial Sequence
  Description of Artificial Sequence: Synthetic oligonucleotide
cauagcaauuaaguaguca

SEQ ID NO: 64461 - RNA, 19 nt, Artificial Sequence
  Description of Artificial Sequence: Synthetic oligonucleotide
agcuugcaugacuuuaaau

SEQ ID NO: 64462 - RNA, 19 nt, Artificial Sequence
  Description of Artificial Sequence: Synthetic oligonucleotide
gcgagaaccuccccgagcc

SEQ ID NO: 64463 - RNA, 19 nt, Artificial Sequence
  Description of Artificial Sequence: Synthetic oligonucleotide
ugaaacguuaggggaccug

SEQ ID NO: 64464 - RNA, 19 nt, Artificial Sequence
  Description of Artificial Sequence: Synthetic oligonucleotide
ucauccggauguuuauuuu

SEQ ID NO: 64465 - RNA, 19 nt, Artificial Sequence
  Description of Artificial Sequence: Synthetic oligonucleotide
gguccacuacauaugaaug

SEQ ID NO: 64466 - RNA, 19 nt, Artificial Sequence
  Description of Artificial Sequence: Synthetic oligonucleotide
ucgucuguacagugcugcc

SEQ ID NO: 64467 - RNA, 19 nt, Artificial Sequence
  Description of Artificial Sequence: Synthetic oligonucleotide
agccgguauucacagcucu

SEQ ID NO: 64468 - RNA, 19 nt, Artificial Sequence
  Description of Artificial Sequence: Synthetic oligonucleotide
auacuguauugaaagccca

SEQ ID NO: 64469 - RNA, 19 nt, Artificial Sequence
  Description of Artificial Sequence: Synthetic oligonucleotide
uuagaccugucaguauagu

SEQ ID NO: 64470 - RNA, 19 nt, Artificial Sequence
  Description of Artificial Sequence: Synthetic oligonucleotide
uccgagugaggaucucucu

SEQ ID NO: 64471 - RNA, 19 nt, Artificial Sequence
  Description of Artificial Sequence: Synthetic oligonucleotide
gucgauuaaguggccuggg

SEQ ID NO: 64472 - RNA, 19 nt, Artificial Sequence
  Description of Artificial Sequence: Synthetic oligonucleotide
cccuuguguauguauaaac

SEQ ID NO: 64473 - RNA, 19 nt, Artificial Sequence
  Description of Artificial Sequence: Synthetic oligonucleotide
ggucgauuaaguggccugg

SEQ ID NO: 64474 - RNA, 19 nt, Artificial Sequence
  Description of Artificial Sequence: Synthetic oligonucleotide
cguugaauaguaaaaggga

SEQ ID NO: 64475 - RNA, 19 nt, Artificial Sequence
  Description of Artificial Sequence: Synthetic oligonucleotide
uuggucgauuaaguggccu

SEQ ID NO: 64476 - RNA, 19 nt, Artificial Sequence
  Description of Artificial Sequence: Synthetic oligonucleotide
agcauucaguuuacacacg

SEQ ID NO: 64477 - RNA, 19 nt, Artificial Sequence
  Description of Artificial Sequence: Synthetic oligonucleotide
cagucaguaguauauuacu

SEQ ID NO: 64478 - RNA, 19 nt, Artificial Sequence
  Description of Artificial Sequence: Synthetic oligonucleotide
cauggcgccgcggaguccc

SEQ ID NO: 64479 - RNA, 19 nt, Artificial Sequence
  Description of Artificial Sequence: Synthetic oligonucleotide
guccacuacauaugaaugu

SEQ ID NO: 64480 - RNA, 19 nt, Artificial Sequence
  Description of Artificial Sequence: Synthetic oligonucleotide
agguccacuuuauuacuua

SEQ ID NO: 64481 - RNA, 19 nt, Artificial Sequence
  Description of Artificial Sequence: Synthetic oligonucleotide
agauagcaauugcaaguuu

SEQ ID NO: 64482 - RNA, 19 nt, Artificial Sequence
  Description of Artificial Sequence: Synthetic oligonucleotide
ccaccauucauguaaaucu

SEQ ID NO: 64483 - RNA, 19 nt, Artificial Sequence
  Description of Artificial Sequence: Synthetic oligonucleotide
cucggugucauaaaagauu

SEQ ID NO: 64484 - RNA, 19 nt, Artificial Sequence
  Description of Artificial Sequence: Synthetic oligonucleotide
ccucucgacguccauggcg

SEQ ID NO: 64485 - RNA, 19 nt, Artificial Sequence
  Description of Artificial Sequence: Synthetic oligonucleotide
uucuuccggucuucgcuac

SEQ ID NO: 64486 - RNA, 19 nt, Artificial Sequence
  Description of Artificial Sequence: Synthetic oligonucleotide
guccuccuccuccuccucg

SEQ ID NO: 64487 - RNA, 19 nt, Artificial Sequence
  Description of Artificial Sequence: Synthetic oligonucleotide
cuuccauuggacaguugaa

SEQ ID NO: 64488 - RNA, 19 nt, Artificial Sequence
  Description of Artificial Sequence: Synthetic oligonucleotide
ggggaagcgagagacggag

SEQ ID NO: 64489 - RNA, 19 nt, Artificial Sequence
  Description of Artificial Sequence: Synthetic oligonucleotide
ggguuuauucuuaaguuua

SEQ ID NO: 64490 - RNA, 19 nt, Artificial Sequence
  Description of Artificial Sequence: Synthetic oligonucleotide
agguuucuuccggucuucg

SEQ ID NO: 64491 - RNA, 19 nt, Artificial Sequence
  Description of Artificial Sequence: Synthetic oligonucleotide
cagggaaguugcagcuugc

SEQ ID NO: 64492 - RNA, 19 nt, Artificial Sequence
  Description of Artificial Sequence: Synthetic oligonucleotide
ucccuuguguauguauaaa

SEQ ID NO: 64493 - RNA, 19 nt, Artificial Sequence
  Description of Artificial Sequence: Synthetic oligonucleotide
ucuuccggucuucgcuaca

SEQ ID NO: 64494 - RNA, 19 nt, Artificial Sequence
  Description of Artificial Sequence: Synthetic oligonucleotide
guaaaacuaaagguccacu

SEQ ID NO: 64495 - RNA, 19 nt, Artificial Sequence
  Description of Artificial Sequence: Synthetic oligonucleotide
auauauugucuggcugcug

SEQ ID NO: 64496 - RNA, 19 nt, Artificial Sequence
  Description of Artificial Sequence: Synthetic oligonucleotide
cuccuacgcaaaucccaag

SEQ ID NO: 64497 - RNA, 19 nt, Artificial Sequence
  Description of Artificial Sequence: Synthetic oligonucleotide
gcguacccuccucugaagg

SEQ ID NO: 64498 - RNA, 19 nt, Artificial Sequence
  Description of Artificial Sequence: Synthetic oligonucleotide
gggacacggacaaaccucc

SEQ ID NO: 64499 - RNA, 19 nt, Artificial Sequence
  Description of Artificial Sequence: Synthetic oligonucleotide
cuacgcaaaucccaagaua

SEQ ID NO: 64500 - RNA, 19 nt, Artificial Sequence
  Description of Artificial Sequence: Synthetic oligonucleotide
gagcgagaaccuccccgag

SEQ ID NO: 64501 - RNA, 19 nt, Artificial Sequence
  Description of Artificial Sequence: Synthetic oligonucleotide
caaaugguccauggcacca

SEQ ID NO: 64502 - RNA, 19 nt, Artificial Sequence
  Description of Artificial Sequence: Synthetic oligonucleotide
cugcucucacuagcaaucc

SEQ ID NO: 64503 - RNA, 19 nt, Artificial Sequence
  Description of Artificial Sequence: Synthetic oligonucleotide
gcugacaaagaaaguuuug

SEQ ID NO: 64504 - RNA, 19 nt, Artificial Sequence
  Description of Artificial Sequence: Synthetic oligonucleotide
ugagaccauuucucucggu

SEQ ID NO: 64505 - RNA, 19 nt, Artificial Sequence
  Description of Artificial Sequence: Synthetic oligonucleotide
cacuccguuccgagugagg

SEQ ID NO: 64506 - RNA, 19 nt, Artificial Sequence
  Description of Artificial Sequence: Synthetic oligonucleotide
uccuccuccuccuccucgu

SEQ ID NO: 64507 - RNA, 19 nt, Artificial Sequence
  Description of Artificial Sequence: Synthetic oligonucleotide
gccaugugcauacaggaua

SEQ ID NO: 64508 - RNA, 19 nt, Artificial Sequence
  Description of Artificial Sequence: Synthetic oligonucleotide
auuggacaguugaacaaua

SEQ ID NO: 64509 - RNA, 19 nt, Artificial Sequence
  Description of Artificial Sequence: Synthetic oligonucleotide
guaccccuaaagcucaggu

SEQ ID NO: 64510 - RNA, 19 nt, Artificial Sequence
  Description of Artificial Sequence: Synthetic oligonucleotide
gagacggagcgagaccgac

SEQ ID NO: 64511 - RNA, 19 nt, Artificial Sequence
  Description of Artificial Sequence: Synthetic oligonucleotide
agccgcuaccaccagccau

SEQ ID NO: 64512 - RNA, 19 nt, Artificial Sequence
  Description of Artificial Sequence: Synthetic oligonucleotide
agcuuaugauacaguguga

SEQ ID NO: 64513 - RNA, 19 nt, Artificial Sequence
  Description of Artificial Sequence: Synthetic oligonucleotide
auaccgcuucacaaaggca

SEQ ID NO: 64514 - RNA, 19 nt, Artificial Sequence
  Description of Artificial Sequence: Synthetic oligonucleotide
gggauaccauuaaauccag

SEQ ID NO: 64515 - RNA, 19 nt, Artificial Sequence
  Description of Artificial Sequence: Synthetic oligonucleotide
ccuuagaauaaucuauaua

SEQ ID NO: 64516 - RNA, 19 nt, Artificial Sequence
  Description of Artificial Sequence: Synthetic oligonucleotide
gguacauuacugaaguaau

SEQ ID NO: 64517 - RNA, 19 nt, Artificial Sequence
  Description of Artificial Sequence: Synthetic oligonucleotide
cgagccgcuaccaccagcc

SEQ ID NO: 64518 - RNA, 19 nt, Artificial Sequence
  Description of Artificial Sequence: Synthetic oligonucleotide
gcgagaccgacagagcgag

SEQ ID NO: 64519 - RNA, 19 nt, Artificial Sequence
  Description of Artificial Sequence: Synthetic oligonucleotide
agcgagaccgacagagcga

SEQ ID NO: 64520 - RNA, 19 nt, Artificial Sequence
  Description of Artificial Sequence: Synthetic oligonucleotide
cucagucauuaccaauaaa

SEQ ID NO: 64521 - RNA, 19 nt, Artificial Sequence
  Description of Artificial Sequence: Synthetic oligonucleotide
cuuggaucuguuagcaauu

SEQ ID NO: 64522 - RNA, 19 nt, Artificial Sequence
  Description of Artificial Sequence: Synthetic oligonucleotide
ccgagugaggaucucucug

SEQ ID NO: 64523 - RNA, 19 nt, Artificial Sequence
  Description of Artificial Sequence: Synthetic oligonucleotide
caugugcauacaggauaac

SEQ ID NO: 64524 - RNA, 19 nt, Artificial Sequence
  Description of Artificial Sequence: Synthetic oligonucleotide
cauauauugucuggcugcu

SEQ ID NO: 64525 - RNA, 19 nt, Artificial Sequence
  Description of Artificial Sequence: Synthetic oligonucleotide
ucgcuacaugacagagaaa

SEQ ID NO: 64526 - RNA, 19 nt, Artificial Sequence
  Description of Artificial Sequence: Synthetic oligonucleotide
cggagcgagaccgacagag

SEQ ID NO: 64527 - RNA, 19 nt, Artificial Sequence
  Description of Artificial Sequence: Synthetic oligonucleotide
gucacuccguuccgaguga

SEQ ID NO: 64528 - RNA, 19 nt, Artificial Sequence
  Description of Artificial Sequence: Synthetic oligonucleotide
guccaucuguguaccucag

SEQ ID NO: 64529 - RNA, 19 nt, Artificial Sequence
  Description of Artificial Sequence: Synthetic oligonucleotide
cacagucguugaauaguaa

SEQ ID NO: 64530 - RNA, 19 nt, Artificial Sequence
  Description of Artificial Sequence: Synthetic oligonucleotide
uucucccguuuuccuggaa

SEQ ID NO: 64531 - RNA, 19 nt, Artificial Sequence
  Description of Artificial Sequence: Synthetic oligonucleotide
ccggucuucgcuacaugac

SEQ ID NO: 64532 - RNA, 19 nt, Artificial Sequence
  Description of Artificial Sequence: Synthetic oligonucleotide
gaugacacggagacacuuu

SEQ ID NO: 64533 - RNA, 19 nt, Artificial Sequence
  Description of Artificial Sequence: Synthetic oligonucleotide
acgcaaaucccaagauaaa

SEQ ID NO: 64534 - RNA, 19 nt, Artificial Sequence
  Description of Artificial Sequence: Synthetic oligonucleotide
guacccuccucugaaggcu

SEQ ID NO: 64535 - RNA, 19 nt, Artificial Sequence
  Description of Artificial Sequence: Synthetic oligonucleotide
caaugucacuccguuccga

SEQ ID NO: 64536 - RNA, 19 nt, Artificial Sequence
  Description of Artificial Sequence: Synthetic oligonucleotide
caugugcguacccuccucu

SEQ ID NO: 64537 - RNA, 19 nt, Artificial Sequence
  Description of Artificial Sequence: Synthetic oligonucleotide
cuaaagcuccuacgcaaau

SEQ ID NO: 64538 - RNA, 19 nt, Artificial Sequence
  Description of Artificial Sequence: Synthetic oligonucleotide
agacggagcgagaccgaca

SEQ ID NO: 64539 - RNA, 19 nt, Artificial Sequence
  Description of Artificial Sequence: Synthetic oligonucleotide
cagcuugcaugacuuuaaa

SEQ ID NO: 64540 - RNA, 19 nt, Artificial Sequence
  Description of Artificial Sequence: Synthetic oligonucleotide
uucacccgucuuggguaca

SEQ ID NO: 64541 - RNA, 19 nt, Artificial Sequence
  Description of Artificial Sequence: Synthetic oligonucleotide
ccuccucgucuguacagug

SEQ ID NO: 64542 - RNA, 19 nt, Artificial Sequence
  Description of Artificial Sequence: Synthetic oligonucleotide
ccgguauucacagcucuuc

SEQ ID NO: 64543 - RNA, 19 nt, Artificial Sequence
  Description of Artificial Sequence: Synthetic oligonucleotide
guuccgagugaggaucucu

SEQ ID NO: 64544 - RNA, 19 nt, Artificial Sequence
  Description of Artificial Sequence: Synthetic oligonucleotide
cccgcccucgcacacacuc

SEQ ID NO: 64545 - RNA, 19 nt, Artificial Sequence
  Description of Artificial Sequence: Synthetic oligonucleotide
gcgcagucuuuucaccuca

SEQ ID NO: 64546 - RNA, 19 nt, Artificial Sequence
  Description of Artificial Sequence: Synthetic oligonucleotide
uggacaccguguggcuaac

SEQ ID NO: 64547 - RNA, 19 nt, Artificial Sequence
  Description of Artificial Sequence: Synthetic oligonucleotide
acggagcgagaccgacaga

SEQ ID NO: 64548 - RNA, 19 nt, Artificial Sequence
  Description of Artificial Sequence: Synthetic oligonucleotide
gcuccuacgcaaaucccaa

SEQ ID NO: 64549 - RNA, 19 nt, Artificial Sequence
  Description of Artificial Sequence: Synthetic oligonucleotide
acccuauaauucacauguu

SEQ ID NO: 64550 - RNA, 19 nt, Artificial Sequence
  Description of Artificial Sequence: Synthetic oligonucleotide
gguguuccaggcccauuua

SEQ ID NO: 64551 - RNA, 19 nt, Artificial Sequence
  Description of Artificial Sequence: Synthetic oligonucleotide
guuaggggaccugcaggcu

SEQ ID NO: 64552 - RNA, 19 nt, Artificial Sequence
  Description of Artificial Sequence: Synthetic oligonucleotide
ggaaaccgcuagagacaag

SEQ ID NO: 64553 - RNA, 19 nt, Artificial Sequence
  Description of Artificial Sequence: Synthetic oligonucleotide
cuucgacgcacaacucuuu

SEQ ID NO: 64554 - RNA, 19 nt, Artificial Sequence
  Description of Artificial Sequence: Synthetic oligonucleotide
cccuuagaauaaucuauau

SEQ ID NO: 64555 - RNA, 19 nt, Artificial Sequence
  Description of Artificial Sequence: Synthetic oligonucleotide
gcuaaggcgucaucagauu

SEQ ID NO: 64556 - RNA, 19 nt, Artificial Sequence
  Description of Artificial Sequence: Synthetic oligonucleotide
cuuccggucuucgcuacau

SEQ ID NO: 64557 - RNA, 19 nt, Artificial Sequence
  Description of Artificial Sequence: Synthetic oligonucleotide
gugaaacguuaggggaccu

SEQ ID NO: 64558 - RNA, 19 nt, Artificial Sequence
  Description of Artificial Sequence: Synthetic oligonucleotide
gcucuucgacgcacaacuc

SEQ ID NO: 64559 - RNA, 19 nt, Artificial Sequence
  Description of Artificial Sequence: Synthetic oligonucleotide
ggauaccauuaaauccagu

SEQ ID NO: 64560 - RNA, 19 nt, Artificial Sequence
  Description of Artificial Sequence: Synthetic oligonucleotide
cgccacacgccggcgaccg

SEQ ID NO: 64561 - RNA, 19 nt, Artificial Sequence
  Description of Artificial Sequence: Synthetic oligonucleotide
ccgcuaccaccagccaucc

SEQ ID NO: 64562 - RNA, 19 nt, Artificial Sequence
  Description of Artificial Sequence: Synthetic oligonucleotide
ggacacggacaaaccuccu

SEQ ID NO: 64563 - RNA, 19 nt, Artificial Sequence
  Description of Artificial Sequence: Synthetic oligonucleotide
cgucuuggguacaguaaau

SEQ ID NO: 64564 - RNA, 19 nt, Artificial Sequence
  Description of Artificial Sequence: Synthetic oligonucleotide
ccauggcgccgcggagucc

SEQ ID NO: 64565 - RNA, 19 nt, Artificial Sequence
  Description of Artificial Sequence: Synthetic oligonucleotide
cguccuccuccuccuccuc

SEQ ID NO: 64566 - RNA, 19 nt, Artificial Sequence
  Description of Artificial Sequence: Synthetic oligonucleotide
gccgguauucacagcucuu

SEQ ID NO: 64567 - RNA, 19 nt, Artificial Sequence
  Description of Artificial Sequence: Synthetic oligonucleotide
ccuaaagcucagguacauu

SEQ ID NO: 64568 - RNA, 19 nt, Artificial Sequence
  Description of Artificial Sequence: Synthetic oligonucleotide
aaucaagcaguauuuacac

SEQ ID NO: 64569 - RNA, 19 nt, Artificial Sequence
  Description of Artificial Sequence: Synthetic oligonucleotide
aaagcaaacuuauuagcac

SEQ ID NO: 64570 - RNA, 19 nt, Artificial Sequence
  Description of Artificial Sequence: Synthetic oligonucleotide
ugugccuuaauacugacag

SEQ ID NO: 64571 - RNA, 19 nt, Artificial Sequence
  Description of Artificial Sequence: Synthetic oligonucleotide
uuagcuauagccaaggacu

SEQ ID NO: 64572 - RNA, 19 nt, Artificial Sequence
  Description of Artificial Sequence: Synthetic oligonucleotide
ucaauuauagugaacaccu

SEQ ID NO: 64573 - RNA, 19 nt, Artificial Sequence
  Description of Artificial Sequence: Synthetic oligonucleotide
ucaauuacggacuuggacc

SEQ ID NO: 64574 - RNA, 19 nt, Artificial Sequence
  Description of Artificial Sequence: Synthetic oligonucleotide
aucuuaguagauuaaaauc

SEQ ID NO: 64575 - RNA, 19 nt, Artificial Sequence
  Description of Artificial Sequence: Synthetic oligonucleotide
acuagcguacuucuuaucc

SEQ ID NO: 64576 - RNA, 19 nt, Artificial Sequence
  Description of Artificial Sequence: Synthetic oligonucleotide
aauucguaggcauccuugc

SEQ ID NO: 64577 - RNA, 19 nt, Artificial Sequence
  Description of Artificial Sequence: Synthetic oligonucleotide
agucaaaugucuuggagcg

SEQ ID NO: 64578 - RNA, 19 nt, Artificial Sequence
  Description of Artificial Sequence: Synthetic oligonucleotide
acuauuucuacauagcaca

SEQ ID NO: 64579 - RNA, 19 nt, Artificial Sequence
  Description of Artificial Sequence: Synthetic oligonucleotide
ucuagcuugucacacaaag

SEQ ID NO: 64580 - RNA, 19 nt, Artificial Sequence
  Description of Artificial Sequence: Synthetic oligonucleotide
ucuauguccauacguaggg

SEQ ID NO: 64581 - RNA, 19 nt, Artificial Sequence
  Description of Artificial Sequence: Synthetic oligonucleotide
aaagcugugauaaagacaa

SEQ ID NO: 64582 - RNA, 19 nt, Artificial Sequence
  Description of Artificial Sequence: Synthetic oligonucleotide
uaaauaccaggugagaugg

SEQ ID NO: 64583 - RNA, 19 nt, Artificial Sequence
  Description of Artificial Sequence: Synthetic oligonucleotide
auuaacaggcugcugugcc

SEQ ID NO: 64584 - RNA, 19 nt, Artificial Sequence
  Description of Artificial Sequence: Synthetic oligonucleotide
aacgccuuauacuaaacca

SEQ ID NO: 64585 - RNA, 19 nt, Artificial Sequence
  Description of Artificial Sequence: Synthetic oligonucleotide
ucgauguccgaauugaugc

SEQ ID NO: 64586 - RNA, 19 nt, Artificial Sequence
  Description of Artificial Sequence: Synthetic oligonucleotide
cacauguauacucugaggc

SEQ ID NO: 64587 - RNA, 19 nt, Artificial Sequence
  Description of Artificial Sequence: Synthetic oligonucleotide
aagacgugcacuagcaugc

SEQ ID NO: 64588 - RNA, 19 nt, Artificial Sequence
  Description of Artificial Sequence: Synthetic oligonucleotide
aagcauuaauaccaaaggu

SEQ ID NO: 64589 - RNA, 19 nt, Artificial Sequence
  Description of Artificial Sequence: Synthetic oligonucleotide
aaacuuuguaggaaacgcc

SEQ ID NO: 64590 - RNA, 19 nt, Artificial Sequence
  Description of Artificial Sequence: Synthetic oligonucleotide
gugauaaagacaauggaag

SEQ ID NO: 64591 - RNA, 19 nt, Artificial Sequence
  Description of Artificial Sequence: Synthetic oligonucleotide
uguaggaaacgccuuauac

SEQ ID NO: 64592 - RNA, 19 nt, Artificial Sequence
  Description of Artificial Sequence: Synthetic oligonucleotide
ucuacacuaaauaccaggu

SEQ ID NO: 64593 - RNA, 19 nt, Artificial Sequence
  Description of Artificial Sequence: Synthetic oligonucleotide
uucaauuauagugaacacc

SEQ ID NO: 64594 - RNA, 19 nt, Artificial Sequence
  Description of Artificial Sequence: Synthetic oligonucleotide
aaaucaagcaguauuuaca

SEQ ID NO: 64595 - RNA, 19 nt, Artificial Sequence
  Description of Artificial Sequence: Synthetic oligonucleotide
cuggucaaaaggaaguggg

SEQ ID NO: 64596 - RNA, 19 nt, Artificial Sequence
  Description of Artificial Sequence: Synthetic oligonucleotide
uagcuuauuaacaggcugc

SEQ ID NO: 64597 - RNA, 19 nt, Artificial Sequence
  Description of Artificial Sequence: Synthetic oligonucleotide
uucuacauagcacacccac

SEQ ID NO: 64598 - RNA, 19 nt, Artificial Sequence
  Description of Artificial Sequence: Synthetic oligonucleotide
ugcucaauuacggacuugg

SEQ ID NO: 64599 - RNA, 19 nt, Artificial Sequence
  Description of Artificial Sequence: Synthetic oligonucleotide
aguuagaaaggcaagggag

SEQ ID NO: 64600 - RNA, 19 nt, Artificial Sequence
  Description of Artificial Sequence: Synthetic oligonucleotide
ucccaaagcgcuuucggcg

SEQ ID NO: 64601 - RNA, 19 nt, Artificial Sequence
  Description of Artificial Sequence: Synthetic oligonucleotide
uugacccgcaacaagaccu

SEQ ID NO: 64602 - RNA, 19 nt, Artificial Sequence
  Description of Artificial Sequence: Synthetic oligonucleotide
uguagccuguagcacauag

SEQ ID NO: 64603 - RNA, 19 nt, Artificial Sequence
  Description of Artificial Sequence: Synthetic oligonucleotide
cagucaaaugucuuggagc

SEQ ID NO: 64604 - RNA, 19 nt, Artificial Sequence
  Description of Artificial Sequence: Synthetic oligonucleotide
ucuagaugacccaggguag

SEQ ID NO: 64605 - RNA, 19 nt, Artificial Sequence
  Description of Artificial Sequence: Synthetic oligonucleotide
ugcguuuugaggucagggg

SEQ ID NO: 64606 - RNA, 19 nt, Artificial Sequence
  Description of Artificial Sequence: Synthetic oligonucleotide
gacaaaucaggguucugag

SEQ ID NO: 64607 - RNA, 19 nt, Artificial Sequence
  Description of Artificial Sequence: Synthetic oligonucleotide
cucauguguagauagccgc

SEQ ID NO: 64608 - RNA, 19 nt, Artificial Sequence
  Description of Artificial Sequence: Synthetic oligonucleotide
uagcguacuucuuaucccg

SEQ ID NO: 64609 - RNA, 19 nt, Artificial Sequence
  Description of Artificial Sequence: Synthetic oligonucleotide
agaccuccaauucguaggc

SEQ ID NO: 64610 - RNA, 19 nt, Artificial Sequence
  Description of Artificial Sequence: Synthetic oligonucleotide
gaugcuuacuauuucuaca

SEQ ID NO: 64611 - RNA, 19 nt, Artificial Sequence
  Description of Artificial Sequence: Synthetic oligonucleotide
uucgauguccgaauugaug

SEQ ID NO: 64612 - RNA, 19 nt, Artificial Sequence
  Description of Artificial Sequence: Synthetic oligonucleotide
caggguaggaucaucacac

SEQ ID NO: 64613 - RNA, 19 nt, Artificial Sequence
  Description of Artificial Sequence: Synthetic oligonucleotide
cuagcuuauuaacaggcug

SEQ ID NO: 64614 - RNA, 19 nt, Artificial Sequence
  Description of Artificial Sequence: Synthetic oligonucleotide
aucccaaagcgcuuucggc

SEQ ID NO: 64615 - RNA, 19 nt, Artificial Sequence
  Description of Artificial Sequence: Synthetic oligonucleotide
gauuucaugaugucauauc

SEQ ID NO: 64616 - RNA, 19 nt, Artificial Sequence
  Description of Artificial Sequence: Synthetic oligonucleotide
auucguaggcauccuugcc

SEQ ID NO: 64617 - RNA, 19 nt, Artificial Sequence
  Description of Artificial Sequence: Synthetic oligonucleotide
ugggcuccgaucuaugucc

SEQ ID NO: 64618 - RNA, 19 nt, Artificial Sequence
  Description of Artificial Sequence: Synthetic oligonucleotide
cauacguagggguguaucc

SEQ ID NO: 64619 - RNA, 19 nt, Artificial Sequence
  Description of Artificial Sequence: Synthetic oligonucleotide
cauacccacaguuaaugac

SEQ ID NO: 64620 - RNA, 19 nt, Artificial Sequence
  Description of Artificial Sequence: Synthetic oligonucleotide
cucaauuacggacuuggac

SEQ ID NO: 64621 - RNA, 19 nt, Artificial Sequence
  Description of Artificial Sequence: Synthetic oligonucleotide
uguacuugucacuagcgua

SEQ ID NO: 64622 - RNA, 19 nt, Artificial Sequence
  Description of Artificial Sequence: Synthetic oligonucleotide
aacccaguggacuccccac

SEQ ID NO: 64623 - RNA, 19 nt, Artificial Sequence
  Description of Artificial Sequence: Synthetic oligonucleotide
cacugguuaaguaccacag

SEQ ID NO: 64624 - RNA, 19 nt, Artificial Sequence
  Description of Artificial Sequence: Synthetic oligonucleotide
aacaccugaccacaaacuu

SEQ ID NO: 64625 - RNA, 19 nt, Artificial Sequence
  Description of Artificial Sequence: Synthetic oligonucleotide
agaugcagaugaaagccgc

SEQ ID NO: 64626 - RNA, 19 nt, Artificial Sequence
  Description of Artificial Sequence: Synthetic oligonucleotide
cuagcguacuucuuauccc

SEQ ID NO: 64627 - RNA, 19 nt, Artificial Sequence
  Description of Artificial Sequence: Synthetic oligonucleotide
uuucaaccugcugauauca

SEQ ID NO: 64628 - RNA, 19 nt, Artificial Sequence
  Description of Artificial Sequence: Synthetic oligonucleotide
uucagacuacgacagggga

SEQ ID NO: 64629 - RNA, 19 nt, Artificial Sequence
  Description of Artificial Sequence: Synthetic oligonucleotide
cuucagacuacgacagggg

SEQ ID NO: 64630 - RNA, 19 nt, Artificial Sequence
  Description of Artificial Sequence: Synthetic oligonucleotide
cauacacugaggccuaagc

SEQ ID NO: 64631 - RNA, 19 nt, Artificial Sequence
  Description of Artificial Sequence: Synthetic oligonucleotide
auacacugaggccuaagcu

SEQ ID NO: 64632 - RNA, 19 nt, Artificial Sequence
  Description of Artificial Sequence: Synthetic oligonucleotide
uuugacccgcaacaagacc

SEQ ID NO: 64633 - RNA, 19 nt, Artificial Sequence
  Description of Artificial Sequence: Synthetic oligonucleotide
uuauucagcuccugguugu

SEQ ID NO: 64634 - RNA, 19 nt, Artificial Sequence
  Description of Artificial Sequence: Synthetic oligonucleotide
aagauccgaggccucuuuc

SEQ ID NO: 64635 - RNA, 19 nt, Artificial Sequence
  Description of Artificial Sequence: Synthetic oligonucleotide
uauuucuacauagcacacc

SEQ ID NO: 64636 - RNA, 19 nt, Artificial Sequence
  Description of Artificial Sequence: Synthetic oligonucleotide
acuacgacaggggacuugg

SEQ ID NO: 64637 - RNA, 19 nt, Artificial Sequence
  Description of Artificial Sequence: Synthetic oligonucleotide
uaauggaaggucaccuaga

SEQ ID NO: 64638 - RNA, 19 nt, Artificial Sequence
  Description of Artificial Sequence: Synthetic oligonucleotide
ggaagucgaauucaacagg

SEQ ID NO: 64639 - RNA, 19 nt, Artificial Sequence
  Description of Artificial Sequence: Synthetic oligonucleotide
ugugaaagauuugccagga

SEQ ID NO: 64640 - RNA, 19 nt, Artificial Sequence
  Description of Artificial Sequence: Synthetic oligonucleotide
uguagauagccgcucacuu

SEQ ID NO: 64641 - RNA, 19 nt, Artificial Sequence
  Description of Artificial Sequence: Synthetic oligonucleotide
auaaggacgcagcuagucu

SEQ ID NO: 64642 - RNA, 19 nt, Artificial Sequence
  Description of Artificial Sequence: Synthetic oligonucleotide
ugguuagcuauagccaagg

SEQ ID NO: 64643 - RNA, 19 nt, Artificial Sequence
  Description of Artificial Sequence: Synthetic oligonucleotide
agcauuaauaccaaaggua

SEQ ID NO: 64644 - RNA, 19 nt, Artificial Sequence
  Description of Artificial Sequence: Synthetic oligonucleotide
gaugaaagccgcccugggc

SEQ ID NO: 64645 - RNA, 19 nt, Artificial Sequence
  Description of Artificial Sequence: Synthetic oligonucleotide
uaucccaugagaccugcuc

SEQ ID NO: 64646 - RNA, 19 nt, Artificial Sequence
  Description of Artificial Sequence: Synthetic oligonucleotide
uuggauggggcggaauucg

SEQ ID NO: 64647 - RNA, 19 nt, Artificial Sequence
  Description of Artificial Sequence: Synthetic oligonucleotide
cucuagaugacccagggua

SEQ ID NO: 64648 - RNA, 19 nt, Artificial Sequence
  Description of Artificial Sequence: Synthetic oligonucleotide
gguaaaucuuaguagauua

SEQ ID NO: 64649 - RNA, 19 nt, Artificial Sequence
  Description of Artificial Sequence: Synthetic oligonucleotide
aucuauguccauacguagg

SEQ ID NO: 64650 - RNA, 19 nt, Artificial Sequence
  Description of Artificial Sequence: Synthetic oligonucleotide
cucguucacauguagccug

SEQ ID NO: 64651 - RNA, 19 nt, Artificial Sequence
  Description of Artificial Sequence: Synthetic oligonucleotide
ugcauccauacccacaguu

SEQ ID NO: 64652 - RNA, 19 nt, Artificial Sequence
  Description of Artificial Sequence: Synthetic oligonucleotide
uccacuuggugccaucgcu

SEQ ID NO: 64653 - RNA, 19 nt, Artificial Sequence
  Description of Artificial Sequence: Synthetic oligonucleotide
uccgaucuauguccauacg

SEQ ID NO: 64654 - RNA, 19 nt, Artificial Sequence
  Description of Artificial Sequence: Synthetic oligonucleotide
acacuugacaagccugaag

SEQ ID NO: 64655 - RNA, 19 nt, Artificial Sequence
  Description of Artificial Sequence: Synthetic oligonucleotide
auggggcggaauucggccc

SEQ ID NO: 64656 - RNA, 19 nt, Artificial Sequence
  Description of Artificial Sequence: Synthetic oligonucleotide
caucccaaagcgcuuucgg

SEQ ID NO: 64657 - RNA, 19 nt, Artificial Sequence
  Description of Artificial Sequence: Synthetic oligonucleotide
uguauccucuacaccuggc

SEQ ID NO: 64658 - RNA, 19 nt, Artificial Sequence
  Description of Artificial Sequence: Synthetic oligonucleotide
augacggcaacagugaaaa

SEQ ID NO: 64659 - RNA, 19 nt, Artificial Sequence
  Description of Artificial Sequence: Synthetic oligonucleotide
cuacacuaaauaccaggug

SEQ ID NO: 64660 - RNA, 19 nt, Artificial Sequence
  Description of Artificial Sequence: Synthetic oligonucleotide
aacugggaugcuuacuauu

SEQ ID NO: 64661 - RNA, 19 nt, Artificial Sequence
  Description of Artificial Sequence: Synthetic oligonucleotide
uaucacaguccgcuuuggc

SEQ ID NO: 64662 - RNA, 19 nt, Artificial Sequence
  Description of Artificial Sequence: Synthetic oligonucleotide
gauguccgaauugaugcug

SEQ ID NO: 64663 - RNA, 19 nt, Artificial Sequence
  Description of Artificial Sequence: Synthetic oligonucleotide
gcuaaucuugaauaccaug

SEQ ID NO: 64664 - RNA, 19 nt, Artificial Sequence
  Description of Artificial Sequence: Synthetic oligonucleotide
uucggcgcucuucucgccg

SEQ ID NO: 64665 - RNA, 19 nt, Artificial Sequence
  Description of Artificial Sequence: Synthetic oligonucleotide
gaggugagcucauguguag

SEQ ID NO: 64666 - RNA, 19 nt, Artificial Sequence
  Description of Artificial Sequence: Synthetic oligonucleotide
uaaggacgcagcuagucuu

SEQ ID NO: 64667 - RNA, 19 nt, Artificial Sequence
  Description of Artificial Sequence: Synthetic oligonucleotide
cuuauuagcacaggcucuc

SEQ ID NO: 64668 - RNA, 19 nt, Artificial Sequence
  Description of Artificial Sequence: Synthetic oligonucleotide
guacuugucacuagcguac

SEQ ID NO: 64669 - RNA, 19 nt, Artificial Sequence
  Description of Artificial Sequence: Synthetic oligonucleotide
uuaacaggcugcugugccu

SEQ ID NO: 64670 - RNA, 19 nt, Artificial Sequence
  Description of Artificial Sequence: Synthetic oligonucleotide
aggugagauggcacaagcc

SEQ ID NO: 64671 - RNA, 19 nt, Artificial Sequence
  Description of Artificial Sequence: Synthetic oligonucleotide
gaguuuaggggacacuuua

SEQ ID NO: 64672 - RNA, 19 nt, Artificial Sequence
  Description of Artificial Sequence: Synthetic oligonucleotide
aagguaaaucuuaguagau

SEQ ID NO: 64673 - RNA, 19 nt, Artificial Sequence
  Description of Artificial Sequence: Synthetic oligonucleotide
cuccgaucuauguccauac

SEQ ID NO: 64674 - RNA, 19 nt, Artificial Sequence
  Description of Artificial Sequence: Synthetic oligonucleotide
cagacagguuaaaacccag

SEQ ID NO: 64675 - RNA, 19 nt, Artificial Sequence
  Description of Artificial Sequence: Synthetic oligonucleotide
cagaggggcaauaggcacc

SEQ ID NO: 64676 - RNA, 19 nt, Artificial Sequence
  Description of Artificial Sequence: Synthetic oligonucleotide
cucuuugacccgcaacaag

SEQ ID NO: 64677 - RNA, 19 nt, Artificial Sequence
  Description of Artificial Sequence: Synthetic oligonucleotide
ggcagacuagaacauucgg

SEQ ID NO: 64678 - RNA, 19 nt, Artificial Sequence
  Description of Artificial Sequence: Synthetic oligonucleotide
ucacuagcguacuucuuau

SEQ ID NO: 64679 - RNA, 19 nt, Artificial Sequence
  Description of Artificial Sequence: Synthetic oligonucleotide
guagauagccgcucacuuc

SEQ ID NO: 64680 - RNA, 19 nt, Artificial Sequence
  Description of Artificial Sequence: Synthetic oligonucleotide
cugcguuuugaggucaggg

SEQ ID NO: 64681 - RNA, 19 nt, Artificial Sequence
  Description of Artificial Sequence: Synthetic oligonucleotide
aaugacggcaacagugaaa

SEQ ID NO: 64682 - RNA, 19 nt, Artificial Sequence
  Description of Artificial Sequence: Synthetic oligonucleotide
agagggguaguuuccacuu

SEQ ID NO: 64683 - RNA, 19 nt, Artificial Sequence
  Description of Artificial Sequence: Synthetic oligonucleotide
gcauuaauaccaaagguaa

SEQ ID NO: 64684 - RNA, 19 nt, Artificial Sequence
  Description of Artificial Sequence: Synthetic oligonucleotide
cagugggccaaauacaaaa

SEQ ID NO: 64685 - RNA, 19 nt, Artificial Sequence
  Description of Artificial Sequence: Synthetic oligonucleotide
guugccggguaacacagga

SEQ ID NO: 64686 - RNA, 19 nt, Artificial Sequence
  Description of Artificial Sequence: Synthetic oligonucleotide
ggcuagcuuauuaacaggc

SEQ ID NO: 64687 - RNA, 19 nt, Artificial Sequence
  Description of Artificial Sequence: Synthetic oligonucleotide
acuuauuagcacaggcucu

SEQ ID NO: 64688 - RNA, 19 nt, Artificial Sequence
  Description of Artificial Sequence: Synthetic oligonucleotide
uguaacugggaugcuuacu

SEQ ID NO: 64689 - RNA, 19 nt, Artificial Sequence
  Description of Artificial Sequence: Synthetic oligonucleotide
aggggcaauaggcaccugu

SEQ ID NO: 64690 - RNA, 19 nt, Artificial Sequence
  Description of Artificial Sequence: Synthetic oligonucleotide
cuauagccaaggacucuag

SEQ ID NO: 64691 - RNA, 19 nt, Artificial Sequence
  Description of Artificial Sequence: Synthetic oligonucleotide
ggcaauaggcaccuguuuc

SEQ ID NO: 64692 - RNA, 19 nt, Artificial Sequence
  Description of Artificial Sequence: Synthetic oligonucleotide
acauucgguggcucugcuc

SEQ ID NO: 64693 - RNA, 19 nt, Artificial Sequence
  Description of Artificial Sequence: Synthetic oligonucleotide
ggaugcuuacuauuucuac

SEQ ID NO: 64694 - RNA, 19 nt, Artificial Sequence
  Description of Artificial Sequence: Synthetic oligonucleotide
cuauguccauacguagggg

SEQ ID NO: 64695 - RNA, 19 nt, Artificial Sequence
  Description of Artificial Sequence: Synthetic oligonucleotide
caucagugggccaaauaca

SEQ ID NO: 64696 - RNA, 19 nt, Artificial Sequence
  Description of Artificial Sequence: Synthetic oligonucleotide
aagucgguucugcucuaga

SEQ ID NO: 64697 - RNA, 19 nt, Artificial Sequence
  Description of Artificial Sequence: Synthetic oligonucleotide
gugucagguggauaaggac

SEQ ID NO: 64698 - RNA, 19 nt, Artificial Sequence
  Description of Artificial Sequence: Synthetic oligonucleotide
gucacuagcguacuucuua

SEQ ID NO: 64699 - RNA, 19 nt, Artificial Sequence
  Description of Artificial Sequence: Synthetic oligonucleotide
agcguggcuaaucuugaau

SEQ ID NO: 64700 - RNA, 19 nt, Artificial Sequence
  Description of Artificial Sequence: Synthetic oligonucleotide
uguccauacguaggggugu

SEQ ID NO: 64701 - RNA, 19 nt, Artificial Sequence
  Description of Artificial Sequence: Synthetic oligonucleotide
uacguagggguguauccuc

SEQ ID NO: 64702 - RNA, 19 nt, Artificial Sequence
  Description of Artificial Sequence: Synthetic oligonucleotide
uuaccuccuggggugcugg

SEQ ID NO: 64703 - RNA, 19 nt, Artificial Sequence
  Description of Artificial Sequence: Synthetic oligonucleotide
cauccauacccacaguuaa

SEQ ID NO: 64704 - RNA, 19 nt, Artificial Sequence
  Description of Artificial Sequence: Synthetic oligonucleotide
agucgguucugcucuagaa

SEQ ID NO: 64705 - RNA, 19 nt, Artificial Sequence
  Description of Artificial Sequence: Synthetic oligonucleotide
gcaacaagaccuccaauuc

SEQ ID NO: 64706 - RNA, 19 nt, Artificial Sequence
  Description of Artificial Sequence: Synthetic oligonucleotide
caugagaccugcucaauua

SEQ ID NO: 64707 - RNA, 19 nt, Artificial Sequence
  Description of Artificial Sequence: Synthetic oligonucleotide
ucggcccagucaaaugucu

SEQ ID NO: 64708 - RNA, 19 nt, Artificial Sequence
  Description of Artificial Sequence: Synthetic oligonucleotide
ggacacuuuaucugcagga

SEQ ID NO: 64709 - RNA, 19 nt, Artificial Sequence
  Description of Artificial Sequence: Synthetic oligonucleotide
gaccugauguuucugaguu

SEQ ID NO: 64710 - RNA, 19 nt, Artificial Sequence
  Description of Artificial Sequence: Synthetic oligonucleotide
ucguucacauguagccugu

SEQ ID NO: 64711 - RNA, 19 nt, Artificial Sequence
  Description of Artificial Sequence: Synthetic oligonucleotide
ugcuuacuauuucuacaua

SEQ ID NO: 64712 - RNA, 19 nt, Artificial Sequence
  Description of Artificial Sequence: Synthetic oligonucleotide
cagggcuagcuuauuaaca

SEQ ID NO: 64713 - RNA, 19 nt, Artificial Sequence
  Description of Artificial Sequence: Synthetic oligonucleotide
auacguagggguguauccu

SEQ ID NO: 64714 - RNA, 19 nt, Artificial Sequence
  Description of Artificial Sequence: Synthetic oligonucleotide
aguagugcccucaggagau

SEQ ID NO: 64715 - RNA, 19 nt, Artificial Sequence
  Description of Artificial Sequence: Synthetic oligonucleotide
uuguaggaaacgccuuaua

SEQ ID NO: 64716 - RNA, 19 nt, Artificial Sequence
  Description of Artificial Sequence: Synthetic oligonucleotide
auauccugacacaguagug

SEQ ID NO: 64717 - RNA, 19 nt, Artificial Sequence
  Description of Artificial Sequence: Synthetic oligonucleotide
auaucacaguccgcuuugg

SEQ ID NO: 64718 - RNA, 19 nt, Artificial Sequence
  Description of Artificial Sequence: Synthetic oligonucleotide
aauuacggacuuggaccug

SEQ ID NO: 64719 - RNA, 19 nt, Artificial Sequence
  Description of Artificial Sequence: Synthetic oligonucleotide
uaacugggaugcuuacuau

SEQ ID NO: 64720 - RNA, 19 nt, Artificial Sequence
  Description of Artificial Sequence: Synthetic oligonucleotide
gcaaaagucgguucugcuc

SEQ ID NO: 64721 - RNA, 19 nt, Artificial Sequence
  Description of Artificial Sequence: Synthetic oligonucleotide
guaaaucuuaguagauuaa

SEQ ID NO: 64722 - RNA, 19 nt, Artificial Sequence
  Description of Artificial Sequence: Synthetic oligonucleotide
agguaaaucuuaguagauu

SEQ ID NO: 64723 - RNA, 19 nt, Artificial Sequence
  Description of Artificial Sequence: Synthetic oligonucleotide
uccccucuagaugacccag

SEQ ID NO: 64724 - RNA, 19 nt, Artificial Sequence
  Description of Artificial Sequence: Synthetic oligonucleotide
ccacauguauacucugagg

SEQ ID NO: 64725 - RNA, 19 nt, Artificial Sequence
  Description of Artificial Sequence: Synthetic oligonucleotide
ucgccgucgagcucuuuca

SEQ ID NO: 64726 - RNA, 19 nt, Artificial Sequence
  Description of Artificial Sequence: Synthetic oligonucleotide
gggcuagcuuauuaacagg

SEQ ID NO: 64727 - RNA, 19 nt, Artificial Sequence
  Description of Artificial Sequence: Synthetic oligonucleotide
uucucacguuggcauugcc

SEQ ID NO: 64728 - RNA, 19 nt, Artificial Sequence
  Description of Artificial Sequence: Synthetic oligonucleotide
uuggaagcgggcgcgacuc

SEQ ID NO: 64729 - RNA, 19 nt, Artificial Sequence
  Description of Artificial Sequence: Synthetic oligonucleotide
agcuucaagcgcucuugca

SEQ ID NO: 64730 - RNA, 19 nt, Artificial Sequence
  Description of Artificial Sequence: Synthetic oligonucleotide
ucuuaucccgaagggcugu

SEQ ID NO: 64731 - RNA, 19 nt, Artificial Sequence
  Description of Artificial Sequence: Synthetic oligonucleotide
auguccauacguaggggug

SEQ ID NO: 64732 - RNA, 19 nt, Artificial Sequence
  Description of Artificial Sequence: Synthetic oligonucleotide
agacgugcacuagcaugcc

SEQ ID NO: 64733 - RNA, 19 nt, Artificial Sequence
  Description of Artificial Sequence: Synthetic oligonucleotide
acugggaugcuuacuauuu

SEQ ID NO: 64734 - RNA, 19 nt, Artificial Sequence
  Description of Artificial Sequence: Synthetic oligonucleotide
ugacccgcaacaagaccuc

SEQ ID NO: 64735 - RNA, 19 nt, Artificial Sequence
  Description of Artificial Sequence: Synthetic oligonucleotide
acgccuuauacuaaaccau

SEQ ID NO: 64736 - RNA, 19 nt, Artificial Sequence
  Description of Artificial Sequence: Synthetic oligonucleotide
gauaggugcagaggggcaa

SEQ ID NO: 64737 - RNA, 19 nt, Artificial Sequence
  Description of Artificial Sequence: Synthetic oligonucleotide
agaggggcaauaggcaccu

SEQ ID NO: 64738 - RNA, 19 nt, Artificial Sequence
  Description of Artificial Sequence: Synthetic oligonucleotide
cugaguugccggguaacac

SEQ ID NO: 64739 - RNA, 19 nt, Artificial Sequence
  Description of Artificial Sequence: Synthetic oligonucleotide
cugggcuccgaucuauguc

SEQ ID NO: 64740 - RNA, 19 nt, Artificial Sequence
  Description of Artificial Sequence: Synthetic oligonucleotide
ccugcucagaugucagugg

SEQ ID NO: 64741 - RNA, 19 nt, Artificial Sequence
  Description of Artificial Sequence: Synthetic oligonucleotide
aguccgcuuuggccuuugc

SEQ ID NO: 64742 - RNA, 19 nt, Artificial Sequence
  Description of Artificial Sequence: Synthetic oligonucleotide
ggaauggagcaaauacccc

SEQ ID NO: 64743 - RNA, 19 nt, Artificial Sequence
  Description of Artificial Sequence: Synthetic oligonucleotide
gagagggguaguuuccacu

SEQ ID NO: 64744 - RNA, 19 nt, Artificial Sequence
  Description of Artificial Sequence: Synthetic oligonucleotide
ugacggcaacagugaaaag

SEQ ID NO: 64745 - RNA, 19 nt, Artificial Sequence
  Description of Artificial Sequence: Synthetic oligonucleotide
gcugauaucacaguccgcu

SEQ ID NO: 64746 - RNA, 19 nt, Artificial Sequence
  Description of Artificial Sequence: Synthetic oligonucleotide
gcucuaaccagcaggggug

SEQ ID NO: 64747 - RNA, 19 nt, Artificial Sequence
  Description of Artificial Sequence: Synthetic oligonucleotide
cuguauagaugucuuugua

SEQ ID NO: 64748 - RNA, 19 nt, Artificial Sequence
  Description of Artificial Sequence: Synthetic oligonucleotide
cucgccgucgagcucuuuc

SEQ ID NO: 64749 - RNA, 19 nt, Artificial Sequence
  Description of Artificial Sequence: Synthetic oligonucleotide
aggguaggaucaucacacu

SEQ ID NO: 64750 - RNA, 19 nt, Artificial Sequence
  Description of Artificial Sequence: Synthetic oligonucleotide
gcagcuguaauggaagguc

SEQ ID NO: 64751 - RNA, 19 nt, Artificial Sequence
  Description of Artificial Sequence: Synthetic oligonucleotide
uacuugucacuagcguacu

SEQ ID NO: 64752 - RNA, 19 nt, Artificial Sequence
  Description of Artificial Sequence: Synthetic oligonucleotide
aagcgggcgcgacucaguu

SEQ ID NO: 64753 - RNA, 19 nt, Artificial Sequence
  Description of Artificial Sequence: Synthetic oligonucleotide
ugucacuagcguacuucuu

SEQ ID NO: 64754 - RNA, 19 nt, Artificial Sequence
  Description of Artificial Sequence: Synthetic oligonucleotide
uuucggcgcucuucucgcc

SEQ ID NO: 64755 - RNA, 19 nt, Artificial Sequence
  Description of Artificial Sequence: Synthetic oligonucleotide
aaagccucguucacaugua

SEQ ID NO: 64756 - RNA, 19 nt, Artificial Sequence
  Description of Artificial Sequence: Synthetic oligonucleotide
gacuacgacaggggacuug

SEQ ID NO: 64757 - RNA, 19 nt, Artificial Sequence
  Description of Artificial Sequence: Synthetic oligonucleotide
cccucuagaugacccaggg

SEQ ID NO: 64758 - RNA, 19 nt, Artificial Sequence
  Description of Artificial Sequence: Synthetic oligonucleotide
ugcuugagcguggcuaauc

SEQ ID NO: 64759 - RNA, 19 nt, Artificial Sequence
  Description of Artificial Sequence: Synthetic oligonucleotide
gccgucgagcucuuucacg

SEQ ID NO: 64760 - RNA, 19 nt, Artificial Sequence
  Description of Artificial Sequence: Synthetic oligonucleotide
gcugcugugccuuaauacu

SEQ ID NO: 64761 - RNA, 19 nt, Artificial Sequence
  Description of Artificial Sequence: Synthetic oligonucleotide
uugccggguaacacaggau

SEQ ID NO: 64762 - RNA, 19 nt, Artificial Sequence
  Description of Artificial Sequence: Synthetic oligonucleotide
cacuagcguacuucuuauc

SEQ ID NO: 64763 - RNA, 19 nt, Artificial Sequence
  Description of Artificial Sequence: Synthetic oligonucleotide
uuaucccgaagggcugucu

SEQ ID NO: 64764 - RNA, 19 nt, Artificial Sequence
  Description of Artificial Sequence: Synthetic oligonucleotide
acucuuugacccgcaacaa

SEQ ID NO: 64765 - RNA, 19 nt, Artificial Sequence
  Description of Artificial Sequence: Synthetic oligonucleotide
agucgauuauucagcuccu

SEQ ID NO: 64766 - RNA, 19 nt, Artificial Sequence
  Description of Artificial Sequence: Synthetic oligonucleotide
acaccugaccacaaacuuu

SEQ ID NO: 64767 - RNA, 19 nt, Artificial Sequence
  Description of Artificial Sequence: Synthetic oligonucleotide
cguggcuaaucuugaauac

SEQ ID NO: 64768 - RNA, 19 nt, Artificial Sequence
  Description of Artificial Sequence: Synthetic oligonucleotide
gauagccgcucacuucugu

SEQ ID NO: 64769 - RNA, 19 nt, Artificial Sequence
  Description of Artificial Sequence: Synthetic oligonucleotide
guccgcuuuggccuuugca

SEQ ID NO: 64770 - RNA, 19 nt, Artificial Sequence
  Description of Artificial Sequence: Synthetic oligonucleotide
gcguggcuaaucuugaaua

SEQ ID NO: 64771 - RNA, 19 nt, Artificial Sequence
  Description of Artificial Sequence: Synthetic oligonucleotide
ugccaucgcugcucaauuu

SEQ ID NO: 64772 - RNA, 19 nt, Artificial Sequence
  Description of Artificial Sequence: Synthetic oligonucleotide
ggcgcgacucaguuauccc

SEQ ID NO: 64773 - RNA, 19 nt, Artificial Sequence
  Description of Artificial Sequence: Synthetic oligonucleotide
gcuauucuuagcagcccug

SEQ ID NO: 64774 - RNA, 19 nt, Artificial Sequence
  Description of Artificial Sequence: Synthetic oligonucleotide
gaauucggcccagucaaau

SEQ ID NO: 64775 - RNA, 19 nt, Artificial Sequence
  Description of Artificial Sequence: Synthetic oligonucleotide
gcuccgaaaggaccuccag

SEQ ID NO: 64776 - RNA, 19 nt, Artificial Sequence
  Description of Artificial Sequence: Synthetic oligonucleotide
uggaagcgggcgcgacuca

SEQ ID NO: 64777 - RNA, 19 nt, Artificial Sequence
  Description of Artificial Sequence: Synthetic oligonucleotide
aguugccggguaacacagg

SEQ ID NO: 64778 - RNA, 19 nt, Artificial Sequence
  Description of Artificial Sequence: Synthetic oligonucleotide
cucucgagcacggcucuuc

SEQ ID NO: 64779 - RNA, 19 nt, Artificial Sequence
  Description of Artificial Sequence: Synthetic oligonucleotide
gguuagcuauagccaagga

SEQ ID NO: 64780 - RNA, 19 nt, Artificial Sequence
  Description of Artificial Sequence: Synthetic oligonucleotide
acguagggguguauccucu

SEQ ID NO: 64781 - RNA, 19 nt, Artificial Sequence
  Description of Artificial Sequence: Synthetic oligonucleotide
gcaucccaaagcgcuuucg

SEQ ID NO: 64782 - RNA, 19 nt, Artificial Sequence
  Description of Artificial Sequence: Synthetic oligonucleotide
agcguacuucuuaucccga

SEQ ID NO: 64783 - RNA, 19 nt, Artificial Sequence
  Description of Artificial Sequence: Synthetic oligonucleotide
ccuccaauucguaggcauc

SEQ ID NO: 64784 - RNA, 19 nt, Artificial Sequence
  Description of Artificial Sequence: Synthetic oligonucleotide
gcuauagccaaggacucua

SEQ ID NO: 64785 - RNA, 19 nt, Artificial Sequence
  Description of Artificial Sequence: Synthetic oligonucleotide
cuuaucccgaagggcuguc

SEQ ID NO: 64786 - RNA, 19 nt, Artificial Sequence
  Description of Artificial Sequence: Synthetic oligonucleotide
cuauucuuagcagcccugu

SEQ ID NO: 64787 - RNA, 19 nt, Artificial Sequence
  Description of Artificial Sequence: Synthetic oligonucleotide
aaagccgcccugggcuuau

SEQ ID NO: 64788 - RNA, 19 nt, Artificial Sequence
  Description of Artificial Sequence: Synthetic oligonucleotide
ggccacccuuaacuggucc

SEQ ID NO: 64789 - RNA, 19 nt, Artificial Sequence
  Description of Artificial Sequence: Synthetic oligonucleotide
gcgcgacucaguuauccca

SEQ ID NO: 64790 - RNA, 19 nt, Artificial Sequence
  Description of Artificial Sequence: Synthetic oligonucleotide
gggcgcgacucaguuaucc

SEQ ID NO: 64791 - RNA, 19 nt, Artificial Sequence
  Description of Artificial Sequence: Synthetic oligonucleotide
gaagauccgaggccucuuu

SEQ ID NO: 64792 - RNA, 19 nt, Artificial Sequence
  Description of Artificial Sequence: Synthetic oligonucleotide
ccuuaacugguccugcaaa

SEQ ID NO: 64793 - RNA, 19 nt, Artificial Sequence
  Description of Artificial Sequence: Synthetic oligonucleotide
guaguguccucaaccgugu

SEQ ID NO: 64794 - RNA, 19 nt, Artificial Sequence
  Description of Artificial Sequence: Synthetic oligonucleotide
gacgugcacuagcaugccu

SEQ ID NO: 64795 - RNA, 19 nt, Artificial Sequence
  Description of Artificial Sequence: Synthetic oligonucleotide
ccccucuagaugacccagg

SEQ ID NO: 64796 - RNA, 19 nt, Artificial Sequence
  Description of Artificial Sequence: Synthetic oligonucleotide
ggugagcucauguguagau

SEQ ID NO: 64797 - RNA, 19 nt, Artificial Sequence
  Description of Artificial Sequence: Synthetic oligonucleotide
gugagcucauguguagaua

SEQ ID NO: 64798 - RNA, 19 nt, Artificial Sequence
  Description of Artificial Sequence: Synthetic oligonucleotide
ccagucgauuauucagcuc

SEQ ID NO: 64799 - RNA, 19 nt, Artificial Sequence
  Description of Artificial Sequence: Synthetic oligonucleotide
gugccuuaauacugacagu

SEQ ID NO: 64800 - RNA, 19 nt, Artificial Sequence
  Description of Artificial Sequence: Synthetic oligonucleotide
ccgaucuauguccauacgu

SEQ ID NO: 64801 - RNA, 19 nt, Artificial Sequence
  Description of Artificial Sequence: Synthetic oligonucleotide
gcgacucaguuaucccaug

SEQ ID NO: 64802 - RNA, 19 nt, Artificial Sequence
  Description of Artificial Sequence: Synthetic oligonucleotide
cuucgauguccgaauugau

SEQ ID NO: 64803 - RNA, 19 nt, Artificial Sequence
  Description of Artificial Sequence: Synthetic oligonucleotide
gacuuggaagcgggcgcga

SEQ ID NO: 64804 - RNA, 19 nt, Artificial Sequence
  Description of Artificial Sequence: Synthetic oligonucleotide
gggaugcuuacuauuucua

SEQ ID NO: 64805 - RNA, 19 nt, Artificial Sequence
  Description of Artificial Sequence: Synthetic oligonucleotide
aucuccgcagccagucgau

SEQ ID NO: 64806 - RNA, 19 nt, Artificial Sequence
  Description of Artificial Sequence: Synthetic oligonucleotide
ggcacgagcggaggaagga

SEQ ID NO: 64807 - RNA, 19 nt, Artificial Sequence
  Description of Artificial Sequence: Synthetic oligonucleotide
gugaaagauuugccaggau

SEQ ID NO: 64808 - RNA, 19 nt, Artificial Sequence
  Description of Artificial Sequence: Synthetic oligonucleotide
cacgagcggaggaaggaau

SEQ ID NO: 64809 - RNA, 19 nt, Artificial Sequence
  Description of Artificial Sequence: Synthetic oligonucleotide
cccuaugcacauacacuga

SEQ ID NO: 64810 - RNA, 19 nt, Artificial Sequence
  Description of Artificial Sequence: Synthetic oligonucleotide
agcgggcgcgacucaguua

SEQ ID NO: 64811 - RNA, 19 nt, Artificial Sequence
  Description of Artificial Sequence: Synthetic oligonucleotide
cacacuugacaagccugaa

SEQ ID NO: 64812 - RNA, 19 nt, Artificial Sequence
  Description of Artificial Sequence: Synthetic oligonucleotide
cugauaucacaguccgcuu

SEQ ID NO: 64813 - RNA, 19 nt, Artificial Sequence
  Description of Artificial Sequence: Synthetic oligonucleotide
gugccaucgcugcucaauu

SEQ ID NO: 64814 - RNA, 19 nt, Artificial Sequence
  Description of Artificial Sequence: Synthetic oligonucleotide
ggaggcacgagcggaggaa

SEQ ID NO: 64815 - RNA, 19 nt, Artificial Sequence
  Description of Artificial Sequence: Synthetic oligonucleotide
gcucaauuacggacuugga

SEQ ID NO: 64816 - RNA, 19 nt, Artificial Sequence
  Description of Artificial Sequence: Synthetic oligonucleotide
ccgggcacucugcucucgg

SEQ ID NO: 64817 - RNA, 19 nt, Artificial Sequence
  Description of Artificial Sequence: Synthetic oligonucleotide
gcuccgaucuauguccaua

SEQ ID NO: 64818 - RNA, 19 nt, Artificial Sequence
  Description of Artificial Sequence: Synthetic oligonucleotide
guccauacguaggggugua

SEQ ID NO: 64819 - RNA, 19 nt, Artificial Sequence
  Description of Artificial Sequence: Synthetic oligonucleotide
uucucgccgucgagcucuu

SEQ ID NO: 64820 - RNA, 19 nt, Artificial Sequence
  Description of Artificial Sequence: Synthetic oligonucleotide
agacuacgacaggggacuu

SEQ ID NO: 64821 - RNA, 19 nt, Artificial Sequence
  Description of Artificial Sequence: Synthetic oligonucleotide
cguuggcauugccguaggg

SEQ ID NO: 64822 - RNA, 19 nt, Artificial Sequence
  Description of Artificial Sequence: Synthetic oligonucleotide
cgacucaguuaucccauga

SEQ ID NO: 64823 - RNA, 19 nt, Artificial Sequence
  Description of Artificial Sequence: Synthetic oligonucleotide
gaggggcaauaggcaccug

SEQ ID NO: 64824 - RNA, 19 nt, Artificial Sequence
  Description of Artificial Sequence: Synthetic oligonucleotide
gcgcuuucggcgcucuucu

SEQ ID NO: 64825 - RNA, 19 nt, Artificial Sequence
  Description of Artificial Sequence: Synthetic oligonucleotide
gccggguaacacaggaucu

SEQ ID NO: 64826 - RNA, 19 nt, Artificial Sequence
  Description of Artificial Sequence: Synthetic oligonucleotide
ggcuaaucuugaauaccau

SEQ ID NO: 64827 - RNA, 19 nt, Artificial Sequence
  Description of Artificial Sequence: Synthetic oligonucleotide
ggaauucggcccagucaaa

SEQ ID NO: 64828 - RNA, 19 nt, Artificial Sequence
  Description of Artificial Sequence: Synthetic oligonucleotide
ggaguuuaggggacacuuu

SEQ ID NO: 64829 - RNA, 19 nt, Artificial Sequence
  Description of Artificial Sequence: Synthetic oligonucleotide
ggggcggaauucggcccag

SEQ ID NO: 64830 - RNA, 19 nt, Artificial Sequence
  Description of Artificial Sequence: Synthetic oligonucleotide
ggggcaauaggcaccuguu

SEQ ID NO: 64831 - RNA, 19 nt, Artificial Sequence
  Description of Artificial Sequence: Synthetic oligonucleotide
cucgagcacggcucuucuu

SEQ ID NO: 64832 - RNA, 19 nt, Artificial Sequence
  Description of Artificial Sequence: Synthetic oligonucleotide
ccucuagaugacccagggu

SEQ ID NO: 64833 - RNA, 19 nt, Artificial Sequence
  Description of Artificial Sequence: Synthetic oligonucleotide
cgccgucgagcucuuucac

SEQ ID NO: 64834 - RNA, 19 nt, Artificial Sequence
  Description of Artificial Sequence: Synthetic oligonucleotide
ccgaauugaugcugcugau

SEQ ID NO: 64835 - RNA, 19 nt, Artificial Sequence
  Description of Artificial Sequence: Synthetic oligonucleotide
gccguagggccugccgcuc

SEQ ID NO: 64836 - RNA, 19 nt, Artificial Sequence
  Description of Artificial Sequence: Synthetic oligonucleotide
guagugcccucaggagauu

SEQ ID NO: 64837 - RNA, 19 nt, Artificial Sequence
  Description of Artificial Sequence: Synthetic oligonucleotide
cgggcgcgacucaguuauc

SEQ ID NO: 64838 - RNA, 19 nt, Artificial Sequence
  Description of Artificial Sequence: Synthetic oligonucleotide
cggcgcucuucucgccguc

SEQ ID NO: 64839 - RNA, 19 nt, Artificial Sequence
  Description of Artificial Sequence: Synthetic oligonucleotide
cgccuccgcucucgagcac

SEQ ID NO: 64840 - RNA, 19 nt, Artificial Sequence
  Description of Artificial Sequence: Synthetic oligonucleotide
gggcggaauucggcccagu

SEQ ID NO: 64841 - RNA, 19 nt, Artificial Sequence
  Description of Artificial Sequence: Synthetic oligonucleotide
cggggcuuuugugcaagau

SEQ ID NO: 64842 - RNA, 19 nt, Artificial Sequence
  Description of Artificial Sequence: Synthetic oligonucleotide
ucuuaauuagcaaagauca

SEQ ID NO: 64843 - RNA, 19 nt, Artificial Sequence
  Description of Artificial Sequence: Synthetic oligonucleotide
aaugaauuuguauugucag

SEQ ID NO: 64844 - RNA, 19 nt, Artificial Sequence
  Description of Artificial Sequence: Synthetic oligonucleotide
uuagcuauuaaaaggaggc

SEQ ID NO: 64845 - RNA, 19 nt, Artificial Sequence
  Description of Artificial Sequence: Synthetic oligonucleotide
cuugagauagccuugacag

SEQ ID NO: 64846 - RNA, 19 nt, Artificial Sequence
  Description of Artificial Sequence: Synthetic oligonucleotide
uaauuagcuauuaaaagga

SEQ ID NO: 64847 - RNA, 19 nt, Artificial Sequence
  Description of Artificial Sequence: Synthetic oligonucleotide
agagucuagucucauaccc

SEQ ID NO: 64848 - RNA, 19 nt, Artificial Sequence
  Description of Artificial Sequence: Synthetic oligonucleotide
aauguuuccccuaggaggc

SEQ ID NO: 64849 - RNA, 19 nt, Artificial Sequence
  Description of Artificial Sequence: Synthetic oligonucleotide
uguccaaugaacucgaucu

SEQ ID NO: 64850 - RNA, 19 nt, Artificial Sequence
  Description of Artificial Sequence: Synthetic oligonucleotide
aauacagccaucgaaaaga

SEQ ID NO: 64851 - RNA, 19 nt, Artificial Sequence
  Description of Artificial Sequence: Synthetic oligonucleotide
auagcaacugcaaacagcc

SEQ ID NO: 64852 - RNA, 19 nt, Artificial Sequence
  Description of Artificial Sequence: Synthetic oligonucleotide
uuaaauagguaacaacugu

SEQ ID NO: 64853 - RNA, 19 nt, Artificial Sequence
  Description of Artificial Sequence: Synthetic oligonucleotide
aaggcuaggacucugaaua

SEQ ID NO: 64854 - RNA, 19 nt, Artificial Sequence
  Description of Artificial Sequence: Synthetic oligonucleotide
gagguaauagcgcacagag

SEQ ID NO: 64855 - RNA, 19 nt, Artificial Sequence
  Description of Artificial Sequence: Synthetic oligonucleotide
ucauaguagaguucgaucu

SEQ ID NO: 64856 - RNA, 19 nt, Artificial Sequence
  Description of Artificial Sequence: Synthetic oligonucleotide
uccaacuuagaugagacag

SEQ ID NO: 64857 - RNA, 19 nt, Artificial Sequence
  Description of Artificial Sequence: Synthetic oligonucleotide
gguaacuucaaauaauucc

SEQ ID NO: 64858 - RNA, 19 nt, Artificial Sequence
  Description of Artificial Sequence: Synthetic oligonucleotide
uccgauguuagcaaaguug

SEQ ID NO: 64859 - RNA, 19 nt, Artificial Sequence
  Description of Artificial Sequence: Synthetic oligonucleotide
aguguuacgacauccacca

SEQ ID NO: 64860 - RNA, 19 nt, Artificial Sequence
  Description of Artificial Sequence: Synthetic oligonucleotide
uagauugugggaugaaagg

SEQ ID NO: 64861 - RNA, 19 nt, Artificial Sequence
  Description of Artificial Sequence: Synthetic oligonucleotide
uagguaacaacugugaaac

SEQ ID NO: 64862 - RNA, 19 nt, Artificial Sequence
  Description of Artificial Sequence: Synthetic oligonucleotide
uguucugacgcuaugguaa

SEQ ID NO: 64863 - RNA, 19 nt, Artificial Sequence
  Description of Artificial Sequence: Synthetic oligonucleotide
cuuaaauagguaacaacug

SEQ ID NO: 64864 - RNA, 19 nt, Artificial Sequence
  Description of Artificial Sequence: Synthetic oligonucleotide
aagacauaauuuggcaagc

SEQ ID NO: 64865 - RNA, 19 nt, Artificial Sequence
  Description of Artificial Sequence: Synthetic oligonucleotide
ucaauuaaucaucuuaauu

SEQ ID NO: 64866 - RNA, 19 nt, Artificial Sequence
  Description of Artificial Sequence: Synthetic oligonucleotide
aauuacaaguugcacugcu

SEQ ID NO: 64867 - RNA, 19 nt, Artificial Sequence
  Description of Artificial Sequence: Synthetic oligonucleotide
ucacguagaggacaagggg

SEQ ID NO: 64868 - RNA, 19 nt, Artificial Sequence
  Description of Artificial Sequence: Synthetic oligonucleotide
ugaauuggugaagauaaag

SEQ ID NO: 64869 - RNA, 19 nt, Artificial Sequence
  Description of Artificial Sequence: Synthetic oligonucleotide
aagagauaacuuuuaggga

SEQ ID NO: 64870 - RNA, 19 nt, Artificial Sequence
  Description of Artificial Sequence: Synthetic oligonucleotide
gacgugacuacccagaguc

SEQ ID NO: 64871 - RNA, 19 nt, Artificial Sequence
  Description of Artificial Sequence: Synthetic oligonucleotide
uguuaugaaucugagagaa

SEQ ID NO: 64872 - RNA, 19 nt, Artificial Sequence
  Description of Artificial Sequence: Synthetic oligonucleotide
aauguagugaauaacuuua

SEQ ID NO: 64873 - RNA, 19 nt, Artificial Sequence
  Description of Artificial Sequence: Synthetic oligonucleotide
uucuauagaggggagggcg

SEQ ID NO: 64874 - RNA, 19 nt, Artificial Sequence
  Description of Artificial Sequence: Synthetic oligonucleotide
ugacgcuaugguaacagag

SEQ ID NO: 64875 - RNA, 19 nt, Artificial Sequence
  Description of Artificial Sequence: Synthetic oligonucleotide
gacauaauuuggcaagcag

SEQ ID NO: 64876 - RNA, 19 nt, Artificial Sequence
  Description of Artificial Sequence: Synthetic oligonucleotide
aaauagcguagcuucacgu

SEQ ID NO: 64877 - RNA, 19 nt, Artificial Sequence
  Description of Artificial Sequence: Synthetic oligonucleotide
aagcuuaucaauuggccaa

SEQ ID NO: 64878 - RNA, 19 nt, Artificial Sequence
  Description of Artificial Sequence: Synthetic oligonucleotide
gauuccucccuuuagggac

SEQ ID NO: 64879 - RNA, 19 nt, Artificial Sequence
  Description of Artificial Sequence: Synthetic oligonucleotide
uuuaugcggcggcugaugg

SEQ ID NO: 64880 - RNA, 19 nt, Artificial Sequence
  Description of Artificial Sequence: Synthetic oligonucleotide
uguuacgacauccaccagu

SEQ ID NO: 64881 - RNA, 19 nt, Artificial Sequence
  Description of Artificial Sequence: Synthetic oligonucleotide
auagcguagcuucacguuc

SEQ ID NO: 64882 - RNA, 19 nt, Artificial Sequence
  Description of Artificial Sequence: Synthetic oligonucleotide
ucgaaaagacaacacauua

SEQ ID NO: 64883 - RNA, 19 nt, Artificial Sequence
  Description of Artificial Sequence: Synthetic oligonucleotide
gaucacaauguaaaacccg

SEQ ID NO: 64884 - RNA, 19 nt, Artificial Sequence
  Description of Artificial Sequence: Synthetic oligonucleotide
gaaauagcguagcuucacg

SEQ ID NO: 64885 - RNA, 19 nt, Artificial Sequence
  Description of Artificial Sequence: Synthetic oligonucleotide
cauaucucucacaagugag

SEQ ID NO: 64886 - RNA, 19 nt, Artificial Sequence
  Description of Artificial Sequence: Synthetic oligonucleotide
uggcuaguguccuagaaca

SEQ ID NO: 64887 - RNA, 19 nt, Artificial Sequence
  Description of Artificial Sequence: Synthetic oligonucleotide
auagccuugacagacagcu

SEQ ID NO: 64888 - RNA, 19 nt, Artificial Sequence
  Description of Artificial Sequence: Synthetic oligonucleotide
ucuauagaggggagggcgg

SEQ ID NO: 64889 - RNA, 19 nt, Artificial Sequence
  Description of Artificial Sequence: Synthetic oligonucleotide
aaauagguaacaacuguga

SEQ ID NO: 64890 - RNA, 19 nt, Artificial Sequence
  Description of Artificial Sequence: Synthetic oligonucleotide
agaucacaauguaaaaccc

SEQ ID NO: 64891 - RNA, 19 nt, Artificial Sequence
  Description of Artificial Sequence: Synthetic oligonucleotide
agauugugggaugaaaggg

SEQ ID NO: 64892 - RNA, 19 nt, Artificial Sequence
  Description of Artificial Sequence: Synthetic oligonucleotide
aauuagcuauuaaaaggag

SEQ ID NO: 64893 - RNA, 19 nt, Artificial Sequence
  Description of Artificial Sequence: Synthetic oligonucleotide
cuaaacuugagucagugaa

SEQ ID NO: 64894 - RNA, 19 nt, Artificial Sequence
  Description of Artificial Sequence: Synthetic oligonucleotide
ccaaguugagguaauagcg

SEQ ID NO: 64895 - RNA, 19 nt, Artificial Sequence
  Description of Artificial Sequence: Synthetic oligonucleotide
augaaucugagagaagcac

SEQ ID NO: 64896 - RNA, 19 nt, Artificial Sequence
  Description of Artificial Sequence: Synthetic oligonucleotide
aauguaaaacccgaggcuu

SEQ ID NO: 64897 - RNA, 19 nt, Artificial Sequence
  Description of Artificial Sequence: Synthetic oligonucleotide
uaggauauaugccugccuc

SEQ ID NO: 64898 - RNA, 19 nt, Artificial Sequence
  Description of Artificial Sequence: Synthetic oligonucleotide
gaagcuuaucaauuggcca

SEQ ID NO: 64899 - RNA, 19 nt, Artificial Sequence
  Description of Artificial Sequence: Synthetic oligonucleotide
agaggguaauccuuauuuc

SEQ ID NO: 64900 - RNA, 19 nt, Artificial Sequence
  Description of Artificial Sequence: Synthetic oligonucleotide
agaauuuagguaaacacau

SEQ ID NO: 64901 - RNA, 19 nt, Artificial Sequence
  Description of Artificial Sequence: Synthetic oligonucleotide
uaccauagcaacugcaaac

SEQ ID NO: 64902 - RNA, 19 nt, Artificial Sequence
  Description of Artificial Sequence: Synthetic oligonucleotide
ugguguuugguagaugggg

SEQ ID NO: 64903 - RNA, 19 nt, Artificial Sequence
  Description of Artificial Sequence: Synthetic oligonucleotide
uucgcaacuaucagguaca

SEQ ID NO: 64904 - RNA, 19 nt, Artificial Sequence
  Description of Artificial Sequence: Synthetic oligonucleotide
uuuaguaccuaugcacucc

SEQ ID NO: 64905 - RNA, 19 nt, Artificial Sequence
  Description of Artificial Sequence: Synthetic oligonucleotide
uaauagcgcacagagaacu

SEQ ID NO: 64906 - RNA, 19 nt, Artificial Sequence
  Description of Artificial Sequence: Synthetic oligonucleotide
auagguaacaacugugaaa

SEQ ID NO: 64907 - RNA, 19 nt, Artificial Sequence
  Description of Artificial Sequence: Synthetic oligonucleotide
guagauugugggaugaaag

SEQ ID NO: 64908 - RNA, 19 nt, Artificial Sequence
  Description of Artificial Sequence: Synthetic oligonucleotide
cauccaacuuagaugagac

SEQ ID NO: 64909 - RNA, 19 nt, Artificial Sequence
  Description of Artificial Sequence: Synthetic oligonucleotide
acgcuaugguaacagaguc

SEQ ID NO: 64910 - RNA, 19 nt, Artificial Sequence
  Description of Artificial Sequence: Synthetic oligonucleotide
uuguauugucagcugggag

SEQ ID NO: 64911 - RNA, 19 nt, Artificial Sequence
  Description of Artificial Sequence: Synthetic oligonucleotide
gauugggugauuucuccug

SEQ ID NO: 64912 - RNA, 19 nt, Artificial Sequence
  Description of Artificial Sequence: Synthetic oligonucleotide
ucgaucuguccaaugaacu

SEQ ID NO: 64913 - RNA, 19 nt, Artificial Sequence
  Description of Artificial Sequence: Synthetic oligonucleotide
cacgugaguaaacucaaag

SEQ ID NO: 64914 - RNA, 19 nt, Artificial Sequence
  Description of Artificial Sequence: Synthetic oligonucleotide
gacuugauugcuuccgagc

SEQ ID NO: 64915 - RNA, 19 nt, Artificial Sequence
  Description of Artificial Sequence: Synthetic oligonucleotide
uaauucccuagaacaaccc

SEQ ID NO: 64916 - RNA, 19 nt, Artificial Sequence
  Description of Artificial Sequence: Synthetic oligonucleotide
gucgguacagacugcaucc

SEQ ID NO: 64917 - RNA, 19 nt, Artificial Sequence
  Description of Artificial Sequence: Synthetic oligonucleotide
uucgaucuguccaaugaac

SEQ ID NO: 64918 - RNA, 19 nt, Artificial Sequence
  Description of Artificial Sequence: Synthetic oligonucleotide
agauaggcucaccuucccc

SEQ ID NO: 64919 - RNA, 19 nt, Artificial Sequence
  Description of Artificial Sequence: Synthetic oligonucleotide
aauagcguagcuucacguu

SEQ ID NO: 64920 - RNA, 19 nt, Artificial Sequence
  Description of Artificial Sequence: Synthetic oligonucleotide
ucacaauguaaaacccgag

SEQ ID NO: 64921 - RNA, 19 nt, Artificial Sequence
  Description of Artificial Sequence: Synthetic oligonucleotide
ugucagauaugagacaagu

SEQ ID NO: 64922 - RNA, 19 nt, Artificial Sequence
  Description of Artificial Sequence: Synthetic oligonucleotide
guucgcaacuaucagguac

SEQ ID NO: 64923 - RNA, 19 nt, Artificial Sequence
  Description of Artificial Sequence: Synthetic oligonucleotide
guuguugucagacaggggu

SEQ ID NO: 64924 - RNA, 19 nt, Artificial Sequence
  Description of Artificial Sequence: Synthetic oligonucleotide
uugagccucauaccgaccu

SEQ ID NO: 64925 - RNA, 19 nt, Artificial Sequence
  Description of Artificial Sequence: Synthetic oligonucleotide
acgugaguaaacucaaagu

SEQ ID NO: 64926 - RNA, 19 nt, Artificial Sequence
  Description of Artificial Sequence: Synthetic oligonucleotide
aguggugcuaaacuugagu

SEQ ID NO: 64927 - RNA, 19 nt, Artificial Sequence
  Description of Artificial Sequence: Synthetic oligonucleotide
agauagccuugacagacag

SEQ ID NO: 64928 - RNA, 19 nt, Artificial Sequence
  Description of Artificial Sequence: Synthetic oligonucleotide
auuuguauugucagcuggg

SEQ ID NO: 64929 - RNA, 19 nt, Artificial Sequence
  Description of Artificial Sequence: Synthetic oligonucleotide
uggaguucgcaacuaucag

SEQ ID NO: 64930 - RNA, 19 nt, Artificial Sequence
  Description of Artificial Sequence: Synthetic oligonucleotide
aacuuagaugagacaggcc

SEQ ID NO: 64931 - RNA, 19 nt, Artificial Sequence
  Description of Artificial Sequence: Synthetic oligonucleotide
uuaguaccuaugcacucca

SEQ ID NO: 64932 - RNA, 19 nt, Artificial Sequence
  Description of Artificial Sequence: Synthetic oligonucleotide
aaaacccgaggcuuaacuu

SEQ ID NO: 64933 - RNA, 19 nt, Artificial Sequence
  Description of Artificial Sequence: Synthetic oligonucleotide
ugugggaugaaaggguuug

SEQ ID NO: 64934 - RNA, 19 nt, Artificial Sequence
  Description of Artificial Sequence: Synthetic oligonucleotide
uuucucggaacccuauccu

SEQ ID NO: 64935 - RNA, 19 nt, Artificial Sequence
  Description of Artificial Sequence: Synthetic oligonucleotide
uauuauccugauuauccau

SEQ ID NO: 64936 - RNA, 19 nt, Artificial Sequence
  Description of Artificial Sequence: Synthetic oligonucleotide
agggacuuacucaugaaag

SEQ ID NO: 64937 - RNA, 19 nt, Artificial Sequence
  Description of Artificial Sequence: Synthetic oligonucleotide
agaaccuggagccaaggau

SEQ ID NO: 64938 - RNA, 19 nt, Artificial Sequence
  Description of Artificial Sequence: Synthetic oligonucleotide
aaggucuuugaaccaaaau

SEQ ID NO: 64939 - RNA, 19 nt, Artificial Sequence
  Description of Artificial Sequence: Synthetic oligonucleotide
ccgauguuagcaaaguugg

SEQ ID NO: 64940 - RNA, 19 nt, Artificial Sequence
  Description of Artificial Sequence: Synthetic oligonucleotide
caacuuagaugagacaggc

SEQ ID NO: 64941 - RNA, 19 nt, Artificial Sequence
  Description of Artificial Sequence: Synthetic oligonucleotide
gaaguagcgccguuccucc

SEQ ID NO: 64942 - RNA, 19 nt, Artificial Sequence
  Description of Artificial Sequence: Synthetic oligonucleotide
acauuuuagccuggauucc

SEQ ID NO: 64943 - RNA, 19 nt, Artificial Sequence
  Description of Artificial Sequence: Synthetic oligonucleotide
caaguaacggucaguugag

SEQ ID NO: 64944 - RNA, 19 nt, Artificial Sequence
  Description of Artificial Sequence: Synthetic oligonucleotide
ugggacuuaugaagguuag

SEQ ID NO: 64945 - RNA, 19 nt, Artificial Sequence
  Description of Artificial Sequence: Synthetic oligonucleotide
ggaguucgcaacuaucagg

SEQ ID NO: 64946 - RNA, 19 nt, Artificial Sequence
  Description of Artificial Sequence: Synthetic oligonucleotide
aacccgaggcuuaacuuac

SEQ ID NO: 64947 - RNA, 19 nt, Artificial Sequence
  Description of Artificial Sequence: Synthetic oligonucleotide
aacccugaacccuaggcua

SEQ ID NO: 64948 - RNA, 19 nt, Artificial Sequence
  Description of Artificial Sequence: Synthetic oligonucleotide
cucgaaggaaauagcguag

SEQ ID NO: 64949 - RNA, 19 nt, Artificial Sequence
  Description of Artificial Sequence: Synthetic oligonucleotide
aaguaacggucaguugagc

SEQ ID NO: 64950 - RNA, 19 nt, Artificial Sequence
  Description of Artificial Sequence: Synthetic oligonucleotide
ucucggaacccuauccuga

SEQ ID NO: 64951 - RNA, 19 nt, Artificial Sequence
  Description of Artificial Sequence: Synthetic oligonucleotide
uagggacuuacucaugaaa

SEQ ID NO: 64952 - RNA, 19 nt, Artificial Sequence
  Description of Artificial Sequence: Synthetic oligonucleotide
gcaaguaacggucaguuga

SEQ ID NO: 64953 - RNA, 19 nt, Artificial Sequence
  Description of Artificial Sequence: Synthetic oligonucleotide
cagucaaccccuuuacuac

SEQ ID NO: 64954 - RNA, 19 nt, Artificial Sequence
  Description of Artificial Sequence: Synthetic oligonucleotide
ugucgguacagacugcauc

SEQ ID NO: 64955 - RNA, 19 nt, Artificial Sequence
  Description of Artificial Sequence: Synthetic oligonucleotide
ucuagucucauacccugaa

SEQ ID NO: 64956 - RNA, 19 nt, Artificial Sequence
  Description of Artificial Sequence: Synthetic oligonucleotide
ugcuaaacuugagucagug

SEQ ID NO: 64957 - RNA, 19 nt, Artificial Sequence
  Description of Artificial Sequence: Synthetic oligonucleotide
aaaacacuaguggugcuaa

SEQ ID NO: 64958 - RNA, 19 nt, Artificial Sequence
  Description of Artificial Sequence: Synthetic oligonucleotide
uguaggauucauacggcuu

SEQ ID NO: 64959 - RNA, 19 nt, Artificial Sequence
  Description of Artificial Sequence: Synthetic oligonucleotide
ugagacaugcucuuccgua

SEQ ID NO: 64960 - RNA, 19 nt, Artificial Sequence
  Description of Artificial Sequence: Synthetic oligonucleotide
aaugggagauuaauuccug

SEQ ID NO: 64961 - RNA, 19 nt, Artificial Sequence
  Description of Artificial Sequence: Synthetic oligonucleotide
aucacguagaggacaaggg

SEQ ID NO: 64962 - RNA, 19 nt, Artificial Sequence
  Description of Artificial Sequence: Synthetic oligonucleotide
auauaugccugccuccccu

SEQ ID NO: 64963 - RNA, 19 nt, Artificial Sequence
  Description of Artificial Sequence: Synthetic oligonucleotide
auccguggugcccuggaac

SEQ ID NO: 64964 - RNA, 19 nt, Artificial Sequence
  Description of Artificial Sequence: Synthetic oligonucleotide
aucacaauguaaaacccga

SEQ ID NO: 64965 - RNA, 19 nt, Artificial Sequence
  Description of Artificial Sequence: Synthetic oligonucleotide
acaagggguaacaagagau

SEQ ID NO: 64966 - RNA, 19 nt, Artificial Sequence
  Description of Artificial Sequence: Synthetic oligonucleotide
uugagguaauagcgcacag

SEQ ID NO: 64967 - RNA, 19 nt, Artificial Sequence
  Description of Artificial Sequence: Synthetic oligonucleotide
cauaguagaguucgaucug

SEQ ID NO: 64968 - RNA, 19 nt, Artificial Sequence
  Description of Artificial Sequence: Synthetic oligonucleotide
gagacaugcucuuccguac

SEQ ID NO: 64969 - RNA, 19 nt, Artificial Sequence
  Description of Artificial Sequence: Synthetic oligonucleotide
uauccugauuauccauuca

SEQ ID NO: 64970 - RNA, 19 nt, Artificial Sequence
  Description of Artificial Sequence: Synthetic oligonucleotide
aucucucacaagugagagg

SEQ ID NO: 64971 - RNA, 19 nt, Artificial Sequence
  Description of Artificial Sequence: Synthetic oligonucleotide
uuacucaugaaagcccaca

SEQ ID NO: 64972 - RNA, 19 nt, Artificial Sequence
  Description of Artificial Sequence: Synthetic oligonucleotide
cgaggcuuaacuuacauuc

SEQ ID NO: 64973 - RNA, 19 nt, Artificial Sequence
  Description of Artificial Sequence: Synthetic oligonucleotide
uguguagauugugggauga

SEQ ID NO: 64974 - RNA, 19 nt, Artificial Sequence
  Description of Artificial Sequence: Synthetic oligonucleotide
uguagauugugggaugaaa

SEQ ID NO: 64975 - RNA, 19 nt, Artificial Sequence
  Description of Artificial Sequence: Synthetic oligonucleotide
gauaugagacaaguguuaa

SEQ ID NO: 64976 - RNA, 19 nt, Artificial Sequence
  Description of Artificial Sequence: Synthetic oligonucleotide
ugaaguagcgccguuccuc

SEQ ID NO: 64977 - RNA, 19 nt, Artificial Sequence
  Description of Artificial Sequence: Synthetic oligonucleotide
auagcgcacagagaacuuc

SEQ ID NO: 64978 - RNA, 19 nt, Artificial Sequence
  Description of Artificial Sequence: Synthetic oligonucleotide
ucgaaggaaauagcguagc

SEQ ID NO: 64979 - RNA, 19 nt, Artificial Sequence
  Description of Artificial Sequence: Synthetic oligonucleotide
cugcuuagggcuuguuggg

SEQ ID NO: 64980 - RNA, 19 nt, Artificial Sequence
  Description of Artificial Sequence: Synthetic oligonucleotide
aauuggccaaugacaaugu

SEQ ID NO: 64981 - RNA, 19 nt, Artificial Sequence
  Description of Artificial Sequence: Synthetic oligonucleotide
ugaacucgaucuugaugcc

SEQ ID NO: 64982 - RNA, 19 nt, Artificial Sequence
  Description of Artificial Sequence: Synthetic oligonucleotide
gguggcucgaaggaaauag

SEQ ID NO: 64983 - RNA, 19 nt, Artificial Sequence
  Description of Artificial Sequence: Synthetic oligonucleotide
acuuuuagggaggcaaaug

SEQ ID NO: 64984 - RNA, 19 nt, Artificial Sequence
  Description of Artificial Sequence: Synthetic oligonucleotide
ugagguaauagcgcacaga

SEQ ID NO: 64985 - RNA, 19 nt, Artificial Sequence
  Description of Artificial Sequence: Synthetic oligonucleotide
cauaugcuagggcccagcc

SEQ ID NO: 64986 - RNA, 19 nt, Artificial Sequence
  Description of Artificial Sequence: Synthetic oligonucleotide
cuggcuaguguccuagaac

SEQ ID NO: 64987 - RNA, 19 nt, Artificial Sequence
  Description of Artificial Sequence: Synthetic oligonucleotide
auggaguucgcaacuauca

SEQ ID NO: 64988 - RNA, 19 nt, Artificial Sequence
  Description of Artificial Sequence: Synthetic oligonucleotide
uccccuacugugcucuuca

SEQ ID NO: 64989 - RNA, 19 nt, Artificial Sequence
  Description of Artificial Sequence: Synthetic oligonucleotide
auacagccaucgaaaagac

SEQ ID NO: 64990 - RNA, 19 nt, Artificial Sequence
  Description of Artificial Sequence: Synthetic oligonucleotide
aguugagguaauagcgcac

SEQ ID NO: 64991 - RNA, 19 nt, Artificial Sequence
  Description of Artificial Sequence: Synthetic oligonucleotide
cuaguggugcuaaacuuga

SEQ ID NO: 64992 - RNA, 19 nt, Artificial Sequence
  Description of Artificial Sequence: Synthetic oligonucleotide
uagcguagcuucacguucu

SEQ ID NO: 64993 - RNA, 19 nt, Artificial Sequence
  Description of Artificial Sequence: Synthetic oligonucleotide
agguuaggugcacacauuu

SEQ ID NO: 64994 - RNA, 19 nt, Artificial Sequence
  Description of Artificial Sequence: Synthetic oligonucleotide
ugcaaguaacggucaguug

SEQ ID NO: 64995 - RNA, 19 nt, Artificial Sequence
  Description of Artificial Sequence: Synthetic oligonucleotide
ucagagauaggcucaccuu

SEQ ID NO: 64996 - RNA, 19 nt, Artificial Sequence
  Description of Artificial Sequence: Synthetic oligonucleotide
gagugcaagacgugacuac

SEQ ID NO: 64997 - RNA, 19 nt, Artificial Sequence
  Description of Artificial Sequence: Synthetic oligonucleotide
gggacuuacucaugaaagc

SEQ ID NO: 64998 - RNA, 19 nt, Artificial Sequence
  Description of Artificial Sequence: Synthetic oligonucleotide
auguguagauugugggaug

SEQ ID NO: 64999 - RNA, 19 nt, Artificial Sequence
  Description of Artificial Sequence: Synthetic oligonucleotide
gggugauuucuccuggccg

SEQ ID NO: 65000 - RNA, 19 nt, Artificial Sequence
  Description of Artificial Sequence: Synthetic oligonucleotide
agggauagauucuguuaug

SEQ ID NO: 65001 - RNA, 19 nt, Artificial Sequence
  Description of Artificial Sequence: Synthetic oligonucleotide
uagcuauuaaaaggaggca

SEQ ID NO: 65002 - RNA, 19 nt, Artificial Sequence
  Description of Artificial Sequence: Synthetic oligonucleotide
uuucuauagaggggagggc

SEQ ID NO: 65003 - RNA, 19 nt, Artificial Sequence
  Description of Artificial Sequence: Synthetic oligonucleotide
uaauuacaaguugcacugc

SEQ ID NO: 65004 - RNA, 19 nt, Artificial Sequence
  Description of Artificial Sequence: Synthetic oligonucleotide
agucaaccccuuuacuacu

SEQ ID NO: 65005 - RNA, 19 nt, Artificial Sequence
  Description of Artificial Sequence: Synthetic oligonucleotide
cuaucccuaccuaggcugc

SEQ ID NO: 65006 - RNA, 19 nt, Artificial Sequence
  Description of Artificial Sequence: Synthetic oligonucleotide
uugcuuccgagcugguaag

SEQ ID NO: 65007 - RNA, 19 nt, Artificial Sequence
  Description of Artificial Sequence: Synthetic oligonucleotide
guuuccccgucguagaaga

SEQ ID NO: 65008 - RNA, 19 nt, Artificial Sequence
  Description of Artificial Sequence: Synthetic oligonucleotide
uuccguacgaugucacccu

SEQ ID NO: 65009 - RNA, 19 nt, Artificial Sequence
  Description of Artificial Sequence: Synthetic oligonucleotide
auuuuagccuggauuccuc

SEQ ID NO: 65010 - RNA, 19 nt, Artificial Sequence
  Description of Artificial Sequence: Synthetic oligonucleotide
agucgaagggagugcaaga

SEQ ID NO: 65011 - RNA, 19 nt, Artificial Sequence
  Description of Artificial Sequence: Synthetic oligonucleotide
uaugaagguuaggugcaca

SEQ ID NO: 65012 - RNA, 19 nt, Artificial Sequence
  Description of Artificial Sequence: Synthetic oligonucleotide
caccaaguugagguaauag

SEQ ID NO: 65013 - RNA, 19 nt, Artificial Sequence
  Description of Artificial Sequence: Synthetic oligonucleotide
aaccccuuuacuacuuaca

SEQ ID NO: 65014 - RNA, 19 nt, Artificial Sequence
  Description of Artificial Sequence: Synthetic oligonucleotide
uacagccaucgaaaagaca

SEQ ID NO: 65015 - RNA, 19 nt, Artificial Sequence
  Description of Artificial Sequence: Synthetic oligonucleotide
uuagggacuuacucaugaa

SEQ ID NO: 65016 - RNA, 19 nt, Artificial Sequence
  Description of Artificial Sequence: Synthetic oligonucleotide
cucugcuuagggcuuguug

SEQ ID NO: 65017 - RNA, 19 nt, Artificial Sequence
  Description of Artificial Sequence: Synthetic oligonucleotide
caacccaaagccccuuaag

SEQ ID NO: 65018 - RNA, 19 nt, Artificial Sequence
  Description of Artificial Sequence: Synthetic oligonucleotide
uguaaaacccgaggcuuaa

SEQ ID NO: 65019 - RNA, 19 nt, Artificial Sequence
  Description of Artificial Sequence: Synthetic oligonucleotide
auaucucucacaagugaga

SEQ ID NO: 65020 - RNA, 19 nt, Artificial Sequence
  Description of Artificial Sequence: Synthetic oligonucleotide
ugcggagucauguggugaa

SEQ ID NO: 65021 - RNA, 19 nt, Artificial Sequence
  Description of Artificial Sequence: Synthetic oligonucleotide
guugagguaauagcgcaca

SEQ ID NO: 65022 - RNA, 19 nt, Artificial Sequence
  Description of Artificial Sequence: Synthetic oligonucleotide
uaacggucaguugagccuc

SEQ ID NO: 65023 - RNA, 19 nt, Artificial Sequence
  Description of Artificial Sequence: Synthetic oligonucleotide
ccuaucccuaccuaggcug

SEQ ID NO: 65024 - RNA, 19 nt, Artificial Sequence
  Description of Artificial Sequence: Synthetic oligonucleotide
gauugugggaugaaagggu

SEQ ID NO: 65025 - RNA, 19 nt, Artificial Sequence
  Description of Artificial Sequence: Synthetic oligonucleotide
agauaugagacaaguguua

SEQ ID NO: 65026 - RNA, 19 nt, Artificial Sequence
  Description of Artificial Sequence: Synthetic oligonucleotide
ggcaucgugggacuuauga

SEQ ID NO: 65027 - RNA, 19 nt, Artificial Sequence
  Description of Artificial Sequence: Synthetic oligonucleotide
gaacccugaacccuaggcu

SEQ ID NO: 65028 - RNA, 19 nt, Artificial Sequence
  Description of Artificial Sequence: Synthetic oligonucleotide
cauaagaaaggcuuccgau

SEQ ID NO: 65029 - RNA, 19 nt, Artificial Sequence
  Description of Artificial Sequence: Synthetic oligonucleotide
ccuuauggaauggggaugg

SEQ ID NO: 65030 - RNA, 19 nt, Artificial Sequence
  Description of Artificial Sequence: Synthetic oligonucleotide
uucccacggucauaguaga

SEQ ID NO: 65031 - RNA, 19 nt, Artificial Sequence
  Description of Artificial Sequence: Synthetic oligonucleotide
ucuuguuuaugcggcggcu

SEQ ID NO: 65032 - RNA, 19 nt, Artificial Sequence
  Description of Artificial Sequence: Synthetic oligonucleotide
cauggugguucccacgguc

SEQ ID NO: 65033 - RNA, 19 nt, Artificial Sequence
  Description of Artificial Sequence: Synthetic oligonucleotide
guaacggucaguugagccu

SEQ ID NO: 65034 - RNA, 19 nt, Artificial Sequence
  Description of Artificial Sequence: Synthetic oligonucleotide
aacaaggcuaggacucuga

SEQ ID NO: 65035 - RNA, 19 nt, Artificial Sequence
  Description of Artificial Sequence: Synthetic oligonucleotide
cucaguagugaggccagag

SEQ ID NO: 65036 - RNA, 19 nt, Artificial Sequence
  Description of Artificial Sequence: Synthetic oligonucleotide
caaccccuuuacuacuuac

SEQ ID NO: 65037 - RNA, 19 nt, Artificial Sequence
  Description of Artificial Sequence: Synthetic oligonucleotide
ugccacuaccucagggaca

SEQ ID NO: 65038 - RNA, 19 nt, Artificial Sequence
  Description of Artificial Sequence: Synthetic oligonucleotide
cagucgaagggagugcaag

SEQ ID NO: 65039 - RNA, 19 nt, Artificial Sequence
  Description of Artificial Sequence: Synthetic oligonucleotide
cuuccuacucuccgcauca

SEQ ID NO: 65040 - RNA, 19 nt, Artificial Sequence
  Description of Artificial Sequence: Synthetic oligonucleotide
auaaagggauagauucugu

SEQ ID NO: 65041 - RNA, 19 nt, Artificial Sequence
  Description of Artificial Sequence: Synthetic oligonucleotide
ccuacucuccgcaucauuc

SEQ ID NO: 65042 - RNA, 19 nt, Artificial Sequence
  Description of Artificial Sequence: Synthetic oligonucleotide
gccaugcggagucaugugg

SEQ ID NO: 65043 - RNA, 19 nt, Artificial Sequence
  Description of Artificial Sequence: Synthetic oligonucleotide
auccaacuuagaugagaca

SEQ ID NO: 65044 - RNA, 19 nt, Artificial Sequence
  Description of Artificial Sequence: Synthetic oligonucleotide
ggugugggaaccuuaugga

SEQ ID NO: 65045 - RNA, 19 nt, Artificial Sequence
  Description of Artificial Sequence: Synthetic oligonucleotide
auaggcucaccuuccccga

SEQ ID NO: 65046 - RNA, 19 nt, Artificial Sequence
  Description of Artificial Sequence: Synthetic oligonucleotide
gcuaguguccuagaacaag

SEQ ID NO: 65047 - RNA, 19 nt, Artificial Sequence
  Description of Artificial Sequence: Synthetic oligonucleotide
caagguugcaaguaacggu

SEQ ID NO: 65048 - RNA, 19 nt, Artificial Sequence
  Description of Artificial Sequence: Synthetic oligonucleotide
ggauauaugccugccuccc

SEQ ID NO: 65049 - RNA, 19 nt, Artificial Sequence
  Description of Artificial Sequence: Synthetic oligonucleotide
uugccuaauguuuccccua

SEQ ID NO: 65050 - RNA, 19 nt, Artificial Sequence
  Description of Artificial Sequence: Synthetic oligonucleotide
uuuccccgucguagaagag

SEQ ID NO: 65051 - RNA, 19 nt, Artificial Sequence
  Description of Artificial Sequence: Synthetic oligonucleotide
cuaucagguacagagucaa

SEQ ID NO: 65052 - RNA, 19 nt, Artificial Sequence
  Description of Artificial Sequence: Synthetic oligonucleotide
caugcggagucauguggug

SEQ ID NO: 65053 - RNA, 19 nt, Artificial Sequence
  Description of Artificial Sequence: Synthetic oligonucleotide
agagucuugcuggcaaaug

SEQ ID NO: 65054 - RNA, 19 nt, Artificial Sequence
  Description of Artificial Sequence: Synthetic oligonucleotide
gccaaugacaauguaguga

SEQ ID NO: 65055 - RNA, 19 nt, Artificial Sequence
  Description of Artificial Sequence: Synthetic oligonucleotide
guaauagcgcacagagaac

SEQ ID NO: 65056 - RNA, 19 nt, Artificial Sequence
  Description of Artificial Sequence: Synthetic oligonucleotide
cuugagucagugaauuggu

SEQ ID NO: 65057 - RNA, 19 nt, Artificial Sequence
  Description of Artificial Sequence: Synthetic oligonucleotide
uuaugcggcggcugauggu

SEQ ID NO: 65058 - RNA, 19 nt, Artificial Sequence
  Description of Artificial Sequence: Synthetic oligonucleotide
caacugugaaaccuuggaa

SEQ ID NO: 65059 - RNA, 19 nt, Artificial Sequence
  Description of Artificial Sequence: Synthetic oligonucleotide
gacagucgaagggagugca

SEQ ID NO: 65060 - RNA, 19 nt, Artificial Sequence
  Description of Artificial Sequence: Synthetic oligonucleotide
ugccaugcggagucaugug

SEQ ID NO: 65061 - RNA, 19 nt, Artificial Sequence
  Description of Artificial Sequence: Synthetic oligonucleotide
gcuugagauagccuugaca

SEQ ID NO: 65062 - RNA, 19 nt, Artificial Sequence
  Description of Artificial Sequence: Synthetic oligonucleotide
aacauccguggugcccugg

SEQ ID NO: 65063 - RNA, 19 nt, Artificial Sequence
  Description of Artificial Sequence: Synthetic oligonucleotide
uccccucuaguguuacgac

SEQ ID NO: 65064 - RNA, 19 nt, Artificial Sequence
  Description of Artificial Sequence: Synthetic oligonucleotide
agcccuacgcccuuccuua

SEQ ID NO: 65065 - RNA, 19 nt, Artificial Sequence
  Description of Artificial Sequence: Synthetic oligonucleotide
gaagggagugcaagacgug

SEQ ID NO: 65066 - RNA, 19 nt, Artificial Sequence
  Description of Artificial Sequence: Synthetic oligonucleotide
agaaccuaccuuccucaua

SEQ ID NO: 65067 - RNA, 19 nt, Artificial Sequence
  Description of Artificial Sequence: Synthetic oligonucleotide
acgguuuccccgucguaga

SEQ ID NO: 65068 - RNA, 19 nt, Artificial Sequence
  Description of Artificial Sequence: Synthetic oligonucleotide
ggucaggaacccugaaccc

SEQ ID NO: 65069 - RNA, 19 nt, Artificial Sequence
  Description of Artificial Sequence: Synthetic oligonucleotide
uguuuccccuaggaggccu

SEQ ID NO: 65070 - RNA, 19 nt, Artificial Sequence
  Description of Artificial Sequence: Synthetic oligonucleotide
gacgcuaugguaacagagu

SEQ ID NO: 65071 - RNA, 19 nt, Artificial Sequence
  Description of Artificial Sequence: Synthetic oligonucleotide
gucucaguagugaggccag

SEQ ID NO: 65072 - RNA, 19 nt, Artificial Sequence
  Description of Artificial Sequence: Synthetic oligonucleotide
aauagcgcacagagaacuu

SEQ ID NO: 65073 - RNA, 19 nt, Artificial Sequence
  Description of Artificial Sequence: Synthetic oligonucleotide
ugagccucauaccgaccuc

SEQ ID NO: 65074 - RNA, 19 nt, Artificial Sequence
  Description of Artificial Sequence: Synthetic oligonucleotide
gugcaagacgugacuaccc

SEQ ID NO: 65075 - RNA, 19 nt, Artificial Sequence
  Description of Artificial Sequence: Synthetic oligonucleotide
ucgguacagacugcauccc

SEQ ID NO: 65076 - RNA, 19 nt, Artificial Sequence
  Description of Artificial Sequence: Synthetic oligonucleotide
gggacagucgaagggagug

SEQ ID NO: 65077 - RNA, 19 nt, Artificial Sequence
  Description of Artificial Sequence: Synthetic oligonucleotide
auguuuccccuaggaggcc

SEQ ID NO: 65078 - RNA, 19 nt, Artificial Sequence
  Description of Artificial Sequence: Synthetic oligonucleotide
gcaagacgugacuacccag

SEQ ID NO: 65079 - RNA, 19 nt, Artificial Sequence
  Description of Artificial Sequence: Synthetic oligonucleotide
uccgucuugugcuccgcuc

SEQ ID NO: 65080 - RNA, 19 nt, Artificial Sequence
  Description of Artificial Sequence: Synthetic oligonucleotide
aucuuucuauagaggggag

SEQ ID NO: 65081 - RNA, 19 nt, Artificial Sequence
  Description of Artificial Sequence: Synthetic oligonucleotide
caggcucggaacuuccuca

SEQ ID NO: 65082 - RNA, 19 nt, Artificial Sequence
  Description of Artificial Sequence: Synthetic oligonucleotide
ccggugucgguacagacug

SEQ ID NO: 65083 - RNA, 19 nt, Artificial Sequence
  Description of Artificial Sequence: Synthetic oligonucleotide
ggcuaggauauaugccugc

SEQ ID NO: 65084 - RNA, 19 nt, Artificial Sequence
  Description of Artificial Sequence: Synthetic oligonucleotide
agacagcucucauucccaa

SEQ ID NO: 65085 - RNA, 19 nt, Artificial Sequence
  Description of Artificial Sequence: Synthetic oligonucleotide
cacggucauaguagaguuc

SEQ ID NO: 65086 - RNA, 19 nt, Artificial Sequence
  Description of Artificial Sequence: Synthetic oligonucleotide
ucgcaacuaucagguacag

SEQ ID NO: 65087 - RNA, 19 nt, Artificial Sequence
  Description of Artificial Sequence: Synthetic oligonucleotide
aggaaauagcguagcuuca

SEQ ID NO: 65088 - RNA, 19 nt, Artificial Sequence
  Description of Artificial Sequence: Synthetic oligonucleotide
cuuagggcuuguuggguaa

SEQ ID NO: 65089 - RNA, 19 nt, Artificial Sequence
  Description of Artificial Sequence: Synthetic oligonucleotide
auguagugaauaacuuuau

SEQ ID NO: 65090 - RNA, 19 nt, Artificial Sequence
  Description of Artificial Sequence: Synthetic oligonucleotide
gaacccuaggcuaggauau

SEQ ID NO: 65091 - RNA, 19 nt, Artificial Sequence
  Description of Artificial Sequence: Synthetic oligonucleotide
aaggcacgacaguugccuu

SEQ ID NO: 65092 - RNA, 19 nt, Artificial Sequence
  Description of Artificial Sequence: Synthetic oligonucleotide
acauccguggugcccugga

SEQ ID NO: 65093 - RNA, 19 nt, Artificial Sequence
  Description of Artificial Sequence: Synthetic oligonucleotide
ccuuuacuacuuacaggcc

SEQ ID NO: 65094 - RNA, 19 nt, Artificial Sequence
  Description of Artificial Sequence: Synthetic oligonucleotide
uccccgagacgguuucccc

SEQ ID NO: 65095 - RNA, 19 nt, Artificial Sequence
  Description of Artificial Sequence: Synthetic oligonucleotide
uccuacucuccgcaucauu

SEQ ID NO: 65096 - RNA, 19 nt, Artificial Sequence
  Description of Artificial Sequence: Synthetic oligonucleotide
cagagcaccacgucccaga

SEQ ID NO: 65097 - RNA, 19 nt, Artificial Sequence
  Description of Artificial Sequence: Synthetic oligonucleotide
gguacagagucaaggguca

SEQ ID NO: 65098 - RNA, 19 nt, Artificial Sequence
  Description of Artificial Sequence: Synthetic oligonucleotide
uuccgccacaacaccacuu

SEQ ID NO: 65099 - RNA, 19 nt, Artificial Sequence
  Description of Artificial Sequence: Synthetic oligonucleotide
ggcaaaugaaugccaggga

SEQ ID NO: 65100 - RNA, 19 nt, Artificial Sequence
  Description of Artificial Sequence: Synthetic oligonucleotide
gcuaggauauaugccugcc

SEQ ID NO: 65101 - RNA, 19 nt, Artificial Sequence
  Description of Artificial Sequence: Synthetic oligonucleotide
aggcuaggacucugaauaa

SEQ ID NO: 65102 - RNA, 19 nt, Artificial Sequence
  Description of Artificial Sequence: Synthetic oligonucleotide
guguaggauucauacggcu

SEQ ID NO: 65103 - RNA, 19 nt, Artificial Sequence
  Description of Artificial Sequence: Synthetic oligonucleotide
uucuggcuaguguccuaga

SEQ ID NO: 65104 - RNA, 19 nt, Artificial Sequence
  Description of Artificial Sequence: Synthetic oligonucleotide
ucggaacccuauccugaaa

SEQ ID NO: 65105 - RNA, 19 nt, Artificial Sequence
  Description of Artificial Sequence: Synthetic oligonucleotide
agcuuaucaauuggccaau

SEQ ID NO: 65106 - RNA, 19 nt, Artificial Sequence
  Description of Artificial Sequence: Synthetic oligonucleotide
uuuccccuaggaggccuag

SEQ ID NO: 65107 - RNA, 19 nt, Artificial Sequence
  Description of Artificial Sequence: Synthetic oligonucleotide
cucucacaagugagaggac

SEQ ID NO: 65108 - RNA, 19 nt, Artificial Sequence
  Description of Artificial Sequence: Synthetic oligonucleotide
ggaucuuagccuugucuaa

SEQ ID NO: 65109 - RNA, 19 nt, Artificial Sequence
  Description of Artificial Sequence: Synthetic oligonucleotide
cuccccucuaguguuacga

SEQ ID NO: 65110 - RNA, 19 nt, Artificial Sequence
  Description of Artificial Sequence: Synthetic oligonucleotide
aucccuaccuaggcugcag

SEQ ID NO: 65111 - RNA, 19 nt, Artificial Sequence
  Description of Artificial Sequence: Synthetic oligonucleotide
ccgucuugugcuccgcucg

SEQ ID NO: 65112 - RNA, 19 nt, Artificial Sequence
  Description of Artificial Sequence: Synthetic oligonucleotide
agguaauagcgcacagaga

SEQ ID NO: 65113 - RNA, 19 nt, Artificial Sequence
  Description of Artificial Sequence: Synthetic oligonucleotide
uaucccuaccuaggcugca

SEQ ID NO: 65114 - RNA, 19 nt, Artificial Sequence
  Description of Artificial Sequence: Synthetic oligonucleotide
cugacgcuaugguaacaga

SEQ ID NO: 65115 - RNA, 19 nt, Artificial Sequence
  Description of Artificial Sequence: Synthetic oligonucleotide
auuccucccuuuagggacu

SEQ ID NO: 65116 - RNA, 19 nt, Artificial Sequence
  Description of Artificial Sequence: Synthetic oligonucleotide
gccccuuaagguucuucag

SEQ ID NO: 65117 - RNA, 19 nt, Artificial Sequence
  Description of Artificial Sequence: Synthetic oligonucleotide
guaaaacccgaggcuuaac

SEQ ID NO: 65118 - RNA, 19 nt, Artificial Sequence
  Description of Artificial Sequence: Synthetic oligonucleotide
caacaacuccugccacuac

SEQ ID NO: 65119 - RNA, 19 nt, Artificial Sequence
  Description of Artificial Sequence: Synthetic oligonucleotide
uccguacgaugucacccuu

SEQ ID NO: 65120 - RNA, 19 nt, Artificial Sequence
  Description of Artificial Sequence: Synthetic oligonucleotide
ggcacgacaguugccuugc

SEQ ID NO: 65121 - RNA, 19 nt, Artificial Sequence
  Description of Artificial Sequence: Synthetic oligonucleotide
gccuaauguuuccccuagg

SEQ ID NO: 65122 - RNA, 19 nt, Artificial Sequence
  Description of Artificial Sequence: Synthetic oligonucleotide
guguuacgacauccaccag

SEQ ID NO: 65123 - RNA, 19 nt, Artificial Sequence
  Description of Artificial Sequence: Synthetic oligonucleotide
aguucgcaacuaucaggua

SEQ ID NO: 65124 - RNA, 19 nt, Artificial Sequence
  Description of Artificial Sequence: Synthetic oligonucleotide
ggugucgguacagacugca

SEQ ID NO: 65125 - RNA, 19 nt, Artificial Sequence
  Description of Artificial Sequence: Synthetic oligonucleotide
gagacgguuuccccgucgu

SEQ ID NO: 65126 - RNA, 19 nt, Artificial Sequence
  Description of Artificial Sequence: Synthetic oligonucleotide
cucggaacccuauccugaa

SEQ ID NO: 65127 - RNA, 19 nt, Artificial Sequence
  Description of Artificial Sequence: Synthetic oligonucleotide
guccuagaacaaggcuagg

SEQ ID NO: 65128 - RNA, 19 nt, Artificial Sequence
  Description of Artificial Sequence: Synthetic oligonucleotide
guaugguuccugacaagcu

SEQ ID NO: 65129 - RNA, 19 nt, Artificial Sequence
  Description of Artificial Sequence: Synthetic oligonucleotide
cucugcccgaagccgaaga

SEQ ID NO: 65130 - RNA, 19 nt, Artificial Sequence
  Description of Artificial Sequence: Synthetic oligonucleotide
ccccgagacgguuuccccg

SEQ ID NO: 65131 - RNA, 19 nt, Artificial Sequence
  Description of Artificial Sequence: Synthetic oligonucleotide
caucuaucagcaccaaguu

SEQ ID NO: 65132 - RNA, 19 nt, Artificial Sequence
  Description of Artificial Sequence: Synthetic oligonucleotide
guugcaaguaacggucagu

SEQ ID NO: 65133 - RNA, 19 nt, Artificial Sequence
  Description of Artificial Sequence: Synthetic oligonucleotide
uuccccuaggaggccuagc

SEQ ID NO: 65134 - RNA, 19 nt, Artificial Sequence
  Description of Artificial Sequence: Synthetic oligonucleotide
ugcccucgaagcgcuguga

SEQ ID NO: 65135 - RNA, 19 nt, Artificial Sequence
  Description of Artificial Sequence: Synthetic oligonucleotide
ugugcuccgcucgcuuccu

SEQ ID NO: 65136 - RNA, 19 nt, Artificial Sequence
  Description of Artificial Sequence: Synthetic oligonucleotide
gcccucgaagcgcugugag

SEQ ID NO: 65137 - RNA, 19 nt, Artificial Sequence
  Description of Artificial Sequence: Synthetic oligonucleotide
aacggucaguugagccuca

SEQ ID NO: 65138 - RNA, 19 nt, Artificial Sequence
  Description of Artificial Sequence: Synthetic oligonucleotide
aacccuaggcuaggauaua

SEQ ID NO: 65139 - RNA, 19 nt, Artificial Sequence
  Description of Artificial Sequence: Synthetic oligonucleotide
uggccgagccaaguccuuc

SEQ ID NO: 65140 - RNA, 19 nt, Artificial Sequence
  Description of Artificial Sequence: Synthetic oligonucleotide
caacauccguggugcccug

SEQ ID NO: 65141 - RNA, 19 nt, Artificial Sequence
  Description of Artificial Sequence: Synthetic oligonucleotide
agacgguuuccccgucgua

SEQ ID NO: 65142 - RNA, 19 nt, Artificial Sequence
  Description of Artificial Sequence: Synthetic oligonucleotide
ugguggcucgaaggaaaua

SEQ ID NO: 65143 - RNA, 19 nt, Artificial Sequence
  Description of Artificial Sequence: Synthetic oligonucleotide
cucccuuuagggacuuacu

SEQ ID NO: 65144 - RNA, 19 nt, Artificial Sequence
  Description of Artificial Sequence: Synthetic oligonucleotide
acgugacuacccagagucu

SEQ ID NO: 65145 - RNA, 19 nt, Artificial Sequence
  Description of Artificial Sequence: Synthetic oligonucleotide
caaagccccuuaagguucu

SEQ ID NO: 65146 - RNA, 19 nt, Artificial Sequence
  Description of Artificial Sequence: Synthetic oligonucleotide
ggaacccuauccugaaaau

SEQ ID NO: 65147 - RNA, 19 nt, Artificial Sequence
  Description of Artificial Sequence: Synthetic oligonucleotide
cuccacgcucugcccgaag

SEQ ID NO: 65148 - RNA, 19 nt, Artificial Sequence
  Description of Artificial Sequence: Synthetic oligonucleotide
uuccuacucuccgcaucau

SEQ ID NO: 65149 - RNA, 19 nt, Artificial Sequence
  Description of Artificial Sequence: Synthetic oligonucleotide
ggcucgaaggaaauagcgu

SEQ ID NO: 65150 - RNA, 19 nt, Artificial Sequence
  Description of Artificial Sequence: Synthetic oligonucleotide
acagucgaagggagugcaa

SEQ ID NO: 65151 - RNA, 19 nt, Artificial Sequence
  Description of Artificial Sequence: Synthetic oligonucleotide
cccgaagccgaagaagcuc

SEQ ID NO: 65152 - RNA, 19 nt, Artificial Sequence
  Description of Artificial Sequence: Synthetic oligonucleotide
cccuacgcccuuccuuagg

SEQ ID NO: 65153 - RNA, 19 nt, Artificial Sequence
  Description of Artificial Sequence: Synthetic oligonucleotide
gaacugccuccccucuagu

SEQ ID NO: 65154 - RNA, 19 nt, Artificial Sequence
  Description of Artificial Sequence: Synthetic oligonucleotide
ccccucuaguguuacgaca

SEQ ID NO: 65155 - RNA, 19 nt, Artificial Sequence
  Description of Artificial Sequence: Synthetic oligonucleotide
cucucccuaucccuaccua

SEQ ID NO: 65156 - RNA, 19 nt, Artificial Sequence
  Description of Artificial Sequence: Synthetic oligonucleotide
cgagacgguuuccccgucg

SEQ ID NO: 65157 - RNA, 19 nt, Artificial Sequence
  Description of Artificial Sequence: Synthetic oligonucleotide
cggaacccuauccugaaaa

SEQ ID NO: 65158 - RNA, 19 nt, Artificial Sequence
  Description of Artificial Sequence: Synthetic oligonucleotide
gggguucuucagagauagg

SEQ ID NO: 65159 - RNA, 19 nt, Artificial Sequence
  Description of Artificial Sequence: Synthetic oligonucleotide
ccguacgaugucacccuuc

SEQ ID NO: 65160 - RNA, 19 nt, Artificial Sequence
  Description of Artificial Sequence: Synthetic oligonucleotide
cauccguggugcccuggaa

SEQ ID NO: 65161 - RNA, 19 nt, Artificial Sequence
  Description of Artificial Sequence: Synthetic oligonucleotide
cuacgcccuuccuuaggcu

SEQ ID NO: 65162 - RNA, 19 nt, Artificial Sequence
  Description of Artificial Sequence: Synthetic oligonucleotide
ccucauaugcuagggccca

SEQ ID NO: 65163 - RNA, 19 nt, Artificial Sequence
  Description of Artificial Sequence: Synthetic oligonucleotide
cugaacccuaggcuaggau

SEQ ID NO: 65164 - RNA, 19 nt, Artificial Sequence
  Description of Artificial Sequence: Synthetic oligonucleotide
ccuccccucuaguguuacg

SEQ ID NO: 65165 - RNA, 19 nt, Artificial Sequence
  Description of Artificial Sequence: Synthetic oligonucleotide
cgucuugugcuccgcucgc

SEQ ID NO: 65166 - RNA, 19 nt, Artificial Sequence
  Description of Artificial Sequence: Synthetic oligonucleotide
gggagguugugcccucgaa

SEQ ID NO: 65167 - RNA, 19 nt, Artificial Sequence
  Description of Artificial Sequence: Synthetic oligonucleotide
cuuccgccacaacaccacu

SEQ ID NO: 65168 - RNA, 19 nt, Artificial Sequence
  Description of Artificial Sequence: Synthetic oligonucleotide
acccgaggcuuaacuuaca

SEQ ID NO: 65169 - RNA, 19 nt, Artificial Sequence
  Description of Artificial Sequence: Synthetic oligonucleotide
gcccuacgcccuuccuuag

SEQ ID NO: 65170 - RNA, 19 nt, Artificial Sequence
  Description of Artificial Sequence: Synthetic oligonucleotide
gcggagucauguggugaag

SEQ ID NO: 65171 - RNA, 19 nt, Artificial Sequence
  Description of Artificial Sequence: Synthetic oligonucleotide
ggcuaguguccuagaacaa

SEQ ID NO: 65172 - RNA, 19 nt, Artificial Sequence
  Description of Artificial Sequence: Synthetic oligonucleotide
cgauguuagcaaaguugga

SEQ ID NO: 65173 - RNA, 19 nt, Artificial Sequence
  Description of Artificial Sequence: Synthetic oligonucleotide
ccaugcggagucauguggu

SEQ ID NO: 65174 - RNA, 19 nt, Artificial Sequence
  Description of Artificial Sequence: Synthetic oligonucleotide
cuagaacaacccagaccuu

SEQ ID NO: 65175 - RNA, 19 nt, Artificial Sequence
  Description of Artificial Sequence: Synthetic oligonucleotide
ccgcucgcuuccuacucuc

SEQ ID NO: 65176 - RNA, 19 nt, Artificial Sequence
  Description of Artificial Sequence: Synthetic oligonucleotide
gugcuaaacuugagucagu

SEQ ID NO: 65177 - RNA, 19 nt, Artificial Sequence
  Description of Artificial Sequence: Synthetic oligonucleotide
acggucaguugagccucau

SEQ ID NO: 65178 - RNA, 19 nt, Artificial Sequence
  Description of Artificial Sequence: Synthetic oligonucleotide
ccuugacagacagcucuca

SEQ ID NO: 65179 - RNA, 19 nt, Artificial Sequence
  Description of Artificial Sequence: Synthetic oligonucleotide
gcacgacaguugccuugcc

SEQ ID NO: 65180 - RNA, 19 nt, Artificial Sequence
  Description of Artificial Sequence: Synthetic oligonucleotide
ggguaacaagagauaacuu

SEQ ID NO: 65181 - RNA, 19 nt, Artificial Sequence
  Description of Artificial Sequence: Synthetic oligonucleotide
ggcggccaaugggagauua

SEQ ID NO: 65182 - RNA, 19 nt, Artificial Sequence
  Description of Artificial Sequence: Synthetic oligonucleotide
ccacgugaguaaacucaaa

SEQ ID NO: 65183 - RNA, 19 nt, Artificial Sequence
  Description of Artificial Sequence: Synthetic oligonucleotide
cgaugucacccuuccgcca

SEQ ID NO: 65184 - RNA, 19 nt, Artificial Sequence
  Description of Artificial Sequence: Synthetic oligonucleotide
cgcuaugguaacagagucu

SEQ ID NO: 65185 - RNA, 19 nt, Artificial Sequence
  Description of Artificial Sequence: Synthetic oligonucleotide
gcgcugugaggcaauggcu

SEQ ID NO: 65186 - RNA, 19 nt, Artificial Sequence
  Description of Artificial Sequence: Synthetic oligonucleotide
gugucgguacagacugcau

SEQ ID NO: 65187 - RNA, 19 nt, Artificial Sequence
  Description of Artificial Sequence: Synthetic oligonucleotide
cccgagacgguuuccccgu

SEQ ID NO: 65188 - RNA, 19 nt, Artificial Sequence
  Description of Artificial Sequence: Synthetic oligonucleotide
cccuaucccuaccuaggcu

SEQ ID NO: 65189 - RNA, 19 nt, Artificial Sequence
  Description of Artificial Sequence: Synthetic oligonucleotide
ccgagcugguaagagggua

SEQ ID NO: 65190 - RNA, 19 nt, Artificial Sequence
  Description of Artificial Sequence: Synthetic oligonucleotide
cccgaggcuuaacuuacau

SEQ ID NO: 65191 - RNA, 19 nt, Artificial Sequence
  Description of Artificial Sequence: Synthetic oligonucleotide
ccgaggcuuaacuuacauu

SEQ ID NO: 65192 - RNA, 19 nt, Artificial Sequence
  Description of Artificial Sequence: Synthetic oligonucleotide
ccgagacgguuuccccguc

SEQ ID NO: 65193 - RNA, 19 nt, Artificial Sequence
  Description of Artificial Sequence: Synthetic oligonucleotide
cagcagagucuagucucau

SEQ ID NO: 65194 - RNA, 19 nt, Artificial Sequence
  Description of Artificial Sequence: Synthetic oligonucleotide
cuggccgagccaaguccuu

SEQ ID NO: 65195 - RNA, 19 nt, Artificial Sequence
  Description of Artificial Sequence: Synthetic oligonucleotide
ccaggcaucgugggacuua

SEQ ID NO: 65196 - RNA, 19 nt, Artificial Sequence
  Description of Artificial Sequence: Synthetic oligonucleotide
cgugacuacccagagucuu

SEQ ID NO: 65197 - RNA, 19 nt, Artificial Sequence
  Description of Artificial Sequence: Synthetic oligonucleotide
cgguuuccccgucguagaa

SEQ ID NO: 65198 - RNA, 19 nt, Artificial Sequence
  Description of Artificial Sequence: Synthetic oligonucleotide
ccccgucguagaagaggaa

SEQ ID NO: 65199 - RNA, 19 nt, Artificial Sequence
  Description of Artificial Sequence: Synthetic oligonucleotide
cccgaucuugagucuucau

SEQ ID NO: 65200 - RNA, 19 nt, Artificial Sequence
  Description of Artificial Sequence: Synthetic oligonucleotide
cggucaguugagccucaua

SEQ ID NO: 65201 - RNA, 19 nt, Artificial Sequence
  Description of Artificial Sequence: Synthetic oligonucleotide
cgcuuccuacucuccgcau

SEQ ID NO: 65202 - RNA, 19 nt, Artificial Sequence
  Description of Artificial Sequence: Synthetic oligonucleotide
ccgcgccggugucgguaca

SEQ ID NO: 65203 - RNA, 19 nt, Artificial Sequence
  Description of Artificial Sequence: Synthetic oligonucleotide
aaaacguaaucuuucaguc

SEQ ID NO: 65204 - RNA, 19 nt, Artificial Sequence
  Description of Artificial Sequence: Synthetic oligonucleotide
uuuacgauggaguucauca

SEQ ID NO: 65205 - RNA, 19 nt, Artificial Sequence
  Description of Artificial Sequence: Synthetic oligonucleotide
ugauugucaaaccacaugu

SEQ ID NO: 65206 - RNA, 19 nt, Artificial Sequence
  Description of Artificial Sequence: Synthetic oligonucleotide
uguuccguauuuacgaugg

SEQ ID NO: 65207 - RNA, 19 nt, Artificial Sequence
  Description of Artificial Sequence: Synthetic oligonucleotide
gacagagcgaaccaugugg

SEQ ID NO: 65208 - RNA, 19 nt, Artificial Sequence
  Description of Artificial Sequence: Synthetic oligonucleotide
uaaaacguaaucuuucagu

SEQ ID NO: 65209 - RNA, 19 nt, Artificial Sequence
  Description of Artificial Sequence: Synthetic oligonucleotide
gaucagacgaccuucuucc

SEQ ID NO: 65210 - RNA, 19 nt, Artificial Sequence
  Description of Artificial Sequence: Synthetic oligonucleotide
agagcgcggacucagaggc

SEQ ID NO: 65211 - RNA, 19 nt, Artificial Sequence
  Description of Artificial Sequence: Synthetic oligonucleotide
aauguuacuggugagcgug

SEQ ID NO: 65212 - RNA, 19 nt, Artificial Sequence
  Description of Artificial Sequence: Synthetic oligonucleotide
uuauggucauccaugaaac

SEQ ID NO: 65213 - RNA, 19 nt, Artificial Sequence
  Description of Artificial Sequence: Synthetic oligonucleotide
caccaaguagguuugaggg

SEQ ID NO: 65214 - RNA, 19 nt, Artificial Sequence
  Description of Artificial Sequence: Synthetic oligonucleotide
acaaagaacgcuguauggc

SEQ ID NO: 65215 - RNA, 19 nt, Artificial Sequence
  Description of Artificial Sequence: Synthetic oligonucleotide
ucgguuuugggauuucugg

SEQ ID NO: 65216 - RNA, 19 nt, Artificial Sequence
  Description of Artificial Sequence: Synthetic oligonucleotide
aacguaaucuuucagucuu

SEQ ID NO: 65217 - RNA, 19 nt, Artificial Sequence
  Description of Artificial Sequence: Synthetic oligonucleotide
aacuacgacaucuucugca

SEQ ID NO: 65218 - RNA, 19 nt, Artificial Sequence
  Description of Artificial Sequence: Synthetic oligonucleotide
aaaccuagcacacgcucuc

SEQ ID NO: 65219 - RNA, 19 nt, Artificial Sequence
  Description of Artificial Sequence: Synthetic oligonucleotide
gauaccuacacccuuggca

SEQ ID NO: 65220 - RNA, 19 nt, Artificial Sequence
  Description of Artificial Sequence: Synthetic oligonucleotide
cuauuucgaaucacaagcg

SEQ ID NO: 65221 - RNA, 19 nt, Artificial Sequence
  Description of Artificial Sequence: Synthetic oligonucleotide
uacacaacgaugccacgcg

SEQ ID NO: 65222 - RNA, 19 nt, Artificial Sequence
  Description of Artificial Sequence: Synthetic oligonucleotide
gacuagaaagaggagaaag

SEQ ID NO: 65223 - RNA, 19 nt, Artificial Sequence
  Description of Artificial Sequence: Synthetic oligonucleotide
uauuucgaaucacaagcgc

SEQ ID NO: 65224 - RNA, 19 nt, Artificial Sequence
  Description of Artificial Sequence: Synthetic oligonucleotide
uguggcacgaugcuccacg

SEQ ID NO: 65225 - RNA, 19 nt, Artificial Sequence
  Description of Artificial Sequence: Synthetic oligonucleotide
gaucauaccgaucugucca

SEQ ID NO: 65226 - RNA, 19 nt, Artificial Sequence
  Description of Artificial Sequence: Synthetic oligonucleotide
ugucaaaccacaugugggc

SEQ ID NO: 65227 - RNA, 19 nt, Artificial Sequence
  Description of Artificial Sequence: Synthetic oligonucleotide
aggagggucaaucauggag

SEQ ID NO: 65228 - RNA, 19 nt, Artificial Sequence
  Description of Artificial Sequence: Synthetic oligonucleotide
ugugugguaccgcaaaaug

SEQ ID NO: 65229 - RNA, 19 nt, Artificial Sequence
  Description of Artificial Sequence: Synthetic oligonucleotide
uacgauggaguucaucaag

SEQ ID NO: 65230 - RNA, 19 nt, Artificial Sequence
  Description of Artificial Sequence: Synthetic oligonucleotide
gugagcgucaggcauaccg

SEQ ID NO: 65231 - RNA, 19 nt, Artificial Sequence
  Description of Artificial Sequence: Synthetic oligonucleotide
agauaugauucugagauca

SEQ ID NO: 65232 - RNA, 19 nt, Artificial Sequence
  Description of Artificial Sequence: Synthetic oligonucleotide
aacgcuguauggcagguga

SEQ ID NO: 65233 - RNA, 19 nt, Artificial Sequence
  Description of Artificial Sequence: Synthetic oligonucleotide
agaaaccuagcacacgcuc

SEQ ID NO: 65234 - RNA, 19 nt, Artificial Sequence
  Description of Artificial Sequence: Synthetic oligonucleotide
agaucagacgaccuucuuc

SEQ ID NO: 65235 - RNA, 19 nt, Artificial Sequence
  Description of Artificial Sequence: Synthetic oligonucleotide
aaacguaaucuuucagucu

SEQ ID NO: 65236 - RNA, 19 nt, Artificial Sequence
  Description of Artificial Sequence: Synthetic oligonucleotide
uccguuauaauagccaucu

SEQ ID NO: 65237 - RNA, 19 nt, Artificial Sequence
  Description of Artificial Sequence: Synthetic oligonucleotide
aaugcacuucaagagcgcg

SEQ ID NO: 65238 - RNA, 19 nt, Artificial Sequence
  Description of Artificial Sequence: Synthetic oligonucleotide
aggccaaauauuaagaucu

SEQ ID NO: 65239 - RNA, 19 nt, Artificial Sequence
  Description of Artificial Sequence: Synthetic oligonucleotide
uaucaaagaucagacgacc

SEQ ID NO: 65240 - RNA, 19 nt, Artificial Sequence
  Description of Artificial Sequence: Synthetic oligonucleotide
guauuuacgauggaguuca

SEQ ID NO: 65241 - RNA, 19 nt, Artificial Sequence
  Description of Artificial Sequence: Synthetic oligonucleotide
aguuugucgguuuugggau

SEQ ID NO: 65242 - RNA, 19 nt, Artificial Sequence
  Description of Artificial Sequence: Synthetic oligonucleotide
aguuuauggucauccauga

SEQ ID NO: 65243 - RNA, 19 nt, Artificial Sequence
  Description of Artificial Sequence: Synthetic oligonucleotide
uuacuggugagcguguaag

SEQ ID NO: 65244 - RNA, 19 nt, Artificial Sequence
  Description of Artificial Sequence: Synthetic oligonucleotide
uuuccguuauaauagccau

SEQ ID NO: 65245 - RNA, 19 nt, Artificial Sequence
  Description of Artificial Sequence: Synthetic oligonucleotide
auaccuacacccuuggcaa

SEQ ID NO: 65246 - RNA, 19 nt, Artificial Sequence
  Description of Artificial Sequence: Synthetic oligonucleotide
accaaguagguuugagggg

SEQ ID NO: 65247 - RNA, 19 nt, Artificial Sequence
  Description of Artificial Sequence: Synthetic oligonucleotide
uacucaaggaucagggaaa

SEQ ID NO: 65248 - RNA, 19 nt, Artificial Sequence
  Description of Artificial Sequence: Synthetic oligonucleotide
accgcaaaaugucaucgag

SEQ ID NO: 65249 - RNA, 19 nt, Artificial Sequence
  Description of Artificial Sequence: Synthetic oligonucleotide
auaaugagcuucugcugag

SEQ ID NO: 65250 - RNA, 19 nt, Artificial Sequence
  Description of Artificial Sequence: Synthetic oligonucleotide
aaaccuuccccgcugucgu

SEQ ID NO: 65251 - RNA, 19 nt, Artificial Sequence
  Description of Artificial Sequence: Synthetic oligonucleotide
uuucgaaucacaagcgcuu

SEQ ID NO: 65252 - RNA, 19 nt, Artificial Sequence
  Description of Artificial Sequence: Synthetic oligonucleotide
uagcacacgcucuccaagg

SEQ ID NO: 65253 - RNA, 19 nt, Artificial Sequence
  Description of Artificial Sequence: Synthetic oligonucleotide
uguacuacacaggccuugg

SEQ ID NO: 65254 - RNA, 19 nt, Artificial Sequence
  Description of Artificial Sequence: Synthetic oligonucleotide
aauuccagcacugcggcau

SEQ ID NO: 65255 - RNA, 19 nt, Artificial Sequence
  Description of Artificial Sequence: Synthetic oligonucleotide
accaucacccgugacggcc

SEQ ID NO: 65256 - RNA, 19 nt, Artificial Sequence
  Description of Artificial Sequence: Synthetic oligonucleotide
ugagcguguaagcaaugga

SEQ ID NO: 65257 - RNA, 19 nt, Artificial Sequence
  Description of Artificial Sequence: Synthetic oligonucleotide
cuaagggcggcacccaucc

SEQ ID NO: 65258 - RNA, 19 nt, Artificial Sequence
  Description of Artificial Sequence: Synthetic oligonucleotide
gucuguuccguauuuacga

SEQ ID NO: 65259 - RNA, 19 nt, Artificial Sequence
  Description of Artificial Sequence: Synthetic oligonucleotide
gugaauggacaacugguac

SEQ ID NO: 65260 - RNA, 19 nt, Artificial Sequence
  Description of Artificial Sequence: Synthetic oligonucleotide
uuccuugccaugcgcuugg

SEQ ID NO: 65261 - RNA, 19 nt, Artificial Sequence
  Description of Artificial Sequence: Synthetic oligonucleotide
cucguuggugaaaucuggg

SEQ ID NO: 65262 - RNA, 19 nt, Artificial Sequence
  Description of Artificial Sequence: Synthetic oligonucleotide
caaagaacgcuguauggca

SEQ ID NO: 65263 - RNA, 19 nt, Artificial Sequence
  Description of Artificial Sequence: Synthetic oligonucleotide
ucgccuauuucgaaucaca

SEQ ID NO: 65264 - RNA, 19 nt, Artificial Sequence
  Description of Artificial Sequence: Synthetic oligonucleotide
aacgaugccacgcgcaguu

SEQ ID NO: 65265 - RNA, 19 nt, Artificial Sequence
  Description of Artificial Sequence: Synthetic oligonucleotide
acaacgaugccacgcgcag

SEQ ID NO: 65266 - RNA, 19 nt, Artificial Sequence
  Description of Artificial Sequence: Synthetic oligonucleotide
auuucgaaucacaagcgcu

SEQ ID NO: 65267 - RNA, 19 nt, Artificial Sequence
  Description of Artificial Sequence: Synthetic oligonucleotide
ucacccgugagugaggagu

SEQ ID NO: 65268 - RNA, 19 nt, Artificial Sequence
  Description of Artificial Sequence: Synthetic oligonucleotide
cagaugguagacguggacc

SEQ ID NO: 65269 - RNA, 19 nt, Artificial Sequence
  Description of Artificial Sequence: Synthetic oligonucleotide
uggaucauaccgaucuguc

SEQ ID NO: 65270 - RNA, 19 nt, Artificial Sequence
  Description of Artificial Sequence: Synthetic oligonucleotide
acacaacgaugccacgcgc

SEQ ID NO: 65271 - RNA, 19 nt, Artificial Sequence
  Description of Artificial Sequence: Synthetic oligonucleotide
ugagcgucaggcauaccgu

SEQ ID NO: 65272 - RNA, 19 nt, Artificial Sequence
  Description of Artificial Sequence: Synthetic oligonucleotide
uaguagguuuccuucucca

SEQ ID NO: 65273 - RNA, 19 nt, Artificial Sequence
  Description of Artificial Sequence: Synthetic oligonucleotide
ucagacgaccuucuuccac

SEQ ID NO: 65274 - RNA, 19 nt, Artificial Sequence
  Description of Artificial Sequence: Synthetic oligonucleotide
gauacauccuaagggcggc

SEQ ID NO: 65275 - RNA, 19 nt, Artificial Sequence
  Description of Artificial Sequence: Synthetic oligonucleotide
ggcgauucugcccaucacg

SEQ ID NO: 65276 - RNA, 19 nt, Artificial Sequence
  Description of Artificial Sequence: Synthetic oligonucleotide
uccgacucacccgugagug

SEQ ID NO: 65277 - RNA, 19 nt, Artificial Sequence
  Description of Artificial Sequence: Synthetic oligonucleotide
aguuccgagcuccaagacu

SEQ ID NO: 65278 - RNA, 19 nt, Artificial Sequence
  Description of Artificial Sequence: Synthetic oligonucleotide
accuuaauuccagcacugc

SEQ ID NO: 65279 - RNA, 19 nt, Artificial Sequence
  Description of Artificial Sequence: Synthetic oligonucleotide
gauugucaaaccacaugug

SEQ ID NO: 65280 - RNA, 19 nt, Artificial Sequence
  Description of Artificial Sequence: Synthetic oligonucleotide
agucuguuccguauuuacg

SEQ ID NO: 65281 - RNA, 19 nt, Artificial Sequence
  Description of Artificial Sequence: Synthetic oligonucleotide
uggguucagacguguuugg

SEQ ID NO: 65282 - RNA, 19 nt, Artificial Sequence
  Description of Artificial Sequence: Synthetic oligonucleotide
ucgaaucacaagcgcuugc

SEQ ID NO: 65283 - RNA, 19 nt, Artificial Sequence
  Description of Artificial Sequence: Synthetic oligonucleotide
auguucgauuuccucagca

SEQ ID NO: 65284 - RNA, 19 nt, Artificial Sequence
  Description of Artificial Sequence: Synthetic oligonucleotide
cacgguucgauccccagug

SEQ ID NO: 65285 - RNA, 19 nt, Artificial Sequence
  Description of Artificial Sequence: Synthetic oligonucleotide
accaggguagaguuccgag

SEQ ID NO: 65286 - RNA, 19 nt, Artificial Sequence
  Description of Artificial Sequence: Synthetic oligonucleotide
ugcacuucaagagcgcgga

SEQ ID NO: 65287 - RNA, 19 nt, Artificial Sequence
  Description of Artificial Sequence: Synthetic oligonucleotide
acguguuuggguucuugug

SEQ ID NO: 65288 - RNA, 19 nt, Artificial Sequence
  Description of Artificial Sequence: Synthetic oligonucleotide
cuugcaggguuaagccucg

SEQ ID NO: 65289 - RNA, 19 nt, Artificial Sequence
  Description of Artificial Sequence: Synthetic oligonucleotide
uuacgauggaguucaucaa

SEQ ID NO: 65290 - RNA, 19 nt, Artificial Sequence
  Description of Artificial Sequence: Synthetic oligonucleotide
cuagcacacgcucuccaag

SEQ ID NO: 65291 - RNA, 19 nt, Artificial Sequence
  Description of Artificial Sequence: Synthetic oligonucleotide
cacgauggcacccugccuc

SEQ ID NO: 65292 - RNA, 19 nt, Artificial Sequence
  Description of Artificial Sequence: Synthetic oligonucleotide
cccgcuuaagaauaggcag

SEQ ID NO: 65293 - RNA, 19 nt, Artificial Sequence
  Description of Artificial Sequence: Synthetic oligonucleotide
uauggucauccaugaaacu

SEQ ID NO: 65294 - RNA, 19 nt, Artificial Sequence
  Description of Artificial Sequence: Synthetic oligonucleotide
aggguuaagccucggcuca

SEQ ID NO: 65295 - RNA, 19 nt, Artificial Sequence
  Description of Artificial Sequence: Synthetic oligonucleotide
ucauccgguucugagucag

SEQ ID NO: 65296 - RNA, 19 nt, Artificial Sequence
  Description of Artificial Sequence: Synthetic oligonucleotide
cuuaagaauaggcagguuu

SEQ ID NO: 65297 - RNA, 19 nt, Artificial Sequence
  Description of Artificial Sequence: Synthetic oligonucleotide
ccaacuacgacaucuucug

SEQ ID NO: 65298 - RNA, 19 nt, Artificial Sequence
  Description of Artificial Sequence: Synthetic oligonucleotide
ccuuaauuccagcacugcg

SEQ ID NO: 65299 - RNA, 19 nt, Artificial Sequence
  Description of Artificial Sequence: Synthetic oligonucleotide
ccguuugcagauaugauuc

SEQ ID NO: 65300 - RNA, 19 nt, Artificial Sequence
  Description of Artificial Sequence: Synthetic oligonucleotide
acuggaauguugaggcggg

SEQ ID NO: 65301 - RNA, 19 nt, Artificial Sequence
  Description of Artificial Sequence: Synthetic oligonucleotide
uggugagcguguaagcaau

SEQ ID NO: 65302 - RNA, 19 nt, Artificial Sequence
  Description of Artificial Sequence: Synthetic oligonucleotide
cuguuccguauuuacgaug

SEQ ID NO: 65303 - RNA, 19 nt, Artificial Sequence
  Description of Artificial Sequence: Synthetic oligonucleotide
ucuguuccguauuuacgau

SEQ ID NO: 65304 - RNA, 19 nt, Artificial Sequence
  Description of Artificial Sequence: Synthetic oligonucleotide
ggauacauccuaagggcgg

SEQ ID NO: 65305 - RNA, 19 nt, Artificial Sequence
  Description of Artificial Sequence: Synthetic oligonucleotide
cauccuaagggcggcaccc

SEQ ID NO: 65306 - RNA, 19 nt, Artificial Sequence
  Description of Artificial Sequence: Synthetic oligonucleotide
uucgaaucacaagcgcuug

SEQ ID NO: 65307 - RNA, 19 nt, Artificial Sequence
  Description of Artificial Sequence: Synthetic oligonucleotide
uuccguuauaauagccauc

SEQ ID NO: 65308 - RNA, 19 nt, Artificial Sequence
  Description of Artificial Sequence: Synthetic oligonucleotide
gugagcguguaagcaaugg

SEQ ID NO: 65309 - RNA, 19 nt, Artificial Sequence
  Description of Artificial Sequence: Synthetic oligonucleotide
gcugacgucuugucaaagg

SEQ ID NO: 65310 - RNA, 19 nt, Artificial Sequence
  Description of Artificial Sequence: Synthetic oligonucleotide
acuggugagcguguaagca

SEQ ID NO: 65311 - RNA, 19 nt, Artificial Sequence
  Description of Artificial Sequence: Synthetic oligonucleotide
caggguuaagccucggcuc

SEQ ID NO: 65312 - RNA, 19 nt, Artificial Sequence
  Description of Artificial Sequence: Synthetic oligonucleotide
cugagaucagcagggauuc

SEQ ID NO: 65313 - RNA, 19 nt, Artificial Sequence
  Description of Artificial Sequence: Synthetic oligonucleotide
agaugauaccuacacccuu

SEQ ID NO: 65314 - RNA, 19 nt, Artificial Sequence
  Description of Artificial Sequence: Synthetic oligonucleotide
uagguuugaggggauacau

SEQ ID NO: 65315 - RNA, 19 nt, Artificial Sequence
  Description of Artificial Sequence: Synthetic oligonucleotide
ggaucauaccgaucugucc

SEQ ID NO: 65316 - RNA, 19 nt, Artificial Sequence
  Description of Artificial Sequence: Synthetic oligonucleotide
caaggguggcgauucugcc

SEQ ID NO: 65317 - RNA, 19 nt, Artificial Sequence
  Description of Artificial Sequence: Synthetic oligonucleotide
cugacgucuugucaaagga

SEQ ID NO: 65318 - RNA, 19 nt, Artificial Sequence
  Description of Artificial Sequence: Synthetic oligonucleotide
gccuauuucgaaucacaag

SEQ ID NO: 65319 - RNA, 19 nt, Artificial Sequence
  Description of Artificial Sequence: Synthetic oligonucleotide
gguguuuucaggcagcccu

SEQ ID NO: 65320 - RNA, 19 nt, Artificial Sequence
  Description of Artificial Sequence: Synthetic oligonucleotide
auuugcccacggcaucggg

SEQ ID NO: 65321 - RNA, 19 nt, Artificial Sequence
  Description of Artificial Sequence: Synthetic oligonucleotide
cuuggcguauuucucccuc

SEQ ID NO: 65322 - RNA, 19 nt, Artificial Sequence
  Description of Artificial Sequence: Synthetic oligonucleotide
gagcgucaggcauaccgug

SEQ ID NO: 65323 - RNA, 19 nt, Artificial Sequence
  Description of Artificial Sequence: Synthetic oligonucleotide
gggauacauccuaagggcg

SEQ ID NO: 65324 - RNA, 19 nt, Artificial Sequence
  Description of Artificial Sequence: Synthetic oligonucleotide
ccgcuuaagaauaggcagg

SEQ ID NO: 65325 - RNA, 19 nt, Artificial Sequence
  Description of Artificial Sequence: Synthetic oligonucleotide
ugucaucgagcuccucaga

SEQ ID NO: 65326 - RNA, 19 nt, Artificial Sequence
  Description of Artificial Sequence: Synthetic oligonucleotide
ccaccaaguagguuugagg

SEQ ID NO: 65327 - RNA, 19 nt, Artificial Sequence
  Description of Artificial Sequence: Synthetic oligonucleotide
caguguacacaacgaugcc

SEQ ID NO: 65328 - RNA, 19 nt, Artificial Sequence
  Description of Artificial Sequence: Synthetic oligonucleotide
guuccgacucacccgugag

SEQ ID NO: 65329 - RNA, 19 nt, Artificial Sequence
  Description of Artificial Sequence: Synthetic oligonucleotide
uucagacguguuuggguuc

SEQ ID NO: 65330 - RNA, 19 nt, Artificial Sequence
  Description of Artificial Sequence: Synthetic oligonucleotide
auguacuacacaggccuug

SEQ ID NO: 65331 - RNA, 19 nt, Artificial Sequence
  Description of Artificial Sequence: Synthetic oligonucleotide
aagaucagacgaccuucuu

SEQ ID NO: 65332 - RNA, 19 nt, Artificial Sequence
  Description of Artificial Sequence: Synthetic oligonucleotide
caacuacgacaucuucugc

SEQ ID NO: 65333 - RNA, 19 nt, Artificial Sequence
  Description of Artificial Sequence: Synthetic oligonucleotide
cacaagcgcuugcugggcg

SEQ ID NO: 65334 - RNA, 19 nt, Artificial Sequence
  Description of Artificial Sequence: Synthetic oligonucleotide
ugcggcauuugcccacggc

SEQ ID NO: 65335 - RNA, 19 nt, Artificial Sequence
  Description of Artificial Sequence: Synthetic oligonucleotide
uaauuccagcacugcggca

SEQ ID NO: 65336 - RNA, 19 nt, Artificial Sequence
  Description of Artificial Sequence: Synthetic oligonucleotide
uuccgacucacccgugagu

SEQ ID NO: 65337 - RNA, 19 nt, Artificial Sequence
  Description of Artificial Sequence: Synthetic oligonucleotide
aucauaccgaucuguccau

SEQ ID NO: 65338 - RNA, 19 nt, Artificial Sequence
  Description of Artificial Sequence: Synthetic oligonucleotide
accagcuacaugcuucauu

SEQ ID NO: 65339 - RNA, 19 nt, Artificial Sequence
  Description of Artificial Sequence: Synthetic oligonucleotide
gaguuccgagcuccaagac

SEQ ID NO: 65340 - RNA, 19 nt, Artificial Sequence
  Description of Artificial Sequence: Synthetic oligonucleotide
guuauccaccuugcagccg

SEQ ID NO: 65341 - RNA, 19 nt, Artificial Sequence
  Description of Artificial Sequence: Synthetic oligonucleotide
cccaguguacacaacgaug

SEQ ID NO: 65342 - RNA, 19 nt, Artificial Sequence
  Description of Artificial Sequence: Synthetic oligonucleotide
uggcgaacacaaucucugu

SEQ ID NO: 65343 - RNA, 19 nt, Artificial Sequence
  Description of Artificial Sequence: Synthetic oligonucleotide
aggggcagcggaauguuug

SEQ ID NO: 65344 - RNA, 19 nt, Artificial Sequence
  Description of Artificial Sequence: Synthetic oligonucleotide
uccuugccgugaaggagga

SEQ ID NO: 65345 - RNA, 19 nt, Artificial Sequence
  Description of Artificial Sequence: Synthetic oligonucleotide
gucgguuuugggauuucug

SEQ ID NO: 65346 - RNA, 19 nt, Artificial Sequence
  Description of Artificial Sequence: Synthetic oligonucleotide
uuugucgguuuugggauuu

SEQ ID NO: 65347 - RNA, 19 nt, Artificial Sequence
  Description of Artificial Sequence: Synthetic oligonucleotide
ccgcaaaaugucaucgagc

SEQ ID NO: 65348 - RNA, 19 nt, Artificial Sequence
  Description of Artificial Sequence: Synthetic oligonucleotide
gugcuuuccuaccagggua

SEQ ID NO: 65349 - RNA, 19 nt, Artificial Sequence
  Description of Artificial Sequence: Synthetic oligonucleotide
acaagcgcuugcugggcgu

SEQ ID NO: 65350 - RNA, 19 nt, Artificial Sequence
  Description of Artificial Sequence: Synthetic oligonucleotide
gccgcagcagaccucaaug

SEQ ID NO: 65351 - RNA, 19 nt, Artificial Sequence
  Description of Artificial Sequence: Synthetic oligonucleotide
cacaacgaugccacgcgca

SEQ ID NO: 65352 - RNA, 19 nt, Artificial Sequence
  Description of Artificial Sequence: Synthetic oligonucleotide
gcgggaaccaugucagugc

SEQ ID NO: 65353 - RNA, 19 nt, Artificial Sequence
  Description of Artificial Sequence: Synthetic oligonucleotide
gacguguuuggguucuugu

SEQ ID NO: 65354 - RNA, 19 nt, Artificial Sequence
  Description of Artificial Sequence: Synthetic oligonucleotide
gggccgucucuucaaagag

SEQ ID NO: 65355 - RNA, 19 nt, Artificial Sequence
  Description of Artificial Sequence: Synthetic oligonucleotide
cuuccuugccaugcgcuug

SEQ ID NO: 65356 - RNA, 19 nt, Artificial Sequence
  Description of Artificial Sequence: Synthetic oligonucleotide
ccaggguagaguuccgagc

SEQ ID NO: 65357 - RNA, 19 nt, Artificial Sequence
  Description of Artificial Sequence: Synthetic oligonucleotide
cacgcccgugaugaggugg

SEQ ID NO: 65358 - RNA, 19 nt, Artificial Sequence
  Description of Artificial Sequence: Synthetic oligonucleotide
cuggugagcguguaagcaa

SEQ ID NO: 65359 - RNA, 19 nt, Artificial Sequence
  Description of Artificial Sequence: Synthetic oligonucleotide
cagccguuugcagauauga

SEQ ID NO: 65360 - RNA, 19 nt, Artificial Sequence
  Description of Artificial Sequence: Synthetic oligonucleotide
guucagacguguuuggguu

SEQ ID NO: 65361 - RNA, 19 nt, Artificial Sequence
  Description of Artificial Sequence: Synthetic oligonucleotide
caucgagcuccucagaggu

SEQ ID NO: 65362 - RNA, 19 nt, Artificial Sequence
  Description of Artificial Sequence: Synthetic oligonucleotide
ucgccugaugaugagcuuu

SEQ ID NO: 65363 - RNA, 19 nt, Artificial Sequence
  Description of Artificial Sequence: Synthetic oligonucleotide
gugauuggauggucuccug

SEQ ID NO: 65364 - RNA, 19 nt, Artificial Sequence
  Description of Artificial Sequence: Synthetic oligonucleotide
aucagacgaccuucuucca

SEQ ID NO: 65365 - RNA, 19 nt, Artificial Sequence
  Description of Artificial Sequence: Synthetic oligonucleotide
guuacuggugagcguguaa

SEQ ID NO: 65366 - RNA, 19 nt, Artificial Sequence
  Description of Artificial Sequence: Synthetic oligonucleotide
guuuauggucauccaugaa

SEQ ID NO: 65367 - RNA, 19 nt, Artificial Sequence
  Description of Artificial Sequence: Synthetic oligonucleotide
agggcgucgccugaugaug

SEQ ID NO: 65368 - RNA, 19 nt, Artificial Sequence
  Description of Artificial Sequence: Synthetic oligonucleotide
agaacgcuguauggcaggu

SEQ ID NO: 65369 - RNA, 19 nt, Artificial Sequence
  Description of Artificial Sequence: Synthetic oligonucleotide
acgauggcacccugccucu

SEQ ID NO: 65370 - RNA, 19 nt, Artificial Sequence
  Description of Artificial Sequence: Synthetic oligonucleotide
ucccaguuccagguaggca

SEQ ID NO: 65371 - RNA, 19 nt, Artificial Sequence
  Description of Artificial Sequence: Synthetic oligonucleotide
gacucacccgugagugagg

SEQ ID NO: 65372 - RNA, 19 nt, Artificial Sequence
  Description of Artificial Sequence: Synthetic oligonucleotide
cucgccuauuucgaaucac

SEQ ID NO: 65373 - RNA, 19 nt, Artificial Sequence
  Description of Artificial Sequence: Synthetic oligonucleotide
cgugagugaggaguuaucc

SEQ ID NO: 65374 - RNA, 19 nt, Artificial Sequence
  Description of Artificial Sequence: Synthetic oligonucleotide
gcggcauuugcccacggca

SEQ ID NO: 65375 - RNA, 19 nt, Artificial Sequence
  Description of Artificial Sequence: Synthetic oligonucleotide
uaccaggguagaguuccga

SEQ ID NO: 65376 - RNA, 19 nt, Artificial Sequence
  Description of Artificial Sequence: Synthetic oligonucleotide
ggcgggaaccaugucagug

SEQ ID NO: 65377 - RNA, 19 nt, Artificial Sequence
  Description of Artificial Sequence: Synthetic oligonucleotide
cacgaugcuccacggcgug

SEQ ID NO: 65378 - RNA, 19 nt, Artificial Sequence
  Description of Artificial Sequence: Synthetic oligonucleotide
uggcgcccgggaccgaagc

SEQ ID NO: 65379 - RNA, 19 nt, Artificial Sequence
  Description of Artificial Sequence: Synthetic oligonucleotide
ggacagagcgaaccaugug

SEQ ID NO: 65380 - RNA, 19 nt, Artificial Sequence
  Description of Artificial Sequence: Synthetic oligonucleotide
guuccgagcuccaagacuu

SEQ ID NO: 65381 - RNA, 19 nt, Artificial Sequence
  Description of Artificial Sequence: Synthetic oligonucleotide
ccaaguagguuugagggga

SEQ ID NO: 65382 - RNA, 19 nt, Artificial Sequence
  Description of Artificial Sequence: Synthetic oligonucleotide
gugugguaccgcaaaaugu

SEQ ID NO: 65383 - RNA, 19 nt, Artificial Sequence
  Description of Artificial Sequence: Synthetic oligonucleotide
gaacgcuguauggcaggug

SEQ ID NO: 65384 - RNA, 19 nt, Artificial Sequence
  Description of Artificial Sequence: Synthetic oligonucleotide
gcagaugguagacguggac

SEQ ID NO: 65385 - RNA, 19 nt, Artificial Sequence
  Description of Artificial Sequence: Synthetic oligonucleotide
gaucccgggccacggaucu

SEQ ID NO: 65386 - RNA, 19 nt, Artificial Sequence
  Description of Artificial Sequence: Synthetic oligonucleotide
ccaggucucacggaugccc

SEQ ID NO: 65387 - RNA, 19 nt, Artificial Sequence
  Description of Artificial Sequence: Synthetic oligonucleotide
ggguucuugugaauggaca

SEQ ID NO: 65388 - RNA, 19 nt, Artificial Sequence
  Description of Artificial Sequence: Synthetic oligonucleotide
agguguacucaaggaucag

SEQ ID NO: 65389 - RNA, 19 nt, Artificial Sequence
  Description of Artificial Sequence: Synthetic oligonucleotide
cacggagccgcagcagacc

SEQ ID NO: 65390 - RNA, 19 nt, Artificial Sequence
  Description of Artificial Sequence: Synthetic oligonucleotide
agcgcggacucagaggcau

SEQ ID NO: 65391 - RNA, 19 nt, Artificial Sequence
  Description of Artificial Sequence: Synthetic oligonucleotide
uaccuacacccuuggcaau

SEQ ID NO: 65392 - RNA, 19 nt, Artificial Sequence
  Description of Artificial Sequence: Synthetic oligonucleotide
gagggucaaucauggagau

SEQ ID NO: 65393 - RNA, 19 nt, Artificial Sequence
  Description of Artificial Sequence: Synthetic oligonucleotide
gacggcuggcgcccgggac

SEQ ID NO: 65394 - RNA, 19 nt, Artificial Sequence
  Description of Artificial Sequence: Synthetic oligonucleotide
acgguucgauccccagugu

SEQ ID NO: 65395 - RNA, 19 nt, Artificial Sequence
  Description of Artificial Sequence: Synthetic oligonucleotide
agcgucaggcauaccguga

SEQ ID NO: 65396 - RNA, 19 nt, Artificial Sequence
  Description of Artificial Sequence: Synthetic oligonucleotide
cgcaaaaugucaucgagcu

SEQ ID NO: 65397 - RNA, 19 nt, Artificial Sequence
  Description of Artificial Sequence: Synthetic oligonucleotide
aagcgcuugcugggcguug

SEQ ID NO: 65398 - RNA, 19 nt, Artificial Sequence
  Description of Artificial Sequence: Synthetic oligonucleotide
cccgcugucguuccuguac

SEQ ID NO: 65399 - RNA, 19 nt, Artificial Sequence
  Description of Artificial Sequence: Synthetic oligonucleotide
agugagcgucaggcauacc

SEQ ID NO: 65400 - RNA, 19 nt, Artificial Sequence
  Description of Artificial Sequence: Synthetic oligonucleotide
ucauaccgaucuguccaua

SEQ ID NO: 65401 - RNA, 19 nt, Artificial Sequence
  Description of Artificial Sequence: Synthetic oligonucleotide
guuccguauuuacgaugga

SEQ ID NO: 65402 - RNA, 19 nt, Artificial Sequence
  Description of Artificial Sequence: Synthetic oligonucleotide
guauggcaggugaacucca

SEQ ID NO: 65403 - RNA, 19 nt, Artificial Sequence
  Description of Artificial Sequence: Synthetic oligonucleotide
gcgucaggcauaccgugac

SEQ ID NO: 65404 - RNA, 19 nt, Artificial Sequence
  Description of Artificial Sequence: Synthetic oligonucleotide
ggcagcggaauguuugcaa

SEQ ID NO: 65405 - RNA, 19 nt, Artificial Sequence
  Description of Artificial Sequence: Synthetic oligonucleotide
cuggaauguugaggcgggc

SEQ ID NO: 65406 - RNA, 19 nt, Artificial Sequence
  Description of Artificial Sequence: Synthetic oligonucleotide
cuucucgccuauuucgaau

SEQ ID NO: 65407 - RNA, 19 nt, Artificial Sequence
  Description of Artificial Sequence: Synthetic oligonucleotide
aaccuuccccgcugucguu

SEQ ID NO: 65408 - RNA, 19 nt, Artificial Sequence
  Description of Artificial Sequence: Synthetic oligonucleotide
cggaauguuugcaauaaua

SEQ ID NO: 65409 - RNA, 19 nt, Artificial Sequence
  Description of Artificial Sequence: Synthetic oligonucleotide
cacgcgcaguuccuuccac

SEQ ID NO: 65410 - RNA, 19 nt, Artificial Sequence
  Description of Artificial Sequence: Synthetic oligonucleotide
cucccggccgggagagcgg

SEQ ID NO: 65411 - RNA, 19 nt, Artificial Sequence
  Description of Artificial Sequence: Synthetic oligonucleotide
ggcgcccuucaucacuagc

SEQ ID NO: 65412 - RNA, 19 nt, Artificial Sequence
  Description of Artificial Sequence: Synthetic oligonucleotide
gccguuugcagauaugauu

SEQ ID NO: 65413 - RNA, 19 nt, Artificial Sequence
  Description of Artificial Sequence: Synthetic oligonucleotide
gaacacggccacgcccgug

SEQ ID NO: 65414 - RNA, 19 nt, Artificial Sequence
  Description of Artificial Sequence: Synthetic oligonucleotide
cagcggucaucccaggucu

SEQ ID NO: 65415 - RNA, 19 nt, Artificial Sequence
  Description of Artificial Sequence: Synthetic oligonucleotide
acgaugccacgcgcaguuc

SEQ ID NO: 65416 - RNA, 19 nt, Artificial Sequence
  Description of Artificial Sequence: Synthetic oligonucleotide
ggcguauuucucccucauc

SEQ ID NO: 65417 - RNA, 19 nt, Artificial Sequence
  Description of Artificial Sequence: Synthetic oligonucleotide
ugacagccucuagccaggu

SEQ ID NO: 65418 - RNA, 19 nt, Artificial Sequence
  Description of Artificial Sequence: Synthetic oligonucleotide
auccuaagggcggcaccca

SEQ ID NO: 65419 - RNA, 19 nt, Artificial Sequence
  Description of Artificial Sequence: Synthetic oligonucleotide
guagaguuccgagcuccaa

SEQ ID NO: 65420 - RNA, 19 nt, Artificial Sequence
  Description of Artificial Sequence: Synthetic oligonucleotide
ccaugcgcuuggcagugag

SEQ ID NO: 65421 - RNA, 19 nt, Artificial Sequence
  Description of Artificial Sequence: Synthetic oligonucleotide
cgaugccacgcgcaguucc

SEQ ID NO: 65422 - RNA, 19 nt, Artificial Sequence
  Description of Artificial Sequence: Synthetic oligonucleotide
cguuauaauagccaucuuu

SEQ ID NO: 65423 - RNA, 19 nt, Artificial Sequence
  Description of Artificial Sequence: Synthetic oligonucleotide
ggugagcguguaagcaaug

SEQ ID NO: 65424 - RNA, 19 nt, Artificial Sequence
  Description of Artificial Sequence: Synthetic oligonucleotide
ggcgucgccugaugaugag

SEQ ID NO: 65425 - RNA, 19 nt, Artificial Sequence
  Description of Artificial Sequence: Synthetic oligonucleotide
cccaacuacgacaucuucu

SEQ ID NO: 65426 - RNA, 19 nt, Artificial Sequence
  Description of Artificial Sequence: Synthetic oligonucleotide
uugucgguuuugggauuuc

SEQ ID NO: 65427 - RNA, 19 nt, Artificial Sequence
  Description of Artificial Sequence: Synthetic oligonucleotide
ccuaagggcggcacccauc

SEQ ID NO: 65428 - RNA, 19 nt, Artificial Sequence
  Description of Artificial Sequence: Synthetic oligonucleotide
gcguguaagcaauggauuu

SEQ ID NO: 65429 - RNA, 19 nt, Artificial Sequence
  Description of Artificial Sequence: Synthetic oligonucleotide
cugcggcauuugcccacgg

SEQ ID NO: 65430 - RNA, 19 nt, Artificial Sequence
  Description of Artificial Sequence: Synthetic oligonucleotide
acgcccgugaugaggugga

SEQ ID NO: 65431 - RNA, 19 nt, Artificial Sequence
  Description of Artificial Sequence: Synthetic oligonucleotide
cgacucacccgugagugag

SEQ ID NO: 65432 - RNA, 19 nt, Artificial Sequence
  Description of Artificial Sequence: Synthetic oligonucleotide
ccgagucugggguuccgac

SEQ ID NO: 65433 - RNA, 19 nt, Artificial Sequence
  Description of Artificial Sequence: Synthetic oligonucleotide
acuuguugguggaguugaa

SEQ ID NO: 65434 - RNA, 19 nt, Artificial Sequence
  Description of Artificial Sequence: Synthetic oligonucleotide
cugccacguguccgccucc

SEQ ID NO: 65435 - RNA, 19 nt, Artificial Sequence
  Description of Artificial Sequence: Synthetic oligonucleotide
ccaugucagugcccaaguc

SEQ ID NO: 65436 - RNA, 19 nt, Artificial Sequence
  Description of Artificial Sequence: Synthetic oligonucleotide
cauccgguucugagucaga

SEQ ID NO: 65437 - RNA, 19 nt, Artificial Sequence
  Description of Artificial Sequence: Synthetic oligonucleotide
gggaaccaugucagugccc

SEQ ID NO: 65438 - RNA, 19 nt, Artificial Sequence
  Description of Artificial Sequence: Synthetic oligonucleotide
cagagcgaaccauguggcu

SEQ ID NO: 65439 - RNA, 19 nt, Artificial Sequence
  Description of Artificial Sequence: Synthetic oligonucleotide
ccgugagugaggaguuauc

SEQ ID NO: 65440 - RNA, 19 nt, Artificial Sequence
  Description of Artificial Sequence: Synthetic oligonucleotide
ccaucacgguucgaucccc

SEQ ID NO: 65441 - RNA, 19 nt, Artificial Sequence
  Description of Artificial Sequence: Synthetic oligonucleotide
cauguacuacacaggccuu

SEQ ID NO: 65442 - RNA, 19 nt, Artificial Sequence
  Description of Artificial Sequence: Synthetic oligonucleotide
gcucaucguccaguggcug

SEQ ID NO: 65443 - RNA, 19 nt, Artificial Sequence
  Description of Artificial Sequence: Synthetic oligonucleotide
gagcgggccggggagccga

SEQ ID NO: 65444 - RNA, 19 nt, Artificial Sequence
  Description of Artificial Sequence: Synthetic oligonucleotide
cagcccuugcaggguuaag

SEQ ID NO: 65445 - RNA, 19 nt, Artificial Sequence
  Description of Artificial Sequence: Synthetic oligonucleotide
gcagccguuugcagauaug

SEQ ID NO: 65446 - RNA, 19 nt, Artificial Sequence
  Description of Artificial Sequence: Synthetic oligonucleotide
gcgucgccugaugaugagc

SEQ ID NO: 65447 - RNA, 19 nt, Artificial Sequence
  Description of Artificial Sequence: Synthetic oligonucleotide
gcauaccgugacaguggcc

SEQ ID NO: 65448 - RNA, 19 nt, Artificial Sequence
  Description of Artificial Sequence: Synthetic oligonucleotide
gcacuucaagagcgcggac

SEQ ID NO: 65449 - RNA, 19 nt, Artificial Sequence
  Description of Artificial Sequence: Synthetic oligonucleotide
ccccguuaccagcuacaug

SEQ ID NO: 65450 - RNA, 19 nt, Artificial Sequence
  Description of Artificial Sequence: Synthetic oligonucleotide
cgccuauuucgaaucacaa

SEQ ID NO: 65451 - RNA, 19 nt, Artificial Sequence
  Description of Artificial Sequence: Synthetic oligonucleotide
gagcgcggacucagaggca

SEQ ID NO: 65452 - RNA, 19 nt, Artificial Sequence
  Description of Artificial Sequence: Synthetic oligonucleotide
gcguuggggccgaucccgg

SEQ ID NO: 65453 - RNA, 19 nt, Artificial Sequence
  Description of Artificial Sequence: Synthetic oligonucleotide
gggcgucgccugaugauga

SEQ ID NO: 65454 - RNA, 19 nt, Artificial Sequence
  Description of Artificial Sequence: Synthetic oligonucleotide
cguuggggccgaucccggg

SEQ ID NO: 65455 - RNA, 19 nt, Artificial Sequence
  Description of Artificial Sequence: Synthetic oligonucleotide
cuacgacaucuucugcauu

SEQ ID NO: 65456 - RNA, 19 nt, Artificial Sequence
  Description of Artificial Sequence: Synthetic oligonucleotide
cagggcgucgccugaugau

SEQ ID NO: 65457 - RNA, 19 nt, Artificial Sequence
  Description of Artificial Sequence: Synthetic oligonucleotide
ccagggcgucgccugauga

SEQ ID NO: 65458 - RNA, 19 nt, Artificial Sequence
  Description of Artificial Sequence: Synthetic oligonucleotide
cccgcgccggguccugugg

SEQ ID NO: 65459 - RNA, 19 nt, Artificial Sequence
  Description of Artificial Sequence: Synthetic oligonucleotide
cacccgugagugaggaguu

SEQ ID NO: 65460 - RNA, 19 nt, Artificial Sequence
  Description of Artificial Sequence: Synthetic oligonucleotide
cgaucccgggccacggauc

SEQ ID NO: 65461 - RNA, 19 nt, Artificial Sequence
  Description of Artificial Sequence: Synthetic oligonucleotide
ggcuaguaguagguuuccu

SEQ ID NO: 65462 - RNA, 19 nt, Artificial Sequence
  Description of Artificial Sequence: Synthetic oligonucleotide
caacgaugccacgcgcagu

SEQ ID NO: 65463 - RNA, 19 nt, Artificial Sequence
  Description of Artificial Sequence: Synthetic oligonucleotide
ccguggugucagcuucaug

SEQ ID NO: 65464 - RNA, 19 nt, Artificial Sequence
  Description of Artificial Sequence: Synthetic oligonucleotide
ggguuaagccucggcucaa

SEQ ID NO: 65465 - RNA, 19 nt, Artificial Sequence
  Description of Artificial Sequence: Synthetic oligonucleotide
ccgacucacccgugaguga

SEQ ID NO: 65466 - RNA, 19 nt, Artificial Sequence
  Description of Artificial Sequence: Synthetic oligonucleotide
ggggcgcccuucaucacua

SEQ ID NO: 65467 - RNA, 19 nt, Artificial Sequence
  Description of Artificial Sequence: Synthetic oligonucleotide
ggccaaauauuaagaucuu

SEQ ID NO: 65468 - RNA, 19 nt, Artificial Sequence
  Description of Artificial Sequence: Synthetic oligonucleotide
ggacggcuggcgcccggga

SEQ ID NO: 65469 - RNA, 19 nt, Artificial Sequence
  Description of Artificial Sequence: Synthetic oligonucleotide
ccgcgccggguccuguggc

SEQ ID NO: 65470 - RNA, 19 nt, Artificial Sequence
  Description of Artificial Sequence: Synthetic oligonucleotide
gcuuaagaauaggcagguu

SEQ ID NO: 65471 - RNA, 19 nt, Artificial Sequence
  Description of Artificial Sequence: Synthetic oligonucleotide
caagcgcuugcugggcguu

SEQ ID NO: 65472 - RNA, 19 nt, Artificial Sequence
  Description of Artificial Sequence: Synthetic oligonucleotide
cggcauuugcccacggcau

SEQ ID NO: 65473 - RNA, 19 nt, Artificial Sequence
  Description of Artificial Sequence: Synthetic oligonucleotide
cccgugagugaggaguuau

SEQ ID NO: 65474 - RNA, 19 nt, Artificial Sequence
  Description of Artificial Sequence: Synthetic oligonucleotide
ccgcugccacguguccgcc

SEQ ID NO: 65475 - RNA, 19 nt, Artificial Sequence
  Description of Artificial Sequence: Synthetic oligonucleotide
ccacuaucuuggcguauuu

SEQ ID NO: 65476 - RNA, 19 nt, Artificial Sequence
  Description of Artificial Sequence: Synthetic oligonucleotide
gccaugcgcuuggcaguga

SEQ ID NO: 65477 - RNA, 19 nt, Artificial Sequence
  Description of Artificial Sequence: Synthetic oligonucleotide
ccgaucccgggccacggau

SEQ ID NO: 65478 - RNA, 19 nt, Artificial Sequence
  Description of Artificial Sequence: Synthetic oligonucleotide
ccguuauaauagccaucuu

SEQ ID NO: 65479 - RNA, 19 nt, Artificial Sequence
  Description of Artificial Sequence: Synthetic oligonucleotide
cagacguguuuggguucuu

SEQ ID NO: 65480 - RNA, 19 nt, Artificial Sequence
  Description of Artificial Sequence: Synthetic oligonucleotide
ggguggcgauucugcccau

SEQ ID NO: 65481 - RNA, 19 nt, Artificial Sequence
  Description of Artificial Sequence: Synthetic oligonucleotide
ccuugccgugaaggaggau

SEQ ID NO: 65482 - RNA, 19 nt, Artificial Sequence
  Description of Artificial Sequence: Synthetic oligonucleotide
aauauuacugacuggacuc

SEQ ID NO: 65483 - RNA, 19 nt, Artificial Sequence
  Description of Artificial Sequence: Synthetic oligonucleotide
uguauuacuaucaggaagg

SEQ ID NO: 65484 - RNA, 19 nt, Artificial Sequence
  Description of Artificial Sequence: Synthetic oligonucleotide
ucuaugauucauaaaaccg

SEQ ID NO: 65485 - RNA, 19 nt, Artificial Sequence
  Description of Artificial Sequence: Synthetic oligonucleotide
uugguaagauauaacaagg

SEQ ID NO: 65486 - RNA, 19 nt, Artificial Sequence
  Description of Artificial Sequence: Synthetic oligonucleotide
accaugauaaaacagccac

SEQ ID NO: 65487 - RNA, 19 nt, Artificial Sequence
  Description of Artificial Sequence: Synthetic oligonucleotide
uauaaugcuaauuugcagu

SEQ ID NO: 65488 - RNA, 19 nt, Artificial Sequence
  Description of Artificial Sequence: Synthetic oligonucleotide
cuaugauucauaaaaccgg

SEQ ID NO: 65489 - RNA, 19 nt, Artificial Sequence
  Description of Artificial Sequence: Synthetic oligonucleotide
auaccaauagaguacagag

SEQ ID NO: 65490 - RNA, 19 nt, Artificial Sequence
  Description of Artificial Sequence: Synthetic oligonucleotide
ugauacuuaucuaaugaag

SEQ ID NO: 65491 - RNA, 19 nt, Artificial Sequence
  Description of Artificial Sequence: Synthetic oligonucleotide
uagguaauauuacugacug

SEQ ID NO: 65492 - RNA, 19 nt, Artificial Sequence
  Description of Artificial Sequence: Synthetic oligonucleotide
gaacccgugacuuacuugg

SEQ ID NO: 65493 - RNA, 19 nt, Artificial Sequence
  Description of Artificial Sequence: Synthetic oligonucleotide
uaagauaccaauagaguac

SEQ ID NO: 65494 - RNA, 19 nt, Artificial Sequence
  Description of Artificial Sequence: Synthetic oligonucleotide
gacagaaucuaucaugugc

SEQ ID NO: 65495 - RNA, 19 nt, Artificial Sequence
  Description of Artificial Sequence: Synthetic oligonucleotide
aacacgagacaacaggaag

SEQ ID NO: 65496 - RNA, 19 nt, Artificial Sequence
  Description of Artificial Sequence: Synthetic oligonucleotide
agaguuaacauacagguuu

SEQ ID NO: 65497 - RNA, 19 nt, Artificial Sequence
  Description of Artificial Sequence: Synthetic oligonucleotide
gaacaauuaccuuccauag

SEQ ID NO: 65498 - RNA, 19 nt, Artificial Sequence
  Description of Artificial Sequence: Synthetic oligonucleotide
uuaguuuauacgcuguaga

SEQ ID NO: 65499 - RNA, 19 nt, Artificial Sequence
  Description of Artificial Sequence: Synthetic oligonucleotide
aacaauuaccuuccauagg

SEQ ID NO: 65500 - RNA, 19 nt, Artificial Sequence
  Description of Artificial Sequence: Synthetic oligonucleotide
ucuaagauaccaauagagu

SEQ ID NO: 65501 - RNA, 19 nt, Artificial Sequence
  Description of Artificial Sequence: Synthetic oligonucleotide
uccuagacuagguagauga

SEQ ID NO: 65502 - RNA, 19 nt, Artificial Sequence
  Description of Artificial Sequence: Synthetic oligonucleotide
ugauucauaaaaccgggac

SEQ ID NO: 65503 - RNA, 19 nt, Artificial Sequence
  Description of Artificial Sequence: Synthetic oligonucleotide
agcauuuguauuuuaagga

SEQ ID NO: 65504 - RNA, 19 nt, Artificial Sequence
  Description of Artificial Sequence: Synthetic oligonucleotide
cuacuaguaguuauugugg

SEQ ID NO: 65505 - RNA, 19 nt, Artificial Sequence
  Description of Artificial Sequence: Synthetic oligonucleotide
uacagguuugguaagauau

SEQ ID NO: 65506 - RNA, 19 nt, Artificial Sequence
  Description of Artificial Sequence: Synthetic oligonucleotide
acuuaucuaaugaaguggc

SEQ ID NO: 65507 - RNA, 19 nt, Artificial Sequence
  Description of Artificial Sequence: Synthetic oligonucleotide
aaucugguagucgaacacc

SEQ ID NO: 65508 - RNA, 19 nt, Artificial Sequence
  Description of Artificial Sequence: Synthetic oligonucleotide
uguuaguucaauagcgagc

SEQ ID NO: 65509 - RNA, 19 nt, Artificial Sequence
  Description of Artificial Sequence: Synthetic oligonucleotide
ugaacaauuaccuuccaua

SEQ ID NO: 65510 - RNA, 19 nt, Artificial Sequence
  Description of Artificial Sequence: Synthetic oligonucleotide
uugaagugaaccgauagcc

SEQ ID NO: 65511 - RNA, 19 nt, Artificial Sequence
  Description of Artificial Sequence: Synthetic oligonucleotide
gaaugaacuggauaaaaga

SEQ ID NO: 65512 - RNA, 19 nt, Artificial Sequence
  Description of Artificial Sequence: Synthetic oligonucleotide
aacaagggauugugcaugc

SEQ ID NO: 65513 - RNA, 19 nt, Artificial Sequence
  Description of Artificial Sequence: Synthetic oligonucleotide
ucaccaguaggcaugguag

SEQ ID NO: 65514 - RNA, 19 nt, Artificial Sequence
  Description of Artificial Sequence: Synthetic oligonucleotide
ucaagucucaagcaugagc

SEQ ID NO: 65515 - RNA, 19 nt, Artificial Sequence
  Description of Artificial Sequence: Synthetic oligonucleotide
uggugguuaagucaggucu

SEQ ID NO: 65516 - RNA, 19 nt, Artificial Sequence
  Description of Artificial Sequence: Synthetic oligonucleotide
uagaauuucuaguuuauau

SEQ ID NO: 65517 - RNA, 19 nt, Artificial Sequence
  Description of Artificial Sequence: Synthetic oligonucleotide
gaagugaaccgauagcccc

SEQ ID NO: 65518 - RNA, 19 nt, Artificial Sequence
  Description of Artificial Sequence: Synthetic oligonucleotide
uacuaguaguuauuguggg

SEQ ID NO: 65519 - RNA, 19 nt, Artificial Sequence
  Description of Artificial Sequence: Synthetic oligonucleotide
uguagaguacccaguaacc

SEQ ID NO: 65520 - RNA, 19 nt, Artificial Sequence
  Description of Artificial Sequence: Synthetic oligonucleotide
aauuagguagguaauauua

SEQ ID NO: 65521 - RNA, 19 nt, Artificial Sequence
  Description of Artificial Sequence: Synthetic oligonucleotide
acuauuaacauguuaccau

SEQ ID NO: 65522 - RNA, 19 nt, Artificial Sequence
  Description of Artificial Sequence: Synthetic oligonucleotide
cagaaaacguaccagggcc

SEQ ID NO: 65523 - RNA, 19 nt, Artificial Sequence
  Description of Artificial Sequence: Synthetic oligonucleotide
gacuguauuacuaucagga

SEQ ID NO: 65524 - RNA, 19 nt, Artificial Sequence
  Description of Artificial Sequence: Synthetic oligonucleotide
auacuuaucuaaugaagug

SEQ ID NO: 65525 - RNA, 19 nt, Artificial Sequence
  Description of Artificial Sequence: Synthetic oligonucleotide
aacuaugauugcuggaaug

SEQ ID NO: 65526 - RNA, 19 nt, Artificial Sequence
  Description of Artificial Sequence: Synthetic oligonucleotide
cuguauuacuaucaggaag

SEQ ID NO: 65527 - RNA, 19 nt, Artificial Sequence
  Description of Artificial Sequence: Synthetic oligonucleotide
uuaacauacagguuuggua

SEQ ID NO: 65528 - RNA, 19 nt, Artificial Sequence
  Description of Artificial Sequence: Synthetic oligonucleotide
aacuauuaacauguuacca

SEQ ID NO: 65529 - RNA, 19 nt, Artificial Sequence
  Description of Artificial Sequence: Synthetic oligonucleotide
caauuuggaauuugggccc

SEQ ID NO: 65530 - RNA, 19 nt, Artificial Sequence
  Description of Artificial Sequence: Synthetic oligonucleotide
cuauaaugcuaauuugcag

SEQ ID NO: 65531 - RNA, 19 nt, Artificial Sequence
  Description of Artificial Sequence: Synthetic oligonucleotide
auguuaguucaauagcgag

SEQ ID NO: 65532 - RNA, 19 nt, Artificial Sequence
  Description of Artificial Sequence: Synthetic oligonucleotide
aaacugaaauagcaugcca

SEQ ID NO: 65533 - RNA, 19 nt, Artificial Sequence
  Description of Artificial Sequence: Synthetic oligonucleotide
cauaaaaccgggacucucc

SEQ ID NO: 65534 - RNA, 19 nt, Artificial Sequence
  Description of Artificial Sequence: Synthetic oligonucleotide
agguuuacguggcagcugg

SEQ ID NO: 65535 - RNA, 19 nt, Artificial Sequence
  Description of Artificial Sequence: Synthetic oligonucleotide
uuauucaguucuuggauuc

SEQ ID NO: 65536 - RNA, 19 nt, Artificial Sequence
  Description of Artificial Sequence: Synthetic oligonucleotide
acacccggaagucagguuc

SEQ ID NO: 65537 - RNA, 19 nt, Artificial Sequence
  Description of Artificial Sequence: Synthetic oligonucleotide
ucugauaaauuagcaauac

SEQ ID NO: 65538 - RNA, 19 nt, Artificial Sequence
  Description of Artificial Sequence: Synthetic oligonucleotide
gccacuugaacuaagaaag

SEQ ID NO: 65539 - RNA, 19 nt, Artificial Sequence
  Description of Artificial Sequence: Synthetic oligonucleotide
cuaagauaccaauagagua

SEQ ID NO: 65540 - RNA, 19 nt, Artificial Sequence
  Description of Artificial Sequence: Synthetic oligonucleotide
ugugauugaauuugcuuuc

SEQ ID NO: 65541 - RNA, 19 nt, Artificial Sequence
  Description of Artificial Sequence: Synthetic oligonucleotide
ugcugggcggcuauaaugc

SEQ ID NO: 65542 - RNA, 19 nt, Artificial Sequence
  Description of Artificial Sequence: Synthetic oligonucleotide
aaauuagguagguaauauu

SEQ ID NO: 65543 - RNA, 19 nt, Artificial Sequence
  Description of Artificial Sequence: Synthetic oligonucleotide
aagauaccaauagaguaca

SEQ ID NO: 65544 - RNA, 19 nt, Artificial Sequence
  Description of Artificial Sequence: Synthetic oligonucleotide
aaacccuuucugcuuccac

SEQ ID NO: 65545 - RNA, 19 nt, Artificial Sequence
  Description of Artificial Sequence: Synthetic oligonucleotide
uagggugugauugaauuug

SEQ ID NO: 65546 - RNA, 19 nt, Artificial Sequence
  Description of Artificial Sequence: Synthetic oligonucleotide
cuggcaauuuggaauuugg

SEQ ID NO: 65547 - RNA, 19 nt, Artificial Sequence
  Description of Artificial Sequence: Synthetic oligonucleotide
ugacgaucugcccaguuac

SEQ ID NO: 65548 - RNA, 19 nt, Artificial Sequence
  Description of Artificial Sequence: Synthetic oligonucleotide
aaucauuaguuuauacgcu

SEQ ID NO: 65549 - RNA, 19 nt, Artificial Sequence
  Description of Artificial Sequence: Synthetic oligonucleotide
agacuguauuacuaucagg

SEQ ID NO: 65550 - RNA, 19 nt, Artificial Sequence
  Description of Artificial Sequence: Synthetic oligonucleotide
cacgccauaccgaugacag

SEQ ID NO: 65551 - RNA, 19 nt, Artificial Sequence
  Description of Artificial Sequence: Synthetic oligonucleotide
aacccuuucugcuuccacu

SEQ ID NO: 65552 - RNA, 19 nt, Artificial Sequence
  Description of Artificial Sequence: Synthetic oligonucleotide
agucaacagaagccuaaac

SEQ ID NO: 65553 - RNA, 19 nt, Artificial Sequence
  Description of Artificial Sequence: Synthetic oligonucleotide
auauaacaagggauugugc

SEQ ID NO: 65554 - RNA, 19 nt, Artificial Sequence
  Description of Artificial Sequence: Synthetic oligonucleotide
aggguaugucaccaaguac

SEQ ID NO: 65555 - RNA, 19 nt, Artificial Sequence
  Description of Artificial Sequence: Synthetic oligonucleotide
uuuugucacgccauaccga

SEQ ID NO: 65556 - RNA, 19 nt, Artificial Sequence
  Description of Artificial Sequence: Synthetic oligonucleotide
caggaaauuagguagguaa

SEQ ID NO: 65557 - RNA, 19 nt, Artificial Sequence
  Description of Artificial Sequence: Synthetic oligonucleotide
acggugaaucccuaggcag

SEQ ID NO: 65558 - RNA, 19 nt, Artificial Sequence
  Description of Artificial Sequence: Synthetic oligonucleotide
uaccaauagaguacagaga

SEQ ID NO: 65559 - RNA, 19 nt, Artificial Sequence
  Description of Artificial Sequence: Synthetic oligonucleotide
gaaucugguagucgaacac

SEQ ID NO: 65560 - RNA, 19 nt, Artificial Sequence
  Description of Artificial Sequence: Synthetic oligonucleotide
gaaucuaucaugugcugaa

SEQ ID NO: 65561 - RNA, 19 nt, Artificial Sequence
  Description of Artificial Sequence: Synthetic oligonucleotide
augauacuuaucuaaugaa

SEQ ID NO: 65562 - RNA, 19 nt, Artificial Sequence
  Description of Artificial Sequence: Synthetic oligonucleotide
cacccgagaguuaacauac

SEQ ID NO: 65563 - RNA, 19 nt, Artificial Sequence
  Description of Artificial Sequence: Synthetic oligonucleotide
uuugucacgccauaccgau

SEQ ID NO: 65564 - RNA, 19 nt, Artificial Sequence
  Description of Artificial Sequence: Synthetic oligonucleotide
uuccagacaaguccauacc

SEQ ID NO: 65565 - RNA, 19 nt, Artificial Sequence
  Description of Artificial Sequence: Synthetic oligonucleotide
uagaacaacacgagacaac

SEQ ID NO: 65566 - RNA, 19 nt, Artificial Sequence
  Description of Artificial Sequence: Synthetic oligonucleotide
uuuuaaggauuuagggcaa

SEQ ID NO: 65567 - RNA, 19 nt, Artificial Sequence
  Description of Artificial Sequence: Synthetic oligonucleotide
aguaucaacuaugauugcu

SEQ ID NO: 65568 - RNA, 19 nt, Artificial Sequence
  Description of Artificial Sequence: Synthetic oligonucleotide
uugaacuaagaaagcacau

SEQ ID NO: 65569 - RNA, 19 nt, Artificial Sequence
  Description of Artificial Sequence: Synthetic oligonucleotide
auaaugcuaauuugcagua

SEQ ID NO: 65570 - RNA, 19 nt, Artificial Sequence
  Description of Artificial Sequence: Synthetic oligonucleotide
caauagaguacagagauaa

SEQ ID NO: 65571 - RNA, 19 nt, Artificial Sequence
  Description of Artificial Sequence: Synthetic oligonucleotide
uuugggcccaaaucuaaga

SEQ ID NO: 65572 - RNA, 19 nt, Artificial Sequence
  Description of Artificial Sequence: Synthetic oligonucleotide
agccacuugaacuaagaaa

SEQ ID NO: 65573 - RNA, 19 nt, Artificial Sequence
  Description of Artificial Sequence: Synthetic oligonucleotide
acuaugauugcuggaauga

SEQ ID NO: 65574 - RNA, 19 nt, Artificial Sequence
  Description of Artificial Sequence: Synthetic oligonucleotide
uuaccauaauucucagaca

SEQ ID NO: 65575 - RNA, 19 nt, Artificial Sequence
  Description of Artificial Sequence: Synthetic oligonucleotide
uugagaugcucauuuuaac

SEQ ID NO: 65576 - RNA, 19 nt, Artificial Sequence
  Description of Artificial Sequence: Synthetic oligonucleotide
gauaccaauagaguacaga

SEQ ID NO: 65577 - RNA, 19 nt, Artificial Sequence
  Description of Artificial Sequence: Synthetic oligonucleotide
agguaauauuacugacugg

SEQ ID NO: 65578 - RNA, 19 nt, Artificial Sequence
  Description of Artificial Sequence: Synthetic oligonucleotide
uagaucaauuauagaauuu

SEQ ID NO: 65579 - RNA, 19 nt, Artificial Sequence
  Description of Artificial Sequence: Synthetic oligonucleotide
auuuauaaccccaaaugua

SEQ ID NO: 65580 - RNA, 19 nt, Artificial Sequence
  Description of Artificial Sequence: Synthetic oligonucleotide
ccuucaauauguuuucgcc

SEQ ID NO: 65581 - RNA, 19 nt, Artificial Sequence
  Description of Artificial Sequence: Synthetic oligonucleotide
cugaagugccacugggugg

SEQ ID NO: 65582 - RNA, 19 nt, Artificial Sequence
  Description of Artificial Sequence: Synthetic oligonucleotide
gagaauacugcugacuuaa

SEQ ID NO: 65583 - RNA, 19 nt, Artificial Sequence
  Description of Artificial Sequence: Synthetic oligonucleotide
uacugacuggacucggugc

SEQ ID NO: 65584 - RNA, 19 nt, Artificial Sequence
  Description of Artificial Sequence: Synthetic oligonucleotide
acuaguaguuauugugggu

SEQ ID NO: 65585 - RNA, 19 nt, Artificial Sequence
  Description of Artificial Sequence: Synthetic oligonucleotide
ggcuauaaugcuaauuugc

SEQ ID NO: 65586 - RNA, 19 nt, Artificial Sequence
  Description of Artificial Sequence: Synthetic oligonucleotide
aaacacccgagaguuaaca

SEQ ID NO: 65587 - RNA, 19 nt, Artificial Sequence
  Description of Artificial Sequence: Synthetic oligonucleotide
agcccagugagaggaaugc

SEQ ID NO: 65588 - RNA, 19 nt, Artificial Sequence
  Description of Artificial Sequence: Synthetic oligonucleotide
uuacuggguggauuagacc

SEQ ID NO: 65589 - RNA, 19 nt, Artificial Sequence
  Description of Artificial Sequence: Synthetic oligonucleotide
gaagccuaaacacccgaga

SEQ ID NO: 65590 - RNA, 19 nt, Artificial Sequence
  Description of Artificial Sequence: Synthetic oligonucleotide
uucaugaacaaugguccca

SEQ ID NO: 65591 - RNA, 19 nt, Artificial Sequence
  Description of Artificial Sequence: Synthetic oligonucleotide
aagucucaagcaugagcug

SEQ ID NO: 65592 - RNA, 19 nt, Artificial Sequence
  Description of Artificial Sequence: Synthetic oligonucleotide
accgaugacagaaucuauc

SEQ ID NO: 65593 - RNA, 19 nt, Artificial Sequence
  Description of Artificial Sequence: Synthetic oligonucleotide
uuuggacccacggugaauc

SEQ ID NO: 65594 - RNA, 19 nt, Artificial Sequence
  Description of Artificial Sequence: Synthetic oligonucleotide
gauaaggugccagcagugc

SEQ ID NO: 65595 - RNA, 19 nt, Artificial Sequence
  Description of Artificial Sequence: Synthetic oligonucleotide
aacacccgagaguuaacau

SEQ ID NO: 65596 - RNA, 19 nt, Artificial Sequence
  Description of Artificial Sequence: Synthetic oligonucleotide
agaccuucuacacuacaaa

SEQ ID NO: 65597 - RNA, 19 nt, Artificial Sequence
  Description of Artificial Sequence: Synthetic oligonucleotide
guaagauauaacaagggau

SEQ ID NO: 65598 - RNA, 19 nt, Artificial Sequence
  Description of Artificial Sequence: Synthetic oligonucleotide
aggauuuagggcaaauaca

SEQ ID NO: 65599 - RNA, 19 nt, Artificial Sequence
  Description of Artificial Sequence: Synthetic oligonucleotide
ugaacccgugacuuacuug

SEQ ID NO: 65600 - RNA, 19 nt, Artificial Sequence
  Description of Artificial Sequence: Synthetic oligonucleotide
gaaaacguaccagggccag

SEQ ID NO: 65601 - RNA, 19 nt, Artificial Sequence
  Description of Artificial Sequence: Synthetic oligonucleotide
uggauggguagaugagucc

SEQ ID NO: 65602 - RNA, 19 nt, Artificial Sequence
  Description of Artificial Sequence: Synthetic oligonucleotide
uccuauucugugccuuuug

SEQ ID NO: 65603 - RNA, 19 nt, Artificial Sequence
  Description of Artificial Sequence: Synthetic oligonucleotide
aguucauuccgaggccgcc

SEQ ID NO: 65604 - RNA, 19 nt, Artificial Sequence
  Description of Artificial Sequence: Synthetic oligonucleotide
aucaacuaugauugcugga

SEQ ID NO: 65605 - RNA, 19 nt, Artificial Sequence
  Description of Artificial Sequence: Synthetic oligonucleotide
aaaacguaccagggccagg

SEQ ID NO: 65606 - RNA, 19 nt, Artificial Sequence
  Description of Artificial Sequence: Synthetic oligonucleotide
aauuugggcccaaaucuaa

SEQ ID NO: 65607 - RNA, 19 nt, Artificial Sequence
  Description of Artificial Sequence: Synthetic oligonucleotide
guggauuagaccagcuugc

SEQ ID NO: 65608 - RNA, 19 nt, Artificial Sequence
  Description of Artificial Sequence: Synthetic oligonucleotide
aaccaugauaaaacagcca

SEQ ID NO: 65609 - RNA, 19 nt, Artificial Sequence
  Description of Artificial Sequence: Synthetic oligonucleotide
uccgucuucucauggcagc

SEQ ID NO: 65610 - RNA, 19 nt, Artificial Sequence
  Description of Artificial Sequence: Synthetic oligonucleotide
uguuuucgccuuccucucc

SEQ ID NO: 65611 - RNA, 19 nt, Artificial Sequence
  Description of Artificial Sequence: Synthetic oligonucleotide
gaccccucugaugagcagg

SEQ ID NO: 65612 - RNA, 19 nt, Artificial Sequence
  Description of Artificial Sequence: Synthetic oligonucleotide
ucugguagucgaacaccug

SEQ ID NO: 65613 - RNA, 19 nt, Artificial Sequence
  Description of Artificial Sequence: Synthetic oligonucleotide
ggaaggguaugucaccaag

SEQ ID NO: 65614 - RNA, 19 nt, Artificial Sequence
  Description of Artificial Sequence: Synthetic oligonucleotide
ucccacuugcugcaguaac

SEQ ID NO: 65615 - RNA, 19 nt, Artificial Sequence
  Description of Artificial Sequence: Synthetic oligonucleotide
cucucauucaguggggaug

SEQ ID NO: 65616 - RNA, 19 nt, Artificial Sequence
  Description of Artificial Sequence: Synthetic oligonucleotide
ccgagaguuaacauacagg

SEQ ID NO: 65617 - RNA, 19 nt, Artificial Sequence
  Description of Artificial Sequence: Synthetic oligonucleotide
uaaggauuuagggcaaaua

SEQ ID NO: 65618 - RNA, 19 nt, Artificial Sequence
  Description of Artificial Sequence: Synthetic oligonucleotide
aggucuacaaugaacccgu

SEQ ID NO: 65619 - RNA, 19 nt, Artificial Sequence
  Description of Artificial Sequence: Synthetic oligonucleotide
ugucugcccugcugcaugg

SEQ ID NO: 65620 - RNA, 19 nt, Artificial Sequence
  Description of Artificial Sequence: Synthetic oligonucleotide
ugguagucgaacaccuguc

SEQ ID NO: 65621 - RNA, 19 nt, Artificial Sequence
  Description of Artificial Sequence: Synthetic oligonucleotide
ugcuuagcuggccaguauu

SEQ ID NO: 65622 - RNA, 19 nt, Artificial Sequence
  Description of Artificial Sequence: Synthetic oligonucleotide
agggugugauugaauuugc

SEQ ID NO: 65623 - RNA, 19 nt, Artificial Sequence
  Description of Artificial Sequence: Synthetic oligonucleotide
guaggcaugguagcaaaac

SEQ ID NO: 65624 - RNA, 19 nt, Artificial Sequence
  Description of Artificial Sequence: Synthetic oligonucleotide
uggguucagacugaucaga

SEQ ID NO: 65625 - RNA, 19 nt, Artificial Sequence
  Description of Artificial Sequence: Synthetic oligonucleotide
cuauagcugauuccccaug

SEQ ID NO: 65626 - RNA, 19 nt, Artificial Sequence
  Description of Artificial Sequence: Synthetic oligonucleotide
agacugaucagaaaacgua

SEQ ID NO: 65627 - RNA, 19 nt, Artificial Sequence
  Description of Artificial Sequence: Synthetic oligonucleotide
guagaguacccaguaacca

SEQ ID NO: 65628 - RNA, 19 nt, Artificial Sequence
  Description of Artificial Sequence: Synthetic oligonucleotide
acacgagacaacaggaaga

SEQ ID NO: 65629 - RNA, 19 nt, Artificial Sequence
  Description of Artificial Sequence: Synthetic oligonucleotide
agacaaguccauaccuagg

SEQ ID NO: 65630 - RNA, 19 nt, Artificial Sequence
  Description of Artificial Sequence: Synthetic oligonucleotide
acacccgagaguuaacaua

SEQ ID NO: 65631 - RNA, 19 nt, Artificial Sequence
  Description of Artificial Sequence: Synthetic oligonucleotide
uaaacacccgagaguuaac

SEQ ID NO: 65632 - RNA, 19 nt, Artificial Sequence
  Description of Artificial Sequence: Synthetic oligonucleotide
guaguuauuguggguucag

SEQ ID NO: 65633 - RNA, 19 nt, Artificial Sequence
  Description of Artificial Sequence: Synthetic oligonucleotide
uagcgagcagcauuucuaa

SEQ ID NO: 65634 - RNA, 19 nt, Artificial Sequence
  Description of Artificial Sequence: Synthetic oligonucleotide
guggguucagacugaucag

SEQ ID NO: 65635 - RNA, 19 nt, Artificial Sequence
  Description of Artificial Sequence: Synthetic oligonucleotide
cacauagaacaacacgaga

SEQ ID NO: 65636 - RNA, 19 nt, Artificial Sequence
  Description of Artificial Sequence: Synthetic oligonucleotide
ugggcccaaaucuaagaua

SEQ ID NO: 65637 - RNA, 19 nt, Artificial Sequence
  Description of Artificial Sequence: Synthetic oligonucleotide
gggcccaaaucuaagauac

SEQ ID NO: 65638 - RNA, 19 nt, Artificial Sequence
  Description of Artificial Sequence: Synthetic oligonucleotide
uagccccaaucuuaggggu

SEQ ID NO: 65639 - RNA, 19 nt, Artificial Sequence
  Description of Artificial Sequence: Synthetic oligonucleotide
aggagagagaauacugcug

SEQ ID NO: 65640 - RNA, 19 nt, Artificial Sequence
  Description of Artificial Sequence: Synthetic oligonucleotide
aauagaguacagagauaau

SEQ ID NO: 65641 - RNA, 19 nt, Artificial Sequence
  Description of Artificial Sequence: Synthetic oligonucleotide
agagaauacugcugacuua

SEQ ID NO: 65642 - RNA, 19 nt, Artificial Sequence
  Description of Artificial Sequence: Synthetic oligonucleotide
auuugggcccaaaucuaag

SEQ ID NO: 65643 - RNA, 19 nt, Artificial Sequence
  Description of Artificial Sequence: Synthetic oligonucleotide
guacccaguaaccaugaua

SEQ ID NO: 65644 - RNA, 19 nt, Artificial Sequence
  Description of Artificial Sequence: Synthetic oligonucleotide
uggauuagaccagcuugca

SEQ ID NO: 65645 - RNA, 19 nt, Artificial Sequence
  Description of Artificial Sequence: Synthetic oligonucleotide
ggauuagaccagcuugcag

SEQ ID NO: 65646 - RNA, 19 nt, Artificial Sequence
  Description of Artificial Sequence: Synthetic oligonucleotide
aggaaauuagguagguaau

SEQ ID NO: 65647 - RNA, 19 nt, Artificial Sequence
  Description of Artificial Sequence: Synthetic oligonucleotide
guagguaauauuacugacu

SEQ ID NO: 65648 - RNA, 19 nt, Artificial Sequence
  Description of Artificial Sequence: Synthetic oligonucleotide
ugacuuacuuggagguuua

SEQ ID NO: 65649 - RNA, 19 nt, Artificial Sequence
  Description of Artificial Sequence: Synthetic oligonucleotide
ggaguucauuccgaggccg

SEQ ID NO: 65650 - RNA, 19 nt, Artificial Sequence
  Description of Artificial Sequence: Synthetic oligonucleotide
agaauacugcugacuuaac

SEQ ID NO: 65651 - RNA, 19 nt, Artificial Sequence
  Description of Artificial Sequence: Synthetic oligonucleotide
caaguccauaccuagggcu

SEQ ID NO: 65652 - RNA, 19 nt, Artificial Sequence
  Description of Artificial Sequence: Synthetic oligonucleotide
agaaaacguaccagggcca

SEQ ID NO: 65653 - RNA, 19 nt, Artificial Sequence
  Description of Artificial Sequence: Synthetic oligonucleotide
acuagguagaugauacuua

SEQ ID NO: 65654 - RNA, 19 nt, Artificial Sequence
  Description of Artificial Sequence: Synthetic oligonucleotide
gguugaaagccacaggacu

SEQ ID NO: 65655 - RNA, 19 nt, Artificial Sequence
  Description of Artificial Sequence: Synthetic oligonucleotide
ggagacuguauuacuauca

SEQ ID NO: 65656 - RNA, 19 nt, Artificial Sequence
  Description of Artificial Sequence: Synthetic oligonucleotide
auagcgagcagcauuucua

SEQ ID NO: 65657 - RNA, 19 nt, Artificial Sequence
  Description of Artificial Sequence: Synthetic oligonucleotide
uaccgaugacagaaucuau

SEQ ID NO: 65658 - RNA, 19 nt, Artificial Sequence
  Description of Artificial Sequence: Synthetic oligonucleotide
cucacacccggaagucagg

SEQ ID NO: 65659 - RNA, 19 nt, Artificial Sequence
  Description of Artificial Sequence: Synthetic oligonucleotide
ggacuacuaguaguuauug

SEQ ID NO: 65660 - RNA, 19 nt, Artificial Sequence
  Description of Artificial Sequence: Synthetic oligonucleotide
cucgauauccucuuccuau

SEQ ID NO: 65661 - RNA, 19 nt, Artificial Sequence
  Description of Artificial Sequence: Synthetic oligonucleotide
accuucuacacuacaaaua

SEQ ID NO: 65662 - RNA, 19 nt, Artificial Sequence
  Description of Artificial Sequence: Synthetic oligonucleotide
gaccuucuacacuacaaau

SEQ ID NO: 65663 - RNA, 19 nt, Artificial Sequence
  Description of Artificial Sequence: Synthetic oligonucleotide
cuuagcuggccaguauuuc

SEQ ID NO: 65664 - RNA, 19 nt, Artificial Sequence
  Description of Artificial Sequence: Synthetic oligonucleotide
ucugcugggcggcuauaau

SEQ ID NO: 65665 - RNA, 19 nt, Artificial Sequence
  Description of Artificial Sequence: Synthetic oligonucleotide
cucuuuggacccacgguga

SEQ ID NO: 65666 - RNA, 19 nt, Artificial Sequence
  Description of Artificial Sequence: Synthetic oligonucleotide
uggacccacggugaauccc

SEQ ID NO: 65667 - RNA, 19 nt, Artificial Sequence
  Description of Artificial Sequence: Synthetic oligonucleotide
uccaucccuccuucaauau

SEQ ID NO: 65668 - RNA, 19 nt, Artificial Sequence
  Description of Artificial Sequence: Synthetic oligonucleotide
ggauuuagggcaaauacau

SEQ ID NO: 65669 - RNA, 19 nt, Artificial Sequence
  Description of Artificial Sequence: Synthetic oligonucleotide
gacuagguagaugauacuu

SEQ ID NO: 65670 - RNA, 19 nt, Artificial Sequence
  Description of Artificial Sequence: Synthetic oligonucleotide
augaacccgugacuuacuu

SEQ ID NO: 65671 - RNA, 19 nt, Artificial Sequence
  Description of Artificial Sequence: Synthetic oligonucleotide
cgagaguuaacauacaggu

SEQ ID NO: 65672 - RNA, 19 nt, Artificial Sequence
  Description of Artificial Sequence: Synthetic oligonucleotide
cccgagaguuaacauacag

SEQ ID NO: 65673 - RNA, 19 nt, Artificial Sequence
  Description of Artificial Sequence: Synthetic oligonucleotide
accgauagccccaaucuua

SEQ ID NO: 65674 - RNA, 19 nt, Artificial Sequence
  Description of Artificial Sequence: Synthetic oligonucleotide
aguggaccgggugagcagu

SEQ ID NO: 65675 - RNA, 19 nt, Artificial Sequence
  Description of Artificial Sequence: Synthetic oligonucleotide
cagacugaucagaaaacgu

SEQ ID NO: 65676 - RNA, 19 nt, Artificial Sequence
  Description of Artificial Sequence: Synthetic oligonucleotide
ggauggguagaugagucca

SEQ ID NO: 65677 - RNA, 19 nt, Artificial Sequence
  Description of Artificial Sequence: Synthetic oligonucleotide
cuuccauaggcuccagaaa

SEQ ID NO: 65678 - RNA, 19 nt, Artificial Sequence
  Description of Artificial Sequence: Synthetic oligonucleotide
ccgauagccccaaucuuag

SEQ ID NO: 65679 - RNA, 19 nt, Artificial Sequence
  Description of Artificial Sequence: Synthetic oligonucleotide
ccgaugacagaaucuauca

SEQ ID NO: 65680 - RNA, 19 nt, Artificial Sequence
  Description of Artificial Sequence: Synthetic oligonucleotide
agauaccaauagaguacag

SEQ ID NO: 65681 - RNA, 19 nt, Artificial Sequence
  Description of Artificial Sequence: Synthetic oligonucleotide
gaguacccaguaaccauga

SEQ ID NO: 65682 - RNA, 19 nt, Artificial Sequence
  Description of Artificial Sequence: Synthetic oligonucleotide
cugguagucgaacaccugu

SEQ ID NO: 65683 - RNA, 19 nt, Artificial Sequence
  Description of Artificial Sequence: Synthetic oligonucleotide
aggacuacuaguaguuauu

SEQ ID NO: 65684 - RNA, 19 nt, Artificial Sequence
  Description of Artificial Sequence: Synthetic oligonucleotide
cuaguggaccgggugagca

SEQ ID NO: 65685 - RNA, 19 nt, Artificial Sequence
  Description of Artificial Sequence: Synthetic oligonucleotide
auacgcuguagaguaccca

SEQ ID NO: 65686 - RNA, 19 nt, Artificial Sequence
  Description of Artificial Sequence: Synthetic oligonucleotide
gcggcuauaaugcuaauuu

SEQ ID NO: 65687 - RNA, 19 nt, Artificial Sequence
  Description of Artificial Sequence: Synthetic oligonucleotide
agguucuuugcagcguggu

SEQ ID NO: 65688 - RNA, 19 nt, Artificial Sequence
  Description of Artificial Sequence: Synthetic oligonucleotide
auauauugauugaguguuu

SEQ ID NO: 65689 - RNA, 19 nt, Artificial Sequence
  Description of Artificial Sequence: Synthetic oligonucleotide
ggugugauugaauuugcuu

SEQ ID NO: 65690 - RNA, 19 nt, Artificial Sequence
  Description of Artificial Sequence: Synthetic oligonucleotide
acagguuugguaagauaua

SEQ ID NO: 65691 - RNA, 19 nt, Artificial Sequence
  Description of Artificial Sequence: Synthetic oligonucleotide
gggauaaggugccagcagu

SEQ ID NO: 65692 - RNA, 19 nt, Artificial Sequence
  Description of Artificial Sequence: Synthetic oligonucleotide
caggacuacuaguaguuau

SEQ ID NO: 65693 - RNA, 19 nt, Artificial Sequence
  Description of Artificial Sequence: Synthetic oligonucleotide
caguuacuggguggauuag

SEQ ID NO: 65694 - RNA, 19 nt, Artificial Sequence
  Description of Artificial Sequence: Synthetic oligonucleotide
cuccuagacuagguagaug

SEQ ID NO: 65695 - RNA, 19 nt, Artificial Sequence
  Description of Artificial Sequence: Synthetic oligonucleotide
cagauaagugggacuugaa

SEQ ID NO: 65696 - RNA, 19 nt, Artificial Sequence
  Description of Artificial Sequence: Synthetic oligonucleotide
cauaggcuccagaaagccu

SEQ ID NO: 65697 - RNA, 19 nt, Artificial Sequence
  Description of Artificial Sequence: Synthetic oligonucleotide
uuagaccagcuugcagaau

SEQ ID NO: 65698 - RNA, 19 nt, Artificial Sequence
  Description of Artificial Sequence: Synthetic oligonucleotide
aguaggcaugguagcaaaa

SEQ ID NO: 65699 - RNA, 19 nt, Artificial Sequence
  Description of Artificial Sequence: Synthetic oligonucleotide
acgccauaccgaugacaga

SEQ ID NO: 65700 - RNA, 19 nt, Artificial Sequence
  Description of Artificial Sequence: Synthetic oligonucleotide
cugggaugagaaauggguu

SEQ ID NO: 65701 - RNA, 19 nt, Artificial Sequence
  Description of Artificial Sequence: Synthetic oligonucleotide
agccccaaucuuaggggug

SEQ ID NO: 65702 - RNA, 19 nt, Artificial Sequence
  Description of Artificial Sequence: Synthetic oligonucleotide
cggcuauaaugcuaauuug

SEQ ID NO: 65703 - RNA, 19 nt, Artificial Sequence
  Description of Artificial Sequence: Synthetic oligonucleotide
gagaguuaacauacagguu

SEQ ID NO: 65704 - RNA, 19 nt, Artificial Sequence
  Description of Artificial Sequence: Synthetic oligonucleotide
ucucaaggccaagcaucuc

SEQ ID NO: 65705 - RNA, 19 nt, Artificial Sequence
  Description of Artificial Sequence: Synthetic oligonucleotide
gcaugaggaaauacaacua

SEQ ID NO: 65706 - RNA, 19 nt, Artificial Sequence
  Description of Artificial Sequence: Synthetic oligonucleotide
cugggcggcuauaaugcua

SEQ ID NO: 65707 - RNA, 19 nt, Artificial Sequence
  Description of Artificial Sequence: Synthetic oligonucleotide
gccccaaucuuaggggugc

SEQ ID NO: 65708 - RNA, 19 nt, Artificial Sequence
  Description of Artificial Sequence: Synthetic oligonucleotide
gccuaaacacccgagaguu

SEQ ID NO: 65709 - RNA, 19 nt, Artificial Sequence
  Description of Artificial Sequence: Synthetic oligonucleotide
agggagagucugccacaau

SEQ ID NO: 65710 - RNA, 19 nt, Artificial Sequence
  Description of Artificial Sequence: Synthetic oligonucleotide
ggcaagacccugcaacuau

SEQ ID NO: 65711 - RNA, 19 nt, Artificial Sequence
  Description of Artificial Sequence: Synthetic oligonucleotide
ggcccaaaucuaagauacc

SEQ ID NO: 65712 - RNA, 19 nt, Artificial Sequence
  Description of Artificial Sequence: Synthetic oligonucleotide
ggguagccugcccugcauc

SEQ ID NO: 65713 - RNA, 19 nt, Artificial Sequence
  Description of Artificial Sequence: Synthetic oligonucleotide
gagaggucuauagcugauu

SEQ ID NO: 65714 - RNA, 19 nt, Artificial Sequence
  Description of Artificial Sequence: Synthetic oligonucleotide
cauugcuuagcuggccagu

SEQ ID NO: 65715 - RNA, 19 nt, Artificial Sequence
  Description of Artificial Sequence: Synthetic oligonucleotide
cgauagccccaaucuuagg

SEQ ID NO: 65716 - RNA, 19 nt, Artificial Sequence
  Description of Artificial Sequence: Synthetic oligonucleotide
ccaauagaguacagagaua

SEQ ID NO: 65717 - RNA, 19 nt, Artificial Sequence
  Description of Artificial Sequence: Synthetic oligonucleotide
cgccauaccgaugacagaa

SEQ ID NO: 65718 - RNA, 19 nt, Artificial Sequence
  Description of Artificial Sequence: Synthetic oligonucleotide
gguuggguuuccccuuugu

SEQ ID NO: 65719 - RNA, 19 nt, Artificial Sequence
  Description of Artificial Sequence: Synthetic oligonucleotide
ccucucacacccggaaguc

SEQ ID NO: 65720 - RNA, 19 nt, Artificial Sequence
  Description of Artificial Sequence: Synthetic oligonucleotide
aggaguccaccaacaccaa

SEQ ID NO: 65721 - RNA, 19 nt, Artificial Sequence
  Description of Artificial Sequence: Synthetic oligonucleotide
ggacccacggugaaucccu

SEQ ID NO: 65722 - RNA, 19 nt, Artificial Sequence
  Description of Artificial Sequence: Synthetic oligonucleotide
ggguggauuagaccagcuu

SEQ ID NO: 65723 - RNA, 19 nt, Artificial Sequence
  Description of Artificial Sequence: Synthetic oligonucleotide
cccugcuaucagcccauuc

SEQ ID NO: 65724 - RNA, 19 nt, Artificial Sequence
  Description of Artificial Sequence: Synthetic oligonucleotide
gggugugauugaauuugcu

SEQ ID NO: 65725 - RNA, 19 nt, Artificial Sequence
  Description of Artificial Sequence: Synthetic oligonucleotide
ccuaaacacccgagaguua

SEQ ID NO: 65726 - RNA, 19 nt, Artificial Sequence
  Description of Artificial Sequence: Synthetic oligonucleotide
gcuuagcuggccaguauuu

SEQ ID NO: 65727 - RNA, 19 nt, Artificial Sequence
  Description of Artificial Sequence: Synthetic oligonucleotide
ccucgauauccucuuccua

SEQ ID NO: 65728 - RNA, 19 nt, Artificial Sequence
  Description of Artificial Sequence: Synthetic oligonucleotide
ggagaggucuauagcugau

SEQ ID NO: 65729 - RNA, 19 nt, Artificial Sequence
  Description of Artificial Sequence: Synthetic oligonucleotide
ggcggcuauaaugcuaauu

SEQ ID NO: 65730 - RNA, 19 nt, Artificial Sequence
  Description of Artificial Sequence: Synthetic oligonucleotide
gcugggcggcuauaaugcu

SEQ ID NO: 65731 - RNA, 19 nt, Artificial Sequence
  Description of Artificial Sequence: Synthetic oligonucleotide
ggcucccauugacgaucug

SEQ ID NO: 65732 - RNA, 19 nt, Artificial Sequence
  Description of Artificial Sequence: Synthetic oligonucleotide
cacacccggaagucagguu

SEQ ID NO: 65733 - RNA, 19 nt, Artificial Sequence
  Description of Artificial Sequence: Synthetic oligonucleotide
ccgggugagcagugcccuc

SEQ ID NO: 65734 - RNA, 19 nt, Artificial Sequence
  Description of Artificial Sequence: Synthetic oligonucleotide
gugaaccgauagccccaau

SEQ ID NO: 65735 - RNA, 19 nt, Artificial Sequence
  Description of Artificial Sequence: Synthetic oligonucleotide
gccauaccgaugacagaau

SEQ ID NO: 65736 - RNA, 19 nt, Artificial Sequence
  Description of Artificial Sequence: Synthetic oligonucleotide
gggcggcuauaaugcuaau

SEQ ID NO: 65737 - RNA, 19 nt, Artificial Sequence
  Description of Artificial Sequence: Synthetic oligonucleotide
aauaggacaaaguacaagc

SEQ ID NO: 65738 - RNA, 19 nt, Artificial Sequence
  Description of Artificial Sequence: Synthetic oligonucleotide
aacauauggggccucaagc

SEQ ID NO: 65739 - RNA, 19 nt, Artificial Sequence
  Description of Artificial Sequence: Synthetic oligonucleotide
aaucagaugguacaaaggu

SEQ ID NO: 65740 - RNA, 19 nt, Artificial Sequence
  Description of Artificial Sequence: Synthetic oligonucleotide
aaccuauuuagguuuauag

SEQ ID NO: 65741 - RNA, 19 nt, Artificial Sequence
  Description of Artificial Sequence: Synthetic oligonucleotide
auaaaaguagugcagaggu

SEQ ID NO: 65742 - RNA, 19 nt, Artificial Sequence
  Description of Artificial Sequence: Synthetic oligonucleotide
ucugauaaaaguagugcag

SEQ ID NO: 65743 - RNA, 19 nt, Artificial Sequence
  Description of Artificial Sequence: Synthetic oligonucleotide
ugagugacggauuacaggc

SEQ ID NO: 65744 - RNA, 19 nt, Artificial Sequence
  Description of Artificial Sequence: Synthetic oligonucleotide
acuugaaaggcuuacagcu

SEQ ID NO: 65745 - RNA, 19 nt, Artificial Sequence
  Description of Artificial Sequence: Synthetic oligonucleotide
acauauggggccucaagcc

SEQ ID NO: 65746 - RNA, 19 nt, Artificial Sequence
  Description of Artificial Sequence: Synthetic oligonucleotide
gagguauauaguuuugcgg

SEQ ID NO: 65747 - RNA, 19 nt, Artificial Sequence
  Description of Artificial Sequence: Synthetic oligonucleotide
ucuagagcgcaucagaccu

SEQ ID NO: 65748 - RNA, 19 nt, Artificial Sequence
  Description of Artificial Sequence: Synthetic oligonucleotide
acucugauaaaaguagugc

SEQ ID NO: 65749 - RNA, 19 nt, Artificial Sequence
  Description of Artificial Sequence: Synthetic oligonucleotide
gacaaugugggguucaccc

SEQ ID NO: 65750 - RNA, 19 nt, Artificial Sequence
  Description of Artificial Sequence: Synthetic oligonucleotide
uguugcuucacaucugcgg

SEQ ID NO: 65751 - RNA, 19 nt, Artificial Sequence
  Description of Artificial Sequence: Synthetic oligonucleotide
ugcggaaaguuucagaaac

SEQ ID NO: 65752 - RNA, 19 nt, Artificial Sequence
  Description of Artificial Sequence: Synthetic oligonucleotide
aacauacucacagauacca

SEQ ID NO: 65753 - RNA, 19 nt, Artificial Sequence
  Description of Artificial Sequence: Synthetic oligonucleotide
uuugcggaaaguuucagaa

SEQ ID NO: 65754 - RNA, 19 nt, Artificial Sequence
  Description of Artificial Sequence: Synthetic oligonucleotide
caguuagugccaaagaccc

SEQ ID NO: 65755 - RNA, 19 nt, Artificial Sequence
  Description of Artificial Sequence: Synthetic oligonucleotide
uccaaaguaauaacuugcc

SEQ ID NO: 65756 - RNA, 19 nt, Artificial Sequence
  Description of Artificial Sequence: Synthetic oligonucleotide
augcuuaugggcuggggcc

SEQ ID NO: 65757 - RNA, 19 nt, Artificial Sequence
  Description of Artificial Sequence: Synthetic oligonucleotide
aacgcuaugguuccuguga

SEQ ID NO: 65758 - RNA, 19 nt, Artificial Sequence
  Description of Artificial Sequence: Synthetic oligonucleotide
ugucccaccaacauaugcc

SEQ ID NO: 65759 - RNA, 19 nt, Artificial Sequence
  Description of Artificial Sequence: Synthetic oligonucleotide
ugagacuuaagacuuucac

SEQ ID NO: 65760 - RNA, 19 nt, Artificial Sequence
  Description of Artificial Sequence: Synthetic oligonucleotide
gagauaucucuguugagug

SEQ ID NO: 65761 - RNA, 19 nt, Artificial Sequence
  Description of Artificial Sequence: Synthetic oligonucleotide
cucgcugaagacuugagac

SEQ ID NO: 65762 - RNA, 19 nt, Artificial Sequence
  Description of Artificial Sequence: Synthetic oligonucleotide
accaacauaugccuccugg

SEQ ID NO: 65763 - RNA, 19 nt, Artificial Sequence
  Description of Artificial Sequence: Synthetic oligonucleotide
aaacauacucacagauacc

SEQ ID NO: 65764 - RNA, 19 nt, Artificial Sequence
  Description of Artificial Sequence: Synthetic oligonucleotide
agagacgaccaccuuugcc

SEQ ID NO: 65765 - RNA, 19 nt, Artificial Sequence
  Description of Artificial Sequence: Synthetic oligonucleotide
gaaaggucggcuuugugga

SEQ ID NO: 65766 - RNA, 19 nt, Artificial Sequence
  Description of Artificial Sequence: Synthetic oligonucleotide
uccgcagcaacgcugaccu

SEQ ID NO: 65767 - RNA, 19 nt, Artificial Sequence
  Description of Artificial Sequence: Synthetic oligonucleotide
cacugucauguaaacaugg

SEQ ID NO: 65768 - RNA, 19 nt, Artificial Sequence
  Description of Artificial Sequence: Synthetic oligonucleotide
accuauuuagguuuauaga

SEQ ID NO: 65769 - RNA, 19 nt, Artificial Sequence
  Description of Artificial Sequence: Synthetic oligonucleotide
ugaacgguccaccacagua

SEQ ID NO: 65770 - RNA, 19 nt, Artificial Sequence
  Description of Artificial Sequence: Synthetic oligonucleotide
cucaguuagugccaaagac

SEQ ID NO: 65771 - RNA, 19 nt, Artificial Sequence
  Description of Artificial Sequence: Synthetic oligonucleotide
ucucacucugauaaaagua

SEQ ID NO: 65772 - RNA, 19 nt, Artificial Sequence
  Description of Artificial Sequence: Synthetic oligonucleotide
aacgacuccaucagcaaag

SEQ ID NO: 65773 - RNA, 19 nt, Artificial Sequence
  Description of Artificial Sequence: Synthetic oligonucleotide
ugucaaggcccauuccugg

SEQ ID NO: 65774 - RNA, 19 nt, Artificial Sequence
  Description of Artificial Sequence: Synthetic oligonucleotide
uaaggcauagguccaugug

SEQ ID NO: 65775 - RNA, 19 nt, Artificial Sequence
  Description of Artificial Sequence: Synthetic oligonucleotide
guggauuaugcuuggacug

SEQ ID NO: 65776 - RNA, 19 nt, Artificial Sequence
  Description of Artificial Sequence: Synthetic oligonucleotide
aacgguccaccacaguaag

SEQ ID NO: 65777 - RNA, 19 nt, Artificial Sequence
  Description of Artificial Sequence: Synthetic oligonucleotide
ugagugucccacucguagg

SEQ ID NO: 65778 - RNA, 19 nt, Artificial Sequence
  Description of Artificial Sequence: Synthetic oligonucleotide
uccucuuaaggacacugac

SEQ ID NO: 65779 - RNA, 19 nt, Artificial Sequence
  Description of Artificial Sequence: Synthetic oligonucleotide
ugucccacucguaggaaag

SEQ ID NO: 65780 - RNA, 19 nt, Artificial Sequence
  Description of Artificial Sequence: Synthetic oligonucleotide
uauuggcucacauuaguua

SEQ ID NO: 65781 - RNA, 19 nt, Artificial Sequence
  Description of Artificial Sequence: Synthetic oligonucleotide
gguuaaaagacagaggguc

SEQ ID NO: 65782 - RNA, 19 nt, Artificial Sequence
  Description of Artificial Sequence: Synthetic oligonucleotide
uuuugcggaaaguuucaga

SEQ ID NO: 65783 - RNA, 19 nt, Artificial Sequence
  Description of Artificial Sequence: Synthetic oligonucleotide
gaugagaugcgguggacuc

SEQ ID NO: 65784 - RNA, 19 nt, Artificial Sequence
  Description of Artificial Sequence: Synthetic oligonucleotide
uaugccucgcugaagacuu

SEQ ID NO: 65785 - RNA, 19 nt, Artificial Sequence
  Description of Artificial Sequence: Synthetic oligonucleotide
auaggggcgacuggguucc

SEQ ID NO: 65786 - RNA, 19 nt, Artificial Sequence
  Description of Artificial Sequence: Synthetic oligonucleotide
aaggcuuacagcucagcuu

SEQ ID NO: 65787 - RNA, 19 nt, Artificial Sequence
  Description of Artificial Sequence: Synthetic oligonucleotide
uuuauaggggcgacugggu

SEQ ID NO: 65788 - RNA, 19 nt, Artificial Sequence
  Description of Artificial Sequence: Synthetic oligonucleotide
gaacuuguugcgugcguag

SEQ ID NO: 65789 - RNA, 19 nt, Artificial Sequence
  Description of Artificial Sequence: Synthetic oligonucleotide
aaguacgucaggggaagag

SEQ ID NO: 65790 - RNA, 19 nt, Artificial Sequence
  Description of Artificial Sequence: Synthetic oligonucleotide
guugcccucgaucugcucc

SEQ ID NO: 65791 - RNA, 19 nt, Artificial Sequence
  Description of Artificial Sequence: Synthetic oligonucleotide
ugguugaacuuguugcgug

SEQ ID NO: 65792 - RNA, 19 nt, Artificial Sequence
  Description of Artificial Sequence: Synthetic oligonucleotide
guacagcuaaguuacguuc

SEQ ID NO: 65793 - RNA, 19 nt, Artificial Sequence
  Description of Artificial Sequence: Synthetic oligonucleotide
ucgcucguuacacucgcag

SEQ ID NO: 65794 - RNA, 19 nt, Artificial Sequence
  Description of Artificial Sequence: Synthetic oligonucleotide
uccuauuggcucacauuag

SEQ ID NO: 65795 - RNA, 19 nt, Artificial Sequence
  Description of Artificial Sequence: Synthetic oligonucleotide
uguacagcuaaguuacguu

SEQ ID NO: 65796 - RNA, 19 nt, Artificial Sequence
  Description of Artificial Sequence: Synthetic oligonucleotide
ugacggauuacaggcauug

SEQ ID NO: 65797 - RNA, 19 nt, Artificial Sequence
  Description of Artificial Sequence: Synthetic oligonucleotide
cucgcagugacuguccagg

SEQ ID NO: 65798 - RNA, 19 nt, Artificial Sequence
  Description of Artificial Sequence: Synthetic oligonucleotide
cucuagagcgcaucagacc

SEQ ID NO: 65799 - RNA, 19 nt, Artificial Sequence
  Description of Artificial Sequence: Synthetic oligonucleotide
ggggauacaacccgggucc

SEQ ID NO: 65800 - RNA, 19 nt, Artificial Sequence
  Description of Artificial Sequence: Synthetic oligonucleotide
uguaaacauggcucaccgc

SEQ ID NO: 65801 - RNA, 19 nt, Artificial Sequence
  Description of Artificial Sequence: Synthetic oligonucleotide
cacaagggcacccugucug

SEQ ID NO: 65802 - RNA, 19 nt, Artificial Sequence
  Description of Artificial Sequence: Synthetic oligonucleotide
guacgucaggggaagaggg

SEQ ID NO: 65803 - RNA, 19 nt, Artificial Sequence
  Description of Artificial Sequence: Synthetic oligonucleotide
gaacccuuagcucugggua

SEQ ID NO: 65804 - RNA, 19 nt, Artificial Sequence
  Description of Artificial Sequence: Synthetic oligonucleotide
gagccuaccauggaaggug

SEQ ID NO: 65805 - RNA, 19 nt, Artificial Sequence
  Description of Artificial Sequence: Synthetic oligonucleotide
uugccaaagagguaaccua

SEQ ID NO: 65806 - RNA, 19 nt, Artificial Sequence
  Description of Artificial Sequence: Synthetic oligonucleotide
acauaugccuggguccacc

SEQ ID NO: 65807 - RNA, 19 nt, Artificial Sequence
  Description of Artificial Sequence: Synthetic oligonucleotide
cuuguugcgugcguagggg

SEQ ID NO: 65808 - RNA, 19 nt, Artificial Sequence
  Description of Artificial Sequence: Synthetic oligonucleotide
ugaaacgcuaugguuccug

SEQ ID NO: 65809 - RNA, 19 nt, Artificial Sequence
  Description of Artificial Sequence: Synthetic oligonucleotide
agugacggauuacaggcau

SEQ ID NO: 65810 - RNA, 19 nt, Artificial Sequence
  Description of Artificial Sequence: Synthetic oligonucleotide
ggacuuucuaacccagccg

SEQ ID NO: 65811 - RNA, 19 nt, Artificial Sequence
  Description of Artificial Sequence: Synthetic oligonucleotide
cagagccuaccauggaagg

SEQ ID NO: 65812 - RNA, 19 nt, Artificial Sequence
  Description of Artificial Sequence: Synthetic oligonucleotide
ucgcugaagacuugagacu

SEQ ID NO: 65813 - RNA, 19 nt, Artificial Sequence
  Description of Artificial Sequence: Synthetic oligonucleotide
uuaugccucgcugaagacu

SEQ ID NO: 65814 - RNA, 19 nt, Artificial Sequence
  Description of Artificial Sequence: Synthetic oligonucleotide
accgccugaaacgcuaugg

SEQ ID NO: 65815 - RNA, 19 nt, Artificial Sequence
  Description of Artificial Sequence: Synthetic oligonucleotide
cauuucgggcagaaggcac

SEQ ID NO: 65816 - RNA, 19 nt, Artificial Sequence
  Description of Artificial Sequence: Synthetic oligonucleotide
cauugaugcuuaugggcug

SEQ ID NO: 65817 - RNA, 19 nt, Artificial Sequence
  Description of Artificial Sequence: Synthetic oligonucleotide
ccauacuauaaaauaggac

SEQ ID NO: 65818 - RNA, 19 nt, Artificial Sequence
  Description of Artificial Sequence: Synthetic oligonucleotide
augagaugcgguggacucc

SEQ ID NO: 65819 - RNA, 19 nt, Artificial Sequence
  Description of Artificial Sequence: Synthetic oligonucleotide
uaugaaccuugggauagca

SEQ ID NO: 65820 - RNA, 19 nt, Artificial Sequence
  Description of Artificial Sequence: Synthetic oligonucleotide
agacaaugugggguucacc

SEQ ID NO: 65821 - RNA, 19 nt, Artificial Sequence
  Description of Artificial Sequence: Synthetic oligonucleotide
ggugggaagcuccauguug

SEQ ID NO: 65822 - RNA, 19 nt, Artificial Sequence
  Description of Artificial Sequence: Synthetic oligonucleotide
caggccuccgcucuuggcc

SEQ ID NO: 65823 - RNA, 19 nt, Artificial Sequence
  Description of Artificial Sequence: Synthetic oligonucleotide
acaaugugggguucaccca

SEQ ID NO: 65824 - RNA, 19 nt, Artificial Sequence
  Description of Artificial Sequence: Synthetic oligonucleotide
acgcuugcagcccuacaag

SEQ ID NO: 65825 - RNA, 19 nt, Artificial Sequence
  Description of Artificial Sequence: Synthetic oligonucleotide
ugagaugcgguggacuccu

SEQ ID NO: 65826 - RNA, 19 nt, Artificial Sequence
  Description of Artificial Sequence: Synthetic oligonucleotide
cuuccgcugacacugguca

SEQ ID NO: 65827 - RNA, 19 nt, Artificial Sequence
  Description of Artificial Sequence: Synthetic oligonucleotide
guguuccgggcaaagacag

SEQ ID NO: 65828 - RNA, 19 nt, Artificial Sequence
  Description of Artificial Sequence: Synthetic oligonucleotide
augcuaaagggcuggcccu

SEQ ID NO: 65829 - RNA, 19 nt, Artificial Sequence
  Description of Artificial Sequence: Synthetic oligonucleotide
guccuaacucuacccacag

SEQ ID NO: 65830 - RNA, 19 nt, Artificial Sequence
  Description of Artificial Sequence: Synthetic oligonucleotide
gcucguuacacucgcagug

SEQ ID NO: 65831 - RNA, 19 nt, Artificial Sequence
  Description of Artificial Sequence: Synthetic oligonucleotide
uguugcgugcguagggguc

SEQ ID NO: 65832 - RNA, 19 nt, Artificial Sequence
  Description of Artificial Sequence: Synthetic oligonucleotide
aggcuuaacaguguggauu

SEQ ID NO: 65833 - RNA, 19 nt, Artificial Sequence
  Description of Artificial Sequence: Synthetic oligonucleotide
agugguacccugguggcca

SEQ ID NO: 65834 - RNA, 19 nt, Artificial Sequence
  Description of Artificial Sequence: Synthetic oligonucleotide
gagcgaaccauugucccac

SEQ ID NO: 65835 - RNA, 19 nt, Artificial Sequence
  Description of Artificial Sequence: Synthetic oligonucleotide
ugcaaggaaaggucggcuu

SEQ ID NO: 65836 - RNA, 19 nt, Artificial Sequence
  Description of Artificial Sequence: Synthetic oligonucleotide
caucgcucguuacacucgc

SEQ ID NO: 65837 - RNA, 19 nt, Artificial Sequence
  Description of Artificial Sequence: Synthetic oligonucleotide
acauuaguuagaagcugug

SEQ ID NO: 65838 - RNA, 19 nt, Artificial Sequence
  Description of Artificial Sequence: Synthetic oligonucleotide
uugcggaaaguuucagaaa

SEQ ID NO: 65839 - RNA, 19 nt, Artificial Sequence
  Description of Artificial Sequence: Synthetic oligonucleotide
cauauggggccucaagcca

SEQ ID NO: 65840 - RNA, 19 nt, Artificial Sequence
  Description of Artificial Sequence: Synthetic oligonucleotide
agcgaaccauugucccacc

SEQ ID NO: 65841 - RNA, 19 nt, Artificial Sequence
  Description of Artificial Sequence: Synthetic oligonucleotide
gcgguucucacucugauaa

SEQ ID NO: 65842 - RNA, 19 nt, Artificial Sequence
  Description of Artificial Sequence: Synthetic oligonucleotide
ccucugaccgccugaaacg

SEQ ID NO: 65843 - RNA, 19 nt, Artificial Sequence
  Description of Artificial Sequence: Synthetic oligonucleotide
gguugaacuuguugcgugc

SEQ ID NO: 65844 - RNA, 19 nt, Artificial Sequence
  Description of Artificial Sequence: Synthetic oligonucleotide
cagagauaucucuguugag

SEQ ID NO: 65845 - RNA, 19 nt, Artificial Sequence
  Description of Artificial Sequence: Synthetic oligonucleotide
uccgcucuuggccgugcgg

SEQ ID NO: 65846 - RNA, 19 nt, Artificial Sequence
  Description of Artificial Sequence: Synthetic oligonucleotide
cuuaugccucgcugaagac

SEQ ID NO: 65847 - RNA, 19 nt, Artificial Sequence
  Description of Artificial Sequence: Synthetic oligonucleotide
ggauuacaggcauuggcca

SEQ ID NO: 65848 - RNA, 19 nt, Artificial Sequence
  Description of Artificial Sequence: Synthetic oligonucleotide
acaacccggguccuguccu

SEQ ID NO: 65849 - RNA, 19 nt, Artificial Sequence
  Description of Artificial Sequence: Synthetic oligonucleotide
agcaacgcugaccuggcuu

SEQ ID NO: 65850 - RNA, 19 nt, Artificial Sequence
  Description of Artificial Sequence: Synthetic oligonucleotide
aaaggucggcuuuguggaa

SEQ ID NO: 65851 - RNA, 19 nt, Artificial Sequence
  Description of Artificial Sequence: Synthetic oligonucleotide
uuguugcgugcguaggggu

SEQ ID NO: 65852 - RNA, 19 nt, Artificial Sequence
  Description of Artificial Sequence: Synthetic oligonucleotide
acacucgcagugacugucc

SEQ ID NO: 65853 - RNA, 19 nt, Artificial Sequence
  Description of Artificial Sequence: Synthetic oligonucleotide
ucguaggaaaguucauauu

SEQ ID NO: 65854 - RNA, 19 nt, Artificial Sequence
  Description of Artificial Sequence: Synthetic oligonucleotide
uccgcugacacuggucaug

SEQ ID NO: 65855 - RNA, 19 nt, Artificial Sequence
  Description of Artificial Sequence: Synthetic oligonucleotide
caccgcacugccacacucg

SEQ ID NO: 65856 - RNA, 19 nt, Artificial Sequence
  Description of Artificial Sequence: Synthetic oligonucleotide
acggcgagucacuuuggca

SEQ ID NO: 65857 - RNA, 19 nt, Artificial Sequence
  Description of Artificial Sequence: Synthetic oligonucleotide
aucugcgguucucacucug

SEQ ID NO: 65858 - RNA, 19 nt, Artificial Sequence
  Description of Artificial Sequence: Synthetic oligonucleotide
cacacucggaaugagaucu

SEQ ID NO: 65859 - RNA, 19 nt, Artificial Sequence
  Description of Artificial Sequence: Synthetic oligonucleotide
cucugaccgccugaaacgc

SEQ ID NO: 65860 - RNA, 19 nt, Artificial Sequence
  Description of Artificial Sequence: Synthetic oligonucleotide
gucggcuuuguggaaauca

SEQ ID NO: 65861 - RNA, 19 nt, Artificial Sequence
  Description of Artificial Sequence: Synthetic oligonucleotide
ugcaagcacggcgagucac

SEQ ID NO: 65862 - RNA, 19 nt, Artificial Sequence
  Description of Artificial Sequence: Synthetic oligonucleotide
agacaaucagaugguacaa

SEQ ID NO: 65863 - RNA, 19 nt, Artificial Sequence
  Description of Artificial Sequence: Synthetic oligonucleotide
uugaugcuuaugggcuggg

SEQ ID NO: 65864 - RNA, 19 nt, Artificial Sequence
  Description of Artificial Sequence: Synthetic oligonucleotide
guugcgugcguaggggucc

SEQ ID NO: 65865 - RNA, 19 nt, Artificial Sequence
  Description of Artificial Sequence: Synthetic oligonucleotide
gacagccuugcaccuguac

SEQ ID NO: 65866 - RNA, 19 nt, Artificial Sequence
  Description of Artificial Sequence: Synthetic oligonucleotide
cucguaggaaaguucauau

SEQ ID NO: 65867 - RNA, 19 nt, Artificial Sequence
  Description of Artificial Sequence: Synthetic oligonucleotide
gaaugaucucaaggcugcc

SEQ ID NO: 65868 - RNA, 19 nt, Artificial Sequence
  Description of Artificial Sequence: Synthetic oligonucleotide
gagacucaaggaccaccac

SEQ ID NO: 65869 - RNA, 19 nt, Artificial Sequence
  Description of Artificial Sequence: Synthetic oligonucleotide
gaacgguccaccacaguaa

SEQ ID NO: 65870 - RNA, 19 nt, Artificial Sequence
  Description of Artificial Sequence: Synthetic oligonucleotide
uggcugacauaugccuggg

SEQ ID NO: 65871 - RNA, 19 nt, Artificial Sequence
  Description of Artificial Sequence: Synthetic oligonucleotide
gaaccuugggauagcaugu

SEQ ID NO: 65872 - RNA, 19 nt, Artificial Sequence
  Description of Artificial Sequence: Synthetic oligonucleotide
cuaugaaccuugggauagc

SEQ ID NO: 65873 - RNA, 19 nt, Artificial Sequence
  Description of Artificial Sequence: Synthetic oligonucleotide
agccuaccauggaaggugg

SEQ ID NO: 65874 - RNA, 19 nt, Artificial Sequence
  Description of Artificial Sequence: Synthetic oligonucleotide
ugcccgucggguguuccgg

SEQ ID NO: 65875 - RNA, 19 nt, Artificial Sequence
  Description of Artificial Sequence: Synthetic oligonucleotide
gcaaguacgucaggggaag

SEQ ID NO: 65876 - RNA, 19 nt, Artificial Sequence
  Description of Artificial Sequence: Synthetic oligonucleotide
cuaugguuccugugaucuc

SEQ ID NO: 65877 - RNA, 19 nt, Artificial Sequence
  Description of Artificial Sequence: Synthetic oligonucleotide
ugacgcuugcagcccuaca

SEQ ID NO: 65878 - RNA, 19 nt, Artificial Sequence
  Description of Artificial Sequence: Synthetic oligonucleotide
cuuccgcccagcugucagc

SEQ ID NO: 65879 - RNA, 19 nt, Artificial Sequence
  Description of Artificial Sequence: Synthetic oligonucleotide
cagguugagugagaauuuc

SEQ ID NO: 65880 - RNA, 19 nt, Artificial Sequence
  Description of Artificial Sequence: Synthetic oligonucleotide
acgucugcaccuggcagag

SEQ ID NO: 65881 - RNA, 19 nt, Artificial Sequence
  Description of Artificial Sequence: Synthetic oligonucleotide
acgcuaugguuccugugau

SEQ ID NO: 65882 - RNA, 19 nt, Artificial Sequence
  Description of Artificial Sequence: Synthetic oligonucleotide
cgauuuucccaagagggcc

SEQ ID NO: 65883 - RNA, 19 nt, Artificial Sequence
  Description of Artificial Sequence: Synthetic oligonucleotide
cgaugacuacaaaacaaug

SEQ ID NO: 65884 - RNA, 19 nt, Artificial Sequence
  Description of Artificial Sequence: Synthetic oligonucleotide
gccauacuauaaaauagga

SEQ ID NO: 65885 - RNA, 19 nt, Artificial Sequence
  Description of Artificial Sequence: Synthetic oligonucleotide
ugcgguucucacucugaua

SEQ ID NO: 65886 - RNA, 19 nt, Artificial Sequence
  Description of Artificial Sequence: Synthetic oligonucleotide
gccgcaacucccuuguuga

SEQ ID NO: 65887 - RNA, 19 nt, Artificial Sequence
  Description of Artificial Sequence: Synthetic oligonucleotide
agcuuaugccucgcugaag

SEQ ID NO: 65888 - RNA, 19 nt, Artificial Sequence
  Description of Artificial Sequence: Synthetic oligonucleotide
ggcaccccggacucuagag

SEQ ID NO: 65889 - RNA, 19 nt, Artificial Sequence
  Description of Artificial Sequence: Synthetic oligonucleotide
uccagcgaucauagggguu

SEQ ID NO: 65890 - RNA, 19 nt, Artificial Sequence
  Description of Artificial Sequence: Synthetic oligonucleotide
ccacucguaggaaaguuca

SEQ ID NO: 65891 - RNA, 19 nt, Artificial Sequence
  Description of Artificial Sequence: Synthetic oligonucleotide
ugcggcuauccaggcacag

SEQ ID NO: 65892 - RNA, 19 nt, Artificial Sequence
  Description of Artificial Sequence: Synthetic oligonucleotide
ccaucgcucguuacacucg

SEQ ID NO: 65893 - RNA, 19 nt, Artificial Sequence
  Description of Artificial Sequence: Synthetic oligonucleotide
cacaccaugauggaacacu

SEQ ID NO: 65894 - RNA, 19 nt, Artificial Sequence
  Description of Artificial Sequence: Synthetic oligonucleotide
gccaucgcucguuacacuc

SEQ ID NO: 65895 - RNA, 19 nt, Artificial Sequence
  Description of Artificial Sequence: Synthetic oligonucleotide
gguucucacucugauaaaa

SEQ ID NO: 65896 - RNA, 19 nt, Artificial Sequence
  Description of Artificial Sequence: Synthetic oligonucleotide
ugcuaaagggcuggcccuc

SEQ ID NO: 65897 - RNA, 19 nt, Artificial Sequence
  Description of Artificial Sequence: Synthetic oligonucleotide
cggcgagucacuuuggcac

SEQ ID NO: 65898 - RNA, 19 nt, Artificial Sequence
  Description of Artificial Sequence: Synthetic oligonucleotide
ccggagcgaaccauugucc

SEQ ID NO: 65899 - RNA, 19 nt, Artificial Sequence
  Description of Artificial Sequence: Synthetic oligonucleotide
cugcccgucggguguuccg

SEQ ID NO: 65900 - RNA, 19 nt, Artificial Sequence
  Description of Artificial Sequence: Synthetic oligonucleotide
gagugacggauuacaggca

SEQ ID NO: 65901 - RNA, 19 nt, Artificial Sequence
  Description of Artificial Sequence: Synthetic oligonucleotide
cgugcggcuauccaggcac

SEQ ID NO: 65902 - RNA, 19 nt, Artificial Sequence
  Description of Artificial Sequence: Synthetic oligonucleotide
cucguuacacucgcaguga

SEQ ID NO: 65903 - RNA, 19 nt, Artificial Sequence
  Description of Artificial Sequence: Synthetic oligonucleotide
aggggcgacuggguucccc

SEQ ID NO: 65904 - RNA, 19 nt, Artificial Sequence
  Description of Artificial Sequence: Synthetic oligonucleotide
ugugacgcuugcagcccua

SEQ ID NO: 65905 - RNA, 19 nt, Artificial Sequence
  Description of Artificial Sequence: Synthetic oligonucleotide
cuauuggcucacauuaguu

SEQ ID NO: 65906 - RNA, 19 nt, Artificial Sequence
  Description of Artificial Sequence: Synthetic oligonucleotide
ggcucacauuaguuagaag

SEQ ID NO: 65907 - RNA, 19 nt, Artificial Sequence
  Description of Artificial Sequence: Synthetic oligonucleotide
ggugaacgguccaccacag

SEQ ID NO: 65908 - RNA, 19 nt, Artificial Sequence
  Description of Artificial Sequence: Synthetic oligonucleotide
cggcagcucaguuagugcc

SEQ ID NO: 65909 - RNA, 19 nt, Artificial Sequence
  Description of Artificial Sequence: Synthetic oligonucleotide
gcaacucccuuguugaagu

SEQ ID NO: 65910 - RNA, 19 nt, Artificial Sequence
  Description of Artificial Sequence: Synthetic oligonucleotide
cgcagcaacgcugaccugg

SEQ ID NO: 65911 - RNA, 19 nt, Artificial Sequence
  Description of Artificial Sequence: Synthetic oligonucleotide
auagccccgaugacuacaa

SEQ ID NO: 65912 - RNA, 19 nt, Artificial Sequence
  Description of Artificial Sequence: Synthetic oligonucleotide
gugucccacucguaggaaa

SEQ ID NO: 65913 - RNA, 19 nt, Artificial Sequence
  Description of Artificial Sequence: Synthetic oligonucleotide
aucagaccuucucgucggu

SEQ ID NO: 65914 - RNA, 19 nt, Artificial Sequence
  Description of Artificial Sequence: Synthetic oligonucleotide
cugaccgccugaaacgcua

SEQ ID NO: 65915 - RNA, 19 nt, Artificial Sequence
  Description of Artificial Sequence: Synthetic oligonucleotide
uccugcccggagcgaacca

SEQ ID NO: 65916 - RNA, 19 nt, Artificial Sequence
  Description of Artificial Sequence: Synthetic oligonucleotide
ugcagacaaugugggguuc

SEQ ID NO: 65917 - RNA, 19 nt, Artificial Sequence
  Description of Artificial Sequence: Synthetic oligonucleotide
augcaagcacggcgaguca

SEQ ID NO: 65918 - RNA, 19 nt, Artificial Sequence
  Description of Artificial Sequence: Synthetic oligonucleotide
cuuagacagcgucuugccu

SEQ ID NO: 65919 - RNA, 19 nt, Artificial Sequence
  Description of Artificial Sequence: Synthetic oligonucleotide
acccuuagcucuggguaga

SEQ ID NO: 65920 - RNA, 19 nt, Artificial Sequence
  Description of Artificial Sequence: Synthetic oligonucleotide
ggacucuagagcgcaucag

SEQ ID NO: 65921 - RNA, 19 nt, Artificial Sequence
  Description of Artificial Sequence: Synthetic oligonucleotide
uuccgcugacacuggucau

SEQ ID NO: 65922 - RNA, 19 nt, Artificial Sequence
  Description of Artificial Sequence: Synthetic oligonucleotide
cuguacagcuaaguuacgu

SEQ ID NO: 65923 - RNA, 19 nt, Artificial Sequence
  Description of Artificial Sequence: Synthetic oligonucleotide
gacauaugccuggguccac

SEQ ID NO: 65924 - RNA, 19 nt, Artificial Sequence
  Description of Artificial Sequence: Synthetic oligonucleotide
augaaccuugggauagcau

SEQ ID NO: 65925 - RNA, 19 nt, Artificial Sequence
  Description of Artificial Sequence: Synthetic oligonucleotide
cggagcgaaccauuguccc

SEQ ID NO: 65926 - RNA, 19 nt, Artificial Sequence
  Description of Artificial Sequence: Synthetic oligonucleotide
gugguacccugguggccag

SEQ ID NO: 65927 - RNA, 19 nt, Artificial Sequence
  Description of Artificial Sequence: Synthetic oligonucleotide
cccagcuuaugccucgcug

SEQ ID NO: 65928 - RNA, 19 nt, Artificial Sequence
  Description of Artificial Sequence: Synthetic oligonucleotide
gguucacccacaugcuaaa

SEQ ID NO: 65929 - RNA, 19 nt, Artificial Sequence
  Description of Artificial Sequence: Synthetic oligonucleotide
gaugugcgcaugugacgcu

SEQ ID NO: 65930 - RNA, 19 nt, Artificial Sequence
  Description of Artificial Sequence: Synthetic oligonucleotide
ggcgagucacuuuggcaca

SEQ ID NO: 65931 - RNA, 19 nt, Artificial Sequence
  Description of Artificial Sequence: Synthetic oligonucleotide
cagcuuaugccucgcugaa

SEQ ID NO: 65932 - RNA, 19 nt, Artificial Sequence
  Description of Artificial Sequence: Synthetic oligonucleotide
caccaacauaugccuccug

SEQ ID NO: 65933 - RNA, 19 nt, Artificial Sequence
  Description of Artificial Sequence: Synthetic oligonucleotide
gccggcagcucaguuagug

SEQ ID NO: 65934 - RNA, 19 nt, Artificial Sequence
  Description of Artificial Sequence: Synthetic oligonucleotide
gacagcgucuugccugccu

SEQ ID NO: 65935 - RNA, 19 nt, Artificial Sequence
  Description of Artificial Sequence: Synthetic oligonucleotide
gacccaacauauggggccu

SEQ ID NO: 65936 - RNA, 19 nt, Artificial Sequence
  Description of Artificial Sequence: Synthetic oligonucleotide
gcgguggacuccucuuaag

SEQ ID NO: 65937 - RNA, 19 nt, Artificial Sequence
  Description of Artificial Sequence: Synthetic oligonucleotide
augugcgcaugugacgcuu

SEQ ID NO: 65938 - RNA, 19 nt, Artificial Sequence
  Description of Artificial Sequence: Synthetic oligonucleotide
gggacgucugcaccuggca

SEQ ID NO: 65939 - RNA, 19 nt, Artificial Sequence
  Description of Artificial Sequence: Synthetic oligonucleotide
ugccacccgggaacgugua

SEQ ID NO: 65940 - RNA, 19 nt, Artificial Sequence
  Description of Artificial Sequence: Synthetic oligonucleotide
agcagcgguuccagccauc

SEQ ID NO: 65941 - RNA, 19 nt, Artificial Sequence
  Description of Artificial Sequence: Synthetic oligonucleotide
cagccugaugagugagcca

SEQ ID NO: 65942 - RNA, 19 nt, Artificial Sequence
  Description of Artificial Sequence: Synthetic oligonucleotide
gugacgcuugcagcccuac

SEQ ID NO: 65943 - RNA, 19 nt, Artificial Sequence
  Description of Artificial Sequence: Synthetic oligonucleotide
ggauagccccgaugacuac

SEQ ID NO: 65944 - RNA, 19 nt, Artificial Sequence
  Description of Artificial Sequence: Synthetic oligonucleotide
ccgcucuuggccgugcggc

SEQ ID NO: 65945 - RNA, 19 nt, Artificial Sequence
  Description of Artificial Sequence: Synthetic oligonucleotide
ggguuaaaagacagagggu

SEQ ID NO: 65946 - RNA, 19 nt, Artificial Sequence
  Description of Artificial Sequence: Synthetic oligonucleotide
guugagugucccacucgua

SEQ ID NO: 65947 - RNA, 19 nt, Artificial Sequence
  Description of Artificial Sequence: Synthetic oligonucleotide
gacccucacuuucucgauu

SEQ ID NO: 65948 - RNA, 19 nt, Artificial Sequence
  Description of Artificial Sequence: Synthetic oligonucleotide
aucgcucguuacacucgca

SEQ ID NO: 65949 - RNA, 19 nt, Artificial Sequence
  Description of Artificial Sequence: Synthetic oligonucleotide
ugccggcagcucaguuagu

SEQ ID NO: 65950 - RNA, 19 nt, Artificial Sequence
  Description of Artificial Sequence: Synthetic oligonucleotide
caaguacgucaggggaaga

SEQ ID NO: 65951 - RNA, 19 nt, Artificial Sequence
  Description of Artificial Sequence: Synthetic oligonucleotide
cugcaaggaaaggucggcu

SEQ ID NO: 65952 - RNA, 19 nt, Artificial Sequence
  Description of Artificial Sequence: Synthetic oligonucleotide
gccacccgggaacguguag

SEQ ID NO: 65953 - RNA, 19 nt, Artificial Sequence
  Description of Artificial Sequence: Synthetic oligonucleotide
gcccgucggguguuccggg

SEQ ID NO: 65954 - RNA, 19 nt, Artificial Sequence
  Description of Artificial Sequence: Synthetic oligonucleotide
cagcuucgcagagacucaa

SEQ ID NO: 65955 - RNA, 19 nt, Artificial Sequence
  Description of Artificial Sequence: Synthetic oligonucleotide
cacucguaggaaaguucau

SEQ ID NO: 65956 - RNA, 19 nt, Artificial Sequence
  Description of Artificial Sequence: Synthetic oligonucleotide
gugaacgguccaccacagu

SEQ ID NO: 65957 - RNA, 19 nt, Artificial Sequence
  Description of Artificial Sequence: Synthetic oligonucleotide
gcgugcguagggguccugc

SEQ ID NO: 65958 - RNA, 19 nt, Artificial Sequence
  Description of Artificial Sequence: Synthetic oligonucleotide
ccucuauccaugcgcagcu

SEQ ID NO: 65959 - RNA, 19 nt, Artificial Sequence
  Description of Artificial Sequence: Synthetic oligonucleotide
cccgucggguguuccgggc

SEQ ID NO: 65960 - RNA, 19 nt, Artificial Sequence
  Description of Artificial Sequence: Synthetic oligonucleotide
cugcgguucucacucugau

SEQ ID NO: 65961 - RNA, 19 nt, Artificial Sequence
  Description of Artificial Sequence: Synthetic oligonucleotide
ggcugagugguacccuggu

SEQ ID NO: 65962 - RNA, 19 nt, Artificial Sequence
  Description of Artificial Sequence: Synthetic oligonucleotide
caacgcugaccuggcuuca

SEQ ID NO: 65963 - RNA, 19 nt, Artificial Sequence
  Description of Artificial Sequence: Synthetic oligonucleotide
cuagagcgcaucagaccuu

SEQ ID NO: 65964 - RNA, 19 nt, Artificial Sequence
  Description of Artificial Sequence: Synthetic oligonucleotide
ugcgugcguagggguccug

SEQ ID NO: 65965 - RNA, 19 nt, Artificial Sequence
  Description of Artificial Sequence: Synthetic oligonucleotide
ccccuuagacagcgucuug

SEQ ID NO: 65966 - RNA, 19 nt, Artificial Sequence
  Description of Artificial Sequence: Synthetic oligonucleotide
ccggacucuagagcgcauc

SEQ ID NO: 65967 - RNA, 19 nt, Artificial Sequence
  Description of Artificial Sequence: Synthetic oligonucleotide
cggacucuagagcgcauca

SEQ ID NO: 65968 - RNA, 19 nt, Artificial Sequence
  Description of Artificial Sequence: Synthetic oligonucleotide
caucugcgguucucacucu

SEQ ID NO: 65969 - RNA, 19 nt, Artificial Sequence
  Description of Artificial Sequence: Synthetic oligonucleotide
ccagccgcaacucccuugu

SEQ ID NO: 65970 - RNA, 19 nt, Artificial Sequence
  Description of Artificial Sequence: Synthetic oligonucleotide
cucuuggccgugcggcuau

SEQ ID NO: 65971 - RNA, 19 nt, Artificial Sequence
  Description of Artificial Sequence: Synthetic oligonucleotide
ccuucucgucggucauuuc

SEQ ID NO: 65972 - RNA, 19 nt, Artificial Sequence
  Description of Artificial Sequence: Synthetic oligonucleotide
caguaaggcauagguccau

SEQ ID NO: 65973 - RNA, 19 nt, Artificial Sequence
  Description of Artificial Sequence: Synthetic oligonucleotide
gcugcccgucggguguucc

SEQ ID NO: 65974 - RNA, 19 nt, Artificial Sequence
  Description of Artificial Sequence: Synthetic oligonucleotide
gucggguguuccgggcaaa

SEQ ID NO: 65975 - RNA, 19 nt, Artificial Sequence
  Description of Artificial Sequence: Synthetic oligonucleotide
caacucccuuguugaaguu

SEQ ID NO: 65976 - RNA, 19 nt, Artificial Sequence
  Description of Artificial Sequence: Synthetic oligonucleotide
ccacacggcuacauggaau

SEQ ID NO: 65977 - RNA, 19 nt, Artificial Sequence
  Description of Artificial Sequence: Synthetic oligonucleotide
gugacggauuacaggcauu

SEQ ID NO: 65978 - RNA, 19 nt, Artificial Sequence
  Description of Artificial Sequence: Synthetic oligonucleotide
auggggccucaagccacua

SEQ ID NO: 65979 - RNA, 19 nt, Artificial Sequence
  Description of Artificial Sequence: Synthetic oligonucleotide
gcucaccgcagggccuugc

SEQ ID NO: 65980 - RNA, 19 nt, Artificial Sequence
  Description of Artificial Sequence: Synthetic oligonucleotide
ccgccugaaacgcuauggu

SEQ ID NO: 65981 - RNA, 19 nt, Artificial Sequence
  Description of Artificial Sequence: Synthetic oligonucleotide
ccgucggguguuccgggca

SEQ ID NO: 65982 - RNA, 19 nt, Artificial Sequence
  Description of Artificial Sequence: Synthetic oligonucleotide
cagggcuccugggaguuuu

SEQ ID NO: 65983 - RNA, 19 nt, Artificial Sequence
  Description of Artificial Sequence: Synthetic oligonucleotide
gcccuucgcagagcauuca

SEQ ID NO: 65984 - RNA, 19 nt, Artificial Sequence
  Description of Artificial Sequence: Synthetic oligonucleotide
ccccggacucuagagcgca

SEQ ID NO: 65985 - RNA, 19 nt, Artificial Sequence
  Description of Artificial Sequence: Synthetic oligonucleotide
gcccggagcgaaccauugu

SEQ ID NO: 65986 - RNA, 19 nt, Artificial Sequence
  Description of Artificial Sequence: Synthetic oligonucleotide
gcacccugucuguuauaau

SEQ ID NO: 65987 - RNA, 19 nt, Artificial Sequence
  Description of Artificial Sequence: Synthetic oligonucleotide
gggauacaacccggguccu

SEQ ID NO: 65988 - RNA, 19 nt, Artificial Sequence
  Description of Artificial Sequence: Synthetic oligonucleotide
cgcucguuacacucgcagu

SEQ ID NO: 65989 - RNA, 19 nt, Artificial Sequence
  Description of Artificial Sequence: Synthetic oligonucleotide
ccgcaacucccuuguugaa

SEQ ID NO: 65990 - RNA, 19 nt, Artificial Sequence
  Description of Artificial Sequence: Synthetic oligonucleotide
ccgcacugccacacucgga

SEQ ID NO: 65991 - RNA, 19 nt, Artificial Sequence
  Description of Artificial Sequence: Synthetic oligonucleotide
ggcucaccgcagggccuug

SEQ ID NO: 65992 - RNA, 19 nt, Artificial Sequence
  Description of Artificial Sequence: Synthetic oligonucleotide
cgccugaaacgcuaugguu

SEQ ID NO: 65993 - RNA, 19 nt, Artificial Sequence
  Description of Artificial Sequence: Synthetic oligonucleotide
cggguguuccgggcaaaga

SEQ ID NO: 65994 - RNA, 19 nt, Artificial Sequence
  Description of Artificial Sequence: Synthetic oligonucleotide
cagcgaucauagggguuuu

SEQ ID NO: 65995 - RNA, 19 nt, Artificial Sequence
  Description of Artificial Sequence: Synthetic oligonucleotide
caucggcaccccggacucu

SEQ ID NO: 65996 - RNA, 19 nt, Artificial Sequence
  Description of Artificial Sequence: Synthetic oligonucleotide
cagccgcaacucccuuguu

SEQ ID NO: 65997 - RNA, 19 nt, Artificial Sequence
  Description of Artificial Sequence: Synthetic oligonucleotide
ccgggcugagugguacccu

SEQ ID NO: 65998 - RNA, 19 nt, Artificial Sequence
  Description of Artificial Sequence: Synthetic oligonucleotide
cagcugcccgucggguguu

SEQ ID NO: 65999 - RNA, 19 nt, Artificial Sequence
  Description of Artificial Sequence: Synthetic oligonucleotide
cccggacucuagagcgcau

SEQ ID NO: 66000 - RNA, 19 nt, Artificial Sequence
  Description of Artificial Sequence: Synthetic oligonucleotide
ugaaguaccagauaaacgg

SEQ ID NO: 66001 - RNA, 19 nt, Artificial Sequence
  Description of Artificial Sequence: Synthetic oligonucleotide
aaugaauuguauaaaaccc

SEQ ID NO: 66002 - RNA, 19 nt, Artificial Sequence
  Description of Artificial Sequence: Synthetic oligonucleotide
aauacacacacacacacac

SEQ ID NO: 66003 - RNA, 19 nt, Artificial Sequence
  Description of Artificial Sequence: Synthetic oligonucleotide
aauacgacuaauuuuaagu

SEQ ID NO: 66004 - RNA, 19 nt, Artificial Sequence
  Description of Artificial Sequence: Synthetic oligonucleotide
uuacauaccaauuugauaa

SEQ ID NO: 66005 - RNA, 19 nt, Artificial Sequence
  Description of Artificial Sequence: Synthetic oligonucleotide
aauaggaugaucuucuugu

SEQ ID NO: 66006 - RNA, 19 nt, Artificial Sequence
  Description of Artificial Sequence: Synthetic oligonucleotide
aaggcuagaauccaugaac

SEQ ID NO: 66007 - RNA, 19 nt, Artificial Sequence
  Description of Artificial Sequence: Synthetic oligonucleotide
aacacacacacacacacac

SEQ ID NO: 66008 - RNA, 19 nt, Artificial Sequence
  Description of Artificial Sequence: Synthetic oligonucleotide
aauccaugaaccaagcugc

SEQ ID NO: 66009 - RNA, 19 nt, Artificial Sequence
  Description of Artificial Sequence: Synthetic oligonucleotide
aaugaaguaccagauaaac

SEQ ID NO: 66010 - RNA, 19 nt, Artificial Sequence
  Description of Artificial Sequence: Synthetic oligonucleotide
uuagagaauuuacagaacc

SEQ ID NO: 66011 - RNA, 19 nt, Artificial Sequence
  Description of Artificial Sequence: Synthetic oligonucleotide
aaaauacgguucuaacugc

SEQ ID NO: 66012 - RNA, 19 nt, Artificial Sequence
  Description of Artificial Sequence: Synthetic oligonucleotide
uguccuaugagccuaauga

SEQ ID NO: 66013 - RNA, 19 nt, Artificial Sequence
  Description of Artificial Sequence: Synthetic oligonucleotide
uggggaauaauucaacagg

SEQ ID NO: 66014 - RNA, 19 nt, Artificial Sequence
  Description of Artificial Sequence: Synthetic oligonucleotide
aauacagucuucccgucac

SEQ ID NO: 66015 - RNA, 19 nt, Artificial Sequence
  Description of Artificial Sequence: Synthetic oligonucleotide
auauguugggcauuaaggg

SEQ ID NO: 66016 - RNA, 19 nt, Artificial Sequence
  Description of Artificial Sequence: Synthetic oligonucleotide
aacuacacuaucaauuccc

SEQ ID NO: 66017 - RNA, 19 nt, Artificial Sequence
  Description of Artificial Sequence: Synthetic oligonucleotide
uuuaaguuaaacagaaguc

SEQ ID NO: 66018 - RNA, 19 nt, Artificial Sequence
  Description of Artificial Sequence: Synthetic oligonucleotide
uaauugucgacuacgaucu

SEQ ID NO: 66019 - RNA, 19 nt, Artificial Sequence
  Description of Artificial Sequence: Synthetic oligonucleotide
uuaacaaagcuaaucggcc

SEQ ID NO: 66020 - RNA, 19 nt, Artificial Sequence
  Description of Artificial Sequence: Synthetic oligonucleotide
aauguuuggccccaaucgg

SEQ ID NO: 66021 - RNA, 19 nt, Artificial Sequence
  Description of Artificial Sequence: Synthetic oligonucleotide
gagaucaacagucugguug

SEQ ID NO: 66022 - RNA, 19 nt, Artificial Sequence
  Description of Artificial Sequence: Synthetic oligonucleotide
acauugauagaacugcccg

SEQ ID NO: 66023 - RNA, 19 nt, Artificial Sequence
  Description of Artificial Sequence: Synthetic oligonucleotide
agucccauaaaugaacucc

SEQ ID NO: 66024 - RNA, 19 nt, Artificial Sequence
  Description of Artificial Sequence: Synthetic oligonucleotide
uuugaaucccaguuuacag

SEQ ID NO: 66025 - RNA, 19 nt, Artificial Sequence
  Description of Artificial Sequence: Synthetic oligonucleotide
acuacgaucuguaauuucc

SEQ ID NO: 66026 - RNA, 19 nt, Artificial Sequence
  Description of Artificial Sequence: Synthetic oligonucleotide
cucucuaacacacacacac

SEQ ID NO: 66027 - RNA, 19 nt, Artificial Sequence
  Description of Artificial Sequence: Synthetic oligonucleotide
uuauugucaaguuugguau

SEQ ID NO: 66028 - RNA, 19 nt, Artificial Sequence
  Description of Artificial Sequence: Synthetic oligonucleotide
cuguuaacccuuuuaaggg

SEQ ID NO: 66029 - RNA, 19 nt, Artificial Sequence
  Description of Artificial Sequence: Synthetic oligonucleotide
ucaacuugccauacgauga

SEQ ID NO: 66030 - RNA, 19 nt, Artificial Sequence
  Description of Artificial Sequence: Synthetic oligonucleotide
cuaaacgacauccugacuc

SEQ ID NO: 66031 - RNA, 19 nt, Artificial Sequence
  Description of Artificial Sequence: Synthetic oligonucleotide
caugguguauuuauaaaag

SEQ ID NO: 66032 - RNA, 19 nt, Artificial Sequence
  Description of Artificial Sequence: Synthetic oligonucleotide
agagaauuuacagaaccac

SEQ ID NO: 66033 - RNA, 19 nt, Artificial Sequence
  Description of Artificial Sequence: Synthetic oligonucleotide
aauguauacucuucagacu

SEQ ID NO: 66034 - RNA, 19 nt, Artificial Sequence
  Description of Artificial Sequence: Synthetic oligonucleotide
uguuaacccuuuuaagggg

SEQ ID NO: 66035 - RNA, 19 nt, Artificial Sequence
  Description of Artificial Sequence: Synthetic oligonucleotide
aauggguaagccugaaugu

SEQ ID NO: 66036 - RNA, 19 nt, Artificial Sequence
  Description of Artificial Sequence: Synthetic oligonucleotide
guauauacugcgcaacggg

SEQ ID NO: 66037 - RNA, 19 nt, Artificial Sequence
  Description of Artificial Sequence: Synthetic oligonucleotide
aacaugaucuauaaguaga

SEQ ID NO: 66038 - RNA, 19 nt, Artificial Sequence
  Description of Artificial Sequence: Synthetic oligonucleotide
uacacacacacacacacac

SEQ ID NO: 66039 - RNA, 19 nt, Artificial Sequence
  Description of Artificial Sequence: Synthetic oligonucleotide
ucugcauggcuacacauca

SEQ ID NO: 66040 - RNA, 19 nt, Artificial Sequence
  Description of Artificial Sequence: Synthetic oligonucleotide
cuaacacacacacacacac

SEQ ID NO: 66041 - RNA, 19 nt, Artificial Sequence
  Description of Artificial Sequence: Synthetic oligonucleotide
uucuaauguuuuaagcagc

SEQ ID NO: 66042 - RNA, 19 nt, Artificial Sequence
  Description of Artificial Sequence: Synthetic oligonucleotide
uauauacugcgcaacgggc

SEQ ID NO: 66043 - RNA, 19 nt, Artificial Sequence
  Description of Artificial Sequence: Synthetic oligonucleotide
uuguuagugauuguuacug

SEQ ID NO: 66044 - RNA, 19 nt, Artificial Sequence
  Description of Artificial Sequence: Synthetic oligonucleotide
caggaauacacacacacac

SEQ ID NO: 66045 - RNA, 19 nt, Artificial Sequence
  Description of Artificial Sequence: Synthetic oligonucleotide
uguuuuaagcagcuuuagc

SEQ ID NO: 66046 - RNA, 19 nt, Artificial Sequence
  Description of Artificial Sequence: Synthetic oligonucleotide
uuucaugacgagcaugucu

SEQ ID NO: 66047 - RNA, 19 nt, Artificial Sequence
  Description of Artificial Sequence: Synthetic oligonucleotide
uguauccggaucaacuugc

SEQ ID NO: 66048 - RNA, 19 nt, Artificial Sequence
  Description of Artificial Sequence: Synthetic oligonucleotide
uuaucaucugaucaguaua

SEQ ID NO: 66049 - RNA, 19 nt, Artificial Sequence
  Description of Artificial Sequence: Synthetic oligonucleotide
ugcacuaaaggcuuuaguu

SEQ ID NO: 66050 - RNA, 19 nt, Artificial Sequence
  Description of Artificial Sequence: Synthetic oligonucleotide
cugaucucuacuuuacuag

SEQ ID NO: 66051 - RNA, 19 nt, Artificial Sequence
  Description of Artificial Sequence: Synthetic oligonucleotide
uaauaggaugaucuucuug

SEQ ID NO: 66052 - RNA, 19 nt, Artificial Sequence
  Description of Artificial Sequence: Synthetic oligonucleotide
ugugaguaucugcugagug

SEQ ID NO: 66053 - RNA, 19 nt, Artificial Sequence
  Description of Artificial Sequence: Synthetic oligonucleotide
uguuagugauuguuacugg

SEQ ID NO: 66054 - RNA, 19 nt, Artificial Sequence
  Description of Artificial Sequence: Synthetic oligonucleotide
augaauucguucuguauug

SEQ ID NO: 66055 - RNA, 19 nt, Artificial Sequence
  Description of Artificial Sequence: Synthetic oligonucleotide
ugggguguauguauuaaug

SEQ ID NO: 66056 - RNA, 19 nt, Artificial Sequence
  Description of Artificial Sequence: Synthetic oligonucleotide
aauucgccaucaacuaucc

SEQ ID NO: 66057 - RNA, 19 nt, Artificial Sequence
  Description of Artificial Sequence: Synthetic oligonucleotide
acgguaacauauuuuaacu

SEQ ID NO: 66058 - RNA, 19 nt, Artificial Sequence
  Description of Artificial Sequence: Synthetic oligonucleotide
agauguaaaccuugugauc

SEQ ID NO: 66059 - RNA, 19 nt, Artificial Sequence
  Description of Artificial Sequence: Synthetic oligonucleotide
ugccacuuaauuauauaca

SEQ ID NO: 66060 - RNA, 19 nt, Artificial Sequence
  Description of Artificial Sequence: Synthetic oligonucleotide
gauuucggaauuugguagc

SEQ ID NO: 66061 - RNA, 19 nt, Artificial Sequence
  Description of Artificial Sequence: Synthetic oligonucleotide
caauuggcaguucacuucg

SEQ ID NO: 66062 - RNA, 19 nt, Artificial Sequence
  Description of Artificial Sequence: Synthetic oligonucleotide
cagacuaaugaacucuucc

SEQ ID NO: 66063 - RNA, 19 nt, Artificial Sequence
  Description of Artificial Sequence: Synthetic oligonucleotide
ucaucgacugguuacuaug

SEQ ID NO: 66064 - RNA, 19 nt, Artificial Sequence
  Description of Artificial Sequence: Synthetic oligonucleotide
ugaauuguauaaaacccuu

SEQ ID NO: 66065 - RNA, 19 nt, Artificial Sequence
  Description of Artificial Sequence: Synthetic oligonucleotide
uguaguauccuuugauccu

SEQ ID NO: 66066 - RNA, 19 nt, Artificial Sequence
  Description of Artificial Sequence: Synthetic oligonucleotide
acaguuacgaauguaaaau

SEQ ID NO: 66067 - RNA, 19 nt, Artificial Sequence
  Description of Artificial Sequence: Synthetic oligonucleotide
uggguaagccugaauguag

SEQ ID NO: 66068 - RNA, 19 nt, Artificial Sequence
  Description of Artificial Sequence: Synthetic oligonucleotide
aaacccuuguguaacaccu

SEQ ID NO: 66069 - RNA, 19 nt, Artificial Sequence
  Description of Artificial Sequence: Synthetic oligonucleotide
cucuaacacacacacacac

SEQ ID NO: 66070 - RNA, 19 nt, Artificial Sequence
  Description of Artificial Sequence: Synthetic oligonucleotide
uuuagcagguguguauccg

SEQ ID NO: 66071 - RNA, 19 nt, Artificial Sequence
  Description of Artificial Sequence: Synthetic oligonucleotide
aggcuagaauccaugaacc

SEQ ID NO: 66072 - RNA, 19 nt, Artificial Sequence
  Description of Artificial Sequence: Synthetic oligonucleotide
cugguuuagauuccaaaug

SEQ ID NO: 66073 - RNA, 19 nt, Artificial Sequence
  Description of Artificial Sequence: Synthetic oligonucleotide
uuuguuagugauuguuacu

SEQ ID NO: 66074 - RNA, 19 nt, Artificial Sequence
  Description of Artificial Sequence: Synthetic oligonucleotide
ucuaacacacacacacaca

SEQ ID NO: 66075 - RNA, 19 nt, Artificial Sequence
  Description of Artificial Sequence: Synthetic oligonucleotide
aguauauacugcgcaacgg

SEQ ID NO: 66076 - RNA, 19 nt, Artificial Sequence
  Description of Artificial Sequence: Synthetic oligonucleotide
ugguggucuauaaaaggug

SEQ ID NO: 66077 - RNA, 19 nt, Artificial Sequence
  Description of Artificial Sequence: Synthetic oligonucleotide
caaagcguuucccaucugg

SEQ ID NO: 66078 - RNA, 19 nt, Artificial Sequence
  Description of Artificial Sequence: Synthetic oligonucleotide
ugucccuauauguugggca

SEQ ID NO: 66079 - RNA, 19 nt, Artificial Sequence
  Description of Artificial Sequence: Synthetic oligonucleotide
gaucaguauauacugcgca

SEQ ID NO: 66080 - RNA, 19 nt, Artificial Sequence
  Description of Artificial Sequence: Synthetic oligonucleotide
ucacauugauagaacugcc

SEQ ID NO: 66081 - RNA, 19 nt, Artificial Sequence
  Description of Artificial Sequence: Synthetic oligonucleotide
uacgguucuaacugcacug

SEQ ID NO: 66082 - RNA, 19 nt, Artificial Sequence
  Description of Artificial Sequence: Synthetic oligonucleotide
aagaaaugaaguaccagau

SEQ ID NO: 66083 - RNA, 19 nt, Artificial Sequence
  Description of Artificial Sequence: Synthetic oligonucleotide
ucuuaauucucccguuugu

SEQ ID NO: 66084 - RNA, 19 nt, Artificial Sequence
  Description of Artificial Sequence: Synthetic oligonucleotide
aauucucccguuuguacau

SEQ ID NO: 66085 - RNA, 19 nt, Artificial Sequence
  Description of Artificial Sequence: Synthetic oligonucleotide
aauacgguucuaacugcac

SEQ ID NO: 66086 - RNA, 19 nt, Artificial Sequence
  Description of Artificial Sequence: Synthetic oligonucleotide
gauguaaaccuugugaucu

SEQ ID NO: 66087 - RNA, 19 nt, Artificial Sequence
  Description of Artificial Sequence: Synthetic oligonucleotide
gguauuuccuuacuaaaac

SEQ ID NO: 66088 - RNA, 19 nt, Artificial Sequence
  Description of Artificial Sequence: Synthetic oligonucleotide
aaccgauggggaauaauuc

SEQ ID NO: 66089 - RNA, 19 nt, Artificial Sequence
  Description of Artificial Sequence: Synthetic oligonucleotide
aguauggcaacaucugaga

SEQ ID NO: 66090 - RNA, 19 nt, Artificial Sequence
  Description of Artificial Sequence: Synthetic oligonucleotide
auacgaugacuguaguauc

SEQ ID NO: 66091 - RNA, 19 nt, Artificial Sequence
  Description of Artificial Sequence: Synthetic oligonucleotide
cacacacacacacacacac

SEQ ID NO: 66092 - RNA, 19 nt, Artificial Sequence
  Description of Artificial Sequence: Synthetic oligonucleotide
ucgacuacgaucuguaauu

SEQ ID NO: 66093 - RNA, 19 nt, Artificial Sequence
  Description of Artificial Sequence: Synthetic oligonucleotide
aacuauccaugcuacugca

SEQ ID NO: 66094 - RNA, 19 nt, Artificial Sequence
  Description of Artificial Sequence: Synthetic oligonucleotide
caguauggcaacaucugag

SEQ ID NO: 66095 - RNA, 19 nt, Artificial Sequence
  Description of Artificial Sequence: Synthetic oligonucleotide
cauugauagaacugcccgc

SEQ ID NO: 66096 - RNA, 19 nt, Artificial Sequence
  Description of Artificial Sequence: Synthetic oligonucleotide
auacgacuaauuuuaaguu

SEQ ID NO: 66097 - RNA, 19 nt, Artificial Sequence
  Description of Artificial Sequence: Synthetic oligonucleotide
cucucucucucuaacacac

SEQ ID NO: 66098 - RNA, 19 nt, Artificial Sequence
  Description of Artificial Sequence: Synthetic oligonucleotide
augaaguaccagauaaacg

SEQ ID NO: 66099 - RNA, 19 nt, Artificial Sequence
  Description of Artificial Sequence: Synthetic oligonucleotide
ucgccaucaacuauccaug

SEQ ID NO: 66100 - RNA, 19 nt, Artificial Sequence
  Description of Artificial Sequence: Synthetic oligonucleotide
ggaauacacacacacacac

SEQ ID NO: 66101 - RNA, 19 nt, Artificial Sequence
  Description of Artificial Sequence: Synthetic oligonucleotide
aauucguucuguauuguau

SEQ ID NO: 66102 - RNA, 19 nt, Artificial Sequence
  Description of Artificial Sequence: Synthetic oligonucleotide
aacaagcuaugugaaaagu

SEQ ID NO: 66103 - RNA, 19 nt, Artificial Sequence
  Description of Artificial Sequence: Synthetic oligonucleotide
uaaacgacauccugacucu

SEQ ID NO: 66104 - RNA, 19 nt, Artificial Sequence
  Description of Artificial Sequence: Synthetic oligonucleotide
ugaugucccuucuagaaua

SEQ ID NO: 66105 - RNA, 19 nt, Artificial Sequence
  Description of Artificial Sequence: Synthetic oligonucleotide
uguuuggccccaaucgggc

SEQ ID NO: 66106 - RNA, 19 nt, Artificial Sequence
  Description of Artificial Sequence: Synthetic oligonucleotide
uacgacuaauuuuaaguua

SEQ ID NO: 66107 - RNA, 19 nt, Artificial Sequence
  Description of Artificial Sequence: Synthetic oligonucleotide
ugcuucaucgacugguuac

SEQ ID NO: 66108 - RNA, 19 nt, Artificial Sequence
  Description of Artificial Sequence: Synthetic oligonucleotide
agcuaacacaauuuacugu

SEQ ID NO: 66109 - RNA, 19 nt, Artificial Sequence
  Description of Artificial Sequence: Synthetic oligonucleotide
uuugugccagauguaaacc

SEQ ID NO: 66110 - RNA, 19 nt, Artificial Sequence
  Description of Artificial Sequence: Synthetic oligonucleotide
uacacaucagauacccacu

SEQ ID NO: 66111 - RNA, 19 nt, Artificial Sequence
  Description of Artificial Sequence: Synthetic oligonucleotide
cacacacacacaaaacaac

SEQ ID NO: 66112 - RNA, 19 nt, Artificial Sequence
  Description of Artificial Sequence: Synthetic oligonucleotide
cacuaaaggcuuuaguuca

SEQ ID NO: 66113 - RNA, 19 nt, Artificial Sequence
  Description of Artificial Sequence: Synthetic oligonucleotide
augcaauguaagaaacacc

SEQ ID NO: 66114 - RNA, 19 nt, Artificial Sequence
  Description of Artificial Sequence: Synthetic oligonucleotide
aaggauguucuaaacgaca

SEQ ID NO: 66115 - RNA, 19 nt, Artificial Sequence
  Description of Artificial Sequence: Synthetic oligonucleotide
cacacacacacacacacuc

SEQ ID NO: 66116 - RNA, 19 nt, Artificial Sequence
  Description of Artificial Sequence: Synthetic oligonucleotide
ccaguuuacaguuuguaac

SEQ ID NO: 66117 - RNA, 19 nt, Artificial Sequence
  Description of Artificial Sequence: Synthetic oligonucleotide
ugguuacuaugaagcaagg

SEQ ID NO: 66118 - RNA, 19 nt, Artificial Sequence
  Description of Artificial Sequence: Synthetic oligonucleotide
cauaauaggaugaucuucu

SEQ ID NO: 66119 - RNA, 19 nt, Artificial Sequence
  Description of Artificial Sequence: Synthetic oligonucleotide
ugcgcaacgggcaaggcua

SEQ ID NO: 66120 - RNA, 19 nt, Artificial Sequence
  Description of Artificial Sequence: Synthetic oligonucleotide
caucaacuauccaugcuac

SEQ ID NO: 66121 - RNA, 19 nt, Artificial Sequence
  Description of Artificial Sequence: Synthetic oligonucleotide
uuuaaggggcaacaagcua

SEQ ID NO: 66122 - RNA, 19 nt, Artificial Sequence
  Description of Artificial Sequence: Synthetic oligonucleotide
ugauagaacugcccgcgcu

SEQ ID NO: 66123 - RNA, 19 nt, Artificial Sequence
  Description of Artificial Sequence: Synthetic oligonucleotide
uugugauauaggcaccggu

SEQ ID NO: 66124 - RNA, 19 nt, Artificial Sequence
  Description of Artificial Sequence: Synthetic oligonucleotide
auaaggcggaaagauuugg

SEQ ID NO: 66125 - RNA, 19 nt, Artificial Sequence
  Description of Artificial Sequence: Synthetic oligonucleotide
accgauggggaauaauuca

SEQ ID NO: 66126 - RNA, 19 nt, Artificial Sequence
  Description of Artificial Sequence: Synthetic oligonucleotide
uauuguauuucagcggcgu

SEQ ID NO: 66127 - RNA, 19 nt, Artificial Sequence
  Description of Artificial Sequence: Synthetic oligonucleotide
ggguguauguauuaauggc

SEQ ID NO: 66128 - RNA, 19 nt, Artificial Sequence
  Description of Artificial Sequence: Synthetic oligonucleotide
ugcgagugugcccugucag

SEQ ID NO: 66129 - RNA, 19 nt, Artificial Sequence
  Description of Artificial Sequence: Synthetic oligonucleotide
gaccaugccaugucucagg

SEQ ID NO: 66130 - RNA, 19 nt, Artificial Sequence
  Description of Artificial Sequence: Synthetic oligonucleotide
ugagguucaguauggcaac

SEQ ID NO: 66131 - RNA, 19 nt, Artificial Sequence
  Description of Artificial Sequence: Synthetic oligonucleotide
cacuaagaacaugaauucg

SEQ ID NO: 66132 - RNA, 19 nt, Artificial Sequence
  Description of Artificial Sequence: Synthetic oligonucleotide
uuacaaugcucugugagua

SEQ ID NO: 66133 - RNA, 19 nt, Artificial Sequence
  Description of Artificial Sequence: Synthetic oligonucleotide
agcggcgugagcucacagc

SEQ ID NO: 66134 - RNA, 19 nt, Artificial Sequence
  Description of Artificial Sequence: Synthetic oligonucleotide
cacacacacacacaaaaca

SEQ ID NO: 66135 - RNA, 19 nt, Artificial Sequence
  Description of Artificial Sequence: Synthetic oligonucleotide
uauacugcgcaacgggcaa

SEQ ID NO: 66136 - RNA, 19 nt, Artificial Sequence
  Description of Artificial Sequence: Synthetic oligonucleotide
ucucuaacacacacacaca

SEQ ID NO: 66137 - RNA, 19 nt, Artificial Sequence
  Description of Artificial Sequence: Synthetic oligonucleotide
caggagagucuguaaacgc

SEQ ID NO: 66138 - RNA, 19 nt, Artificial Sequence
  Description of Artificial Sequence: Synthetic oligonucleotide
uguguauccggaucaacuu

SEQ ID NO: 66139 - RNA, 19 nt, Artificial Sequence
  Description of Artificial Sequence: Synthetic oligonucleotide
acuauguuccuaucuguaa

SEQ ID NO: 66140 - RNA, 19 nt, Artificial Sequence
  Description of Artificial Sequence: Synthetic oligonucleotide
aaauacgguucuaacugca

SEQ ID NO: 66141 - RNA, 19 nt, Artificial Sequence
  Description of Artificial Sequence: Synthetic oligonucleotide
cagauaaacgguaacauau

SEQ ID NO: 66142 - RNA, 19 nt, Artificial Sequence
  Description of Artificial Sequence: Synthetic oligonucleotide
uuaacccuuuuaaggggca

SEQ ID NO: 66143 - RNA, 19 nt, Artificial Sequence
  Description of Artificial Sequence: Synthetic oligonucleotide
cagugucccuauauguugg

SEQ ID NO: 66144 - RNA, 19 nt, Artificial Sequence
  Description of Artificial Sequence: Synthetic oligonucleotide
auacgguucuaacugcacu

SEQ ID NO: 66145 - RNA, 19 nt, Artificial Sequence
  Description of Artificial Sequence: Synthetic oligonucleotide
guucuaacugcacugaggu

SEQ ID NO: 66146 - RNA, 19 nt, Artificial Sequence
  Description of Artificial Sequence: Synthetic oligonucleotide
aaaucccaagccauuaaaa

SEQ ID NO: 66147 - RNA, 19 nt, Artificial Sequence
  Description of Artificial Sequence: Synthetic oligonucleotide
uccaauucgccaucaacua

SEQ ID NO: 66148 - RNA, 19 nt, Artificial Sequence
  Description of Artificial Sequence: Synthetic oligonucleotide
aucaguauauacugcgcaa

SEQ ID NO: 66149 - RNA, 19 nt, Artificial Sequence
  Description of Artificial Sequence: Synthetic oligonucleotide
uaacacacacacacacaca

SEQ ID NO: 66150 - RNA, 19 nt, Artificial Sequence
  Description of Artificial Sequence: Synthetic oligonucleotide
cucucucucucucuaacac

SEQ ID NO: 66151 - RNA, 19 nt, Artificial Sequence
  Description of Artificial Sequence: Synthetic oligonucleotide
guauaaaacccuuguguaa

SEQ ID NO: 66152 - RNA, 19 nt, Artificial Sequence
  Description of Artificial Sequence: Synthetic oligonucleotide
uucagacuaaugaacucuu

SEQ ID NO: 66153 - RNA, 19 nt, Artificial Sequence
  Description of Artificial Sequence: Synthetic oligonucleotide
auaaaacccuuguguaaca

SEQ ID NO: 66154 - RNA, 19 nt, Artificial Sequence
  Description of Artificial Sequence: Synthetic oligonucleotide
uaggcauugcacucucacc

SEQ ID NO: 66155 - RNA, 19 nt, Artificial Sequence
  Description of Artificial Sequence: Synthetic oligonucleotide
ugaguaucugcugagugua

SEQ ID NO: 66156 - RNA, 19 nt, Artificial Sequence
  Description of Artificial Sequence: Synthetic oligonucleotide
uguguaacaccuugguauu

SEQ ID NO: 66157 - RNA, 19 nt, Artificial Sequence
  Description of Artificial Sequence: Synthetic oligonucleotide
uacuaggucacauggugua

SEQ ID NO: 66158 - RNA, 19 nt, Artificial Sequence
  Description of Artificial Sequence: Synthetic oligonucleotide
auucguucuguauuguauu

SEQ ID NO: 66159 - RNA, 19 nt, Artificial Sequence
  Description of Artificial Sequence: Synthetic oligonucleotide
acacacacacacacaaaac

SEQ ID NO: 66160 - RNA, 19 nt, Artificial Sequence
  Description of Artificial Sequence: Synthetic oligonucleotide
aaguagagacacagaaucu

SEQ ID NO: 66161 - RNA, 19 nt, Artificial Sequence
  Description of Artificial Sequence: Synthetic oligonucleotide
ucucucucucucuaacaca

SEQ ID NO: 66162 - RNA, 19 nt, Artificial Sequence
  Description of Artificial Sequence: Synthetic oligonucleotide
acgacuaauuuuaaguuaa

SEQ ID NO: 66163 - RNA, 19 nt, Artificial Sequence
  Description of Artificial Sequence: Synthetic oligonucleotide
auuguauuucagcggcgug

SEQ ID NO: 66164 - RNA, 19 nt, Artificial Sequence
  Description of Artificial Sequence: Synthetic oligonucleotide
ugcaauuggcaguucacuu

SEQ ID NO: 66165 - RNA, 19 nt, Artificial Sequence
  Description of Artificial Sequence: Synthetic oligonucleotide
gaaggauguucuaaacgac

SEQ ID NO: 66166 - RNA, 19 nt, Artificial Sequence
  Description of Artificial Sequence: Synthetic oligonucleotide
aggggcaacaagcuaugug

SEQ ID NO: 66167 - RNA, 19 nt, Artificial Sequence
  Description of Artificial Sequence: Synthetic oligonucleotide
ucgucugcuccaauucgcc

SEQ ID NO: 66168 - RNA, 19 nt, Artificial Sequence
  Description of Artificial Sequence: Synthetic oligonucleotide
ucucucucucucucuaaca

SEQ ID NO: 66169 - RNA, 19 nt, Artificial Sequence
  Description of Artificial Sequence: Synthetic oligonucleotide
cuucguuugugccagaugu

SEQ ID NO: 66170 - RNA, 19 nt, Artificial Sequence
  Description of Artificial Sequence: Synthetic oligonucleotide
aguuacgaauguaaaauuu

SEQ ID NO: 66171 - RNA, 19 nt, Artificial Sequence
  Description of Artificial Sequence: Synthetic oligonucleotide
ucaauauucugguggucua

SEQ ID NO: 66172 - RNA, 19 nt, Artificial Sequence
  Description of Artificial Sequence: Synthetic oligonucleotide
uugucgacuacgaucugua

SEQ ID NO: 66173 - RNA, 19 nt, Artificial Sequence
  Description of Artificial Sequence: Synthetic oligonucleotide
ucuaaacgacauccugacu

SEQ ID NO: 66174 - RNA, 19 nt, Artificial Sequence
  Description of Artificial Sequence: Synthetic oligonucleotide
uacugugcgagugugcccu

SEQ ID NO: 66175 - RNA, 19 nt, Artificial Sequence
  Description of Artificial Sequence: Synthetic oligonucleotide
uguugcuagcuuagugcca

SEQ ID NO: 66176 - RNA, 19 nt, Artificial Sequence
  Description of Artificial Sequence: Synthetic oligonucleotide
aguagagacacagaaucua

SEQ ID NO: 66177 - RNA, 19 nt, Artificial Sequence
  Description of Artificial Sequence: Synthetic oligonucleotide
uacacuggucaaacugucu

SEQ ID NO: 66178 - RNA, 19 nt, Artificial Sequence
  Description of Artificial Sequence: Synthetic oligonucleotide
guccuaugagccuaaugac

SEQ ID NO: 66179 - RNA, 19 nt, Artificial Sequence
  Description of Artificial Sequence: Synthetic oligonucleotide
cuugugaucuucacugcca

SEQ ID NO: 66180 - RNA, 19 nt, Artificial Sequence
  Description of Artificial Sequence: Synthetic oligonucleotide
ggaucaacuugccauacga

SEQ ID NO: 66181 - RNA, 19 nt, Artificial Sequence
  Description of Artificial Sequence: Synthetic oligonucleotide
accagauaaacgguaacau

SEQ ID NO: 66182 - RNA, 19 nt, Artificial Sequence
  Description of Artificial Sequence: Synthetic oligonucleotide
ggagagucuguaaacgccg

SEQ ID NO: 66183 - RNA, 19 nt, Artificial Sequence
  Description of Artificial Sequence: Synthetic oligonucleotide
uguagccccggauucucug

SEQ ID NO: 66184 - RNA, 19 nt, Artificial Sequence
  Description of Artificial Sequence: Synthetic oligonucleotide
uaaaacccuuguguaacac

SEQ ID NO: 66185 - RNA, 19 nt, Artificial Sequence
  Description of Artificial Sequence: Synthetic oligonucleotide
cacacacacacacacaaaa

SEQ ID NO: 66186 - RNA, 19 nt, Artificial Sequence
  Description of Artificial Sequence: Synthetic oligonucleotide
aaaauacgacuaauuuuaa

SEQ ID NO: 66187 - RNA, 19 nt, Artificial Sequence
  Description of Artificial Sequence: Synthetic oligonucleotide
uacugaugucccuucuaga

SEQ ID NO: 66188 - RNA, 19 nt, Artificial Sequence
  Description of Artificial Sequence: Synthetic oligonucleotide
gucacucaagcaccauagg

SEQ ID NO: 66189 - RNA, 19 nt, Artificial Sequence
  Description of Artificial Sequence: Synthetic oligonucleotide
gguggucuauaaaaggugc

SEQ ID NO: 66190 - RNA, 19 nt, Artificial Sequence
  Description of Artificial Sequence: Synthetic oligonucleotide
cuugcaugaggagaucaac

SEQ ID NO: 66191 - RNA, 19 nt, Artificial Sequence
  Description of Artificial Sequence: Synthetic oligonucleotide
cacagcgcagaacuugaag

SEQ ID NO: 66192 - RNA, 19 nt, Artificial Sequence
  Description of Artificial Sequence: Synthetic oligonucleotide
cacacacacacacacucuc

SEQ ID NO: 66193 - RNA, 19 nt, Artificial Sequence
  Description of Artificial Sequence: Synthetic oligonucleotide
gguucuaacugcacugagg

SEQ ID NO: 66194 - RNA, 19 nt, Artificial Sequence
  Description of Artificial Sequence: Synthetic oligonucleotide
ucguuugugccagauguaa

SEQ ID NO: 66195 - RNA, 19 nt, Artificial Sequence
  Description of Artificial Sequence: Synthetic oligonucleotide
ucccauaaaugaacucccu

SEQ ID NO: 66196 - RNA, 19 nt, Artificial Sequence
  Description of Artificial Sequence: Synthetic oligonucleotide
ugcauaucugagucacaga

SEQ ID NO: 66197 - RNA, 19 nt, Artificial Sequence
  Description of Artificial Sequence: Synthetic oligonucleotide
cacacacacacacacacaa

SEQ ID NO: 66198 - RNA, 19 nt, Artificial Sequence
  Description of Artificial Sequence: Synthetic oligonucleotide
uucuaacagugccaucauc

SEQ ID NO: 66199 - RNA, 19 nt, Artificial Sequence
  Description of Artificial Sequence: Synthetic oligonucleotide
aauugucgacuacgaucug

SEQ ID NO: 66200 - RNA, 19 nt, Artificial Sequence
  Description of Artificial Sequence: Synthetic oligonucleotide
gguguauuuauaaaagucu

SEQ ID NO: 66201 - RNA, 19 nt, Artificial Sequence
  Description of Artificial Sequence: Synthetic oligonucleotide
acuucguuugugccagaug

SEQ ID NO: 66202 - RNA, 19 nt, Artificial Sequence
  Description of Artificial Sequence: Synthetic oligonucleotide
guaucugcugaguguaaca

SEQ ID NO: 66203 - RNA, 19 nt, Artificial Sequence
  Description of Artificial Sequence: Synthetic oligonucleotide
acuugccauacgaugacug

SEQ ID NO: 66204 - RNA, 19 nt, Artificial Sequence
  Description of Artificial Sequence: Synthetic oligonucleotide
auugucgacuacgaucugu

SEQ ID NO: 66205 - RNA, 19 nt, Artificial Sequence
  Description of Artificial Sequence: Synthetic oligonucleotide
acacacacacacaaaacaa

SEQ ID NO: 66206 - RNA, 19 nt, Artificial Sequence
  Description of Artificial Sequence: Synthetic oligonucleotide
uuucggaauuugguagcag

SEQ ID NO: 66207 - RNA, 19 nt, Artificial Sequence
  Description of Artificial Sequence: Synthetic oligonucleotide
acacacacacacucucucu

SEQ ID NO: 66208 - RNA, 19 nt, Artificial Sequence
  Description of Artificial Sequence: Synthetic oligonucleotide
gcggcgugagcucacagcg

SEQ ID NO: 66209 - RNA, 19 nt, Artificial Sequence
  Description of Artificial Sequence: Synthetic oligonucleotide
auauacugcgcaacgggca

SEQ ID NO: 66210 - RNA, 19 nt, Artificial Sequence
  Description of Artificial Sequence: Synthetic oligonucleotide
guaccagauaaacgguaac

SEQ ID NO: 66211 - RNA, 19 nt, Artificial Sequence
  Description of Artificial Sequence: Synthetic oligonucleotide
ggcuacacaucagauaccc

SEQ ID NO: 66212 - RNA, 19 nt, Artificial Sequence
  Description of Artificial Sequence: Synthetic oligonucleotide
uucaucgacugguuacuau

SEQ ID NO: 66213 - RNA, 19 nt, Artificial Sequence
  Description of Artificial Sequence: Synthetic oligonucleotide
uuacugugcgagugugccc

SEQ ID NO: 66214 - RNA, 19 nt, Artificial Sequence
  Description of Artificial Sequence: Synthetic oligonucleotide
cauacgaugacuguaguau

SEQ ID NO: 66215 - RNA, 19 nt, Artificial Sequence
  Description of Artificial Sequence: Synthetic oligonucleotide
uguaaaccuugugaucuuc

SEQ ID NO: 66216 - RNA, 19 nt, Artificial Sequence
  Description of Artificial Sequence: Synthetic oligonucleotide
cucaaaguuguagccccgg

SEQ ID NO: 66217 - RNA, 19 nt, Artificial Sequence
  Description of Artificial Sequence: Synthetic oligonucleotide
agggcauauuaaucaaaau

SEQ ID NO: 66218 - RNA, 19 nt, Artificial Sequence
  Description of Artificial Sequence: Synthetic oligonucleotide
gaauacacacacacacaca

SEQ ID NO: 66219 - RNA, 19 nt, Artificial Sequence
  Description of Artificial Sequence: Synthetic oligonucleotide
acccacuaagaacaugaau

SEQ ID NO: 66220 - RNA, 19 nt, Artificial Sequence
  Description of Artificial Sequence: Synthetic oligonucleotide
cacacacacacacucucuc

SEQ ID NO: 66221 - RNA, 19 nt, Artificial Sequence
  Description of Artificial Sequence: Synthetic oligonucleotide
ugaauucguucuguauugu

SEQ ID NO: 66222 - RNA, 19 nt, Artificial Sequence
  Description of Artificial Sequence: Synthetic oligonucleotide
caaucgggcuucagaaaug

SEQ ID NO: 66223 - RNA, 19 nt, Artificial Sequence
  Description of Artificial Sequence: Synthetic oligonucleotide
gaauucguucuguauugua

SEQ ID NO: 66224 - RNA, 19 nt, Artificial Sequence
  Description of Artificial Sequence: Synthetic oligonucleotide
guucuccacaaccgauggg

SEQ ID NO: 66225 - RNA, 19 nt, Artificial Sequence
  Description of Artificial Sequence: Synthetic oligonucleotide
uccacaaccgauggggaau

SEQ ID NO: 66226 - RNA, 19 nt, Artificial Sequence
  Description of Artificial Sequence: Synthetic oligonucleotide
uggcuacacaucagauacc

SEQ ID NO: 66227 - RNA, 19 nt, Artificial Sequence
  Description of Artificial Sequence: Synthetic oligonucleotide
cucucucucucucucuaac

SEQ ID NO: 66228 - RNA, 19 nt, Artificial Sequence
  Description of Artificial Sequence: Synthetic oligonucleotide
auucuaacagugccaucau

SEQ ID NO: 66229 - RNA, 19 nt, Artificial Sequence
  Description of Artificial Sequence: Synthetic oligonucleotide
acaagcuaugugaaaagua

SEQ ID NO: 66230 - RNA, 19 nt, Artificial Sequence
  Description of Artificial Sequence: Synthetic oligonucleotide
caugaauucguucuguauu

SEQ ID NO: 66231 - RNA, 19 nt, Artificial Sequence
  Description of Artificial Sequence: Synthetic oligonucleotide
auaauaggaugaucuucuu

SEQ ID NO: 66232 - RNA, 19 nt, Artificial Sequence
  Description of Artificial Sequence: Synthetic oligonucleotide
uacgaucuguaauuuccuu

SEQ ID NO: 66233 - RNA, 19 nt, Artificial Sequence
  Description of Artificial Sequence: Synthetic oligonucleotide
uccggaucaacuugccaua

SEQ ID NO: 66234 - RNA, 19 nt, Artificial Sequence
  Description of Artificial Sequence: Synthetic oligonucleotide
acacaucagauacccacua

SEQ ID NO: 66235 - RNA, 19 nt, Artificial Sequence
  Description of Artificial Sequence: Synthetic oligonucleotide
acacacacucucucucucu

SEQ ID NO: 66236 - RNA, 19 nt, Artificial Sequence
  Description of Artificial Sequence: Synthetic oligonucleotide
aacuugccauacgaugacu

SEQ ID NO: 66237 - RNA, 19 nt, Artificial Sequence
  Description of Artificial Sequence: Synthetic oligonucleotide
gucuucccgucacucaagc

SEQ ID NO: 66238 - RNA, 19 nt, Artificial Sequence
  Description of Artificial Sequence: Synthetic oligonucleotide
aggaauacacacacacaca

SEQ ID NO: 66239 - RNA, 19 nt, Artificial Sequence
  Description of Artificial Sequence: Synthetic oligonucleotide
uacaaugcucugugaguau

SEQ ID NO: 66240 - RNA, 19 nt, Artificial Sequence
  Description of Artificial Sequence: Synthetic oligonucleotide
guaagguccucaaaguugu

SEQ ID NO: 66241 - RNA, 19 nt, Artificial Sequence
  Description of Artificial Sequence: Synthetic oligonucleotide
uucguuugugccagaugua

SEQ ID NO: 66242 - RNA, 19 nt, Artificial Sequence
  Description of Artificial Sequence: Synthetic oligonucleotide
cacacucucucucucucuc

SEQ ID NO: 66243 - RNA, 19 nt, Artificial Sequence
  Description of Artificial Sequence: Synthetic oligonucleotide
ucucucucucucucucucu

SEQ ID NO: 66244 - RNA, 19 nt, Artificial Sequence
  Description of Artificial Sequence: Synthetic oligonucleotide
guaguuccaccgccugccg

SEQ ID NO: 66245 - RNA, 19 nt, Artificial Sequence
  Description of Artificial Sequence: Synthetic oligonucleotide
aacugccuccuacuacaaa

SEQ ID NO: 66246 - RNA, 19 nt, Artificial Sequence
  Description of Artificial Sequence: Synthetic oligonucleotide
cagaccuaucuucugaucu

SEQ ID NO: 66247 - RNA, 19 nt, Artificial Sequence
  Description of Artificial Sequence: Synthetic oligonucleotide
cuaugagccuaaugacauc

SEQ ID NO: 66248 - RNA, 19 nt, Artificial Sequence
  Description of Artificial Sequence: Synthetic oligonucleotide
ugggcauuaagggcuggcu

SEQ ID NO: 66249 - RNA, 19 nt, Artificial Sequence
  Description of Artificial Sequence: Synthetic oligonucleotide
cuguccuaugagccuaaug

SEQ ID NO: 66250 - RNA, 19 nt, Artificial Sequence
  Description of Artificial Sequence: Synthetic oligonucleotide
cauggcuacacaucagaua

SEQ ID NO: 66251 - RNA, 19 nt, Artificial Sequence
  Description of Artificial Sequence: Synthetic oligonucleotide
cacacacucucucucucuc

SEQ ID NO: 66252 - RNA, 19 nt, Artificial Sequence
  Description of Artificial Sequence: Synthetic oligonucleotide
ucaugacgagcaugucugu

SEQ ID NO: 66253 - RNA, 19 nt, Artificial Sequence
  Description of Artificial Sequence: Synthetic oligonucleotide
ccuuuguaguuccaccgcc

SEQ ID NO: 66254 - RNA, 19 nt, Artificial Sequence
  Description of Artificial Sequence: Synthetic oligonucleotide
agauaaacgguaacauauu

SEQ ID NO: 66255 - RNA, 19 nt, Artificial Sequence
  Description of Artificial Sequence: Synthetic oligonucleotide
cucucucucucucucucuc

SEQ ID NO: 66256 - RNA, 19 nt, Artificial Sequence
  Description of Artificial Sequence: Synthetic oligonucleotide
uuucagcggcgugagcuca

SEQ ID NO: 66257 - RNA, 19 nt, Artificial Sequence
  Description of Artificial Sequence: Synthetic oligonucleotide
acacacucucucucucucu

SEQ ID NO: 66258 - RNA, 19 nt, Artificial Sequence
  Description of Artificial Sequence: Synthetic oligonucleotide
ugagagugcuuuugacaua

SEQ ID NO: 66259 - RNA, 19 nt, Artificial Sequence
  Description of Artificial Sequence: Synthetic oligonucleotide
acucucucucucucucucu

SEQ ID NO: 66260 - RNA, 19 nt, Artificial Sequence
  Description of Artificial Sequence: Synthetic oligonucleotide
cccacuaagaacaugaauu

SEQ ID NO: 66261 - RNA, 19 nt, Artificial Sequence
  Description of Artificial Sequence: Synthetic oligonucleotide
ucucucucucucucucuaa

SEQ ID NO: 66262 - RNA, 19 nt, Artificial Sequence
  Description of Artificial Sequence: Synthetic oligonucleotide
auggguaagccugaaugua

SEQ ID NO: 66263 - RNA, 19 nt, Artificial Sequence
  Description of Artificial Sequence: Synthetic oligonucleotide
ugucgacuacgaucuguaa

SEQ ID NO: 66264 - RNA, 19 nt, Artificial Sequence
  Description of Artificial Sequence: Synthetic oligonucleotide
cacucucucucucucucuc

SEQ ID NO: 66265 - RNA, 19 nt, Artificial Sequence
  Description of Artificial Sequence: Synthetic oligonucleotide
ugugcgagugugcccuguc

SEQ ID NO: 66266 - RNA, 19 nt, Artificial Sequence
  Description of Artificial Sequence: Synthetic oligonucleotide
acacucucucucucucucu

SEQ ID NO: 66267 - RNA, 19 nt, Artificial Sequence
  Description of Artificial Sequence: Synthetic oligonucleotide
uugauccuguugcuagcuu

SEQ ID NO: 66268 - RNA, 19 nt, Artificial Sequence
  Description of Artificial Sequence: Synthetic oligonucleotide
cugccuccuacuacaaaca

SEQ ID NO: 66269 - RNA, 19 nt, Artificial Sequence
  Description of Artificial Sequence: Synthetic oligonucleotide
auguaaaccuugugaucuu

SEQ ID NO: 66270 - RNA, 19 nt, Artificial Sequence
  Description of Artificial Sequence: Synthetic oligonucleotide
accggucccuuuguaguuc

SEQ ID NO: 66271 - RNA, 19 nt, Artificial Sequence
  Description of Artificial Sequence: Synthetic oligonucleotide
auacacacacacacacaca

SEQ ID NO: 66272 - RNA, 19 nt, Artificial Sequence
  Description of Artificial Sequence: Synthetic oligonucleotide
uucaauggguaagccugaa

SEQ ID NO: 66273 - RNA, 19 nt, Artificial Sequence
  Description of Artificial Sequence: Synthetic oligonucleotide
gauauaggcaccggucccu

SEQ ID NO: 66274 - RNA, 19 nt, Artificial Sequence
  Description of Artificial Sequence: Synthetic oligonucleotide
acgguucuaacugcacuga

SEQ ID NO: 66275 - RNA, 19 nt, Artificial Sequence
  Description of Artificial Sequence: Synthetic oligonucleotide
gucgacuacgaucuguaau

SEQ ID NO: 66276 - RNA, 19 nt, Artificial Sequence
  Description of Artificial Sequence: Synthetic oligonucleotide
acuaugaagcaagguggaa

SEQ ID NO: 66277 - RNA, 19 nt, Artificial Sequence
  Description of Artificial Sequence: Synthetic oligonucleotide
cccaagccauuaaaauacg

SEQ ID NO: 66278 - RNA, 19 nt, Artificial Sequence
  Description of Artificial Sequence: Synthetic oligonucleotide
gcuagaauccaugaaccaa

SEQ ID NO: 66279 - RNA, 19 nt, Artificial Sequence
  Description of Artificial Sequence: Synthetic oligonucleotide
caaccgauggggaauaauu

SEQ ID NO: 66280 - RNA, 19 nt, Artificial Sequence
  Description of Artificial Sequence: Synthetic oligonucleotide
acugcgcaacgggcaaggc

SEQ ID NO: 66281 - RNA, 19 nt, Artificial Sequence
  Description of Artificial Sequence: Synthetic oligonucleotide
guaucccaccagacaaaag

SEQ ID NO: 66282 - RNA, 19 nt, Artificial Sequence
  Description of Artificial Sequence: Synthetic oligonucleotide
ccauauucuaacagugcca

SEQ ID NO: 66283 - RNA, 19 nt, Artificial Sequence
  Description of Artificial Sequence: Synthetic oligonucleotide
gaaugcacuaaaggcuuua

SEQ ID NO: 66284 - RNA, 19 nt, Artificial Sequence
  Description of Artificial Sequence: Synthetic oligonucleotide
cccuuguguaacaccuugg

SEQ ID NO: 66285 - RNA, 19 nt, Artificial Sequence
  Description of Artificial Sequence: Synthetic oligonucleotide
uucagcggcgugagcucac

SEQ ID NO: 66286 - RNA, 19 nt, Artificial Sequence
  Description of Artificial Sequence: Synthetic oligonucleotide
acacacacacacacucucu

SEQ ID NO: 66287 - RNA, 19 nt, Artificial Sequence
  Description of Artificial Sequence: Synthetic oligonucleotide
acacacacacacacacucu

SEQ ID NO: 66288 - RNA, 19 nt, Artificial Sequence
  Description of Artificial Sequence: Synthetic oligonucleotide
uccagcuagcaaucauguu

SEQ ID NO: 66289 - RNA, 19 nt, Artificial Sequence
  Description of Artificial Sequence: Synthetic oligonucleotide
guauuucagcggcgugagc

SEQ ID NO: 66290 - RNA, 19 nt, Artificial Sequence
  Description of Artificial Sequence: Synthetic oligonucleotide
agcuagcaaucauguuugu

SEQ ID NO: 66291 - RNA, 19 nt, Artificial Sequence
  Description of Artificial Sequence: Synthetic oligonucleotide
ggcgugagcucacagcgca

SEQ ID NO: 66292 - RNA, 19 nt, Artificial Sequence
  Description of Artificial Sequence: Synthetic oligonucleotide
cuuuguaguuccaccgccu

SEQ ID NO: 66293 - RNA, 19 nt, Artificial Sequence
  Description of Artificial Sequence: Synthetic oligonucleotide
gugucccuauauguugggc

SEQ ID NO: 66294 - RNA, 19 nt, Artificial Sequence
  Description of Artificial Sequence: Synthetic oligonucleotide
cuacgaucuguaauuuccu

SEQ ID NO: 66295 - RNA, 19 nt, Artificial Sequence
  Description of Artificial Sequence: Synthetic oligonucleotide
guucaauggguaagccuga

SEQ ID NO: 66296 - RNA, 19 nt, Artificial Sequence
  Description of Artificial Sequence: Synthetic oligonucleotide
ugcuguccuaugagccuaa

SEQ ID NO: 66297 - RNA, 19 nt, Artificial Sequence
  Description of Artificial Sequence: Synthetic oligonucleotide
acaaccgauggggaauaau

SEQ ID NO: 66298 - RNA, 19 nt, Artificial Sequence
  Description of Artificial Sequence: Synthetic oligonucleotide
gcuuuagcagguguguauc

SEQ ID NO: 66299 - RNA, 19 nt, Artificial Sequence
  Description of Artificial Sequence: Synthetic oligonucleotide
acuaggucacaugguguau

SEQ ID NO: 66300 - RNA, 19 nt, Artificial Sequence
  Description of Artificial Sequence: Synthetic oligonucleotide
auacugcgcaacgggcaag

SEQ ID NO: 66301 - RNA, 19 nt, Artificial Sequence
  Description of Artificial Sequence: Synthetic oligonucleotide
caugagauuggcucauuuu

SEQ ID NO: 66302 - RNA, 19 nt, Artificial Sequence
  Description of Artificial Sequence: Synthetic oligonucleotide
acacacacacacacacaca

SEQ ID NO: 66303 - RNA, 19 nt, Artificial Sequence
  Description of Artificial Sequence: Synthetic oligonucleotide
acacacacacacacacacu

SEQ ID NO: 66304 - RNA, 19 nt, Artificial Sequence
  Description of Artificial Sequence: Synthetic oligonucleotide
cucuuccuaucaagccuuc

SEQ ID NO: 66305 - RNA, 19 nt, Artificial Sequence
  Description of Artificial Sequence: Synthetic oligonucleotide
guugcuagcuuagugccau

SEQ ID NO: 66306 - RNA, 19 nt, Artificial Sequence
  Description of Artificial Sequence: Synthetic oligonucleotide
gucccuauauguugggcau

SEQ ID NO: 66307 - RNA, 19 nt, Artificial Sequence
  Description of Artificial Sequence: Synthetic oligonucleotide
gcuuaaagugaaaaguaau

SEQ ID NO: 66308 - RNA, 19 nt, Artificial Sequence
  Description of Artificial Sequence: Synthetic oligonucleotide
uuccuuaguauggggucuu

SEQ ID NO: 66309 - RNA, 19 nt, Artificial Sequence
  Description of Artificial Sequence: Synthetic oligonucleotide
caguuacgaauguaaaauu

SEQ ID NO: 66310 - RNA, 19 nt, Artificial Sequence
  Description of Artificial Sequence: Synthetic oligonucleotide
agccccggauucucuggug

SEQ ID NO: 66311 - RNA, 19 nt, Artificial Sequence
  Description of Artificial Sequence: Synthetic oligonucleotide
uauaggcaccggucccuuu

SEQ ID NO: 66312 - RNA, 19 nt, Artificial Sequence
  Description of Artificial Sequence: Synthetic oligonucleotide
guccagcuagcaaucaugu

SEQ ID NO: 66313 - RNA, 19 nt, Artificial Sequence
  Description of Artificial Sequence: Synthetic oligonucleotide
auccaugaaccaagcugca

SEQ ID NO: 66314 - RNA, 19 nt, Artificial Sequence
  Description of Artificial Sequence: Synthetic oligonucleotide
gugcgagugugcccuguca

SEQ ID NO: 66315 - RNA, 19 nt, Artificial Sequence
  Description of Artificial Sequence: Synthetic oligonucleotide
accauccuuuaaacuaaaa

SEQ ID NO: 66316 - RNA, 19 nt, Artificial Sequence
  Description of Artificial Sequence: Synthetic oligonucleotide
cucucucucucucucucua

SEQ ID NO: 66317 - RNA, 19 nt, Artificial Sequence
  Description of Artificial Sequence: Synthetic oligonucleotide
uccuuaguauggggucuuc

SEQ ID NO: 66318 - RNA, 19 nt, Artificial Sequence
  Description of Artificial Sequence: Synthetic oligonucleotide
acacacacacacacacaaa

SEQ ID NO: 66319 - RNA, 19 nt, Artificial Sequence
  Description of Artificial Sequence: Synthetic oligonucleotide
ucccuauauguugggcauu

SEQ ID NO: 66320 - RNA, 19 nt, Artificial Sequence
  Description of Artificial Sequence: Synthetic oligonucleotide
auauaggcaccggucccuu

SEQ ID NO: 66321 - RNA, 19 nt, Artificial Sequence
  Description of Artificial Sequence: Synthetic oligonucleotide
ccgauggggaauaauucaa

SEQ ID NO: 66322 - RNA, 19 nt, Artificial Sequence
  Description of Artificial Sequence: Synthetic oligonucleotide
acaggguguccaacaacau

SEQ ID NO: 66323 - RNA, 19 nt, Artificial Sequence
  Description of Artificial Sequence: Synthetic oligonucleotide
gaguaucugcugaguguaa

SEQ ID NO: 66324 - RNA, 19 nt, Artificial Sequence
  Description of Artificial Sequence: Synthetic oligonucleotide
gagagucuguaaacgccgu

SEQ ID NO: 66325 - RNA, 19 nt, Artificial Sequence
  Description of Artificial Sequence: Synthetic oligonucleotide
gcaugaggagaaugcacua

SEQ ID NO: 66326 - RNA, 19 nt, Artificial Sequence
  Description of Artificial Sequence: Synthetic oligonucleotide
cagucugguugagcccuag

SEQ ID NO: 66327 - RNA, 19 nt, Artificial Sequence
  Description of Artificial Sequence: Synthetic oligonucleotide
guuuggccccaaucgggcu

SEQ ID NO: 66328 - RNA, 19 nt, Artificial Sequence
  Description of Artificial Sequence: Synthetic oligonucleotide
cugcgaccacauuuuguua

SEQ ID NO: 66329 - RNA, 19 nt, Artificial Sequence
  Description of Artificial Sequence: Synthetic oligonucleotide
aucgggcuucagaaauggu

SEQ ID NO: 66330 - RNA, 19 nt, Artificial Sequence
  Description of Artificial Sequence: Synthetic oligonucleotide
gccuaaugacauccucauc

SEQ ID NO: 66331 - RNA, 19 nt, Artificial Sequence
  Description of Artificial Sequence: Synthetic oligonucleotide
cugcgcaacgggcaaggcu

SEQ ID NO: 66332 - RNA, 19 nt, Artificial Sequence
  Description of Artificial Sequence: Synthetic oligonucleotide
ccauacgaugacuguagua

SEQ ID NO: 66333 - RNA, 19 nt, Artificial Sequence
  Description of Artificial Sequence: Synthetic oligonucleotide
agagugcuuuugacauagu

SEQ ID NO: 66334 - RNA, 19 nt, Artificial Sequence
  Description of Artificial Sequence: Synthetic oligonucleotide
cuucaucgacugguuacua

SEQ ID NO: 66335 - RNA, 19 nt, Artificial Sequence
  Description of Artificial Sequence: Synthetic oligonucleotide
caggguguccaacaacauu

SEQ ID NO: 66336 - RNA, 19 nt, Artificial Sequence
  Description of Artificial Sequence: Synthetic oligonucleotide
gcaacgggcaaggcuagaa

SEQ ID NO: 66337 - RNA, 19 nt, Artificial Sequence
  Description of Artificial Sequence: Synthetic oligonucleotide
cgguucuaacugcacugag

SEQ ID NO: 66338 - RNA, 19 nt, Artificial Sequence
  Description of Artificial Sequence: Synthetic oligonucleotide
gcuucaucgacugguuacu

SEQ ID NO: 66339 - RNA, 19 nt, Artificial Sequence
  Description of Artificial Sequence: Synthetic oligonucleotide
accuaucuucugaucucua

SEQ ID NO: 66340 - RNA, 19 nt, Artificial Sequence
  Description of Artificial Sequence: Synthetic oligonucleotide
cuaauguuuuaagcagcuu

SEQ ID NO: 66341 - RNA, 19 nt, Artificial Sequence
  Description of Artificial Sequence: Synthetic oligonucleotide
caacgggcaaggcuagaau

SEQ ID NO: 66342 - RNA, 19 nt, Artificial Sequence
  Description of Artificial Sequence: Synthetic oligonucleotide
gcuacacaucagauaccca

SEQ ID NO: 66343 - RNA, 19 nt, Artificial Sequence
  Description of Artificial Sequence: Synthetic oligonucleotide
ccccggauucucuggugug

SEQ ID NO: 66344 - RNA, 19 nt, Artificial Sequence
  Description of Artificial Sequence: Synthetic oligonucleotide
cgguuugaaucccaguuua

SEQ ID NO: 66345 - RNA, 19 nt, Artificial Sequence
  Description of Artificial Sequence: Synthetic oligonucleotide
gcgguuugaaucccaguuu

SEQ ID NO: 66346 - RNA, 19 nt, Artificial Sequence
  Description of Artificial Sequence: Synthetic oligonucleotide
cgaccacauuuuguuagug

SEQ ID NO: 66347 - RNA, 19 nt, Artificial Sequence
  Description of Artificial Sequence: Synthetic oligonucleotide
cccugaguugcuacauuua

SEQ ID NO: 66348 - RNA, 19 nt, Artificial Sequence
  Description of Artificial Sequence: Synthetic oligonucleotide
cccuauauguugggcauua

SEQ ID NO: 66349 - RNA, 19 nt, Artificial Sequence
  Description of Artificial Sequence: Synthetic oligonucleotide
gcgagugugcccugucagu

SEQ ID NO: 66350 - RNA, 19 nt, Artificial Sequence
  Description of Artificial Sequence: Synthetic oligonucleotide
gcgcaacgggcaaggcuag

SEQ ID NO: 66351 - RNA, 19 nt, Artificial Sequence
  Description of Artificial Sequence: Synthetic oligonucleotide
gcuagcaaucauguuuguu

SEQ ID NO: 66352 - RNA, 19 nt, Artificial Sequence
  Description of Artificial Sequence: Synthetic oligonucleotide
ccuguccaauguauacucu

SEQ ID NO: 66353 - RNA, 19 nt, Artificial Sequence
  Description of Artificial Sequence: Synthetic oligonucleotide
gcggaaagauuuggagaaa

SEQ ID NO: 66354 - RNA, 19 nt, Artificial Sequence
  Description of Artificial Sequence: Synthetic oligonucleotide
gccccggauucucuggugu

SEQ ID NO: 66355 - RNA, 19 nt, Artificial Sequence
  Description of Artificial Sequence: Synthetic oligonucleotide
cuccuacuacaaacaugau

SEQ ID NO: 66356 - RNA, 19 nt, Artificial Sequence
  Description of Artificial Sequence: Synthetic oligonucleotide
ccgucacucaagcaccaua

SEQ ID NO: 66357 - RNA, 19 nt, Artificial Sequence
  Description of Artificial Sequence: Synthetic oligonucleotide
caccggucccuuuguaguu

SEQ ID NO: 66358 - RNA, 19 nt, Artificial Sequence
  Description of Artificial Sequence: Synthetic oligonucleotide
cacaaccgauggggaauaa

SEQ ID NO: 66359 - RNA, 19 nt, Artificial Sequence
  Description of Artificial Sequence: Synthetic oligonucleotide
cccuuuuaaggggcaacaa

SEQ ID NO: 66360 - RNA, 19 nt, Artificial Sequence
  Description of Artificial Sequence: Synthetic oligonucleotide
gggaagcaucacugauggu

SEQ ID NO: 66361 - RNA, 19 nt, Artificial Sequence
  Description of Artificial Sequence: Synthetic oligonucleotide
ccuauauguugggcauuaa

SEQ ID NO: 66362 - RNA, 19 nt, Artificial Sequence
  Description of Artificial Sequence: Synthetic oligonucleotide
cgggcaaggcuagaaucca

SEQ ID NO: 66363 - RNA, 19 nt, Artificial Sequence
  Description of Artificial Sequence: Synthetic oligonucleotide
ccacaaccgauggggaaua

SEQ ID NO: 66364 - RNA, 19 nt, Artificial Sequence
  Description of Artificial Sequence: Synthetic oligonucleotide
ggcuggcuauuaggagaaa

SEQ ID NO: 66365 - RNA, 19 nt, Artificial Sequence
  Description of Artificial Sequence: Synthetic oligonucleotide
cccggauucucuggugugu

SEQ ID NO: 66366 - RNA, 19 nt, Artificial Sequence
  Description of Artificial Sequence: Synthetic oligonucleotide
cgagugugcccugucaguu

SEQ ID NO: 66367 - RNA, 19 nt, Artificial Sequence
  Description of Artificial Sequence: Synthetic oligonucleotide
cgacuacgaucuguaauuu

SEQ ID NO: 66368 - RNA, 19 nt, Artificial Sequence
  Description of Artificial Sequence: Synthetic oligonucleotide
cgcaacgggcaaggcuaga

SEQ ID NO: 66369 - RNA, 19 nt, Artificial Sequence
  Description of Artificial Sequence: Synthetic oligonucleotide
ccgccugccgcaggagagu

SEQ ID NO: 66370 - RNA, 19 nt, Artificial Sequence
  Description of Artificial Sequence: Synthetic oligonucleotide
aaaguuaucauaugguagc

SEQ ID NO: 66371 - RNA, 19 nt, Artificial Sequence
  Description of Artificial Sequence: Synthetic oligonucleotide
aauugguacacuuucauuc

SEQ ID NO: 66372 - RNA, 19 nt, Artificial Sequence
  Description of Artificial Sequence: Synthetic oligonucleotide
aacaauaacucuuggagac

SEQ ID NO: 66373 - RNA, 19 nt, Artificial Sequence
  Description of Artificial Sequence: Synthetic oligonucleotide
agacuuuuaaaacaagucc

SEQ ID NO: 66374 - RNA, 19 nt, Artificial Sequence
  Description of Artificial Sequence: Synthetic oligonucleotide
aaucaauggaaaucuauac

SEQ ID NO: 66375 - RNA, 19 nt, Artificial Sequence
  Description of Artificial Sequence: Synthetic oligonucleotide
uuuacauaggacuauaagc

SEQ ID NO: 66376 - RNA, 19 nt, Artificial Sequence
  Description of Artificial Sequence: Synthetic oligonucleotide
gauuaaaguuaucauaugg

SEQ ID NO: 66377 - RNA, 19 nt, Artificial Sequence
  Description of Artificial Sequence: Synthetic oligonucleotide
agucguaacaccucuaucc

SEQ ID NO: 66378 - RNA, 19 nt, Artificial Sequence
  Description of Artificial Sequence: Synthetic oligonucleotide
uuauaagaaauacucaucu

SEQ ID NO: 66379 - RNA, 19 nt, Artificial Sequence
  Description of Artificial Sequence: Synthetic oligonucleotide
uguauguuuacauaggacu

SEQ ID NO: 66380 - RNA, 19 nt, Artificial Sequence
  Description of Artificial Sequence: Synthetic oligonucleotide
auauuagagaguuaaaugu

SEQ ID NO: 66381 - RNA, 19 nt, Artificial Sequence
  Description of Artificial Sequence: Synthetic oligonucleotide
gaagcauuacccuaagugg

SEQ ID NO: 66382 - RNA, 19 nt, Artificial Sequence
  Description of Artificial Sequence: Synthetic oligonucleotide
agugauggcauauagcgcg

SEQ ID NO: 66383 - RNA, 19 nt, Artificial Sequence
  Description of Artificial Sequence: Synthetic oligonucleotide
uaaaguuaucauaugguag

SEQ ID NO: 66384 - RNA, 19 nt, Artificial Sequence
  Description of Artificial Sequence: Synthetic oligonucleotide
aucaauggaaaucuauacc

SEQ ID NO: 66385 - RNA, 19 nt, Artificial Sequence
  Description of Artificial Sequence: Synthetic oligonucleotide
aaauuuaugcuuccuguag

SEQ ID NO: 66386 - RNA, 19 nt, Artificial Sequence
  Description of Artificial Sequence: Synthetic oligonucleotide
ugcgaaauauaaauaaaag

SEQ ID NO: 66387 - RNA, 19 nt, Artificial Sequence
  Description of Artificial Sequence: Synthetic oligonucleotide
uuaauuaaggugcagcaac

SEQ ID NO: 66388 - RNA, 19 nt, Artificial Sequence
  Description of Artificial Sequence: Synthetic oligonucleotide
aaggguuuuguguacuagc

SEQ ID NO: 66389 - RNA, 19 nt, Artificial Sequence
  Description of Artificial Sequence: Synthetic oligonucleotide
agaagcauuacccuaagug

SEQ ID NO: 66390 - RNA, 19 nt, Artificial Sequence
  Description of Artificial Sequence: Synthetic oligonucleotide
agugcauucugccugaagg

SEQ ID NO: 66391 - RNA, 19 nt, Artificial Sequence
  Description of Artificial Sequence: Synthetic oligonucleotide
aacauccgcacauagagug

SEQ ID NO: 66392 - RNA, 19 nt, Artificial Sequence
  Description of Artificial Sequence: Synthetic oligonucleotide
cuaacauccgcacauagag

SEQ ID NO: 66393 - RNA, 19 nt, Artificial Sequence
  Description of Artificial Sequence: Synthetic oligonucleotide
uuuauagugucaccauacg

SEQ ID NO: 66394 - RNA, 19 nt, Artificial Sequence
  Description of Artificial Sequence: Synthetic oligonucleotide
aacgagugaccuaugaccc

SEQ ID NO: 66395 - RNA, 19 nt, Artificial Sequence
  Description of Artificial Sequence: Synthetic oligonucleotide
aaauuuauguuguucuuaa

SEQ ID NO: 66396 - RNA, 19 nt, Artificial Sequence
  Description of Artificial Sequence: Synthetic oligonucleotide
aacccaaucaaauucuagu

SEQ ID NO: 66397 - RNA, 19 nt, Artificial Sequence
  Description of Artificial Sequence: Synthetic oligonucleotide
aauaaugugccaucucuga

SEQ ID NO: 66398 - RNA, 19 nt, Artificial Sequence
  Description of Artificial Sequence: Synthetic oligonucleotide
ucugaaacgcuucacugag

SEQ ID NO: 66399 - RNA, 19 nt, Artificial Sequence
  Description of Artificial Sequence: Synthetic oligonucleotide
ugacuuugaaugaaguuug

SEQ ID NO: 66400 - RNA, 19 nt, Artificial Sequence
  Description of Artificial Sequence: Synthetic oligonucleotide
accaaaucauuuaagacac

SEQ ID NO: 66401 - RNA, 19 nt, Artificial Sequence
  Description of Artificial Sequence: Synthetic oligonucleotide
uguucuaaagaccacucac

SEQ ID NO: 66402 - RNA, 19 nt, Artificial Sequence
  Description of Artificial Sequence: Synthetic oligonucleotide
agaauuaggcauuuguaug

SEQ ID NO: 66403 - RNA, 19 nt, Artificial Sequence
  Description of Artificial Sequence: Synthetic oligonucleotide
agaaugacugcuuuauguc

SEQ ID NO: 66404 - RNA, 19 nt, Artificial Sequence
  Description of Artificial Sequence: Synthetic oligonucleotide
uuuguauguuuacauagga

SEQ ID NO: 66405 - RNA, 19 nt, Artificial Sequence
  Description of Artificial Sequence: Synthetic oligonucleotide
acauagagugcauucugcc

SEQ ID NO: 66406 - RNA, 19 nt, Artificial Sequence
  Description of Artificial Sequence: Synthetic oligonucleotide
aaacuaggaucuuuuaaca

SEQ ID NO: 66407 - RNA, 19 nt, Artificial Sequence
  Description of Artificial Sequence: Synthetic oligonucleotide
uauagugucaccauacgua

SEQ ID NO: 66408 - RNA, 19 nt, Artificial Sequence
  Description of Artificial Sequence: Synthetic oligonucleotide
auacaugggauaugaagac

SEQ ID NO: 66409 - RNA, 19 nt, Artificial Sequence
  Description of Artificial Sequence: Synthetic oligonucleotide
aaacgcuucacugagucag

SEQ ID NO: 66410 - RNA, 19 nt, Artificial Sequence
  Description of Artificial Sequence: Synthetic oligonucleotide
aucgcucacacacacacac

SEQ ID NO: 66411 - RNA, 19 nt, Artificial Sequence
  Description of Artificial Sequence: Synthetic oligonucleotide
uguacuagcuuuauuuaga

SEQ ID NO: 66412 - RNA, 19 nt, Artificial Sequence
  Description of Artificial Sequence: Synthetic oligonucleotide
uuaucgcucacacacacac

SEQ ID NO: 66413 - RNA, 19 nt, Artificial Sequence
  Description of Artificial Sequence: Synthetic oligonucleotide
aauuaaaggaggcaccuua

SEQ ID NO: 66414 - RNA, 19 nt, Artificial Sequence
  Description of Artificial Sequence: Synthetic oligonucleotide
uauauccaaacccuuaguc

SEQ ID NO: 66415 - RNA, 19 nt, Artificial Sequence
  Description of Artificial Sequence: Synthetic oligonucleotide
uguugaaaaguucacggaa

SEQ ID NO: 66416 - RNA, 19 nt, Artificial Sequence
  Description of Artificial Sequence: Synthetic oligonucleotide
uuaaggcuaaggaaguuca

SEQ ID NO: 66417 - RNA, 19 nt, Artificial Sequence
  Description of Artificial Sequence: Synthetic oligonucleotide
aaaauugguacacuuucau

SEQ ID NO: 66418 - RNA, 19 nt, Artificial Sequence
  Description of Artificial Sequence: Synthetic oligonucleotide
acuaggaucuuuuaacaug

SEQ ID NO: 66419 - RNA, 19 nt, Artificial Sequence
  Description of Artificial Sequence: Synthetic oligonucleotide
uggaaaucuauaccaauga

SEQ ID NO: 66420 - RNA, 19 nt, Artificial Sequence
  Description of Artificial Sequence: Synthetic oligonucleotide
ucuauauaaucaguaaucu

SEQ ID NO: 66421 - RNA, 19 nt, Artificial Sequence
  Description of Artificial Sequence: Synthetic oligonucleotide
gaaaucuauaccaaugaac

SEQ ID NO: 66422 - RNA, 19 nt, Artificial Sequence
  Description of Artificial Sequence: Synthetic oligonucleotide
caugauagcaaaaugcuga

SEQ ID NO: 66423 - RNA, 19 nt, Artificial Sequence
  Description of Artificial Sequence: Synthetic oligonucleotide
aacuaugaaacaaacgagu

SEQ ID NO: 66424 - RNA, 19 nt, Artificial Sequence
  Description of Artificial Sequence: Synthetic oligonucleotide
guuuacauaggacuauaag

SEQ ID NO: 66425 - RNA, 19 nt, Artificial Sequence
  Description of Artificial Sequence: Synthetic oligonucleotide
uaggagacccauuaaaaga

SEQ ID NO: 66426 - RNA, 19 nt, Artificial Sequence
  Description of Artificial Sequence: Synthetic oligonucleotide
uucaauaugcuugacagau

SEQ ID NO: 66427 - RNA, 19 nt, Artificial Sequence
  Description of Artificial Sequence: Synthetic oligonucleotide
aacccuuagucacuggaag

SEQ ID NO: 66428 - RNA, 19 nt, Artificial Sequence
  Description of Artificial Sequence: Synthetic oligonucleotide
cuuauagugaucaaaccga

SEQ ID NO: 66429 - RNA, 19 nt, Artificial Sequence
  Description of Artificial Sequence: Synthetic oligonucleotide
auagugucaccauacguag

SEQ ID NO: 66430 - RNA, 19 nt, Artificial Sequence
  Description of Artificial Sequence: Synthetic oligonucleotide
auuauaagaaauacucauc

SEQ ID NO: 66431 - RNA, 19 nt, Artificial Sequence
  Description of Artificial Sequence: Synthetic oligonucleotide
aaugaacuuagaagagagc

SEQ ID NO: 66432 - RNA, 19 nt, Artificial Sequence
  Description of Artificial Sequence: Synthetic oligonucleotide
uacccuaauuauaagaaau

SEQ ID NO: 66433 - RNA, 19 nt, Artificial Sequence
  Description of Artificial Sequence: Synthetic oligonucleotide
aagcucagcuaacauccgc

SEQ ID NO: 66434 - RNA, 19 nt, Artificial Sequence
  Description of Artificial Sequence: Synthetic oligonucleotide
uguuucguuuuaaauuaag

SEQ ID NO: 66435 - RNA, 19 nt, Artificial Sequence
  Description of Artificial Sequence: Synthetic oligonucleotide
uagaauuaggcauuuguau

SEQ ID NO: 66436 - RNA, 19 nt, Artificial Sequence
  Description of Artificial Sequence: Synthetic oligonucleotide
aauggaaaucuauaccaau

SEQ ID NO: 66437 - RNA, 19 nt, Artificial Sequence
  Description of Artificial Sequence: Synthetic oligonucleotide
auagagugcauucugccug

SEQ ID NO: 66438 - RNA, 19 nt, Artificial Sequence
  Description of Artificial Sequence: Synthetic oligonucleotide
ucgguaguuaccuaaggca

SEQ ID NO: 66439 - RNA, 19 nt, Artificial Sequence
  Description of Artificial Sequence: Synthetic oligonucleotide
ucuauccauuagaagaagc

SEQ ID NO: 66440 - RNA, 19 nt, Artificial Sequence
  Description of Artificial Sequence: Synthetic oligonucleotide
uacccuaaguggaauauug

SEQ ID NO: 66441 - RNA, 19 nt, Artificial Sequence
  Description of Artificial Sequence: Synthetic oligonucleotide
agcaucaauucauauaccu

SEQ ID NO: 66442 - RNA, 19 nt, Artificial Sequence
  Description of Artificial Sequence: Synthetic oligonucleotide
cauaugguagcuuuuaaga

SEQ ID NO: 66443 - RNA, 19 nt, Artificial Sequence
  Description of Artificial Sequence: Synthetic oligonucleotide
uuagaagaagcauuacccu

SEQ ID NO: 66444 - RNA, 19 nt, Artificial Sequence
  Description of Artificial Sequence: Synthetic oligonucleotide
gcgaaauauaaauaaaagc

SEQ ID NO: 66445 - RNA, 19 nt, Artificial Sequence
  Description of Artificial Sequence: Synthetic oligonucleotide
auuaccgagggagacacac

SEQ ID NO: 66446 - RNA, 19 nt, Artificial Sequence
  Description of Artificial Sequence: Synthetic oligonucleotide
auauccaaacccuuaguca

SEQ ID NO: 66447 - RNA, 19 nt, Artificial Sequence
  Description of Artificial Sequence: Synthetic oligonucleotide
aacuacauggaauacccua

SEQ ID NO: 66448 - RNA, 19 nt, Artificial Sequence
  Description of Artificial Sequence: Synthetic oligonucleotide
uuauagugucaccauacgu

SEQ ID NO: 66449 - RNA, 19 nt, Artificial Sequence
  Description of Artificial Sequence: Synthetic oligonucleotide
augauagcaaaaugcugac

SEQ ID NO: 66450 - RNA, 19 nt, Artificial Sequence
  Description of Artificial Sequence: Synthetic oligonucleotide
auacguagcucuaaugagc

SEQ ID NO: 66451 - RNA, 19 nt, Artificial Sequence
  Description of Artificial Sequence: Synthetic oligonucleotide
uauaagcucauuaauccuu

SEQ ID NO: 66452 - RNA, 19 nt, Artificial Sequence
  Description of Artificial Sequence: Synthetic oligonucleotide
accucucccaaucacacuc

SEQ ID NO: 66453 - RNA, 19 nt, Artificial Sequence
  Description of Artificial Sequence: Synthetic oligonucleotide
agcaacuacauggaauacc

SEQ ID NO: 66454 - RNA, 19 nt, Artificial Sequence
  Description of Artificial Sequence: Synthetic oligonucleotide
aaacaaacgagugaccuau

SEQ ID NO: 66455 - RNA, 19 nt, Artificial Sequence
  Description of Artificial Sequence: Synthetic oligonucleotide
uaauuaaggugcagcaaca

SEQ ID NO: 66456 - RNA, 19 nt, Artificial Sequence
  Description of Artificial Sequence: Synthetic oligonucleotide
ucccauaagcgaaauuucc

SEQ ID NO: 66457 - RNA, 19 nt, Artificial Sequence
  Description of Artificial Sequence: Synthetic oligonucleotide
cuauauaaucaguaaucug

SEQ ID NO: 66458 - RNA, 19 nt, Artificial Sequence
  Description of Artificial Sequence: Synthetic oligonucleotide
aucauuacaaacgccagug

SEQ ID NO: 66459 - RNA, 19 nt, Artificial Sequence
  Description of Artificial Sequence: Synthetic oligonucleotide
aaggcuaaggaaguucauc

SEQ ID NO: 66460 - RNA, 19 nt, Artificial Sequence
  Description of Artificial Sequence: Synthetic oligonucleotide
auucgucuggaacagaaga

SEQ ID NO: 66461 - RNA, 19 nt, Artificial Sequence
  Description of Artificial Sequence: Synthetic oligonucleotide
uuacaaacgccagugucgg

SEQ ID NO: 66462 - RNA, 19 nt, Artificial Sequence
  Description of Artificial Sequence: Synthetic oligonucleotide
cauacguagcucuaaugag

SEQ ID NO: 66463 - RNA, 19 nt, Artificial Sequence
  Description of Artificial Sequence: Synthetic oligonucleotide
uuaugucuuggccuaaccu

SEQ ID NO: 66464 - RNA, 19 nt, Artificial Sequence
  Description of Artificial Sequence: Synthetic oligonucleotide
ucugauaauuuccccuuug

SEQ ID NO: 66465 - RNA, 19 nt, Artificial Sequence
  Description of Artificial Sequence: Synthetic oligonucleotide
uuguauguuuacauaggac

SEQ ID NO: 66466 - RNA, 19 nt, Artificial Sequence
  Description of Artificial Sequence: Synthetic oligonucleotide
aagucguaacaccucuauc

SEQ ID NO: 66467 - RNA, 19 nt, Artificial Sequence
  Description of Artificial Sequence: Synthetic oligonucleotide
cuuuuaacaugucaagcuc

SEQ ID NO: 66468 - RNA, 19 nt, Artificial Sequence
  Description of Artificial Sequence: Synthetic oligonucleotide
agauuaccgagggagacac

SEQ ID NO: 66469 - RNA, 19 nt, Artificial Sequence
  Description of Artificial Sequence: Synthetic oligonucleotide
acuaaauagucaucaacaa

SEQ ID NO: 66470 - RNA, 19 nt, Artificial Sequence
  Description of Artificial Sequence: Synthetic oligonucleotide
uuuaugucuuggccuaacc

SEQ ID NO: 66471 - RNA, 19 nt, Artificial Sequence
  Description of Artificial Sequence: Synthetic oligonucleotide
uucuaugucgguaguuacc

SEQ ID NO: 66472 - RNA, 19 nt, Artificial Sequence
  Description of Artificial Sequence: Synthetic oligonucleotide
uacagugauggcauauagc

SEQ ID NO: 66473 - RNA, 19 nt, Artificial Sequence
  Description of Artificial Sequence: Synthetic oligonucleotide
aaucuauaccaaugaacaa

SEQ ID NO: 66474 - RNA, 19 nt, Artificial Sequence
  Description of Artificial Sequence: Synthetic oligonucleotide
gacauucugauaauuuccc

SEQ ID NO: 66475 - RNA, 19 nt, Artificial Sequence
  Description of Artificial Sequence: Synthetic oligonucleotide
aacuaggaucuuuuaacau

SEQ ID NO: 66476 - RNA, 19 nt, Artificial Sequence
  Description of Artificial Sequence: Synthetic oligonucleotide
acgaagaauaccuuuccgu

SEQ ID NO: 66477 - RNA, 19 nt, Artificial Sequence
  Description of Artificial Sequence: Synthetic oligonucleotide
ucauagaguugcgaagugg

SEQ ID NO: 66478 - RNA, 19 nt, Artificial Sequence
  Description of Artificial Sequence: Synthetic oligonucleotide
ugaagaaugcugauucguc

SEQ ID NO: 66479 - RNA, 19 nt, Artificial Sequence
  Description of Artificial Sequence: Synthetic oligonucleotide
cauaagcgaaauuuccuac

SEQ ID NO: 66480 - RNA, 19 nt, Artificial Sequence
  Description of Artificial Sequence: Synthetic oligonucleotide
auacucaucugagugcuac

SEQ ID NO: 66481 - RNA, 19 nt, Artificial Sequence
  Description of Artificial Sequence: Synthetic oligonucleotide
uagcuuuuaagagaguacu

SEQ ID NO: 66482 - RNA, 19 nt, Artificial Sequence
  Description of Artificial Sequence: Synthetic oligonucleotide
uuauagugaucaaaccgaa

SEQ ID NO: 66483 - RNA, 19 nt, Artificial Sequence
  Description of Artificial Sequence: Synthetic oligonucleotide
ucuaugucgguaguuaccu

SEQ ID NO: 66484 - RNA, 19 nt, Artificial Sequence
  Description of Artificial Sequence: Synthetic oligonucleotide
uaugucgguaguuaccuaa

SEQ ID NO: 66485 - RNA, 19 nt, Artificial Sequence
  Description of Artificial Sequence: Synthetic oligonucleotide
ugauucgucuggaacagaa

SEQ ID NO: 66486 - RNA, 19 nt, Artificial Sequence
  Description of Artificial Sequence: Synthetic oligonucleotide
ugauauauccaaacccuua

SEQ ID NO: 66487 - RNA, 19 nt, Artificial Sequence
  Description of Artificial Sequence: Synthetic oligonucleotide
auaagcgaaauuuccuacu

SEQ ID NO: 66488 - RNA, 19 nt, Artificial Sequence
  Description of Artificial Sequence: Synthetic oligonucleotide
uaauuccccuucuauauaa

SEQ ID NO: 66489 - RNA, 19 nt, Artificial Sequence
  Description of Artificial Sequence: Synthetic oligonucleotide
agugaucaaaccgaaauau

SEQ ID NO: 66490 - RNA, 19 nt, Artificial Sequence
  Description of Artificial Sequence: Synthetic oligonucleotide
ucacacacacacacucugg

SEQ ID NO: 66491 - RNA, 19 nt, Artificial Sequence
  Description of Artificial Sequence: Synthetic oligonucleotide
aggucauccagucaacgug

SEQ ID NO: 66492 - RNA, 19 nt, Artificial Sequence
  Description of Artificial Sequence: Synthetic oligonucleotide
guguacuagcuuuauuuag

SEQ ID NO: 66493 - RNA, 19 nt, Artificial Sequence
  Description of Artificial Sequence: Synthetic oligonucleotide
acuaagaaauguaaaggcu

SEQ ID NO: 66494 - RNA, 19 nt, Artificial Sequence
  Description of Artificial Sequence: Synthetic oligonucleotide
ugucgguaguuaccuaagg

SEQ ID NO: 66495 - RNA, 19 nt, Artificial Sequence
  Description of Artificial Sequence: Synthetic oligonucleotide
uccucauagaguugcgaag

SEQ ID NO: 66496 - RNA, 19 nt, Artificial Sequence
  Description of Artificial Sequence: Synthetic oligonucleotide
uucuauuuuauagugcuuu

SEQ ID NO: 66497 - RNA, 19 nt, Artificial Sequence
  Description of Artificial Sequence: Synthetic oligonucleotide
ucuugcgagcaaaaucacc

SEQ ID NO: 66498 - RNA, 19 nt, Artificial Sequence
  Description of Artificial Sequence: Synthetic oligonucleotide
ucaaaccgaaauauugaau

SEQ ID NO: 66499 - RNA, 19 nt, Artificial Sequence
  Description of Artificial Sequence: Synthetic oligonucleotide
cacggaauuuauacugugg

SEQ ID NO: 66500 - RNA, 19 nt, Artificial Sequence
  Description of Artificial Sequence: Synthetic oligonucleotide
guuuauagugucaccauac

SEQ ID NO: 66501 - RNA, 19 nt, Artificial Sequence
  Description of Artificial Sequence: Synthetic oligonucleotide
agagcauagacagagcagu

SEQ ID NO: 66502 - RNA, 19 nt, Artificial Sequence
  Description of Artificial Sequence: Synthetic oligonucleotide
agugauucucauguggaag

SEQ ID NO: 66503 - RNA, 19 nt, Artificial Sequence
  Description of Artificial Sequence: Synthetic oligonucleotide
uguuuauagugucaccaua

SEQ ID NO: 66504 - RNA, 19 nt, Artificial Sequence
  Description of Artificial Sequence: Synthetic oligonucleotide
uggcauauagcgcguaugu

SEQ ID NO: 66505 - RNA, 19 nt, Artificial Sequence
  Description of Artificial Sequence: Synthetic oligonucleotide
gaucaaaccgaaauauuga

SEQ ID NO: 66506 - RNA, 19 nt, Artificial Sequence
  Description of Artificial Sequence: Synthetic oligonucleotide
acgccgauagguuuuccac

SEQ ID NO: 66507 - RNA, 19 nt, Artificial Sequence
  Description of Artificial Sequence: Synthetic oligonucleotide
aaacccaaucaaauucuag

SEQ ID NO: 66508 - RNA, 19 nt, Artificial Sequence
  Description of Artificial Sequence: Synthetic oligonucleotide
agcgaaauuuccuacuaau

SEQ ID NO: 66509 - RNA, 19 nt, Artificial Sequence
  Description of Artificial Sequence: Synthetic oligonucleotide
uaagcgaaauuuccuacua

SEQ ID NO: 66510 - RNA, 19 nt, Artificial Sequence
  Description of Artificial Sequence: Synthetic oligonucleotide
agaguugcgaaguggauuu

SEQ ID NO: 66511 - RNA, 19 nt, Artificial Sequence
  Description of Artificial Sequence: Synthetic oligonucleotide
uuucuaugucgguaguuac

SEQ ID NO: 66512 - RNA, 19 nt, Artificial Sequence
  Description of Artificial Sequence: Synthetic oligonucleotide
uauaacgccgauagguuuu

SEQ ID NO: 66513 - RNA, 19 nt, Artificial Sequence
  Description of Artificial Sequence: Synthetic oligonucleotide
aguguuuagguugcgccgg

SEQ ID NO: 66514 - RNA, 19 nt, Artificial Sequence
  Description of Artificial Sequence: Synthetic oligonucleotide
ugcgaaguggauuuacaaa

SEQ ID NO: 66515 - RNA, 19 nt, Artificial Sequence
  Description of Artificial Sequence: Synthetic oligonucleotide
auggaaaucuauaccaaug

SEQ ID NO: 66516 - RNA, 19 nt, Artificial Sequence
  Description of Artificial Sequence: Synthetic oligonucleotide
uguugucucagcuccaaua

SEQ ID NO: 66517 - RNA, 19 nt, Artificial Sequence
  Description of Artificial Sequence: Synthetic oligonucleotide
gucgguaguuaccuaaggc

SEQ ID NO: 66518 - RNA, 19 nt, Artificial Sequence
  Description of Artificial Sequence: Synthetic oligonucleotide
uacauaggacuauaagcuc

SEQ ID NO: 66519 - RNA, 19 nt, Artificial Sequence
  Description of Artificial Sequence: Synthetic oligonucleotide
agcucuaaugagcugcuga

SEQ ID NO: 66520 - RNA, 19 nt, Artificial Sequence
  Description of Artificial Sequence: Synthetic oligonucleotide
aguuaggacaacugacaca

SEQ ID NO: 66521 - RNA, 19 nt, Artificial Sequence
  Description of Artificial Sequence: Synthetic oligonucleotide
agagccgcgugccuaagag

SEQ ID NO: 66522 - RNA, 19 nt, Artificial Sequence
  Description of Artificial Sequence: Synthetic oligonucleotide
aacgccgauagguuuucca

SEQ ID NO: 66523 - RNA, 19 nt, Artificial Sequence
  Description of Artificial Sequence: Synthetic oligonucleotide
cacauuguuaguccuggac

SEQ ID NO: 66524 - RNA, 19 nt, Artificial Sequence
  Description of Artificial Sequence: Synthetic oligonucleotide
ucccguagcaucaauucau

SEQ ID NO: 66525 - RNA, 19 nt, Artificial Sequence
  Description of Artificial Sequence: Synthetic oligonucleotide
ucuagaucauaugauuaaa

SEQ ID NO: 66526 - RNA, 19 nt, Artificial Sequence
  Description of Artificial Sequence: Synthetic oligonucleotide
cugccaagcuaucaggaag

SEQ ID NO: 66527 - RNA, 19 nt, Artificial Sequence
  Description of Artificial Sequence: Synthetic oligonucleotide
aaccgaaauauugaauaau

SEQ ID NO: 66528 - RNA, 19 nt, Artificial Sequence
  Description of Artificial Sequence: Synthetic oligonucleotide
aagaaggcgcuugaguacu

SEQ ID NO: 66529 - RNA, 19 nt, Artificial Sequence
  Description of Artificial Sequence: Synthetic oligonucleotide
cacgaagaauaccuuuccg

SEQ ID NO: 66530 - RNA, 19 nt, Artificial Sequence
  Description of Artificial Sequence: Synthetic oligonucleotide
ucacuauaacgccgauagg

SEQ ID NO: 66531 - RNA, 19 nt, Artificial Sequence
  Description of Artificial Sequence: Synthetic oligonucleotide
uauagugaucaaaccgaaa

SEQ ID NO: 66532 - RNA, 19 nt, Artificial Sequence
  Description of Artificial Sequence: Synthetic oligonucleotide
uauaaucaguaaucuguua

SEQ ID NO: 66533 - RNA, 19 nt, Artificial Sequence
  Description of Artificial Sequence: Synthetic oligonucleotide
acagccuaugaugacacug

SEQ ID NO: 66534 - RNA, 19 nt, Artificial Sequence
  Description of Artificial Sequence: Synthetic oligonucleotide
caacaauaacucuuggaga

SEQ ID NO: 66535 - RNA, 19 nt, Artificial Sequence
  Description of Artificial Sequence: Synthetic oligonucleotide
agcuaacauccgcacauag

SEQ ID NO: 66536 - RNA, 19 nt, Artificial Sequence
  Description of Artificial Sequence: Synthetic oligonucleotide
uugauuuucuaugucggua

SEQ ID NO: 66537 - RNA, 19 nt, Artificial Sequence
  Description of Artificial Sequence: Synthetic oligonucleotide
uauagcgcguaugucuugc

SEQ ID NO: 66538 - RNA, 19 nt, Artificial Sequence
  Description of Artificial Sequence: Synthetic oligonucleotide
aguugcgaaguggauuuac

SEQ ID NO: 66539 - RNA, 19 nt, Artificial Sequence
  Description of Artificial Sequence: Synthetic oligonucleotide
gacccacaagauuaccgag

SEQ ID NO: 66540 - RNA, 19 nt, Artificial Sequence
  Description of Artificial Sequence: Synthetic oligonucleotide
cacacacacacacucuggc

SEQ ID NO: 66541 - RNA, 19 nt, Artificial Sequence
  Description of Artificial Sequence: Synthetic oligonucleotide
cucacacacacacacucug

SEQ ID NO: 66542 - RNA, 19 nt, Artificial Sequence
  Description of Artificial Sequence: Synthetic oligonucleotide
uggcucaguggucugaaaa

SEQ ID NO: 66543 - RNA, 19 nt, Artificial Sequence
  Description of Artificial Sequence: Synthetic oligonucleotide
acauaggacuauaagcuca

SEQ ID NO: 66544 - RNA, 19 nt, Artificial Sequence
  Description of Artificial Sequence: Synthetic oligonucleotide
augcgaaauauaaauaaaa

SEQ ID NO: 66545 - RNA, 19 nt, Artificial Sequence
  Description of Artificial Sequence: Synthetic oligonucleotide
ugagcugagacucgacaau

SEQ ID NO: 66546 - RNA, 19 nt, Artificial Sequence
  Description of Artificial Sequence: Synthetic oligonucleotide
ucaacguggucaacuauuu

SEQ ID NO: 66547 - RNA, 19 nt, Artificial Sequence
  Description of Artificial Sequence: Synthetic oligonucleotide
aagcgaaauuuccuacuaa

SEQ ID NO: 66548 - RNA, 19 nt, Artificial Sequence
  Description of Artificial Sequence: Synthetic oligonucleotide
caguuaggacaacugacac

SEQ ID NO: 66549 - RNA, 19 nt, Artificial Sequence
  Description of Artificial Sequence: Synthetic oligonucleotide
gaucuguuuggagacacuc

SEQ ID NO: 66550 - RNA, 19 nt, Artificial Sequence
  Description of Artificial Sequence: Synthetic oligonucleotide
cuuuuaagucguaacaccu

SEQ ID NO: 66551 - RNA, 19 nt, Artificial Sequence
  Description of Artificial Sequence: Synthetic oligonucleotide
auagcgcguaugucuugcc

SEQ ID NO: 66552 - RNA, 19 nt, Artificial Sequence
  Description of Artificial Sequence: Synthetic oligonucleotide
uaaacccaaucaaauucua

SEQ ID NO: 66553 - RNA, 19 nt, Artificial Sequence
  Description of Artificial Sequence: Synthetic oligonucleotide
aagauuaccgagggagaca

SEQ ID NO: 66554 - RNA, 19 nt, Artificial Sequence
  Description of Artificial Sequence: Synthetic oligonucleotide
ugucggaaauguaggcaug

SEQ ID NO: 66555 - RNA, 19 nt, Artificial Sequence
  Description of Artificial Sequence: Synthetic oligonucleotide
gacccauuaaaagauucuc

SEQ ID NO: 66556 - RNA, 19 nt, Artificial Sequence
  Description of Artificial Sequence: Synthetic oligonucleotide
cugagacucgacaaugcuc

SEQ ID NO: 66557 - RNA, 19 nt, Artificial Sequence
  Description of Artificial Sequence: Synthetic oligonucleotide
guuaggacaacugacacau

SEQ ID NO: 66558 - RNA, 19 nt, Artificial Sequence
  Description of Artificial Sequence: Synthetic oligonucleotide
uucccuuuacuguaggcuu

SEQ ID NO: 66559 - RNA, 19 nt, Artificial Sequence
  Description of Artificial Sequence: Synthetic oligonucleotide
accauacguagcucuaaug

SEQ ID NO: 66560 - RNA, 19 nt, Artificial Sequence
  Description of Artificial Sequence: Synthetic oligonucleotide
uuggccuaaccucucugac

SEQ ID NO: 66561 - RNA, 19 nt, Artificial Sequence
  Description of Artificial Sequence: Synthetic oligonucleotide
aacgcuucacugagucagc

SEQ ID NO: 66562 - RNA, 19 nt, Artificial Sequence
  Description of Artificial Sequence: Synthetic oligonucleotide
cucauggacagaacauaac

SEQ ID NO: 66563 - RNA, 19 nt, Artificial Sequence
  Description of Artificial Sequence: Synthetic oligonucleotide
gucuagaucauaugauuaa

SEQ ID NO: 66564 - RNA, 19 nt, Artificial Sequence
  Description of Artificial Sequence: Synthetic oligonucleotide
auuaugcgaaauauaaaua

SEQ ID NO: 66565 - RNA, 19 nt, Artificial Sequence
  Description of Artificial Sequence: Synthetic oligonucleotide
cagugauggcauauagcgc

SEQ ID NO: 66566 - RNA, 19 nt, Artificial Sequence
  Description of Artificial Sequence: Synthetic oligonucleotide
caagauuaccgagggagac

SEQ ID NO: 66567 - RNA, 19 nt, Artificial Sequence
  Description of Artificial Sequence: Synthetic oligonucleotide
guuaucauaugguagcuuu

SEQ ID NO: 66568 - RNA, 19 nt, Artificial Sequence
  Description of Artificial Sequence: Synthetic oligonucleotide
acaccggcuuuacagguug

SEQ ID NO: 66569 - RNA, 19 nt, Artificial Sequence
  Description of Artificial Sequence: Synthetic oligonucleotide
agcugagacucgacaaugc

SEQ ID NO: 66570 - RNA, 19 nt, Artificial Sequence
  Description of Artificial Sequence: Synthetic oligonucleotide
uuuagguugcgccggugua

SEQ ID NO: 66571 - RNA, 19 nt, Artificial Sequence
  Description of Artificial Sequence: Synthetic oligonucleotide
gauucgucuggaacagaag

SEQ ID NO: 66572 - RNA, 19 nt, Artificial Sequence
  Description of Artificial Sequence: Synthetic oligonucleotide
uuguuucguuuuaaauuaa

SEQ ID NO: 66573 - RNA, 19 nt, Artificial Sequence
  Description of Artificial Sequence: Synthetic oligonucleotide
gcaugucuagaucauauga

SEQ ID NO: 66574 - RNA, 19 nt, Artificial Sequence
  Description of Artificial Sequence: Synthetic oligonucleotide
aacucuuggagacgccuuu

SEQ ID NO: 66575 - RNA, 19 nt, Artificial Sequence
  Description of Artificial Sequence: Synthetic oligonucleotide
aggaaucucucuugguagu

SEQ ID NO: 66576 - RNA, 19 nt, Artificial Sequence
  Description of Artificial Sequence: Synthetic oligonucleotide
gagacgccuuuucagauaa

SEQ ID NO: 66577 - RNA, 19 nt, Artificial Sequence
  Description of Artificial Sequence: Synthetic oligonucleotide
gcaccaaaucauuuaagac

SEQ ID NO: 66578 - RNA, 19 nt, Artificial Sequence
  Description of Artificial Sequence: Synthetic oligonucleotide
uacuuguucaggugagguc

SEQ ID NO: 66579 - RNA, 19 nt, Artificial Sequence
  Description of Artificial Sequence: Synthetic oligonucleotide
uguauacaccaaaggguuu

SEQ ID NO: 66580 - RNA, 19 nt, Artificial Sequence
  Description of Artificial Sequence: Synthetic oligonucleotide
uuaccgagggagacacacc

SEQ ID NO: 66581 - RNA, 19 nt, Artificial Sequence
  Description of Artificial Sequence: Synthetic oligonucleotide
uacauggaauacccuaauu

SEQ ID NO: 66582 - RNA, 19 nt, Artificial Sequence
  Description of Artificial Sequence: Synthetic oligonucleotide
aaaacacgaagaauaccuu

SEQ ID NO: 66583 - RNA, 19 nt, Artificial Sequence
  Description of Artificial Sequence: Synthetic oligonucleotide
acccacaagauuaccgagg

SEQ ID NO: 66584 - RNA, 19 nt, Artificial Sequence
  Description of Artificial Sequence: Synthetic oligonucleotide
cauucugauaauuuccccu

SEQ ID NO: 66585 - RNA, 19 nt, Artificial Sequence
  Description of Artificial Sequence: Synthetic oligonucleotide
ugcgagcaaaaucaccuuu

SEQ ID NO: 66586 - RNA, 19 nt, Artificial Sequence
  Description of Artificial Sequence: Synthetic oligonucleotide
uagugucaccauacguagc

SEQ ID NO: 66587 - RNA, 19 nt, Artificial Sequence
  Description of Artificial Sequence: Synthetic oligonucleotide
aggagacccauuaaaagau

SEQ ID NO: 66588 - RNA, 19 nt, Artificial Sequence
  Description of Artificial Sequence: Synthetic oligonucleotide
auauaaucaguaaucuguu

SEQ ID NO: 66589 - RNA, 19 nt, Artificial Sequence
  Description of Artificial Sequence: Synthetic oligonucleotide
guaaagaaggcgcuugagu

SEQ ID NO: 66590 - RNA, 19 nt, Artificial Sequence
  Description of Artificial Sequence: Synthetic oligonucleotide
gcgaaguggauuuacaaaa

SEQ ID NO: 66591 - RNA, 19 nt, Artificial Sequence
  Description of Artificial Sequence: Synthetic oligonucleotide
caguauccucucaauguug

SEQ ID NO: 66592 - RNA, 19 nt, Artificial Sequence
  Description of Artificial Sequence: Synthetic oligonucleotide
guacuagcuuuauuuagaa

SEQ ID NO: 66593 - RNA, 19 nt, Artificial Sequence
  Description of Artificial Sequence: Synthetic oligonucleotide
uuaagucguaacaccucua

SEQ ID NO: 66594 - RNA, 19 nt, Artificial Sequence
  Description of Artificial Sequence: Synthetic oligonucleotide
aucccguagcaucaauuca

SEQ ID NO: 66595 - RNA, 19 nt, Artificial Sequence
  Description of Artificial Sequence: Synthetic oligonucleotide
ugauagcaaaaugcugaca

SEQ ID NO: 66596 - RNA, 19 nt, Artificial Sequence
  Description of Artificial Sequence: Synthetic oligonucleotide
acaaacgccagugucggaa

SEQ ID NO: 66597 - RNA, 19 nt, Artificial Sequence
  Description of Artificial Sequence: Synthetic oligonucleotide
acacacacacacucuggca

SEQ ID NO: 66598 - RNA, 19 nt, Artificial Sequence
  Description of Artificial Sequence: Synthetic oligonucleotide
cuucuauauaaucaguaau

SEQ ID NO: 66599 - RNA, 19 nt, Artificial Sequence
  Description of Artificial Sequence: Synthetic oligonucleotide
gagcugagacucgacaaug

SEQ ID NO: 66600 - RNA, 19 nt, Artificial Sequence
  Description of Artificial Sequence: Synthetic oligonucleotide
caaacccuuagucacugga

SEQ ID NO: 66601 - RNA, 19 nt, Artificial Sequence
  Description of Artificial Sequence: Synthetic oligonucleotide
uagaguugcgaaguggauu

SEQ ID NO: 66602 - RNA, 19 nt, Artificial Sequence
  Description of Artificial Sequence: Synthetic oligonucleotide
ucaauaugcuugacagauu

SEQ ID NO: 66603 - RNA, 19 nt, Artificial Sequence
  Description of Artificial Sequence: Synthetic oligonucleotide
gaucauuacaaacgccagu

SEQ ID NO: 66604 - RNA, 19 nt, Artificial Sequence
  Description of Artificial Sequence: Synthetic oligonucleotide
caaauuuaugcuuccugua

SEQ ID NO: 66605 - RNA, 19 nt, Artificial Sequence
  Description of Artificial Sequence: Synthetic oligonucleotide
caagcucagcuaacauccg

SEQ ID NO: 66606 - RNA, 19 nt, Artificial Sequence
  Description of Artificial Sequence: Synthetic oligonucleotide
uuagguugcgccgguguac

SEQ ID NO: 66607 - RNA, 19 nt, Artificial Sequence
  Description of Artificial Sequence: Synthetic oligonucleotide
agacucgacaaugcucagg

SEQ ID NO: 66608 - RNA, 19 nt, Artificial Sequence
  Description of Artificial Sequence: Synthetic oligonucleotide
uagcgcguaugucuugcca

SEQ ID NO: 66609 - RNA, 19 nt, Artificial Sequence
  Description of Artificial Sequence: Synthetic oligonucleotide
aggguuuuguguacuagcu

SEQ ID NO: 66610 - RNA, 19 nt, Artificial Sequence
  Description of Artificial Sequence: Synthetic oligonucleotide
cacuauaacgccgauaggu

SEQ ID NO: 66611 - RNA, 19 nt, Artificial Sequence
  Description of Artificial Sequence: Synthetic oligonucleotide
uaucgcucacacacacaca

SEQ ID NO: 66612 - RNA, 19 nt, Artificial Sequence
  Description of Artificial Sequence: Synthetic oligonucleotide
acguggucaacuauuuucu

SEQ ID NO: 66613 - RNA, 19 nt, Artificial Sequence
  Description of Artificial Sequence: Synthetic oligonucleotide
gauucucauguggaaguca

SEQ ID NO: 66614 - RNA, 19 nt, Artificial Sequence
  Description of Artificial Sequence: Synthetic oligonucleotide
auaacgccgauagguuuuc

SEQ ID NO: 66615 - RNA, 19 nt, Artificial Sequence
  Description of Artificial Sequence: Synthetic oligonucleotide
gagugcauucugccugaag

SEQ ID NO: 66616 - RNA, 19 nt, Artificial Sequence
  Description of Artificial Sequence: Synthetic oligonucleotide
agcgcguaugucuugccau

SEQ ID NO: 66617 - RNA, 19 nt, Artificial Sequence
  Description of Artificial Sequence: Synthetic oligonucleotide
gaaacgcuucacugaguca

SEQ ID NO: 66618 - RNA, 19 nt, Artificial Sequence
  Description of Artificial Sequence: Synthetic oligonucleotide
auauagcgcguaugucuug

SEQ ID NO: 66619 - RNA, 19 nt, Artificial Sequence
  Description of Artificial Sequence: Synthetic oligonucleotide
cagcacaaacuuauaguga

SEQ ID NO: 66620 - RNA, 19 nt, Artificial Sequence
  Description of Artificial Sequence: Synthetic oligonucleotide
ugccuacauugucugacau

SEQ ID NO: 66621 - RNA, 19 nt, Artificial Sequence
  Description of Artificial Sequence: Synthetic oligonucleotide
ccauacguagcucuaauga

SEQ ID NO: 66622 - RNA, 19 nt, Artificial Sequence
  Description of Artificial Sequence: Synthetic oligonucleotide
cuauaagcucauuaauccu

SEQ ID NO: 66623 - RNA, 19 nt, Artificial Sequence
  Description of Artificial Sequence: Synthetic oligonucleotide
ggaaaucuauaccaaugaa

SEQ ID NO: 66624 - RNA, 19 nt, Artificial Sequence
  Description of Artificial Sequence: Synthetic oligonucleotide
acuauaacgccgauagguu

SEQ ID NO: 66625 - RNA, 19 nt, Artificial Sequence
  Description of Artificial Sequence: Synthetic oligonucleotide
gcauauagcgcguaugucu

SEQ ID NO: 66626 - RNA, 19 nt, Artificial Sequence
  Description of Artificial Sequence: Synthetic oligonucleotide
cuuggccuaaccucucuga

SEQ ID NO: 66627 - RNA, 19 nt, Artificial Sequence
  Description of Artificial Sequence: Synthetic oligonucleotide
agccgcgugccuaagagca

SEQ ID NO: 66628 - RNA, 19 nt, Artificial Sequence
  Description of Artificial Sequence: Synthetic oligonucleotide
ugcgccgguguacagugau

SEQ ID NO: 66629 - RNA, 19 nt, Artificial Sequence
  Description of Artificial Sequence: Synthetic oligonucleotide
cuuuaugucuuggccuaac

SEQ ID NO: 66630 - RNA, 19 nt, Artificial Sequence
  Description of Artificial Sequence: Synthetic oligonucleotide
auggaauacccuaauuaua

SEQ ID NO: 66631 - RNA, 19 nt, Artificial Sequence
  Description of Artificial Sequence: Synthetic oligonucleotide
gagacucgacaaugcucag

SEQ ID NO: 66632 - RNA, 19 nt, Artificial Sequence
  Description of Artificial Sequence: Synthetic oligonucleotide
cacuucgucacaggugaag

SEQ ID NO: 66633 - RNA, 19 nt, Artificial Sequence
  Description of Artificial Sequence: Synthetic oligonucleotide
ggacccacaagauuaccga

SEQ ID NO: 66634 - RNA, 19 nt, Artificial Sequence
  Description of Artificial Sequence: Synthetic oligonucleotide
agucaacguggucaacuau

SEQ ID NO: 66635 - RNA, 19 nt, Artificial Sequence
  Description of Artificial Sequence: Synthetic oligonucleotide
cuuauaauacaggagccau

SEQ ID NO: 66636 - RNA, 19 nt, Artificial Sequence
  Description of Artificial Sequence: Synthetic oligonucleotide
augucgguaguuaccuaag

SEQ ID NO: 66637 - RNA, 19 nt, Artificial Sequence
  Description of Artificial Sequence: Synthetic oligonucleotide
acggacccacaagauuacc

SEQ ID NO: 66638 - RNA, 19 nt, Artificial Sequence
  Description of Artificial Sequence: Synthetic oligonucleotide
cacugcggaaggugugucc

SEQ ID NO: 66639 - RNA, 19 nt, Artificial Sequence
  Description of Artificial Sequence: Synthetic oligonucleotide
ggcaugucuagaucauaug

SEQ ID NO: 66640 - RNA, 19 nt, Artificial Sequence
  Description of Artificial Sequence: Synthetic oligonucleotide
guacuuugaaguuucuguu

SEQ ID NO: 66641 - RNA, 19 nt, Artificial Sequence
  Description of Artificial Sequence: Synthetic oligonucleotide
auaguagaauuaggcauuu

SEQ ID NO: 66642 - RNA, 19 nt, Artificial Sequence
  Description of Artificial Sequence: Synthetic oligonucleotide
acccuaauuauaagaaaua

SEQ ID NO: 66643 - RNA, 19 nt, Artificial Sequence
  Description of Artificial Sequence: Synthetic oligonucleotide
acaccucuauccauuagaa

SEQ ID NO: 66644 - RNA, 19 nt, Artificial Sequence
  Description of Artificial Sequence: Synthetic oligonucleotide
ucuggaguugggucuucau

SEQ ID NO: 66645 - RNA, 19 nt, Artificial Sequence
  Description of Artificial Sequence: Synthetic oligonucleotide
gguaguuaccuaaggcaug

SEQ ID NO: 66646 - RNA, 19 nt, Artificial Sequence
  Description of Artificial Sequence: Synthetic oligonucleotide
gcugacacggacccacaag

SEQ ID NO: 66647 - RNA, 19 nt, Artificial Sequence
  Description of Artificial Sequence: Synthetic oligonucleotide
uucuccuauuuaacugguu

SEQ ID NO: 66648 - RNA, 19 nt, Artificial Sequence
  Description of Artificial Sequence: Synthetic oligonucleotide
cuauaccaaugaacaauaa

SEQ ID NO: 66649 - RNA, 19 nt, Artificial Sequence
  Description of Artificial Sequence: Synthetic oligonucleotide
uucugccuacauugucuga

SEQ ID NO: 66650 - RNA, 19 nt, Artificial Sequence
  Description of Artificial Sequence: Synthetic oligonucleotide
gagccgcgugccuaagagc

SEQ ID NO: 66651 - RNA, 19 nt, Artificial Sequence
  Description of Artificial Sequence: Synthetic oligonucleotide
acgagugaccuaugaccca

SEQ ID NO: 66652 - RNA, 19 nt, Artificial Sequence
  Description of Artificial Sequence: Synthetic oligonucleotide
acgccagugucggaaaugu

SEQ ID NO: 66653 - RNA, 19 nt, Artificial Sequence
  Description of Artificial Sequence: Synthetic oligonucleotide
ucgcucacacacacacacu

SEQ ID NO: 66654 - RNA, 19 nt, Artificial Sequence
  Description of Artificial Sequence: Synthetic oligonucleotide
cacggacccacaagauuac

SEQ ID NO: 66655 - RNA, 19 nt, Artificial Sequence
  Description of Artificial Sequence: Synthetic oligonucleotide
gcugauauauccaaacccu

SEQ ID NO: 66656 - RNA, 19 nt, Artificial Sequence
  Description of Artificial Sequence: Synthetic oligonucleotide
cuuaucgcucacacacaca

SEQ ID NO: 66657 - RNA, 19 nt, Artificial Sequence
  Description of Artificial Sequence: Synthetic oligonucleotide
auguuuacauaggacuaua

SEQ ID NO: 66658 - RNA, 19 nt, Artificial Sequence
  Description of Artificial Sequence: Synthetic oligonucleotide
uuacccuaaguggaauauu

SEQ ID NO: 66659 - RNA, 19 nt, Artificial Sequence
  Description of Artificial Sequence: Synthetic oligonucleotide
uguuuagguugcgccggug

SEQ ID NO: 66660 - RNA, 19 nt, Artificial Sequence
  Description of Artificial Sequence: Synthetic oligonucleotide
gucggaaauguaggcauga

SEQ ID NO: 66661 - RNA, 19 nt, Artificial Sequence
  Description of Artificial Sequence: Synthetic oligonucleotide
guuuagguugcgccggugu

SEQ ID NO: 66662 - RNA, 19 nt, Artificial Sequence
  Description of Artificial Sequence: Synthetic oligonucleotide
aaggcaugucuagaucaua

SEQ ID NO: 66663 - RNA, 19 nt, Artificial Sequence
  Description of Artificial Sequence: Synthetic oligonucleotide
cauuacccuaaguggaaua

SEQ ID NO: 66664 - RNA, 19 nt, Artificial Sequence
  Description of Artificial Sequence: Synthetic oligonucleotide
agcauuacccuaaguggaa

SEQ ID NO: 66665 - RNA, 19 nt, Artificial Sequence
  Description of Artificial Sequence: Synthetic oligonucleotide
cugauaauuuccccuuugu

SEQ ID NO: 66666 - RNA, 19 nt, Artificial Sequence
  Description of Artificial Sequence: Synthetic oligonucleotide
ucggaaauguaggcaugaa

SEQ ID NO: 66667 - RNA, 19 nt, Artificial Sequence
  Description of Artificial Sequence: Synthetic oligonucleotide
cggacccacaagauuaccg

SEQ ID NO: 66668 - RNA, 19 nt, Artificial Sequence
  Description of Artificial Sequence: Synthetic oligonucleotide
cauauagcgcguaugucuu

SEQ ID NO: 66669 - RNA, 19 nt, Artificial Sequence
  Description of Artificial Sequence: Synthetic oligonucleotide
uacaaacgccagugucgga

SEQ ID NO: 66670 - RNA, 19 nt, Artificial Sequence
  Description of Artificial Sequence: Synthetic oligonucleotide
cauccgcacauagagugca

SEQ ID NO: 66671 - RNA, 19 nt, Artificial Sequence
  Description of Artificial Sequence: Synthetic oligonucleotide
auagaguugcgaaguggau

SEQ ID NO: 66672 - RNA, 19 nt, Artificial Sequence
  Description of Artificial Sequence: Synthetic oligonucleotide
cugacccacaugauagcaa

SEQ ID NO: 66673 - RNA, 19 nt, Artificial Sequence
  Description of Artificial Sequence: Synthetic oligonucleotide
ggacaaaugaacaccggcu

SEQ ID NO: 66674 - RNA, 19 nt, Artificial Sequence
  Description of Artificial Sequence: Synthetic oligonucleotide
cagugauucucauguggaa

SEQ ID NO: 66675 - RNA, 19 nt, Artificial Sequence
  Description of Artificial Sequence: Synthetic oligonucleotide
cauaggacuauaagcucau

SEQ ID NO: 66676 - RNA, 19 nt, Artificial Sequence
  Description of Artificial Sequence: Synthetic oligonucleotide
cuauaacgccgauagguuu

SEQ ID NO: 66677 - RNA, 19 nt, Artificial Sequence
  Description of Artificial Sequence: Synthetic oligonucleotide
agccugguacagacgcaac

SEQ ID NO: 66678 - RNA, 19 nt, Artificial Sequence
  Description of Artificial Sequence: Synthetic oligonucleotide
gcuaacauccgcacauaga

SEQ ID NO: 66679 - RNA, 19 nt, Artificial Sequence
  Description of Artificial Sequence: Synthetic oligonucleotide
uccgcacauagagugcauu

SEQ ID NO: 66680 - RNA, 19 nt, Artificial Sequence
  Description of Artificial Sequence: Synthetic oligonucleotide
cagucaacguggucaacua

SEQ ID NO: 66681 - RNA, 19 nt, Artificial Sequence
  Description of Artificial Sequence: Synthetic oligonucleotide
gcucccauaagcgaaauuu

SEQ ID NO: 66682 - RNA, 19 nt, Artificial Sequence
  Description of Artificial Sequence: Synthetic oligonucleotide
uaacgccgauagguuuucc

SEQ ID NO: 66683 - RNA, 19 nt, Artificial Sequence
  Description of Artificial Sequence: Synthetic oligonucleotide
gagagccgcgugccuaaga

SEQ ID NO: 66684 - RNA, 19 nt, Artificial Sequence
  Description of Artificial Sequence: Synthetic oligonucleotide
acgcuucacugagucagcu

SEQ ID NO: 66685 - RNA, 19 nt, Artificial Sequence
  Description of Artificial Sequence: Synthetic oligonucleotide
gucaacguggucaacuauu

SEQ ID NO: 66686 - RNA, 19 nt, Artificial Sequence
  Description of Artificial Sequence: Synthetic oligonucleotide
agguugcgccgguguacag

SEQ ID NO: 66687 - RNA, 19 nt, Artificial Sequence
  Description of Artificial Sequence: Synthetic oligonucleotide
cgcucacacacacacacuc

SEQ ID NO: 66688 - RNA, 19 nt, Artificial Sequence
  Description of Artificial Sequence: Synthetic oligonucleotide
gcgcguaugucuugccaug

SEQ ID NO: 66689 - RNA, 19 nt, Artificial Sequence
  Description of Artificial Sequence: Synthetic oligonucleotide
gcucauuaauccuuugauu

SEQ ID NO: 66690 - RNA, 19 nt, Artificial Sequence
  Description of Artificial Sequence: Synthetic oligonucleotide
uaguuaccuaaggcauguc

SEQ ID NO: 66691 - RNA, 19 nt, Artificial Sequence
  Description of Artificial Sequence: Synthetic oligonucleotide
gcgaaauuuccuacuaaua

SEQ ID NO: 66692 - RNA, 19 nt, Artificial Sequence
  Description of Artificial Sequence: Synthetic oligonucleotide
ccaugcucccauaagcgaa

SEQ ID NO: 66693 - RNA, 19 nt, Artificial Sequence
  Description of Artificial Sequence: Synthetic oligonucleotide
cuacauggaauacccuaau

SEQ ID NO: 66694 - RNA, 19 nt, Artificial Sequence
  Description of Artificial Sequence: Synthetic oligonucleotide
uuguucaggugaggucauc

SEQ ID NO: 66695 - RNA, 19 nt, Artificial Sequence
  Description of Artificial Sequence: Synthetic oligonucleotide
cuucacugagucagcuacu

SEQ ID NO: 66696 - RNA, 19 nt, Artificial Sequence
  Description of Artificial Sequence: Synthetic oligonucleotide
gauuaccgagggagacaca

SEQ ID NO: 66697 - RNA, 19 nt, Artificial Sequence
  Description of Artificial Sequence: Synthetic oligonucleotide
ggagacgccuuuucagaua

SEQ ID NO: 66698 - RNA, 19 nt, Artificial Sequence
  Description of Artificial Sequence: Synthetic oligonucleotide
cuaugucgguaguuaccua

SEQ ID NO: 66699 - RNA, 19 nt, Artificial Sequence
  Description of Artificial Sequence: Synthetic oligonucleotide
agcuaucaggaagggcuuu

SEQ ID NO: 66700 - RNA, 19 nt, Artificial Sequence
  Description of Artificial Sequence: Synthetic oligonucleotide
auaggacuauaagcucauu

SEQ ID NO: 66701 - RNA, 19 nt, Artificial Sequence
  Description of Artificial Sequence: Synthetic oligonucleotide
ccggcuuuacagguuggag

SEQ ID NO: 66702 - RNA, 19 nt, Artificial Sequence
  Description of Artificial Sequence: Synthetic oligonucleotide
cagagcaguuaggacaacu

SEQ ID NO: 66703 - RNA, 19 nt, Artificial Sequence
  Description of Artificial Sequence: Synthetic oligonucleotide
ccgguguacagugauggca

SEQ ID NO: 66704 - RNA, 19 nt, Artificial Sequence
  Description of Artificial Sequence: Synthetic oligonucleotide
ccgaaauauugaauaauuu

SEQ ID NO: 66705 - RNA, 19 nt, Artificial Sequence
  Description of Artificial Sequence: Synthetic oligonucleotide
cugaaacgcuucacugagu

SEQ ID NO: 66706 - RNA, 19 nt, Artificial Sequence
  Description of Artificial Sequence: Synthetic oligonucleotide
ccucauagaguugcgaagu

SEQ ID NO: 66707 - RNA, 19 nt, Artificial Sequence
  Description of Artificial Sequence: Synthetic oligonucleotide
caccauacguagcucuaau

SEQ ID NO: 66708 - RNA, 19 nt, Artificial Sequence
  Description of Artificial Sequence: Synthetic oligonucleotide
guguuuagguugcgccggu

SEQ ID NO: 66709 - RNA, 19 nt, Artificial Sequence
  Description of Artificial Sequence: Synthetic oligonucleotide
ggagagagccgcgugccua

SEQ ID NO: 66710 - RNA, 19 nt, Artificial Sequence
  Description of Artificial Sequence: Synthetic oligonucleotide
ggguuuuguguacuagcuu

SEQ ID NO: 66711 - RNA, 19 nt, Artificial Sequence
  Description of Artificial Sequence: Synthetic oligonucleotide
gaguugcgaaguggauuua

SEQ ID NO: 66712 - RNA, 19 nt, Artificial Sequence
  Description of Artificial Sequence: Synthetic oligonucleotide
ccagucaacguggucaacu

SEQ ID NO: 66713 - RNA, 19 nt, Artificial Sequence
  Description of Artificial Sequence: Synthetic oligonucleotide
agaaggcgcuugaguacuu

SEQ ID NO: 66714 - RNA, 19 nt, Artificial Sequence
  Description of Artificial Sequence: Synthetic oligonucleotide
cgguaguuaccuaaggcau

SEQ ID NO: 66715 - RNA, 19 nt, Artificial Sequence
  Description of Artificial Sequence: Synthetic oligonucleotide
cgccgauagguuuuccaca

SEQ ID NO: 66716 - RNA, 19 nt, Artificial Sequence
  Description of Artificial Sequence: Synthetic oligonucleotide
cccguagcaucaauucaua

SEQ ID NO: 66717 - RNA, 19 nt, Artificial Sequence
  Description of Artificial Sequence: Synthetic oligonucleotide
cucugacauucugccuaca

SEQ ID NO: 66718 - RNA, 19 nt, Artificial Sequence
  Description of Artificial Sequence: Synthetic oligonucleotide
gguugcgccgguguacagu

SEQ ID NO: 66719 - RNA, 19 nt, Artificial Sequence
  Description of Artificial Sequence: Synthetic oligonucleotide
gcucacacacacacacucu

SEQ ID NO: 66720 - RNA, 19 nt, Artificial Sequence
  Description of Artificial Sequence: Synthetic oligonucleotide
gcuuuaugucuuggccuaa

SEQ ID NO: 66721 - RNA, 19 nt, Artificial Sequence
  Description of Artificial Sequence: Synthetic oligonucleotide
gcauuacccuaaguggaau

SEQ ID NO: 66722 - RNA, 19 nt, Artificial Sequence
  Description of Artificial Sequence: Synthetic oligonucleotide
gcgccgguguacagugaug

SEQ ID NO: 66723 - RNA, 19 nt, Artificial Sequence
  Description of Artificial Sequence: Synthetic oligonucleotide
gcguaugucuugccaugau

SEQ ID NO: 66724 - RNA, 19 nt, Artificial Sequence
  Description of Artificial Sequence: Synthetic oligonucleotide
cgcguaugucuugccauga

SEQ ID NO: 66725 - RNA, 19 nt, Artificial Sequence
  Description of Artificial Sequence: Synthetic oligonucleotide
gcacuucgucacaggugaa

SEQ ID NO: 66726 - RNA, 19 nt, Artificial Sequence
  Description of Artificial Sequence: Synthetic oligonucleotide
cuaguaguaauucauaggg

SEQ ID NO: 66727 - RNA, 19 nt, Artificial Sequence
  Description of Artificial Sequence: Synthetic oligonucleotide
uuaaauaauucacuccuag

SEQ ID NO: 66728 - RNA, 19 nt, Artificial Sequence
  Description of Artificial Sequence: Synthetic oligonucleotide
uguaguguagcacagaaaa

SEQ ID NO: 66729 - RNA, 19 nt, Artificial Sequence
  Description of Artificial Sequence: Synthetic oligonucleotide
aaauaauucacuccuagua

SEQ ID NO: 66730 - RNA, 19 nt, Artificial Sequence
  Description of Artificial Sequence: Synthetic oligonucleotide
auuaauacgugauugcacu

SEQ ID NO: 66731 - RNA, 19 nt, Artificial Sequence
  Description of Artificial Sequence: Synthetic oligonucleotide
aauuaauacgugauugcac

SEQ ID NO: 66732 - RNA, 19 nt, Artificial Sequence
  Description of Artificial Sequence: Synthetic oligonucleotide
uccucuauucgauagagcu

SEQ ID NO: 66733 - RNA, 19 nt, Artificial Sequence
  Description of Artificial Sequence: Synthetic oligonucleotide
uuugugaggccuuucaggc

SEQ ID NO: 66734 - RNA, 19 nt, Artificial Sequence
  Description of Artificial Sequence: Synthetic oligonucleotide
ucaauuaauacgugauugc

SEQ ID NO: 66735 - RNA, 19 nt, Artificial Sequence
  Description of Artificial Sequence: Synthetic oligonucleotide
agauaaugggcucacgguc

SEQ ID NO: 66736 - RNA, 19 nt, Artificial Sequence
  Description of Artificial Sequence: Synthetic oligonucleotide
uuucuuaacacuagagggu

SEQ ID NO: 66737 - RNA, 19 nt, Artificial Sequence
  Description of Artificial Sequence: Synthetic oligonucleotide
aaauagucuuccuuaacaa

SEQ ID NO: 66738 - RNA, 19 nt, Artificial Sequence
  Description of Artificial Sequence: Synthetic oligonucleotide
auugaacauggccauaauc

SEQ ID NO: 66739 - RNA, 19 nt, Artificial Sequence
  Description of Artificial Sequence: Synthetic oligonucleotide
aaaucaacucaagggaagg

SEQ ID NO: 66740 - RNA, 19 nt, Artificial Sequence
  Description of Artificial Sequence: Synthetic oligonucleotide
aacacuagaggguggcuuc

SEQ ID NO: 66741 - RNA, 19 nt, Artificial Sequence
  Description of Artificial Sequence: Synthetic oligonucleotide
gaaauugaacaucaccgug

SEQ ID NO: 66742 - RNA, 19 nt, Artificial Sequence
  Description of Artificial Sequence: Synthetic oligonucleotide
cauuguuucgcucuacagg

SEQ ID NO: 66743 - RNA, 19 nt, Artificial Sequence
  Description of Artificial Sequence: Synthetic oligonucleotide
uguauggcggguaagggga

SEQ ID NO: 66744 - RNA, 19 nt, Artificial Sequence
  Description of Artificial Sequence: Synthetic oligonucleotide
cacaaguuuucacaaaugc

SEQ ID NO: 66745 - RNA, 19 nt, Artificial Sequence
  Description of Artificial Sequence: Synthetic oligonucleotide
ggggcuaaaauacugaacc

SEQ ID NO: 66746 - RNA, 19 nt, Artificial Sequence
  Description of Artificial Sequence: Synthetic oligonucleotide
augcuuuucgcuuuggcug

SEQ ID NO: 66747 - RNA, 19 nt, Artificial Sequence
  Description of Artificial Sequence: Synthetic oligonucleotide
ugcauagggagauaccugc

SEQ ID NO: 66748 - RNA, 19 nt, Artificial Sequence
  Description of Artificial Sequence: Synthetic oligonucleotide
cucaagaacugaauagggg

SEQ ID NO: 66749 - RNA, 19 nt, Artificial Sequence
  Description of Artificial Sequence: Synthetic oligonucleotide
auaauucacuccuaguagu

SEQ ID NO: 66750 - RNA, 19 nt, Artificial Sequence
  Description of Artificial Sequence: Synthetic oligonucleotide
gauaccugcaacugugcag

SEQ ID NO: 66751 - RNA, 19 nt, Artificial Sequence
  Description of Artificial Sequence: Synthetic oligonucleotide
auagggagauaccugcaac

SEQ ID NO: 66752 - RNA, 19 nt, Artificial Sequence
  Description of Artificial Sequence: Synthetic oligonucleotide
acuuaucuaauuaaaauau

SEQ ID NO: 66753 - RNA, 19 nt, Artificial Sequence
  Description of Artificial Sequence: Synthetic oligonucleotide
aaauugaacaucaccgugu

SEQ ID NO: 66754 - RNA, 19 nt, Artificial Sequence
  Description of Artificial Sequence: Synthetic oligonucleotide
ugagguccuaugcaaauca

SEQ ID NO: 66755 - RNA, 19 nt, Artificial Sequence
  Description of Artificial Sequence: Synthetic oligonucleotide
caucuuagaauucauccug

SEQ ID NO: 66756 - RNA, 19 nt, Artificial Sequence
  Description of Artificial Sequence: Synthetic oligonucleotide
aagagaaugcuuuucgcuu

SEQ ID NO: 66757 - RNA, 19 nt, Artificial Sequence
  Description of Artificial Sequence: Synthetic oligonucleotide
uuaugggaagauuugugcu

SEQ ID NO: 66758 - RNA, 19 nt, Artificial Sequence
  Description of Artificial Sequence: Synthetic oligonucleotide
uugcuugucguccuuucgg

SEQ ID NO: 66759 - RNA, 19 nt, Artificial Sequence
  Description of Artificial Sequence: Synthetic oligonucleotide
agaaauugaacaucaccgu

SEQ ID NO: 66760 - RNA, 19 nt, Artificial Sequence
  Description of Artificial Sequence: Synthetic oligonucleotide
uuaucgucgggaaaaucug

SEQ ID NO: 66761 - RNA, 19 nt, Artificial Sequence
  Description of Artificial Sequence: Synthetic oligonucleotide
cucguaacaccaaggaccg

SEQ ID NO: 66762 - RNA, 19 nt, Artificial Sequence
  Description of Artificial Sequence: Synthetic oligonucleotide
uuuuacuagugcuuuuaga

SEQ ID NO: 66763 - RNA, 19 nt, Artificial Sequence
  Description of Artificial Sequence: Synthetic oligonucleotide
aauacgugauugcacuccu

SEQ ID NO: 66764 - RNA, 19 nt, Artificial Sequence
  Description of Artificial Sequence: Synthetic oligonucleotide
ucuccuuaugggaagauuu

SEQ ID NO: 66765 - RNA, 19 nt, Artificial Sequence
  Description of Artificial Sequence: Synthetic oligonucleotide
uuguauauggugcuggcuu

SEQ ID NO: 66766 - RNA, 19 nt, Artificial Sequence
  Description of Artificial Sequence: Synthetic oligonucleotide
ugauuucucuuuacccagg

SEQ ID NO: 66767 - RNA, 19 nt, Artificial Sequence
  Description of Artificial Sequence: Synthetic oligonucleotide
gauggacaaaucugugucc

SEQ ID NO: 66768 - RNA, 19 nt, Artificial Sequence
  Description of Artificial Sequence: Synthetic oligonucleotide
ggaacuaaaucauacacaa

SEQ ID NO: 66769 - RNA, 19 nt, Artificial Sequence
  Description of Artificial Sequence: Synthetic oligonucleotide
uacgugauugcacuccucu

SEQ ID NO: 66770 - RNA, 19 nt, Artificial Sequence
  Description of Artificial Sequence: Synthetic oligonucleotide
caacacaucgguagggacc

SEQ ID NO: 66771 - RNA, 19 nt, Artificial Sequence
  Description of Artificial Sequence: Synthetic oligonucleotide
acuagaggguggcuucucc

SEQ ID NO: 66772 - RNA, 19 nt, Artificial Sequence
  Description of Artificial Sequence: Synthetic oligonucleotide
aucucgaggugguuuggcc

SEQ ID NO: 66773 - RNA, 19 nt, Artificial Sequence
  Description of Artificial Sequence: Synthetic oligonucleotide
ccaguaaaccuuaaaacag

SEQ ID NO: 66774 - RNA, 19 nt, Artificial Sequence
  Description of Artificial Sequence: Synthetic oligonucleotide
uguuguuuguuagcaggcg

SEQ ID NO: 66775 - RNA, 19 nt, Artificial Sequence
  Description of Artificial Sequence: Synthetic oligonucleotide
ccagauuccaccuccaagg

SEQ ID NO: 66776 - RNA, 19 nt, Artificial Sequence
  Description of Artificial Sequence: Synthetic oligonucleotide
ucgguagggaccuuucgag

SEQ ID NO: 66777 - RNA, 19 nt, Artificial Sequence
  Description of Artificial Sequence: Synthetic oligonucleotide
uguuucgcucuacaggaac

SEQ ID NO: 66778 - RNA, 19 nt, Artificial Sequence
  Description of Artificial Sequence: Synthetic oligonucleotide
uguguuuccccauggugug

SEQ ID NO: 66779 - RNA, 19 nt, Artificial Sequence
  Description of Artificial Sequence: Synthetic oligonucleotide
aauacaccugcaucuuaga

SEQ ID NO: 66780 - RNA, 19 nt, Artificial Sequence
  Description of Artificial Sequence: Synthetic oligonucleotide
uccggaacuguucuucuca

SEQ ID NO: 66781 - RNA, 19 nt, Artificial Sequence
  Description of Artificial Sequence: Synthetic oligonucleotide
aacacaucgguagggaccu

SEQ ID NO: 66782 - RNA, 19 nt, Artificial Sequence
  Description of Artificial Sequence: Synthetic oligonucleotide
ugaucagguguacaccucu

SEQ ID NO: 66783 - RNA, 19 nt, Artificial Sequence
  Description of Artificial Sequence: Synthetic oligonucleotide
uccucuacuuuagggagcg

SEQ ID NO: 66784 - RNA, 19 nt, Artificial Sequence
  Description of Artificial Sequence: Synthetic oligonucleotide
gacuguauggcggguaagg

SEQ ID NO: 66785 - RNA, 19 nt, Artificial Sequence
  Description of Artificial Sequence: Synthetic oligonucleotide
ucgucggacaucucgaggu

SEQ ID NO: 66786 - RNA, 19 nt, Artificial Sequence
  Description of Artificial Sequence: Synthetic oligonucleotide
uucgucggacaucucgagg

SEQ ID NO: 66787 - RNA, 19 nt, Artificial Sequence
  Description of Artificial Sequence: Synthetic oligonucleotide
aaaggcgcaaugggaaguc

SEQ ID NO: 66788 - RNA, 19 nt, Artificial Sequence
  Description of Artificial Sequence: Synthetic oligonucleotide
uagggagcgaggcugguga

SEQ ID NO: 66789 - RNA, 19 nt, Artificial Sequence
  Description of Artificial Sequence: Synthetic oligonucleotide
cuaagcacuccaaagggga

SEQ ID NO: 66790 - RNA, 19 nt, Artificial Sequence
  Description of Artificial Sequence: Synthetic oligonucleotide
gcuaagugggcacugcugg

SEQ ID NO: 66791 - RNA, 19 nt, Artificial Sequence
  Description of Artificial Sequence: Synthetic oligonucleotide
uuuucgcuuuggcuggaag

SEQ ID NO: 66792 - RNA, 19 nt, Artificial Sequence
  Description of Artificial Sequence: Synthetic oligonucleotide
ugugcagaccggauguugu

SEQ ID NO: 66793 - RNA, 19 nt, Artificial Sequence
  Description of Artificial Sequence: Synthetic oligonucleotide
gcuaaucugacauuuguga

SEQ ID NO: 66794 - RNA, 19 nt, Artificial Sequence
  Description of Artificial Sequence: Synthetic oligonucleotide
uaauucacuccuaguagua

SEQ ID NO: 66795 - RNA, 19 nt, Artificial Sequence
  Description of Artificial Sequence: Synthetic oligonucleotide
gaagagaaugcuuuucgcu

SEQ ID NO: 66796 - RNA, 19 nt, Artificial Sequence
  Description of Artificial Sequence: Synthetic oligonucleotide
ucggcuuauuggcaugugc

SEQ ID NO: 66797 - RNA, 19 nt, Artificial Sequence
  Description of Artificial Sequence: Synthetic oligonucleotide
auugcacuccucuauucga

SEQ ID NO: 66798 - RNA, 19 nt, Artificial Sequence
  Description of Artificial Sequence: Synthetic oligonucleotide
auggugcauagggagauac

SEQ ID NO: 66799 - RNA, 19 nt, Artificial Sequence
  Description of Artificial Sequence: Synthetic oligonucleotide
uccaaguuaguucuuccuu

SEQ ID NO: 66800 - RNA, 19 nt, Artificial Sequence
  Description of Artificial Sequence: Synthetic oligonucleotide
uccuuaaagucucggugac

SEQ ID NO: 66801 - RNA, 19 nt, Artificial Sequence
  Description of Artificial Sequence: Synthetic oligonucleotide
ggacguuucuccuuauggg

SEQ ID NO: 66802 - RNA, 19 nt, Artificial Sequence
  Description of Artificial Sequence: Synthetic oligonucleotide
ucguccuuucggcuuauug

SEQ ID NO: 66803 - RNA, 19 nt, Artificial Sequence
  Description of Artificial Sequence: Synthetic oligonucleotide
agagauuaaagugcuggcu

SEQ ID NO: 66804 - RNA, 19 nt, Artificial Sequence
  Description of Artificial Sequence: Synthetic oligonucleotide
ggggaacuaaaucauacac

SEQ ID NO: 66805 - RNA, 19 nt, Artificial Sequence
  Description of Artificial Sequence: Synthetic oligonucleotide
aauaugguggugacacucu

SEQ ID NO: 66806 - RNA, 19 nt, Artificial Sequence
  Description of Artificial Sequence: Synthetic oligonucleotide
aucucgagggcgcuuuccg

SEQ ID NO: 66807 - RNA, 19 nt, Artificial Sequence
  Description of Artificial Sequence: Synthetic oligonucleotide
ggccuaagcacuccaaagg

SEQ ID NO: 66808 - RNA, 19 nt, Artificial Sequence
  Description of Artificial Sequence: Synthetic oligonucleotide
cuuuagggagcgaggcugg

SEQ ID NO: 66809 - RNA, 19 nt, Artificial Sequence
  Description of Artificial Sequence: Synthetic oligonucleotide
cucuauucgauagagcuga

SEQ ID NO: 66810 - RNA, 19 nt, Artificial Sequence
  Description of Artificial Sequence: Synthetic oligonucleotide
uuaauacgugauugcacuc

SEQ ID NO: 66811 - RNA, 19 nt, Artificial Sequence
  Description of Artificial Sequence: Synthetic oligonucleotide
cuaugcaaaucaacccaag

SEQ ID NO: 66812 - RNA, 19 nt, Artificial Sequence
  Description of Artificial Sequence: Synthetic oligonucleotide
ucucgaggugguuuggcca

SEQ ID NO: 66813 - RNA, 19 nt, Artificial Sequence
  Description of Artificial Sequence: Synthetic oligonucleotide
guugcugguaggagcaugg

SEQ ID NO: 66814 - RNA, 19 nt, Artificial Sequence
  Description of Artificial Sequence: Synthetic oligonucleotide
aaucaacucaagggaagga

SEQ ID NO: 66815 - RNA, 19 nt, Artificial Sequence
  Description of Artificial Sequence: Synthetic oligonucleotide
cucuacuuuagggagcgag

SEQ ID NO: 66816 - RNA, 19 nt, Artificial Sequence
  Description of Artificial Sequence: Synthetic oligonucleotide
acuccucuauucgauagag

SEQ ID NO: 66817 - RNA, 19 nt, Artificial Sequence
  Description of Artificial Sequence: Synthetic oligonucleotide
acgguaguuggacuguaug

SEQ ID NO: 66818 - RNA, 19 nt, Artificial Sequence
  Description of Artificial Sequence: Synthetic oligonucleotide
aagucccauuuaucgucgg

SEQ ID NO: 66819 - RNA, 19 nt, Artificial Sequence
  Description of Artificial Sequence: Synthetic oligonucleotide
ugcuugucguccuuucggc

SEQ ID NO: 66820 - RNA, 19 nt, Artificial Sequence
  Description of Artificial Sequence: Synthetic oligonucleotide
uaucgucgggaaaaucugu

SEQ ID NO: 66821 - RNA, 19 nt, Artificial Sequence
  Description of Artificial Sequence: Synthetic oligonucleotide
agucccauuuaucgucggg

SEQ ID NO: 66822 - RNA, 19 nt, Artificial Sequence
  Description of Artificial Sequence: Synthetic oligonucleotide
gaacuuuccauaacugauc

SEQ ID NO: 66823 - RNA, 19 nt, Artificial Sequence
  Description of Artificial Sequence: Synthetic oligonucleotide
gugauuuguauguagugua

SEQ ID NO: 66824 - RNA, 19 nt, Artificial Sequence
  Description of Artificial Sequence: Synthetic oligonucleotide
aagggcuaaucugacauuu

SEQ ID NO: 66825 - RNA, 19 nt, Artificial Sequence
  Description of Artificial Sequence: Synthetic oligonucleotide
cacccggauacacugcugg

SEQ ID NO: 66826 - RNA, 19 nt, Artificial Sequence
  Description of Artificial Sequence: Synthetic oligonucleotide
aauucacuccuaguaguaa

SEQ ID NO: 66827 - RNA, 19 nt, Artificial Sequence
  Description of Artificial Sequence: Synthetic oligonucleotide
gauagcuucagcucccgcu

SEQ ID NO: 66828 - RNA, 19 nt, Artificial Sequence
  Description of Artificial Sequence: Synthetic oligonucleotide
aggggaacuaaaucauaca

SEQ ID NO: 66829 - RNA, 19 nt, Artificial Sequence
  Description of Artificial Sequence: Synthetic oligonucleotide
caauuaauacgugauugca

SEQ ID NO: 66830 - RNA, 19 nt, Artificial Sequence
  Description of Artificial Sequence: Synthetic oligonucleotide
gguaguuggacuguauggc

SEQ ID NO: 66831 - RNA, 19 nt, Artificial Sequence
  Description of Artificial Sequence: Synthetic oligonucleotide
agauuaaagugcuggcuuu

SEQ ID NO: 66832 - RNA, 19 nt, Artificial Sequence
  Description of Artificial Sequence: Synthetic oligonucleotide
cuccuuaaagucucgguga

SEQ ID NO: 66833 - RNA, 19 nt, Artificial Sequence
  Description of Artificial Sequence: Synthetic oligonucleotide
gucaacaccgccuuggagu

SEQ ID NO: 66834 - RNA, 19 nt, Artificial Sequence
  Description of Artificial Sequence: Synthetic oligonucleotide
auuguguauguuggugagg

SEQ ID NO: 66835 - RNA, 19 nt, Artificial Sequence
  Description of Artificial Sequence: Synthetic oligonucleotide
aaaugcgaccagaaauuga

SEQ ID NO: 66836 - RNA, 19 nt, Artificial Sequence
  Description of Artificial Sequence: Synthetic oligonucleotide
agauagagucaauauuguu

SEQ ID NO: 66837 - RNA, 19 nt, Artificial Sequence
  Description of Artificial Sequence: Synthetic oligonucleotide
uucacuccuaguaguaauu

SEQ ID NO: 66838 - RNA, 19 nt, Artificial Sequence
  Description of Artificial Sequence: Synthetic oligonucleotide
auuuaucgucgggaaaauc

SEQ ID NO: 66839 - RNA, 19 nt, Artificial Sequence
  Description of Artificial Sequence: Synthetic oligonucleotide
ugcuggugcaaggucauca

SEQ ID NO: 66840 - RNA, 19 nt, Artificial Sequence
  Description of Artificial Sequence: Synthetic oligonucleotide
gaauucauccugcguccug

SEQ ID NO: 66841 - RNA, 19 nt, Artificial Sequence
  Description of Artificial Sequence: Synthetic oligonucleotide
gagaaccccucguaacacc

SEQ ID NO: 66842 - RNA, 19 nt, Artificial Sequence
  Description of Artificial Sequence: Synthetic oligonucleotide
uccuuaugggaagauuugu

SEQ ID NO: 66843 - RNA, 19 nt, Artificial Sequence
  Description of Artificial Sequence: Synthetic oligonucleotide
aaagggcuaaucugacauu

SEQ ID NO: 66844 - RNA, 19 nt, Artificial Sequence
  Description of Artificial Sequence: Synthetic oligonucleotide
cuauucuuaccaaucauau

SEQ ID NO: 66845 - RNA, 19 nt, Artificial Sequence
  Description of Artificial Sequence: Synthetic oligonucleotide
auacaccugcaucuuagaa

SEQ ID NO: 66846 - RNA, 19 nt, Artificial Sequence
  Description of Artificial Sequence: Synthetic oligonucleotide
uggggagauaggcacacuu

SEQ ID NO: 66847 - RNA, 19 nt, Artificial Sequence
  Description of Artificial Sequence: Synthetic oligonucleotide
uuguuagcaggcgcagccg

SEQ ID NO: 66848 - RNA, 19 nt, Artificial Sequence
  Description of Artificial Sequence: Synthetic oligonucleotide
uuucgcucuacaggaacca

SEQ ID NO: 66849 - RNA, 19 nt, Artificial Sequence
  Description of Artificial Sequence: Synthetic oligonucleotide
acuagugcuuuuagaguuc

SEQ ID NO: 66850 - RNA, 19 nt, Artificial Sequence
  Description of Artificial Sequence: Synthetic oligonucleotide
cagguuguugggaacuuuc

SEQ ID NO: 66851 - RNA, 19 nt, Artificial Sequence
  Description of Artificial Sequence: Synthetic oligonucleotide
ggagauaccugcaacugug

SEQ ID NO: 66852 - RNA, 19 nt, Artificial Sequence
  Description of Artificial Sequence: Synthetic oligonucleotide
gagauaaugggcucacggu

SEQ ID NO: 66853 - RNA, 19 nt, Artificial Sequence
  Description of Artificial Sequence: Synthetic oligonucleotide
uggugcauagggagauacc

SEQ ID NO: 66854 - RNA, 19 nt, Artificial Sequence
  Description of Artificial Sequence: Synthetic oligonucleotide
aucaccgugugucugcuuu

SEQ ID NO: 66855 - RNA, 19 nt, Artificial Sequence
  Description of Artificial Sequence: Synthetic oligonucleotide
uggacuguauggcggguaa

SEQ ID NO: 66856 - RNA, 19 nt, Artificial Sequence
  Description of Artificial Sequence: Synthetic oligonucleotide
caaaugcgaccagaaauug

SEQ ID NO: 66857 - RNA, 19 nt, Artificial Sequence
  Description of Artificial Sequence: Synthetic oligonucleotide
ucggacaucucgagguggu

SEQ ID NO: 66858 - RNA, 19 nt, Artificial Sequence
  Description of Artificial Sequence: Synthetic oligonucleotide
guuucgcucuacaggaacc

SEQ ID NO: 66859 - RNA, 19 nt, Artificial Sequence
  Description of Artificial Sequence: Synthetic oligonucleotide
cuuccccuggugcucaccc

SEQ ID NO: 66860 - RNA, 19 nt, Artificial Sequence
  Description of Artificial Sequence: Synthetic oligonucleotide
ugagaaccccucguaacac

SEQ ID NO: 66861 - RNA, 19 nt, Artificial Sequence
  Description of Artificial Sequence: Synthetic oligonucleotide
agggagauaccugcaacug

SEQ ID NO: 66862 - RNA, 19 nt, Artificial Sequence
  Description of Artificial Sequence: Synthetic oligonucleotide
uuauuggcaugugcagacc

SEQ ID NO: 66863 - RNA, 19 nt, Artificial Sequence
  Description of Artificial Sequence: Synthetic oligonucleotide
ggcuuauuggcaugugcag

SEQ ID NO: 66864 - RNA, 19 nt, Artificial Sequence
  Description of Artificial Sequence: Synthetic oligonucleotide
caucgguagggaccuuucg

SEQ ID NO: 66865 - RNA, 19 nt, Artificial Sequence
  Description of Artificial Sequence: Synthetic oligonucleotide
gcuauuguguauguuggug

SEQ ID NO: 66866 - RNA, 19 nt, Artificial Sequence
  Description of Artificial Sequence: Synthetic oligonucleotide
agacacucugaaggggugg

SEQ ID NO: 66867 - RNA, 19 nt, Artificial Sequence
  Description of Artificial Sequence: Synthetic oligonucleotide
ucacuccuaguaguaauuc

SEQ ID NO: 66868 - RNA, 19 nt, Artificial Sequence
  Description of Artificial Sequence: Synthetic oligonucleotide
cguccuuucggcuuauugg

SEQ ID NO: 66869 - RNA, 19 nt, Artificial Sequence
  Description of Artificial Sequence: Synthetic oligonucleotide
acagacacucugaaggggu

SEQ ID NO: 66870 - RNA, 19 nt, Artificial Sequence
  Description of Artificial Sequence: Synthetic oligonucleotide
ggagcuacaaaagcccugc

SEQ ID NO: 66871 - RNA, 19 nt, Artificial Sequence
  Description of Artificial Sequence: Synthetic oligonucleotide
ggaaaggcgcaaugggaag

SEQ ID NO: 66872 - RNA, 19 nt, Artificial Sequence
  Description of Artificial Sequence: Synthetic oligonucleotide
cugagaaccccucguaaca

SEQ ID NO: 66873 - RNA, 19 nt, Artificial Sequence
  Description of Artificial Sequence: Synthetic oligonucleotide
ugacaccucuuccuuucgu

SEQ ID NO: 66874 - RNA, 19 nt, Artificial Sequence
  Description of Artificial Sequence: Synthetic oligonucleotide
cauagggaacaagagauua

SEQ ID NO: 66875 - RNA, 19 nt, Artificial Sequence
  Description of Artificial Sequence: Synthetic oligonucleotide
cuccucuauucgauagagc

SEQ ID NO: 66876 - RNA, 19 nt, Artificial Sequence
  Description of Artificial Sequence: Synthetic oligonucleotide
gaugucuggcaacgcuggc

SEQ ID NO: 66877 - RNA, 19 nt, Artificial Sequence
  Description of Artificial Sequence: Synthetic oligonucleotide
acgcuggcaacacaucggu

SEQ ID NO: 66878 - RNA, 19 nt, Artificial Sequence
  Description of Artificial Sequence: Synthetic oligonucleotide
uggcuuaauccugacuuuc

SEQ ID NO: 66879 - RNA, 19 nt, Artificial Sequence
  Description of Artificial Sequence: Synthetic oligonucleotide
ccuuaugggaagauuugug

SEQ ID NO: 66880 - RNA, 19 nt, Artificial Sequence
  Description of Artificial Sequence: Synthetic oligonucleotide
gaacugaauaggggacucc

SEQ ID NO: 66881 - RNA, 19 nt, Artificial Sequence
  Description of Artificial Sequence: Synthetic oligonucleotide
gggugcuuuccuuucaaac

SEQ ID NO: 66882 - RNA, 19 nt, Artificial Sequence
  Description of Artificial Sequence: Synthetic oligonucleotide
guaguguagcacagaaaac

SEQ ID NO: 66883 - RNA, 19 nt, Artificial Sequence
  Description of Artificial Sequence: Synthetic oligonucleotide
auaggcacacuuggaaccu

SEQ ID NO: 66884 - RNA, 19 nt, Artificial Sequence
  Description of Artificial Sequence: Synthetic oligonucleotide
uuaacacuagaggguggcu

SEQ ID NO: 66885 - RNA, 19 nt, Artificial Sequence
  Description of Artificial Sequence: Synthetic oligonucleotide
uucgcucuacaggaaccag

SEQ ID NO: 66886 - RNA, 19 nt, Artificial Sequence
  Description of Artificial Sequence: Synthetic oligonucleotide
uccuccgguuccaaacuuc

SEQ ID NO: 66887 - RNA, 19 nt, Artificial Sequence
  Description of Artificial Sequence: Synthetic oligonucleotide
auaggggacuccucccacu

SEQ ID NO: 66888 - RNA, 19 nt, Artificial Sequence
  Description of Artificial Sequence: Synthetic oligonucleotide
uuucgucccuccucucgug

SEQ ID NO: 66889 - RNA, 19 nt, Artificial Sequence
  Description of Artificial Sequence: Synthetic oligonucleotide
cuccucucgugacugugag

SEQ ID NO: 66890 - RNA, 19 nt, Artificial Sequence
  Description of Artificial Sequence: Synthetic oligonucleotide
cugaggucgucaacaccgc

SEQ ID NO: 66891 - RNA, 19 nt, Artificial Sequence
  Description of Artificial Sequence: Synthetic oligonucleotide
gggaacuaaaucauacaca

SEQ ID NO: 66892 - RNA, 19 nt, Artificial Sequence
  Description of Artificial Sequence: Synthetic oligonucleotide
uugucguccuuucggcuua

SEQ ID NO: 66893 - RNA, 19 nt, Artificial Sequence
  Description of Artificial Sequence: Synthetic oligonucleotide
acgguccuccucuggugac

SEQ ID NO: 66894 - RNA, 19 nt, Artificial Sequence
  Description of Artificial Sequence: Synthetic oligonucleotide
agaaccccucguaacacca

SEQ ID NO: 66895 - RNA, 19 nt, Artificial Sequence
  Description of Artificial Sequence: Synthetic oligonucleotide
uuguuucgcucuacaggaa

SEQ ID NO: 66896 - RNA, 19 nt, Artificial Sequence
  Description of Artificial Sequence: Synthetic oligonucleotide
uaggccgucugcacuugac

SEQ ID NO: 66897 - RNA, 19 nt, Artificial Sequence
  Description of Artificial Sequence: Synthetic oligonucleotide
cgguaguuggacuguaugg

SEQ ID NO: 66898 - RNA, 19 nt, Artificial Sequence
  Description of Artificial Sequence: Synthetic oligonucleotide
ccggauacacugcuggugc

SEQ ID NO: 66899 - RNA, 19 nt, Artificial Sequence
  Description of Artificial Sequence: Synthetic oligonucleotide
cccgccaggauucauacuc

SEQ ID NO: 66900 - RNA, 19 nt, Artificial Sequence
  Description of Artificial Sequence: Synthetic oligonucleotide
cugaucagguguacaccuc

SEQ ID NO: 66901 - RNA, 19 nt, Artificial Sequence
  Description of Artificial Sequence: Synthetic oligonucleotide
augugcagaccggauguug

SEQ ID NO: 66902 - RNA, 19 nt, Artificial Sequence
  Description of Artificial Sequence: Synthetic oligonucleotide
gaccggauguuguuuguua

SEQ ID NO: 66903 - RNA, 19 nt, Artificial Sequence
  Description of Artificial Sequence: Synthetic oligonucleotide
aacaccgccuuggagucuu

SEQ ID NO: 66904 - RNA, 19 nt, Artificial Sequence
  Description of Artificial Sequence: Synthetic oligonucleotide
cuuucgaggccugauagcu

SEQ ID NO: 66905 - RNA, 19 nt, Artificial Sequence
  Description of Artificial Sequence: Synthetic oligonucleotide
gcagaccggauguuguuug

SEQ ID NO: 66906 - RNA, 19 nt, Artificial Sequence
  Description of Artificial Sequence: Synthetic oligonucleotide
ccugagaaccccucguaac

SEQ ID NO: 66907 - RNA, 19 nt, Artificial Sequence
  Description of Artificial Sequence: Synthetic oligonucleotide
uccucucgugacugugagc

SEQ ID NO: 66908 - RNA, 19 nt, Artificial Sequence
  Description of Artificial Sequence: Synthetic oligonucleotide
cuggugaccuguagugguc

SEQ ID NO: 66909 - RNA, 19 nt, Artificial Sequence
  Description of Artificial Sequence: Synthetic oligonucleotide
gcuggcuuaauccugacuu

SEQ ID NO: 66910 - RNA, 19 nt, Artificial Sequence
  Description of Artificial Sequence: Synthetic oligonucleotide
gugagauaaugggcucacg

SEQ ID NO: 66911 - RNA, 19 nt, Artificial Sequence
  Description of Artificial Sequence: Synthetic oligonucleotide
aggggacuccucccacuuc

SEQ ID NO: 66912 - RNA, 19 nt, Artificial Sequence
  Description of Artificial Sequence: Synthetic oligonucleotide
uauggcggguaaggggaug

SEQ ID NO: 66913 - RNA, 19 nt, Artificial Sequence
  Description of Artificial Sequence: Synthetic oligonucleotide
caucucgaggugguuuggc

SEQ ID NO: 66914 - RNA, 19 nt, Artificial Sequence
  Description of Artificial Sequence: Synthetic oligonucleotide
gggcuaaaauacugaacca

SEQ ID NO: 66915 - RNA, 19 nt, Artificial Sequence
  Description of Artificial Sequence: Synthetic oligonucleotide
caacccaagguucuguccu

SEQ ID NO: 66916 - RNA, 19 nt, Artificial Sequence
  Description of Artificial Sequence: Synthetic oligonucleotide
ccuuggagucuucauuagc

SEQ ID NO: 66917 - RNA, 19 nt, Artificial Sequence
  Description of Artificial Sequence: Synthetic oligonucleotide
auccugcguccugugaauc

SEQ ID NO: 66918 - RNA, 19 nt, Artificial Sequence
  Description of Artificial Sequence: Synthetic oligonucleotide
ccgcccugagucuaggccg

SEQ ID NO: 66919 - RNA, 19 nt, Artificial Sequence
  Description of Artificial Sequence: Synthetic oligonucleotide
uauauggugcuggcuuaau

SEQ ID NO: 66920 - RNA, 19 nt, Artificial Sequence
  Description of Artificial Sequence: Synthetic oligonucleotide
ucauucaccuuggguaauu

SEQ ID NO: 66921 - RNA, 19 nt, Artificial Sequence
  Description of Artificial Sequence: Synthetic oligonucleotide
agucucggugacagugaac

SEQ ID NO: 66922 - RNA, 19 nt, Artificial Sequence
  Description of Artificial Sequence: Synthetic oligonucleotide
cugcaacugugcaggucag

SEQ ID NO: 66923 - RNA, 19 nt, Artificial Sequence
  Description of Artificial Sequence: Synthetic oligonucleotide
gcaacacaucgguagggac

SEQ ID NO: 66924 - RNA, 19 nt, Artificial Sequence
  Description of Artificial Sequence: Synthetic oligonucleotide
auacgugauugcacuccuc

SEQ ID NO: 66925 - RNA, 19 nt, Artificial Sequence
  Description of Artificial Sequence: Synthetic oligonucleotide
gaaaggcgcaaugggaagu

SEQ ID NO: 66926 - RNA, 19 nt, Artificial Sequence
  Description of Artificial Sequence: Synthetic oligonucleotide
ggugcauagggagauaccu

SEQ ID NO: 66927 - RNA, 19 nt, Artificial Sequence
  Description of Artificial Sequence: Synthetic oligonucleotide
gguuguagagccgguuggc

SEQ ID NO: 66928 - RNA, 19 nt, Artificial Sequence
  Description of Artificial Sequence: Synthetic oligonucleotide
uucggcuuauuggcaugug

SEQ ID NO: 66929 - RNA, 19 nt, Artificial Sequence
  Description of Artificial Sequence: Synthetic oligonucleotide
aaggaccgcaaagggcuaa

SEQ ID NO: 66930 - RNA, 19 nt, Artificial Sequence
  Description of Artificial Sequence: Synthetic oligonucleotide
agaaccacauuuggagcua

SEQ ID NO: 66931 - RNA, 19 nt, Artificial Sequence
  Description of Artificial Sequence: Synthetic oligonucleotide
agggcuaaucugacauuug

SEQ ID NO: 66932 - RNA, 19 nt, Artificial Sequence
  Description of Artificial Sequence: Synthetic oligonucleotide
ccuuucgaggccugauagc

SEQ ID NO: 66933 - RNA, 19 nt, Artificial Sequence
  Description of Artificial Sequence: Synthetic oligonucleotide
aauuuccaacagagcacua

SEQ ID NO: 66934 - RNA, 19 nt, Artificial Sequence
  Description of Artificial Sequence: Synthetic oligonucleotide
ccauuuaucgucgggaaaa

SEQ ID NO: 66935 - RNA, 19 nt, Artificial Sequence
  Description of Artificial Sequence: Synthetic oligonucleotide
gcuuauuggcaugugcaga

SEQ ID NO: 66936 - RNA, 19 nt, Artificial Sequence
  Description of Artificial Sequence: Synthetic oligonucleotide
gauugaacauggccauaau

SEQ ID NO: 66937 - RNA, 19 nt, Artificial Sequence
  Description of Artificial Sequence: Synthetic oligonucleotide
gaggucgucaacaccgccu

SEQ ID NO: 66938 - RNA, 19 nt, Artificial Sequence
  Description of Artificial Sequence: Synthetic oligonucleotide
gagcuaagugggcacugcu

SEQ ID NO: 66939 - RNA, 19 nt, Artificial Sequence
  Description of Artificial Sequence: Synthetic oligonucleotide
cacuccucuauucgauaga

SEQ ID NO: 66940 - RNA, 19 nt, Artificial Sequence
  Description of Artificial Sequence: Synthetic oligonucleotide
guagagccgguuggcuucc

SEQ ID NO: 66941 - RNA, 19 nt, Artificial Sequence
  Description of Artificial Sequence: Synthetic oligonucleotide
guauauggugcuggcuuaa

SEQ ID NO: 66942 - RNA, 19 nt, Artificial Sequence
  Description of Artificial Sequence: Synthetic oligonucleotide
gggcuaaucugacauuugu

SEQ ID NO: 66943 - RNA, 19 nt, Artificial Sequence
  Description of Artificial Sequence: Synthetic oligonucleotide
gcggguaaggggaugucug

SEQ ID NO: 66944 - RNA, 19 nt, Artificial Sequence
  Description of Artificial Sequence: Synthetic oligonucleotide
ggagcuaagugggcacugc

SEQ ID NO: 66945 - RNA, 19 nt, Artificial Sequence
  Description of Artificial Sequence: Synthetic oligonucleotide
cccucguaacaccaaggac

SEQ ID NO: 66946 - RNA, 19 nt, Artificial Sequence
  Description of Artificial Sequence: Synthetic oligonucleotide
uuccccacuugcucauguu

SEQ ID NO: 66947 - RNA, 19 nt, Artificial Sequence
  Description of Artificial Sequence: Synthetic oligonucleotide
gccgguuggcuucccaggc

SEQ ID NO: 66948 - RNA, 19 nt, Artificial Sequence
  Description of Artificial Sequence: Synthetic oligonucleotide
cuuucgucccuccucucgu

SEQ ID NO: 66949 - RNA, 19 nt, Artificial Sequence
  Description of Artificial Sequence: Synthetic oligonucleotide
cugaaggggugggagaucu

SEQ ID NO: 66950 - RNA, 19 nt, Artificial Sequence
  Description of Artificial Sequence: Synthetic oligonucleotide
ucccgccaggauucauacu

SEQ ID NO: 66951 - RNA, 19 nt, Artificial Sequence
  Description of Artificial Sequence: Synthetic oligonucleotide
gugauugcacuccucuauu

SEQ ID NO: 66952 - RNA, 19 nt, Artificial Sequence
  Description of Artificial Sequence: Synthetic oligonucleotide
cgguagggaccuuucgagg

SEQ ID NO: 66953 - RNA, 19 nt, Artificial Sequence
  Description of Artificial Sequence: Synthetic oligonucleotide
ucguaacaccaaggaccgc

SEQ ID NO: 66954 - RNA, 19 nt, Artificial Sequence
  Description of Artificial Sequence: Synthetic oligonucleotide
cggcuuauuggcaugugca

SEQ ID NO: 66955 - RNA, 19 nt, Artificial Sequence
  Description of Artificial Sequence: Synthetic oligonucleotide
ggacuguauggcggguaag

SEQ ID NO: 66956 - RNA, 19 nt, Artificial Sequence
  Description of Artificial Sequence: Synthetic oligonucleotide
cacagccgguuuccuagga

SEQ ID NO: 66957 - RNA, 19 nt, Artificial Sequence
  Description of Artificial Sequence: Synthetic oligonucleotide
gaaccccucguaacaccaa

SEQ ID NO: 66958 - RNA, 19 nt, Artificial Sequence
  Description of Artificial Sequence: Synthetic oligonucleotide
agggcgcuuuccggaacug

SEQ ID NO: 66959 - RNA, 19 nt, Artificial Sequence
  Description of Artificial Sequence: Synthetic oligonucleotide
ggucgucaacaccgccuug

SEQ ID NO: 66960 - RNA, 19 nt, Artificial Sequence
  Description of Artificial Sequence: Synthetic oligonucleotide
gcauagggagauaccugca

SEQ ID NO: 66961 - RNA, 19 nt, Artificial Sequence
  Description of Artificial Sequence: Synthetic oligonucleotide
cauuuaucgucgggaaaau

SEQ ID NO: 66962 - RNA, 19 nt, Artificial Sequence
  Description of Artificial Sequence: Synthetic oligonucleotide
gcaaaagacacgggucucu

SEQ ID NO: 66963 - RNA, 19 nt, Artificial Sequence
  Description of Artificial Sequence: Synthetic oligonucleotide
cauccugcguccugugaau

SEQ ID NO: 66964 - RNA, 19 nt, Artificial Sequence
  Description of Artificial Sequence: Synthetic oligonucleotide
cgucaacaccgccuuggag

SEQ ID NO: 66965 - RNA, 19 nt, Artificial Sequence
  Description of Artificial Sequence: Synthetic oligonucleotide
cagaccggauguuguuugu

SEQ ID NO: 66966 - RNA, 19 nt, Artificial Sequence
  Description of Artificial Sequence: Synthetic oligonucleotide
ugucguccuuucggcuuau

SEQ ID NO: 66967 - RNA, 19 nt, Artificial Sequence
  Description of Artificial Sequence: Synthetic oligonucleotide
gcuugucguccuuucggcu

SEQ ID NO: 66968 - RNA, 19 nt, Artificial Sequence
  Description of Artificial Sequence: Synthetic oligonucleotide
gcgcuuuccggaacuguuc

SEQ ID NO: 66969 - RNA, 19 nt, Artificial Sequence
  Description of Artificial Sequence: Synthetic oligonucleotide
cccauuuaucgucgggaaa

SEQ ID NO: 66970 - RNA, 19 nt, Artificial Sequence
  Description of Artificial Sequence: Synthetic oligonucleotide
caaaagacacgggucucuu

SEQ ID NO: 66971 - RNA, 19 nt, Artificial Sequence
  Description of Artificial Sequence: Synthetic oligonucleotide
gcuccuccgguuccaaacu

SEQ ID NO: 66972 - RNA, 19 nt, Artificial Sequence
  Description of Artificial Sequence: Synthetic oligonucleotide
ugccuucgucggacaucuc

SEQ ID NO: 66973 - RNA, 19 nt, Artificial Sequence
  Description of Artificial Sequence: Synthetic oligonucleotide
guuggacuguauggcgggu

SEQ ID NO: 66974 - RNA, 19 nt, Artificial Sequence
  Description of Artificial Sequence: Synthetic oligonucleotide
gugcagaccggauguuguu

SEQ ID NO: 66975 - RNA, 19 nt, Artificial Sequence
  Description of Artificial Sequence: Synthetic oligonucleotide
cugcuggugcaaggucauc

SEQ ID NO: 66976 - RNA, 19 nt, Artificial Sequence
  Description of Artificial Sequence: Synthetic oligonucleotide
ccucacuauucuuaccaau

SEQ ID NO: 66977 - RNA, 19 nt, Artificial Sequence
  Description of Artificial Sequence: Synthetic oligonucleotide
cgucggacaucucgaggug

SEQ ID NO: 66978 - RNA, 19 nt, Artificial Sequence
  Description of Artificial Sequence: Synthetic oligonucleotide
cucuucgccuguccccacu

SEQ ID NO: 66979 - RNA, 19 nt, Artificial Sequence
  Description of Artificial Sequence: Synthetic oligonucleotide
gcacccggauacacugcug

SEQ ID NO: 66980 - RNA, 19 nt, Artificial Sequence
  Description of Artificial Sequence: Synthetic oligonucleotide
cauucaccuuggguaauuu

SEQ ID NO: 66981 - RNA, 19 nt, Artificial Sequence
  Description of Artificial Sequence: Synthetic oligonucleotide
caccgugugucugcuuugu

SEQ ID NO: 66982 - RNA, 19 nt, Artificial Sequence
  Description of Artificial Sequence: Synthetic oligonucleotide
ggcgcuuuccggaacuguu

SEQ ID NO: 66983 - RNA, 19 nt, Artificial Sequence
  Description of Artificial Sequence: Synthetic oligonucleotide
guauggcggguaaggggau

SEQ ID NO: 66984 - RNA, 19 nt, Artificial Sequence
  Description of Artificial Sequence: Synthetic oligonucleotide
ggacgguaguuggacugua

SEQ ID NO: 66985 - RNA, 19 nt, Artificial Sequence
  Description of Artificial Sequence: Synthetic oligonucleotide
ccucuucgccuguccccac

SEQ ID NO: 66986 - RNA, 19 nt, Artificial Sequence
  Description of Artificial Sequence: Synthetic oligonucleotide
cgguccuccucuggugacc

SEQ ID NO: 66987 - RNA, 19 nt, Artificial Sequence
  Description of Artificial Sequence: Synthetic oligonucleotide
caugugcagaccggauguu

SEQ ID NO: 66988 - RNA, 19 nt, Artificial Sequence
  Description of Artificial Sequence: Synthetic oligonucleotide
ccgguuuccuaggaucaua

SEQ ID NO: 66989 - RNA, 19 nt, Artificial Sequence
  Description of Artificial Sequence: Synthetic oligonucleotide
ccccggggccuaagcacuc

SEQ ID NO: 66990 - RNA, 19 nt, Artificial Sequence
  Description of Artificial Sequence: Synthetic oligonucleotide
caucaccgugugucugcuu

SEQ ID NO: 66991 - RNA, 19 nt, Artificial Sequence
  Description of Artificial Sequence: Synthetic oligonucleotide
gggcgcuuuccggaacugu

SEQ ID NO: 66992 - RNA, 19 nt, Artificial Sequence
  Description of Artificial Sequence: Synthetic oligonucleotide
cucccgcuggcugcaacuu

SEQ ID NO: 66993 - RNA, 19 nt, Artificial Sequence
  Description of Artificial Sequence: Synthetic oligonucleotide
gcgaggcuggugacuuucu

SEQ ID NO: 66994 - RNA, 19 nt, Artificial Sequence
  Description of Artificial Sequence: Synthetic oligonucleotide
aaaagauacacacuguccc

SEQ ID NO: 66995 - RNA, 19 nt, Artificial Sequence
  Description of Artificial Sequence: Synthetic oligonucleotide
ucuauuucaagucaaacug

SEQ ID NO: 66996 - RNA, 19 nt, Artificial Sequence
  Description of Artificial Sequence: Synthetic oligonucleotide
aacguaagaacccugauug

SEQ ID NO: 66997 - RNA, 19 nt, Artificial Sequence
  Description of Artificial Sequence: Synthetic oligonucleotide
aaagaaguauauugcaauc

SEQ ID NO: 66998 - RNA, 19 nt, Artificial Sequence
  Description of Artificial Sequence: Synthetic oligonucleotide
ugauuuaugaaacucugug

SEQ ID NO: 66999 - RNA, 19 nt, Artificial Sequence
  Description of Artificial Sequence: Synthetic oligonucleotide
aacaguggagauuuaaaag

SEQ ID NO: 67000 - RNA, 19 nt, Artificial Sequence
  Description of Artificial Sequence: Synthetic oligonucleotide
cauaauagcaacugagugg

SEQ ID NO: 67001 - RNA, 19 nt, Artificial Sequence
  Description of Artificial Sequence: Synthetic oligonucleotide
acuacaaucagucuuagau

SEQ ID NO: 67002 - RNA, 19 nt, Artificial Sequence
  Description of Artificial Sequence: Synthetic oligonucleotide
aguucuaaacacuagccuc

SEQ ID NO: 67003 - RNA, 19 nt, Artificial Sequence
  Description of Artificial Sequence: Synthetic oligonucleotide
auaauagcaacugaguggg

SEQ ID NO: 67004 - RNA, 19 nt, Artificial Sequence
  Description of Artificial Sequence: Synthetic oligonucleotide
uuagaaucaaaauaucccu

SEQ ID NO: 67005 - RNA, 19 nt, Artificial Sequence
  Description of Artificial Sequence: Synthetic oligonucleotide
aaucauaauagcaacugag

SEQ ID NO: 67006 - RNA, 19 nt, Artificial Sequence
  Description of Artificial Sequence: Synthetic oligonucleotide
gaggauauaucucagggug

SEQ ID NO: 67007 - RNA, 19 nt, Artificial Sequence
  Description of Artificial Sequence: Synthetic oligonucleotide
uauuaaauggccugucuag

SEQ ID NO: 67008 - RNA, 19 nt, Artificial Sequence
  Description of Artificial Sequence: Synthetic oligonucleotide
uuuaucuguacaagcagag

SEQ ID NO: 67009 - RNA, 19 nt, Artificial Sequence
  Description of Artificial Sequence: Synthetic oligonucleotide
aggagguaugaucugaccc

SEQ ID NO: 67010 - RNA, 19 nt, Artificial Sequence
  Description of Artificial Sequence: Synthetic oligonucleotide
acuacugaauuucaaauca

SEQ ID NO: 67011 - RNA, 19 nt, Artificial Sequence
  Description of Artificial Sequence: Synthetic oligonucleotide
agauuaaagcgguaagugg

SEQ ID NO: 67012 - RNA, 19 nt, Artificial Sequence
  Description of Artificial Sequence: Synthetic oligonucleotide
ugauuaugaacucgcuugg

SEQ ID NO: 67013 - RNA, 19 nt, Artificial Sequence
  Description of Artificial Sequence: Synthetic oligonucleotide
ugaaaacuuaaacaaugga

SEQ ID NO: 67014 - RNA, 19 nt, Artificial Sequence
  Description of Artificial Sequence: Synthetic oligonucleotide
ucuugauugggucucaagu

SEQ ID NO: 67015 - RNA, 19 nt, Artificial Sequence
  Description of Artificial Sequence: Synthetic oligonucleotide
uuuuaucuguacaagcaga

SEQ ID NO: 67016 - RNA, 19 nt, Artificial Sequence
  Description of Artificial Sequence: Synthetic oligonucleotide
aaguauucaaguuucugaa

SEQ ID NO: 67017 - RNA, 19 nt, Artificial Sequence
  Description of Artificial Sequence: Synthetic oligonucleotide
cuuuaccccuauuaaaugg

SEQ ID NO: 67018 - RNA, 19 nt, Artificial Sequence
  Description of Artificial Sequence: Synthetic oligonucleotide
aacaauggacuacaaucag

SEQ ID NO: 67019 - RNA, 19 nt, Artificial Sequence
  Description of Artificial Sequence: Synthetic oligonucleotide
guaaaguugaugcucuuag

SEQ ID NO: 67020 - RNA, 19 nt, Artificial Sequence
  Description of Artificial Sequence: Synthetic oligonucleotide
uaguuaaccauauuuacua

SEQ ID NO: 67021 - RNA, 19 nt, Artificial Sequence
  Description of Artificial Sequence: Synthetic oligonucleotide
cuuagauuuacauuccauc

SEQ ID NO: 67022 - RNA, 19 nt, Artificial Sequence
  Description of Artificial Sequence: Synthetic oligonucleotide
cauaguuaaccauauuuac

SEQ ID NO: 67023 - RNA, 19 nt, Artificial Sequence
  Description of Artificial Sequence: Synthetic oligonucleotide
gaacaauggaggcucaucc

SEQ ID NO: 67024 - RNA, 19 nt, Artificial Sequence
  Description of Artificial Sequence: Synthetic oligonucleotide
uuuaccccuauuaaauggc

SEQ ID NO: 67025 - RNA, 19 nt, Artificial Sequence
  Description of Artificial Sequence: Synthetic oligonucleotide
acaaugauuacugagucug

SEQ ID NO: 67026 - RNA, 19 nt, Artificial Sequence
  Description of Artificial Sequence: Synthetic oligonucleotide
ugaagaaccucuuuuacua

SEQ ID NO: 67027 - RNA, 19 nt, Artificial Sequence
  Description of Artificial Sequence: Synthetic oligonucleotide
aauuuaaguuuucuaccga

SEQ ID NO: 67028 - RNA, 19 nt, Artificial Sequence
  Description of Artificial Sequence: Synthetic oligonucleotide
uagucauuauauaaaggac

SEQ ID NO: 67029 - RNA, 19 nt, Artificial Sequence
  Description of Artificial Sequence: Synthetic oligonucleotide
uucuaaauggguugacuag

SEQ ID NO: 67030 - RNA, 19 nt, Artificial Sequence
  Description of Artificial Sequence: Synthetic oligonucleotide
ugaaagaaguauauugcaa

SEQ ID NO: 67031 - RNA, 19 nt, Artificial Sequence
  Description of Artificial Sequence: Synthetic oligonucleotide
aaauguuugacugcuauuu

SEQ ID NO: 67032 - RNA, 19 nt, Artificial Sequence
  Description of Artificial Sequence: Synthetic oligonucleotide
aaacaauggacuacaauca

SEQ ID NO: 67033 - RNA, 19 nt, Artificial Sequence
  Description of Artificial Sequence: Synthetic oligonucleotide
aaacugacuaguauggucu

SEQ ID NO: 67034 - RNA, 19 nt, Artificial Sequence
  Description of Artificial Sequence: Synthetic oligonucleotide
ucauuagacgccauguccu

SEQ ID NO: 67035 - RNA, 19 nt, Artificial Sequence
  Description of Artificial Sequence: Synthetic oligonucleotide
augcuuuugggcucuaaac

SEQ ID NO: 67036 - RNA, 19 nt, Artificial Sequence
  Description of Artificial Sequence: Synthetic oligonucleotide
agaaucauaauagcaacug

SEQ ID NO: 67037 - RNA, 19 nt, Artificial Sequence
  Description of Artificial Sequence: Synthetic oligonucleotide
uuacuacugaauuucaaau

SEQ ID NO: 67038 - RNA, 19 nt, Artificial Sequence
  Description of Artificial Sequence: Synthetic oligonucleotide
agaaguauauugcaauccu

SEQ ID NO: 67039 - RNA, 19 nt, Artificial Sequence
  Description of Artificial Sequence: Synthetic oligonucleotide
uugacauuagauuuuguuu

SEQ ID NO: 67040 - RNA, 19 nt, Artificial Sequence
  Description of Artificial Sequence: Synthetic oligonucleotide
uguuuugcuaugaaccacu

SEQ ID NO: 67041 - RNA, 19 nt, Artificial Sequence
  Description of Artificial Sequence: Synthetic oligonucleotide
uaaacacuagccucuuuag

SEQ ID NO: 67042 - RNA, 19 nt, Artificial Sequence
  Description of Artificial Sequence: Synthetic oligonucleotide
cugacccucuucuaaaugg

SEQ ID NO: 67043 - RNA, 19 nt, Artificial Sequence
  Description of Artificial Sequence: Synthetic oligonucleotide
caauggacuacaaucaguc

SEQ ID NO: 67044 - RNA, 19 nt, Artificial Sequence
  Description of Artificial Sequence: Synthetic oligonucleotide
uaaauggccugucuaguug

SEQ ID NO: 67045 - RNA, 19 nt, Artificial Sequence
  Description of Artificial Sequence: Synthetic oligonucleotide
cuugauugggucucaagug

SEQ ID NO: 67046 - RNA, 19 nt, Artificial Sequence
  Description of Artificial Sequence: Synthetic oligonucleotide
uuuagaucugaaagaacaa

SEQ ID NO: 67047 - RNA, 19 nt, Artificial Sequence
  Description of Artificial Sequence: Synthetic oligonucleotide
uugauugggucucaagugu

SEQ ID NO: 67048 - RNA, 19 nt, Artificial Sequence
  Description of Artificial Sequence: Synthetic oligonucleotide
ucagcauuucgcuucacac

SEQ ID NO: 67049 - RNA, 19 nt, Artificial Sequence
  Description of Artificial Sequence: Synthetic oligonucleotide
cuugcauuacauuuugauc

SEQ ID NO: 67050 - RNA, 19 nt, Artificial Sequence
  Description of Artificial Sequence: Synthetic oligonucleotide
aauagcaacugagugggga

SEQ ID NO: 67051 - RNA, 19 nt, Artificial Sequence
  Description of Artificial Sequence: Synthetic oligonucleotide
agucauuauauaaaggaca

SEQ ID NO: 67052 - RNA, 19 nt, Artificial Sequence
  Description of Artificial Sequence: Synthetic oligonucleotide
uuugugggcccauauaccu

SEQ ID NO: 67053 - RNA, 19 nt, Artificial Sequence
  Description of Artificial Sequence: Synthetic oligonucleotide
uguaaguaggacaguggug

SEQ ID NO: 67054 - RNA, 19 nt, Artificial Sequence
  Description of Artificial Sequence: Synthetic oligonucleotide
augugguggaaauccaaac

SEQ ID NO: 67055 - RNA, 19 nt, Artificial Sequence
  Description of Artificial Sequence: Synthetic oligonucleotide
ucucuagcaagguuaauuc

SEQ ID NO: 67056 - RNA, 19 nt, Artificial Sequence
  Description of Artificial Sequence: Synthetic oligonucleotide
guacaagaacguaagaacc

SEQ ID NO: 67057 - RNA, 19 nt, Artificial Sequence
  Description of Artificial Sequence: Synthetic oligonucleotide
aguauucaaguuucugaag

SEQ ID NO: 67058 - RNA, 19 nt, Artificial Sequence
  Description of Artificial Sequence: Synthetic oligonucleotide
gguacaagaacguaagaac

SEQ ID NO: 67059 - RNA, 19 nt, Artificial Sequence
  Description of Artificial Sequence: Synthetic oligonucleotide
uacauauccuuguugagua

SEQ ID NO: 67060 - RNA, 19 nt, Artificial Sequence
  Description of Artificial Sequence: Synthetic oligonucleotide
ugacccucuucuaaauggg

SEQ ID NO: 67061 - RNA, 19 nt, Artificial Sequence
  Description of Artificial Sequence: Synthetic oligonucleotide
uaauggagguggcaaaugu

SEQ ID NO: 67062 - RNA, 19 nt, Artificial Sequence
  Description of Artificial Sequence: Synthetic oligonucleotide
uugaagaaccucuuuuacu

SEQ ID NO: 67063 - RNA, 19 nt, Artificial Sequence
  Description of Artificial Sequence: Synthetic oligonucleotide
gaagcuuaucacuaagaga

SEQ ID NO: 67064 - RNA, 19 nt, Artificial Sequence
  Description of Artificial Sequence: Synthetic oligonucleotide
agagcuacgguacucuuca

SEQ ID NO: 67065 - RNA, 19 nt, Artificial Sequence
  Description of Artificial Sequence: Synthetic oligonucleotide
ccaaaugacauucagccgc

SEQ ID NO: 67066 - RNA, 19 nt, Artificial Sequence
  Description of Artificial Sequence: Synthetic oligonucleotide
ucaagugaugugaaucacu

SEQ ID NO: 67067 - RNA, 19 nt, Artificial Sequence
  Description of Artificial Sequence: Synthetic oligonucleotide
acuccuagaaguaaaguug

SEQ ID NO: 67068 - RNA, 19 nt, Artificial Sequence
  Description of Artificial Sequence: Synthetic oligonucleotide
uuggaaacuugcauuacau

SEQ ID NO: 67069 - RNA, 19 nt, Artificial Sequence
  Description of Artificial Sequence: Synthetic oligonucleotide
ugguucgucagcauuucgc

SEQ ID NO: 67070 - RNA, 19 nt, Artificial Sequence
  Description of Artificial Sequence: Synthetic oligonucleotide
cacuauggcgccuuucugg

SEQ ID NO: 67071 - RNA, 19 nt, Artificial Sequence
  Description of Artificial Sequence: Synthetic oligonucleotide
ugauuacugagucuguaua

SEQ ID NO: 67072 - RNA, 19 nt, Artificial Sequence
  Description of Artificial Sequence: Synthetic oligonucleotide
uauggcgccuuucuggucu

SEQ ID NO: 67073 - RNA, 19 nt, Artificial Sequence
  Description of Artificial Sequence: Synthetic oligonucleotide
acuaguauggucugauuau

SEQ ID NO: 67074 - RNA, 19 nt, Artificial Sequence
  Description of Artificial Sequence: Synthetic oligonucleotide
ggcccauauaccuugaugc

SEQ ID NO: 67075 - RNA, 19 nt, Artificial Sequence
  Description of Artificial Sequence: Synthetic oligonucleotide
uacuccuagaaguaaaguu

SEQ ID NO: 67076 - RNA, 19 nt, Artificial Sequence
  Description of Artificial Sequence: Synthetic oligonucleotide
uaagaacccugauuggucu

SEQ ID NO: 67077 - RNA, 19 nt, Artificial Sequence
  Description of Artificial Sequence: Synthetic oligonucleotide
aauggguugacuaguuuca

SEQ ID NO: 67078 - RNA, 19 nt, Artificial Sequence
  Description of Artificial Sequence: Synthetic oligonucleotide
ucuaaauggguugacuagu

SEQ ID NO: 67079 - RNA, 19 nt, Artificial Sequence
  Description of Artificial Sequence: Synthetic oligonucleotide
aagcuuaaguauucaaguu

SEQ ID NO: 67080 - RNA, 19 nt, Artificial Sequence
  Description of Artificial Sequence: Synthetic oligonucleotide
auuaaagcgguaaguggac

SEQ ID NO: 67081 - RNA, 19 nt, Artificial Sequence
  Description of Artificial Sequence: Synthetic oligonucleotide
ugaacaucauuagacgcca

SEQ ID NO: 67082 - RNA, 19 nt, Artificial Sequence
  Description of Artificial Sequence: Synthetic oligonucleotide
cuaagucuacauauccuug

SEQ ID NO: 67083 - RNA, 19 nt, Artificial Sequence
  Description of Artificial Sequence: Synthetic oligonucleotide
agcuuaaguauucaaguuu

SEQ ID NO: 67084 - RNA, 19 nt, Artificial Sequence
  Description of Artificial Sequence: Synthetic oligonucleotide
uuaccccuauuaaauggcc

SEQ ID NO: 67085 - RNA, 19 nt, Artificial Sequence
  Description of Artificial Sequence: Synthetic oligonucleotide
acagacuuaaccccggaau

SEQ ID NO: 67086 - RNA, 19 nt, Artificial Sequence
  Description of Artificial Sequence: Synthetic oligonucleotide
uguugaguaaaagaauaau

SEQ ID NO: 67087 - RNA, 19 nt, Artificial Sequence
  Description of Artificial Sequence: Synthetic oligonucleotide
cagauuaaagcgguaagug

SEQ ID NO: 67088 - RNA, 19 nt, Artificial Sequence
  Description of Artificial Sequence: Synthetic oligonucleotide
aauuuugugggcccauaua

SEQ ID NO: 67089 - RNA, 19 nt, Artificial Sequence
  Description of Artificial Sequence: Synthetic oligonucleotide
ucccgauugugcuacagga

SEQ ID NO: 67090 - RNA, 19 nt, Artificial Sequence
  Description of Artificial Sequence: Synthetic oligonucleotide
aauuuuggucaggaacauc

SEQ ID NO: 67091 - RNA, 19 nt, Artificial Sequence
  Description of Artificial Sequence: Synthetic oligonucleotide
guauggucugauuaugaac

SEQ ID NO: 67092 - RNA, 19 nt, Artificial Sequence
  Description of Artificial Sequence: Synthetic oligonucleotide
ugugggcccauauaccuug

SEQ ID NO: 67093 - RNA, 19 nt, Artificial Sequence
  Description of Artificial Sequence: Synthetic oligonucleotide
auaguuaaccauauuuacu

SEQ ID NO: 67094 - RNA, 19 nt, Artificial Sequence
  Description of Artificial Sequence: Synthetic oligonucleotide
gaaguggcacaucuaaguc

SEQ ID NO: 67095 - RNA, 19 nt, Artificial Sequence
  Description of Artificial Sequence: Synthetic oligonucleotide
uucauggguacaagaacgu

SEQ ID NO: 67096 - RNA, 19 nt, Artificial Sequence
  Description of Artificial Sequence: Synthetic oligonucleotide
ugcaauccuugcaauucag

SEQ ID NO: 67097 - RNA, 19 nt, Artificial Sequence
  Description of Artificial Sequence: Synthetic oligonucleotide
acaguugcccuacaaacaa

SEQ ID NO: 67098 - RNA, 19 nt, Artificial Sequence
  Description of Artificial Sequence: Synthetic oligonucleotide
ugcaguacaugguaagaaa

SEQ ID NO: 67099 - RNA, 19 nt, Artificial Sequence
  Description of Artificial Sequence: Synthetic oligonucleotide
uuaugaacucgcuuggcuu

SEQ ID NO: 67100 - RNA, 19 nt, Artificial Sequence
  Description of Artificial Sequence: Synthetic oligonucleotide
ugggucucaaguguuagca

SEQ ID NO: 67101 - RNA, 19 nt, Artificial Sequence
  Description of Artificial Sequence: Synthetic oligonucleotide
uugacuaguuucaauuauu

SEQ ID NO: 67102 - RNA, 19 nt, Artificial Sequence
  Description of Artificial Sequence: Synthetic oligonucleotide
cucuagcaagguuaauucc

SEQ ID NO: 67103 - RNA, 19 nt, Artificial Sequence
  Description of Artificial Sequence: Synthetic oligonucleotide
agugucccgauugugcuac

SEQ ID NO: 67104 - RNA, 19 nt, Artificial Sequence
  Description of Artificial Sequence: Synthetic oligonucleotide
aacugacuaguauggucug

SEQ ID NO: 67105 - RNA, 19 nt, Artificial Sequence
  Description of Artificial Sequence: Synthetic oligonucleotide
accccuauuaaauggccug

SEQ ID NO: 67106 - RNA, 19 nt, Artificial Sequence
  Description of Artificial Sequence: Synthetic oligonucleotide
uugcaauccuugcaauuca

SEQ ID NO: 67107 - RNA, 19 nt, Artificial Sequence
  Description of Artificial Sequence: Synthetic oligonucleotide
acuuugaccggccucugca

SEQ ID NO: 67108 - RNA, 19 nt, Artificial Sequence
  Description of Artificial Sequence: Synthetic oligonucleotide
gugcaauugaaaacaaaug

SEQ ID NO: 67109 - RNA, 19 nt, Artificial Sequence
  Description of Artificial Sequence: Synthetic oligonucleotide
uggccuaccccaaacugca

SEQ ID NO: 67110 - RNA, 19 nt, Artificial Sequence
  Description of Artificial Sequence: Synthetic oligonucleotide
auggccuaccccaaacugc

SEQ ID NO: 67111 - RNA, 19 nt, Artificial Sequence
  Description of Artificial Sequence: Synthetic oligonucleotide
aagagcuacgguacucuuc

SEQ ID NO: 67112 - RNA, 19 nt, Artificial Sequence
  Description of Artificial Sequence: Synthetic oligonucleotide
uuaaccccggaauuacaac

SEQ ID NO: 67113 - RNA, 19 nt, Artificial Sequence
  Description of Artificial Sequence: Synthetic oligonucleotide
gaagaaccucuuuuacuac

SEQ ID NO: 67114 - RNA, 19 nt, Artificial Sequence
  Description of Artificial Sequence: Synthetic oligonucleotide
uucucuagcaagguuaauu

SEQ ID NO: 67115 - RNA, 19 nt, Artificial Sequence
  Description of Artificial Sequence: Synthetic oligonucleotide
uuuucucacuuugaccggc

SEQ ID NO: 67116 - RNA, 19 nt, Artificial Sequence
  Description of Artificial Sequence: Synthetic oligonucleotide
uuaaauggccugucuaguu

SEQ ID NO: 67117 - RNA, 19 nt, Artificial Sequence
  Description of Artificial Sequence: Synthetic oligonucleotide
aaccccggaauuacaacuc

SEQ ID NO: 67118 - RNA, 19 nt, Artificial Sequence
  Description of Artificial Sequence: Synthetic oligonucleotide
aaugauuacugagucugua

SEQ ID NO: 67119 - RNA, 19 nt, Artificial Sequence
  Description of Artificial Sequence: Synthetic oligonucleotide
caagcuuaaguauucaagu

SEQ ID NO: 67120 - RNA, 19 nt, Artificial Sequence
  Description of Artificial Sequence: Synthetic oligonucleotide
acuauggcgccuuucuggu

SEQ ID NO: 67121 - RNA, 19 nt, Artificial Sequence
  Description of Artificial Sequence: Synthetic oligonucleotide
acguaagaacccugauugg

SEQ ID NO: 67122 - RNA, 19 nt, Artificial Sequence
  Description of Artificial Sequence: Synthetic oligonucleotide
cuagccucuuuagaagugg

SEQ ID NO: 67123 - RNA, 19 nt, Artificial Sequence
  Description of Artificial Sequence: Synthetic oligonucleotide
auuaaauggccugucuagu

SEQ ID NO: 67124 - RNA, 19 nt, Artificial Sequence
  Description of Artificial Sequence: Synthetic oligonucleotide
aaacccgcauugcuugcug

SEQ ID NO: 67125 - RNA, 19 nt, Artificial Sequence
  Description of Artificial Sequence: Synthetic oligonucleotide
aguuaaccauauuuacuaa

SEQ ID NO: 67126 - RNA, 19 nt, Artificial Sequence
  Description of Artificial Sequence: Synthetic oligonucleotide
augacgcucccuuuucaag

SEQ ID NO: 67127 - RNA, 19 nt, Artificial Sequence
  Description of Artificial Sequence: Synthetic oligonucleotide
uuagacgccauguccucac

SEQ ID NO: 67128 - RNA, 19 nt, Artificial Sequence
  Description of Artificial Sequence: Synthetic oligonucleotide
ucuguacaagcagagucac

SEQ ID NO: 67129 - RNA, 19 nt, Artificial Sequence
  Description of Artificial Sequence: Synthetic oligonucleotide
accgaagauggauuuugug

SEQ ID NO: 67130 - RNA, 19 nt, Artificial Sequence
  Description of Artificial Sequence: Synthetic oligonucleotide
ucucauggauuuucuauuu

SEQ ID NO: 67131 - RNA, 19 nt, Artificial Sequence
  Description of Artificial Sequence: Synthetic oligonucleotide
agcaagguuaauuccguuu

SEQ ID NO: 67132 - RNA, 19 nt, Artificial Sequence
  Description of Artificial Sequence: Synthetic oligonucleotide
uauugcaauccuugcaauu

SEQ ID NO: 67133 - RNA, 19 nt, Artificial Sequence
  Description of Artificial Sequence: Synthetic oligonucleotide
aguccuaccaggcaaucuu

SEQ ID NO: 67134 - RNA, 19 nt, Artificial Sequence
  Description of Artificial Sequence: Synthetic oligonucleotide
aaggggccccaucauacgu

SEQ ID NO: 67135 - RNA, 19 nt, Artificial Sequence
  Description of Artificial Sequence: Synthetic oligonucleotide
cuacgguacucuucaauuc

SEQ ID NO: 67136 - RNA, 19 nt, Artificial Sequence
  Description of Artificial Sequence: Synthetic oligonucleotide
uaauagcaacugagugggg

SEQ ID NO: 67137 - RNA, 19 nt, Artificial Sequence
  Description of Artificial Sequence: Synthetic oligonucleotide
uaccccuauuaaauggccu

SEQ ID NO: 67138 - RNA, 19 nt, Artificial Sequence
  Description of Artificial Sequence: Synthetic oligonucleotide
gcaaugagugucccgauug

SEQ ID NO: 67139 - RNA, 19 nt, Artificial Sequence
  Description of Artificial Sequence: Synthetic oligonucleotide
cuccuagaaguaaaguuga

SEQ ID NO: 67140 - RNA, 19 nt, Artificial Sequence
  Description of Artificial Sequence: Synthetic oligonucleotide
cuaccgaagauggauuuug

SEQ ID NO: 67141 - RNA, 19 nt, Artificial Sequence
  Description of Artificial Sequence: Synthetic oligonucleotide
acagaaugagcuuggcuuu

SEQ ID NO: 67142 - RNA, 19 nt, Artificial Sequence
  Description of Artificial Sequence: Synthetic oligonucleotide
ucacuauggcgccuuucug

SEQ ID NO: 67143 - RNA, 19 nt, Artificial Sequence
  Description of Artificial Sequence: Synthetic oligonucleotide
gacgcucccuuuucaagug

SEQ ID NO: 67144 - RNA, 19 nt, Artificial Sequence
  Description of Artificial Sequence: Synthetic oligonucleotide
cuaccaggcaaucuuaaaa

SEQ ID NO: 67145 - RNA, 19 nt, Artificial Sequence
  Description of Artificial Sequence: Synthetic oligonucleotide
ucacuaagagaaugaguua

SEQ ID NO: 67146 - RNA, 19 nt, Artificial Sequence
  Description of Artificial Sequence: Synthetic oligonucleotide
gacuuaaccccggaauuac

SEQ ID NO: 67147 - RNA, 19 nt, Artificial Sequence
  Description of Artificial Sequence: Synthetic oligonucleotide
guuggucuugccuacccca

SEQ ID NO: 67148 - RNA, 19 nt, Artificial Sequence
  Description of Artificial Sequence: Synthetic oligonucleotide
cuuaaccccggaauuacaa

SEQ ID NO: 67149 - RNA, 19 nt, Artificial Sequence
  Description of Artificial Sequence: Synthetic oligonucleotide
caucauuagacgccauguc

SEQ ID NO: 67150 - RNA, 19 nt, Artificial Sequence
  Description of Artificial Sequence: Synthetic oligonucleotide
agguuaauuccguuucaaa

SEQ ID NO: 67151 - RNA, 19 nt, Artificial Sequence
  Description of Artificial Sequence: Synthetic oligonucleotide
ugauugggucucaaguguu

SEQ ID NO: 67152 - RNA, 19 nt, Artificial Sequence
  Description of Artificial Sequence: Synthetic oligonucleotide
aagauacacacugucccua

SEQ ID NO: 67153 - RNA, 19 nt, Artificial Sequence
  Description of Artificial Sequence: Synthetic oligonucleotide
uucuaccgaagauggauuu

SEQ ID NO: 67154 - RNA, 19 nt, Artificial Sequence
  Description of Artificial Sequence: Synthetic oligonucleotide
agaacguaagaacccugau

SEQ ID NO: 67155 - RNA, 19 nt, Artificial Sequence
  Description of Artificial Sequence: Synthetic oligonucleotide
guaagaacccugauugguc

SEQ ID NO: 67156 - RNA, 19 nt, Artificial Sequence
  Description of Artificial Sequence: Synthetic oligonucleotide
aaaacccgcauugcuugcu

SEQ ID NO: 67157 - RNA, 19 nt, Artificial Sequence
  Description of Artificial Sequence: Synthetic oligonucleotide
ucucacuuugaccggccuc

SEQ ID NO: 67158 - RNA, 19 nt, Artificial Sequence
  Description of Artificial Sequence: Synthetic oligonucleotide
uggucuccgaaugucuuug

SEQ ID NO: 67159 - RNA, 19 nt, Artificial Sequence
  Description of Artificial Sequence: Synthetic oligonucleotide
acaauggacuacaaucagu

SEQ ID NO: 67160 - RNA, 19 nt, Artificial Sequence
  Description of Artificial Sequence: Synthetic oligonucleotide
gucuugauugggucucaag

SEQ ID NO: 67161 - RNA, 19 nt, Artificial Sequence
  Description of Artificial Sequence: Synthetic oligonucleotide
cucaggguguaaaguuuag

SEQ ID NO: 67162 - RNA, 19 nt, Artificial Sequence
  Description of Artificial Sequence: Synthetic oligonucleotide
cucauggauuuucuauuuc

SEQ ID NO: 67163 - RNA, 19 nt, Artificial Sequence
  Description of Artificial Sequence: Synthetic oligonucleotide
aguaauggagguggcaaau

SEQ ID NO: 67164 - RNA, 19 nt, Artificial Sequence
  Description of Artificial Sequence: Synthetic oligonucleotide
agaugaaaagcuagcacuu

SEQ ID NO: 67165 - RNA, 19 nt, Artificial Sequence
  Description of Artificial Sequence: Synthetic oligonucleotide
uccuaccaggcaaucuuaa

SEQ ID NO: 67166 - RNA, 19 nt, Artificial Sequence
  Description of Artificial Sequence: Synthetic oligonucleotide
cuuaagaugcucacugccu

SEQ ID NO: 67167 - RNA, 19 nt, Artificial Sequence
  Description of Artificial Sequence: Synthetic oligonucleotide
cauuagacgccauguccuc

SEQ ID NO: 67168 - RNA, 19 nt, Artificial Sequence
  Description of Artificial Sequence: Synthetic oligonucleotide
auauccuccuguaaaggau

SEQ ID NO: 67169 - RNA, 19 nt, Artificial Sequence
  Description of Artificial Sequence: Synthetic oligonucleotide
guaauggagguggcaaaug

SEQ ID NO: 67170 - RNA, 19 nt, Artificial Sequence
  Description of Artificial Sequence: Synthetic oligonucleotide
agcuacgguacucuucaau

SEQ ID NO: 67171 - RNA, 19 nt, Artificial Sequence
  Description of Artificial Sequence: Synthetic oligonucleotide
aaugaacaauggaggcuca

SEQ ID NO: 67172 - RNA, 19 nt, Artificial Sequence
  Description of Artificial Sequence: Synthetic oligonucleotide
aguaaaguugaugcucuua

SEQ ID NO: 67173 - RNA, 19 nt, Artificial Sequence
  Description of Artificial Sequence: Synthetic oligonucleotide
aagaacccugauuggucuu

SEQ ID NO: 67174 - RNA, 19 nt, Artificial Sequence
  Description of Artificial Sequence: Synthetic oligonucleotide
ugugcagauuaaagcggua

SEQ ID NO: 67175 - RNA, 19 nt, Artificial Sequence
  Description of Artificial Sequence: Synthetic oligonucleotide
caggguguaaaguuuagau

SEQ ID NO: 67176 - RNA, 19 nt, Artificial Sequence
  Description of Artificial Sequence: Synthetic oligonucleotide
uuuggcgaggcuguagauu

SEQ ID NO: 67177 - RNA, 19 nt, Artificial Sequence
  Description of Artificial Sequence: Synthetic oligonucleotide
uugccuaccccagggguca

SEQ ID NO: 67178 - RNA, 19 nt, Artificial Sequence
  Description of Artificial Sequence: Synthetic oligonucleotide
cugguucgucagcauuucg

SEQ ID NO: 67179 - RNA, 19 nt, Artificial Sequence
  Description of Artificial Sequence: Synthetic oligonucleotide
gaacguaagaacccugauu

SEQ ID NO: 67180 - RNA, 19 nt, Artificial Sequence
  Description of Artificial Sequence: Synthetic oligonucleotide
cauuuugauccugugaggu

SEQ ID NO: 67181 - RNA, 19 nt, Artificial Sequence
  Description of Artificial Sequence: Synthetic oligonucleotide
gacuacaaucagucuuaga

SEQ ID NO: 67182 - RNA, 19 nt, Artificial Sequence
  Description of Artificial Sequence: Synthetic oligonucleotide
caucagcagaggauauauc

SEQ ID NO: 67183 - RNA, 19 nt, Artificial Sequence
  Description of Artificial Sequence: Synthetic oligonucleotide
aacuugcauuacauuuuga

SEQ ID NO: 67184 - RNA, 19 nt, Artificial Sequence
  Description of Artificial Sequence: Synthetic oligonucleotide
aggauauaucucagggugu

SEQ ID NO: 67185 - RNA, 19 nt, Artificial Sequence
  Description of Artificial Sequence: Synthetic oligonucleotide
gucuccgaaugucuuugac

SEQ ID NO: 67186 - RNA, 19 nt, Artificial Sequence
  Description of Artificial Sequence: Synthetic oligonucleotide
auuagacgccauguccuca

SEQ ID NO: 67187 - RNA, 19 nt, Artificial Sequence
  Description of Artificial Sequence: Synthetic oligonucleotide
agcaacugaguggggaacu

SEQ ID NO: 67188 - RNA, 19 nt, Artificial Sequence
  Description of Artificial Sequence: Synthetic oligonucleotide
aagcgguaaguggacuccu

SEQ ID NO: 67189 - RNA, 19 nt, Artificial Sequence
  Description of Artificial Sequence: Synthetic oligonucleotide
acauauccuuguugaguaa

SEQ ID NO: 67190 - RNA, 19 nt, Artificial Sequence
  Description of Artificial Sequence: Synthetic oligonucleotide
cauauccuuguugaguaaa

SEQ ID NO: 67191 - RNA, 19 nt, Artificial Sequence
  Description of Artificial Sequence: Synthetic oligonucleotide
auauccuuguugaguaaaa

SEQ ID NO: 67192 - RNA, 19 nt, Artificial Sequence
  Description of Artificial Sequence: Synthetic oligonucleotide
cuagcaagguuaauuccgu

SEQ ID NO: 67193 - RNA, 19 nt, Artificial Sequence
  Description of Artificial Sequence: Synthetic oligonucleotide
cuuaaguauucaaguuucu

SEQ ID NO: 67194 - RNA, 19 nt, Artificial Sequence
  Description of Artificial Sequence: Synthetic oligonucleotide
cuacauauccuuguugagu

SEQ ID NO: 67195 - RNA, 19 nt, Artificial Sequence
  Description of Artificial Sequence: Synthetic oligonucleotide
caggggucacuauggcgcc

SEQ ID NO: 67196 - RNA, 19 nt, Artificial Sequence
  Description of Artificial Sequence: Synthetic oligonucleotide
ucuaccgaagauggauuuu

SEQ ID NO: 67197 - RNA, 19 nt, Artificial Sequence
  Description of Artificial Sequence: Synthetic oligonucleotide
ugacuaguauggucugauu

SEQ ID NO: 67198 - RNA, 19 nt, Artificial Sequence
  Description of Artificial Sequence: Synthetic oligonucleotide
agcugacccucuucuaaau

SEQ ID NO: 67199 - RNA, 19 nt, Artificial Sequence
  Description of Artificial Sequence: Synthetic oligonucleotide
cuacaaucagucuuagauu

SEQ ID NO: 67200 - RNA, 19 nt, Artificial Sequence
  Description of Artificial Sequence: Synthetic oligonucleotide
gugcagauuaaagcgguaa

SEQ ID NO: 67201 - RNA, 19 nt, Artificial Sequence
  Description of Artificial Sequence: Synthetic oligonucleotide
ucucaccuguugccaugug

SEQ ID NO: 67202 - RNA, 19 nt, Artificial Sequence
  Description of Artificial Sequence: Synthetic oligonucleotide
ccgcuuuauguuuuaaaca

SEQ ID NO: 67203 - RNA, 19 nt, Artificial Sequence
  Description of Artificial Sequence: Synthetic oligonucleotide
cuugucaugacgcucccuu

SEQ ID NO: 67204 - RNA, 19 nt, Artificial Sequence
  Description of Artificial Sequence: Synthetic oligonucleotide
gguacucuucaauuccaaa

SEQ ID NO: 67205 - RNA, 19 nt, Artificial Sequence
  Description of Artificial Sequence: Synthetic oligonucleotide
acuuaaccccggaauuaca

SEQ ID NO: 67206 - RNA, 19 nt, Artificial Sequence
  Description of Artificial Sequence: Synthetic oligonucleotide
cacuagccucuuuagaagu

SEQ ID NO: 67207 - RNA, 19 nt, Artificial Sequence
  Description of Artificial Sequence: Synthetic oligonucleotide
agguaugaucugacccuuc

SEQ ID NO: 67208 - RNA, 19 nt, Artificial Sequence
  Description of Artificial Sequence: Synthetic oligonucleotide
gcgguaaguggacuccuug

SEQ ID NO: 67209 - RNA, 19 nt, Artificial Sequence
  Description of Artificial Sequence: Synthetic oligonucleotide
uuaugcuuuugggcucuaa

SEQ ID NO: 67210 - RNA, 19 nt, Artificial Sequence
  Description of Artificial Sequence: Synthetic oligonucleotide
gguaugaucugacccuucu

SEQ ID NO: 67211 - RNA, 19 nt, Artificial Sequence
  Description of Artificial Sequence: Synthetic oligonucleotide
augcaaugagugucccgau

SEQ ID NO: 67212 - RNA, 19 nt, Artificial Sequence
  Description of Artificial Sequence: Synthetic oligonucleotide
agccucuuuagaaguggca

SEQ ID NO: 67213 - RNA, 19 nt, Artificial Sequence
  Description of Artificial Sequence: Synthetic oligonucleotide
gaggcuuauggcucaguuu

SEQ ID NO: 67214 - RNA, 19 nt, Artificial Sequence
  Description of Artificial Sequence: Synthetic oligonucleotide
gacgccauguccucacaau

SEQ ID NO: 67215 - RNA, 19 nt, Artificial Sequence
  Description of Artificial Sequence: Synthetic oligonucleotide
ucacuuugaccggccucug

SEQ ID NO: 67216 - RNA, 19 nt, Artificial Sequence
  Description of Artificial Sequence: Synthetic oligonucleotide
ugggcccauauaccuugau

SEQ ID NO: 67217 - RNA, 19 nt, Artificial Sequence
  Description of Artificial Sequence: Synthetic oligonucleotide
cuauggcgccuuucugguc

SEQ ID NO: 67218 - RNA, 19 nt, Artificial Sequence
  Description of Artificial Sequence: Synthetic oligonucleotide
gcuacgguacucuucaauu

SEQ ID NO: 67219 - RNA, 19 nt, Artificial Sequence
  Description of Artificial Sequence: Synthetic oligonucleotide
cacagacuuaaccccggaa

SEQ ID NO: 67220 - RNA, 19 nt, Artificial Sequence
  Description of Artificial Sequence: Synthetic oligonucleotide
ggaacaucacaaauaguau

SEQ ID NO: 67221 - RNA, 19 nt, Artificial Sequence
  Description of Artificial Sequence: Synthetic oligonucleotide
gcagauuaaagcgguaagu

SEQ ID NO: 67222 - RNA, 19 nt, Artificial Sequence
  Description of Artificial Sequence: Synthetic oligonucleotide
guacuccuagaaguaaagu

SEQ ID NO: 67223 - RNA, 19 nt, Artificial Sequence
  Description of Artificial Sequence: Synthetic oligonucleotide
gccugucuaguuguuguug

SEQ ID NO: 67224 - RNA, 19 nt, Artificial Sequence
  Description of Artificial Sequence: Synthetic oligonucleotide
gagugucccgauugugcua

SEQ ID NO: 67225 - RNA, 19 nt, Artificial Sequence
  Description of Artificial Sequence: Synthetic oligonucleotide
agcuuaucacuaagagaau

SEQ ID NO: 67226 - RNA, 19 nt, Artificial Sequence
  Description of Artificial Sequence: Synthetic oligonucleotide
ggcaaaugugguggaaauc

SEQ ID NO: 67227 - RNA, 19 nt, Artificial Sequence
  Description of Artificial Sequence: Synthetic oligonucleotide
ccuaaugauguuuccauuu

SEQ ID NO: 67228 - RNA, 19 nt, Artificial Sequence
  Description of Artificial Sequence: Synthetic oligonucleotide
ccggccucugcaaaucaug

SEQ ID NO: 67229 - RNA, 19 nt, Artificial Sequence
  Description of Artificial Sequence: Synthetic oligonucleotide
cugguacuccuagaaguaa

SEQ ID NO: 67230 - RNA, 19 nt, Artificial Sequence
  Description of Artificial Sequence: Synthetic oligonucleotide
ccgcauugcuugcugggag

SEQ ID NO: 67231 - RNA, 19 nt, Artificial Sequence
  Description of Artificial Sequence: Synthetic oligonucleotide
gcaacugaguggggaacug

SEQ ID NO: 67232 - RNA, 19 nt, Artificial Sequence
  Description of Artificial Sequence: Synthetic oligonucleotide
gacccucuucuaaaugggu

SEQ ID NO: 67233 - RNA, 19 nt, Artificial Sequence
  Description of Artificial Sequence: Synthetic oligonucleotide
cugacuaguauggucugau

SEQ ID NO: 67234 - RNA, 19 nt, Artificial Sequence
  Description of Artificial Sequence: Synthetic oligonucleotide
gugaaaggggccccaucau

SEQ ID NO: 67235 - RNA, 19 nt, Artificial Sequence
  Description of Artificial Sequence: Synthetic oligonucleotide
ccaugaagcuuaucacuaa

SEQ ID NO: 67236 - RNA, 19 nt, Artificial Sequence
  Description of Artificial Sequence: Synthetic oligonucleotide
cauuucgcuucacacucuu

SEQ ID NO: 67237 - RNA, 19 nt, Artificial Sequence
  Description of Artificial Sequence: Synthetic oligonucleotide
cccuauuaaauggccuguc

SEQ ID NO: 67238 - RNA, 19 nt, Artificial Sequence
  Description of Artificial Sequence: Synthetic oligonucleotide
gagcuacgguacucuucaa

SEQ ID NO: 67239 - RNA, 19 nt, Artificial Sequence
  Description of Artificial Sequence: Synthetic oligonucleotide
cuaccgcuuuauguuuuaa

SEQ ID NO: 67240 - RNA, 19 nt, Artificial Sequence
  Description of Artificial Sequence: Synthetic oligonucleotide
ccuaccaggcaaucuuaaa

SEQ ID NO: 67241 - RNA, 19 nt, Artificial Sequence
  Description of Artificial Sequence: Synthetic oligonucleotide
gccuaccccaaacugcagu

SEQ ID NO: 67242 - RNA, 19 nt, Artificial Sequence
  Description of Artificial Sequence: Synthetic oligonucleotide
agcgguaaguggacuccuu

SEQ ID NO: 67243 - RNA, 19 nt, Artificial Sequence
  Description of Artificial Sequence: Synthetic oligonucleotide
aggggucacuauggcgccu

SEQ ID NO: 67244 - RNA, 19 nt, Artificial Sequence
  Description of Artificial Sequence: Synthetic oligonucleotide
caagagcuacgguacucuu

SEQ ID NO: 67245 - RNA, 19 nt, Artificial Sequence
  Description of Artificial Sequence: Synthetic oligonucleotide
cuggucuccgaaugucuuu

SEQ ID NO: 67246 - RNA, 19 nt, Artificial Sequence
  Description of Artificial Sequence: Synthetic oligonucleotide
cgcuucacacucuugacau

SEQ ID NO: 67247 - RNA, 19 nt, Artificial Sequence
  Description of Artificial Sequence: Synthetic oligonucleotide
gggucucaaguguuagcau

SEQ ID NO: 67248 - RNA, 19 nt, Artificial Sequence
  Description of Artificial Sequence: Synthetic oligonucleotide
cccuacaaacaaaccauuu

SEQ ID NO: 67249 - RNA, 19 nt, Artificial Sequence
  Description of Artificial Sequence: Synthetic oligonucleotide
gugucccgauugugcuaca

SEQ ID NO: 67250 - RNA, 19 nt, Artificial Sequence
  Description of Artificial Sequence: Synthetic oligonucleotide
ggccuaccccaaacugcag

SEQ ID NO: 67251 - RNA, 19 nt, Artificial Sequence
  Description of Artificial Sequence: Synthetic oligonucleotide
cuugugaaaggggccccau

SEQ ID NO: 67252 - RNA, 19 nt, Artificial Sequence
  Description of Artificial Sequence: Synthetic oligonucleotide
ccaagagcuacgguacucu

SEQ ID NO: 67253 - RNA, 19 nt, Artificial Sequence
  Description of Artificial Sequence: Synthetic oligonucleotide
cagaaugagcuuggcuuuu

SEQ ID NO: 67254 - RNA, 19 nt, Artificial Sequence
  Description of Artificial Sequence: Synthetic oligonucleotide
cccauauaccuugaugcuu

SEQ ID NO: 67255 - RNA, 19 nt, Artificial Sequence
  Description of Artificial Sequence: Synthetic oligonucleotide
gcauuucgcuucacacucu

SEQ ID NO: 67256 - RNA, 19 nt, Artificial Sequence
  Description of Artificial Sequence: Synthetic oligonucleotide
cuaccccaggggucacuau

SEQ ID NO: 67257 - RNA, 19 nt, Artificial Sequence
  Description of Artificial Sequence: Synthetic oligonucleotide
cugaggcuuauggcucagu

SEQ ID NO: 67258 - RNA, 19 nt, Artificial Sequence
  Description of Artificial Sequence: Synthetic oligonucleotide
ccccuauuaaauggccugu

SEQ ID NO: 67259 - RNA, 19 nt, Artificial Sequence
  Description of Artificial Sequence: Synthetic oligonucleotide
ggcgaggcuguagauucuu

SEQ ID NO: 67260 - RNA, 19 nt, Artificial Sequence
  Description of Artificial Sequence: Synthetic oligonucleotide
ggggucacuauggcgccuu

SEQ ID NO: 67261 - RNA, 19 nt, Artificial Sequence
  Description of Artificial Sequence: Synthetic oligonucleotide
uauaauggcauacauaugg

SEQ ID NO: 67262 - RNA, 19 nt, Artificial Sequence
  Description of Artificial Sequence: Synthetic oligonucleotide
uuuuauaggacuauuacug

SEQ ID NO: 67263 - RNA, 19 nt, Artificial Sequence
  Description of Artificial Sequence: Synthetic oligonucleotide
agaacaauaaugcacacag

SEQ ID NO: 67264 - RNA, 19 nt, Artificial Sequence
  Description of Artificial Sequence: Synthetic oligonucleotide
ucgacagucaaucagaccc

SEQ ID NO: 67265 - RNA, 19 nt, Artificial Sequence
  Description of Artificial Sequence: Synthetic oligonucleotide
uagaauaaaugcaacagag

SEQ ID NO: 67266 - RNA, 19 nt, Artificial Sequence
  Description of Artificial Sequence: Synthetic oligonucleotide
uuaugaaccaugcagaagu

SEQ ID NO: 67267 - RNA, 19 nt, Artificial Sequence
  Description of Artificial Sequence: Synthetic oligonucleotide
aagugcgggagucaaaugc

SEQ ID NO: 67268 - RNA, 19 nt, Artificial Sequence
  Description of Artificial Sequence: Synthetic oligonucleotide
aaugucgauauuccaaacg

SEQ ID NO: 67269 - RNA, 19 nt, Artificial Sequence
  Description of Artificial Sequence: Synthetic oligonucleotide
cuuuauuuaagacagccgc

SEQ ID NO: 67270 - RNA, 19 nt, Artificial Sequence
  Description of Artificial Sequence: Synthetic oligonucleotide
ucaaaauacauccaaggac

SEQ ID NO: 67271 - RNA, 19 nt, Artificial Sequence
  Description of Artificial Sequence: Synthetic oligonucleotide
uacaccucauuucugaucg

SEQ ID NO: 67272 - RNA, 19 nt, Artificial Sequence
  Description of Artificial Sequence: Synthetic oligonucleotide
ucaauaaucacaaaauuuu

SEQ ID NO: 67273 - RNA, 19 nt, Artificial Sequence
  Description of Artificial Sequence: Synthetic oligonucleotide
ugugcucccauuaaguugg

SEQ ID NO: 67274 - RNA, 19 nt, Artificial Sequence
  Description of Artificial Sequence: Synthetic oligonucleotide
ucuuuauaguucaagaaac

SEQ ID NO: 67275 - RNA, 19 nt, Artificial Sequence
  Description of Artificial Sequence: Synthetic oligonucleotide
  modified_base (9)..(9): a, c, u, g, unknown or other
uuugauuunacccuucguc

SEQ ID NO: 67276 - RNA, 19 nt, Artificial Sequence
  Description of Artificial Sequence: Synthetic oligonucleotide
uguauugcacguuuuagag

SEQ ID NO: 67277 - RNA, 19 nt, Artificial Sequence
  Description of Artificial Sequence: Synthetic oligonucleotide
  modified_base (7)..(7): a, c, u, g, unknown or other
gaagaunagggguacauca

SEQ ID NO: 67278 - RNA, 19 nt, Artificial Sequence
  Description of Artificial Sequence: Synthetic oligonucleotide
auuaaguuggggcacuggc

SEQ ID NO: 67279 - RNA, 19 nt, Artificial Sequence
  Description of Artificial Sequence: Synthetic oligonucleotide
ucaaugacuaaacagaguu

SEQ ID NO: 67280 - RNA, 19 nt, Artificial Sequence
  Description of Artificial Sequence: Synthetic oligonucleotide
ugaggauuuguauugcacg

SEQ ID NO: 67281 - RNA, 19 nt, Artificial Sequence
  Description of Artificial Sequence: Synthetic oligonucleotide
uuugcuaauaugaaggcau

SEQ ID NO: 67282 - RNA, 19 nt, Artificial Sequence
  Description of Artificial Sequence: Synthetic oligonucleotide
ucaaguaguaguacuaaug

SEQ ID NO: 67283 - RNA, 19 nt, Artificial Sequence
  Description of Artificial Sequence: Synthetic oligonucleotide
agugauucugauucaaagg

SEQ ID NO: 67284 - RNA, 19 nt, Artificial Sequence
  Description of Artificial Sequence: Synthetic oligonucleotide
auaguccuaaaucuuuacc

SEQ ID NO: 67285 - RNA, 19 nt, Artificial Sequence
  Description of Artificial Sequence: Synthetic oligonucleotide
uacggaaaggacaaaaugu

SEQ ID NO: 67286 - RNA, 19 nt, Artificial Sequence
  Description of Artificial Sequence: Synthetic oligonucleotide
augucgauauuccaaacgg

SEQ ID NO: 67287 - RNA, 19 nt, Artificial Sequence
  Description of Artificial Sequence: Synthetic oligonucleotide
uaguccuaaaucuuuaccc

SEQ ID NO: 67288 - RNA, 19 nt, Artificial Sequence
  Description of Artificial Sequence: Synthetic oligonucleotide
uauugcacguuuuagaguc

SEQ ID NO: 67289 - RNA, 19 nt, Artificial Sequence
  Description of Artificial Sequence: Synthetic oligonucleotide
aguacuaauggucuacauc

SEQ ID NO: 67290 - RNA, 19 nt, Artificial Sequence
  Description of Artificial Sequence: Synthetic oligonucleotide
uacauauggugccaaaugc

SEQ ID NO: 67291 - RNA, 19 nt, Artificial Sequence
  Description of Artificial Sequence: Synthetic oligonucleotide
uucacaauccaugaguuag

SEQ ID NO: 67292 - RNA, 19 nt, Artificial Sequence
  Description of Artificial Sequence: Synthetic oligonucleotide
guauguaugauguacugug

SEQ ID NO: 67293 - RNA, 19 nt, Artificial Sequence
  Description of Artificial Sequence: Synthetic oligonucleotide
  modified_base (5)..(5): a, c, u, g, unknown or other
agaunagggguacaucagc

SEQ ID NO: 67294 - RNA, 19 nt, Artificial Sequence
  Description of Artificial Sequence: Synthetic oligonucleotide
  modified_base (3)..(3): a, c, u, g, unknown or other
uunacccuucgucaggacg

SEQ ID NO: 67295 - RNA, 19 nt, Artificial Sequence
  Description of Artificial Sequence: Synthetic oligonucleotide
aaugacuaaacagaguuaa

SEQ ID NO: 67296 - RNA, 19 nt, Artificial Sequence
  Description of Artificial Sequence: Synthetic oligonucleotide
  modified_base (7)..(7): a, c, u, g, unknown or other
ugauuunacccuucgucag

SEQ ID NO: 67297 - RNA, 19 nt, Artificial Sequence
  Description of Artificial Sequence: Synthetic oligonucleotide
uuacggaaaggacaaaaug

SEQ ID NO: 67298 - RNA, 19 nt, Artificial Sequence
  Description of Artificial Sequence: Synthetic oligonucleotide
uccuacuuagcucuugcgg

SEQ ID NO: 67299 - RNA, 19 nt, Artificial Sequence
  Description of Artificial Sequence: Synthetic oligonucleotide
acuccguaaacauacugac

SEQ ID NO: 67300 - RNA, 19 nt, Artificial Sequence
  Description of Artificial Sequence: Synthetic oligonucleotide
  modified_base (8)..(8): a, c, u, g, unknown or other
uugauuunacccuucguca

SEQ ID NO: 67301 - RNA, 19 nt, Artificial Sequence
  Description of Artificial Sequence: Synthetic oligonucleotide
aaauuaugaaccaugcaga

SEQ ID NO: 67302 - RNA, 19 nt, Artificial Sequence
  Description of Artificial Sequence: Synthetic oligonucleotide
aagacagccgccuccagag

SEQ ID NO: 67303 - RNA, 19 nt, Artificial Sequence
  Description of Artificial Sequence: Synthetic oligonucleotide
uguucuaaucacuggagug

SEQ ID NO: 67304 - RNA, 19 nt, Artificial Sequence
  Description of Artificial Sequence: Synthetic oligonucleotide
aguuucagaacacauugug

SEQ ID NO: 67305 - RNA, 19 nt, Artificial Sequence
  Description of Artificial Sequence: Synthetic oligonucleotide
aucaaauauaauggcauac

SEQ ID NO: 67306 - RNA, 19 nt, Artificial Sequence
  Description of Artificial Sequence: Synthetic oligonucleotide
  modified_base (3)..(3): a, c, u, g, unknown or other
aunagggguacaucagccc

SEQ ID NO: 67307 - RNA, 19 nt, Artificial Sequence
  Description of Artificial Sequence: Synthetic oligonucleotide
ucuacuccacucaugaaga

SEQ ID NO: 67308 - RNA, 19 nt, Artificial Sequence
  Description of Artificial Sequence: Synthetic oligonucleotide
aggacaauaacaugcauaa

SEQ ID NO: 67309 - RNA, 19 nt, Artificial Sequence
  Description of Artificial Sequence: Synthetic oligonucleotide
aucaaaauacauccaagga

SEQ ID NO: 67310 - RNA, 19 nt, Artificial Sequence
  Description of Artificial Sequence: Synthetic oligonucleotide
uaaguuuugauaguugcac

SEQ ID NO: 67311 - RNA, 19 nt, Artificial Sequence
  Description of Artificial Sequence: Synthetic oligonucleotide
ugacuaaacagaguuaaca

SEQ ID NO: 67312 - RNA, 19 nt, Artificial Sequence
  Description of Artificial Sequence: Synthetic oligonucleotide
gaugcaugguauuagucac

SEQ ID NO: 67313 - RNA, 19 nt, Artificial Sequence
  Description of Artificial Sequence: Synthetic oligonucleotide
agaugcaugguauuaguca

SEQ ID NO: 67314 - RNA, 19 nt, Artificial Sequence
  Description of Artificial Sequence: Synthetic oligonucleotide
cuggcgagaauucuggugg

SEQ ID NO: 67315 - RNA, 19 nt, Artificial Sequence
  Description of Artificial Sequence: Synthetic oligonucleotide
uuugacuacaacugguuaa

SEQ ID NO: 67316 - RNA, 19 nt, Artificial Sequence
  Description of Artificial Sequence: Synthetic oligonucleotide
uuaagguuagagcaagauc

SEQ ID NO: 67317 - RNA, 19 nt, Artificial Sequence
  Description of Artificial Sequence: Synthetic oligonucleotide
aacggcuagauaauuuugg

SEQ ID NO: 67318 - RNA, 19 nt, Artificial Sequence
  Description of Artificial Sequence: Synthetic oligonucleotide
  modified_base (6)..(6): a, c, u, g, unknown or other
gauuunacccuucgucagg

SEQ ID NO: 67319 - RNA, 19 nt, Artificial Sequence
  Description of Artificial Sequence: Synthetic oligonucleotide
caccauauaccguaagacg

SEQ ID NO: 67320 - RNA, 19 nt, Artificial Sequence
  Description of Artificial Sequence: Synthetic oligonucleotide
auugaacuugcuuguaaag

SEQ ID NO: 67321 - RNA, 19 nt, Artificial Sequence
  Description of Artificial Sequence: Synthetic oligonucleotide
gucuacuccacucaugaag

SEQ ID NO: 67322 - RNA, 19 nt, Artificial Sequence
  Description of Artificial Sequence: Synthetic oligonucleotide
aauaaugcacacagcagug

SEQ ID NO: 67323 - RNA, 19 nt, Artificial Sequence
  Description of Artificial Sequence: Synthetic oligonucleotide
aaccacauagcucauugau

SEQ ID NO: 67324 - RNA, 19 nt, Artificial Sequence
  Description of Artificial Sequence: Synthetic oligonucleotide
  modified_base (4)..(4): a, c, u, g, unknown or other
gaunagggguacaucagcc

SEQ ID NO: 67325 - RNA, 19 nt, Artificial Sequence
  Description of Artificial Sequence: Synthetic oligonucleotide
aguaguacuaauggucuac

SEQ ID NO: 67326 - RNA, 19 nt, Artificial Sequence
  Description of Artificial Sequence: Synthetic oligonucleotide
guucuaaucacuggagugg

SEQ ID NO: 67327 - RNA, 19 nt, Artificial Sequence
  Description of Artificial Sequence: Synthetic oligonucleotide
agcaguuuacucuauaauu

SEQ ID NO: 67328 - RNA, 19 nt, Artificial Sequence
  Description of Artificial Sequence: Synthetic oligonucleotide
uuauuuaagacagccgccu

SEQ ID NO: 67329 - RNA, 19 nt, Artificial Sequence
  Description of Artificial Sequence: Synthetic oligonucleotide
aguuacaccucauuucuga

SEQ ID NO: 67330 - RNA, 19 nt, Artificial Sequence
  Description of Artificial Sequence: Synthetic oligonucleotide
agaauaaaugcaacagagg

SEQ ID NO: 67331 - RNA, 19 nt, Artificial Sequence
  Description of Artificial Sequence: Synthetic oligonucleotide
  modified_base (2)..(2): a, c, u, g, unknown or other
unagggguacaucagcccu

SEQ ID NO: 67332 - RNA, 19 nt, Artificial Sequence
  Description of Artificial Sequence: Synthetic oligonucleotide
uacaccaggguaaugucga

SEQ ID NO: 67333 - RNA, 19 nt, Artificial Sequence
  Description of Artificial Sequence: Synthetic oligonucleotide
gaaggcauggguuggacuc

SEQ ID NO: 67334 - RNA, 19 nt, Artificial Sequence
  Description of Artificial Sequence: Synthetic oligonucleotide
gaaacgugagaagugauuc

SEQ ID NO: 67335 - RNA, 19 nt, Artificial Sequence
  Description of Artificial Sequence: Synthetic oligonucleotide
acagaggucgaugaguggg

SEQ ID NO: 67336 - RNA, 19 nt, Artificial Sequence
  Description of Artificial Sequence: Synthetic oligonucleotide
  modified_base (2)..(2): a, c, u, g, unknown or other
unacccuucgucaggacgu

SEQ ID NO: 67337 - RNA, 19 nt, Artificial Sequence
  Description of Artificial Sequence: Synthetic oligonucleotide
cauagcucauugaucacag

SEQ ID NO: 67338 - RNA, 19 nt, Artificial Sequence
  Description of Artificial Sequence: Synthetic oligonucleotide
gacuacaacugguuaaaac

SEQ ID NO: 67339 - RNA, 19 nt, Artificial Sequence
  Description of Artificial Sequence: Synthetic oligonucleotide
aguccuaaaucuuuacccu

SEQ ID NO: 67340 - RNA, 19 nt, Artificial Sequence
  Description of Artificial Sequence: Synthetic oligonucleotide
uaucagaccucaugcaggc

SEQ ID NO: 67341 - RNA, 19 nt, Artificial Sequence
  Description of Artificial Sequence: Synthetic oligonucleotide
acggcuagauaauuuuggg

SEQ ID NO: 67342 - RNA, 19 nt, Artificial Sequence
  Description of Artificial Sequence: Synthetic oligonucleotide
aauccaugaguuagggcgg

SEQ ID NO: 67343 - RNA, 19 nt, Artificial Sequence
  Description of Artificial Sequence: Synthetic oligonucleotide
uucaacuuacaguaagauc

SEQ ID NO: 67344 - RNA, 19 nt, Artificial Sequence
  Description of Artificial Sequence: Synthetic oligonucleotide
ugcaccauauaccguaaga

SEQ ID NO: 67345 - RNA, 19 nt, Artificial Sequence
  Description of Artificial Sequence: Synthetic oligonucleotide
ugucgauauuccaaacggc

SEQ ID NO: 67346 - RNA, 19 nt, Artificial Sequence
  Description of Artificial Sequence: Synthetic oligonucleotide
uauaggacuauuacugauu

SEQ ID NO: 67347 - RNA, 19 nt, Artificial Sequence
  Description of Artificial Sequence: Synthetic oligonucleotide
acuucauuuuaagugcggg

SEQ ID NO: 67348 - RNA, 19 nt, Artificial Sequence
  Description of Artificial Sequence: Synthetic oligonucleotide
uuauaggacuauuacugau

SEQ ID NO: 67349 - RNA, 19 nt, Artificial Sequence
  Description of Artificial Sequence: Synthetic oligonucleotide
aaacgugagaagugauucu

SEQ ID NO: 67350 - RNA, 19 nt, Artificial Sequence
  Description of Artificial Sequence: Synthetic oligonucleotide
uguaugauguacuguguau

SEQ ID NO: 67351 - RNA, 19 nt, Artificial Sequence
  Description of Artificial Sequence: Synthetic oligonucleotide
aaugcaacagaggucaaua

SEQ ID NO: 67352 - RNA, 19 nt, Artificial Sequence
  Description of Artificial Sequence: Synthetic oligonucleotide
uauguaugauguacugugu

SEQ ID NO: 67353 - RNA, 19 nt, Artificial Sequence
  Description of Artificial Sequence: Synthetic oligonucleotide
guacugguaagaauggaag

SEQ ID NO: 67354 - RNA, 19 nt, Artificial Sequence
  Description of Artificial Sequence: Synthetic oligonucleotide
ucugccauaguaccuucca

SEQ ID NO: 67355 - RNA, 19 nt, Artificial Sequence
  Description of Artificial Sequence: Synthetic oligonucleotide
uuuugcuaauaugaaggca

SEQ ID NO: 67356 - RNA, 19 nt, Artificial Sequence
  Description of Artificial Sequence: Synthetic oligonucleotide
gcucauugaucacagaugc

SEQ ID NO: 67357 - RNA, 19 nt, Artificial Sequence
  Description of Artificial Sequence: Synthetic oligonucleotide
aucgacagucaaucagacc

SEQ ID NO: 67358 - RNA, 19 nt, Artificial Sequence
  Description of Artificial Sequence: Synthetic oligonucleotide
uacauccgauucaaaacca

SEQ ID NO: 67359 - RNA, 19 nt, Artificial Sequence
  Description of Artificial Sequence: Synthetic oligonucleotide
uuuaagguuagagcaagau

SEQ ID NO: 67360 - RNA, 19 nt, Artificial Sequence
  Description of Artificial Sequence: Synthetic oligonucleotide
  modified_base (6)..(6): a, c, u, g, unknown or other
aagaunagggguacaucag

SEQ ID NO: 67361 - RNA, 19 nt, Artificial Sequence
  Description of Artificial Sequence: Synthetic oligonucleotide
aguuuacucuucuuuauuu

SEQ ID NO: 67362 - RNA, 19 nt, Artificial Sequence
  Description of Artificial Sequence: Synthetic oligonucleotide
ucgcuaaugugaugaagag

SEQ ID NO: 67363 - RNA, 19 nt, Artificial Sequence
  Description of Artificial Sequence: Synthetic oligonucleotide
agucaaugacuaaacagag

SEQ ID NO: 67364 - RNA, 19 nt, Artificial Sequence
  Description of Artificial Sequence: Synthetic oligonucleotide
ugcaacagaggucaauaau

SEQ ID NO: 67365 - RNA, 19 nt, Artificial Sequence
  Description of Artificial Sequence: Synthetic oligonucleotide
guaucagaccucaugcagg

SEQ ID NO: 67366 - RNA, 19 nt, Artificial Sequence
  Description of Artificial Sequence: Synthetic oligonucleotide
uccuaaaucuuuacccuuc

SEQ ID NO: 67367 - RNA, 19 nt, Artificial Sequence
  Description of Artificial Sequence: Synthetic oligonucleotide
uagugcauuuaagugagga

SEQ ID NO: 67368 - RNA, 19 nt, Artificial Sequence
  Description of Artificial Sequence: Synthetic oligonucleotide
uauuacugauuauuagcau

SEQ ID NO: 67369 - RNA, 19 nt, Artificial Sequence
  Description of Artificial Sequence: Synthetic oligonucleotide
guaagauccuacuuagcuc

SEQ ID NO: 67370 - RNA, 19 nt, Artificial Sequence
  Description of Artificial Sequence: Synthetic oligonucleotide
aagcauuguaaguugcauu

SEQ ID NO: 67371 - RNA, 19 nt, Artificial Sequence
  Description of Artificial Sequence: Synthetic oligonucleotide
aguuuugauaguugcacuu

SEQ ID NO: 67372 - RNA, 19 nt, Artificial Sequence
  Description of Artificial Sequence: Synthetic oligonucleotide
aaggcauggguuggacucc

SEQ ID NO: 67373 - RNA, 19 nt, Artificial Sequence
  Description of Artificial Sequence: Synthetic oligonucleotide
acaacagcaguuuacucua

SEQ ID NO: 67374 - RNA, 19 nt, Artificial Sequence
  Description of Artificial Sequence: Synthetic oligonucleotide
acagugcccauguggcucc

SEQ ID NO: 67375 - RNA, 19 nt, Artificial Sequence
  Description of Artificial Sequence: Synthetic oligonucleotide
uuaagugcgggagucaaau

SEQ ID NO: 67376 - RNA, 19 nt, Artificial Sequence
  Description of Artificial Sequence: Synthetic oligonucleotide
aaggacaauaacaugcaua

SEQ ID NO: 67377 - RNA, 19 nt, Artificial Sequence
  Description of Artificial Sequence: Synthetic oligonucleotide
acagaguuaacaucuuuua

SEQ ID NO: 67378 - RNA, 19 nt, Artificial Sequence
  Description of Artificial Sequence: Synthetic oligonucleotide
uuuugauaguugcacuuuu

SEQ ID NO: 67379 - RNA, 19 nt, Artificial Sequence
  Description of Artificial Sequence: Synthetic oligonucleotide
aucgcuaaugugaugaaga

SEQ ID NO: 67380 - RNA, 19 nt, Artificial Sequence
  Description of Artificial Sequence: Synthetic oligonucleotide
ugaugggaaacuucucaac

SEQ ID NO: 67381 - RNA, 19 nt, Artificial Sequence
  Description of Artificial Sequence: Synthetic oligonucleotide
ugaaacgugagaagugauu

SEQ ID NO: 67382 - RNA, 19 nt, Artificial Sequence
  Description of Artificial Sequence: Synthetic oligonucleotide
ucggaaguguaugaaacgu

SEQ ID NO: 67383 - RNA, 19 nt, Artificial Sequence
  Description of Artificial Sequence: Synthetic oligonucleotide
acuaauggucuacauccga

SEQ ID NO: 67384 - RNA, 19 nt, Artificial Sequence
  Description of Artificial Sequence: Synthetic oligonucleotide
aggacuauuacugauuauu

SEQ ID NO: 67385 - RNA, 19 nt, Artificial Sequence
  Description of Artificial Sequence: Synthetic oligonucleotide
cuccguaaacauacugacg

SEQ ID NO: 67386 - RNA, 19 nt, Artificial Sequence
  Description of Artificial Sequence: Synthetic oligonucleotide
cuacuuagcucuugcgggc

SEQ ID NO: 67387 - RNA, 19 nt, Artificial Sequence
  Description of Artificial Sequence: Synthetic oligonucleotide
aaacggcuagauaauuuug

SEQ ID NO: 67388 - RNA, 19 nt, Artificial Sequence
  Description of Artificial Sequence: Synthetic oligonucleotide
caacagaggucaauaauca

SEQ ID NO: 67389 - RNA, 19 nt, Artificial Sequence
  Description of Artificial Sequence: Synthetic oligonucleotide
ucggccaucacuccguuuu

SEQ ID NO: 67390 - RNA, 19 nt, Artificial Sequence
  Description of Artificial Sequence: Synthetic oligonucleotide
acagcaguuuacucuauaa

SEQ ID NO: 67391 - RNA, 19 nt, Artificial Sequence
  Description of Artificial Sequence: Synthetic oligonucleotide
cuuuuauaggacuauuacu

SEQ ID NO: 67392 - RNA, 19 nt, Artificial Sequence
  Description of Artificial Sequence: Synthetic oligonucleotide
uucugaucgcuaaugugau

SEQ ID NO: 67393 - RNA, 19 nt, Artificial Sequence
  Description of Artificial Sequence: Synthetic oligonucleotide
caggguaaugucgauauuc

SEQ ID NO: 67394 - RNA, 19 nt, Artificial Sequence
  Description of Artificial Sequence: Synthetic oligonucleotide
aggucaauaaucacaaaau

SEQ ID NO: 67395 - RNA, 19 nt, Artificial Sequence
  Description of Artificial Sequence: Synthetic oligonucleotide
cuagcuggcaucccgaaga

SEQ ID NO: 67396 - RNA, 19 nt, Artificial Sequence
  Description of Artificial Sequence: Synthetic oligonucleotide
uaaugucgauauuccaaac

SEQ ID NO: 67397 - RNA, 19 nt, Artificial Sequence
  Description of Artificial Sequence: Synthetic oligonucleotide
aaacuaaacaggacuccgu

SEQ ID NO: 67398 - RNA, 19 nt, Artificial Sequence
  Description of Artificial Sequence: Synthetic oligonucleotide
aguauguaugauguacugu

SEQ ID NO: 67399 - RNA, 19 nt, Artificial Sequence
  Description of Artificial Sequence: Synthetic oligonucleotide
caaagccucuucagguugg

SEQ ID NO: 67400 - RNA, 19 nt, Artificial Sequence
  Description of Artificial Sequence: Synthetic oligonucleotide
auccuacuuagcucuugcg

SEQ ID NO: 67401 - RNA, 19 nt, Artificial Sequence
  Description of Artificial Sequence: Synthetic oligonucleotide
uuggacuccccggauuucg

SEQ ID NO: 67402 - RNA, 19 nt, Artificial Sequence
  Description of Artificial Sequence: Synthetic oligonucleotide
gacuccguaaacauacuga

SEQ ID NO: 67403 - RNA, 19 nt, Artificial Sequence
  Description of Artificial Sequence: Synthetic oligonucleotide
guagcauuuugacuacaac

SEQ ID NO: 67404 - RNA, 19 nt, Artificial Sequence
  Description of Artificial Sequence: Synthetic oligonucleotide
cugaucgcuaaugugauga

SEQ ID NO: 67405 - RNA, 19 nt, Artificial Sequence
  Description of Artificial Sequence: Synthetic oligonucleotide
cacaauccaugaguuaggg

SEQ ID NO: 67406 - RNA, 19 nt, Artificial Sequence
  Description of Artificial Sequence: Synthetic oligonucleotide
ugguauuagucaccaaguu

SEQ ID NO: 67407 - RNA, 19 nt, Artificial Sequence
  Description of Artificial Sequence: Synthetic oligonucleotide
uaagcauuguaaguugcau

SEQ ID NO: 67408 - RNA, 19 nt, Artificial Sequence
  Description of Artificial Sequence: Synthetic oligonucleotide
uccccuuguaagcugccca

SEQ ID NO: 67409 - RNA, 19 nt, Artificial Sequence
  Description of Artificial Sequence: Synthetic oligonucleotide
cugacgaacuggccuauag

SEQ ID NO: 67410 - RNA, 19 nt, Artificial Sequence
  Description of Artificial Sequence: Synthetic oligonucleotide
uuagcucuugcgggcaggg

SEQ ID NO: 67411 - RNA, 19 nt, Artificial Sequence
  Description of Artificial Sequence: Synthetic oligonucleotide
augguauuagucaccaagu

SEQ ID NO: 67412 - RNA, 19 nt, Artificial Sequence
  Description of Artificial Sequence: Synthetic oligonucleotide
acauagcucauugaucaca

SEQ ID NO: 67413 - RNA, 19 nt, Artificial Sequence
  Description of Artificial Sequence: Synthetic oligonucleotide
  modified_base (9)..(9): a, c, u, g, unknown or other
uggaagaunagggguacau

SEQ ID NO: 67414 - RNA, 19 nt, Artificial Sequence
  Description of Artificial Sequence: Synthetic oligonucleotide
ugcgggagucaaaugcucu

SEQ ID NO: 67415 - RNA, 19 nt, Artificial Sequence
  Description of Artificial Sequence: Synthetic oligonucleotide
agugaguacaccaggguaa

SEQ ID NO: 67416 - RNA, 19 nt, Artificial Sequence
  Description of Artificial Sequence: Synthetic oligonucleotide
augacuaaacagaguuaac

SEQ ID NO: 67417 - RNA, 19 nt, Artificial Sequence
  Description of Artificial Sequence: Synthetic oligonucleotide
aacagcaguuuacucuaua

SEQ ID NO: 67418 - RNA, 19 nt, Artificial Sequence
  Description of Artificial Sequence: Synthetic oligonucleotide
cauugaacuugcuuguaaa

SEQ ID NO: 67419 - RNA, 19 nt, Artificial Sequence
  Description of Artificial Sequence: Synthetic oligonucleotide
uuggcgggguugagcaugg

SEQ ID NO: 67420 - RNA, 19 nt, Artificial Sequence
  Description of Artificial Sequence: Synthetic oligonucleotide
auacugacgaacuggccua

SEQ ID NO: 67421 - RNA, 19 nt, Artificial Sequence
  Description of Artificial Sequence: Synthetic oligonucleotide
cauacugacgaacuggccu

SEQ ID NO: 67422 - RNA, 19 nt, Artificial Sequence
  Description of Artificial Sequence: Synthetic oligonucleotide
cauaguaccuuccaccucu

SEQ ID NO: 67423 - RNA, 19 nt, Artificial Sequence
  Description of Artificial Sequence: Synthetic oligonucleotide
ugaaggcauaaaacagcaa

SEQ ID NO: 67424 - RNA, 19 nt, Artificial Sequence
  Description of Artificial Sequence: Synthetic oligonucleotide
auauaccguaagacgcagc

SEQ ID NO: 67425 - RNA, 19 nt, Artificial Sequence
  Description of Artificial Sequence: Synthetic oligonucleotide
uagggcggaacucccuuca

SEQ ID NO: 67426 - RNA, 19 nt, Artificial Sequence
  Description of Artificial Sequence: Synthetic oligonucleotide
cauauggugccaaaugcua

SEQ ID NO: 67427 - RNA, 19 nt, Artificial Sequence
  Description of Artificial Sequence: Synthetic oligonucleotide
ucugaucgcuaaugugaug

SEQ ID NO: 67428 - RNA, 19 nt, Artificial Sequence
  Description of Artificial Sequence: Synthetic oligonucleotide
uuccugcuacagaagggga

SEQ ID NO: 67429 - RNA, 19 nt, Artificial Sequence
  Description of Artificial Sequence: Synthetic oligonucleotide
uaaugaucacuggcgagaa

SEQ ID NO: 67430 - RNA, 19 nt, Artificial Sequence
  Description of Artificial Sequence: Synthetic oligonucleotide
agaaggcauggguuggacu

SEQ ID NO: 67431 - RNA, 19 nt, Artificial Sequence
  Description of Artificial Sequence: Synthetic oligonucleotide
uggcuuuuguagccucugc

SEQ ID NO: 67432 - RNA, 19 nt, Artificial Sequence
  Description of Artificial Sequence: Synthetic oligonucleotide
gcacguuuuagagucauug

SEQ ID NO: 67433 - RNA, 19 nt, Artificial Sequence
  Description of Artificial Sequence: Synthetic oligonucleotide
  modified_base (18)..(18): a, c, u, g, unknown or other
gucaggacguggaagauna

SEQ ID NO: 67434 - RNA, 19 nt, Artificial Sequence
  Description of Artificial Sequence: Synthetic oligonucleotide
uuucccggcuggcuuugag

SEQ ID NO: 67435 - RNA, 19 nt, Artificial Sequence
  Description of Artificial Sequence: Synthetic oligonucleotide
  modified_base (4)..(4): a, c, u, g, unknown or other
uuunacccuucgucaggac

SEQ ID NO: 67436 - RNA, 19 nt, Artificial Sequence
  Description of Artificial Sequence: Synthetic oligonucleotide
ggaaguguaugaaacguga

SEQ ID NO: 67437 - RNA, 19 nt, Artificial Sequence
  Description of Artificial Sequence: Synthetic oligonucleotide
acuuggacuccccggauuu

SEQ ID NO: 67438 - RNA, 19 nt, Artificial Sequence
  Description of Artificial Sequence: Synthetic oligonucleotide
gugaggauuuguauugcac

SEQ ID NO: 67439 - RNA, 19 nt, Artificial Sequence
  Description of Artificial Sequence: Synthetic oligonucleotide
uccggcucauagaguuugg

SEQ ID NO: 67440 - RNA, 19 nt, Artificial Sequence
  Description of Artificial Sequence: Synthetic oligonucleotide
cugccaaacuaaacaggac

SEQ ID NO: 67441 - RNA, 19 nt, Artificial Sequence
  Description of Artificial Sequence: Synthetic oligonucleotide
ccagcuauuucuagcuucc

SEQ ID NO: 67442 - RNA, 19 nt, Artificial Sequence
  Description of Artificial Sequence: Synthetic oligonucleotide
auuuugacuacaacugguu

SEQ ID NO: 67443 - RNA, 19 nt, Artificial Sequence
  Description of Artificial Sequence: Synthetic oligonucleotide
gacuuccccuuguaagcug

SEQ ID NO: 67444 - RNA, 19 nt, Artificial Sequence
  Description of Artificial Sequence: Synthetic oligonucleotide
gagggaucugaauuuccaa

SEQ ID NO: 67445 - RNA, 19 nt, Artificial Sequence
  Description of Artificial Sequence: Synthetic oligonucleotide
gaaggcccucauccggcgg

SEQ ID NO: 67446 - RNA, 19 nt, Artificial Sequence
  Description of Artificial Sequence: Synthetic oligonucleotide
ucccauuaaguuggggcac

SEQ ID NO: 67447 - RNA, 19 nt, Artificial Sequence
  Description of Artificial Sequence: Synthetic oligonucleotide
augcaacagaggucaauaa

SEQ ID NO: 67448 - RNA, 19 nt, Artificial Sequence
  Description of Artificial Sequence: Synthetic oligonucleotide
gucgauauuccaaacggcu

SEQ ID NO: 67449 - RNA, 19 nt, Artificial Sequence
  Description of Artificial Sequence: Synthetic oligonucleotide
ugaucgcuaaugugaugaa

SEQ ID NO: 67450 - RNA, 19 nt, Artificial Sequence
  Description of Artificial Sequence: Synthetic oligonucleotide
agugcgggagucaaaugcu

SEQ ID NO: 67451 - RNA, 19 nt, Artificial Sequence
  Description of Artificial Sequence: Synthetic oligonucleotide
cacauagcucauugaucac

SEQ ID NO: 67452 - RNA, 19 nt, Artificial Sequence
  Description of Artificial Sequence: Synthetic oligonucleotide
ggacuccguaaacauacug

SEQ ID NO: 67453 - RNA, 19 nt, Artificial Sequence
  Description of Artificial Sequence: Synthetic oligonucleotide
gauguacuguguauucaaa

SEQ ID NO: 67454 - RNA, 19 nt, Artificial Sequence
  Description of Artificial Sequence: Synthetic oligonucleotide
guaguacuaauggucuaca

SEQ ID NO: 67455 - RNA, 19 nt, Artificial Sequence
  Description of Artificial Sequence: Synthetic oligonucleotide
cuaaaucuuuacccuucca

SEQ ID NO: 67456 - RNA, 19 nt, Artificial Sequence
  Description of Artificial Sequence: Synthetic oligonucleotide
uuagggcggaacucccuuc

SEQ ID NO: 67457 - RNA, 19 nt, Artificial Sequence
  Description of Artificial Sequence: Synthetic oligonucleotide
uggggaguuacaccucauu

SEQ ID NO: 67458 - RNA, 19 nt, Artificial Sequence
  Description of Artificial Sequence: Synthetic oligonucleotide
cugccauaguaccuuccac

SEQ ID NO: 67459 - RNA, 19 nt, Artificial Sequence
  Description of Artificial Sequence: Synthetic oligonucleotide
uaggacuauuacugauuau

SEQ ID NO: 67460 - RNA, 19 nt, Artificial Sequence
  Description of Artificial Sequence: Synthetic oligonucleotide
accguaagacgcagcagag

SEQ ID NO: 67461 - RNA, 19 nt, Artificial Sequence
  Description of Artificial Sequence: Synthetic oligonucleotide
guaagcugcccauuccuua

SEQ ID NO: 67462 - RNA, 19 nt, Artificial Sequence
  Description of Artificial Sequence: Synthetic oligonucleotide
uccugacgccgcagaaugc

SEQ ID NO: 67463 - RNA, 19 nt, Artificial Sequence
  Description of Artificial Sequence: Synthetic oligonucleotide
cuuggacgcccucuugcug

SEQ ID NO: 67464 - RNA, 19 nt, Artificial Sequence
  Description of Artificial Sequence: Synthetic oligonucleotide
cuuacggaaaggacaaaau

SEQ ID NO: 67465 - RNA, 19 nt, Artificial Sequence
  Description of Artificial Sequence: Synthetic oligonucleotide
gaaugcgagcuccgggcca

SEQ ID NO: 67466 - RNA, 19 nt, Artificial Sequence
  Description of Artificial Sequence: Synthetic oligonucleotide
auccaucgacagucaauca

SEQ ID NO: 67467 - RNA, 19 nt, Artificial Sequence
  Description of Artificial Sequence: Synthetic oligonucleotide
uccaaacggcuagauaauu

SEQ ID NO: 67468 - RNA, 19 nt, Artificial Sequence
  Description of Artificial Sequence: Synthetic oligonucleotide
cggcuagauaauuuugggg

SEQ ID NO: 67469 - RNA, 19 nt, Artificial Sequence
  Description of Artificial Sequence: Synthetic oligonucleotide
agcaaucuguuuccugcua

SEQ ID NO: 67470 - RNA, 19 nt, Artificial Sequence
  Description of Artificial Sequence: Synthetic oligonucleotide
gccagcuauuucuagcuuc

SEQ ID NO: 67471 - RNA, 19 nt, Artificial Sequence
  Description of Artificial Sequence: Synthetic oligonucleotide
uugcacguuuuagagucau

SEQ ID NO: 67472 - RNA, 19 nt, Artificial Sequence
  Description of Artificial Sequence: Synthetic oligonucleotide
cuaauggucuacauccgau

SEQ ID NO: 67473 - RNA, 19 nt, Artificial Sequence
  Description of Artificial Sequence: Synthetic oligonucleotide
ggggucuuuucccggcugg

SEQ ID NO: 67474 - RNA, 19 nt, Artificial Sequence
  Description of Artificial Sequence: Synthetic oligonucleotide
aaacugugguugugccuua

SEQ ID NO: 67475 - RNA, 19 nt, Artificial Sequence
  Description of Artificial Sequence: Synthetic oligonucleotide
gaguggaaauaacuccccu

SEQ ID NO: 67476 - RNA, 19 nt, Artificial Sequence
  Description of Artificial Sequence: Synthetic oligonucleotide
cguaagacgcagcagagca

SEQ ID NO: 67477 - RNA, 19 nt, Artificial Sequence
  Description of Artificial Sequence: Synthetic oligonucleotide
cggauuucgauuucaguuc

SEQ ID NO: 67478 - RNA, 19 nt, Artificial Sequence
  Description of Artificial Sequence: Synthetic oligonucleotide
aggcgcugucuguacuuag

SEQ ID NO: 67479 - RNA, 19 nt, Artificial Sequence
  Description of Artificial Sequence: Synthetic oligonucleotide
ucgccugugcucccauuaa

SEQ ID NO: 67480 - RNA, 19 nt, Artificial Sequence
  Description of Artificial Sequence: Synthetic oligonucleotide
ggucaauaaucacaaaauu

SEQ ID NO: 67481 - RNA, 19 nt, Artificial Sequence
  Description of Artificial Sequence: Synthetic oligonucleotide
acuggccuauagagcaggg

SEQ ID NO: 67482 - RNA, 19 nt, Artificial Sequence
  Description of Artificial Sequence: Synthetic oligonucleotide
guaagacgcagcagagcac

SEQ ID NO: 67483 - RNA, 19 nt, Artificial Sequence
  Description of Artificial Sequence: Synthetic oligonucleotide
augaaacgugagaagugau

SEQ ID NO: 67484 - RNA, 19 nt, Artificial Sequence
  Description of Artificial Sequence: Synthetic oligonucleotide
cuccauugaacuugcuugu

SEQ ID NO: 67485 - RNA, 19 nt, Artificial Sequence
  Description of Artificial Sequence: Synthetic oligonucleotide
ugguaauguccaugugguu

SEQ ID NO: 67486 - RNA, 19 nt, Artificial Sequence
  Description of Artificial Sequence: Synthetic oligonucleotide
aggauuuguauugcacguu

SEQ ID NO: 67487 - RNA, 19 nt, Artificial Sequence
  Description of Artificial Sequence: Synthetic oligonucleotide
acguacugguaagaaugga

SEQ ID NO: 67488 - RNA, 19 nt, Artificial Sequence
  Description of Artificial Sequence: Synthetic oligonucleotide
acgugagaagugauucuga

SEQ ID NO: 67489 - RNA, 19 nt, Artificial Sequence
  Description of Artificial Sequence: Synthetic oligonucleotide
uccccggauuucgauuuca

SEQ ID NO: 67490 - RNA, 19 nt, Artificial Sequence
  Description of Artificial Sequence: Synthetic oligonucleotide
ugcacguuuuagagucauu

SEQ ID NO: 67491 - RNA, 19 nt, Artificial Sequence
  Description of Artificial Sequence: Synthetic oligonucleotide
  modified_base (8)..(8): a, c, u, g, unknown or other
ggaagaunagggguacauc

SEQ ID NO: 67492 - RNA, 19 nt, Artificial Sequence
  Description of Artificial Sequence: Synthetic oligonucleotide
gcaucggaaguguaugaaa

SEQ ID NO: 67493 - RNA, 19 nt, Artificial Sequence
  Description of Artificial Sequence: Synthetic oligonucleotide
ggcggaacucccuucaacu

SEQ ID NO: 67494 - RNA, 19 nt, Artificial Sequence
  Description of Artificial Sequence: Synthetic oligonucleotide
guuacaccucauuucugau

SEQ ID NO: 67495 - RNA, 19 nt, Artificial Sequence
  Description of Artificial Sequence: Synthetic oligonucleotide
auugcacguuuuagaguca

SEQ ID NO: 67496 - RNA, 19 nt, Artificial Sequence
  Description of Artificial Sequence: Synthetic oligonucleotide
gccgcagaaugcgagcucc

SEQ ID NO: 67497 - RNA, 19 nt, Artificial Sequence
  Description of Artificial Sequence: Synthetic oligonucleotide
gucgccugugcucccauua

SEQ ID NO: 67498 - RNA, 19 nt, Artificial Sequence
  Description of Artificial Sequence: Synthetic oligonucleotide
accacggugccagcuauuu

SEQ ID NO: 67499 - RNA, 19 nt, Artificial Sequence
  Description of Artificial Sequence: Synthetic oligonucleotide
acgccgcagaaugcgagcu

SEQ ID NO: 67500 - RNA, 19 nt, Artificial Sequence
  Description of Artificial Sequence: Synthetic oligonucleotide
gcccugaauugcucccugg

SEQ ID NO: 67501 - RNA, 19 nt, Artificial Sequence
  Description of Artificial Sequence: Synthetic oligonucleotide
cagcaguuuacucuauaau

SEQ ID NO: 67502 - RNA, 19 nt, Artificial Sequence
  Description of Artificial Sequence: Synthetic oligonucleotide
gccugcccugaauugcucc

SEQ ID NO: 67503 - RNA, 19 nt, Artificial Sequence
  Description of Artificial Sequence: Synthetic oligonucleotide
uacugacgaacuggccuau

SEQ ID NO: 67504 - RNA, 19 nt, Artificial Sequence
  Description of Artificial Sequence: Synthetic oligonucleotide
aagauccuacuuagcucuu

SEQ ID NO: 67505 - RNA, 19 nt, Artificial Sequence
  Description of Artificial Sequence: Synthetic oligonucleotide
ccggauuucgauuucaguu

SEQ ID NO: 67506 - RNA, 19 nt, Artificial Sequence
  Description of Artificial Sequence: Synthetic oligonucleotide
acccuucgucaggacgugg

SEQ ID NO: 67507 - RNA, 19 nt, Artificial Sequence
  Description of Artificial Sequence: Synthetic oligonucleotide
ggcaucgacaggaggcaug

SEQ ID NO: 67508 - RNA, 19 nt, Artificial Sequence
  Description of Artificial Sequence: Synthetic oligonucleotide
cugacgccgcagaaugcga

SEQ ID NO: 67509 - RNA, 19 nt, Artificial Sequence
  Description of Artificial Sequence: Synthetic oligonucleotide
ccguuuucagccagggaca

SEQ ID NO: 67510 - RNA, 19 nt, Artificial Sequence
  Description of Artificial Sequence: Synthetic oligonucleotide
aggacuccguaaacauacu

SEQ ID NO: 67511 - RNA, 19 nt, Artificial Sequence
  Description of Artificial Sequence: Synthetic oligonucleotide
cacccggaaggcacgguaa

SEQ ID NO: 67512 - RNA, 19 nt, Artificial Sequence
  Description of Artificial Sequence: Synthetic oligonucleotide
gccccgccuauuuccagcc

SEQ ID NO: 67513 - RNA, 19 nt, Artificial Sequence
  Description of Artificial Sequence: Synthetic oligonucleotide
gacuuggacuccccggauu

SEQ ID NO: 67514 - RNA, 19 nt, Artificial Sequence
  Description of Artificial Sequence: Synthetic oligonucleotide
gacuccccggauuucgauu

SEQ ID NO: 67515 - RNA, 19 nt, Artificial Sequence
  Description of Artificial Sequence: Synthetic oligonucleotide
agggcggaacucccuucaa

SEQ ID NO: 67516 - RNA, 19 nt, Artificial Sequence
  Description of Artificial Sequence: Synthetic oligonucleotide
cuccguuuucagccaggga

SEQ ID NO: 67517 - RNA, 19 nt, Artificial Sequence
  Description of Artificial Sequence: Synthetic oligonucleotide
ccaugaggugagugggcac

SEQ ID NO: 67518 - RNA, 19 nt, Artificial Sequence
  Description of Artificial Sequence: Synthetic oligonucleotide
ccggcucauagaguuuggg

SEQ ID NO: 67519 - RNA, 19 nt, Artificial Sequence
  Description of Artificial Sequence: Synthetic oligonucleotide
ccguaagacgcagcagagc

SEQ ID NO: 67520 - RNA, 19 nt, Artificial Sequence
  Description of Artificial Sequence: Synthetic oligonucleotide
ugucgccugugcucccauu

SEQ ID NO: 67521 - RNA, 19 nt, Artificial Sequence
  Description of Artificial Sequence: Synthetic oligonucleotide
ggcacguacugguaagaau

SEQ ID NO: 67522 - RNA, 19 nt, Artificial Sequence
  Description of Artificial Sequence: Synthetic oligonucleotide
gugcucccauuaaguuggg

SEQ ID NO: 67523 - RNA, 19 nt, Artificial Sequence
  Description of Artificial Sequence: Synthetic oligonucleotide
cauuggcaaacagugccau

SEQ ID NO: 67524 - RNA, 19 nt, Artificial Sequence
  Description of Artificial Sequence: Synthetic oligonucleotide
ccgcagaaugcgagcuccg

SEQ ID NO: 67525 - RNA, 19 nt, Artificial Sequence
  Description of Artificial Sequence: Synthetic oligonucleotide
auaguaccuuccaccucuu

SEQ ID NO: 67526 - RNA, 19 nt, Artificial Sequence
  Description of Artificial Sequence: Synthetic oligonucleotide
cccuucgucaggacgugga

SEQ ID NO: 67527 - RNA, 19 nt, Artificial Sequence
  Description of Artificial Sequence: Synthetic oligonucleotide
cucuugcgggcaggggcug

SEQ ID NO: 67528 - RNA, 19 nt, Artificial Sequence
  Description of Artificial Sequence: Synthetic oligonucleotide
ccauuaaguuggggcacug

SEQ ID NO: 67529 - RNA, 19 nt, Artificial Sequence
  Description of Artificial Sequence: Synthetic oligonucleotide
cccgccuauuuccagccca

SEQ ID NO: 67530 - RNA, 19 nt, Artificial Sequence
  Description of Artificial Sequence: Synthetic oligonucleotide
acugacgaacuggccuaua

SEQ ID NO: 67531 - RNA, 19 nt, Artificial Sequence
  Description of Artificial Sequence: Synthetic oligonucleotide
ccguaaacauacugacgaa

SEQ ID NO: 67532 - RNA, 19 nt, Artificial Sequence
  Description of Artificial Sequence: Synthetic oligonucleotide
accgccuugcccagccaaa

SEQ ID NO: 67533 - RNA, 19 nt, Artificial Sequence
  Description of Artificial Sequence: Synthetic oligonucleotide
gggcacguacugguaagaa

SEQ ID NO: 67534 - RNA, 19 nt, Artificial Sequence
  Description of Artificial Sequence: Synthetic oligonucleotide
cucuuacggaaaggacaaa

SEQ ID NO: 67535 - RNA, 19 nt, Artificial Sequence
  Description of Artificial Sequence: Synthetic oligonucleotide
aggcacgguaagggccugu

SEQ ID NO: 67536 - RNA, 19 nt, Artificial Sequence
  Description of Artificial Sequence: Synthetic oligonucleotide
caacagcaguuuacucuau

SEQ ID NO: 67537 - RNA, 19 nt, Artificial Sequence
  Description of Artificial Sequence: Synthetic oligonucleotide
ccgccuugcccagccaaag

SEQ ID NO: 67538 - RNA, 19 nt, Artificial Sequence
  Description of Artificial Sequence: Synthetic oligonucleotide
gaccaucacagaggucgau

SEQ ID NO: 67539 - RNA, 19 nt, Artificial Sequence
  Description of Artificial Sequence: Synthetic oligonucleotide
ccugugcucccauuaaguu

SEQ ID NO: 67540 - RNA, 19 nt, Artificial Sequence
  Description of Artificial Sequence: Synthetic oligonucleotide
cggaacucccuucaacuua

SEQ ID NO: 67541 - RNA, 19 nt, Artificial Sequence
  Description of Artificial Sequence: Synthetic oligonucleotide
ccuucgucaggacguggaa

SEQ ID NO: 67542 - RNA, 19 nt, Artificial Sequence
  Description of Artificial Sequence: Synthetic oligonucleotide
ggcgcugucuguacuuagu

SEQ ID NO: 67543 - RNA, 19 nt, Artificial Sequence
  Description of Artificial Sequence: Synthetic oligonucleotide
gggagggguguuucguuuu

SEQ ID NO: 67544 - RNA, 19 nt, Artificial Sequence
  Description of Artificial Sequence: Synthetic oligonucleotide
gcgggagucaaaugcucuu

SEQ ID NO: 67545 - RNA, 19 nt, Artificial Sequence
  Description of Artificial Sequence: Synthetic oligonucleotide
gccggaggcaggucuuugu

SEQ ID NO: 67546 - RNA, 19 nt, Artificial Sequence
  Description of Artificial Sequence: Synthetic oligonucleotide
ccccgccuauuuccagccc

SEQ ID NO: 67547 - RNA, 19 nt, Artificial Sequence
  Description of Artificial Sequence: Synthetic oligonucleotide
ccaugucuacuccacucau

SEQ ID NO: 67548 - RNA, 19 nt, Artificial Sequence
  Description of Artificial Sequence: Synthetic oligonucleotide
ucccugcggcaggcgcugu

SEQ ID NO: 67549 - RNA, 19 nt, Artificial Sequence
  Description of Artificial Sequence: Synthetic oligonucleotide
cccauuaaguuggggcacu

SEQ ID NO: 67550 - RNA, 19 nt, Artificial Sequence
  Description of Artificial Sequence: Synthetic oligonucleotide
ccgaccacggugccagcua

SEQ ID NO: 67551 - RNA, 19 nt, Artificial Sequence
  Description of Artificial Sequence: Synthetic oligonucleotide
gucgaugaguggggucuuu

SEQ ID NO: 67552 - RNA, 19 nt, Artificial Sequence
  Description of Artificial Sequence: Synthetic oligonucleotide
cucggccaucacuccguuu

SEQ ID NO: 67553 - RNA, 19 nt, Artificial Sequence
  Description of Artificial Sequence: Synthetic oligonucleotide
cgccgcagaaugcgagcuc

SEQ ID NO: 67554 - RNA, 19 nt, Artificial Sequence
  Description of Artificial Sequence: Synthetic oligonucleotide
ccacucccggaaggccagc

SEQ ID NO: 67555 - RNA, 19 nt, Artificial Sequence
  Description of Artificial Sequence: Synthetic oligonucleotide
cggccccgccuauuuccag

SEQ ID NO: 67556 - RNA, 19 nt, Artificial Sequence
  Description of Artificial Sequence: Synthetic oligonucleotide
gguccggcucauagaguuu

SEQ ID NO: 67557 - RNA, 19 nt, Artificial Sequence
  Description of Artificial Sequence: Synthetic oligonucleotide
cgaccacggugccagcuau

SEQ ID NO: 67558 - RNA, 19 nt, Artificial Sequence
  Description of Artificial Sequence: Synthetic oligonucleotide
agcacaacaagauagaagc

SEQ ID NO: 67559 - RNA, 19 nt, Artificial Sequence
  Description of Artificial Sequence: Synthetic oligonucleotide
aauauaauagucuagcaca

SEQ ID NO: 67560 - RNA, 19 nt, Artificial Sequence
  Description of Artificial Sequence: Synthetic oligonucleotide
aauaaguaggcuuugagcu

SEQ ID NO: 67561 - RNA, 19 nt, Artificial Sequence
  Description of Artificial Sequence: Synthetic oligonucleotide
uuucuuauaagucauuggg

SEQ ID NO: 67562 - RNA, 19 nt, Artificial Sequence
  Description of Artificial Sequence: Synthetic oligonucleotide
uguguuaucuaaaaugugg

SEQ ID NO: 67563 - RNA, 19 nt, Artificial Sequence
  Description of Artificial Sequence: Synthetic oligonucleotide
  modified_base (10)..(10): a, c, u, g, unknown or other
ucuaauuugngcaauacuu

SEQ ID NO: 67564 - RNA, 19 nt, Artificial Sequence
  Description of Artificial Sequence: Synthetic oligonucleotide
gacuauuaaauauagugag

SEQ ID NO: 67565 - RNA, 19 nt, Artificial Sequence
  Description of Artificial Sequence: Synthetic oligonucleotide
uuuuguugcacuuugguug

SEQ ID NO: 67566 - RNA, 19 nt, Artificial Sequence
  Description of Artificial Sequence: Synthetic oligonucleotide
uguuucaaaccuuaguggg

SEQ ID NO: 67567 - RNA, 19 nt, Artificial Sequence
  Description of Artificial Sequence: Synthetic oligonucleotide
uuuaguuagccauucauug

SEQ ID NO: 67568 - RNA, 19 nt, Artificial Sequence
  Description of Artificial Sequence: Synthetic oligonucleotide
gauaguuucgauuaccuac

SEQ ID NO: 67569 - RNA, 19 nt, Artificial Sequence
  Description of Artificial Sequence: Synthetic oligonucleotide
uuuugguuaagucagcuga

SEQ ID NO: 67570 - RNA, 19 nt, Artificial Sequence
  Description of Artificial Sequence: Synthetic oligonucleotide
agucagaaggcuuuggagc

SEQ ID NO: 67571 - RNA, 19 nt, Artificial Sequence
  Description of Artificial Sequence: Synthetic oligonucleotide
uauucagaaauucggcucg

SEQ ID NO: 67572 - RNA, 19 nt, Artificial Sequence
  Description of Artificial Sequence: Synthetic oligonucleotide
auagcuauaccuaacuucc

SEQ ID NO: 67573 - RNA, 19 nt, Artificial Sequence
  Description of Artificial Sequence: Synthetic oligonucleotide
guuucgauuaccuacuuag

SEQ ID NO: 67574 - RNA, 19 nt, Artificial Sequence
  Description of Artificial Sequence: Synthetic oligonucleotide
ugacuauuaaauauaguga

SEQ ID NO: 67575 - RNA, 19 nt, Artificial Sequence
  Description of Artificial Sequence: Synthetic oligonucleotide
gagacuaagauaauuuugg

SEQ ID NO: 67576 - RNA, 19 nt, Artificial Sequence
  Description of Artificial Sequence: Synthetic oligonucleotide
aacacgcuaguccacgugc

SEQ ID NO: 67577 - RNA, 19 nt, Artificial Sequence
  Description of Artificial Sequence: Synthetic oligonucleotide
aacaauaucucaacaguac

SEQ ID NO: 67578 - RNA, 19 nt, Artificial Sequence
  Description of Artificial Sequence: Synthetic oligonucleotide
auugaugaguuacaaggac

SEQ ID NO: 67579 - RNA, 19 nt, Artificial Sequence
  Description of Artificial Sequence: Synthetic oligonucleotide
ucuacaugaauucuaauuu

SEQ ID NO: 67580 - RNA, 19 nt, Artificial Sequence
  Description of Artificial Sequence: Synthetic oligonucleotide
agguauaugaaccagcaca

SEQ ID NO: 67581 - RNA, 19 nt, Artificial Sequence
  Description of Artificial Sequence: Synthetic oligonucleotide
uagauaauuucuuccaugc

SEQ ID NO: 67582 - RNA, 19 nt, Artificial Sequence
  Description of Artificial Sequence: Synthetic oligonucleotide
agaaucaguaaccacgguc

SEQ ID NO: 67583 - RNA, 19 nt, Artificial Sequence
  Description of Artificial Sequence: Synthetic oligonucleotide
aauuuaggacaguaccaac

SEQ ID NO: 67584 - RNA, 19 nt, Artificial Sequence
  Description of Artificial Sequence: Synthetic oligonucleotide
cuucugacguucuagagcc

SEQ ID NO: 67585 - RNA, 19 nt, Artificial Sequence
  Description of Artificial Sequence: Synthetic oligonucleotide
ugugauauugaugaguuac

SEQ ID NO: 67586 - RNA, 19 nt, Artificial Sequence
  Description of Artificial Sequence: Synthetic oligonucleotide
uauaugaaccagcacauaa

SEQ ID NO: 67587 - RNA, 19 nt, Artificial Sequence
  Description of Artificial Sequence: Synthetic oligonucleotide
aucgucauuccucugauag

SEQ ID NO: 67588 - RNA, 19 nt, Artificial Sequence
  Description of Artificial Sequence: Synthetic oligonucleotide
auaauagucuagcacauga

SEQ ID NO: 67589 - RNA, 19 nt, Artificial Sequence
  Description of Artificial Sequence: Synthetic oligonucleotide
  modified_base (17)..(17): a, c, u, g, unknown or other
caugaauucuaauuugngc

SEQ ID NO: 67590 - RNA, 19 nt, Artificial Sequence
  Description of Artificial Sequence: Synthetic oligonucleotide
ucguuauggaaacaaaaca

SEQ ID NO: 67591 - RNA, 19 nt, Artificial Sequence
  Description of Artificial Sequence: Synthetic oligonucleotide
uagaucagaucugaaaugg

SEQ ID NO: 67592 - RNA, 19 nt, Artificial Sequence
  Description of Artificial Sequence: Synthetic oligonucleotide
uuuagguauaugaaccagc

SEQ ID NO: 67593 - RNA, 19 nt, Artificial Sequence
  Description of Artificial Sequence: Synthetic oligonucleotide
ucaauuuaggacaguacca

SEQ ID NO: 67594 - RNA, 19 nt, Artificial Sequence
  Description of Artificial Sequence: Synthetic oligonucleotide
accauuauugcccuagauc

SEQ ID NO: 67595 - RNA, 19 nt, Artificial Sequence
  Description of Artificial Sequence: Synthetic oligonucleotide
auaccaaguguuuauaaug

SEQ ID NO: 67596 - RNA, 19 nt, Artificial Sequence
  Description of Artificial Sequence: Synthetic oligonucleotide
aacugacuaauaaugacag

SEQ ID NO: 67597 - RNA, 19 nt, Artificial Sequence
  Description of Artificial Sequence: Synthetic oligonucleotide
aaacuuaugucauccaaau

SEQ ID NO: 67598 - RNA, 19 nt, Artificial Sequence
  Description of Artificial Sequence: Synthetic oligonucleotide
uacuuagauaauuucuucc

SEQ ID NO: 67599 - RNA, 19 nt, Artificial Sequence
  Description of Artificial Sequence: Synthetic oligonucleotide
uucuuauaagucauugggc

SEQ ID NO: 67600 - RNA, 19 nt, Artificial Sequence
  Description of Artificial Sequence: Synthetic oligonucleotide
aauagucuagcacaugaaa

SEQ ID NO: 67601 - RNA, 19 nt, Artificial Sequence
  Description of Artificial Sequence: Synthetic oligonucleotide
gauauugaugaguuacaag

SEQ ID NO: 67602 - RNA, 19 nt, Artificial Sequence
  Description of Artificial Sequence: Synthetic oligonucleotide
auugcccuagaucagaucu

SEQ ID NO: 67603 - RNA, 19 nt, Artificial Sequence
  Description of Artificial Sequence: Synthetic oligonucleotide
  modified_base (9)..(9): a, c, u, g, unknown or other
cuaauuugngcaauacuug

SEQ ID NO: 67604 - RNA, 19 nt, Artificial Sequence
  Description of Artificial Sequence: Synthetic oligonucleotide
acucguguagucuuagugg

SEQ ID NO: 67605 - RNA, 19 nt, Artificial Sequence
  Description of Artificial Sequence: Synthetic oligonucleotide
  modified_base (7)..(7): a, c, u, g, unknown or other
aauuugngcaauacuuguc

SEQ ID NO: 67606 - RNA, 19 nt, Artificial Sequence
  Description of Artificial Sequence: Synthetic oligonucleotide
agauauuaucaauuuagga

SEQ ID NO: 67607 - RNA, 19 nt, Artificial Sequence
  Description of Artificial Sequence: Synthetic oligonucleotide
uucucuacgaggcagaguu

SEQ ID NO: 67608 - RNA, 19 nt, Artificial Sequence
  Description of Artificial Sequence: Synthetic oligonucleotide
ugugucuacucugucaugg

SEQ ID NO: 67609 - RNA, 19 nt, Artificial Sequence
  Description of Artificial Sequence: Synthetic oligonucleotide
uguucagcugacaguagcg

SEQ ID NO: 67610 - RNA, 19 nt, Artificial Sequence
  Description of Artificial Sequence: Synthetic oligonucleotide
  modified_base (6)..(6): a, c, u, g, unknown or other
auuugngcaauacuugucu

SEQ ID NO: 67611 - RNA, 19 nt, Artificial Sequence
  Description of Artificial Sequence: Synthetic oligonucleotide
uaaucauccaauuuaggua

SEQ ID NO: 67612 - RNA, 19 nt, Artificial Sequence
  Description of Artificial Sequence: Synthetic oligonucleotide
acuauuaaauauagugagc

SEQ ID NO: 67613 - RNA, 19 nt, Artificial Sequence
  Description of Artificial Sequence: Synthetic oligonucleotide
uuuaggaucaaaacaugau

SEQ ID NO: 67614 - RNA, 19 nt, Artificial Sequence
  Description of Artificial Sequence: Synthetic oligonucleotide
acaguagcgagucuauuuc

SEQ ID NO: 67615 - RNA, 19 nt, Artificial Sequence
  Description of Artificial Sequence: Synthetic oligonucleotide
uuauucagaaauucggcuc

SEQ ID NO: 67616 - RNA, 19 nt, Artificial Sequence
  Description of Artificial Sequence: Synthetic oligonucleotide
auauagugagcauauacau

SEQ ID NO: 67617 - RNA, 19 nt, Artificial Sequence
  Description of Artificial Sequence: Synthetic oligonucleotide
  modified_base (8)..(8): a, c, u, g, unknown or other
uaauuugngcaauacuugu

SEQ ID NO: 67618 - RNA, 19 nt, Artificial Sequence
  Description of Artificial Sequence: Synthetic oligonucleotide
cauagcuauaccuaacuuc

SEQ ID NO: 67619 - RNA, 19 nt, Artificial Sequence
  Description of Artificial Sequence: Synthetic oligonucleotide
uagucuagcacaugaaaga

SEQ ID NO: 67620 - RNA, 19 nt, Artificial Sequence
  Description of Artificial Sequence: Synthetic oligonucleotide
uguaugcacauacauuaca

SEQ ID NO: 67621 - RNA, 19 nt, Artificial Sequence
  Description of Artificial Sequence: Synthetic oligonucleotide
ucuccgauuguuucaaacc

SEQ ID NO: 67622 - RNA, 19 nt, Artificial Sequence
  Description of Artificial Sequence: Synthetic oligonucleotide
aggacauacuacuaaauau

SEQ ID NO: 67623 - RNA, 19 nt, Artificial Sequence
  Description of Artificial Sequence: Synthetic oligonucleotide
ugauuuguugccaucuggu

SEQ ID NO: 67624 - RNA, 19 nt, Artificial Sequence
  Description of Artificial Sequence: Synthetic oligonucleotide
auagaugacucguguaguc

SEQ ID NO: 67625 - RNA, 19 nt, Artificial Sequence
  Description of Artificial Sequence: Synthetic oligonucleotide
guuaucuaaaaugugguuc

SEQ ID NO: 67626 - RNA, 19 nt, Artificial Sequence
  Description of Artificial Sequence: Synthetic oligonucleotide
augcuuuacucuaaagugc

SEQ ID NO: 67627 - RNA, 19 nt, Artificial Sequence
  Description of Artificial Sequence: Synthetic oligonucleotide
uacaaugacacuguacgca

SEQ ID NO: 67628 - RNA, 19 nt, Artificial Sequence
  Description of Artificial Sequence: Synthetic oligonucleotide
cauguaugcacauacauua

SEQ ID NO: 67629 - RNA, 19 nt, Artificial Sequence
  Description of Artificial Sequence: Synthetic oligonucleotide
uucgauuaccuacuuagau

SEQ ID NO: 67630 - RNA, 19 nt, Artificial Sequence
  Description of Artificial Sequence: Synthetic oligonucleotide
uuauuguggaugcauuuuc

SEQ ID NO: 67631 - RNA, 19 nt, Artificial Sequence
  Description of Artificial Sequence: Synthetic oligonucleotide
ucuaguugugacuauuaaa

SEQ ID NO: 67632 - RNA, 19 nt, Artificial Sequence
  Description of Artificial Sequence: Synthetic oligonucleotide
uacaaggacauacuacuaa

SEQ ID NO: 67633 - RNA, 19 nt, Artificial Sequence
  Description of Artificial Sequence: Synthetic oligonucleotide
auugcagcgaucaaucauc

SEQ ID NO: 67634 - RNA, 19 nt, Artificial Sequence
  Description of Artificial Sequence: Synthetic oligonucleotide
uuaguuagccauucauuga

SEQ ID NO: 67635 - RNA, 19 nt, Artificial Sequence
  Description of Artificial Sequence: Synthetic oligonucleotide
uagcgagucuauuucacag

SEQ ID NO: 67636 - RNA, 19 nt, Artificial Sequence
  Description of Artificial Sequence: Synthetic oligonucleotide
ugcuugaugaguagauuug

SEQ ID NO: 67637 - RNA, 19 nt, Artificial Sequence
  Description of Artificial Sequence: Synthetic oligonucleotide
auagucuagcacaugaaag

SEQ ID NO: 67638 - RNA, 19 nt, Artificial Sequence
  Description of Artificial Sequence: Synthetic oligonucleotide
auaucucaacaguacaucu

SEQ ID NO: 67639 - RNA, 19 nt, Artificial Sequence
  Description of Artificial Sequence: Synthetic oligonucleotide
agcgagucuauuucacagc

SEQ ID NO: 67640 - RNA, 19 nt, Artificial Sequence
  Description of Artificial Sequence: Synthetic oligonucleotide
ucugacgcuucucagcagc

SEQ ID NO: 67641 - RNA, 19 nt, Artificial Sequence
  Description of Artificial Sequence: Synthetic oligonucleotide
uucaagacugcccucaauu

SEQ ID NO: 67642 - RNA, 19 nt, Artificial Sequence
  Description of Artificial Sequence: Synthetic oligonucleotide
gaagacaccuuagauauca

SEQ ID NO: 67643 - RNA, 19 nt, Artificial Sequence
  Description of Artificial Sequence: Synthetic oligonucleotide
uauuguggaugcauuuuca

SEQ ID NO: 67644 - RNA, 19 nt, Artificial Sequence
  Description of Artificial Sequence: Synthetic oligonucleotide
uguuucuacuggcaaauau

SEQ ID NO: 67645 - RNA, 19 nt, Artificial Sequence
  Description of Artificial Sequence: Synthetic oligonucleotide
ucaagauauuaucaauuua

SEQ ID NO: 67646 - RNA, 19 nt, Artificial Sequence
  Description of Artificial Sequence: Synthetic oligonucleotide
gacucguguagucuuagug

SEQ ID NO: 67647 - RNA, 19 nt, Artificial Sequence
  Description of Artificial Sequence: Synthetic oligonucleotide
ugacuaauaaugacagaaa

SEQ ID NO: 67648 - RNA, 19 nt, Artificial Sequence
  Description of Artificial Sequence: Synthetic oligonucleotide
cucguguagucuuaguggc

SEQ ID NO: 67649 - RNA, 19 nt, Artificial Sequence
  Description of Artificial Sequence: Synthetic oligonucleotide
augcggaaggaauggagac

SEQ ID NO: 67650 - RNA, 19 nt, Artificial Sequence
  Description of Artificial Sequence: Synthetic oligonucleotide
uuguuuaggugucuacaug

SEQ ID NO: 67651 - RNA, 19 nt, Artificial Sequence
  Description of Artificial Sequence: Synthetic oligonucleotide
aggccauauuaucuguggc

SEQ ID NO: 67652 - RNA, 19 nt, Artificial Sequence
  Description of Artificial Sequence: Synthetic oligonucleotide
aauucuacccuaaaacuua

SEQ ID NO: 67653 - RNA, 19 nt, Artificial Sequence
  Description of Artificial Sequence: Synthetic oligonucleotide
gaugacuacuucuguuucc

SEQ ID NO: 67654 - RNA, 19 nt, Artificial Sequence
  Description of Artificial Sequence: Synthetic oligonucleotide
augucuuauaagaaauuuc

SEQ ID NO: 67655 - RNA, 19 nt, Artificial Sequence
  Description of Artificial Sequence: Synthetic oligonucleotide
gauuuguugccaucuggug

SEQ ID NO: 67656 - RNA, 19 nt, Artificial Sequence
  Description of Artificial Sequence: Synthetic oligonucleotide
uuaccuacuuagauaauuu

SEQ ID NO: 67657 - RNA, 19 nt, Artificial Sequence
  Description of Artificial Sequence: Synthetic oligonucleotide
ucagauaguuucgauuacc

SEQ ID NO: 67658 - RNA, 19 nt, Artificial Sequence
  Description of Artificial Sequence: Synthetic oligonucleotide
uaggcgauuugagagagug

SEQ ID NO: 67659 - RNA, 19 nt, Artificial Sequence
  Description of Artificial Sequence: Synthetic oligonucleotide
auauaggaaacauucugua

SEQ ID NO: 67660 - RNA, 19 nt, Artificial Sequence
  Description of Artificial Sequence: Synthetic oligonucleotide
gauaggcgauuugagagag

SEQ ID NO: 67661 - RNA, 19 nt, Artificial Sequence
  Description of Artificial Sequence: Synthetic oligonucleotide
uuaucaauuuaggacagua

SEQ ID NO: 67662 - RNA, 19 nt, Artificial Sequence
  Description of Artificial Sequence: Synthetic oligonucleotide
auuguuuaggugucuacau

SEQ ID NO: 67663 - RNA, 19 nt, Artificial Sequence
  Description of Artificial Sequence: Synthetic oligonucleotide
gauacugcggacgccuucg

SEQ ID NO: 67664 - RNA, 19 nt, Artificial Sequence
  Description of Artificial Sequence: Synthetic oligonucleotide
gauccgcuaagcauguccg

SEQ ID NO: 67665 - RNA, 19 nt, Artificial Sequence
  Description of Artificial Sequence: Synthetic oligonucleotide
uuguggaugcauuuucaca

SEQ ID NO: 67666 - RNA, 19 nt, Artificial Sequence
  Description of Artificial Sequence: Synthetic oligonucleotide
ucgauuaccuacuuagaua

SEQ ID NO: 67667 - RNA, 19 nt, Artificial Sequence
  Description of Artificial Sequence: Synthetic oligonucleotide
ugugacuauuaaauauagu

SEQ ID NO: 67668 - RNA, 19 nt, Artificial Sequence
  Description of Artificial Sequence: Synthetic oligonucleotide
cagcgaucaaucaucagug

SEQ ID NO: 67669 - RNA, 19 nt, Artificial Sequence
  Description of Artificial Sequence: Synthetic oligonucleotide
aaauucggcucguuccucu

SEQ ID NO: 67670 - RNA, 19 nt, Artificial Sequence
  Description of Artificial Sequence: Synthetic oligonucleotide
  modified_base (3)..(3): a, c, u, g, unknown or other
ugngcaauacuugucucca

SEQ ID NO: 67671 - RNA, 19 nt, Artificial Sequence
  Description of Artificial Sequence: Synthetic oligonucleotide
ucuuaccauagacuugugu

SEQ ID NO: 67672 - RNA, 19 nt, Artificial Sequence
  Description of Artificial Sequence: Synthetic oligonucleotide
gacucuaagugguacagaa

SEQ ID NO: 67673 - RNA, 19 nt, Artificial Sequence
  Description of Artificial Sequence: Synthetic oligonucleotide
ucuggugauuuaguuagcc

SEQ ID NO: 67674 - RNA, 19 nt, Artificial Sequence
  Description of Artificial Sequence: Synthetic oligonucleotide
gauuugagagaguguggcc

SEQ ID NO: 67675 - RNA, 19 nt, Artificial Sequence
  Description of Artificial Sequence: Synthetic oligonucleotide
ugguuaagucagcugaggu

SEQ ID NO: 67676 - RNA, 19 nt, Artificial Sequence
  Description of Artificial Sequence: Synthetic oligonucleotide
ugauaggcgauuugagaga

SEQ ID NO: 67677 - RNA, 19 nt, Artificial Sequence
  Description of Artificial Sequence: Synthetic oligonucleotide
ugagcauauacauggguuu

SEQ ID NO: 67678 - RNA, 19 nt, Artificial Sequence
  Description of Artificial Sequence: Synthetic oligonucleotide
uuucgauuaccuacuuaga

SEQ ID NO: 67679 - RNA, 19 nt, Artificial Sequence
  Description of Artificial Sequence: Synthetic oligonucleotide
ucaccugucccaaggauuc

SEQ ID NO: 67680 - RNA, 19 nt, Artificial Sequence
  Description of Artificial Sequence: Synthetic oligonucleotide
cugacuaauaaugacagaa

SEQ ID NO: 67681 - RNA, 19 nt, Artificial Sequence
  Description of Artificial Sequence: Synthetic oligonucleotide
uggguucuuucuccgauug

SEQ ID NO: 67682 - RNA, 19 nt, Artificial Sequence
  Description of Artificial Sequence: Synthetic oligonucleotide
guuucaaaccuuagugggg

SEQ ID NO: 67683 - RNA, 19 nt, Artificial Sequence
  Description of Artificial Sequence: Synthetic oligonucleotide
acaaggacauacuacuaaa

SEQ ID NO: 67684 - RNA, 19 nt, Artificial Sequence
  Description of Artificial Sequence: Synthetic oligonucleotide
agucuagcacaugaaagag

SEQ ID NO: 67685 - RNA, 19 nt, Artificial Sequence
  Description of Artificial Sequence: Synthetic oligonucleotide
uaauagucuagcacaugaa

SEQ ID NO: 67686 - RNA, 19 nt, Artificial Sequence
  Description of Artificial Sequence: Synthetic oligonucleotide
uagugagcauauacauggg

SEQ ID NO: 67687 - RNA, 19 nt, Artificial Sequence
  Description of Artificial Sequence: Synthetic oligonucleotide
uucuccgauuguuucaaac

SEQ ID NO: 67688 - RNA, 19 nt, Artificial Sequence
  Description of Artificial Sequence: Synthetic oligonucleotide
agugagcauauacaugggu

SEQ ID NO: 67689 - RNA, 19 nt, Artificial Sequence
  Description of Artificial Sequence: Synthetic oligonucleotide
acaccuuagauaucaaaua

SEQ ID NO: 67690 - RNA, 19 nt, Artificial Sequence
  Description of Artificial Sequence: Synthetic oligonucleotide
  modified_base (5)..(5): a, c, u, g, unknown or other
uuugngcaauacuugucuc

SEQ ID NO: 67691 - RNA, 19 nt, Artificial Sequence
  Description of Artificial Sequence: Synthetic oligonucleotide
uguuaucuaaaaugugguu

SEQ ID NO: 67692 - RNA, 19 nt, Artificial Sequence
  Description of Artificial Sequence: Synthetic oligonucleotide
uauaagucauugggcauug

SEQ ID NO: 67693 - RNA, 19 nt, Artificial Sequence
  Description of Artificial Sequence: Synthetic oligonucleotide
ugauuuaguuagccauuca

SEQ ID NO: 67694 - RNA, 19 nt, Artificial Sequence
  Description of Artificial Sequence: Synthetic oligonucleotide
caacaagauagaagcacug

SEQ ID NO: 67695 - RNA, 19 nt, Artificial Sequence
  Description of Artificial Sequence: Synthetic oligonucleotide
aguagcgagucuauuucac

SEQ ID NO: 67696 - RNA, 19 nt, Artificial Sequence
  Description of Artificial Sequence: Synthetic oligonucleotide
uucagauaguuucgauuac

SEQ ID NO: 67697 - RNA, 19 nt, Artificial Sequence
  Description of Artificial Sequence: Synthetic oligonucleotide
gauuuaguuagccauucau

SEQ ID NO: 67698 - RNA, 19 nt, Artificial Sequence
  Description of Artificial Sequence: Synthetic oligonucleotide
uuacaaccauuauugcccu

SEQ ID NO: 67699 - RNA, 19 nt, Artificial Sequence
  Description of Artificial Sequence: Synthetic oligonucleotide
aaccauuauugcccuagau

SEQ ID NO: 67700 - RNA, 19 nt, Artificial Sequence
  Description of Artificial Sequence: Synthetic oligonucleotide
gaugucguuauggaaacaa

SEQ ID NO: 67701 - RNA, 19 nt, Artificial Sequence
  Description of Artificial Sequence: Synthetic oligonucleotide
acggucagcuaaaauaauc

SEQ ID NO: 67702 - RNA, 19 nt, Artificial Sequence
  Description of Artificial Sequence: Synthetic oligonucleotide
auuaccuacuuagauaauu

SEQ ID NO: 67703 - RNA, 19 nt, Artificial Sequence
  Description of Artificial Sequence: Synthetic oligonucleotide
uuauaagucauugggcauu

SEQ ID NO: 67704 - RNA, 19 nt, Artificial Sequence
  Description of Artificial Sequence: Synthetic oligonucleotide
agauguucagcugacagua

SEQ ID NO: 67705 - RNA, 19 nt, Artificial Sequence
  Description of Artificial Sequence: Synthetic oligonucleotide
acaacaagauagaagcacu

SEQ ID NO: 67706 - RNA, 19 nt, Artificial Sequence
  Description of Artificial Sequence: Synthetic oligonucleotide
agcaagaugucuugcaguu

SEQ ID NO: 67707 - RNA, 19 nt, Artificial Sequence
  Description of Artificial Sequence: Synthetic oligonucleotide
auaguuucgauuaccuacu

SEQ ID NO: 67708 - RNA, 19 nt, Artificial Sequence
  Description of Artificial Sequence: Synthetic oligonucleotide
cucugauaggcgauuugag

SEQ ID NO: 67709 - RNA, 19 nt, Artificial Sequence
  Description of Artificial Sequence: Synthetic oligonucleotide
accuacuuagauaauuucu

SEQ ID NO: 67710 - RNA, 19 nt, Artificial Sequence
  Description of Artificial Sequence: Synthetic oligonucleotide
uugacgucucucuucucgc

SEQ ID NO: 67711 - RNA, 19 nt, Artificial Sequence
  Description of Artificial Sequence: Synthetic oligonucleotide
accucauaucguccugggc

SEQ ID NO: 67712 - RNA, 19 nt, Artificial Sequence
  Description of Artificial Sequence: Synthetic oligonucleotide
agagcagccuaccauuagu

SEQ ID NO: 67713 - RNA, 19 nt, Artificial Sequence
  Description of Artificial Sequence: Synthetic oligonucleotide
uacgcauagaauguucuau

SEQ ID NO: 67714 - RNA, 19 nt, Artificial Sequence
  Description of Artificial Sequence: Synthetic oligonucleotide
gucagaaggcuuuggagca

SEQ ID NO: 67715 - RNA, 19 nt, Artificial Sequence
  Description of Artificial Sequence: Synthetic oligonucleotide
ucucuaguugugacuauua

SEQ ID NO: 67716 - RNA, 19 nt, Artificial Sequence
  Description of Artificial Sequence: Synthetic oligonucleotide
gccauauuaucuguggccg

SEQ ID NO: 67717 - RNA, 19 nt, Artificial Sequence
  Description of Artificial Sequence: Synthetic oligonucleotide
accuuauccacagauugcu

SEQ ID NO: 67718 - RNA, 19 nt, Artificial Sequence
  Description of Artificial Sequence: Synthetic oligonucleotide
uuacugggauauuggaaaa

SEQ ID NO: 67719 - RNA, 19 nt, Artificial Sequence
  Description of Artificial Sequence: Synthetic oligonucleotide
ggcgauuugagagagugug

SEQ ID NO: 67720 - RNA, 19 nt, Artificial Sequence
  Description of Artificial Sequence: Synthetic oligonucleotide
uggagacuaccgcugcuug

SEQ ID NO: 67721 - RNA, 19 nt, Artificial Sequence
  Description of Artificial Sequence: Synthetic oligonucleotide
agcuagggaauccaacuau

SEQ ID NO: 67722 - RNA, 19 nt, Artificial Sequence
  Description of Artificial Sequence: Synthetic oligonucleotide
ggccauauuaucuguggcc

SEQ ID NO: 67723 - RNA, 19 nt, Artificial Sequence
  Description of Artificial Sequence: Synthetic oligonucleotide
auguaugcacauacauuac

SEQ ID NO: 67724 - RNA, 19 nt, Artificial Sequence
  Description of Artificial Sequence: Synthetic oligonucleotide
uagcuuuucgaucggccuc

SEQ ID NO: 67725 - RNA, 19 nt, Artificial Sequence
  Description of Artificial Sequence: Synthetic oligonucleotide
gacgccuucggccggaaca

SEQ ID NO: 67726 - RNA, 19 nt, Artificial Sequence
  Description of Artificial Sequence: Synthetic oligonucleotide
auuuaguuagccauucauu

SEQ ID NO: 67727 - RNA, 19 nt, Artificial Sequence
  Description of Artificial Sequence: Synthetic oligonucleotide
uccuuauuuggugucccug

SEQ ID NO: 67728 - RNA, 19 nt, Artificial Sequence
  Description of Artificial Sequence: Synthetic oligonucleotide
ugagccuuuaggagugaaa

SEQ ID NO: 67729 - RNA, 19 nt, Artificial Sequence
  Description of Artificial Sequence: Synthetic oligonucleotide
gguauacugcuccagccug

SEQ ID NO: 67730 - RNA, 19 nt, Artificial Sequence
  Description of Artificial Sequence: Synthetic oligonucleotide
uagaugacucguguagucu

SEQ ID NO: 67731 - RNA, 19 nt, Artificial Sequence
  Description of Artificial Sequence: Synthetic oligonucleotide
ggauccgcuaagcaugucc

SEQ ID NO: 67732 - RNA, 19 nt, Artificial Sequence
  Description of Artificial Sequence: Synthetic oligonucleotide
gaccuuauccacagauugc

SEQ ID NO: 67733 - RNA, 19 nt, Artificial Sequence
  Description of Artificial Sequence: Synthetic oligonucleotide
aaacauucuguaagacgcu

SEQ ID NO: 67734 - RNA, 19 nt, Artificial Sequence
  Description of Artificial Sequence: Synthetic oligonucleotide
uucuacccuaaaacuuaug

SEQ ID NO: 67735 - RNA, 19 nt, Artificial Sequence
  Description of Artificial Sequence: Synthetic oligonucleotide
gacgccacuuuucugcaca

SEQ ID NO: 67736 - RNA, 19 nt, Artificial Sequence
  Description of Artificial Sequence: Synthetic oligonucleotide
gacaccuuagauaucaaau

SEQ ID NO: 67737 - RNA, 19 nt, Artificial Sequence
  Description of Artificial Sequence: Synthetic oligonucleotide
uugcccuagaucagaucug

SEQ ID NO: 67738 - RNA, 19 nt, Artificial Sequence
  Description of Artificial Sequence: Synthetic oligonucleotide
cuaaaacuuaugucaucca

SEQ ID NO: 67739 - RNA, 19 nt, Artificial Sequence
  Description of Artificial Sequence: Synthetic oligonucleotide
gucuacaugaauucuaauu

SEQ ID NO: 67740 - RNA, 19 nt, Artificial Sequence
  Description of Artificial Sequence: Synthetic oligonucleotide
ugaguagauuugacgccac

SEQ ID NO: 67741 - RNA, 19 nt, Artificial Sequence
  Description of Artificial Sequence: Synthetic oligonucleotide
agacaccuuagauaucaaa

SEQ ID NO: 67742 - RNA, 19 nt, Artificial Sequence
  Description of Artificial Sequence: Synthetic oligonucleotide
gaacacgcuaguccacgug

SEQ ID NO: 67743 - RNA, 19 nt, Artificial Sequence
  Description of Artificial Sequence: Synthetic oligonucleotide
auuuuacuccaaugaugga

SEQ ID NO: 67744 - RNA, 19 nt, Artificial Sequence
  Description of Artificial Sequence: Synthetic oligonucleotide
gcagccuaccauuagugug

SEQ ID NO: 67745 - RNA, 19 nt, Artificial Sequence
  Description of Artificial Sequence: Synthetic oligonucleotide
aagacugcccucaauuaua

SEQ ID NO: 67746 - RNA, 19 nt, Artificial Sequence
  Description of Artificial Sequence: Synthetic oligonucleotide
uuacuccaaugauggaagu

SEQ ID NO: 67747 - RNA, 19 nt, Artificial Sequence
  Description of Artificial Sequence: Synthetic oligonucleotide
auaucguccugggcgacuc

SEQ ID NO: 67748 - RNA, 19 nt, Artificial Sequence
  Description of Artificial Sequence: Synthetic oligonucleotide
cauguccguagcugguccg

SEQ ID NO: 67749 - RNA, 19 nt, Artificial Sequence
  Description of Artificial Sequence: Synthetic oligonucleotide
ugacagacuggcaucuguu

SEQ ID NO: 67750 - RNA, 19 nt, Artificial Sequence
  Description of Artificial Sequence: Synthetic oligonucleotide
uccgauuguuucaaaccuu

SEQ ID NO: 67751 - RNA, 19 nt, Artificial Sequence
  Description of Artificial Sequence: Synthetic oligonucleotide
cucucagucuccccgcggc

SEQ ID NO: 67752 - RNA, 19 nt, Artificial Sequence
  Description of Artificial Sequence: Synthetic oligonucleotide
uugacgccacuuuucugca

SEQ ID NO: 67753 - RNA, 19 nt, Artificial Sequence
  Description of Artificial Sequence: Synthetic oligonucleotide
uagcuauaccuaacuucca

SEQ ID NO: 67754 - RNA, 19 nt, Artificial Sequence
  Description of Artificial Sequence: Synthetic oligonucleotide
gucccaaggauucuuccuc

SEQ ID NO: 67755 - RNA, 19 nt, Artificial Sequence
  Description of Artificial Sequence: Synthetic oligonucleotide
auccaacuaucuuuacuaa

SEQ ID NO: 67756 - RNA, 19 nt, Artificial Sequence
  Description of Artificial Sequence: Synthetic oligonucleotide
acgcauagaauguucuaua

SEQ ID NO: 67757 - RNA, 19 nt, Artificial Sequence
  Description of Artificial Sequence: Synthetic oligonucleotide
ugcccuagaucagaucuga

SEQ ID NO: 67758 - RNA, 19 nt, Artificial Sequence
  Description of Artificial Sequence: Synthetic oligonucleotide
cuucggccggaacaggaag

SEQ ID NO: 67759 - RNA, 19 nt, Artificial Sequence
  Description of Artificial Sequence: Synthetic oligonucleotide
ugcccucaauuauaaacua

SEQ ID NO: 67760 - RNA, 19 nt, Artificial Sequence
  Description of Artificial Sequence: Synthetic oligonucleotide
ucuacgaggcagaguuggu

SEQ ID NO: 67761 - RNA, 19 nt, Artificial Sequence
  Description of Artificial Sequence: Synthetic oligonucleotide
ucguguagucuuaguggcu

SEQ ID NO: 67762 - RNA, 19 nt, Artificial Sequence
  Description of Artificial Sequence: Synthetic oligonucleotide
aggcuuaguagguuuugaa

SEQ ID NO: 67763 - RNA, 19 nt, Artificial Sequence
  Description of Artificial Sequence: Synthetic oligonucleotide
guagcgagucuauuucaca

SEQ ID NO: 67764 - RNA, 19 nt, Artificial Sequence
  Description of Artificial Sequence: Synthetic oligonucleotide
cuagcacaugaaagagcag

SEQ ID NO: 67765 - RNA, 19 nt, Artificial Sequence
  Description of Artificial Sequence: Synthetic oligonucleotide
gcaguuggguucuuucucc

SEQ ID NO: 67766 - RNA, 19 nt, Artificial Sequence
  Description of Artificial Sequence: Synthetic oligonucleotide
ucauccaauuuagguauau

SEQ ID NO: 67767 - RNA, 19 nt, Artificial Sequence
  Description of Artificial Sequence: Synthetic oligonucleotide
ugauacugcggacgccuuc

SEQ ID NO: 67768 - RNA, 19 nt, Artificial Sequence
  Description of Artificial Sequence: Synthetic oligonucleotide
aguuucgauuaccuacuua

SEQ ID NO: 67769 - RNA, 19 nt, Artificial Sequence
  Description of Artificial Sequence: Synthetic oligonucleotide
cuguaagacgcugggguac

SEQ ID NO: 67770 - RNA, 19 nt, Artificial Sequence
  Description of Artificial Sequence: Synthetic oligonucleotide
acauuacauaguuguguua

SEQ ID NO: 67771 - RNA, 19 nt, Artificial Sequence
  Description of Artificial Sequence: Synthetic oligonucleotide
agcgaucaaucaucaguga

SEQ ID NO: 67772 - RNA, 19 nt, Artificial Sequence
  Description of Artificial Sequence: Synthetic oligonucleotide
uguaagacgcugggguacu

SEQ ID NO: 67773 - RNA, 19 nt, Artificial Sequence
  Description of Artificial Sequence: Synthetic oligonucleotide
agaacacgcuaguccacgu

SEQ ID NO: 67774 - RNA, 19 nt, Artificial Sequence
  Description of Artificial Sequence: Synthetic oligonucleotide
cauuacauaguuguguuau

SEQ ID NO: 67775 - RNA, 19 nt, Artificial Sequence
  Description of Artificial Sequence: Synthetic oligonucleotide
uucggcucguuccucuauc

SEQ ID NO: 67776 - RNA, 19 nt, Artificial Sequence
  Description of Artificial Sequence: Synthetic oligonucleotide
caucuuaccauagacuugu

SEQ ID NO: 67777 - RNA, 19 nt, Artificial Sequence
  Description of Artificial Sequence: Synthetic oligonucleotide
uauugcccuagaucagauc

SEQ ID NO: 67778 - RNA, 19 nt, Artificial Sequence
  Description of Artificial Sequence: Synthetic oligonucleotide
cugcccucaauuauaaacu

SEQ ID NO: 67779 - RNA, 19 nt, Artificial Sequence
  Description of Artificial Sequence: Synthetic oligonucleotide
gacaguagcgagucuauuu

SEQ ID NO: 67780 - RNA, 19 nt, Artificial Sequence
  Description of Artificial Sequence: Synthetic oligonucleotide
uuccuuauuuggugucccu

SEQ ID NO: 67781 - RNA, 19 nt, Artificial Sequence
  Description of Artificial Sequence: Synthetic oligonucleotide
gacucccaccuucaggcca

SEQ ID NO: 67782 - RNA, 19 nt, Artificial Sequence
  Description of Artificial Sequence: Synthetic oligonucleotide
cauccaauuuagguauaug

SEQ ID NO: 67783 - RNA, 19 nt, Artificial Sequence
  Description of Artificial Sequence: Synthetic oligonucleotide
aauucggcucguuccucua

SEQ ID NO: 67784 - RNA, 19 nt, Artificial Sequence
  Description of Artificial Sequence: Synthetic oligonucleotide
uuccgcuugccagauacau

SEQ ID NO: 67785 - RNA, 19 nt, Artificial Sequence
  Description of Artificial Sequence: Synthetic oligonucleotide
uccaaugauggaagucauu

SEQ ID NO: 67786 - RNA, 19 nt, Artificial Sequence
  Description of Artificial Sequence: Synthetic oligonucleotide
guaccaacugacuaauaau

SEQ ID NO: 67787 - RNA, 19 nt, Artificial Sequence
  Description of Artificial Sequence: Synthetic oligonucleotide
uucugacgcuucucagcag

SEQ ID NO: 67788 - RNA, 19 nt, Artificial Sequence
  Description of Artificial Sequence: Synthetic oligonucleotide
uccauuuauuguggaugca

SEQ ID NO: 67789 - RNA, 19 nt, Artificial Sequence
  Description of Artificial Sequence: Synthetic oligonucleotide
gcgguuuccuuauuuggug

SEQ ID NO: 67790 - RNA, 19 nt, Artificial Sequence
  Description of Artificial Sequence: Synthetic oligonucleotide
augacucguguagucuuag

SEQ ID NO: 67791 - RNA, 19 nt, Artificial Sequence
  Description of Artificial Sequence: Synthetic oligonucleotide
gguuaagucagcugaggua

SEQ ID NO: 67792 - RNA, 19 nt, Artificial Sequence
  Description of Artificial Sequence: Synthetic oligonucleotide
gacguucuagagccuccug

SEQ ID NO: 67793 - RNA, 19 nt, Artificial Sequence
  Description of Artificial Sequence: Synthetic oligonucleotide
cgauuaccuacuuagauaa

SEQ ID NO: 67794 - RNA, 19 nt, Artificial Sequence
  Description of Artificial Sequence: Synthetic oligonucleotide
auacugcggacgccuucgg

SEQ ID NO: 67795 - RNA, 19 nt, Artificial Sequence
  Description of Artificial Sequence: Synthetic oligonucleotide
guauacugcuccagccugc

SEQ ID NO: 67796 - RNA, 19 nt, Artificial Sequence
  Description of Artificial Sequence: Synthetic oligonucleotide
agacuugugucuacucugu

SEQ ID NO: 67797 - RNA, 19 nt, Artificial Sequence
  Description of Artificial Sequence: Synthetic oligonucleotide
gcgagucuauuucacagca

SEQ ID NO: 67798 - RNA, 19 nt, Artificial Sequence
  Description of Artificial Sequence: Synthetic oligonucleotide
uccuuagauuccucugaua

SEQ ID NO: 67799 - RNA, 19 nt, Artificial Sequence
  Description of Artificial Sequence: Synthetic oligonucleotide
cuccgauuguuucaaaccu

SEQ ID NO: 67800 - RNA, 19 nt, Artificial Sequence
  Description of Artificial Sequence: Synthetic oligonucleotide
uucccucaauggcauuggu

SEQ ID NO: 67801 - RNA, 19 nt, Artificial Sequence
  Description of Artificial Sequence: Synthetic oligonucleotide
gacuugugucuacucuguc

SEQ ID NO: 67802 - RNA, 19 nt, Artificial Sequence
  Description of Artificial Sequence: Synthetic oligonucleotide
ugggguacuuuugggagua

SEQ ID NO: 67803 - RNA, 19 nt, Artificial Sequence
  Description of Artificial Sequence: Synthetic oligonucleotide
uccgcuaagcauguccgua

SEQ ID NO: 67804 - RNA, 19 nt, Artificial Sequence
  Description of Artificial Sequence: Synthetic oligonucleotide
cucuaguugugacuauuaa

SEQ ID NO: 67805 - RNA, 19 nt, Artificial Sequence
  Description of Artificial Sequence: Synthetic oligonucleotide
acaggccauauuaucugug

SEQ ID NO: 67806 - RNA, 19 nt, Artificial Sequence
  Description of Artificial Sequence: Synthetic oligonucleotide
cuagcuuuucgaucggccu

SEQ ID NO: 67807 - RNA, 19 nt, Artificial Sequence
  Description of Artificial Sequence: Synthetic oligonucleotide
uuucucuacgaggcagagu

SEQ ID NO: 67808 - RNA, 19 nt, Artificial Sequence
  Description of Artificial Sequence: Synthetic oligonucleotide
aucguccugggcgacucuc

SEQ ID NO: 67809 - RNA, 19 nt, Artificial Sequence
  Description of Artificial Sequence: Synthetic oligonucleotide
cuacgaggcagaguugguc

SEQ ID NO: 67810 - RNA, 19 nt, Artificial Sequence
  Description of Artificial Sequence: Synthetic oligonucleotide
ugacguucuagagccuccu

SEQ ID NO: 67811 - RNA, 19 nt, Artificial Sequence
  Description of Artificial Sequence: Synthetic oligonucleotide
cccucaauuauaaacuaaa

SEQ ID NO: 67812 - RNA, 19 nt, Artificial Sequence
  Description of Artificial Sequence: Synthetic oligonucleotide
acauggguuuacugggaua

SEQ ID NO: 67813 - RNA, 19 nt, Artificial Sequence
  Description of Artificial Sequence: Synthetic oligonucleotide
caguagcgagucuauuuca

SEQ ID NO: 67814 - RNA, 19 nt, Artificial Sequence
  Description of Artificial Sequence: Synthetic oligonucleotide
gaaauucggcucguuccuc

SEQ ID NO: 67815 - RNA, 19 nt, Artificial Sequence
  Description of Artificial Sequence: Synthetic oligonucleotide
cacgcuaguccacgugcag

SEQ ID NO: 67816 - RNA, 19 nt, Artificial Sequence
  Description of Artificial Sequence: Synthetic oligonucleotide
agacuaccgcugcuugaug

SEQ ID NO: 67817 - RNA, 19 nt, Artificial Sequence
  Description of Artificial Sequence: Synthetic oligonucleotide
ugaugucguuauggaaaca

SEQ ID NO: 67818 - RNA, 19 nt, Artificial Sequence
  Description of Artificial Sequence: Synthetic oligonucleotide
ucgaacucuuucgcucuca

SEQ ID NO: 67819 - RNA, 19 nt, Artificial Sequence
  Description of Artificial Sequence: Synthetic oligonucleotide
ugggcgacucucucuuuuc

SEQ ID NO: 67820 - RNA, 19 nt, Artificial Sequence
  Description of Artificial Sequence: Synthetic oligonucleotide
cacuguacgcauagaaugu

SEQ ID NO: 67821 - RNA, 19 nt, Artificial Sequence
  Description of Artificial Sequence: Synthetic oligonucleotide
uccuugacucuaaguggua

SEQ ID NO: 67822 - RNA, 19 nt, Artificial Sequence
  Description of Artificial Sequence: Synthetic oligonucleotide
ucguccugggcgacucucu

SEQ ID NO: 67823 - RNA, 19 nt, Artificial Sequence
  Description of Artificial Sequence: Synthetic oligonucleotide
auucuacccuaaaacuuau

SEQ ID NO: 67824 - RNA, 19 nt, Artificial Sequence
  Description of Artificial Sequence: Synthetic oligonucleotide
ugggacccggauccgcuaa

SEQ ID NO: 67825 - RNA, 19 nt, Artificial Sequence
  Description of Artificial Sequence: Synthetic oligonucleotide
acgccuucggccggaacag

SEQ ID NO: 67826 - RNA, 19 nt, Artificial Sequence
  Description of Artificial Sequence: Synthetic oligonucleotide
uuuugacgucucucuucuc

SEQ ID NO: 67827 - RNA, 19 nt, Artificial Sequence
  Description of Artificial Sequence: Synthetic oligonucleotide
gucuacucugucauggaua

SEQ ID NO: 67828 - RNA, 19 nt, Artificial Sequence
  Description of Artificial Sequence: Synthetic oligonucleotide
auccgcuaagcauguccgu

SEQ ID NO: 67829 - RNA, 19 nt, Artificial Sequence
  Description of Artificial Sequence: Synthetic oligonucleotide
cagccuaccauuagugugu

SEQ ID NO: 67830 - RNA, 19 nt, Artificial Sequence
  Description of Artificial Sequence: Synthetic oligonucleotide
agccuaccauuaguguguc

SEQ ID NO: 67831 - RNA, 19 nt, Artificial Sequence
  Description of Artificial Sequence: Synthetic oligonucleotide
guaaccacggucagcuaaa

SEQ ID NO: 67832 - RNA, 19 nt, Artificial Sequence
  Description of Artificial Sequence: Synthetic oligonucleotide
auauuaucuguggccggaa

SEQ ID NO: 67833 - RNA, 19 nt, Artificial Sequence
  Description of Artificial Sequence: Synthetic oligonucleotide
auucggcucguuccucuau

SEQ ID NO: 67834 - RNA, 19 nt, Artificial Sequence
  Description of Artificial Sequence: Synthetic oligonucleotide
gguauaugaaccagcacau

SEQ ID NO: 67835 - RNA, 19 nt, Artificial Sequence
  Description of Artificial Sequence: Synthetic oligonucleotide
  modified_base (2)..(2): a, c, u, g, unknown or other
gngcaauacuugucuccaa

SEQ ID NO: 67836 - RNA, 19 nt, Artificial Sequence
  Description of Artificial Sequence: Synthetic oligonucleotide
ugacgccacuuuucugcac

SEQ ID NO: 67837 - RNA, 19 nt, Artificial Sequence
  Description of Artificial Sequence: Synthetic oligonucleotide
ucgccuagccaggcguucc

SEQ ID NO: 67838 - RNA, 19 nt, Artificial Sequence
  Description of Artificial Sequence: Synthetic oligonucleotide
gacgucucucuucucgccu

SEQ ID NO: 67839 - RNA, 19 nt, Artificial Sequence
  Description of Artificial Sequence: Synthetic oligonucleotide
auucauugaugcggcugga

SEQ ID NO: 67840 - RNA, 19 nt, Artificial Sequence
  Description of Artificial Sequence: Synthetic oligonucleotide
acgcuaguccacgugcagu

SEQ ID NO: 67841 - RNA, 19 nt, Artificial Sequence
  Description of Artificial Sequence: Synthetic oligonucleotide
aagacaccuuagauaucaa

SEQ ID NO: 67842 - RNA, 19 nt, Artificial Sequence
  Description of Artificial Sequence: Synthetic oligonucleotide
gaugacucguguagucuua

SEQ ID NO: 67843 - RNA, 19 nt, Artificial Sequence
  Description of Artificial Sequence: Synthetic oligonucleotide
ucggccggaacaggaagau

SEQ ID NO: 67844 - RNA, 19 nt, Artificial Sequence
  Description of Artificial Sequence: Synthetic oligonucleotide
gagacuaccgcugcuugau

SEQ ID NO: 67845 - RNA, 19 nt, Artificial Sequence
  Description of Artificial Sequence: Synthetic oligonucleotide
ccgcuaagcauguccguag

SEQ ID NO: 67846 - RNA, 19 nt, Artificial Sequence
  Description of Artificial Sequence: Synthetic oligonucleotide
cuaccauuagugugucugu

SEQ ID NO: 67847 - RNA, 19 nt, Artificial Sequence
  Description of Artificial Sequence: Synthetic oligonucleotide
uacaaccauuauugcccua

SEQ ID NO: 67848 - RNA, 19 nt, Artificial Sequence
  Description of Artificial Sequence: Synthetic oligonucleotide
gaguagauuugacgccacu

SEQ ID NO: 67849 - RNA, 19 nt, Artificial Sequence
  Description of Artificial Sequence: Synthetic oligonucleotide
cguagcugguccgagugcg

SEQ ID NO: 67850 - RNA, 19 nt, Artificial Sequence
  Description of Artificial Sequence: Synthetic oligonucleotide
ggcuacuaucacuaaccaa

SEQ ID NO: 67851 - RNA, 19 nt, Artificial Sequence
  Description of Artificial Sequence: Synthetic oligonucleotide
uaaccacggucagcuaaaa

SEQ ID NO: 67852 - RNA, 19 nt, Artificial Sequence
  Description of Artificial Sequence: Synthetic oligonucleotide
ugacaguagcgagucuauu

SEQ ID NO: 67853 - RNA, 19 nt, Artificial Sequence
  Description of Artificial Sequence: Synthetic oligonucleotide
ccuacuuagauaauuucuu

SEQ ID NO: 67854 - RNA, 19 nt, Artificial Sequence
  Description of Artificial Sequence: Synthetic oligonucleotide
ggucagcuaaaauaaucau

SEQ ID NO: 67855 - RNA, 19 nt, Artificial Sequence
  Description of Artificial Sequence: Synthetic oligonucleotide
ccuugacucuaagugguac

SEQ ID NO: 67856 - RNA, 19 nt, Artificial Sequence
  Description of Artificial Sequence: Synthetic oligonucleotide
uggcccugacagacuggca

SEQ ID NO: 67857 - RNA, 19 nt, Artificial Sequence
  Description of Artificial Sequence: Synthetic oligonucleotide
acacgcuaguccacgugca

SEQ ID NO: 67858 - RNA, 19 nt, Artificial Sequence
  Description of Artificial Sequence: Synthetic oligonucleotide
ggagacuaccgcugcuuga

SEQ ID NO: 67859 - RNA, 19 nt, Artificial Sequence
  Description of Artificial Sequence: Synthetic oligonucleotide
gcuuuacucuaaagugcag

SEQ ID NO: 67860 - RNA, 19 nt, Artificial Sequence
  Description of Artificial Sequence: Synthetic oligonucleotide
ggcgacucucucuuuucuc

SEQ ID NO: 67861 - RNA, 19 nt, Artificial Sequence
  Description of Artificial Sequence: Synthetic oligonucleotide
augagccuuuaggagugaa

SEQ ID NO: 67862 - RNA, 19 nt, Artificial Sequence
  Description of Artificial Sequence: Synthetic oligonucleotide
ccgauuguuucaaaccuua

SEQ ID NO: 67863 - RNA, 19 nt, Artificial Sequence
  Description of Artificial Sequence: Synthetic oligonucleotide
aggcgauuugagagagugu

SEQ ID NO: 67864 - RNA, 19 nt, Artificial Sequence
  Description of Artificial Sequence: Synthetic oligonucleotide
cugacaguagcgagucuau

SEQ ID NO: 67865 - RNA, 19 nt, Artificial Sequence
  Description of Artificial Sequence: Synthetic oligonucleotide
auaggcgauuugagagagu

SEQ ID NO: 67866 - RNA, 19 nt, Artificial Sequence
  Description of Artificial Sequence: Synthetic oligonucleotide
gauuaccuacuuagauaau

SEQ ID NO: 67867 - RNA, 19 nt, Artificial Sequence
  Description of Artificial Sequence: Synthetic oligonucleotide
gggacccggauccgcuaag

SEQ ID NO: 67868 - RNA, 19 nt, Artificial Sequence
  Description of Artificial Sequence: Synthetic oligonucleotide
cucgccuagccaggcguuc

SEQ ID NO: 67869 - RNA, 19 nt, Artificial Sequence
  Description of Artificial Sequence: Synthetic oligonucleotide
gcagaguuggucauuguuu

SEQ ID NO: 67870 - RNA, 19 nt, Artificial Sequence
  Description of Artificial Sequence: Synthetic oligonucleotide
cgcuaagcauguccguagc

SEQ ID NO: 67871 - RNA, 19 nt, Artificial Sequence
  Description of Artificial Sequence: Synthetic oligonucleotide
ggacccggauccgcuaagc

SEQ ID NO: 67872 - RNA, 19 nt, Artificial Sequence
  Description of Artificial Sequence: Synthetic oligonucleotide
gcauauacauggguuuacu

SEQ ID NO: 67873 - RNA, 19 nt, Artificial Sequence
  Description of Artificial Sequence: Synthetic oligonucleotide
caucgucauuccucugaua

SEQ ID NO: 67874 - RNA, 19 nt, Artificial Sequence
  Description of Artificial Sequence: Synthetic oligonucleotide
guuccgcuugccagauaca

SEQ ID NO: 67875 - RNA, 19 nt, Artificial Sequence
  Description of Artificial Sequence: Synthetic oligonucleotide
auggguuuacugggauauu

SEQ ID NO: 67876 - RNA, 19 nt, Artificial Sequence
  Description of Artificial Sequence: Synthetic oligonucleotide
ggguacuuuugggaguaaa

SEQ ID NO: 67877 - RNA, 19 nt, Artificial Sequence
  Description of Artificial Sequence: Synthetic oligonucleotide
guccguagcugguccgagu

SEQ ID NO: 67878 - RNA, 19 nt, Artificial Sequence
  Description of Artificial Sequence: Synthetic oligonucleotide
gagguuccgcuugccagau

SEQ ID NO: 67879 - RNA, 19 nt, Artificial Sequence
  Description of Artificial Sequence: Synthetic oligonucleotide
ggccucaagucagaaggcu

SEQ ID NO: 67880 - RNA, 19 nt, Artificial Sequence
  Description of Artificial Sequence: Synthetic oligonucleotide
ccggaaugccugugcagga

SEQ ID NO: 67881 - RNA, 19 nt, Artificial Sequence
  Description of Artificial Sequence: Synthetic oligonucleotide
gggcgacucucucuuuucu

SEQ ID NO: 67882 - RNA, 19 nt, Artificial Sequence
  Description of Artificial Sequence: Synthetic oligonucleotide
ggucauuguuuaggugucu

SEQ ID NO: 67883 - RNA, 19 nt, Artificial Sequence
  Description of Artificial Sequence: Synthetic oligonucleotide
agguuccgcuugccagaua

SEQ ID NO: 67884 - RNA, 19 nt, Artificial Sequence
  Description of Artificial Sequence: Synthetic oligonucleotide
cgguuuccuuauuuggugu

SEQ ID NO: 67885 - RNA, 19 nt, Artificial Sequence
  Description of Artificial Sequence: Synthetic oligonucleotide
ccuagccaggcguuccagu

SEQ ID NO: 67886 - RNA, 19 nt, Artificial Sequence
  Description of Artificial Sequence: Synthetic oligonucleotide
ggugcaccaugugcauucu

SEQ ID NO: 67887 - RNA, 19 nt, Artificial Sequence
  Description of Artificial Sequence: Synthetic oligonucleotide
guaagacgcugggguacuu

SEQ ID NO: 67888 - RNA, 19 nt, Artificial Sequence
  Description of Artificial Sequence: Synthetic oligonucleotide
gcccuagaucagaucugaa

SEQ ID NO: 67889 - RNA, 19 nt, Artificial Sequence
  Description of Artificial Sequence: Synthetic oligonucleotide
gccuaccauuagugugucu

SEQ ID NO: 67890 - RNA, 19 nt, Artificial Sequence
  Description of Artificial Sequence: Synthetic oligonucleotide
cgagucuauuucacagcau

SEQ ID NO: 67891 - RNA, 19 nt, Artificial Sequence
  Description of Artificial Sequence: Synthetic oligonucleotide
cggcgccguucccuggcag

SEQ ID NO: 67892 - RNA, 19 nt, Artificial Sequence
  Description of Artificial Sequence: Synthetic oligonucleotide
gcggacgccuucggccgga

SEQ ID NO: 67893 - RNA, 19 nt, Artificial Sequence
  Description of Artificial Sequence: Synthetic oligonucleotide
cggauccgcuaagcauguc

SEQ ID NO: 67894 - RNA, 19 nt, Artificial Sequence
  Description of Artificial Sequence: Synthetic oligonucleotide
cggcucguuccucuaucuu

SEQ ID NO: 67895 - RNA, 19 nt, Artificial Sequence
  Description of Artificial Sequence: Synthetic oligonucleotide
auagcuaucagcaaaauac

SEQ ID NO: 67896 - RNA, 19 nt, Artificial Sequence
  Description of Artificial Sequence: Synthetic oligonucleotide
uguucuaggaaucugguag

SEQ ID NO: 67897 - RNA, 19 nt, Artificial Sequence
  Description of Artificial Sequence: Synthetic oligonucleotide
uuuguguggagauaggacg

SEQ ID NO: 67898 - RNA, 19 nt, Artificial Sequence
  Description of Artificial Sequence: Synthetic oligonucleotide
gacuguagaagacaggugg

SEQ ID NO: 67899 - RNA, 19 nt, Artificial Sequence
  Description of Artificial Sequence: Synthetic oligonucleotide
ucuccuuauagcaacacag

SEQ ID NO: 67900 - RNA, 19 nt, Artificial Sequence
  Description of Artificial Sequence: Synthetic oligonucleotide
auaacuuaagugauuaggc

SEQ ID NO: 67901 - RNA, 19 nt, Artificial Sequence
  Description of Artificial Sequence: Synthetic oligonucleotide
uuuagucugacugaagccg

SEQ ID NO: 67902 - RNA, 19 nt, Artificial Sequence
  Description of Artificial Sequence: Synthetic oligonucleotide
aaacccacguuccaguaac

SEQ ID NO: 67903 - RNA, 19 nt, Artificial Sequence
  Description of Artificial Sequence: Synthetic oligonucleotide
gaagucuagggcuagguag

SEQ ID NO: 67904 - RNA, 19 nt, Artificial Sequence
  Description of Artificial Sequence: Synthetic oligonucleotide
cuuacagaaguucagguug

SEQ ID NO: 67905 - RNA, 19 nt, Artificial Sequence
  Description of Artificial Sequence: Synthetic oligonucleotide
gaagugacaauccugugug

SEQ ID NO: 67906 - RNA, 19 nt, Artificial Sequence
  Description of Artificial Sequence: Synthetic oligonucleotide
acuugaacacauuucccgc

SEQ ID NO: 67907 - RNA, 19 nt, Artificial Sequence
  Description of Artificial Sequence: Synthetic oligonucleotide
uguaagacuagacugcuuc

SEQ ID NO: 67908 - RNA, 19 nt, Artificial Sequence
  Description of Artificial Sequence: Synthetic oligonucleotide
aacucaacuggagaagagc

SEQ ID NO: 67909 - RNA, 19 nt, Artificial Sequence
  Description of Artificial Sequence: Synthetic oligonucleotide
augauucuaaguuucaaga

SEQ ID NO: 67910 - RNA, 19 nt, Artificial Sequence
  Description of Artificial Sequence: Synthetic oligonucleotide
aacggcguggcguagagug

SEQ ID NO: 67911 - RNA, 19 nt, Artificial Sequence
  Description of Artificial Sequence: Synthetic oligonucleotide
uggguugcauuucuaaagg

SEQ ID NO: 67912 - RNA, 19 nt, Artificial Sequence
  Description of Artificial Sequence: Synthetic oligonucleotide
gauguagacacuuugggaa

SEQ ID NO: 67913 - RNA, 19 nt, Artificial Sequence
  Description of Artificial Sequence: Synthetic oligonucleotide
cuuauagcaacacagcauc

SEQ ID NO: 67914 - RNA, 19 nt, Artificial Sequence
  Description of Artificial Sequence: Synthetic oligonucleotide
uauugauagaagucauagg

SEQ ID NO: 67915 - RNA, 19 nt, Artificial Sequence
  Description of Artificial Sequence: Synthetic oligonucleotide
uucccaaugaagaagugac

SEQ ID NO: 67916 - RNA, 19 nt, Artificial Sequence
  Description of Artificial Sequence: Synthetic oligonucleotide
acuccguugauacaguguc

SEQ ID NO: 67917 - RNA, 19 nt, Artificial Sequence
  Description of Artificial Sequence: Synthetic oligonucleotide
ugcucauuggucuugauau

SEQ ID NO: 67918 - RNA, 19 nt, Artificial Sequence
  Description of Artificial Sequence: Synthetic oligonucleotide
uauaaggugugcucauugg

SEQ ID NO: 67919 - RNA, 19 nt, Artificial Sequence
  Description of Artificial Sequence: Synthetic oligonucleotide
uuggcuuaugcacuggugc

SEQ ID NO: 67920 - RNA, 19 nt, Artificial Sequence
  Description of Artificial Sequence: Synthetic oligonucleotide
ugauacagugucuauugcc

SEQ ID NO: 67921 - RNA, 19 nt, Artificial Sequence
  Description of Artificial Sequence: Synthetic oligonucleotide
acaagcgcaaguuuccacg

SEQ ID NO: 67922 - RNA, 19 nt, Artificial Sequence
  Description of Artificial Sequence: Synthetic oligonucleotide
uuguguggagauaggacgg

SEQ ID NO: 67923 - RNA, 19 nt, Artificial Sequence
  Description of Artificial Sequence: Synthetic oligonucleotide
ugagauugcgauugacugg

SEQ ID NO: 67924 - RNA, 19 nt, Artificial Sequence
  Description of Artificial Sequence: Synthetic oligonucleotide
ucuacuuucucauccgaug

SEQ ID NO: 67925 - RNA, 19 nt, Artificial Sequence
  Description of Artificial Sequence: Synthetic oligonucleotide
uaagugauuaggcaccaac

SEQ ID NO: 67926 - RNA, 19 nt, Artificial Sequence
  Description of Artificial Sequence: Synthetic oligonucleotide
gagauugcgauugacuggg

SEQ ID NO: 67927 - RNA, 19 nt, Artificial Sequence
  Description of Artificial Sequence: Synthetic oligonucleotide
ugaggauugccgcacaucu

SEQ ID NO: 67928 - RNA, 19 nt, Artificial Sequence
  Description of Artificial Sequence: Synthetic oligonucleotide
uaacuuaagugauuaggca

SEQ ID NO: 67929 - RNA, 19 nt, Artificial Sequence
  Description of Artificial Sequence: Synthetic oligonucleotide
auaaguacugucuuugaau

SEQ ID NO: 67930 - RNA, 19 nt, Artificial Sequence
  Description of Artificial Sequence: Synthetic oligonucleotide
aacucuguuguagggaggg

SEQ ID NO: 67931 - RNA, 19 nt, Artificial Sequence
  Description of Artificial Sequence: Synthetic oligonucleotide
acagcgucagucccaaggc

SEQ ID NO: 67932 - RNA, 19 nt, Artificial Sequence
  Description of Artificial Sequence: Synthetic oligonucleotide
ucugaucgacccacgauag

SEQ ID NO: 67933 - RNA, 19 nt, Artificial Sequence
  Description of Artificial Sequence: Synthetic oligonucleotide
agaagugacaauccugugu

SEQ ID NO: 67934 - RNA, 19 nt, Artificial Sequence
  Description of Artificial Sequence: Synthetic oligonucleotide
auagaagucauagguggac

SEQ ID NO: 67935 - RNA, 19 nt, Artificial Sequence
  Description of Artificial Sequence: Synthetic oligonucleotide
uauagcaacacagcaucag

SEQ ID NO: 67936 - RNA, 19 nt, Artificial Sequence
  Description of Artificial Sequence: Synthetic oligonucleotide
aauguaagacuagacugcu

SEQ ID NO: 67937 - RNA, 19 nt, Artificial Sequence
  Description of Artificial Sequence: Synthetic oligonucleotide
agcuaguauugauagaagu

SEQ ID NO: 67938 - RNA, 19 nt, Artificial Sequence
  Description of Artificial Sequence: Synthetic oligonucleotide
aauuguccccugcucguuc

SEQ ID NO: 67939 - RNA, 19 nt, Artificial Sequence
  Description of Artificial Sequence: Synthetic oligonucleotide
cuaacaagggugguggagg

SEQ ID NO: 67940 - RNA, 19 nt, Artificial Sequence
  Description of Artificial Sequence: Synthetic oligonucleotide
cauggagucaacuauagcu

SEQ ID NO: 67941 - RNA, 19 nt, Artificial Sequence
  Description of Artificial Sequence: Synthetic oligonucleotide
acguaguugucaucagagc

SEQ ID NO: 67942 - RNA, 19 nt, Artificial Sequence
  Description of Artificial Sequence: Synthetic oligonucleotide
cuaguauugauagaaguca

SEQ ID NO: 67943 - RNA, 19 nt, Artificial Sequence
  Description of Artificial Sequence: Synthetic oligonucleotide
ucacuugaacacauuuccc

SEQ ID NO: 67944 - RNA, 19 nt, Artificial Sequence
  Description of Artificial Sequence: Synthetic oligonucleotide
guacucguaggucucacag

SEQ ID NO: 67945 - RNA, 19 nt, Artificial Sequence
  Description of Artificial Sequence: Synthetic oligonucleotide
agccuagugggucaaagug

SEQ ID NO: 67946 - RNA, 19 nt, Artificial Sequence
  Description of Artificial Sequence: Synthetic oligonucleotide
ucaagacacaaguagccaa

SEQ ID NO: 67947 - RNA, 19 nt, Artificial Sequence
  Description of Artificial Sequence: Synthetic oligonucleotide
aaaucaccacuagguaccc

SEQ ID NO: 67948 - RNA, 19 nt, Artificial Sequence
  Description of Artificial Sequence: Synthetic oligonucleotide
ucguguuggguacucguag

SEQ ID NO: 67949 - RNA, 19 nt, Artificial Sequence
  Description of Artificial Sequence: Synthetic oligonucleotide
gccucuaugaauaggaagg

SEQ ID NO: 67950 - RNA, 19 nt, Artificial Sequence
  Description of Artificial Sequence: Synthetic oligonucleotide
gacuugaccgcugacuccg

SEQ ID NO: 67951 - RNA, 19 nt, Artificial Sequence
  Description of Artificial Sequence: Synthetic oligonucleotide
agugauuaggcaccaacaa

SEQ ID NO: 67952 - RNA, 19 nt, Artificial Sequence
  Description of Artificial Sequence: Synthetic oligonucleotide
guauaaggugugcucauug

SEQ ID NO: 67953 - RNA, 19 nt, Artificial Sequence
  Description of Artificial Sequence: Synthetic oligonucleotide
guagccaacagauuacaca

SEQ ID NO: 67954 - RNA, 19 nt, Artificial Sequence
  Description of Artificial Sequence: Synthetic oligonucleotide
uguaucccucuuuugucag

SEQ ID NO: 67955 - RNA, 19 nt, Artificial Sequence
  Description of Artificial Sequence: Synthetic oligonucleotide
uuucauggagucaacuaua

SEQ ID NO: 67956 - RNA, 19 nt, Artificial Sequence
  Description of Artificial Sequence: Synthetic oligonucleotide
uagguggaccccaaguggc

SEQ ID NO: 67957 - RNA, 19 nt, Artificial Sequence
  Description of Artificial Sequence: Synthetic oligonucleotide
uuuccacgcuccuaaagac

SEQ ID NO: 67958 - RNA, 19 nt, Artificial Sequence
  Description of Artificial Sequence: Synthetic oligonucleotide
gucauaaguacugucuuug

SEQ ID NO: 67959 - RNA, 19 nt, Artificial Sequence
  Description of Artificial Sequence: Synthetic oligonucleotide
cuccuuauagcaacacagc

SEQ ID NO: 67960 - RNA, 19 nt, Artificial Sequence
  Description of Artificial Sequence: Synthetic oligonucleotide
uggacuugaccgcugacuc

SEQ ID NO: 67961 - RNA, 19 nt, Artificial Sequence
  Description of Artificial Sequence: Synthetic oligonucleotide
uuauagcaacacagcauca

SEQ ID NO: 67962 - RNA, 19 nt, Artificial Sequence
  Description of Artificial Sequence: Synthetic oligonucleotide
uccacgcuccuaaagacaa

SEQ ID NO: 67963 - RNA, 19 nt, Artificial Sequence
  Description of Artificial Sequence: Synthetic oligonucleotide
cuuaaauggcaacaagaca

SEQ ID NO: 67964 - RNA, 19 nt, Artificial Sequence
  Description of Artificial Sequence: Synthetic oligonucleotide
cuccuaacaaggguggugg

SEQ ID NO: 67965 - RNA, 19 nt, Artificial Sequence
  Description of Artificial Sequence: Synthetic oligonucleotide
acuacuuacagaaguucag

SEQ ID NO: 67966 - RNA, 19 nt, Artificial Sequence
  Description of Artificial Sequence: Synthetic oligonucleotide
uugaaagggagcucaucga

SEQ ID NO: 67967 - RNA, 19 nt, Artificial Sequence
  Description of Artificial Sequence: Synthetic oligonucleotide
uucuguuaugggccugggg

SEQ ID NO: 67968 - RNA, 19 nt, Artificial Sequence
  Description of Artificial Sequence: Synthetic oligonucleotide
ccuaaagacaaucuccagc

SEQ ID NO: 67969 - RNA, 19 nt, Artificial Sequence
  Description of Artificial Sequence: Synthetic oligonucleotide
guuuccacgcuccuaaaga

SEQ ID NO: 67970 - RNA, 19 nt, Artificial Sequence
  Description of Artificial Sequence: Synthetic oligonucleotide
uuucggugagggcucgggg

SEQ ID NO: 67971 - RNA, 19 nt, Artificial Sequence
  Description of Artificial Sequence: Synthetic oligonucleotide
uacuuucucauccgaugug

SEQ ID NO: 67972 - RNA, 19 nt, Artificial Sequence
  Description of Artificial Sequence: Synthetic oligonucleotide
gaucucacuuccucggcug

SEQ ID NO: 67973 - RNA, 19 nt, Artificial Sequence
  Description of Artificial Sequence: Synthetic oligonucleotide
ucuggacccaccuauuaau

SEQ ID NO: 67974 - RNA, 19 nt, Artificial Sequence
  Description of Artificial Sequence: Synthetic oligonucleotide
uaggaaucugguaggcuga

SEQ ID NO: 67975 - RNA, 19 nt, Artificial Sequence
  Description of Artificial Sequence: Synthetic oligonucleotide
ugaucgacccacgauaguc

SEQ ID NO: 67976 - RNA, 19 nt, Artificial Sequence
  Description of Artificial Sequence: Synthetic oligonucleotide
gauugccgcacaucugucc

SEQ ID NO: 67977 - RNA, 19 nt, Artificial Sequence
  Description of Artificial Sequence: Synthetic oligonucleotide
aagaaacacaccaccagau

SEQ ID NO: 67978 - RNA, 19 nt, Artificial Sequence
  Description of Artificial Sequence: Synthetic oligonucleotide
uucaagacacaaguagcca

SEQ ID NO: 67979 - RNA, 19 nt, Artificial Sequence
  Description of Artificial Sequence: Synthetic oligonucleotide
augcuuuguguggagauag

SEQ ID NO: 67980 - RNA, 19 nt, Artificial Sequence
  Description of Artificial Sequence: Synthetic oligonucleotide
ggagauacuccugaggugc

SEQ ID NO: 67981 - RNA, 19 nt, Artificial Sequence
  Description of Artificial Sequence: Synthetic oligonucleotide
caggccuacauccaacuac

SEQ ID NO: 67982 - RNA, 19 nt, Artificial Sequence
  Description of Artificial Sequence: Synthetic oligonucleotide
acuagcuaauguucugugu

SEQ ID NO: 67983 - RNA, 19 nt, Artificial Sequence
  Description of Artificial Sequence: Synthetic oligonucleotide
ggcaacaagacacaaaugu

SEQ ID NO: 67984 - RNA, 19 nt, Artificial Sequence
  Description of Artificial Sequence: Synthetic oligonucleotide
acacaaguagccaacagau

SEQ ID NO: 67985 - RNA, 19 nt, Artificial Sequence
  Description of Artificial Sequence: Synthetic oligonucleotide
gggaauuguccccugcucg

SEQ ID NO: 67986 - RNA, 19 nt, Artificial Sequence
  Description of Artificial Sequence: Synthetic oligonucleotide
auuuucucuucccaaugaa

SEQ ID NO: 67987 - RNA, 19 nt, Artificial Sequence
  Description of Artificial Sequence: Synthetic oligonucleotide
acgauagucuucccuggag

SEQ ID NO: 67988 - RNA, 19 nt, Artificial Sequence
  Description of Artificial Sequence: Synthetic oligonucleotide
uugacggucaggccuacau

SEQ ID NO: 67989 - RNA, 19 nt, Artificial Sequence
  Description of Artificial Sequence: Synthetic oligonucleotide
cacuuugggaauugucccc

SEQ ID NO: 67990 - RNA, 19 nt, Artificial Sequence
  Description of Artificial Sequence: Synthetic oligonucleotide
ugcuuuguguggagauagg

SEQ ID NO: 67991 - RNA, 19 nt, Artificial Sequence
  Description of Artificial Sequence: Synthetic oligonucleotide
ggcacugucugaucgaccc

SEQ ID NO: 67992 - RNA, 19 nt, Artificial Sequence
  Description of Artificial Sequence: Synthetic oligonucleotide
agcaaaauacagauaggga

SEQ ID NO: 67993 - RNA, 19 nt, Artificial Sequence
  Description of Artificial Sequence: Synthetic oligonucleotide
uuccacgcuccuaaagaca

SEQ ID NO: 67994 - RNA, 19 nt, Artificial Sequence
  Description of Artificial Sequence: Synthetic oligonucleotide
cccaaauauggcaaguccc

SEQ ID NO: 67995 - RNA, 19 nt, Artificial Sequence
  Description of Artificial Sequence: Synthetic oligonucleotide
ugaccgcugacuccguuga

SEQ ID NO: 67996 - RNA, 19 nt, Artificial Sequence
  Description of Artificial Sequence: Synthetic oligonucleotide
acuagguaccccugucaag

SEQ ID NO: 67997 - RNA, 19 nt, Artificial Sequence
  Description of Artificial Sequence: Synthetic oligonucleotide
auggguagccuaguggguc

SEQ ID NO: 67998 - RNA, 19 nt, Artificial Sequence
  Description of Artificial Sequence: Synthetic oligonucleotide
uucuguauugugucggcuu

SEQ ID NO: 67999 - RNA, 19 nt, Artificial Sequence
  Description of Artificial Sequence: Synthetic oligonucleotide
caguacucuucuucggagc

SEQ ID NO: 68000 - RNA, 19 nt, Artificial Sequence
  Description of Artificial Sequence: Synthetic oligonucleotide
gauuaggcaccaacaauga

SEQ ID NO: 68001 - RNA, 19 nt, Artificial Sequence
  Description of Artificial Sequence: Synthetic oligonucleotide
ugcgccuggggauaguagu

SEQ ID NO: 68002 - RNA, 19 nt, Artificial Sequence
  Description of Artificial Sequence: Synthetic oligonucleotide
ucucuuuagucugacugaa

SEQ ID NO: 68003 - RNA, 19 nt, Artificial Sequence
  Description of Artificial Sequence: Synthetic oligonucleotide
uuuucacuaacuggagguc

SEQ ID NO: 68004 - RNA, 19 nt, Artificial Sequence
  Description of Artificial Sequence: Synthetic oligonucleotide
gacccaccuauuaauguug

SEQ ID NO: 68005 - RNA, 19 nt, Artificial Sequence
  Description of Artificial Sequence: Synthetic oligonucleotide
cugaacucaacuggagaag

SEQ ID NO: 68006 - RNA, 19 nt, Artificial Sequence
  Description of Artificial Sequence: Synthetic oligonucleotide
acuggacccaaacccacgu

SEQ ID NO: 68007 - RNA, 19 nt, Artificial Sequence
  Description of Artificial Sequence: Synthetic oligonucleotide
aaggaguuugucagaggug

SEQ ID NO: 68008 - RNA, 19 nt, Artificial Sequence
  Description of Artificial Sequence: Synthetic oligonucleotide
uaucccucuuuugucaggu

SEQ ID NO: 68009 - RNA, 19 nt, Artificial Sequence
  Description of Artificial Sequence: Synthetic oligonucleotide
aaaacaugacucacuugaa

SEQ ID NO: 68010 - RNA, 19 nt, Artificial Sequence
  Description of Artificial Sequence: Synthetic oligonucleotide
cugcucguuccauagccag

SEQ ID NO: 68011 - RNA, 19 nt, Artificial Sequence
  Description of Artificial Sequence: Synthetic oligonucleotide
gacaagcgcaaguuuccac

SEQ ID NO: 68012 - RNA, 19 nt, Artificial Sequence
  Description of Artificial Sequence: Synthetic oligonucleotide
guaacuugagaaugguugu

SEQ ID NO: 68013 - RNA, 19 nt, Artificial Sequence
  Description of Artificial Sequence: Synthetic oligonucleotide
ugacuccguugauacagug

SEQ ID NO: 68014 - RNA, 19 nt, Artificial Sequence
  Description of Artificial Sequence: Synthetic oligonucleotide
uucacuaacuggaggucuu

SEQ ID NO: 68015 - RNA, 19 nt, Artificial Sequence
  Description of Artificial Sequence: Synthetic oligonucleotide
cuggacccaccuauuaaug

SEQ ID NO: 68016 - RNA, 19 nt, Artificial Sequence
  Description of Artificial Sequence: Synthetic oligonucleotide
gguagaagauccuggguuc

SEQ ID NO: 68017 - RNA, 19 nt, Artificial Sequence
  Description of Artificial Sequence: Synthetic oligonucleotide
ccaccuauuaauguuggcc

SEQ ID NO: 68018 - RNA, 19 nt, Artificial Sequence
  Description of Artificial Sequence: Synthetic oligonucleotide
guaucccucuuuugucagg

SEQ ID NO: 68019 - RNA, 19 nt, Artificial Sequence
  Description of Artificial Sequence: Synthetic oligonucleotide
ugcucguuccauagccagc

SEQ ID NO: 68020 - RNA, 19 nt, Artificial Sequence
  Description of Artificial Sequence: Synthetic oligonucleotide
ucucaggucaagagguguu

SEQ ID NO: 68021 - RNA, 19 nt, Artificial Sequence
  Description of Artificial Sequence: Synthetic oligonucleotide
uccguugauacagugucua

SEQ ID NO: 68022 - RNA, 19 nt, Artificial Sequence
  Description of Artificial Sequence: Synthetic oligonucleotide
guagccuagugggucaaag

SEQ ID NO: 68023 - RNA, 19 nt, Artificial Sequence
  Description of Artificial Sequence: Synthetic oligonucleotide
gucugaucgacccacgaua

SEQ ID NO: 68024 - RNA, 19 nt, Artificial Sequence
  Description of Artificial Sequence: Synthetic oligonucleotide
uagccuagugggucaaagu

SEQ ID NO: 68025 - RNA, 19 nt, Artificial Sequence
  Description of Artificial Sequence: Synthetic oligonucleotide
uggcuugggaaggcuauag

SEQ ID NO: 68026 - RNA, 19 nt, Artificial Sequence
  Description of Artificial Sequence: Synthetic oligonucleotide
cacaggguauugcugggug

SEQ ID NO: 68027 - RNA, 19 nt, Artificial Sequence
  Description of Artificial Sequence: Synthetic oligonucleotide
uuguugacggucaggccua

SEQ ID NO: 68028 - RNA, 19 nt, Artificial Sequence
  Description of Artificial Sequence: Synthetic oligonucleotide
uguguggagauaggacggc

SEQ ID NO: 68029 - RNA, 19 nt, Artificial Sequence
  Description of Artificial Sequence: Synthetic oligonucleotide
ggcuguaugacagcgucag

SEQ ID NO: 68030 - RNA, 19 nt, Artificial Sequence
  Description of Artificial Sequence: Synthetic oligonucleotide
auggacuugaccgcugacu

SEQ ID NO: 68031 - RNA, 19 nt, Artificial Sequence
  Description of Artificial Sequence: Synthetic oligonucleotide
cauccauauuguccacuag

SEQ ID NO: 68032 - RNA, 19 nt, Artificial Sequence
  Description of Artificial Sequence: Synthetic oligonucleotide
agauaggacggcaguacug

SEQ ID NO: 68033 - RNA, 19 nt, Artificial Sequence
  Description of Artificial Sequence: Synthetic oligonucleotide
uggguagccuaguggguca

SEQ ID NO: 68034 - RNA, 19 nt, Artificial Sequence
  Description of Artificial Sequence: Synthetic oligonucleotide
caccuauuaauguuggccu

SEQ ID NO: 68035 - RNA, 19 nt, Artificial Sequence
  Description of Artificial Sequence: Synthetic oligonucleotide
cugugugaaaugauucuaa

SEQ ID NO: 68036 - RNA, 19 nt, Artificial Sequence
  Description of Artificial Sequence: Synthetic oligonucleotide
gacuggacccaaacccacg

SEQ ID NO: 68037 - RNA, 19 nt, Artificial Sequence
  Description of Artificial Sequence: Synthetic oligonucleotide
uugcgccuggggauaguag

SEQ ID NO: 68038 - RNA, 19 nt, Artificial Sequence
  Description of Artificial Sequence: Synthetic oligonucleotide
uucagcgucuggagugcug

SEQ ID NO: 68039 - RNA, 19 nt, Artificial Sequence
  Description of Artificial Sequence: Synthetic oligonucleotide
aagccgcagaucuggcaga

SEQ ID NO: 68040 - RNA, 19 nt, Artificial Sequence
  Description of Artificial Sequence: Synthetic oligonucleotide
cacgcuccuaaagacaauc

SEQ ID NO: 68041 - RNA, 19 nt, Artificial Sequence
  Description of Artificial Sequence: Synthetic oligonucleotide
cuggugcaaguggagauac

SEQ ID NO: 68042 - RNA, 19 nt, Artificial Sequence
  Description of Artificial Sequence: Synthetic oligonucleotide
agguauaaggugugcucau

SEQ ID NO: 68043 - RNA, 19 nt, Artificial Sequence
  Description of Artificial Sequence: Synthetic oligonucleotide
uggggccucuaugaauagg

SEQ ID NO: 68044 - RNA, 19 nt, Artificial Sequence
  Description of Artificial Sequence: Synthetic oligonucleotide
gaacacauuucccgcccca

SEQ ID NO: 68045 - RNA, 19 nt, Artificial Sequence
  Description of Artificial Sequence: Synthetic oligonucleotide
cauaguucuccucgcuguc

SEQ ID NO: 68046 - RNA, 19 nt, Artificial Sequence
  Description of Artificial Sequence: Synthetic oligonucleotide
acccacgauagucuucccu

SEQ ID NO: 68047 - RNA, 19 nt, Artificial Sequence
  Description of Artificial Sequence: Synthetic oligonucleotide
caaacggcguggcguagag

SEQ ID NO: 68048 - RNA, 19 nt, Artificial Sequence
  Description of Artificial Sequence: Synthetic oligonucleotide
gggucaaagugauggggcc

SEQ ID NO: 68049 - RNA, 19 nt, Artificial Sequence
  Description of Artificial Sequence: Synthetic oligonucleotide
acccaccuauuaauguugg

SEQ ID NO: 68050 - RNA, 19 nt, Artificial Sequence
  Description of Artificial Sequence: Synthetic oligonucleotide
auguucuaggaaucuggua

SEQ ID NO: 68051 - RNA, 19 nt, Artificial Sequence
  Description of Artificial Sequence: Synthetic oligonucleotide
auagccuguaaaacucugu

SEQ ID NO: 68052 - RNA, 19 nt, Artificial Sequence
  Description of Artificial Sequence: Synthetic oligonucleotide
aggccuacauccaacuacu

SEQ ID NO: 68053 - RNA, 19 nt, Artificial Sequence
  Description of Artificial Sequence: Synthetic oligonucleotide
ccaaauauggcaaguccca

SEQ ID NO: 68054 - RNA, 19 nt, Artificial Sequence
  Description of Artificial Sequence: Synthetic oligonucleotide
ccccaaauauggcaagucc

SEQ ID NO: 68055 - RNA, 19 nt, Artificial Sequence
  Description of Artificial Sequence: Synthetic oligonucleotide
cugucuccggagucugugc

SEQ ID NO: 68056 - RNA, 19 nt, Artificial Sequence
  Description of Artificial Sequence: Synthetic oligonucleotide
ggcagacuggacccaaacc

SEQ ID NO: 68057 - RNA, 19 nt, Artificial Sequence
  Description of Artificial Sequence: Synthetic oligonucleotide
aggaagaagcucgguggag

SEQ ID NO: 68058 - RNA, 19 nt, Artificial Sequence
  Description of Artificial Sequence: Synthetic oligonucleotide
ucaaacggcguggcguaga

SEQ ID NO: 68059 - RNA, 19 nt, Artificial Sequence
  Description of Artificial Sequence: Synthetic oligonucleotide
uccuaacaaggguggugga

SEQ ID NO: 68060 - RNA, 19 nt, Artificial Sequence
  Description of Artificial Sequence: Synthetic oligonucleotide
cuuaagugauuaggcacca

SEQ ID NO: 68061 - RNA, 19 nt, Artificial Sequence
  Description of Artificial Sequence: Synthetic oligonucleotide
ccaguacucuucuucggag

SEQ ID NO: 68062 - RNA, 19 nt, Artificial Sequence
  Description of Artificial Sequence: Synthetic oligonucleotide
gagauaggacggcaguacu

SEQ ID NO: 68063 - RNA, 19 nt, Artificial Sequence
  Description of Artificial Sequence: Synthetic oligonucleotide
aacugaccguccugccccu

SEQ ID NO: 68064 - RNA, 19 nt, Artificial Sequence
  Description of Artificial Sequence: Synthetic oligonucleotide
cuucacuguuccuacucaa

SEQ ID NO: 68065 - RNA, 19 nt, Artificial Sequence
  Description of Artificial Sequence: Synthetic oligonucleotide
ggggaggucauaaguacug

SEQ ID NO: 68066 - RNA, 19 nt, Artificial Sequence
  Description of Artificial Sequence: Synthetic oligonucleotide
gaggauugccgcacaucug

SEQ ID NO: 68067 - RNA, 19 nt, Artificial Sequence
  Description of Artificial Sequence: Synthetic oligonucleotide
gugauuaggcaccaacaau

SEQ ID NO: 68068 - RNA, 19 nt, Artificial Sequence
  Description of Artificial Sequence: Synthetic oligonucleotide
ccagaccuucaaaggaucc

SEQ ID NO: 68069 - RNA, 19 nt, Artificial Sequence
  Description of Artificial Sequence: Synthetic oligonucleotide
ugggaccaucccauuucac

SEQ ID NO: 68070 - RNA, 19 nt, Artificial Sequence
  Description of Artificial Sequence: Synthetic oligonucleotide
uccgagaagaggguucauu

SEQ ID NO: 68071 - RNA, 19 nt, Artificial Sequence
  Description of Artificial Sequence: Synthetic oligonucleotide
acugucugaucgacccacg

SEQ ID NO: 68072 - RNA, 19 nt, Artificial Sequence
  Description of Artificial Sequence: Synthetic oligonucleotide
guagaagauccuggguuca

SEQ ID NO: 68073 - RNA, 19 nt, Artificial Sequence
  Description of Artificial Sequence: Synthetic oligonucleotide
ucaugggcacguaguuguc

SEQ ID NO: 68074 - RNA, 19 nt, Artificial Sequence
  Description of Artificial Sequence: Synthetic oligonucleotide
ggauggcuuucggugaggg

SEQ ID NO: 68075 - RNA, 19 nt, Artificial Sequence
  Description of Artificial Sequence: Synthetic oligonucleotide
ugugucggcuuggcuuggg

SEQ ID NO: 68076 - RNA, 19 nt, Artificial Sequence
  Description of Artificial Sequence: Synthetic oligonucleotide
uuaagugauuaggcaccaa

SEQ ID NO: 68077 - RNA, 19 nt, Artificial Sequence
  Description of Artificial Sequence: Synthetic oligonucleotide
uguccacuaggaggucucc

SEQ ID NO: 68078 - RNA, 19 nt, Artificial Sequence
  Description of Artificial Sequence: Synthetic oligonucleotide
gggguaagggucagggucc

SEQ ID NO: 68079 - RNA, 19 nt, Artificial Sequence
  Description of Artificial Sequence: Synthetic oligonucleotide
aucgacccacgauagucuu

SEQ ID NO: 68080 - RNA, 19 nt, Artificial Sequence
  Description of Artificial Sequence: Synthetic oligonucleotide
cacuagguaccccugucaa

SEQ ID NO: 68081 - RNA, 19 nt, Artificial Sequence
  Description of Artificial Sequence: Synthetic oligonucleotide
ugaagcugucagggaaacu

SEQ ID NO: 68082 - RNA, 19 nt, Artificial Sequence
  Description of Artificial Sequence: Synthetic oligonucleotide
ccacgauagucuucccugg

SEQ ID NO: 68083 - RNA, 19 nt, Artificial Sequence
  Description of Artificial Sequence: Synthetic oligonucleotide
uuccccucauagccuguaa

SEQ ID NO: 68084 - RNA, 19 nt, Artificial Sequence
  Description of Artificial Sequence: Synthetic oligonucleotide
cucggcuggggccucuaug

SEQ ID NO: 68085 - RNA, 19 nt, Artificial Sequence
  Description of Artificial Sequence: Synthetic oligonucleotide
uggcguagagugggaagga

SEQ ID NO: 68086 - RNA, 19 nt, Artificial Sequence
  Description of Artificial Sequence: Synthetic oligonucleotide
gaucgacccacgauagucu

SEQ ID NO: 68087 - RNA, 19 nt, Artificial Sequence
  Description of Artificial Sequence: Synthetic oligonucleotide
cugaggauugccgcacauc

SEQ ID NO: 68088 - RNA, 19 nt, Artificial Sequence
  Description of Artificial Sequence: Synthetic oligonucleotide
cagugucuauugcccuggg

SEQ ID NO: 68089 - RNA, 19 nt, Artificial Sequence
  Description of Artificial Sequence: Synthetic oligonucleotide
cuggggccucuaugaauag

SEQ ID NO: 68090 - RNA, 19 nt, Artificial Sequence
  Description of Artificial Sequence: Synthetic oligonucleotide
cucuggacccaccuauuaa

SEQ ID NO: 68091 - RNA, 19 nt, Artificial Sequence
  Description of Artificial Sequence: Synthetic oligonucleotide
ccuaacaagggugguggag

SEQ ID NO: 68092 - RNA, 19 nt, Artificial Sequence
  Description of Artificial Sequence: Synthetic oligonucleotide
ucccgacacaggguauugc

SEQ ID NO: 68093 - RNA, 19 nt, Artificial Sequence
  Description of Artificial Sequence: Synthetic oligonucleotide
uagguaccccugucaagua

SEQ ID NO: 68094 - RNA, 19 nt, Artificial Sequence
  Description of Artificial Sequence: Synthetic oligonucleotide
ccgcugacuccguugauac

SEQ ID NO: 68095 - RNA, 19 nt, Artificial Sequence
  Description of Artificial Sequence: Synthetic oligonucleotide
uggguacucguaggucuca

SEQ ID NO: 68096 - RNA, 19 nt, Artificial Sequence
  Description of Artificial Sequence: Synthetic oligonucleotide
cacgauagucuucccugga

SEQ ID NO: 68097 - RNA, 19 nt, Artificial Sequence
  Description of Artificial Sequence: Synthetic oligonucleotide
ugcuucuguuaugggccug

SEQ ID NO: 68098 - RNA, 19 nt, Artificial Sequence
  Description of Artificial Sequence: Synthetic oligonucleotide
ugcccaguuacagcccauc

SEQ ID NO: 68099 - RNA, 19 nt, Artificial Sequence
  Description of Artificial Sequence: Synthetic oligonucleotide
gcaaguggagauacuccug

SEQ ID NO: 68100 - RNA, 19 nt, Artificial Sequence
  Description of Artificial Sequence: Synthetic oligonucleotide
aaacggcguggcguagagu

SEQ ID NO: 68101 - RNA, 19 nt, Artificial Sequence
  Description of Artificial Sequence: Synthetic oligonucleotide
gugaugcuuuguguggaga

SEQ ID NO: 68102 - RNA, 19 nt, Artificial Sequence
  Description of Artificial Sequence: Synthetic oligonucleotide
agauugcgauugacugggg

SEQ ID NO: 68103 - RNA, 19 nt, Artificial Sequence
  Description of Artificial Sequence: Synthetic oligonucleotide
gacuccguugauacagugu

SEQ ID NO: 68104 - RNA, 19 nt, Artificial Sequence
  Description of Artificial Sequence: Synthetic oligonucleotide
cucguguuggguacucgua

SEQ ID NO: 68105 - RNA, 19 nt, Artificial Sequence
  Description of Artificial Sequence: Synthetic oligonucleotide
gguacucguaggucucaca

SEQ ID NO: 68106 - RNA, 19 nt, Artificial Sequence
  Description of Artificial Sequence: Synthetic oligonucleotide
accgcugacuccguugaua

SEQ ID NO: 68107 - RNA, 19 nt, Artificial Sequence
  Description of Artificial Sequence: Synthetic oligonucleotide
gccuagugggucaaaguga

SEQ ID NO: 68108 - RNA, 19 nt, Artificial Sequence
  Description of Artificial Sequence: Synthetic oligonucleotide
augacccugaaaggaguuu

SEQ ID NO: 68109 - RNA, 19 nt, Artificial Sequence
  Description of Artificial Sequence: Synthetic oligonucleotide
gccuacauccaacuacuua

SEQ ID NO: 68110 - RNA, 19 nt, Artificial Sequence
  Description of Artificial Sequence: Synthetic oligonucleotide
gauggguagccuagugggu

SEQ ID NO: 68111 - RNA, 19 nt, Artificial Sequence
  Description of Artificial Sequence: Synthetic oligonucleotide
agcuccuaacaaggguggu

SEQ ID NO: 68112 - RNA, 19 nt, Artificial Sequence
  Description of Artificial Sequence: Synthetic oligonucleotide
cucaaacggcguggcguag

SEQ ID NO: 68113 - RNA, 19 nt, Artificial Sequence
  Description of Artificial Sequence: Synthetic oligonucleotide
cuacuuccccucauagccu

SEQ ID NO: 68114 - RNA, 19 nt, Artificial Sequence
  Description of Artificial Sequence: Synthetic oligonucleotide
guauugugucggcuuggcu

SEQ ID NO: 68115 - RNA, 19 nt, Artificial Sequence
  Description of Artificial Sequence: Synthetic oligonucleotide
aacucccgacacaggguau

SEQ ID NO: 68116 - RNA, 19 nt, Artificial Sequence
  Description of Artificial Sequence: Synthetic oligonucleotide
gugcaccaccccucaugcc

SEQ ID NO: 68117 - RNA, 19 nt, Artificial Sequence
  Description of Artificial Sequence: Synthetic oligonucleotide
gguccgagaagaggguuca

SEQ ID NO: 68118 - RNA, 19 nt, Artificial Sequence
  Description of Artificial Sequence: Synthetic oligonucleotide
cuuaugcacuggugcaagu

SEQ ID NO: 68119 - RNA, 19 nt, Artificial Sequence
  Description of Artificial Sequence: Synthetic oligonucleotide
uguugacggucaggccuac

SEQ ID NO: 68120 - RNA, 19 nt, Artificial Sequence
  Description of Artificial Sequence: Synthetic oligonucleotide
acggucaggccuacaucca

SEQ ID NO: 68121 - RNA, 19 nt, Artificial Sequence
  Description of Artificial Sequence: Synthetic oligonucleotide
guuaugggccuggggcuga

SEQ ID NO: 68122 - RNA, 19 nt, Artificial Sequence
  Description of Artificial Sequence: Synthetic oligonucleotide
gggcucaaacggcguggcg

SEQ ID NO: 68123 - RNA, 19 nt, Artificial Sequence
  Description of Artificial Sequence: Synthetic oligonucleotide
gugucggcuuggcuuggga

SEQ ID NO: 68124 - RNA, 19 nt, Artificial Sequence
  Description of Artificial Sequence: Synthetic oligonucleotide
gcguagagugggaaggaga

SEQ ID NO: 68125 - RNA, 19 nt, Artificial Sequence
  Description of Artificial Sequence: Synthetic oligonucleotide
ggacccaccuauuaauguu

SEQ ID NO: 68126 - RNA, 19 nt, Artificial Sequence
  Description of Artificial Sequence: Synthetic oligonucleotide
guguugcgccuggggauag

SEQ ID NO: 68127 - RNA, 19 nt, Artificial Sequence
  Description of Artificial Sequence: Synthetic oligonucleotide
ggucauaaguacugucuuu

SEQ ID NO: 68128 - RNA, 19 nt, Artificial Sequence
  Description of Artificial Sequence: Synthetic oligonucleotide
cagggaaacugaccguccu

SEQ ID NO: 68129 - RNA, 19 nt, Artificial Sequence
  Description of Artificial Sequence: Synthetic oligonucleotide
cagaccuucaaaggauccu

SEQ ID NO: 68130 - RNA, 19 nt, Artificial Sequence
  Description of Artificial Sequence: Synthetic oligonucleotide
ccuagugggucaaagugau

SEQ ID NO: 68131 - RNA, 19 nt, Artificial Sequence
  Description of Artificial Sequence: Synthetic oligonucleotide
cuuugcggucaggcuugag

SEQ ID NO: 68132 - RNA, 19 nt, Artificial Sequence
  Description of Artificial Sequence: Synthetic oligonucleotide
gcugagucuccgggagugg

SEQ ID NO: 68133 - RNA, 19 nt, Artificial Sequence
  Description of Artificial Sequence: Synthetic oligonucleotide
uguugcgccuggggauagu

SEQ ID NO: 68134 - RNA, 19 nt, Artificial Sequence
  Description of Artificial Sequence: Synthetic oligonucleotide
guugcgccuggggauagua

SEQ ID NO: 68135 - RNA, 19 nt, Artificial Sequence
  Description of Artificial Sequence: Synthetic oligonucleotide
cccuugagcucgguggccc

SEQ ID NO: 68136 - RNA, 19 nt, Artificial Sequence
  Description of Artificial Sequence: Synthetic oligonucleotide
cuccguugauacagugucu

SEQ ID NO: 68137 - RNA, 19 nt, Artificial Sequence
  Description of Artificial Sequence: Synthetic oligonucleotide
cugacuccguugauacagu

SEQ ID NO: 68138 - RNA, 19 nt, Artificial Sequence
  Description of Artificial Sequence: Synthetic oligonucleotide
ggggcucaaacggcguggc

SEQ ID NO: 68139 - RNA, 19 nt, Artificial Sequence
  Description of Artificial Sequence: Synthetic oligonucleotide
gucaaguauggcugcucuu

SEQ ID NO: 68140 - RNA, 19 nt, Artificial Sequence
  Description of Artificial Sequence: Synthetic oligonucleotide
ccacuagguaccccuguca

SEQ ID NO: 68141 - RNA, 19 nt, Artificial Sequence
  Description of Artificial Sequence: Synthetic oligonucleotide
cuauagcuaucagcaaaau

SEQ ID NO: 68142 - RNA, 19 nt, Artificial Sequence
  Description of Artificial Sequence: Synthetic oligonucleotide
gcucuggacccaccuauua

SEQ ID NO: 68143 - RNA, 19 nt, Artificial Sequence
  Description of Artificial Sequence: Synthetic oligonucleotide
caccucguguuggguacuc

SEQ ID NO: 68144 - RNA, 19 nt, Artificial Sequence
  Description of Artificial Sequence: Synthetic oligonucleotide
ccagaccucacaagauaaa

SEQ ID NO: 68145 - RNA, 19 nt, Artificial Sequence
  Description of Artificial Sequence: Synthetic oligonucleotide
ggauugccgcacaucuguc

SEQ ID NO: 68146 - RNA, 19 nt, Artificial Sequence
  Description of Artificial Sequence: Synthetic oligonucleotide
agcucuggacccaccuauu

SEQ ID NO: 68147 - RNA, 19 nt, Artificial Sequence
  Description of Artificial Sequence: Synthetic oligonucleotide
caucaggcccuugccucca

SEQ ID NO: 68148 - RNA, 19 nt, Artificial Sequence
  Description of Artificial Sequence: Synthetic oligonucleotide
cugaucgacccacgauagu

SEQ ID NO: 68149 - RNA, 19 nt, Artificial Sequence
  Description of Artificial Sequence: Synthetic oligonucleotide
guugacggucaggccuaca

SEQ ID NO: 68150 - RNA, 19 nt, Artificial Sequence
  Description of Artificial Sequence: Synthetic oligonucleotide
acuugaccgcugacuccgu

SEQ ID NO: 68151 - RNA, 19 nt, Artificial Sequence
  Description of Artificial Sequence: Synthetic oligonucleotide
ggggugguuggaacaucca

SEQ ID NO: 68152 - RNA, 19 nt, Artificial Sequence
  Description of Artificial Sequence: Synthetic oligonucleotide
gguauaaggugugcucauu

SEQ ID NO: 68153 - RNA, 19 nt, Artificial Sequence
  Description of Artificial Sequence: Synthetic oligonucleotide
ccccugcucguuccauagc

SEQ ID NO: 68154 - RNA, 19 nt, Artificial Sequence
  Description of Artificial Sequence: Synthetic oligonucleotide
gcccuugagcucgguggcc

SEQ ID NO: 68155 - RNA, 19 nt, Artificial Sequence
  Description of Artificial Sequence: Synthetic oligonucleotide
cuugaccgcugacuccguu

SEQ ID NO: 68156 - RNA, 19 nt, Artificial Sequence
  Description of Artificial Sequence: Synthetic oligonucleotide
ggcaagccucaaggagaug

SEQ ID NO: 68157 - RNA, 19 nt, Artificial Sequence
  Description of Artificial Sequence: Synthetic oligonucleotide
gaccgcugacuccguugau

SEQ ID NO: 68158 - RNA, 19 nt, Artificial Sequence
  Description of Artificial Sequence: Synthetic oligonucleotide
cugguccgagaagaggguu

SEQ ID NO: 68159 - RNA, 19 nt, Artificial Sequence
  Description of Artificial Sequence: Synthetic oligonucleotide
gguagccuagugggucaaa

SEQ ID NO: 68160 - RNA, 19 nt, Artificial Sequence
  Description of Artificial Sequence: Synthetic oligonucleotide
gaccguccugccccugcuu

SEQ ID NO: 68161 - RNA, 19 nt, Artificial Sequence
  Description of Artificial Sequence: Synthetic oligonucleotide
ccgagguguuucugccuga

SEQ ID NO: 68162 - RNA, 19 nt, Artificial Sequence
  Description of Artificial Sequence: Synthetic oligonucleotide
ccugucaaguauggcugcu

SEQ ID NO: 68163 - RNA, 19 nt, Artificial Sequence
  Description of Artificial Sequence: Synthetic oligonucleotide
ccguugauacagugucuau

SEQ ID NO: 68164 - RNA, 19 nt, Artificial Sequence
  Description of Artificial Sequence: Synthetic oligonucleotide
gcuuugcggucaggcuuga

SEQ ID NO: 68165 - RNA, 19 nt, Artificial Sequence
  Description of Artificial Sequence: Synthetic oligonucleotide
gccccaccgagguguuucu

SEQ ID NO: 68166 - RNA, 19 nt, Artificial Sequence
  Description of Artificial Sequence: Synthetic oligonucleotide
guccgagaagaggguucau

SEQ ID NO: 68167 - RNA, 19 nt, Artificial Sequence
  Description of Artificial Sequence: Synthetic oligonucleotide
cucgguggagucggcuguu

SEQ ID NO: 68168 - RNA, 19 nt, Artificial Sequence
  Description of Artificial Sequence: Synthetic oligonucleotide
ccacgcuccuaaagacaau

SEQ ID NO: 68169 - RNA, 19 nt, Artificial Sequence
  Description of Artificial Sequence: Synthetic oligonucleotide
ccaccucguguuggguacu

SEQ ID NO: 68170 - RNA, 19 nt, Artificial Sequence
  Description of Artificial Sequence: Synthetic oligonucleotide
aaaaucgggaauuauuugg

SEQ ID NO: 68171 - RNA, 19 nt, Artificial Sequence
  Description of Artificial Sequence: Synthetic oligonucleotide
auuauaauaguccgcaagc

SEQ ID NO: 68172 - RNA, 19 nt, Artificial Sequence
  Description of Artificial Sequence: Synthetic oligonucleotide
aaauagauggacugaauag

SEQ ID NO: 68173 - RNA, 19 nt, Artificial Sequence
  Description of Artificial Sequence: Synthetic oligonucleotide
aauuauaauaguccgcaag

SEQ ID NO: 68174 - RNA, 19 nt, Artificial Sequence
  Description of Artificial Sequence: Synthetic oligonucleotide
aaaguaaagcggcaacugc

SEQ ID NO: 68175 - RNA, 19 nt, Artificial Sequence
  Description of Artificial Sequence: Synthetic oligonucleotide
auuauagggacucaagcac

SEQ ID NO: 68176 - RNA, 19 nt, Artificial Sequence
  Description of Artificial Sequence: Synthetic oligonucleotide
ucaucuauguuucuaagcc

SEQ ID NO: 68177 - RNA, 19 nt, Artificial Sequence
  Description of Artificial Sequence: Synthetic oligonucleotide
uaugaaaccgaauuuguag

SEQ ID NO: 68178 - RNA, 19 nt, Artificial Sequence
  Description of Artificial Sequence: Synthetic oligonucleotide
ucucuuaguagauaugucg

SEQ ID NO: 68179 - RNA, 19 nt, Artificial Sequence
  Description of Artificial Sequence: Synthetic oligonucleotide
agauuauagggacucaagc

SEQ ID NO: 68180 - RNA, 19 nt, Artificial Sequence
  Description of Artificial Sequence: Synthetic oligonucleotide
uucguuugcagcaagaaga

SEQ ID NO: 68181 - RNA, 19 nt, Artificial Sequence
  Description of Artificial Sequence: Synthetic oligonucleotide
uacugugaaaguuauagcc

SEQ ID NO: 68182 - RNA, 19 nt, Artificial Sequence
  Description of Artificial Sequence: Synthetic oligonucleotide
augaaaccgaauuuguagc

SEQ ID NO: 68183 - RNA, 19 nt, Artificial Sequence
  Description of Artificial Sequence: Synthetic oligonucleotide
aggauauauaccuaauuag

SEQ ID NO: 68184 - RNA, 19 nt, Artificial Sequence
  Description of Artificial Sequence: Synthetic oligonucleotide
aaaugcacgucacagaaau

SEQ ID NO: 68185 - RNA, 19 nt, Artificial Sequence
  Description of Artificial Sequence: Synthetic oligonucleotide
aaccuacaacuucaaaagc

SEQ ID NO: 68186 - RNA, 19 nt, Artificial Sequence
  Description of Artificial Sequence: Synthetic oligonucleotide
aaaucgggaauuauuuggc

SEQ ID NO: 68187 - RNA, 19 nt, Artificial Sequence
  Description of Artificial Sequence: Synthetic oligonucleotide
uaguuagcaaauaaaacuc

SEQ ID NO: 68188 - RNA, 19 nt, Artificial Sequence
  Description of Artificial Sequence: Synthetic oligonucleotide
ugugagaaacgccuuuucg

SEQ ID NO: 68189 - RNA, 19 nt, Artificial Sequence
  Description of Artificial Sequence: Synthetic oligonucleotide
ucagcuaaugugagaaacg

SEQ ID NO: 68190 - RNA, 19 nt, Artificial Sequence
  Description of Artificial Sequence: Synthetic oligonucleotide
ugucuauagauuauaggga

SEQ ID NO: 68191 - RNA, 19 nt, Artificial Sequence
  Description of Artificial Sequence: Synthetic oligonucleotide
uaggauauauaccuaauua

SEQ ID NO: 68192 - RNA, 19 nt, Artificial Sequence
  Description of Artificial Sequence: Synthetic oligonucleotide
uuuaaaguaaagcggcaac

SEQ ID NO: 68193 - RNA, 19 nt, Artificial Sequence
  Description of Artificial Sequence: Synthetic oligonucleotide
ucaaguaucacuucugcau

SEQ ID NO: 68194 - RNA, 19 nt, Artificial Sequence
  Description of Artificial Sequence: Synthetic oligonucleotide
gaaaucuugucaauggaag

SEQ ID NO: 68195 - RNA, 19 nt, Artificial Sequence
  Description of Artificial Sequence: Synthetic oligonucleotide
aaaagcaggucguacgucu

SEQ ID NO: 68196 - RNA, 19 nt, Artificial Sequence
  Description of Artificial Sequence: Synthetic oligonucleotide
aaaucagugcuuuauguua

SEQ ID NO: 68197 - RNA, 19 nt, Artificial Sequence
  Description of Artificial Sequence: Synthetic oligonucleotide
uuaacccacguacagauuc

SEQ ID NO: 68198 - RNA, 19 nt, Artificial Sequence
  Description of Artificial Sequence: Synthetic oligonucleotide
uuacuaguaaacaaugaua

SEQ ID NO: 68199 - RNA, 19 nt, Artificial Sequence
  Description of Artificial Sequence: Synthetic oligonucleotide
ucuagauaacucauaccag

SEQ ID NO: 68200 - RNA, 19 nt, Artificial Sequence
  Description of Artificial Sequence: Synthetic oligonucleotide
ugaaaguuauagccgagca

SEQ ID NO: 68201 - RNA, 19 nt, Artificial Sequence
  Description of Artificial Sequence: Synthetic oligonucleotide
cucuagauaacucauacca

SEQ ID NO: 68202 - RNA, 19 nt, Artificial Sequence
  Description of Artificial Sequence: Synthetic oligonucleotide
acuagcaugaugcccauug

SEQ ID NO: 68203 - RNA, 19 nt, Artificial Sequence
  Description of Artificial Sequence: Synthetic oligonucleotide
accgaauuaacugacaucu

SEQ ID NO: 68204 - RNA, 19 nt, Artificial Sequence
  Description of Artificial Sequence: Synthetic oligonucleotide
uauacuguguaugggagcc

SEQ ID NO: 68205 - RNA, 19 nt, Artificial Sequence
  Description of Artificial Sequence: Synthetic oligonucleotide
aaaaggacgcaggucuugc

SEQ ID NO: 68206 - RNA, 19 nt, Artificial Sequence
  Description of Artificial Sequence: Synthetic oligonucleotide
aaauaucaaggccacugga

SEQ ID NO: 68207 - RNA, 19 nt, Artificial Sequence
  Description of Artificial Sequence: Synthetic oligonucleotide
uuggcaaacguuacuaaga

SEQ ID NO: 68208 - RNA, 19 nt, Artificial Sequence
  Description of Artificial Sequence: Synthetic oligonucleotide
gauacuccgcgcuaggacc

SEQ ID NO: 68209 - RNA, 19 nt, Artificial Sequence
  Description of Artificial Sequence: Synthetic oligonucleotide
agaaagcaacucucgagac

SEQ ID NO: 68210 - RNA, 19 nt, Artificial Sequence
  Description of Artificial Sequence: Synthetic oligonucleotide
uucgccauugggaggagcg

SEQ ID NO: 68211 - RNA, 19 nt, Artificial Sequence
  Description of Artificial Sequence: Synthetic oligonucleotide
gugaauaggauauauaccu

SEQ ID NO: 68212 - RNA, 19 nt, Artificial Sequence
  Description of Artificial Sequence: Synthetic oligonucleotide
gaaaaucgggaauuauuug

SEQ ID NO: 68213 - RNA, 19 nt, Artificial Sequence
  Description of Artificial Sequence: Synthetic oligonucleotide
aucaucuuaggaugcuagc

SEQ ID NO: 68214 - RNA, 19 nt, Artificial Sequence
  Description of Artificial Sequence: Synthetic oligonucleotide
uacacgagaagccuuucgc

SEQ ID NO: 68215 - RNA, 19 nt, Artificial Sequence
  Description of Artificial Sequence: Synthetic oligonucleotide
ucuacgucgagggagcgcg

SEQ ID NO: 68216 - RNA, 19 nt, Artificial Sequence
  Description of Artificial Sequence: Synthetic oligonucleotide
gucuauagauuauagggac

SEQ ID NO: 68217 - RNA, 19 nt, Artificial Sequence
  Description of Artificial Sequence: Synthetic oligonucleotide
uauugaaggcaucauccga

SEQ ID NO: 68218 - RNA, 19 nt, Artificial Sequence
  Description of Artificial Sequence: Synthetic oligonucleotide
uagauaacucauaccagga

SEQ ID NO: 68219 - RNA, 19 nt, Artificial Sequence
  Description of Artificial Sequence: Synthetic oligonucleotide
uuauagggacucaagcaca

SEQ ID NO: 68220 - RNA, 19 nt, Artificial Sequence
  Description of Artificial Sequence: Synthetic oligonucleotide
agguacaacucucuuauca

SEQ ID NO: 68221 - RNA, 19 nt, Artificial Sequence
  Description of Artificial Sequence: Synthetic oligonucleotide
agccgagcaaacuucgagc

SEQ ID NO: 68222 - RNA, 19 nt, Artificial Sequence
  Description of Artificial Sequence: Synthetic oligonucleotide
aucuauguuucuaagccac

SEQ ID NO: 68223 - RNA, 19 nt, Artificial Sequence
  Description of Artificial Sequence: Synthetic oligonucleotide
acugugaaaguuauagccg

SEQ ID NO: 68224 - RNA, 19 nt, Artificial Sequence
  Description of Artificial Sequence: Synthetic oligonucleotide
gacaucugauaguaggcag

SEQ ID NO: 68225 - RNA, 19 nt, Artificial Sequence
  Description of Artificial Sequence: Synthetic oligonucleotide
agauacuccgcgcuaggac

SEQ ID NO: 68226 - RNA, 19 nt, Artificial Sequence
  Description of Artificial Sequence: Synthetic oligonucleotide
aacggguuuauguugggau

SEQ ID NO: 68227 - RNA, 19 nt, Artificial Sequence
  Description of Artificial Sequence: Synthetic oligonucleotide
uuacacgagaagccuuucg

SEQ ID NO: 68228 - RNA, 19 nt, Artificial Sequence
  Description of Artificial Sequence: Synthetic oligonucleotide
agcggcaacugccacauuc

SEQ ID NO: 68229 - RNA, 19 nt, Artificial Sequence
  Description of Artificial Sequence: Synthetic oligonucleotide
uuaaaguaaagcggcaacu

SEQ ID NO: 68230 - RNA, 19 nt, Artificial Sequence
  Description of Artificial Sequence: Synthetic oligonucleotide
agaauuggacuauaauaca

SEQ ID NO: 68231 - RNA, 19 nt, Artificial Sequence
  Description of Artificial Sequence: Synthetic oligonucleotide
acaacugaagugcaguggu

SEQ ID NO: 68232 - RNA, 19 nt, Artificial Sequence
  Description of Artificial Sequence: Synthetic oligonucleotide
gaauaggauauauaccuaa

SEQ ID NO: 68233 - RNA, 19 nt, Artificial Sequence
  Description of Artificial Sequence: Synthetic oligonucleotide
ucuauagauuauagggacu

SEQ ID NO: 68234 - RNA, 19 nt, Artificial Sequence
  Description of Artificial Sequence: Synthetic oligonucleotide
agauaacucauaccaggag

SEQ ID NO: 68235 - RNA, 19 nt, Artificial Sequence
  Description of Artificial Sequence: Synthetic oligonucleotide
ucguuugcagcaagaagag

SEQ ID NO: 68236 - RNA, 19 nt, Artificial Sequence
  Description of Artificial Sequence: Synthetic oligonucleotide
aacacuagugcaugcaauu

SEQ ID NO: 68237 - RNA, 19 nt, Artificial Sequence
  Description of Artificial Sequence: Synthetic oligonucleotide
auaguuuaauguugauaag

SEQ ID NO: 68238 - RNA, 19 nt, Artificial Sequence
  Description of Artificial Sequence: Synthetic oligonucleotide
caacucucgagaccgagcg

SEQ ID NO: 68239 - RNA, 19 nt, Artificial Sequence
  Description of Artificial Sequence: Synthetic oligonucleotide
auaguccgcaagcagucac

SEQ ID NO: 68240 - RNA, 19 nt, Artificial Sequence
  Description of Artificial Sequence: Synthetic oligonucleotide
uuauaauaguccgcaagca

SEQ ID NO: 68241 - RNA, 19 nt, Artificial Sequence
  Description of Artificial Sequence: Synthetic oligonucleotide
uaauaguccgcaagcaguc

SEQ ID NO: 68242 - RNA, 19 nt, Artificial Sequence
  Description of Artificial Sequence: Synthetic oligonucleotide
ugugaaaguuauagccgag

SEQ ID NO: 68243 - RNA, 19 nt, Artificial Sequence
  Description of Artificial Sequence: Synthetic oligonucleotide
ugagaaacgccuuuucgau

SEQ ID NO: 68244 - RNA, 19 nt, Artificial Sequence
  Description of Artificial Sequence: Synthetic oligonucleotide
acguuacuaagauccacuc

SEQ ID NO: 68245 - RNA, 19 nt, Artificial Sequence
  Description of Artificial Sequence: Synthetic oligonucleotide
gauaacucauaccaggagu

SEQ ID NO: 68246 - RNA, 19 nt, Artificial Sequence
  Description of Artificial Sequence: Synthetic oligonucleotide
uaaaucagugcuuuauguu

SEQ ID NO: 68247 - RNA, 19 nt, Artificial Sequence
  Description of Artificial Sequence: Synthetic oligonucleotide
ucucuagauaacucauacc

SEQ ID NO: 68248 - RNA, 19 nt, Artificial Sequence
  Description of Artificial Sequence: Synthetic oligonucleotide
ucuuaguagauaugucgcu

SEQ ID NO: 68249 - RNA, 19 nt, Artificial Sequence
  Description of Artificial Sequence: Synthetic oligonucleotide
uaugucgcuauacugugua

SEQ ID NO: 68250 - RNA, 19 nt, Artificial Sequence
  Description of Artificial Sequence: Synthetic oligonucleotide
aaauuauaauaguccgcaa

SEQ ID NO: 68251 - RNA, 19 nt, Artificial Sequence
  Description of Artificial Sequence: Synthetic oligonucleotide
acuagugcaugcaauuaac

SEQ ID NO: 68252 - RNA, 19 nt, Artificial Sequence
  Description of Artificial Sequence: Synthetic oligonucleotide
acagcaaggacuaacgaca

SEQ ID NO: 68253 - RNA, 19 nt, Artificial Sequence
  Description of Artificial Sequence: Synthetic oligonucleotide
aacguuacuaagauccacu

SEQ ID NO: 68254 - RNA, 19 nt, Artificial Sequence
  Description of Artificial Sequence: Synthetic oligonucleotide
gaaaucgguuuaaauauca

SEQ ID NO: 68255 - RNA, 19 nt, Artificial Sequence
  Description of Artificial Sequence: Synthetic oligonucleotide
caugcaauuaacuagguuu

SEQ ID NO: 68256 - RNA, 19 nt, Artificial Sequence
  Description of Artificial Sequence: Synthetic oligonucleotide
cauuuacuuagcaagguaa

SEQ ID NO: 68257 - RNA, 19 nt, Artificial Sequence
  Description of Artificial Sequence: Synthetic oligonucleotide
agagacuuacagaaagggg

SEQ ID NO: 68258 - RNA, 19 nt, Artificial Sequence
  Description of Artificial Sequence: Synthetic oligonucleotide
ugauaguaggcaguuagaa

SEQ ID NO: 68259 - RNA, 19 nt, Artificial Sequence
  Description of Artificial Sequence: Synthetic oligonucleotide
cuacugugaaaguuauagc

SEQ ID NO: 68260 - RNA, 19 nt, Artificial Sequence
  Description of Artificial Sequence: Synthetic oligonucleotide
uaggcaguuagaauuuauc

SEQ ID NO: 68261 - RNA, 19 nt, Artificial Sequence
  Description of Artificial Sequence: Synthetic oligonucleotide
ucggucgggacaaaauggc

SEQ ID NO: 68262 - RNA, 19 nt, Artificial Sequence
  Description of Artificial Sequence: Synthetic oligonucleotide
gcugacaccgaauuaacug

SEQ ID NO: 68263 - RNA, 19 nt, Artificial Sequence
  Description of Artificial Sequence: Synthetic oligonucleotide
acucucgagaccgagcggg

SEQ ID NO: 68264 - RNA, 19 nt, Artificial Sequence
  Description of Artificial Sequence: Synthetic oligonucleotide
ugaauaggauauauaccua

SEQ ID NO: 68265 - RNA, 19 nt, Artificial Sequence
  Description of Artificial Sequence: Synthetic oligonucleotide
aacucucuuaucauccaug

SEQ ID NO: 68266 - RNA, 19 nt, Artificial Sequence
  Description of Artificial Sequence: Synthetic oligonucleotide
uggcaaacguuacuaagau

SEQ ID NO: 68267 - RNA, 19 nt, Artificial Sequence
  Description of Artificial Sequence: Synthetic oligonucleotide
gugagaaacgccuuuucga

SEQ ID NO: 68268 - RNA, 19 nt, Artificial Sequence
  Description of Artificial Sequence: Synthetic oligonucleotide
augugagaaacgccuuuuc

SEQ ID NO: 68269 - RNA, 19 nt, Artificial Sequence
  Description of Artificial Sequence: Synthetic oligonucleotide
ugucgcuauacuguguaug

SEQ ID NO: 68270 - RNA, 19 nt, Artificial Sequence
  Description of Artificial Sequence: Synthetic oligonucleotide
uccuaguaacauucuuucc

SEQ ID NO: 68271 - RNA, 19 nt, Artificial Sequence
  Description of Artificial Sequence: Synthetic oligonucleotide
ugacaccgaauuaacugac

SEQ ID NO: 68272 - RNA, 19 nt, Artificial Sequence
  Description of Artificial Sequence: Synthetic oligonucleotide
aaggaggucucgcgagccg

SEQ ID NO: 68273 - RNA, 19 nt, Artificial Sequence
  Description of Artificial Sequence: Synthetic oligonucleotide
aguaugaaaccgaauuugu

SEQ ID NO: 68274 - RNA, 19 nt, Artificial Sequence
  Description of Artificial Sequence: Synthetic oligonucleotide
auuguuaaguagaguauga

SEQ ID NO: 68275 - RNA, 19 nt, Artificial Sequence
  Description of Artificial Sequence: Synthetic oligonucleotide
uguccuaaacucagccucu

SEQ ID NO: 68276 - RNA, 19 nt, Artificial Sequence
  Description of Artificial Sequence: Synthetic oligonucleotide
ucguacgucuucuucgcca

SEQ ID NO: 68277 - RNA, 19 nt, Artificial Sequence
  Description of Artificial Sequence: Synthetic oligonucleotide
gguaaaucagugcuuuaug

SEQ ID NO: 68278 - RNA, 19 nt, Artificial Sequence
  Description of Artificial Sequence: Synthetic oligonucleotide
cagaaaucgguuuaaauau

SEQ ID NO: 68279 - RNA, 19 nt, Artificial Sequence
  Description of Artificial Sequence: Synthetic oligonucleotide
gaaaguuauagccgagcaa

SEQ ID NO: 68280 - RNA, 19 nt, Artificial Sequence
  Description of Artificial Sequence: Synthetic oligonucleotide
aacucucgagaccgagcgg

SEQ ID NO: 68281 - RNA, 19 nt, Artificial Sequence
  Description of Artificial Sequence: Synthetic oligonucleotide
uagggaacuuagccuaccc

SEQ ID NO: 68282 - RNA, 19 nt, Artificial Sequence
  Description of Artificial Sequence: Synthetic oligonucleotide
cuaguaccagagaauggac

SEQ ID NO: 68283 - RNA, 19 nt, Artificial Sequence
  Description of Artificial Sequence: Synthetic oligonucleotide
acaccgaauuaacugacau

SEQ ID NO: 68284 - RNA, 19 nt, Artificial Sequence
  Description of Artificial Sequence: Synthetic oligonucleotide
auagggaacuuagccuacc

SEQ ID NO: 68285 - RNA, 19 nt, Artificial Sequence
  Description of Artificial Sequence: Synthetic oligonucleotide
gucggucgggacaaaaugg

SEQ ID NO: 68286 - RNA, 19 nt, Artificial Sequence
  Description of Artificial Sequence: Synthetic oligonucleotide
aaagugaauaggauauaua

SEQ ID NO: 68287 - RNA, 19 nt, Artificial Sequence
  Description of Artificial Sequence: Synthetic oligonucleotide
cugugaaaguuauagccga

SEQ ID NO: 68288 - RNA, 19 nt, Artificial Sequence
  Description of Artificial Sequence: Synthetic oligonucleotide
cugacaccgaauuaacuga

SEQ ID NO: 68289 - RNA, 19 nt, Artificial Sequence
  Description of Artificial Sequence: Synthetic oligonucleotide
cuugaacacggccuccgcc

SEQ ID NO: 68290 - RNA, 19 nt, Artificial Sequence
  Description of Artificial Sequence: Synthetic oligonucleotide
ugaacggguuuauguuggg

SEQ ID NO: 68291 - RNA, 19 nt, Artificial Sequence
  Description of Artificial Sequence: Synthetic oligonucleotide
aaugugagaaacgccuuuu

SEQ ID NO: 68292 - RNA, 19 nt, Artificial Sequence
  Description of Artificial Sequence: Synthetic oligonucleotide
uguccucaguuaacuacug

SEQ ID NO: 68293 - RNA, 19 nt, Artificial Sequence
  Description of Artificial Sequence: Synthetic oligonucleotide
gagcucuacgucgagggag

SEQ ID NO: 68294 - RNA, 19 nt, Artificial Sequence
  Description of Artificial Sequence: Synthetic oligonucleotide
caaagguaucaucuuagga

SEQ ID NO: 68295 - RNA, 19 nt, Artificial Sequence
  Description of Artificial Sequence: Synthetic oligonucleotide
acggguuuauguugggaug

SEQ ID NO: 68296 - RNA, 19 nt, Artificial Sequence
  Description of Artificial Sequence: Synthetic oligonucleotide
uauagauuauagggacuca

SEQ ID NO: 68297 - RNA, 19 nt, Artificial Sequence
  Description of Artificial Sequence: Synthetic oligonucleotide
acacgagaagccuuucgcu

SEQ ID NO: 68298 - RNA, 19 nt, Artificial Sequence
  Description of Artificial Sequence: Synthetic oligonucleotide
auucaaggcgaaugagugu

SEQ ID NO: 68299 - RNA, 19 nt, Artificial Sequence
  Description of Artificial Sequence: Synthetic oligonucleotide
auagauuauagggacucaa

SEQ ID NO: 68300 - RNA, 19 nt, Artificial Sequence
  Description of Artificial Sequence: Synthetic oligonucleotide
uuccgaacggccucgucga

SEQ ID NO: 68301 - RNA, 19 nt, Artificial Sequence
  Description of Artificial Sequence: Synthetic oligonucleotide
uaguaggcaguuagaauuu

SEQ ID NO: 68302 - RNA, 19 nt, Artificial Sequence
  Description of Artificial Sequence: Synthetic oligonucleotide
agcggagaagcguaugcca

SEQ ID NO: 68303 - RNA, 19 nt, Artificial Sequence
  Description of Artificial Sequence: Synthetic oligonucleotide
ucggugcugcucacuacgg

SEQ ID NO: 68304 - RNA, 19 nt, Artificial Sequence
  Description of Artificial Sequence: Synthetic oligonucleotide
gugaaaguuauagccgagc

SEQ ID NO: 68305 - RNA, 19 nt, Artificial Sequence
  Description of Artificial Sequence: Synthetic oligonucleotide
ucucgcgagccgacgagcc

SEQ ID NO: 68306 - RNA, 19 nt, Artificial Sequence
  Description of Artificial Sequence: Synthetic oligonucleotide
auacuccgcgcuaggaccc

SEQ ID NO: 68307 - RNA, 19 nt, Artificial Sequence
  Description of Artificial Sequence: Synthetic oligonucleotide
auaacucauaccaggagua

SEQ ID NO: 68308 - RNA, 19 nt, Artificial Sequence
  Description of Artificial Sequence: Synthetic oligonucleotide
cugcucgaaaugaaucaug

SEQ ID NO: 68309 - RNA, 19 nt, Artificial Sequence
  Description of Artificial Sequence: Synthetic oligonucleotide
aauucagguuaaguaguuu

SEQ ID NO: 68310 - RNA, 19 nt, Artificial Sequence
  Description of Artificial Sequence: Synthetic oligonucleotide
caucuauguuucuaagcca

SEQ ID NO: 68311 - RNA, 19 nt, Artificial Sequence
  Description of Artificial Sequence: Synthetic oligonucleotide
aguagaguaugaaaccgaa

SEQ ID NO: 68312 - RNA, 19 nt, Artificial Sequence
  Description of Artificial Sequence: Synthetic oligonucleotide
gcgagcucuacgucgaggg

SEQ ID NO: 68313 - RNA, 19 nt, Artificial Sequence
  Description of Artificial Sequence: Synthetic oligonucleotide
aauaguccgcaagcaguca

SEQ ID NO: 68314 - RNA, 19 nt, Artificial Sequence
  Description of Artificial Sequence: Synthetic oligonucleotide
agggaacuuagccuacccu

SEQ ID NO: 68315 - RNA, 19 nt, Artificial Sequence
  Description of Artificial Sequence: Synthetic oligonucleotide
uaguccgcaagcagucaca

SEQ ID NO: 68316 - RNA, 19 nt, Artificial Sequence
  Description of Artificial Sequence: Synthetic oligonucleotide
uuagccuacccuguccuaa

SEQ ID NO: 68317 - RNA, 19 nt, Artificial Sequence
  Description of Artificial Sequence: Synthetic oligonucleotide
cauagggaacuuagccuac

SEQ ID NO: 68318 - RNA, 19 nt, Artificial Sequence
  Description of Artificial Sequence: Synthetic oligonucleotide
caccgaauuaacugacauc

SEQ ID NO: 68319 - RNA, 19 nt, Artificial Sequence
  Description of Artificial Sequence: Synthetic oligonucleotide
agcagauacuccgcgcuag

SEQ ID NO: 68320 - RNA, 19 nt, Artificial Sequence
  Description of Artificial Sequence: Synthetic oligonucleotide
gcuaguaccagagaaugga

SEQ ID NO: 68321 - RNA, 19 nt, Artificial Sequence
  Description of Artificial Sequence: Synthetic oligonucleotide
acguacagauucaaggcga

SEQ ID NO: 68322 - RNA, 19 nt, Artificial Sequence
  Description of Artificial Sequence: Synthetic oligonucleotide
gacuaagagccaccaguga

SEQ ID NO: 68323 - RNA, 19 nt, Artificial Sequence
  Description of Artificial Sequence: Synthetic oligonucleotide
gaacuuagccuacccuguc

SEQ ID NO: 68324 - RNA, 19 nt, Artificial Sequence
  Description of Artificial Sequence: Synthetic oligonucleotide
ugauaagaauuggacuaua

SEQ ID NO: 68325 - RNA, 19 nt, Artificial Sequence
  Description of Artificial Sequence: Synthetic oligonucleotide
agcgagcgagcucuacguc

SEQ ID NO: 68326 - RNA, 19 nt, Artificial Sequence
  Description of Artificial Sequence: Synthetic oligonucleotide
gacgcucccacggacgagc

SEQ ID NO: 68327 - RNA, 19 nt, Artificial Sequence
  Description of Artificial Sequence: Synthetic oligonucleotide
gacaaagcccuaauaguua

SEQ ID NO: 68328 - RNA, 19 nt, Artificial Sequence
  Description of Artificial Sequence: Synthetic oligonucleotide
gcuaaugugagaaacgccu

SEQ ID NO: 68329 - RNA, 19 nt, Artificial Sequence
  Description of Artificial Sequence: Synthetic oligonucleotide
caaacguuacuaagaucca

SEQ ID NO: 68330 - RNA, 19 nt, Artificial Sequence
  Description of Artificial Sequence: Synthetic oligonucleotide
agcuuaaacauugcauuuu

SEQ ID NO: 68331 - RNA, 19 nt, Artificial Sequence
  Description of Artificial Sequence: Synthetic oligonucleotide
ggagaagcguaugccaggg

SEQ ID NO: 68332 - RNA, 19 nt, Artificial Sequence
  Description of Artificial Sequence: Synthetic oligonucleotide
aacgccuuuucgauguuua

SEQ ID NO: 68333 - RNA, 19 nt, Artificial Sequence
  Description of Artificial Sequence: Synthetic oligonucleotide
guaaagcggcaacugccac

SEQ ID NO: 68334 - RNA, 19 nt, Artificial Sequence
  Description of Artificial Sequence: Synthetic oligonucleotide
cugauaguaggcaguuaga

SEQ ID NO: 68335 - RNA, 19 nt, Artificial Sequence
  Description of Artificial Sequence: Synthetic oligonucleotide
aguccgcaagcagucacag

SEQ ID NO: 68336 - RNA, 19 nt, Artificial Sequence
  Description of Artificial Sequence: Synthetic oligonucleotide
gcgaaugaguguuuuccug

SEQ ID NO: 68337 - RNA, 19 nt, Artificial Sequence
  Description of Artificial Sequence: Synthetic oligonucleotide
gaaaccgaauuuguagcua

SEQ ID NO: 68338 - RNA, 19 nt, Artificial Sequence
  Description of Artificial Sequence: Synthetic oligonucleotide
cauguagcuccaaaccuua

SEQ ID NO: 68339 - RNA, 19 nt, Artificial Sequence
  Description of Artificial Sequence: Synthetic oligonucleotide
gaucggugcugcucacuac

SEQ ID NO: 68340 - RNA, 19 nt, Artificial Sequence
  Description of Artificial Sequence: Synthetic oligonucleotide
cacuagugcaugcaauuaa

SEQ ID NO: 68341 - RNA, 19 nt, Artificial Sequence
  Description of Artificial Sequence: Synthetic oligonucleotide
cacccgggcguucuggggc

SEQ ID NO: 68342 - RNA, 19 nt, Artificial Sequence
  Description of Artificial Sequence: Synthetic oligonucleotide
aaccgaauuuguagcuagu

SEQ ID NO: 68343 - RNA, 19 nt, Artificial Sequence
  Description of Artificial Sequence: Synthetic oligonucleotide
ugcaauuaacuagguuuua

SEQ ID NO: 68344 - RNA, 19 nt, Artificial Sequence
  Description of Artificial Sequence: Synthetic oligonucleotide
agcgagcucuacgucgagg

SEQ ID NO: 68345 - RNA, 19 nt, Artificial Sequence
  Description of Artificial Sequence: Synthetic oligonucleotide
gcagcggagaagcguaugc

SEQ ID NO: 68346 - RNA, 19 nt, Artificial Sequence
  Description of Artificial Sequence: Synthetic oligonucleotide
cugcauuacccuuuguccu

SEQ ID NO: 68347 - RNA, 19 nt, Artificial Sequence
  Description of Artificial Sequence: Synthetic oligonucleotide
gaacacggccuccgcccgg

SEQ ID NO: 68348 - RNA, 19 nt, Artificial Sequence
  Description of Artificial Sequence: Synthetic oligonucleotide
guaugaaaccgaauuugua

SEQ ID NO: 68349 - RNA, 19 nt, Artificial Sequence
  Description of Artificial Sequence: Synthetic oligonucleotide
cuccgcccggagcagauac

SEQ ID NO: 68350 - RNA, 19 nt, Artificial Sequence
  Description of Artificial Sequence: Synthetic oligonucleotide
ccucugcucgaaaugaauc

SEQ ID NO: 68351 - RNA, 19 nt, Artificial Sequence
  Description of Artificial Sequence: Synthetic oligonucleotide
cagcggagaagcguaugcc

SEQ ID NO: 68352 - RNA, 19 nt, Artificial Sequence
  Description of Artificial Sequence: Synthetic oligonucleotide
cuggucuaccgaacugcug

SEQ ID NO: 68353 - RNA, 19 nt, Artificial Sequence
  Description of Artificial Sequence: Synthetic oligonucleotide
agguuucaaacagauuaua

SEQ ID NO: 68354 - RNA, 19 nt, Artificial Sequence
  Description of Artificial Sequence: Synthetic oligonucleotide
accgaauuuguagcuagua

SEQ ID NO: 68355 - RNA, 19 nt, Artificial Sequence
  Description of Artificial Sequence: Synthetic oligonucleotide
ggaaaaucgggaauuauuu

SEQ ID NO: 68356 - RNA, 19 nt, Artificial Sequence
  Description of Artificial Sequence: Synthetic oligonucleotide
cacgucacagaaaucuugu

SEQ ID NO: 68357 - RNA, 19 nt, Artificial Sequence
  Description of Artificial Sequence: Synthetic oligonucleotide
gaacggguuuauguuggga

SEQ ID NO: 68358 - RNA, 19 nt, Artificial Sequence
  Description of Artificial Sequence: Synthetic oligonucleotide
agggaucggugcugcucac

SEQ ID NO: 68359 - RNA, 19 nt, Artificial Sequence
  Description of Artificial Sequence: Synthetic oligonucleotide
aggggacaaagcccuaaua

SEQ ID NO: 68360 - RNA, 19 nt, Artificial Sequence
  Description of Artificial Sequence: Synthetic oligonucleotide
gcagauacuccgcgcuagg

SEQ ID NO: 68361 - RNA, 19 nt, Artificial Sequence
  Description of Artificial Sequence: Synthetic oligonucleotide
aauugucuuuagggcacua

SEQ ID NO: 68362 - RNA, 19 nt, Artificial Sequence
  Description of Artificial Sequence: Synthetic oligonucleotide
acacuagugcaugcaauua

SEQ ID NO: 68363 - RNA, 19 nt, Artificial Sequence
  Description of Artificial Sequence: Synthetic oligonucleotide
uacgucgagggagcgcggc

SEQ ID NO: 68364 - RNA, 19 nt, Artificial Sequence
  Description of Artificial Sequence: Synthetic oligonucleotide
aggucucgcgagccgacga

SEQ ID NO: 68365 - RNA, 19 nt, Artificial Sequence
  Description of Artificial Sequence: Synthetic oligonucleotide
uccgcgcuaggacccgggc

SEQ ID NO: 68366 - RNA, 19 nt, Artificial Sequence
  Description of Artificial Sequence: Synthetic oligonucleotide
gagcgagcgagcucuacgu

SEQ ID NO: 68367 - RNA, 19 nt, Artificial Sequence
  Description of Artificial Sequence: Synthetic oligonucleotide
uagguacaacucucuuauc

SEQ ID NO: 68368 - RNA, 19 nt, Artificial Sequence
  Description of Artificial Sequence: Synthetic oligonucleotide
ucgcgagccgacgagcccu

SEQ ID NO: 68369 - RNA, 19 nt, Artificial Sequence
  Description of Artificial Sequence: Synthetic oligonucleotide
uccgaacggccucgucgag

SEQ ID NO: 68370 - RNA, 19 nt, Artificial Sequence
  Description of Artificial Sequence: Synthetic oligonucleotide
ggcaguuagaauuuaucuu

SEQ ID NO: 68371 - RNA, 19 nt, Artificial Sequence
  Description of Artificial Sequence: Synthetic oligonucleotide
auaugucgcuauacugugu

SEQ ID NO: 68372 - RNA, 19 nt, Artificial Sequence
  Description of Artificial Sequence: Synthetic oligonucleotide
gguacaacucucuuaucau

SEQ ID NO: 68373 - RNA, 19 nt, Artificial Sequence
  Description of Artificial Sequence: Synthetic oligonucleotide
cuaacgacagcagguuuaa

SEQ ID NO: 68374 - RNA, 19 nt, Artificial Sequence
  Description of Artificial Sequence: Synthetic oligonucleotide
ggcaaacguuacuaagauc

SEQ ID NO: 68375 - RNA, 19 nt, Artificial Sequence
  Description of Artificial Sequence: Synthetic oligonucleotide
cuuuacacgagaagccuuu

SEQ ID NO: 68376 - RNA, 19 nt, Artificial Sequence
  Description of Artificial Sequence: Synthetic oligonucleotide
gucuaccgaacugcuggag

SEQ ID NO: 68377 - RNA, 19 nt, Artificial Sequence
  Description of Artificial Sequence: Synthetic oligonucleotide
augucgcuauacuguguau

SEQ ID NO: 68378 - RNA, 19 nt, Artificial Sequence
  Description of Artificial Sequence: Synthetic oligonucleotide
gucuuuccuggucuaccga

SEQ ID NO: 68379 - RNA, 19 nt, Artificial Sequence
  Description of Artificial Sequence: Synthetic oligonucleotide
uacuccgcgcuaggacccg

SEQ ID NO: 68380 - RNA, 19 nt, Artificial Sequence
  Description of Artificial Sequence: Synthetic oligonucleotide
cucgcgagccgacgagccc

SEQ ID NO: 68381 - RNA, 19 nt, Artificial Sequence
  Description of Artificial Sequence: Synthetic oligonucleotide
cucuacgucgagggagcgc

SEQ ID NO: 68382 - RNA, 19 nt, Artificial Sequence
  Description of Artificial Sequence: Synthetic oligonucleotide
aacuacugugaaaguuaua

SEQ ID NO: 68383 - RNA, 19 nt, Artificial Sequence
  Description of Artificial Sequence: Synthetic oligonucleotide
acgccuuuucgauguuuau

SEQ ID NO: 68384 - RNA, 19 nt, Artificial Sequence
  Description of Artificial Sequence: Synthetic oligonucleotide
aguaggcaguuagaauuua

SEQ ID NO: 68385 - RNA, 19 nt, Artificial Sequence
  Description of Artificial Sequence: Synthetic oligonucleotide
ggggcugacaccgaauuaa

SEQ ID NO: 68386 - RNA, 19 nt, Artificial Sequence
  Description of Artificial Sequence: Synthetic oligonucleotide
ggagcagauacuccgcgcu

SEQ ID NO: 68387 - RNA, 19 nt, Artificial Sequence
  Description of Artificial Sequence: Synthetic oligonucleotide
gaccgagcgggagaccuuc

SEQ ID NO: 68388 - RNA, 19 nt, Artificial Sequence
  Description of Artificial Sequence: Synthetic oligonucleotide
acgagcgagcgagcucuac

SEQ ID NO: 68389 - RNA, 19 nt, Artificial Sequence
  Description of Artificial Sequence: Synthetic oligonucleotide
gccgccgguagccccaagg

SEQ ID NO: 68390 - RNA, 19 nt, Artificial Sequence
  Description of Artificial Sequence: Synthetic oligonucleotide
caagguaaaucagugcuuu

SEQ ID NO: 68391 - RNA, 19 nt, Artificial Sequence
  Description of Artificial Sequence: Synthetic oligonucleotide
ggguucucuuaguagauau

SEQ ID NO: 68392 - RNA, 19 nt, Artificial Sequence
  Description of Artificial Sequence: Synthetic oligonucleotide
auagccgagcaaacuucga

SEQ ID NO: 68393 - RNA, 19 nt, Artificial Sequence
  Description of Artificial Sequence: Synthetic oligonucleotide
ggucucgcgagccgacgag

SEQ ID NO: 68394 - RNA, 19 nt, Artificial Sequence
  Description of Artificial Sequence: Synthetic oligonucleotide
cuccgcgcuaggacccggg

SEQ ID NO: 68395 - RNA, 19 nt, Artificial Sequence
  Description of Artificial Sequence: Synthetic oligonucleotide
cuaggacccgggcgagggc

SEQ ID NO: 68396 - RNA, 19 nt, Artificial Sequence
  Description of Artificial Sequence: Synthetic oligonucleotide
gagcgagcucuacgucgag

SEQ ID NO: 68397 - RNA, 19 nt, Artificial Sequence
  Description of Artificial Sequence: Synthetic oligonucleotide
gagccgacgagcccugcua

SEQ ID NO: 68398 - RNA, 19 nt, Artificial Sequence
  Description of Artificial Sequence: Synthetic oligonucleotide
ggcgggcuugaacacggcc

SEQ ID NO: 68399 - RNA, 19 nt, Artificial Sequence
  Description of Artificial Sequence: Synthetic oligonucleotide
gagcagauacuccgcgcua

SEQ ID NO: 68400 - RNA, 19 nt, Artificial Sequence
  Description of Artificial Sequence: Synthetic oligonucleotide
caccagugaggcauauaaa

SEQ ID NO: 68401 - RNA, 19 nt, Artificial Sequence
  Description of Artificial Sequence: Synthetic oligonucleotide
cagguuuaaccuacaacuu

SEQ ID NO: 68402 - RNA, 19 nt, Artificial Sequence
  Description of Artificial Sequence: Synthetic oligonucleotide
gucucgcgagccgacgagc

SEQ ID NO: 68403 - RNA, 19 nt, Artificial Sequence
  Description of Artificial Sequence: Synthetic oligonucleotide
ccgaauuaacugacaucug

SEQ ID NO: 68404 - RNA, 19 nt, Artificial Sequence
  Description of Artificial Sequence: Synthetic oligonucleotide
ccggagcagauacuccgcg

SEQ ID NO: 68405 - RNA, 19 nt, Artificial Sequence
  Description of Artificial Sequence: Synthetic oligonucleotide
ucacuacggccaacuccuc

SEQ ID NO: 68406 - RNA, 19 nt, Artificial Sequence
  Description of Artificial Sequence: Synthetic oligonucleotide
gacuaacgacagcagguuu

SEQ ID NO: 68407 - RNA, 19 nt, Artificial Sequence
  Description of Artificial Sequence: Synthetic oligonucleotide
gccuacccuguccuaauga

SEQ ID NO: 68408 - RNA, 19 nt, Artificial Sequence
  Description of Artificial Sequence: Synthetic oligonucleotide
cacggacgagcgagcgagc

SEQ ID NO: 68409 - RNA, 19 nt, Artificial Sequence
  Description of Artificial Sequence: Synthetic oligonucleotide
cagauacuccgcgcuagga

SEQ ID NO: 68410 - RNA, 19 nt, Artificial Sequence
  Description of Artificial Sequence: Synthetic oligonucleotide
ggcgaaugaguguuuuccu

SEQ ID NO: 68411 - RNA, 19 nt, Artificial Sequence
  Description of Artificial Sequence: Synthetic oligonucleotide
cuuagccuacccuguccua

SEQ ID NO: 68412 - RNA, 19 nt, Artificial Sequence
  Description of Artificial Sequence: Synthetic oligonucleotide
gguagccccaagggaucgg

SEQ ID NO: 68413 - RNA, 19 nt, Artificial Sequence
  Description of Artificial Sequence: Synthetic oligonucleotide
guaggcaguuagaauuuau

SEQ ID NO: 68414 - RNA, 19 nt, Artificial Sequence
  Description of Artificial Sequence: Synthetic oligonucleotide
ggaaagugaauaggauaua

SEQ ID NO: 68415 - RNA, 19 nt, Artificial Sequence
  Description of Artificial Sequence: Synthetic oligonucleotide
gguuuauguugggaugaaa

SEQ ID NO: 68416 - RNA, 19 nt, Artificial Sequence
  Description of Artificial Sequence: Synthetic oligonucleotide
cggucgggacaaaauggcc

SEQ ID NO: 68417 - RNA, 19 nt, Artificial Sequence
  Description of Artificial Sequence: Synthetic oligonucleotide
guccgcaagcagucacaga

SEQ ID NO: 68418 - RNA, 19 nt, Artificial Sequence
  Description of Artificial Sequence: Synthetic oligonucleotide
gggcugacaccgaauuaac

SEQ ID NO: 68419 - RNA, 19 nt, Artificial Sequence
  Description of Artificial Sequence: Synthetic oligonucleotide
gggacgcucccacggacga

SEQ ID NO: 68420 - RNA, 19 nt, Artificial Sequence
  Description of Artificial Sequence: Synthetic oligonucleotide
guggaaaaucgggaauuau

SEQ ID NO: 68421 - RNA, 19 nt, Artificial Sequence
  Description of Artificial Sequence: Synthetic oligonucleotide
gcuauaguuuaauguugau

SEQ ID NO: 68422 - RNA, 19 nt, Artificial Sequence
  Description of Artificial Sequence: Synthetic oligonucleotide
caacuccucacccgggcgu

SEQ ID NO: 68423 - RNA, 19 nt, Artificial Sequence
  Description of Artificial Sequence: Synthetic oligonucleotide
gcucuacgucgagggagcg

SEQ ID NO: 68424 - RNA, 19 nt, Artificial Sequence
  Description of Artificial Sequence: Synthetic oligonucleotide
cgggacgcucccacggacg

SEQ ID NO: 68425 - RNA, 19 nt, Artificial Sequence
  Description of Artificial Sequence: Synthetic oligonucleotide
cucgucgaggaagccccga

SEQ ID NO: 68426 - RNA, 19 nt, Artificial Sequence
  Description of Artificial Sequence: Synthetic oligonucleotide
ggacuaacgacagcagguu

SEQ ID NO: 68427 - RNA, 19 nt, Artificial Sequence
  Description of Artificial Sequence: Synthetic oligonucleotide
ggagucggucgggacaaaa

SEQ ID NO: 68428 - RNA, 19 nt, Artificial Sequence
  Description of Artificial Sequence: Synthetic oligonucleotide
cguacagauucaaggcgaa

SEQ ID NO: 68429 - RNA, 19 nt, Artificial Sequence
  Description of Artificial Sequence: Synthetic oligonucleotide
cgagcgagcucuacgucga

SEQ ID NO: 68430 - RNA, 19 nt, Artificial Sequence
  Description of Artificial Sequence: Synthetic oligonucleotide
caaggcgaaugaguguuuu

SEQ ID NO: 68431 - RNA, 19 nt, Artificial Sequence
  Description of Artificial Sequence: Synthetic oligonucleotide
ggcugacaccgaauuaacu

SEQ ID NO: 68432 - RNA, 19 nt, Artificial Sequence
  Description of Artificial Sequence: Synthetic oligonucleotide
ccgcccggagcagauacuc

SEQ ID NO: 68433 - RNA, 19 nt, Artificial Sequence
  Description of Artificial Sequence: Synthetic oligonucleotide
agaccgagcgggagaccuu

SEQ ID NO: 68434 - RNA, 19 nt, Artificial Sequence
  Description of Artificial Sequence: Synthetic oligonucleotide
ccggggagucggucgggac

SEQ ID NO: 68435 - RNA, 19 nt, Artificial Sequence
  Description of Artificial Sequence: Synthetic oligonucleotide
gccgggacgcucccacgga

SEQ ID NO: 68436 - RNA, 19 nt, Artificial Sequence
  Description of Artificial Sequence: Synthetic oligonucleotide
cccgugccuccgaggggcg

SEQ ID NO: 68437 - RNA, 19 nt, Artificial Sequence
  Description of Artificial Sequence: Synthetic oligonucleotide
cgcgagccgacgagcccug

SEQ ID NO: 68438 - RNA, 19 nt, Artificial Sequence
  Description of Artificial Sequence: Synthetic oligonucleotide
gcgagccgacgagcccugc

SEQ ID NO: 68439 - RNA, 19 nt, Artificial Sequence
  Description of Artificial Sequence: Synthetic oligonucleotide
ccgggcguucuggggccgc

SEQ ID NO: 68440 - RNA, 19 nt, Artificial Sequence
  Description of Artificial Sequence: Synthetic oligonucleotide
ccgacgagcccugcuacau

SEQ ID NO: 68441 - RNA, 19 nt, Artificial Sequence
  Description of Artificial Sequence: Synthetic oligonucleotide
cgacgagcccugcuacaua

SEQ ID NO: 68442 - RNA, 19 nt, Artificial Sequence
  Description of Artificial Sequence: Synthetic oligonucleotide
cgagccgacgagcccugcu

SEQ ID NO: 68443 - RNA, 19 nt, Artificial Sequence
  Description of Artificial Sequence: Synthetic oligonucleotide
ccuccgcccggagcagaua

SEQ ID NO: 68444 - RNA, 19 nt, Artificial Sequence
  Description of Artificial Sequence: Synthetic oligonucleotide
gcggcucggccgggacgcu

SEQ ID NO: 68445 - RNA, 19 nt, Artificial Sequence
  Description of Artificial Sequence: Synthetic oligonucleotide
aaguguggcaaguacagcc

SEQ ID NO: 68446 - RNA, 19 nt, Artificial Sequence
  Description of Artificial Sequence: Synthetic oligonucleotide
uuauaucucgcuuacaaag

SEQ ID NO: 68447 - RNA, 19 nt, Artificial Sequence
  Description of Artificial Sequence: Synthetic oligonucleotide
uaugauuagggucaaacug

SEQ ID NO: 68448 - RNA, 19 nt, Artificial Sequence
  Description of Artificial Sequence: Synthetic oligonucleotide
ucuaauacugugaccaucg

SEQ ID NO: 68449 - RNA, 19 nt, Artificial Sequence
  Description of Artificial Sequence: Synthetic oligonucleotide
gaaaguucggauuaguaug

SEQ ID NO: 68450 - RNA, 19 nt, Artificial Sequence
  Description of Artificial Sequence: Synthetic oligonucleotide
aaccauguaacuuggaugu

SEQ ID NO: 68451 - RNA, 19 nt, Artificial Sequence
  Description of Artificial Sequence: Synthetic oligonucleotide
gaaucuaguauucugugag

SEQ ID NO: 68452 - RNA, 19 nt, Artificial Sequence
  Description of Artificial Sequence: Synthetic oligonucleotide
uaaugguacagucauaaga

SEQ ID NO: 68453 - RNA, 19 nt, Artificial Sequence
  Description of Artificial Sequence: Synthetic oligonucleotide
aaccuaucaucccacagac

SEQ ID NO: 68454 - RNA, 19 nt, Artificial Sequence
  Description of Artificial Sequence: Synthetic oligonucleotide
uuuauguugaaggugacca

SEQ ID NO: 68455 - RNA, 19 nt, Artificial Sequence
  Description of Artificial Sequence: Synthetic oligonucleotide
uucuuuauguugaagguga

SEQ ID NO: 68456 - RNA, 19 nt, Artificial Sequence
  Description of Artificial Sequence: Synthetic oligonucleotide
uguuuaaucugaacugacg

SEQ ID NO: 68457 - RNA, 19 nt, Artificial Sequence
  Description of Artificial Sequence: Synthetic oligonucleotide
aguuaugaaguucacagcu

SEQ ID NO: 68458 - RNA, 19 nt, Artificial Sequence
  Description of Artificial Sequence: Synthetic oligonucleotide
cuaagguucucaaugacag

SEQ ID NO: 68459 - RNA, 19 nt, Artificial Sequence
  Description of Artificial Sequence: Synthetic oligonucleotide
aauuuaaucauaagccauc

SEQ ID NO: 68460 - RNA, 19 nt, Artificial Sequence
  Description of Artificial Sequence: Synthetic oligonucleotide
uguaacuuggauguguagg

SEQ ID NO: 68461 - RNA, 19 nt, Artificial Sequence
  Description of Artificial Sequence: Synthetic oligonucleotide
uuugcuagcgguaugucug

SEQ ID NO: 68462 - RNA, 19 nt, Artificial Sequence
  Description of Artificial Sequence: Synthetic oligonucleotide
ucuaaauccauauucccac

SEQ ID NO: 68463 - RNA, 19 nt, Artificial Sequence
  Description of Artificial Sequence: Synthetic oligonucleotide
guuuccgccacacugacgg

SEQ ID NO: 68464 - RNA, 19 nt, Artificial Sequence
  Description of Artificial Sequence: Synthetic oligonucleotide
aacuggauccagcaaguac

SEQ ID NO: 68465 - RNA, 19 nt, Artificial Sequence
  Description of Artificial Sequence: Synthetic oligonucleotide
ugugaugugucauuuaacu

SEQ ID NO: 68466 - RNA, 19 nt, Artificial Sequence
  Description of Artificial Sequence: Synthetic oligonucleotide
auagcaaccaguguaaauc

SEQ ID NO: 68467 - RNA, 19 nt, Artificial Sequence
  Description of Artificial Sequence: Synthetic oligonucleotide
aguacgguuccuuagacug

SEQ ID NO: 68468 - RNA, 19 nt, Artificial Sequence
  Description of Artificial Sequence: Synthetic oligonucleotide
agaaccugaauagugaaac

SEQ ID NO: 68469 - RNA, 19 nt, Artificial Sequence
  Description of Artificial Sequence: Synthetic oligonucleotide
aacaaacuugcuaaguaac

SEQ ID NO: 68470 - RNA, 19 nt, Artificial Sequence
  Description of Artificial Sequence: Synthetic oligonucleotide
ugcauguaaccuaucaucc

SEQ ID NO: 68471 - RNA, 19 nt, Artificial Sequence
  Description of Artificial Sequence: Synthetic oligonucleotide
gaugcguacaagcucaccc

SEQ ID NO: 68472 - RNA, 19 nt, Artificial Sequence
  Description of Artificial Sequence: Synthetic oligonucleotide
gaggaauuaaaacugaucu

SEQ ID NO: 68473 - RNA, 19 nt, Artificial Sequence
  Description of Artificial Sequence: Synthetic oligonucleotide
aauaguuuaugaaugacuu

SEQ ID NO: 68474 - RNA, 19 nt, Artificial Sequence
  Description of Artificial Sequence: Synthetic oligonucleotide
aacaagaacaaacuugcua

SEQ ID NO: 68475 - RNA, 19 nt, Artificial Sequence
  Description of Artificial Sequence: Synthetic oligonucleotide
aauacugugaccaucguuu

SEQ ID NO: 68476 - RNA, 19 nt, Artificial Sequence
  Description of Artificial Sequence: Synthetic oligonucleotide
uuauggauggucauacaca

SEQ ID NO: 68477 - RNA, 19 nt, Artificial Sequence
  Description of Artificial Sequence: Synthetic oligonucleotide
uggauuaacuggaaggcug

SEQ ID NO: 68478 - RNA, 19 nt, Artificial Sequence
  Description of Artificial Sequence: Synthetic oligonucleotide
auuaguauggucagucagc

SEQ ID NO: 68479 - RNA, 19 nt, Artificial Sequence
  Description of Artificial Sequence: Synthetic oligonucleotide
ugauuagggucaaacuggg

SEQ ID NO: 68480 - RNA, 19 nt, Artificial Sequence
  Description of Artificial Sequence: Synthetic oligonucleotide
gacgcgaacaaacuugucc

SEQ ID NO: 68481 - RNA, 19 nt, Artificial Sequence
  Description of Artificial Sequence: Synthetic oligonucleotide
ugugguuauuuggagaggg

SEQ ID NO: 68482 - RNA, 19 nt, Artificial Sequence
  Description of Artificial Sequence: Synthetic oligonucleotide
acgaaucagggacaguacc

SEQ ID NO: 68483 - RNA, 19 nt, Artificial Sequence
  Description of Artificial Sequence: Synthetic oligonucleotide
auaagauccuacaaccagc

SEQ ID NO: 68484 - RNA, 19 nt, Artificial Sequence
  Description of Artificial Sequence: Synthetic oligonucleotide
uguuccauacauucucggg

SEQ ID NO: 68485 - RNA, 19 nt, Artificial Sequence
  Description of Artificial Sequence: Synthetic oligonucleotide
acaccaauacacuuccgac

SEQ ID NO: 68486 - RNA, 19 nt, Artificial Sequence
  Description of Artificial Sequence: Synthetic oligonucleotide
cuuggguugacucuuguac

SEQ ID NO: 68487 - RNA, 19 nt, Artificial Sequence
  Description of Artificial Sequence: Synthetic oligonucleotide
augauuagggucaaacugg

SEQ ID NO: 68488 - RNA, 19 nt, Artificial Sequence
  Description of Artificial Sequence: Synthetic oligonucleotide
agauccuacaaccagcagu

SEQ ID NO: 68489 - RNA, 19 nt, Artificial Sequence
  Description of Artificial Sequence: Synthetic oligonucleotide
cacuuuggaaguauggccc

SEQ ID NO: 68490 - RNA, 19 nt, Artificial Sequence
  Description of Artificial Sequence: Synthetic oligonucleotide
uaagauccuacaaccagca

SEQ ID NO: 68491 - RNA, 19 nt, Artificial Sequence
  Description of Artificial Sequence: Synthetic oligonucleotide
uccauaaacuugcagucga

SEQ ID NO: 68492 - RNA, 19 nt, Artificial Sequence
  Description of Artificial Sequence: Synthetic oligonucleotide
auaguuuaugaaugacuuc

SEQ ID NO: 68493 - RNA, 19 nt, Artificial Sequence
  Description of Artificial Sequence: Synthetic oligonucleotide
uauaucucgcuuacaaagu

SEQ ID NO: 68494 - RNA, 19 nt, Artificial Sequence
  Description of Artificial Sequence: Synthetic oligonucleotide
uugcauguaaccuaucauc

SEQ ID NO: 68495 - RNA, 19 nt, Artificial Sequence
  Description of Artificial Sequence: Synthetic oligonucleotide
aguacuacuggaaccauuc

SEQ ID NO: 68496 - RNA, 19 nt, Artificial Sequence
  Description of Artificial Sequence: Synthetic oligonucleotide
ugcaucacggacacuaaug

SEQ ID NO: 68497 - RNA, 19 nt, Artificial Sequence
  Description of Artificial Sequence: Synthetic oligonucleotide
auaaacaccaauagucuag

SEQ ID NO: 68498 - RNA, 19 nt, Artificial Sequence
  Description of Artificial Sequence: Synthetic oligonucleotide
gaagaguacgguuccuuag

SEQ ID NO: 68499 - RNA, 19 nt, Artificial Sequence
  Description of Artificial Sequence: Synthetic oligonucleotide
aggaauuaaaacugaucug

SEQ ID NO: 68500 - RNA, 19 nt, Artificial Sequence
  Description of Artificial Sequence: Synthetic oligonucleotide
uaggugauccacaacgcca

SEQ ID NO: 68501 - RNA, 19 nt, Artificial Sequence
  Description of Artificial Sequence: Synthetic oligonucleotide
uagucuaguggcauaaauc

SEQ ID NO: 68502 - RNA, 19 nt, Artificial Sequence
  Description of Artificial Sequence: Synthetic oligonucleotide
aagaguacgguuccuuaga

SEQ ID NO: 68503 - RNA, 19 nt, Artificial Sequence
  Description of Artificial Sequence: Synthetic oligonucleotide
uguggcaagacaacugacu

SEQ ID NO: 68504 - RNA, 19 nt, Artificial Sequence
  Description of Artificial Sequence: Synthetic oligonucleotide
cuuuuauggauggucauac

SEQ ID NO: 68505 - RNA, 19 nt, Artificial Sequence
  Description of Artificial Sequence: Synthetic oligonucleotide
uucggauuaguauggucag

SEQ ID NO: 68506 - RNA, 19 nt, Artificial Sequence
  Description of Artificial Sequence: Synthetic oligonucleotide
aaucuaguauucugugagu

SEQ ID NO: 68507 - RNA, 19 nt, Artificial Sequence
  Description of Artificial Sequence: Synthetic oligonucleotide
uagaggauacgccaucugu

SEQ ID NO: 68508 - RNA, 19 nt, Artificial Sequence
  Description of Artificial Sequence: Synthetic oligonucleotide
agaguacgguuccuuagac

SEQ ID NO: 68509 - RNA, 19 nt, Artificial Sequence
  Description of Artificial Sequence: Synthetic oligonucleotide
aucuaguauucugugaguc

SEQ ID NO: 68510 - RNA, 19 nt, Artificial Sequence
  Description of Artificial Sequence: Synthetic oligonucleotide
aacucggacaguuguguca

SEQ ID NO: 68511 - RNA, 19 nt, Artificial Sequence
  Description of Artificial Sequence: Synthetic oligonucleotide
cuuuauaucucgcuuacaa

SEQ ID NO: 68512 - RNA, 19 nt, Artificial Sequence
  Description of Artificial Sequence: Synthetic oligonucleotide
uuucacgaauccauuuuac

SEQ ID NO: 68513 - RNA, 19 nt, Artificial Sequence
  Description of Artificial Sequence: Synthetic oligonucleotide
acuaaugguacagucauaa

SEQ ID NO: 68514 - RNA, 19 nt, Artificial Sequence
  Description of Artificial Sequence: Synthetic oligonucleotide
uuguuuaaucugaacugac

SEQ ID NO: 68515 - RNA, 19 nt, Artificial Sequence
  Description of Artificial Sequence: Synthetic oligonucleotide
uuuggacgugcuaaggagu

SEQ ID NO: 68516 - RNA, 19 nt, Artificial Sequence
  Description of Artificial Sequence: Synthetic oligonucleotide
caugucguucaacaugucc

SEQ ID NO: 68517 - RNA, 19 nt, Artificial Sequence
  Description of Artificial Sequence: Synthetic oligonucleotide
uuaaaacucgaggacacaa

SEQ ID NO: 68518 - RNA, 19 nt, Artificial Sequence
  Description of Artificial Sequence: Synthetic oligonucleotide
guaugucuggcugugaacc

SEQ ID NO: 68519 - RNA, 19 nt, Artificial Sequence
  Description of Artificial Sequence: Synthetic oligonucleotide
uuuugcgguguucuggaac

SEQ ID NO: 68520 - RNA, 19 nt, Artificial Sequence
  Description of Artificial Sequence: Synthetic oligonucleotide
cuauccaugcacugcagug

SEQ ID NO: 68521 - RNA, 19 nt, Artificial Sequence
  Description of Artificial Sequence: Synthetic oligonucleotide
ucacggacacuaaugguac

SEQ ID NO: 68522 - RNA, 19 nt, Artificial Sequence
  Description of Artificial Sequence: Synthetic oligonucleotide
agaaucuaguauucuguga

SEQ ID NO: 68523 - RNA, 19 nt, Artificial Sequence
  Description of Artificial Sequence: Synthetic oligonucleotide
cauacuuaucugcugcuug

SEQ ID NO: 68524 - RNA, 19 nt, Artificial Sequence
  Description of Artificial Sequence: Synthetic oligonucleotide
uguagcgguugccaagugc

SEQ ID NO: 68525 - RNA, 19 nt, Artificial Sequence
  Description of Artificial Sequence: Synthetic oligonucleotide
aagacaacugacugcccga

SEQ ID NO: 68526 - RNA, 19 nt, Artificial Sequence
  Description of Artificial Sequence: Synthetic oligonucleotide
uccguuccgugcaucacgg

SEQ ID NO: 68527 - RNA, 19 nt, Artificial Sequence
  Description of Artificial Sequence: Synthetic oligonucleotide
gacaccaauacacuuccga

SEQ ID NO: 68528 - RNA, 19 nt, Artificial Sequence
  Description of Artificial Sequence: Synthetic oligonucleotide
uuggacgugcuaaggagug

SEQ ID NO: 68529 - RNA, 19 nt, Artificial Sequence
  Description of Artificial Sequence: Synthetic oligonucleotide
auagaugcguacaagcuca

SEQ ID NO: 68530 - RNA, 19 nt, Artificial Sequence
  Description of Artificial Sequence: Synthetic oligonucleotide
guagacgcgaacaaacuug

SEQ ID NO: 68531 - RNA, 19 nt, Artificial Sequence
  Description of Artificial Sequence: Synthetic oligonucleotide
agaugugguuauuuggaga

SEQ ID NO: 68532 - RNA, 19 nt, Artificial Sequence
  Description of Artificial Sequence: Synthetic oligonucleotide
uuggguugacucuuguaca

SEQ ID NO: 68533 - RNA, 19 nt, Artificial Sequence
  Description of Artificial Sequence: Synthetic oligonucleotide
uccgaagaguucuuugaug

SEQ ID NO: 68534 - RNA, 19 nt, Artificial Sequence
  Description of Artificial Sequence: Synthetic oligonucleotide
cuaaauccauauucccacc

SEQ ID NO: 68535 - RNA, 19 nt, Artificial Sequence
  Description of Artificial Sequence: Synthetic oligonucleotide
uagcaaccaguguaaauca

SEQ ID NO: 68536 - RNA, 19 nt, Artificial Sequence
  Description of Artificial Sequence: Synthetic oligonucleotide
ugucuuuuauggaggagau

SEQ ID NO: 68537 - RNA, 19 nt, Artificial Sequence
  Description of Artificial Sequence: Synthetic oligonucleotide
uaaacucggacaguugugu

SEQ ID NO: 68538 - RNA, 19 nt, Artificial Sequence
  Description of Artificial Sequence: Synthetic oligonucleotide
ugacgaaucagggacagua

SEQ ID NO: 68539 - RNA, 19 nt, Artificial Sequence
  Description of Artificial Sequence: Synthetic oligonucleotide
uagacgcgaacaaacuugu

SEQ ID NO: 68540 - RNA, 19 nt, Artificial Sequence
  Description of Artificial Sequence: Synthetic oligonucleotide
agguucauacguuucuugu

SEQ ID NO: 68541 - RNA, 19 nt, Artificial Sequence
  Description of Artificial Sequence: Synthetic oligonucleotide
accgaaucaauaaaaugug

SEQ ID NO: 68542 - RNA, 19 nt, Artificial Sequence
  Description of Artificial Sequence: Synthetic oligonucleotide
auagucuaguggcauaaau

SEQ ID NO: 68543 - RNA, 19 nt, Artificial Sequence
  Description of Artificial Sequence: Synthetic oligonucleotide
acgccaucuguuaugaagg

SEQ ID NO: 68544 - RNA, 19 nt, Artificial Sequence
  Description of Artificial Sequence: Synthetic oligonucleotide
ucgaucaugcgacugcaau

SEQ ID NO: 68545 - RNA, 19 nt, Artificial Sequence
  Description of Artificial Sequence: Synthetic oligonucleotide
acauucucgggucuuggca

SEQ ID NO: 68546 - RNA, 19 nt, Artificial Sequence
  Description of Artificial Sequence: Synthetic oligonucleotide
guguguaugauuaggguca

SEQ ID NO: 68547 - RNA, 19 nt, Artificial Sequence
  Description of Artificial Sequence: Synthetic oligonucleotide
cuuguacacuccuacuuuc

SEQ ID NO: 68548 - RNA, 19 nt, Artificial Sequence
  Description of Artificial Sequence: Synthetic oligonucleotide
uuccgacucaccaaauuau

SEQ ID NO: 68549 - RNA, 19 nt, Artificial Sequence
  Description of Artificial Sequence: Synthetic oligonucleotide
uggccacucuauuaguuug

SEQ ID NO: 68550 - RNA, 19 nt, Artificial Sequence
  Description of Artificial Sequence: Synthetic oligonucleotide
agugucugaaaguucggau

SEQ ID NO: 68551 - RNA, 19 nt, Artificial Sequence
  Description of Artificial Sequence: Synthetic oligonucleotide
uuuaaucauaagccaucau

SEQ ID NO: 68552 - RNA, 19 nt, Artificial Sequence
  Description of Artificial Sequence: Synthetic oligonucleotide
gugcucagaagguucauac

SEQ ID NO: 68553 - RNA, 19 nt, Artificial Sequence
  Description of Artificial Sequence: Synthetic oligonucleotide
uuauguugaaggugaccac

SEQ ID NO: 68554 - RNA, 19 nt, Artificial Sequence
  Description of Artificial Sequence: Synthetic oligonucleotide
gcuaugaggcuacagggag

SEQ ID NO: 68555 - RNA, 19 nt, Artificial Sequence
  Description of Artificial Sequence: Synthetic oligonucleotide
gaccuuuauagaugcguac

SEQ ID NO: 68556 - RNA, 19 nt, Artificial Sequence
  Description of Artificial Sequence: Synthetic oligonucleotide
accaguguaaaggacagaa

SEQ ID NO: 68557 - RNA, 19 nt, Artificial Sequence
  Description of Artificial Sequence: Synthetic oligonucleotide
uguaaaggacagaauucuu

SEQ ID NO: 68558 - RNA, 19 nt, Artificial Sequence
  Description of Artificial Sequence: Synthetic oligonucleotide
cacaacgccaaauaucaga

SEQ ID NO: 68559 - RNA, 19 nt, Artificial Sequence
  Description of Artificial Sequence: Synthetic oligonucleotide
caacguccugcuuggaucc

SEQ ID NO: 68560 - RNA, 19 nt, Artificial Sequence
  Description of Artificial Sequence: Synthetic oligonucleotide
uggauccuuuccuagcugu

SEQ ID NO: 68561 - RNA, 19 nt, Artificial Sequence
  Description of Artificial Sequence: Synthetic oligonucleotide
uccccucuuguucaggaga

SEQ ID NO: 68562 - RNA, 19 nt, Artificial Sequence
  Description of Artificial Sequence: Synthetic oligonucleotide
guagcagcgaauggugugg

SEQ ID NO: 68563 - RNA, 19 nt, Artificial Sequence
  Description of Artificial Sequence: Synthetic oligonucleotide
acuuucacgaauccauuuu

SEQ ID NO: 68564 - RNA, 19 nt, Artificial Sequence
  Description of Artificial Sequence: Synthetic oligonucleotide
cuaaugguacagucauaag

SEQ ID NO: 68565 - RNA, 19 nt, Artificial Sequence
  Description of Artificial Sequence: Synthetic oligonucleotide
ucagaagguucauacguuu

SEQ ID NO: 68566 - RNA, 19 nt, Artificial Sequence
  Description of Artificial Sequence: Synthetic oligonucleotide
uggguugacucuuguacac

SEQ ID NO: 68567 - RNA, 19 nt, Artificial Sequence
  Description of Artificial Sequence: Synthetic oligonucleotide
uauccaugcacugcaguga

SEQ ID NO: 68568 - RNA, 19 nt, Artificial Sequence
  Description of Artificial Sequence: Synthetic oligonucleotide
ucaugcgacugcaauucgu

SEQ ID NO: 68569 - RNA, 19 nt, Artificial Sequence
  Description of Artificial Sequence: Synthetic oligonucleotide
guauguugugagcauggac

SEQ ID NO: 68570 - RNA, 19 nt, Artificial Sequence
  Description of Artificial Sequence: Synthetic oligonucleotide
ucguagacgcgaacaaacu

SEQ ID NO: 68571 - RNA, 19 nt, Artificial Sequence
  Description of Artificial Sequence: Synthetic oligonucleotide
uugcuagcgguaugucugg

SEQ ID NO: 68572 - RNA, 19 nt, Artificial Sequence
  Description of Artificial Sequence: Synthetic oligonucleotide
acaaaccgaaucaauaaaa

SEQ ID NO: 68573 - RNA, 19 nt, Artificial Sequence
  Description of Artificial Sequence: Synthetic oligonucleotide
uccuacaaccagcaguuuu

SEQ ID NO: 68574 - RNA, 19 nt, Artificial Sequence
  Description of Artificial Sequence: Synthetic oligonucleotide
uuuaaaacucgaggacaca

SEQ ID NO: 68575 - RNA, 19 nt, Artificial Sequence
  Description of Artificial Sequence: Synthetic oligonucleotide
caggcaagcagucaccauc

SEQ ID NO: 68576 - RNA, 19 nt, Artificial Sequence
  Description of Artificial Sequence: Synthetic oligonucleotide
accuuuauagaugcguaca

SEQ ID NO: 68577 - RNA, 19 nt, Artificial Sequence
  Description of Artificial Sequence: Synthetic oligonucleotide
gguuaaugcugcaggaagg

SEQ ID NO: 68578 - RNA, 19 nt, Artificial Sequence
  Description of Artificial Sequence: Synthetic oligonucleotide
auaucucgcuuacaaaguu

SEQ ID NO: 68579 - RNA, 19 nt, Artificial Sequence
  Description of Artificial Sequence: Synthetic oligonucleotide
ugcaauucguagacgcgaa

SEQ ID NO: 68580 - RNA, 19 nt, Artificial Sequence
  Description of Artificial Sequence: Synthetic oligonucleotide
gauacgccaucuguuauga

SEQ ID NO: 68581 - RNA, 19 nt, Artificial Sequence
  Description of Artificial Sequence: Synthetic oligonucleotide
ugcgagugaucuccagaag

SEQ ID NO: 68582 - RNA, 19 nt, Artificial Sequence
  Description of Artificial Sequence: Synthetic oligonucleotide
auagaggauacgccaucug

SEQ ID NO: 68583 - RNA, 19 nt, Artificial Sequence
  Description of Artificial Sequence: Synthetic oligonucleotide
caaaggacgguuuugcugu

SEQ ID NO: 68584 - RNA, 19 nt, Artificial Sequence
  Description of Artificial Sequence: Synthetic oligonucleotide
ucaggggacgauccauccc

SEQ ID NO: 68585 - RNA, 19 nt, Artificial Sequence
  Description of Artificial Sequence: Synthetic oligonucleotide
aagcucacccguauguaug

SEQ ID NO: 68586 - RNA, 19 nt, Artificial Sequence
  Description of Artificial Sequence: Synthetic oligonucleotide
ucucgugcuaugaggcuac

SEQ ID NO: 68587 - RNA, 19 nt, Artificial Sequence
  Description of Artificial Sequence: Synthetic oligonucleotide
caagaaaugcgagugaucu

SEQ ID NO: 68588 - RNA, 19 nt, Artificial Sequence
  Description of Artificial Sequence: Synthetic oligonucleotide
ugcguacaagcucacccgu

SEQ ID NO: 68589 - RNA, 19 nt, Artificial Sequence
  Description of Artificial Sequence: Synthetic oligonucleotide
acucggacaguugugucag

SEQ ID NO: 68590 - RNA, 19 nt, Artificial Sequence
  Description of Artificial Sequence: Synthetic oligonucleotide
acggacacuaaugguacag

SEQ ID NO: 68591 - RNA, 19 nt, Artificial Sequence
  Description of Artificial Sequence: Synthetic oligonucleotide
gucagcugaacaaguauac

SEQ ID NO: 68592 - RNA, 19 nt, Artificial Sequence
  Description of Artificial Sequence: Synthetic oligonucleotide
agcuccgaagaguucuuug

SEQ ID NO: 68593 - RNA, 19 nt, Artificial Sequence
  Description of Artificial Sequence: Synthetic oligonucleotide
  modified_base (8)..(8): a, c, u, g, unknown or other
aguggccncaucugcuaag

SEQ ID NO: 68594 - RNA, 19 nt, Artificial Sequence
  Description of Artificial Sequence: Synthetic oligonucleotide
aaaggacgguuuugcugug

SEQ ID NO: 68595 - RNA, 19 nt, Artificial Sequence
  Description of Artificial Sequence: Synthetic oligonucleotide
ggggucaaugugaaaauag

SEQ ID NO: 68596 - RNA, 19 nt, Artificial Sequence
  Description of Artificial Sequence: Synthetic oligonucleotide
gagagugcgugaacugagg

SEQ ID NO: 68597 - RNA, 19 nt, Artificial Sequence
  Description of Artificial Sequence: Synthetic oligonucleotide
agaagaguacgguuccuua

SEQ ID NO: 68598 - RNA, 19 nt, Artificial Sequence
  Description of Artificial Sequence: Synthetic oligonucleotide
ucucgcuuacaaaguuaug

SEQ ID NO: 68599 - RNA, 19 nt, Artificial Sequence
  Description of Artificial Sequence: Synthetic oligonucleotide
agacaugggcucuuguuua

SEQ ID NO: 68600 - RNA, 19 nt, Artificial Sequence
  Description of Artificial Sequence: Synthetic oligonucleotide
cagaacaauucugauccug

SEQ ID NO: 68601 - RNA, 19 nt, Artificial Sequence
  Description of Artificial Sequence: Synthetic oligonucleotide
gaugugucauuuaacuucu

SEQ ID NO: 68602 - RNA, 19 nt, Artificial Sequence
  Description of Artificial Sequence: Synthetic oligonucleotide
agaugcguacaagcucacc

SEQ ID NO: 68603 - RNA, 19 nt, Artificial Sequence
  Description of Artificial Sequence: Synthetic oligonucleotide
ccgacagaguuuuaguccc

SEQ ID NO: 68604 - RNA, 19 nt, Artificial Sequence
  Description of Artificial Sequence: Synthetic oligonucleotide
caugcaaaggacgguuuug

SEQ ID NO: 68605 - RNA, 19 nt, Artificial Sequence
  Description of Artificial Sequence: Synthetic oligonucleotide
cuugaauugcauguaaccu

SEQ ID NO: 68606 - RNA, 19 nt, Artificial Sequence
  Description of Artificial Sequence: Synthetic oligonucleotide
guaauucuagaacucuccu

SEQ ID NO: 68607 - RNA, 19 nt, Artificial Sequence
  Description of Artificial Sequence: Synthetic oligonucleotide
gaggauacgccaucuguua

SEQ ID NO: 68608 - RNA, 19 nt, Artificial Sequence
  Description of Artificial Sequence: Synthetic oligonucleotide
  modified_base (5)..(5): a, c, u, g, unknown or other
ggccncaucugcuaagcug

SEQ ID NO: 68609 - RNA, 19 nt, Artificial Sequence
  Description of Artificial Sequence: Synthetic oligonucleotide
uucaugcaaaggacgguuu

SEQ ID NO: 68610 - RNA, 19 nt, Artificial Sequence
  Description of Artificial Sequence: Synthetic oligonucleotide
gagaucggcuguuccuuug

SEQ ID NO: 68611 - RNA, 19 nt, Artificial Sequence
  Description of Artificial Sequence: Synthetic oligonucleotide
ccagcauagaggauacgcc

SEQ ID NO: 68612 - RNA, 19 nt, Artificial Sequence
  Description of Artificial Sequence: Synthetic oligonucleotide
cuucccggaggugugagug

SEQ ID NO: 68613 - RNA, 19 nt, Artificial Sequence
  Description of Artificial Sequence: Synthetic oligonucleotide
agcaaccaguguaaaucac

SEQ ID NO: 68614 - RNA, 19 nt, Artificial Sequence
  Description of Artificial Sequence: Synthetic oligonucleotide
caauucguagacgcgaaca

SEQ ID NO: 68615 - RNA, 19 nt, Artificial Sequence
  Description of Artificial Sequence: Synthetic oligonucleotide
caaaguuaugaaguucaca

SEQ ID NO: 68616 - RNA, 19 nt, Artificial Sequence
  Description of Artificial Sequence: Synthetic oligonucleotide
uggaacacuggaguacuuc

SEQ ID NO: 68617 - RNA, 19 nt, Artificial Sequence
  Description of Artificial Sequence: Synthetic oligonucleotide
gugguuauuuggagagggg

SEQ ID NO: 68618 - RNA, 19 nt, Artificial Sequence
  Description of Artificial Sequence: Synthetic oligonucleotide
ggauacgccaucuguuaug

SEQ ID NO: 68619 - RNA, 19 nt, Artificial Sequence
  Description of Artificial Sequence: Synthetic oligonucleotide
gacgaaucagggacaguac

SEQ ID NO: 68620 - RNA, 19 nt, Artificial Sequence
  Description of Artificial Sequence: Synthetic oligonucleotide
accaaauuauaaacucgga

SEQ ID NO: 68621 - RNA, 19 nt, Artificial Sequence
  Description of Artificial Sequence: Synthetic oligonucleotide
gcgacugcaauucguagac

SEQ ID NO: 68622 - RNA, 19 nt, Artificial Sequence
  Description of Artificial Sequence: Synthetic oligonucleotide
augugguuauuuggagagg

SEQ ID NO: 68623 - RNA, 19 nt, Artificial Sequence
  Description of Artificial Sequence: Synthetic oligonucleotide
acuuugcuagcgguauguc

SEQ ID NO: 68624 - RNA, 19 nt, Artificial Sequence
  Description of Artificial Sequence: Synthetic oligonucleotide
gguugacucuuguacacuc

SEQ ID NO: 68625 - RNA, 19 nt, Artificial Sequence
  Description of Artificial Sequence: Synthetic oligonucleotide
caaaccgaaucaauaaaau

SEQ ID NO: 68626 - RNA, 19 nt, Artificial Sequence
  Description of Artificial Sequence: Synthetic oligonucleotide
agacaacugacugcccgag

SEQ ID NO: 68627 - RNA, 19 nt, Artificial Sequence
  Description of Artificial Sequence: Synthetic oligonucleotide
cauaagcugucugcagggc

SEQ ID NO: 68628 - RNA, 19 nt, Artificial Sequence
  Description of Artificial Sequence: Synthetic oligonucleotide
uggacgugcuaaggagugg

SEQ ID NO: 68629 - RNA, 19 nt, Artificial Sequence
  Description of Artificial Sequence: Synthetic oligonucleotide
aggauacgccaucuguuau

SEQ ID NO: 68630 - RNA, 19 nt, Artificial Sequence
  Description of Artificial Sequence: Synthetic oligonucleotide
cauguaacuuggaugugua

SEQ ID NO: 68631 - RNA, 19 nt, Artificial Sequence
  Description of Artificial Sequence: Synthetic oligonucleotide
gaacaauucugauccuggu

SEQ ID NO: 68632 - RNA, 19 nt, Artificial Sequence
  Description of Artificial Sequence: Synthetic oligonucleotide
uucucgugcuaugaggcua

SEQ ID NO: 68633 - RNA, 19 nt, Artificial Sequence
  Description of Artificial Sequence: Synthetic oligonucleotide
acagaacaauucugauccu

SEQ ID NO: 68634 - RNA, 19 nt, Artificial Sequence
  Description of Artificial Sequence: Synthetic oligonucleotide
gacagcuccgaagaguucu

SEQ ID NO: 68635 - RNA, 19 nt, Artificial Sequence
  Description of Artificial Sequence: Synthetic oligonucleotide
ugacucuuguacacuccua

SEQ ID NO: 68636 - RNA, 19 nt, Artificial Sequence
  Description of Artificial Sequence: Synthetic oligonucleotide
acugacgggaugccauccu

SEQ ID NO: 68637 - RNA, 19 nt, Artificial Sequence
  Description of Artificial Sequence: Synthetic oligonucleotide
gcgagugaucuccagaaga

SEQ ID NO: 68638 - RNA, 19 nt, Artificial Sequence
  Description of Artificial Sequence: Synthetic oligonucleotide
uggaugcuuccaucauagc

SEQ ID NO: 68639 - RNA, 19 nt, Artificial Sequence
  Description of Artificial Sequence: Synthetic oligonucleotide
uaguggcauaaaucacugu

SEQ ID NO: 68640 - RNA, 19 nt, Artificial Sequence
  Description of Artificial Sequence: Synthetic oligonucleotide
uuggaaguauggcccucaa

SEQ ID NO: 68641 - RNA, 19 nt, Artificial Sequence
  Description of Artificial Sequence: Synthetic oligonucleotide
agcagcgaauggugugguc

SEQ ID NO: 68642 - RNA, 19 nt, Artificial Sequence
  Description of Artificial Sequence: Synthetic oligonucleotide
gucacuggccacucuauua

SEQ ID NO: 68643 - RNA, 19 nt, Artificial Sequence
  Description of Artificial Sequence: Synthetic oligonucleotide
caaaccauguaacuuggau

SEQ ID NO: 68644 - RNA, 19 nt, Artificial Sequence
  Description of Artificial Sequence: Synthetic oligonucleotide
caugcgacugcaauucgua

SEQ ID NO: 68645 - RNA, 19 nt, Artificial Sequence
  Description of Artificial Sequence: Synthetic oligonucleotide
uagaugcguacaagcucac

SEQ ID NO: 68646 - RNA, 19 nt, Artificial Sequence
  Description of Artificial Sequence: Synthetic oligonucleotide
agaggauacgccaucuguu

SEQ ID NO: 68647 - RNA, 19 nt, Artificial Sequence
  Description of Artificial Sequence: Synthetic oligonucleotide
uggcaacuuucuguugacc

SEQ ID NO: 68648 - RNA, 19 nt, Artificial Sequence
  Description of Artificial Sequence: Synthetic oligonucleotide
guuccgugcaucacggaca

SEQ ID NO: 68649 - RNA, 19 nt, Artificial Sequence
  Description of Artificial Sequence: Synthetic oligonucleotide
aguccguuccgugcaucac

SEQ ID NO: 68650 - RNA, 19 nt, Artificial Sequence
  Description of Artificial Sequence: Synthetic oligonucleotide
gguaugucuggcugugaac

SEQ ID NO: 68651 - RNA, 19 nt, Artificial Sequence
  Description of Artificial Sequence: Synthetic oligonucleotide
auucguagacgcgaacaaa

SEQ ID NO: 68652 - RNA, 19 nt, Artificial Sequence
  Description of Artificial Sequence: Synthetic oligonucleotide
gcgaacaaacuuguccagg

SEQ ID NO: 68653 - RNA, 19 nt, Artificial Sequence
  Description of Artificial Sequence: Synthetic oligonucleotide
uuguagcgguugccaagug

SEQ ID NO: 68654 - RNA, 19 nt, Artificial Sequence
  Description of Artificial Sequence: Synthetic oligonucleotide
uuugccaguccagcauaga

SEQ ID NO: 68655 - RNA, 19 nt, Artificial Sequence
  Description of Artificial Sequence: Synthetic oligonucleotide
ucgugcuaugaggcuacag

SEQ ID NO: 68656 - RNA, 19 nt, Artificial Sequence
  Description of Artificial Sequence: Synthetic oligonucleotide
ggagagugcgugaacugag

SEQ ID NO: 68657 - RNA, 19 nt, Artificial Sequence
  Description of Artificial Sequence: Synthetic oligonucleotide
guagcgguugccaagugcu

SEQ ID NO: 68658 - RNA, 19 nt, Artificial Sequence
  Description of Artificial Sequence: Synthetic oligonucleotide
cugcaauucguagacgcga

SEQ ID NO: 68659 - RNA, 19 nt, Artificial Sequence
  Description of Artificial Sequence: Synthetic oligonucleotide
ccuaagguucucaaugaca

SEQ ID NO: 68660 - RNA, 19 nt, Artificial Sequence
  Description of Artificial Sequence: Synthetic oligonucleotide
gugcccgacagaguuuuag

SEQ ID NO: 68661 - RNA, 19 nt, Artificial Sequence
  Description of Artificial Sequence: Synthetic oligonucleotide
  modified_base (6)..(6): a, c, u, g, unknown or other
uggccncaucugcuaagcu

SEQ ID NO: 68662 - RNA, 19 nt, Artificial Sequence
  Description of Artificial Sequence: Synthetic oligonucleotide
cuuggauccuuuccuagcu

SEQ ID NO: 68663 - RNA, 19 nt, Artificial Sequence
  Description of Artificial Sequence: Synthetic oligonucleotide
ggauuaguauggucaguca

SEQ ID NO: 68664 - RNA, 19 nt, Artificial Sequence
  Description of Artificial Sequence: Synthetic oligonucleotide
guucuuaaaugucacccuu

SEQ ID NO: 68665 - RNA, 19 nt, Artificial Sequence
  Description of Artificial Sequence: Synthetic oligonucleotide
cauuccugguauuguggca

SEQ ID NO: 68666 - RNA, 19 nt, Artificial Sequence
  Description of Artificial Sequence: Synthetic oligonucleotide
ggacgugcuaaggaguggc

SEQ ID NO: 68667 - RNA, 19 nt, Artificial Sequence
  Description of Artificial Sequence: Synthetic oligonucleotide
ucggauuaguauggucagu

SEQ ID NO: 68668 - RNA, 19 nt, Artificial Sequence
  Description of Artificial Sequence: Synthetic oligonucleotide
gacuuugcuagcgguaugu

SEQ ID NO: 68669 - RNA, 19 nt, Artificial Sequence
  Description of Artificial Sequence: Synthetic oligonucleotide
gcuccgaagaguucuuuga

SEQ ID NO: 68670 - RNA, 19 nt, Artificial Sequence
  Description of Artificial Sequence: Synthetic oligonucleotide
uggcccuccaagguucuga

SEQ ID NO: 68671 - RNA, 19 nt, Artificial Sequence
  Description of Artificial Sequence: Synthetic oligonucleotide
auaucagagugcagccaug

SEQ ID NO: 68672 - RNA, 19 nt, Artificial Sequence
  Description of Artificial Sequence: Synthetic oligonucleotide
uucccggaggugugaguga

SEQ ID NO: 68673 - RNA, 19 nt, Artificial Sequence
  Description of Artificial Sequence: Synthetic oligonucleotide
aggugauccacaacgccaa

SEQ ID NO: 68674 - RNA, 19 nt, Artificial Sequence
  Description of Artificial Sequence: Synthetic oligonucleotide
gaguacgguuccuuagacu

SEQ ID NO: 68675 - RNA, 19 nt, Artificial Sequence
  Description of Artificial Sequence: Synthetic oligonucleotide
ccguauguauguugugagc

SEQ ID NO: 68676 - RNA, 19 nt, Artificial Sequence
  Description of Artificial Sequence: Synthetic oligonucleotide
gccuuuuggacgugcuaag

SEQ ID NO: 68677 - RNA, 19 nt, Artificial Sequence
  Description of Artificial Sequence: Synthetic oligonucleotide
ucuucccggaggugugagu

SEQ ID NO: 68678 - RNA, 19 nt, Artificial Sequence
  Description of Artificial Sequence: Synthetic oligonucleotide
cucagcgcacucaucucca

SEQ ID NO: 68679 - RNA, 19 nt, Artificial Sequence
  Description of Artificial Sequence: Synthetic oligonucleotide
ccucagcgcacucaucucc

SEQ ID NO: 68680 - RNA, 19 nt, Artificial Sequence
  Description of Artificial Sequence: Synthetic oligonucleotide
gcaaccaguguaaaucaca

SEQ ID NO: 68681 - RNA, 19 nt, Artificial Sequence
  Description of Artificial Sequence: Synthetic oligonucleotide
gaccgacuggucacuggag

SEQ ID NO: 68682 - RNA, 19 nt, Artificial Sequence
  Description of Artificial Sequence: Synthetic oligonucleotide
cacugacgggaugccaucc

SEQ ID NO: 68683 - RNA, 19 nt, Artificial Sequence
  Description of Artificial Sequence: Synthetic oligonucleotide
guauguauguugugagcau

SEQ ID NO: 68684 - RNA, 19 nt, Artificial Sequence
  Description of Artificial Sequence: Synthetic oligonucleotide
guaacuggauccagcaagu

SEQ ID NO: 68685 - RNA, 19 nt, Artificial Sequence
  Description of Artificial Sequence: Synthetic oligonucleotide
cuuggauguguagggagaa

SEQ ID NO: 68686 - RNA, 19 nt, Artificial Sequence
  Description of Artificial Sequence: Synthetic oligonucleotide
gugaugugucauuuaacuu

SEQ ID NO: 68687 - RNA, 19 nt, Artificial Sequence
  Description of Artificial Sequence: Synthetic oligonucleotide
ccuuuuggacgugcuaagg

SEQ ID NO: 68688 - RNA, 19 nt, Artificial Sequence
  Description of Artificial Sequence: Synthetic oligonucleotide
gagugcgugaacugaggau

SEQ ID NO: 68689 - RNA, 19 nt, Artificial Sequence
  Description of Artificial Sequence: Synthetic oligonucleotide
ggaccgacuggucacugga

SEQ ID NO: 68690 - RNA, 19 nt, Artificial Sequence
  Description of Artificial Sequence: Synthetic oligonucleotide
cacccguauguauguugug

SEQ ID NO: 68691 - RNA, 19 nt, Artificial Sequence
  Description of Artificial Sequence: Synthetic oligonucleotide
uaacuggauccagcaagua

SEQ ID NO: 68692 - RNA, 19 nt, Artificial Sequence
  Description of Artificial Sequence: Synthetic oligonucleotide
agacgcgaacaaacuuguc

SEQ ID NO: 68693 - RNA, 19 nt, Artificial Sequence
  Description of Artificial Sequence: Synthetic oligonucleotide
ggacacaaaccauguaacu

SEQ ID NO: 68694 - RNA, 19 nt, Artificial Sequence
  Description of Artificial Sequence: Synthetic oligonucleotide
ugcuagcgguaugucuggc

SEQ ID NO: 68695 - RNA, 19 nt, Artificial Sequence
  Description of Artificial Sequence: Synthetic oligonucleotide
ugguaguucaggggacgau

SEQ ID NO: 68696 - RNA, 19 nt, Artificial Sequence
  Description of Artificial Sequence: Synthetic oligonucleotide
uggcaaguacagccuuaua

SEQ ID NO: 68697 - RNA, 19 nt, Artificial Sequence
  Description of Artificial Sequence: Synthetic oligonucleotide
agggguuccaauggacgau

SEQ ID NO: 68698 - RNA, 19 nt, Artificial Sequence
  Description of Artificial Sequence: Synthetic oligonucleotide
uagcagcgaaugguguggu

SEQ ID NO: 68699 - RNA, 19 nt, Artificial Sequence
  Description of Artificial Sequence: Synthetic oligonucleotide
ggacagaauucuucccgga

SEQ ID NO: 68700 - RNA, 19 nt, Artificial Sequence
  Description of Artificial Sequence: Synthetic oligonucleotide
ggacgguuuugcuguggcc

SEQ ID NO: 68701 - RNA, 19 nt, Artificial Sequence
  Description of Artificial Sequence: Synthetic oligonucleotide
caucacggacacuaauggu

SEQ ID NO: 68702 - RNA, 19 nt, Artificial Sequence
  Description of Artificial Sequence: Synthetic oligonucleotide
gguuccaauggacgaugga

SEQ ID NO: 68703 - RNA, 19 nt, Artificial Sequence
  Description of Artificial Sequence: Synthetic oligonucleotide
cguuccgugcaucacggac

SEQ ID NO: 68704 - RNA, 19 nt, Artificial Sequence
  Description of Artificial Sequence: Synthetic oligonucleotide
aacguccugcuuggauccu

SEQ ID NO: 68705 - RNA, 19 nt, Artificial Sequence
  Description of Artificial Sequence: Synthetic oligonucleotide
acgugcuaaggaguggcuu

SEQ ID NO: 68706 - RNA, 19 nt, Artificial Sequence
  Description of Artificial Sequence: Synthetic oligonucleotide
gcaauucguagacgcgaac

SEQ ID NO: 68707 - RNA, 19 nt, Artificial Sequence
  Description of Artificial Sequence: Synthetic oligonucleotide
ggccacucuauuaguuugc

SEQ ID NO: 68708 - RNA, 19 nt, Artificial Sequence
  Description of Artificial Sequence: Synthetic oligonucleotide
cggauuaguauggucaguc

SEQ ID NO: 68709 - RNA, 19 nt, Artificial Sequence
  Description of Artificial Sequence: Synthetic oligonucleotide
guuaugaaguucacagcuu

SEQ ID NO: 68710 - RNA, 19 nt, Artificial Sequence
  Description of Artificial Sequence: Synthetic oligonucleotide
caagcucacccguauguau

SEQ ID NO: 68711 - RNA, 19 nt, Artificial Sequence
  Description of Artificial Sequence: Synthetic oligonucleotide
aauggacgauggagacaca

SEQ ID NO: 68712 - RNA, 19 nt, Artificial Sequence
  Description of Artificial Sequence: Synthetic oligonucleotide
gcagucgaucaugcgacug

SEQ ID NO: 68713 - RNA, 19 nt, Artificial Sequence
  Description of Artificial Sequence: Synthetic oligonucleotide
ggguuuccgccacacugac

SEQ ID NO: 68714 - RNA, 19 nt, Artificial Sequence
  Description of Artificial Sequence: Synthetic oligonucleotide
ggucaaugugaaaauaguu

SEQ ID NO: 68715 - RNA, 19 nt, Artificial Sequence
  Description of Artificial Sequence: Synthetic oligonucleotide
auacgccaucuguuaugaa

SEQ ID NO: 68716 - RNA, 19 nt, Artificial Sequence
  Description of Artificial Sequence: Synthetic oligonucleotide
gggucaaugugaaaauagu

SEQ ID NO: 68717 - RNA, 19 nt, Artificial Sequence
  Description of Artificial Sequence: Synthetic oligonucleotide
guauggucagucagcagau

SEQ ID NO: 68718 - RNA, 19 nt, Artificial Sequence
  Description of Artificial Sequence: Synthetic oligonucleotide
gggccugaaauucaguguu

SEQ ID NO: 68719 - RNA, 19 nt, Artificial Sequence
  Description of Artificial Sequence: Synthetic oligonucleotide
guccagcauagaggauacg

SEQ ID NO: 68720 - RNA, 19 nt, Artificial Sequence
  Description of Artificial Sequence: Synthetic oligonucleotide
gguuuccgccacacugacg

SEQ ID NO: 68721 - RNA, 19 nt, Artificial Sequence
  Description of Artificial Sequence: Synthetic oligonucleotide
cacggacacuaaugguaca

SEQ ID NO: 68722 - RNA, 19 nt, Artificial Sequence
  Description of Artificial Sequence: Synthetic oligonucleotide
cuaauacugugaccaucgu

SEQ ID NO: 68723 - RNA, 19 nt, Artificial Sequence
  Description of Artificial Sequence: Synthetic oligonucleotide
cuuuugcgguguucuggaa

SEQ ID NO: 68724 - RNA, 19 nt, Artificial Sequence
  Description of Artificial Sequence: Synthetic oligonucleotide
ggggacgauccauccccag

SEQ ID NO: 68725 - RNA, 19 nt, Artificial Sequence
  Description of Artificial Sequence: Synthetic oligonucleotide
cuccgaagaguucuuugau

SEQ ID NO: 68726 - RNA, 19 nt, Artificial Sequence
  Description of Artificial Sequence: Synthetic oligonucleotide
cgagugaucuccagaagaa

SEQ ID NO: 68727 - RNA, 19 nt, Artificial Sequence
  Description of Artificial Sequence: Synthetic oligonucleotide
cgcgaacaaacuuguccag

SEQ ID NO: 68728 - RNA, 19 nt, Artificial Sequence
  Description of Artificial Sequence: Synthetic oligonucleotide
  modified_base (9)..(9): a, c, u, g, unknown or other
caguggccncaucugcuaa

SEQ ID NO: 68729 - RNA, 19 nt, Artificial Sequence
  Description of Artificial Sequence: Synthetic oligonucleotide
gcuuuauaucucgcuuaca

SEQ ID NO: 68730 - RNA, 19 nt, Artificial Sequence
  Description of Artificial Sequence: Synthetic oligonucleotide
ccaccaauagggccaccuc

SEQ ID NO: 68731 - RNA, 19 nt, Artificial Sequence
  Description of Artificial Sequence: Synthetic oligonucleotide
cgccaaauaucagagugca

SEQ ID NO: 68732 - RNA, 19 nt, Artificial Sequence
  Description of Artificial Sequence: Synthetic oligonucleotide
aggggacgauccaucccca

SEQ ID NO: 68733 - RNA, 19 nt, Artificial Sequence
  Description of Artificial Sequence: Synthetic oligonucleotide
gacgugcuaaggaguggcu

SEQ ID NO: 68734 - RNA, 19 nt, Artificial Sequence
  Description of Artificial Sequence: Synthetic oligonucleotide
gggacgauccauccccagu

SEQ ID NO: 68735 - RNA, 19 nt, Artificial Sequence
  Description of Artificial Sequence: Synthetic oligonucleotide
ccacugaacacaaggucgu

SEQ ID NO: 68736 - RNA, 19 nt, Artificial Sequence
  Description of Artificial Sequence: Synthetic oligonucleotide
cugagaucggcuguuccuu

SEQ ID NO: 68737 - RNA, 19 nt, Artificial Sequence
  Description of Artificial Sequence: Synthetic oligonucleotide
cccgugugaggggucaaug

SEQ ID NO: 68738 - RNA, 19 nt, Artificial Sequence
  Description of Artificial Sequence: Synthetic oligonucleotide
ugacugcccgagggccgug

SEQ ID NO: 68739 - RNA, 19 nt, Artificial Sequence
  Description of Artificial Sequence: Synthetic oligonucleotide
auccuacaaccagcaguuu

SEQ ID NO: 68740 - RNA, 19 nt, Artificial Sequence
  Description of Artificial Sequence: Synthetic oligonucleotide
caaccugagaacgcucuuu

SEQ ID NO: 68741 - RNA, 19 nt, Artificial Sequence
  Description of Artificial Sequence: Synthetic oligonucleotide
gccgcccuugccugcagga

SEQ ID NO: 68742 - RNA, 19 nt, Artificial Sequence
  Description of Artificial Sequence: Synthetic oligonucleotide
cugcccgagggccguggca

SEQ ID NO: 68743 - RNA, 19 nt, Artificial Sequence
  Description of Artificial Sequence: Synthetic oligonucleotide
gagggccguggcauucaaa

SEQ ID NO: 68744 - RNA, 19 nt, Artificial Sequence
  Description of Artificial Sequence: Synthetic oligonucleotide
gaacucggucuuccagcuu

SEQ ID NO: 68745 - RNA, 19 nt, Artificial Sequence
  Description of Artificial Sequence: Synthetic oligonucleotide
ccggaggugugagugacaa

SEQ ID NO: 68746 - RNA, 19 nt, Artificial Sequence
  Description of Artificial Sequence: Synthetic oligonucleotide
ggguugacucuuguacacu

SEQ ID NO: 68747 - RNA, 19 nt, Artificial Sequence
  Description of Artificial Sequence: Synthetic oligonucleotide
ccaguguaaaggacagaau

SEQ ID NO: 68748 - RNA, 19 nt, Artificial Sequence
  Description of Artificial Sequence: Synthetic oligonucleotide
cugcaugauugugaccuuu

SEQ ID NO: 68749 - RNA, 19 nt, Artificial Sequence
  Description of Artificial Sequence: Synthetic oligonucleotide
cucgugcuaugaggcuaca

SEQ ID NO: 68750 - RNA, 19 nt, Artificial Sequence
  Description of Artificial Sequence: Synthetic oligonucleotide
cuggaacacuggaguacuu

SEQ ID NO: 68751 - RNA, 19 nt, Artificial Sequence
  Description of Artificial Sequence: Synthetic oligonucleotide
cguagacgcgaacaaacuu

SEQ ID NO: 68752 - RNA, 19 nt, Artificial Sequence
  Description of Artificial Sequence: Synthetic oligonucleotide
agugcccgacagaguuuua

SEQ ID NO: 68753 - RNA, 19 nt, Artificial Sequence
  Description of Artificial Sequence: Synthetic oligonucleotide
cgaucaugcgacugcaauu

SEQ ID NO: 68754 - RNA, 19 nt, Artificial Sequence
  Description of Artificial Sequence: Synthetic oligonucleotide
cugcaacguccugcuugga

SEQ ID NO: 68755 - RNA, 19 nt, Artificial Sequence
  Description of Artificial Sequence: Synthetic oligonucleotide
cccggaggugugagugaca

SEQ ID NO: 68756 - RNA, 19 nt, Artificial Sequence
  Description of Artificial Sequence: Synthetic oligonucleotide
ccguuccgugcaucacgga

SEQ ID NO: 68757 - RNA, 19 nt, Artificial Sequence
  Description of Artificial Sequence: Synthetic oligonucleotide
ccgagggccguggcauuca

SEQ ID NO: 68758 - RNA, 19 nt, Artificial Sequence
  Description of Artificial Sequence: Synthetic oligonucleotide
ggcccgugugaggggucaa

SEQ ID NO: 68759 - RNA, 19 nt, Artificial Sequence
  Description of Artificial Sequence: Synthetic oligonucleotide
cgagggccguggcauucaa

SEQ ID NO: 68760 - RNA, 19 nt, Artificial Sequence
  Description of Artificial Sequence: Synthetic oligonucleotide
gcccgugugaggggucaau

SEQ ID NO: 68761 - RNA, 19 nt, Artificial Sequence
  Description of Artificial Sequence: Synthetic oligonucleotide
aacaugaccgauuuggacc

SEQ ID NO: 68762 - RNA, 19 nt, Artificial Sequence
  Description of Artificial Sequence: Synthetic oligonucleotide
aaaucgacagcucugcuac

SEQ ID NO: 68763 - RNA, 19 nt, Artificial Sequence
  Description of Artificial Sequence: Synthetic oligonucleotide
aaauugauaaauaacaggu

SEQ ID NO: 68764 - RNA, 19 nt, Artificial Sequence
  Description of Artificial Sequence: Synthetic oligonucleotide
gaucauggaaucuuuaggg

SEQ ID NO: 68765 - RNA, 19 nt, Artificial Sequence
  Description of Artificial Sequence: Synthetic oligonucleotide
aauguuacucucuggaguc

SEQ ID NO: 68766 - RNA, 19 nt, Artificial Sequence
  Description of Artificial Sequence: Synthetic oligonucleotide
aagagaaggauauuucuag

SEQ ID NO: 68767 - RNA, 19 nt, Artificial Sequence
  Description of Artificial Sequence: Synthetic oligonucleotide
aauggcguccaagagaugg

SEQ ID NO: 68768 - RNA, 19 nt, Artificial Sequence
  Description of Artificial Sequence: Synthetic oligonucleotide
ucauggaaucuuuagggcg

SEQ ID NO: 68769 - RNA, 19 nt, Artificial Sequence
  Description of Artificial Sequence: Synthetic oligonucleotide
ucugcaaccaaacauuugu

SEQ ID NO: 68770 - RNA, 19 nt, Artificial Sequence
  Description of Artificial Sequence: Synthetic oligonucleotide
uugacugacagccaccggg

SEQ ID NO: 68771 - RNA, 19 nt, Artificial Sequence
  Description of Artificial Sequence: Synthetic oligonucleotide
ucucuuaaacaauacuggg

SEQ ID NO: 68772 - RNA, 19 nt, Artificial Sequence
  Description of Artificial Sequence: Synthetic oligonucleotide
aaagcguuggcauguacag

SEQ ID NO: 68773 - RNA, 19 nt, Artificial Sequence
  Description of Artificial Sequence: Synthetic oligonucleotide
acuaagugcacgcagaaca

SEQ ID NO: 68774 - RNA, 19 nt, Artificial Sequence
  Description of Artificial Sequence: Synthetic oligonucleotide
uaggcaauuagaauuguug

SEQ ID NO: 68775 - RNA, 19 nt, Artificial Sequence
  Description of Artificial Sequence: Synthetic oligonucleotide
gacuaaaucacaaagaucu

SEQ ID NO: 68776 - RNA, 19 nt, Artificial Sequence
  Description of Artificial Sequence: Synthetic oligonucleotide
acauguaaccaccaguuuc

SEQ ID NO: 68777 - RNA, 19 nt, Artificial Sequence
  Description of Artificial Sequence: Synthetic oligonucleotide
aucauggaaucuuuagggc

SEQ ID NO: 68778 - RNA, 19 nt, Artificial Sequence
  Description of Artificial Sequence: Synthetic oligonucleotide
uuuguuagaaccacugcgu

SEQ ID NO: 68779 - RNA, 19 nt, Artificial Sequence
  Description of Artificial Sequence: Synthetic oligonucleotide
gaacuuggaacuguaaggg

SEQ ID NO: 68780 - RNA, 19 nt, Artificial Sequence
  Description of Artificial Sequence: Synthetic oligonucleotide
gaagucucaaaacaucccc

SEQ ID NO: 68781 - RNA, 19 nt, Artificial Sequence
  Description of Artificial Sequence: Synthetic oligonucleotide
uguaccuagaagcuugccc

SEQ ID NO: 68782 - RNA, 19 nt, Artificial Sequence
  Description of Artificial Sequence: Synthetic oligonucleotide
uggcaugugagcuuaaagc

SEQ ID NO: 68783 - RNA, 19 nt, Artificial Sequence
  Description of Artificial Sequence: Synthetic oligonucleotide
ggugguaccaacuaagugc

SEQ ID NO: 68784 - RNA, 19 nt, Artificial Sequence
  Description of Artificial Sequence: Synthetic oligonucleotide
acgucuaauggcaugaagc

SEQ ID NO: 68785 - RNA, 19 nt, Artificial Sequence
  Description of Artificial Sequence: Synthetic oligonucleotide
auucagaguguacacgugg

SEQ ID NO: 68786 - RNA, 19 nt, Artificial Sequence
  Description of Artificial Sequence: Synthetic oligonucleotide
ucuuggucgacuaucggug

SEQ ID NO: 68787 - RNA, 19 nt, Artificial Sequence
  Description of Artificial Sequence: Synthetic oligonucleotide
agcuguauaccauuuucgg

SEQ ID NO: 68788 - RNA, 19 nt, Artificial Sequence
  Description of Artificial Sequence: Synthetic oligonucleotide
agagucagacaaucgcucc

SEQ ID NO: 68789 - RNA, 19 nt, Artificial Sequence
  Description of Artificial Sequence: Synthetic oligonucleotide
cguacuaacagguugaggg

SEQ ID NO: 68790 - RNA, 19 nt, Artificial Sequence
  Description of Artificial Sequence: Synthetic oligonucleotide
uuuucggugucauacccag

SEQ ID NO: 68791 - RNA, 19 nt, Artificial Sequence
  Description of Artificial Sequence: Synthetic oligonucleotide
guaccuagaagcuugcccc

SEQ ID NO: 68792 - RNA, 19 nt, Artificial Sequence
  Description of Artificial Sequence: Synthetic oligonucleotide
agacacgugcagcucaucc

SEQ ID NO: 68793 - RNA, 19 nt, Artificial Sequence
  Description of Artificial Sequence: Synthetic oligonucleotide
uaaagcguuggcauguaca

SEQ ID NO: 68794 - RNA, 19 nt, Artificial Sequence
  Description of Artificial Sequence: Synthetic oligonucleotide
uguucgccagcuaauagug

SEQ ID NO: 68795 - RNA, 19 nt, Artificial Sequence
  Description of Artificial Sequence: Synthetic oligonucleotide
aauugggcaauuaacauua

SEQ ID NO: 68796 - RNA, 19 nt, Artificial Sequence
  Description of Artificial Sequence: Synthetic oligonucleotide
uauagguucugaugucugg

SEQ ID NO: 68797 - RNA, 19 nt, Artificial Sequence
  Description of Artificial Sequence: Synthetic oligonucleotide
uccauagcagguacaaacc

SEQ ID NO: 68798 - RNA, 19 nt, Artificial Sequence
  Description of Artificial Sequence: Synthetic oligonucleotide
agaguguacacguggaucu

SEQ ID NO: 68799 - RNA, 19 nt, Artificial Sequence
  Description of Artificial Sequence: Synthetic oligonucleotide
agcacguugcuucaugggg

SEQ ID NO: 68800 - RNA, 19 nt, Artificial Sequence
  Description of Artificial Sequence: Synthetic oligonucleotide
guugugaugacucccugag

SEQ ID NO: 68801 - RNA, 19 nt, Artificial Sequence
  Description of Artificial Sequence: Synthetic oligonucleotide
uuuguucgccagcuaauag

SEQ ID NO: 68802 - RNA, 19 nt, Artificial Sequence
  Description of Artificial Sequence: Synthetic oligonucleotide
caucgauuugcaaugguac

SEQ ID NO: 68803 - RNA, 19 nt, Artificial Sequence
  Description of Artificial Sequence: Synthetic oligonucleotide
agaugaaucacaucugaaa

SEQ ID NO: 68804 - RNA, 19 nt, Artificial Sequence
  Description of Artificial Sequence: Synthetic oligonucleotide
cacucuaacauguaaccac

SEQ ID NO: 68805 - RNA, 19 nt, Artificial Sequence
  Description of Artificial Sequence: Synthetic oligonucleotide
uacgugguaggucuucccg

SEQ ID NO: 68806 - RNA, 19 nt, Artificial Sequence
  Description of Artificial Sequence: Synthetic oligonucleotide
uaggcguacuaacagguug

SEQ ID NO: 68807 - RNA, 19 nt, Artificial Sequence
  Description of Artificial Sequence: Synthetic oligonucleotide
uagucuacgucuccccugg

SEQ ID NO: 68808 - RNA, 19 nt, Artificial Sequence
  Description of Artificial Sequence: Synthetic oligonucleotide
ucuccuacgugguaggucu

SEQ ID NO: 68809 - RNA, 19 nt, Artificial Sequence
  Description of Artificial Sequence: Synthetic oligonucleotide
guuagaaccacugcguuug

SEQ ID NO: 68810 - RNA, 19 nt, Artificial Sequence
  Description of Artificial Sequence: Synthetic oligonucleotide
auagcacguugcuucaugg

SEQ ID NO: 68811 - RNA, 19 nt, Artificial Sequence
  Description of Artificial Sequence: Synthetic oligonucleotide
ucacaguuaaaaccucggc

SEQ ID NO: 68812 - RNA, 19 nt, Artificial Sequence
  Description of Artificial Sequence: Synthetic oligonucleotide
agagugaguacugugaggu

SEQ ID NO: 68813 - RNA, 19 nt, Artificial Sequence
  Description of Artificial Sequence: Synthetic oligonucleotide
agacuuaagggagaaauga

SEQ ID NO: 68814 - RNA, 19 nt, Artificial Sequence
  Description of Artificial Sequence: Synthetic oligonucleotide
agaagucucaaaacauccc

SEQ ID NO: 68815 - RNA, 19 nt, Artificial Sequence
  Description of Artificial Sequence: Synthetic oligonucleotide
cagacaaucgcucccauuc

SEQ ID NO: 68816 - RNA, 19 nt, Artificial Sequence
  Description of Artificial Sequence: Synthetic oligonucleotide
ucgacuaucgguguuuccc

SEQ ID NO: 68817 - RNA, 19 nt, Artificial Sequence
  Description of Artificial Sequence: Synthetic oligonucleotide
gaguaggcguacuaacagg

SEQ ID NO: 68818 - RNA, 19 nt, Artificial Sequence
  Description of Artificial Sequence: Synthetic oligonucleotide
aguuaaaaccucggcuucc

SEQ ID NO: 68819 - RNA, 19 nt, Artificial Sequence
  Description of Artificial Sequence: Synthetic oligonucleotide
ggcaauuagaauuguuggg

SEQ ID NO: 68820 - RNA, 19 nt, Artificial Sequence
  Description of Artificial Sequence: Synthetic oligonucleotide
gucaaaacaaccaggcuug

SEQ ID NO: 68821 - RNA, 19 nt, Artificial Sequence
  Description of Artificial Sequence: Synthetic oligonucleotide
gauaggugcguucccacug

SEQ ID NO: 68822 - RNA, 19 nt, Artificial Sequence
  Description of Artificial Sequence: Synthetic oligonucleotide
guacacguggaucuuguag

SEQ ID NO: 68823 - RNA, 19 nt, Artificial Sequence
  Description of Artificial Sequence: Synthetic oligonucleotide
gacacgugcagcucauccg

SEQ ID NO: 68824 - RNA, 19 nt, Artificial Sequence
  Description of Artificial Sequence: Synthetic oligonucleotide
augggaaacuguguaaggg

SEQ ID NO: 68825 - RNA, 19 nt, Artificial Sequence
  Description of Artificial Sequence: Synthetic oligonucleotide
ggcaugugagcuuaaagcc

SEQ ID NO: 68826 - RNA, 19 nt, Artificial Sequence
  Description of Artificial Sequence: Synthetic oligonucleotide
uggacuaucaggagguguc

SEQ ID NO: 68827 - RNA, 19 nt, Artificial Sequence
  Description of Artificial Sequence: Synthetic oligonucleotide
agcuugcacgucuaauggc

SEQ ID NO: 68828 - RNA, 19 nt, Artificial Sequence
  Description of Artificial Sequence: Synthetic oligonucleotide
uguaaguguucccagugua

SEQ ID NO: 68829 - RNA, 19 nt, Artificial Sequence
  Description of Artificial Sequence: Synthetic oligonucleotide
uaaccaucugcaaccaaac

SEQ ID NO: 68830 - RNA, 19 nt, Artificial Sequence
  Description of Artificial Sequence: Synthetic oligonucleotide
ggaaccgcagguuggaugg

SEQ ID NO: 68831 - RNA, 19 nt, Artificial Sequence
  Description of Artificial Sequence: Synthetic oligonucleotide
uagaauuguugggacagag

SEQ ID NO: 68832 - RNA, 19 nt, Artificial Sequence
  Description of Artificial Sequence: Synthetic oligonucleotide
accaacuaagugcacgcag

SEQ ID NO: 68833 - RNA, 19 nt, Artificial Sequence
  Description of Artificial Sequence: Synthetic oligonucleotide
uguauaccauuuucggugu

SEQ ID NO: 68834 - RNA, 19 nt, Artificial Sequence
  Description of Artificial Sequence: Synthetic oligonucleotide
uuugcagcgccucaacuau

SEQ ID NO: 68835 - RNA, 19 nt, Artificial Sequence
  Description of Artificial Sequence: Synthetic oligonucleotide
gguaucucugaguauacug

SEQ ID NO: 68836 - RNA, 19 nt, Artificial Sequence
  Description of Artificial Sequence: Synthetic oligonucleotide
acugaguagaccacaccgc

SEQ ID NO: 68837 - RNA, 19 nt, Artificial Sequence
  Description of Artificial Sequence: Synthetic oligonucleotide
aacuaagugcacgcagaac

SEQ ID NO: 68838 - RNA, 19 nt, Artificial Sequence
  Description of Artificial Sequence: Synthetic oligonucleotide
accgauuuggaccuccuca

SEQ ID NO: 68839 - RNA, 19 nt, Artificial Sequence
  Description of Artificial Sequence: Synthetic oligonucleotide
uuagagaagcugugagaag

SEQ ID NO: 68840 - RNA, 19 nt, Artificial Sequence
  Description of Artificial Sequence: Synthetic oligonucleotide
ucauccguagguugguuca

SEQ ID NO: 68841 - RNA, 19 nt, Artificial Sequence
  Description of Artificial Sequence: Synthetic oligonucleotide
ucagaguggcgcuaguaga

SEQ ID NO: 68842 - RNA, 19 nt, Artificial Sequence
  Description of Artificial Sequence: Synthetic oligonucleotide
agauacaaccacugaugag

SEQ ID NO: 68843 - RNA, 19 nt, Artificial Sequence
  Description of Artificial Sequence: Synthetic oligonucleotide
ugcguuugucugaagguga

SEQ ID NO: 68844 - RNA, 19 nt, Artificial Sequence
  Description of Artificial Sequence: Synthetic oligonucleotide
guaccaacuaagugcacgc

SEQ ID NO: 68845 - RNA, 19 nt, Artificial Sequence
  Description of Artificial Sequence: Synthetic oligonucleotide
aagacuuaagggagaaaug

SEQ ID NO: 68846 - RNA, 19 nt, Artificial Sequence
  Description of Artificial Sequence: Synthetic oligonucleotide
aucuuggucgacuaucggu

SEQ ID NO: 68847 - RNA, 19 nt, Artificial Sequence
  Description of Artificial Sequence: Synthetic oligonucleotide
agacuaaaucacaaagauc

SEQ ID NO: 68848 - RNA, 19 nt, Artificial Sequence
  Description of Artificial Sequence: Synthetic oligonucleotide
acaugaccgauuuggaccu

SEQ ID NO: 68849 - RNA, 19 nt, Artificial Sequence
  Description of Artificial Sequence: Synthetic oligonucleotide
aauugauaaauaacaggua

SEQ ID NO: 68850 - RNA, 19 nt, Artificial Sequence
  Description of Artificial Sequence: Synthetic oligonucleotide
guauuugucaaagcaaguc

SEQ ID NO: 68851 - RNA, 19 nt, Artificial Sequence
  Description of Artificial Sequence: Synthetic oligonucleotide
ugguuguaaaccugugaug

SEQ ID NO: 68852 - RNA, 19 nt, Artificial Sequence
  Description of Artificial Sequence: Synthetic oligonucleotide
uuuagggcgcucguaagug

SEQ ID NO: 68853 - RNA, 19 nt, Artificial Sequence
  Description of Artificial Sequence: Synthetic oligonucleotide
caaucuuguaggacugacc

SEQ ID NO: 68854 - RNA, 19 nt, Artificial Sequence
  Description of Artificial Sequence: Synthetic oligonucleotide
aguaauccuggcacggggc

SEQ ID NO: 68855 - RNA, 19 nt, Artificial Sequence
  Description of Artificial Sequence: Synthetic oligonucleotide
uggcauaaugggaaacugu

SEQ ID NO: 68856 - RNA, 19 nt, Artificial Sequence
  Description of Artificial Sequence: Synthetic oligonucleotide
guaauccuggcacggggcg

SEQ ID NO: 68857 - RNA, 19 nt, Artificial Sequence
  Description of Artificial Sequence: Synthetic oligonucleotide
aucgauuugcaaugguaca

SEQ ID NO: 68858 - RNA, 19 nt, Artificial Sequence
  Description of Artificial Sequence: Synthetic oligonucleotide
cagcuugcacgucuaaugg

SEQ ID NO: 68859 - RNA, 19 nt, Artificial Sequence
  Description of Artificial Sequence: Synthetic oligonucleotide
uggccuccgaaacaugugc

SEQ ID NO: 68860 - RNA, 19 nt, Artificial Sequence
  Description of Artificial Sequence: Synthetic oligonucleotide
ugugguccgccuaaagcca

SEQ ID NO: 68861 - RNA, 19 nt, Artificial Sequence
  Description of Artificial Sequence: Synthetic oligonucleotide
gaaggguaaccaguugggg

SEQ ID NO: 68862 - RNA, 19 nt, Artificial Sequence
  Description of Artificial Sequence: Synthetic oligonucleotide
ucuuuagggcgcucguaag

SEQ ID NO: 68863 - RNA, 19 nt, Artificial Sequence
  Description of Artificial Sequence: Synthetic oligonucleotide
ucggcagagacacuucuuc

SEQ ID NO: 68864 - RNA, 19 nt, Artificial Sequence
  Description of Artificial Sequence: Synthetic oligonucleotide
gacguagaugguguacucg

SEQ ID NO: 68865 - RNA, 19 nt, Artificial Sequence
  Description of Artificial Sequence: Synthetic oligonucleotide
gaucuuggucgacuaucgg

SEQ ID NO: 68866 - RNA, 19 nt, Artificial Sequence
  Description of Artificial Sequence: Synthetic oligonucleotide
aaauaacagguaagagaag

SEQ ID NO: 68867 - RNA, 19 nt, Artificial Sequence
  Description of Artificial Sequence: Synthetic oligonucleotide
guacagucccagaucaugg

SEQ ID NO: 68868 - RNA, 19 nt, Artificial Sequence
  Description of Artificial Sequence: Synthetic oligonucleotide
ggagggaacauccaggauc

SEQ ID NO: 68869 - RNA, 19 nt, Artificial Sequence
  Description of Artificial Sequence: Synthetic oligonucleotide
uucgccagcuaauagugau

SEQ ID NO: 68870 - RNA, 19 nt, Artificial Sequence
  Description of Artificial Sequence: Synthetic oligonucleotide
cauaaugggaaacugugua

SEQ ID NO: 68871 - RNA, 19 nt, Artificial Sequence
  Description of Artificial Sequence: Synthetic oligonucleotide
cauugccuagauaggugcg

SEQ ID NO: 68872 - RNA, 19 nt, Artificial Sequence
  Description of Artificial Sequence: Synthetic oligonucleotide
uggguuggaaauguuacuc

SEQ ID NO: 68873 - RNA, 19 nt, Artificial Sequence
  Description of Artificial Sequence: Synthetic oligonucleotide
ucuggugguaucucugagu

SEQ ID NO: 68874 - RNA, 19 nt, Artificial Sequence
  Description of Artificial Sequence: Synthetic oligonucleotide
aaccaucugcaaccaaaca

SEQ ID NO: 68875 - RNA, 19 nt, Artificial Sequence
  Description of Artificial Sequence: Synthetic oligonucleotide
gaccccucugguaaggccg

SEQ ID NO: 68876 - RNA, 19 nt, Artificial Sequence
  Description of Artificial Sequence: Synthetic oligonucleotide
uagcacguugcuucauggg

SEQ ID NO: 68877 - RNA, 19 nt, Artificial Sequence
  Description of Artificial Sequence: Synthetic oligonucleotide
ggcauuuggauugaguccc

SEQ ID NO: 68878 - RNA, 19 nt, Artificial Sequence
  Description of Artificial Sequence: Synthetic oligonucleotide
uguacucgguuccuggcuc

SEQ ID NO: 68879 - RNA, 19 nt, Artificial Sequence
  Description of Artificial Sequence: Synthetic oligonucleotide
gacaucaacacgguagcca

SEQ ID NO: 68880 - RNA, 19 nt, Artificial Sequence
  Description of Artificial Sequence: Synthetic oligonucleotide
aguuucauguggccuccuc

SEQ ID NO: 68881 - RNA, 19 nt, Artificial Sequence
  Description of Artificial Sequence: Synthetic oligonucleotide
uaucgguguuucccugugg

SEQ ID NO: 68882 - RNA, 19 nt, Artificial Sequence
  Description of Artificial Sequence: Synthetic oligonucleotide
uugaucuuggucgacuauc

SEQ ID NO: 68883 - RNA, 19 nt, Artificial Sequence
  Description of Artificial Sequence: Synthetic oligonucleotide
aucgguguuucccugugga

SEQ ID NO: 68884 - RNA, 19 nt, Artificial Sequence
  Description of Artificial Sequence: Synthetic oligonucleotide
uggcgcuaguagaaguucc

SEQ ID NO: 68885 - RNA, 19 nt, Artificial Sequence
  Description of Artificial Sequence: Synthetic oligonucleotide
ugcacgucuaauggcauga

SEQ ID NO: 68886 - RNA, 19 nt, Artificial Sequence
  Description of Artificial Sequence: Synthetic oligonucleotide
uuugaacuguggagggaac

SEQ ID NO: 68887 - RNA, 19 nt, Artificial Sequence
  Description of Artificial Sequence: Synthetic oligonucleotide
aguaggcguacuaacaggu

SEQ ID NO: 68888 - RNA, 19 nt, Artificial Sequence
  Description of Artificial Sequence: Synthetic oligonucleotide
ggcauaaugggaaacugug

SEQ ID NO: 68889 - RNA, 19 nt, Artificial Sequence
  Description of Artificial Sequence: Synthetic oligonucleotide
acugaauuccucucaucaa

SEQ ID NO: 68890 - RNA, 19 nt, Artificial Sequence
  Description of Artificial Sequence: Synthetic oligonucleotide
uuguuagaaccacugcguu

SEQ ID NO: 68891 - RNA, 19 nt, Artificial Sequence
  Description of Artificial Sequence: Synthetic oligonucleotide
gaguauacugguuguaggu

SEQ ID NO: 68892 - RNA, 19 nt, Artificial Sequence
  Description of Artificial Sequence: Synthetic oligonucleotide
ugggugguaccaacuaagu

SEQ ID NO: 68893 - RNA, 19 nt, Artificial Sequence
  Description of Artificial Sequence: Synthetic oligonucleotide
acuaacagguugagggagg

SEQ ID NO: 68894 - RNA, 19 nt, Artificial Sequence
  Description of Artificial Sequence: Synthetic oligonucleotide
caaccgcauacuaaguguc

SEQ ID NO: 68895 - RNA, 19 nt, Artificial Sequence
  Description of Artificial Sequence: Synthetic oligonucleotide
agaccaguaaugguggccu

SEQ ID NO: 68896 - RNA, 19 nt, Artificial Sequence
  Description of Artificial Sequence: Synthetic oligonucleotide
uuucggugucauacccagg

SEQ ID NO: 68897 - RNA, 19 nt, Artificial Sequence
  Description of Artificial Sequence: Synthetic oligonucleotide
caacacgguagccagucac

SEQ ID NO: 68898 - RNA, 19 nt, Artificial Sequence
  Description of Artificial Sequence: Synthetic oligonucleotide
uccguagguugguucaggc

SEQ ID NO: 68899 - RNA, 19 nt, Artificial Sequence
  Description of Artificial Sequence: Synthetic oligonucleotide
aaagcaugagucauccgua

SEQ ID NO: 68900 - RNA, 19 nt, Artificial Sequence
  Description of Artificial Sequence: Synthetic oligonucleotide
uacagucccagaucaugga

SEQ ID NO: 68901 - RNA, 19 nt, Artificial Sequence
  Description of Artificial Sequence: Synthetic oligonucleotide
cuuccaaucagaggcucgc

SEQ ID NO: 68902 - RNA, 19 nt, Artificial Sequence
  Description of Artificial Sequence: Synthetic oligonucleotide
caagauacucuuucugcca

SEQ ID NO: 68903 - RNA, 19 nt, Artificial Sequence
  Description of Artificial Sequence: Synthetic oligonucleotide
cauagcacguugcuucaug

SEQ ID NO: 68904 - RNA, 19 nt, Artificial Sequence
  Description of Artificial Sequence: Synthetic oligonucleotide
guagucuacgucuccccug

SEQ ID NO: 68905 - RNA, 19 nt, Artificial Sequence
  Description of Artificial Sequence: Synthetic oligonucleotide
ugcacgauuugcugaggcu

SEQ ID NO: 68906 - RNA, 19 nt, Artificial Sequence
  Description of Artificial Sequence: Synthetic oligonucleotide
gcauugccuagauaggugc

SEQ ID NO: 68907 - RNA, 19 nt, Artificial Sequence
  Description of Artificial Sequence: Synthetic oligonucleotide
agcaaauggcuccaagaua

SEQ ID NO: 68908 - RNA, 19 nt, Artificial Sequence
  Description of Artificial Sequence: Synthetic oligonucleotide
uccgaaacaugugcaggag

SEQ ID NO: 68909 - RNA, 19 nt, Artificial Sequence
  Description of Artificial Sequence: Synthetic oligonucleotide
guaaccaucugcaaccaaa

SEQ ID NO: 68910 - RNA, 19 nt, Artificial Sequence
  Description of Artificial Sequence: Synthetic oligonucleotide
acuaucgguguuucccugu

SEQ ID NO: 68911 - RNA, 19 nt, Artificial Sequence
  Description of Artificial Sequence: Synthetic oligonucleotide
guacuaacagguugaggga

SEQ ID NO: 68912 - RNA, 19 nt, Artificial Sequence
  Description of Artificial Sequence: Synthetic oligonucleotide
uugagagcauagacacuga

SEQ ID NO: 68913 - RNA, 19 nt, Artificial Sequence
  Description of Artificial Sequence: Synthetic oligonucleotide
cagacuaaaucacaaagau

SEQ ID NO: 68914 - RNA, 19 nt, Artificial Sequence
  Description of Artificial Sequence: Synthetic oligonucleotide
ugugaugguauagguucug

SEQ ID NO: 68915 - RNA, 19 nt, Artificial Sequence
  Description of Artificial Sequence: Synthetic oligonucleotide
ucacaccauugucauggca

SEQ ID NO: 68916 - RNA, 19 nt, Artificial Sequence
  Description of Artificial Sequence: Synthetic oligonucleotide
cuaugauguuguaggugac

SEQ ID NO: 68917 - RNA, 19 nt, Artificial Sequence
  Description of Artificial Sequence: Synthetic oligonucleotide
cauuaguguuuguucucug

SEQ ID NO: 68918 - RNA, 19 nt, Artificial Sequence
  Description of Artificial Sequence: Synthetic oligonucleotide
cucuuaaacaauacugggu

SEQ ID NO: 68919 - RNA, 19 nt, Artificial Sequence
  Description of Artificial Sequence: Synthetic oligonucleotide
caccaaucuuguaggacug

SEQ ID NO: 68920 - RNA, 19 nt, Artificial Sequence
  Description of Artificial Sequence: Synthetic oligonucleotide
gacuaucgguguuucccug

SEQ ID NO: 68921 - RNA, 19 nt, Artificial Sequence
  Description of Artificial Sequence: Synthetic oligonucleotide
uaucaggagguguccacau

SEQ ID NO: 68922 - RNA, 19 nt, Artificial Sequence
  Description of Artificial Sequence: Synthetic oligonucleotide
acgcagaacaagguaacca

SEQ ID NO: 68923 - RNA, 19 nt, Artificial Sequence
  Description of Artificial Sequence: Synthetic oligonucleotide
uugcacgucuaauggcaug

SEQ ID NO: 68924 - RNA, 19 nt, Artificial Sequence
  Description of Artificial Sequence: Synthetic oligonucleotide
aacacgguagccagucacu

SEQ ID NO: 68925 - RNA, 19 nt, Artificial Sequence
  Description of Artificial Sequence: Synthetic oligonucleotide
cacgucuaauggcaugaag

SEQ ID NO: 68926 - RNA, 19 nt, Artificial Sequence
  Description of Artificial Sequence: Synthetic oligonucleotide
guauagguucugaugucug

SEQ ID NO: 68927 - RNA, 19 nt, Artificial Sequence
  Description of Artificial Sequence: Synthetic oligonucleotide
auaggugcguucccacugu

SEQ ID NO: 68928 - RNA, 19 nt, Artificial Sequence
  Description of Artificial Sequence: Synthetic oligonucleotide
cacgguagccagucacugg

SEQ ID NO: 68929 - RNA, 19 nt, Artificial Sequence
  Description of Artificial Sequence: Synthetic oligonucleotide
uacgucuccccugggaaca

SEQ ID NO: 68930 - RNA, 19 nt, Artificial Sequence
  Description of Artificial Sequence: Synthetic oligonucleotide
ccagcuaauagugauggug

SEQ ID NO: 68931 - RNA, 19 nt, Artificial Sequence
  Description of Artificial Sequence: Synthetic oligonucleotide
gcacucgauagccagugag

SEQ ID NO: 68932 - RNA, 19 nt, Artificial Sequence
  Description of Artificial Sequence: Synthetic oligonucleotide
ugacguagaugguguacuc

SEQ ID NO: 68933 - RNA, 19 nt, Artificial Sequence
  Description of Artificial Sequence: Synthetic oligonucleotide
gguacagucccagaucaug

SEQ ID NO: 68934 - RNA, 19 nt, Artificial Sequence
  Description of Artificial Sequence: Synthetic oligonucleotide
cucgucggugccaacagga

SEQ ID NO: 68935 - RNA, 19 nt, Artificial Sequence
  Description of Artificial Sequence: Synthetic oligonucleotide
cuacgugguaggucuuccc

SEQ ID NO: 68936 - RNA, 19 nt, Artificial Sequence
  Description of Artificial Sequence: Synthetic oligonucleotide
cugcguuugucugaaggug

SEQ ID NO: 68937 - RNA, 19 nt, Artificial Sequence
  Description of Artificial Sequence: Synthetic oligonucleotide
auguuacucucuggagucg

SEQ ID NO: 68938 - RNA, 19 nt, Artificial Sequence
  Description of Artificial Sequence: Synthetic oligonucleotide
auugccuagauaggugcgu

SEQ ID NO: 68939 - RNA, 19 nt, Artificial Sequence
  Description of Artificial Sequence: Synthetic oligonucleotide
accgcagguuggauggugc

SEQ ID NO: 68940 - RNA, 19 nt, Artificial Sequence
  Description of Artificial Sequence: Synthetic oligonucleotide
ggugucauacccaggguug

SEQ ID NO: 68941 - RNA, 19 nt, Artificial Sequence
  Description of Artificial Sequence: Synthetic oligonucleotide
cuaucgguguuucccugug

SEQ ID NO: 68942 - RNA, 19 nt, Artificial Sequence
  Description of Artificial Sequence: Synthetic oligonucleotide
gugucauacccaggguugg

SEQ ID NO: 68943 - RNA, 19 nt, Artificial Sequence
  Description of Artificial Sequence: Synthetic oligonucleotide
caggccauaugcuuauaga

SEQ ID NO: 68944 - RNA, 19 nt, Artificial Sequence
  Description of Artificial Sequence: Synthetic oligonucleotide
gggucuuuugaacugugga

SEQ ID NO: 68945 - RNA, 19 nt, Artificial Sequence
  Description of Artificial Sequence: Synthetic oligonucleotide
cauuuggauugagucccgg

SEQ ID NO: 68946 - RNA, 19 nt, Artificial Sequence
  Description of Artificial Sequence: Synthetic oligonucleotide
gucauccguagguugguuc

SEQ ID NO: 68947 - RNA, 19 nt, Artificial Sequence
  Description of Artificial Sequence: Synthetic oligonucleotide
agaguggcgcuaguagaag

SEQ ID NO: 68948 - RNA, 19 nt, Artificial Sequence
  Description of Artificial Sequence: Synthetic oligonucleotide
ucugaguauacugguugua

SEQ ID NO: 68949 - RNA, 19 nt, Artificial Sequence
  Description of Artificial Sequence: Synthetic oligonucleotide
gacugaccccuucauggca

SEQ ID NO: 68950 - RNA, 19 nt, Artificial Sequence
  Description of Artificial Sequence: Synthetic oligonucleotide
cgucauagcacguugcuuc

SEQ ID NO: 68951 - RNA, 19 nt, Artificial Sequence
  Description of Artificial Sequence: Synthetic oligonucleotide
ugggaacaugaccgauuug

SEQ ID NO: 68952 - RNA, 19 nt, Artificial Sequence
  Description of Artificial Sequence: Synthetic oligonucleotide
uuagaaccacugcguuugu

SEQ ID NO: 68953 - RNA, 19 nt, Artificial Sequence
  Description of Artificial Sequence: Synthetic oligonucleotide
guaaagcguuggcauguac

SEQ ID NO: 68954 - RNA, 19 nt, Artificial Sequence
  Description of Artificial Sequence: Synthetic oligonucleotide
uucgggucacccgcacucg

SEQ ID NO: 68955 - RNA, 19 nt, Artificial Sequence
  Description of Artificial Sequence: Synthetic oligonucleotide
ucggugucauacccagggu

SEQ ID NO: 68956 - RNA, 19 nt, Artificial Sequence
  Description of Artificial Sequence: Synthetic oligonucleotide
auguuugaucuuggucgac

SEQ ID NO: 68957 - RNA, 19 nt, Artificial Sequence
  Description of Artificial Sequence: Synthetic oligonucleotide
caguaguaaagcguuggca

SEQ ID NO: 68958 - RNA, 19 nt, Artificial Sequence
  Description of Artificial Sequence: Synthetic oligonucleotide
ggugguaucucugaguaua

SEQ ID NO: 68959 - RNA, 19 nt, Artificial Sequence
  Description of Artificial Sequence: Synthetic oligonucleotide
ugaccgauuuggaccuccu

SEQ ID NO: 68960 - RNA, 19 nt, Artificial Sequence
  Description of Artificial Sequence: Synthetic oligonucleotide
uaauccuggcacggggcgc

SEQ ID NO: 68961 - RNA, 19 nt, Artificial Sequence
  Description of Artificial Sequence: Synthetic oligonucleotide
gggugguaccaacuaagug

SEQ ID NO: 68962 - RNA, 19 nt, Artificial Sequence
  Description of Artificial Sequence: Synthetic oligonucleotide
gguggugccgucaggacug

SEQ ID NO: 68963 - RNA, 19 nt, Artificial Sequence
  Description of Artificial Sequence: Synthetic oligonucleotide
uaccaacuaagugcacgca

SEQ ID NO: 68964 - RNA, 19 nt, Artificial Sequence
  Description of Artificial Sequence: Synthetic oligonucleotide
uucuccuacgugguagguc

SEQ ID NO: 68965 - RNA, 19 nt, Artificial Sequence
  Description of Artificial Sequence: Synthetic oligonucleotide
guacucgguuccuggcucc

SEQ ID NO: 68966 - RNA, 19 nt, Artificial Sequence
  Description of Artificial Sequence: Synthetic oligonucleotide
uguggaccccagacuaaau

SEQ ID NO: 68967 - RNA, 19 nt, Artificial Sequence
  Description of Artificial Sequence: Synthetic oligonucleotide
uuguagucagugccugguu

SEQ ID NO: 68968 - RNA, 19 nt, Artificial Sequence
  Description of Artificial Sequence: Synthetic oligonucleotide
aggcguacuaacagguuga

SEQ ID NO: 68969 - RNA, 19 nt, Artificial Sequence
  Description of Artificial Sequence: Synthetic oligonucleotide
gacaaucgcucccauuccu

SEQ ID NO: 68970 - RNA, 19 nt, Artificial Sequence
  Description of Artificial Sequence: Synthetic oligonucleotide
gggguucuaccauucaaga

SEQ ID NO: 68971 - RNA, 19 nt, Artificial Sequence
  Description of Artificial Sequence: Synthetic oligonucleotide
gaaucuuuagggcgcucgu

SEQ ID NO: 68972 - RNA, 19 nt, Artificial Sequence
  Description of Artificial Sequence: Synthetic oligonucleotide
guagucagugccugguugu

SEQ ID NO: 68973 - RNA, 19 nt, Artificial Sequence
  Description of Artificial Sequence: Synthetic oligonucleotide
ucgcccagccccgaugcag

SEQ ID NO: 68974 - RNA, 19 nt, Artificial Sequence
  Description of Artificial Sequence: Synthetic oligonucleotide
cauucccaagacacgugca

SEQ ID NO: 68975 - RNA, 19 nt, Artificial Sequence
  Description of Artificial Sequence: Synthetic oligonucleotide
ugccuagauaggugcguuc

SEQ ID NO: 68976 - RNA, 19 nt, Artificial Sequence
  Description of Artificial Sequence: Synthetic oligonucleotide
caauugggcaauuaacauu

SEQ ID NO: 68977 - RNA, 19 nt, Artificial Sequence
  Description of Artificial Sequence: Synthetic oligonucleotide
uuggucgacuaucgguguu

SEQ ID NO: 68978 - RNA, 19 nt, Artificial Sequence
  Description of Artificial Sequence: Synthetic oligonucleotide
gggaaacuguguaaggguc

SEQ ID NO: 68979 - RNA, 19 nt, Artificial Sequence
  Description of Artificial Sequence: Synthetic oligonucleotide
gucacccgcacucgauagc

SEQ ID NO: 68980 - RNA, 19 nt, Artificial Sequence
  Description of Artificial Sequence: Synthetic oligonucleotide
ugguccgccuaaagccaug

SEQ ID NO: 68981 - RNA, 19 nt, Artificial Sequence
  Description of Artificial Sequence: Synthetic oligonucleotide
gcaugaaaugauguacuca

SEQ ID NO: 68982 - RNA, 19 nt, Artificial Sequence
  Description of Artificial Sequence: Synthetic oligonucleotide
ucgggucacccgcacucga

SEQ ID NO: 68983 - RNA, 19 nt, Artificial Sequence
  Description of Artificial Sequence: Synthetic oligonucleotide
agucuacgucuccccuggg

SEQ ID NO: 68984 - RNA, 19 nt, Artificial Sequence
  Description of Artificial Sequence: Synthetic oligonucleotide
cuaucaggagguguccaca

SEQ ID NO: 68985 - RNA, 19 nt, Artificial Sequence
  Description of Artificial Sequence: Synthetic oligonucleotide
cugaguagaccacaccgcu

SEQ ID NO: 68986 - RNA, 19 nt, Artificial Sequence
  Description of Artificial Sequence: Synthetic oligonucleotide
acuaaaucacaaagaucuu

SEQ ID NO: 68987 - RNA, 19 nt, Artificial Sequence
  Description of Artificial Sequence: Synthetic oligonucleotide
cuaacagguugagggagga

SEQ ID NO: 68988 - RNA, 19 nt, Artificial Sequence
  Description of Artificial Sequence: Synthetic oligonucleotide
cuuggcgaucccacuucuc

SEQ ID NO: 68989 - RNA, 19 nt, Artificial Sequence
  Description of Artificial Sequence: Synthetic oligonucleotide
gaccgauuuggaccuccuc

SEQ ID NO: 68990 - RNA, 19 nt, Artificial Sequence
  Description of Artificial Sequence: Synthetic oligonucleotide
ccaacuaagugcacgcaga

SEQ ID NO: 68991 - RNA, 19 nt, Artificial Sequence
  Description of Artificial Sequence: Synthetic oligonucleotide
ugguaaggccggucagagu

SEQ ID NO: 68992 - RNA, 19 nt, Artificial Sequence
  Description of Artificial Sequence: Synthetic oligonucleotide
gcgcucguaagugucaccc

SEQ ID NO: 68993 - RNA, 19 nt, Artificial Sequence
  Description of Artificial Sequence: Synthetic oligonucleotide
ccgaaacaugugcaggagc

SEQ ID NO: 68994 - RNA, 19 nt, Artificial Sequence
  Description of Artificial Sequence: Synthetic oligonucleotide
gugguaucucugaguauac

SEQ ID NO: 68995 - RNA, 19 nt, Artificial Sequence
  Description of Artificial Sequence: Synthetic oligonucleotide
ccuccgaaacaugugcagg

SEQ ID NO: 68996 - RNA, 19 nt, Artificial Sequence
  Description of Artificial Sequence: Synthetic oligonucleotide
cucuggagucgucucuguc

SEQ ID NO: 68997 - RNA, 19 nt, Artificial Sequence
  Description of Artificial Sequence: Synthetic oligonucleotide
guauaccauuuucgguguc

SEQ ID NO: 68998 - RNA, 19 nt, Artificial Sequence
  Description of Artificial Sequence: Synthetic oligonucleotide
cuuuagggcgcucguaagu

SEQ ID NO: 68999 - RNA, 19 nt, Artificial Sequence
  Description of Artificial Sequence: Synthetic oligonucleotide
cgucuaauggcaugaagca

SEQ ID NO: 69000 - RNA, 19 nt, Artificial Sequence
  Description of Artificial Sequence: Synthetic oligonucleotide
cauccguagguugguucag

SEQ ID NO: 69001 - RNA, 19 nt, Artificial Sequence
  Description of Artificial Sequence: Synthetic oligonucleotide
gaguggcgcuaguagaagu

SEQ ID NO: 69002 - RNA, 19 nt, Artificial Sequence
  Description of Artificial Sequence: Synthetic oligonucleotide
aguggcgcuaguagaaguu

SEQ ID NO: 69003 - RNA, 19 nt, Artificial Sequence
  Description of Artificial Sequence: Synthetic oligonucleotide
uggucgacuaucgguguuu

SEQ ID NO: 69004 - RNA, 19 nt, Artificial Sequence
  Description of Artificial Sequence: Synthetic oligonucleotide
uugccuagauaggugcguu

SEQ ID NO: 69005 - RNA, 19 nt, Artificial Sequence
  Description of Artificial Sequence: Synthetic oligonucleotide
ccuagauaggugcguuccc

SEQ ID NO: 69006 - RNA, 19 nt, Artificial Sequence
  Description of Artificial Sequence: Synthetic oligonucleotide
uccuacgugguaggucuuc

SEQ ID NO: 69007 - RNA, 19 nt, Artificial Sequence
  Description of Artificial Sequence: Synthetic oligonucleotide
aaggccggucagaguggcg

SEQ ID NO: 69008 - RNA, 19 nt, Artificial Sequence
  Description of Artificial Sequence: Synthetic oligonucleotide
cucugaguauacugguugu

SEQ ID NO: 69009 - RNA, 19 nt, Artificial Sequence
  Description of Artificial Sequence: Synthetic oligonucleotide
cuuuguucgccagcuaaua

SEQ ID NO: 69010 - RNA, 19 nt, Artificial Sequence
  Description of Artificial Sequence: Synthetic oligonucleotide
guggcgcuaguagaaguuc

SEQ ID NO: 69011 - RNA, 19 nt, Artificial Sequence
  Description of Artificial Sequence: Synthetic oligonucleotide
acuggacuaucaggaggug

SEQ ID NO: 69012 - RNA, 19 nt, Artificial Sequence
  Description of Artificial Sequence: Synthetic oligonucleotide
ccaaucuuguaggacugac

SEQ ID NO: 69013 - RNA, 19 nt, Artificial Sequence
  Description of Artificial Sequence: Synthetic oligonucleotide
agguuuacucucacaguua

SEQ ID NO: 69014 - RNA, 19 nt, Artificial Sequence
  Description of Artificial Sequence: Synthetic oligonucleotide
ggacuaucaggaggugucc

SEQ ID NO: 69015 - RNA, 19 nt, Artificial Sequence
  Description of Artificial Sequence: Synthetic oligonucleotide
ccguagguugguucaggcc

SEQ ID NO: 69016 - RNA, 19 nt, Artificial Sequence
  Description of Artificial Sequence: Synthetic oligonucleotide
gcccacucuaacauguaac

SEQ ID NO: 69017 - RNA, 19 nt, Artificial Sequence
  Description of Artificial Sequence: Synthetic oligonucleotide
ucauagcacguugcuucau

SEQ ID NO: 69018 - RNA, 19 nt, Artificial Sequence
  Description of Artificial Sequence: Synthetic oligonucleotide
gugcaggagcaaauggcuc

SEQ ID NO: 69019 - RNA, 19 nt, Artificial Sequence
  Description of Artificial Sequence: Synthetic oligonucleotide
caaucgcucccauuccucu

SEQ ID NO: 69020 - RNA, 19 nt, Artificial Sequence
  Description of Artificial Sequence: Synthetic oligonucleotide
gcguacuaacagguugagg

SEQ ID NO: 69021 - RNA, 19 nt, Artificial Sequence
  Description of Artificial Sequence: Synthetic oligonucleotide
auggcguccaagagauggu

SEQ ID NO: 69022 - RNA, 19 nt, Artificial Sequence
  Description of Artificial Sequence: Synthetic oligonucleotide
uggcguccaagagaugguu

SEQ ID NO: 69023 - RNA, 19 nt, Artificial Sequence
  Description of Artificial Sequence: Synthetic oligonucleotide
guaaguguucccaguguau

SEQ ID NO: 69024 - RNA, 19 nt, Artificial Sequence
  Description of Artificial Sequence: Synthetic oligonucleotide
gugaccccucugguaaggc

SEQ ID NO: 69025 - RNA, 19 nt, Artificial Sequence
  Description of Artificial Sequence: Synthetic oligonucleotide
ggcguacuaacagguugag

SEQ ID NO: 69026 - RNA, 19 nt, Artificial Sequence
  Description of Artificial Sequence: Synthetic oligonucleotide
caucaaccgcauacuaagu

SEQ ID NO: 69027 - RNA, 19 nt, Artificial Sequence
  Description of Artificial Sequence: Synthetic oligonucleotide
cuuggucgacuaucggugu

SEQ ID NO: 69028 - RNA, 19 nt, Artificial Sequence
  Description of Artificial Sequence: Synthetic oligonucleotide
gcauuuggauugagucccg

SEQ ID NO: 69029 - RNA, 19 nt, Artificial Sequence
  Description of Artificial Sequence: Synthetic oligonucleotide
guaggacugaccccuucau

SEQ ID NO: 69030 - RNA, 19 nt, Artificial Sequence
  Description of Artificial Sequence: Synthetic oligonucleotide
agguguguugaaacagcua

SEQ ID NO: 69031 - RNA, 19 nt, Artificial Sequence
  Description of Artificial Sequence: Synthetic oligonucleotide
ccuacgugguaggucuucc

SEQ ID NO: 69032 - RNA, 19 nt, Artificial Sequence
  Description of Artificial Sequence: Synthetic oligonucleotide
gguagucuacgucuccccu

SEQ ID NO: 69033 - RNA, 19 nt, Artificial Sequence
  Description of Artificial Sequence: Synthetic oligonucleotide
guucgccagcuaauaguga

SEQ ID NO: 69034 - RNA, 19 nt, Artificial Sequence
  Description of Artificial Sequence: Synthetic oligonucleotide
cacaggggaguaggcguac

SEQ ID NO: 69035 - RNA, 19 nt, Artificial Sequence
  Description of Artificial Sequence: Synthetic oligonucleotide
gaauggcguccaagagaug

SEQ ID NO: 69036 - RNA, 19 nt, Artificial Sequence
  Description of Artificial Sequence: Synthetic oligonucleotide
ccgcauacuaagugucuuc

SEQ ID NO: 69037 - RNA, 19 nt, Artificial Sequence
  Description of Artificial Sequence: Synthetic oligonucleotide
ccaccggggacugaggcug

SEQ ID NO: 69038 - RNA, 19 nt, Artificial Sequence
  Description of Artificial Sequence: Synthetic oligonucleotide
uggaaucuuuagggcgcuc

SEQ ID NO: 69039 - RNA, 19 nt, Artificial Sequence
  Description of Artificial Sequence: Synthetic oligonucleotide
cuagaagcuugccccugua

SEQ ID NO: 69040 - RNA, 19 nt, Artificial Sequence
  Description of Artificial Sequence: Synthetic oligonucleotide
gaggggauccaggcuucuc

SEQ ID NO: 69041 - RNA, 19 nt, Artificial Sequence
  Description of Artificial Sequence: Synthetic oligonucleotide
gguaaccaucugcaaccaa

SEQ ID NO: 69042 - RNA, 19 nt, Artificial Sequence
  Description of Artificial Sequence: Synthetic oligonucleotide
agucauccguagguugguu

SEQ ID NO: 69043 - RNA, 19 nt, Artificial Sequence
  Description of Artificial Sequence: Synthetic oligonucleotide
ggcgcucguaagugucacc

SEQ ID NO: 69044 - RNA, 19 nt, Artificial Sequence
  Description of Artificial Sequence: Synthetic oligonucleotide
caccauugucauggcacca

SEQ ID NO: 69045 - RNA, 19 nt, Artificial Sequence
  Description of Artificial Sequence: Synthetic oligonucleotide
gccgucaggacuggguuca

SEQ ID NO: 69046 - RNA, 19 nt, Artificial Sequence
  Description of Artificial Sequence: Synthetic oligonucleotide
ccacucuaacauguaacca

SEQ ID NO: 69047 - RNA, 19 nt, Artificial Sequence
  Description of Artificial Sequence: Synthetic oligonucleotide
ccucgucggugccaacagg

SEQ ID NO: 69048 - RNA, 19 nt, Artificial Sequence
  Description of Artificial Sequence: Synthetic oligonucleotide
gcauaaugggaaacugugu

SEQ ID NO: 69049 - RNA, 19 nt, Artificial Sequence
  Description of Artificial Sequence: Synthetic oligonucleotide
cagggugaugaugcuuaga

SEQ ID NO: 69050 - RNA, 19 nt, Artificial Sequence
  Description of Artificial Sequence: Synthetic oligonucleotide
ggucgacuaucgguguuuc

SEQ ID NO: 69051 - RNA, 19 nt, Artificial Sequence
  Description of Artificial Sequence: Synthetic oligonucleotide
ggauugaccucggcagaga

SEQ ID NO: 69052 - RNA, 19 nt, Artificial Sequence
  Description of Artificial Sequence: Synthetic oligonucleotide
cauauuugguggccaccau

SEQ ID NO: 69053 - RNA, 19 nt, Artificial Sequence
  Description of Artificial Sequence: Synthetic oligonucleotide
caucaacacgguagccagu

SEQ ID NO: 69054 - RNA, 19 nt, Artificial Sequence
  Description of Artificial Sequence: Synthetic oligonucleotide
gggugccacccacugggca

SEQ ID NO: 69055 - RNA, 19 nt, Artificial Sequence
  Description of Artificial Sequence: Synthetic oligonucleotide
caugaccgauuuggaccuc

SEQ ID NO: 69056 - RNA, 19 nt, Artificial Sequence
  Description of Artificial Sequence: Synthetic oligonucleotide
cacggggcgccugccauga

SEQ ID NO: 69057 - RNA, 19 nt, Artificial Sequence
  Description of Artificial Sequence: Synthetic oligonucleotide
gggucacccgcacucgaua

SEQ ID NO: 69058 - RNA, 19 nt, Artificial Sequence
  Description of Artificial Sequence: Synthetic oligonucleotide
guaggcguacuaacagguu

SEQ ID NO: 69059 - RNA, 19 nt, Artificial Sequence
  Description of Artificial Sequence: Synthetic oligonucleotide
guucuccuacgugguaggu

SEQ ID NO: 69060 - RNA, 19 nt, Artificial Sequence
  Description of Artificial Sequence: Synthetic oligonucleotide
gggcgcucguaagugucac

SEQ ID NO: 69061 - RNA, 19 nt, Artificial Sequence
  Description of Artificial Sequence: Synthetic oligonucleotide
cucggcagagacacuucuu

SEQ ID NO: 69062 - RNA, 19 nt, Artificial Sequence
  Description of Artificial Sequence: Synthetic oligonucleotide
ccgguggugccgucaggac

SEQ ID NO: 69063 - RNA, 19 nt, Artificial Sequence
  Description of Artificial Sequence: Synthetic oligonucleotide
ggccgguggugccgucagg

SEQ ID NO: 69064 - RNA, 19 nt, Artificial Sequence
  Description of Artificial Sequence: Synthetic oligonucleotide
ccgauuuggaccuccucau

SEQ ID NO: 69065 - RNA, 19 nt, Artificial Sequence
  Description of Artificial Sequence: Synthetic oligonucleotide
acgucuccccugggaacau

SEQ ID NO: 69066 - RNA, 19 nt, Artificial Sequence
  Description of Artificial Sequence: Synthetic oligonucleotide
cucgcccagccccgaugca

SEQ ID NO: 69067 - RNA, 19 nt, Artificial Sequence
  Description of Artificial Sequence: Synthetic oligonucleotide
ccgcagguuggauggugca

SEQ ID NO: 69068 - RNA, 19 nt, Artificial Sequence
  Description of Artificial Sequence: Synthetic oligonucleotide
gguccgccuaaagccaugu

SEQ ID NO: 69069 - RNA, 19 nt, Artificial Sequence
  Description of Artificial Sequence: Synthetic oligonucleotide
cccucgcccagccccgaug

SEQ ID NO: 69070 - RNA, 19 nt, Artificial Sequence
  Description of Artificial Sequence: Synthetic oligonucleotide
gugguccgccuaaagccau

SEQ ID NO: 69071 - RNA, 19 nt, Artificial Sequence
  Description of Artificial Sequence: Synthetic oligonucleotide
gccagcuaauagugauggu

SEQ ID NO: 69072 - RNA, 19 nt, Artificial Sequence
  Description of Artificial Sequence: Synthetic oligonucleotide
cgacuaucgguguuucccu

SEQ ID NO: 69073 - RNA, 19 nt, Artificial Sequence
  Description of Artificial Sequence: Synthetic oligonucleotide
gcacgucuaauggcaugaa

SEQ ID NO: 69074 - RNA, 19 nt, Artificial Sequence
  Description of Artificial Sequence: Synthetic oligonucleotide
gggugucaccugagugaac

SEQ ID NO: 69075 - RNA, 19 nt, Artificial Sequence
  Description of Artificial Sequence: Synthetic oligonucleotide
cgcucguaagugucaccca

SEQ ID NO: 69076 - RNA, 19 nt, Artificial Sequence
  Description of Artificial Sequence: Synthetic oligonucleotide
guccgccuaaagccauguu

SEQ ID NO: 69077 - RNA, 19 nt, Artificial Sequence
  Description of Artificial Sequence: Synthetic oligonucleotide
ccuuggcgaucccacuucu

SEQ ID NO: 69078 - RNA, 19 nt, Artificial Sequence
  Description of Artificial Sequence: Synthetic oligonucleotide
acggggcgccugccaugau

SEQ ID NO: 69079 - RNA, 19 nt, Artificial Sequence
  Description of Artificial Sequence: Synthetic oligonucleotide
cccggaacgugaggguaga

SEQ ID NO: 69080 - RNA, 19 nt, Artificial Sequence
  Description of Artificial Sequence: Synthetic oligonucleotide
gcggggucgagggaccacu

SEQ ID NO: 69081 - RNA, 19 nt, Artificial Sequence
  Description of Artificial Sequence: Synthetic oligonucleotide
cuccuacgugguaggucuu

SEQ ID NO: 69082 - RNA, 19 nt, Artificial Sequence
  Description of Artificial Sequence: Synthetic oligonucleotide
cggugucauacccaggguu

SEQ ID NO: 69083 - RNA, 19 nt, Artificial Sequence
  Description of Artificial Sequence: Synthetic oligonucleotide
gggcaaugacguagauggu

SEQ ID NO: 69084 - RNA, 19 nt, Artificial Sequence
  Description of Artificial Sequence: Synthetic oligonucleotide
cccgcacucgauagccagu

SEQ ID NO: 69085 - RNA, 19 nt, Artificial Sequence
  Description of Artificial Sequence: Synthetic oligonucleotide
ccgucaggacuggguucac

SEQ ID NO: 69086 - RNA, 19 nt, Artificial Sequence
  Description of Artificial Sequence: Synthetic oligonucleotide
cggggcgccugccaugaua

SEQ ID NO: 69087 - RNA, 19 nt, Artificial Sequence
  Description of Artificial Sequence: Synthetic oligonucleotide
ccgcuggccuccgaaacau

SEQ ID NO: 69088 - RNA, 19 nt, Artificial Sequence
  Description of Artificial Sequence: Synthetic oligonucleotide
cccgucgucauagcacguu

SEQ ID NO: 69089 - RNA, 19 nt, Artificial Sequence
  Description of Artificial Sequence: Synthetic oligonucleotide
cgggucacccgcacucgau

SEQ ID NO: 69090 - RNA, 19 nt, Artificial Sequence
  Description of Artificial Sequence: Synthetic oligonucleotide
cggggucgagggaccacuu

SEQ ID NO: 69091 - RNA, 19 nt, Artificial Sequence
  Description of Artificial Sequence: Synthetic oligonucleotide
aauauauauauauauauaa

SEQ ID NO: 69092 - RNA, 19 nt, Artificial Sequence
  Description of Artificial Sequence: Synthetic oligonucleotide
uauauauauaucuauauga

SEQ ID NO: 69093 - RNA, 19 nt, Artificial Sequence
  Description of Artificial Sequence: Synthetic oligonucleotide
aauacuacaguaaaagccc

SEQ ID NO: 69094 - RNA, 19 nt, Artificial Sequence
  Description of Artificial Sequence: Synthetic oligonucleotide
aauucaacuacccuuuuac

SEQ ID NO: 69095 - RNA, 19 nt, Artificial Sequence
  Description of Artificial Sequence: Synthetic oligonucleotide
auauauauaauauauauau

SEQ ID NO: 69096 - RNA, 19 nt, Artificial Sequence
  Description of Artificial Sequence: Synthetic oligonucleotide
uauauauauauauauaaug

SEQ ID NO: 69097 - RNA, 19 nt, Artificial Sequence
  Description of Artificial Sequence: Synthetic oligonucleotide
aagaaugagacuuuaauca

SEQ ID NO: 69098 - RNA, 19 nt, Artificial Sequence
  Description of Artificial Sequence: Synthetic oligonucleotide
uauauauuuauauauauaa

SEQ ID NO: 69099 - RNA, 19 nt, Artificial Sequence
  Description of Artificial Sequence: Synthetic oligonucleotide
auauauauauauauaaugc

SEQ ID NO: 69100 - RNA, 19 nt, Artificial Sequence
  Description of Artificial Sequence: Synthetic oligonucleotide
aaucuaaucauugugacag

SEQ ID NO: 69101 - RNA, 19 nt, Artificial Sequence
  Description of Artificial Sequence: Synthetic oligonucleotide
aauucguuaauauucaaga

SEQ ID NO: 69102 - RNA, 19 nt, Artificial Sequence
  Description of Artificial Sequence: Synthetic oligonucleotide
  modified_base (2)..(2): a, c, u, g, unknown or other
anccugaagaggcugaacc

SEQ ID NO: 69103 - RNA, 19 nt, Artificial Sequence
  Description of Artificial Sequence: Synthetic oligonucleotide
auauauaauauauauauau

SEQ ID NO: 69104 - RNA, 19 nt, Artificial Sequence
  Description of Artificial Sequence: Synthetic oligonucleotide
uauauauauauauaaugcc

SEQ ID NO: 69105 - RNA, 19 nt, Artificial Sequence
  Description of Artificial Sequence: Synthetic oligonucleotide
auaaauauaggucaagucu

SEQ ID NO: 69106 - RNA, 19 nt, Artificial Sequence
  Description of Artificial Sequence: Synthetic oligonucleotide
uuauauauauaauauauau

SEQ ID NO: 69107 - RNA, 19 nt, Artificial Sequence
  Description of Artificial Sequence: Synthetic oligonucleotide
aaacgaggcacuuuguggc

SEQ ID NO: 69108 - RNA, 19 nt, Artificial Sequence
  Description of Artificial Sequence: Synthetic oligonucleotide
aauauauauuuauauauau

SEQ ID NO: 69109 - RNA, 19 nt, Artificial Sequence
  Description of Artificial Sequence: Synthetic oligonucleotide
uacccuuuuacaauuaugg

SEQ ID NO: 69110 - RNA, 19 nt, Artificial Sequence
  Description of Artificial Sequence: Synthetic oligonucleotide
ugauauaucuuauuaauga

SEQ ID NO: 69111 - RNA, 19 nt, Artificial Sequence
  Description of Artificial Sequence: Synthetic oligonucleotide
ucguuaauauucaagauca

SEQ ID NO: 69112 - RNA, 19 nt, Artificial Sequence
  Description of Artificial Sequence: Synthetic oligonucleotide
auaauauauauauauauau

SEQ ID NO: 69113 - RNA, 19 nt, Artificial Sequence
  Description of Artificial Sequence: Synthetic oligonucleotide
aaauucucaauggaaaugg

SEQ ID NO: 69114 - RNA, 19 nt, Artificial Sequence
  Description of Artificial Sequence: Synthetic oligonucleotide
uguguaaauccuaagagcu

SEQ ID NO: 69115 - RNA, 19 nt, Artificial Sequence
  Description of Artificial Sequence: Synthetic oligonucleotide
auauaauauauauauauau

SEQ ID NO: 69116 - RNA, 19 nt, Artificial Sequence
  Description of Artificial Sequence: Synthetic oligonucleotide
aaggcuguuuuacagacuc

SEQ ID NO: 69117 - RNA, 19 nt, Artificial Sequence
  Description of Artificial Sequence: Synthetic oligonucleotide
aacuaacucucccauacac

SEQ ID NO: 69118 - RNA, 19 nt, Artificial Sequence
  Description of Artificial Sequence: Synthetic oligonucleotide
uguccuaaaauuaagcuaa

SEQ ID NO: 69119 - RNA, 19 nt, Artificial Sequence
  Description of Artificial Sequence: Synthetic oligonucleotide
auguguaaauccuaagagc

SEQ ID NO: 69120 - RNA, 19 nt, Artificial Sequence
  Description of Artificial Sequence: Synthetic oligonucleotide
aauuucaauggugagaucu

SEQ ID NO: 69121 - RNA, 19 nt, Artificial Sequence
  Description of Artificial Sequence: Synthetic oligonucleotide
  modified_base (8)..(8): a, c, u, g, unknown or other
agaguuanccugaagaggc

SEQ ID NO: 69122 - RNA, 19 nt, Artificial Sequence
  Description of Artificial Sequence: Synthetic oligonucleotide
auuuuaauuugguugagug

SEQ ID NO: 69123 - RNA, 19 nt, Artificial Sequence
  Description of Artificial Sequence: Synthetic oligonucleotide
auaaauccuuguuaaacac

SEQ ID NO: 69124 - RNA, 19 nt, Artificial Sequence
  Description of Artificial Sequence: Synthetic oligonucleotide
aucguuaugaacauauugc

SEQ ID NO: 69125 - RNA, 19 nt, Artificial Sequence
  Description of Artificial Sequence: Synthetic oligonucleotide
uacagaaugcauuucaggc

SEQ ID NO: 69126 - RNA, 19 nt, Artificial Sequence
  Description of Artificial Sequence: Synthetic oligonucleotide
uauaauauauauauauaua

SEQ ID NO: 69127 - RNA, 19 nt, Artificial Sequence
  Description of Artificial Sequence: Synthetic oligonucleotide
uauuuggauaaauauaggu

SEQ ID NO: 69128 - RNA, 19 nt, Artificial Sequence
  Description of Artificial Sequence: Synthetic oligonucleotide
agagauuaccuacagaaug

SEQ ID NO: 69129 - RNA, 19 nt, Artificial Sequence
  Description of Artificial Sequence: Synthetic oligonucleotide
uuacuggacauuucaaugg

SEQ ID NO: 69130 - RNA, 19 nt, Artificial Sequence
  Description of Artificial Sequence: Synthetic oligonucleotide
augacuacaccauaaaaug

SEQ ID NO: 69131 - RNA, 19 nt, Artificial Sequence
  Description of Artificial Sequence: Synthetic oligonucleotide
aagcauuccagaaacacgg

SEQ ID NO: 69132 - RNA, 19 nt, Artificial Sequence
  Description of Artificial Sequence: Synthetic oligonucleotide
aaaggugaugccuucaagu

SEQ ID NO: 69133 - RNA, 19 nt, Artificial Sequence
  Description of Artificial Sequence: Synthetic oligonucleotide
uaaacgaggcacuuugugg

SEQ ID NO: 69134 - RNA, 19 nt, Artificial Sequence
  Description of Artificial Sequence: Synthetic oligonucleotide
uauauauauauaaugccua

SEQ ID NO: 69135 - RNA, 19 nt, Artificial Sequence
  Description of Artificial Sequence: Synthetic oligonucleotide
auuuauauauauaauauau

SEQ ID NO: 69136 - RNA, 19 nt, Artificial Sequence
  Description of Artificial Sequence: Synthetic oligonucleotide
caauuugaauuauaaauac

SEQ ID NO: 69137 - RNA, 19 nt, Artificial Sequence
  Description of Artificial Sequence: Synthetic oligonucleotide
uauauaauauauauauaua

SEQ ID NO: 69138 - RNA, 19 nt, Artificial Sequence
  Description of Artificial Sequence: Synthetic oligonucleotide
uauauauauaauauauaua

SEQ ID NO: 69139 - RNA, 19 nt, Artificial Sequence
  Description of Artificial Sequence: Synthetic oligonucleotide
uucguuaauauucaagauc

SEQ ID NO: 69140 - RNA, 19 nt, Artificial Sequence
  Description of Artificial Sequence: Synthetic oligonucleotide
cuacuuaccaucaaacuac

SEQ ID NO: 69141 - RNA, 19 nt, Artificial Sequence
  Description of Artificial Sequence: Synthetic oligonucleotide
augcaugacacauuaacag

SEQ ID NO: 69142 - RNA, 19 nt, Artificial Sequence
  Description of Artificial Sequence: Synthetic oligonucleotide
gauugcugcaacaugauug

SEQ ID NO: 69143 - RNA, 19 nt, Artificial Sequence
  Description of Artificial Sequence: Synthetic oligonucleotide
uuuauauauauaauauaua

SEQ ID NO: 69144 - RNA, 19 nt, Artificial Sequence
  Description of Artificial Sequence: Synthetic oligonucleotide
uaauauauauauauauaua

SEQ ID NO: 69145 - RNA, 19 nt, Artificial Sequence
  Description of Artificial Sequence: Synthetic oligonucleotide
ucuacuuaccaucaaacua

SEQ ID NO: 69146 - RNA, 19 nt, Artificial Sequence
  Description of Artificial Sequence: Synthetic oligonucleotide
  modified_base (9)..(9): a, c, u, g, unknown or other
aagaguuanccugaagagg

SEQ ID NO: 69147 - RNA, 19 nt, Artificial Sequence
  Description of Artificial Sequence: Synthetic oligonucleotide
ugaggcauuauccuguaca

SEQ ID NO: 69148 - RNA, 19 nt, Artificial Sequence
  Description of Artificial Sequence: Synthetic oligonucleotide
ucaauauucauguaucaau

SEQ ID NO: 69149 - RNA, 19 nt, Artificial Sequence
  Description of Artificial Sequence: Synthetic oligonucleotide
uaauauauauuuauauaua

SEQ ID NO: 69150 - RNA, 19 nt, Artificial Sequence
  Description of Artificial Sequence: Synthetic oligonucleotide
aaauaaaguaaggagagua

SEQ ID NO: 69151 - RNA, 19 nt, Artificial Sequence
  Description of Artificial Sequence: Synthetic oligonucleotide
aaugacuacaccauaaaau

SEQ ID NO: 69152 - RNA, 19 nt, Artificial Sequence
  Description of Artificial Sequence: Synthetic oligonucleotide
aguauauauauaucuauau

SEQ ID NO: 69153 - RNA, 19 nt, Artificial Sequence
  Description of Artificial Sequence: Synthetic oligonucleotide
aacacuaagauaaaggguu

SEQ ID NO: 69154 - RNA, 19 nt, Artificial Sequence
  Description of Artificial Sequence: Synthetic oligonucleotide
ucucauuuuagucaaccac

SEQ ID NO: 69155 - RNA, 19 nt, Artificial Sequence
  Description of Artificial Sequence: Synthetic oligonucleotide
guauauauauaucuauaug

SEQ ID NO: 69156 - RNA, 19 nt, Artificial Sequence
  Description of Artificial Sequence: Synthetic oligonucleotide
aaauucguuaauauucaag

SEQ ID NO: 69157 - RNA, 19 nt, Artificial Sequence
  Description of Artificial Sequence: Synthetic oligonucleotide
agucgaucaauauucaugu

SEQ ID NO: 69158 - RNA, 19 nt, Artificial Sequence
  Description of Artificial Sequence: Synthetic oligonucleotide
uccaacuuugguuuaaugu

SEQ ID NO: 69159 - RNA, 19 nt, Artificial Sequence
  Description of Artificial Sequence: Synthetic oligonucleotide
uauuuauauauauaauaua

SEQ ID NO: 69160 - RNA, 19 nt, Artificial Sequence
  Description of Artificial Sequence: Synthetic oligonucleotide
uggaguuuauaacacuaag

SEQ ID NO: 69161 - RNA, 19 nt, Artificial Sequence
  Description of Artificial Sequence: Synthetic oligonucleotide
auuguauaucuuguaaugg

SEQ ID NO: 69162 - RNA, 19 nt, Artificial Sequence
  Description of Artificial Sequence: Synthetic oligonucleotide
aaaaggauacugugcaacu

SEQ ID NO: 69163 - RNA, 19 nt, Artificial Sequence
  Description of Artificial Sequence: Synthetic oligonucleotide
auauauauauauaaugccu

SEQ ID NO: 69164 - RNA, 19 nt, Artificial Sequence
  Description of Artificial Sequence: Synthetic oligonucleotide
agaauuacagaggacuugg

SEQ ID NO: 69165 - RNA, 19 nt, Artificial Sequence
  Description of Artificial Sequence: Synthetic oligonucleotide
ucuauaugaaacagauuga

SEQ ID NO: 69166 - RNA, 19 nt, Artificial Sequence
  Description of Artificial Sequence: Synthetic oligonucleotide
aaaucuaaucauugugaca

SEQ ID NO: 69167 - RNA, 19 nt, Artificial Sequence
  Description of Artificial Sequence: Synthetic oligonucleotide
aauucuauggggaugguaa

SEQ ID NO: 69168 - RNA, 19 nt, Artificial Sequence
  Description of Artificial Sequence: Synthetic oligonucleotide
aaacacgggagagauuacc

SEQ ID NO: 69169 - RNA, 19 nt, Artificial Sequence
  Description of Artificial Sequence: Synthetic oligonucleotide
caacagucgaucaauauuc

SEQ ID NO: 69170 - RNA, 19 nt, Artificial Sequence
  Description of Artificial Sequence: Synthetic oligonucleotide
uauucauguaucaauguuu

SEQ ID NO: 69171 - RNA, 19 nt, Artificial Sequence
  Description of Artificial Sequence: Synthetic oligonucleotide
ucgaucaauauucauguau

SEQ ID NO: 69172 - RNA, 19 nt, Artificial Sequence
  Description of Artificial Sequence: Synthetic oligonucleotide
uuuauaaccugugccacag

SEQ ID NO: 69173 - RNA, 19 nt, Artificial Sequence
  Description of Artificial Sequence: Synthetic oligonucleotide
uauauauaauauauauaua

SEQ ID NO: 69174 - RNA, 19 nt, Artificial Sequence
  Description of Artificial Sequence: Synthetic oligonucleotide
auagcacaaaucauuacac

SEQ ID NO: 69175 - RNA, 19 nt, Artificial Sequence
  Description of Artificial Sequence: Synthetic oligonucleotide
gaggcuacugacaaauucg

SEQ ID NO: 69176 - RNA, 19 nt, Artificial Sequence
  Description of Artificial Sequence: Synthetic oligonucleotide
ucugacugggaauaguuac

SEQ ID NO: 69177 - RNA, 19 nt, Artificial Sequence
  Description of Artificial Sequence: Synthetic oligonucleotide
uuaaauucucaauggaaau

SEQ ID NO: 69178 - RNA, 19 nt, Artificial Sequence
  Description of Artificial Sequence: Synthetic oligonucleotide
uuuaaagguaaacgaggca

SEQ ID NO: 69179 - RNA, 19 nt, Artificial Sequence
  Description of Artificial Sequence: Synthetic oligonucleotide
ucguuaugaacauauugca

SEQ ID NO: 69180 - RNA, 19 nt, Artificial Sequence
  Description of Artificial Sequence: Synthetic oligonucleotide
ucuagucuuauguccauug

SEQ ID NO: 69181 - RNA, 19 nt, Artificial Sequence
  Description of Artificial Sequence: Synthetic oligonucleotide
uaggucaagucuaagucga

SEQ ID NO: 69182 - RNA, 19 nt, Artificial Sequence
  Description of Artificial Sequence: Synthetic oligonucleotide
acuuuaucaacagucgauc

SEQ ID NO: 69183 - RNA, 19 nt, Artificial Sequence
  Description of Artificial Sequence: Synthetic oligonucleotide
uuucuauucuagcacuuac

SEQ ID NO: 69184 - RNA, 19 nt, Artificial Sequence
  Description of Artificial Sequence: Synthetic oligonucleotide
aaauccuaagagcuuaguu

SEQ ID NO: 69185 - RNA, 19 nt, Artificial Sequence
  Description of Artificial Sequence: Synthetic oligonucleotide
agguuagcuggacuuaugg

SEQ ID NO: 69186 - RNA, 19 nt, Artificial Sequence
  Description of Artificial Sequence: Synthetic oligonucleotide
ucaacagucgaucaauauu

SEQ ID NO: 69187 - RNA, 19 nt, Artificial Sequence
  Description of Artificial Sequence: Synthetic oligonucleotide
auuaacagugcaacagccc

SEQ ID NO: 69188 - RNA, 19 nt, Artificial Sequence
  Description of Artificial Sequence: Synthetic oligonucleotide
ggaaacucaaaguacauga

SEQ ID NO: 69189 - RNA, 19 nt, Artificial Sequence
  Description of Artificial Sequence: Synthetic oligonucleotide
gagaucuuaggaaaaguug

SEQ ID NO: 69190 - RNA, 19 nt, Artificial Sequence
  Description of Artificial Sequence: Synthetic oligonucleotide
uugguagccaaacggaacu

SEQ ID NO: 69191 - RNA, 19 nt, Artificial Sequence
  Description of Artificial Sequence: Synthetic oligonucleotide
aacuaaacauguaacuugu

SEQ ID NO: 69192 - RNA, 19 nt, Artificial Sequence
  Description of Artificial Sequence: Synthetic oligonucleotide
aaauuuggcggugucauaa

SEQ ID NO: 69193 - RNA, 19 nt, Artificial Sequence
  Description of Artificial Sequence: Synthetic oligonucleotide
aauuaagcuaagaagcuuu

SEQ ID NO: 69194 - RNA, 19 nt, Artificial Sequence
  Description of Artificial Sequence: Synthetic oligonucleotide
cagucgaucaauauucaug

SEQ ID NO: 69195 - RNA, 19 nt, Artificial Sequence
  Description of Artificial Sequence: Synthetic oligonucleotide
ugcaguuaaauuuggcggu

SEQ ID NO: 69196 - RNA, 19 nt, Artificial Sequence
  Description of Artificial Sequence: Synthetic oligonucleotide
uuuggcggugucauaaugu

SEQ ID NO: 69197 - RNA, 19 nt, Artificial Sequence
  Description of Artificial Sequence: Synthetic oligonucleotide
uuuuaguaugauguucugc

SEQ ID NO: 69198 - RNA, 19 nt, Artificial Sequence
  Description of Artificial Sequence: Synthetic oligonucleotide
uaauuuuaguaugauguuc

SEQ ID NO: 69199 - RNA, 19 nt, Artificial Sequence
  Description of Artificial Sequence: Synthetic oligonucleotide
aaccaagucagcucaaauu

SEQ ID NO: 69200 - RNA, 19 nt, Artificial Sequence
  Description of Artificial Sequence: Synthetic oligonucleotide
guaacaaauggacaucuga

SEQ ID NO: 69201 - RNA, 19 nt, Artificial Sequence
  Description of Artificial Sequence: Synthetic oligonucleotide
ugacuacaccauaaaaugu

SEQ ID NO: 69202 - RNA, 19 nt, Artificial Sequence
  Description of Artificial Sequence: Synthetic oligonucleotide
aaggugguauacaaauuuc

SEQ ID NO: 69203 - RNA, 19 nt, Artificial Sequence
  Description of Artificial Sequence: Synthetic oligonucleotide
ucacuuuaucaacagucga

SEQ ID NO: 69204 - RNA, 19 nt, Artificial Sequence
  Description of Artificial Sequence: Synthetic oligonucleotide
uaaucaguuuuaaguggag

SEQ ID NO: 69205 - RNA, 19 nt, Artificial Sequence
  Description of Artificial Sequence: Synthetic oligonucleotide
agaucccacacaauaagac

SEQ ID NO: 69206 - RNA, 19 nt, Artificial Sequence
  Description of Artificial Sequence: Synthetic oligonucleotide
aaguagguuagcuggacuu

SEQ ID NO: 69207 - RNA, 19 nt, Artificial Sequence
  Description of Artificial Sequence: Synthetic oligonucleotide
accaagucagcucaaauua

SEQ ID NO: 69208 - RNA, 19 nt, Artificial Sequence
  Description of Artificial Sequence: Synthetic oligonucleotide
uagucuuauguccauuggu

SEQ ID NO: 69209 - RNA, 19 nt, Artificial Sequence
  Description of Artificial Sequence: Synthetic oligonucleotide
agaaacacgggagagauua

SEQ ID NO: 69210 - RNA, 19 nt, Artificial Sequence
  Description of Artificial Sequence: Synthetic oligonucleotide
aaaauuugccccgaugcaa

SEQ ID NO: 69211 - RNA, 19 nt, Artificial Sequence
  Description of Artificial Sequence: Synthetic oligonucleotide
auucuauggggaugguaac

SEQ ID NO: 69212 - RNA, 19 nt, Artificial Sequence
  Description of Artificial Sequence: Synthetic oligonucleotide
uaagucgaauccauccucu

SEQ ID NO: 69213 - RNA, 19 nt, Artificial Sequence
  Description of Artificial Sequence: Synthetic oligonucleotide
cacacaauaagacauaagu

SEQ ID NO: 69214 - RNA, 19 nt, Artificial Sequence
  Description of Artificial Sequence: Synthetic oligonucleotide
uguccauguccuaaaauua

SEQ ID NO: 69215 - RNA, 19 nt, Artificial Sequence
  Description of Artificial Sequence: Synthetic oligonucleotide
auauauauauauauauaau

SEQ ID NO: 69216 - RNA, 19 nt, Artificial Sequence
  Description of Artificial Sequence: Synthetic oligonucleotide
uguaacuuguaaccuacuu

SEQ ID NO: 69217 - RNA, 19 nt, Artificial Sequence
  Description of Artificial Sequence: Synthetic oligonucleotide
cuuguggaacaacagcgcc

SEQ ID NO: 69218 - RNA, 19 nt, Artificial Sequence
  Description of Artificial Sequence: Synthetic oligonucleotide
cuccacuuaaguuuauaac

SEQ ID NO: 69219 - RNA, 19 nt, Artificial Sequence
  Description of Artificial Sequence: Synthetic oligonucleotide
aucuacuuaccaucaaacu

SEQ ID NO: 69220 - RNA, 19 nt, Artificial Sequence
  Description of Artificial Sequence: Synthetic oligonucleotide
uuaucacuuuaucaacagu

SEQ ID NO: 69221 - RNA, 19 nt, Artificial Sequence
  Description of Artificial Sequence: Synthetic oligonucleotide
guuaauauucaagaucauc

SEQ ID NO: 69222 - RNA, 19 nt, Artificial Sequence
  Description of Artificial Sequence: Synthetic oligonucleotide
ggugaugcuauuuaauuca

SEQ ID NO: 69223 - RNA, 19 nt, Artificial Sequence
  Description of Artificial Sequence: Synthetic oligonucleotide
aaccuuacuacaucaucaa

SEQ ID NO: 69224 - RNA, 19 nt, Artificial Sequence
  Description of Artificial Sequence: Synthetic oligonucleotide
uugucuucccgucgugugg

SEQ ID NO: 69225 - RNA, 19 nt, Artificial Sequence
  Description of Artificial Sequence: Synthetic oligonucleotide
guaaacgaggcacuuugug

SEQ ID NO: 69226 - RNA, 19 nt, Artificial Sequence
  Description of Artificial Sequence: Synthetic oligonucleotide
gucagcucaaauuacagua

SEQ ID NO: 69227 - RNA, 19 nt, Artificial Sequence
  Description of Artificial Sequence: Synthetic oligonucleotide
aguugucucuaacuuuauc

SEQ ID NO: 69228 - RNA, 19 nt, Artificial Sequence
  Description of Artificial Sequence: Synthetic oligonucleotide
uggugaugcuauuuaauuc

SEQ ID NO: 69229 - RNA, 19 nt, Artificial Sequence
  Description of Artificial Sequence: Synthetic oligonucleotide
gaucccacacaauaagaca

SEQ ID NO: 69230 - RNA, 19 nt, Artificial Sequence
  Description of Artificial Sequence: Synthetic oligonucleotide
agaaacuccgguuuucaaa

SEQ ID NO: 69231 - RNA, 19 nt, Artificial Sequence
  Description of Artificial Sequence: Synthetic oligonucleotide
ucugccuaaucuacuuacc

SEQ ID NO: 69232 - RNA, 19 nt, Artificial Sequence
  Description of Artificial Sequence: Synthetic oligonucleotide
auacugugcaacucugcag

SEQ ID NO: 69233 - RNA, 19 nt, Artificial Sequence
  Description of Artificial Sequence: Synthetic oligonucleotide
ugucucuaacuuuaucacu

SEQ ID NO: 69234 - RNA, 19 nt, Artificial Sequence
  Description of Artificial Sequence: Synthetic oligonucleotide
auugguagccaaacggaac

SEQ ID NO: 69235 - RNA, 19 nt, Artificial Sequence
  Description of Artificial Sequence: Synthetic oligonucleotide
gaggcauuauccuguacac

SEQ ID NO: 69236 - RNA, 19 nt, Artificial Sequence
  Description of Artificial Sequence: Synthetic oligonucleotide
aaauuaagcuaagaagcuu

SEQ ID NO: 69237 - RNA, 19 nt, Artificial Sequence
  Description of Artificial Sequence: Synthetic oligonucleotide
uacuuaccaucaaacuacc

SEQ ID NO: 69238 - RNA, 19 nt, Artificial Sequence
  Description of Artificial Sequence: Synthetic oligonucleotide
auacuacaguaaaagcccc

SEQ ID NO: 69239 - RNA, 19 nt, Artificial Sequence
  Description of Artificial Sequence: Synthetic oligonucleotide
cauucacugaaccaaguca

SEQ ID NO: 69240 - RNA, 19 nt, Artificial Sequence
  Description of Artificial Sequence: Synthetic oligonucleotide
agucauauuuggcugccca

SEQ ID NO: 69241 - RNA, 19 nt, Artificial Sequence
  Description of Artificial Sequence: Synthetic oligonucleotide
gguagcuauaguaauacac

SEQ ID NO: 69242 - RNA, 19 nt, Artificial Sequence
  Description of Artificial Sequence: Synthetic oligonucleotide
aauuggaggaauauaucuu

SEQ ID NO: 69243 - RNA, 19 nt, Artificial Sequence
  Description of Artificial Sequence: Synthetic oligonucleotide
auauauuuauauauauaau

SEQ ID NO: 69244 - RNA, 19 nt, Artificial Sequence
  Description of Artificial Sequence: Synthetic oligonucleotide
uuaguaugauguucugccu

SEQ ID NO: 69245 - RNA, 19 nt, Artificial Sequence
  Description of Artificial Sequence: Synthetic oligonucleotide
aacacgccuugcucuaguc

SEQ ID NO: 69246 - RNA, 19 nt, Artificial Sequence
  Description of Artificial Sequence: Synthetic oligonucleotide
aguaauacacauagcgucu

SEQ ID NO: 69247 - RNA, 19 nt, Artificial Sequence
  Description of Artificial Sequence: Synthetic oligonucleotide
cucuagucuacauaaaucu

SEQ ID NO: 69248 - RNA, 19 nt, Artificial Sequence
  Description of Artificial Sequence: Synthetic oligonucleotide
auacacauagcgucucuga

SEQ ID NO: 69249 - RNA, 19 nt, Artificial Sequence
  Description of Artificial Sequence: Synthetic oligonucleotide
ugcaacagcccauuguaau

SEQ ID NO: 69250 - RNA, 19 nt, Artificial Sequence
  Description of Artificial Sequence: Synthetic oligonucleotide
uagaaguagguuagcugga

SEQ ID NO: 69251 - RNA, 19 nt, Artificial Sequence
  Description of Artificial Sequence: Synthetic oligonucleotide
gucgaauccauccucuuga

SEQ ID NO: 69252 - RNA, 19 nt, Artificial Sequence
  Description of Artificial Sequence: Synthetic oligonucleotide
gcacuuacaaaacuaacuc

SEQ ID NO: 69253 - RNA, 19 nt, Artificial Sequence
  Description of Artificial Sequence: Synthetic oligonucleotide
uuacagacucaauuguuuu

SEQ ID NO: 69254 - RNA, 19 nt, Artificial Sequence
  Description of Artificial Sequence: Synthetic oligonucleotide
agagcuuaguuacaauuuu

SEQ ID NO: 69255 - RNA, 19 nt, Artificial Sequence
  Description of Artificial Sequence: Synthetic oligonucleotide
uccuauuuccaaugacuac

SEQ ID NO: 69256 - RNA, 19 nt, Artificial Sequence
  Description of Artificial Sequence: Synthetic oligonucleotide
acguaaguaucuuaagaua

SEQ ID NO: 69257 - RNA, 19 nt, Artificial Sequence
  Description of Artificial Sequence: Synthetic oligonucleotide
cuaagucgaauccauccuc

SEQ ID NO: 69258 - RNA, 19 nt, Artificial Sequence
  Description of Artificial Sequence: Synthetic oligonucleotide
auauauauuuauauauaua

SEQ ID NO: 69259 - RNA, 19 nt, Artificial Sequence
  Description of Artificial Sequence: Synthetic oligonucleotide
aggaauauaucuucaccuu

SEQ ID NO: 69260 - RNA, 19 nt, Artificial Sequence
  Description of Artificial Sequence: Synthetic oligonucleotide
auuaccuacagaaugcauu

SEQ ID NO: 69261 - RNA, 19 nt, Artificial Sequence
  Description of Artificial Sequence: Synthetic oligonucleotide
gcuaagaagcuuuggagac

SEQ ID NO: 69262 - RNA, 19 nt, Artificial Sequence
  Description of Artificial Sequence: Synthetic oligonucleotide
cacgggagagauuaccuac

SEQ ID NO: 69263 - RNA, 19 nt, Artificial Sequence
  Description of Artificial Sequence: Synthetic oligonucleotide
cugcauguuacacugguga

SEQ ID NO: 69264 - RNA, 19 nt, Artificial Sequence
  Description of Artificial Sequence: Synthetic oligonucleotide
uucaggcuaaucgugaaua

SEQ ID NO: 69265 - RNA, 19 nt, Artificial Sequence
  Description of Artificial Sequence: Synthetic oligonucleotide
auuuggcggugucauaaug

SEQ ID NO: 69266 - RNA, 19 nt, Artificial Sequence
  Description of Artificial Sequence: Synthetic oligonucleotide
guaaggagaguauguauaa

SEQ ID NO: 69267 - RNA, 19 nt, Artificial Sequence
  Description of Artificial Sequence: Synthetic oligonucleotide
aucugauuggcaugaggca

SEQ ID NO: 69268 - RNA, 19 nt, Artificial Sequence
  Description of Artificial Sequence: Synthetic oligonucleotide
cucauuuuagucaaccacu

SEQ ID NO: 69269 - RNA, 19 nt, Artificial Sequence
  Description of Artificial Sequence: Synthetic oligonucleotide
agaaaucuagggccucuug

SEQ ID NO: 69270 - RNA, 19 nt, Artificial Sequence
  Description of Artificial Sequence: Synthetic oligonucleotide
gaauuacagaggacuuggg

SEQ ID NO: 69271 - RNA, 19 nt, Artificial Sequence
  Description of Artificial Sequence: Synthetic oligonucleotide
acauguaacuuguaaccua

SEQ ID NO: 69272 - RNA, 19 nt, Artificial Sequence
  Description of Artificial Sequence: Synthetic oligonucleotide
guaaguaucuuaagauaac

SEQ ID NO: 69273 - RNA, 19 nt, Artificial Sequence
  Description of Artificial Sequence: Synthetic oligonucleotide
aaauuugccccgaugcaau

SEQ ID NO: 69274 - RNA, 19 nt, Artificial Sequence
  Description of Artificial Sequence: Synthetic oligonucleotide
  modified_base (6)..(6): a, c, u, g, unknown or other
aguuanccugaagaggcug

SEQ ID NO: 69275 - RNA, 19 nt, Artificial Sequence
  Description of Artificial Sequence: Synthetic oligonucleotide
ugccuaaucuacuuaccau

SEQ ID NO: 69276 - RNA, 19 nt, Artificial Sequence
  Description of Artificial Sequence: Synthetic oligonucleotide
cacuaucuccaaaacacca

SEQ ID NO: 69277 - RNA, 19 nt, Artificial Sequence
  Description of Artificial Sequence: Synthetic oligonucleotide
uuugccccgaugcaauaaa

SEQ ID NO: 69278 - RNA, 19 nt, Artificial Sequence
  Description of Artificial Sequence: Synthetic oligonucleotide
ucucccauauacguaagua

SEQ ID NO: 69279 - RNA, 19 nt, Artificial Sequence
  Description of Artificial Sequence: Synthetic oligonucleotide
gacugggaauaguuacucc

SEQ ID NO: 69280 - RNA, 19 nt, Artificial Sequence
  Description of Artificial Sequence: Synthetic oligonucleotide
uuguguauccucagugcau

SEQ ID NO: 69281 - RNA, 19 nt, Artificial Sequence
  Description of Artificial Sequence: Synthetic oligonucleotide
aagucuaagucgaauccau

SEQ ID NO: 69282 - RNA, 19 nt, Artificial Sequence
  Description of Artificial Sequence: Synthetic oligonucleotide
aaacacgccuugcucuagu

SEQ ID NO: 69283 - RNA, 19 nt, Artificial Sequence
  Description of Artificial Sequence: Synthetic oligonucleotide
agaggacuugggaugguac

SEQ ID NO: 69284 - RNA, 19 nt, Artificial Sequence
  Description of Artificial Sequence: Synthetic oligonucleotide
uacccaaaagugaaacauu

SEQ ID NO: 69285 - RNA, 19 nt, Artificial Sequence
  Description of Artificial Sequence: Synthetic oligonucleotide
gaacucuacuuugauguca

SEQ ID NO: 69286 - RNA, 19 nt, Artificial Sequence
  Description of Artificial Sequence: Synthetic oligonucleotide
aaccuuucagucauagcaa

SEQ ID NO: 69287 - RNA, 19 nt, Artificial Sequence
  Description of Artificial Sequence: Synthetic oligonucleotide
gguccuuacuuccccauag

SEQ ID NO: 69288 - RNA, 19 nt, Artificial Sequence
  Description of Artificial Sequence: Synthetic oligonucleotide
auucaugaccugguuagca

SEQ ID NO: 69289 - RNA, 19 nt, Artificial Sequence
  Description of Artificial Sequence: Synthetic oligonucleotide
gcuacugacaaauucguua

SEQ ID NO: 69290 - RNA, 19 nt, Artificial Sequence
  Description of Artificial Sequence: Synthetic oligonucleotide
aaguuuuaauuaggacuca

SEQ ID NO: 69291 - RNA, 19 nt, Artificial Sequence
  Description of Artificial Sequence: Synthetic oligonucleotide
cauuauccuguacacguca

SEQ ID NO: 69292 - RNA, 19 nt, Artificial Sequence
  Description of Artificial Sequence: Synthetic oligonucleotide
uucuagaacuaaacaugua

SEQ ID NO: 69293 - RNA, 19 nt, Artificial Sequence
  Description of Artificial Sequence: Synthetic oligonucleotide
ugacugggaauaguuacuc

SEQ ID NO: 69294 - RNA, 19 nt, Artificial Sequence
  Description of Artificial Sequence: Synthetic oligonucleotide
cuccgguuuucaaacauca

SEQ ID NO: 69295 - RNA, 19 nt, Artificial Sequence
  Description of Artificial Sequence: Synthetic oligonucleotide
ugcauguuacacuggugau

SEQ ID NO: 69296 - RNA, 19 nt, Artificial Sequence
  Description of Artificial Sequence: Synthetic oligonucleotide
gaggacuugggaugguaca

SEQ ID NO: 69297 - RNA, 19 nt, Artificial Sequence
  Description of Artificial Sequence: Synthetic oligonucleotide
uuauaaccugugccacagc

SEQ ID NO: 69298 - RNA, 19 nt, Artificial Sequence
  Description of Artificial Sequence: Synthetic oligonucleotide
aaauucuauggggauggua

SEQ ID NO: 69299 - RNA, 19 nt, Artificial Sequence
  Description of Artificial Sequence: Synthetic oligonucleotide
uccuaagagcuuaguuaca

SEQ ID NO: 69300 - RNA, 19 nt, Artificial Sequence
  Description of Artificial Sequence: Synthetic oligonucleotide
aaccacagccaucguuaug

SEQ ID NO: 69301 - RNA, 19 nt, Artificial Sequence
  Description of Artificial Sequence: Synthetic oligonucleotide
agauuaccuacagaaugca

SEQ ID NO: 69302 - RNA, 19 nt, Artificial Sequence
  Description of Artificial Sequence: Synthetic oligonucleotide
aacccauuagaaguagguu

SEQ ID NO: 69303 - RNA, 19 nt, Artificial Sequence
  Description of Artificial Sequence: Synthetic oligonucleotide
agucuuauguccauuggua

SEQ ID NO: 69304 - RNA, 19 nt, Artificial Sequence
  Description of Artificial Sequence: Synthetic oligonucleotide
uauucaugaccugguuagc

SEQ ID NO: 69305 - RNA, 19 nt, Artificial Sequence
  Description of Artificial Sequence: Synthetic oligonucleotide
aacccucauucagaccuuc

SEQ ID NO: 69306 - RNA, 19 nt, Artificial Sequence
  Description of Artificial Sequence: Synthetic oligonucleotide
ggcauuauccuguacacgu

SEQ ID NO: 69307 - RNA, 19 nt, Artificial Sequence
  Description of Artificial Sequence: Synthetic oligonucleotide
accuuucagucauagcaau

SEQ ID NO: 69308 - RNA, 19 nt, Artificial Sequence
  Description of Artificial Sequence: Synthetic oligonucleotide
gccuaaucuacuuaccauc

SEQ ID NO: 69309 - RNA, 19 nt, Artificial Sequence
  Description of Artificial Sequence: Synthetic oligonucleotide
aggcauuauccuguacacg

SEQ ID NO: 69310 - RNA, 19 nt, Artificial Sequence
  Description of Artificial Sequence: Synthetic oligonucleotide
uccgguuuucaaacaucac

SEQ ID NO: 69311 - RNA, 19 nt, Artificial Sequence
  Description of Artificial Sequence: Synthetic oligonucleotide
auagaaaucuagggccucu

SEQ ID NO: 69312 - RNA, 19 nt, Artificial Sequence
  Description of Artificial Sequence: Synthetic oligonucleotide
acagucgaucaauauucau

SEQ ID NO: 69313 - RNA, 19 nt, Artificial Sequence
  Description of Artificial Sequence: Synthetic oligonucleotide
ugguuagcaugcugugccc

SEQ ID NO: 69314 - RNA, 19 nt, Artificial Sequence
  Description of Artificial Sequence: Synthetic oligonucleotide
aauuugccccgaugcaaua

SEQ ID NO: 69315 - RNA, 19 nt, Artificial Sequence
  Description of Artificial Sequence: Synthetic oligonucleotide
  modified_base (4)..(4): a, c, u, g, unknown or other
uuanccugaagaggcugaa

SEQ ID NO: 69316 - RNA, 19 nt, Artificial Sequence
  Description of Artificial Sequence: Synthetic oligonucleotide
ugccccgaugcaauaaaua

SEQ ID NO: 69317 - RNA, 19 nt, Artificial Sequence
  Description of Artificial Sequence: Synthetic oligonucleotide
agucuaagucgaauccauc

SEQ ID NO: 69318 - RNA, 19 nt, Artificial Sequence
  Description of Artificial Sequence: Synthetic oligonucleotide
cugccuaaucuacuuacca

SEQ ID NO: 69319 - RNA, 19 nt, Artificial Sequence
  Description of Artificial Sequence: Synthetic oligonucleotide
acacuaagauaaaggguug

SEQ ID NO: 69320 - RNA, 19 nt, Artificial Sequence
  Description of Artificial Sequence: Synthetic oligonucleotide
acuccgguuuucaaacauc

SEQ ID NO: 69321 - RNA, 19 nt, Artificial Sequence
  Description of Artificial Sequence: Synthetic oligonucleotide
uaaggagaguauguauaau

SEQ ID NO: 69322 - RNA, 19 nt, Artificial Sequence
  Description of Artificial Sequence: Synthetic oligonucleotide
guguccauguccuaaaauu

SEQ ID NO: 69323 - RNA, 19 nt, Artificial Sequence
  Description of Artificial Sequence: Synthetic oligonucleotide
acuaagauaaaggguuguu

SEQ ID NO: 69324 - RNA, 19 nt, Artificial Sequence
  Description of Artificial Sequence: Synthetic oligonucleotide
cauugguagccaaacggaa

SEQ ID NO: 69325 - RNA, 19 nt, Artificial Sequence
  Description of Artificial Sequence: Synthetic oligonucleotide
cucaacccauuagaaguag

SEQ ID NO: 69326 - RNA, 19 nt, Artificial Sequence
  Description of Artificial Sequence: Synthetic oligonucleotide
agggcuugauaaguucuag

SEQ ID NO: 69327 - RNA, 19 nt, Artificial Sequence
  Description of Artificial Sequence: Synthetic oligonucleotide
acuuaugggucuugauuuu

SEQ ID NO: 69328 - RNA, 19 nt, Artificial Sequence
  Description of Artificial Sequence: Synthetic oligonucleotide
ucgugaauacugucauaaa

SEQ ID NO: 69329 - RNA, 19 nt, Artificial Sequence
  Description of Artificial Sequence: Synthetic oligonucleotide
  modified_base (5)..(5): a, c, u, g, unknown or other
guuanccugaagaggcuga

SEQ ID NO: 69330 - RNA, 19 nt, Artificial Sequence
  Description of Artificial Sequence: Synthetic oligonucleotide
agccaaacggaacuucaua

SEQ ID NO: 69331 - RNA, 19 nt, Artificial Sequence
  Description of Artificial Sequence: Synthetic oligonucleotide
guaauacacauagcgucuc

SEQ ID NO: 69332 - RNA, 19 nt, Artificial Sequence
  Description of Artificial Sequence: Synthetic oligonucleotide
aguuccgccacugaacauu

SEQ ID NO: 69333 - RNA, 19 nt, Artificial Sequence
  Description of Artificial Sequence: Synthetic oligonucleotide
uaaauuuggcggugucaua

SEQ ID NO: 69334 - RNA, 19 nt, Artificial Sequence
  Description of Artificial Sequence: Synthetic oligonucleotide
cguaaguaucuuaagauaa

SEQ ID NO: 69335 - RNA, 19 nt, Artificial Sequence
  Description of Artificial Sequence: Synthetic oligonucleotide
accuuacuacaucaucaau

SEQ ID NO: 69336 - RNA, 19 nt, Artificial Sequence
  Description of Artificial Sequence: Synthetic oligonucleotide
acacgccuugcucuagucu

SEQ ID NO: 69337 - RNA, 19 nt, Artificial Sequence
  Description of Artificial Sequence: Synthetic oligonucleotide
cagcuuuacaguggauugc

SEQ ID NO: 69338 - RNA, 19 nt, Artificial Sequence
  Description of Artificial Sequence: Synthetic oligonucleotide
caagucuaagucgaaucca

SEQ ID NO: 69339 - RNA, 19 nt, Artificial Sequence
  Description of Artificial Sequence: Synthetic oligonucleotide
auuucuauucuagcacuua

SEQ ID NO: 69340 - RNA, 19 nt, Artificial Sequence
  Description of Artificial Sequence: Synthetic oligonucleotide
uggacuuaugggucuugau

SEQ ID NO: 69341 - RNA, 19 nt, Artificial Sequence
  Description of Artificial Sequence: Synthetic oligonucleotide
uuauguccauugguagcca

SEQ ID NO: 69342 - RNA, 19 nt, Artificial Sequence
  Description of Artificial Sequence: Synthetic oligonucleotide
cgguuuagugcacaguucc

SEQ ID NO: 69343 - RNA, 19 nt, Artificial Sequence
  Description of Artificial Sequence: Synthetic oligonucleotide
cacagccaucguuaugaac

SEQ ID NO: 69344 - RNA, 19 nt, Artificial Sequence
  Description of Artificial Sequence: Synthetic oligonucleotide
aacuaccucugguccuggu

SEQ ID NO: 69345 - RNA, 19 nt, Artificial Sequence
  Description of Artificial Sequence: Synthetic oligonucleotide
ugcccauuacuggacauuu

SEQ ID NO: 69346 - RNA, 19 nt, Artificial Sequence
  Description of Artificial Sequence: Synthetic oligonucleotide
uugcucuagucuacauaaa

SEQ ID NO: 69347 - RNA, 19 nt, Artificial Sequence
  Description of Artificial Sequence: Synthetic oligonucleotide
uugcaaguuccgccacuga

SEQ ID NO: 69348 - RNA, 19 nt, Artificial Sequence
  Description of Artificial Sequence: Synthetic oligonucleotide
aagguaaacgaggcacuuu

SEQ ID NO: 69349 - RNA, 19 nt, Artificial Sequence
  Description of Artificial Sequence: Synthetic oligonucleotide
caacccauuagaaguaggu

SEQ ID NO: 69350 - RNA, 19 nt, Artificial Sequence
  Description of Artificial Sequence: Synthetic oligonucleotide
gggcuugauaaguucuagc

SEQ ID NO: 69351 - RNA, 19 nt, Artificial Sequence
  Description of Artificial Sequence: Synthetic oligonucleotide
caccaguccgucccuuucc

SEQ ID NO: 69352 - RNA, 19 nt, Artificial Sequence
  Description of Artificial Sequence: Synthetic oligonucleotide
gaacuugucuucccgucgu

SEQ ID NO: 69353 - RNA, 19 nt, Artificial Sequence
  Description of Artificial Sequence: Synthetic oligonucleotide
cauauuuggcugcccauua

SEQ ID NO: 69354 - RNA, 19 nt, Artificial Sequence
  Description of Artificial Sequence: Synthetic oligonucleotide
ucgaauccauccucuugau

SEQ ID NO: 69355 - RNA, 19 nt, Artificial Sequence
  Description of Artificial Sequence: Synthetic oligonucleotide
cacuuuaucaacagucgau

SEQ ID NO: 69356 - RNA, 19 nt, Artificial Sequence
  Description of Artificial Sequence: Synthetic oligonucleotide
acacgggagagauuaccua

SEQ ID NO: 69357 - RNA, 19 nt, Artificial Sequence
  Description of Artificial Sequence: Synthetic oligonucleotide
uaacgaucucuuugaugau

SEQ ID NO: 69358 - RNA, 19 nt, Artificial Sequence
  Description of Artificial Sequence: Synthetic oligonucleotide
uugccccgaugcaauaaau

SEQ ID NO: 69359 - RNA, 19 nt, Artificial Sequence
  Description of Artificial Sequence: Synthetic oligonucleotide
cugcaugcaugacacauua

SEQ ID NO: 69360 - RNA, 19 nt, Artificial Sequence
  Description of Artificial Sequence: Synthetic oligonucleotide
guccauguccuaaaauuaa

SEQ ID NO: 69361 - RNA, 19 nt, Artificial Sequence
  Description of Artificial Sequence: Synthetic oligonucleotide
gagcuuaguuacaauuuua

SEQ ID NO: 69362 - RNA, 19 nt, Artificial Sequence
  Description of Artificial Sequence: Synthetic oligonucleotide
ggaaaucccauagcaauaa

SEQ ID NO: 69363 - RNA, 19 nt, Artificial Sequence
  Description of Artificial Sequence: Synthetic oligonucleotide
cugguggcgaggcuucuuc

SEQ ID NO: 69364 - RNA, 19 nt, Artificial Sequence
  Description of Artificial Sequence: Synthetic oligonucleotide
cuaagaagcuuuggagaca

SEQ ID NO: 69365 - RNA, 19 nt, Artificial Sequence
  Description of Artificial Sequence: Synthetic oligonucleotide
cacgccuugcucuagucua

SEQ ID NO: 69366 - RNA, 19 nt, Artificial Sequence
  Description of Artificial Sequence: Synthetic oligonucleotide
guuagcaugcugugcccaa

SEQ ID NO: 69367 - RNA, 19 nt, Artificial Sequence
  Description of Artificial Sequence: Synthetic oligonucleotide
cccauuacuggacauuuca

SEQ ID NO: 69368 - RNA, 19 nt, Artificial Sequence
  Description of Artificial Sequence: Synthetic oligonucleotide
ccauugguagccaaacgga

SEQ ID NO: 69369 - RNA, 19 nt, Artificial Sequence
  Description of Artificial Sequence: Synthetic oligonucleotide
uucuagucuuauguccauu

SEQ ID NO: 69370 - RNA, 19 nt, Artificial Sequence
  Description of Artificial Sequence: Synthetic oligonucleotide
uagaaaucuagggccucuu

SEQ ID NO: 69371 - RNA, 19 nt, Artificial Sequence
  Description of Artificial Sequence: Synthetic oligonucleotide
caguaacaaauggacaucu

SEQ ID NO: 69372 - RNA, 19 nt, Artificial Sequence
  Description of Artificial Sequence: Synthetic oligonucleotide
gcaguuaaauuuggcggug

SEQ ID NO: 69373 - RNA, 19 nt, Artificial Sequence
  Description of Artificial Sequence: Synthetic oligonucleotide
ccgguaaacuccacuuaag

SEQ ID NO: 69374 - RNA, 19 nt, Artificial Sequence
  Description of Artificial Sequence: Synthetic oligonucleotide
ucuagcugugguggauuau

SEQ ID NO: 69375 - RNA, 19 nt, Artificial Sequence
  Description of Artificial Sequence: Synthetic oligonucleotide
uuguuccuguauacaccuu

SEQ ID NO: 69376 - RNA, 19 nt, Artificial Sequence
  Description of Artificial Sequence: Synthetic oligonucleotide
ggacuuaugggucuugauu

SEQ ID NO: 69377 - RNA, 19 nt, Artificial Sequence
  Description of Artificial Sequence: Synthetic oligonucleotide
gccgguaaacuccacuuaa

SEQ ID NO: 69378 - RNA, 19 nt, Artificial Sequence
  Description of Artificial Sequence: Synthetic oligonucleotide
  modified_base (7)..(7): a, c, u, g, unknown or other
gaguuanccugaagaggcu

SEQ ID NO: 69379 - RNA, 19 nt, Artificial Sequence
  Description of Artificial Sequence: Synthetic oligonucleotide
gauuaccuacagaaugcau

SEQ ID NO: 69380 - RNA, 19 nt, Artificial Sequence
  Description of Artificial Sequence: Synthetic oligonucleotide
gguagccaaacggaacuuc

SEQ ID NO: 69381 - RNA, 19 nt, Artificial Sequence
  Description of Artificial Sequence: Synthetic oligonucleotide
gucauauuuggcugcccau

SEQ ID NO: 69382 - RNA, 19 nt, Artificial Sequence
  Description of Artificial Sequence: Synthetic oligonucleotide
gggagagauuaccuacaga

SEQ ID NO: 69383 - RNA, 19 nt, Artificial Sequence
  Description of Artificial Sequence: Synthetic oligonucleotide
ccaaacggaacuucauaaa

SEQ ID NO: 69384 - RNA, 19 nt, Artificial Sequence
  Description of Artificial Sequence: Synthetic oligonucleotide
gucgaucaauauucaugua

SEQ ID NO: 69385 - RNA, 19 nt, Artificial Sequence
  Description of Artificial Sequence: Synthetic oligonucleotide
cacuaagauaaaggguugu

SEQ ID NO: 69386 - RNA, 19 nt, Artificial Sequence
  Description of Artificial Sequence: Synthetic oligonucleotide
guagguuagcuggacuuau

SEQ ID NO: 69387 - RNA, 19 nt, Artificial Sequence
  Description of Artificial Sequence: Synthetic oligonucleotide
uucccgucguguggguccu

SEQ ID NO: 69388 - RNA, 19 nt, Artificial Sequence
  Description of Artificial Sequence: Synthetic oligonucleotide
caggcuaaucgugaauacu

SEQ ID NO: 69389 - RNA, 19 nt, Artificial Sequence
  Description of Artificial Sequence: Synthetic oligonucleotide
gcauuauccuguacacguc

SEQ ID NO: 69390 - RNA, 19 nt, Artificial Sequence
  Description of Artificial Sequence: Synthetic oligonucleotide
cgggagagauuaccuacag

SEQ ID NO: 69391 - RNA, 19 nt, Artificial Sequence
  Description of Artificial Sequence: Synthetic oligonucleotide
ggccucuugugccuuuaaa

SEQ ID NO: 69392 - RNA, 19 nt, Artificial Sequence
  Description of Artificial Sequence: Synthetic oligonucleotide
caguuaaauuuggcggugu

SEQ ID NO: 69393 - RNA, 19 nt, Artificial Sequence
  Description of Artificial Sequence: Synthetic oligonucleotide
cuuagccauuggucaagau

SEQ ID NO: 69394 - RNA, 19 nt, Artificial Sequence
  Description of Artificial Sequence: Synthetic oligonucleotide
cagaggacuugggauggua

SEQ ID NO: 69395 - RNA, 19 nt, Artificial Sequence
  Description of Artificial Sequence: Synthetic oligonucleotide
ggucaagucuaagucgaau

SEQ ID NO: 69396 - RNA, 19 nt, Artificial Sequence
  Description of Artificial Sequence: Synthetic oligonucleotide
agccaucguuaugaacaua

SEQ ID NO: 69397 - RNA, 19 nt, Artificial Sequence
  Description of Artificial Sequence: Synthetic oligonucleotide
cgaggcacuuuguggcaac

SEQ ID NO: 69398 - RNA, 19 nt, Artificial Sequence
  Description of Artificial Sequence: Synthetic oligonucleotide
gcccauuacuggacauuuc

SEQ ID NO: 69399 - RNA, 19 nt, Artificial Sequence
  Description of Artificial Sequence: Synthetic oligonucleotide
ucccgucguguggguccug

SEQ ID NO: 69400 - RNA, 19 nt, Artificial Sequence
  Description of Artificial Sequence: Synthetic oligonucleotide
cguuaauauucaagaucau

SEQ ID NO: 69401 - RNA, 19 nt, Artificial Sequence
  Description of Artificial Sequence: Synthetic oligonucleotide
gugcacaguuccaccccuu

SEQ ID NO: 69402 - RNA, 19 nt, Artificial Sequence
  Description of Artificial Sequence: Synthetic oligonucleotide
cccgucguguggguccuga

SEQ ID NO: 69403 - RNA, 19 nt, Artificial Sequence
  Description of Artificial Sequence: Synthetic oligonucleotide
ccgucguguggguccugaa

SEQ ID NO: 69404 - RNA, 19 nt, Artificial Sequence
  Description of Artificial Sequence: Synthetic oligonucleotide
ccgucccuuuccagcuuua

SEQ ID NO: 69405 - RNA, 19 nt, Artificial Sequence
  Description of Artificial Sequence: Synthetic oligonucleotide
uuagguaagguccauaucc

SEQ ID NO: 69406 - RNA, 19 nt, Artificial Sequence
  Description of Artificial Sequence: Synthetic oligonucleotide
cuuuaguuagguaaggucc

SEQ ID NO: 69407 - RNA, 19 nt, Artificial Sequence
  Description of Artificial Sequence: Synthetic oligonucleotide
ugaacaauggcuaaaguuc

SEQ ID NO: 69408 - RNA, 19 nt, Artificial Sequence
  Description of Artificial Sequence: Synthetic oligonucleotide
ucuaccuaaacaaacggcu

SEQ ID NO: 69409 - RNA, 19 nt, Artificial Sequence
  Description of Artificial Sequence: Synthetic oligonucleotide
aaucaauuggcaaacucgg

SEQ ID NO: 69410 - RNA, 19 nt, Artificial Sequence
  Description of Artificial Sequence: Synthetic oligonucleotide
uuuacuuauagaacugcug

SEQ ID NO: 69411 - RNA, 19 nt, Artificial Sequence
  Description of Artificial Sequence: Synthetic oligonucleotide
uacaaauucuaccaagacu

SEQ ID NO: 69412 - RNA, 19 nt, Artificial Sequence
  Description of Artificial Sequence: Synthetic oligonucleotide
uggaguagcuaucacaaug

SEQ ID NO: 69413 - RNA, 19 nt, Artificial Sequence
  Description of Artificial Sequence: Synthetic oligonucleotide
agaaucaauuggcaaacuc

SEQ ID NO: 69414 - RNA, 19 nt, Artificial Sequence
  Description of Artificial Sequence: Synthetic oligonucleotide
ucaauuggcaaacucgggu

SEQ ID NO: 69415 - RNA, 19 nt, Artificial Sequence
  Description of Artificial Sequence: Synthetic oligonucleotide
uauaauagagagaguaaau

SEQ ID NO: 69416 - RNA, 19 nt, Artificial Sequence
  Description of Artificial Sequence: Synthetic oligonucleotide
aaaguuggaagggugcggg

SEQ ID NO: 69417 - RNA, 19 nt, Artificial Sequence
  Description of Artificial Sequence: Synthetic oligonucleotide
aauagccccaagaggaagc

SEQ ID NO: 69418 - RNA, 19 nt, Artificial Sequence
  Description of Artificial Sequence: Synthetic oligonucleotide
uguaacaugguccaaucuu

SEQ ID NO: 69419 - RNA, 19 nt, Artificial Sequence
  Description of Artificial Sequence: Synthetic oligonucleotide
gguuuuaugguagugaaag

SEQ ID NO: 69420 - RNA, 19 nt, Artificial Sequence
  Description of Artificial Sequence: Synthetic oligonucleotide
cacuauuucauguaacaug

SEQ ID NO: 69421 - RNA, 19 nt, Artificial Sequence
  Description of Artificial Sequence: Synthetic oligonucleotide
uguauaauagagagaguaa

SEQ ID NO: 69422 - RNA, 19 nt, Artificial Sequence
  Description of Artificial Sequence: Synthetic oligonucleotide
uucuaccuaaacaaacggc

SEQ ID NO: 69423 - RNA, 19 nt, Artificial Sequence
  Description of Artificial Sequence: Synthetic oligonucleotide
uaaauacaaauugaucggc

SEQ ID NO: 69424 - RNA, 19 nt, Artificial Sequence
  Description of Artificial Sequence: Synthetic oligonucleotide
ggugguaagagucaagaag

SEQ ID NO: 69425 - RNA, 19 nt, Artificial Sequence
  Description of Artificial Sequence: Synthetic oligonucleotide
aguuuaggaacaggaaagc

SEQ ID NO: 69426 - RNA, 19 nt, Artificial Sequence
  Description of Artificial Sequence: Synthetic oligonucleotide
agagucuacagguuuggag

SEQ ID NO: 69427 - RNA, 19 nt, Artificial Sequence
  Description of Artificial Sequence: Synthetic oligonucleotide
auguggaacucuucauucc

SEQ ID NO: 69428 - RNA, 19 nt, Artificial Sequence
  Description of Artificial Sequence: Synthetic oligonucleotide
uaugguagugaaaguuuag

SEQ ID NO: 69429 - RNA, 19 nt, Artificial Sequence
  Description of Artificial Sequence: Synthetic oligonucleotide
uuguaggcaauauaggaau

SEQ ID NO: 69430 - RNA, 19 nt, Artificial Sequence
  Description of Artificial Sequence: Synthetic oligonucleotide
ucagaggcgggucuaagca

SEQ ID NO: 69431 - RNA, 19 nt, Artificial Sequence
  Description of Artificial Sequence: Synthetic oligonucleotide
cuuaugucauauacuuucc

SEQ ID NO: 69432 - RNA, 19 nt, Artificial Sequence
  Description of Artificial Sequence: Synthetic oligonucleotide
ucuagagucuccucgucgc

SEQ ID NO: 69433 - RNA, 19 nt, Artificial Sequence
  Description of Artificial Sequence: Synthetic oligonucleotide
ucaaagacggccccgcugu

SEQ ID NO: 69434 - RNA, 19 nt, Artificial Sequence
  Description of Artificial Sequence: Synthetic oligonucleotide
gagucggaugacuggaugg

SEQ ID NO: 69435 - RNA, 19 nt, Artificial Sequence
  Description of Artificial Sequence: Synthetic oligonucleotide
caagaagggccuaauuggg

SEQ ID NO: 69436 - RNA, 19 nt, Artificial Sequence
  Description of Artificial Sequence: Synthetic oligonucleotide
uuuuaugguagugaaaguu

SEQ ID NO: 69437 - RNA, 19 nt, Artificial Sequence
  Description of Artificial Sequence: Synthetic oligonucleotide
aagcccuagccuaugggcc

SEQ ID NO: 69438 - RNA, 19 nt, Artificial Sequence
  Description of Artificial Sequence: Synthetic oligonucleotide
ucuaaggggacaaggaguu

SEQ ID NO: 69439 - RNA, 19 nt, Artificial Sequence
  Description of Artificial Sequence: Synthetic oligonucleotide
gagggauaaacugugguac

SEQ ID NO: 69440 - RNA, 19 nt, Artificial Sequence
  Description of Artificial Sequence: Synthetic oligonucleotide
aaauacaaauugaucggcu

SEQ ID NO: 69441 - RNA, 19 nt, Artificial Sequence
  Description of Artificial Sequence: Synthetic oligonucleotide
gaugcauugugcuguuaag

SEQ ID NO: 69442 - RNA, 19 nt, Artificial Sequence
  Description of Artificial Sequence: Synthetic oligonucleotide
aguuagguaagguccauau

SEQ ID NO: 69443 - RNA, 19 nt, Artificial Sequence
  Description of Artificial Sequence: Synthetic oligonucleotide
gaaucuauguugcucaacu

SEQ ID NO: 69444 - RNA, 19 nt, Artificial Sequence
  Description of Artificial Sequence: Synthetic oligonucleotide
aauucuaccaagacugaaa

SEQ ID NO: 69445 - RNA, 19 nt, Artificial Sequence
  Description of Artificial Sequence: Synthetic oligonucleotide
uguaggcaauauaggaaug

SEQ ID NO: 69446 - RNA, 19 nt, Artificial Sequence
  Description of Artificial Sequence: Synthetic oligonucleotide
cauguggaacucuucauuc

SEQ ID NO: 69447 - RNA, 19 nt, Artificial Sequence
  Description of Artificial Sequence: Synthetic oligonucleotide
auaauagagagaguaaaua

SEQ ID NO: 69448 - RNA, 19 nt, Artificial Sequence
  Description of Artificial Sequence: Synthetic oligonucleotide
caauuggcaaacucgggug

SEQ ID NO: 69449 - RNA, 19 nt, Artificial Sequence
  Description of Artificial Sequence: Synthetic oligonucleotide
aagaaguuugggcguggag

SEQ ID NO: 69450 - RNA, 19 nt, Artificial Sequence
  Description of Artificial Sequence: Synthetic oligonucleotide
acaugguccaaucuuugca

SEQ ID NO: 69451 - RNA, 19 nt, Artificial Sequence
  Description of Artificial Sequence: Synthetic oligonucleotide
gacaacacggacggggugg

SEQ ID NO: 69452 - RNA, 19 nt, Artificial Sequence
  Description of Artificial Sequence: Synthetic oligonucleotide
uuuucaggggagucggaug

SEQ ID NO: 69453 - RNA, 19 nt, Artificial Sequence
  Description of Artificial Sequence: Synthetic oligonucleotide
cagaagaagggaaucuaug

SEQ ID NO: 69454 - RNA, 19 nt, Artificial Sequence
  Description of Artificial Sequence: Synthetic oligonucleotide
caaagaaccuccagcuggc

SEQ ID NO: 69455 - RNA, 19 nt, Artificial Sequence
  Description of Artificial Sequence: Synthetic oligonucleotide
cuucauuccucagggaggg

SEQ ID NO: 69456 - RNA, 19 nt, Artificial Sequence
  Description of Artificial Sequence: Synthetic oligonucleotide
acacggacgggguggaugg

SEQ ID NO: 69457 - RNA, 19 nt, Artificial Sequence
  Description of Artificial Sequence: Synthetic oligonucleotide
uacacacgcacccuuuaac

SEQ ID NO: 69458 - RNA, 19 nt, Artificial Sequence
  Description of Artificial Sequence: Synthetic oligonucleotide
gauuguuuucagaggcggg

SEQ ID NO: 69459 - RNA, 19 nt, Artificial Sequence
  Description of Artificial Sequence: Synthetic oligonucleotide
agcccuagccuaugggccc

SEQ ID NO: 69460 - RNA, 19 nt, Artificial Sequence
  Description of Artificial Sequence: Synthetic oligonucleotide
uacaaauugaucggcugcu

SEQ ID NO: 69461 - RNA, 19 nt, Artificial Sequence
  Description of Artificial Sequence: Synthetic oligonucleotide
caaacggcucccaguaagg

SEQ ID NO: 69462 - RNA, 19 nt, Artificial Sequence
  Description of Artificial Sequence: Synthetic oligonucleotide
cauguguuaccaacccuag

SEQ ID NO: 69463 - RNA, 19 nt, Artificial Sequence
  Description of Artificial Sequence: Synthetic oligonucleotide
aauugaucggcugcucugu

SEQ ID NO: 69464 - RNA, 19 nt, Artificial Sequence
  Description of Artificial Sequence: Synthetic oligonucleotide
acacacgcacccuuuaaca

SEQ ID NO: 69465 - RNA, 19 nt, Artificial Sequence
  Description of Artificial Sequence: Synthetic oligonucleotide
uuuggcuaugguugcaguc

SEQ ID NO: 69466 - RNA, 19 nt, Artificial Sequence
  Description of Artificial Sequence: Synthetic oligonucleotide
acgggaacaugugucacac

SEQ ID NO: 69467 - RNA, 19 nt, Artificial Sequence
  Description of Artificial Sequence: Synthetic oligonucleotide
guuggaagggugcgggagg

SEQ ID NO: 69468 - RNA, 19 nt, Artificial Sequence
  Description of Artificial Sequence: Synthetic oligonucleotide
ugcccauugacaacacgga

SEQ ID NO: 69469 - RNA, 19 nt, Artificial Sequence
  Description of Artificial Sequence: Synthetic oligonucleotide
uugacaacacggacggggu

SEQ ID NO: 69470 - RNA, 19 nt, Artificial Sequence
  Description of Artificial Sequence: Synthetic oligonucleotide
aaagacggccccgcuguac

SEQ ID NO: 69471 - RNA, 19 nt, Artificial Sequence
  Description of Artificial Sequence: Synthetic oligonucleotide
auuuacuuauagaacugcu

SEQ ID NO: 69472 - RNA, 19 nt, Artificial Sequence
  Description of Artificial Sequence: Synthetic oligonucleotide
aaauucuaccaagacugaa

SEQ ID NO: 69473 - RNA, 19 nt, Artificial Sequence
  Description of Artificial Sequence: Synthetic oligonucleotide
agaagggccuaauugggaa

SEQ ID NO: 69474 - RNA, 19 nt, Artificial Sequence
  Description of Artificial Sequence: Synthetic oligonucleotide
aggagggauaaacuguggu

SEQ ID NO: 69475 - RNA, 19 nt, Artificial Sequence
  Description of Artificial Sequence: Synthetic oligonucleotide
aagacggccccgcuguaca

SEQ ID NO: 69476 - RNA, 19 nt, Artificial Sequence
  Description of Artificial Sequence: Synthetic oligonucleotide
ggcauguagauugaggggc

SEQ ID NO: 69477 - RNA, 19 nt, Artificial Sequence
  Description of Artificial Sequence: Synthetic oligonucleotide
accugacggcaacucaccc

SEQ ID NO: 69478 - RNA, 19 nt, Artificial Sequence
  Description of Artificial Sequence: Synthetic oligonucleotide
auggggaacguuuuggcua

SEQ ID NO: 69479 - RNA, 19 nt, Artificial Sequence
  Description of Artificial Sequence: Synthetic oligonucleotide
gaaaguuuaggaacaggaa

SEQ ID NO: 69480 - RNA, 19 nt, Artificial Sequence
  Description of Artificial Sequence: Synthetic oligonucleotide
agucggaugacuggauggg

SEQ ID NO: 69481 - RNA, 19 nt, Artificial Sequence
  Description of Artificial Sequence: Synthetic oligonucleotide
caacccuagagacaccaug

SEQ ID NO: 69482 - RNA, 19 nt, Artificial Sequence
  Description of Artificial Sequence: Synthetic oligonucleotide
cuugggucgaaccugugga

SEQ ID NO: 69483 - RNA, 19 nt, Artificial Sequence
  Description of Artificial Sequence: Synthetic oligonucleotide
ucgcuccugcuuuaaaucu

SEQ ID NO: 69484 - RNA, 19 nt, Artificial Sequence
  Description of Artificial Sequence: Synthetic oligonucleotide
aacggcucccaguaaggau

SEQ ID NO: 69485 - RNA, 19 nt, Artificial Sequence
  Description of Artificial Sequence: Synthetic oligonucleotide
aauccggcuuugcuuuucu

SEQ ID NO: 69486 - RNA, 19 nt, Artificial Sequence
  Description of Artificial Sequence: Synthetic oligonucleotide
cuuauagaacugcugagcu

SEQ ID NO: 69487 - RNA, 19 nt, Artificial Sequence
  Description of Artificial Sequence: Synthetic oligonucleotide
agguaagugacugcgcucu

SEQ ID NO: 69488 - RNA, 19 nt, Artificial Sequence
  Description of Artificial Sequence: Synthetic oligonucleotide
ggaguagcuaucacaaugc

SEQ ID NO: 69489 - RNA, 19 nt, Artificial Sequence
  Description of Artificial Sequence: Synthetic oligonucleotide
cacgcacccuuuaacacug

SEQ ID NO: 69490 - RNA, 19 nt, Artificial Sequence
  Description of Artificial Sequence: Synthetic oligonucleotide
aagggccuaauugggaaga

SEQ ID NO: 69491 - RNA, 19 nt, Artificial Sequence
  Description of Artificial Sequence: Synthetic oligonucleotide
cacacgcacccuuuaacac

SEQ ID NO: 69492 - RNA, 19 nt, Artificial Sequence
  Description of Artificial Sequence: Synthetic oligonucleotide
ccggaaacauuaaauacug

SEQ ID NO: 69493 - RNA, 19 nt, Artificial Sequence
  Description of Artificial Sequence: Synthetic oligonucleotide
aucaauuggcaaacucggg

SEQ ID NO: 69494 - RNA, 19 nt, Artificial Sequence
  Description of Artificial Sequence: Synthetic oligonucleotide
auuguauuuuggaggacga

SEQ ID NO: 69495 - RNA, 19 nt, Artificial Sequence
  Description of Artificial Sequence: Synthetic oligonucleotide
uuguagguguaaacuuggu

SEQ ID NO: 69496 - RNA, 19 nt, Artificial Sequence
  Description of Artificial Sequence: Synthetic oligonucleotide
acagaaaguuugaagcaca

SEQ ID NO: 69497 - RNA, 19 nt, Artificial Sequence
  Description of Artificial Sequence: Synthetic oligonucleotide
aucuagggcagauccacau

SEQ ID NO: 69498 - RNA, 19 nt, Artificial Sequence
  Description of Artificial Sequence: Synthetic oligonucleotide
gucugcuuagcccacccac

SEQ ID NO: 69499 - RNA, 19 nt, Artificial Sequence
  Description of Artificial Sequence: Synthetic oligonucleotide
uuucuagagucuccucguc

SEQ ID NO: 69500 - RNA, 19 nt, Artificial Sequence
  Description of Artificial Sequence: Synthetic oligonucleotide
gguaagguccauauccaag

SEQ ID NO: 69501 - RNA, 19 nt, Artificial Sequence
  Description of Artificial Sequence: Synthetic oligonucleotide
ugcaagcaugggaggaggc

SEQ ID NO: 69502 - RNA, 19 nt, Artificial Sequence
  Description of Artificial Sequence: Synthetic oligonucleotide
acaaauugaucggcugcuc

SEQ ID NO: 69503 - RNA, 19 nt, Artificial Sequence
  Description of Artificial Sequence: Synthetic oligonucleotide
guuagguaagguccauauc

SEQ ID NO: 69504 - RNA, 19 nt, Artificial Sequence
  Description of Artificial Sequence: Synthetic oligonucleotide
auguagauugaggggcagg

SEQ ID NO: 69505 - RNA, 19 nt, Artificial Sequence
  Description of Artificial Sequence: Synthetic oligonucleotide
ugcuuaugucauauacuuu

SEQ ID NO: 69506 - RNA, 19 nt, Artificial Sequence
  Description of Artificial Sequence: Synthetic oligonucleotide
cacuggguuaguuaaaccu

SEQ ID NO: 69507 - RNA, 19 nt, Artificial Sequence
  Description of Artificial Sequence: Synthetic oligonucleotide
uggaagaaguuugggcgug

SEQ ID NO: 69508 - RNA, 19 nt, Artificial Sequence
  Description of Artificial Sequence: Synthetic oligonucleotide
acgaccucucuuccguguc

SEQ ID NO: 69509 - RNA, 19 nt, Artificial Sequence
  Description of Artificial Sequence: Synthetic oligonucleotide
gggcauguagauugagggg

SEQ ID NO: 69510 - RNA, 19 nt, Artificial Sequence
  Description of Artificial Sequence: Synthetic oligonucleotide
uggcacuagggccccuccg

SEQ ID NO: 69511 - RNA, 19 nt, Artificial Sequence
  Description of Artificial Sequence: Synthetic oligonucleotide
uugaucggcugcucuguac

SEQ ID NO: 69512 - RNA, 19 nt, Artificial Sequence
  Description of Artificial Sequence: Synthetic oligonucleotide
uggugguaagagucaagaa

SEQ ID NO: 69513 - RNA, 19 nt, Artificial Sequence
  Description of Artificial Sequence: Synthetic oligonucleotide
ccuaauugggaagagacca

SEQ ID NO: 69514 - RNA, 19 nt, Artificial Sequence
  Description of Artificial Sequence: Synthetic oligonucleotide
cuuugcauguacacacaga

SEQ ID NO: 69515 - RNA, 19 nt, Artificial Sequence
  Description of Artificial Sequence: Synthetic oligonucleotide
gaucggcugcucuguaccc

SEQ ID NO: 69516 - RNA, 19 nt, Artificial Sequence
  Description of Artificial Sequence: Synthetic oligonucleotide
gaggagggauaaacugugg

SEQ ID NO: 69517 - RNA, 19 nt, Artificial Sequence
  Description of Artificial Sequence: Synthetic oligonucleotide
gaacguuuuggcuaugguu

SEQ ID NO: 69518 - RNA, 19 nt, Artificial Sequence
  Description of Artificial Sequence: Synthetic oligonucleotide
cucaaagacggccccgcug

SEQ ID NO: 69519 - RNA, 19 nt, Artificial Sequence
  Description of Artificial Sequence: Synthetic oligonucleotide
ggccuaauugggaagagac

SEQ ID NO: 69520 - RNA, 19 nt, Artificial Sequence
  Description of Artificial Sequence: Synthetic oligonucleotide
agcccuuuaguuagguaag

SEQ ID NO: 69521 - RNA, 19 nt, Artificial Sequence
  Description of Artificial Sequence: Synthetic oligonucleotide
uggggaacguuuuggcuau

SEQ ID NO: 69522 - RNA, 19 nt, Artificial Sequence
  Description of Artificial Sequence: Synthetic oligonucleotide
caauagccccaagaggaag

SEQ ID NO: 69523 - RNA, 19 nt, Artificial Sequence
  Description of Artificial Sequence: Synthetic oligonucleotide
acacgggaacaugugucac

SEQ ID NO: 69524 - RNA, 19 nt, Artificial Sequence
  Description of Artificial Sequence: Synthetic oligonucleotide
auuuucaggggagucggau

SEQ ID NO: 69525 - RNA, 19 nt, Artificial Sequence
  Description of Artificial Sequence: Synthetic oligonucleotide
uuggaggacgaccucucuu

SEQ ID NO: 69526 - RNA, 19 nt, Artificial Sequence
  Description of Artificial Sequence: Synthetic oligonucleotide
ugacugcgcucuucuuacg

SEQ ID NO: 69527 - RNA, 19 nt, Artificial Sequence
  Description of Artificial Sequence: Synthetic oligonucleotide
cagaggcgggucuaagcag

SEQ ID NO: 69528 - RNA, 19 nt, Artificial Sequence
  Description of Artificial Sequence: Synthetic oligonucleotide
auguguuaccaacccuaga

SEQ ID NO: 69529 - RNA, 19 nt, Artificial Sequence
  Description of Artificial Sequence: Synthetic oligonucleotide
cuggcucaaagacggcccc

SEQ ID NO: 69530 - RNA, 19 nt, Artificial Sequence
  Description of Artificial Sequence: Synthetic oligonucleotide
agguaagguccauauccaa

SEQ ID NO: 69531 - RNA, 19 nt, Artificial Sequence
  Description of Artificial Sequence: Synthetic oligonucleotide
acuagggccccuccggaaa

SEQ ID NO: 69532 - RNA, 19 nt, Artificial Sequence
  Description of Artificial Sequence: Synthetic oligonucleotide
cacacgggaacauguguca

SEQ ID NO: 69533 - RNA, 19 nt, Artificial Sequence
  Description of Artificial Sequence: Synthetic oligonucleotide
gucggaugacuggaugggg

SEQ ID NO: 69534 - RNA, 19 nt, Artificial Sequence
  Description of Artificial Sequence: Synthetic oligonucleotide
uuaguuagguaagguccau

SEQ ID NO: 69535 - RNA, 19 nt, Artificial Sequence
  Description of Artificial Sequence: Synthetic oligonucleotide
cuucuagauggucaugugu

SEQ ID NO: 69536 - RNA, 19 nt, Artificial Sequence
  Description of Artificial Sequence: Synthetic oligonucleotide
auauccaagaagggccuaa

SEQ ID NO: 69537 - RNA, 19 nt, Artificial Sequence
  Description of Artificial Sequence: Synthetic oligonucleotide
ggagucggaugacuggaug

SEQ ID NO: 69538 - RNA, 19 nt, Artificial Sequence
  Description of Artificial Sequence: Synthetic oligonucleotide
gguuacaguucgcugugca

SEQ ID NO: 69539 - RNA, 19 nt, Artificial Sequence
  Description of Artificial Sequence: Synthetic oligonucleotide
ggagggauaaacuguggua

SEQ ID NO: 69540 - RNA, 19 nt, Artificial Sequence
  Description of Artificial Sequence: Synthetic oligonucleotide
gacgggguggauggaauuc

SEQ ID NO: 69541 - RNA, 19 nt, Artificial Sequence
  Description of Artificial Sequence: Synthetic oligonucleotide
cugcgcucuucuuacgcuc

SEQ ID NO: 69542 - RNA, 19 nt, Artificial Sequence
  Description of Artificial Sequence: Synthetic oligonucleotide
cuccaaagcucacucacua

SEQ ID NO: 69543 - RNA, 19 nt, Artificial Sequence
  Description of Artificial Sequence: Synthetic oligonucleotide
gcaagcaugggaggaggcg

SEQ ID NO: 69544 - RNA, 19 nt, Artificial Sequence
  Description of Artificial Sequence: Synthetic oligonucleotide
acccuagagacaccaugaa

SEQ ID NO: 69545 - RNA, 19 nt, Artificial Sequence
  Description of Artificial Sequence: Synthetic oligonucleotide
aggcgggucuaagcagucc

SEQ ID NO: 69546 - RNA, 19 nt, Artificial Sequence
  Description of Artificial Sequence: Synthetic oligonucleotide
cauauacuuucccaccccu

SEQ ID NO: 69547 - RNA, 19 nt, Artificial Sequence
  Description of Artificial Sequence: Synthetic oligonucleotide
cccuagagacaccaugaag

SEQ ID NO: 69548 - RNA, 19 nt, Artificial Sequence
  Description of Artificial Sequence: Synthetic oligonucleotide
cccaccguggcuguggagg

SEQ ID NO: 69549 - RNA, 19 nt, Artificial Sequence
  Description of Artificial Sequence: Synthetic oligonucleotide
uaguuagguaagguccaua

SEQ ID NO: 69550 - RNA, 19 nt, Artificial Sequence
  Description of Artificial Sequence: Synthetic oligonucleotide
cacgggaacaugugucaca

SEQ ID NO: 69551 - RNA, 19 nt, Artificial Sequence
  Description of Artificial Sequence: Synthetic oligonucleotide
acgggguggauggaauucu

SEQ ID NO: 69552 - RNA, 19 nt, Artificial Sequence
  Description of Artificial Sequence: Synthetic oligonucleotide
guacacacgcacccuuuaa

SEQ ID NO: 69553 - RNA, 19 nt, Artificial Sequence
  Description of Artificial Sequence: Synthetic oligonucleotide
auaagcugaggagcugcaa

SEQ ID NO: 69554 - RNA, 19 nt, Artificial Sequence
  Description of Artificial Sequence: Synthetic oligonucleotide
aacucacccugggcuaaga

SEQ ID NO: 69555 - RNA, 19 nt, Artificial Sequence
  Description of Artificial Sequence: Synthetic oligonucleotide
acccaccugacggcaacuc

SEQ ID NO: 69556 - RNA, 19 nt, Artificial Sequence
  Description of Artificial Sequence: Synthetic oligonucleotide
agggccuaauugggaagag

SEQ ID NO: 69557 - RNA, 19 nt, Artificial Sequence
  Description of Artificial Sequence: Synthetic oligonucleotide
caaagcucacucacuagau

SEQ ID NO: 69558 - RNA, 19 nt, Artificial Sequence
  Description of Artificial Sequence: Synthetic oligonucleotide
ccaagcccuagccuauggg

SEQ ID NO: 69559 - RNA, 19 nt, Artificial Sequence
  Description of Artificial Sequence: Synthetic oligonucleotide
guucagcccuuuaguuagg

SEQ ID NO: 69560 - RNA, 19 nt, Artificial Sequence
  Description of Artificial Sequence: Synthetic oligonucleotide
gccuaauugggaagagacc

SEQ ID NO: 69561 - RNA, 19 nt, Artificial Sequence
  Description of Artificial Sequence: Synthetic oligonucleotide
cauggggaacguuuuggcu

SEQ ID NO: 69562 - RNA, 19 nt, Artificial Sequence
  Description of Artificial Sequence: Synthetic oligonucleotide
caaacucgggugccaccug

SEQ ID NO: 69563 - RNA, 19 nt, Artificial Sequence
  Description of Artificial Sequence: Synthetic oligonucleotide
cuggcacuagggccccucc

SEQ ID NO: 69564 - RNA, 19 nt, Artificial Sequence
  Description of Artificial Sequence: Synthetic oligonucleotide
ggcgggucuaagcagucca

SEQ ID NO: 69565 - RNA, 19 nt, Artificial Sequence
  Description of Artificial Sequence: Synthetic oligonucleotide
acaccggguuggcuguugu

SEQ ID NO: 69566 - RNA, 19 nt, Artificial Sequence
  Description of Artificial Sequence: Synthetic oligonucleotide
gcugcaagcaugggaggag

SEQ ID NO: 69567 - RNA, 19 nt, Artificial Sequence
  Description of Artificial Sequence: Synthetic oligonucleotide
cagguauucacaggucuaa

SEQ ID NO: 69568 - RNA, 19 nt, Artificial Sequence
  Description of Artificial Sequence: Synthetic oligonucleotide
ccuccggaaacauuaaaua

SEQ ID NO: 69569 - RNA, 19 nt, Artificial Sequence
  Description of Artificial Sequence: Synthetic oligonucleotide
auauacuuucccaccccuu

SEQ ID NO: 69570 - RNA, 19 nt, Artificial Sequence
  Description of Artificial Sequence: Synthetic oligonucleotide
gacgaccucucuuccgugu

SEQ ID NO: 69571 - RNA, 19 nt, Artificial Sequence
  Description of Artificial Sequence: Synthetic oligonucleotide
acaacacggacggggugga

SEQ ID NO: 69572 - RNA, 19 nt, Artificial Sequence
  Description of Artificial Sequence: Synthetic oligonucleotide
ggcucaaagacggccccgc

SEQ ID NO: 69573 - RNA, 19 nt, Artificial Sequence
  Description of Artificial Sequence: Synthetic oligonucleotide
ugccaagcccuagccuaug

SEQ ID NO: 69574 - RNA, 19 nt, Artificial Sequence
  Description of Artificial Sequence: Synthetic oligonucleotide
ccggcuuugcuuuucuaga

SEQ ID NO: 69575 - RNA, 19 nt, Artificial Sequence
  Description of Artificial Sequence: Synthetic oligonucleotide
cccgcuguacaccggguug

SEQ ID NO: 69576 - RNA, 19 nt, Artificial Sequence
  Description of Artificial Sequence: Synthetic oligonucleotide
ucuuacgcucuggcucaaa

SEQ ID NO: 69577 - RNA, 19 nt, Artificial Sequence
  Description of Artificial Sequence: Synthetic oligonucleotide
acgcacccuuuaacacugc

SEQ ID NO: 69578 - RNA, 19 nt, Artificial Sequence
  Description of Artificial Sequence: Synthetic oligonucleotide
gcuguacaugcagaccgac

SEQ ID NO: 69579 - RNA, 19 nt, Artificial Sequence
  Description of Artificial Sequence: Synthetic oligonucleotide
ggggagucggaugacugga

SEQ ID NO: 69580 - RNA, 19 nt, Artificial Sequence
  Description of Artificial Sequence: Synthetic oligonucleotide
acccaccguggcuguggag

SEQ ID NO: 69581 - RNA, 19 nt, Artificial Sequence
  Description of Artificial Sequence: Synthetic oligonucleotide
ccgcuguacaccggguugg

SEQ ID NO: 69582 - RNA, 19 nt, Artificial Sequence
  Description of Artificial Sequence: Synthetic oligonucleotide
gggaaucuauguugcucaa

SEQ ID NO: 69583 - RNA, 19 nt, Artificial Sequence
  Description of Artificial Sequence: Synthetic oligonucleotide
acggacgggguggauggaa

SEQ ID NO: 69584 - RNA, 19 nt, Artificial Sequence
  Description of Artificial Sequence: Synthetic oligonucleotide
ugaggcggaugagcuguuu

SEQ ID NO: 69585 - RNA, 19 nt, Artificial Sequence
  Description of Artificial Sequence: Synthetic oligonucleotide
uucuuacgcucuggcucaa

SEQ ID NO: 69586 - RNA, 19 nt, Artificial Sequence
  Description of Artificial Sequence: Synthetic oligonucleotide
aggaagcuucagagaggug

SEQ ID NO: 69587 - RNA, 19 nt, Artificial Sequence
  Description of Artificial Sequence: Synthetic oligonucleotide
cgcacccuuuaacacugcc

SEQ ID NO: 69588 - RNA, 19 nt, Artificial Sequence
  Description of Artificial Sequence: Synthetic oligonucleotide
gcgggucuaagcaguccag

SEQ ID NO: 69589 - RNA, 19 nt, Artificial Sequence
  Description of Artificial Sequence: Synthetic oligonucleotide
ccaauagccccaagaggaa

SEQ ID NO: 69590 - RNA, 19 nt, Artificial Sequence
  Description of Artificial Sequence: Synthetic oligonucleotide
cacggugugccaagcccua

SEQ ID NO: 69591 - RNA, 19 nt, Artificial Sequence
  Description of Artificial Sequence: Synthetic oligonucleotide
aggggacaaggaguuuguu

SEQ ID NO: 69592 - RNA, 19 nt, Artificial Sequence
  Description of Artificial Sequence: Synthetic oligonucleotide
gcacuagggccccuccgga

SEQ ID NO: 69593 - RNA, 19 nt, Artificial Sequence
  Description of Artificial Sequence: Synthetic oligonucleotide
gccuaugggcccagacaag

SEQ ID NO: 69594 - RNA, 19 nt, Artificial Sequence
  Description of Artificial Sequence: Synthetic oligonucleotide
cccuccggaaacauuaaau

SEQ ID NO: 69595 - RNA, 19 nt, Artificial Sequence
  Description of Artificial Sequence: Synthetic oligonucleotide
gguguauaauagagagagu

SEQ ID NO: 69596 - RNA, 19 nt, Artificial Sequence
  Description of Artificial Sequence: Synthetic oligonucleotide
ccuaugggcccagacaagu

SEQ ID NO: 69597 - RNA, 19 nt, Artificial Sequence
  Description of Artificial Sequence: Synthetic oligonucleotide
caaagacggccccgcugua

SEQ ID NO: 69598 - RNA, 19 nt, Artificial Sequence
  Description of Artificial Sequence: Synthetic oligonucleotide
gugucccaggaugcauugu

SEQ ID NO: 69599 - RNA, 19 nt, Artificial Sequence
  Description of Artificial Sequence: Synthetic oligonucleotide
gcucaaagacggccccgcu

SEQ ID NO: 69600 - RNA, 19 nt, Artificial Sequence
  Description of Artificial Sequence: Synthetic oligonucleotide
gguaagugacugcgcucuu

SEQ ID NO: 69601 - RNA, 19 nt, Artificial Sequence
  Description of Artificial Sequence: Synthetic oligonucleotide
ggggaacguuuuggcuaug

SEQ ID NO: 69602 - RNA, 19 nt, Artificial Sequence
  Description of Artificial Sequence: Synthetic oligonucleotide
caugcccuuggggauuguu

SEQ ID NO: 69603 - RNA, 19 nt, Artificial Sequence
  Description of Artificial Sequence: Synthetic oligonucleotide
ccccuccggaaacauuaaa

SEQ ID NO: 69604 - RNA, 19 nt, Artificial Sequence
  Description of Artificial Sequence: Synthetic oligonucleotide
cguuuuggcuaugguugca

SEQ ID NO: 69605 - RNA, 19 nt, Artificial Sequence
  Description of Artificial Sequence: Synthetic oligonucleotide
cacggacgggguggaugga

SEQ ID NO: 69606 - RNA, 19 nt, Artificial Sequence
  Description of Artificial Sequence: Synthetic oligonucleotide
cgggucuaagcaguccaga

SEQ ID NO: 69607 - RNA, 19 nt, Artificial Sequence
  Description of Artificial Sequence: Synthetic oligonucleotide
ggguacacacgcacccuuu

SEQ ID NO: 69608 - RNA, 19 nt, Artificial Sequence
  Description of Artificial Sequence: Synthetic oligonucleotide
ccgcccgucccugcucccc

SEQ ID NO: 69609 - RNA, 19 nt, Artificial Sequence
  Description of Artificial Sequence: Synthetic oligonucleotide
gggagucggaugacuggau

SEQ ID NO: 69610 - RNA, 19 nt, Artificial Sequence
  Description of Artificial Sequence: Synthetic oligonucleotide
caacacggacgggguggau

SEQ ID NO: 69611 - RNA, 19 nt, Artificial Sequence
  Description of Artificial Sequence: Synthetic oligonucleotide
ccccgcuguacaccggguu

SEQ ID NO: 69612 - RNA, 19 nt, Artificial Sequence
  Description of Artificial Sequence: Synthetic oligonucleotide
auuaauaaugcacagaggc

SEQ ID NO: 69613 - RNA, 19 nt, Artificial Sequence
  Description of Artificial Sequence: Synthetic oligonucleotide
aagaguaggucacaaaacc

SEQ ID NO: 69614 - RNA, 19 nt, Artificial Sequence
  Description of Artificial Sequence: Synthetic oligonucleotide
aaaugcuagaccuagcgac

SEQ ID NO: 69615 - RNA, 19 nt, Artificial Sequence
  Description of Artificial Sequence: Synthetic oligonucleotide
aauaagcagauuuaacuag

SEQ ID NO: 69616 - RNA, 19 nt, Artificial Sequence
  Description of Artificial Sequence: Synthetic oligonucleotide
ugagcuacaaaccuuaccc

SEQ ID NO: 69617 - RNA, 19 nt, Artificial Sequence
  Description of Artificial Sequence: Synthetic oligonucleotide
aguuaugaaagauguaacc

SEQ ID NO: 69618 - RNA, 19 nt, Artificial Sequence
  Description of Artificial Sequence: Synthetic oligonucleotide
aaagauuacucuuaccuug

SEQ ID NO: 69619 - RNA, 19 nt, Artificial Sequence
  Description of Artificial Sequence: Synthetic oligonucleotide
aacuguagcccuuuucugc

SEQ ID NO: 69620 - RNA, 19 nt, Artificial Sequence
  Description of Artificial Sequence: Synthetic oligonucleotide
aacuuagguccuuuaaagc

SEQ ID NO: 69621 - RNA, 19 nt, Artificial Sequence
  Description of Artificial Sequence: Synthetic oligonucleotide
uugguuaacaauacaauug

SEQ ID NO: 69622 - RNA, 19 nt, Artificial Sequence
  Description of Artificial Sequence: Synthetic oligonucleotide
uuaacuagcuuuuggaaag

SEQ ID NO: 69623 - RNA, 19 nt, Artificial Sequence
  Description of Artificial Sequence: Synthetic oligonucleotide
auauucaaacacuagcacg

SEQ ID NO: 69624 - RNA, 19 nt, Artificial Sequence
  Description of Artificial Sequence: Synthetic oligonucleotide
gguuaaaucgcucucaugg

SEQ ID NO: 69625 - RNA, 19 nt, Artificial Sequence
  Description of Artificial Sequence: Synthetic oligonucleotide
uucguauuuaagaugguag

SEQ ID NO: 69626 - RNA, 19 nt, Artificial Sequence
  Description of Artificial Sequence: Synthetic oligonucleotide
aaugaaauuguuaagcacu

SEQ ID NO: 69627 - RNA, 19 nt, Artificial Sequence
  Description of Artificial Sequence: Synthetic oligonucleotide
cugaacuacacaaauauug

SEQ ID NO: 69628 - RNA, 19 nt, Artificial Sequence
  Description of Artificial Sequence: Synthetic oligonucleotide
ugcacaaaacccaaauagg

SEQ ID NO: 69629 - RNA, 19 nt, Artificial Sequence
  Description of Artificial Sequence: Synthetic oligonucleotide
aacaauacaauugguuaac

SEQ ID NO: 69630 - RNA, 19 nt, Artificial Sequence
  Description of Artificial Sequence: Synthetic oligonucleotide
uuaccuaaugcuuauugcc

SEQ ID NO: 69631 - RNA, 19 nt, Artificial Sequence
  Description of Artificial Sequence: Synthetic oligonucleotide
auagguuguaaacaucaac

SEQ ID NO: 69632 - RNA, 19 nt, Artificial Sequence
  Description of Artificial Sequence: Synthetic oligonucleotide
gaaaccuucguauuuaaga

SEQ ID NO: 69633 - RNA, 19 nt, Artificial Sequence
  Description of Artificial Sequence: Synthetic oligonucleotide
cuaaaugcuagaccuagcg

SEQ ID NO: 69634 - RNA, 19 nt, Artificial Sequence
  Description of Artificial Sequence: Synthetic oligonucleotide
agucauuauaguucccacc

SEQ ID NO: 69635 - RNA, 19 nt, Artificial Sequence
  Description of Artificial Sequence: Synthetic oligonucleotide
auuaucuagaacucuucuc

SEQ ID NO: 69636 - RNA, 19 nt, Artificial Sequence
  Description of Artificial Sequence: Synthetic oligonucleotide
agauuuaacuagcuuuugg

SEQ ID NO: 69637 - RNA, 19 nt, Artificial Sequence
  Description of Artificial Sequence: Synthetic oligonucleotide
uacuacuguaaccaggacc

SEQ ID NO: 69638 - RNA, 19 nt, Artificial Sequence
  Description of Artificial Sequence: Synthetic oligonucleotide
uauaugaauaaaaggacuu

SEQ ID NO: 69639 - RNA, 19 nt, Artificial Sequence
  Description of Artificial Sequence: Synthetic oligonucleotide
uuuaacuagcuuuuggaaa

SEQ ID NO: 69640 - RNA, 19 nt, Artificial Sequence
  Description of Artificial Sequence: Synthetic oligonucleotide
aggucuaaaugcuagaccu

SEQ ID NO: 69641 - RNA, 19 nt, Artificial Sequence
  Description of Artificial Sequence: Synthetic oligonucleotide
acuagcacgccccauuccc

SEQ ID NO: 69642 - RNA, 19 nt, Artificial Sequence
  Description of Artificial Sequence: Synthetic oligonucleotide
ucuugacuauggaucaucg

SEQ ID NO: 69643 - RNA, 19 nt, Artificial Sequence
  Description of Artificial Sequence: Synthetic oligonucleotide
acaugagccuauuuucugc

SEQ ID NO: 69644 - RNA, 19 nt, Artificial Sequence
  Description of Artificial Sequence: Synthetic oligonucleotide
cugauuauagguuguaaac

SEQ ID NO: 69645 - RNA, 19 nt, Artificial Sequence
  Description of Artificial Sequence: Synthetic oligonucleotide
aacuaacauacuaaaauca

SEQ ID NO: 69646 - RNA, 19 nt, Artificial Sequence
  Description of Artificial Sequence: Synthetic oligonucleotide
guaauuaacaaugaucuuc

SEQ ID NO: 69647 - RNA, 19 nt, Artificial Sequence
  Description of Artificial Sequence: Synthetic oligonucleotide
auaucuauucucuccaugu

SEQ ID NO: 69648 - RNA, 19 nt, Artificial Sequence
  Description of Artificial Sequence: Synthetic oligonucleotide
aaucuuaaugcuauuaaau

SEQ ID NO: 69649 - RNA, 19 nt, Artificial Sequence
  Description of Artificial Sequence: Synthetic oligonucleotide
uauaaacacuuuauacccc

SEQ ID NO: 69650 - RNA, 19 nt, Artificial Sequence
  Description of Artificial Sequence: Synthetic oligonucleotide
cuuaacaccgcuaggacuc

SEQ ID NO: 69651 - RNA, 19 nt, Artificial Sequence
  Description of Artificial Sequence: Synthetic oligonucleotide
aaccaggaaauguuaaccu

SEQ ID NO: 69652 - RNA, 19 nt, Artificial Sequence
  Description of Artificial Sequence: Synthetic oligonucleotide
uugacuauggaucaucguu

SEQ ID NO: 69653 - RNA, 19 nt, Artificial Sequence
  Description of Artificial Sequence: Synthetic oligonucleotide
ugauuauagguuguaaaca

SEQ ID NO: 69654 - RNA, 19 nt, Artificial Sequence
  Description of Artificial Sequence: Synthetic oligonucleotide
uaauugacacuacauugca

SEQ ID NO: 69655 - RNA, 19 nt, Artificial Sequence
  Description of Artificial Sequence: Synthetic oligonucleotide
cuuaccuaaugcuuauugc

SEQ ID NO: 69656 - RNA, 19 nt, Artificial Sequence
  Description of Artificial Sequence: Synthetic oligonucleotide
guaaccauuuucuaacaug

SEQ ID NO: 69657 - RNA, 19 nt, Artificial Sequence
  Description of Artificial Sequence: Synthetic oligonucleotide
aauauaccugauguaauga

SEQ ID NO: 69658 - RNA, 19 nt, Artificial Sequence
  Description of Artificial Sequence: Synthetic oligonucleotide
uacccaauucuaauuaucu

SEQ ID NO: 69659 - RNA, 19 nt, Artificial Sequence
  Description of Artificial Sequence: Synthetic oligonucleotide
agaauuagagcaacaagag

SEQ ID NO: 69660 - RNA, 19 nt, Artificial Sequence
  Description of Artificial Sequence: Synthetic oligonucleotide
aguagguguuucuuuacag

SEQ ID NO: 69661 - RNA, 19 nt, Artificial Sequence
  Description of Artificial Sequence: Synthetic oligonucleotide
uguuaaaugggcgccaggc

SEQ ID NO: 69662 - RNA, 19 nt, Artificial Sequence
  Description of Artificial Sequence: Synthetic oligonucleotide
auuaugcccauuaauagug

SEQ ID NO: 69663 - RNA, 19 nt, Artificial Sequence
  Description of Artificial Sequence: Synthetic oligonucleotide
auagauuuggaaaugggga

SEQ ID NO: 69664 - RNA, 19 nt, Artificial Sequence
  Description of Artificial Sequence: Synthetic oligonucleotide
auugacacuacauugcauu

SEQ ID NO: 69665 - RNA, 19 nt, Artificial Sequence
  Description of Artificial Sequence: Synthetic oligonucleotide
uaguuaugaaagauguaac

SEQ ID NO: 69666 - RNA, 19 nt, Artificial Sequence
  Description of Artificial Sequence: Synthetic oligonucleotide
acuacuguaaccaggacca

SEQ ID NO: 69667 - RNA, 19 nt, Artificial Sequence
  Description of Artificial Sequence: Synthetic oligonucleotide
uagauauuuagaugguaac

SEQ ID NO: 69668 - RNA, 19 nt, Artificial Sequence
  Description of Artificial Sequence: Synthetic oligonucleotide
uuacaguuccucuaaugca

SEQ ID NO: 69669 - RNA, 19 nt, Artificial Sequence
  Description of Artificial Sequence: Synthetic oligonucleotide
aaagggcggagcuccuucc

SEQ ID NO: 69670 - RNA, 19 nt, Artificial Sequence
  Description of Artificial Sequence: Synthetic oligonucleotide
aaccuucguauuuaagaug

SEQ ID NO: 69671 - RNA, 19 nt, Artificial Sequence
  Description of Artificial Sequence: Synthetic oligonucleotide
aaccuaguacaacuuauaa

SEQ ID NO: 69672 - RNA, 19 nt, Artificial Sequence
  Description of Artificial Sequence: Synthetic oligonucleotide
gucauuauaguucccacca

SEQ ID NO: 69673 - RNA, 19 nt, Artificial Sequence
  Description of Artificial Sequence: Synthetic oligonucleotide
acauacuaaaaucaugauu

SEQ ID NO: 69674 - RNA, 19 nt, Artificial Sequence
  Description of Artificial Sequence: Synthetic oligonucleotide
caccauaguaucuuaugcc

SEQ ID NO: 69675 - RNA, 19 nt, Artificial Sequence
  Description of Artificial Sequence: Synthetic oligonucleotide
cacuacauugcauuaauca

SEQ ID NO: 69676 - RNA, 19 nt, Artificial Sequence
  Description of Artificial Sequence: Synthetic oligonucleotide
ugacuauggaucaucguuc

SEQ ID NO: 69677 - RNA, 19 nt, Artificial Sequence
  Description of Artificial Sequence: Synthetic oligonucleotide
uaugaaagauguaaccauu

SEQ ID NO: 69678 - RNA, 19 nt, Artificial Sequence
  Description of Artificial Sequence: Synthetic oligonucleotide
acauuccucauuuaggcaa

SEQ ID NO: 69679 - RNA, 19 nt, Artificial Sequence
  Description of Artificial Sequence: Synthetic oligonucleotide
acgacugucucaaaguaac

SEQ ID NO: 69680 - RNA, 19 nt, Artificial Sequence
  Description of Artificial Sequence: Synthetic oligonucleotide
ugauuuguagggaaaccaa

SEQ ID NO: 69681 - RNA, 19 nt, Artificial Sequence
  Description of Artificial Sequence: Synthetic oligonucleotide
uuucauggguccauaauuu

SEQ ID NO: 69682 - RNA, 19 nt, Artificial Sequence
  Description of Artificial Sequence: Synthetic oligonucleotide
gacuuguccauacacaaaa

SEQ ID NO: 69683 - RNA, 19 nt, Artificial Sequence
  Description of Artificial Sequence: Synthetic oligonucleotide
uggaacguuuuguuugggg

SEQ ID NO: 69684 - RNA, 19 nt, Artificial Sequence
  Description of Artificial Sequence: Synthetic oligonucleotide
ucuuaacaccgcuaggacu

SEQ ID NO: 69685 - RNA, 19 nt, Artificial Sequence
  Description of Artificial Sequence: Synthetic oligonucleotide
auggaauguugucuauuac

SEQ ID NO: 69686 - RNA, 19 nt, Artificial Sequence
  Description of Artificial Sequence: Synthetic oligonucleotide
uuuaggacgacugucucaa

SEQ ID NO: 69687 - RNA, 19 nt, Artificial Sequence
  Description of Artificial Sequence: Synthetic oligonucleotide
cacgaccaaaauuaccucc

SEQ ID NO: 69688 - RNA, 19 nt, Artificial Sequence
  Description of Artificial Sequence: Synthetic oligonucleotide
uaccugauguaaugaaaag

SEQ ID NO: 69689 - RNA, 19 nt, Artificial Sequence
  Description of Artificial Sequence: Synthetic oligonucleotide
auaugaccuuauuaucuag

SEQ ID NO: 69690 - RNA, 19 nt, Artificial Sequence
  Description of Artificial Sequence: Synthetic oligonucleotide
auaugaauaaaaggacuug

SEQ ID NO: 69691 - RNA, 19 nt, Artificial Sequence
  Description of Artificial Sequence: Synthetic oligonucleotide
guuaaaucgcucucauggc

SEQ ID NO: 69692 - RNA, 19 nt, Artificial Sequence
  Description of Artificial Sequence: Synthetic oligonucleotide
ugaccuuauuaucuagaac

SEQ ID NO: 69693 - RNA, 19 nt, Artificial Sequence
  Description of Artificial Sequence: Synthetic oligonucleotide
acaauuuuaucaacggugu

SEQ ID NO: 69694 - RNA, 19 nt, Artificial Sequence
  Description of Artificial Sequence: Synthetic oligonucleotide
uauugcccuuccuugcagg

SEQ ID NO: 69695 - RNA, 19 nt, Artificial Sequence
  Description of Artificial Sequence: Synthetic oligonucleotide
ugagccuauuuucugcacu

SEQ ID NO: 69696 - RNA, 19 nt, Artificial Sequence
  Description of Artificial Sequence: Synthetic oligonucleotide
uacuaaaaucaugauuaca

SEQ ID NO: 69697 - RNA, 19 nt, Artificial Sequence
  Description of Artificial Sequence: Synthetic oligonucleotide
aguaggguucucauucacc

SEQ ID NO: 69698 - RNA, 19 nt, Artificial Sequence
  Description of Artificial Sequence: Synthetic oligonucleotide
accacuaccacaauuuaca

SEQ ID NO: 69699 - RNA, 19 nt, Artificial Sequence
  Description of Artificial Sequence: Synthetic oligonucleotide
ugaacaagaaggguuuccu

SEQ ID NO: 69700 - RNA, 19 nt, Artificial Sequence
  Description of Artificial Sequence: Synthetic oligonucleotide
uaugcccauuaauagugug

SEQ ID NO: 69701 - RNA, 19 nt, Artificial Sequence
  Description of Artificial Sequence: Synthetic oligonucleotide
aagauguaaccauuuucua

SEQ ID NO: 69702 - RNA, 19 nt, Artificial Sequence
  Description of Artificial Sequence: Synthetic oligonucleotide
gucuaaaugcuagaccuag

SEQ ID NO: 69703 - RNA, 19 nt, Artificial Sequence
  Description of Artificial Sequence: Synthetic oligonucleotide
uguaaccauuuucuaacau

SEQ ID NO: 69704 - RNA, 19 nt, Artificial Sequence
  Description of Artificial Sequence: Synthetic oligonucleotide
uucauggguccauaauuug

SEQ ID NO: 69705 - RNA, 19 nt, Artificial Sequence
  Description of Artificial Sequence: Synthetic oligonucleotide
cuuuccugacaacuccucg

SEQ ID NO: 69706 - RNA, 19 nt, Artificial Sequence
  Description of Artificial Sequence: Synthetic oligonucleotide
uacaacuuauaaacagguc

SEQ ID NO: 69707 - RNA, 19 nt, Artificial Sequence
  Description of Artificial Sequence: Synthetic oligonucleotide
ugcugacuuguccauacac

SEQ ID NO: 69708 - RNA, 19 nt, Artificial Sequence
  Description of Artificial Sequence: Synthetic oligonucleotide
accgcuaggacucaaugaa

SEQ ID NO: 69709 - RNA, 19 nt, Artificial Sequence
  Description of Artificial Sequence: Synthetic oligonucleotide
aauccauuauauccaccau

SEQ ID NO: 69710 - RNA, 19 nt, Artificial Sequence
  Description of Artificial Sequence: Synthetic oligonucleotide
uuauugcccuuccuugcag

SEQ ID NO: 69711 - RNA, 19 nt, Artificial Sequence
  Description of Artificial Sequence: Synthetic oligonucleotide
uuaaccuccccaauucuuu

SEQ ID NO: 69712 - RNA, 19 nt, Artificial Sequence
  Description of Artificial Sequence: Synthetic oligonucleotide
auauaccugauguaaugaa

SEQ ID NO: 69713 - RNA, 19 nt, Artificial Sequence
  Description of Artificial Sequence: Synthetic oligonucleotide
auucaagccuuaccuaaug

SEQ ID NO: 69714 - RNA, 19 nt, Artificial Sequence
  Description of Artificial Sequence: Synthetic oligonucleotide
cauaacuaccucugcugcc

SEQ ID NO: 69715 - RNA, 19 nt, Artificial Sequence
  Description of Artificial Sequence: Synthetic oligonucleotide
cugacuaucaccauaguau

SEQ ID NO: 69716 - RNA, 19 nt, Artificial Sequence
  Description of Artificial Sequence: Synthetic oligonucleotide
uuuauuccugguaccacua

SEQ ID NO: 69717 - RNA, 19 nt, Artificial Sequence
  Description of Artificial Sequence: Synthetic oligonucleotide
uguuaaccuccccaauucu

SEQ ID NO: 69718 - RNA, 19 nt, Artificial Sequence
  Description of Artificial Sequence: Synthetic oligonucleotide
ugugucagugcccauucau

SEQ ID NO: 69719 - RNA, 19 nt, Artificial Sequence
  Description of Artificial Sequence: Synthetic oligonucleotide
accuaguacaacuuauaaa

SEQ ID NO: 69720 - RNA, 19 nt, Artificial Sequence
  Description of Artificial Sequence: Synthetic oligonucleotide
gaccaaaguuccaugcuag

SEQ ID NO: 69721 - RNA, 19 nt, Artificial Sequence
  Description of Artificial Sequence: Synthetic oligonucleotide
auuuaggacgacugucuca

SEQ ID NO: 69722 - RNA, 19 nt, Artificial Sequence
  Description of Artificial Sequence: Synthetic oligonucleotide
auuuuaucaacggugucau

SEQ ID NO: 69723 - RNA, 19 nt, Artificial Sequence
  Description of Artificial Sequence: Synthetic oligonucleotide
caggucuaaaugcuagacc

SEQ ID NO: 69724 - RNA, 19 nt, Artificial Sequence
  Description of Artificial Sequence: Synthetic oligonucleotide
aucauggcccuccauuuug

SEQ ID NO: 69725 - RNA, 19 nt, Artificial Sequence
  Description of Artificial Sequence: Synthetic oligonucleotide
aacacuagcacgccccauu

SEQ ID NO: 69726 - RNA, 19 nt, Artificial Sequence
  Description of Artificial Sequence: Synthetic oligonucleotide
uuuauaccccaaaacuauu

SEQ ID NO: 69727 - RNA, 19 nt, Artificial Sequence
  Description of Artificial Sequence: Synthetic oligonucleotide
auuacccaauucuaauuau

SEQ ID NO: 69728 - RNA, 19 nt, Artificial Sequence
  Description of Artificial Sequence: Synthetic oligonucleotide
gauacugucaagguugugu

SEQ ID NO: 69729 - RNA, 19 nt, Artificial Sequence
  Description of Artificial Sequence: Synthetic oligonucleotide
aaugcuagaccuagcgacu

SEQ ID NO: 69730 - RNA, 19 nt, Artificial Sequence
  Description of Artificial Sequence: Synthetic oligonucleotide
uaaaucgcucucauggcuu

SEQ ID NO: 69731 - RNA, 19 nt, Artificial Sequence
  Description of Artificial Sequence: Synthetic oligonucleotide
ucacuguuaaaugggcgcc

SEQ ID NO: 69732 - RNA, 19 nt, Artificial Sequence
  Description of Artificial Sequence: Synthetic oligonucleotide
uuugaccagguacccaagu

SEQ ID NO: 69733 - RNA, 19 nt, Artificial Sequence
  Description of Artificial Sequence: Synthetic oligonucleotide
uaaccuaguacaacuuaua

SEQ ID NO: 69734 - RNA, 19 nt, Artificial Sequence
  Description of Artificial Sequence: Synthetic oligonucleotide
accuaaugcuuauugcccu

SEQ ID NO: 69735 - RNA, 19 nt, Artificial Sequence
  Description of Artificial Sequence: Synthetic oligonucleotide
uugaccucaugacauuaaa

SEQ ID NO: 69736 - RNA, 19 nt, Artificial Sequence
  Description of Artificial Sequence: Synthetic oligonucleotide
aguaaucuuaaugcuauua

SEQ ID NO: 69737 - RNA, 19 nt, Artificial Sequence
  Description of Artificial Sequence: Synthetic oligonucleotide
agcacucuuuaauuaguga

SEQ ID NO: 69738 - RNA, 19 nt, Artificial Sequence
  Description of Artificial Sequence: Synthetic oligonucleotide
acauugcauuaaucaauag

SEQ ID NO: 69739 - RNA, 19 nt, Artificial Sequence
  Description of Artificial Sequence: Synthetic oligonucleotide
accugauguaaugaaaaga

SEQ ID NO: 69740 - RNA, 19 nt, Artificial Sequence
  Description of Artificial Sequence: Synthetic oligonucleotide
cauuccucauuuaggcaag

SEQ ID NO: 69741 - RNA, 19 nt, Artificial Sequence
  Description of Artificial Sequence: Synthetic oligonucleotide
uuaugcccauuaauagugu

SEQ ID NO: 69742 - RNA, 19 nt, Artificial Sequence
  Description of Artificial Sequence: Synthetic oligonucleotide
acacuagcacgccccauuc

SEQ ID NO: 69743 - RNA, 19 nt, Artificial Sequence
  Description of Artificial Sequence: Synthetic oligonucleotide
ucacaauuaugcccauuaa

SEQ ID NO: 69744 - RNA, 19 nt, Artificial Sequence
  Description of Artificial Sequence: Synthetic oligonucleotide
aguuaccuccaccaaaauu

SEQ ID NO: 69745 - RNA, 19 nt, Artificial Sequence
  Description of Artificial Sequence: Synthetic oligonucleotide
uaagugugccccauuucuc

SEQ ID NO: 69746 - RNA, 19 nt, Artificial Sequence
  Description of Artificial Sequence: Synthetic oligonucleotide
acuguaaccaggaccacca

SEQ ID NO: 69747 - RNA, 19 nt, Artificial Sequence
  Description of Artificial Sequence: Synthetic oligonucleotide
aguaauuaacaaugaucuu

SEQ ID NO: 69748 - RNA, 19 nt, Artificial Sequence
  Description of Artificial Sequence: Synthetic oligonucleotide
guuaagcacuagcuggcgc

SEQ ID NO: 69749 - RNA, 19 nt, Artificial Sequence
  Description of Artificial Sequence: Synthetic oligonucleotide
gugagcuacaaaccuuacc

SEQ ID NO: 69750 - RNA, 19 nt, Artificial Sequence
  Description of Artificial Sequence: Synthetic oligonucleotide
auaguuaccuccaccaaaa

SEQ ID NO: 69751 - RNA, 19 nt, Artificial Sequence
  Description of Artificial Sequence: Synthetic oligonucleotide
cacgaccucucugugaucc

SEQ ID NO: 69752 - RNA, 19 nt, Artificial Sequence
  Description of Artificial Sequence: Synthetic oligonucleotide
accacgacccauaaaguug

SEQ ID NO: 69753 - RNA, 19 nt, Artificial Sequence
  Description of Artificial Sequence: Synthetic oligonucleotide
auguaaccauuuucuaaca

SEQ ID NO: 69754 - RNA, 19 nt, Artificial Sequence
  Description of Artificial Sequence: Synthetic oligonucleotide
gucuauuacauuuauuguu

SEQ ID NO: 69755 - RNA, 19 nt, Artificial Sequence
  Description of Artificial Sequence: Synthetic oligonucleotide
uccuaagcauuuugaccag

SEQ ID NO: 69756 - RNA, 19 nt, Artificial Sequence
  Description of Artificial Sequence: Synthetic oligonucleotide
aaccuccccaauucuuuca

SEQ ID NO: 69757 - RNA, 19 nt, Artificial Sequence
  Description of Artificial Sequence: Synthetic oligonucleotide
aaguugccagauccaccuc

SEQ ID NO: 69758 - RNA, 19 nt, Artificial Sequence
  Description of Artificial Sequence: Synthetic oligonucleotide
uugacacuacauugcauua

SEQ ID NO: 69759 - RNA, 19 nt, Artificial Sequence
  Description of Artificial Sequence: Synthetic oligonucleotide
uugauugcuguuguccacu

SEQ ID NO: 69760 - RNA, 19 nt, Artificial Sequence
  Description of Artificial Sequence: Synthetic oligonucleotide
acuaucaccauaguaucuu

SEQ ID NO: 69761 - RNA, 19 nt, Artificial Sequence
  Description of Artificial Sequence: Synthetic oligonucleotide
uaaaugggcgccaggcuuu

SEQ ID NO: 69762 - RNA, 19 nt, Artificial Sequence
  Description of Artificial Sequence: Synthetic oligonucleotide
agaguaggucacaaaacca

SEQ ID NO: 69763 - RNA, 19 nt, Artificial Sequence
  Description of Artificial Sequence: Synthetic oligonucleotide
aaaccuuacccagccagaa

SEQ ID NO: 69764 - RNA, 19 nt, Artificial Sequence
  Description of Artificial Sequence: Synthetic oligonucleotide
aacuagcuuuuggaaagcu

SEQ ID NO: 69765 - RNA, 19 nt, Artificial Sequence
  Description of Artificial Sequence: Synthetic oligonucleotide
acaccgcuaggacucaaug

SEQ ID NO: 69766 - RNA, 19 nt, Artificial Sequence
  Description of Artificial Sequence: Synthetic oligonucleotide
acaagaaggguuuccuguu

SEQ ID NO: 69767 - RNA, 19 nt, Artificial Sequence
  Description of Artificial Sequence: Synthetic oligonucleotide
aggacucaaugaaacuaac

SEQ ID NO: 69768 - RNA, 19 nt, Artificial Sequence
  Description of Artificial Sequence: Synthetic oligonucleotide
aggaaagacauuccucauu

SEQ ID NO: 69769 - RNA, 19 nt, Artificial Sequence
  Description of Artificial Sequence: Synthetic oligonucleotide
uaggcaaguaggguucuca

SEQ ID NO: 69770 - RNA, 19 nt, Artificial Sequence
  Description of Artificial Sequence: Synthetic oligonucleotide
gagauguucuuaacaccgc

SEQ ID NO: 69771 - RNA, 19 nt, Artificial Sequence
  Description of Artificial Sequence: Synthetic oligonucleotide
aauugacacuacauugcau

SEQ ID NO: 69772 - RNA, 19 nt, Artificial Sequence
  Description of Artificial Sequence: Synthetic oligonucleotide
uuuuaucaacggugucaug

SEQ ID NO: 69773 - RNA, 19 nt, Artificial Sequence
  Description of Artificial Sequence: Synthetic oligonucleotide
uaacuagcuuuuggaaagc

SEQ ID NO: 69774 - RNA, 19 nt, Artificial Sequence
  Description of Artificial Sequence: Synthetic oligonucleotide
caauuuuaucaacgguguc

SEQ ID NO: 69775 - RNA, 19 nt, Artificial Sequence
  Description of Artificial Sequence: Synthetic oligonucleotide
aacugaacauugacagugu

SEQ ID NO: 69776 - RNA, 19 nt, Artificial Sequence
  Description of Artificial Sequence: Synthetic oligonucleotide
uugcaaacuguggcuauga

SEQ ID NO: 69777 - RNA, 19 nt, Artificial Sequence
  Description of Artificial Sequence: Synthetic oligonucleotide
ugagacaauuuaguuguuu

SEQ ID NO: 69778 - RNA, 19 nt, Artificial Sequence
  Description of Artificial Sequence: Synthetic oligonucleotide
ggcaauauaccugauguaa

SEQ ID NO: 69779 - RNA, 19 nt, Artificial Sequence
  Description of Artificial Sequence: Synthetic oligonucleotide
caugagccuauuuucugca

SEQ ID NO: 69780 - RNA, 19 nt, Artificial Sequence
  Description of Artificial Sequence: Synthetic oligonucleotide
aggcuuuacagaauccucu

SEQ ID NO: 69781 - RNA, 19 nt, Artificial Sequence
  Description of Artificial Sequence: Synthetic oligonucleotide
gacccauaaaguugccaga

SEQ ID NO: 69782 - RNA, 19 nt, Artificial Sequence
  Description of Artificial Sequence: Synthetic oligonucleotide
ccuuaccuaaugcuuauug

SEQ ID NO: 69783 - RNA, 19 nt, Artificial Sequence
  Description of Artificial Sequence: Synthetic oligonucleotide
gguaaauguggaauggaga

SEQ ID NO: 69784 - RNA, 19 nt, Artificial Sequence
  Description of Artificial Sequence: Synthetic oligonucleotide
agaaaccuucguauuuaag

SEQ ID NO: 69785 - RNA, 19 nt, Artificial Sequence
  Description of Artificial Sequence: Synthetic oligonucleotide
aaccuuacccagccagaaa

SEQ ID NO: 69786 - RNA, 19 nt, Artificial Sequence
  Description of Artificial Sequence: Synthetic oligonucleotide
guacaacuuauaaacaggu

SEQ ID NO: 69787 - RNA, 19 nt, Artificial Sequence
  Description of Artificial Sequence: Synthetic oligonucleotide
uaaccuccccaauucuuuc

SEQ ID NO: 69788 - RNA, 19 nt, Artificial Sequence
  Description of Artificial Sequence: Synthetic oligonucleotide
cucucagguuauauucuuc

SEQ ID NO: 69789 - RNA, 19 nt, Artificial Sequence
  Description of Artificial Sequence: Synthetic oligonucleotide
agauuacucuuaccuugcu

SEQ ID NO: 69790 - RNA, 19 nt, Artificial Sequence
  Description of Artificial Sequence: Synthetic oligonucleotide
ccacgacccauaaaguugc

SEQ ID NO: 69791 - RNA, 19 nt, Artificial Sequence
  Description of Artificial Sequence: Synthetic oligonucleotide
guagguguuucuuuacagu

SEQ ID NO: 69792 - RNA, 19 nt, Artificial Sequence
  Description of Artificial Sequence: Synthetic oligonucleotide
uggcuuacuuuuccacagu

SEQ ID NO: 69793 - RNA, 19 nt, Artificial Sequence
  Description of Artificial Sequence: Synthetic oligonucleotide
augaaauuguuaagcacua

SEQ ID NO: 69794 - RNA, 19 nt, Artificial Sequence
  Description of Artificial Sequence: Synthetic oligonucleotide
gacuugagacaauuuaguu

SEQ ID NO: 69795 - RNA, 19 nt, Artificial Sequence
  Description of Artificial Sequence: Synthetic oligonucleotide
agcgacuguggcaacuauc

SEQ ID NO: 69796 - RNA, 19 nt, Artificial Sequence
  Description of Artificial Sequence: Synthetic oligonucleotide
cgacccauaaaguugccag

SEQ ID NO: 69797 - RNA, 19 nt, Artificial Sequence
  Description of Artificial Sequence: Synthetic oligonucleotide
gaccuagcgacuguggcaa

SEQ ID NO: 69798 - RNA, 19 nt, Artificial Sequence
  Description of Artificial Sequence: Synthetic oligonucleotide
gaucaucguuccuccugug

SEQ ID NO: 69799 - RNA, 19 nt, Artificial Sequence
  Description of Artificial Sequence: Synthetic oligonucleotide
cagauuuaacuagcuuuug

SEQ ID NO: 69800 - RNA, 19 nt, Artificial Sequence
  Description of Artificial Sequence: Synthetic oligonucleotide
uaacuaccucugcugccac

SEQ ID NO: 69801 - RNA, 19 nt, Artificial Sequence
  Description of Artificial Sequence: Synthetic oligonucleotide
auagggacugccugagcuu

SEQ ID NO: 69802 - RNA, 19 nt, Artificial Sequence
  Description of Artificial Sequence: Synthetic oligonucleotide
ucuguaagugugccccauu

SEQ ID NO: 69803 - RNA, 19 nt, Artificial Sequence
  Description of Artificial Sequence: Synthetic oligonucleotide
guaucuuaugccuccacuu

SEQ ID NO: 69804 - RNA, 19 nt, Artificial Sequence
  Description of Artificial Sequence: Synthetic oligonucleotide
ugcacugcuuauucacaua

SEQ ID NO: 69805 - RNA, 19 nt, Artificial Sequence
  Description of Artificial Sequence: Synthetic oligonucleotide
ccaugcuagcauugcaugc

SEQ ID NO: 69806 - RNA, 19 nt, Artificial Sequence
  Description of Artificial Sequence: Synthetic oligonucleotide
agccuuaccuaaugcuuau

SEQ ID NO: 69807 - RNA, 19 nt, Artificial Sequence
  Description of Artificial Sequence: Synthetic oligonucleotide
aggcaaguaggguucucau

SEQ ID NO: 69808 - RNA, 19 nt, Artificial Sequence
  Description of Artificial Sequence: Synthetic oligonucleotide
cacaauuaugcccauuaau

SEQ ID NO: 69809 - RNA, 19 nt, Artificial Sequence
  Description of Artificial Sequence: Synthetic oligonucleotide
guuaaaugggcgccaggcu

SEQ ID NO: 69810 - RNA, 19 nt, Artificial Sequence
  Description of Artificial Sequence: Synthetic oligonucleotide
ccccuaaauugcaagucag

SEQ ID NO: 69811 - RNA, 19 nt, Artificial Sequence
  Description of Artificial Sequence: Synthetic oligonucleotide
agccagaaaccuucguauu

SEQ ID NO: 69812 - RNA, 19 nt, Artificial Sequence
  Description of Artificial Sequence: Synthetic oligonucleotide
gacgacugucucaaaguaa

SEQ ID NO: 69813 - RNA, 19 nt, Artificial Sequence
  Description of Artificial Sequence: Synthetic oligonucleotide
cuucguauuuaagauggua

SEQ ID NO: 69814 - RNA, 19 nt, Artificial Sequence
  Description of Artificial Sequence: Synthetic oligonucleotide
cacuagcacgccccauucc

SEQ ID NO: 69815 - RNA, 19 nt, Artificial Sequence
  Description of Artificial Sequence: Synthetic oligonucleotide
gaaauggggagaauagauu

SEQ ID NO: 69816 - RNA, 19 nt, Artificial Sequence
  Description of Artificial Sequence: Synthetic oligonucleotide
cugacaacuccucgcucuc

SEQ ID NO: 69817 - RNA, 19 nt, Artificial Sequence
  Description of Artificial Sequence: Synthetic oligonucleotide
cauggguccauaauuugau

SEQ ID NO: 69818 - RNA, 19 nt, Artificial Sequence
  Description of Artificial Sequence: Synthetic oligonucleotide
caccgcuaggacucaauga

SEQ ID NO: 69819 - RNA, 19 nt, Artificial Sequence
  Description of Artificial Sequence: Synthetic oligonucleotide
ggaauguugucuauuacau

SEQ ID NO: 69820 - RNA, 19 nt, Artificial Sequence
  Description of Artificial Sequence: Synthetic oligonucleotide
aaugggcgccaggcuuuac

SEQ ID NO: 69821 - RNA, 19 nt, Artificial Sequence
  Description of Artificial Sequence: Synthetic oligonucleotide
gcugacuaucaccauagua

SEQ ID NO: 69822 - RNA, 19 nt, Artificial Sequence
  Description of Artificial Sequence: Synthetic oligonucleotide
accugauuauagguuguaa

SEQ ID NO: 69823 - RNA, 19 nt, Artificial Sequence
  Description of Artificial Sequence: Synthetic oligonucleotide
agcauugcaugcauccaaa

SEQ ID NO: 69824 - RNA, 19 nt, Artificial Sequence
  Description of Artificial Sequence: Synthetic oligonucleotide
gugucagugcccauucauc

SEQ ID NO: 69825 - RNA, 19 nt, Artificial Sequence
  Description of Artificial Sequence: Synthetic oligonucleotide
agcuuuccugacaacuccu

SEQ ID NO: 69826 - RNA, 19 nt, Artificial Sequence
  Description of Artificial Sequence: Synthetic oligonucleotide
aacaccgcuaggacucaau

SEQ ID NO: 69827 - RNA, 19 nt, Artificial Sequence
  Description of Artificial Sequence: Synthetic oligonucleotide
ggacucaaugaaacuaaca

SEQ ID NO: 69828 - RNA, 19 nt, Artificial Sequence
  Description of Artificial Sequence: Synthetic oligonucleotide
gacuaucaccauaguaucu

SEQ ID NO: 69829 - RNA, 19 nt, Artificial Sequence
  Description of Artificial Sequence: Synthetic oligonucleotide
cauuuugaccagguaccca

SEQ ID NO: 69830 - RNA, 19 nt, Artificial Sequence
  Description of Artificial Sequence: Synthetic oligonucleotide
cagccagaaaccuucguau

SEQ ID NO: 69831 - RNA, 19 nt, Artificial Sequence
  Description of Artificial Sequence: Synthetic oligonucleotide
cuugacuauggaucaucgu

SEQ ID NO: 69832 - RNA, 19 nt, Artificial Sequence
  Description of Artificial Sequence: Synthetic oligonucleotide
gcuagaccuagcgacugug

SEQ ID NO: 69833 - RNA, 19 nt, Artificial Sequence
  Description of Artificial Sequence: Synthetic oligonucleotide
ccuaaauugcaagucagua

SEQ ID NO: 69834 - RNA, 19 nt, Artificial Sequence
  Description of Artificial Sequence: Synthetic oligonucleotide
uuaggacgacugucucaaa

SEQ ID NO: 69835 - RNA, 19 nt, Artificial Sequence
  Description of Artificial Sequence: Synthetic oligonucleotide
ggacgacugucucaaagua

SEQ ID NO: 69836 - RNA, 19 nt, Artificial Sequence
  Description of Artificial Sequence: Synthetic oligonucleotide
ccuaagcauuuugaccagg

SEQ ID NO: 69837 - RNA, 19 nt, Artificial Sequence
  Description of Artificial Sequence: Synthetic oligonucleotide
acggugucaugaucaucaa

SEQ ID NO: 69838 - RNA, 19 nt, Artificial Sequence
  Description of Artificial Sequence: Synthetic oligonucleotide
gcccaucaaccuugugugg

SEQ ID NO: 69839 - RNA, 19 nt, Artificial Sequence
  Description of Artificial Sequence: Synthetic oligonucleotide
aaaugggcgccaggcuuua

SEQ ID NO: 69840 - RNA, 19 nt, Artificial Sequence
  Description of Artificial Sequence: Synthetic oligonucleotide
cacuguuaaaugggcgcca

SEQ ID NO: 69841 - RNA, 19 nt, Artificial Sequence
  Description of Artificial Sequence: Synthetic oligonucleotide
guuaaccuccccaauucuu

SEQ ID NO: 69842 - RNA, 19 nt, Artificial Sequence
  Description of Artificial Sequence: Synthetic oligonucleotide
caccacgacccauaaaguu

SEQ ID NO: 69843 - RNA, 19 nt, Artificial Sequence
  Description of Artificial Sequence: Synthetic oligonucleotide
ggcgcaacaguagacauuu

SEQ ID NO: 69844 - RNA, 19 nt, Artificial Sequence
  Description of Artificial Sequence: Synthetic oligonucleotide
cuguaagugugccccauuu

SEQ ID NO: 69845 - RNA, 19 nt, Artificial Sequence
  Description of Artificial Sequence: Synthetic oligonucleotide
uaacaccgcuaggacucaa

SEQ ID NO: 69846 - RNA, 19 nt, Artificial Sequence
  Description of Artificial Sequence: Synthetic oligonucleotide
gucagugcccauucaucau

SEQ ID NO: 69847 - RNA, 19 nt, Artificial Sequence
  Description of Artificial Sequence: Synthetic oligonucleotide
ccgagcacacauugcagca

SEQ ID NO: 69848 - RNA, 19 nt, Artificial Sequence
  Description of Artificial Sequence: Synthetic oligonucleotide
gggcaauauaccugaugua

SEQ ID NO: 69849 - RNA, 19 nt, Artificial Sequence
  Description of Artificial Sequence: Synthetic oligonucleotide
cuagcgacuguggcaacua

SEQ ID NO: 69850 - RNA, 19 nt, Artificial Sequence
  Description of Artificial Sequence: Synthetic oligonucleotide
ccugacaacuccucgcucu

SEQ ID NO: 69851 - RNA, 19 nt, Artificial Sequence
  Description of Artificial Sequence: Synthetic oligonucleotide
ccuguuuaagcugcaguaa

SEQ ID NO: 69852 - RNA, 19 nt, Artificial Sequence
  Description of Artificial Sequence: Synthetic oligonucleotide
caacagcagagcacauacu

SEQ ID NO: 69853 - RNA, 19 nt, Artificial Sequence
  Description of Artificial Sequence: Synthetic oligonucleotide
agcacgccccauuccccuu

SEQ ID NO: 69854 - RNA, 19 nt, Artificial Sequence
  Description of Artificial Sequence: Synthetic oligonucleotide
ccauagggacugccugagc

SEQ ID NO: 69855 - RNA, 19 nt, Artificial Sequence
  Description of Artificial Sequence: Synthetic oligonucleotide
ggcaaguaggguucucauu

SEQ ID NO: 69856 - RNA, 19 nt, Artificial Sequence
  Description of Artificial Sequence: Synthetic oligonucleotide
gucuguaagugugccccau

SEQ ID NO: 69857 - RNA, 19 nt, Artificial Sequence
  Description of Artificial Sequence: Synthetic oligonucleotide
ccgcuaggacucaaugaaa

SEQ ID NO: 69858 - RNA, 19 nt, Artificial Sequence
  Description of Artificial Sequence: Synthetic oligonucleotide
ccaccacgacccauaaagu

SEQ ID NO: 69859 - RNA, 19 nt, Artificial Sequence
  Description of Artificial Sequence: Synthetic oligonucleotide
ccuaaugcuuauugcccuu

SEQ ID NO: 69860 - RNA, 19 nt, Artificial Sequence
  Description of Artificial Sequence: Synthetic oligonucleotide
gggcuugaaugaaauuguu

SEQ ID NO: 69861 - RNA, 19 nt, Artificial Sequence
  Description of Artificial Sequence: Synthetic oligonucleotide
ccuagcgacuguggcaacu

SEQ ID NO: 69862 - RNA, 19 nt, Artificial Sequence
  Description of Artificial Sequence: Synthetic oligonucleotide
gcacgccccauuccccuuu

SEQ ID NO: 69863 - RNA, 19 nt, Artificial Sequence
  Description of Artificial Sequence: Synthetic oligonucleotide
cacgccccauuccccuuuu

SEQ ID NO: 69864 - RNA, 19 nt, Artificial Sequence
  Description of Artificial Sequence: Synthetic oligonucleotide
agaucuagaaguaacaagc

SEQ ID NO: 69865 - RNA, 19 nt, Artificial Sequence
  Description of Artificial Sequence: Synthetic oligonucleotide
uuaagacugguguugagcg

SEQ ID NO: 69866 - RNA, 19 nt, Artificial Sequence
  Description of Artificial Sequence: Synthetic oligonucleotide
agccacauagacuacgucc

SEQ ID NO: 69867 - RNA, 19 nt, Artificial Sequence
  Description of Artificial Sequence: Synthetic oligonucleotide
uucuauuguauaaaaccag

SEQ ID NO: 69868 - RNA, 19 nt, Artificial Sequence
  Description of Artificial Sequence: Synthetic oligonucleotide
acaccauagagacagcuac

SEQ ID NO: 69869 - RNA, 19 nt, Artificial Sequence
  Description of Artificial Sequence: Synthetic oligonucleotide
uagguauuguaacugagca

SEQ ID NO: 69870 - RNA, 19 nt, Artificial Sequence
  Description of Artificial Sequence: Synthetic oligonucleotide
aacugagcagcuaagcgcc

SEQ ID NO: 69871 - RNA, 19 nt, Artificial Sequence
  Description of Artificial Sequence: Synthetic oligonucleotide
gagaauauacgccaucacc

SEQ ID NO: 69872 - RNA, 19 nt, Artificial Sequence
  Description of Artificial Sequence: Synthetic oligonucleotide
auuggauuacugcuauggc

SEQ ID NO: 69873 - RNA, 19 nt, Artificial Sequence
  Description of Artificial Sequence: Synthetic oligonucleotide
guaacugagcagcuaagcg

SEQ ID NO: 69874 - RNA, 19 nt, Artificial Sequence
  Description of Artificial Sequence: Synthetic oligonucleotide
ucauugcccaaguagcugg

SEQ ID NO: 69875 - RNA, 19 nt, Artificial Sequence
  Description of Artificial Sequence: Synthetic oligonucleotide
aacgcuccuaccucccucc

SEQ ID NO: 69876 - RNA, 19 nt, Artificial Sequence
  Description of Artificial Sequence: Synthetic oligonucleotide
gaaguaacaagccgguaug

SEQ ID NO: 69877 - RNA, 19 nt, Artificial Sequence
  Description of Artificial Sequence: Synthetic oligonucleotide
uacucuuguguacucggcg

SEQ ID NO: 69878 - RNA, 19 nt, Artificial Sequence
  Description of Artificial Sequence: Synthetic oligonucleotide
agcacuacuaucuccaccu

SEQ ID NO: 69879 - RNA, 19 nt, Artificial Sequence
  Description of Artificial Sequence: Synthetic oligonucleotide
uaacaagccgguauggcca

SEQ ID NO: 69880 - RNA, 19 nt, Artificial Sequence
  Description of Artificial Sequence: Synthetic oligonucleotide
guacacucgaagcuggugg

SEQ ID NO: 69881 - RNA, 19 nt, Artificial Sequence
  Description of Artificial Sequence: Synthetic oligonucleotide
gguauuguaacugagcagc

SEQ ID NO: 69882 - RNA, 19 nt, Artificial Sequence
  Description of Artificial Sequence: Synthetic oligonucleotide
aucuggcccaccuagacag

SEQ ID NO: 69883 - RNA, 19 nt, Artificial Sequence
  Description of Artificial Sequence: Synthetic oligonucleotide
ucacccuacauaucgguag

SEQ ID NO: 69884 - RNA, 19 nt, Artificial Sequence
  Description of Artificial Sequence: Synthetic oligonucleotide
uuucagaggcgggagaugg

SEQ ID NO: 69885 - RNA, 19 nt, Artificial Sequence
  Description of Artificial Sequence: Synthetic oligonucleotide
cucccuagggauuaugucc

SEQ ID NO: 69886 - RNA, 19 nt, Artificial Sequence
  Description of Artificial Sequence: Synthetic oligonucleotide
gaaacguugggccucccag

SEQ ID NO: 69887 - RNA, 19 nt, Artificial Sequence
  Description of Artificial Sequence: Synthetic oligonucleotide
auagacuacguccaucaug

SEQ ID NO: 69888 - RNA, 19 nt, Artificial Sequence
  Description of Artificial Sequence: Synthetic oligonucleotide
agaaguaacaagccgguau

SEQ ID NO: 69889 - RNA, 19 nt, Artificial Sequence
  Description of Artificial Sequence: Synthetic oligonucleotide
agcccgaacaucccuacgc

SEQ ID NO: 69890 - RNA, 19 nt, Artificial Sequence
  Description of Artificial Sequence: Synthetic oligonucleotide
agaauauacgccaucacca

SEQ ID NO: 69891 - RNA, 19 nt, Artificial Sequence
  Description of Artificial Sequence: Synthetic oligonucleotide
auaucgacugugcagcaag

SEQ ID NO: 69892 - RNA, 19 nt, Artificial Sequence
  Description of Artificial Sequence: Synthetic oligonucleotide
agugucacugcccuccgac

SEQ ID NO: 69893 - RNA, 19 nt, Artificial Sequence
  Description of Artificial Sequence: Synthetic oligonucleotide
agucucuccggcucggugc

SEQ ID NO: 69894 - RNA, 19 nt, Artificial Sequence
  Description of Artificial Sequence: Synthetic oligonucleotide
uacauaucgguagacagcu

SEQ ID NO: 69895 - RNA, 19 nt, Artificial Sequence
  Description of Artificial Sequence: Synthetic oligonucleotide
ucgaguugccuacacacug

SEQ ID NO: 69896 - RNA, 19 nt, Artificial Sequence
  Description of Artificial Sequence: Synthetic oligonucleotide
ugugguucgggaguaaaag

SEQ ID NO: 69897 - RNA, 19 nt, Artificial Sequence
  Description of Artificial Sequence: Synthetic oligonucleotide
uuuagaccauuguacaggu

SEQ ID NO: 69898 - RNA, 19 nt, Artificial Sequence
  Description of Artificial Sequence: Synthetic oligonucleotide
guaacaagccgguauggcc

SEQ ID NO: 69899 - RNA, 19 nt, Artificial Sequence
  Description of Artificial Sequence: Synthetic oligonucleotide
guaucauugcccaaguagc

SEQ ID NO: 69900 - RNA, 19 nt, Artificial Sequence
  Description of Artificial Sequence: Synthetic oligonucleotide
ggugugugaagacaaagag

SEQ ID NO: 69901 - RNA, 19 nt, Artificial Sequence
  Description of Artificial Sequence: Synthetic oligonucleotide
cuacauaucgguagacagc

SEQ ID NO: 69902 - RNA, 19 nt, Artificial Sequence
  Description of Artificial Sequence: Synthetic oligonucleotide
cauaucgguagacagcuug

SEQ ID NO: 69903 - RNA, 19 nt, Artificial Sequence
  Description of Artificial Sequence: Synthetic oligonucleotide
ucuuuggcacuucauuccc

SEQ ID NO: 69904 - RNA, 19 nt, Artificial Sequence
  Description of Artificial Sequence: Synthetic oligonucleotide
aguaacaagccgguauggc

SEQ ID NO: 69905 - RNA, 19 nt, Artificial Sequence
  Description of Artificial Sequence: Synthetic oligonucleotide
aauaugacugggguggcca

SEQ ID NO: 69906 - RNA, 19 nt, Artificial Sequence
  Description of Artificial Sequence: Synthetic oligonucleotide
ugugguaccaguggaugcg

SEQ ID NO: 69907 - RNA, 19 nt, Artificial Sequence
  Description of Artificial Sequence: Synthetic oligonucleotide
ucccuagggauuauguccc

SEQ ID NO: 69908 - RNA, 19 nt, Artificial Sequence
  Description of Artificial Sequence: Synthetic oligonucleotide
acugguaagccgugaugcc

SEQ ID NO: 69909 - RNA, 19 nt, Artificial Sequence
  Description of Artificial Sequence: Synthetic oligonucleotide
ucgagugggacauucuggc

SEQ ID NO: 69910 - RNA, 19 nt, Artificial Sequence
  Description of Artificial Sequence: Synthetic oligonucleotide
ugccgcucucacuagauag

SEQ ID NO: 69911 - RNA, 19 nt, Artificial Sequence
  Description of Artificial Sequence: Synthetic oligonucleotide
uaucauugcccaaguagcu

SEQ ID NO: 69912 - RNA, 19 nt, Artificial Sequence
  Description of Artificial Sequence: Synthetic oligonucleotide
aaguaacaagccgguaugg

SEQ ID NO: 69913 - RNA, 19 nt, Artificial Sequence
  Description of Artificial Sequence: Synthetic oligonucleotide
cacgcuauucuugaugugg

SEQ ID NO: 69914 - RNA, 19 nt, Artificial Sequence
  Description of Artificial Sequence: Synthetic oligonucleotide
acuacguccaucaugucug

SEQ ID NO: 69915 - RNA, 19 nt, Artificial Sequence
  Description of Artificial Sequence: Synthetic oligonucleotide
aacguugggccucccagug

SEQ ID NO: 69916 - RNA, 19 nt, Artificial Sequence
  Description of Artificial Sequence: Synthetic oligonucleotide
cuugccgcuagucucuccg

SEQ ID NO: 69917 - RNA, 19 nt, Artificial Sequence
  Description of Artificial Sequence: Synthetic oligonucleotide
agcacagacucuugagcac

SEQ ID NO: 69918 - RNA, 19 nt, Artificial Sequence
  Description of Artificial Sequence: Synthetic oligonucleotide
gugguucgggaguaaaagg

SEQ ID NO: 69919 - RNA, 19 nt, Artificial Sequence
  Description of Artificial Sequence: Synthetic oligonucleotide
acucccuagggauuauguc

SEQ ID NO: 69920 - RNA, 19 nt, Artificial Sequence
  Description of Artificial Sequence: Synthetic oligonucleotide
auaguguaccacucccuag

SEQ ID NO: 69921 - RNA, 19 nt, Artificial Sequence
  Description of Artificial Sequence: Synthetic oligonucleotide
ugcagauuggugaguuugc

SEQ ID NO: 69922 - RNA, 19 nt, Artificial Sequence
  Description of Artificial Sequence: Synthetic oligonucleotide
guuguuauggugccgggga

SEQ ID NO: 69923 - RNA, 19 nt, Artificial Sequence
  Description of Artificial Sequence: Synthetic oligonucleotide
aacaagccgguauggccag

SEQ ID NO: 69924 - RNA, 19 nt, Artificial Sequence
  Description of Artificial Sequence: Synthetic oligonucleotide
ggcauuuuagguuucuaac

SEQ ID NO: 69925 - RNA, 19 nt, Artificial Sequence
  Description of Artificial Sequence: Synthetic oligonucleotide
guagguauuguaacugagc

SEQ ID NO: 69926 - RNA, 19 nt, Artificial Sequence
  Description of Artificial Sequence: Synthetic oligonucleotide
agguugucacggcuggcgc

SEQ ID NO: 69927 - RNA, 19 nt, Artificial Sequence
  Description of Artificial Sequence: Synthetic oligonucleotide
guggaugcggguaucauug

SEQ ID NO: 69928 - RNA, 19 nt, Artificial Sequence
  Description of Artificial Sequence: Synthetic oligonucleotide
ugguuuggcauuuuagguu

SEQ ID NO: 69929 - RNA, 19 nt, Artificial Sequence
  Description of Artificial Sequence: Synthetic oligonucleotide
ugagccacauagacuacgu

SEQ ID NO: 69930 - RNA, 19 nt, Artificial Sequence
  Description of Artificial Sequence: Synthetic oligonucleotide
ggaguuaggaauuggauua

SEQ ID NO: 69931 - RNA, 19 nt, Artificial Sequence
  Description of Artificial Sequence: Synthetic oligonucleotide
aaacguugggccucccagu

SEQ ID NO: 69932 - RNA, 19 nt, Artificial Sequence
  Description of Artificial Sequence: Synthetic oligonucleotide
ugucauugguguacagaca

SEQ ID NO: 69933 - RNA, 19 nt, Artificial Sequence
  Description of Artificial Sequence: Synthetic oligonucleotide
acagagaaacguugggccu

SEQ ID NO: 69934 - RNA, 19 nt, Artificial Sequence
  Description of Artificial Sequence: Synthetic oligonucleotide
uuguuauggugccggggag

SEQ ID NO: 69935 - RNA, 19 nt, Artificial Sequence
  Description of Artificial Sequence: Synthetic oligonucleotide
cucccggagaauauacgcc

SEQ ID NO: 69936 - RNA, 19 nt, Artificial Sequence
  Description of Artificial Sequence: Synthetic oligonucleotide
cuggggacgcgcucgagcg

SEQ ID NO: 69937 - RNA, 19 nt, Artificial Sequence
  Description of Artificial Sequence: Synthetic oligonucleotide
uccgacggcgugagcaugg

SEQ ID NO: 69938 - RNA, 19 nt, Artificial Sequence
  Description of Artificial Sequence: Synthetic oligonucleotide
gaguugccuacacacugcc

SEQ ID NO: 69939 - RNA, 19 nt, Artificial Sequence
  Description of Artificial Sequence: Synthetic oligonucleotide
auaucgguagacagcuugg

SEQ ID NO: 69940 - RNA, 19 nt, Artificial Sequence
  Description of Artificial Sequence: Synthetic oligonucleotide
uucugcaaggacgaugccu

SEQ ID NO: 69941 - RNA, 19 nt, Artificial Sequence
  Description of Artificial Sequence: Synthetic oligonucleotide
uuuaugggucacccuacau

SEQ ID NO: 69942 - RNA, 19 nt, Artificial Sequence
  Description of Artificial Sequence: Synthetic oligonucleotide
uaucgacugugcagcaagc

SEQ ID NO: 69943 - RNA, 19 nt, Artificial Sequence
  Description of Artificial Sequence: Synthetic oligonucleotide
aagcccgaacaucccuacg

SEQ ID NO: 69944 - RNA, 19 nt, Artificial Sequence
  Description of Artificial Sequence: Synthetic oligonucleotide
uaauaucgacugugcagca

SEQ ID NO: 69945 - RNA, 19 nt, Artificial Sequence
  Description of Artificial Sequence: Synthetic oligonucleotide
cccaucuuaaggaguaugg

SEQ ID NO: 69946 - RNA, 19 nt, Artificial Sequence
  Description of Artificial Sequence: Synthetic oligonucleotide
aggacgggaaguguugccg

SEQ ID NO: 69947 - RNA, 19 nt, Artificial Sequence
  Description of Artificial Sequence: Synthetic oligonucleotide
gagucuuuaggcaccuggc

SEQ ID NO: 69948 - RNA, 19 nt, Artificial Sequence
  Description of Artificial Sequence: Synthetic oligonucleotide
ugggaggccgaugaugaag

SEQ ID NO: 69949 - RNA, 19 nt, Artificial Sequence
  Description of Artificial Sequence: Synthetic oligonucleotide
aaacgguggcuggaagcac

SEQ ID NO: 69950 - RNA, 19 nt, Artificial Sequence
  Description of Artificial Sequence: Synthetic oligonucleotide
cugguuccugcaaauauga

SEQ ID NO: 69951 - RNA, 19 nt, Artificial Sequence
  Description of Artificial Sequence: Synthetic oligonucleotide
cuacucuuguguacucggc

SEQ ID NO: 69952 - RNA, 19 nt, Artificial Sequence
  Description of Artificial Sequence: Synthetic oligonucleotide
gcucguguugccuuggacc

SEQ ID NO: 69953 - RNA, 19 nt, Artificial Sequence
  Description of Artificial Sequence: Synthetic oligonucleotide
guagcugucgguagggcug

SEQ ID NO: 69954 - RNA, 19 nt, Artificial Sequence
  Description of Artificial Sequence: Synthetic oligonucleotide
guugccuacacacugcccu

SEQ ID NO: 69955 - RNA, 19 nt, Artificial Sequence
  Description of Artificial Sequence: Synthetic oligonucleotide
uguacacucgaagcuggug

SEQ ID NO: 69956 - RNA, 19 nt, Artificial Sequence
  Description of Artificial Sequence: Synthetic oligonucleotide
gacuacguccaucaugucu

SEQ ID NO: 69957 - RNA, 19 nt, Artificial Sequence
  Description of Artificial Sequence: Synthetic oligonucleotide
cuauucucucagcugacca

SEQ ID NO: 69958 - RNA, 19 nt, Artificial Sequence
  Description of Artificial Sequence: Synthetic oligonucleotide
agccggaaggguugagaac

SEQ ID NO: 69959 - RNA, 19 nt, Artificial Sequence
  Description of Artificial Sequence: Synthetic oligonucleotide
ucggcgcccgugauggagg

SEQ ID NO: 69960 - RNA, 19 nt, Artificial Sequence
  Description of Artificial Sequence: Synthetic oligonucleotide
cucgcccucgaguggaagg

SEQ ID NO: 69961 - RNA, 19 nt, Artificial Sequence
  Description of Artificial Sequence: Synthetic oligonucleotide
uggcccaccuagacagugg

SEQ ID NO: 69962 - RNA, 19 nt, Artificial Sequence
  Description of Artificial Sequence: Synthetic oligonucleotide
gcucccagcggccagcucg

SEQ ID NO: 69963 - RNA, 19 nt, Artificial Sequence
  Description of Artificial Sequence: Synthetic oligonucleotide
gacucccggagaauauacg

SEQ ID NO: 69964 - RNA, 19 nt, Artificial Sequence
  Description of Artificial Sequence: Synthetic oligonucleotide
gguguacagacagugggag

SEQ ID NO: 69965 - RNA, 19 nt, Artificial Sequence
  Description of Artificial Sequence: Synthetic oligonucleotide
ggaguaguccccuggcucc

SEQ ID NO: 69966 - RNA, 19 nt, Artificial Sequence
  Description of Artificial Sequence: Synthetic oligonucleotide
ggucacaccggcgugaggc

SEQ ID NO: 69967 - RNA, 19 nt, Artificial Sequence
  Description of Artificial Sequence: Synthetic oligonucleotide
cucuacucuuguguacucg

SEQ ID NO: 69968 - RNA, 19 nt, Artificial Sequence
  Description of Artificial Sequence: Synthetic oligonucleotide
ugcgcuacgcuagugucac

SEQ ID NO: 69969 - RNA, 19 nt, Artificial Sequence
  Description of Artificial Sequence: Synthetic oligonucleotide
uauugcggcugcugcccgg

SEQ ID NO: 69970 - RNA, 19 nt, Artificial Sequence
  Description of Artificial Sequence: Synthetic oligonucleotide
agacggccauuucugaaga

SEQ ID NO: 69971 - RNA, 19 nt, Artificial Sequence
  Description of Artificial Sequence: Synthetic oligonucleotide
gaggccggucuucaugcag

SEQ ID NO: 69972 - RNA, 19 nt, Artificial Sequence
  Description of Artificial Sequence: Synthetic oligonucleotide
ggaguauggauucucccca

SEQ ID NO: 69973 - RNA, 19 nt, Artificial Sequence
  Description of Artificial Sequence: Synthetic oligonucleotide
acggcgugagcaugggcuc

SEQ ID NO: 69974 - RNA, 19 nt, Artificial Sequence
  Description of Artificial Sequence: Synthetic oligonucleotide
gaguauggauucuccccac

SEQ ID NO: 69975 - RNA, 19 nt, Artificial Sequence
  Description of Artificial Sequence: Synthetic oligonucleotide
cccauccuaaaucuggccc

SEQ ID NO: 69976 - RNA, 19 nt, Artificial Sequence
  Description of Artificial Sequence: Synthetic oligonucleotide
gacgcgcucgagcgcagcg

SEQ ID NO: 69977 - RNA, 19 nt, Artificial Sequence
  Description of Artificial Sequence: Synthetic oligonucleotide
gcgguuguuggucuacacg

SEQ ID NO: 69978 - RNA, 19 nt, Artificial Sequence
  Description of Artificial Sequence: Synthetic oligonucleotide
guugagcggguaugagcgg

SEQ ID NO: 69979 - RNA, 19 nt, Artificial Sequence
  Description of Artificial Sequence: Synthetic oligonucleotide
cauugcccaaguagcuggc

SEQ ID NO: 69980 - RNA, 19 nt, Artificial Sequence
  Description of Artificial Sequence: Synthetic oligonucleotide
gaauauacgccaucaccau

SEQ ID NO: 69981 - RNA, 19 nt, Artificial Sequence
  Description of Artificial Sequence: Synthetic oligonucleotide
cgguuguuggucuacacgc

SEQ ID NO: 69982 - RNA, 19 nt, Artificial Sequence
  Description of Artificial Sequence: Synthetic oligonucleotide
aguugccuacacacugccc

SEQ ID NO: 69983 - RNA, 19 nt, Artificial Sequence
  Description of Artificial Sequence: Synthetic oligonucleotide
cagcuacacaccacucccg

SEQ ID NO: 69984 - RNA, 19 nt, Artificial Sequence
  Description of Artificial Sequence: Synthetic oligonucleotide
agaaacguugggccuccca

SEQ ID NO: 69985 - RNA, 19 nt, Artificial Sequence
  Description of Artificial Sequence: Synthetic oligonucleotide
ucgaguggaaggccgucuc

SEQ ID NO: 69986 - RNA, 19 nt, Artificial Sequence
  Description of Artificial Sequence: Synthetic oligonucleotide
ugguuccugcaaauaugac

SEQ ID NO: 69987 - RNA, 19 nt, Artificial Sequence
  Description of Artificial Sequence: Synthetic oligonucleotide
gaguuaggaauuggauuac

SEQ ID NO: 69988 - RNA, 19 nt, Artificial Sequence
  Description of Artificial Sequence: Synthetic oligonucleotide
cacaccggcgugaggcucg

SEQ ID NO: 69989 - RNA, 19 nt, Artificial Sequence
  Description of Artificial Sequence: Synthetic oligonucleotide
ugucgguagggcuguugug

SEQ ID NO: 69990 - RNA, 19 nt, Artificial Sequence
  Description of Artificial Sequence: Synthetic oligonucleotide
uuccucuaauaucgacugu

SEQ ID NO: 69991 - RNA, 19 nt, Artificial Sequence
  Description of Artificial Sequence: Synthetic oligonucleotide
aguuaggaauuggauuacu

SEQ ID NO: 69992 - RNA, 19 nt, Artificial Sequence
  Description of Artificial Sequence: Synthetic oligonucleotide
caucuuaaggaguauggau

SEQ ID NO: 69993 - RNA, 19 nt, Artificial Sequence
  Description of Artificial Sequence: Synthetic oligonucleotide
cuagugucacugcccuccg

SEQ ID NO: 69994 - RNA, 19 nt, Artificial Sequence
  Description of Artificial Sequence: Synthetic oligonucleotide
ucucacuagauagcagcuc

SEQ ID NO: 69995 - RNA, 19 nt, Artificial Sequence
  Description of Artificial Sequence: Synthetic oligonucleotide
guaugagcggcgcuugcuc

SEQ ID NO: 69996 - RNA, 19 nt, Artificial Sequence
  Description of Artificial Sequence: Synthetic oligonucleotide
uugccgcuagucucuccgg

SEQ ID NO: 69997 - RNA, 19 nt, Artificial Sequence
  Description of Artificial Sequence: Synthetic oligonucleotide
cuuguguacucggcgcccg

SEQ ID NO: 69998 - RNA, 19 nt, Artificial Sequence
  Description of Artificial Sequence: Synthetic oligonucleotide
ugcucguguugccuuggac

SEQ ID NO: 69999 - RNA, 19 nt, Artificial Sequence
  Description of Artificial Sequence: Synthetic oligonucleotide
ggaagaucuagaaguaaca

SEQ ID NO: 70000 - RNA, 19 nt, Artificial Sequence
  Description of Artificial Sequence: Synthetic oligonucleotide
auacgccaucaccauccuc

SEQ ID NO: 70001 - RNA, 19 nt, Artificial Sequence
  Description of Artificial Sequence: Synthetic oligonucleotide
agagcacccgagugauguc

SEQ ID NO: 70002 - RNA, 19 nt, Artificial Sequence
  Description of Artificial Sequence: Synthetic oligonucleotide
cucucagcugaccagaccu

SEQ ID NO: 70003 - RNA, 19 nt, Artificial Sequence
  Description of Artificial Sequence: Synthetic oligonucleotide
caaauaugacugggguggc

SEQ ID NO: 70004 - RNA, 19 nt, Artificial Sequence
  Description of Artificial Sequence: Synthetic oligonucleotide
ugggcucgcccucgagugg

SEQ ID NO: 70005 - RNA, 19 nt, Artificial Sequence
  Description of Artificial Sequence: Synthetic oligonucleotide
ggagaauauacgccaucac

SEQ ID NO: 70006 - RNA, 19 nt, Artificial Sequence
  Description of Artificial Sequence: Synthetic oligonucleotide
uggaugcggguaucauugc

SEQ ID NO: 70007 - RNA, 19 nt, Artificial Sequence
  Description of Artificial Sequence: Synthetic oligonucleotide
cuauugcggcugcugcccg

SEQ ID NO: 70008 - RNA, 19 nt, Artificial Sequence
  Description of Artificial Sequence: Synthetic oligonucleotide
accguggacacggagcacu

SEQ ID NO: 70009 - RNA, 19 nt, Artificial Sequence
  Description of Artificial Sequence: Synthetic oligonucleotide
cagugccgcagugaaacag

SEQ ID NO: 70010 - RNA, 19 nt, Artificial Sequence
  Description of Artificial Sequence: Synthetic oligonucleotide
acccuacauaucgguagac

SEQ ID NO: 70011 - RNA, 19 nt, Artificial Sequence
  Description of Artificial Sequence: Synthetic oligonucleotide
gguuguuauggugccgggg

SEQ ID NO: 70012 - RNA, 19 nt, Artificial Sequence
  Description of Artificial Sequence: Synthetic oligonucleotide
ggaugcggguaucauugcc

SEQ ID NO: 70013 - RNA, 19 nt, Artificial Sequence
  Description of Artificial Sequence: Synthetic oligonucleotide
caggacgggaaguguugcc

SEQ ID NO: 70014 - RNA, 19 nt, Artificial Sequence
  Description of Artificial Sequence: Synthetic oligonucleotide
gaagaguaauacaaagcuu

SEQ ID NO: 70015 - RNA, 19 nt, Artificial Sequence
  Description of Artificial Sequence: Synthetic oligonucleotide
gacuagcugagcucgaguu

SEQ ID NO: 70016 - RNA, 19 nt, Artificial Sequence
  Description of Artificial Sequence: Synthetic oligonucleotide
caagccgguauggccagcc

SEQ ID NO: 70017 - RNA, 19 nt, Artificial Sequence
  Description of Artificial Sequence: Synthetic oligonucleotide
ucgcccucgaguggaaggc

SEQ ID NO: 70018 - RNA, 19 nt, Artificial Sequence
  Description of Artificial Sequence: Synthetic oligonucleotide
cacauagacuacguccauc

SEQ ID NO: 70019 - RNA, 19 nt, Artificial Sequence
  Description of Artificial Sequence: Synthetic oligonucleotide
caucccuacgccuggcaca

SEQ ID NO: 70020 - RNA, 19 nt, Artificial Sequence
  Description of Artificial Sequence: Synthetic oligonucleotide
agacuacguccaucauguc

SEQ ID NO: 70021 - RNA, 19 nt, Artificial Sequence
  Description of Artificial Sequence: Synthetic oligonucleotide
gcucgagugggacauucug

SEQ ID NO: 70022 - RNA, 19 nt, Artificial Sequence
  Description of Artificial Sequence: Synthetic oligonucleotide
gccggaaggguugagaaca

SEQ ID NO: 70023 - RNA, 19 nt, Artificial Sequence
  Description of Artificial Sequence: Synthetic oligonucleotide
cguggcugcggaaaagacg

SEQ ID NO: 70024 - RNA, 19 nt, Artificial Sequence
  Description of Artificial Sequence: Synthetic oligonucleotide
guuuugcucugaacucugc

SEQ ID NO: 70025 - RNA, 19 nt, Artificial Sequence
  Description of Artificial Sequence: Synthetic oligonucleotide
aggguucguggccaccuga

SEQ ID NO: 70026 - RNA, 19 nt, Artificial Sequence
  Description of Artificial Sequence: Synthetic oligonucleotide
aguuugcaaggaggcggcg

SEQ ID NO: 70027 - RNA, 19 nt, Artificial Sequence
  Description of Artificial Sequence: Synthetic oligonucleotide
gagccacauagacuacguc

SEQ ID NO: 70028 - RNA, 19 nt, Artificial Sequence
  Description of Artificial Sequence: Synthetic oligonucleotide
caccuaagcugccauggga

SEQ ID NO: 70029 - RNA, 19 nt, Artificial Sequence
  Description of Artificial Sequence: Synthetic oligonucleotide
ggcaggguauguaaacagc

SEQ ID NO: 70030 - RNA, 19 nt, Artificial Sequence
  Description of Artificial Sequence: Synthetic oligonucleotide
ggacugguaagccgugaug

SEQ ID NO: 70031 - RNA, 19 nt, Artificial Sequence
  Description of Artificial Sequence: Synthetic oligonucleotide
ugagccuaccugggcuggg

SEQ ID NO: 70032 - RNA, 19 nt, Artificial Sequence
  Description of Artificial Sequence: Synthetic oligonucleotide
ccgaacaucccuacgccug

SEQ ID NO: 70033 - RNA, 19 nt, Artificial Sequence
  Description of Artificial Sequence: Synthetic oligonucleotide
ggcuauugcggcugcugcc

SEQ ID NO: 70034 - RNA, 19 nt, Artificial Sequence
  Description of Artificial Sequence: Synthetic oligonucleotide
gcuauugcggcugcugccc

SEQ ID NO: 70035 - RNA, 19 nt, Artificial Sequence
  Description of Artificial Sequence: Synthetic oligonucleotide
ucuugccgcuagucucucc

SEQ ID NO: 70036 - RNA, 19 nt, Artificial Sequence
  Description of Artificial Sequence: Synthetic oligonucleotide
ucggucacaccggcgugag

SEQ ID NO: 70037 - RNA, 19 nt, Artificial Sequence
  Description of Artificial Sequence: Synthetic oligonucleotide
uccccggcauauugcaaaa

SEQ ID NO: 70038 - RNA, 19 nt, Artificial Sequence
  Description of Artificial Sequence: Synthetic oligonucleotide
gcggguaucauugcccaag

SEQ ID NO: 70039 - RNA, 19 nt, Artificial Sequence
  Description of Artificial Sequence: Synthetic oligonucleotide
gccacauagacuacgucca

SEQ ID NO: 70040 - RNA, 19 nt, Artificial Sequence
  Description of Artificial Sequence: Synthetic oligonucleotide
uagaaguaacaagccggua

SEQ ID NO: 70041 - RNA, 19 nt, Artificial Sequence
  Description of Artificial Sequence: Synthetic oligonucleotide
cugguaagccgugaugcca

SEQ ID NO: 70042 - RNA, 19 nt, Artificial Sequence
  Description of Artificial Sequence: Synthetic oligonucleotide
uugcucguguugccuugga

SEQ ID NO: 70043 - RNA, 19 nt, Artificial Sequence
  Description of Artificial Sequence: Synthetic oligonucleotide
ugagcucgaguugccuaca

SEQ ID NO: 70044 - RNA, 19 nt, Artificial Sequence
  Description of Artificial Sequence: Synthetic oligonucleotide
gagcucgaguugccuacac

SEQ ID NO: 70045 - RNA, 19 nt, Artificial Sequence
  Description of Artificial Sequence: Synthetic oligonucleotide
cagagucuaguuggguuuc

SEQ ID NO: 70046 - RNA, 19 nt, Artificial Sequence
  Description of Artificial Sequence: Synthetic oligonucleotide
gcaguguacacucgaagcu

SEQ ID NO: 70047 - RNA, 19 nt, Artificial Sequence
  Description of Artificial Sequence: Synthetic oligonucleotide
guacucggcgcccgugaug

SEQ ID NO: 70048 - RNA, 19 nt, Artificial Sequence
  Description of Artificial Sequence: Synthetic oligonucleotide
uggacucccggagaauaua

SEQ ID NO: 70049 - RNA, 19 nt, Artificial Sequence
  Description of Artificial Sequence: Synthetic oligonucleotide
ccagcgcugagacaccgcc

SEQ ID NO: 70050 - RNA, 19 nt, Artificial Sequence
  Description of Artificial Sequence: Synthetic oligonucleotide
cugagccuaccugggcugg

SEQ ID NO: 70051 - RNA, 19 nt, Artificial Sequence
  Description of Artificial Sequence: Synthetic oligonucleotide
cacccuacauaucgguaga

SEQ ID NO: 70052 - RNA, 19 nt, Artificial Sequence
  Description of Artificial Sequence: Synthetic oligonucleotide
gcuacgcuagugucacugc

SEQ ID NO: 70053 - RNA, 19 nt, Artificial Sequence
  Description of Artificial Sequence: Synthetic oligonucleotide
ucuggcccaccuagacagu

SEQ ID NO: 70054 - RNA, 19 nt, Artificial Sequence
  Description of Artificial Sequence: Synthetic oligonucleotide
cucucacuagauagcagcu

SEQ ID NO: 70055 - RNA, 19 nt, Artificial Sequence
  Description of Artificial Sequence: Synthetic oligonucleotide
cugcccggguagcugucgg

SEQ ID NO: 70056 - RNA, 19 nt, Artificial Sequence
  Description of Artificial Sequence: Synthetic oligonucleotide
ccauccuaaaucuggccca

SEQ ID NO: 70057 - RNA, 19 nt, Artificial Sequence
  Description of Artificial Sequence: Synthetic oligonucleotide
agcauauguggaagaguaa

SEQ ID NO: 70058 - RNA, 19 nt, Artificial Sequence
  Description of Artificial Sequence: Synthetic oligonucleotide
acaagccgguauggccagc

SEQ ID NO: 70059 - RNA, 19 nt, Artificial Sequence
  Description of Artificial Sequence: Synthetic oligonucleotide
cugcgcuacgcuaguguca

SEQ ID NO: 70060 - RNA, 19 nt, Artificial Sequence
  Description of Artificial Sequence: Synthetic oligonucleotide
gcccgaacaucccuacgcc

SEQ ID NO: 70061 - RNA, 19 nt, Artificial Sequence
  Description of Artificial Sequence: Synthetic oligonucleotide
gucacggcuggcgcagcgg

SEQ ID NO: 70062 - RNA, 19 nt, Artificial Sequence
  Description of Artificial Sequence: Synthetic oligonucleotide
ggauuccgacacuuccaug

SEQ ID NO: 70063 - RNA, 19 nt, Artificial Sequence
  Description of Artificial Sequence: Synthetic oligonucleotide
gagccuaccugggcugggc

SEQ ID NO: 70064 - RNA, 19 nt, Artificial Sequence
  Description of Artificial Sequence: Synthetic oligonucleotide
ggacucccggagaauauac

SEQ ID NO: 70065 - RNA, 19 nt, Artificial Sequence
  Description of Artificial Sequence: Synthetic oligonucleotide
agcggguaugagcggcgcu

SEQ ID NO: 70066 - RNA, 19 nt, Artificial Sequence
  Description of Artificial Sequence: Synthetic oligonucleotide
cacugguuccugcaaauau

SEQ ID NO: 70067 - RNA, 19 nt, Artificial Sequence
  Description of Artificial Sequence: Synthetic oligonucleotide
cgaguugccuacacacugc

SEQ ID NO: 70068 - RNA, 19 nt, Artificial Sequence
  Description of Artificial Sequence: Synthetic oligonucleotide
ugcggaaaagacggccauu

SEQ ID NO: 70069 - RNA, 19 nt, Artificial Sequence
  Description of Artificial Sequence: Synthetic oligonucleotide
gggucacccuacauaucgg

SEQ ID NO: 70070 - RNA, 19 nt, Artificial Sequence
  Description of Artificial Sequence: Synthetic oligonucleotide
gagcggguaugagcggcgc

SEQ ID NO: 70071 - RNA, 19 nt, Artificial Sequence
  Description of Artificial Sequence: Synthetic oligonucleotide
ugaccagaccuggguuccc

SEQ ID NO: 70072 - RNA, 19 nt, Artificial Sequence
  Description of Artificial Sequence: Synthetic oligonucleotide
ucacaccggcgugaggcuc

SEQ ID NO: 70073 - RNA, 19 nt, Artificial Sequence
  Description of Artificial Sequence: Synthetic oligonucleotide
gcgcccgcucuuuagacca

SEQ ID NO: 70074 - RNA, 19 nt, Artificial Sequence
  Description of Artificial Sequence: Synthetic oligonucleotide
gaaacggagcuugcagccu

SEQ ID NO: 70075 - RNA, 19 nt, Artificial Sequence
  Description of Artificial Sequence: Synthetic oligonucleotide
aggcccacacgccgaugug

SEQ ID NO: 70076 - RNA, 19 nt, Artificial Sequence
  Description of Artificial Sequence: Synthetic oligonucleotide
ccaccuaagcugccauggg

SEQ ID NO: 70077 - RNA, 19 nt, Artificial Sequence
  Description of Artificial Sequence: Synthetic oligonucleotide
cucgaguugccuacacacu

SEQ ID NO: 70078 - RNA, 19 nt, Artificial Sequence
  Description of Artificial Sequence: Synthetic oligonucleotide
cacucgguuuaugggucac

SEQ ID NO: 70079 - RNA, 19 nt, Artificial Sequence
  Description of Artificial Sequence: Synthetic oligonucleotide
gcgcccgugauggagguug

SEQ ID NO: 70080 - RNA, 19 nt, Artificial Sequence
  Description of Artificial Sequence: Synthetic oligonucleotide
cuagacaguggucucgcuu

SEQ ID NO: 70081 - RNA, 19 nt, Artificial Sequence
  Description of Artificial Sequence: Synthetic oligonucleotide
ggacccaucuuaaggagua

SEQ ID NO: 70082 - RNA, 19 nt, Artificial Sequence
  Description of Artificial Sequence: Synthetic oligonucleotide
agcaugggcucgcccucga

SEQ ID NO: 70083 - RNA, 19 nt, Artificial Sequence
  Description of Artificial Sequence: Synthetic oligonucleotide
gcgccguuaagacuggugu

SEQ ID NO: 70084 - RNA, 19 nt, Artificial Sequence
  Description of Artificial Sequence: Synthetic oligonucleotide
gccgcucucacuagauagc

SEQ ID NO: 70085 - RNA, 19 nt, Artificial Sequence
  Description of Artificial Sequence: Synthetic oligonucleotide
gugccccuuggcucuacuc

SEQ ID NO: 70086 - RNA, 19 nt, Artificial Sequence
  Description of Artificial Sequence: Synthetic oligonucleotide
gucacccuacauaucggua

SEQ ID NO: 70087 - RNA, 19 nt, Artificial Sequence
  Description of Artificial Sequence: Synthetic oligonucleotide
ggucacccuacauaucggu

SEQ ID NO: 70088 - RNA, 19 nt, Artificial Sequence
  Description of Artificial Sequence: Synthetic oligonucleotide
ccccuaauugugccccucc

SEQ ID NO: 70089 - RNA, 19 nt, Artificial Sequence
  Description of Artificial Sequence: Synthetic oligonucleotide
gcccucgaguggaaggccg

SEQ ID NO: 70090 - RNA, 19 nt, Artificial Sequence
  Description of Artificial Sequence: Synthetic oligonucleotide
guagagcacccgagugaug

SEQ ID NO: 70091 - RNA, 19 nt, Artificial Sequence
  Description of Artificial Sequence: Synthetic oligonucleotide
ccaucuuaaggaguaugga

SEQ ID NO: 70092 - RNA, 19 nt, Artificial Sequence
  Description of Artificial Sequence: Synthetic oligonucleotide
gcccacacgccgaugugag

SEQ ID NO: 70093 - RNA, 19 nt, Artificial Sequence
  Description of Artificial Sequence: Synthetic oligonucleotide
ggcgccguuaagacuggug

SEQ ID NO: 70094 - RNA, 19 nt, Artificial Sequence
  Description of Artificial Sequence: Synthetic oligonucleotide
ccccuugagucuuuaggca

SEQ ID NO: 70095 - RNA, 19 nt, Artificial Sequence
  Description of Artificial Sequence: Synthetic oligonucleotide
gcguuggcaggguauguaa

SEQ ID NO: 70096 - RNA, 19 nt, Artificial Sequence
  Description of Artificial Sequence: Synthetic oligonucleotide
ggguaugagcggcgcuugc

SEQ ID NO: 70097 - RNA, 19 nt, Artificial Sequence
  Description of Artificial Sequence: Synthetic oligonucleotide
gcucuacucuuguguacuc

SEQ ID NO: 70098 - RNA, 19 nt, Artificial Sequence
  Description of Artificial Sequence: Synthetic oligonucleotide
guccccgcgguuguugguc

SEQ ID NO: 70099 - RNA, 19 nt, Artificial Sequence
  Description of Artificial Sequence: Synthetic oligonucleotide
ccggaaggguugagaacag

SEQ ID NO: 70100 - RNA, 19 nt, Artificial Sequence
  Description of Artificial Sequence: Synthetic oligonucleotide
cccgcucuuuagaccauug

SEQ ID NO: 70101 - RNA, 19 nt, Artificial Sequence
  Description of Artificial Sequence: Synthetic oligonucleotide
agcacccgagugaugucau

SEQ ID NO: 70102 - RNA, 19 nt, Artificial Sequence
  Description of Artificial Sequence: Synthetic oligonucleotide
ccggagaauauacgccauc

SEQ ID NO: 70103 - RNA, 19 nt, Artificial Sequence
  Description of Artificial Sequence: Synthetic oligonucleotide
cgcuacgcuagugucacug

SEQ ID NO: 70104 - RNA, 19 nt, Artificial Sequence
  Description of Artificial Sequence: Synthetic oligonucleotide
acaccggcgugaggcucgg

SEQ ID NO: 70105 - RNA, 19 nt, Artificial Sequence
  Description of Artificial Sequence: Synthetic oligonucleotide
agccucauggaggcauuuu

SEQ ID NO: 70106 - RNA, 19 nt, Artificial Sequence
  Description of Artificial Sequence: Synthetic oligonucleotide
agcuaagcgcccgcucuuu

SEQ ID NO: 70107 - RNA, 19 nt, Artificial Sequence
  Description of Artificial Sequence: Synthetic oligonucleotide
ccucgcacaccugacucug

SEQ ID NO: 70108 - RNA, 19 nt, Artificial Sequence
  Description of Artificial Sequence: Synthetic oligonucleotide
cuccgacggcgugagcaug

SEQ ID NO: 70109 - RNA, 19 nt, Artificial Sequence
  Description of Artificial Sequence: Synthetic oligonucleotide
cggagaauauacgccauca

SEQ ID NO: 70110 - RNA, 19 nt, Artificial Sequence
  Description of Artificial Sequence: Synthetic oligonucleotide
cagaacuuugagacauguu

SEQ ID NO: 70111 - RNA, 19 nt, Artificial Sequence
  Description of Artificial Sequence: Synthetic oligonucleotide
cccaccuagacaguggucu

SEQ ID NO: 70112 - RNA, 19 nt, Artificial Sequence
  Description of Artificial Sequence: Synthetic oligonucleotide
cccuagggauuaugucccc

SEQ ID NO: 70113 - RNA, 19 nt, Artificial Sequence
  Description of Artificial Sequence: Synthetic oligonucleotide
ccggcgugaggcucgggug

SEQ ID NO: 70114 - RNA, 19 nt, Artificial Sequence
  Description of Artificial Sequence: Synthetic oligonucleotide
cgguuuaugggucacccua

SEQ ID NO: 70115 - RNA, 19 nt, Artificial Sequence
  Description of Artificial Sequence: Synthetic oligonucleotide
ccacgcuauucuugaugug

SEQ ID NO: 70116 - RNA, 19 nt, Artificial Sequence
  Description of Artificial Sequence: Synthetic oligonucleotide
gucacaccggcgugaggcu

SEQ ID NO: 70117 - RNA, 19 nt, Artificial Sequence
  Description of Artificial Sequence: Synthetic oligonucleotide
cauagacuacguccaucau

SEQ ID NO: 70118 - RNA, 19 nt, Artificial Sequence
  Description of Artificial Sequence: Synthetic oligonucleotide
ggacuagcugagcucgagu

SEQ ID NO: 70119 - RNA, 19 nt, Artificial Sequence
  Description of Artificial Sequence: Synthetic oligonucleotide
gccgucuccggggcuauug

SEQ ID NO: 70120 - RNA, 19 nt, Artificial Sequence
  Description of Artificial Sequence: Synthetic oligonucleotide
cccuacauaucgguagaca

SEQ ID NO: 70121 - RNA, 19 nt, Artificial Sequence
  Description of Artificial Sequence: Synthetic oligonucleotide
cgcucucacuagauagcag

SEQ ID NO: 70122 - RNA, 19 nt, Artificial Sequence
  Description of Artificial Sequence: Synthetic oligonucleotide
ccgucuccggggcuauugc

SEQ ID NO: 70123 - RNA, 19 nt, Artificial Sequence
  Description of Artificial Sequence: Synthetic oligonucleotide
cuggacucccggagaauau

SEQ ID NO: 70124 - RNA, 19 nt, Artificial Sequence
  Description of Artificial Sequence: Synthetic oligonucleotide
ggcgugagcaugggcucgc

SEQ ID NO: 70125 - RNA, 19 nt, Artificial Sequence
  Description of Artificial Sequence: Synthetic oligonucleotide
ccgcuagucucuccggcuc

SEQ ID NO: 70126 - RNA, 19 nt, Artificial Sequence
  Description of Artificial Sequence: Synthetic oligonucleotide
agcuggacucccggagaau

SEQ ID NO: 70127 - RNA, 19 nt, Artificial Sequence
  Description of Artificial Sequence: Synthetic oligonucleotide
gguuguuggucuacacgcu

SEQ ID NO: 70128 - RNA, 19 nt, Artificial Sequence
  Description of Artificial Sequence: Synthetic oligonucleotide
gguaugagcggcgcuugcu

SEQ ID NO: 70129 - RNA, 19 nt, Artificial Sequence
  Description of Artificial Sequence: Synthetic oligonucleotide
acauaucgguagacagcuu

SEQ ID NO: 70130 - RNA, 19 nt, Artificial Sequence
  Description of Artificial Sequence: Synthetic oligonucleotide
ggcccaccuagacaguggu

SEQ ID NO: 70131 - RNA, 19 nt, Artificial Sequence
  Description of Artificial Sequence: Synthetic oligonucleotide
gacugguguugagcgggua

SEQ ID NO: 70132 - RNA, 19 nt, Artificial Sequence
  Description of Artificial Sequence: Synthetic oligonucleotide
cugccgcucucacuagaua

SEQ ID NO: 70133 - RNA, 19 nt, Artificial Sequence
  Description of Artificial Sequence: Synthetic oligonucleotide
gcaaggacgaugccugcuu

SEQ ID NO: 70134 - RNA, 19 nt, Artificial Sequence
  Description of Artificial Sequence: Synthetic oligonucleotide
cgcgcucgagcgcagcgcc

SEQ ID NO: 70135 - RNA, 19 nt, Artificial Sequence
  Description of Artificial Sequence: Synthetic oligonucleotide
ccguuaagacugguguuga

SEQ ID NO: 70136 - RNA, 19 nt, Artificial Sequence
  Description of Artificial Sequence: Synthetic oligonucleotide
accacucccuagggauuau

SEQ ID NO: 70137 - RNA, 19 nt, Artificial Sequence
  Description of Artificial Sequence: Synthetic oligonucleotide
ccagaacuuugagacaugu

SEQ ID NO: 70138 - RNA, 19 nt, Artificial Sequence
  Description of Artificial Sequence: Synthetic oligonucleotide
cucgagcgcagcgccuuga

SEQ ID NO: 70139 - RNA, 19 nt, Artificial Sequence
  Description of Artificial Sequence: Synthetic oligonucleotide
ccgcucucacuagauagca

SEQ ID NO: 70140 - RNA, 19 nt, Artificial Sequence
  Description of Artificial Sequence: Synthetic oligonucleotide
gagcagcuaagcgcccgcu

SEQ ID NO: 70141 - RNA, 19 nt, Artificial Sequence
  Description of Artificial Sequence: Synthetic oligonucleotide
ccguggacacggagcacuc

SEQ ID NO: 70142 - RNA, 19 nt, Artificial Sequence
  Description of Artificial Sequence: Synthetic oligonucleotide
ggcgccacaggcccacaua

SEQ ID NO: 70143 - RNA, 19 nt, Artificial Sequence
  Description of Artificial Sequence: Synthetic oligonucleotide
ccacucgguuuauggguca

SEQ ID NO: 70144 - RNA, 19 nt, Artificial Sequence
  Description of Artificial Sequence: Synthetic oligonucleotide
gacccaucuuaaggaguau

SEQ ID NO: 70145 - RNA, 19 nt, Artificial Sequence
  Description of Artificial Sequence: Synthetic oligonucleotide
gcuaagcgcccgcucuuua

SEQ ID NO: 70146 - RNA, 19 nt, Artificial Sequence
  Description of Artificial Sequence: Synthetic oligonucleotide
gcucgagcgcagcgccuug

SEQ ID NO: 70147 - RNA, 19 nt, Artificial Sequence
  Description of Artificial Sequence: Synthetic oligonucleotide
gccgcuagucucuccggcu

SEQ ID NO: 70148 - RNA, 19 nt, Artificial Sequence
  Description of Artificial Sequence: Synthetic oligonucleotide
ggggcgccguuaagacugg

SEQ ID NO: 70149 - RNA, 19 nt, Artificial Sequence
  Description of Artificial Sequence: Synthetic oligonucleotide
ccuugagguugucacggcu

SEQ ID NO: 70150 - RNA, 19 nt, Artificial Sequence
  Description of Artificial Sequence: Synthetic oligonucleotide
cgcgccaggaagcccgaac

SEQ ID NO: 70151 - RNA, 19 nt, Artificial Sequence
  Description of Artificial Sequence: Synthetic oligonucleotide
gcucgcccucgaguggaag

SEQ ID NO: 70152 - RNA, 19 nt, Artificial Sequence
  Description of Artificial Sequence: Synthetic oligonucleotide
cucucccgugggacuagcu

SEQ ID NO: 70153 - RNA, 19 nt, Artificial Sequence
  Description of Artificial Sequence: Synthetic oligonucleotide
ccgacggcgugagcauggg

SEQ ID NO: 70154 - RNA, 19 nt, Artificial Sequence
  Description of Artificial Sequence: Synthetic oligonucleotide
ccgugggacuagcugagcu

SEQ ID NO: 70155 - RNA, 19 nt, Artificial Sequence
  Description of Artificial Sequence: Synthetic oligonucleotide
ggacgcgcucgagcgcagc

SEQ ID NO: 70156 - RNA, 19 nt, Artificial Sequence
  Description of Artificial Sequence: Synthetic oligonucleotide
cccgcgguuguuggucuac

SEQ ID NO: 70157 - RNA, 19 nt, Artificial Sequence
  Description of Artificial Sequence: Synthetic oligonucleotide
ccucgaguggaaggccguc

SEQ ID NO: 70158 - RNA, 19 nt, Artificial Sequence
  Description of Artificial Sequence: Synthetic oligonucleotide
cccgaacaucccuacgccu

SEQ ID NO: 70159 - RNA, 19 nt, Artificial Sequence
  Description of Artificial Sequence: Synthetic oligonucleotide
cggguaugagcggcgcuug

SEQ ID NO: 70160 - RNA, 19 nt, Artificial Sequence
  Description of Artificial Sequence: Synthetic oligonucleotide
cccgugggacuagcugagc

SEQ ID NO: 70161 - RNA, 19 nt, Artificial Sequence
  Description of Artificial Sequence: Synthetic oligonucleotide
gcccaccuagacagugguc

SEQ ID NO: 70162 - RNA, 19 nt, Artificial Sequence
  Description of Artificial Sequence: Synthetic oligonucleotide
ccaaggcgccacaggccca

SEQ ID NO: 70163 - RNA, 19 nt, Artificial Sequence
  Description of Artificial Sequence: Synthetic oligonucleotide
gggacgcgcucgagcgcag

SEQ ID NO: 70164 - RNA, 19 nt, Artificial Sequence
  Description of Artificial Sequence: Synthetic oligonucleotide
cggcucgagugggacauuc

SEQ ID NO: 70165 - RNA, 19 nt, Artificial Sequence
  Description of Artificial Sequence: Synthetic oligonucleotide
ggcucgagugggacauucu

SEQ ID NO: 70166 - RNA, 19 nt, Artificial Sequence
  Description of Artificial Sequence: Synthetic oligonucleotide
gcggguaugagcggcgcuu

SEQ ID NO: 70167 - RNA, 19 nt, Artificial Sequence
  Description of Artificial Sequence: Synthetic oligonucleotide
cgcccucgaguggaaggcc

SEQ ID NO: 70168 - RNA, 19 nt, Artificial Sequence
  Description of Artificial Sequence: Synthetic oligonucleotide
cgcuagugucacugcccuc

SEQ ID NO: 70169 - RNA, 19 nt, Artificial Sequence
  Description of Artificial Sequence: Synthetic oligonucleotide
cccacacgccgaugugaga

SEQ ID NO: 70170 - RNA, 19 nt, Artificial Sequence
  Description of Artificial Sequence: Synthetic oligonucleotide
cccggagaauauacgccau

SEQ ID NO: 70171 - RNA, 19 nt, Artificial Sequence
  Description of Artificial Sequence: Synthetic oligonucleotide
ggcuccggcucgaguggga

SEQ ID NO: 70172 - RNA, 19 nt, Artificial Sequence
  Description of Artificial Sequence: Synthetic oligonucleotide
ccgguauggccagcccauc

SEQ ID NO: 70173 - RNA, 19 nt, Artificial Sequence
  Description of Artificial Sequence: Synthetic oligonucleotide
cggucacaccggcgugagg

SEQ ID NO: 70174 - RNA, 19 nt, Artificial Sequence
  Description of Artificial Sequence: Synthetic oligonucleotide
agcugucgguagggcuguu

SEQ ID NO: 70175 - RNA, 19 nt, Artificial Sequence
  Description of Artificial Sequence: Synthetic oligonucleotide
cccucgaguggaaggccgu

SEQ ID NO: 70176 - RNA, 19 nt, Artificial Sequence
  Description of Artificial Sequence: Synthetic oligonucleotide
cggguaucauugcccaagu

SEQ ID NO: 70177 - RNA, 19 nt, Artificial Sequence
  Description of Artificial Sequence: Synthetic oligonucleotide
ggcgugggaggccgaugau

SEQ ID NO: 70178 - RNA, 19 nt, Artificial Sequence
  Description of Artificial Sequence: Synthetic oligonucleotide
ccgcgguuguuggucuaca

SEQ ID NO: 70179 - RNA, 19 nt, Artificial Sequence
  Description of Artificial Sequence: Synthetic oligonucleotide
ccggggcgccccgucucag

SEQ ID NO: 70180 - RNA, 19 nt, Artificial Sequence
  Description of Artificial Sequence: Synthetic oligonucleotide
gcgcuacgcuagugucacu

SEQ ID NO: 70181 - RNA, 19 nt, Artificial Sequence
  Description of Artificial Sequence: Synthetic oligonucleotide
gcgccccgucucagggauc

SEQ ID NO: 70182 - RNA, 19 nt, Artificial Sequence
  Description of Artificial Sequence: Synthetic oligonucleotide
gggcgccguuaagacuggu

SEQ ID NO: 70183 - RNA, 19 nt, Artificial Sequence
  Description of Artificial Sequence: Synthetic oligonucleotide
ggcgcccgugauggagguu

SEQ ID NO: 70184 - RNA, 19 nt, Artificial Sequence
  Description of Artificial Sequence: Synthetic oligonucleotide
cgcccgcucuuuagaccau

SEQ ID NO: 70185 - RNA, 19 nt, Artificial Sequence
  Description of Artificial Sequence: Synthetic oligonucleotide
ccggcucgagugggacauu

SEQ ID NO: 70186 - RNA, 19 nt, Artificial Sequence
  Description of Artificial Sequence: Synthetic oligonucleotide
aagacuauuaaccacggcu

SEQ ID NO: 70187 - RNA, 19 nt, Artificial Sequence
  Description of Artificial Sequence: Synthetic oligonucleotide
uucuauguaagacagacac

SEQ ID NO: 70188 - RNA, 19 nt, Artificial Sequence
  Description of Artificial Sequence: Synthetic oligonucleotide
aaaacgaccucacagcaag

SEQ ID NO: 70189 - RNA, 19 nt, Artificial Sequence
  Description of Artificial Sequence: Synthetic oligonucleotide
auuaguaccaucagcaagc

SEQ ID NO: 70190 - RNA, 19 nt, Artificial Sequence
  Description of Artificial Sequence: Synthetic oligonucleotide
  modified_base (9)..(9): a, c, u, g, unknown or other
uauucaacnccgaagugag

SEQ ID NO: 70191 - RNA, 19 nt, Artificial Sequence
  Description of Artificial Sequence: Synthetic oligonucleotide
aguucuauguaagacagac

SEQ ID NO: 70192 - RNA, 19 nt, Artificial Sequence
  Description of Artificial Sequence: Synthetic oligonucleotide
aguaauauccaucacugcu

SEQ ID NO: 70193 - RNA, 19 nt, Artificial Sequence
  Description of Artificial Sequence: Synthetic oligonucleotide
accauuaaagcccaagauc

SEQ ID NO: 70194 - RNA, 19 nt, Artificial Sequence
  Description of Artificial Sequence: Synthetic oligonucleotide
auaucaguaauauccauca

SEQ ID NO: 70195 - RNA, 19 nt, Artificial Sequence
  Description of Artificial Sequence: Synthetic oligonucleotide
  modified_base (10)..(10): a, c, u, g, unknown or other
uuauucaacnccgaaguga

SEQ ID NO: 70196 - RNA, 19 nt, Artificial Sequence
  Description of Artificial Sequence: Synthetic oligonucleotide
acuuauaaaaucaugguga

SEQ ID NO: 70197 - RNA, 19 nt, Artificial Sequence
  Description of Artificial Sequence: Synthetic oligonucleotide
agacauuagggaaagaaac

SEQ ID NO: 70198 - RNA, 19 nt, Artificial Sequence
  Description of Artificial Sequence: Synthetic oligonucleotide
caucaaucaacauucauuc

SEQ ID NO: 70199 - RNA, 19 nt, Artificial Sequence
  Description of Artificial Sequence: Synthetic oligonucleotide
ucuuuugcccagaauagcc

SEQ ID NO: 70200 - RNA, 19 nt, Artificial Sequence
  Description of Artificial Sequence: Synthetic oligonucleotide
uguaaggcaaucaaccgcu

SEQ ID NO: 70201 - RNA, 19 nt, Artificial Sequence
  Description of Artificial Sequence: Synthetic oligonucleotide
uauaugaacaagaggaaua

SEQ ID NO: 70202 - RNA, 19 nt, Artificial Sequence
  Description of Artificial Sequence: Synthetic oligonucleotide
uuccucuccguuaaguugg

SEQ ID NO: 70203 - RNA, 19 nt, Artificial Sequence
  Description of Artificial Sequence: Synthetic oligonucleotide
ucuguaaggcaaucaaccg

SEQ ID NO: 70204 - RNA, 19 nt, Artificial Sequence
  Description of Artificial Sequence: Synthetic oligonucleotide
agugauguaacaaugccuc

SEQ ID NO: 70205 - RNA, 19 nt, Artificial Sequence
  Description of Artificial Sequence: Synthetic oligonucleotide
ucuccguuaaguugggugg

SEQ ID NO: 70206 - RNA, 19 nt, Artificial Sequence
  Description of Artificial Sequence: Synthetic oligonucleotide
cacugauaaaaguagacug

SEQ ID NO: 70207 - RNA, 19 nt, Artificial Sequence
  Description of Artificial Sequence: Synthetic oligonucleotide
  modified_base (7)..(7): a, c, u, g, unknown or other
uucaacnccgaagugagug

SEQ ID NO: 70208 - RNA, 19 nt, Artificial Sequence
  Description of Artificial Sequence: Synthetic oligonucleotide
uggauuccaguucauacag

SEQ ID NO: 70209 - RNA, 19 nt, Artificial Sequence
  Description of Artificial Sequence: Synthetic oligonucleotide
aagaggaauaaauaaucau

SEQ ID NO: 70210 - RNA, 19 nt, Artificial Sequence
  Description of Artificial Sequence: Synthetic oligonucleotide
aacucuauuuucugggucu

SEQ ID NO: 70211 - RNA, 19 nt, Artificial Sequence
  Description of Artificial Sequence: Synthetic oligonucleotide
uggagaucacugaagaggc

SEQ ID NO: 70212 - RNA, 19 nt, Artificial Sequence
  Description of Artificial Sequence: Synthetic oligonucleotide
agggcaguaccaucgagcc

SEQ ID NO: 70213 - RNA, 19 nt, Artificial Sequence
  Description of Artificial Sequence: Synthetic oligonucleotide
aacuccaugcggcccaccc

SEQ ID NO: 70214 - RNA, 19 nt, Artificial Sequence
  Description of Artificial Sequence: Synthetic oligonucleotide
uaugcauuucuacaggauc

SEQ ID NO: 70215 - RNA, 19 nt, Artificial Sequence
  Description of Artificial Sequence: Synthetic oligonucleotide
ucaugucagguucuggcgg

SEQ ID NO: 70216 - RNA, 19 nt, Artificial Sequence
  Description of Artificial Sequence: Synthetic oligonucleotide
acuuucgagccuuuggagg

SEQ ID NO: 70217 - RNA, 19 nt, Artificial Sequence
  Description of Artificial Sequence: Synthetic oligonucleotide
uguggaauggugucagccg

SEQ ID NO: 70218 - RNA, 19 nt, Artificial Sequence
  Description of Artificial Sequence: Synthetic oligonucleotide
ucuauggcguucuccagcg

SEQ ID NO: 70219 - RNA, 19 nt, Artificial Sequence
  Description of Artificial Sequence: Synthetic oligonucleotide
uauuaguucuauguaagac

SEQ ID NO: 70220 - RNA, 19 nt, Artificial Sequence
  Description of Artificial Sequence: Synthetic oligonucleotide
uguaugauaucaguaauau

SEQ ID NO: 70221 - RNA, 19 nt, Artificial Sequence
  Description of Artificial Sequence: Synthetic oligonucleotide
agagaguuaggacaauuug

SEQ ID NO: 70222 - RNA, 19 nt, Artificial Sequence
  Description of Artificial Sequence: Synthetic oligonucleotide
uguacacaguugcugaccc

SEQ ID NO: 70223 - RNA, 19 nt, Artificial Sequence
  Description of Artificial Sequence: Synthetic oligonucleotide
aagucuagacacagcaggc

SEQ ID NO: 70224 - RNA, 19 nt, Artificial Sequence
  Description of Artificial Sequence: Synthetic oligonucleotide
guaccaucgagccugcacg

SEQ ID NO: 70225 - RNA, 19 nt, Artificial Sequence
  Description of Artificial Sequence: Synthetic oligonucleotide
aguaccaucgagccugcac

SEQ ID NO: 70226 - RNA, 19 nt, Artificial Sequence
  Description of Artificial Sequence: Synthetic oligonucleotide
gacuucgaaccacuuaagg

SEQ ID NO: 70227 - RNA, 19 nt, Artificial Sequence
  Description of Artificial Sequence: Synthetic oligonucleotide
uauucaucgggagagugcc

SEQ ID NO: 70228 - RNA, 19 nt, Artificial Sequence
  Description of Artificial Sequence: Synthetic oligonucleotide
aagggugacaugaugagcu

SEQ ID NO: 70229 - RNA, 19 nt, Artificial Sequence
  Description of Artificial Sequence: Synthetic oligonucleotide
aaggcugauacgguggccg

SEQ ID NO: 70230 - RNA, 19 nt, Artificial Sequence
  Description of Artificial Sequence: Synthetic oligonucleotide
uuugccugggcucaucaug

SEQ ID NO: 70231 - RNA, 19 nt, Artificial Sequence
  Description of Artificial Sequence: Synthetic oligonucleotide
caucaugucagguucuggc

SEQ ID NO: 70232 - RNA, 19 nt, Artificial Sequence
  Description of Artificial Sequence: Synthetic oligonucleotide
uaacaaugccucaaacuca

SEQ ID NO: 70233 - RNA, 19 nt, Artificial Sequence
  Description of Artificial Sequence: Synthetic oligonucleotide
aggguguucuuguaaguac

SEQ ID NO: 70234 - RNA, 19 nt, Artificial Sequence
  Description of Artificial Sequence: Synthetic oligonucleotide
uccaaggcacgucagaggu

SEQ ID NO: 70235 - RNA, 19 nt, Artificial Sequence
  Description of Artificial Sequence: Synthetic oligonucleotide
uaauauccaucacugcuac

SEQ ID NO: 70236 - RNA, 19 nt, Artificial Sequence
  Description of Artificial Sequence: Synthetic oligonucleotide
aucaugucagguucuggcg

SEQ ID NO: 70237 - RNA, 19 nt, Artificial Sequence
  Description of Artificial Sequence: Synthetic oligonucleotide
ucuccggacaggcaagggg

SEQ ID NO: 70238 - RNA, 19 nt, Artificial Sequence
  Description of Artificial Sequence: Synthetic oligonucleotide
  modified_base (6)..(6): a, c, u, g, unknown or other
ucaacnccgaagugagugg

SEQ ID NO: 70239 - RNA, 19 nt, Artificial Sequence
  Description of Artificial Sequence: Synthetic oligonucleotide
auauagcuucucuacuuuc

SEQ ID NO: 70240 - RNA, 19 nt, Artificial Sequence
  Description of Artificial Sequence: Synthetic oligonucleotide
aacgaccucacagcaagac

SEQ ID NO: 70241 - RNA, 19 nt, Artificial Sequence
  Description of Artificial Sequence: Synthetic oligonucleotide
ugcugaaagggaauaaaau

SEQ ID NO: 70242 - RNA, 19 nt, Artificial Sequence
  Description of Artificial Sequence: Synthetic oligonucleotide
uuagaaugaugaaggccag

SEQ ID NO: 70243 - RNA, 19 nt, Artificial Sequence
  Description of Artificial Sequence: Synthetic oligonucleotide
uugugacuugcucagacuc

SEQ ID NO: 70244 - RNA, 19 nt, Artificial Sequence
  Description of Artificial Sequence: Synthetic oligonucleotide
aaagcccaagaucuuauuu

SEQ ID NO: 70245 - RNA, 19 nt, Artificial Sequence
  Description of Artificial Sequence: Synthetic oligonucleotide
acuauuaaccacggcugcc

SEQ ID NO: 70246 - RNA, 19 nt, Artificial Sequence
  Description of Artificial Sequence: Synthetic oligonucleotide
guuaugaccccauauagcu

SEQ ID NO: 70247 - RNA, 19 nt, Artificial Sequence
  Description of Artificial Sequence: Synthetic oligonucleotide
cuugguaucuggcucucgg

SEQ ID NO: 70248 - RNA, 19 nt, Artificial Sequence
  Description of Artificial Sequence: Synthetic oligonucleotide
acaaaacgaccucacagca

SEQ ID NO: 70249 - RNA, 19 nt, Artificial Sequence
  Description of Artificial Sequence: Synthetic oligonucleotide
ugaagcucugcgcucaaac

SEQ ID NO: 70250 - RNA, 19 nt, Artificial Sequence
  Description of Artificial Sequence: Synthetic oligonucleotide
uagggcaguaccaucgagc

SEQ ID NO: 70251 - RNA, 19 nt, Artificial Sequence
  Description of Artificial Sequence: Synthetic oligonucleotide
cuguaaggcaaucaaccgc

SEQ ID NO: 70252 - RNA, 19 nt, Artificial Sequence
  Description of Artificial Sequence: Synthetic oligonucleotide
acugcauaggugaagaacu

SEQ ID NO: 70253 - RNA, 19 nt, Artificial Sequence
  Description of Artificial Sequence: Synthetic oligonucleotide
ugguagacaaacucuauuu

SEQ ID NO: 70254 - RNA, 19 nt, Artificial Sequence
  Description of Artificial Sequence: Synthetic oligonucleotide
acauuagggaaagaaacca

SEQ ID NO: 70255 - RNA, 19 nt, Artificial Sequence
  Description of Artificial Sequence: Synthetic oligonucleotide
uguucuuguaaguacuuuu

SEQ ID NO: 70256 - RNA, 19 nt, Artificial Sequence
  Description of Artificial Sequence: Synthetic oligonucleotide
ggaauaucugaacugcugc

SEQ ID NO: 70257 - RNA, 19 nt, Artificial Sequence
  Description of Artificial Sequence: Synthetic oligonucleotide
cauggcaacuccuggagug

SEQ ID NO: 70258 - RNA, 19 nt, Artificial Sequence
  Description of Artificial Sequence: Synthetic oligonucleotide
acuguucauguaugaaauc

SEQ ID NO: 70259 - RNA, 19 nt, Artificial Sequence
  Description of Artificial Sequence: Synthetic oligonucleotide
agucuagacacagcaggcc

SEQ ID NO: 70260 - RNA, 19 nt, Artificial Sequence
  Description of Artificial Sequence: Synthetic oligonucleotide
uacagcgaaagccucugga

SEQ ID NO: 70261 - RNA, 19 nt, Artificial Sequence
  Description of Artificial Sequence: Synthetic oligonucleotide
uugacagggaggaauggaa

SEQ ID NO: 70262 - RNA, 19 nt, Artificial Sequence
  Description of Artificial Sequence: Synthetic oligonucleotide
cuauuaaccacggcugccg

SEQ ID NO: 70263 - RNA, 19 nt, Artificial Sequence
  Description of Artificial Sequence: Synthetic oligonucleotide
uuaaagcccaagaucuuau

SEQ ID NO: 70264 - RNA, 19 nt, Artificial Sequence
  Description of Artificial Sequence: Synthetic oligonucleotide
ugcgcaacguugaggacag

SEQ ID NO: 70265 - RNA, 19 nt, Artificial Sequence
  Description of Artificial Sequence: Synthetic oligonucleotide
ugucucuuagcaagggacu

SEQ ID NO: 70266 - RNA, 19 nt, Artificial Sequence
  Description of Artificial Sequence: Synthetic oligonucleotide
aguucacggaagcaugaag

SEQ ID NO: 70267 - RNA, 19 nt, Artificial Sequence
  Description of Artificial Sequence: Synthetic oligonucleotide
aggauuauggacauuagua

SEQ ID NO: 70268 - RNA, 19 nt, Artificial Sequence
  Description of Artificial Sequence: Synthetic oligonucleotide
gacuuucgagccuuuggag

SEQ ID NO: 70269 - RNA, 19 nt, Artificial Sequence
  Description of Artificial Sequence: Synthetic oligonucleotide
cuguagacugcauagguga

SEQ ID NO: 70270 - RNA, 19 nt, Artificial Sequence
  Description of Artificial Sequence: Synthetic oligonucleotide
cauauugcacuguauucuc

SEQ ID NO: 70271 - RNA, 19 nt, Artificial Sequence
  Description of Artificial Sequence: Synthetic oligonucleotide
ucgaaccacuuaaggaucc

SEQ ID NO: 70272 - RNA, 19 nt, Artificial Sequence
  Description of Artificial Sequence: Synthetic oligonucleotide
uuaaccacggcugccgcag

SEQ ID NO: 70273 - RNA, 19 nt, Artificial Sequence
  Description of Artificial Sequence: Synthetic oligonucleotide
acgugugagguuaucaagg

SEQ ID NO: 70274 - RNA, 19 nt, Artificial Sequence
  Description of Artificial Sequence: Synthetic oligonucleotide
cucuccguuaaguugggug

SEQ ID NO: 70275 - RNA, 19 nt, Artificial Sequence
  Description of Artificial Sequence: Synthetic oligonucleotide
aaccauggcaacuccugga

SEQ ID NO: 70276 - RNA, 19 nt, Artificial Sequence
  Description of Artificial Sequence: Synthetic oligonucleotide
ucccuaacuguucauguau

SEQ ID NO: 70277 - RNA, 19 nt, Artificial Sequence
  Description of Artificial Sequence: Synthetic oligonucleotide
ugucaacuuuccaaagcac

SEQ ID NO: 70278 - RNA, 19 nt, Artificial Sequence
  Description of Artificial Sequence: Synthetic oligonucleotide
ugauacgguggccggauga

SEQ ID NO: 70279 - RNA, 19 nt, Artificial Sequence
  Description of Artificial Sequence: Synthetic oligonucleotide
auguagggcaguaccaucg

SEQ ID NO: 70280 - RNA, 19 nt, Artificial Sequence
  Description of Artificial Sequence: Synthetic oligonucleotide
  modified_base (18)..(18): a, c, u, g, unknown or other
cuaucacuuuauucaacnc

SEQ ID NO: 70281 - RNA, 19 nt, Artificial Sequence
  Description of Artificial Sequence: Synthetic oligonucleotide
ggaagugugucucuuagca

SEQ ID NO: 70282 - RNA, 19 nt, Artificial Sequence
  Description of Artificial Sequence: Synthetic oligonucleotide
uuuugacagggaggaaugg

SEQ ID NO: 70283 - RNA, 19 nt, Artificial Sequence
  Description of Artificial Sequence: Synthetic oligonucleotide
auauugcacuguauucucc

SEQ ID NO: 70284 - RNA, 19 nt, Artificial Sequence
  Description of Artificial Sequence: Synthetic oligonucleotide
agguggagaucacugaaga

SEQ ID NO: 70285 - RNA, 19 nt, Artificial Sequence
  Description of Artificial Sequence: Synthetic oligonucleotide
ucucuuagcaagggacugg

SEQ ID NO: 70286 - RNA, 19 nt, Artificial Sequence
  Description of Artificial Sequence: Synthetic oligonucleotide
uauuaaccacggcugccgc

SEQ ID NO: 70287 - RNA, 19 nt, Artificial Sequence
  Description of Artificial Sequence: Synthetic oligonucleotide
uagggaugccgacaggaga

SEQ ID NO: 70288 - RNA, 19 nt, Artificial Sequence
  Description of Artificial Sequence: Synthetic oligonucleotide
ucccauguaugauaucagu

SEQ ID NO: 70289 - RNA, 19 nt, Artificial Sequence
  Description of Artificial Sequence: Synthetic oligonucleotide
ugauguaacaaugccucaa

SEQ ID NO: 70290 - RNA, 19 nt, Artificial Sequence
  Description of Artificial Sequence: Synthetic oligonucleotide
cacccggacaauuuggcac

SEQ ID NO: 70291 - RNA, 19 nt, Artificial Sequence
  Description of Artificial Sequence: Synthetic oligonucleotide
acacaaggcugauacggug

SEQ ID NO: 70292 - RNA, 19 nt, Artificial Sequence
  Description of Artificial Sequence: Synthetic oligonucleotide
gaagacuauuaaccacggc

SEQ ID NO: 70293 - RNA, 19 nt, Artificial Sequence
  Description of Artificial Sequence: Synthetic oligonucleotide
ugacagauagccugcgcaa

SEQ ID NO: 70294 - RNA, 19 nt, Artificial Sequence
  Description of Artificial Sequence: Synthetic oligonucleotide
uaccaucgagccugcacgg

SEQ ID NO: 70295 - RNA, 19 nt, Artificial Sequence
  Description of Artificial Sequence: Synthetic oligonucleotide
uccaggguaaagucaagua

SEQ ID NO: 70296 - RNA, 19 nt, Artificial Sequence
  Description of Artificial Sequence: Synthetic oligonucleotide
uacgguggccggaugaggu

SEQ ID NO: 70297 - RNA, 19 nt, Artificial Sequence
  Description of Artificial Sequence: Synthetic oligonucleotide
gugcucuuucccucaaagg

SEQ ID NO: 70298 - RNA, 19 nt, Artificial Sequence
  Description of Artificial Sequence: Synthetic oligonucleotide
gauagccugcgcaacguug

SEQ ID NO: 70299 - RNA, 19 nt, Artificial Sequence
  Description of Artificial Sequence: Synthetic oligonucleotide
aacaagcuaaacacauagu

SEQ ID NO: 70300 - RNA, 19 nt, Artificial Sequence
  Description of Artificial Sequence: Synthetic oligonucleotide
ugcggaucccuuccgugag

SEQ ID NO: 70301 - RNA, 19 nt, Artificial Sequence
  Description of Artificial Sequence: Synthetic oligonucleotide
cacucacaagccaucaauc

SEQ ID NO: 70302 - RNA, 19 nt, Artificial Sequence
  Description of Artificial Sequence: Synthetic oligonucleotide
acuguggaauggugucagc

SEQ ID NO: 70303 - RNA, 19 nt, Artificial Sequence
  Description of Artificial Sequence: Synthetic oligonucleotide
gugucucuuagcaagggac

SEQ ID NO: 70304 - RNA, 19 nt, Artificial Sequence
  Description of Artificial Sequence: Synthetic oligonucleotide
aauccaagggucagcacau

SEQ ID NO: 70305 - RNA, 19 nt, Artificial Sequence
  Description of Artificial Sequence: Synthetic oligonucleotide
gguccuuucaauccacaug

SEQ ID NO: 70306 - RNA, 19 nt, Artificial Sequence
  Description of Artificial Sequence: Synthetic oligonucleotide
agcuuugggagugagugga

SEQ ID NO: 70307 - RNA, 19 nt, Artificial Sequence
  Description of Artificial Sequence: Synthetic oligonucleotide
uggagguuauucagcuucu

SEQ ID NO: 70308 - RNA, 19 nt, Artificial Sequence
  Description of Artificial Sequence: Synthetic oligonucleotide
guauaggcuguuguguaug

SEQ ID NO: 70309 - RNA, 19 nt, Artificial Sequence
  Description of Artificial Sequence: Synthetic oligonucleotide
  modified_base (3)..(3): a, c, u, g, unknown or other
acnccgaagugaguggcuc

SEQ ID NO: 70310 - RNA, 19 nt, Artificial Sequence
  Description of Artificial Sequence: Synthetic oligonucleotide
gucuuaaacacagcaguuc

SEQ ID NO: 70311 - RNA, 19 nt, Artificial Sequence
  Description of Artificial Sequence: Synthetic oligonucleotide
uuaaguuggguggcagugu

SEQ ID NO: 70312 - RNA, 19 nt, Artificial Sequence
  Description of Artificial Sequence: Synthetic oligonucleotide
gcacaugacugaugcaugg

SEQ ID NO: 70313 - RNA, 19 nt, Artificial Sequence
  Description of Artificial Sequence: Synthetic oligonucleotide
gauuaggcaggguagggau

SEQ ID NO: 70314 - RNA, 19 nt, Artificial Sequence
  Description of Artificial Sequence: Synthetic oligonucleotide
uuaguaccaucagcaagca

SEQ ID NO: 70315 - RNA, 19 nt, Artificial Sequence
  Description of Artificial Sequence: Synthetic oligonucleotide
agcgaauuagguaguucuc

SEQ ID NO: 70316 - RNA, 19 nt, Artificial Sequence
  Description of Artificial Sequence: Synthetic oligonucleotide
aaauagaugcuaggcucau

SEQ ID NO: 70317 - RNA, 19 nt, Artificial Sequence
  Description of Artificial Sequence: Synthetic oligonucleotide
uuaugaccccauauagcuu

SEQ ID NO: 70318 - RNA, 19 nt, Artificial Sequence
  Description of Artificial Sequence: Synthetic oligonucleotide
agcggcuuaagcugcucug

SEQ ID NO: 70319 - RNA, 19 nt, Artificial Sequence
  Description of Artificial Sequence: Synthetic oligonucleotide
auacagcgaaagccucugg

SEQ ID NO: 70320 - RNA, 19 nt, Artificial Sequence
  Description of Artificial Sequence: Synthetic oligonucleotide
cugcauaggugaagaacug

SEQ ID NO: 70321 - RNA, 19 nt, Artificial Sequence
  Description of Artificial Sequence: Synthetic oligonucleotide
ccauuaaagcccaagaucu

SEQ ID NO: 70322 - RNA, 19 nt, Artificial Sequence
  Description of Artificial Sequence: Synthetic oligonucleotide
cuggaguguacuugguauc

SEQ ID NO: 70323 - RNA, 19 nt, Artificial Sequence
  Description of Artificial Sequence: Synthetic oligonucleotide
  modified_base (5)..(5): a, c, u, g, unknown or other
caacnccgaagugaguggc

SEQ ID NO: 70324 - RNA, 19 nt, Artificial Sequence
  Description of Artificial Sequence: Synthetic oligonucleotide
guaauauccaucacugcua

SEQ ID NO: 70325 - RNA, 19 nt, Artificial Sequence
  Description of Artificial Sequence: Synthetic oligonucleotide
cauacagcgaaagccucug

SEQ ID NO: 70326 - RNA, 19 nt, Artificial Sequence
  Description of Artificial Sequence: Synthetic oligonucleotide
acccggacaauuuggcaca

SEQ ID NO: 70327 - RNA, 19 nt, Artificial Sequence
  Description of Artificial Sequence: Synthetic oligonucleotide
gaauuagguaguucucacu

SEQ ID NO: 70328 - RNA, 19 nt, Artificial Sequence
  Description of Artificial Sequence: Synthetic oligonucleotide
uccggaauggccgggaaua

SEQ ID NO: 70329 - RNA, 19 nt, Artificial Sequence
  Description of Artificial Sequence: Synthetic oligonucleotide
cuguugaaaucuguuugac

SEQ ID NO: 70330 - RNA, 19 nt, Artificial Sequence
  Description of Artificial Sequence: Synthetic oligonucleotide
ggagagugggugcacagac

SEQ ID NO: 70331 - RNA, 19 nt, Artificial Sequence
  Description of Artificial Sequence: Synthetic oligonucleotide
agcaaucagauuaauuaua

SEQ ID NO: 70332 - RNA, 19 nt, Artificial Sequence
  Description of Artificial Sequence: Synthetic oligonucleotide
ugguccaaggcacgucaga

SEQ ID NO: 70333 - RNA, 19 nt, Artificial Sequence
  Description of Artificial Sequence: Synthetic oligonucleotide
uccucuccguuaaguuggg

SEQ ID NO: 70334 - RNA, 19 nt, Artificial Sequence
  Description of Artificial Sequence: Synthetic oligonucleotide
gguggagaucacugaagag

SEQ ID NO: 70335 - RNA, 19 nt, Artificial Sequence
  Description of Artificial Sequence: Synthetic oligonucleotide
agauuaggcaggguaggga

SEQ ID NO: 70336 - RNA, 19 nt, Artificial Sequence
  Description of Artificial Sequence: Synthetic oligonucleotide
agggcgcauugucagaaga

SEQ ID NO: 70337 - RNA, 19 nt, Artificial Sequence
  Description of Artificial Sequence: Synthetic oligonucleotide
guagggcaguaccaucgag

SEQ ID NO: 70338 - RNA, 19 nt, Artificial Sequence
  Description of Artificial Sequence: Synthetic oligonucleotide
cucacaagccaucaaucaa

SEQ ID NO: 70339 - RNA, 19 nt, Artificial Sequence
  Description of Artificial Sequence: Synthetic oligonucleotide
caagccaucaaucaacauu

SEQ ID NO: 70340 - RNA, 19 nt, Artificial Sequence
  Description of Artificial Sequence: Synthetic oligonucleotide
cagcgaauuagguaguucu

SEQ ID NO: 70341 - RNA, 19 nt, Artificial Sequence
  Description of Artificial Sequence: Synthetic oligonucleotide
gucucuuagcaagggacug

SEQ ID NO: 70342 - RNA, 19 nt, Artificial Sequence
  Description of Artificial Sequence: Synthetic oligonucleotide
ucuggcucucgggagauua

SEQ ID NO: 70343 - RNA, 19 nt, Artificial Sequence
  Description of Artificial Sequence: Synthetic oligonucleotide
gagugauguaacaaugccu

SEQ ID NO: 70344 - RNA, 19 nt, Artificial Sequence
  Description of Artificial Sequence: Synthetic oligonucleotide
gacagauagccugcgcaac

SEQ ID NO: 70345 - RNA, 19 nt, Artificial Sequence
  Description of Artificial Sequence: Synthetic oligonucleotide
ugccgcagagaguuaggac

SEQ ID NO: 70346 - RNA, 19 nt, Artificial Sequence
  Description of Artificial Sequence: Synthetic oligonucleotide
guaucuggcucucgggaga

SEQ ID NO: 70347 - RNA, 19 nt, Artificial Sequence
  Description of Artificial Sequence: Synthetic oligonucleotide
ccauguaugauaucaguaa

SEQ ID NO: 70348 - RNA, 19 nt, Artificial Sequence
  Description of Artificial Sequence: Synthetic oligonucleotide
ugccccagcgaauuaggua

SEQ ID NO: 70349 - RNA, 19 nt, Artificial Sequence
  Description of Artificial Sequence: Synthetic oligonucleotide
auagccugcgcaacguuga

SEQ ID NO: 70350 - RNA, 19 nt, Artificial Sequence
  Description of Artificial Sequence: Synthetic oligonucleotide
guagggaugccgacaggag

SEQ ID NO: 70351 - RNA, 19 nt, Artificial Sequence
  Description of Artificial Sequence: Synthetic oligonucleotide
agcgggcugauuucuucug

SEQ ID NO: 70352 - RNA, 19 nt, Artificial Sequence
  Description of Artificial Sequence: Synthetic oligonucleotide
aggacaauuuguaccaaua

SEQ ID NO: 70353 - RNA, 19 nt, Artificial Sequence
  Description of Artificial Sequence: Synthetic oligonucleotide
cagcgaaagccucuggaca

SEQ ID NO: 70354 - RNA, 19 nt, Artificial Sequence
  Description of Artificial Sequence: Synthetic oligonucleotide
aucccgagggaagguauag

SEQ ID NO: 70355 - RNA, 19 nt, Artificial Sequence
  Description of Artificial Sequence: Synthetic oligonucleotide
cauguaugauaucaguaau

SEQ ID NO: 70356 - RNA, 19 nt, Artificial Sequence
  Description of Artificial Sequence: Synthetic oligonucleotide
auacgguggccggaugagg

SEQ ID NO: 70357 - RNA, 19 nt, Artificial Sequence
  Description of Artificial Sequence: Synthetic oligonucleotide
acucacucacaagccauca

SEQ ID NO: 70358 - RNA, 19 nt, Artificial Sequence
  Description of Artificial Sequence: Synthetic oligonucleotide
cgugugagguuaucaaggg

SEQ ID NO: 70359 - RNA, 19 nt, Artificial Sequence
  Description of Artificial Sequence: Synthetic oligonucleotide
auaacaagcuaaacacaua

SEQ ID NO: 70360 - RNA, 19 nt, Artificial Sequence
  Description of Artificial Sequence: Synthetic oligonucleotide
gagggcgcauugucagaag

SEQ ID NO: 70361 - RNA, 19 nt, Artificial Sequence
  Description of Artificial Sequence: Synthetic oligonucleotide
gaaggcauuuugacaggga

SEQ ID NO: 70362 - RNA, 19 nt, Artificial Sequence
  Description of Artificial Sequence: Synthetic oligonucleotide
uuucgagccuuuggaggug

SEQ ID NO: 70363 - RNA, 19 nt, Artificial Sequence
  Description of Artificial Sequence: Synthetic oligonucleotide
cuccguuaaguuggguggc

SEQ ID NO: 70364 - RNA, 19 nt, Artificial Sequence
  Description of Artificial Sequence: Synthetic oligonucleotide
caucaggccaauagggucu

SEQ ID NO: 70365 - RNA, 19 nt, Artificial Sequence
  Description of Artificial Sequence: Synthetic oligonucleotide
cacacaucucccuaacugu

SEQ ID NO: 70366 - RNA, 19 nt, Artificial Sequence
  Description of Artificial Sequence: Synthetic oligonucleotide
gccugcgcaacguugagga

SEQ ID NO: 70367 - RNA, 19 nt, Artificial Sequence
  Description of Artificial Sequence: Synthetic oligonucleotide
acguugaggacagaaugua

SEQ ID NO: 70368 - RNA, 19 nt, Artificial Sequence
  Description of Artificial Sequence: Synthetic oligonucleotide
uccguuaaguuggguggca

SEQ ID NO: 70369 - RNA, 19 nt, Artificial Sequence
  Description of Artificial Sequence: Synthetic oligonucleotide
caaaacgaccucacagcaa

SEQ ID NO: 70370 - RNA, 19 nt, Artificial Sequence
  Description of Artificial Sequence: Synthetic oligonucleotide
ucggucaugcagcggcuua

SEQ ID NO: 70371 - RNA, 19 nt, Artificial Sequence
  Description of Artificial Sequence: Synthetic oligonucleotide
guucuauguaagacagaca

SEQ ID NO: 70372 - RNA, 19 nt, Artificial Sequence
  Description of Artificial Sequence: Synthetic oligonucleotide
caucgagccugcacggcuc

SEQ ID NO: 70373 - RNA, 19 nt, Artificial Sequence
  Description of Artificial Sequence: Synthetic oligonucleotide
cugcgcaacguugaggaca

SEQ ID NO: 70374 - RNA, 19 nt, Artificial Sequence
  Description of Artificial Sequence: Synthetic oligonucleotide
ccgggaauaucugaacugc

SEQ ID NO: 70375 - RNA, 19 nt, Artificial Sequence
  Description of Artificial Sequence: Synthetic oligonucleotide
agcucugcgcucaaacagu

SEQ ID NO: 70376 - RNA, 19 nt, Artificial Sequence
  Description of Artificial Sequence: Synthetic oligonucleotide
cgaauuagguaguucucac

SEQ ID NO: 70377 - RNA, 19 nt, Artificial Sequence
  Description of Artificial Sequence: Synthetic oligonucleotide
ggaagguauaggcuguugu

SEQ ID NO: 70378 - RNA, 19 nt, Artificial Sequence
  Description of Artificial Sequence: Synthetic oligonucleotide
guggacccaccuccaauac

SEQ ID NO: 70379 - RNA, 19 nt, Artificial Sequence
  Description of Artificial Sequence: Synthetic oligonucleotide
ggugacagauagccugcgc

SEQ ID NO: 70380 - RNA, 19 nt, Artificial Sequence
  Description of Artificial Sequence: Synthetic oligonucleotide
uccaaucacgugugagguu

SEQ ID NO: 70381 - RNA, 19 nt, Artificial Sequence
  Description of Artificial Sequence: Synthetic oligonucleotide
cucuuagcaagggacugga

SEQ ID NO: 70382 - RNA, 19 nt, Artificial Sequence
  Description of Artificial Sequence: Synthetic oligonucleotide
agccugcgcaacguugagg

SEQ ID NO: 70383 - RNA, 19 nt, Artificial Sequence
  Description of Artificial Sequence: Synthetic oligonucleotide
ugccgacaggagagaagga

SEQ ID NO: 70384 - RNA, 19 nt, Artificial Sequence
  Description of Artificial Sequence: Synthetic oligonucleotide
aaacgaccucacagcaaga

SEQ ID NO: 70385 - RNA, 19 nt, Artificial Sequence
  Description of Artificial Sequence: Synthetic oligonucleotide
cuauggcguucuccagcgg

SEQ ID NO: 70386 - RNA, 19 nt, Artificial Sequence
  Description of Artificial Sequence: Synthetic oligonucleotide
gcgaauuagguaguucuca

SEQ ID NO: 70387 - RNA, 19 nt, Artificial Sequence
  Description of Artificial Sequence: Synthetic oligonucleotide
ucucuggcggauguagguu

SEQ ID NO: 70388 - RNA, 19 nt, Artificial Sequence
  Description of Artificial Sequence: Synthetic oligonucleotide
agaagccgucagcccaucu

SEQ ID NO: 70389 - RNA, 19 nt, Artificial Sequence
  Description of Artificial Sequence: Synthetic oligonucleotide
auggccgggaauaucugaa

SEQ ID NO: 70390 - RNA, 19 nt, Artificial Sequence
  Description of Artificial Sequence: Synthetic oligonucleotide
ggaacuuaggguccuugua

SEQ ID NO: 70391 - RNA, 19 nt, Artificial Sequence
  Description of Artificial Sequence: Synthetic oligonucleotide
cccuaacuguucauguaug

SEQ ID NO: 70392 - RNA, 19 nt, Artificial Sequence
  Description of Artificial Sequence: Synthetic oligonucleotide
ggggcuauucaucgggaga

SEQ ID NO: 70393 - RNA, 19 nt, Artificial Sequence
  Description of Artificial Sequence: Synthetic oligonucleotide
ggcaucccauuacugcccc

SEQ ID NO: 70394 - RNA, 19 nt, Artificial Sequence
  Description of Artificial Sequence: Synthetic oligonucleotide
gggagagugccagaaugug

SEQ ID NO: 70395 - RNA, 19 nt, Artificial Sequence
  Description of Artificial Sequence: Synthetic oligonucleotide
uguuguguaugugguccuu

SEQ ID NO: 70396 - RNA, 19 nt, Artificial Sequence
  Description of Artificial Sequence: Synthetic oligonucleotide
ggacaauuuguaccaauau

SEQ ID NO: 70397 - RNA, 19 nt, Artificial Sequence
  Description of Artificial Sequence: Synthetic oligonucleotide
cuugugacuugcucagacu

SEQ ID NO: 70398 - RNA, 19 nt, Artificial Sequence
  Description of Artificial Sequence: Synthetic oligonucleotide
agggccguucucaggcaac

SEQ ID NO: 70399 - RNA, 19 nt, Artificial Sequence
  Description of Artificial Sequence: Synthetic oligonucleotide
gacuggucugggucauaca

SEQ ID NO: 70400 - RNA, 19 nt, Artificial Sequence
  Description of Artificial Sequence: Synthetic oligonucleotide
cagagaguuaggacaauuu

SEQ ID NO: 70401 - RNA, 19 nt, Artificial Sequence
  Description of Artificial Sequence: Synthetic oligonucleotide
ugcugacccucucguuggu

SEQ ID NO: 70402 - RNA, 19 nt, Artificial Sequence
  Description of Artificial Sequence: Synthetic oligonucleotide
cucuccggacaggcaaggg

SEQ ID NO: 70403 - RNA, 19 nt, Artificial Sequence
  Description of Artificial Sequence: Synthetic oligonucleotide
ggagagugccagaauguga

SEQ ID NO: 70404 - RNA, 19 nt, Artificial Sequence
  Description of Artificial Sequence: Synthetic oligonucleotide
cuccaaucacgugugaggu

SEQ ID NO: 70405 - RNA, 19 nt, Artificial Sequence
  Description of Artificial Sequence: Synthetic oligonucleotide
  modified_base (2)..(2): a, c, u, g, unknown or other
cnccgaagugaguggcuca

SEQ ID NO: 70406 - RNA, 19 nt, Artificial Sequence
  Description of Artificial Sequence: Synthetic oligonucleotide
caugucagguucuggcggu

SEQ ID NO: 70407 - RNA, 19 nt, Artificial Sequence
  Description of Artificial Sequence: Synthetic oligonucleotide
ggcucucgggagauuaggc

SEQ ID NO: 70408 - RNA, 19 nt, Artificial Sequence
  Description of Artificial Sequence: Synthetic oligonucleotide
cugauacgguggccggaug

SEQ ID NO: 70409 - RNA, 19 nt, Artificial Sequence
  Description of Artificial Sequence: Synthetic oligonucleotide
cuggcggauguagguuucc

SEQ ID NO: 70410 - RNA, 19 nt, Artificial Sequence
  Description of Artificial Sequence: Synthetic oligonucleotide
ucccuuccgugagcagagg

SEQ ID NO: 70411 - RNA, 19 nt, Artificial Sequence
  Description of Artificial Sequence: Synthetic oligonucleotide
ggaguguacuugguaucug

SEQ ID NO: 70412 - RNA, 19 nt, Artificial Sequence
  Description of Artificial Sequence: Synthetic oligonucleotide
  modified_base (8)..(8): a, c, u, g, unknown or other
auucaacnccgaagugagu

SEQ ID NO: 70413 - RNA, 19 nt, Artificial Sequence
  Description of Artificial Sequence: Synthetic oligonucleotide
agccgucagcccaucuguc

SEQ ID NO: 70414 - RNA, 19 nt, Artificial Sequence
  Description of Artificial Sequence: Synthetic oligonucleotide
cuuccgugagcagagguau

SEQ ID NO: 70415 - RNA, 19 nt, Artificial Sequence
  Description of Artificial Sequence: Synthetic oligonucleotide
ccaaucacgugugagguua

SEQ ID NO: 70416 - RNA, 19 nt, Artificial Sequence
  Description of Artificial Sequence: Synthetic oligonucleotide
ccacggcugccgcagagag

SEQ ID NO: 70417 - RNA, 19 nt, Artificial Sequence
  Description of Artificial Sequence: Synthetic oligonucleotide
gcucaagacuguagacugc

SEQ ID NO: 70418 - RNA, 19 nt, Artificial Sequence
  Description of Artificial Sequence: Synthetic oligonucleotide
cuagggccguucucaggca

SEQ ID NO: 70419 - RNA, 19 nt, Artificial Sequence
  Description of Artificial Sequence: Synthetic oligonucleotide
gcucugcgcucaaacagug

SEQ ID NO: 70420 - RNA, 19 nt, Artificial Sequence
  Description of Artificial Sequence: Synthetic oligonucleotide
gaucccgagggaagguaua

SEQ ID NO: 70421 - RNA, 19 nt, Artificial Sequence
  Description of Artificial Sequence: Synthetic oligonucleotide
gggaagguauaggcuguug

SEQ ID NO: 70422 - RNA, 19 nt, Artificial Sequence
  Description of Artificial Sequence: Synthetic oligonucleotide
ggccgggaauaucugaacu

SEQ ID NO: 70423 - RNA, 19 nt, Artificial Sequence
  Description of Artificial Sequence: Synthetic oligonucleotide
gcugccgcagagaguuagg

SEQ ID NO: 70424 - RNA, 19 nt, Artificial Sequence
  Description of Artificial Sequence: Synthetic oligonucleotide
gcaggguagggaugccgac

SEQ ID NO: 70425 - RNA, 19 nt, Artificial Sequence
  Description of Artificial Sequence: Synthetic oligonucleotide
cuguauucuccaggguaaa

SEQ ID NO: 70426 - RNA, 19 nt, Artificial Sequence
  Description of Artificial Sequence: Synthetic oligonucleotide
cuaauccgguucucacugu

SEQ ID NO: 70427 - RNA, 19 nt, Artificial Sequence
  Description of Artificial Sequence: Synthetic oligonucleotide
gcuuugggagugaguggag

SEQ ID NO: 70428 - RNA, 19 nt, Artificial Sequence
  Description of Artificial Sequence: Synthetic oligonucleotide
ccgaugaagcucugcgcuc

SEQ ID NO: 70429 - RNA, 19 nt, Artificial Sequence
  Description of Artificial Sequence: Synthetic oligonucleotide
ucgggagauuaggcagggu

SEQ ID NO: 70430 - RNA, 19 nt, Artificial Sequence
  Description of Artificial Sequence: Synthetic oligonucleotide
uggagacucuuuggccuuu

SEQ ID NO: 70431 - RNA, 19 nt, Artificial Sequence
  Description of Artificial Sequence: Synthetic oligonucleotide
ggcgcauugucagaagagu

SEQ ID NO: 70432 - RNA, 19 nt, Artificial Sequence
  Description of Artificial Sequence: Synthetic oligonucleotide
ccguuaaguuggguggcag

SEQ ID NO: 70433 - RNA, 19 nt, Artificial Sequence
  Description of Artificial Sequence: Synthetic oligonucleotide
cccgaugaagcucugcgcu

SEQ ID NO: 70434 - RNA, 19 nt, Artificial Sequence
  Description of Artificial Sequence: Synthetic oligonucleotide
cacaugacugaugcauggu

SEQ ID NO: 70435 - RNA, 19 nt, Artificial Sequence
  Description of Artificial Sequence: Synthetic oligonucleotide
auguagcuaggaggaccau

SEQ ID NO: 70436 - RNA, 19 nt, Artificial Sequence
  Description of Artificial Sequence: Synthetic oligonucleotide
ggccguucucaggcaacag

SEQ ID NO: 70437 - RNA, 19 nt, Artificial Sequence
  Description of Artificial Sequence: Synthetic oligonucleotide
ggaugccgacaggagagaa

SEQ ID NO: 70438 - RNA, 19 nt, Artificial Sequence
  Description of Artificial Sequence: Synthetic oligonucleotide
ccacccggacaauuuggca

SEQ ID NO: 70439 - RNA, 19 nt, Artificial Sequence
  Description of Artificial Sequence: Synthetic oligonucleotide
cugccccagcgaauuaggu

SEQ ID NO: 70440 - RNA, 19 nt, Artificial Sequence
  Description of Artificial Sequence: Synthetic oligonucleotide
ccugcgcaacguugaggac

SEQ ID NO: 70441 - RNA, 19 nt, Artificial Sequence
  Description of Artificial Sequence: Synthetic oligonucleotide
ccgagggaagguauaggcu

SEQ ID NO: 70442 - RNA, 19 nt, Artificial Sequence
  Description of Artificial Sequence: Synthetic oligonucleotide
gggccguucucaggcaaca

SEQ ID NO: 70443 - RNA, 19 nt, Artificial Sequence
  Description of Artificial Sequence: Synthetic oligonucleotide
gcaucccauuacugcccca

SEQ ID NO: 70444 - RNA, 19 nt, Artificial Sequence
  Description of Artificial Sequence: Synthetic oligonucleotide
gcugauacgguggccggau

SEQ ID NO: 70445 - RNA, 19 nt, Artificial Sequence
  Description of Artificial Sequence: Synthetic oligonucleotide
guaaggcaaucaaccgcuu

SEQ ID NO: 70446 - RNA, 19 nt, Artificial Sequence
  Description of Artificial Sequence: Synthetic oligonucleotide
gcgcauugucagaagaguu

SEQ ID NO: 70447 - RNA, 19 nt, Artificial Sequence
  Description of Artificial Sequence: Synthetic oligonucleotide
cguuaaguuggguggcagu

SEQ ID NO: 70448 - RNA, 19 nt, Artificial Sequence
  Description of Artificial Sequence: Synthetic oligonucleotide
ggcuauucaucgggagagu

SEQ ID NO: 70449 - RNA, 19 nt, Artificial Sequence
  Description of Artificial Sequence: Synthetic oligonucleotide
gggcaguaccaucgagccu

SEQ ID NO: 70450 - RNA, 19 nt, Artificial Sequence
  Description of Artificial Sequence: Synthetic oligonucleotide
cggaauggccgggaauauc

SEQ ID NO: 70451 - RNA, 19 nt, Artificial Sequence
  Description of Artificial Sequence: Synthetic oligonucleotide
cgggagagugccagaaugu

SEQ ID NO: 70452 - RNA, 19 nt, Artificial Sequence
  Description of Artificial Sequence: Synthetic oligonucleotide
caguaccaucgagccugca

SEQ ID NO: 70453 - RNA, 19 nt, Artificial Sequence
  Description of Artificial Sequence: Synthetic oligonucleotide
cugcacggcucggcuuccu

SEQ ID NO: 70454 - RNA, 19 nt, Artificial Sequence
  Description of Artificial Sequence: Synthetic oligonucleotide
cccguggaugcggaucccu

SEQ ID NO: 70455 - RNA, 19 nt, Artificial Sequence
  Description of Artificial Sequence: Synthetic oligonucleotide
ccggaauggccgggaauau

SEQ ID NO: 70456 - RNA, 19 nt, Artificial Sequence
  Description of Artificial Sequence: Synthetic oligonucleotide
ccacccuuucuagggccgu

SEQ ID NO: 70457 - RNA, 19 nt, Artificial Sequence
  Description of Artificial Sequence: Synthetic oligonucleotide
gcgcaacguugaggacaga

SEQ ID NO: 70458 - RNA, 19 nt, Artificial Sequence
  Description of Artificial Sequence: Synthetic oligonucleotide
aauaagauauugcuguggc

SEQ ID NO: 70459 - RNA, 19 nt, Artificial Sequence
  Description of Artificial Sequence: Synthetic oligonucleotide
aaaucuauuugcuaucugg

SEQ ID NO: 70460 - RNA, 19 nt, Artificial Sequence
  Description of Artificial Sequence: Synthetic oligonucleotide
uuaaagucuaguaagaaca

SEQ ID NO: 70461 - RNA, 19 nt, Artificial Sequence
  Description of Artificial Sequence: Synthetic oligonucleotide
ugugaaacuauacagaccu

SEQ ID NO: 70462 - RNA, 19 nt, Artificial Sequence
  Description of Artificial Sequence: Synthetic oligonucleotide
aauaauagggagccuacac

SEQ ID NO: 70463 - RNA, 19 nt, Artificial Sequence
  Description of Artificial Sequence: Synthetic oligonucleotide
agugucaugauguaaaguc

SEQ ID NO: 70464 - RNA, 19 nt, Artificial Sequence
  Description of Artificial Sequence: Synthetic oligonucleotide
auacucuacaaguuaaugc

SEQ ID NO: 70465 - RNA, 19 nt, Artificial Sequence
  Description of Artificial Sequence: Synthetic oligonucleotide
aaacugauacccaagaaac

SEQ ID NO: 70466 - RNA, 19 nt, Artificial Sequence
  Description of Artificial Sequence: Synthetic oligonucleotide
cuaguaagaacauuucucg

SEQ ID NO: 70467 - RNA, 19 nt, Artificial Sequence
  Description of Artificial Sequence: Synthetic oligonucleotide
uaaaucaccgacuagugug

SEQ ID NO: 70468 - RNA, 19 nt, Artificial Sequence
  Description of Artificial Sequence: Synthetic oligonucleotide
uuauaaagugugcauaagc

SEQ ID NO: 70469 - RNA, 19 nt, Artificial Sequence
  Description of Artificial Sequence: Synthetic oligonucleotide
aauaaaggugcuuaacacu

SEQ ID NO: 70470 - RNA, 19 nt, Artificial Sequence
  Description of Artificial Sequence: Synthetic oligonucleotide
uuaucauuauagcugacug

SEQ ID NO: 70471 - RNA, 19 nt, Artificial Sequence
  Description of Artificial Sequence: Synthetic oligonucleotide
uuauuuggcgacaagcaag

SEQ ID NO: 70472 - RNA, 19 nt, Artificial Sequence
  Description of Artificial Sequence: Synthetic oligonucleotide
ugcaccuacagcuauauca

SEQ ID NO: 70473 - RNA, 19 nt, Artificial Sequence
  Description of Artificial Sequence: Synthetic oligonucleotide
aguaucuuaaagauauucc

SEQ ID NO: 70474 - RNA, 19 nt, Artificial Sequence
  Description of Artificial Sequence: Synthetic oligonucleotide
ugauuuagcauuuuaguuc

SEQ ID NO: 70475 - RNA, 19 nt, Artificial Sequence
  Description of Artificial Sequence: Synthetic oligonucleotide
uuuaggacaugauuuagca

SEQ ID NO: 70476 - RNA, 19 nt, Artificial Sequence
  Description of Artificial Sequence: Synthetic oligonucleotide
gaaugauccacucugcagc

SEQ ID NO: 70477 - RNA, 19 nt, Artificial Sequence
  Description of Artificial Sequence: Synthetic oligonucleotide
uucauauauuaucaaacac

SEQ ID NO: 70478 - RNA, 19 nt, Artificial Sequence
  Description of Artificial Sequence: Synthetic oligonucleotide
uuuaaaacucaaaguacca

SEQ ID NO: 70479 - RNA, 19 nt, Artificial Sequence
  Description of Artificial Sequence: Synthetic oligonucleotide
gacaucuuaacugugaaac

SEQ ID NO: 70480 - RNA, 19 nt, Artificial Sequence
  Description of Artificial Sequence: Synthetic oligonucleotide
ucacaaacuuaacaugggg

SEQ ID NO: 70481 - RNA, 19 nt, Artificial Sequence
  Description of Artificial Sequence: Synthetic oligonucleotide
acaaacuuaacauggggug

SEQ ID NO: 70482 - RNA, 19 nt, Artificial Sequence
  Description of Artificial Sequence: Synthetic oligonucleotide
ugaucaaagucuaauacua

SEQ ID NO: 70483 - RNA, 19 nt, Artificial Sequence
  Description of Artificial Sequence: Synthetic oligonucleotide
caauugacccuuuacauac

SEQ ID NO: 70484 - RNA, 19 nt, Artificial Sequence
  Description of Artificial Sequence: Synthetic oligonucleotide
uaucuuaaagauauucccu

SEQ ID NO: 70485 - RNA, 19 nt, Artificial Sequence
  Description of Artificial Sequence: Synthetic oligonucleotide
auuagguaacacuuaaugu

SEQ ID NO: 70486 - RNA, 19 nt, Artificial Sequence
  Description of Artificial Sequence: Synthetic oligonucleotide
agcuauaucauugaaauau

SEQ ID NO: 70487 - RNA, 19 nt, Artificial Sequence
  Description of Artificial Sequence: Synthetic oligonucleotide
augaguaucucacaugucu

SEQ ID NO: 70488 - RNA, 19 nt, Artificial Sequence
  Description of Artificial Sequence: Synthetic oligonucleotide
uuucaauuaaugagugacc

SEQ ID NO: 70489 - RNA, 19 nt, Artificial Sequence
  Description of Artificial Sequence: Synthetic oligonucleotide
cacauuuagggauacauuc

SEQ ID NO: 70490 - RNA, 19 nt, Artificial Sequence
  Description of Artificial Sequence: Synthetic oligonucleotide
aaggauauaacuccauuua

SEQ ID NO: 70491 - RNA, 19 nt, Artificial Sequence
  Description of Artificial Sequence: Synthetic oligonucleotide
aaaauaugaguaucucaca

SEQ ID NO: 70492 - RNA, 19 nt, Artificial Sequence
  Description of Artificial Sequence: Synthetic oligonucleotide
gagaauaagauauugcugu

SEQ ID NO: 70493 - RNA, 19 nt, Artificial Sequence
  Description of Artificial Sequence: Synthetic oligonucleotide
agucaaaugagagaaaaca

SEQ ID NO: 70494 - RNA, 19 nt, Artificial Sequence
  Description of Artificial Sequence: Synthetic oligonucleotide
uauuauugggcuuacugaa

SEQ ID NO: 70495 - RNA, 19 nt, Artificial Sequence
  Description of Artificial Sequence: Synthetic oligonucleotide
ucgguuucaauaaacacau

SEQ ID NO: 70496 - RNA, 19 nt, Artificial Sequence
  Description of Artificial Sequence: Synthetic oligonucleotide
uacaauuucacuacccuau

SEQ ID NO: 70497 - RNA, 19 nt, Artificial Sequence
  Description of Artificial Sequence: Synthetic oligonucleotide
aguucuaacaaucuguauu

SEQ ID NO: 70498 - RNA, 19 nt, Artificial Sequence
  Description of Artificial Sequence: Synthetic oligonucleotide
uucggguuuauuuaggggu

SEQ ID NO: 70499 - RNA, 19 nt, Artificial Sequence
  Description of Artificial Sequence: Synthetic oligonucleotide
gggguauuggcuuauaagg

SEQ ID NO: 70500 - RNA, 19 nt, Artificial Sequence
  Description of Artificial Sequence: Synthetic oligonucleotide
uauaguucucaacccauca

SEQ ID NO: 70501 - RNA, 19 nt, Artificial Sequence
  Description of Artificial Sequence: Synthetic oligonucleotide
uuagggauacauucauagg

SEQ ID NO: 70502 - RNA, 19 nt, Artificial Sequence
  Description of Artificial Sequence: Synthetic oligonucleotide
auuuuauauguccaagaga

SEQ ID NO: 70503 - RNA, 19 nt, Artificial Sequence
  Description of Artificial Sequence: Synthetic oligonucleotide
acuagccccaguuucuacc

SEQ ID NO: 70504 - RNA, 19 nt, Artificial Sequence
  Description of Artificial Sequence: Synthetic oligonucleotide
uacaaguuaaugccucuag

SEQ ID NO: 70505 - RNA, 19 nt, Artificial Sequence
  Description of Artificial Sequence: Synthetic oligonucleotide
auuagagaauaagauauug

SEQ ID NO: 70506 - RNA, 19 nt, Artificial Sequence
  Description of Artificial Sequence: Synthetic oligonucleotide
uucaauuaaugagugaccu

SEQ ID NO: 70507 - RNA, 19 nt, Artificial Sequence
  Description of Artificial Sequence: Synthetic oligonucleotide
cuuauaguaguucuucuuc

SEQ ID NO: 70508 - RNA, 19 nt, Artificial Sequence
  Description of Artificial Sequence: Synthetic oligonucleotide
uuucucgagccacugauga

SEQ ID NO: 70509 - RNA, 19 nt, Artificial Sequence
  Description of Artificial Sequence: Synthetic oligonucleotide
auagggagccuacacacuc

SEQ ID NO: 70510 - RNA, 19 nt, Artificial Sequence
  Description of Artificial Sequence: Synthetic oligonucleotide
uauagaaauagaggcagug

SEQ ID NO: 70511 - RNA, 19 nt, Artificial Sequence
  Description of Artificial Sequence: Synthetic oligonucleotide
guaagaacauuucucgagc

SEQ ID NO: 70512 - RNA, 19 nt, Artificial Sequence
  Description of Artificial Sequence: Synthetic oligonucleotide
aaguuaaugccucuagcaa

SEQ ID NO: 70513 - RNA, 19 nt, Artificial Sequence
  Description of Artificial Sequence: Synthetic oligonucleotide
aucacguaaguuuauuuca

SEQ ID NO: 70514 - RNA, 19 nt, Artificial Sequence
  Description of Artificial Sequence: Synthetic oligonucleotide
aggacaauugacccuuuac

SEQ ID NO: 70515 - RNA, 19 nt, Artificial Sequence
  Description of Artificial Sequence: Synthetic oligonucleotide
uugagaugaggcuauguga

SEQ ID NO: 70516 - RNA, 19 nt, Artificial Sequence
  Description of Artificial Sequence: Synthetic oligonucleotide
ugacucauugcugaucugg

SEQ ID NO: 70517 - RNA, 19 nt, Artificial Sequence
  Description of Artificial Sequence: Synthetic oligonucleotide
uuaaaggccguaucucuag

SEQ ID NO: 70518 - RNA, 19 nt, Artificial Sequence
  Description of Artificial Sequence: Synthetic oligonucleotide
cuaaagguagagugaaggc

SEQ ID NO: 70519 - RNA, 19 nt, Artificial Sequence
  Description of Artificial Sequence: Synthetic oligonucleotide
aaaaucuauuugcuaucug

SEQ ID NO: 70520 - RNA, 19 nt, Artificial Sequence
  Description of Artificial Sequence: Synthetic oligonucleotide
gauaacaaugguccaacuc

SEQ ID NO: 70521 - RNA, 19 nt, Artificial Sequence
  Description of Artificial Sequence: Synthetic oligonucleotide
auauauugcauagauuucu

SEQ ID NO: 70522 - RNA, 19 nt, Artificial Sequence
  Description of Artificial Sequence: Synthetic oligonucleotide
uggaauuauuuaaugcaac

SEQ ID NO: 70523 - RNA, 19 nt, Artificial Sequence
  Description of Artificial Sequence: Synthetic oligonucleotide
ugacuacugacaaucuaag

SEQ ID NO: 70524 - RNA, 19 nt, Artificial Sequence
  Description of Artificial Sequence: Synthetic oligonucleotide
guaacaaucuucuuuaggu

SEQ ID NO: 70525 - RNA, 19 nt, Artificial Sequence
  Description of Artificial Sequence: Synthetic oligonucleotide
aaucuguauuaguugacau

SEQ ID NO: 70526 - RNA, 19 nt, Artificial Sequence
  Description of Artificial Sequence: Synthetic oligonucleotide
guuuauuuagggguauugg

SEQ ID NO: 70527 - RNA, 19 nt, Artificial Sequence
  Description of Artificial Sequence: Synthetic oligonucleotide
auaguaguucuucuucguc

SEQ ID NO: 70528 - RNA, 19 nt, Artificial Sequence
  Description of Artificial Sequence: Synthetic oligonucleotide
ugcauucugaccagauggg

SEQ ID NO: 70529 - RNA, 19 nt, Artificial Sequence
  Description of Artificial Sequence: Synthetic oligonucleotide
aggacuacucaaauagucc

SEQ ID NO: 70530 - RNA, 19 nt, Artificial Sequence
  Description of Artificial Sequence: Synthetic oligonucleotide
gacuugaacaauccaaaca

SEQ ID NO: 70531 - RNA, 19 nt, Artificial Sequence
  Description of Artificial Sequence: Synthetic oligonucleotide
agagaaaacauacuauguu

SEQ ID NO: 70532 - RNA, 19 nt, Artificial Sequence
  Description of Artificial Sequence: Synthetic oligonucleotide
uuaaugagugaccugcuuu

SEQ ID NO: 70533 - RNA, 19 nt, Artificial Sequence
  Description of Artificial Sequence: Synthetic oligonucleotide
aauauuguguggugucaca

SEQ ID NO: 70534 - RNA, 19 nt, Artificial Sequence
  Description of Artificial Sequence: Synthetic oligonucleotide
uaaggauauaacuccauuu

SEQ ID NO: 70535 - RNA, 19 nt, Artificial Sequence
  Description of Artificial Sequence: Synthetic oligonucleotide
aggaggaauaucaagggag

SEQ ID NO: 70536 - RNA, 19 nt, Artificial Sequence
  Description of Artificial Sequence: Synthetic oligonucleotide
aaucaucugauacccaauu

SEQ ID NO: 70537 - RNA, 19 nt, Artificial Sequence
  Description of Artificial Sequence: Synthetic oligonucleotide
auaugagagacuugaacaa

SEQ ID NO: 70538 - RNA, 19 nt, Artificial Sequence
  Description of Artificial Sequence: Synthetic oligonucleotide
agggguauuggcuuauaag

SEQ ID NO: 70539 - RNA, 19 nt, Artificial Sequence
  Description of Artificial Sequence: Synthetic oligonucleotide
aagucuaguaagaacauuu

SEQ ID NO: 70540 - RNA, 19 nt, Artificial Sequence
  Description of Artificial Sequence: Synthetic oligonucleotide
uuuaguuccuauuccuagu

SEQ ID NO: 70541 - RNA, 19 nt, Artificial Sequence
  Description of Artificial Sequence: Synthetic oligonucleotide
uuugcuagcucgccaaccu

SEQ ID NO: 70542 - RNA, 19 nt, Artificial Sequence
  Description of Artificial Sequence: Synthetic oligonucleotide
ugucuagaaaacugauacc

SEQ ID NO: 70543 - RNA, 19 nt, Artificial Sequence
  Description of Artificial Sequence: Synthetic oligonucleotide
cacucaaugaccacaguuc

SEQ ID NO: 70544 - RNA, 19 nt, Artificial Sequence
  Description of Artificial Sequence: Synthetic oligonucleotide
uagguuaaaucaccgacua

SEQ ID NO: 70545 - RNA, 19 nt, Artificial Sequence
  Description of Artificial Sequence: Synthetic oligonucleotide
cuggccuuaaccaaaccug

SEQ ID NO: 70546 - RNA, 19 nt, Artificial Sequence
  Description of Artificial Sequence: Synthetic oligonucleotide
aaggccguaucucuagcug

SEQ ID NO: 70547 - RNA, 19 nt, Artificial Sequence
  Description of Artificial Sequence: Synthetic oligonucleotide
uuggcuuauaaggauauaa

SEQ ID NO: 70548 - RNA, 19 nt, Artificial Sequence
  Description of Artificial Sequence: Synthetic oligonucleotide
caaguuaaugccucuagca

SEQ ID NO: 70549 - RNA, 19 nt, Artificial Sequence
  Description of Artificial Sequence: Synthetic oligonucleotide
acacuucauacuucuauug

SEQ ID NO: 70550 - RNA, 19 nt, Artificial Sequence
  Description of Artificial Sequence: Synthetic oligonucleotide
cugaugacuacugacaauc

SEQ ID NO: 70551 - RNA, 19 nt, Artificial Sequence
  Description of Artificial Sequence: Synthetic oligonucleotide
ugaaacuauacagaccuau

SEQ ID NO: 70552 - RNA, 19 nt, Artificial Sequence
  Description of Artificial Sequence: Synthetic oligonucleotide
uauaguaguucuucuucgu

SEQ ID NO: 70553 - RNA, 19 nt, Artificial Sequence
  Description of Artificial Sequence: Synthetic oligonucleotide
ccuucaaugugaaagcagg

SEQ ID NO: 70554 - RNA, 19 nt, Artificial Sequence
  Description of Artificial Sequence: Synthetic oligonucleotide
auuuagguuaaaucaccga

SEQ ID NO: 70555 - RNA, 19 nt, Artificial Sequence
  Description of Artificial Sequence: Synthetic oligonucleotide
uguuuaggacaugauuuag

SEQ ID NO: 70556 - RNA, 19 nt, Artificial Sequence
  Description of Artificial Sequence: Synthetic oligonucleotide
accuauuuaccccacagua

SEQ ID NO: 70557 - RNA, 19 nt, Artificial Sequence
  Description of Artificial Sequence: Synthetic oligonucleotide
uuaauauugugugguguca

SEQ ID NO: 70558 - RNA, 19 nt, Artificial Sequence
  Description of Artificial Sequence: Synthetic oligonucleotide
agcuauucgguuucaauaa

SEQ ID NO: 70559 - RNA, 19 nt, Artificial Sequence
  Description of Artificial Sequence: Synthetic oligonucleotide
agauguuuaggacaugauu

SEQ ID NO: 70560 - RNA, 19 nt, Artificial Sequence
  Description of Artificial Sequence: Synthetic oligonucleotide
uauuuagggguauuggcuu

SEQ ID NO: 70561 - RNA, 19 nt, Artificial Sequence
  Description of Artificial Sequence: Synthetic oligonucleotide
agcaagugcaagaaaguuc

SEQ ID NO: 70562 - RNA, 19 nt, Artificial Sequence
  Description of Artificial Sequence: Synthetic oligonucleotide
uccacuuaauguacuuuca

SEQ ID NO: 70563 - RNA, 19 nt, Artificial Sequence
  Description of Artificial Sequence: Synthetic oligonucleotide
aaaggugcuuaacacuaaa

SEQ ID NO: 70564 - RNA, 19 nt, Artificial Sequence
  Description of Artificial Sequence: Synthetic oligonucleotide
auguacuuaauuguuguga

SEQ ID NO: 70565 - RNA, 19 nt, Artificial Sequence
  Description of Artificial Sequence: Synthetic oligonucleotide
uuauagaaauagaggcagu

SEQ ID NO: 70566 - RNA, 19 nt, Artificial Sequence
  Description of Artificial Sequence: Synthetic oligonucleotide
agauaagcaauagcauaac

SEQ ID NO: 70567 - RNA, 19 nt, Artificial Sequence
  Description of Artificial Sequence: Synthetic oligonucleotide
ccuugaaaguauuacaaac

SEQ ID NO: 70568 - RNA, 19 nt, Artificial Sequence
  Description of Artificial Sequence: Synthetic oligonucleotide
cuucggguuuauuuagggg

SEQ ID NO: 70569 - RNA, 19 nt, Artificial Sequence
  Description of Artificial Sequence: Synthetic oligonucleotide
guaacacuuaauguguuac

SEQ ID NO: 70570 - RNA, 19 nt, Artificial Sequence
  Description of Artificial Sequence: Synthetic oligonucleotide
uuuggacugucuagaaaac

SEQ ID NO: 70571 - RNA, 19 nt, Artificial Sequence
  Description of Artificial Sequence: Synthetic oligonucleotide
aguaaacgcagccacuuaa

SEQ ID NO: 70572 - RNA, 19 nt, Artificial Sequence
  Description of Artificial Sequence: Synthetic oligonucleotide
uaguaagaacauuucucga

SEQ ID NO: 70573 - RNA, 19 nt, Artificial Sequence
  Description of Artificial Sequence: Synthetic oligonucleotide
uuccuauuccuagucuucg

SEQ ID NO: 70574 - RNA, 19 nt, Artificial Sequence
  Description of Artificial Sequence: Synthetic oligonucleotide
uuuccccagaugaaaauua

SEQ ID NO: 70575 - RNA, 19 nt, Artificial Sequence
  Description of Artificial Sequence: Synthetic oligonucleotide
aucgcugacucauugcuga

SEQ ID NO: 70576 - RNA, 19 nt, Artificial Sequence
  Description of Artificial Sequence: Synthetic oligonucleotide
ucaaucgcugacucauugc

SEQ ID NO: 70577 - RNA, 19 nt, Artificial Sequence
  Description of Artificial Sequence: Synthetic oligonucleotide
acccuauucauccauccgu

SEQ ID NO: 70578 - RNA, 19 nt, Artificial Sequence
  Description of Artificial Sequence: Synthetic oligonucleotide
uuucacuacccuauucauc

SEQ ID NO: 70579 - RNA, 19 nt, Artificial Sequence
  Description of Artificial Sequence: Synthetic oligonucleotide
ucaccgacuagugugaaaa

SEQ ID NO: 70580 - RNA, 19 nt, Artificial Sequence
  Description of Artificial Sequence: Synthetic oligonucleotide
uacacuauuauugggcuua

SEQ ID NO: 70581 - RNA, 19 nt, Artificial Sequence
  Description of Artificial Sequence: Synthetic oligonucleotide
cuucgucucaauaaucuca

SEQ ID NO: 70582 - RNA, 19 nt, Artificial Sequence
  Description of Artificial Sequence: Synthetic oligonucleotide
cuagugucaugauguaaag

SEQ ID NO: 70583 - RNA, 19 nt, Artificial Sequence
  Description of Artificial Sequence: Synthetic oligonucleotide
cuacccuauucauccaucc

SEQ ID NO: 70584 - RNA, 19 nt, Artificial Sequence
  Description of Artificial Sequence: Synthetic oligonucleotide
auccucuuauaguaguucu

SEQ ID NO: 70585 - RNA, 19 nt, Artificial Sequence
  Description of Artificial Sequence: Synthetic oligonucleotide
uugcuucggguuuauuuag

SEQ ID NO: 70586 - RNA, 19 nt, Artificial Sequence
  Description of Artificial Sequence: Synthetic oligonucleotide
guuaaaucaccgacuagug

SEQ ID NO: 70587 - RNA, 19 nt, Artificial Sequence
  Description of Artificial Sequence: Synthetic oligonucleotide
ugaucuggccuuaaccaaa

SEQ ID NO: 70588 - RNA, 19 nt, Artificial Sequence
  Description of Artificial Sequence: Synthetic oligonucleotide
uuuaaccuauuuaccccac

SEQ ID NO: 70589 - RNA, 19 nt, Artificial Sequence
  Description of Artificial Sequence: Synthetic oligonucleotide
uaaggugcaaggcauccua

SEQ ID NO: 70590 - RNA, 19 nt, Artificial Sequence
  Description of Artificial Sequence: Synthetic oligonucleotide
uccuauuccuagucuucgg

SEQ ID NO: 70591 - RNA, 19 nt, Artificial Sequence
  Description of Artificial Sequence: Synthetic oligonucleotide
uuaaccuauuuaccccaca

SEQ ID NO: 70592 - RNA, 19 nt, Artificial Sequence
  Description of Artificial Sequence: Synthetic oligonucleotide
aagauauugcuguggcuuu

SEQ ID NO: 70593 - RNA, 19 nt, Artificial Sequence
  Description of Artificial Sequence: Synthetic oligonucleotide
cauacucuacaaguuaaug

SEQ ID NO: 70594 - RNA, 19 nt, Artificial Sequence
  Description of Artificial Sequence: Synthetic oligonucleotide
acaucuuaacugugaaacu

SEQ ID NO: 70595 - RNA, 19 nt, Artificial Sequence
  Description of Artificial Sequence: Synthetic oligonucleotide
uguaaguggauggaauuau

SEQ ID NO: 70596 - RNA, 19 nt, Artificial Sequence
  Description of Artificial Sequence: Synthetic oligonucleotide
acaauugacccuuuacaua

SEQ ID NO: 70597 - RNA, 19 nt, Artificial Sequence
  Description of Artificial Sequence: Synthetic oligonucleotide
agucuaguaagaacauuuc

SEQ ID NO: 70598 - RNA, 19 nt, Artificial Sequence
  Description of Artificial Sequence: Synthetic oligonucleotide
uaccacaauuuuccaaaga

SEQ ID NO: 70599 - RNA, 19 nt, Artificial Sequence
  Description of Artificial Sequence: Synthetic oligonucleotide
cuuaaccaaaccugucaac

SEQ ID NO: 70600 - RNA, 19 nt, Artificial Sequence
  Description of Artificial Sequence: Synthetic oligonucleotide
ucgguaaggugcaaggcau

SEQ ID NO: 70601 - RNA, 19 nt, Artificial Sequence
  Description of Artificial Sequence: Synthetic oligonucleotide
cucuacaaguuaaugccuc

SEQ ID NO: 70602 - RNA, 19 nt, Artificial Sequence
  Description of Artificial Sequence: Synthetic oligonucleotide
auaagauauugcuguggcu

SEQ ID NO: 70603 - RNA, 19 nt, Artificial Sequence
  Description of Artificial Sequence: Synthetic oligonucleotide
guugacauuagguaacacu

SEQ ID NO: 70604 - RNA, 19 nt, Artificial Sequence
  Description of Artificial Sequence: Synthetic oligonucleotide
uaauauuguguggugucac

SEQ ID NO: 70605 - RNA, 19 nt, Artificial Sequence
  Description of Artificial Sequence: Synthetic oligonucleotide
uacccaauuugagaggaca

SEQ ID NO: 70606 - RNA, 19 nt, Artificial Sequence
  Description of Artificial Sequence: Synthetic oligonucleotide
uggccuuaaccaaaccugu

SEQ ID NO: 70607 - RNA, 19 nt, Artificial Sequence
  Description of Artificial Sequence: Synthetic oligonucleotide
aaaucaccgacuaguguga

SEQ ID NO: 70608 - RNA, 19 nt, Artificial Sequence
  Description of Artificial Sequence: Synthetic oligonucleotide
auagaggcagugucaucuc

SEQ ID NO: 70609 - RNA, 19 nt, Artificial Sequence
  Description of Artificial Sequence: Synthetic oligonucleotide
aauuaaugagugaccugcu

SEQ ID NO: 70610 - RNA, 19 nt, Artificial Sequence
  Description of Artificial Sequence: Synthetic oligonucleotide
gucaaucgcugacucauug

SEQ ID NO: 70611 - RNA, 19 nt, Artificial Sequence
  Description of Artificial Sequence: Synthetic oligonucleotide
caucuuccccuuauguaag

SEQ ID NO: 70612 - RNA, 19 nt, Artificial Sequence
  Description of Artificial Sequence: Synthetic oligonucleotide
cauccuagugucaugaugu

SEQ ID NO: 70613 - RNA, 19 nt, Artificial Sequence
  Description of Artificial Sequence: Synthetic oligonucleotide
ucauaggacuacucaaaua

SEQ ID NO: 70614 - RNA, 19 nt, Artificial Sequence
  Description of Artificial Sequence: Synthetic oligonucleotide
auacaggacaauugacccu

SEQ ID NO: 70615 - RNA, 19 nt, Artificial Sequence
  Description of Artificial Sequence: Synthetic oligonucleotide
uaauaauagggagccuaca

SEQ ID NO: 70616 - RNA, 19 nt, Artificial Sequence
  Description of Artificial Sequence: Synthetic oligonucleotide
ggaauaucaagggagaaaa

SEQ ID NO: 70617 - RNA, 19 nt, Artificial Sequence
  Description of Artificial Sequence: Synthetic oligonucleotide
ggacaauugacccuuuaca

SEQ ID NO: 70618 - RNA, 19 nt, Artificial Sequence
  Description of Artificial Sequence: Synthetic oligonucleotide
augcaacuuugauacagga

SEQ ID NO: 70619 - RNA, 19 nt, Artificial Sequence
  Description of Artificial Sequence: Synthetic oligonucleotide
aucuguauuaguugacauu

SEQ ID NO: 70620 - RNA, 19 nt, Artificial Sequence
  Description of Artificial Sequence: Synthetic oligonucleotide
agaacaucacguaaguuua

SEQ ID NO: 70621 - RNA, 19 nt, Artificial Sequence
  Description of Artificial Sequence: Synthetic oligonucleotide
aaacuuaacaugggguguu

SEQ ID NO: 70622 - RNA, 19 nt, Artificial Sequence
  Description of Artificial Sequence: Synthetic oligonucleotide
uggaggacuuucaauuaau

SEQ ID NO: 70623 - RNA, 19 nt, Artificial Sequence
  Description of Artificial Sequence: Synthetic oligonucleotide
gagaggacaucuuaacugu

SEQ ID NO: 70624 - RNA, 19 nt, Artificial Sequence
  Description of Artificial Sequence: Synthetic oligonucleotide
acuuaacaugggguguuac

SEQ ID NO: 70625 - RNA, 19 nt, Artificial Sequence
  Description of Artificial Sequence: Synthetic oligonucleotide
uauccucuuauaguaguuc

SEQ ID NO: 70626 - RNA, 19 nt, Artificial Sequence
  Description of Artificial Sequence: Synthetic oligonucleotide
augggguguuacuuuagca

SEQ ID NO: 70627 - RNA, 19 nt, Artificial Sequence
  Description of Artificial Sequence: Synthetic oligonucleotide
ugaggccgucguuacagcc

SEQ ID NO: 70628 - RNA, 19 nt, Artificial Sequence
  Description of Artificial Sequence: Synthetic oligonucleotide
uacaggacaauugacccuu

SEQ ID NO: 70629 - RNA, 19 nt, Artificial Sequence
  Description of Artificial Sequence: Synthetic oligonucleotide
ccaagugaaaugguuauag

SEQ ID NO: 70630 - RNA, 19 nt, Artificial Sequence
  Description of Artificial Sequence: Synthetic oligonucleotide
cuaagcuugucuaugaauu

SEQ ID NO: 70631 - RNA, 19 nt, Artificial Sequence
  Description of Artificial Sequence: Synthetic oligonucleotide
cuugcuucggguuuauuua

SEQ ID NO: 70632 - RNA, 19 nt, Artificial Sequence
  Description of Artificial Sequence: Synthetic oligonucleotide
uuccccagaugaaaauuaa

SEQ ID NO: 70633 - RNA, 19 nt, Artificial Sequence
  Description of Artificial Sequence: Synthetic oligonucleotide
agguuaaaucaccgacuag

SEQ ID NO: 70634 - RNA, 19 nt, Artificial Sequence
  Description of Artificial Sequence: Synthetic oligonucleotide
aaagucuaguaagaacauu

SEQ ID NO: 70635 - RNA, 19 nt, Artificial Sequence
  Description of Artificial Sequence: Synthetic oligonucleotide
gcuucggguuuauuuaggg

SEQ ID NO: 70636 - RNA, 19 nt, Artificial Sequence
  Description of Artificial Sequence: Synthetic oligonucleotide
gaugacuacugacaaucua

SEQ ID NO: 70637 - RNA, 19 nt, Artificial Sequence
  Description of Artificial Sequence: Synthetic oligonucleotide
aaaguaccacaaauacacu

SEQ ID NO: 70638 - RNA, 19 nt, Artificial Sequence
  Description of Artificial Sequence: Synthetic oligonucleotide
ucacagugauauuuguauu

SEQ ID NO: 70639 - RNA, 19 nt, Artificial Sequence
  Description of Artificial Sequence: Synthetic oligonucleotide
cucgccaaccucuagcaca

SEQ ID NO: 70640 - RNA, 19 nt, Artificial Sequence
  Description of Artificial Sequence: Synthetic oligonucleotide
uuggacugucuagaaaacu

SEQ ID NO: 70641 - RNA, 19 nt, Artificial Sequence
  Description of Artificial Sequence: Synthetic oligonucleotide
guauuuugagaugaggcua

SEQ ID NO: 70642 - RNA, 19 nt, Artificial Sequence
  Description of Artificial Sequence: Synthetic oligonucleotide
aaagaugaccugguucaau

SEQ ID NO: 70643 - RNA, 19 nt, Artificial Sequence
  Description of Artificial Sequence: Synthetic oligonucleotide
aguugacauuagguaacac

SEQ ID NO: 70644 - RNA, 19 nt, Artificial Sequence
  Description of Artificial Sequence: Synthetic oligonucleotide
aaccccacacgccggccuc

SEQ ID NO: 70645 - RNA, 19 nt, Artificial Sequence
  Description of Artificial Sequence: Synthetic oligonucleotide
aaucgcugacucauugcug

SEQ ID NO: 70646 - RNA, 19 nt, Artificial Sequence
  Description of Artificial Sequence: Synthetic oligonucleotide
ccaacagauaagcaauagc

SEQ ID NO: 70647 - RNA, 19 nt, Artificial Sequence
  Description of Artificial Sequence: Synthetic oligonucleotide
aauagggagccuacacacu

SEQ ID NO: 70648 - RNA, 19 nt, Artificial Sequence
  Description of Artificial Sequence: Synthetic oligonucleotide
uagggguauuggcuuauaa

SEQ ID NO: 70649 - RNA, 19 nt, Artificial Sequence
  Description of Artificial Sequence: Synthetic oligonucleotide
cacagugauauuuguauua

SEQ ID NO: 70650 - RNA, 19 nt, Artificial Sequence
  Description of Artificial Sequence: Synthetic oligonucleotide
uccucacaaauaugagaga

SEQ ID NO: 70651 - RNA, 19 nt, Artificial Sequence
  Description of Artificial Sequence: Synthetic oligonucleotide
gguuauagaaauagaggca

SEQ ID NO: 70652 - RNA, 19 nt, Artificial Sequence
  Description of Artificial Sequence: Synthetic oligonucleotide
auccggcuaccuuucaucu

SEQ ID NO: 70653 - RNA, 19 nt, Artificial Sequence
  Description of Artificial Sequence: Synthetic oligonucleotide
aacaucacguaaguuuauu

SEQ ID NO: 70654 - RNA, 19 nt, Artificial Sequence
  Description of Artificial Sequence: Synthetic oligonucleotide
gucguuacagccgcgacca

SEQ ID NO: 70655 - RNA, 19 nt, Artificial Sequence
  Description of Artificial Sequence: Synthetic oligonucleotide
aaguaaacgcagccacuua

SEQ ID NO: 70656 - RNA, 19 nt, Artificial Sequence
  Description of Artificial Sequence: Synthetic oligonucleotide
cacaaacuuaacauggggu

SEQ ID NO: 70657 - RNA, 19 nt, Artificial Sequence
  Description of Artificial Sequence: Synthetic oligonucleotide
agcucgccaaccucuagca

SEQ ID NO: 70658 - RNA, 19 nt, Artificial Sequence
  Description of Artificial Sequence: Synthetic oligonucleotide
aucaucugauacccaauuu

SEQ ID NO: 70659 - RNA, 19 nt, Artificial Sequence
  Description of Artificial Sequence: Synthetic oligonucleotide
ugcuaucuggaaguuuaca

SEQ ID NO: 70660 - RNA, 19 nt, Artificial Sequence
  Description of Artificial Sequence: Synthetic oligonucleotide
acuacccuauucauccauc

SEQ ID NO: 70661 - RNA, 19 nt, Artificial Sequence
  Description of Artificial Sequence: Synthetic oligonucleotide
ugucagggauuaacauccc

SEQ ID NO: 70662 - RNA, 19 nt, Artificial Sequence
  Description of Artificial Sequence: Synthetic oligonucleotide
uagugucaugauguaaagu

SEQ ID NO: 70663 - RNA, 19 nt, Artificial Sequence
  Description of Artificial Sequence: Synthetic oligonucleotide
cuaccaaugugccuguaaa

SEQ ID NO: 70664 - RNA, 19 nt, Artificial Sequence
  Description of Artificial Sequence: Synthetic oligonucleotide
cagggauuaacaucccaca

SEQ ID NO: 70665 - RNA, 19 nt, Artificial Sequence
  Description of Artificial Sequence: Synthetic oligonucleotide
uccucuuauaguaguucuu

SEQ ID NO: 70666 - RNA, 19 nt, Artificial Sequence
  Description of Artificial Sequence: Synthetic oligonucleotide
ucaacauuguaggcacaga

SEQ ID NO: 70667 - RNA, 19 nt, Artificial Sequence
  Description of Artificial Sequence: Synthetic oligonucleotide
cagcuauucgguuucaaua

SEQ ID NO: 70668 - RNA, 19 nt, Artificial Sequence
  Description of Artificial Sequence: Synthetic oligonucleotide
auauuguguggugucacau

SEQ ID NO: 70669 - RNA, 19 nt, Artificial Sequence
  Description of Artificial Sequence: Synthetic oligonucleotide
caagugaaaugguuauaga

SEQ ID NO: 70670 - RNA, 19 nt, Artificial Sequence
  Description of Artificial Sequence: Synthetic oligonucleotide
ccucacaaauaugagagac

SEQ ID NO: 70671 - RNA, 19 nt, Artificial Sequence
  Description of Artificial Sequence: Synthetic oligonucleotide
aaacaccugccaacaagca

SEQ ID NO: 70672 - RNA, 19 nt, Artificial Sequence
  Description of Artificial Sequence: Synthetic oligonucleotide
cuucgguaaggugcaaggc

SEQ ID NO: 70673 - RNA, 19 nt, Artificial Sequence
  Description of Artificial Sequence: Synthetic oligonucleotide
uuacacuauuauugggcuu

SEQ ID NO: 70674 - RNA, 19 nt, Artificial Sequence
  Description of Artificial Sequence: Synthetic oligonucleotide
gggauuaacaucccacaga

SEQ ID NO: 70675 - RNA, 19 nt, Artificial Sequence
  Description of Artificial Sequence: Synthetic oligonucleotide
aacccuaaaucagcuuagu

SEQ ID NO: 70676 - RNA, 19 nt, Artificial Sequence
  Description of Artificial Sequence: Synthetic oligonucleotide
caucuuaacugugaaacua

SEQ ID NO: 70677 - RNA, 19 nt, Artificial Sequence
  Description of Artificial Sequence: Synthetic oligonucleotide
aucuuaacugugaaacuau

SEQ ID NO: 70678 - RNA, 19 nt, Artificial Sequence
  Description of Artificial Sequence: Synthetic oligonucleotide
ggauuaacaucccacagau

SEQ ID NO: 70679 - RNA, 19 nt, Artificial Sequence
  Description of Artificial Sequence: Synthetic oligonucleotide
aguccaagugaaaugguua

SEQ ID NO: 70680 - RNA, 19 nt, Artificial Sequence
  Description of Artificial Sequence: Synthetic oligonucleotide
gaugaggcuaugugaggaa

SEQ ID NO: 70681 - RNA, 19 nt, Artificial Sequence
  Description of Artificial Sequence: Synthetic oligonucleotide
agacuacugaaguccacuu

SEQ ID NO: 70682 - RNA, 19 nt, Artificial Sequence
  Description of Artificial Sequence: Synthetic oligonucleotide
cucacaugucuccacauua

SEQ ID NO: 70683 - RNA, 19 nt, Artificial Sequence
  Description of Artificial Sequence: Synthetic oligonucleotide
acucuacaaguuaaugccu

SEQ ID NO: 70684 - RNA, 19 nt, Artificial Sequence
  Description of Artificial Sequence: Synthetic oligonucleotide
acacuauuauugggcuuac

SEQ ID NO: 70685 - RNA, 19 nt, Artificial Sequence
  Description of Artificial Sequence: Synthetic oligonucleotide
agccacuuaaguaucuuaa

SEQ ID NO: 70686 - RNA, 19 nt, Artificial Sequence
  Description of Artificial Sequence: Synthetic oligonucleotide
acaguucuaacaaucugua

SEQ ID NO: 70687 - RNA, 19 nt, Artificial Sequence
  Description of Artificial Sequence: Synthetic oligonucleotide
aauugacccuuuacauaca

SEQ ID NO: 70688 - RNA, 19 nt, Artificial Sequence
  Description of Artificial Sequence: Synthetic oligonucleotide
auaggacuacucaaauagu

SEQ ID NO: 70689 - RNA, 19 nt, Artificial Sequence
  Description of Artificial Sequence: Synthetic oligonucleotide
aacacuugcuucggguuua

SEQ ID NO: 70690 - RNA, 19 nt, Artificial Sequence
  Description of Artificial Sequence: Synthetic oligonucleotide
gcauccuagugucaugaug

SEQ ID NO: 70691 - RNA, 19 nt, Artificial Sequence
  Description of Artificial Sequence: Synthetic oligonucleotide
gguaaggugcaaggcaucc

SEQ ID NO: 70692 - RNA, 19 nt, Artificial Sequence
  Description of Artificial Sequence: Synthetic oligonucleotide
ccagaugggacuuugaggu

SEQ ID NO: 70693 - RNA, 19 nt, Artificial Sequence
  Description of Artificial Sequence: Synthetic oligonucleotide
ccuagugucaugauguaaa

SEQ ID NO: 70694 - RNA, 19 nt, Artificial Sequence
  Description of Artificial Sequence: Synthetic oligonucleotide
caucuaagcuuuauaugua

SEQ ID NO: 70695 - RNA, 19 nt, Artificial Sequence
  Description of Artificial Sequence: Synthetic oligonucleotide
cagcucauacucuacaagu

SEQ ID NO: 70696 - RNA, 19 nt, Artificial Sequence
  Description of Artificial Sequence: Synthetic oligonucleotide
ugccucuagcaaacaagau

SEQ ID NO: 70697 - RNA, 19 nt, Artificial Sequence
  Description of Artificial Sequence: Synthetic oligonucleotide
ccacagauagucuuuaaaa

SEQ ID NO: 70698 - RNA, 19 nt, Artificial Sequence
  Description of Artificial Sequence: Synthetic oligonucleotide
aggcauccuagugucauga

SEQ ID NO: 70699 - RNA, 19 nt, Artificial Sequence
  Description of Artificial Sequence: Synthetic oligonucleotide
cuuaacaugggguguuacu

SEQ ID NO: 70700 - RNA, 19 nt, Artificial Sequence
  Description of Artificial Sequence: Synthetic oligonucleotide
gccuuaaccaaaccuguca

SEQ ID NO: 70701 - RNA, 19 nt, Artificial Sequence
  Description of Artificial Sequence: Synthetic oligonucleotide
auacccaauuugagaggac

SEQ ID NO: 70702 - RNA, 19 nt, Artificial Sequence
  Description of Artificial Sequence: Synthetic oligonucleotide
gcuuaguauuuucucacaa

SEQ ID NO: 70703 - RNA, 19 nt, Artificial Sequence
  Description of Artificial Sequence: Synthetic oligonucleotide
gugcuuaacacuaaacuuu

SEQ ID NO: 70704 - RNA, 19 nt, Artificial Sequence
  Description of Artificial Sequence: Synthetic oligonucleotide
cucgauccggcuaccuuuc

SEQ ID NO: 70705 - RNA, 19 nt, Artificial Sequence
  Description of Artificial Sequence: Synthetic oligonucleotide
caaucgcugacucauugcu

SEQ ID NO: 70706 - RNA, 19 nt, Artificial Sequence
  Description of Artificial Sequence: Synthetic oligonucleotide
aggggaaucaaugggucuu

SEQ ID NO: 70707 - RNA, 19 nt, Artificial Sequence
  Description of Artificial Sequence: Synthetic oligonucleotide
ccacuuaauguacuuucac

SEQ ID NO: 70708 - RNA, 19 nt, Artificial Sequence
  Description of Artificial Sequence: Synthetic oligonucleotide
aauuguugugaggcagcua

SEQ ID NO: 70709 - RNA, 19 nt, Artificial Sequence
  Description of Artificial Sequence: Synthetic oligonucleotide
uccaagugaaaugguuaua

SEQ ID NO: 70710 - RNA, 19 nt, Artificial Sequence
  Description of Artificial Sequence: Synthetic oligonucleotide
ugccaacaagcaacccacu

SEQ ID NO: 70711 - RNA, 19 nt, Artificial Sequence
  Description of Artificial Sequence: Synthetic oligonucleotide
cuagcucgccaaccucuag

SEQ ID NO: 70712 - RNA, 19 nt, Artificial Sequence
  Description of Artificial Sequence: Synthetic oligonucleotide
ggaggaauaucaagggaga

SEQ ID NO: 70713 - RNA, 19 nt, Artificial Sequence
  Description of Artificial Sequence: Synthetic oligonucleotide
accaaaccugucaacugga

SEQ ID NO: 70714 - RNA, 19 nt, Artificial Sequence
  Description of Artificial Sequence: Synthetic oligonucleotide
agggagccuacacacucaa

SEQ ID NO: 70715 - RNA, 19 nt, Artificial Sequence
  Description of Artificial Sequence: Synthetic oligonucleotide
aaucaccgacuagugugaa

SEQ ID NO: 70716 - RNA, 19 nt, Artificial Sequence
  Description of Artificial Sequence: Synthetic oligonucleotide
guuaaaggccguaucucua

SEQ ID NO: 70717 - RNA, 19 nt, Artificial Sequence
  Description of Artificial Sequence: Synthetic oligonucleotide
ggcgacaagcaagugcaag

SEQ ID NO: 70718 - RNA, 19 nt, Artificial Sequence
  Description of Artificial Sequence: Synthetic oligonucleotide
gcgaccaacgccgucgucc

SEQ ID NO: 70719 - RNA, 19 nt, Artificial Sequence
  Description of Artificial Sequence: Synthetic oligonucleotide
gguaacacuuaauguguua

SEQ ID NO: 70720 - RNA, 19 nt, Artificial Sequence
  Description of Artificial Sequence: Synthetic oligonucleotide
ggagccuacacacucaauu

SEQ ID NO: 70721 - RNA, 19 nt, Artificial Sequence
  Description of Artificial Sequence: Synthetic oligonucleotide
gguccaacuccugagagua

SEQ ID NO: 70722 - RNA, 19 nt, Artificial Sequence
  Description of Artificial Sequence: Synthetic oligonucleotide
aucaccgacuagugugaaa

SEQ ID NO: 70723 - RNA, 19 nt, Artificial Sequence
  Description of Artificial Sequence: Synthetic oligonucleotide
caaacuuaacauggggugu

SEQ ID NO: 70724 - RNA, 19 nt, Artificial Sequence
  Description of Artificial Sequence: Synthetic oligonucleotide
guaucucuagcugggauau

SEQ ID NO: 70725 - RNA, 19 nt, Artificial Sequence
  Description of Artificial Sequence: Synthetic oligonucleotide
ccggcuaccuuucaucuuc

SEQ ID NO: 70726 - RNA, 19 nt, Artificial Sequence
  Description of Artificial Sequence: Synthetic oligonucleotide
aacccacucaucagcuaaa

SEQ ID NO: 70727 - RNA, 19 nt, Artificial Sequence
  Description of Artificial Sequence: Synthetic oligonucleotide
ggccguaucucuagcuggg

SEQ ID NO: 70728 - RNA, 19 nt, Artificial Sequence
  Description of Artificial Sequence: Synthetic oligonucleotide
ucgauccggcuaccuuuca

SEQ ID NO: 70729 - RNA, 19 nt, Artificial Sequence
  Description of Artificial Sequence: Synthetic oligonucleotide
ccuauuuaccccacaguaa

SEQ ID NO: 70730 - RNA, 19 nt, Artificial Sequence
  Description of Artificial Sequence: Synthetic oligonucleotide
caacccaucagagccacua

SEQ ID NO: 70731 - RNA, 19 nt, Artificial Sequence
  Description of Artificial Sequence: Synthetic oligonucleotide
gccgcgaccaacgccgucg

SEQ ID NO: 70732 - RNA, 19 nt, Artificial Sequence
  Description of Artificial Sequence: Synthetic oligonucleotide
gacugucuagaaaacugau

SEQ ID NO: 70733 - RNA, 19 nt, Artificial Sequence
  Description of Artificial Sequence: Synthetic oligonucleotide
ccccuuauguaaguggaug

SEQ ID NO: 70734 - RNA, 19 nt, Artificial Sequence
  Description of Artificial Sequence: Synthetic oligonucleotide
gggauacauucauaggacu

SEQ ID NO: 70735 - RNA, 19 nt, Artificial Sequence
  Description of Artificial Sequence: Synthetic oligonucleotide
ggaaucaaugggucuuucu

SEQ ID NO: 70736 - RNA, 19 nt, Artificial Sequence
  Description of Artificial Sequence: Synthetic oligonucleotide
uccggcuaccuuucaucuu

SEQ ID NO: 70737 - RNA, 19 nt, Artificial Sequence
  Description of Artificial Sequence: Synthetic oligonucleotide
ccuuaaccaaaccugucaa

SEQ ID NO: 70738 - RNA, 19 nt, Artificial Sequence
  Description of Artificial Sequence: Synthetic oligonucleotide
cuacaaguuaaugccucua

SEQ ID NO: 70739 - RNA, 19 nt, Artificial Sequence
  Description of Artificial Sequence: Synthetic oligonucleotide
ucgcugacucauugcugau

SEQ ID NO: 70740 - RNA, 19 nt, Artificial Sequence
  Description of Artificial Sequence: Synthetic oligonucleotide
gccucuagcaaacaagauu

SEQ ID NO: 70741 - RNA, 19 nt, Artificial Sequence
  Description of Artificial Sequence: Synthetic oligonucleotide
uggcgacaagcaagugcaa

SEQ ID NO: 70742 - RNA, 19 nt, Artificial Sequence
  Description of Artificial Sequence: Synthetic oligonucleotide
caagaguaagcugaagcuu

SEQ ID NO: 70743 - RNA, 19 nt, Artificial Sequence
  Description of Artificial Sequence: Synthetic oligonucleotide
ccaauuugagaggacaucu

SEQ ID NO: 70744 - RNA, 19 nt, Artificial Sequence
  Description of Artificial Sequence: Synthetic oligonucleotide
caaguaaacgcagccacuu

SEQ ID NO: 70745 - RNA, 19 nt, Artificial Sequence
  Description of Artificial Sequence: Synthetic oligonucleotide
cgucguuacagccgcgacc

SEQ ID NO: 70746 - RNA, 19 nt, Artificial Sequence
  Description of Artificial Sequence: Synthetic oligonucleotide
cacacucaauucaaacuuu

SEQ ID NO: 70747 - RNA, 19 nt, Artificial Sequence
  Description of Artificial Sequence: Synthetic oligonucleotide
caauuugagaggacaucuu

SEQ ID NO: 70748 - RNA, 19 nt, Artificial Sequence
  Description of Artificial Sequence: Synthetic oligonucleotide
gcugaagcuuauccaugga

SEQ ID NO: 70749 - RNA, 19 nt, Artificial Sequence
  Description of Artificial Sequence: Synthetic oligonucleotide
agccgcgaccaacgccguc

SEQ ID NO: 70750 - RNA, 19 nt, Artificial Sequence
  Description of Artificial Sequence: Synthetic oligonucleotide
aggucaguuaaaggccgua

SEQ ID NO: 70751 - RNA, 19 nt, Artificial Sequence
  Description of Artificial Sequence: Synthetic oligonucleotide
gcgcccugagcucaggcca

SEQ ID NO: 70752 - RNA, 19 nt, Artificial Sequence
  Description of Artificial Sequence: Synthetic oligonucleotide
caguucuaacaaucuguau

SEQ ID NO: 70753 - RNA, 19 nt, Artificial Sequence
  Description of Artificial Sequence: Synthetic oligonucleotide
guaaggugcaaggcauccu

SEQ ID NO: 70754 - RNA, 19 nt, Artificial Sequence
  Description of Artificial Sequence: Synthetic oligonucleotide
ucguuacagccgcgaccaa

SEQ ID NO: 70755 - RNA, 19 nt, Artificial Sequence
  Description of Artificial Sequence: Synthetic oligonucleotide
cauggaaauaaaggugcuu

SEQ ID NO: 70756 - RNA, 19 nt, Artificial Sequence
  Description of Artificial Sequence: Synthetic oligonucleotide
caggacaauugacccuuua

SEQ ID NO: 70757 - RNA, 19 nt, Artificial Sequence
  Description of Artificial Sequence: Synthetic oligonucleotide
ccacccaaccuccucacaa

SEQ ID NO: 70758 - RNA, 19 nt, Artificial Sequence
  Description of Artificial Sequence: Synthetic oligonucleotide
gugaaacuauacagaccua

SEQ ID NO: 70759 - RNA, 19 nt, Artificial Sequence
  Description of Artificial Sequence: Synthetic oligonucleotide
gcaccuacagcuauaucau

SEQ ID NO: 70760 - RNA, 19 nt, Artificial Sequence
  Description of Artificial Sequence: Synthetic oligonucleotide
ggccuuaaccaaaccuguc

SEQ ID NO: 70761 - RNA, 19 nt, Artificial Sequence
  Description of Artificial Sequence: Synthetic oligonucleotide
cguaucucuagcugggaua

SEQ ID NO: 70762 - RNA, 19 nt, Artificial Sequence
  Description of Artificial Sequence: Synthetic oligonucleotide
gcucgccaaccucuagcac

SEQ ID NO: 70763 - RNA, 19 nt, Artificial Sequence
  Description of Artificial Sequence: Synthetic oligonucleotide
cguuacagccgcgaccaac

SEQ ID NO: 70764 - RNA, 19 nt, Artificial Sequence
  Description of Artificial Sequence: Synthetic oligonucleotide
cuccgcgcccugagcucag

SEQ ID NO: 70765 - RNA, 19 nt, Artificial Sequence
  Description of Artificial Sequence: Synthetic oligonucleotide
gcuuagauuuggacugucu

SEQ ID NO: 70766 - RNA, 19 nt, Artificial Sequence
  Description of Artificial Sequence: Synthetic oligonucleotide
ggucaguuaaaggccguau

SEQ ID NO: 70767 - RNA, 19 nt, Artificial Sequence
  Description of Artificial Sequence: Synthetic oligonucleotide
ccgucguuacagccgcgac

SEQ ID NO: 70768 - RNA, 19 nt, Artificial Sequence
  Description of Artificial Sequence: Synthetic oligonucleotide
gccgucguuacagccgcga

SEQ ID NO: 70769 - RNA, 19 nt, Artificial Sequence
  Description of Artificial Sequence: Synthetic oligonucleotide
ggacuagccccaguuucua

SEQ ID NO: 70770 - RNA, 19 nt, Artificial Sequence
  Description of Artificial Sequence: Synthetic oligonucleotide
caccuacagcuauaucauu

SEQ ID NO: 70771 - RNA, 19 nt, Artificial Sequence
  Description of Artificial Sequence: Synthetic oligonucleotide
cacuauuauugggcuuacu

SEQ ID NO: 70772 - RNA, 19 nt, Artificial Sequence
  Description of Artificial Sequence: Synthetic oligonucleotide
gccguaucucuagcuggga

SEQ ID NO: 70773 - RNA, 19 nt, Artificial Sequence
  Description of Artificial Sequence: Synthetic oligonucleotide
ggcauccuagugucaugau

SEQ ID NO: 70774 - RNA, 19 nt, Artificial Sequence
  Description of Artificial Sequence: Synthetic oligonucleotide
ccagcucgauccggcuacc

SEQ ID NO: 70775 - RNA, 19 nt, Artificial Sequence
  Description of Artificial Sequence: Synthetic oligonucleotide
ccguaucucuagcugggau

SEQ ID NO: 70776 - RNA, 19 nt, Artificial Sequence
  Description of Artificial Sequence: Synthetic oligonucleotide
cgaccaacgccgucguccu

SEQ ID NO: 70777 - RNA, 19 nt, Artificial Sequence
  Description of Artificial Sequence: Synthetic oligonucleotide
cagcucgauccggcuaccu

SEQ ID NO: 70778 - RNA, 19 nt, Artificial Sequence
  Description of Artificial Sequence: Synthetic oligonucleotide
cagccgcgaccaacgccgu

SEQ ID NO: 70779 - RNA, 19 nt, Artificial Sequence
  Description of Artificial Sequence: Synthetic oligonucleotide
gggagccuacacacucaau

SEQ ID NO: 70780 - RNA, 19 nt, Artificial Sequence
  Description of Artificial Sequence: Synthetic oligonucleotide
cgauccggcuaccuuucau

SEQ ID NO: 70781 - RNA, 19 nt, Artificial Sequence
  Description of Artificial Sequence: Synthetic oligonucleotide
cgcgaccaacgccgucguc

SEQ ID NO: 70782 - RNA, 19 nt, Artificial Sequence
  Description of Artificial Sequence: Synthetic oligonucleotide
ccgcgaccaacgccgucgu

SEQ ID NO: 70783 - RNA, 19 nt, Artificial Sequence
  Description of Artificial Sequence: Synthetic oligonucleotide
ccccgccugcugaggccgu

SEQ ID NO: 70784 - RNA, 19 nt, Artificial Sequence
  Description of Artificial Sequence: Synthetic oligonucleotide
aauccaauaauguuggagg

SEQ ID NO: 70785 - RNA, 19 nt, Artificial Sequence
  Description of Artificial Sequence: Synthetic oligonucleotide
aaucguuagagucaguuuc

SEQ ID NO: 70786 - RNA, 19 nt, Artificial Sequence
  Description of Artificial Sequence: Synthetic oligonucleotide
aauuacacccauuuuacag

SEQ ID NO: 70787 - RNA, 19 nt, Artificial Sequence
  Description of Artificial Sequence: Synthetic oligonucleotide
aauaugacuaagccaaagg

SEQ ID NO: 70788 - RNA, 19 nt, Artificial Sequence
  Description of Artificial Sequence: Synthetic oligonucleotide
gauaacaguaacuagcacc

SEQ ID NO: 70789 - RNA, 19 nt, Artificial Sequence
  Description of Artificial Sequence: Synthetic oligonucleotide
cuagaaaacagguaggcgg

SEQ ID NO: 70790 - RNA, 19 nt, Artificial Sequence
  Description of Artificial Sequence: Synthetic oligonucleotide
ucaaauaccauguaguacu

SEQ ID NO: 70791 - RNA, 19 nt, Artificial Sequence
  Description of Artificial Sequence: Synthetic oligonucleotide
uucauaacggccaacauga

SEQ ID NO: 70792 - RNA, 19 nt, Artificial Sequence
  Description of Artificial Sequence: Synthetic oligonucleotide
uuugcaaucacuucgcuca

SEQ ID NO: 70793 - RNA, 19 nt, Artificial Sequence
  Description of Artificial Sequence: Synthetic oligonucleotide
uuaacaaucaaugcgcccg

SEQ ID NO: 70794 - RNA, 19 nt, Artificial Sequence
  Description of Artificial Sequence: Synthetic oligonucleotide
uuuauugagagauuugaca

SEQ ID NO: 70795 - RNA, 19 nt, Artificial Sequence
  Description of Artificial Sequence: Synthetic oligonucleotide
uuguugaagauacugaaca

SEQ ID NO: 70796 - RNA, 19 nt, Artificial Sequence
  Description of Artificial Sequence: Synthetic oligonucleotide
auaacaguaacuagcaccc

SEQ ID NO: 70797 - RNA, 19 nt, Artificial Sequence
  Description of Artificial Sequence: Synthetic oligonucleotide
caaaauccaauaauguugg

SEQ ID NO: 70798 - RNA, 19 nt, Artificial Sequence
  Description of Artificial Sequence: Synthetic oligonucleotide
aucuaugucuuauaacagc

SEQ ID NO: 70799 - RNA, 19 nt, Artificial Sequence
  Description of Artificial Sequence: Synthetic oligonucleotide
ucauaaguuauuaacugga

SEQ ID NO: 70800 - RNA, 19 nt, Artificial Sequence
  Description of Artificial Sequence: Synthetic oligonucleotide
uauucuacaaacauggcuu

SEQ ID NO: 70801 - RNA, 19 nt, Artificial Sequence
  Description of Artificial Sequence: Synthetic oligonucleotide
uuuuagagagccauguaug

SEQ ID NO: 70802 - RNA, 19 nt, Artificial Sequence
  Description of Artificial Sequence: Synthetic oligonucleotide
aguaaugcaagcuaauacu

SEQ ID NO: 70803 - RNA, 19 nt, Artificial Sequence
  Description of Artificial Sequence: Synthetic oligonucleotide
aagugauacacauucaaau

SEQ ID NO: 70804 - RNA, 19 nt, Artificial Sequence
  Description of Artificial Sequence: Synthetic oligonucleotide
uuuagagagccauguaugg

SEQ ID NO: 70805 - RNA, 19 nt, Artificial Sequence
  Description of Artificial Sequence: Synthetic oligonucleotide
cuguuaacaaucaaugcgc

SEQ ID NO: 70806 - RNA, 19 nt, Artificial Sequence
  Description of Artificial Sequence: Synthetic oligonucleotide
ugauuguuaucccauagcu

SEQ ID NO: 70807 - RNA, 19 nt, Artificial Sequence
  Description of Artificial Sequence: Synthetic oligonucleotide
aagguacuaggauaaaucu

SEQ ID NO: 70808 - RNA, 19 nt, Artificial Sequence
  Description of Artificial Sequence: Synthetic oligonucleotide
acaauuuaaacgggcaugc

SEQ ID NO: 70809 - RNA, 19 nt, Artificial Sequence
  Description of Artificial Sequence: Synthetic oligonucleotide
ucguuuaacuugcucaagg

SEQ ID NO: 70810 - RNA, 19 nt, Artificial Sequence
  Description of Artificial Sequence: Synthetic oligonucleotide
aacaugauugccucuauau

SEQ ID NO: 70811 - RNA, 19 nt, Artificial Sequence
  Description of Artificial Sequence: Synthetic oligonucleotide
uauggaggaaauaugacua

SEQ ID NO: 70812 - RNA, 19 nt, Artificial Sequence
  Description of Artificial Sequence: Synthetic oligonucleotide
aauguaauggcuaucuaca

SEQ ID NO: 70813 - RNA, 19 nt, Artificial Sequence
  Description of Artificial Sequence: Synthetic oligonucleotide
uuauggaggaaauaugacu

SEQ ID NO: 70814 - RNA, 19 nt, Artificial Sequence
  Description of Artificial Sequence: Synthetic oligonucleotide
aauaagugagauucacucu

SEQ ID NO: 70815 - RNA, 19 nt, Artificial Sequence
  Description of Artificial Sequence: Synthetic oligonucleotide
ugcaauuggauccggauac

SEQ ID NO: 70816 - RNA, 19 nt, Artificial Sequence
  Description of Artificial Sequence: Synthetic oligonucleotide
uaagguacuaggauaaauc

SEQ ID NO: 70817 - RNA, 19 nt, Artificial Sequence
  Description of Artificial Sequence: Synthetic oligonucleotide
aaacugacuaauuuaggaa

SEQ ID NO: 70818 - RNA, 19 nt, Artificial Sequence
  Description of Artificial Sequence: Synthetic oligonucleotide
auaacggccaacaugauug

SEQ ID NO: 70819 - RNA, 19 nt, Artificial Sequence
  Description of Artificial Sequence: Synthetic oligonucleotide
uuucucaccuguaauaagu

SEQ ID NO: 70820 - RNA, 19 nt, Artificial Sequence
  Description of Artificial Sequence: Synthetic oligonucleotide
auugguuaggcacaggacu

SEQ ID NO: 70821 - RNA, 19 nt, Artificial Sequence
  Description of Artificial Sequence: Synthetic oligonucleotide
auuaacuggauuccugguc

SEQ ID NO: 70822 - RNA, 19 nt, Artificial Sequence
  Description of Artificial Sequence: Synthetic oligonucleotide
uuuugaaacgucaccugag

SEQ ID NO: 70823 - RNA, 19 nt, Artificial Sequence
  Description of Artificial Sequence: Synthetic oligonucleotide
auaagcucagaacaauguc

SEQ ID NO: 70824 - RNA, 19 nt, Artificial Sequence
  Description of Artificial Sequence: Synthetic oligonucleotide
acccacuuaaccugggucc

SEQ ID NO: 70825 - RNA, 19 nt, Artificial Sequence
  Description of Artificial Sequence: Synthetic oligonucleotide
gguacuuucgucucaauag

SEQ ID NO: 70826 - RNA, 19 nt, Artificial Sequence
  Description of Artificial Sequence: Synthetic oligonucleotide
auaugacuaagccaaagga

SEQ ID NO: 70827 - RNA, 19 nt, Artificial Sequence
  Description of Artificial Sequence: Synthetic oligonucleotide
uuuagaggcgcuaggaaac

SEQ ID NO: 70828 - RNA, 19 nt, Artificial Sequence
  Description of Artificial Sequence: Synthetic oligonucleotide
auaggauacacauuggcau

SEQ ID NO: 70829 - RNA, 19 nt, Artificial Sequence
  Description of Artificial Sequence: Synthetic oligonucleotide
augugaaucuacuguaggg

SEQ ID NO: 70830 - RNA, 19 nt, Artificial Sequence
  Description of Artificial Sequence: Synthetic oligonucleotide
auaauguuggaggagaugu

SEQ ID NO: 70831 - RNA, 19 nt, Artificial Sequence
  Description of Artificial Sequence: Synthetic oligonucleotide
uuaauuaacuuaguccagc

SEQ ID NO: 70832 - RNA, 19 nt, Artificial Sequence
  Description of Artificial Sequence: Synthetic oligonucleotide
ugaaagccuugcuaguucg

SEQ ID NO: 70833 - RNA, 19 nt, Artificial Sequence
  Description of Artificial Sequence: Synthetic oligonucleotide
agaaccuuaaaccucucca

SEQ ID NO: 70834 - RNA, 19 nt, Artificial Sequence
  Description of Artificial Sequence: Synthetic oligonucleotide
aaauaugacuaagccaaag

SEQ ID NO: 70835 - RNA, 19 nt, Artificial Sequence
  Description of Artificial Sequence: Synthetic oligonucleotide
uugauuguuaucccauagc

SEQ ID NO: 70836 - RNA, 19 nt, Artificial Sequence
  Description of Artificial Sequence: Synthetic oligonucleotide
uugagagcccauuagcaag

SEQ ID NO: 70837 - RNA, 19 nt, Artificial Sequence
  Description of Artificial Sequence: Synthetic oligonucleotide
augcuauugcaucucacgg

SEQ ID NO: 70838 - RNA, 19 nt, Artificial Sequence
  Description of Artificial Sequence: Synthetic oligonucleotide
aaucugauugaugagugga

SEQ ID NO: 70839 - RNA, 19 nt, Artificial Sequence
  Description of Artificial Sequence: Synthetic oligonucleotide
uguuaacaaucaaugcgcc

SEQ ID NO: 70840 - RNA, 19 nt, Artificial Sequence
  Description of Artificial Sequence: Synthetic oligonucleotide
uuuucguaucgaaccacgg

SEQ ID NO: 70841 - RNA, 19 nt, Artificial Sequence
  Description of Artificial Sequence: Synthetic oligonucleotide
acugacuaauuuaggaacc

SEQ ID NO: 70842 - RNA, 19 nt, Artificial Sequence
  Description of Artificial Sequence: Synthetic oligonucleotide
aucggcaaaagaugcuugc

SEQ ID NO: 70843 - RNA, 19 nt, Artificial Sequence
  Description of Artificial Sequence: Synthetic oligonucleotide
uacuuacacacucugauuu

SEQ ID NO: 70844 - RNA, 19 nt, Artificial Sequence
  Description of Artificial Sequence: Synthetic oligonucleotide
ucuagaaaacagguaggcg

SEQ ID NO: 70845 - RNA, 19 nt, Artificial Sequence
  Description of Artificial Sequence: Synthetic oligonucleotide
agguaggcgguucugcucc

SEQ ID NO: 70846 - RNA, 19 nt, Artificial Sequence
  Description of Artificial Sequence: Synthetic oligonucleotide
auuugcaaucacuucgcuc

SEQ ID NO: 70847 - RNA, 19 nt, Artificial Sequence
  Description of Artificial Sequence: Synthetic oligonucleotide
ucuaaacacaugugaaucu

SEQ ID NO: 70848 - RNA, 19 nt, Artificial Sequence
  Description of Artificial Sequence: Synthetic oligonucleotide
aacaguaacuagcacccgu

SEQ ID NO: 70849 - RNA, 19 nt, Artificial Sequence
  Description of Artificial Sequence: Synthetic oligonucleotide
ugagaggaugauaaaacau

SEQ ID NO: 70850 - RNA, 19 nt, Artificial Sequence
  Description of Artificial Sequence: Synthetic oligonucleotide
cacgaaaccgaacauuucc

SEQ ID NO: 70851 - RNA, 19 nt, Artificial Sequence
  Description of Artificial Sequence: Synthetic oligonucleotide
aggaaauaugacuaagcca

SEQ ID NO: 70852 - RNA, 19 nt, Artificial Sequence
  Description of Artificial Sequence: Synthetic oligonucleotide
aacauaagugguacuuucg

SEQ ID NO: 70853 - RNA, 19 nt, Artificial Sequence
  Description of Artificial Sequence: Synthetic oligonucleotide
ugagaagugagcaccgugu

SEQ ID NO: 70854 - RNA, 19 nt, Artificial Sequence
  Description of Artificial Sequence: Synthetic oligonucleotide
uugagaggaugauaaaaca

SEQ ID NO: 70855 - RNA, 19 nt, Artificial Sequence
  Description of Artificial Sequence: Synthetic oligonucleotide
uguaauaagugagauucac

SEQ ID NO: 70856 - RNA, 19 nt, Artificial Sequence
  Description of Artificial Sequence: Synthetic oligonucleotide
ugcacuacucacuauaaua

SEQ ID NO: 70857 - RNA, 19 nt, Artificial Sequence
  Description of Artificial Sequence: Synthetic oligonucleotide
aaucaguuagugguguaag

SEQ ID NO: 70858 - RNA, 19 nt, Artificial Sequence
  Description of Artificial Sequence: Synthetic oligonucleotide
aacuuuucguaucgaacca

SEQ ID NO: 70859 - RNA, 19 nt, Artificial Sequence
  Description of Artificial Sequence: Synthetic oligonucleotide
uccgguggaggaaaguccg

SEQ ID NO: 70860 - RNA, 19 nt, Artificial Sequence
  Description of Artificial Sequence: Synthetic oligonucleotide
uucuuacuuacacacucug

SEQ ID NO: 70861 - RNA, 19 nt, Artificial Sequence
  Description of Artificial Sequence: Synthetic oligonucleotide
auaagugagauucacucuu

SEQ ID NO: 70862 - RNA, 19 nt, Artificial Sequence
  Description of Artificial Sequence: Synthetic oligonucleotide
acuuaguccagcuaacuau

SEQ ID NO: 70863 - RNA, 19 nt, Artificial Sequence
  Description of Artificial Sequence: Synthetic oligonucleotide
aggacugguaaccauucuc

SEQ ID NO: 70864 - RNA, 19 nt, Artificial Sequence
  Description of Artificial Sequence: Synthetic oligonucleotide
acuaugcugcacuacucac

SEQ ID NO: 70865 - RNA, 19 nt, Artificial Sequence
  Description of Artificial Sequence: Synthetic oligonucleotide
uaugucuuauaacagcauu

SEQ ID NO: 70866 - RNA, 19 nt, Artificial Sequence
  Description of Artificial Sequence: Synthetic oligonucleotide
aaaacggagauaccuggau

SEQ ID NO: 70867 - RNA, 19 nt, Artificial Sequence
  Description of Artificial Sequence: Synthetic oligonucleotide
gagaccuauguuuuaacuc

SEQ ID NO: 70868 - RNA, 19 nt, Artificial Sequence
  Description of Artificial Sequence: Synthetic oligonucleotide
aauaauguuggaggagaug

SEQ ID NO: 70869 - RNA, 19 nt, Artificial Sequence
  Description of Artificial Sequence: Synthetic oligonucleotide
gauccggauacucaacagc

SEQ ID NO: 70870 - RNA, 19 nt, Artificial Sequence
  Description of Artificial Sequence: Synthetic oligonucleotide
ugugcuuguaaaugaaguc

SEQ ID NO: 70871 - RNA, 19 nt, Artificial Sequence
  Description of Artificial Sequence: Synthetic oligonucleotide
ccuguaauaagugagauuc

SEQ ID NO: 70872 - RNA, 19 nt, Artificial Sequence
  Description of Artificial Sequence: Synthetic oligonucleotide
cauauaaggucuucacuac

SEQ ID NO: 70873 - RNA, 19 nt, Artificial Sequence
  Description of Artificial Sequence: Synthetic oligonucleotide
uuaacuuaguccagcuaac

SEQ ID NO: 70874 - RNA, 19 nt, Artificial Sequence
  Description of Artificial Sequence: Synthetic oligonucleotide
ugaucgucgcuacucagca

SEQ ID NO: 70875 - RNA, 19 nt, Artificial Sequence
  Description of Artificial Sequence: Synthetic oligonucleotide
uacacgaaaccgaacauuu

SEQ ID NO: 70876 - RNA, 19 nt, Artificial Sequence
  Description of Artificial Sequence: Synthetic oligonucleotide
uacuaugcugcacuacuca

SEQ ID NO: 70877 - RNA, 19 nt, Artificial Sequence
  Description of Artificial Sequence: Synthetic oligonucleotide
uccagcuaacuauuaagga

SEQ ID NO: 70878 - RNA, 19 nt, Artificial Sequence
  Description of Artificial Sequence: Synthetic oligonucleotide
ugagaccuauguuuuaacu

SEQ ID NO: 70879 - RNA, 19 nt, Artificial Sequence
  Description of Artificial Sequence: Synthetic oligonucleotide
ugagacuaucggcaaaaga

SEQ ID NO: 70880 - RNA, 19 nt, Artificial Sequence
  Description of Artificial Sequence: Synthetic oligonucleotide
uucguaucgaaccacgguu

SEQ ID NO: 70881 - RNA, 19 nt, Artificial Sequence
  Description of Artificial Sequence: Synthetic oligonucleotide
uguugaagauacugaacac

SEQ ID NO: 70882 - RNA, 19 nt, Artificial Sequence
  Description of Artificial Sequence: Synthetic oligonucleotide
cuagcuuuugaaacgucac

SEQ ID NO: 70883 - RNA, 19 nt, Artificial Sequence
  Description of Artificial Sequence: Synthetic oligonucleotide
uuucguaucgaaccacggu

SEQ ID NO: 70884 - RNA, 19 nt, Artificial Sequence
  Description of Artificial Sequence: Synthetic oligonucleotide
ucgacuggcaaacccaacu

SEQ ID NO: 70885 - RNA, 19 nt, Artificial Sequence
  Description of Artificial Sequence: Synthetic oligonucleotide
augacuaagccaaaggacu

SEQ ID NO: 70886 - RNA, 19 nt, Artificial Sequence
  Description of Artificial Sequence: Synthetic oligonucleotide
uucucaccuguaauaagug

SEQ ID NO: 70887 - RNA, 19 nt, Artificial Sequence
  Description of Artificial Sequence: Synthetic oligonucleotide
gacuaucggcaaaagaugc

SEQ ID NO: 70888 - RNA, 19 nt, Artificial Sequence
  Description of Artificial Sequence: Synthetic oligonucleotide
cuaggauaaaucuaugucu

SEQ ID NO: 70889 - RNA, 19 nt, Artificial Sequence
  Description of Artificial Sequence: Synthetic oligonucleotide
caacguucgcaucaugucc

SEQ ID NO: 70890 - RNA, 19 nt, Artificial Sequence
  Description of Artificial Sequence: Synthetic oligonucleotide
uaguucgacuggcaaaccc

SEQ ID NO: 70891 - RNA, 19 nt, Artificial Sequence
  Description of Artificial Sequence: Synthetic oligonucleotide
ucgcuacucagcaaggacu

SEQ ID NO: 70892 - RNA, 19 nt, Artificial Sequence
  Description of Artificial Sequence: Synthetic oligonucleotide
ugaagcaauugguuaggca

SEQ ID NO: 70893 - RNA, 19 nt, Artificial Sequence
  Description of Artificial Sequence: Synthetic oligonucleotide
guaaucugauugaugagug

SEQ ID NO: 70894 - RNA, 19 nt, Artificial Sequence
  Description of Artificial Sequence: Synthetic oligonucleotide
agguaaacuucggagcagc

SEQ ID NO: 70895 - RNA, 19 nt, Artificial Sequence
  Description of Artificial Sequence: Synthetic oligonucleotide
cuuggccguaaucugauug

SEQ ID NO: 70896 - RNA, 19 nt, Artificial Sequence
  Description of Artificial Sequence: Synthetic oligonucleotide
aucguuagagucaguuucc

SEQ ID NO: 70897 - RNA, 19 nt, Artificial Sequence
  Description of Artificial Sequence: Synthetic oligonucleotide
cacuacucacuauaauacc

SEQ ID NO: 70898 - RNA, 19 nt, Artificial Sequence
  Description of Artificial Sequence: Synthetic oligonucleotide
caugauugccucuauauua

SEQ ID NO: 70899 - RNA, 19 nt, Artificial Sequence
  Description of Artificial Sequence: Synthetic oligonucleotide
caagcuaauacugagaccu

SEQ ID NO: 70900 - RNA, 19 nt, Artificial Sequence
  Description of Artificial Sequence: Synthetic oligonucleotide
uaucggcaaaagaugcuug

SEQ ID NO: 70901 - RNA, 19 nt, Artificial Sequence
  Description of Artificial Sequence: Synthetic oligonucleotide
uguaaggagggcagguacu

SEQ ID NO: 70902 - RNA, 19 nt, Artificial Sequence
  Description of Artificial Sequence: Synthetic oligonucleotide
gacuaauuuaggaacccac

SEQ ID NO: 70903 - RNA, 19 nt, Artificial Sequence
  Description of Artificial Sequence: Synthetic oligonucleotide
uggcaaacccaacugcaug

SEQ ID NO: 70904 - RNA, 19 nt, Artificial Sequence
  Description of Artificial Sequence: Synthetic oligonucleotide
gaaacacgcagggacaaug

SEQ ID NO: 70905 - RNA, 19 nt, Artificial Sequence
  Description of Artificial Sequence: Synthetic oligonucleotide
gagacuaucggcaaaagau

SEQ ID NO: 70906 - RNA, 19 nt, Artificial Sequence
  Description of Artificial Sequence: Synthetic oligonucleotide
uuuaggaacccacucucuu

SEQ ID NO: 70907 - RNA, 19 nt, Artificial Sequence
  Description of Artificial Sequence: Synthetic oligonucleotide
uaacaaucaaugcgcccgc

SEQ ID NO: 70908 - RNA, 19 nt, Artificial Sequence
  Description of Artificial Sequence: Synthetic oligonucleotide
acagacgugugcugguagg

SEQ ID NO: 70909 - RNA, 19 nt, Artificial Sequence
  Description of Artificial Sequence: Synthetic oligonucleotide
cugacgucaccaacguucg

SEQ ID NO: 70910 - RNA, 19 nt, Artificial Sequence
  Description of Artificial Sequence: Synthetic oligonucleotide
ucaaucguuagagucaguu

SEQ ID NO: 70911 - RNA, 19 nt, Artificial Sequence
  Description of Artificial Sequence: Synthetic oligonucleotide
uggaggaaauaugacuaag

SEQ ID NO: 70912 - RNA, 19 nt, Artificial Sequence
  Description of Artificial Sequence: Synthetic oligonucleotide
ugcuauugcaucucacggu

SEQ ID NO: 70913 - RNA, 19 nt, Artificial Sequence
  Description of Artificial Sequence: Synthetic oligonucleotide
ucucaccuguaauaaguga

SEQ ID NO: 70914 - RNA, 19 nt, Artificial Sequence
  Description of Artificial Sequence: Synthetic oligonucleotide
aaaucaguuagugguguaa

SEQ ID NO: 70915 - RNA, 19 nt, Artificial Sequence
  Description of Artificial Sequence: Synthetic oligonucleotide
ugccacacauggaaugugc

SEQ ID NO: 70916 - RNA, 19 nt, Artificial Sequence
  Description of Artificial Sequence: Synthetic oligonucleotide
uaccacauaaagugauaca

SEQ ID NO: 70917 - RNA, 19 nt, Artificial Sequence
  Description of Artificial Sequence: Synthetic oligonucleotide
cugaacccacuuaaccugg

SEQ ID NO: 70918 - RNA, 19 nt, Artificial Sequence
  Description of Artificial Sequence: Synthetic oligonucleotide
cagccauaagcucagaaca

SEQ ID NO: 70919 - RNA, 19 nt, Artificial Sequence
  Description of Artificial Sequence: Synthetic oligonucleotide
uuggccguaaucugauuga

SEQ ID NO: 70920 - RNA, 19 nt, Artificial Sequence
  Description of Artificial Sequence: Synthetic oligonucleotide
uccgaacuccacuucggag

SEQ ID NO: 70921 - RNA, 19 nt, Artificial Sequence
  Description of Artificial Sequence: Synthetic oligonucleotide
acuucacauguuuaccaca

SEQ ID NO: 70922 - RNA, 19 nt, Artificial Sequence
  Description of Artificial Sequence: Synthetic oligonucleotide
ucguaaaugaagagcugau

SEQ ID NO: 70923 - RNA, 19 nt, Artificial Sequence
  Description of Artificial Sequence: Synthetic oligonucleotide
aacggccaacaugauugcc

SEQ ID NO: 70924 - RNA, 19 nt, Artificial Sequence
  Description of Artificial Sequence: Synthetic oligonucleotide
caauugguuaggcacagga

SEQ ID NO: 70925 - RNA, 19 nt, Artificial Sequence
  Description of Artificial Sequence: Synthetic oligonucleotide
agugagcaccgugugacac

SEQ ID NO: 70926 - RNA, 19 nt, Artificial Sequence
  Description of Artificial Sequence: Synthetic oligonucleotide
aucacuucgcucaucccac

SEQ ID NO: 70927 - RNA, 19 nt, Artificial Sequence
  Description of Artificial Sequence: Synthetic oligonucleotide
uauugcaucucacggugua

SEQ ID NO: 70928 - RNA, 19 nt, Artificial Sequence
  Description of Artificial Sequence: Synthetic oligonucleotide
ugacagaacuccugaauua

SEQ ID NO: 70929 - RNA, 19 nt, Artificial Sequence
  Description of Artificial Sequence: Synthetic oligonucleotide
cugaucgucgcuacucagc

SEQ ID NO: 70930 - RNA, 19 nt, Artificial Sequence
  Description of Artificial Sequence: Synthetic oligonucleotide
aacguucgcaucauguccu

SEQ ID NO: 70931 - RNA, 19 nt, Artificial Sequence
  Description of Artificial Sequence: Synthetic oligonucleotide
aaaaucaguuaguggugua

SEQ ID NO: 70932 - RNA, 19 nt, Artificial Sequence
  Description of Artificial Sequence: Synthetic oligonucleotide
acuaauuuaggaacccacu

SEQ ID NO: 70933 - RNA, 19 nt, Artificial Sequence
  Description of Artificial Sequence: Synthetic oligonucleotide
ccagcuaacuauuaaggac

SEQ ID NO: 70934 - RNA, 19 nt, Artificial Sequence
  Description of Artificial Sequence: Synthetic oligonucleotide
gaugaucauccgguggagg

SEQ ID NO: 70935 - RNA, 19 nt, Artificial Sequence
  Description of Artificial Sequence: Synthetic oligonucleotide
ugaacccacuuaaccuggg

SEQ ID NO: 70936 - RNA, 19 nt, Artificial Sequence
  Description of Artificial Sequence: Synthetic oligonucleotide
aagccuugcuaguucgacu

SEQ ID NO: 70937 - RNA, 19 nt, Artificial Sequence
  Description of Artificial Sequence: Synthetic oligonucleotide
gcuauugcaucucacggug

SEQ ID NO: 70938 - RNA, 19 nt, Artificial Sequence
  Description of Artificial Sequence: Synthetic oligonucleotide
acuagcacccguucuacau

SEQ ID NO: 70939 - RNA, 19 nt, Artificial Sequence
  Description of Artificial Sequence: Synthetic oligonucleotide
cuuuagaggcgcuaggaaa

SEQ ID NO: 70940 - RNA, 19 nt, Artificial Sequence
  Description of Artificial Sequence: Synthetic oligonucleotide
accacgguuucaaagaacu

SEQ ID NO: 70941 - RNA, 19 nt, Artificial Sequence
  Description of Artificial Sequence: Synthetic oligonucleotide
gucaccaacguucgcauca

SEQ ID NO: 70942 - RNA, 19 nt, Artificial Sequence
  Description of Artificial Sequence: Synthetic oligonucleotide
agacuaucggcaaaagaug

SEQ ID NO: 70943 - RNA, 19 nt, Artificial Sequence
  Description of Artificial Sequence: Synthetic oligonucleotide
gaagucguuuaacuugcuc

SEQ ID NO: 70944 - RNA, 19 nt, Artificial Sequence
  Description of Artificial Sequence: Synthetic oligonucleotide
ggaacccacucucuuauag

SEQ ID NO: 70945 - RNA, 19 nt, Artificial Sequence
  Description of Artificial Sequence: Synthetic oligonucleotide
cuguaaggagggcagguac

SEQ ID NO: 70946 - RNA, 19 nt, Artificial Sequence
  Description of Artificial Sequence: Synthetic oligonucleotide
agcccauuagcaagcaugg

SEQ ID NO: 70947 - RNA, 19 nt, Artificial Sequence
  Description of Artificial Sequence: Synthetic oligonucleotide
cugacuaauuuaggaaccc

SEQ ID NO: 70948 - RNA, 19 nt, Artificial Sequence
  Description of Artificial Sequence: Synthetic oligonucleotide
acuagcuuuugaaacguca

SEQ ID NO: 70949 - RNA, 19 nt, Artificial Sequence
  Description of Artificial Sequence: Synthetic oligonucleotide
aucaguuagugguguaagu

SEQ ID NO: 70950 - RNA, 19 nt, Artificial Sequence
  Description of Artificial Sequence: Synthetic oligonucleotide
uuaggaacccacucucuua

SEQ ID NO: 70951 - RNA, 19 nt, Artificial Sequence
  Description of Artificial Sequence: Synthetic oligonucleotide
aagcaauugguuaggcaca

SEQ ID NO: 70952 - RNA, 19 nt, Artificial Sequence
  Description of Artificial Sequence: Synthetic oligonucleotide
ugacuaagccaaaggacuu

SEQ ID NO: 70953 - RNA, 19 nt, Artificial Sequence
  Description of Artificial Sequence: Synthetic oligonucleotide
ugacuaauuuaggaaccca

SEQ ID NO: 70954 - RNA, 19 nt, Artificial Sequence
  Description of Artificial Sequence: Synthetic oligonucleotide
ugauugccucuauauuagc

SEQ ID NO: 70955 - RNA, 19 nt, Artificial Sequence
  Description of Artificial Sequence: Synthetic oligonucleotide
uggacucaauaguacagua

SEQ ID NO: 70956 - RNA, 19 nt, Artificial Sequence
  Description of Artificial Sequence: Synthetic oligonucleotide
ugcuuuagaggcgcuagga

SEQ ID NO: 70957 - RNA, 19 nt, Artificial Sequence
  Description of Artificial Sequence: Synthetic oligonucleotide
acuugagagcccauuagca

SEQ ID NO: 70958 - RNA, 19 nt, Artificial Sequence
  Description of Artificial Sequence: Synthetic oligonucleotide
agcucagaacaaugucaac

SEQ ID NO: 70959 - RNA, 19 nt, Artificial Sequence
  Description of Artificial Sequence: Synthetic oligonucleotide
ugcuaguucgacuggcaaa

SEQ ID NO: 70960 - RNA, 19 nt, Artificial Sequence
  Description of Artificial Sequence: Synthetic oligonucleotide
uaucgaaccacgguuucaa

SEQ ID NO: 70961 - RNA, 19 nt, Artificial Sequence
  Description of Artificial Sequence: Synthetic oligonucleotide
cauaggacggggaaaucca

SEQ ID NO: 70962 - RNA, 19 nt, Artificial Sequence
  Description of Artificial Sequence: Synthetic oligonucleotide
auugcaucucacgguguac

SEQ ID NO: 70963 - RNA, 19 nt, Artificial Sequence
  Description of Artificial Sequence: Synthetic oligonucleotide
aagcguguagucugccagu

SEQ ID NO: 70964 - RNA, 19 nt, Artificial Sequence
  Description of Artificial Sequence: Synthetic oligonucleotide
acaugauugccucuauauu

SEQ ID NO: 70965 - RNA, 19 nt, Artificial Sequence
  Description of Artificial Sequence: Synthetic oligonucleotide
ucgucgcuacucagcaagg

SEQ ID NO: 70966 - RNA, 19 nt, Artificial Sequence
  Description of Artificial Sequence: Synthetic oligonucleotide
gaggcgcuaggaaacacgc

SEQ ID NO: 70967 - RNA, 19 nt, Artificial Sequence
  Description of Artificial Sequence: Synthetic oligonucleotide
ugaagcguguagucugcca

SEQ ID NO: 70968 - RNA, 19 nt, Artificial Sequence
  Description of Artificial Sequence: Synthetic oligonucleotide
uugccucuauauuagcuuu

SEQ ID NO: 70969 - RNA, 19 nt, Artificial Sequence
  Description of Artificial Sequence: Synthetic oligonucleotide
cagcuaacuauuaaggacu

SEQ ID NO: 70970 - RNA, 19 nt, Artificial Sequence
  Description of Artificial Sequence: Synthetic oligonucleotide
cagaugaucauccggugga

SEQ ID NO: 70971 - RNA, 19 nt, Artificial Sequence
  Description of Artificial Sequence: Synthetic oligonucleotide
aagaacaccuuuagguaau

SEQ ID NO: 70972 - RNA, 19 nt, Artificial Sequence
  Description of Artificial Sequence: Synthetic oligonucleotide
uaacuuaguccagcuaacu

SEQ ID NO: 70973 - RNA, 19 nt, Artificial Sequence
  Description of Artificial Sequence: Synthetic oligonucleotide
ggacuacuaacuaaaucag

SEQ ID NO: 70974 - RNA, 19 nt, Artificial Sequence
  Description of Artificial Sequence: Synthetic oligonucleotide
gugaccguuugcaggaagg

SEQ ID NO: 70975 - RNA, 19 nt, Artificial Sequence
  Description of Artificial Sequence: Synthetic oligonucleotide
cagcgaaucccaccggucc

SEQ ID NO: 70976 - RNA, 19 nt, Artificial Sequence
  Description of Artificial Sequence: Synthetic oligonucleotide
uguugucacaugccuguau

SEQ ID NO: 70977 - RNA, 19 nt, Artificial Sequence
  Description of Artificial Sequence: Synthetic oligonucleotide
uugcuaguucgacuggcaa

SEQ ID NO: 70978 - RNA, 19 nt, Artificial Sequence
  Description of Artificial Sequence: Synthetic oligonucleotide
ucggcaaaagaugcuugcc

SEQ ID NO: 70979 - RNA, 19 nt, Artificial Sequence
  Description of Artificial Sequence: Synthetic oligonucleotide
uggcauugagacaguuuga

SEQ ID NO: 70980 - RNA, 19 nt, Artificial Sequence
  Description of Artificial Sequence: Synthetic oligonucleotide
aacuagcacccguucuaca

SEQ ID NO: 70981 - RNA, 19 nt, Artificial Sequence
  Description of Artificial Sequence: Synthetic oligonucleotide
cauaagcucagaacaaugu

SEQ ID NO: 70982 - RNA, 19 nt, Artificial Sequence
  Description of Artificial Sequence: Synthetic oligonucleotide
guaacuagcacccguucua

SEQ ID NO: 70983 - RNA, 19 nt, Artificial Sequence
  Description of Artificial Sequence: Synthetic oligonucleotide
ucguaucgaaccacgguuu

SEQ ID NO: 70984 - RNA, 19 nt, Artificial Sequence
  Description of Artificial Sequence: Synthetic oligonucleotide
cuacuaugcugcacuacuc

SEQ ID NO: 70985 - RNA, 19 nt, Artificial Sequence
  Description of Artificial Sequence: Synthetic oligonucleotide
caacuuuacauucaaucgu

SEQ ID NO: 70986 - RNA, 19 nt, Artificial Sequence
  Description of Artificial Sequence: Synthetic oligonucleotide
acuaagccaaaggacuuca

SEQ ID NO: 70987 - RNA, 19 nt, Artificial Sequence
  Description of Artificial Sequence: Synthetic oligonucleotide
agcaauugguuaggcacag

SEQ ID NO: 70988 - RNA, 19 nt, Artificial Sequence
  Description of Artificial Sequence: Synthetic oligonucleotide
acucaauaguacaguaaug

SEQ ID NO: 70989 - RNA, 19 nt, Artificial Sequence
  Description of Artificial Sequence: Synthetic oligonucleotide
aguucgacuggcaaaccca

SEQ ID NO: 70990 - RNA, 19 nt, Artificial Sequence
  Description of Artificial Sequence: Synthetic oligonucleotide
gcacuacucacuauaauac

SEQ ID NO: 70991 - RNA, 19 nt, Artificial Sequence
  Description of Artificial Sequence: Synthetic oligonucleotide
uaacggccaacaugauugc

SEQ ID NO: 70992 - RNA, 19 nt, Artificial Sequence
  Description of Artificial Sequence: Synthetic oligonucleotide
cugagaccuauguuuuaac

SEQ ID NO: 70993 - RNA, 19 nt, Artificial Sequence
  Description of Artificial Sequence: Synthetic oligonucleotide
gucgcuacucagcaaggac

SEQ ID NO: 70994 - RNA, 19 nt, Artificial Sequence
  Description of Artificial Sequence: Synthetic oligonucleotide
gacacuugagagcccauua

SEQ ID NO: 70995 - RNA, 19 nt, Artificial Sequence
  Description of Artificial Sequence: Synthetic oligonucleotide
gcuguuucguaaaugaaga

SEQ ID NO: 70996 - RNA, 19 nt, Artificial Sequence
  Description of Artificial Sequence: Synthetic oligonucleotide
ggcaaaagaugcuugccuc

SEQ ID NO: 70997 - RNA, 19 nt, Artificial Sequence
  Description of Artificial Sequence: Synthetic oligonucleotide
gagcaaccuguaaggaggg

SEQ ID NO: 70998 - RNA, 19 nt, Artificial Sequence
  Description of Artificial Sequence: Synthetic oligonucleotide
auggacucaauaguacagu

SEQ ID NO: 70999 - RNA, 19 nt, Artificial Sequence
  Description of Artificial Sequence: Synthetic oligonucleotide
aucuacuguaggguuuuag

SEQ ID NO: 71000 - RNA, 19 nt, Artificial Sequence
  Description of Artificial Sequence: Synthetic oligonucleotide
ucagcgaaucccaccgguc

SEQ ID NO: 71001 - RNA, 19 nt, Artificial Sequence
  Description of Artificial Sequence: Synthetic oligonucleotide
caaccuuacugccacuuca

SEQ ID NO: 71002 - RNA, 19 nt, Artificial Sequence
  Description of Artificial Sequence: Synthetic oligonucleotide
accaacguucgcaucaugu

SEQ ID NO: 71003 - RNA, 19 nt, Artificial Sequence
  Description of Artificial Sequence: Synthetic oligonucleotide
uccuucauuaaagcccgcu

SEQ ID NO: 71004 - RNA, 19 nt, Artificial Sequence
  Description of Artificial Sequence: Synthetic oligonucleotide
uugagacuaucggcaaaag

SEQ ID NO: 71005 - RNA, 19 nt, Artificial Sequence
  Description of Artificial Sequence: Synthetic oligonucleotide
aagugagcaccgugugaca

SEQ ID NO: 71006 - RNA, 19 nt, Artificial Sequence
  Description of Artificial Sequence: Synthetic oligonucleotide
ucguuagagucaguuuccc

SEQ ID NO: 71007 - RNA, 19 nt, Artificial Sequence
  Description of Artificial Sequence: Synthetic oligonucleotide
acugagaccuauguuuuaa

SEQ ID NO: 71008 - RNA, 19 nt, Artificial Sequence
  Description of Artificial Sequence: Synthetic oligonucleotide
gaaccacgguuucaaagaa

SEQ ID NO: 71009 - RNA, 19 nt, Artificial Sequence
  Description of Artificial Sequence: Synthetic oligonucleotide
gacuccugacgucaccaac

SEQ ID NO: 71010 - RNA, 19 nt, Artificial Sequence
  Description of Artificial Sequence: Synthetic oligonucleotide
agucagcgaaucccaccgg

SEQ ID NO: 71011 - RNA, 19 nt, Artificial Sequence
  Description of Artificial Sequence: Synthetic oligonucleotide
caaugcgcccgcuguuucg

SEQ ID NO: 71012 - RNA, 19 nt, Artificial Sequence
  Description of Artificial Sequence: Synthetic oligonucleotide
acagccccauucuuaauua

SEQ ID NO: 71013 - RNA, 19 nt, Artificial Sequence
  Description of Artificial Sequence: Synthetic oligonucleotide
aaugcgcccgcuguuucgu

SEQ ID NO: 71014 - RNA, 19 nt, Artificial Sequence
  Description of Artificial Sequence: Synthetic oligonucleotide
ucccauagcuugugucugc

SEQ ID NO: 71015 - RNA, 19 nt, Artificial Sequence
  Description of Artificial Sequence: Synthetic oligonucleotide
cugcuuuagaggcgcuagg

SEQ ID NO: 71016 - RNA, 19 nt, Artificial Sequence
  Description of Artificial Sequence: Synthetic oligonucleotide
ucaaugcgcccgcuguuuc

SEQ ID NO: 71017 - RNA, 19 nt, Artificial Sequence
  Description of Artificial Sequence: Synthetic oligonucleotide
auacacgaaaccgaacauu

SEQ ID NO: 71018 - RNA, 19 nt, Artificial Sequence
  Description of Artificial Sequence: Synthetic oligonucleotide
guugagacuaucggcaaaa

SEQ ID NO: 71019 - RNA, 19 nt, Artificial Sequence
  Description of Artificial Sequence: Synthetic oligonucleotide
acugcccgugaccguuugc

SEQ ID NO: 71020 - RNA, 19 nt, Artificial Sequence
  Description of Artificial Sequence: Synthetic oligonucleotide
aguuucuuacuuacacacu

SEQ ID NO: 71021 - RNA, 19 nt, Artificial Sequence
  Description of Artificial Sequence: Synthetic oligonucleotide
aggcgguucugcuccggac

SEQ ID NO: 71022 - RNA, 19 nt, Artificial Sequence
  Description of Artificial Sequence: Synthetic oligonucleotide
aguccgaacuccacuucgg

SEQ ID NO: 71023 - RNA, 19 nt, Artificial Sequence
  Description of Artificial Sequence: Synthetic oligonucleotide
guaaccauucucaggugga

SEQ ID NO: 71024 - RNA, 19 nt, Artificial Sequence
  Description of Artificial Sequence: Synthetic oligonucleotide
agcuaacuauuaaggacug

SEQ ID NO: 71025 - RNA, 19 nt, Artificial Sequence
  Description of Artificial Sequence: Synthetic oligonucleotide
gauugccucuauauuagcu

SEQ ID NO: 71026 - RNA, 19 nt, Artificial Sequence
  Description of Artificial Sequence: Synthetic oligonucleotide
cauccgguggaggaaaguc

SEQ ID NO: 71027 - RNA, 19 nt, Artificial Sequence
  Description of Artificial Sequence: Synthetic oligonucleotide
agcaaggacugguaaccau

SEQ ID NO: 71028 - RNA, 19 nt, Artificial Sequence
  Description of Artificial Sequence: Synthetic oligonucleotide
agugcuugacagaacuccu

SEQ ID NO: 71029 - RNA, 19 nt, Artificial Sequence
  Description of Artificial Sequence: Synthetic oligonucleotide
agacgagugugaauggcca

SEQ ID NO: 71030 - RNA, 19 nt, Artificial Sequence
  Description of Artificial Sequence: Synthetic oligonucleotide
cacagacgugugcugguag

SEQ ID NO: 71031 - RNA, 19 nt, Artificial Sequence
  Description of Artificial Sequence: Synthetic oligonucleotide
cuugcuaguucgacuggca

SEQ ID NO: 71032 - RNA, 19 nt, Artificial Sequence
  Description of Artificial Sequence: Synthetic oligonucleotide
cucugauuuccauguccug

SEQ ID NO: 71033 - RNA, 19 nt, Artificial Sequence
  Description of Artificial Sequence: Synthetic oligonucleotide
acuaucggcaaaagaugcu

SEQ ID NO: 71034 - RNA, 19 nt, Artificial Sequence
  Description of Artificial Sequence: Synthetic oligonucleotide
cuguaauaagugagauuca

SEQ ID NO: 71035 - RNA, 19 nt, Artificial Sequence
  Description of Artificial Sequence: Synthetic oligonucleotide
aucccauagcuugugucug

SEQ ID NO: 71036 - RNA, 19 nt, Artificial Sequence
  Description of Artificial Sequence: Synthetic oligonucleotide
aaccuuacugccacuucaa

SEQ ID NO: 71037 - RNA, 19 nt, Artificial Sequence
  Description of Artificial Sequence: Synthetic oligonucleotide
gagcugaucgucgcuacuc

SEQ ID NO: 71038 - RNA, 19 nt, Artificial Sequence
  Description of Artificial Sequence: Synthetic oligonucleotide
cuaaacacaugugaaucua

SEQ ID NO: 71039 - RNA, 19 nt, Artificial Sequence
  Description of Artificial Sequence: Synthetic oligonucleotide
ugaucauccgguggaggaa

SEQ ID NO: 71040 - RNA, 19 nt, Artificial Sequence
  Description of Artificial Sequence: Synthetic oligonucleotide
ucgcagcaguacuucaaaa

SEQ ID NO: 71041 - RNA, 19 nt, Artificial Sequence
  Description of Artificial Sequence: Synthetic oligonucleotide
acgagugugaauggccaca

SEQ ID NO: 71042 - RNA, 19 nt, Artificial Sequence
  Description of Artificial Sequence: Synthetic oligonucleotide
ggacugguaaccauucuca

SEQ ID NO: 71043 - RNA, 19 nt, Artificial Sequence
  Description of Artificial Sequence: Synthetic oligonucleotide
ugccucuauauuagcuuuu

SEQ ID NO: 71044 - RNA, 19 nt, Artificial Sequence
  Description of Artificial Sequence: Synthetic oligonucleotide
acgucaccaacguucgcau

SEQ ID NO: 71045 - RNA, 19 nt, Artificial Sequence
  Description of Artificial Sequence: Synthetic oligonucleotide
ggauaacaguaacuagcac

SEQ ID NO: 71046 - RNA, 19 nt, Artificial Sequence
  Description of Artificial Sequence: Synthetic oligonucleotide
auuaagguacuaggauaaa

SEQ ID NO: 71047 - RNA, 19 nt, Artificial Sequence
  Description of Artificial Sequence: Synthetic oligonucleotide
agguacuaggauaaaucua

SEQ ID NO: 71048 - RNA, 19 nt, Artificial Sequence
  Description of Artificial Sequence: Synthetic oligonucleotide
cagguaaacuucggagcag

SEQ ID NO: 71049 - RNA, 19 nt, Artificial Sequence
  Description of Artificial Sequence: Synthetic oligonucleotide
gacacugggagggcuucug

SEQ ID NO: 71050 - RNA, 19 nt, Artificial Sequence
  Description of Artificial Sequence: Synthetic oligonucleotide
cacgcagggacaaugugcu

SEQ ID NO: 71051 - RNA, 19 nt, Artificial Sequence
  Description of Artificial Sequence: Synthetic oligonucleotide
uucaaucguuagagucagu

SEQ ID NO: 71052 - RNA, 19 nt, Artificial Sequence
  Description of Artificial Sequence: Synthetic oligonucleotide
gcccgugaccguuugcagg

SEQ ID NO: 71053 - RNA, 19 nt, Artificial Sequence
  Description of Artificial Sequence: Synthetic oligonucleotide
ugacgucaccaacguucgc

SEQ ID NO: 71054 - RNA, 19 nt, Artificial Sequence
  Description of Artificial Sequence: Synthetic oligonucleotide
ccaacguucgcaucauguc

SEQ ID NO: 71055 - RNA, 19 nt, Artificial Sequence
  Description of Artificial Sequence: Synthetic oligonucleotide
cacuucgcucaucccacug

SEQ ID NO: 71056 - RNA, 19 nt, Artificial Sequence
  Description of Artificial Sequence: Synthetic oligonucleotide
aggguuuuagagagccaug

SEQ ID NO: 71057 - RNA, 19 nt, Artificial Sequence
  Description of Artificial Sequence: Synthetic oligonucleotide
cacuacuaugcugcacuac

SEQ ID NO: 71058 - RNA, 19 nt, Artificial Sequence
  Description of Artificial Sequence: Synthetic oligonucleotide
cacuagcuuuugaaacguc

SEQ ID NO: 71059 - RNA, 19 nt, Artificial Sequence
  Description of Artificial Sequence: Synthetic oligonucleotide
gauuguuaucccauagcuu

SEQ ID NO: 71060 - RNA, 19 nt, Artificial Sequence
  Description of Artificial Sequence: Synthetic oligonucleotide
gugaaucuacuguaggguu

SEQ ID NO: 71061 - RNA, 19 nt, Artificial Sequence
  Description of Artificial Sequence: Synthetic oligonucleotide
agcacuaguuccggugaca

SEQ ID NO: 71062 - RNA, 19 nt, Artificial Sequence
  Description of Artificial Sequence: Synthetic oligonucleotide
gcugaucgucgcuacucag

SEQ ID NO: 71063 - RNA, 19 nt, Artificial Sequence
  Description of Artificial Sequence: Synthetic oligonucleotide
acguucgcaucauguccug

SEQ ID NO: 71064 - RNA, 19 nt, Artificial Sequence
  Description of Artificial Sequence: Synthetic oligonucleotide
gcaaccuguaaggagggca

SEQ ID NO: 71065 - RNA, 19 nt, Artificial Sequence
  Description of Artificial Sequence: Synthetic oligonucleotide
ggucuaaacacaugugaau

SEQ ID NO: 71066 - RNA, 19 nt, Artificial Sequence
  Description of Artificial Sequence: Synthetic oligonucleotide
gguaaacuucggagcagcc

SEQ ID NO: 71067 - RNA, 19 nt, Artificial Sequence
  Description of Artificial Sequence: Synthetic oligonucleotide
guccgaacuccacuucgga

SEQ ID NO: 71068 - RNA, 19 nt, Artificial Sequence
  Description of Artificial Sequence: Synthetic oligonucleotide
uggccguaaucugauugau

SEQ ID NO: 71069 - RNA, 19 nt, Artificial Sequence
  Description of Artificial Sequence: Synthetic oligonucleotide
cuggucgcagcaguacuuc

SEQ ID NO: 71070 - RNA, 19 nt, Artificial Sequence
  Description of Artificial Sequence: Synthetic oligonucleotide
guuaugagguagcuaccau

SEQ ID NO: 71071 - RNA, 19 nt, Artificial Sequence
  Description of Artificial Sequence: Synthetic oligonucleotide
aucaaugcgcccgcuguuu

SEQ ID NO: 71072 - RNA, 19 nt, Artificial Sequence
  Description of Artificial Sequence: Synthetic oligonucleotide
ccguaaucugauugaugag

SEQ ID NO: 71073 - RNA, 19 nt, Artificial Sequence
  Description of Artificial Sequence: Synthetic oligonucleotide
cagcacuaguuccggugac

SEQ ID NO: 71074 - RNA, 19 nt, Artificial Sequence
  Description of Artificial Sequence: Synthetic oligonucleotide
agccgacuggucauugucu

SEQ ID NO: 71075 - RNA, 19 nt, Artificial Sequence
  Description of Artificial Sequence: Synthetic oligonucleotide
cugagcgagccuguccaac

SEQ ID NO: 71076 - RNA, 19 nt, Artificial Sequence
  Description of Artificial Sequence: Synthetic oligonucleotide
augccuguauuuagggaaa

SEQ ID NO: 71077 - RNA, 19 nt, Artificial Sequence
  Description of Artificial Sequence: Synthetic oligonucleotide
gcuuuagaggcgcuaggaa

SEQ ID NO: 71078 - RNA, 19 nt, Artificial Sequence
  Description of Artificial Sequence: Synthetic oligonucleotide
cuaugucuuauaacagcau

SEQ ID NO: 71079 - RNA, 19 nt, Artificial Sequence
  Description of Artificial Sequence: Synthetic oligonucleotide
ucggagcagccacacuguu

SEQ ID NO: 71080 - RNA, 19 nt, Artificial Sequence
  Description of Artificial Sequence: Synthetic oligonucleotide
guucgacuggcaaacccaa

SEQ ID NO: 71081 - RNA, 19 nt, Artificial Sequence
  Description of Artificial Sequence: Synthetic oligonucleotide
gaacccacuuaaccugggu

SEQ ID NO: 71082 - RNA, 19 nt, Artificial Sequence
  Description of Artificial Sequence: Synthetic oligonucleotide
gucagcgaaucccaccggu

SEQ ID NO: 71083 - RNA, 19 nt, Artificial Sequence
  Description of Artificial Sequence: Synthetic oligonucleotide
gcacaggacuacuaacuaa

SEQ ID NO: 71084 - RNA, 19 nt, Artificial Sequence
  Description of Artificial Sequence: Synthetic oligonucleotide
ggacucaauaguacaguaa

SEQ ID NO: 71085 - RNA, 19 nt, Artificial Sequence
  Description of Artificial Sequence: Synthetic oligonucleotide
gaucgucgcuacucagcaa

SEQ ID NO: 71086 - RNA, 19 nt, Artificial Sequence
  Description of Artificial Sequence: Synthetic oligonucleotide
cuuaaccuggguccagagu

SEQ ID NO: 71087 - RNA, 19 nt, Artificial Sequence
  Description of Artificial Sequence: Synthetic oligonucleotide
ggcacaggacuacuaacua

SEQ ID NO: 71088 - RNA, 19 nt, Artificial Sequence
  Description of Artificial Sequence: Synthetic oligonucleotide
ccuugcuaguucgacuggc

SEQ ID NO: 71089 - RNA, 19 nt, Artificial Sequence
  Description of Artificial Sequence: Synthetic oligonucleotide
cugcccgugaccguuugca

SEQ ID NO: 71090 - RNA, 19 nt, Artificial Sequence
  Description of Artificial Sequence: Synthetic oligonucleotide
cuccggacuuuagcacugg

SEQ ID NO: 71091 - RNA, 19 nt, Artificial Sequence
  Description of Artificial Sequence: Synthetic oligonucleotide
cauaacggccaacaugauu

SEQ ID NO: 71092 - RNA, 19 nt, Artificial Sequence
  Description of Artificial Sequence: Synthetic oligonucleotide
guaggcgguucugcuccgg

SEQ ID NO: 71093 - RNA, 19 nt, Artificial Sequence
  Description of Artificial Sequence: Synthetic oligonucleotide
gguugagacuaucggcaaa

SEQ ID NO: 71094 - RNA, 19 nt, Artificial Sequence
  Description of Artificial Sequence: Synthetic oligonucleotide
agcguguagucugccaguu

SEQ ID NO: 71095 - RNA, 19 nt, Artificial Sequence
  Description of Artificial Sequence: Synthetic oligonucleotide
gcaaccuuacugccacuuc

SEQ ID NO: 71096 - RNA, 19 nt, Artificial Sequence
  Description of Artificial Sequence: Synthetic oligonucleotide
ggguuuuagagagccaugu

SEQ ID NO: 71097 - RNA, 19 nt, Artificial Sequence
  Description of Artificial Sequence: Synthetic oligonucleotide
cuaucggcaaaagaugcuu

SEQ ID NO: 71098 - RNA, 19 nt, Artificial Sequence
  Description of Artificial Sequence: Synthetic oligonucleotide
ggcaaaguaacuccuccuu

SEQ ID NO: 71099 - RNA, 19 nt, Artificial Sequence
  Description of Artificial Sequence: Synthetic oligonucleotide
acuuggccguaaucugauu

SEQ ID NO: 71100 - RNA, 19 nt, Artificial Sequence
  Description of Artificial Sequence: Synthetic oligonucleotide
aggaacccacucucuuaua

SEQ ID NO: 71101 - RNA, 19 nt, Artificial Sequence
  Description of Artificial Sequence: Synthetic oligonucleotide
gcaauugguuaggcacagg

SEQ ID NO: 71102 - RNA, 19 nt, Artificial Sequence
  Description of Artificial Sequence: Synthetic oligonucleotide
caccaacguucgcaucaug

SEQ ID NO: 71103 - RNA, 19 nt, Artificial Sequence
  Description of Artificial Sequence: Synthetic oligonucleotide
cuauugcaucucacggugu

SEQ ID NO: 71104 - RNA, 19 nt, Artificial Sequence
  Description of Artificial Sequence: Synthetic oligonucleotide
cccgugaccguuugcagga

SEQ ID NO: 71105 - RNA, 19 nt, Artificial Sequence
  Description of Artificial Sequence: Synthetic oligonucleotide
gugagcaccgugugacacu

SEQ ID NO: 71106 - RNA, 19 nt, Artificial Sequence
  Description of Artificial Sequence: Synthetic oligonucleotide
ccagcacuaguuccgguga

SEQ ID NO: 71107 - RNA, 19 nt, Artificial Sequence
  Description of Artificial Sequence: Synthetic oligonucleotide
acggagauaccuggaucuu

SEQ ID NO: 71108 - RNA, 19 nt, Artificial Sequence
  Description of Artificial Sequence: Synthetic oligonucleotide
cagccccauucuuaauuaa

SEQ ID NO: 71109 - RNA, 19 nt, Artificial Sequence
  Description of Artificial Sequence: Synthetic oligonucleotide
gcugcacuacucacuauaa

SEQ ID NO: 71110 - RNA, 19 nt, Artificial Sequence
  Description of Artificial Sequence: Synthetic oligonucleotide
gcuccggacuuuagcacug

SEQ ID NO: 71111 - RNA, 19 nt, Artificial Sequence
  Description of Artificial Sequence: Synthetic oligonucleotide
cuccugacgucaccaacgu

SEQ ID NO: 71112 - RNA, 19 nt, Artificial Sequence
  Description of Artificial Sequence: Synthetic oligonucleotide
gcgucacagacgugugcug

SEQ ID NO: 71113 - RNA, 19 nt, Artificial Sequence
  Description of Artificial Sequence: Synthetic oligonucleotide
cguaucgaaccacgguuuc

SEQ ID NO: 71114 - RNA, 19 nt, Artificial Sequence
  Description of Artificial Sequence: Synthetic oligonucleotide
aggcgcuaggaaacacgca

SEQ ID NO: 71115 - RNA, 19 nt, Artificial Sequence
  Description of Artificial Sequence: Synthetic oligonucleotide
cuucggaggauguccuuuu

SEQ ID NO: 71116 - RNA, 19 nt, Artificial Sequence
  Description of Artificial Sequence: Synthetic oligonucleotide
ccggacuuuagcacuggaa

SEQ ID NO: 71117 - RNA, 19 nt, Artificial Sequence
  Description of Artificial Sequence: Synthetic oligonucleotide
cauguacagcaaccuuacu

SEQ ID NO: 71118 - RNA, 19 nt, Artificial Sequence
  Description of Artificial Sequence: Synthetic oligonucleotide
cguuuaacuugcucaaggu

SEQ ID NO: 71119 - RNA, 19 nt, Artificial Sequence
  Description of Artificial Sequence: Synthetic oligonucleotide
cugcacuacucacuauaau

SEQ ID NO: 71120 - RNA, 19 nt, Artificial Sequence
  Description of Artificial Sequence: Synthetic oligonucleotide
ccgacuggucauugucuuc

SEQ ID NO: 71121 - RNA, 19 nt, Artificial Sequence
  Description of Artificial Sequence: Synthetic oligonucleotide
gccauaagcucagaacaau

SEQ ID NO: 71122 - RNA, 19 nt, Artificial Sequence
  Description of Artificial Sequence: Synthetic oligonucleotide
gguuaggcacaggacuacu

SEQ ID NO: 71123 - RNA, 19 nt, Artificial Sequence
  Description of Artificial Sequence: Synthetic oligonucleotide
caacugcaugguugagacu

SEQ ID NO: 71124 - RNA, 19 nt, Artificial Sequence
  Description of Artificial Sequence: Synthetic oligonucleotide
ccgcuguuucguaaaugaa

SEQ ID NO: 71125 - RNA, 19 nt, Artificial Sequence
  Description of Artificial Sequence: Synthetic oligonucleotide
cccguuugagaugaauugu

SEQ ID NO: 71126 - RNA, 19 nt, Artificial Sequence
  Description of Artificial Sequence: Synthetic oligonucleotide
gcuaacuauuaaggacugu

SEQ ID NO: 71127 - RNA, 19 nt, Artificial Sequence
  Description of Artificial Sequence: Synthetic oligonucleotide
cccacagcucaaaacuuau

SEQ ID NO: 71128 - RNA, 19 nt, Artificial Sequence
  Description of Artificial Sequence: Synthetic oligonucleotide
gccgacuggucauugucuu

SEQ ID NO: 71129 - RNA, 19 nt, Artificial Sequence
  Description of Artificial Sequence: Synthetic oligonucleotide
gcgcccgcuguuucguaaa

SEQ ID NO: 71130 - RNA, 19 nt, Artificial Sequence
  Description of Artificial Sequence: Synthetic oligonucleotide
gccccguuugagaugaauu

SEQ ID NO: 71131 - RNA, 19 nt, Artificial Sequence
  Description of Artificial Sequence: Synthetic oligonucleotide
ggaaacacgcagggacaau

SEQ ID NO: 71132 - RNA, 19 nt, Artificial Sequence
  Description of Artificial Sequence: Synthetic oligonucleotide
cggauacucaacagcuccu

SEQ ID NO: 71133 - RNA, 19 nt, Artificial Sequence
  Description of Artificial Sequence: Synthetic oligonucleotide
gcuggucgcagcaguacuu

SEQ ID NO: 71134 - RNA, 19 nt, Artificial Sequence
  Description of Artificial Sequence: Synthetic oligonucleotide
cgucgcuacucagcaagga

SEQ ID NO: 71135 - RNA, 19 nt, Artificial Sequence
  Description of Artificial Sequence: Synthetic oligonucleotide
cagggacaaugugcuugua

SEQ ID NO: 71136 - RNA, 19 nt, Artificial Sequence
  Description of Artificial Sequence: Synthetic oligonucleotide
cgguggaggaaaguccgaa

SEQ ID NO: 71137 - RNA, 19 nt, Artificial Sequence
  Description of Artificial Sequence: Synthetic oligonucleotide
ggucugcuuuagaggcgcu

SEQ ID NO: 71138 - RNA, 19 nt, Artificial Sequence
  Description of Artificial Sequence: Synthetic oligonucleotide
ccgugaccguuugcaggaa

SEQ ID NO: 71139 - RNA, 19 nt, Artificial Sequence
  Description of Artificial Sequence: Synthetic oligonucleotide
acuacuaacagucaacugc

SEQ ID NO: 71140 - RNA, 19 nt, Artificial Sequence
  Description of Artificial Sequence: Synthetic oligonucleotide
aacacacacacacacacac

SEQ ID NO: 71141 - RNA, 19 nt, Artificial Sequence
  Description of Artificial Sequence: Synthetic oligonucleotide
cauauugugaccaacuccg

SEQ ID NO: 71142 - RNA, 19 nt, Artificial Sequence
  Description of Artificial Sequence: Synthetic oligonucleotide
uuugcguuuaaccaaagug

SEQ ID NO: 71143 - RNA, 19 nt, Artificial Sequence
  Description of Artificial Sequence: Synthetic oligonucleotide
ucaacugagacucuuaacu

SEQ ID NO: 71144 - RNA, 19 nt, Artificial Sequence
  Description of Artificial Sequence: Synthetic oligonucleotide
aauaaaagaagguggauuu

SEQ ID NO: 71145 - RNA, 19 nt, Artificial Sequence
  Description of Artificial Sequence: Synthetic oligonucleotide
auugugaccaacuccgugc

SEQ ID NO: 71146 - RNA, 19 nt, Artificial Sequence
  Description of Artificial Sequence: Synthetic oligonucleotide
aagauuauucauuugugga

SEQ ID NO: 71147 - RNA, 19 nt, Artificial Sequence
  Description of Artificial Sequence: Synthetic oligonucleotide
aaguauuuggcauaggcaa

SEQ ID NO: 71148 - RNA, 19 nt, Artificial Sequence
  Description of Artificial Sequence: Synthetic oligonucleotide
ugcacaacuacuaacaguc

SEQ ID NO: 71149 - RNA, 19 nt, Artificial Sequence
  Description of Artificial Sequence: Synthetic oligonucleotide
uugcguuuaaccaaagugc

SEQ ID NO: 71150 - RNA, 19 nt, Artificial Sequence
  Description of Artificial Sequence: Synthetic oligonucleotide
aaagacccaacucagaaau

SEQ ID NO: 71151 - RNA, 19 nt, Artificial Sequence
  Description of Artificial Sequence: Synthetic oligonucleotide
cauuaggauacagagaucg

SEQ ID NO: 71152 - RNA, 19 nt, Artificial Sequence
  Description of Artificial Sequence: Synthetic oligonucleotide
uguagcucaagcauuuuag

SEQ ID NO: 71153 - RNA, 19 nt, Artificial Sequence
  Description of Artificial Sequence: Synthetic oligonucleotide
cuaacagucaacugcaccc

SEQ ID NO: 71154 - RNA, 19 nt, Artificial Sequence
  Description of Artificial Sequence: Synthetic oligonucleotide
uuaaccaaagugcuggcug

SEQ ID NO: 71155 - RNA, 19 nt, Artificial Sequence
  Description of Artificial Sequence: Synthetic oligonucleotide
gauacuguguuucaggaca

SEQ ID NO: 71156 - RNA, 19 nt, Artificial Sequence
  Description of Artificial Sequence: Synthetic oligonucleotide
gacucuucguguuucaagg

SEQ ID NO: 71157 - RNA, 19 nt, Artificial Sequence
  Description of Artificial Sequence: Synthetic oligonucleotide
uucaaguaaacugugaagu

SEQ ID NO: 71158 - RNA, 19 nt, Artificial Sequence
  Description of Artificial Sequence: Synthetic oligonucleotide
aaacuacucaguuugcaca

SEQ ID NO: 71159 - RNA, 19 nt, Artificial Sequence
  Description of Artificial Sequence: Synthetic oligonucleotide
aaaagguccccugagcugg

SEQ ID NO: 71160 - RNA, 19 nt, Artificial Sequence
  Description of Artificial Sequence: Synthetic oligonucleotide
uauugagagcacaggaagg

SEQ ID NO: 71161 - RNA, 19 nt, Artificial Sequence
  Description of Artificial Sequence: Synthetic oligonucleotide
uuagaaugaucagacaucc

SEQ ID NO: 71162 - RNA, 19 nt, Artificial Sequence
  Description of Artificial Sequence: Synthetic oligonucleotide
aaacaaucuaagaauuggg

SEQ ID NO: 71163 - RNA, 19 nt, Artificial Sequence
  Description of Artificial Sequence: Synthetic oligonucleotide
agcauaacgaugugcaggg

SEQ ID NO: 71164 - RNA, 19 nt, Artificial Sequence
  Description of Artificial Sequence: Synthetic oligonucleotide
uauuuaugccgauuaugcg

SEQ ID NO: 71165 - RNA, 19 nt, Artificial Sequence
  Description of Artificial Sequence: Synthetic oligonucleotide
aacuacucaguuugcacag

SEQ ID NO: 71166 - RNA, 19 nt, Artificial Sequence
  Description of Artificial Sequence: Synthetic oligonucleotide
ucagguaacucacacguga

SEQ ID NO: 71167 - RNA, 19 nt, Artificial Sequence
  Description of Artificial Sequence: Synthetic oligonucleotide
agggaacacacacacacac

SEQ ID NO: 71168 - RNA, 19 nt, Artificial Sequence
  Description of Artificial Sequence: Synthetic oligonucleotide
auuuuagacaaaagguccc

SEQ ID NO: 71169 - RNA, 19 nt, Artificial Sequence
  Description of Artificial Sequence: Synthetic oligonucleotide
uuguggaacuaccaaaaug

SEQ ID NO: 71170 - RNA, 19 nt, Artificial Sequence
  Description of Artificial Sequence: Synthetic oligonucleotide
cucuuuaugugauagugac

SEQ ID NO: 71171 - RNA, 19 nt, Artificial Sequence
  Description of Artificial Sequence: Synthetic oligonucleotide
aacaugucuccacuuguag

SEQ ID NO: 71172 - RNA, 19 nt, Artificial Sequence
  Description of Artificial Sequence: Synthetic oligonucleotide
uauuguggaacuaccaaaa

SEQ ID NO: 71173 - RNA, 19 nt, Artificial Sequence
  Description of Artificial Sequence: Synthetic oligonucleotide
aguaaugccccauugcugu

SEQ ID NO: 71174 - RNA, 19 nt, Artificial Sequence
  Description of Artificial Sequence: Synthetic oligonucleotide
ugaucagacauccuuucca

SEQ ID NO: 71175 - RNA, 19 nt, Artificial Sequence
  Description of Artificial Sequence: Synthetic oligonucleotide
ucuauacagaaucuucaga

SEQ ID NO: 71176 - RNA, 19 nt, Artificial Sequence
  Description of Artificial Sequence: Synthetic oligonucleotide
acucuuaacuauuugcuga

SEQ ID NO: 71177 - RNA, 19 nt, Artificial Sequence
  Description of Artificial Sequence: Synthetic oligonucleotide
gaagcaucgcuuugguucg

SEQ ID NO: 71178 - RNA, 19 nt, Artificial Sequence
  Description of Artificial Sequence: Synthetic oligonucleotide
ugucugaaaccuaaucacc

SEQ ID NO: 71179 - RNA, 19 nt, Artificial Sequence
  Description of Artificial Sequence: Synthetic oligonucleotide
aaacgaggucagcauuucc

SEQ ID NO: 71180 - RNA, 19 nt, Artificial Sequence
  Description of Artificial Sequence: Synthetic oligonucleotide
cuuuaugugauagugacca

SEQ ID NO: 71181 - RNA, 19 nt, Artificial Sequence
  Description of Artificial Sequence: Synthetic oligonucleotide
acugcuuagcucuacugag

SEQ ID NO: 71182 - RNA, 19 nt, Artificial Sequence
  Description of Artificial Sequence: Synthetic oligonucleotide
uaggauacagagaucgugu

SEQ ID NO: 71183 - RNA, 19 nt, Artificial Sequence
  Description of Artificial Sequence: Synthetic oligonucleotide
ugcguuuaaccaaagugcu

SEQ ID NO: 71184 - RNA, 19 nt, Artificial Sequence
  Description of Artificial Sequence: Synthetic oligonucleotide
augaucagacauccuuucc

SEQ ID NO: 71185 - RNA, 19 nt, Artificial Sequence
  Description of Artificial Sequence: Synthetic oligonucleotide
uuaggauacagagaucgug

SEQ ID NO: 71186 - RNA, 19 nt, Artificial Sequence
  Description of Artificial Sequence: Synthetic oligonucleotide
aaucaacugagacucuuaa

SEQ ID NO: 71187 - RNA, 19 nt, Artificial Sequence
  Description of Artificial Sequence: Synthetic oligonucleotide
uuuaugccgauuaugcgua

SEQ ID NO: 71188 - RNA, 19 nt, Artificial Sequence
  Description of Artificial Sequence: Synthetic oligonucleotide
gaugggcucauauugugac

SEQ ID NO: 71189 - RNA, 19 nt, Artificial Sequence
  Description of Artificial Sequence: Synthetic oligonucleotide
ucucuuuaugugauaguga

SEQ ID NO: 71190 - RNA, 19 nt, Artificial Sequence
  Description of Artificial Sequence: Synthetic oligonucleotide
ugcuuagcucuacugagug

SEQ ID NO: 71191 - RNA, 19 nt, Artificial Sequence
  Description of Artificial Sequence: Synthetic oligonucleotide
cauaccucagguaacucac

SEQ ID NO: 71192 - RNA, 19 nt, Artificial Sequence
  Description of Artificial Sequence: Synthetic oligonucleotide
cugaaaccuaaucaccacg

SEQ ID NO: 71193 - RNA, 19 nt, Artificial Sequence
  Description of Artificial Sequence: Synthetic oligonucleotide
aucaacugagacucuuaac

SEQ ID NO: 71194 - RNA, 19 nt, Artificial Sequence
  Description of Artificial Sequence: Synthetic oligonucleotide
uuccuaaguugacucuucg

SEQ ID NO: 71195 - RNA, 19 nt, Artificial Sequence
  Description of Artificial Sequence: Synthetic oligonucleotide
uauugugaccaacuccgug

SEQ ID NO: 71196 - RNA, 19 nt, Artificial Sequence
  Description of Artificial Sequence: Synthetic oligonucleotide
uccacuuguagugccaagg

SEQ ID NO: 71197 - RNA, 19 nt, Artificial Sequence
  Description of Artificial Sequence: Synthetic oligonucleotide
aaguauugauaauggcaca

SEQ ID NO: 71198 - RNA, 19 nt, Artificial Sequence
  Description of Artificial Sequence: Synthetic oligonucleotide
aaccuaaucaccacguggu

SEQ ID NO: 71199 - RNA, 19 nt, Artificial Sequence
  Description of Artificial Sequence: Synthetic oligonucleotide
ccugcauuaggauacagag

SEQ ID NO: 71200 - RNA, 19 nt, Artificial Sequence
  Description of Artificial Sequence: Synthetic oligonucleotide
augccgauuaugcguaugg

SEQ ID NO: 71201 - RNA, 19 nt, Artificial Sequence
  Description of Artificial Sequence: Synthetic oligonucleotide
cacacacacacacacacac

SEQ ID NO: 71202 - RNA, 19 nt, Artificial Sequence
  Description of Artificial Sequence: Synthetic oligonucleotide
uuuuagacaaaaggucccc

SEQ ID NO: 71203 - RNA, 19 nt, Artificial Sequence
  Description of Artificial Sequence: Synthetic oligonucleotide
aucuucagaccacgggacc

SEQ ID NO: 71204 - RNA, 19 nt, Artificial Sequence
  Description of Artificial Sequence: Synthetic oligonucleotide
ugacucuucguguuucaag

SEQ ID NO: 71205 - RNA, 19 nt, Artificial Sequence
  Description of Artificial Sequence: Synthetic oligonucleotide
uuaugugauagugaccaac

SEQ ID NO: 71206 - RNA, 19 nt, Artificial Sequence
  Description of Artificial Sequence: Synthetic oligonucleotide
cacgugguuagaaugauca

SEQ ID NO: 71207 - RNA, 19 nt, Artificial Sequence
  Description of Artificial Sequence: Synthetic oligonucleotide
ggagggaacacacacacac

SEQ ID NO: 71208 - RNA, 19 nt, Artificial Sequence
  Description of Artificial Sequence: Synthetic oligonucleotide
acggacccaaaccaccacc

SEQ ID NO: 71209 - RNA, 19 nt, Artificial Sequence
  Description of Artificial Sequence: Synthetic oligonucleotide
gauuuccuacguuucagga

SEQ ID NO: 71210 - RNA, 19 nt, Artificial Sequence
  Description of Artificial Sequence: Synthetic oligonucleotide
ggguccaguauuuaugccg

SEQ ID NO: 71211 - RNA, 19 nt, Artificial Sequence
  Description of Artificial Sequence: Synthetic oligonucleotide
aucauggacugcuauauuu

SEQ ID NO: 71212 - RNA, 19 nt, Artificial Sequence
  Description of Artificial Sequence: Synthetic oligonucleotide
ggaacggacggacagcugg

SEQ ID NO: 71213 - RNA, 19 nt, Artificial Sequence
  Description of Artificial Sequence: Synthetic oligonucleotide
auucagcacacaucuguag

SEQ ID NO: 71214 - RNA, 19 nt, Artificial Sequence
  Description of Artificial Sequence: Synthetic oligonucleotide
uuacugcacaacuacuaac

SEQ ID NO: 71215 - RNA, 19 nt, Artificial Sequence
  Description of Artificial Sequence: Synthetic oligonucleotide
agugcuuaagaaauuguga

SEQ ID NO: 71216 - RNA, 19 nt, Artificial Sequence
  Description of Artificial Sequence: Synthetic oligonucleotide
ggaacacacacacacacac

SEQ ID NO: 71217 - RNA, 19 nt, Artificial Sequence
  Description of Artificial Sequence: Synthetic oligonucleotide
ccgauuaugcguauggagg

SEQ ID NO: 71218 - RNA, 19 nt, Artificial Sequence
  Description of Artificial Sequence: Synthetic oligonucleotide
aacgaggucagcauuucca

SEQ ID NO: 71219 - RNA, 19 nt, Artificial Sequence
  Description of Artificial Sequence: Synthetic oligonucleotide
acacacacacacuucuuug

SEQ ID NO: 71220 - RNA, 19 nt, Artificial Sequence
  Description of Artificial Sequence: Synthetic oligonucleotide
uuguuugcguuuaaccaaa

SEQ ID NO: 71221 - RNA, 19 nt, Artificial Sequence
  Description of Artificial Sequence: Synthetic oligonucleotide
cagcauaacgaugugcagg

SEQ ID NO: 71222 - RNA, 19 nt, Artificial Sequence
  Description of Artificial Sequence: Synthetic oligonucleotide
augggcucauauugugacc

SEQ ID NO: 71223 - RNA, 19 nt, Artificial Sequence
  Description of Artificial Sequence: Synthetic oligonucleotide
guaacucacacgugauucc

SEQ ID NO: 71224 - RNA, 19 nt, Artificial Sequence
  Description of Artificial Sequence: Synthetic oligonucleotide
agugccuacccgcucccgc

SEQ ID NO: 71225 - RNA, 19 nt, Artificial Sequence
  Description of Artificial Sequence: Synthetic oligonucleotide
agcucuacugagugucuac

SEQ ID NO: 71226 - RNA, 19 nt, Artificial Sequence
  Description of Artificial Sequence: Synthetic oligonucleotide
aacucacacgugauucccc

SEQ ID NO: 71227 - RNA, 19 nt, Artificial Sequence
  Description of Artificial Sequence: Synthetic oligonucleotide
augccguccgugcagcggc

SEQ ID NO: 71228 - RNA, 19 nt, Artificial Sequence
  Description of Artificial Sequence: Synthetic oligonucleotide
aggccgagauguuagagga

SEQ ID NO: 71229 - RNA, 19 nt, Artificial Sequence
  Description of Artificial Sequence: Synthetic oligonucleotide
auugagagcacaggaaggu

SEQ ID NO: 71230 - RNA, 19 nt, Artificial Sequence
  Description of Artificial Sequence: Synthetic oligonucleotide
agacucuuaacuauuugcu

SEQ ID NO: 71231 - RNA, 19 nt, Artificial Sequence
  Description of Artificial Sequence: Synthetic oligonucleotide
ugggcucauauugugacca

SEQ ID NO: 71232 - RNA, 19 nt, Artificial Sequence
  Description of Artificial Sequence: Synthetic oligonucleotide
caccgaauccaccacguag

SEQ ID NO: 71233 - RNA, 19 nt, Artificial Sequence
  Description of Artificial Sequence: Synthetic oligonucleotide
uaccucagguaacucacac

SEQ ID NO: 71234 - RNA, 19 nt, Artificial Sequence
  Description of Artificial Sequence: Synthetic oligonucleotide
uccaaucgcugcccggacg

SEQ ID NO: 71235 - RNA, 19 nt, Artificial Sequence
  Description of Artificial Sequence: Synthetic oligonucleotide
cucauauugugaccaacuc

SEQ ID NO: 71236 - RNA, 19 nt, Artificial Sequence
  Description of Artificial Sequence: Synthetic oligonucleotide
uaacucacacgugauuccc

SEQ ID NO: 71237 - RNA, 19 nt, Artificial Sequence
  Description of Artificial Sequence: Synthetic oligonucleotide
cucuggacggacccaaacc

SEQ ID NO: 71238 - RNA, 19 nt, Artificial Sequence
  Description of Artificial Sequence: Synthetic oligonucleotide
uuuaaccaaagugcuggcu

SEQ ID NO: 71239 - RNA, 19 nt, Artificial Sequence
  Description of Artificial Sequence: Synthetic oligonucleotide
gaugauggcgcacgccggc

SEQ ID NO: 71240 - RNA, 19 nt, Artificial Sequence
  Description of Artificial Sequence: Synthetic oligonucleotide
agaaaucgcuuuugugucu

SEQ ID NO: 71241 - RNA, 19 nt, Artificial Sequence
  Description of Artificial Sequence: Synthetic oligonucleotide
uuuagacaaaagguccccu

SEQ ID NO: 71242 - RNA, 19 nt, Artificial Sequence
  Description of Artificial Sequence: Synthetic oligonucleotide
acaugguaggugguggccg

SEQ ID NO: 71243 - RNA, 19 nt, Artificial Sequence
  Description of Artificial Sequence: Synthetic oligonucleotide
aacggacggacagcugggc

SEQ ID NO: 71244 - RNA, 19 nt, Artificial Sequence
  Description of Artificial Sequence: Synthetic oligonucleotide
auaacgaugugcagggacu

SEQ ID NO: 71245 - RNA, 19 nt, Artificial Sequence
  Description of Artificial Sequence: Synthetic oligonucleotide
uuaugcguauggagggaac

SEQ ID NO: 71246 - RNA, 19 nt, Artificial Sequence
  Description of Artificial Sequence: Synthetic oligonucleotide
aacgaugugcagggacugg

SEQ ID NO: 71247 - RNA, 19 nt, Artificial Sequence
  Description of Artificial Sequence: Synthetic oligonucleotide
uccuaaguugacucuucgu

SEQ ID NO: 71248 - RNA, 19 nt, Artificial Sequence
  Description of Artificial Sequence: Synthetic oligonucleotide
caugguaggugguggccgg

SEQ ID NO: 71249 - RNA, 19 nt, Artificial Sequence
  Description of Artificial Sequence: Synthetic oligonucleotide
cgaagcaucgcuuugguuc

SEQ ID NO: 71250 - RNA, 19 nt, Artificial Sequence
  Description of Artificial Sequence: Synthetic oligonucleotide
gguaacucacacgugauuc

SEQ ID NO: 71251 - RNA, 19 nt, Artificial Sequence
  Description of Artificial Sequence: Synthetic oligonucleotide
uuagcucuacugagugucu

SEQ ID NO: 71252 - RNA, 19 nt, Artificial Sequence
  Description of Artificial Sequence: Synthetic oligonucleotide
gguuagaaugaucagacau

SEQ ID NO: 71253 - RNA, 19 nt, Artificial Sequence
  Description of Artificial Sequence: Synthetic oligonucleotide
gacgcauuaccgcuucuuc

SEQ ID NO: 71254 - RNA, 19 nt, Artificial Sequence
  Description of Artificial Sequence: Synthetic oligonucleotide
acagacgccgcgguggagg

SEQ ID NO: 71255 - RNA, 19 nt, Artificial Sequence
  Description of Artificial Sequence: Synthetic oligonucleotide
gauggcgcacgccggcugg

SEQ ID NO: 71256 - RNA, 19 nt, Artificial Sequence
  Description of Artificial Sequence: Synthetic oligonucleotide
ugcaaacgaggucagcauu

SEQ ID NO: 71257 - RNA, 19 nt, Artificial Sequence
  Description of Artificial Sequence: Synthetic oligonucleotide
ugccgccacggacagacgc

SEQ ID NO: 71258 - RNA, 19 nt, Artificial Sequence
  Description of Artificial Sequence: Synthetic oligonucleotide
aguacaccccagugccuac

SEQ ID NO: 71259 - RNA, 19 nt, Artificial Sequence
  Description of Artificial Sequence: Synthetic oligonucleotide
acgcauuaccgcuucuucu

SEQ ID NO: 71260 - RNA, 19 nt, Artificial Sequence
  Description of Artificial Sequence: Synthetic oligonucleotide
auuuugcaauucagcacac

SEQ ID NO: 71261 - RNA, 19 nt, Artificial Sequence
  Description of Artificial Sequence: Synthetic oligonucleotide
cuaguuguaaauuucucuu

SEQ ID NO: 71262 - RNA, 19 nt, Artificial Sequence
  Description of Artificial Sequence: Synthetic oligonucleotide
aagacccaacucagaaauc

SEQ ID NO: 71263 - RNA, 19 nt, Artificial Sequence
  Description of Artificial Sequence: Synthetic oligonucleotide
gaaaucgcuuuugugucuc

SEQ ID NO: 71264 - RNA, 19 nt, Artificial Sequence
  Description of Artificial Sequence: Synthetic oligonucleotide
acgugguuagaaugaucag

SEQ ID NO: 71265 - RNA, 19 nt, Artificial Sequence
  Description of Artificial Sequence: Synthetic oligonucleotide
cugugaagugccugaguac

SEQ ID NO: 71266 - RNA, 19 nt, Artificial Sequence
  Description of Artificial Sequence: Synthetic oligonucleotide
ugucuuuguucgcgggcgc

SEQ ID NO: 71267 - RNA, 19 nt, Artificial Sequence
  Description of Artificial Sequence: Synthetic oligonucleotide
agugccugaguaccaguga

SEQ ID NO: 71268 - RNA, 19 nt, Artificial Sequence
  Description of Artificial Sequence: Synthetic oligonucleotide
aucaccacgugguuagaau

SEQ ID NO: 71269 - RNA, 19 nt, Artificial Sequence
  Description of Artificial Sequence: Synthetic oligonucleotide
acagcaacgugucgucaug

SEQ ID NO: 71270 - RNA, 19 nt, Artificial Sequence
  Description of Artificial Sequence: Synthetic oligonucleotide
ucgccgaugauggcgcacg

SEQ ID NO: 71271 - RNA, 19 nt, Artificial Sequence
  Description of Artificial Sequence: Synthetic oligonucleotide
guccaccgaauccaccacg

SEQ ID NO: 71272 - RNA, 19 nt, Artificial Sequence
  Description of Artificial Sequence: Synthetic oligonucleotide
cgauuaugcguauggaggg

SEQ ID NO: 71273 - RNA, 19 nt, Artificial Sequence
  Description of Artificial Sequence: Synthetic oligonucleotide
aaaucgcuuuugugucucu

SEQ ID NO: 71274 - RNA, 19 nt, Artificial Sequence
  Description of Artificial Sequence: Synthetic oligonucleotide
acggacggacagcugggcg

SEQ ID NO: 71275 - RNA, 19 nt, Artificial Sequence
  Description of Artificial Sequence: Synthetic oligonucleotide
uuaggcucggaggcgcccg

SEQ ID NO: 71276 - RNA, 19 nt, Artificial Sequence
  Description of Artificial Sequence: Synthetic oligonucleotide
aaaucaacugagacucuua

SEQ ID NO: 71277 - RNA, 19 nt, Artificial Sequence
  Description of Artificial Sequence: Synthetic oligonucleotide
uuccuacguuucaggauca

SEQ ID NO: 71278 - RNA, 19 nt, Artificial Sequence
  Description of Artificial Sequence: Synthetic oligonucleotide
gaacggacggacagcuggg

SEQ ID NO: 71279 - RNA, 19 nt, Artificial Sequence
  Description of Artificial Sequence: Synthetic oligonucleotide
gaugccguccgugcagcgg

SEQ ID NO: 71280 - RNA, 19 nt, Artificial Sequence
  Description of Artificial Sequence: Synthetic oligonucleotide
acucuucguguuucaagga

SEQ ID NO: 71281 - RNA, 19 nt, Artificial Sequence
  Description of Artificial Sequence: Synthetic oligonucleotide
cccugugacauaaaacuac

SEQ ID NO: 71282 - RNA, 19 nt, Artificial Sequence
  Description of Artificial Sequence: Synthetic oligonucleotide
caaucaguaggcugagaga

SEQ ID NO: 71283 - RNA, 19 nt, Artificial Sequence
  Description of Artificial Sequence: Synthetic oligonucleotide
ccaaggugggguuuuauuc

SEQ ID NO: 71284 - RNA, 19 nt, Artificial Sequence
  Description of Artificial Sequence: Synthetic oligonucleotide
ucacccagacguccauuca

SEQ ID NO: 71285 - RNA, 19 nt, Artificial Sequence
  Description of Artificial Sequence: Synthetic oligonucleotide
gugccugaguaccagugac

SEQ ID NO: 71286 - RNA, 19 nt, Artificial Sequence
  Description of Artificial Sequence: Synthetic oligonucleotide
augcaaacgaggucagcau

SEQ ID NO: 71287 - RNA, 19 nt, Artificial Sequence
  Description of Artificial Sequence: Synthetic oligonucleotide
acgaggucagcauuuccaa

SEQ ID NO: 71288 - RNA, 19 nt, Artificial Sequence
  Description of Artificial Sequence: Synthetic oligonucleotide
cagaccacgggaccagccc

SEQ ID NO: 71289 - RNA, 19 nt, Artificial Sequence
  Description of Artificial Sequence: Synthetic oligonucleotide
ugcccggacgcauuaccgc

SEQ ID NO: 71290 - RNA, 19 nt, Artificial Sequence
  Description of Artificial Sequence: Synthetic oligonucleotide
agucaacugcacccuuaag

SEQ ID NO: 71291 - RNA, 19 nt, Artificial Sequence
  Description of Artificial Sequence: Synthetic oligonucleotide
cguccauucauucacucag

SEQ ID NO: 71292 - RNA, 19 nt, Artificial Sequence
  Description of Artificial Sequence: Synthetic oligonucleotide
uaugccgauuaugcguaug

SEQ ID NO: 71293 - RNA, 19 nt, Artificial Sequence
  Description of Artificial Sequence: Synthetic oligonucleotide
guccacguccaccgaaucc

SEQ ID NO: 71294 - RNA, 19 nt, Artificial Sequence
  Description of Artificial Sequence: Synthetic oligonucleotide
ccgaugauggcgcacgccg

SEQ ID NO: 71295 - RNA, 19 nt, Artificial Sequence
  Description of Artificial Sequence: Synthetic oligonucleotide
accguguucacgaacucgu

SEQ ID NO: 71296 - RNA, 19 nt, Artificial Sequence
  Description of Artificial Sequence: Synthetic oligonucleotide
gugaccaacuccgugcuca

SEQ ID NO: 71297 - RNA, 19 nt, Artificial Sequence
  Description of Artificial Sequence: Synthetic oligonucleotide
auuaugcguauggagggaa

SEQ ID NO: 71298 - RNA, 19 nt, Artificial Sequence
  Description of Artificial Sequence: Synthetic oligonucleotide
gauuaugcguauggaggga

SEQ ID NO: 71299 - RNA, 19 nt, Artificial Sequence
  Description of Artificial Sequence: Synthetic oligonucleotide
cugggcgcacuuaggcucg

SEQ ID NO: 71300 - RNA, 19 nt, Artificial Sequence
  Description of Artificial Sequence: Synthetic oligonucleotide
caccguguucacgaacucg

SEQ ID NO: 71301 - RNA, 19 nt, Artificial Sequence
  Description of Artificial Sequence: Synthetic oligonucleotide
ugauggcgcacgccggcug

SEQ ID NO: 71302 - RNA, 19 nt, Artificial Sequence
  Description of Artificial Sequence: Synthetic oligonucleotide
acacacacacacacacuuc

SEQ ID NO: 71303 - RNA, 19 nt, Artificial Sequence
  Description of Artificial Sequence: Synthetic oligonucleotide
ccauuguucaagcaggcca

SEQ ID NO: 71304 - RNA, 19 nt, Artificial Sequence
  Description of Artificial Sequence: Synthetic oligonucleotide
cucagguaacucacacgug

SEQ ID NO: 71305 - RNA, 19 nt, Artificial Sequence
  Description of Artificial Sequence: Synthetic oligonucleotide
agccugaugccuuggcggu

SEQ ID NO: 71306 - RNA, 19 nt, Artificial Sequence
  Description of Artificial Sequence: Synthetic oligonucleotide
ucguuuccaaucgcugccc

SEQ ID NO: 71307 - RNA, 19 nt, Artificial Sequence
  Description of Artificial Sequence: Synthetic oligonucleotide
caccacgugguuagaauga

SEQ ID NO: 71308 - RNA, 19 nt, Artificial Sequence
  Description of Artificial Sequence: Synthetic oligonucleotide
cacuuaggcucggaggcgc

SEQ ID NO: 71309 - RNA, 19 nt, Artificial Sequence
  Description of Artificial Sequence: Synthetic oligonucleotide
cauuuguggaaguugguuu

SEQ ID NO: 71310 - RNA, 19 nt, Artificial Sequence
  Description of Artificial Sequence: Synthetic oligonucleotide
acccggcgcaccugggccc

SEQ ID NO: 71311 - RNA, 19 nt, Artificial Sequence
  Description of Artificial Sequence: Synthetic oligonucleotide
cccagcauaacgaugugca

SEQ ID NO: 71312 - RNA, 19 nt, Artificial Sequence
  Description of Artificial Sequence: Synthetic oligonucleotide
cuuuguucgcgggcgcggg

SEQ ID NO: 71313 - RNA, 19 nt, Artificial Sequence
  Description of Artificial Sequence: Synthetic oligonucleotide
gcauaccucagguaacuca

SEQ ID NO: 71314 - RNA, 19 nt, Artificial Sequence
  Description of Artificial Sequence: Synthetic oligonucleotide
cuucagaccacgggaccag

SEQ ID NO: 71315 - RNA, 19 nt, Artificial Sequence
  Description of Artificial Sequence: Synthetic oligonucleotide
acugagacucuuaacuauu

SEQ ID NO: 71316 - RNA, 19 nt, Artificial Sequence
  Description of Artificial Sequence: Synthetic oligonucleotide
gaacacacacacacacaca

SEQ ID NO: 71317 - RNA, 19 nt, Artificial Sequence
  Description of Artificial Sequence: Synthetic oligonucleotide
cucuugucacaaaugaaau

SEQ ID NO: 71318 - RNA, 19 nt, Artificial Sequence
  Description of Artificial Sequence: Synthetic oligonucleotide
guaaugccccauugcugug

SEQ ID NO: 71319 - RNA, 19 nt, Artificial Sequence
  Description of Artificial Sequence: Synthetic oligonucleotide
ugccgauuaugcguaugga

SEQ ID NO: 71320 - RNA, 19 nt, Artificial Sequence
  Description of Artificial Sequence: Synthetic oligonucleotide
uuccaaucgcugcccggac

SEQ ID NO: 71321 - RNA, 19 nt, Artificial Sequence
  Description of Artificial Sequence: Synthetic oligonucleotide
agguaacucacacgugauu

SEQ ID NO: 71322 - RNA, 19 nt, Artificial Sequence
  Description of Artificial Sequence: Synthetic oligonucleotide
ugccuacccgcucccgcag

SEQ ID NO: 71323 - RNA, 19 nt, Artificial Sequence
  Description of Artificial Sequence: Synthetic oligonucleotide
acgaacucguugaacuuga

SEQ ID NO: 71324 - RNA, 19 nt, Artificial Sequence
  Description of Artificial Sequence: Synthetic oligonucleotide
uccacuccccgccgguuac

SEQ ID NO: 71325 - RNA, 19 nt, Artificial Sequence
  Description of Artificial Sequence: Synthetic oligonucleotide
uuuguucgcgggcgcgggu

SEQ ID NO: 71326 - RNA, 19 nt, Artificial Sequence
  Description of Artificial Sequence: Synthetic oligonucleotide
aacuccgugcucacucaca

SEQ ID NO: 71327 - RNA, 19 nt, Artificial Sequence
  Description of Artificial Sequence: Synthetic oligonucleotide
cacacacacacacacuucu

SEQ ID NO: 71328 - RNA, 19 nt, Artificial Sequence
  Description of Artificial Sequence: Synthetic oligonucleotide
acucagguauugagagcac

SEQ ID NO: 71329 - RNA, 19 nt, Artificial Sequence
  Description of Artificial Sequence: Synthetic oligonucleotide
ugaccaacuccgugcucac

SEQ ID NO: 71330 - RNA, 19 nt, Artificial Sequence
  Description of Artificial Sequence: Synthetic oligonucleotide
guucacgaacucguugaac

SEQ ID NO: 71331 - RNA, 19 nt, Artificial Sequence
  Description of Artificial Sequence: Synthetic oligonucleotide
ccaaucgcugcccggacgc

SEQ ID NO: 71332 - RNA, 19 nt, Artificial Sequence
  Description of Artificial Sequence: Synthetic oligonucleotide
ggaucugaacacugaccug

SEQ ID NO: 71333 - RNA, 19 nt, Artificial Sequence
  Description of Artificial Sequence: Synthetic oligonucleotide
caaacgaggucagcauuuc

SEQ ID NO: 71334 - RNA, 19 nt, Artificial Sequence
  Description of Artificial Sequence: Synthetic oligonucleotide
acccuaaaagauggauuca

SEQ ID NO: 71335 - RNA, 19 nt, Artificial Sequence
  Description of Artificial Sequence: Synthetic oligonucleotide
gaaaucaacugagacucuu

SEQ ID NO: 71336 - RNA, 19 nt, Artificial Sequence
  Description of Artificial Sequence: Synthetic oligonucleotide
ugugaccaacuccgugcuc

SEQ ID NO: 71337 - RNA, 19 nt, Artificial Sequence
  Description of Artificial Sequence: Synthetic oligonucleotide
gagggaacacacacacaca

SEQ ID NO: 71338 - RNA, 19 nt, Artificial Sequence
  Description of Artificial Sequence: Synthetic oligonucleotide
gcuuguuagcgaugaccag

SEQ ID NO: 71339 - RNA, 19 nt, Artificial Sequence
  Description of Artificial Sequence: Synthetic oligonucleotide
uugagagcacaggaagguu

SEQ ID NO: 71340 - RNA, 19 nt, Artificial Sequence
  Description of Artificial Sequence: Synthetic oligonucleotide
cuacccuaaaagauggauu

SEQ ID NO: 71341 - RNA, 19 nt, Artificial Sequence
  Description of Artificial Sequence: Synthetic oligonucleotide
gguccaguauuuaugccga

SEQ ID NO: 71342 - RNA, 19 nt, Artificial Sequence
  Description of Artificial Sequence: Synthetic oligonucleotide
gccaccggcagcgacuugg

SEQ ID NO: 71343 - RNA, 19 nt, Artificial Sequence
  Description of Artificial Sequence: Synthetic oligonucleotide
cacacacacacacacacuu

SEQ ID NO: 71344 - RNA, 19 nt, Artificial Sequence
  Description of Artificial Sequence: Synthetic oligonucleotide
agcggccguaguuucuccu

SEQ ID NO: 71345 - RNA, 19 nt, Artificial Sequence
  Description of Artificial Sequence: Synthetic oligonucleotide
uuaugccgauuaugcguau

SEQ ID NO: 71346 - RNA, 19 nt, Artificial Sequence
  Description of Artificial Sequence: Synthetic oligonucleotide
caacuccgugcucacucac

SEQ ID NO: 71347 - RNA, 19 nt, Artificial Sequence
  Description of Artificial Sequence: Synthetic oligonucleotide
cucggcguccccggaacgg

SEQ ID NO: 71348 - RNA, 19 nt, Artificial Sequence
  Description of Artificial Sequence: Synthetic oligonucleotide
auauugugaccaacuccgu

SEQ ID NO: 71349 - RNA, 19 nt, Artificial Sequence
  Description of Artificial Sequence: Synthetic oligonucleotide
ccauauuguggaacuacca

SEQ ID NO: 71350 - RNA, 19 nt, Artificial Sequence
  Description of Artificial Sequence: Synthetic oligonucleotide
acccucgcguccucacguc

SEQ ID NO: 71351 - RNA, 19 nt, Artificial Sequence
  Description of Artificial Sequence: Synthetic oligonucleotide
ugcauaccucagguaacuc

SEQ ID NO: 71352 - RNA, 19 nt, Artificial Sequence
  Description of Artificial Sequence: Synthetic oligonucleotide
ggcgcacuuaggcucggag

SEQ ID NO: 71353 - RNA, 19 nt, Artificial Sequence
  Description of Artificial Sequence: Synthetic oligonucleotide
cuuaggcucggaggcgccc

SEQ ID NO: 71354 - RNA, 19 nt, Artificial Sequence
  Description of Artificial Sequence: Synthetic oligonucleotide
agcgacuugggcagguccu

SEQ ID NO: 71355 - RNA, 19 nt, Artificial Sequence
  Description of Artificial Sequence: Synthetic oligonucleotide
ucgaagcaucgcuuugguu

SEQ ID NO: 71356 - RNA, 19 nt, Artificial Sequence
  Description of Artificial Sequence: Synthetic oligonucleotide
cacucauuguuguuugcgu

SEQ ID NO: 71357 - RNA, 19 nt, Artificial Sequence
  Description of Artificial Sequence: Synthetic oligonucleotide
uguucgcgggcgcggguuc

SEQ ID NO: 71358 - RNA, 19 nt, Artificial Sequence
  Description of Artificial Sequence: Synthetic oligonucleotide
ccucagguaacucacacgu

SEQ ID NO: 71359 - RNA, 19 nt, Artificial Sequence
  Description of Artificial Sequence: Synthetic oligonucleotide
acggacagacgccgcggug

SEQ ID NO: 71360 - RNA, 19 nt, Artificial Sequence
  Description of Artificial Sequence: Synthetic oligonucleotide
ccguugcucaguuuguauc

SEQ ID NO: 71361 - RNA, 19 nt, Artificial Sequence
  Description of Artificial Sequence: Synthetic oligonucleotide
acacacacacacacacaca

SEQ ID NO: 71362 - RNA, 19 nt, Artificial Sequence
  Description of Artificial Sequence: Synthetic oligonucleotide
acacacacacacacacacu

SEQ ID NO: 71363 - RNA, 19 nt, Artificial Sequence
  Description of Artificial Sequence: Synthetic oligonucleotide
gaaugcaaggagcggucau

SEQ ID NO: 71364 - RNA, 19 nt, Artificial Sequence
  Description of Artificial Sequence: Synthetic oligonucleotide
agccucguuuccaaucgcu

SEQ ID NO: 71365 - RNA, 19 nt, Artificial Sequence
  Description of Artificial Sequence: Synthetic oligonucleotide
gcguauggagggaacacac

SEQ ID NO: 71366 - RNA, 19 nt, Artificial Sequence
  Description of Artificial Sequence: Synthetic oligonucleotide
uccccggaacggacggaca

SEQ ID NO: 71367 - RNA, 19 nt, Artificial Sequence
  Description of Artificial Sequence: Synthetic oligonucleotide
cagucaacugcacccuuaa

SEQ ID NO: 71368 - RNA, 19 nt, Artificial Sequence
  Description of Artificial Sequence: Synthetic oligonucleotide
caguuuguaucuucucggu

SEQ ID NO: 71369 - RNA, 19 nt, Artificial Sequence
  Description of Artificial Sequence: Synthetic oligonucleotide
gcggcuguaggacuuccac

SEQ ID NO: 71370 - RNA, 19 nt, Artificial Sequence
  Description of Artificial Sequence: Synthetic oligonucleotide
uagcucuacugagugucua

SEQ ID NO: 71371 - RNA, 19 nt, Artificial Sequence
  Description of Artificial Sequence: Synthetic oligonucleotide
gauagggccuaggccaucu

SEQ ID NO: 71372 - RNA, 19 nt, Artificial Sequence
  Description of Artificial Sequence: Synthetic oligonucleotide
gugccuacccgcucccgca

SEQ ID NO: 71373 - RNA, 19 nt, Artificial Sequence
  Description of Artificial Sequence: Synthetic oligonucleotide
gugaagugccugaguacca

SEQ ID NO: 71374 - RNA, 19 nt, Artificial Sequence
  Description of Artificial Sequence: Synthetic oligonucleotide
gacccucgcguccucacgu

SEQ ID NO: 71375 - RNA, 19 nt, Artificial Sequence
  Description of Artificial Sequence: Synthetic oligonucleotide
ggacccucgcguccucacg

SEQ ID NO: 71376 - RNA, 19 nt, Artificial Sequence
  Description of Artificial Sequence: Synthetic oligonucleotide
ggaucauggacugcuauau

SEQ ID NO: 71377 - RNA, 19 nt, Artificial Sequence
  Description of Artificial Sequence: Synthetic oligonucleotide
uuccaaggugggguuuuau

SEQ ID NO: 71378 - RNA, 19 nt, Artificial Sequence
  Description of Artificial Sequence: Synthetic oligonucleotide
gcacccuuaaguauugaua

SEQ ID NO: 71379 - RNA, 19 nt, Artificial Sequence
  Description of Artificial Sequence: Synthetic oligonucleotide
ugccguugcucaguuugua

SEQ ID NO: 71380 - RNA, 19 nt, Artificial Sequence
  Description of Artificial Sequence: Synthetic oligonucleotide
cugcuuagcucuacugagu

SEQ ID NO: 71381 - RNA, 19 nt, Artificial Sequence
  Description of Artificial Sequence: Synthetic oligonucleotide
augauggcgcacgccggcu

SEQ ID NO: 71382 - RNA, 19 nt, Artificial Sequence
  Description of Artificial Sequence: Synthetic oligonucleotide
ggaugggcucauauuguga

SEQ ID NO: 71383 - RNA, 19 nt, Artificial Sequence
  Description of Artificial Sequence: Synthetic oligonucleotide
ugggcaccguguucacgaa

SEQ ID NO: 71384 - RNA, 19 nt, Artificial Sequence
  Description of Artificial Sequence: Synthetic oligonucleotide
acguccacuccccgccggu

SEQ ID NO: 71385 - RNA, 19 nt, Artificial Sequence
  Description of Artificial Sequence: Synthetic oligonucleotide
cacacacacacacuucuuu

SEQ ID NO: 71386 - RNA, 19 nt, Artificial Sequence
  Description of Artificial Sequence: Synthetic oligonucleotide
uuguucgcgggcgcggguu

SEQ ID NO: 71387 - RNA, 19 nt, Artificial Sequence
  Description of Artificial Sequence: Synthetic oligonucleotide
cagaggguccaguauuuau

SEQ ID NO: 71388 - RNA, 19 nt, Artificial Sequence
  Description of Artificial Sequence: Synthetic oligonucleotide
cccagacguccauucauuc

SEQ ID NO: 71389 - RNA, 19 nt, Artificial Sequence
  Description of Artificial Sequence: Synthetic oligonucleotide
cugagacucuuaacuauuu

SEQ ID NO: 71390 - RNA, 19 nt, Artificial Sequence
  Description of Artificial Sequence: Synthetic oligonucleotide
aagcaucgcuuugguucgu

SEQ ID NO: 71391 - RNA, 19 nt, Artificial Sequence
  Description of Artificial Sequence: Synthetic oligonucleotide
cuccuuugcacagcaacgu

SEQ ID NO: 71392 - RNA, 19 nt, Artificial Sequence
  Description of Artificial Sequence: Synthetic oligonucleotide
gccucguuuccaaucgcug

SEQ ID NO: 71393 - RNA, 19 nt, Artificial Sequence
  Description of Artificial Sequence: Synthetic oligonucleotide
uggauucagaggggagauu

SEQ ID NO: 71394 - RNA, 19 nt, Artificial Sequence
  Description of Artificial Sequence: Synthetic oligonucleotide
gggaacacacacacacaca

SEQ ID NO: 71395 - RNA, 19 nt, Artificial Sequence
  Description of Artificial Sequence: Synthetic oligonucleotide
ucgcugcccggacgcauua

SEQ ID NO: 71396 - RNA, 19 nt, Artificial Sequence
  Description of Artificial Sequence: Synthetic oligonucleotide
gacagacgccgcgguggag

SEQ ID NO: 71397 - RNA, 19 nt, Artificial Sequence
  Description of Artificial Sequence: Synthetic oligonucleotide
cacagcaacgugucgucau

SEQ ID NO: 71398 - RNA, 19 nt, Artificial Sequence
  Description of Artificial Sequence: Synthetic oligonucleotide
ggacugcuauauuuugacu

SEQ ID NO: 71399 - RNA, 19 nt, Artificial Sequence
  Description of Artificial Sequence: Synthetic oligonucleotide
acccagacguccauucauu

SEQ ID NO: 71400 - RNA, 19 nt, Artificial Sequence
  Description of Artificial Sequence: Synthetic oligonucleotide
acacacacacacacuucuu

SEQ ID NO: 71401 - RNA, 19 nt, Artificial Sequence
  Description of Artificial Sequence: Synthetic oligonucleotide
caguacaccccagugccua

SEQ ID NO: 71402 - RNA, 19 nt, Artificial Sequence
  Description of Artificial Sequence: Synthetic oligonucleotide
ccccggaacggacggacag

SEQ ID NO: 71403 - RNA, 19 nt, Artificial Sequence
  Description of Artificial Sequence: Synthetic oligonucleotide
cucgaagcaucgcuuuggu

SEQ ID NO: 71404 - RNA, 19 nt, Artificial Sequence
  Description of Artificial Sequence: Synthetic oligonucleotide
cagguaacucacacgugau

SEQ ID NO: 71405 - RNA, 19 nt, Artificial Sequence
  Description of Artificial Sequence: Synthetic oligonucleotide
ccuacguuucaggaucauc

SEQ ID NO: 71406 - RNA, 19 nt, Artificial Sequence
  Description of Artificial Sequence: Synthetic oligonucleotide
cucgccgaugauggcgcac

SEQ ID NO: 71407 - RNA, 19 nt, Artificial Sequence
  Description of Artificial Sequence: Synthetic oligonucleotide
ggacggacccaaaccacca

SEQ ID NO: 71408 - RNA, 19 nt, Artificial Sequence
  Description of Artificial Sequence: Synthetic oligonucleotide
ugggcgcacuuaggcucgg

SEQ ID NO: 71409 - RNA, 19 nt, Artificial Sequence
  Description of Artificial Sequence: Synthetic oligonucleotide
gguccacguccaccgaauc

SEQ ID NO: 71410 - RNA, 19 nt, Artificial Sequence
  Description of Artificial Sequence: Synthetic oligonucleotide
ggccgagauguuagaggag

SEQ ID NO: 71411 - RNA, 19 nt, Artificial Sequence
  Description of Artificial Sequence: Synthetic oligonucleotide
gcauuaggauacagagauc

SEQ ID NO: 71412 - RNA, 19 nt, Artificial Sequence
  Description of Artificial Sequence: Synthetic oligonucleotide
cacccagacguccauucau

SEQ ID NO: 71413 - RNA, 19 nt, Artificial Sequence
  Description of Artificial Sequence: Synthetic oligonucleotide
ucgcucacucagccucguu

SEQ ID NO: 71414 - RNA, 19 nt, Artificial Sequence
  Description of Artificial Sequence: Synthetic oligonucleotide
cugauagggccuaggccau

SEQ ID NO: 71415 - RNA, 19 nt, Artificial Sequence
  Description of Artificial Sequence: Synthetic oligonucleotide
ggacagacgccgcggugga

SEQ ID NO: 71416 - RNA, 19 nt, Artificial Sequence
  Description of Artificial Sequence: Synthetic oligonucleotide
ccuaaucaccacgugguua

SEQ ID NO: 71417 - RNA, 19 nt, Artificial Sequence
  Description of Artificial Sequence: Synthetic oligonucleotide
gggcaccguguucacgaac

SEQ ID NO: 71418 - RNA, 19 nt, Artificial Sequence
  Description of Artificial Sequence: Synthetic oligonucleotide
agcaucgcuuugguucguu

SEQ ID NO: 71419 - RNA, 19 nt, Artificial Sequence
  Description of Artificial Sequence: Synthetic oligonucleotide
gcaguccucuggacggacc

SEQ ID NO: 71420 - RNA, 19 nt, Artificial Sequence
  Description of Artificial Sequence: Synthetic oligonucleotide
gccgccacggacagacgcc

SEQ ID NO: 71421 - RNA, 19 nt, Artificial Sequence
  Description of Artificial Sequence: Synthetic oligonucleotide
cguugcucaguuuguaucu

SEQ ID NO: 71422 - RNA, 19 nt, Artificial Sequence
  Description of Artificial Sequence: Synthetic oligonucleotide
gccgaugauggcgcacgcc

SEQ ID NO: 71423 - RNA, 19 nt, Artificial Sequence
  Description of Artificial Sequence: Synthetic oligonucleotide
ccacagcggccguaguuuc

SEQ ID NO: 71424 - RNA, 19 nt, Artificial Sequence
  Description of Artificial Sequence: Synthetic oligonucleotide
ccgcgguggaggaugccug

SEQ ID NO: 71425 - RNA, 19 nt, Artificial Sequence
  Description of Artificial Sequence: Synthetic oligonucleotide
cgaacucguugaacuugag

SEQ ID NO: 71426 - RNA, 19 nt, Artificial Sequence
  Description of Artificial Sequence: Synthetic oligonucleotide
gcgacuugggcagguccug

SEQ ID NO: 71427 - RNA, 19 nt, Artificial Sequence
  Description of Artificial Sequence: Synthetic oligonucleotide
gcccugguucuccgcaaac

SEQ ID NO: 71428 - RNA, 19 nt, Artificial Sequence
  Description of Artificial Sequence: Synthetic oligonucleotide
aucgcugcccggacgcauu

SEQ ID NO: 71429 - RNA, 19 nt, Artificial Sequence
  Description of Artificial Sequence: Synthetic oligonucleotide
ccggacgcauuaccgcuuc

SEQ ID NO: 71430 - RNA, 19 nt, Artificial Sequence
  Description of Artificial Sequence: Synthetic oligonucleotide
cccggaacggacggacagc

SEQ ID NO: 71431 - RNA, 19 nt, Artificial Sequence
  Description of Artificial Sequence: Synthetic oligonucleotide
gggcucauauugugaccaa

SEQ ID NO: 71432 - RNA, 19 nt, Artificial Sequence
  Description of Artificial Sequence: Synthetic oligonucleotide
auggcgcacgccggcugga

SEQ ID NO: 71433 - RNA, 19 nt, Artificial Sequence
  Description of Artificial Sequence: Synthetic oligonucleotide
gcccggacgcauuaccgcu

SEQ ID NO: 71434 - RNA, 19 nt, Artificial Sequence
  Description of Artificial Sequence: Synthetic oligonucleotide
guccaguauuuaugccgau

SEQ ID NO: 71435 - RNA, 19 nt, Artificial Sequence
  Description of Artificial Sequence: Synthetic oligonucleotide
cguccaccgaauccaccac

SEQ ID NO: 71436 - RNA, 19 nt, Artificial Sequence
  Description of Artificial Sequence: Synthetic oligonucleotide
caccaccggacccucgcgu

SEQ ID NO: 71437 - RNA, 19 nt, Artificial Sequence
  Description of Artificial Sequence: Synthetic oligonucleotide
ggcugccgcauggucccag

SEQ ID NO: 71438 - RNA, 19 nt, Artificial Sequence
  Description of Artificial Sequence: Synthetic oligonucleotide
gccguugcucaguuuguau

SEQ ID NO: 71439 - RNA, 19 nt, Artificial Sequence
  Description of Artificial Sequence: Synthetic oligonucleotide
ggcgcacgccggcuggaca

SEQ ID NO: 71440 - RNA, 19 nt, Artificial Sequence
  Description of Artificial Sequence: Synthetic oligonucleotide
gacggacagcugggcgcac

SEQ ID NO: 71441 - RNA, 19 nt, Artificial Sequence
  Description of Artificial Sequence: Synthetic oligonucleotide
cacggacagacgccgcggu

SEQ ID NO: 71442 - RNA, 19 nt, Artificial Sequence
  Description of Artificial Sequence: Synthetic oligonucleotide
gaccaacuccgugcucacu

SEQ ID NO: 71443 - RNA, 19 nt, Artificial Sequence
  Description of Artificial Sequence: Synthetic oligonucleotide
gugccguugcucaguuugu

SEQ ID NO: 71444 - RNA, 19 nt, Artificial Sequence
  Description of Artificial Sequence: Synthetic oligonucleotide
gcugcgacccggcgcaccu

SEQ ID NO: 71445 - RNA, 19 nt, Artificial Sequence
  Description of Artificial Sequence: Synthetic oligonucleotide
ggcgcggguucucgcucac

SEQ ID NO: 71446 - RNA, 19 nt, Artificial Sequence
  Description of Artificial Sequence: Synthetic oligonucleotide
cugcgacccggcgcaccug

SEQ ID NO: 71447 - RNA, 19 nt, Artificial Sequence
  Description of Artificial Sequence: Synthetic oligonucleotide
ccgcgcugccgccacggac

SEQ ID NO: 71448 - RNA, 19 nt, Artificial Sequence
  Description of Artificial Sequence: Synthetic oligonucleotide
cgcauuaccgcuucuucuu

SEQ ID NO: 71449 - RNA, 19 nt, Artificial Sequence
  Description of Artificial Sequence: Synthetic oligonucleotide
cggacccaaaccaccaccu

SEQ ID NO: 71450 - RNA, 19 nt, Artificial Sequence
  Description of Artificial Sequence: Synthetic oligonucleotide
cggaacggacggacagcug

SEQ ID NO: 71451 - RNA, 19 nt, Artificial Sequence
  Description of Artificial Sequence: Synthetic oligonucleotide
ccgagauguuagaggagau

SEQ ID NO: 71452 - RNA, 19 nt, Artificial Sequence
  Description of Artificial Sequence: Synthetic oligonucleotide
cgccgaugauggcgcacgc

SEQ ID NO: 71453 - RNA, 19 nt, Artificial Sequence
  Description of Artificial Sequence: Synthetic oligonucleotide
guucgcgggcgcggguucu

SEQ ID NO: 71454 - RNA, 19 nt, Artificial Sequence
  Description of Artificial Sequence: Synthetic oligonucleotide
ccggaacggacggacagcu

SEQ ID NO: 71455 - RNA, 19 nt, Artificial Sequence
  Description of Artificial Sequence: Synthetic oligonucleotide
ccacuccccgccgguuacc

SEQ ID NO: 71456 - RNA, 19 nt, Artificial Sequence
  Description of Artificial Sequence: Synthetic oligonucleotide
ggcggugccguugcucagu

SEQ ID NO: 71457 - RNA, 19 nt, Artificial Sequence
  Description of Artificial Sequence: Synthetic oligonucleotide
caccggacccucgcguccu

SEQ ID NO: 71458 - RNA, 19 nt, Artificial Sequence
  Description of Artificial Sequence: Synthetic oligonucleotide
ccccgcgggcaucuuccuc

SEQ ID NO: 71459 - RNA, 19 nt, Artificial Sequence
  Description of Artificial Sequence: Synthetic oligonucleotide
ccaccgaauccaccacgua

SEQ ID NO: 71460 - RNA, 19 nt, Artificial Sequence
  Description of Artificial Sequence: Synthetic oligonucleotide
gcgcggguucucgcucacc

SEQ ID NO: 71461 - RNA, 19 nt, Artificial Sequence
  Description of Artificial Sequence: Synthetic oligonucleotide
gcgccccgcgggcaucuuc

SEQ ID NO: 71462 - RNA, 19 nt, Artificial Sequence
  Description of Artificial Sequence: Synthetic oligonucleotide
cgugcucacucacaaccau

SEQ ID NO: 71463 - RNA, 19 nt, Artificial Sequence
  Description of Artificial Sequence: Synthetic oligonucleotide
ggccaccggcagcgacuug

SEQ ID NO: 71464 - RNA, 19 nt, Artificial Sequence
  Description of Artificial Sequence: Synthetic oligonucleotide
ccucgccgaugauggcgca

SEQ ID NO: 71465 - RNA, 19 nt, Artificial Sequence
  Description of Artificial Sequence: Synthetic oligonucleotide
gggcgcacuuaggcucgga

SEQ ID NO: 71466 - RNA, 19 nt, Artificial Sequence
  Description of Artificial Sequence: Synthetic oligonucleotide
gcggugccguugcucaguu

SEQ ID NO: 71467 - RNA, 19 nt, Artificial Sequence
  Description of Artificial Sequence: Synthetic oligonucleotide
ccguguucacgaacucguu

SEQ ID NO: 71468 - RNA, 19 nt, Artificial Sequence
  Description of Artificial Sequence: Synthetic oligonucleotide
ccgcagggguauccccgga

SEQ ID NO: 71469 - RNA, 19 nt, Artificial Sequence
  Description of Artificial Sequence: Synthetic oligonucleotide
cgguccacguccaccgaau

SEQ ID NO: 71470 - RNA, 19 nt, Artificial Sequence
  Description of Artificial Sequence: Synthetic oligonucleotide
cgcugcccggacgcauuac

SEQ ID NO: 71471 - RNA, 19 nt, Artificial Sequence
  Description of Artificial Sequence: Synthetic oligonucleotide
cccggacgcauuaccgcuu

SEQ ID NO: 71472 - RNA, 19 nt, Artificial Sequence
  Description of Artificial Sequence: Synthetic oligonucleotide
ccggacccucgcguccuca

SEQ ID NO: 71473 - RNA, 19 nt, Artificial Sequence
  Description of Artificial Sequence: Synthetic oligonucleotide
gccccgcgggcaucuuccu

SEQ ID NO: 71474 - RNA, 19 nt, Artificial Sequence
  Description of Artificial Sequence: Synthetic oligonucleotide
cggacgcauuaccgcuucu

SEQ ID NO: 71475 - RNA, 19 nt, Artificial Sequence
  Description of Artificial Sequence: Synthetic oligonucleotide
ccgcugcgacccggcgcac

SEQ ID NO: 71476 - RNA, 19 nt, Artificial Sequence
  Description of Artificial Sequence: Synthetic oligonucleotide
cggugccguugcucaguuu

SEQ ID NO: 71477 - RNA, 19 nt, Artificial Sequence
  Description of Artificial Sequence: Synthetic oligonucleotide
aacuauauuacuuuguccc

SEQ ID NO: 71478 - RNA, 19 nt, Artificial Sequence
  Description of Artificial Sequence: Synthetic oligonucleotide
aaauaguacaugcacaucc

SEQ ID NO: 71479 - RNA, 19 nt, Artificial Sequence
  Description of Artificial Sequence: Synthetic oligonucleotide
aauauuagaaccucgagag

SEQ ID NO: 71480 - RNA, 19 nt, Artificial Sequence
  Description of Artificial Sequence: Synthetic oligonucleotide
ucuaagauuuccaagaccg

SEQ ID NO: 71481 - RNA, 19 nt, Artificial Sequence
  Description of Artificial Sequence: Synthetic oligonucleotide
aaucuauuguaucucaggc

SEQ ID NO: 71482 - RNA, 19 nt, Artificial Sequence
  Description of Artificial Sequence: Synthetic oligonucleotide
aagugauacgauuaaagcg

SEQ ID NO: 71483 - RNA, 19 nt, Artificial Sequence
  Description of Artificial Sequence: Synthetic oligonucleotide
aacugaauuguuugaagcc

SEQ ID NO: 71484 - RNA, 19 nt, Artificial Sequence
  Description of Artificial Sequence: Synthetic oligonucleotide
auaacuguacuauaccacc

SEQ ID NO: 71485 - RNA, 19 nt, Artificial Sequence
  Description of Artificial Sequence: Synthetic oligonucleotide
uccuacauaacuuccaugg

SEQ ID NO: 71486 - RNA, 19 nt, Artificial Sequence
  Description of Artificial Sequence: Synthetic oligonucleotide
ucuuggauaaguccaagcg

SEQ ID NO: 71487 - RNA, 19 nt, Artificial Sequence
  Description of Artificial Sequence: Synthetic oligonucleotide
ucuauuagcagaaacacau

SEQ ID NO: 71488 - RNA, 19 nt, Artificial Sequence
  Description of Artificial Sequence: Synthetic oligonucleotide
uuuauaguucaucagagaa

SEQ ID NO: 71489 - RNA, 19 nt, Artificial Sequence
  Description of Artificial Sequence: Synthetic oligonucleotide
gacgauuuaaacuggacag

SEQ ID NO: 71490 - RNA, 19 nt, Artificial Sequence
  Description of Artificial Sequence: Synthetic oligonucleotide
gaagguauguuuuagggug

SEQ ID NO: 71491 - RNA, 19 nt, Artificial Sequence
  Description of Artificial Sequence: Synthetic oligonucleotide
ucuauuguaucucaggcca

SEQ ID NO: 71492 - RNA, 19 nt, Artificial Sequence
  Description of Artificial Sequence: Synthetic oligonucleotide
aaauccagugaacaucuac

SEQ ID NO: 71493 - RNA, 19 nt, Artificial Sequence
  Description of Artificial Sequence: Synthetic oligonucleotide
uuaaaguuaccuacgguag

SEQ ID NO: 71494 - RNA, 19 nt, Artificial Sequence
  Description of Artificial Sequence: Synthetic oligonucleotide
uguaucucaggccaagacg

SEQ ID NO: 71495 - RNA, 19 nt, Artificial Sequence
  Description of Artificial Sequence: Synthetic oligonucleotide
ucauuguacaacgaaaggg

SEQ ID NO: 71496 - RNA, 19 nt, Artificial Sequence
  Description of Artificial Sequence: Synthetic oligonucleotide
uuuaaaguuaccuacggua

SEQ ID NO: 71497 - RNA, 19 nt, Artificial Sequence
  Description of Artificial Sequence: Synthetic oligonucleotide
agugauacgauuaaagcgg

SEQ ID NO: 71498 - RNA, 19 nt, Artificial Sequence
  Description of Artificial Sequence: Synthetic oligonucleotide
acaacgaaaggguaaaguc

SEQ ID NO: 71499 - RNA, 19 nt, Artificial Sequence
  Description of Artificial Sequence: Synthetic oligonucleotide
ucuuuaaaguuaccuacgg

SEQ ID NO: 71500 - RNA, 19 nt, Artificial Sequence
  Description of Artificial Sequence: Synthetic oligonucleotide
aaggugaguaagcagguuc

SEQ ID NO: 71501 - RNA, 19 nt, Artificial Sequence
  Description of Artificial Sequence: Synthetic oligonucleotide
uuauaaaucugccauaguu

SEQ ID NO: 71502 - RNA, 19 nt, Artificial Sequence
  Description of Artificial Sequence: Synthetic oligonucleotide
aaaucaagcauccgcagcu

SEQ ID NO: 71503 - RNA, 19 nt, Artificial Sequence
  Description of Artificial Sequence: Synthetic oligonucleotide
uacuauaccaccuacuaac

SEQ ID NO: 71504 - RNA, 19 nt, Artificial Sequence
  Description of Artificial Sequence: Synthetic oligonucleotide
ucgauuguguuccauauug

SEQ ID NO: 71505 - RNA, 19 nt, Artificial Sequence
  Description of Artificial Sequence: Synthetic oligonucleotide
gaagauauugugcuuagac

SEQ ID NO: 71506 - RNA, 19 nt, Artificial Sequence
  Description of Artificial Sequence: Synthetic oligonucleotide
uguuaugccguaaaucaag

SEQ ID NO: 71507 - RNA, 19 nt, Artificial Sequence
  Description of Artificial Sequence: Synthetic oligonucleotide
aaacauaugugacugcagu

SEQ ID NO: 71508 - RNA, 19 nt, Artificial Sequence
  Description of Artificial Sequence: Synthetic oligonucleotide
ugaugcaaauucuugaaca

SEQ ID NO: 71509 - RNA, 19 nt, Artificial Sequence
  Description of Artificial Sequence: Synthetic oligonucleotide
uuggauaaguccaagcgug

SEQ ID NO: 71510 - RNA, 19 nt, Artificial Sequence
  Description of Artificial Sequence: Synthetic oligonucleotide
uggauaaugaacgaaggcc

SEQ ID NO: 71511 - RNA, 19 nt, Artificial Sequence
  Description of Artificial Sequence: Synthetic oligonucleotide
aucuauuguaucucaggcc

SEQ ID NO: 71512 - RNA, 19 nt, Artificial Sequence
  Description of Artificial Sequence: Synthetic oligonucleotide
uuuagggugauaucuagga

SEQ ID NO: 71513 - RNA, 19 nt, Artificial Sequence
  Description of Artificial Sequence: Synthetic oligonucleotide
gauacgauuaaagcggagg

SEQ ID NO: 71514 - RNA, 19 nt, Artificial Sequence
  Description of Artificial Sequence: Synthetic oligonucleotide
auuacuuugucccuuaaau

SEQ ID NO: 71515 - RNA, 19 nt, Artificial Sequence
  Description of Artificial Sequence: Synthetic oligonucleotide
ugugucaaugcaaugcgcc

SEQ ID NO: 71516 - RNA, 19 nt, Artificial Sequence
  Description of Artificial Sequence: Synthetic oligonucleotide
auauaauaguuguucauca

SEQ ID NO: 71517 - RNA, 19 nt, Artificial Sequence
  Description of Artificial Sequence: Synthetic oligonucleotide
uuaaagcggagguacagag

SEQ ID NO: 71518 - RNA, 19 nt, Artificial Sequence
  Description of Artificial Sequence: Synthetic oligonucleotide
uaguuguucaucaugugga

SEQ ID NO: 71519 - RNA, 19 nt, Artificial Sequence
  Description of Artificial Sequence: Synthetic oligonucleotide
uaagaguacuauguaaggg

SEQ ID NO: 71520 - RNA, 19 nt, Artificial Sequence
  Description of Artificial Sequence: Synthetic oligonucleotide
uuuuagggugauaucuagg

SEQ ID NO: 71521 - RNA, 19 nt, Artificial Sequence
  Description of Artificial Sequence: Synthetic oligonucleotide
uuugugucagaccauggca

SEQ ID NO: 71522 - RNA, 19 nt, Artificial Sequence
  Description of Artificial Sequence: Synthetic oligonucleotide
agauuuaguagacagccca

SEQ ID NO: 71523 - RNA, 19 nt, Artificial Sequence
  Description of Artificial Sequence: Synthetic oligonucleotide
uuagaagauuguuugacaa

SEQ ID NO: 71524 - RNA, 19 nt, Artificial Sequence
  Description of Artificial Sequence: Synthetic oligonucleotide
uccucuauuagcagaaaca

SEQ ID NO: 71525 - RNA, 19 nt, Artificial Sequence
  Description of Artificial Sequence: Synthetic oligonucleotide
aaguuaucgagagagucag

SEQ ID NO: 71526 - RNA, 19 nt, Artificial Sequence
  Description of Artificial Sequence: Synthetic oligonucleotide
uuccuauuguaucugggag

SEQ ID NO: 71527 - RNA, 19 nt, Artificial Sequence
  Description of Artificial Sequence: Synthetic oligonucleotide
acgauuaaagcggagguac

SEQ ID NO: 71528 - RNA, 19 nt, Artificial Sequence
  Description of Artificial Sequence: Synthetic oligonucleotide
uaugccguaaaucaagcau

SEQ ID NO: 71529 - RNA, 19 nt, Artificial Sequence
  Description of Artificial Sequence: Synthetic oligonucleotide
cuaugauuccucuauuagc

SEQ ID NO: 71530 - RNA, 19 nt, Artificial Sequence
  Description of Artificial Sequence: Synthetic oligonucleotide
uaguagacagcccagcucu

SEQ ID NO: 71531 - RNA, 19 nt, Artificial Sequence
  Description of Artificial Sequence: Synthetic oligonucleotide
uguucaaguugauugugag

SEQ ID NO: 71532 - RNA, 19 nt, Artificial Sequence
  Description of Artificial Sequence: Synthetic oligonucleotide
ucuaauucucguaacuuuc

SEQ ID NO: 71533 - RNA, 19 nt, Artificial Sequence
  Description of Artificial Sequence: Synthetic oligonucleotide
gaugcacuugcucuguggg

SEQ ID NO: 71534 - RNA, 19 nt, Artificial Sequence
  Description of Artificial Sequence: Synthetic oligonucleotide
uguacuauaccaccuacua

SEQ ID NO: 71535 - RNA, 19 nt, Artificial Sequence
  Description of Artificial Sequence: Synthetic oligonucleotide
cucgagagaaacaagacca

SEQ ID NO: 71536 - RNA, 19 nt, Artificial Sequence
  Description of Artificial Sequence: Synthetic oligonucleotide
aucaccuccgcauugcuag

SEQ ID NO: 71537 - RNA, 19 nt, Artificial Sequence
  Description of Artificial Sequence: Synthetic oligonucleotide
aaaggguaaagucuuuaaa

SEQ ID NO: 71538 - RNA, 19 nt, Artificial Sequence
  Description of Artificial Sequence: Synthetic oligonucleotide
uagcauuguauauacauau

SEQ ID NO: 71539 - RNA, 19 nt, Artificial Sequence
  Description of Artificial Sequence: Synthetic oligonucleotide
uauaccaccuacuaacgaa

SEQ ID NO: 71540 - RNA, 19 nt, Artificial Sequence
  Description of Artificial Sequence: Synthetic oligonucleotide
aguuuguugcuguauaagu

SEQ ID NO: 71541 - RNA, 19 nt, Artificial Sequence
  Description of Artificial Sequence: Synthetic oligonucleotide
auauucagcuuacuuaaca

SEQ ID NO: 71542 - RNA, 19 nt, Artificial Sequence
  Description of Artificial Sequence: Synthetic oligonucleotide
acuguacuauaccaccuac

SEQ ID NO: 71543 - RNA, 19 nt, Artificial Sequence
  Description of Artificial Sequence: Synthetic oligonucleotide
uuuaguucagcagcaauac

SEQ ID NO: 71544 - RNA, 19 nt, Artificial Sequence
  Description of Artificial Sequence: Synthetic oligonucleotide
agacgauuuaaacuggaca

SEQ ID NO: 71545 - RNA, 19 nt, Artificial Sequence
  Description of Artificial Sequence: Synthetic oligonucleotide
auaauccagugauucacuc

SEQ ID NO: 71546 - RNA, 19 nt, Artificial Sequence
  Description of Artificial Sequence: Synthetic oligonucleotide
aguacuauguaaggggcac

SEQ ID NO: 71547 - RNA, 19 nt, Artificial Sequence
  Description of Artificial Sequence: Synthetic oligonucleotide
ucuauauagcauuguauau

SEQ ID NO: 71548 - RNA, 19 nt, Artificial Sequence
  Description of Artificial Sequence: Synthetic oligonucleotide
ucucguaacuuucuaagau

SEQ ID NO: 71549 - RNA, 19 nt, Artificial Sequence
  Description of Artificial Sequence: Synthetic oligonucleotide
agucuugaguuugagugcc

SEQ ID NO: 71550 - RNA, 19 nt, Artificial Sequence
  Description of Artificial Sequence: Synthetic oligonucleotide
gucagugagauuuaguaga

SEQ ID NO: 71551 - RNA, 19 nt, Artificial Sequence
  Description of Artificial Sequence: Synthetic oligonucleotide
uuauaguucaucagagaau

SEQ ID NO: 71552 - RNA, 19 nt, Artificial Sequence
  Description of Artificial Sequence: Synthetic oligonucleotide
uuuccuauuguaucuggga

SEQ ID NO: 71553 - RNA, 19 nt, Artificial Sequence
  Description of Artificial Sequence: Synthetic oligonucleotide
caauuucuagcuaagguca

SEQ ID NO: 71554 - RNA, 19 nt, Artificial Sequence
  Description of Artificial Sequence: Synthetic oligonucleotide
agguugguuaucugugugc

SEQ ID NO: 71555 - RNA, 19 nt, Artificial Sequence
  Description of Artificial Sequence: Synthetic oligonucleotide
ucccuuaaauuuaaugacu

SEQ ID NO: 71556 - RNA, 19 nt, Artificial Sequence
  Description of Artificial Sequence: Synthetic oligonucleotide
ugguuguuugucaagacua

SEQ ID NO: 71557 - RNA, 19 nt, Artificial Sequence
  Description of Artificial Sequence: Synthetic oligonucleotide
agaguagaaauguuauugu

SEQ ID NO: 71558 - RNA, 19 nt, Artificial Sequence
  Description of Artificial Sequence: Synthetic oligonucleotide
auuuaagcauucuaggguu

SEQ ID NO: 71559 - RNA, 19 nt, Artificial Sequence
  Description of Artificial Sequence: Synthetic oligonucleotide
aauccagugaacaucuaca

SEQ ID NO: 71560 - RNA, 19 nt, Artificial Sequence
  Description of Artificial Sequence: Synthetic oligonucleotide
auuuaguagacagcccagc

SEQ ID NO: 71561 - RNA, 19 nt, Artificial Sequence
  Description of Artificial Sequence: Synthetic oligonucleotide
ucucaguuuguuaugccgu

SEQ ID NO: 71562 - RNA, 19 nt, Artificial Sequence
  Description of Artificial Sequence: Synthetic oligonucleotide
auacgauuaaagcggaggu

SEQ ID NO: 71563 - RNA, 19 nt, Artificial Sequence
  Description of Artificial Sequence: Synthetic oligonucleotide
guuaucgagagagucaggc

SEQ ID NO: 71564 - RNA, 19 nt, Artificial Sequence
  Description of Artificial Sequence: Synthetic oligonucleotide
aagaccguggggaagcuuc

SEQ ID NO: 71565 - RNA, 19 nt, Artificial Sequence
  Description of Artificial Sequence: Synthetic oligonucleotide
aagacgauuuaaacuggac

SEQ ID NO: 71566 - RNA, 19 nt, Artificial Sequence
  Description of Artificial Sequence: Synthetic oligonucleotide
cuggauaaaagacucucug

SEQ ID NO: 71567 - RNA, 19 nt, Artificial Sequence
  Description of Artificial Sequence: Synthetic oligonucleotide
auguuuuagggugauaucu

SEQ ID NO: 71568 - RNA, 19 nt, Artificial Sequence
  Description of Artificial Sequence: Synthetic oligonucleotide
uccuaagagaaacaccuau

SEQ ID NO: 71569 - RNA, 19 nt, Artificial Sequence
  Description of Artificial Sequence: Synthetic oligonucleotide
guuuuagggugauaucuag

SEQ ID NO: 71570 - RNA, 19 nt, Artificial Sequence
  Description of Artificial Sequence: Synthetic oligonucleotide
ccaacaaaacuuuuggacc

SEQ ID NO: 71571 - RNA, 19 nt, Artificial Sequence
  Description of Artificial Sequence: Synthetic oligonucleotide
agaucuaauucucguaacu

SEQ ID NO: 71572 - RNA, 19 nt, Artificial Sequence
  Description of Artificial Sequence: Synthetic oligonucleotide
caauauuagaaccucgaga

SEQ ID NO: 71573 - RNA, 19 nt, Artificial Sequence
  Description of Artificial Sequence: Synthetic oligonucleotide
gucaggcaaaacuagugag

SEQ ID NO: 71574 - RNA, 19 nt, Artificial Sequence
  Description of Artificial Sequence: Synthetic oligonucleotide
ugcaaugcgccauuuuccc

SEQ ID NO: 71575 - RNA, 19 nt, Artificial Sequence
  Description of Artificial Sequence: Synthetic oligonucleotide
gauaaguccaagcgugcug

SEQ ID NO: 71576 - RNA, 19 nt, Artificial Sequence
  Description of Artificial Sequence: Synthetic oligonucleotide
gcuuacuuaacacuuuugc

SEQ ID NO: 71577 - RNA, 19 nt, Artificial Sequence
  Description of Artificial Sequence: Synthetic oligonucleotide
augcucaugauugacagcu

SEQ ID NO: 71578 - RNA, 19 nt, Artificial Sequence
  Description of Artificial Sequence: Synthetic oligonucleotide
ugccguaaaucaagcaucc

SEQ ID NO: 71579 - RNA, 19 nt, Artificial Sequence
  Description of Artificial Sequence: Synthetic oligonucleotide
gaggucuaguaguucauug

SEQ ID NO: 71580 - RNA, 19 nt, Artificial Sequence
  Description of Artificial Sequence: Synthetic oligonucleotide
uguacaaggcgagucaaga

SEQ ID NO: 71581 - RNA, 19 nt, Artificial Sequence
  Description of Artificial Sequence: Synthetic oligonucleotide
uuucccauaacuguacuau

SEQ ID NO: 71582 - RNA, 19 nt, Artificial Sequence
  Description of Artificial Sequence: Synthetic oligonucleotide
ucaaacccagucuugaguu

SEQ ID NO: 71583 - RNA, 19 nt, Artificial Sequence
  Description of Artificial Sequence: Synthetic oligonucleotide
uuguacaacgaaaggguaa

SEQ ID NO: 71584 - RNA, 19 nt, Artificial Sequence
  Description of Artificial Sequence: Synthetic oligonucleotide
uuguuugucaagacuaauu

SEQ ID NO: 71585 - RNA, 19 nt, Artificial Sequence
  Description of Artificial Sequence: Synthetic oligonucleotide
cagugauucacuccaacug

SEQ ID NO: 71586 - RNA, 19 nt, Artificial Sequence
  Description of Artificial Sequence: Synthetic oligonucleotide
gagucaagauauaaaacca

SEQ ID NO: 71587 - RNA, 19 nt, Artificial Sequence
  Description of Artificial Sequence: Synthetic oligonucleotide
acuauauuacuuugucccu

SEQ ID NO: 71588 - RNA, 19 nt, Artificial Sequence
  Description of Artificial Sequence: Synthetic oligonucleotide
ugguagaguagaaauguua

SEQ ID NO: 71589 - RNA, 19 nt, Artificial Sequence
  Description of Artificial Sequence: Synthetic oligonucleotide
uaaugaucuggguauugcu

SEQ ID NO: 71590 - RNA, 19 nt, Artificial Sequence
  Description of Artificial Sequence: Synthetic oligonucleotide
uccucuagaucuaauucuc

SEQ ID NO: 71591 - RNA, 19 nt, Artificial Sequence
  Description of Artificial Sequence: Synthetic oligonucleotide
aauaguacaugcacauccu

SEQ ID NO: 71592 - RNA, 19 nt, Artificial Sequence
  Description of Artificial Sequence: Synthetic oligonucleotide
guuugugucagaccauggc

SEQ ID NO: 71593 - RNA, 19 nt, Artificial Sequence
  Description of Artificial Sequence: Synthetic oligonucleotide
agucaggcaaaacuaguga

SEQ ID NO: 71594 - RNA, 19 nt, Artificial Sequence
  Description of Artificial Sequence: Synthetic oligonucleotide
uguggaagguauguuuuag

SEQ ID NO: 71595 - RNA, 19 nt, Artificial Sequence
  Description of Artificial Sequence: Synthetic oligonucleotide
gucuuuaaaguuaccuacg

SEQ ID NO: 71596 - RNA, 19 nt, Artificial Sequence
  Description of Artificial Sequence: Synthetic oligonucleotide
uauaauaguuguucaucau

SEQ ID NO: 71597 - RNA, 19 nt, Artificial Sequence
  Description of Artificial Sequence: Synthetic oligonucleotide
uuccucuauuagcagaaac

SEQ ID NO: 71598 - RNA, 19 nt, Artificial Sequence
  Description of Artificial Sequence: Synthetic oligonucleotide
ggauaaugaacgaaggccc

SEQ ID NO: 71599 - RNA, 19 nt, Artificial Sequence
  Description of Artificial Sequence: Synthetic oligonucleotide
uguuuuagggugauaucua

SEQ ID NO: 71600 - RNA, 19 nt, Artificial Sequence
  Description of Artificial Sequence: Synthetic oligonucleotide
uguacaacgaaaggguaaa

SEQ ID NO: 71601 - RNA, 19 nt, Artificial Sequence
  Description of Artificial Sequence: Synthetic oligonucleotide
aaccucgagagaaacaaga

SEQ ID NO: 71602 - RNA, 19 nt, Artificial Sequence
  Description of Artificial Sequence: Synthetic oligonucleotide
ucuagaucuaauucucgua

SEQ ID NO: 71603 - RNA, 19 nt, Artificial Sequence
  Description of Artificial Sequence: Synthetic oligonucleotide
aggggcacaaauuuacacu

SEQ ID NO: 71604 - RNA, 19 nt, Artificial Sequence
  Description of Artificial Sequence: Synthetic oligonucleotide
uaagagaaacaccuaucua

SEQ ID NO: 71605 - RNA, 19 nt, Artificial Sequence
  Description of Artificial Sequence: Synthetic oligonucleotide
aaacccagucuugaguuug

SEQ ID NO: 71606 - RNA, 19 nt, Artificial Sequence
  Description of Artificial Sequence: Synthetic oligonucleotide
accaaaauaagaguacuau

SEQ ID NO: 71607 - RNA, 19 nt, Artificial Sequence
  Description of Artificial Sequence: Synthetic oligonucleotide
cagccuauacaccacuggg

SEQ ID NO: 71608 - RNA, 19 nt, Artificial Sequence
  Description of Artificial Sequence: Synthetic oligonucleotide
aguguaccaauuuccucag

SEQ ID NO: 71609 - RNA, 19 nt, Artificial Sequence
  Description of Artificial Sequence: Synthetic oligonucleotide
uuaccuacgguaguuuaug

SEQ ID NO: 71610 - RNA, 19 nt, Artificial Sequence
  Description of Artificial Sequence: Synthetic oligonucleotide
uacaacgaaaggguaaagu

SEQ ID NO: 71611 - RNA, 19 nt, Artificial Sequence
  Description of Artificial Sequence: Synthetic oligonucleotide
agauguacaaggcgaguca

SEQ ID NO: 71612 - RNA, 19 nt, Artificial Sequence
  Description of Artificial Sequence: Synthetic oligonucleotide
uugacaauauuagaaccuc

SEQ ID NO: 71613 - RNA, 19 nt, Artificial Sequence
  Description of Artificial Sequence: Synthetic oligonucleotide
auucgauuguguuccauau

SEQ ID NO: 71614 - RNA, 19 nt, Artificial Sequence
  Description of Artificial Sequence: Synthetic oligonucleotide
acgauuuaaacuggacagg

SEQ ID NO: 71615 - RNA, 19 nt, Artificial Sequence
  Description of Artificial Sequence: Synthetic oligonucleotide
uacuaacgaaggaaacaug

SEQ ID NO: 71616 - RNA, 19 nt, Artificial Sequence
  Description of Artificial Sequence: Synthetic oligonucleotide
gaauuguuugaagccagug

SEQ ID NO: 71617 - RNA, 19 nt, Artificial Sequence
  Description of Artificial Sequence: Synthetic oligonucleotide
uaaugaacgaaggcccucc

SEQ ID NO: 71618 - RNA, 19 nt, Artificial Sequence
  Description of Artificial Sequence: Synthetic oligonucleotide
uauguuuuagggugauauc

SEQ ID NO: 71619 - RNA, 19 nt, Artificial Sequence
  Description of Artificial Sequence: Synthetic oligonucleotide
gauaaaagacucucuggua

SEQ ID NO: 71620 - RNA, 19 nt, Artificial Sequence
  Description of Artificial Sequence: Synthetic oligonucleotide
gauugugagcuacauccca

SEQ ID NO: 71621 - RNA, 19 nt, Artificial Sequence
  Description of Artificial Sequence: Synthetic oligonucleotide
cuagaucuaauucucguaa

SEQ ID NO: 71622 - RNA, 19 nt, Artificial Sequence
  Description of Artificial Sequence: Synthetic oligonucleotide
uuauaucuuuaccugccuu

SEQ ID NO: 71623 - RNA, 19 nt, Artificial Sequence
  Description of Artificial Sequence: Synthetic oligonucleotide
acuauaccaccuacuaacg

SEQ ID NO: 71624 - RNA, 19 nt, Artificial Sequence
  Description of Artificial Sequence: Synthetic oligonucleotide
uggauaaguccaagcgugc

SEQ ID NO: 71625 - RNA, 19 nt, Artificial Sequence
  Description of Artificial Sequence: Synthetic oligonucleotide
ggcauaucagauuauacaa

SEQ ID NO: 71626 - RNA, 19 nt, Artificial Sequence
  Description of Artificial Sequence: Synthetic oligonucleotide
uuguuaugccguaaaucaa

SEQ ID NO: 71627 - RNA, 19 nt, Artificial Sequence
  Description of Artificial Sequence: Synthetic oligonucleotide
uaaagcucugugaguugag

SEQ ID NO: 71628 - RNA, 19 nt, Artificial Sequence
  Description of Artificial Sequence: Synthetic oligonucleotide
guuuguuaugccguaaauc

SEQ ID NO: 71629 - RNA, 19 nt, Artificial Sequence
  Description of Artificial Sequence: Synthetic oligonucleotide
gaaaggguaaagucuuuaa

SEQ ID NO: 71630 - RNA, 19 nt, Artificial Sequence
  Description of Artificial Sequence: Synthetic oligonucleotide
uucuagcuaaggucaagcu

SEQ ID NO: 71631 - RNA, 19 nt, Artificial Sequence
  Description of Artificial Sequence: Synthetic oligonucleotide
ugauacgauuaaagcggag

SEQ ID NO: 71632 - RNA, 19 nt, Artificial Sequence
  Description of Artificial Sequence: Synthetic oligonucleotide
agcacauuuaagcauucua

SEQ ID NO: 71633 - RNA, 19 nt, Artificial Sequence
  Description of Artificial Sequence: Synthetic oligonucleotide
auaucagauuauacaacag

SEQ ID NO: 71634 - RNA, 19 nt, Artificial Sequence
  Description of Artificial Sequence: Synthetic oligonucleotide
cuagcuaaggucaagcuau

SEQ ID NO: 71635 - RNA, 19 nt, Artificial Sequence
  Description of Artificial Sequence: Synthetic oligonucleotide
uuagggugauaucuaggau

SEQ ID NO: 71636 - RNA, 19 nt, Artificial Sequence
  Description of Artificial Sequence: Synthetic oligonucleotide
uuuaccugccuuccauuuc

SEQ ID NO: 71637 - RNA, 19 nt, Artificial Sequence
  Description of Artificial Sequence: Synthetic oligonucleotide
auaaugaacgaaggcccuc

SEQ ID NO: 71638 - RNA, 19 nt, Artificial Sequence
  Description of Artificial Sequence: Synthetic oligonucleotide
gucaagauauaaaaccaca

SEQ ID NO: 71639 - RNA, 19 nt, Artificial Sequence
  Description of Artificial Sequence: Synthetic oligonucleotide
ugauucacuccaacuguaa

SEQ ID NO: 71640 - RNA, 19 nt, Artificial Sequence
  Description of Artificial Sequence: Synthetic oligonucleotide
augucuauauagcauugua

SEQ ID NO: 71641 - RNA, 19 nt, Artificial Sequence
  Description of Artificial Sequence: Synthetic oligonucleotide
auauuaauggcagucuauu

SEQ ID NO: 71642 - RNA, 19 nt, Artificial Sequence
  Description of Artificial Sequence: Synthetic oligonucleotide
gagagaguccagccuauac

SEQ ID NO: 71643 - RNA, 19 nt, Artificial Sequence
  Description of Artificial Sequence: Synthetic oligonucleotide
ucaauaaguaagugaccua

SEQ ID NO: 71644 - RNA, 19 nt, Artificial Sequence
  Description of Artificial Sequence: Synthetic oligonucleotide
uuagagagacauucaucuc

SEQ ID NO: 71645 - RNA, 19 nt, Artificial Sequence
  Description of Artificial Sequence: Synthetic oligonucleotide
acuguuaaauaaccuugaa

SEQ ID NO: 71646 - RNA, 19 nt, Artificial Sequence
  Description of Artificial Sequence: Synthetic oligonucleotide
auauuagaaccucgagaga

SEQ ID NO: 71647 - RNA, 19 nt, Artificial Sequence
  Description of Artificial Sequence: Synthetic oligonucleotide
ccaaaauaagaguacuaug

SEQ ID NO: 71648 - RNA, 19 nt, Artificial Sequence
  Description of Artificial Sequence: Synthetic oligonucleotide
cuuuauaguucaucagaga

SEQ ID NO: 71649 - RNA, 19 nt, Artificial Sequence
  Description of Artificial Sequence: Synthetic oligonucleotide
aguuuguuaugccguaaau

SEQ ID NO: 71650 - RNA, 19 nt, Artificial Sequence
  Description of Artificial Sequence: Synthetic oligonucleotide
uuuuguggaucugcaaccu

SEQ ID NO: 71651 - RNA, 19 nt, Artificial Sequence
  Description of Artificial Sequence: Synthetic oligonucleotide
auaccaccuacuaacgaag

SEQ ID NO: 71652 - RNA, 19 nt, Artificial Sequence
  Description of Artificial Sequence: Synthetic oligonucleotide
gauucgauuguguuccaua

SEQ ID NO: 71653 - RNA, 19 nt, Artificial Sequence
  Description of Artificial Sequence: Synthetic oligonucleotide
aaggcgagucaagauauaa

SEQ ID NO: 71654 - RNA, 19 nt, Artificial Sequence
  Description of Artificial Sequence: Synthetic oligonucleotide
gccuauacaccacugggag

SEQ ID NO: 71655 - RNA, 19 nt, Artificial Sequence
  Description of Artificial Sequence: Synthetic oligonucleotide
aaagcucugugaguugagu

SEQ ID NO: 71656 - RNA, 19 nt, Artificial Sequence
  Description of Artificial Sequence: Synthetic oligonucleotide
aggaagugacgucaacuga

SEQ ID NO: 71657 - RNA, 19 nt, Artificial Sequence
  Description of Artificial Sequence: Synthetic oligonucleotide
ugucaguuaugaacccaga

SEQ ID NO: 71658 - RNA, 19 nt, Artificial Sequence
  Description of Artificial Sequence: Synthetic oligonucleotide
accucgagagaaacaagac

SEQ ID NO: 71659 - RNA, 19 nt, Artificial Sequence
  Description of Artificial Sequence: Synthetic oligonucleotide
uaucuuuaccugccuucca

SEQ ID NO: 71660 - RNA, 19 nt, Artificial Sequence
  Description of Artificial Sequence: Synthetic oligonucleotide
uucuuacuugcuccuuaca

SEQ ID NO: 71661 - RNA, 19 nt, Artificial Sequence
  Description of Artificial Sequence: Synthetic oligonucleotide
augcacuugcucugugggg

SEQ ID NO: 71662 - RNA, 19 nt, Artificial Sequence
  Description of Artificial Sequence: Synthetic oligonucleotide
ccguaaaucaagcauccgc

SEQ ID NO: 71663 - RNA, 19 nt, Artificial Sequence
  Description of Artificial Sequence: Synthetic oligonucleotide
auccuacauaacuuccaug

SEQ ID NO: 71664 - RNA, 19 nt, Artificial Sequence
  Description of Artificial Sequence: Synthetic oligonucleotide
ggauaaaagacucucuggu

SEQ ID NO: 71665 - RNA, 19 nt, Artificial Sequence
  Description of Artificial Sequence: Synthetic oligonucleotide
uacuauguaaggggcacaa

SEQ ID NO: 71666 - RNA, 19 nt, Artificial Sequence
  Description of Artificial Sequence: Synthetic oligonucleotide
ucagggcuuaugcaauuau

SEQ ID NO: 71667 - RNA, 19 nt, Artificial Sequence
  Description of Artificial Sequence: Synthetic oligonucleotide
uggucaacugguuguuugu

SEQ ID NO: 71668 - RNA, 19 nt, Artificial Sequence
  Description of Artificial Sequence: Synthetic oligonucleotide
agggcuuaugcaauuauaa

SEQ ID NO: 71669 - RNA, 19 nt, Artificial Sequence
  Description of Artificial Sequence: Synthetic oligonucleotide
guugauugugagcuacauc

SEQ ID NO: 71670 - RNA, 19 nt, Artificial Sequence
  Description of Artificial Sequence: Synthetic oligonucleotide
auuucuagcuaaggucaag

SEQ ID NO: 71671 - RNA, 19 nt, Artificial Sequence
  Description of Artificial Sequence: Synthetic oligonucleotide
aagcgugcugaguucuccu

SEQ ID NO: 71672 - RNA, 19 nt, Artificial Sequence
  Description of Artificial Sequence: Synthetic oligonucleotide
ugacaaauguaaggggaaa

SEQ ID NO: 71673 - RNA, 19 nt, Artificial Sequence
  Description of Artificial Sequence: Synthetic oligonucleotide
ggugauaucuaggaugcac

SEQ ID NO: 71674 - RNA, 19 nt, Artificial Sequence
  Description of Artificial Sequence: Synthetic oligonucleotide
caacgaaaggguaaagucu

SEQ ID NO: 71675 - RNA, 19 nt, Artificial Sequence
  Description of Artificial Sequence: Synthetic oligonucleotide
ugggccuugcaucuuuaaa

SEQ ID NO: 71676 - RNA, 19 nt, Artificial Sequence
  Description of Artificial Sequence: Synthetic oligonucleotide
auauggggaaagugcauuu

SEQ ID NO: 71677 - RNA, 19 nt, Artificial Sequence
  Description of Artificial Sequence: Synthetic oligonucleotide
guaagugaccuagaccaac

SEQ ID NO: 71678 - RNA, 19 nt, Artificial Sequence
  Description of Artificial Sequence: Synthetic oligonucleotide
aagcauucuaggguuuuau

SEQ ID NO: 71679 - RNA, 19 nt, Artificial Sequence
  Description of Artificial Sequence: Synthetic oligonucleotide
acaaggcgagucaagauau

SEQ ID NO: 71680 - RNA, 19 nt, Artificial Sequence
  Description of Artificial Sequence: Synthetic oligonucleotide
agcgugcugaguucuccuc

SEQ ID NO: 71681 - RNA, 19 nt, Artificial Sequence
  Description of Artificial Sequence: Synthetic oligonucleotide
accaccuacuaacgaagga

SEQ ID NO: 71682 - RNA, 19 nt, Artificial Sequence
  Description of Artificial Sequence: Synthetic oligonucleotide
guaaagcucugugaguuga

SEQ ID NO: 71683 - RNA, 19 nt, Artificial Sequence
  Description of Artificial Sequence: Synthetic oligonucleotide
aauuucuagcuaaggucaa

SEQ ID NO: 71684 - RNA, 19 nt, Artificial Sequence
  Description of Artificial Sequence: Synthetic oligonucleotide
gacgucaacugauuguccu

SEQ ID NO: 71685 - RNA, 19 nt, Artificial Sequence
  Description of Artificial Sequence: Synthetic oligonucleotide
ggaaaggucucaauacccc

SEQ ID NO: 71686 - RNA, 19 nt, Artificial Sequence
  Description of Artificial Sequence: Synthetic oligonucleotide
uaccuacgguaguuuauga

SEQ ID NO: 71687 - RNA, 19 nt, Artificial Sequence
  Description of Artificial Sequence: Synthetic oligonucleotide
ggaauaaaugguggaaaac

SEQ ID NO: 71688 - RNA, 19 nt, Artificial Sequence
  Description of Artificial Sequence: Synthetic oligonucleotide
ggaugcacuugcucugugg

SEQ ID NO: 71689 - RNA, 19 nt, Artificial Sequence
  Description of Artificial Sequence: Synthetic oligonucleotide
ugcgccauuuucccauaac

SEQ ID NO: 71690 - RNA, 19 nt, Artificial Sequence
  Description of Artificial Sequence: Synthetic oligonucleotide
auaguacaugcacauccua

SEQ ID NO: 71691 - RNA, 19 nt, Artificial Sequence
  Description of Artificial Sequence: Synthetic oligonucleotide
accuacgguaguuuaugau

SEQ ID NO: 71692 - RNA, 19 nt, Artificial Sequence
  Description of Artificial Sequence: Synthetic oligonucleotide
uuugucccuuaaauuuaau

SEQ ID NO: 71693 - RNA, 19 nt, Artificial Sequence
  Description of Artificial Sequence: Synthetic oligonucleotide
cuuggauaaguccaagcgu

SEQ ID NO: 71694 - RNA, 19 nt, Artificial Sequence
  Description of Artificial Sequence: Synthetic oligonucleotide
uucgauuguguuccauauu

SEQ ID NO: 71695 - RNA, 19 nt, Artificial Sequence
  Description of Artificial Sequence: Synthetic oligonucleotide
uacgauuaaagcggaggua

SEQ ID NO: 71696 - RNA, 19 nt, Artificial Sequence
  Description of Artificial Sequence: Synthetic oligonucleotide
cccauaacuguacuauacc

SEQ ID NO: 71697 - RNA, 19 nt, Artificial Sequence
  Description of Artificial Sequence: Synthetic oligonucleotide
gcucaugauugacagcuug

SEQ ID NO: 71698 - RNA, 19 nt, Artificial Sequence
  Description of Artificial Sequence: Synthetic oligonucleotide
ccaagacgauuuaaacugg

SEQ ID NO: 71699 - RNA, 19 nt, Artificial Sequence
  Description of Artificial Sequence: Synthetic oligonucleotide
acauccuacauaacuucca

SEQ ID NO: 71700 - RNA, 19 nt, Artificial Sequence
  Description of Artificial Sequence: Synthetic oligonucleotide
gauguacaaggcgagucaa

SEQ ID NO: 71701 - RNA, 19 nt, Artificial Sequence
  Description of Artificial Sequence: Synthetic oligonucleotide
agcuaaggucaagcuauuc

SEQ ID NO: 71702 - RNA, 19 nt, Artificial Sequence
  Description of Artificial Sequence: Synthetic oligonucleotide
ccuaagagaaacaccuauc

SEQ ID NO: 71703 - RNA, 19 nt, Artificial Sequence
  Description of Artificial Sequence: Synthetic oligonucleotide
uccaagcgugcugaguucu

SEQ ID NO: 71704 - RNA, 19 nt, Artificial Sequence
  Description of Artificial Sequence: Synthetic oligonucleotide
aagcggagguacagagugg

SEQ ID NO: 71705 - RNA, 19 nt, Artificial Sequence
  Description of Artificial Sequence: Synthetic oligonucleotide
cuauaccaccuacuaacga

SEQ ID NO: 71706 - RNA, 19 nt, Artificial Sequence
  Description of Artificial Sequence: Synthetic oligonucleotide
agcauucuaggguuuuaua

SEQ ID NO: 71707 - RNA, 19 nt, Artificial Sequence
  Description of Artificial Sequence: Synthetic oligonucleotide
gugugggaccagcaguuug

SEQ ID NO: 71708 - RNA, 19 nt, Artificial Sequence
  Description of Artificial Sequence: Synthetic oligonucleotide
cuccucuagaucuaauucu

SEQ ID NO: 71709 - RNA, 19 nt, Artificial Sequence
  Description of Artificial Sequence: Synthetic oligonucleotide
caccuacuaacgaaggaaa

SEQ ID NO: 71710 - RNA, 19 nt, Artificial Sequence
  Description of Artificial Sequence: Synthetic oligonucleotide
acuggcauaucagauuaua

SEQ ID NO: 71711 - RNA, 19 nt, Artificial Sequence
  Description of Artificial Sequence: Synthetic oligonucleotide
cuacgguaguuuaugauau

SEQ ID NO: 71712 - RNA, 19 nt, Artificial Sequence
  Description of Artificial Sequence: Synthetic oligonucleotide
guucucacggaugcugagc

SEQ ID NO: 71713 - RNA, 19 nt, Artificial Sequence
  Description of Artificial Sequence: Synthetic oligonucleotide
agcggagguacagaguggu

SEQ ID NO: 71714 - RNA, 19 nt, Artificial Sequence
  Description of Artificial Sequence: Synthetic oligonucleotide
uauggggaaagugcauuua

SEQ ID NO: 71715 - RNA, 19 nt, Artificial Sequence
  Description of Artificial Sequence: Synthetic oligonucleotide
agcgcauggauggaccucu

SEQ ID NO: 71716 - RNA, 19 nt, Artificial Sequence
  Description of Artificial Sequence: Synthetic oligonucleotide
gauaaugaacgaaggcccu

SEQ ID NO: 71717 - RNA, 19 nt, Artificial Sequence
  Description of Artificial Sequence: Synthetic oligonucleotide
aaugcgccauuuucccaua

SEQ ID NO: 71718 - RNA, 19 nt, Artificial Sequence
  Description of Artificial Sequence: Synthetic oligonucleotide
auaugggccuugcaucuuu

SEQ ID NO: 71719 - RNA, 19 nt, Artificial Sequence
  Description of Artificial Sequence: Synthetic oligonucleotide
cuuuaaaguuaccuacggu

SEQ ID NO: 71720 - RNA, 19 nt, Artificial Sequence
  Description of Artificial Sequence: Synthetic oligonucleotide
aaguuaccuacgguaguuu

SEQ ID NO: 71721 - RNA, 19 nt, Artificial Sequence
  Description of Artificial Sequence: Synthetic oligonucleotide
uccgcauugcuagacuuuu

SEQ ID NO: 71722 - RNA, 19 nt, Artificial Sequence
  Description of Artificial Sequence: Synthetic oligonucleotide
agccuauacaccacuggga

SEQ ID NO: 71723 - RNA, 19 nt, Artificial Sequence
  Description of Artificial Sequence: Synthetic oligonucleotide
gcacauccuacauaacuuc

SEQ ID NO: 71724 - RNA, 19 nt, Artificial Sequence
  Description of Artificial Sequence: Synthetic oligonucleotide
cuacuaacgaaggaaacau

SEQ ID NO: 71725 - RNA, 19 nt, Artificial Sequence
  Description of Artificial Sequence: Synthetic oligonucleotide
guacaacgaaaggguaaag

SEQ ID NO: 71726 - RNA, 19 nt, Artificial Sequence
  Description of Artificial Sequence: Synthetic oligonucleotide
aaucaagcauccgcagcuu

SEQ ID NO: 71727 - RNA, 19 nt, Artificial Sequence
  Description of Artificial Sequence: Synthetic oligonucleotide
aguuaucgagagagucagg

SEQ ID NO: 71728 - RNA, 19 nt, Artificial Sequence
  Description of Artificial Sequence: Synthetic oligonucleotide
uugauucgauuguguucca

SEQ ID NO: 71729 - RNA, 19 nt, Artificial Sequence
  Description of Artificial Sequence: Synthetic oligonucleotide
uacgguaguuuaugauaua

SEQ ID NO: 71730 - RNA, 19 nt, Artificial Sequence
  Description of Artificial Sequence: Synthetic oligonucleotide
gguugguuaucugugugca

SEQ ID NO: 71731 - RNA, 19 nt, Artificial Sequence
  Description of Artificial Sequence: Synthetic oligonucleotide
ggccaagacgauuuaaacu

SEQ ID NO: 71732 - RNA, 19 nt, Artificial Sequence
  Description of Artificial Sequence: Synthetic oligonucleotide
gugauacgauuaaagcgga

SEQ ID NO: 71733 - RNA, 19 nt, Artificial Sequence
  Description of Artificial Sequence: Synthetic oligonucleotide
cacgauaugggccuugcau

SEQ ID NO: 71734 - RNA, 19 nt, Artificial Sequence
  Description of Artificial Sequence: Synthetic oligonucleotide
ccuacgguaguuuaugaua

SEQ ID NO: 71735 - RNA, 19 nt, Artificial Sequence
  Description of Artificial Sequence: Synthetic oligonucleotide
acgucaacugauuguccuu

SEQ ID NO: 71736 - RNA, 19 nt, Artificial Sequence
  Description of Artificial Sequence: Synthetic oligonucleotide
caguuuguuaugccguaaa

SEQ ID NO: 71737 - RNA, 19 nt, Artificial Sequence
  Description of Artificial Sequence: Synthetic oligonucleotide
ugauucgauuguguuccau

SEQ ID NO: 71738 - RNA, 19 nt, Artificial Sequence
  Description of Artificial Sequence: Synthetic oligonucleotide
uggaccuccacuggauaua

SEQ ID NO: 71739 - RNA, 19 nt, Artificial Sequence
  Description of Artificial Sequence: Synthetic oligonucleotide
ccuacuaacgaaggaaaca

SEQ ID NO: 71740 - RNA, 19 nt, Artificial Sequence
  Description of Artificial Sequence: Synthetic oligonucleotide
cauaauuuguuggaagauu

SEQ ID NO: 71741 - RNA, 19 nt, Artificial Sequence
  Description of Artificial Sequence: Synthetic oligonucleotide
ucaccuccgcauugcuaga

SEQ ID NO: 71742 - RNA, 19 nt, Artificial Sequence
  Description of Artificial Sequence: Synthetic oligonucleotide
ggugaccgaugccucuggg

SEQ ID NO: 71743 - RNA, 19 nt, Artificial Sequence
  Description of Artificial Sequence: Synthetic oligonucleotide
uagcuaaggucaagcuauu

SEQ ID NO: 71744 - RNA, 19 nt, Artificial Sequence
  Description of Artificial Sequence: Synthetic oligonucleotide
caaugcgccauuuucccau

SEQ ID NO: 71745 - RNA, 19 nt, Artificial Sequence
  Description of Artificial Sequence: Synthetic oligonucleotide
ggcuaugauuccucuauua

SEQ ID NO: 71746 - RNA, 19 nt, Artificial Sequence
  Description of Artificial Sequence: Synthetic oligonucleotide
ccaaugugucaaugcaaug

SEQ ID NO: 71747 - RNA, 19 nt, Artificial Sequence
  Description of Artificial Sequence: Synthetic oligonucleotide
cuguacuauaccaccuacu

SEQ ID NO: 71748 - RNA, 19 nt, Artificial Sequence
  Description of Artificial Sequence: Synthetic oligonucleotide
cagggcuuaugcaauuaua

SEQ ID NO: 71749 - RNA, 19 nt, Artificial Sequence
  Description of Artificial Sequence: Synthetic oligonucleotide
aucgagagagucaggcaaa

SEQ ID NO: 71750 - RNA, 19 nt, Artificial Sequence
  Description of Artificial Sequence: Synthetic oligonucleotide
aacuggcauaucagauuau

SEQ ID NO: 71751 - RNA, 19 nt, Artificial Sequence
  Description of Artificial Sequence: Synthetic oligonucleotide
acuauguaaggggcacaaa

SEQ ID NO: 71752 - RNA, 19 nt, Artificial Sequence
  Description of Artificial Sequence: Synthetic oligonucleotide
gcaguuuguugcuguauaa

SEQ ID NO: 71753 - RNA, 19 nt, Artificial Sequence
  Description of Artificial Sequence: Synthetic oligonucleotide
guccaagcgugcugaguuc

SEQ ID NO: 71754 - RNA, 19 nt, Artificial Sequence
  Description of Artificial Sequence: Synthetic oligonucleotide
gugauucacuccaacugua

SEQ ID NO: 71755 - RNA, 19 nt, Artificial Sequence
  Description of Artificial Sequence: Synthetic oligonucleotide
agguauguuuuagggugau

SEQ ID NO: 71756 - RNA, 19 nt, Artificial Sequence
  Description of Artificial Sequence: Synthetic oligonucleotide
uugcucugugggguggggu

SEQ ID NO: 71757 - RNA, 19 nt, Artificial Sequence
  Description of Artificial Sequence: Synthetic oligonucleotide
cauccuacauaacuuccau

SEQ ID NO: 71758 - RNA, 19 nt, Artificial Sequence
  Description of Artificial Sequence: Synthetic oligonucleotide
cuuuaccugccuuccauuu

SEQ ID NO: 71759 - RNA, 19 nt, Artificial Sequence
  Description of Artificial Sequence: Synthetic oligonucleotide
gaacccagauuugcuccuc

SEQ ID NO: 71760 - RNA, 19 nt, Artificial Sequence
  Description of Artificial Sequence: Synthetic oligonucleotide
ugagagaguccagccuaua

SEQ ID NO: 71761 - RNA, 19 nt, Artificial Sequence
  Description of Artificial Sequence: Synthetic oligonucleotide
ccauauugagggaauaaau

SEQ ID NO: 71762 - RNA, 19 nt, Artificial Sequence
  Description of Artificial Sequence: Synthetic oligonucleotide
guuaccuacgguaguuuau

SEQ ID NO: 71763 - RNA, 19 nt, Artificial Sequence
  Description of Artificial Sequence: Synthetic oligonucleotide
gguuguuugucaagacuaa

SEQ ID NO: 71764 - RNA, 19 nt, Artificial Sequence
  Description of Artificial Sequence: Synthetic oligonucleotide
ggcagcgcauggauggacc

SEQ ID NO: 71765 - RNA, 19 nt, Artificial Sequence
  Description of Artificial Sequence: Synthetic oligonucleotide
cguaacuuucuaagauuuc

SEQ ID NO: 71766 - RNA, 19 nt, Artificial Sequence
  Description of Artificial Sequence: Synthetic oligonucleotide
gccguaaaucaagcauccg

SEQ ID NO: 71767 - RNA, 19 nt, Artificial Sequence
  Description of Artificial Sequence: Synthetic oligonucleotide
ugugugggaccagcaguuu

SEQ ID NO: 71768 - RNA, 19 nt, Artificial Sequence
  Description of Artificial Sequence: Synthetic oligonucleotide
gaagugacgucaacugauu

SEQ ID NO: 71769 - RNA, 19 nt, Artificial Sequence
  Description of Artificial Sequence: Synthetic oligonucleotide
cugggaggucuaguaguuc

SEQ ID NO: 71770 - RNA, 19 nt, Artificial Sequence
  Description of Artificial Sequence: Synthetic oligonucleotide
caccuccgcauugcuagac

SEQ ID NO: 71771 - RNA, 19 nt, Artificial Sequence
  Description of Artificial Sequence: Synthetic oligonucleotide
gcaaugcgccauuuuccca

SEQ ID NO: 71772 - RNA, 19 nt, Artificial Sequence
  Description of Artificial Sequence: Synthetic oligonucleotide
ggcacgauaugggccuugc

SEQ ID NO: 71773 - RNA, 19 nt, Artificial Sequence
  Description of Artificial Sequence: Synthetic oligonucleotide
gagcugauuuguagcuaaa

SEQ ID NO: 71774 - RNA, 19 nt, Artificial Sequence
  Description of Artificial Sequence: Synthetic oligonucleotide
agaccguggggaagcuucu

SEQ ID NO: 71775 - RNA, 19 nt, Artificial Sequence
  Description of Artificial Sequence: Synthetic oligonucleotide
gaccuccacuggauauaac

SEQ ID NO: 71776 - RNA, 19 nt, Artificial Sequence
  Description of Artificial Sequence: Synthetic oligonucleotide
cugguagaguagaaauguu

SEQ ID NO: 71777 - RNA, 19 nt, Artificial Sequence
  Description of Artificial Sequence: Synthetic oligonucleotide
acgaaaggguaaagucuuu

SEQ ID NO: 71778 - RNA, 19 nt, Artificial Sequence
  Description of Artificial Sequence: Synthetic oligonucleotide
ggauaaguccaagcgugcu

SEQ ID NO: 71779 - RNA, 19 nt, Artificial Sequence
  Description of Artificial Sequence: Synthetic oligonucleotide
caaggcgagucaagauaua

SEQ ID NO: 71780 - RNA, 19 nt, Artificial Sequence
  Description of Artificial Sequence: Synthetic oligonucleotide
cagcgcauggauggaccuc

SEQ ID NO: 71781 - RNA, 19 nt, Artificial Sequence
  Description of Artificial Sequence: Synthetic oligonucleotide
gaaggugaguaagcagguu

SEQ ID NO: 71782 - RNA, 19 nt, Artificial Sequence
  Description of Artificial Sequence: Synthetic oligonucleotide
cucaggccaagacgauuua

SEQ ID NO: 71783 - RNA, 19 nt, Artificial Sequence
  Description of Artificial Sequence: Synthetic oligonucleotide
cgauuaaagcggagguaca

SEQ ID NO: 71784 - RNA, 19 nt, Artificial Sequence
  Description of Artificial Sequence: Synthetic oligonucleotide
cgauuuaaacuggacaggu

SEQ ID NO: 71785 - RNA, 19 nt, Artificial Sequence
  Description of Artificial Sequence: Synthetic oligonucleotide
gauaugggccuugcaucuu

SEQ ID NO: 71786 - RNA, 19 nt, Artificial Sequence
  Description of Artificial Sequence: Synthetic oligonucleotide
ccaagcgugcugaguucuc

SEQ ID NO: 71787 - RNA, 19 nt, Artificial Sequence
  Description of Artificial Sequence: Synthetic oligonucleotide
cuccgcauugcuagacuuu

SEQ ID NO: 71788 - RNA, 19 nt, Artificial Sequence
  Description of Artificial Sequence: Synthetic oligonucleotide
cgauaugggccuugcaucu

SEQ ID NO: 71789 - RNA, 19 nt, Artificial Sequence
  Description of Artificial Sequence: Synthetic oligonucleotide
gugagagaguccagccuau

SEQ ID NO: 71790 - RNA, 19 nt, Artificial Sequence
  Description of Artificial Sequence: Synthetic oligonucleotide
cgaaaggguaaagucuuua

SEQ ID NO: 71791 - RNA, 19 nt, Artificial Sequence
  Description of Artificial Sequence: Synthetic oligonucleotide
gggugauaucuaggaugca

SEQ ID NO: 71792 - RNA, 19 nt, Artificial Sequence
  Description of Artificial Sequence: Synthetic oligonucleotide
ggaggucuaguaguucauu

SEQ ID NO: 71793 - RNA, 19 nt, Artificial Sequence
  Description of Artificial Sequence: Synthetic oligonucleotide
gggaggucuaguaguucau

SEQ ID NO: 71794 - RNA, 19 nt, Artificial Sequence
  Description of Artificial Sequence: Synthetic oligonucleotide
caagaccguggggaagcuu

SEQ ID NO: 71795 - RNA, 19 nt, Artificial Sequence
  Description of Artificial Sequence: Synthetic oligonucleotide
gcgcauggauggaccucuu

SEQ ID NO: 71796 - RNA, 19 nt, Artificial Sequence
  Description of Artificial Sequence: Synthetic oligonucleotide
aaugauaacacacagaggc

SEQ ID NO: 71797 - RNA, 19 nt, Artificial Sequence
  Description of Artificial Sequence: Synthetic oligonucleotide
uuuauugucacucugggca

SEQ ID NO: 71798 - RNA, 19 nt, Artificial Sequence
  Description of Artificial Sequence: Synthetic oligonucleotide
uuaucuauuaugcucagcc

SEQ ID NO: 71799 - RNA, 19 nt, Artificial Sequence
  Description of Artificial Sequence: Synthetic oligonucleotide
aauccaaaacucuacaaug

SEQ ID NO: 71800 - RNA, 19 nt, Artificial Sequence
  Description of Artificial Sequence: Synthetic oligonucleotide
aacuuguuuaacuggcugc

SEQ ID NO: 71801 - RNA, 19 nt, Artificial Sequence
  Description of Artificial Sequence: Synthetic oligonucleotide
aaauaaugccacucuggcc

SEQ ID NO: 71802 - RNA, 19 nt, Artificial Sequence
  Description of Artificial Sequence: Synthetic oligonucleotide
uuaguuacucaacaaaaca

SEQ ID NO: 71803 - RNA, 19 nt, Artificial Sequence
  Description of Artificial Sequence: Synthetic oligonucleotide
aguaccuauccauagguac

SEQ ID NO: 71804 - RNA, 19 nt, Artificial Sequence
  Description of Artificial Sequence: Synthetic oligonucleotide
uacaguuuaauggagauga

SEQ ID NO: 71805 - RNA, 19 nt, Artificial Sequence
  Description of Artificial Sequence: Synthetic oligonucleotide
auagaaagaggccagccgg

SEQ ID NO: 71806 - RNA, 19 nt, Artificial Sequence
  Description of Artificial Sequence: Synthetic oligonucleotide
uguuggaauacuuggacag

SEQ ID NO: 71807 - RNA, 19 nt, Artificial Sequence
  Description of Artificial Sequence: Synthetic oligonucleotide
ugaaacuuguuuaacuggc

SEQ ID NO: 71808 - RNA, 19 nt, Artificial Sequence
  Description of Artificial Sequence: Synthetic oligonucleotide
ugauaugacuaccaacccg

SEQ ID NO: 71809 - RNA, 19 nt, Artificial Sequence
  Description of Artificial Sequence: Synthetic oligonucleotide
gacaggacgaaccugacgc

SEQ ID NO: 71810 - RNA, 19 nt, Artificial Sequence
  Description of Artificial Sequence: Synthetic oligonucleotide
ugauuuaucuauuaugcuc

SEQ ID NO: 71811 - RNA, 19 nt, Artificial Sequence
  Description of Artificial Sequence: Synthetic oligonucleotide
auauccuuacuaaagaaac

SEQ ID NO: 71812 - RNA, 19 nt, Artificial Sequence
  Description of Artificial Sequence: Synthetic oligonucleotide
aaugcagagucauuuccuc

SEQ ID NO: 71813 - RNA, 19 nt, Artificial Sequence
  Description of Artificial Sequence: Synthetic oligonucleotide
aaacgccuguuauaaagac

SEQ ID NO: 71814 - RNA, 19 nt, Artificial Sequence
  Description of Artificial Sequence: Synthetic oligonucleotide
agauaugcaggauauccac

SEQ ID NO: 71815 - RNA, 19 nt, Artificial Sequence
  Description of Artificial Sequence: Synthetic oligonucleotide
aaucgaauaaucucuccca

SEQ ID NO: 71816 - RNA, 19 nt, Artificial Sequence
  Description of Artificial Sequence: Synthetic oligonucleotide
uuccaguguaaauagaggc

SEQ ID NO: 71817 - RNA, 19 nt, Artificial Sequence
  Description of Artificial Sequence: Synthetic oligonucleotide
auaugcuuuaacaagauga

SEQ ID NO: 71818 - RNA, 19 nt, Artificial Sequence
  Description of Artificial Sequence: Synthetic oligonucleotide
uugguaauugaguauauaa

SEQ ID NO: 71819 - RNA, 19 nt, Artificial Sequence
  Description of Artificial Sequence: Synthetic oligonucleotide
ccuguuuacaguuuaaugg

SEQ ID NO: 71820 - RNA, 19 nt, Artificial Sequence
  Description of Artificial Sequence: Synthetic oligonucleotide
aaacuuguuuaacuggcug

SEQ ID NO: 71821 - RNA, 19 nt, Artificial Sequence
  Description of Artificial Sequence: Synthetic oligonucleotide
  modified_base (4)..(4): a, c, u, g, unknown or other
cuunaaaggggcuucccag

SEQ ID NO: 71822 - RNA, 19 nt, Artificial Sequence
  Description of Artificial Sequence: Synthetic oligonucleotide
aauaaugcacaucccaaau

SEQ ID NO: 71823 - RNA, 19 nt, Artificial Sequence
  Description of Artificial Sequence: Synthetic oligonucleotide
uuuaaagaccuaccaaaga

SEQ ID NO: 71824 - RNA, 19 nt, Artificial Sequence
  Description of Artificial Sequence: Synthetic oligonucleotide
caagauaugcaggauaucc

SEQ ID NO: 71825 - RNA, 19 nt, Artificial Sequence
  Description of Artificial Sequence: Synthetic oligonucleotide
guaauugaguauauaaaag

SEQ ID NO: 71826 - RNA, 19 nt, Artificial Sequence
  Description of Artificial Sequence: Synthetic oligonucleotide
auaaauaucuccaccagug

SEQ ID NO: 71827 - RNA, 19 nt, Artificial Sequence
  Description of Artificial Sequence: Synthetic oligonucleotide
ucuauuaugcucagccuug

SEQ ID NO: 71828 - RNA, 19 nt, Artificial Sequence
  Description of Artificial Sequence: Synthetic oligonucleotide
aacaauccaaaacucuaca

SEQ ID NO: 71829 - RNA, 19 nt, Artificial Sequence
  Description of Artificial Sequence: Synthetic oligonucleotide
ugcucguucauagaaagag

SEQ ID NO: 71830 - RNA, 19 nt, Artificial Sequence
  Description of Artificial Sequence: Synthetic oligonucleotide
gguaggucuaaguagaaag

SEQ ID NO: 71831 - RNA, 19 nt, Artificial Sequence
  Description of Artificial Sequence: Synthetic oligonucleotide
guaggugugagauuuaaca

SEQ ID NO: 71832 - RNA, 19 nt, Artificial Sequence
  Description of Artificial Sequence: Synthetic oligonucleotide
aauauacacaugagcuugc

SEQ ID NO: 71833 - RNA, 19 nt, Artificial Sequence
  Description of Artificial Sequence: Synthetic oligonucleotide
uccuacauagaugaucacg

SEQ ID NO: 71834 - RNA, 19 nt, Artificial Sequence
  Description of Artificial Sequence: Synthetic oligonucleotide
aaucccauaaauaucucca

SEQ ID NO: 71835 - RNA, 19 nt, Artificial Sequence
  Description of Artificial Sequence: Synthetic oligonucleotide
agcacuacuacguuauuug

SEQ ID NO: 71836 - RNA, 19 nt, Artificial Sequence
  Description of Artificial Sequence: Synthetic oligonucleotide
ucucugaccaguaagcaaa

SEQ ID NO: 71837 - RNA, 19 nt, Artificial Sequence
  Description of Artificial Sequence: Synthetic oligonucleotide
gaggaaaguuuauagagga

SEQ ID NO: 71838 - RNA, 19 nt, Artificial Sequence
  Description of Artificial Sequence: Synthetic oligonucleotide
guuuuaaagaccuaccaaa

SEQ ID NO: 71839 - RNA, 19 nt, Artificial Sequence
  Description of Artificial Sequence: Synthetic oligonucleotide
uuuaucuucgucacauacu

SEQ ID NO: 71840 - RNA, 19 nt, Artificial Sequence
  Description of Artificial Sequence: Synthetic oligonucleotide
agcucuacgggccauauca

SEQ ID NO: 71841 - RNA, 19 nt, Artificial Sequence
  Description of Artificial Sequence: Synthetic oligonucleotide
ucugauagugugauuccag

SEQ ID NO: 71842 - RNA, 19 nt, Artificial Sequence
  Description of Artificial Sequence: Synthetic oligonucleotide
  modified_base (11)..(11): a, c, u, g, unknown or other
agcucuacuunaaaggggc

SEQ ID NO: 71843 - RNA, 19 nt, Artificial Sequence
  Description of Artificial Sequence: Synthetic oligonucleotide
cuuacaggggcaaacugcc

SEQ ID NO: 71844 - RNA, 19 nt, Artificial Sequence
  Description of Artificial Sequence: Synthetic oligonucleotide
ugguaauugaguauauaaa

SEQ ID NO: 71845 - RNA, 19 nt, Artificial Sequence
  Description of Artificial Sequence: Synthetic oligonucleotide
uauguguaccauaugcacu

SEQ ID NO: 71846 - RNA, 19 nt, Artificial Sequence
  Description of Artificial Sequence: Synthetic oligonucleotide
aucgaauaaucucucccac

SEQ ID NO: 71847 - RNA, 19 nt, Artificial Sequence
  Description of Artificial Sequence: Synthetic oligonucleotide
uuggaauacuuggacagcg

SEQ ID NO: 71848 - RNA, 19 nt, Artificial Sequence
  Description of Artificial Sequence: Synthetic oligonucleotide
uacaguauguguaccauau

SEQ ID NO: 71849 - RNA, 19 nt, Artificial Sequence
  Description of Artificial Sequence: Synthetic oligonucleotide
caaucgaauaaucucuccc

SEQ ID NO: 71850 - RNA, 19 nt, Artificial Sequence
  Description of Artificial Sequence: Synthetic oligonucleotide
cuuccaaucgaauaaucuc

SEQ ID NO: 71851 - RNA, 19 nt, Artificial Sequence
  Description of Artificial Sequence: Synthetic oligonucleotide
accauuaauccauaucuca

SEQ ID NO: 71852 - RNA, 19 nt, Artificial Sequence
  Description of Artificial Sequence: Synthetic oligonucleotide
ucuucaaggcuacggaaug

SEQ ID NO: 71853 - RNA, 19 nt, Artificial Sequence
  Description of Artificial Sequence: Synthetic oligonucleotide
acucugaucacaaaccuag

SEQ ID NO: 71854 - RNA, 19 nt, Artificial Sequence
  Description of Artificial Sequence: Synthetic oligonucleotide
aaacaguuaguuacucaac

SEQ ID NO: 71855 - RNA, 19 nt, Artificial Sequence
  Description of Artificial Sequence: Synthetic oligonucleotide
ugcugguaggucuaaguag

SEQ ID NO: 71856 - RNA, 19 nt, Artificial Sequence
  Description of Artificial Sequence: Synthetic oligonucleotide
uaucucaacaagucauugc

SEQ ID NO: 71857 - RNA, 19 nt, Artificial Sequence
  Description of Artificial Sequence: Synthetic oligonucleotide
gucucaacagcucuacggg

SEQ ID NO: 71858 - RNA, 19 nt, Artificial Sequence
  Description of Artificial Sequence: Synthetic oligonucleotide
aaaugauaacacacagagg

SEQ ID NO: 71859 - RNA, 19 nt, Artificial Sequence
  Description of Artificial Sequence: Synthetic oligonucleotide
ugauggauucuacuuuacc

SEQ ID NO: 71860 - RNA, 19 nt, Artificial Sequence
  Description of Artificial Sequence: Synthetic oligonucleotide
cauaaugccaggaccgagc

SEQ ID NO: 71861 - RNA, 19 nt, Artificial Sequence
  Description of Artificial Sequence: Synthetic oligonucleotide
cuagacauuucacucugcc

SEQ ID NO: 71862 - RNA, 19 nt, Artificial Sequence
  Description of Artificial Sequence: Synthetic oligonucleotide
acuucggacaucucauuuc

SEQ ID NO: 71863 - RNA, 19 nt, Artificial Sequence
  Description of Artificial Sequence: Synthetic oligonucleotide
aguggucugacuccaaaug

SEQ ID NO: 71864 - RNA, 19 nt, Artificial Sequence
  Description of Artificial Sequence: Synthetic oligonucleotide
ucuucaagaaguugugcgu

SEQ ID NO: 71865 - RNA, 19 nt, Artificial Sequence
  Description of Artificial Sequence: Synthetic oligonucleotide
acauccuacauagaugauc

SEQ ID NO: 71866 - RNA, 19 nt, Artificial Sequence
  Description of Artificial Sequence: Synthetic oligonucleotide
acuaucugcaggcauuucu

SEQ ID NO: 71867 - RNA, 19 nt, Artificial Sequence
  Description of Artificial Sequence: Synthetic oligonucleotide
uacauacagguuuacagua

SEQ ID NO: 71868 - RNA, 19 nt, Artificial Sequence
  Description of Artificial Sequence: Synthetic oligonucleotide
cauccuacauagaugauca

SEQ ID NO: 71869 - RNA, 19 nt, Artificial Sequence
  Description of Artificial Sequence: Synthetic oligonucleotide
gauccuuaaauuucaugga

SEQ ID NO: 71870 - RNA, 19 nt, Artificial Sequence
  Description of Artificial Sequence: Synthetic oligonucleotide
acuaucagugaacaaucca

SEQ ID NO: 71871 - RNA, 19 nt, Artificial Sequence
  Description of Artificial Sequence: Synthetic oligonucleotide
uucaaggcuacggaaugcg

SEQ ID NO: 71872 - RNA, 19 nt, Artificial Sequence
  Description of Artificial Sequence: Synthetic oligonucleotide
ucaacaagucauugcauaa

SEQ ID NO: 71873 - RNA, 19 nt, Artificial Sequence
  Description of Artificial Sequence: Synthetic oligonucleotide
  modified_base (3)..(3): a, c, u, g, unknown or other
uunaaaggggcuucccagu

SEQ ID NO: 71874 - RNA, 19 nt, Artificial Sequence
  Description of Artificial Sequence: Synthetic oligonucleotide
aaccuaguuugcugguagg

SEQ ID NO: 71875 - RNA, 19 nt, Artificial Sequence
  Description of Artificial Sequence: Synthetic oligonucleotide
aaggguuugagaugagaaa

SEQ ID NO: 71876 - RNA, 19 nt, Artificial Sequence
  Description of Artificial Sequence: Synthetic oligonucleotide
ugcguagucagcuuugauc

SEQ ID NO: 71877 - RNA, 19 nt, Artificial Sequence
  Description of Artificial Sequence: Synthetic oligonucleotide
uuaauccauaucucaacaa

SEQ ID NO: 71878 - RNA, 19 nt, Artificial Sequence
  Description of Artificial Sequence: Synthetic oligonucleotide
ugcucacggauaauggacc

SEQ ID NO: 71879 - RNA, 19 nt, Artificial Sequence
  Description of Artificial Sequence: Synthetic oligonucleotide
acuaccaacccguagguuu

SEQ ID NO: 71880 - RNA, 19 nt, Artificial Sequence
  Description of Artificial Sequence: Synthetic oligonucleotide
guaggucuaaguagaaagg

SEQ ID NO: 71881 - RNA, 19 nt, Artificial Sequence
  Description of Artificial Sequence: Synthetic oligonucleotide
  modified_base (5)..(5): a, c, u, g, unknown or other
acuunaaaggggcuuccca

SEQ ID NO: 71882 - RNA, 19 nt, Artificial Sequence
  Description of Artificial Sequence: Synthetic oligonucleotide
aggccguaaccacaggccc

SEQ ID NO: 71883 - RNA, 19 nt, Artificial Sequence
  Description of Artificial Sequence: Synthetic oligonucleotide
cuguuuacaguuuaaugga

SEQ ID NO: 71884 - RNA, 19 nt, Artificial Sequence
  Description of Artificial Sequence: Synthetic oligonucleotide
gacgacaucagaggcgucg

SEQ ID NO: 71885 - RNA, 19 nt, Artificial Sequence
  Description of Artificial Sequence: Synthetic oligonucleotide
gauagugugauuccagugu

SEQ ID NO: 71886 - RNA, 19 nt, Artificial Sequence
  Description of Artificial Sequence: Synthetic oligonucleotide
uuuggaucauucacucuga

SEQ ID NO: 71887 - RNA, 19 nt, Artificial Sequence
  Description of Artificial Sequence: Synthetic oligonucleotide
uggucugacuccaaaugca

SEQ ID NO: 71888 - RNA, 19 nt, Artificial Sequence
  Description of Artificial Sequence: Synthetic oligonucleotide
ucgaauaaucucucccacc

SEQ ID NO: 71889 - RNA, 19 nt, Artificial Sequence
  Description of Artificial Sequence: Synthetic oligonucleotide
aucuauuaugcucagccuu

SEQ ID NO: 71890 - RNA, 19 nt, Artificial Sequence
  Description of Artificial Sequence: Synthetic oligonucleotide
acuacguuauuugugacau

SEQ ID NO: 71891 - RNA, 19 nt, Artificial Sequence
  Description of Artificial Sequence: Synthetic oligonucleotide
ugugcucacggauaaugga

SEQ ID NO: 71892 - RNA, 19 nt, Artificial Sequence
  Description of Artificial Sequence: Synthetic oligonucleotide
cuacaaugcugacacuucc

SEQ ID NO: 71893 - RNA, 19 nt, Artificial Sequence
  Description of Artificial Sequence: Synthetic oligonucleotide
guuaguuacucaacaaaac

SEQ ID NO: 71894 - RNA, 19 nt, Artificial Sequence
  Description of Artificial Sequence: Synthetic oligonucleotide
uaucuauuaugcucagccu

SEQ ID NO: 71895 - RNA, 19 nt, Artificial Sequence
  Description of Artificial Sequence: Synthetic oligonucleotide
gcuacuaugaccacagacc

SEQ ID NO: 71896 - RNA, 19 nt, Artificial Sequence
  Description of Artificial Sequence: Synthetic oligonucleotide
aagauaugcaggauaucca

SEQ ID NO: 71897 - RNA, 19 nt, Artificial Sequence
  Description of Artificial Sequence: Synthetic oligonucleotide
cucaguaccuauccauagg

SEQ ID NO: 71898 - RNA, 19 nt, Artificial Sequence
  Description of Artificial Sequence: Synthetic oligonucleotide
aguuaguuacucaacaaaa

SEQ ID NO: 71899 - RNA, 19 nt, Artificial Sequence
  Description of Artificial Sequence: Synthetic oligonucleotide
  modified_base (8)..(8): a, c, u, g, unknown or other
ucuacuunaaaggggcuuc

SEQ ID NO: 71900 - RNA, 19 nt, Artificial Sequence
  Description of Artificial Sequence: Synthetic oligonucleotide
uaggucuaaguagaaaggu

SEQ ID NO: 71901 - RNA, 19 nt, Artificial Sequence
  Description of Artificial Sequence: Synthetic oligonucleotide
aagugcauccagaacucuc

SEQ ID NO: 71902 - RNA, 19 nt, Artificial Sequence
  Description of Artificial Sequence: Synthetic oligonucleotide
acuagucucaaagcugcac

SEQ ID NO: 71903 - RNA, 19 nt, Artificial Sequence
  Description of Artificial Sequence: Synthetic oligonucleotide
auagaugaucacgucacug

SEQ ID NO: 71904 - RNA, 19 nt, Artificial Sequence
  Description of Artificial Sequence: Synthetic oligonucleotide
uguaagcacuacuacguua

SEQ ID NO: 71905 - RNA, 19 nt, Artificial Sequence
  Description of Artificial Sequence: Synthetic oligonucleotide
cagcauggaaguuccaaag

SEQ ID NO: 71906 - RNA, 19 nt, Artificial Sequence
  Description of Artificial Sequence: Synthetic oligonucleotide
guggucugacuccaaaugc

SEQ ID NO: 71907 - RNA, 19 nt, Artificial Sequence
  Description of Artificial Sequence: Synthetic oligonucleotide
aacuucggacaucucauuu

SEQ ID NO: 71908 - RNA, 19 nt, Artificial Sequence
  Description of Artificial Sequence: Synthetic oligonucleotide
auguguaccauaugcacua

SEQ ID NO: 71909 - RNA, 19 nt, Artificial Sequence
  Description of Artificial Sequence: Synthetic oligonucleotide
  modified_base (12)..(12): a, c, u, g, unknown or other
gagcucuacuunaaagggg

SEQ ID NO: 71910 - RNA, 19 nt, Artificial Sequence
  Description of Artificial Sequence: Synthetic oligonucleotide
uccaaucgaauaaucucuc

SEQ ID NO: 71911 - RNA, 19 nt, Artificial Sequence
  Description of Artificial Sequence: Synthetic oligonucleotide
gauaugacuaccaacccgu

SEQ ID NO: 71912 - RNA, 19 nt, Artificial Sequence
  Description of Artificial Sequence: Synthetic oligonucleotide
aaacucccauuugauaucu

SEQ ID NO: 71913 - RNA, 19 nt, Artificial Sequence
  Description of Artificial Sequence: Synthetic oligonucleotide
auuugauaucucugcuaag

SEQ ID NO: 71914 - RNA, 19 nt, Artificial Sequence
  Description of Artificial Sequence: Synthetic oligonucleotide
ucucaacagcucuacgggc

SEQ ID NO: 71915 - RNA, 19 nt, Artificial Sequence
  Description of Artificial Sequence: Synthetic oligonucleotide
ugaauuucucucagugaaa

SEQ ID NO: 71916 - RNA, 19 nt, Artificial Sequence
  Description of Artificial Sequence: Synthetic oligonucleotide
acgcacaggccauacuugg

SEQ ID NO: 71917 - RNA, 19 nt, Artificial Sequence
  Description of Artificial Sequence: Synthetic oligonucleotide
cccagugcgaaguacaggg

SEQ ID NO: 71918 - RNA, 19 nt, Artificial Sequence
  Description of Artificial Sequence: Synthetic oligonucleotide
uguaggugugagauuuaac

SEQ ID NO: 71919 - RNA, 19 nt, Artificial Sequence
  Description of Artificial Sequence: Synthetic oligonucleotide
augucacggaaauauucug

SEQ ID NO: 71920 - RNA, 19 nt, Artificial Sequence
  Description of Artificial Sequence: Synthetic oligonucleotide
auuucugcuaagcgaccag

SEQ ID NO: 71921 - RNA, 19 nt, Artificial Sequence
  Description of Artificial Sequence: Synthetic oligonucleotide
cauacugacgugguagccc

SEQ ID NO: 71922 - RNA, 19 nt, Artificial Sequence
  Description of Artificial Sequence: Synthetic oligonucleotide
gcauauuggagguauuggc

SEQ ID NO: 71923 - RNA, 19 nt, Artificial Sequence
  Description of Artificial Sequence: Synthetic oligonucleotide
ucacggauaauggaccaug

SEQ ID NO: 71924 - RNA, 19 nt, Artificial Sequence
  Description of Artificial Sequence: Synthetic oligonucleotide
gguggugcgauguagguca

SEQ ID NO: 71925 - RNA, 19 nt, Artificial Sequence
  Description of Artificial Sequence: Synthetic oligonucleotide
ucccaauagaguccaugca

SEQ ID NO: 71926 - RNA, 19 nt, Artificial Sequence
  Description of Artificial Sequence: Synthetic oligonucleotide
auacugacgugguagccca

SEQ ID NO: 71927 - RNA, 19 nt, Artificial Sequence
  Description of Artificial Sequence: Synthetic oligonucleotide
auauugaauuucucucagu

SEQ ID NO: 71928 - RNA, 19 nt, Artificial Sequence
  Description of Artificial Sequence: Synthetic oligonucleotide
cugaccaguaagcaaagga

SEQ ID NO: 71929 - RNA, 19 nt, Artificial Sequence
  Description of Artificial Sequence: Synthetic oligonucleotide
cuuuucagugacaggacga

SEQ ID NO: 71930 - RNA, 19 nt, Artificial Sequence
  Description of Artificial Sequence: Synthetic oligonucleotide
uucccagugcgaaguacag

SEQ ID NO: 71931 - RNA, 19 nt, Artificial Sequence
  Description of Artificial Sequence: Synthetic oligonucleotide
ugacuaccaacccguaggu

SEQ ID NO: 71932 - RNA, 19 nt, Artificial Sequence
  Description of Artificial Sequence: Synthetic oligonucleotide
auuguucaagcuacuauga

SEQ ID NO: 71933 - RNA, 19 nt, Artificial Sequence
  Description of Artificial Sequence: Synthetic oligonucleotide
gaagucccggagaacuucg

SEQ ID NO: 71934 - RNA, 19 nt, Artificial Sequence
  Description of Artificial Sequence: Synthetic oligonucleotide
caggccguaaccacaggcc

SEQ ID NO: 71935 - RNA, 19 nt, Artificial Sequence
  Description of Artificial Sequence: Synthetic oligonucleotide
cuauccauagguacagaga

SEQ ID NO: 71936 - RNA, 19 nt, Artificial Sequence
  Description of Artificial Sequence: Synthetic oligonucleotide
agucuaaucuucaaggcua

SEQ ID NO: 71937 - RNA, 19 nt, Artificial Sequence
  Description of Artificial Sequence: Synthetic oligonucleotide
gauuaagcagcaccauuaa

SEQ ID NO: 71938 - RNA, 19 nt, Artificial Sequence
  Description of Artificial Sequence: Synthetic oligonucleotide
  modified_base (7)..(7): a, c, u, g, unknown or other
cuacuunaaaggggcuucc

SEQ ID NO: 71939 - RNA, 19 nt, Artificial Sequence
  Description of Artificial Sequence: Synthetic oligonucleotide
acuaugaccacagacccuu

SEQ ID NO: 71940 - RNA, 19 nt, Artificial Sequence
  Description of Artificial Sequence: Synthetic oligonucleotide
ugccuguaagcacuacuac

SEQ ID NO: 71941 - RNA, 19 nt, Artificial Sequence
  Description of Artificial Sequence: Synthetic oligonucleotide
aaggaaaguuacaguggag

SEQ ID NO: 71942 - RNA, 19 nt, Artificial Sequence
  Description of Artificial Sequence: Synthetic oligonucleotide
aagaccuaccaaagaaaca

SEQ ID NO: 71943 - RNA, 19 nt, Artificial Sequence
  Description of Artificial Sequence: Synthetic oligonucleotide
acggaaauauucugauagu

SEQ ID NO: 71944 - RNA, 19 nt, Artificial Sequence
  Description of Artificial Sequence: Synthetic oligonucleotide
uuguccaccuaaguuugag

SEQ ID NO: 71945 - RNA, 19 nt, Artificial Sequence
  Description of Artificial Sequence: Synthetic oligonucleotide
uugugcguagucagcuuug

SEQ ID NO: 71946 - RNA, 19 nt, Artificial Sequence
  Description of Artificial Sequence: Synthetic oligonucleotide
auccaaaacucuacaaugu

SEQ ID NO: 71947 - RNA, 19 nt, Artificial Sequence
  Description of Artificial Sequence: Synthetic oligonucleotide
gcaccauuaauccauaucu

SEQ ID NO: 71948 - RNA, 19 nt, Artificial Sequence
  Description of Artificial Sequence: Synthetic oligonucleotide
acacucauacaucaauauu

SEQ ID NO: 71949 - RNA, 19 nt, Artificial Sequence
  Description of Artificial Sequence: Synthetic oligonucleotide
uucugauagugugauucca

SEQ ID NO: 71950 - RNA, 19 nt, Artificial Sequence
  Description of Artificial Sequence: Synthetic oligonucleotide
uggaccaugugauuuuauu

SEQ ID NO: 71951 - RNA, 19 nt, Artificial Sequence
  Description of Artificial Sequence: Synthetic oligonucleotide
uuucugcuaagcgaccaga

SEQ ID NO: 71952 - RNA, 19 nt, Artificial Sequence
  Description of Artificial Sequence: Synthetic oligonucleotide
auaucuccaccagugauau

SEQ ID NO: 71953 - RNA, 19 nt, Artificial Sequence
  Description of Artificial Sequence: Synthetic oligonucleotide
aacgccuguuauaaagaca

SEQ ID NO: 71954 - RNA, 19 nt, Artificial Sequence
  Description of Artificial Sequence: Synthetic oligonucleotide
acggauaauggaccaugug

SEQ ID NO: 71955 - RNA, 19 nt, Artificial Sequence
  Description of Artificial Sequence: Synthetic oligonucleotide
acguuauuugugacaugcc

SEQ ID NO: 71956 - RNA, 19 nt, Artificial Sequence
  Description of Artificial Sequence: Synthetic oligonucleotide
caccauuaauccauaucuc

SEQ ID NO: 71957 - RNA, 19 nt, Artificial Sequence
  Description of Artificial Sequence: Synthetic oligonucleotide
acuagucaggggccucugg

SEQ ID NO: 71958 - RNA, 19 nt, Artificial Sequence
  Description of Artificial Sequence: Synthetic oligonucleotide
ucaaggcuacggaaugcgu

SEQ ID NO: 71959 - RNA, 19 nt, Artificial Sequence
  Description of Artificial Sequence: Synthetic oligonucleotide
uacgggccauaucauaaaa

SEQ ID NO: 71960 - RNA, 19 nt, Artificial Sequence
  Description of Artificial Sequence: Synthetic oligonucleotide
uacuaugaccacagacccu

SEQ ID NO: 71961 - RNA, 19 nt, Artificial Sequence
  Description of Artificial Sequence: Synthetic oligonucleotide
ggcauauuggagguauugg

SEQ ID NO: 71962 - RNA, 19 nt, Artificial Sequence
  Description of Artificial Sequence: Synthetic oligonucleotide
ucauacugacgugguagcc

SEQ ID NO: 71963 - RNA, 19 nt, Artificial Sequence
  Description of Artificial Sequence: Synthetic oligonucleotide
gucaaguaguuucuuugga

SEQ ID NO: 71964 - RNA, 19 nt, Artificial Sequence
  Description of Artificial Sequence: Synthetic oligonucleotide
ggcauuucugcuaagcgac

SEQ ID NO: 71965 - RNA, 19 nt, Artificial Sequence
  Description of Artificial Sequence: Synthetic oligonucleotide
aagcacuacuacguuauuu

SEQ ID NO: 71966 - RNA, 19 nt, Artificial Sequence
  Description of Artificial Sequence: Synthetic oligonucleotide
  modified_base (6)..(6): a, c, u, g, unknown or other
uacuunaaaggggcuuccc

SEQ ID NO: 71967 - RNA, 19 nt, Artificial Sequence
  Description of Artificial Sequence: Synthetic oligonucleotide
uacggaaugcguucugcau

SEQ ID NO: 71968 - RNA, 19 nt, Artificial Sequence
  Description of Artificial Sequence: Synthetic oligonucleotide
aggacgacaucagaggcgu

SEQ ID NO: 71969 - RNA, 19 nt, Artificial Sequence
  Description of Artificial Sequence: Synthetic oligonucleotide
ucccaagugccccaauaau

SEQ ID NO: 71970 - RNA, 19 nt, Artificial Sequence
  Description of Artificial Sequence: Synthetic oligonucleotide
aggcauauuggagguauug

SEQ ID NO: 71971 - RNA, 19 nt, Artificial Sequence
  Description of Artificial Sequence: Synthetic oligonucleotide
ugcuaagcgaccagagauu

SEQ ID NO: 71972 - RNA, 19 nt, Artificial Sequence
  Description of Artificial Sequence: Synthetic oligonucleotide
  modified_base (18)..(18): a, c, u, g, unknown or other
aggaccgagcucuacuuna

SEQ ID NO: 71973 - RNA, 19 nt, Artificial Sequence
  Description of Artificial Sequence: Synthetic oligonucleotide
agggguagucaccuuacau

SEQ ID NO: 71974 - RNA, 19 nt, Artificial Sequence
  Description of Artificial Sequence: Synthetic oligonucleotide
auccuacauagaugaucac

SEQ ID NO: 71975 - RNA, 19 nt, Artificial Sequence
  Description of Artificial Sequence: Synthetic oligonucleotide
cuaguuugcugguaggucu

SEQ ID NO: 71976 - RNA, 19 nt, Artificial Sequence
  Description of Artificial Sequence: Synthetic oligonucleotide
cuacuacguuauuugugac

SEQ ID NO: 71977 - RNA, 19 nt, Artificial Sequence
  Description of Artificial Sequence: Synthetic oligonucleotide
aagggguagucaccuuaca

SEQ ID NO: 71978 - RNA, 19 nt, Artificial Sequence
  Description of Artificial Sequence: Synthetic oligonucleotide
gguagagucagccaucaua

SEQ ID NO: 71979 - RNA, 19 nt, Artificial Sequence
  Description of Artificial Sequence: Synthetic oligonucleotide
cuuugauccuugccucgcc

SEQ ID NO: 71980 - RNA, 19 nt, Artificial Sequence
  Description of Artificial Sequence: Synthetic oligonucleotide
aguugcaaguggucugacu

SEQ ID NO: 71981 - RNA, 19 nt, Artificial Sequence
  Description of Artificial Sequence: Synthetic oligonucleotide
ugaaaucauguuggacagc

SEQ ID NO: 71982 - RNA, 19 nt, Artificial Sequence
  Description of Artificial Sequence: Synthetic oligonucleotide
aagugcuugcguugggcua

SEQ ID NO: 71983 - RNA, 19 nt, Artificial Sequence
  Description of Artificial Sequence: Synthetic oligonucleotide
cagugcgaaguacaggguc

SEQ ID NO: 71984 - RNA, 19 nt, Artificial Sequence
  Description of Artificial Sequence: Synthetic oligonucleotide
cuauuaugcucagccuugc

SEQ ID NO: 71985 - RNA, 19 nt, Artificial Sequence
  Description of Artificial Sequence: Synthetic oligonucleotide
gaagggguagucaccuuac

SEQ ID NO: 71986 - RNA, 19 nt, Artificial Sequence
  Description of Artificial Sequence: Synthetic oligonucleotide
cgucguaauucccaggugg

SEQ ID NO: 71987 - RNA, 19 nt, Artificial Sequence
  Description of Artificial Sequence: Synthetic oligonucleotide
acggaaugcguucugcaua

SEQ ID NO: 71988 - RNA, 19 nt, Artificial Sequence
  Description of Artificial Sequence: Synthetic oligonucleotide
cuucaaggcuacggaaugc

SEQ ID NO: 71989 - RNA, 19 nt, Artificial Sequence
  Description of Artificial Sequence: Synthetic oligonucleotide
gucacauacuuuggggagc

SEQ ID NO: 71990 - RNA, 19 nt, Artificial Sequence
  Description of Artificial Sequence: Synthetic oligonucleotide
agcgacugugaaaucacug

SEQ ID NO: 71991 - RNA, 19 nt, Artificial Sequence
  Description of Artificial Sequence: Synthetic oligonucleotide
agugcgaaguacagggucu

SEQ ID NO: 71992 - RNA, 19 nt, Artificial Sequence
  Description of Artificial Sequence: Synthetic oligonucleotide
guaccuauccauagguaca

SEQ ID NO: 71993 - RNA, 19 nt, Artificial Sequence
  Description of Artificial Sequence: Synthetic oligonucleotide
guauuggccaccagugcug

SEQ ID NO: 71994 - RNA, 19 nt, Artificial Sequence
  Description of Artificial Sequence: Synthetic oligonucleotide
gugcucacggauaauggac

SEQ ID NO: 71995 - RNA, 19 nt, Artificial Sequence
  Description of Artificial Sequence: Synthetic oligonucleotide
ucacggaaauauucugaua

SEQ ID NO: 71996 - RNA, 19 nt, Artificial Sequence
  Description of Artificial Sequence: Synthetic oligonucleotide
gagccaguugacagagggg

SEQ ID NO: 71997 - RNA, 19 nt, Artificial Sequence
  Description of Artificial Sequence: Synthetic oligonucleotide
aauggaccaugugauuuua

SEQ ID NO: 71998 - RNA, 19 nt, Artificial Sequence
  Description of Artificial Sequence: Synthetic oligonucleotide
uaguuugcugguaggucua

SEQ ID NO: 71999 - RNA, 19 nt, Artificial Sequence
  Description of Artificial Sequence: Synthetic oligonucleotide
gacgcacaggccauacuug

SEQ ID NO: 72000 - RNA, 19 nt, Artificial Sequence
  Description of Artificial Sequence: Synthetic oligonucleotide
ucguaauucccagguggug

SEQ ID NO: 72001 - RNA, 19 nt, Artificial Sequence
  Description of Artificial Sequence: Synthetic oligonucleotide
cuugcguugggcuaguuuu

SEQ ID NO: 72002 - RNA, 19 nt, Artificial Sequence
  Description of Artificial Sequence: Synthetic oligonucleotide
uuggaucauucacucugau

SEQ ID NO: 72003 - RNA, 19 nt, Artificial Sequence
  Description of Artificial Sequence: Synthetic oligonucleotide
aacugccuguaagcacuac

SEQ ID NO: 72004 - RNA, 19 nt, Artificial Sequence
  Description of Artificial Sequence: Synthetic oligonucleotide
uuacaggggcaaacugccu

SEQ ID NO: 72005 - RNA, 19 nt, Artificial Sequence
  Description of Artificial Sequence: Synthetic oligonucleotide
cuccauguacauaaccaaa

SEQ ID NO: 72006 - RNA, 19 nt, Artificial Sequence
  Description of Artificial Sequence: Synthetic oligonucleotide
gacaucagaggcgucguaa

SEQ ID NO: 72007 - RNA, 19 nt, Artificial Sequence
  Description of Artificial Sequence: Synthetic oligonucleotide
gaagugcuugcguugggcu

SEQ ID NO: 72008 - RNA, 19 nt, Artificial Sequence
  Description of Artificial Sequence: Synthetic oligonucleotide
agguggugcgauguagguc

SEQ ID NO: 72009 - RNA, 19 nt, Artificial Sequence
  Description of Artificial Sequence: Synthetic oligonucleotide
cacgucacuguuggaauac

SEQ ID NO: 72010 - RNA, 19 nt, Artificial Sequence
  Description of Artificial Sequence: Synthetic oligonucleotide
ugugcguagucagcuuuga

SEQ ID NO: 72011 - RNA, 19 nt, Artificial Sequence
  Description of Artificial Sequence: Synthetic oligonucleotide
ucacgucacuguuggaaua

SEQ ID NO: 72012 - RNA, 19 nt, Artificial Sequence
  Description of Artificial Sequence: Synthetic oligonucleotide
gcgaccagagauuucucug

SEQ ID NO: 72013 - RNA, 19 nt, Artificial Sequence
  Description of Artificial Sequence: Synthetic oligonucleotide
accuaguuugcugguaggu

SEQ ID NO: 72014 - RNA, 19 nt, Artificial Sequence
  Description of Artificial Sequence: Synthetic oligonucleotide
gaccuaccaaagaaacaac

SEQ ID NO: 72015 - RNA, 19 nt, Artificial Sequence
  Description of Artificial Sequence: Synthetic oligonucleotide
aagucccggagaacuucgg

SEQ ID NO: 72016 - RNA, 19 nt, Artificial Sequence
  Description of Artificial Sequence: Synthetic oligonucleotide
guaagcacuacuacguuau

SEQ ID NO: 72017 - RNA, 19 nt, Artificial Sequence
  Description of Artificial Sequence: Synthetic oligonucleotide
aggcgucguaauucccagg

SEQ ID NO: 72018 - RNA, 19 nt, Artificial Sequence
  Description of Artificial Sequence: Synthetic oligonucleotide
cugcuaagcgaccagagau

SEQ ID NO: 72019 - RNA, 19 nt, Artificial Sequence
  Description of Artificial Sequence: Synthetic oligonucleotide
cuugccucgccaucuuuca

SEQ ID NO: 72020 - RNA, 19 nt, Artificial Sequence
  Description of Artificial Sequence: Synthetic oligonucleotide
gcugguaggucuaaguaga

SEQ ID NO: 72021 - RNA, 19 nt, Artificial Sequence
  Description of Artificial Sequence: Synthetic oligonucleotide
gucacggaaauauucugau

SEQ ID NO: 72022 - RNA, 19 nt, Artificial Sequence
  Description of Artificial Sequence: Synthetic oligonucleotide
ccuacauagaugaucacgu

SEQ ID NO: 72023 - RNA, 19 nt, Artificial Sequence
  Description of Artificial Sequence: Synthetic oligonucleotide
guuuaacuggcugcacuca

SEQ ID NO: 72024 - RNA, 19 nt, Artificial Sequence
  Description of Artificial Sequence: Synthetic oligonucleotide
uggagguauuggccaccag

SEQ ID NO: 72025 - RNA, 19 nt, Artificial Sequence
  Description of Artificial Sequence: Synthetic oligonucleotide
cuacguuauuugugacaug

SEQ ID NO: 72026 - RNA, 19 nt, Artificial Sequence
  Description of Artificial Sequence: Synthetic oligonucleotide
cagucuaaucuucaaggcu

SEQ ID NO: 72027 - RNA, 19 nt, Artificial Sequence
  Description of Artificial Sequence: Synthetic oligonucleotide
cauuucugcuaagcgacca

SEQ ID NO: 72028 - RNA, 19 nt, Artificial Sequence
  Description of Artificial Sequence: Synthetic oligonucleotide
aggucuaaguagaaagguu

SEQ ID NO: 72029 - RNA, 19 nt, Artificial Sequence
  Description of Artificial Sequence: Synthetic oligonucleotide
agugccccaauaauuggaa

SEQ ID NO: 72030 - RNA, 19 nt, Artificial Sequence
  Description of Artificial Sequence: Synthetic oligonucleotide
auacuuggaccaugcugaa

SEQ ID NO: 72031 - RNA, 19 nt, Artificial Sequence
  Description of Artificial Sequence: Synthetic oligonucleotide
cagaguagcagaugugacu

SEQ ID NO: 72032 - RNA, 19 nt, Artificial Sequence
  Description of Artificial Sequence: Synthetic oligonucleotide
uguguaccauaugcacuac

SEQ ID NO: 72033 - RNA, 19 nt, Artificial Sequence
  Description of Artificial Sequence: Synthetic oligonucleotide
auauucugauagugugauu

SEQ ID NO: 72034 - RNA, 19 nt, Artificial Sequence
  Description of Artificial Sequence: Synthetic oligonucleotide
uaagcacuacuacguuauu

SEQ ID NO: 72035 - RNA, 19 nt, Artificial Sequence
  Description of Artificial Sequence: Synthetic oligonucleotide
cggauaauggaccauguga

SEQ ID NO: 72036 - RNA, 19 nt, Artificial Sequence
  Description of Artificial Sequence: Synthetic oligonucleotide
uugccucgccaucuuucac

SEQ ID NO: 72037 - RNA, 19 nt, Artificial Sequence
  Description of Artificial Sequence: Synthetic oligonucleotide
accuagagguagagucagc

SEQ ID NO: 72038 - RNA, 19 nt, Artificial Sequence
  Description of Artificial Sequence: Synthetic oligonucleotide
ggagguauuggccaccagu

SEQ ID NO: 72039 - RNA, 19 nt, Artificial Sequence
  Description of Artificial Sequence: Synthetic oligonucleotide
cugauagugugauuccagu

SEQ ID NO: 72040 - RNA, 19 nt, Artificial Sequence
  Description of Artificial Sequence: Synthetic oligonucleotide
gacgaaccugacgcacagg

SEQ ID NO: 72041 - RNA, 19 nt, Artificial Sequence
  Description of Artificial Sequence: Synthetic oligonucleotide
aguugugcguagucagcuu

SEQ ID NO: 72042 - RNA, 19 nt, Artificial Sequence
  Description of Artificial Sequence: Synthetic oligonucleotide
ccuaaguuugaggaaaaga

SEQ ID NO: 72043 - RNA, 19 nt, Artificial Sequence
  Description of Artificial Sequence: Synthetic oligonucleotide
aggaaaguuuauagaggau

SEQ ID NO: 72044 - RNA, 19 nt, Artificial Sequence
  Description of Artificial Sequence: Synthetic oligonucleotide
cguuauuugugacaugcca

SEQ ID NO: 72045 - RNA, 19 nt, Artificial Sequence
  Description of Artificial Sequence: Synthetic oligonucleotide
ggcaaacugccuguaagca

SEQ ID NO: 72046 - RNA, 19 nt, Artificial Sequence
  Description of Artificial Sequence: Synthetic oligonucleotide
guguauccauuuuguugca

SEQ ID NO: 72047 - RNA, 19 nt, Artificial Sequence
  Description of Artificial Sequence: Synthetic oligonucleotide
gccguaaccacaggccccg

SEQ ID NO: 72048 - RNA, 19 nt, Artificial Sequence
  Description of Artificial Sequence: Synthetic oligonucleotide
gcuacggaaugcguucugc

SEQ ID NO: 72049 - RNA, 19 nt, Artificial Sequence
  Description of Artificial Sequence: Synthetic oligonucleotide
acgggccauaucauaaaau

SEQ ID NO: 72050 - RNA, 19 nt, Artificial Sequence
  Description of Artificial Sequence: Synthetic oligonucleotide
caccuaaguuugaggaaaa

SEQ ID NO: 72051 - RNA, 19 nt, Artificial Sequence
  Description of Artificial Sequence: Synthetic oligonucleotide
ggccauacuuggaccaugc

SEQ ID NO: 72052 - RNA, 19 nt, Artificial Sequence
  Description of Artificial Sequence: Synthetic oligonucleotide
aacagcucuacgggccaua

SEQ ID NO: 72053 - RNA, 19 nt, Artificial Sequence
  Description of Artificial Sequence: Synthetic oligonucleotide
aguggucucaacagcucua

SEQ ID NO: 72054 - RNA, 19 nt, Artificial Sequence
  Description of Artificial Sequence: Synthetic oligonucleotide
caguaccuauccauaggua

SEQ ID NO: 72055 - RNA, 19 nt, Artificial Sequence
  Description of Artificial Sequence: Synthetic oligonucleotide
ccuugccucgccaucuuuc

SEQ ID NO: 72056 - RNA, 19 nt, Artificial Sequence
  Description of Artificial Sequence: Synthetic oligonucleotide
cacgggaaaagugcaucca

SEQ ID NO: 72057 - RNA, 19 nt, Artificial Sequence
  Description of Artificial Sequence: Synthetic oligonucleotide
aaacugccuguaagcacua

SEQ ID NO: 72058 - RNA, 19 nt, Artificial Sequence
  Description of Artificial Sequence: Synthetic oligonucleotide
cugguaggucuaaguagaa

SEQ ID NO: 72059 - RNA, 19 nt, Artificial Sequence
  Description of Artificial Sequence: Synthetic oligonucleotide
aggcuacggaaugcguucu

SEQ ID NO: 72060 - RNA, 19 nt, Artificial Sequence
  Description of Artificial Sequence: Synthetic oligonucleotide
guacagagaucuggccuuc

SEQ ID NO: 72061 - RNA, 19 nt, Artificial Sequence
  Description of Artificial Sequence: Synthetic oligonucleotide
acagcucuacgggccauau

SEQ ID NO: 72062 - RNA, 19 nt, Artificial Sequence
  Description of Artificial Sequence: Synthetic oligonucleotide
cauagaugaucacgucacu

SEQ ID NO: 72063 - RNA, 19 nt, Artificial Sequence
  Description of Artificial Sequence: Synthetic oligonucleotide
gucguaauucccagguggu

SEQ ID NO: 72064 - RNA, 19 nt, Artificial Sequence
  Description of Artificial Sequence: Synthetic oligonucleotide
cacuagucucaaagcugca

SEQ ID NO: 72065 - RNA, 19 nt, Artificial Sequence
  Description of Artificial Sequence: Synthetic oligonucleotide
cacggauaauggaccaugu

SEQ ID NO: 72066 - RNA, 19 nt, Artificial Sequence
  Description of Artificial Sequence: Synthetic oligonucleotide
ggcugcaccugccauguua

SEQ ID NO: 72067 - RNA, 19 nt, Artificial Sequence
  Description of Artificial Sequence: Synthetic oligonucleotide
gcauuucugcuaagcgacc

SEQ ID NO: 72068 - RNA, 19 nt, Artificial Sequence
  Description of Artificial Sequence: Synthetic oligonucleotide
ccaccuaaguuugaggaaa

SEQ ID NO: 72069 - RNA, 19 nt, Artificial Sequence
  Description of Artificial Sequence: Synthetic oligonucleotide
uacugacgugguagcccau

SEQ ID NO: 72070 - RNA, 19 nt, Artificial Sequence
  Description of Artificial Sequence: Synthetic oligonucleotide
cuaccaacccguagguuuu

SEQ ID NO: 72071 - RNA, 19 nt, Artificial Sequence
  Description of Artificial Sequence: Synthetic oligonucleotide
auaugacuaccaacccgua

SEQ ID NO: 72072 - RNA, 19 nt, Artificial Sequence
  Description of Artificial Sequence: Synthetic oligonucleotide
gcgucguaauucccaggug

SEQ ID NO: 72073 - RNA, 19 nt, Artificial Sequence
  Description of Artificial Sequence: Synthetic oligonucleotide
ggccguaaccacaggcccc

SEQ ID NO: 72074 - RNA, 19 nt, Artificial Sequence
  Description of Artificial Sequence: Synthetic oligonucleotide
  modified_base (9)..(9): a, c, u, g, unknown or other
cucuacuunaaaggggcuu

SEQ ID NO: 72075 - RNA, 19 nt, Artificial Sequence
  Description of Artificial Sequence: Synthetic oligonucleotide
ggguguaggugugagauuu

SEQ ID NO: 72076 - RNA, 19 nt, Artificial Sequence
  Description of Artificial Sequence: Synthetic oligonucleotide
gccacauuggaagcaaacu

SEQ ID NO: 72077 - RNA, 19 nt, Artificial Sequence
  Description of Artificial Sequence: Synthetic oligonucleotide
cacuagucaggggccucug

SEQ ID NO: 72078 - RNA, 19 nt, Artificial Sequence
  Description of Artificial Sequence: Synthetic oligonucleotide
cugccugcucguucauaga

SEQ ID NO: 72079 - RNA, 19 nt, Artificial Sequence
  Description of Artificial Sequence: Synthetic oligonucleotide
cagguggugcgauguaggu

SEQ ID NO: 72080 - RNA, 19 nt, Artificial Sequence
  Description of Artificial Sequence: Synthetic oligonucleotide
caguaagcaaaggaugguu

SEQ ID NO: 72081 - RNA, 19 nt, Artificial Sequence
  Description of Artificial Sequence: Synthetic oligonucleotide
  modified_base (19)..(19): a, c, u, g, unknown or other
caggaccgagcucuacuun

SEQ ID NO: 72082 - RNA, 19 nt, Artificial Sequence
  Description of Artificial Sequence: Synthetic oligonucleotide
gcucgcugugaccccacuc

SEQ ID NO: 72083 - RNA, 19 nt, Artificial Sequence
  Description of Artificial Sequence: Synthetic oligonucleotide
cuguaagcacuacuacguu

SEQ ID NO: 72084 - RNA, 19 nt, Artificial Sequence
  Description of Artificial Sequence: Synthetic oligonucleotide
ccugacgcacaggccauac

SEQ ID NO: 72085 - RNA, 19 nt, Artificial Sequence
  Description of Artificial Sequence: Synthetic oligonucleotide
gcuugguguaaacucccau

SEQ ID NO: 72086 - RNA, 19 nt, Artificial Sequence
  Description of Artificial Sequence: Synthetic oligonucleotide
gccccaauaauuggaacau

SEQ ID NO: 72087 - RNA, 19 nt, Artificial Sequence
  Description of Artificial Sequence: Synthetic oligonucleotide
gcuaagcgaccagagauuu

SEQ ID NO: 72088 - RNA, 19 nt, Artificial Sequence
  Description of Artificial Sequence: Synthetic oligonucleotide
  modified_base (10)..(10): a, c, u, g, unknown or other
gcucuacuunaaaggggcu

SEQ ID NO: 72089 - RNA, 19 nt, Artificial Sequence
  Description of Artificial Sequence: Synthetic oligonucleotide
ggucagggagccccuucaa

SEQ ID NO: 72090 - RNA, 19 nt, Artificial Sequence
  Description of Artificial Sequence: Synthetic oligonucleotide
cucucgcagccacaggcau

SEQ ID NO: 72091 - RNA, 19 nt, Artificial Sequence
  Description of Artificial Sequence: Synthetic oligonucleotide
  modified_base (17)..(17): a, c, u, g, unknown or other
ggaccgagcucuacuunaa

SEQ ID NO: 72092 - RNA, 19 nt, Artificial Sequence
  Description of Artificial Sequence: Synthetic oligonucleotide
gugcguagucagcuuugau

SEQ ID NO: 72093 - RNA, 19 nt, Artificial Sequence
  Description of Artificial Sequence: Synthetic oligonucleotide
gacuaccaacccguagguu

SEQ ID NO: 72094 - RNA, 19 nt, Artificial Sequence
  Description of Artificial Sequence: Synthetic oligonucleotide
ggccccgagacuccaugua

SEQ ID NO: 72095 - RNA, 19 nt, Artificial Sequence
  Description of Artificial Sequence: Synthetic oligonucleotide
cccauaaugccaggaccga

SEQ ID NO: 72096 - RNA, 19 nt, Artificial Sequence
  Description of Artificial Sequence: Synthetic oligonucleotide
cucacggauaauggaccau

SEQ ID NO: 72097 - RNA, 19 nt, Artificial Sequence
  Description of Artificial Sequence: Synthetic oligonucleotide
gcuugcguugggcuaguuu

SEQ ID NO: 72098 - RNA, 19 nt, Artificial Sequence
  Description of Artificial Sequence: Synthetic oligonucleotide
gguguaggugugagauuua

SEQ ID NO: 72099 - RNA, 19 nt, Artificial Sequence
  Description of Artificial Sequence: Synthetic oligonucleotide
ccaaaggguguagguguga

SEQ ID NO: 72100 - RNA, 19 nt, Artificial Sequence
  Description of Artificial Sequence: Synthetic oligonucleotide
gcagcaccauuaauccaua

SEQ ID NO: 72101 - RNA, 19 nt, Artificial Sequence
  Description of Artificial Sequence: Synthetic oligonucleotide
ugcuugcguugggcuaguu

SEQ ID NO: 72102 - RNA, 19 nt, Artificial Sequence
  Description of Artificial Sequence: Synthetic oligonucleotide
cggaaugcguucugcauau

SEQ ID NO: 72103 - RNA, 19 nt, Artificial Sequence
  Description of Artificial Sequence: Synthetic oligonucleotide
cggagaacuucggacaucu

SEQ ID NO: 72104 - RNA, 19 nt, Artificial Sequence
  Description of Artificial Sequence: Synthetic oligonucleotide
ccggagaacuucggacauc

SEQ ID NO: 72105 - RNA, 19 nt, Artificial Sequence
  Description of Artificial Sequence: Synthetic oligonucleotide
ccaggaccgagcucuacuu

SEQ ID NO: 72106 - RNA, 19 nt, Artificial Sequence
  Description of Artificial Sequence: Synthetic oligonucleotide
ccagugcgaaguacagggu

SEQ ID NO: 72107 - RNA, 19 nt, Artificial Sequence
  Description of Artificial Sequence: Synthetic oligonucleotide
gcucuacgggccauaucau

SEQ ID NO: 72108 - RNA, 19 nt, Artificial Sequence
  Description of Artificial Sequence: Synthetic oligonucleotide
gggaagucccggagaacuu

SEQ ID NO: 72109 - RNA, 19 nt, Artificial Sequence
  Description of Artificial Sequence: Synthetic oligonucleotide
gugcuugcguugggcuagu

SEQ ID NO: 72110 - RNA, 19 nt, Artificial Sequence
  Description of Artificial Sequence: Synthetic oligonucleotide
gcccaccuagagguagagu

SEQ ID NO: 72111 - RNA, 19 nt, Artificial Sequence
  Description of Artificial Sequence: Synthetic oligonucleotide
ccguaaccacaggccccga

SEQ ID NO: 72112 - RNA, 19 nt, Artificial Sequence
  Description of Artificial Sequence: Synthetic oligonucleotide
aaaauauaaggccauagcc

SEQ ID NO: 72113 - RNA, 19 nt, Artificial Sequence
  Description of Artificial Sequence: Synthetic oligonucleotide
aaucaauuaacagagacug

SEQ ID NO: 72114 - RNA, 19 nt, Artificial Sequence
  Description of Artificial Sequence: Synthetic oligonucleotide
aauaaagacuaacaacguc

SEQ ID NO: 72115 - RNA, 19 nt, Artificial Sequence
  Description of Artificial Sequence: Synthetic oligonucleotide
aacaacgucaucuuaaaga

SEQ ID NO: 72116 - RNA, 19 nt, Artificial Sequence
  Description of Artificial Sequence: Synthetic oligonucleotide
aggauaggaggccagaugc

SEQ ID NO: 72117 - RNA, 19 nt, Artificial Sequence
  Description of Artificial Sequence: Synthetic oligonucleotide
aaauuaaucauaauacucu

SEQ ID NO: 72118 - RNA, 19 nt, Artificial Sequence
  Description of Artificial Sequence: Synthetic oligonucleotide
cuaaacgucccaaagagag

SEQ ID NO: 72119 - RNA, 19 nt, Artificial Sequence
  Description of Artificial Sequence: Synthetic oligonucleotide
uucaaugagagauuuaaac

SEQ ID NO: 72120 - RNA, 19 nt, Artificial Sequence
  Description of Artificial Sequence: Synthetic oligonucleotide
aacacucgugaauaguggc

SEQ ID NO: 72121 - RNA, 19 nt, Artificial Sequence
  Description of Artificial Sequence: Synthetic oligonucleotide
aguggauauaagcagaaag

SEQ ID NO: 72122 - RNA, 19 nt, Artificial Sequence
  Description of Artificial Sequence: Synthetic oligonucleotide
ucuauguuagcgauaacca

SEQ ID NO: 72123 - RNA, 19 nt, Artificial Sequence
  Description of Artificial Sequence: Synthetic oligonucleotide
ucuacuaaacgucccaaag

SEQ ID NO: 72124 - RNA, 19 nt, Artificial Sequence
  Description of Artificial Sequence: Synthetic oligonucleotide
aagguuguuggaugguugc

SEQ ID NO: 72125 - RNA, 19 nt, Artificial Sequence
  Description of Artificial Sequence: Synthetic oligonucleotide
agugauuagauucauccug

SEQ ID NO: 72126 - RNA, 19 nt, Artificial Sequence
  Description of Artificial Sequence: Synthetic oligonucleotide
agaaucaucucccagagau

SEQ ID NO: 72127 - RNA, 19 nt, Artificial Sequence
  Description of Artificial Sequence: Synthetic oligonucleotide
ucuaacaaagcgaaucaug

SEQ ID NO: 72128 - RNA, 19 nt, Artificial Sequence
  Description of Artificial Sequence: Synthetic oligonucleotide
aauauaaggccauagccuu

SEQ ID NO: 72129 - RNA, 19 nt, Artificial Sequence
  Description of Artificial Sequence: Synthetic oligonucleotide
ugaaaauucgucugaagcu

SEQ ID NO: 72130 - RNA, 19 nt, Artificial Sequence
  Description of Artificial Sequence: Synthetic oligonucleotide
aaaagauaaucuggaaaac

SEQ ID NO: 72131 - RNA, 19 nt, Artificial Sequence
  Description of Artificial Sequence: Synthetic oligonucleotide
ucaagauucuacuaccacc

SEQ ID NO: 72132 - RNA, 19 nt, Artificial Sequence
  Description of Artificial Sequence: Synthetic oligonucleotide
aaauauaaggccauagccu

SEQ ID NO: 72133 - RNA, 19 nt, Artificial Sequence
  Description of Artificial Sequence: Synthetic oligonucleotide
agccuuaaauuuuaggguc

SEQ ID NO: 72134 - RNA, 19 nt, Artificial Sequence
  Description of Artificial Sequence: Synthetic oligonucleotide
aauaguaaccaccugcgua

SEQ ID NO: 72135 - RNA, 19 nt, Artificial Sequence
  Description of Artificial Sequence: Synthetic oligonucleotide
uguccuaagaauugucagg

SEQ ID NO: 72136 - RNA, 19 nt, Artificial Sequence
  Description of Artificial Sequence: Synthetic oligonucleotide
cugaaaugauuucacaugc

SEQ ID NO: 72137 - RNA, 19 nt, Artificial Sequence
  Description of Artificial Sequence: Synthetic oligonucleotide
uacucaucgccuauaaaag

SEQ ID NO: 72138 - RNA, 19 nt, Artificial Sequence
  Description of Artificial Sequence: Synthetic oligonucleotide
acgagaacccuucaaaauc

SEQ ID NO: 72139 - RNA, 19 nt, Artificial Sequence
  Description of Artificial Sequence: Synthetic oligonucleotide
aauccuucuagcaagaaaa

SEQ ID NO: 72140 - RNA, 19 nt, Artificial Sequence
  Description of Artificial Sequence: Synthetic oligonucleotide
uuuucaaugagagauuuaa

SEQ ID NO: 72141 - RNA, 19 nt, Artificial Sequence
  Description of Artificial Sequence: Synthetic oligonucleotide
gagauuuaaacaugguaug

SEQ ID NO: 72142 - RNA, 19 nt, Artificial Sequence
  Description of Artificial Sequence: Synthetic oligonucleotide
agaguuaauaaguuaauuu

SEQ ID NO: 72143 - RNA, 19 nt, Artificial Sequence
  Description of Artificial Sequence: Synthetic oligonucleotide
cuagucaacacuuugauua

SEQ ID NO: 72144 - RNA, 19 nt, Artificial Sequence
  Description of Artificial Sequence: Synthetic oligonucleotide
uaugguugugcuaugacau

SEQ ID NO: 72145 - RNA, 19 nt, Artificial Sequence
  Description of Artificial Sequence: Synthetic oligonucleotide
caugacgaaguauagccgg

SEQ ID NO: 72146 - RNA, 19 nt, Artificial Sequence
  Description of Artificial Sequence: Synthetic oligonucleotide
aauuaaucauaauacucuu

SEQ ID NO: 72147 - RNA, 19 nt, Artificial Sequence
  Description of Artificial Sequence: Synthetic oligonucleotide
ccuauaaaagauaaucugg

SEQ ID NO: 72148 - RNA, 19 nt, Artificial Sequence
  Description of Artificial Sequence: Synthetic oligonucleotide
ugaguuaucaagauagcuu

SEQ ID NO: 72149 - RNA, 19 nt, Artificial Sequence
  Description of Artificial Sequence: Synthetic oligonucleotide
aaauauuaucaugugugug

SEQ ID NO: 72150 - RNA, 19 nt, Artificial Sequence
  Description of Artificial Sequence: Synthetic oligonucleotide
ugugcuccauuauagacug

SEQ ID NO: 72151 - RNA, 19 nt, Artificial Sequence
  Description of Artificial Sequence: Synthetic oligonucleotide
cauacaguuccucuguucc

SEQ ID NO: 72152 - RNA, 19 nt, Artificial Sequence
  Description of Artificial Sequence: Synthetic oligonucleotide
uguacuaugguugugcuau

SEQ ID NO: 72153 - RNA, 19 nt, Artificial Sequence
  Description of Artificial Sequence: Synthetic oligonucleotide
agacugaaacaguucgucc

SEQ ID NO: 72154 - RNA, 19 nt, Artificial Sequence
  Description of Artificial Sequence: Synthetic oligonucleotide
uuucaauagucuacuaaac

SEQ ID NO: 72155 - RNA, 19 nt, Artificial Sequence
  Description of Artificial Sequence: Synthetic oligonucleotide
uaaguggauguuauggcug

SEQ ID NO: 72156 - RNA, 19 nt, Artificial Sequence
  Description of Artificial Sequence: Synthetic oligonucleotide
gauucuagggacuguuucc

SEQ ID NO: 72157 - RNA, 19 nt, Artificial Sequence
  Description of Artificial Sequence: Synthetic oligonucleotide
aaagcgaaucaugcaaacg

SEQ ID NO: 72158 - RNA, 19 nt, Artificial Sequence
  Description of Artificial Sequence: Synthetic oligonucleotide
uguuaagacaggcugcccu

SEQ ID NO: 72159 - RNA, 19 nt, Artificial Sequence
  Description of Artificial Sequence: Synthetic oligonucleotide
cacuuaugggcuaaugucc

SEQ ID NO: 72160 - RNA, 19 nt, Artificial Sequence
  Description of Artificial Sequence: Synthetic oligonucleotide
uuaaugacuuaaugugucc

SEQ ID NO: 72161 - RNA, 19 nt, Artificial Sequence
  Description of Artificial Sequence: Synthetic oligonucleotide
ucaauuaacagagacugau

SEQ ID NO: 72162 - RNA, 19 nt, Artificial Sequence
  Description of Artificial Sequence: Synthetic oligonucleotide
agcgauaaccagcugaucu

SEQ ID NO: 72163 - RNA, 19 nt, Artificial Sequence
  Description of Artificial Sequence: Synthetic oligonucleotide
ucacuuaugggcuaauguc

SEQ ID NO: 72164 - RNA, 19 nt, Artificial Sequence
  Description of Artificial Sequence: Synthetic oligonucleotide
uaacggccuauucaggccg

SEQ ID NO: 72165 - RNA, 19 nt, Artificial Sequence
  Description of Artificial Sequence: Synthetic oligonucleotide
uucuuaccuacuaaguaac

SEQ ID NO: 72166 - RNA, 19 nt, Artificial Sequence
  Description of Artificial Sequence: Synthetic oligonucleotide
uauagauuaacuuguuauu

SEQ ID NO: 72167 - RNA, 19 nt, Artificial Sequence
  Description of Artificial Sequence: Synthetic oligonucleotide
uugauccuauaacugcagg

SEQ ID NO: 72168 - RNA, 19 nt, Artificial Sequence
  Description of Artificial Sequence: Synthetic oligonucleotide
guaagcaauuaucucuggg

SEQ ID NO: 72169 - RNA, 19 nt, Artificial Sequence
  Description of Artificial Sequence: Synthetic oligonucleotide
uagccuuaaauuuuagggu

SEQ ID NO: 72170 - RNA, 19 nt, Artificial Sequence
  Description of Artificial Sequence: Synthetic oligonucleotide
uucguaaacgcuugcuucc

SEQ ID NO: 72171 - RNA, 19 nt, Artificial Sequence
  Description of Artificial Sequence: Synthetic oligonucleotide
uuuauagauuaacuuguua

SEQ ID NO: 72172 - RNA, 19 nt, Artificial Sequence
  Description of Artificial Sequence: Synthetic oligonucleotide
acuaugguugugcuaugac

SEQ ID NO: 72173 - RNA, 19 nt, Artificial Sequence
  Description of Artificial Sequence: Synthetic oligonucleotide
auaguaaccaccugcguau

SEQ ID NO: 72174 - RNA, 19 nt, Artificial Sequence
  Description of Artificial Sequence: Synthetic oligonucleotide
gaucggaugcacaaacugg

SEQ ID NO: 72175 - RNA, 19 nt, Artificial Sequence
  Description of Artificial Sequence: Synthetic oligonucleotide
ucgccuauaaaagauaauc

SEQ ID NO: 72176 - RNA, 19 nt, Artificial Sequence
  Description of Artificial Sequence: Synthetic oligonucleotide
ugggcuaauguccuaagaa

SEQ ID NO: 72177 - RNA, 19 nt, Artificial Sequence
  Description of Artificial Sequence: Synthetic oligonucleotide
auguccuaagaauugucag

SEQ ID NO: 72178 - RNA, 19 nt, Artificial Sequence
  Description of Artificial Sequence: Synthetic oligonucleotide
uugugcuccauuauagacu

SEQ ID NO: 72179 - RNA, 19 nt, Artificial Sequence
  Description of Artificial Sequence: Synthetic oligonucleotide
uuuucagcagugaucagua

SEQ ID NO: 72180 - RNA, 19 nt, Artificial Sequence
  Description of Artificial Sequence: Synthetic oligonucleotide
aaggcgugcucucugacgu

SEQ ID NO: 72181 - RNA, 19 nt, Artificial Sequence
  Description of Artificial Sequence: Synthetic oligonucleotide
agaucggaugcacaaacug

SEQ ID NO: 72182 - RNA, 19 nt, Artificial Sequence
  Description of Artificial Sequence: Synthetic oligonucleotide
uagcuuuauucguaaacgc

SEQ ID NO: 72183 - RNA, 19 nt, Artificial Sequence
  Description of Artificial Sequence: Synthetic oligonucleotide
ucagcgauuuugauggaga

SEQ ID NO: 72184 - RNA, 19 nt, Artificial Sequence
  Description of Artificial Sequence: Synthetic oligonucleotide
ucgauaggaacuggaaacg

SEQ ID NO: 72185 - RNA, 19 nt, Artificial Sequence
  Description of Artificial Sequence: Synthetic oligonucleotide
aauguccuaagaauuguca

SEQ ID NO: 72186 - RNA, 19 nt, Artificial Sequence
  Description of Artificial Sequence: Synthetic oligonucleotide
aaguauagccgguccacug

SEQ ID NO: 72187 - RNA, 19 nt, Artificial Sequence
  Description of Artificial Sequence: Synthetic oligonucleotide
uagagguuacacaaaucca

SEQ ID NO: 72188 - RNA, 19 nt, Artificial Sequence
  Description of Artificial Sequence: Synthetic oligonucleotide
aaugagcaguggcgcagcc

SEQ ID NO: 72189 - RNA, 19 nt, Artificial Sequence
  Description of Artificial Sequence: Synthetic oligonucleotide
aaccaaguaggguaacaca

SEQ ID NO: 72190 - RNA, 19 nt, Artificial Sequence
  Description of Artificial Sequence: Synthetic oligonucleotide
cuauguuagcgauaaccag

SEQ ID NO: 72191 - RNA, 19 nt, Artificial Sequence
  Description of Artificial Sequence: Synthetic oligonucleotide
uacuauacauuguacuuuc

SEQ ID NO: 72192 - RNA, 19 nt, Artificial Sequence
  Description of Artificial Sequence: Synthetic oligonucleotide
uuucccaggcaaaauauua

SEQ ID NO: 72193 - RNA, 19 nt, Artificial Sequence
  Description of Artificial Sequence: Synthetic oligonucleotide
uucaagauucuacuaccac

SEQ ID NO: 72194 - RNA, 19 nt, Artificial Sequence
  Description of Artificial Sequence: Synthetic oligonucleotide
uuagcgauaaccagcugau

SEQ ID NO: 72195 - RNA, 19 nt, Artificial Sequence
  Description of Artificial Sequence: Synthetic oligonucleotide
uuauagacugaaacaguuc

SEQ ID NO: 72196 - RNA, 19 nt, Artificial Sequence
  Description of Artificial Sequence: Synthetic oligonucleotide
cuacucaucgccuauaaaa

SEQ ID NO: 72197 - RNA, 19 nt, Artificial Sequence
  Description of Artificial Sequence: Synthetic oligonucleotide
aacgcuugcuuccaaacua

SEQ ID NO: 72198 - RNA, 19 nt, Artificial Sequence
  Description of Artificial Sequence: Synthetic oligonucleotide
gaaagugcaaagccacgcc

SEQ ID NO: 72199 - RNA, 19 nt, Artificial Sequence
  Description of Artificial Sequence: Synthetic oligonucleotide
aaaugagcaguggcgcagc

SEQ ID NO: 72200 - RNA, 19 nt, Artificial Sequence
  Description of Artificial Sequence: Synthetic oligonucleotide
aaacgcuugcuuccaaacu

SEQ ID NO: 72201 - RNA, 19 nt, Artificial Sequence
  Description of Artificial Sequence: Synthetic oligonucleotide
augcaaacgaagauuagag

SEQ ID NO: 72202 - RNA, 19 nt, Artificial Sequence
  Description of Artificial Sequence: Synthetic oligonucleotide
auaucugauagagugccag

SEQ ID NO: 72203 - RNA, 19 nt, Artificial Sequence
  Description of Artificial Sequence: Synthetic oligonucleotide
agacagacuagaaacaaug

SEQ ID NO: 72204 - RNA, 19 nt, Artificial Sequence
  Description of Artificial Sequence: Synthetic oligonucleotide
agguucuucuacuagaguu

SEQ ID NO: 72205 - RNA, 19 nt, Artificial Sequence
  Description of Artificial Sequence: Synthetic oligonucleotide
acggcuuaucaguaacggc

SEQ ID NO: 72206 - RNA, 19 nt, Artificial Sequence
  Description of Artificial Sequence: Synthetic oligonucleotide
uaacaacgucaucuuaaag

SEQ ID NO: 72207 - RNA, 19 nt, Artificial Sequence
  Description of Artificial Sequence: Synthetic oligonucleotide
guugugcuccauuauagac

SEQ ID NO: 72208 - RNA, 19 nt, Artificial Sequence
  Description of Artificial Sequence: Synthetic oligonucleotide
uuugccgcacacuuugggc

SEQ ID NO: 72209 - RNA, 19 nt, Artificial Sequence
  Description of Artificial Sequence: Synthetic oligonucleotide
accaaguaggguaacacag

SEQ ID NO: 72210 - RNA, 19 nt, Artificial Sequence
  Description of Artificial Sequence: Synthetic oligonucleotide
gagagauuuaaacauggua

SEQ ID NO: 72211 - RNA, 19 nt, Artificial Sequence
  Description of Artificial Sequence: Synthetic oligonucleotide
ugacauacgagaacccuuc

SEQ ID NO: 72212 - RNA, 19 nt, Artificial Sequence
  Description of Artificial Sequence: Synthetic oligonucleotide
aggugugucauucgauagg

SEQ ID NO: 72213 - RNA, 19 nt, Artificial Sequence
  Description of Artificial Sequence: Synthetic oligonucleotide
uaaacgcuugcuuccaaac

SEQ ID NO: 72214 - RNA, 19 nt, Artificial Sequence
  Description of Artificial Sequence: Synthetic oligonucleotide
ugcguauauaauuuucaau

SEQ ID NO: 72215 - RNA, 19 nt, Artificial Sequence
  Description of Artificial Sequence: Synthetic oligonucleotide
aagauagcuuucaaccaag

SEQ ID NO: 72216 - RNA, 19 nt, Artificial Sequence
  Description of Artificial Sequence: Synthetic oligonucleotide
uggauauaagcagaaagua

SEQ ID NO: 72217 - RNA, 19 nt, Artificial Sequence
  Description of Artificial Sequence: Synthetic oligonucleotide
auaggcucgauggaauugg

SEQ ID NO: 72218 - RNA, 19 nt, Artificial Sequence
  Description of Artificial Sequence: Synthetic oligonucleotide
ucuuaccuacuaaguaacc

SEQ ID NO: 72219 - RNA, 19 nt, Artificial Sequence
  Description of Artificial Sequence: Synthetic oligonucleotide
guggaacaaaauauaaggc

SEQ ID NO: 72220 - RNA, 19 nt, Artificial Sequence
  Description of Artificial Sequence: Synthetic oligonucleotide
ugugaguuucacucuguca

SEQ ID NO: 72221 - RNA, 19 nt, Artificial Sequence
  Description of Artificial Sequence: Synthetic oligonucleotide
auagucuacuaaacguccc

SEQ ID NO: 72222 - RNA, 19 nt, Artificial Sequence
  Description of Artificial Sequence: Synthetic oligonucleotide
ugucauucgauaggaacug

SEQ ID NO: 72223 - RNA, 19 nt, Artificial Sequence
  Description of Artificial Sequence: Synthetic oligonucleotide
aacaaugagccuucacaaa

SEQ ID NO: 72224 - RNA, 19 nt, Artificial Sequence
  Description of Artificial Sequence: Synthetic oligonucleotide
caacacucgugaauagugg

SEQ ID NO: 72225 - RNA, 19 nt, Artificial Sequence
  Description of Artificial Sequence: Synthetic oligonucleotide
caagaucggaugcacaaac

SEQ ID NO: 72226 - RNA, 19 nt, Artificial Sequence
  Description of Artificial Sequence: Synthetic oligonucleotide
aucggaugcacaaacuggg

SEQ ID NO: 72227 - RNA, 19 nt, Artificial Sequence
  Description of Artificial Sequence: Synthetic oligonucleotide
uggauguuauggcuggaga

SEQ ID NO: 72228 - RNA, 19 nt, Artificial Sequence
  Description of Artificial Sequence: Synthetic oligonucleotide
uagucuacuaaacguccca

SEQ ID NO: 72229 - RNA, 19 nt, Artificial Sequence
  Description of Artificial Sequence: Synthetic oligonucleotide
uuucaaccaaguaggguaa

SEQ ID NO: 72230 - RNA, 19 nt, Artificial Sequence
  Description of Artificial Sequence: Synthetic oligonucleotide
guaucuugauccuauaacu

SEQ ID NO: 72231 - RNA, 19 nt, Artificial Sequence
  Description of Artificial Sequence: Synthetic oligonucleotide
aaccaugccaugggauugc

SEQ ID NO: 72232 - RNA, 19 nt, Artificial Sequence
  Description of Artificial Sequence: Synthetic oligonucleotide
auucgauaggaacuggaaa

SEQ ID NO: 72233 - RNA, 19 nt, Artificial Sequence
  Description of Artificial Sequence: Synthetic oligonucleotide
cugcguagaauacugcuug

SEQ ID NO: 72234 - RNA, 19 nt, Artificial Sequence
  Description of Artificial Sequence: Synthetic oligonucleotide
gacgaaguauagccggucc

SEQ ID NO: 72235 - RNA, 19 nt, Artificial Sequence
  Description of Artificial Sequence: Synthetic oligonucleotide
gaucuggcgguguuaagac

SEQ ID NO: 72236 - RNA, 19 nt, Artificial Sequence
  Description of Artificial Sequence: Synthetic oligonucleotide
cuugauccuauaacugcag

SEQ ID NO: 72237 - RNA, 19 nt, Artificial Sequence
  Description of Artificial Sequence: Synthetic oligonucleotide
ucggaugcacaaacugggg

SEQ ID NO: 72238 - RNA, 19 nt, Artificial Sequence
  Description of Artificial Sequence: Synthetic oligonucleotide
uugaauggugguuggauuu

SEQ ID NO: 72239 - RNA, 19 nt, Artificial Sequence
  Description of Artificial Sequence: Synthetic oligonucleotide
auagagugccaguugugug

SEQ ID NO: 72240 - RNA, 19 nt, Artificial Sequence
  Description of Artificial Sequence: Synthetic oligonucleotide
ugguacaugaggucccacc

SEQ ID NO: 72241 - RNA, 19 nt, Artificial Sequence
  Description of Artificial Sequence: Synthetic oligonucleotide
ugcuguacuaugguugugc

SEQ ID NO: 72242 - RNA, 19 nt, Artificial Sequence
  Description of Artificial Sequence: Synthetic oligonucleotide
gcguauauaauuuucaaua

SEQ ID NO: 72243 - RNA, 19 nt, Artificial Sequence
  Description of Artificial Sequence: Synthetic oligonucleotide
ugauuagauucauccugcc

SEQ ID NO: 72244 - RNA, 19 nt, Artificial Sequence
  Description of Artificial Sequence: Synthetic oligonucleotide
ucccagucgauucuccuga

SEQ ID NO: 72245 - RNA, 19 nt, Artificial Sequence
  Description of Artificial Sequence: Synthetic oligonucleotide
ugaaugcaucuaacaaagc

SEQ ID NO: 72246 - RNA, 19 nt, Artificial Sequence
  Description of Artificial Sequence: Synthetic oligonucleotide
ugcguagaauacugcuugg

SEQ ID NO: 72247 - RNA, 19 nt, Artificial Sequence
  Description of Artificial Sequence: Synthetic oligonucleotide
ucaguagcuuuauucguaa

SEQ ID NO: 72248 - RNA, 19 nt, Artificial Sequence
  Description of Artificial Sequence: Synthetic oligonucleotide
augaguuaucaagauagcu

SEQ ID NO: 72249 - RNA, 19 nt, Artificial Sequence
  Description of Artificial Sequence: Synthetic oligonucleotide
uggucuauguuagcgauaa

SEQ ID NO: 72250 - RNA, 19 nt, Artificial Sequence
  Description of Artificial Sequence: Synthetic oligonucleotide
gaaacgggaacccaagcua

SEQ ID NO: 72251 - RNA, 19 nt, Artificial Sequence
  Description of Artificial Sequence: Synthetic oligonucleotide
agcaauuaucucuggggca

SEQ ID NO: 72252 - RNA, 19 nt, Artificial Sequence
  Description of Artificial Sequence: Synthetic oligonucleotide
uggugguuggauuucccug

SEQ ID NO: 72253 - RNA, 19 nt, Artificial Sequence
  Description of Artificial Sequence: Synthetic oligonucleotide
uuugcaagaucggaugcac

SEQ ID NO: 72254 - RNA, 19 nt, Artificial Sequence
  Description of Artificial Sequence: Synthetic oligonucleotide
uuauucguaaacgcuugcu

SEQ ID NO: 72255 - RNA, 19 nt, Artificial Sequence
  Description of Artificial Sequence: Synthetic oligonucleotide
gugaauaguggcaugguuc

SEQ ID NO: 72256 - RNA, 19 nt, Artificial Sequence
  Description of Artificial Sequence: Synthetic oligonucleotide
uugacauacgagaacccuu

SEQ ID NO: 72257 - RNA, 19 nt, Artificial Sequence
  Description of Artificial Sequence: Synthetic oligonucleotide
aguauagccgguccacugu

SEQ ID NO: 72258 - RNA, 19 nt, Artificial Sequence
  Description of Artificial Sequence: Synthetic oligonucleotide
acucaucgccuauaaaaga

SEQ ID NO: 72259 - RNA, 19 nt, Artificial Sequence
  Description of Artificial Sequence: Synthetic oligonucleotide
caaacuacaaugaaugcau

SEQ ID NO: 72260 - RNA, 19 nt, Artificial Sequence
  Description of Artificial Sequence: Synthetic oligonucleotide
uaaccaccugcguauauaa

SEQ ID NO: 72261 - RNA, 19 nt, Artificial Sequence
  Description of Artificial Sequence: Synthetic oligonucleotide
gguggagggauccugauga

SEQ ID NO: 72262 - RNA, 19 nt, Artificial Sequence
  Description of Artificial Sequence: Synthetic oligonucleotide
aaaggauggggcauacaca

SEQ ID NO: 72263 - RNA, 19 nt, Artificial Sequence
  Description of Artificial Sequence: Synthetic oligonucleotide
ugcucuauccaaugugggu

SEQ ID NO: 72264 - RNA, 19 nt, Artificial Sequence
  Description of Artificial Sequence: Synthetic oligonucleotide
caaagcgaaucaugcaaac

SEQ ID NO: 72265 - RNA, 19 nt, Artificial Sequence
  Description of Artificial Sequence: Synthetic oligonucleotide
aacgaagauuagagguuac

SEQ ID NO: 72266 - RNA, 19 nt, Artificial Sequence
  Description of Artificial Sequence: Synthetic oligonucleotide
cuaugguugugcuaugaca

SEQ ID NO: 72267 - RNA, 19 nt, Artificial Sequence
  Description of Artificial Sequence: Synthetic oligonucleotide
aguugaucacuuaugggcu

SEQ ID NO: 72268 - RNA, 19 nt, Artificial Sequence
  Description of Artificial Sequence: Synthetic oligonucleotide
uggaguagguucacuuuac

SEQ ID NO: 72269 - RNA, 19 nt, Artificial Sequence
  Description of Artificial Sequence: Synthetic oligonucleotide
acuggucuauguuagcgau

SEQ ID NO: 72270 - RNA, 19 nt, Artificial Sequence
  Description of Artificial Sequence: Synthetic oligonucleotide
guaacggccuauucaggcc

SEQ ID NO: 72271 - RNA, 19 nt, Artificial Sequence
  Description of Artificial Sequence: Synthetic oligonucleotide
aaaccuucauagucaggau

SEQ ID NO: 72272 - RNA, 19 nt, Artificial Sequence
  Description of Artificial Sequence: Synthetic oligonucleotide
acgucccaaagagagaguc

SEQ ID NO: 72273 - RNA, 19 nt, Artificial Sequence
  Description of Artificial Sequence: Synthetic oligonucleotide
caagguuguuggaugguug

SEQ ID NO: 72274 - RNA, 19 nt, Artificial Sequence
  Description of Artificial Sequence: Synthetic oligonucleotide
uucccuacuugcugaaugu

SEQ ID NO: 72275 - RNA, 19 nt, Artificial Sequence
  Description of Artificial Sequence: Synthetic oligonucleotide
caggugugucauucgauag

SEQ ID NO: 72276 - RNA, 19 nt, Artificial Sequence
  Description of Artificial Sequence: Synthetic oligonucleotide
agggucauuucccacugca

SEQ ID NO: 72277 - RNA, 19 nt, Artificial Sequence
  Description of Artificial Sequence: Synthetic oligonucleotide
cuacuaaacgucccaaaga

SEQ ID NO: 72278 - RNA, 19 nt, Artificial Sequence
  Description of Artificial Sequence: Synthetic oligonucleotide
cauacgagaacccuucaaa

SEQ ID NO: 72279 - RNA, 19 nt, Artificial Sequence
  Description of Artificial Sequence: Synthetic oligonucleotide
uagaguuaauaaguuaauu

SEQ ID NO: 72280 - RNA, 19 nt, Artificial Sequence
  Description of Artificial Sequence: Synthetic oligonucleotide
cugcuugggcucuaauucc

SEQ ID NO: 72281 - RNA, 19 nt, Artificial Sequence
  Description of Artificial Sequence: Synthetic oligonucleotide
gaauugagucauuaaaguu

SEQ ID NO: 72282 - RNA, 19 nt, Artificial Sequence
  Description of Artificial Sequence: Synthetic oligonucleotide
ucaucgccuauaaaagaua

SEQ ID NO: 72283 - RNA, 19 nt, Artificial Sequence
  Description of Artificial Sequence: Synthetic oligonucleotide
auauccuucuuaccuacua

SEQ ID NO: 72284 - RNA, 19 nt, Artificial Sequence
  Description of Artificial Sequence: Synthetic oligonucleotide
agcuuuauucguaaacgcu

SEQ ID NO: 72285 - RNA, 19 nt, Artificial Sequence
  Description of Artificial Sequence: Synthetic oligonucleotide
uccuaagaauugucaggcc

SEQ ID NO: 72286 - RNA, 19 nt, Artificial Sequence
  Description of Artificial Sequence: Synthetic oligonucleotide
uggauuucauacugcacuu

SEQ ID NO: 72287 - RNA, 19 nt, Artificial Sequence
  Description of Artificial Sequence: Synthetic oligonucleotide
cuuaccuacuaaguaacca

SEQ ID NO: 72288 - RNA, 19 nt, Artificial Sequence
  Description of Artificial Sequence: Synthetic oligonucleotide
aauucgucugaagcuuucu

SEQ ID NO: 72289 - RNA, 19 nt, Artificial Sequence
  Description of Artificial Sequence: Synthetic oligonucleotide
aauguggacuccagaccuc

SEQ ID NO: 72290 - RNA, 19 nt, Artificial Sequence
  Description of Artificial Sequence: Synthetic oligonucleotide
uuccugucagcgagcauca

SEQ ID NO: 72291 - RNA, 19 nt, Artificial Sequence
  Description of Artificial Sequence: Synthetic oligonucleotide
ucaaccaaguaggguaaca

SEQ ID NO: 72292 - RNA, 19 nt, Artificial Sequence
  Description of Artificial Sequence: Synthetic oligonucleotide
gauagcuuucaaccaagua

SEQ ID NO: 72293 - RNA, 19 nt, Artificial Sequence
  Description of Artificial Sequence: Synthetic oligonucleotide
uuaugggcuaauguccuaa

SEQ ID NO: 72294 - RNA, 19 nt, Artificial Sequence
  Description of Artificial Sequence: Synthetic oligonucleotide
acguugugcuccauuauag

SEQ ID NO: 72295 - RNA, 19 nt, Artificial Sequence
  Description of Artificial Sequence: Synthetic oligonucleotide
caugcaaacgaagauuaga

SEQ ID NO: 72296 - RNA, 19 nt, Artificial Sequence
  Description of Artificial Sequence: Synthetic oligonucleotide
agcgauuuugauggagauc

SEQ ID NO: 72297 - RNA, 19 nt, Artificial Sequence
  Description of Artificial Sequence: Synthetic oligonucleotide
caaccaaguaggguaacac

SEQ ID NO: 72298 - RNA, 19 nt, Artificial Sequence
  Description of Artificial Sequence: Synthetic oligonucleotide
acgaaguauagccggucca

SEQ ID NO: 72299 - RNA, 19 nt, Artificial Sequence
  Description of Artificial Sequence: Synthetic oligonucleotide
ugcuacucaucgccuauaa

SEQ ID NO: 72300 - RNA, 19 nt, Artificial Sequence
  Description of Artificial Sequence: Synthetic oligonucleotide
ugcacucgcaaaacauuaa

SEQ ID NO: 72301 - RNA, 19 nt, Artificial Sequence
  Description of Artificial Sequence: Synthetic oligonucleotide
gacacguugugcuccauua

SEQ ID NO: 72302 - RNA, 19 nt, Artificial Sequence
  Description of Artificial Sequence: Synthetic oligonucleotide
aaacgggaacccaagcuau

SEQ ID NO: 72303 - RNA, 19 nt, Artificial Sequence
  Description of Artificial Sequence: Synthetic oligonucleotide
uuucccagucgauucuccu

SEQ ID NO: 72304 - RNA, 19 nt, Artificial Sequence
  Description of Artificial Sequence: Synthetic oligonucleotide
cuaacaacgucaucuuaaa

SEQ ID NO: 72305 - RNA, 19 nt, Artificial Sequence
  Description of Artificial Sequence: Synthetic oligonucleotide
uuacuauuugguggaggga

SEQ ID NO: 72306 - RNA, 19 nt, Artificial Sequence
  Description of Artificial Sequence: Synthetic oligonucleotide
caucgccuauaaaagauaa

SEQ ID NO: 72307 - RNA, 19 nt, Artificial Sequence
  Description of Artificial Sequence: Synthetic oligonucleotide
ccuauucaggccgaaaacc

SEQ ID NO: 72308 - RNA, 19 nt, Artificial Sequence
  Description of Artificial Sequence: Synthetic oligonucleotide
aagaucggaugcacaaacu

SEQ ID NO: 72309 - RNA, 19 nt, Artificial Sequence
  Description of Artificial Sequence: Synthetic oligonucleotide
acauacgagaacccuucaa

SEQ ID NO: 72310 - RNA, 19 nt, Artificial Sequence
  Description of Artificial Sequence: Synthetic oligonucleotide
ggguguuuggucaugaguc

SEQ ID NO: 72311 - RNA, 19 nt, Artificial Sequence
  Description of Artificial Sequence: Synthetic oligonucleotide
gguaagcaauuaucucugg

SEQ ID NO: 72312 - RNA, 19 nt, Artificial Sequence
  Description of Artificial Sequence: Synthetic oligonucleotide
cuaaguggauguuauggcu

SEQ ID NO: 72313 - RNA, 19 nt, Artificial Sequence
  Description of Artificial Sequence: Synthetic oligonucleotide
aaaauucgucugaagcuuu

SEQ ID NO: 72314 - RNA, 19 nt, Artificial Sequence
  Description of Artificial Sequence: Synthetic oligonucleotide
ccuggauugaagaaucauc

SEQ ID NO: 72315 - RNA, 19 nt, Artificial Sequence
  Description of Artificial Sequence: Synthetic oligonucleotide
cauucgauaggaacuggaa

SEQ ID NO: 72316 - RNA, 19 nt, Artificial Sequence
  Description of Artificial Sequence: Synthetic oligonucleotide
cugcacuuugcaagaucgg

SEQ ID NO: 72317 - RNA, 19 nt, Artificial Sequence
  Description of Artificial Sequence: Synthetic oligonucleotide
gguguuaagacaggcugcc

SEQ ID NO: 72318 - RNA, 19 nt, Artificial Sequence
  Description of Artificial Sequence: Synthetic oligonucleotide
aacccaagcuauauuguuu

SEQ ID NO: 72319 - RNA, 19 nt, Artificial Sequence
  Description of Artificial Sequence: Synthetic oligonucleotide
augggcuaauguccuaaga

SEQ ID NO: 72320 - RNA, 19 nt, Artificial Sequence
  Description of Artificial Sequence: Synthetic oligonucleotide
gagaacccuucaaaaucag

SEQ ID NO: 72321 - RNA, 19 nt, Artificial Sequence
  Description of Artificial Sequence: Synthetic oligonucleotide
gaaaauucgucugaagcuu

SEQ ID NO: 72322 - RNA, 19 nt, Artificial Sequence
  Description of Artificial Sequence: Synthetic oligonucleotide
augagcaguggcgcagccc

SEQ ID NO: 72323 - RNA, 19 nt, Artificial Sequence
  Description of Artificial Sequence: Synthetic oligonucleotide
agugcuacucaucgccuau

SEQ ID NO: 72324 - RNA, 19 nt, Artificial Sequence
  Description of Artificial Sequence: Synthetic oligonucleotide
cuauucaggccgaaaaccu

SEQ ID NO: 72325 - RNA, 19 nt, Artificial Sequence
  Description of Artificial Sequence: Synthetic oligonucleotide
caauguggguuaagucccc

SEQ ID NO: 72326 - RNA, 19 nt, Artificial Sequence
  Description of Artificial Sequence: Synthetic oligonucleotide
ucccgaaacugcccuugcc

SEQ ID NO: 72327 - RNA, 19 nt, Artificial Sequence
  Description of Artificial Sequence: Synthetic oligonucleotide
uuaucaguaacggccuauu

SEQ ID NO: 72328 - RNA, 19 nt, Artificial Sequence
  Description of Artificial Sequence: Synthetic oligonucleotide
agauaaucuggaaaaccuu

SEQ ID NO: 72329 - RNA, 19 nt, Artificial Sequence
  Description of Artificial Sequence: Synthetic oligonucleotide
gcgauaaccagcugaucug

SEQ ID NO: 72330 - RNA, 19 nt, Artificial Sequence
  Description of Artificial Sequence: Synthetic oligonucleotide
ccauuugggaugcuccacg

SEQ ID NO: 72331 - RNA, 19 nt, Artificial Sequence
  Description of Artificial Sequence: Synthetic oligonucleotide
acgaagauuagagguuaca

SEQ ID NO: 72332 - RNA, 19 nt, Artificial Sequence
  Description of Artificial Sequence: Synthetic oligonucleotide
acucgugaauaguggcaug

SEQ ID NO: 72333 - RNA, 19 nt, Artificial Sequence
  Description of Artificial Sequence: Synthetic oligonucleotide
uucccgaaacugcccuugc

SEQ ID NO: 72334 - RNA, 19 nt, Artificial Sequence
  Description of Artificial Sequence: Synthetic oligonucleotide
uuccagugcuacucaucgc

SEQ ID NO: 72335 - RNA, 19 nt, Artificial Sequence
  Description of Artificial Sequence: Synthetic oligonucleotide
cugcguauauaauuuucaa

SEQ ID NO: 72336 - RNA, 19 nt, Artificial Sequence
  Description of Artificial Sequence: Synthetic oligonucleotide
auaguggcaugguucugau

SEQ ID NO: 72337 - RNA, 19 nt, Artificial Sequence
  Description of Artificial Sequence: Synthetic oligonucleotide
agaugcuuagaaaacccuu

SEQ ID NO: 72338 - RNA, 19 nt, Artificial Sequence
  Description of Artificial Sequence: Synthetic oligonucleotide
acuaaacgucccaaagaga

SEQ ID NO: 72339 - RNA, 19 nt, Artificial Sequence
  Description of Artificial Sequence: Synthetic oligonucleotide
guauagccgguccacuguc

SEQ ID NO: 72340 - RNA, 19 nt, Artificial Sequence
  Description of Artificial Sequence: Synthetic oligonucleotide
cguagaauacugcuugggc

SEQ ID NO: 72341 - RNA, 19 nt, Artificial Sequence
  Description of Artificial Sequence: Synthetic oligonucleotide
aucuaacaaagcgaaucau

SEQ ID NO: 72342 - RNA, 19 nt, Artificial Sequence
  Description of Artificial Sequence: Synthetic oligonucleotide
aauacugcuugggcucuaa

SEQ ID NO: 72343 - RNA, 19 nt, Artificial Sequence
  Description of Artificial Sequence: Synthetic oligonucleotide
cuggcgguguuaagacagg

SEQ ID NO: 72344 - RNA, 19 nt, Artificial Sequence
  Description of Artificial Sequence: Synthetic oligonucleotide
ucguaaacgcuugcuucca

SEQ ID NO: 72345 - RNA, 19 nt, Artificial Sequence
  Description of Artificial Sequence: Synthetic oligonucleotide
cucaucgccuauaaaagau

SEQ ID NO: 72346 - RNA, 19 nt, Artificial Sequence
  Description of Artificial Sequence: Synthetic oligonucleotide
gggugcucuauccaaugug

SEQ ID NO: 72347 - RNA, 19 nt, Artificial Sequence
  Description of Artificial Sequence: Synthetic oligonucleotide
aucaguagcuuuauucgua

SEQ ID NO: 72348 - RNA, 19 nt, Artificial Sequence
  Description of Artificial Sequence: Synthetic oligonucleotide
gacauacgagaacccuuca

SEQ ID NO: 72349 - RNA, 19 nt, Artificial Sequence
  Description of Artificial Sequence: Synthetic oligonucleotide
aggauggggcauacacacc

SEQ ID NO: 72350 - RNA, 19 nt, Artificial Sequence
  Description of Artificial Sequence: Synthetic oligonucleotide
acacucgugaauaguggca

SEQ ID NO: 72351 - RNA, 19 nt, Artificial Sequence
  Description of Artificial Sequence: Synthetic oligonucleotide
cugauagagugccaguugu

SEQ ID NO: 72352 - RNA, 19 nt, Artificial Sequence
  Description of Artificial Sequence: Synthetic oligonucleotide
agucuacuaaacgucccaa

SEQ ID NO: 72353 - RNA, 19 nt, Artificial Sequence
  Description of Artificial Sequence: Synthetic oligonucleotide
cuagaguuaauaaguuaau

SEQ ID NO: 72354 - RNA, 19 nt, Artificial Sequence
  Description of Artificial Sequence: Synthetic oligonucleotide
gucuacuaaacgucccaaa

SEQ ID NO: 72355 - RNA, 19 nt, Artificial Sequence
  Description of Artificial Sequence: Synthetic oligonucleotide
uuuagggucaagggucauu

SEQ ID NO: 72356 - RNA, 19 nt, Artificial Sequence
  Description of Artificial Sequence: Synthetic oligonucleotide
ccuacggcuuaucaguaac

SEQ ID NO: 72357 - RNA, 19 nt, Artificial Sequence
  Description of Artificial Sequence: Synthetic oligonucleotide
uggcgguguuaagacaggc

SEQ ID NO: 72358 - RNA, 19 nt, Artificial Sequence
  Description of Artificial Sequence: Synthetic oligonucleotide
ccugcguauauaauuuuca

SEQ ID NO: 72359 - RNA, 19 nt, Artificial Sequence
  Description of Artificial Sequence: Synthetic oligonucleotide
accuacuaaguaaccaaau

SEQ ID NO: 72360 - RNA, 19 nt, Artificial Sequence
  Description of Artificial Sequence: Synthetic oligonucleotide
acacguugugcuccauuau

SEQ ID NO: 72361 - RNA, 19 nt, Artificial Sequence
  Description of Artificial Sequence: Synthetic oligonucleotide
agcacaccguaugcccacc

SEQ ID NO: 72362 - RNA, 19 nt, Artificial Sequence
  Description of Artificial Sequence: Synthetic oligonucleotide
uguggacuccagaccucac

SEQ ID NO: 72363 - RNA, 19 nt, Artificial Sequence
  Description of Artificial Sequence: Synthetic oligonucleotide
ggguuggcuaacaacacuc

SEQ ID NO: 72364 - RNA, 19 nt, Artificial Sequence
  Description of Artificial Sequence: Synthetic oligonucleotide
gccuauucaggccgaaaac

SEQ ID NO: 72365 - RNA, 19 nt, Artificial Sequence
  Description of Artificial Sequence: Synthetic oligonucleotide
guacuaugguugugcuaug

SEQ ID NO: 72366 - RNA, 19 nt, Artificial Sequence
  Description of Artificial Sequence: Synthetic oligonucleotide
ucuauccaauguggguuaa

SEQ ID NO: 72367 - RNA, 19 nt, Artificial Sequence
  Description of Artificial Sequence: Synthetic oligonucleotide
cagcacaccguaugcccac

SEQ ID NO: 72368 - RNA, 19 nt, Artificial Sequence
  Description of Artificial Sequence: Synthetic oligonucleotide
agcaaugaauaaagacuaa

SEQ ID NO: 72369 - RNA, 19 nt, Artificial Sequence
  Description of Artificial Sequence: Synthetic oligonucleotide
ggccuauucaggccgaaaa

SEQ ID NO: 72370 - RNA, 19 nt, Artificial Sequence
  Description of Artificial Sequence: Synthetic oligonucleotide
gcggguaagagagagcaca

SEQ ID NO: 72371 - RNA, 19 nt, Artificial Sequence
  Description of Artificial Sequence: Synthetic oligonucleotide
augacgaaguauagccggu

SEQ ID NO: 72372 - RNA, 19 nt, Artificial Sequence
  Description of Artificial Sequence: Synthetic oligonucleotide
ucauuccaauguggacucc

SEQ ID NO: 72373 - RNA, 19 nt, Artificial Sequence
  Description of Artificial Sequence: Synthetic oligonucleotide
cacguugugcuccauuaua

SEQ ID NO: 72374 - RNA, 19 nt, Artificial Sequence
  Description of Artificial Sequence: Synthetic oligonucleotide
guagcggguaagagagagc

SEQ ID NO: 72375 - RNA, 19 nt, Artificial Sequence
  Description of Artificial Sequence: Synthetic oligonucleotide
gggcuugaauggugguugg

SEQ ID NO: 72376 - RNA, 19 nt, Artificial Sequence
  Description of Artificial Sequence: Synthetic oligonucleotide
cauagaagugauggggucu

SEQ ID NO: 72377 - RNA, 19 nt, Artificial Sequence
  Description of Artificial Sequence: Synthetic oligonucleotide
acgggaacccaagcuauau

SEQ ID NO: 72378 - RNA, 19 nt, Artificial Sequence
  Description of Artificial Sequence: Synthetic oligonucleotide
gguucuucuacuagaguua

SEQ ID NO: 72379 - RNA, 19 nt, Artificial Sequence
  Description of Artificial Sequence: Synthetic oligonucleotide
cugcaggugugucauucga

SEQ ID NO: 72380 - RNA, 19 nt, Artificial Sequence
  Description of Artificial Sequence: Synthetic oligonucleotide
guguuaagacaggcugccc

SEQ ID NO: 72381 - RNA, 19 nt, Artificial Sequence
  Description of Artificial Sequence: Synthetic oligonucleotide
gaaguauagccgguccacu

SEQ ID NO: 72382 - RNA, 19 nt, Artificial Sequence
  Description of Artificial Sequence: Synthetic oligonucleotide
gaguggauauaagcagaaa

SEQ ID NO: 72383 - RNA, 19 nt, Artificial Sequence
  Description of Artificial Sequence: Synthetic oligonucleotide
gagggauccugaugaugaa

SEQ ID NO: 72384 - RNA, 19 nt, Artificial Sequence
  Description of Artificial Sequence: Synthetic oligonucleotide
ccuucuuaccuacuaagua

SEQ ID NO: 72385 - RNA, 19 nt, Artificial Sequence
  Description of Artificial Sequence: Synthetic oligonucleotide
aaccaccugcguauauaau

SEQ ID NO: 72386 - RNA, 19 nt, Artificial Sequence
  Description of Artificial Sequence: Synthetic oligonucleotide
cuccaugcccauuugggau

SEQ ID NO: 72387 - RNA, 19 nt, Artificial Sequence
  Description of Artificial Sequence: Synthetic oligonucleotide
auauaaggccauagccuua

SEQ ID NO: 72388 - RNA, 19 nt, Artificial Sequence
  Description of Artificial Sequence: Synthetic oligonucleotide
gggcuaauguccuaagaau

SEQ ID NO: 72389 - RNA, 19 nt, Artificial Sequence
  Description of Artificial Sequence: Synthetic oligonucleotide
ugaucacuuaugggcuaau

SEQ ID NO: 72390 - RNA, 19 nt, Artificial Sequence
  Description of Artificial Sequence: Synthetic oligonucleotide
aacggccuauucaggccga

SEQ ID NO: 72391 - RNA, 19 nt, Artificial Sequence
  Description of Artificial Sequence: Synthetic oligonucleotide
caucucuaaguggauguua

SEQ ID NO: 72392 - RNA, 19 nt, Artificial Sequence
  Description of Artificial Sequence: Synthetic oligonucleotide
aacgggaacccaagcuaua

SEQ ID NO: 72393 - RNA, 19 nt, Artificial Sequence
  Description of Artificial Sequence: Synthetic oligonucleotide
ggcgugcucucugacgucc

SEQ ID NO: 72394 - RNA, 19 nt, Artificial Sequence
  Description of Artificial Sequence: Synthetic oligonucleotide
gcuuuauucguaaacgcuu

SEQ ID NO: 72395 - RNA, 19 nt, Artificial Sequence
  Description of Artificial Sequence: Synthetic oligonucleotide
ggucccaccguugacauau

SEQ ID NO: 72396 - RNA, 19 nt, Artificial Sequence
  Description of Artificial Sequence: Synthetic oligonucleotide
gccccuacggcuuaucagu

SEQ ID NO: 72397 - RNA, 19 nt, Artificial Sequence
  Description of Artificial Sequence: Synthetic oligonucleotide
ggcuaauguccuaagaauu

SEQ ID NO: 72398 - RNA, 19 nt, Artificial Sequence
  Description of Artificial Sequence: Synthetic oligonucleotide
cuggucuauguuagcgaua

SEQ ID NO: 72399 - RNA, 19 nt, Artificial Sequence
  Description of Artificial Sequence: Synthetic oligonucleotide
cuauaggcucgauggaauu

SEQ ID NO: 72400 - RNA, 19 nt, Artificial Sequence
  Description of Artificial Sequence: Synthetic oligonucleotide
cauauccuucuuaccuacu

SEQ ID NO: 72401 - RNA, 19 nt, Artificial Sequence
  Description of Artificial Sequence: Synthetic oligonucleotide
cgaaguauagccgguccac

SEQ ID NO: 72402 - RNA, 19 nt, Artificial Sequence
  Description of Artificial Sequence: Synthetic oligonucleotide
gcucgauggaauuggaauu

SEQ ID NO: 72403 - RNA, 19 nt, Artificial Sequence
  Description of Artificial Sequence: Synthetic oligonucleotide
caaagccacgccuuuuguu

SEQ ID NO: 72404 - RNA, 19 nt, Artificial Sequence
  Description of Artificial Sequence: Synthetic oligonucleotide
cagugcuacucaucgccua

SEQ ID NO: 72405 - RNA, 19 nt, Artificial Sequence
  Description of Artificial Sequence: Synthetic oligonucleotide
ccauauggcugguaagcaa

SEQ ID NO: 72406 - RNA, 19 nt, Artificial Sequence
  Description of Artificial Sequence: Synthetic oligonucleotide
gcuguacuaugguugugcu

SEQ ID NO: 72407 - RNA, 19 nt, Artificial Sequence
  Description of Artificial Sequence: Synthetic oligonucleotide
ggaacccaagcuauauugu

SEQ ID NO: 72408 - RNA, 19 nt, Artificial Sequence
  Description of Artificial Sequence: Synthetic oligonucleotide
cagccccuacggcuuauca

SEQ ID NO: 72409 - RNA, 19 nt, Artificial Sequence
  Description of Artificial Sequence: Synthetic oligonucleotide
cagcgauuuugauggagau

SEQ ID NO: 72410 - RNA, 19 nt, Artificial Sequence
  Description of Artificial Sequence: Synthetic oligonucleotide
gcuacucaucgccuauaaa

SEQ ID NO: 72411 - RNA, 19 nt, Artificial Sequence
  Description of Artificial Sequence: Synthetic oligonucleotide
gguacccacaaagguagua

SEQ ID NO: 72412 - RNA, 19 nt, Artificial Sequence
  Description of Artificial Sequence: Synthetic oligonucleotide
ggucuauguuagcgauaac

SEQ ID NO: 72413 - RNA, 19 nt, Artificial Sequence
  Description of Artificial Sequence: Synthetic oligonucleotide
agcugaucuggcgguguua

SEQ ID NO: 72414 - RNA, 19 nt, Artificial Sequence
  Description of Artificial Sequence: Synthetic oligonucleotide
gcuugaauggugguuggau

SEQ ID NO: 72415 - RNA, 19 nt, Artificial Sequence
  Description of Artificial Sequence: Synthetic oligonucleotide
gcaagaucggaugcacaaa

SEQ ID NO: 72416 - RNA, 19 nt, Artificial Sequence
  Description of Artificial Sequence: Synthetic oligonucleotide
cauccauccauguguccuu

SEQ ID NO: 72417 - RNA, 19 nt, Artificial Sequence
  Description of Artificial Sequence: Synthetic oligonucleotide
cguugugcuccauuauaga

SEQ ID NO: 72418 - RNA, 19 nt, Artificial Sequence
  Description of Artificial Sequence: Synthetic oligonucleotide
gcugcccucgugugaagaa

SEQ ID NO: 72419 - RNA, 19 nt, Artificial Sequence
  Description of Artificial Sequence: Synthetic oligonucleotide
gugugucauucgauaggaa

SEQ ID NO: 72420 - RNA, 19 nt, Artificial Sequence
  Description of Artificial Sequence: Synthetic oligonucleotide
gcuuaucaguaacggccua

SEQ ID NO: 72421 - RNA, 19 nt, Artificial Sequence
  Description of Artificial Sequence: Synthetic oligonucleotide
ggccauagccuuaaauuuu

SEQ ID NO: 72422 - RNA, 19 nt, Artificial Sequence
  Description of Artificial Sequence: Synthetic oligonucleotide
caccugcguauauaauuuu

SEQ ID NO: 72423 - RNA, 19 nt, Artificial Sequence
  Description of Artificial Sequence: Synthetic oligonucleotide
gcacaccguaugcccacca

SEQ ID NO: 72424 - RNA, 19 nt, Artificial Sequence
  Description of Artificial Sequence: Synthetic oligonucleotide
ggcgguguuaagacaggcu

SEQ ID NO: 72425 - RNA, 19 nt, Artificial Sequence
  Description of Artificial Sequence: Synthetic oligonucleotide
gcugcguagaauacugcuu

SEQ ID NO: 72426 - RNA, 19 nt, Artificial Sequence
  Description of Artificial Sequence: Synthetic oligonucleotide
cuuacucuuugggcuuccu

SEQ ID NO: 72427 - RNA, 19 nt, Artificial Sequence
  Description of Artificial Sequence: Synthetic oligonucleotide
acggccuauucaggccgaa

SEQ ID NO: 72428 - RNA, 19 nt, Artificial Sequence
  Description of Artificial Sequence: Synthetic oligonucleotide
ccccuauaggcucgaugga

SEQ ID NO: 72429 - RNA, 19 nt, Artificial Sequence
  Description of Artificial Sequence: Synthetic oligonucleotide
aggacacguugugcuccau

SEQ ID NO: 72430 - RNA, 19 nt, Artificial Sequence
  Description of Artificial Sequence: Synthetic oligonucleotide
cccuacggcuuaucaguaa

SEQ ID NO: 72431 - RNA, 19 nt, Artificial Sequence
  Description of Artificial Sequence: Synthetic oligonucleotide
cgaugacagaauagucuua

SEQ ID NO: 72432 - RNA, 19 nt, Artificial Sequence
  Description of Artificial Sequence: Synthetic oligonucleotide
gggaggcauuugaucucuc

SEQ ID NO: 72433 - RNA, 19 nt, Artificial Sequence
  Description of Artificial Sequence: Synthetic oligonucleotide
ccccuacggcuuaucagua

SEQ ID NO: 72434 - RNA, 19 nt, Artificial Sequence
  Description of Artificial Sequence: Synthetic oligonucleotide
cguaaacgcuugcuuccaa

SEQ ID NO: 72435 - RNA, 19 nt, Artificial Sequence
  Description of Artificial Sequence: Synthetic oligonucleotide
ggguagcggguaagagaga

SEQ ID NO: 72436 - RNA, 19 nt, Artificial Sequence
  Description of Artificial Sequence: Synthetic oligonucleotide
ccagcccuugagcuggagu

SEQ ID NO: 72437 - RNA, 19 nt, Artificial Sequence
  Description of Artificial Sequence: Synthetic oligonucleotide
gcccucgugugaagaacuu

SEQ ID NO: 72438 - RNA, 19 nt, Artificial Sequence
  Description of Artificial Sequence: Synthetic oligonucleotide
cggccuauucaggccgaaa

SEQ ID NO: 72439 - RNA, 19 nt, Artificial Sequence
  Description of Artificial Sequence: Synthetic oligonucleotide
gccgcuuggcaggguguuu

SEQ ID NO: 72440 - RNA, 19 nt, Artificial Sequence
  Description of Artificial Sequence: Synthetic oligonucleotide
aauaccuuaaauuugacac

SEQ ID NO: 72441 - RNA, 19 nt, Artificial Sequence
  Description of Artificial Sequence: Synthetic oligonucleotide
acauaugcaaaucaagucc

SEQ ID NO: 72442 - RNA, 19 nt, Artificial Sequence
  Description of Artificial Sequence: Synthetic oligonucleotide
uauagcuuuacuaugaaac

SEQ ID NO: 72443 - RNA, 19 nt, Artificial Sequence
  Description of Artificial Sequence: Synthetic oligonucleotide
uaaaagacuagcuacagug

SEQ ID NO: 72444 - RNA, 19 nt, Artificial Sequence
  Description of Artificial Sequence: Synthetic oligonucleotide
uuagacuaaggacuaaugg

SEQ ID NO: 72445 - RNA, 19 nt, Artificial Sequence
  Description of Artificial Sequence: Synthetic oligonucleotide
cauaguuugaauuguaagg

SEQ ID NO: 72446 - RNA, 19 nt, Artificial Sequence
  Description of Artificial Sequence: Synthetic oligonucleotide
gucuauaaguuccagaacg

SEQ ID NO: 72447 - RNA, 19 nt, Artificial Sequence
  Description of Artificial Sequence: Synthetic oligonucleotide
aacaguacuagacaggacu

SEQ ID NO: 72448 - RNA, 19 nt, Artificial Sequence
  Description of Artificial Sequence: Synthetic oligonucleotide
aaaucuuagacuaaggacu

SEQ ID NO: 72449 - RNA, 19 nt, Artificial Sequence
  Description of Artificial Sequence: Synthetic oligonucleotide
acuaugaaggauuggagac

SEQ ID NO: 72450 - RNA, 19 nt, Artificial Sequence
  Description of Artificial Sequence: Synthetic oligonucleotide
aaaccuagaagccugaaaa

SEQ ID NO: 72451 - RNA, 19 nt, Artificial Sequence
  Description of Artificial Sequence: Synthetic oligonucleotide
aaacacuauuuauauggcg

SEQ ID NO: 72452 - RNA, 19 nt, Artificial Sequence
  Description of Artificial Sequence: Synthetic oligonucleotide
ucgacuguuuguaacaagg

SEQ ID NO: 72453 - RNA, 19 nt, Artificial Sequence
  Description of Artificial Sequence: Synthetic oligonucleotide
uuugauggaaaacuacugc

SEQ ID NO: 72454 - RNA, 19 nt, Artificial Sequence
  Description of Artificial Sequence: Synthetic oligonucleotide
agaaauaguccuuauggag

SEQ ID NO: 72455 - RNA, 19 nt, Artificial Sequence
  Description of Artificial Sequence: Synthetic oligonucleotide
ugucaauucaguuuaggca

SEQ ID NO: 72456 - RNA, 19 nt, Artificial Sequence
  Description of Artificial Sequence: Synthetic oligonucleotide
uuugcaggugaucaaauca

SEQ ID NO: 72457 - RNA, 19 nt, Artificial Sequence
  Description of Artificial Sequence: Synthetic oligonucleotide
uacacgguaugcuagaacc

SEQ ID NO: 72458 - RNA, 19 nt, Artificial Sequence
  Description of Artificial Sequence: Synthetic oligonucleotide
aacaauggaaacuggagaa

SEQ ID NO: 72459 - RNA, 19 nt, Artificial Sequence
  Description of Artificial Sequence: Synthetic oligonucleotide
aaaacacuauuuauauggc

SEQ ID NO: 72460 - RNA, 19 nt, Artificial Sequence
  Description of Artificial Sequence: Synthetic oligonucleotide
aacuaugaaggauuggaga

SEQ ID NO: 72461 - RNA, 19 nt, Artificial Sequence
  Description of Artificial Sequence: Synthetic oligonucleotide
agagaaaugcuauaccaag

SEQ ID NO: 72462 - RNA, 19 nt, Artificial Sequence
  Description of Artificial Sequence: Synthetic oligonucleotide
ucuaaggaguuacuuagcc

SEQ ID NO: 72463 - RNA, 19 nt, Artificial Sequence
  Description of Artificial Sequence: Synthetic oligonucleotide
  modified_base (8)..(8): a, c, u, g, unknown or other
gaugcuancugauccauug

SEQ ID NO: 72464 - RNA, 19 nt, Artificial Sequence
  Description of Artificial Sequence: Synthetic oligonucleotide
caaccaucgaagcugaucg

SEQ ID NO: 72465 - RNA, 19 nt, Artificial Sequence
  Description of Artificial Sequence: Synthetic oligonucleotide
gauugacugaaucuucccg

SEQ ID NO: 72466 - RNA, 19 nt, Artificial Sequence
  Description of Artificial Sequence: Synthetic oligonucleotide
uaaggaguuacuuagccaa

SEQ ID NO: 72467 - RNA, 19 nt, Artificial Sequence
  Description of Artificial Sequence: Synthetic oligonucleotide
uuaaugaacagguuauggu

SEQ ID NO: 72468 - RNA, 19 nt, Artificial Sequence
  Description of Artificial Sequence: Synthetic oligonucleotide
auaacaacccaacaaagaa

SEQ ID NO: 72469 - RNA, 19 nt, Artificial Sequence
  Description of Artificial Sequence: Synthetic oligonucleotide
aaauaguccuuauggagga

SEQ ID NO: 72470 - RNA, 19 nt, Artificial Sequence
  Description of Artificial Sequence: Synthetic oligonucleotide
uggacugacaaguacagcu

SEQ ID NO: 72471 - RNA, 19 nt, Artificial Sequence
  Description of Artificial Sequence: Synthetic oligonucleotide
ugacguuuacagaugaccc

SEQ ID NO: 72472 - RNA, 19 nt, Artificial Sequence
  Description of Artificial Sequence: Synthetic oligonucleotide
uagacuaaggacuaauggu

SEQ ID NO: 72473 - RNA, 19 nt, Artificial Sequence
  Description of Artificial Sequence: Synthetic oligonucleotide
acuauuuauauggcgaagg

SEQ ID NO: 72474 - RNA, 19 nt, Artificial Sequence
  Description of Artificial Sequence: Synthetic oligonucleotide
uguccaagucuuuaugagg

SEQ ID NO: 72475 - RNA, 19 nt, Artificial Sequence
  Description of Artificial Sequence: Synthetic oligonucleotide
uugucaauucaguuuaggc

SEQ ID NO: 72476 - RNA, 19 nt, Artificial Sequence
  Description of Artificial Sequence: Synthetic oligonucleotide
cacaauacuccauaggaac

SEQ ID NO: 72477 - RNA, 19 nt, Artificial Sequence
  Description of Artificial Sequence: Synthetic oligonucleotide
gguaauuagccucauagug

SEQ ID NO: 72478 - RNA, 19 nt, Artificial Sequence
  Description of Artificial Sequence: Synthetic oligonucleotide
uugguaguuucacuaagcc

SEQ ID NO: 72479 - RNA, 19 nt, Artificial Sequence
  Description of Artificial Sequence: Synthetic oligonucleotide
cugauuaacacugaaauga

SEQ ID NO: 72480 - RNA, 19 nt, Artificial Sequence
  Description of Artificial Sequence: Synthetic oligonucleotide
uuguguaguacuuacugcu

SEQ ID NO: 72481 - RNA, 19 nt, Artificial Sequence
  Description of Artificial Sequence: Synthetic oligonucleotide
uccggagucuauaaguucc

SEQ ID NO: 72482 - RNA, 19 nt, Artificial Sequence
  Description of Artificial Sequence: Synthetic oligonucleotide
aauaaaccaacaauggaaa

SEQ ID NO: 72483 - RNA, 19 nt, Artificial Sequence
  Description of Artificial Sequence: Synthetic oligonucleotide
ugugcuuacuuacagcuaa

SEQ ID NO: 72484 - RNA, 19 nt, Artificial Sequence
  Description of Artificial Sequence: Synthetic oligonucleotide
uaauuagccucauaguggu

SEQ ID NO: 72485 - RNA, 19 nt, Artificial Sequence
  Description of Artificial Sequence: Synthetic oligonucleotide
ugaguuuucauagcuuggg

SEQ ID NO: 72486 - RNA, 19 nt, Artificial Sequence
  Description of Artificial Sequence: Synthetic oligonucleotide
auuuugugcuuacuuacag

SEQ ID NO: 72487 - RNA, 19 nt, Artificial Sequence
  Description of Artificial Sequence: Synthetic oligonucleotide
uaaugaacagguuauggua

SEQ ID NO: 72488 - RNA, 19 nt, Artificial Sequence
  Description of Artificial Sequence: Synthetic oligonucleotide
ugcuacauaaauguuauau

SEQ ID NO: 72489 - RNA, 19 nt, Artificial Sequence
  Description of Artificial Sequence: Synthetic oligonucleotide
auaguuugaauuguaaggu

SEQ ID NO: 72490 - RNA, 19 nt, Artificial Sequence
  Description of Artificial Sequence: Synthetic oligonucleotide
aauuggugcauuaugggga

SEQ ID NO: 72491 - RNA, 19 nt, Artificial Sequence
  Description of Artificial Sequence: Synthetic oligonucleotide
cuacuaugcucuuaaaaug

SEQ ID NO: 72492 - RNA, 19 nt, Artificial Sequence
  Description of Artificial Sequence: Synthetic oligonucleotide
aaccuagaagccugaaaag

SEQ ID NO: 72493 - RNA, 19 nt, Artificial Sequence
  Description of Artificial Sequence: Synthetic oligonucleotide
aaucuagaaagaguaauau

SEQ ID NO: 72494 - RNA, 19 nt, Artificial Sequence
  Description of Artificial Sequence: Synthetic oligonucleotide
ucuauaaguuccagaacga

SEQ ID NO: 72495 - RNA, 19 nt, Artificial Sequence
  Description of Artificial Sequence: Synthetic oligonucleotide
ugcuauuauagcuuuacua

SEQ ID NO: 72496 - RNA, 19 nt, Artificial Sequence
  Description of Artificial Sequence: Synthetic oligonucleotide
uuuauauguagaccucaca

SEQ ID NO: 72497 - RNA, 19 nt, Artificial Sequence
  Description of Artificial Sequence: Synthetic oligonucleotide
uagacuaaggaugacugcc

SEQ ID NO: 72498 - RNA, 19 nt, Artificial Sequence
  Description of Artificial Sequence: Synthetic oligonucleotide
uggaaguucaaagugauua

SEQ ID NO: 72499 - RNA, 19 nt, Artificial Sequence
  Description of Artificial Sequence: Synthetic oligonucleotide
agacuaaggacuaaugguc

SEQ ID NO: 72500 - RNA, 19 nt, Artificial Sequence
  Description of Artificial Sequence: Synthetic oligonucleotide
ucuagccuacuguugaugc

SEQ ID NO: 72501 - RNA, 19 nt, Artificial Sequence
  Description of Artificial Sequence: Synthetic oligonucleotide
cuucagauaaucugaguug

SEQ ID NO: 72502 - RNA, 19 nt, Artificial Sequence
  Description of Artificial Sequence: Synthetic oligonucleotide
aggugaucaaaucacccuc

SEQ ID NO: 72503 - RNA, 19 nt, Artificial Sequence
  Description of Artificial Sequence: Synthetic oligonucleotide
  modified_base (2)..(2): a, c, u, g, unknown or other
ancugauccauugauggga

SEQ ID NO: 72504 - RNA, 19 nt, Artificial Sequence
  Description of Artificial Sequence: Synthetic oligonucleotide
ucuuuaugaggagagguca

SEQ ID NO: 72505 - RNA, 19 nt, Artificial Sequence
  Description of Artificial Sequence: Synthetic oligonucleotide
acaacuaugaaggauugga

SEQ ID NO: 72506 - RNA, 19 nt, Artificial Sequence
  Description of Artificial Sequence: Synthetic oligonucleotide
aaaugcuauaccaaguaau

SEQ ID NO: 72507 - RNA, 19 nt, Artificial Sequence
  Description of Artificial Sequence: Synthetic oligonucleotide
uuuaacuaccuaauauaau

SEQ ID NO: 72508 - RNA, 19 nt, Artificial Sequence
  Description of Artificial Sequence: Synthetic oligonucleotide
aagucuaauauagcgaaaa

SEQ ID NO: 72509 - RNA, 19 nt, Artificial Sequence
  Description of Artificial Sequence: Synthetic oligonucleotide
auugacugaaucuucccga

SEQ ID NO: 72510 - RNA, 19 nt, Artificial Sequence
  Description of Artificial Sequence: Synthetic oligonucleotide
cacuaaauucaccuaagac

SEQ ID NO: 72511 - RNA, 19 nt, Artificial Sequence
  Description of Artificial Sequence: Synthetic oligonucleotide
uccacuaaauucaccuaag

SEQ ID NO: 72512 - RNA, 19 nt, Artificial Sequence
  Description of Artificial Sequence: Synthetic oligonucleotide
ucaccuaagacugacuugu

SEQ ID NO: 72513 - RNA, 19 nt, Artificial Sequence
  Description of Artificial Sequence: Synthetic oligonucleotide
gacaaguacagcucagcgc

SEQ ID NO: 72514 - RNA, 19 nt, Artificial Sequence
  Description of Artificial Sequence: Synthetic oligonucleotide
uuaagacacuaacagguau

SEQ ID NO: 72515 - RNA, 19 nt, Artificial Sequence
  Description of Artificial Sequence: Synthetic oligonucleotide
uaaguuacacuucuugcua

SEQ ID NO: 72516 - RNA, 19 nt, Artificial Sequence
  Description of Artificial Sequence: Synthetic oligonucleotide
aaagugauuaccgugucuu

SEQ ID NO: 72517 - RNA, 19 nt, Artificial Sequence
  Description of Artificial Sequence: Synthetic oligonucleotide
uaauggucaacagauggug

SEQ ID NO: 72518 - RNA, 19 nt, Artificial Sequence
  Description of Artificial Sequence: Synthetic oligonucleotide
cucacaauacuccauagga

SEQ ID NO: 72519 - RNA, 19 nt, Artificial Sequence
  Description of Artificial Sequence: Synthetic oligonucleotide
auaggaacuacacgguaug

SEQ ID NO: 72520 - RNA, 19 nt, Artificial Sequence
  Description of Artificial Sequence: Synthetic oligonucleotide
ucauaggauuacauuugag

SEQ ID NO: 72521 - RNA, 19 nt, Artificial Sequence
  Description of Artificial Sequence: Synthetic oligonucleotide
gaguuacuuagccaagacc

SEQ ID NO: 72522 - RNA, 19 nt, Artificial Sequence
  Description of Artificial Sequence: Synthetic oligonucleotide
acauacggugaacugcugg

SEQ ID NO: 72523 - RNA, 19 nt, Artificial Sequence
  Description of Artificial Sequence: Synthetic oligonucleotide
caaaaucuuagacuaagga

SEQ ID NO: 72524 - RNA, 19 nt, Artificial Sequence
  Description of Artificial Sequence: Synthetic oligonucleotide
ugguaguuucacuaagccc

SEQ ID NO: 72525 - RNA, 19 nt, Artificial Sequence
  Description of Artificial Sequence: Synthetic oligonucleotide
ugaccauaaccuaugccga

SEQ ID NO: 72526 - RNA, 19 nt, Artificial Sequence
  Description of Artificial Sequence: Synthetic oligonucleotide
agacugacuuguuagaaau

SEQ ID NO: 72527 - RNA, 19 nt, Artificial Sequence
  Description of Artificial Sequence: Synthetic oligonucleotide
cauugaugggagaguaugg

SEQ ID NO: 72528 - RNA, 19 nt, Artificial Sequence
  Description of Artificial Sequence: Synthetic oligonucleotide
uauauggcgaaggucggag

SEQ ID NO: 72529 - RNA, 19 nt, Artificial Sequence
  Description of Artificial Sequence: Synthetic oligonucleotide
uucuccggagucuauaagu

SEQ ID NO: 72530 - RNA, 19 nt, Artificial Sequence
  Description of Artificial Sequence: Synthetic oligonucleotide
acugguaccugugagaggu

SEQ ID NO: 72531 - RNA, 19 nt, Artificial Sequence
  Description of Artificial Sequence: Synthetic oligonucleotide
cugacguuuacagaugacc

SEQ ID NO: 72532 - RNA, 19 nt, Artificial Sequence
  Description of Artificial Sequence: Synthetic oligonucleotide
auagaguaugauguaacug

SEQ ID NO: 72533 - RNA, 19 nt, Artificial Sequence
  Description of Artificial Sequence: Synthetic oligonucleotide
aauucuccggagucuauaa

SEQ ID NO: 72534 - RNA, 19 nt, Artificial Sequence
  Description of Artificial Sequence: Synthetic oligonucleotide
auuggugcauuauggggag

SEQ ID NO: 72535 - RNA, 19 nt, Artificial Sequence
  Description of Artificial Sequence: Synthetic oligonucleotide
aaugcuauaccaaguaaua

SEQ ID NO: 72536 - RNA, 19 nt, Artificial Sequence
  Description of Artificial Sequence: Synthetic oligonucleotide
uuagcugauuaacacugaa

SEQ ID NO: 72537 - RNA, 19 nt, Artificial Sequence
  Description of Artificial Sequence: Synthetic oligonucleotide
acacuaacagguaugccgg

SEQ ID NO: 72538 - RNA, 19 nt, Artificial Sequence
  Description of Artificial Sequence: Synthetic oligonucleotide
cacagauagaguaugaugu

SEQ ID NO: 72539 - RNA, 19 nt, Artificial Sequence
  Description of Artificial Sequence: Synthetic oligonucleotide
gcucuaaggaguuacuuag

SEQ ID NO: 72540 - RNA, 19 nt, Artificial Sequence
  Description of Artificial Sequence: Synthetic oligonucleotide
aaaucuagaaagaguaaua

SEQ ID NO: 72541 - RNA, 19 nt, Artificial Sequence
  Description of Artificial Sequence: Synthetic oligonucleotide
auuauggggagugaaguga

SEQ ID NO: 72542 - RNA, 19 nt, Artificial Sequence
  Description of Artificial Sequence: Synthetic oligonucleotide
ucuagacgagaccuugaug

SEQ ID NO: 72543 - RNA, 19 nt, Artificial Sequence
  Description of Artificial Sequence: Synthetic oligonucleotide
  modified_base (6)..(6): a, c, u, g, unknown or other
ugcuancugauccauugau

SEQ ID NO: 72544 - RNA, 19 nt, Artificial Sequence
  Description of Artificial Sequence: Synthetic oligonucleotide
uaaggacuaauggucaaca

SEQ ID NO: 72545 - RNA, 19 nt, Artificial Sequence
  Description of Artificial Sequence: Synthetic oligonucleotide
aaugauugccauugagauu

SEQ ID NO: 72546 - RNA, 19 nt, Artificial Sequence
  Description of Artificial Sequence: Synthetic oligonucleotide
aacaauucgcucucacaau

SEQ ID NO: 72547 - RNA, 19 nt, Artificial Sequence
  Description of Artificial Sequence: Synthetic oligonucleotide
uuccauagguaauuagccu

SEQ ID NO: 72548 - RNA, 19 nt, Artificial Sequence
  Description of Artificial Sequence: Synthetic oligonucleotide
auggcacauuuauugcuac

SEQ ID NO: 72549 - RNA, 19 nt, Artificial Sequence
  Description of Artificial Sequence: Synthetic oligonucleotide
aacuacacgguaugcuaga

SEQ ID NO: 72550 - RNA, 19 nt, Artificial Sequence
  Description of Artificial Sequence: Synthetic oligonucleotide
uuacaagauuauuguauaa

SEQ ID NO: 72551 - RNA, 19 nt, Artificial Sequence
  Description of Artificial Sequence: Synthetic oligonucleotide
uuuagcugauuaacacuga

SEQ ID NO: 72552 - RNA, 19 nt, Artificial Sequence
  Description of Artificial Sequence: Synthetic oligonucleotide
auucaccuaagacugacuu

SEQ ID NO: 72553 - RNA, 19 nt, Artificial Sequence
  Description of Artificial Sequence: Synthetic oligonucleotide
ucugauugugcagaagcga

SEQ ID NO: 72554 - RNA, 19 nt, Artificial Sequence
  Description of Artificial Sequence: Synthetic oligonucleotide
auaggguugguaguuucac

SEQ ID NO: 72555 - RNA, 19 nt, Artificial Sequence
  Description of Artificial Sequence: Synthetic oligonucleotide
uucaccuaagacugacuug

SEQ ID NO: 72556 - RNA, 19 nt, Artificial Sequence
  Description of Artificial Sequence: Synthetic oligonucleotide
uagcuuuacuaugaaaccu

SEQ ID NO: 72557 - RNA, 19 nt, Artificial Sequence
  Description of Artificial Sequence: Synthetic oligonucleotide
uucuagacuaaggaugacu

SEQ ID NO: 72558 - RNA, 19 nt, Artificial Sequence
  Description of Artificial Sequence: Synthetic oligonucleotide
augccgggaaugcuaaggg

SEQ ID NO: 72559 - RNA, 19 nt, Artificial Sequence
  Description of Artificial Sequence: Synthetic oligonucleotide
aacccuacauuuucuuuaa

SEQ ID NO: 72560 - RNA, 19 nt, Artificial Sequence
  Description of Artificial Sequence: Synthetic oligonucleotide
ugcuagaaccuacuaugcu

SEQ ID NO: 72561 - RNA, 19 nt, Artificial Sequence
  Description of Artificial Sequence: Synthetic oligonucleotide
aaauaacccuacauuuucu

SEQ ID NO: 72562 - RNA, 19 nt, Artificial Sequence
  Description of Artificial Sequence: Synthetic oligonucleotide
aagcgcaucacccgucugu

SEQ ID NO: 72563 - RNA, 19 nt, Artificial Sequence
  Description of Artificial Sequence: Synthetic oligonucleotide
gaacuacacgguaugcuag

SEQ ID NO: 72564 - RNA, 19 nt, Artificial Sequence
  Description of Artificial Sequence: Synthetic oligonucleotide
ggaaaugugaccauugcuc

SEQ ID NO: 72565 - RNA, 19 nt, Artificial Sequence
  Description of Artificial Sequence: Synthetic oligonucleotide
agguaauuagccucauagu

SEQ ID NO: 72566 - RNA, 19 nt, Artificial Sequence
  Description of Artificial Sequence: Synthetic oligonucleotide
cauuauggggagugaagug

SEQ ID NO: 72567 - RNA, 19 nt, Artificial Sequence
  Description of Artificial Sequence: Synthetic oligonucleotide
caacaauucgcucucacaa

SEQ ID NO: 72568 - RNA, 19 nt, Artificial Sequence
  Description of Artificial Sequence: Synthetic oligonucleotide
cacaguuccauaacaauaa

SEQ ID NO: 72569 - RNA, 19 nt, Artificial Sequence
  Description of Artificial Sequence: Synthetic oligonucleotide
accaucgaagcugaucgac

SEQ ID NO: 72570 - RNA, 19 nt, Artificial Sequence
  Description of Artificial Sequence: Synthetic oligonucleotide
accuacuaugcucuuaaaa

SEQ ID NO: 72571 - RNA, 19 nt, Artificial Sequence
  Description of Artificial Sequence: Synthetic oligonucleotide
caucgaagcugaucgacug

SEQ ID NO: 72572 - RNA, 19 nt, Artificial Sequence
  Description of Artificial Sequence: Synthetic oligonucleotide
acuacugcuuguaugguca

SEQ ID NO: 72573 - RNA, 19 nt, Artificial Sequence
  Description of Artificial Sequence: Synthetic oligonucleotide
uguuugaggcagcaacagu

SEQ ID NO: 72574 - RNA, 19 nt, Artificial Sequence
  Description of Artificial Sequence: Synthetic oligonucleotide
gauagaguaugauguaacu

SEQ ID NO: 72575 - RNA, 19 nt, Artificial Sequence
  Description of Artificial Sequence: Synthetic oligonucleotide
uuugaauuguaagguuuac

SEQ ID NO: 72576 - RNA, 19 nt, Artificial Sequence
  Description of Artificial Sequence: Synthetic oligonucleotide
uagacucucccuuguaagu

SEQ ID NO: 72577 - RNA, 19 nt, Artificial Sequence
  Description of Artificial Sequence: Synthetic oligonucleotide
acacuauuuauauggcgaa

SEQ ID NO: 72578 - RNA, 19 nt, Artificial Sequence
  Description of Artificial Sequence: Synthetic oligonucleotide
ugauggaaguguugaccag

SEQ ID NO: 72579 - RNA, 19 nt, Artificial Sequence
  Description of Artificial Sequence: Synthetic oligonucleotide
ucagcgcuaaucuggcucu

SEQ ID NO: 72580 - RNA, 19 nt, Artificial Sequence
  Description of Artificial Sequence: Synthetic oligonucleotide
uugcuauuauagcuuuacu

SEQ ID NO: 72581 - RNA, 19 nt, Artificial Sequence
  Description of Artificial Sequence: Synthetic oligonucleotide
auugugaccauaaccuaug

SEQ ID NO: 72582 - RNA, 19 nt, Artificial Sequence
  Description of Artificial Sequence: Synthetic oligonucleotide
aaugcauuuugugcuuacu

SEQ ID NO: 72583 - RNA, 19 nt, Artificial Sequence
  Description of Artificial Sequence: Synthetic oligonucleotide
agcuuuaacaaugcuggca

SEQ ID NO: 72584 - RNA, 19 nt, Artificial Sequence
  Description of Artificial Sequence: Synthetic oligonucleotide
gacguuuacagaugaccca

SEQ ID NO: 72585 - RNA, 19 nt, Artificial Sequence
  Description of Artificial Sequence: Synthetic oligonucleotide
guugguaguuucacuaagc

SEQ ID NO: 72586 - RNA, 19 nt, Artificial Sequence
  Description of Artificial Sequence: Synthetic oligonucleotide
aaucuuagacuaaggacua

SEQ ID NO: 72587 - RNA, 19 nt, Artificial Sequence
  Description of Artificial Sequence: Synthetic oligonucleotide
agacuagcuacagugaaaa

SEQ ID NO: 72588 - RNA, 19 nt, Artificial Sequence
  Description of Artificial Sequence: Synthetic oligonucleotide
uugugaccauaaccuaugc

SEQ ID NO: 72589 - RNA, 19 nt, Artificial Sequence
  Description of Artificial Sequence: Synthetic oligonucleotide
uggguuugauggaaaacua

SEQ ID NO: 72590 - RNA, 19 nt, Artificial Sequence
  Description of Artificial Sequence: Synthetic oligonucleotide
auagacgccaaagccuuuc

SEQ ID NO: 72591 - RNA, 19 nt, Artificial Sequence
  Description of Artificial Sequence: Synthetic oligonucleotide
aggguugguaguuucacua

SEQ ID NO: 72592 - RNA, 19 nt, Artificial Sequence
  Description of Artificial Sequence: Synthetic oligonucleotide
uuaaugcauaaugcuaaaa

SEQ ID NO: 72593 - RNA, 19 nt, Artificial Sequence
  Description of Artificial Sequence: Synthetic oligonucleotide
cucuaaggaguuacuuagc

SEQ ID NO: 72594 - RNA, 19 nt, Artificial Sequence
  Description of Artificial Sequence: Synthetic oligonucleotide
uuguaguuacaaugcauuu

SEQ ID NO: 72595 - RNA, 19 nt, Artificial Sequence
  Description of Artificial Sequence: Synthetic oligonucleotide
cuauaaguuccagaacgac

SEQ ID NO: 72596 - RNA, 19 nt, Artificial Sequence
  Description of Artificial Sequence: Synthetic oligonucleotide
agaccucacaguuccauaa

SEQ ID NO: 72597 - RNA, 19 nt, Artificial Sequence
  Description of Artificial Sequence: Synthetic oligonucleotide
guugagguuccucucucug

SEQ ID NO: 72598 - RNA, 19 nt, Artificial Sequence
  Description of Artificial Sequence: Synthetic oligonucleotide
gacugauacuggcucuaag

SEQ ID NO: 72599 - RNA, 19 nt, Artificial Sequence
  Description of Artificial Sequence: Synthetic oligonucleotide
auucuccggagucuauaag

SEQ ID NO: 72600 - RNA, 19 nt, Artificial Sequence
  Description of Artificial Sequence: Synthetic oligonucleotide
aaacaccucaugggccggc

SEQ ID NO: 72601 - RNA, 19 nt, Artificial Sequence
  Description of Artificial Sequence: Synthetic oligonucleotide
gaaaccuagaagccugaaa

SEQ ID NO: 72602 - RNA, 19 nt, Artificial Sequence
  Description of Artificial Sequence: Synthetic oligonucleotide
gcuagaaccuacuaugcuc

SEQ ID NO: 72603 - RNA, 19 nt, Artificial Sequence
  Description of Artificial Sequence: Synthetic oligonucleotide
uuccaaccaucgaagcuga

SEQ ID NO: 72604 - RNA, 19 nt, Artificial Sequence
  Description of Artificial Sequence: Synthetic oligonucleotide
gguaaauaacccuacauuu

SEQ ID NO: 72605 - RNA, 19 nt, Artificial Sequence
  Description of Artificial Sequence: Synthetic oligonucleotide
gacuaaggacuaaugguca

SEQ ID NO: 72606 - RNA, 19 nt, Artificial Sequence
  Description of Artificial Sequence: Synthetic oligonucleotide
auuguuagccauccgccuu

SEQ ID NO: 72607 - RNA, 19 nt, Artificial Sequence
  Description of Artificial Sequence: Synthetic oligonucleotide
gacgccaaagccuuuccaa

SEQ ID NO: 72608 - RNA, 19 nt, Artificial Sequence
  Description of Artificial Sequence: Synthetic oligonucleotide
ucccgaugaguuccaacca

SEQ ID NO: 72609 - RNA, 19 nt, Artificial Sequence
  Description of Artificial Sequence: Synthetic oligonucleotide
cuaagacugacuuguuaga

SEQ ID NO: 72610 - RNA, 19 nt, Artificial Sequence
  Description of Artificial Sequence: Synthetic oligonucleotide
ccuaugccgacucagaauc

SEQ ID NO: 72611 - RNA, 19 nt, Artificial Sequence
  Description of Artificial Sequence: Synthetic oligonucleotide
gguugguaguuucacuaag

SEQ ID NO: 72612 - RNA, 19 nt, Artificial Sequence
  Description of Artificial Sequence: Synthetic oligonucleotide
auuguaaauuucugauauu

SEQ ID NO: 72613 - RNA, 19 nt, Artificial Sequence
  Description of Artificial Sequence: Synthetic oligonucleotide
cauuaauaucccgcacgcg

SEQ ID NO: 72614 - RNA, 19 nt, Artificial Sequence
  Description of Artificial Sequence: Synthetic oligonucleotide
cuucuaugugcagacugag

SEQ ID NO: 72615 - RNA, 19 nt, Artificial Sequence
  Description of Artificial Sequence: Synthetic oligonucleotide
acuaaggacuaauggucaa

SEQ ID NO: 72616 - RNA, 19 nt, Artificial Sequence
  Description of Artificial Sequence: Synthetic oligonucleotide
accaaguaauauuuuccua

SEQ ID NO: 72617 - RNA, 19 nt, Artificial Sequence
  Description of Artificial Sequence: Synthetic oligonucleotide
  modified_base (7)..(7): a, c, u, g, unknown or other
augcuancugauccauuga

SEQ ID NO: 72618 - RNA, 19 nt, Artificial Sequence
  Description of Artificial Sequence: Synthetic oligonucleotide
auacaacuaugaaggauug

SEQ ID NO: 72619 - RNA, 19 nt, Artificial Sequence
  Description of Artificial Sequence: Synthetic oligonucleotide
gcaacauacggugaacugc

SEQ ID NO: 72620 - RNA, 19 nt, Artificial Sequence
  Description of Artificial Sequence: Synthetic oligonucleotide
gaccauaaccuaugccgac

SEQ ID NO: 72621 - RNA, 19 nt, Artificial Sequence
  Description of Artificial Sequence: Synthetic oligonucleotide
gguuugugucuucagauaa

SEQ ID NO: 72622 - RNA, 19 nt, Artificial Sequence
  Description of Artificial Sequence: Synthetic oligonucleotide
agcucagcgcuaaucuggc

SEQ ID NO: 72623 - RNA, 19 nt, Artificial Sequence
  Description of Artificial Sequence: Synthetic oligonucleotide
cuaaggacuaauggucaac

SEQ ID NO: 72624 - RNA, 19 nt, Artificial Sequence
  Description of Artificial Sequence: Synthetic oligonucleotide
aaccaucgaagcugaucga

SEQ ID NO: 72625 - RNA, 19 nt, Artificial Sequence
  Description of Artificial Sequence: Synthetic oligonucleotide
aacaccucaugggccggcg

SEQ ID NO: 72626 - RNA, 19 nt, Artificial Sequence
  Description of Artificial Sequence: Synthetic oligonucleotide
cacuauuuauauggcgaag

SEQ ID NO: 72627 - RNA, 19 nt, Artificial Sequence
  Description of Artificial Sequence: Synthetic oligonucleotide
uaggguugguaguuucacu

SEQ ID NO: 72628 - RNA, 19 nt, Artificial Sequence
  Description of Artificial Sequence: Synthetic oligonucleotide
uuauauggcgaaggucgga

SEQ ID NO: 72629 - RNA, 19 nt, Artificial Sequence
  Description of Artificial Sequence: Synthetic oligonucleotide
acgguaugcuagaaccuac

SEQ ID NO: 72630 - RNA, 19 nt, Artificial Sequence
  Description of Artificial Sequence: Synthetic oligonucleotide
uaaacaccucaugggccgg

SEQ ID NO: 72631 - RNA, 19 nt, Artificial Sequence
  Description of Artificial Sequence: Synthetic oligonucleotide
uggucaacagauggugucu

SEQ ID NO: 72632 - RNA, 19 nt, Artificial Sequence
  Description of Artificial Sequence: Synthetic oligonucleotide
ugccgggaaugcuaagggc

SEQ ID NO: 72633 - RNA, 19 nt, Artificial Sequence
  Description of Artificial Sequence: Synthetic oligonucleotide
uaggaacuacacgguaugc

SEQ ID NO: 72634 - RNA, 19 nt, Artificial Sequence
  Description of Artificial Sequence: Synthetic oligonucleotide
cuacacgguaugcuagaac

SEQ ID NO: 72635 - RNA, 19 nt, Artificial Sequence
  Description of Artificial Sequence: Synthetic oligonucleotide
accuaugccgacucagaau

SEQ ID NO: 72636 - RNA, 19 nt, Artificial Sequence
  Description of Artificial Sequence: Synthetic oligonucleotide
gguuaugguaaauaacccu

SEQ ID NO: 72637 - RNA, 19 nt, Artificial Sequence
  Description of Artificial Sequence: Synthetic oligonucleotide
gauggcacauuuauugcua

SEQ ID NO: 72638 - RNA, 19 nt, Artificial Sequence
  Description of Artificial Sequence: Synthetic oligonucleotide
gggcuuuaaugcauaaugc

SEQ ID NO: 72639 - RNA, 19 nt, Artificial Sequence
  Description of Artificial Sequence: Synthetic oligonucleotide
uugugcuuacuuacagcua

SEQ ID NO: 72640 - RNA, 19 nt, Artificial Sequence
  Description of Artificial Sequence: Synthetic oligonucleotide
aucgaagcugaucgacugu

SEQ ID NO: 72641 - RNA, 19 nt, Artificial Sequence
  Description of Artificial Sequence: Synthetic oligonucleotide
cacuaacagguaugccggg

SEQ ID NO: 72642 - RNA, 19 nt, Artificial Sequence
  Description of Artificial Sequence: Synthetic oligonucleotide
agacgagaccuugaugucu

SEQ ID NO: 72643 - RNA, 19 nt, Artificial Sequence
  Description of Artificial Sequence: Synthetic oligonucleotide
aaguagacucucccuugua

SEQ ID NO: 72644 - RNA, 19 nt, Artificial Sequence
  Description of Artificial Sequence: Synthetic oligonucleotide
gcaaagucuaauauagcga

SEQ ID NO: 72645 - RNA, 19 nt, Artificial Sequence
  Description of Artificial Sequence: Synthetic oligonucleotide
cuaauggucaacagauggu

SEQ ID NO: 72646 - RNA, 19 nt, Artificial Sequence
  Description of Artificial Sequence: Synthetic oligonucleotide
aggaguuacuuagccaaga

SEQ ID NO: 72647 - RNA, 19 nt, Artificial Sequence
  Description of Artificial Sequence: Synthetic oligonucleotide
gagaguaugggaggcggca

SEQ ID NO: 72648 - RNA, 19 nt, Artificial Sequence
  Description of Artificial Sequence: Synthetic oligonucleotide
gaugagacagucucugauu

SEQ ID NO: 72649 - RNA, 19 nt, Artificial Sequence
  Description of Artificial Sequence: Synthetic oligonucleotide
  modified_base (5)..(5): a, c, u, g, unknown or other
gcuancugauccauugaug

SEQ ID NO: 72650 - RNA, 19 nt, Artificial Sequence
  Description of Artificial Sequence: Synthetic oligonucleotide
ggugaucaaaucacccucc

SEQ ID NO: 72651 - RNA, 19 nt, Artificial Sequence
  Description of Artificial Sequence: Synthetic oligonucleotide
aguccacuaaauucaccua

SEQ ID NO: 72652 - RNA, 19 nt, Artificial Sequence
  Description of Artificial Sequence: Synthetic oligonucleotide
caacauacggugaacugcu

SEQ ID NO: 72653 - RNA, 19 nt, Artificial Sequence
  Description of Artificial Sequence: Synthetic oligonucleotide
ccuucuaucuagccuacug

SEQ ID NO: 72654 - RNA, 19 nt, Artificial Sequence
  Description of Artificial Sequence: Synthetic oligonucleotide
accgugucuuaaauacaac

SEQ ID NO: 72655 - RNA, 19 nt, Artificial Sequence
  Description of Artificial Sequence: Synthetic oligonucleotide
uguuuguaacaaggcuuga

SEQ ID NO: 72656 - RNA, 19 nt, Artificial Sequence
  Description of Artificial Sequence: Synthetic oligonucleotide
auauggcgaaggucggaga

SEQ ID NO: 72657 - RNA, 19 nt, Artificial Sequence
  Description of Artificial Sequence: Synthetic oligonucleotide
accauaaccuaugccgacu

SEQ ID NO: 72658 - RNA, 19 nt, Artificial Sequence
  Description of Artificial Sequence: Synthetic oligonucleotide
caacaguacuagacaggac

SEQ ID NO: 72659 - RNA, 19 nt, Artificial Sequence
  Description of Artificial Sequence: Synthetic oligonucleotide
ggaacuacacgguaugcua

SEQ ID NO: 72660 - RNA, 19 nt, Artificial Sequence
  Description of Artificial Sequence: Synthetic oligonucleotide
gcuuguauggucaggagaa

SEQ ID NO: 72661 - RNA, 19 nt, Artificial Sequence
  Description of Artificial Sequence: Synthetic oligonucleotide
agacgccaaagccuuucca

SEQ ID NO: 72662 - RNA, 19 nt, Artificial Sequence
  Description of Artificial Sequence: Synthetic oligonucleotide
agacuaaggaugacugcca

SEQ ID NO: 72663 - RNA, 19 nt, Artificial Sequence
  Description of Artificial Sequence: Synthetic oligonucleotide
cgaugaguuccaaccaucg

SEQ ID NO: 72664 - RNA, 19 nt, Artificial Sequence
  Description of Artificial Sequence: Synthetic oligonucleotide
ucgaagcugaucgacuguu

SEQ ID NO: 72665 - RNA, 19 nt, Artificial Sequence
  Description of Artificial Sequence: Synthetic oligonucleotide
cauggaaguucaaagugau

SEQ ID NO: 72666 - RNA, 19 nt, Artificial Sequence
  Description of Artificial Sequence: Synthetic oligonucleotide
auagguaauuagccucaua

SEQ ID NO: 72667 - RNA, 19 nt, Artificial Sequence
  Description of Artificial Sequence: Synthetic oligonucleotide
gcaggugaucaaaucaccc

SEQ ID NO: 72668 - RNA, 19 nt, Artificial Sequence
  Description of Artificial Sequence: Synthetic oligonucleotide
gccgggaaugcuaagggcc

SEQ ID NO: 72669 - RNA, 19 nt, Artificial Sequence
  Description of Artificial Sequence: Synthetic oligonucleotide
uuuaggcacaaggcaacuu

SEQ ID NO: 72670 - RNA, 19 nt, Artificial Sequence
  Description of Artificial Sequence: Synthetic oligonucleotide
ggacuaauggucaacagau

SEQ ID NO: 72671 - RNA, 19 nt, Artificial Sequence
  Description of Artificial Sequence: Synthetic oligonucleotide
cauacggugaacugcuggu

SEQ ID NO: 72672 - RNA, 19 nt, Artificial Sequence
  Description of Artificial Sequence: Synthetic oligonucleotide
agcugaucgacuguuugua

SEQ ID NO: 72673 - RNA, 19 nt, Artificial Sequence
  Description of Artificial Sequence: Synthetic oligonucleotide
uccaagcgcaucacccguc

SEQ ID NO: 72674 - RNA, 19 nt, Artificial Sequence
  Description of Artificial Sequence: Synthetic oligonucleotide
uccuauccucacuucugau

SEQ ID NO: 72675 - RNA, 19 nt, Artificial Sequence
  Description of Artificial Sequence: Synthetic oligonucleotide
cagauagaguaugauguaa

SEQ ID NO: 72676 - RNA, 19 nt, Artificial Sequence
  Description of Artificial Sequence: Synthetic oligonucleotide
aacauacggugaacugcug

SEQ ID NO: 72677 - RNA, 19 nt, Artificial Sequence
  Description of Artificial Sequence: Synthetic oligonucleotide
augcuaagggccaaugguu

SEQ ID NO: 72678 - RNA, 19 nt, Artificial Sequence
  Description of Artificial Sequence: Synthetic oligonucleotide
gggaggcggcaacauacgg

SEQ ID NO: 72679 - RNA, 19 nt, Artificial Sequence
  Description of Artificial Sequence: Synthetic oligonucleotide
agcgcuaaucuggcucuuc

SEQ ID NO: 72680 - RNA, 19 nt, Artificial Sequence
  Description of Artificial Sequence: Synthetic oligonucleotide
caauacuccauaggaacua

SEQ ID NO: 72681 - RNA, 19 nt, Artificial Sequence
  Description of Artificial Sequence: Synthetic oligonucleotide
ccggcguucucucaugagc

SEQ ID NO: 72682 - RNA, 19 nt, Artificial Sequence
  Description of Artificial Sequence: Synthetic oligonucleotide
ggcucuaaggaguuacuua

SEQ ID NO: 72683 - RNA, 19 nt, Artificial Sequence
  Description of Artificial Sequence: Synthetic oligonucleotide
cuaugugcagacugagacu

SEQ ID NO: 72684 - RNA, 19 nt, Artificial Sequence
  Description of Artificial Sequence: Synthetic oligonucleotide
guaugccgggaaugcuaag

SEQ ID NO: 72685 - RNA, 19 nt, Artificial Sequence
  Description of Artificial Sequence: Synthetic oligonucleotide
ccauagguaauuagccuca

SEQ ID NO: 72686 - RNA, 19 nt, Artificial Sequence
  Description of Artificial Sequence: Synthetic oligonucleotide
uugcuacauaaauguuaua

SEQ ID NO: 72687 - RNA, 19 nt, Artificial Sequence
  Description of Artificial Sequence: Synthetic oligonucleotide
agaaccuacuaugcucuua

SEQ ID NO: 72688 - RNA, 19 nt, Artificial Sequence
  Description of Artificial Sequence: Synthetic oligonucleotide
acaaggcuugauccuccau

SEQ ID NO: 72689 - RNA, 19 nt, Artificial Sequence
  Description of Artificial Sequence: Synthetic oligonucleotide
gacccauaggguugguagu

SEQ ID NO: 72690 - RNA, 19 nt, Artificial Sequence
  Description of Artificial Sequence: Synthetic oligonucleotide
aggcuagaauaaggaaaug

SEQ ID NO: 72691 - RNA, 19 nt, Artificial Sequence
  Description of Artificial Sequence: Synthetic oligonucleotide
acuacacgguaugcuagaa

SEQ ID NO: 72692 - RNA, 19 nt, Artificial Sequence
  Description of Artificial Sequence: Synthetic oligonucleotide
ggcugacguuuacagauga

SEQ ID NO: 72693 - RNA, 19 nt, Artificial Sequence
  Description of Artificial Sequence: Synthetic oligonucleotide
agguaugccgggaaugcua

SEQ ID NO: 72694 - RNA, 19 nt, Artificial Sequence
  Description of Artificial Sequence: Synthetic oligonucleotide
uagaaccuacuaugcucuu

SEQ ID NO: 72695 - RNA, 19 nt, Artificial Sequence
  Description of Artificial Sequence: Synthetic oligonucleotide
aauagacgccaaagccuuu

SEQ ID NO: 72696 - RNA, 19 nt, Artificial Sequence
  Description of Artificial Sequence: Synthetic oligonucleotide
auggaaguguugaccaguu

SEQ ID NO: 72697 - RNA, 19 nt, Artificial Sequence
  Description of Artificial Sequence: Synthetic oligonucleotide
caugggccggcguucucuc

SEQ ID NO: 72698 - RNA, 19 nt, Artificial Sequence
  Description of Artificial Sequence: Synthetic oligonucleotide
ccaacaauucgcucucaca

SEQ ID NO: 72699 - RNA, 19 nt, Artificial Sequence
  Description of Artificial Sequence: Synthetic oligonucleotide
acccauaggguugguaguu

SEQ ID NO: 72700 - RNA, 19 nt, Artificial Sequence
  Description of Artificial Sequence: Synthetic oligonucleotide
gcucuuggauuccauaggu

SEQ ID NO: 72701 - RNA, 19 nt, Artificial Sequence
  Description of Artificial Sequence: Synthetic oligonucleotide
ccauaaccuaugccgacuc

SEQ ID NO: 72702 - RNA, 19 nt, Artificial Sequence
  Description of Artificial Sequence: Synthetic oligonucleotide
auacggugaacugcuggua

SEQ ID NO: 72703 - RNA, 19 nt, Artificial Sequence
  Description of Artificial Sequence: Synthetic oligonucleotide
guucuagacuaaggaugac

SEQ ID NO: 72704 - RNA, 19 nt, Artificial Sequence
  Description of Artificial Sequence: Synthetic oligonucleotide
gugcuuacuuacagcuaac

SEQ ID NO: 72705 - RNA, 19 nt, Artificial Sequence
  Description of Artificial Sequence: Synthetic oligonucleotide
agcuaacacuuuacaagua

SEQ ID NO: 72706 - RNA, 19 nt, Artificial Sequence
  Description of Artificial Sequence: Synthetic oligonucleotide
cacgguaugcuagaaccua

SEQ ID NO: 72707 - RNA, 19 nt, Artificial Sequence
  Description of Artificial Sequence: Synthetic oligonucleotide
ggguugguaguuucacuaa

SEQ ID NO: 72708 - RNA, 19 nt, Artificial Sequence
  Description of Artificial Sequence: Synthetic oligonucleotide
  modified_base (9)..(9): a, c, u, g, unknown or other
agaugcuancugauccauu

SEQ ID NO: 72709 - RNA, 19 nt, Artificial Sequence
  Description of Artificial Sequence: Synthetic oligonucleotide
agacugauacuggcucuaa

SEQ ID NO: 72710 - RNA, 19 nt, Artificial Sequence
  Description of Artificial Sequence: Synthetic oligonucleotide
ggcggcaacauacggugaa

SEQ ID NO: 72711 - RNA, 19 nt, Artificial Sequence
  Description of Artificial Sequence: Synthetic oligonucleotide
cuagccuacuguugaugcu

SEQ ID NO: 72712 - RNA, 19 nt, Artificial Sequence
  Description of Artificial Sequence: Synthetic oligonucleotide
ccucacaguuccauaacaa

SEQ ID NO: 72713 - RNA, 19 nt, Artificial Sequence
  Description of Artificial Sequence: Synthetic oligonucleotide
ccacuaaauucaccuaaga

SEQ ID NO: 72714 - RNA, 19 nt, Artificial Sequence
  Description of Artificial Sequence: Synthetic oligonucleotide
guuacuuagccaagaccau

SEQ ID NO: 72715 - RNA, 19 nt, Artificial Sequence
  Description of Artificial Sequence: Synthetic oligonucleotide
ggagaguaugggaggcggc

SEQ ID NO: 72716 - RNA, 19 nt, Artificial Sequence
  Description of Artificial Sequence: Synthetic oligonucleotide
gguaugccgggaaugcuaa

SEQ ID NO: 72717 - RNA, 19 nt, Artificial Sequence
  Description of Artificial Sequence: Synthetic oligonucleotide
ggguugagguuccucucuc

SEQ ID NO: 72718 - RNA, 19 nt, Artificial Sequence
  Description of Artificial Sequence: Synthetic oligonucleotide
uccaaccaucgaagcugau

SEQ ID NO: 72719 - RNA, 19 nt, Artificial Sequence
  Description of Artificial Sequence: Synthetic oligonucleotide
guagaccucacaguuccau

SEQ ID NO: 72720 - RNA, 19 nt, Artificial Sequence
  Description of Artificial Sequence: Synthetic oligonucleotide
cuuguaaguuacacuucuu

SEQ ID NO: 72721 - RNA, 19 nt, Artificial Sequence
  Description of Artificial Sequence: Synthetic oligonucleotide
cucuagacgagaccuugau

SEQ ID NO: 72722 - RNA, 19 nt, Artificial Sequence
  Description of Artificial Sequence: Synthetic oligonucleotide
gacgagaccuugaugucuu

SEQ ID NO: 72723 - RNA, 19 nt, Artificial Sequence
  Description of Artificial Sequence: Synthetic oligonucleotide
augacccauaggguuggua

SEQ ID NO: 72724 - RNA, 19 nt, Artificial Sequence
  Description of Artificial Sequence: Synthetic oligonucleotide
augggccggcguucucuca

SEQ ID NO: 72725 - RNA, 19 nt, Artificial Sequence
  Description of Artificial Sequence: Synthetic oligonucleotide
gcugacguuuacagaugac

SEQ ID NO: 72726 - RNA, 19 nt, Artificial Sequence
  Description of Artificial Sequence: Synthetic oligonucleotide
gccggcguucucucaugag

SEQ ID NO: 72727 - RNA, 19 nt, Artificial Sequence
  Description of Artificial Sequence: Synthetic oligonucleotide
acgagaccuugaugucuuu

SEQ ID NO: 72728 - RNA, 19 nt, Artificial Sequence
  Description of Artificial Sequence: Synthetic oligonucleotide
ccauaggaacuacacggua

SEQ ID NO: 72729 - RNA, 19 nt, Artificial Sequence
  Description of Artificial Sequence: Synthetic oligonucleotide
ggaggcggcaacauacggu

SEQ ID NO: 72730 - RNA, 19 nt, Artificial Sequence
  Description of Artificial Sequence: Synthetic oligonucleotide
ccucuagacgagaccuuga

SEQ ID NO: 72731 - RNA, 19 nt, Artificial Sequence
  Description of Artificial Sequence: Synthetic oligonucleotide
gcggcaacauacggugaac

SEQ ID NO: 72732 - RNA, 19 nt, Artificial Sequence
  Description of Artificial Sequence: Synthetic oligonucleotide
guaugggaggcggcaacau

SEQ ID NO: 72733 - RNA, 19 nt, Artificial Sequence
  Description of Artificial Sequence: Synthetic oligonucleotide
cuuguauggucaggagaau

SEQ ID NO: 72734 - RNA, 19 nt, Artificial Sequence
  Description of Artificial Sequence: Synthetic oligonucleotide
cauagguaauuagccucau

SEQ ID NO: 72735 - RNA, 19 nt, Artificial Sequence
  Description of Artificial Sequence: Synthetic oligonucleotide
ggccggcguucucucauga

SEQ ID NO: 72736 - RNA, 19 nt, Artificial Sequence
  Description of Artificial Sequence: Synthetic oligonucleotide
gccacagauagaguaugau

SEQ ID NO: 72737 - RNA, 19 nt, Artificial Sequence
  Description of Artificial Sequence: Synthetic oligonucleotide
cagguaugccgggaaugcu

SEQ ID NO: 72738 - RNA, 19 nt, Artificial Sequence
  Description of Artificial Sequence: Synthetic oligonucleotide
cagccacccaaaggacaga

SEQ ID NO: 72739 - RNA, 19 nt, Artificial Sequence
  Description of Artificial Sequence: Synthetic oligonucleotide
cggcguucucucaugagcu

SEQ ID NO: 72740 - RNA, 19 nt, Artificial Sequence
  Description of Artificial Sequence: Synthetic oligonucleotide
gcaagccaccucuguaauu

SEQ ID NO: 72741 - RNA, 19 nt, Artificial Sequence
  Description of Artificial Sequence: Synthetic oligonucleotide
cccgaugaguuccaaccau

SEQ ID NO: 72742 - RNA, 19 nt, Artificial Sequence
  Description of Artificial Sequence: Synthetic oligonucleotide
ccaagcgcaucacccgucu

SEQ ID NO: 72743 - RNA, 19 nt, Artificial Sequence
  Description of Artificial Sequence: Synthetic oligonucleotide
ccauugagauugacugaau

SEQ ID NO: 72744 - RNA, 19 nt, Artificial Sequence
  Description of Artificial Sequence: Synthetic oligonucleotide
cgguaugcuagaaccuacu

SEQ ID NO: 72745 - RNA, 19 nt, Artificial Sequence
  Description of Artificial Sequence: Synthetic oligonucleotide
cgaagcugaucgacuguuu

SEQ ID NO: 72746 - RNA, 19 nt, Artificial Sequence
  Description of Artificial Sequence: Synthetic oligonucleotide
cccauaggguugguaguuu

SEQ ID NO: 72747 - RNA, 19 nt, Artificial Sequence
  Description of Artificial Sequence: Synthetic oligonucleotide
cagcgcuaaucuggcucuu

SEQ ID NO: 72748 - RNA, 19 nt, Artificial Sequence
  Description of Artificial Sequence: Synthetic oligonucleotide
aauaacuugacuuuaaucu

SEQ ID NO: 72749 - RNA, 19 nt, Artificial Sequence
  Description of Artificial Sequence: Synthetic oligonucleotide
aauacuauucuuuucaauc

SEQ ID NO: 72750 - RNA, 19 nt, Artificial Sequence
  Description of Artificial Sequence: Synthetic oligonucleotide
uucaguacaacuauggugg

SEQ ID NO: 72751 - RNA, 19 nt, Artificial Sequence
  Description of Artificial Sequence: Synthetic oligonucleotide
aauagaucaugauuaaauc

SEQ ID NO: 72752 - RNA, 19 nt, Artificial Sequence
  Description of Artificial Sequence: Synthetic oligonucleotide
aauaaaaucacuaugcuau

SEQ ID NO: 72753 - RNA, 19 nt, Artificial Sequence
  Description of Artificial Sequence: Synthetic oligonucleotide
auuacgauuauuuuguuca

SEQ ID NO: 72754 - RNA, 19 nt, Artificial Sequence
  Description of Artificial Sequence: Synthetic oligonucleotide
aaagcuauacaucuaauaa

SEQ ID NO: 72755 - RNA, 19 nt, Artificial Sequence
  Description of Artificial Sequence: Synthetic oligonucleotide
uaacauaaguguaagaacu

SEQ ID NO: 72756 - RNA, 19 nt, Artificial Sequence
  Description of Artificial Sequence: Synthetic oligonucleotide
auuagcuaaaaugaaggcc

SEQ ID NO: 72757 - RNA, 19 nt, Artificial Sequence
  Description of Artificial Sequence: Synthetic oligonucleotide
ucuaauacauccuugggcu

SEQ ID NO: 72758 - RNA, 19 nt, Artificial Sequence
  Description of Artificial Sequence: Synthetic oligonucleotide
ugaacuuugucacaggaca

SEQ ID NO: 72759 - RNA, 19 nt, Artificial Sequence
  Description of Artificial Sequence: Synthetic oligonucleotide
ucaacaaacagucaccuaa

SEQ ID NO: 72760 - RNA, 19 nt, Artificial Sequence
  Description of Artificial Sequence: Synthetic oligonucleotide
acuaugaauaacaauuccc

SEQ ID NO: 72761 - RNA, 19 nt, Artificial Sequence
  Description of Artificial Sequence: Synthetic oligonucleotide
aauacacgaugccucuucc

SEQ ID NO: 72762 - RNA, 19 nt, Artificial Sequence
  Description of Artificial Sequence: Synthetic oligonucleotide
uguguaguaaacauguuau

SEQ ID NO: 72763 - RNA, 19 nt, Artificial Sequence
  Description of Artificial Sequence: Synthetic oligonucleotide
aaauacacgaugccucuuc

SEQ ID NO: 72764 - RNA, 19 nt, Artificial Sequence
  Description of Artificial Sequence: Synthetic oligonucleotide
uuaacuaauguguaguaaa

SEQ ID NO: 72765 - RNA, 19 nt, Artificial Sequence
  Description of Artificial Sequence: Synthetic oligonucleotide
uagaucaugauuaaaucuc

SEQ ID NO: 72766 - RNA, 19 nt, Artificial Sequence
  Description of Artificial Sequence: Synthetic oligonucleotide
uuaguauuaauagagacuu

SEQ ID NO: 72767 - RNA, 19 nt, Artificial Sequence
  Description of Artificial Sequence: Synthetic oligonucleotide
aaaugcuguuaauaaacug

SEQ ID NO: 72768 - RNA, 19 nt, Artificial Sequence
  Description of Artificial Sequence: Synthetic oligonucleotide
cucagaauuaacuaaugug

SEQ ID NO: 72769 - RNA, 19 nt, Artificial Sequence
  Description of Artificial Sequence: Synthetic oligonucleotide
auuccauagcacaugaugc

SEQ ID NO: 72770 - RNA, 19 nt, Artificial Sequence
  Description of Artificial Sequence: Synthetic oligonucleotide
uaauugaugccauaaggca

SEQ ID NO: 72771 - RNA, 19 nt, Artificial Sequence
  Description of Artificial Sequence: Synthetic oligonucleotide
auagaucaugauuaaaucu

SEQ ID NO: 72772 - RNA, 19 nt, Artificial Sequence
  Description of Artificial Sequence: Synthetic oligonucleotide
uaauauugggucagaaacc

SEQ ID NO: 72773 - RNA, 19 nt, Artificial Sequence
  Description of Artificial Sequence: Synthetic oligonucleotide
uauuaucacggacaagucc

SEQ ID NO: 72774 - RNA, 19 nt, Artificial Sequence
  Description of Artificial Sequence: Synthetic oligonucleotide
aaacuaugaauaacaauuc

SEQ ID NO: 72775 - RNA, 19 nt, Artificial Sequence
  Description of Artificial Sequence: Synthetic oligonucleotide
uuaaaugauucauuuagau

SEQ ID NO: 72776 - RNA, 19 nt, Artificial Sequence
  Description of Artificial Sequence: Synthetic oligonucleotide
ucugaaaucucuagcaacu

SEQ ID NO: 72777 - RNA, 19 nt, Artificial Sequence
  Description of Artificial Sequence: Synthetic oligonucleotide
uuuuaugaaauuccccgug

SEQ ID NO: 72778 - RNA, 19 nt, Artificial Sequence
  Description of Artificial Sequence: Synthetic oligonucleotide
gacacaauuguagauuugg

SEQ ID NO: 72779 - RNA, 19 nt, Artificial Sequence
  Description of Artificial Sequence: Synthetic oligonucleotide
agaauuaacuaauguguag

SEQ ID NO: 72780 - RNA, 19 nt, Artificial Sequence
  Description of Artificial Sequence: Synthetic oligonucleotide
auuaugaugaaagaugaga

SEQ ID NO: 72781 - RNA, 19 nt, Artificial Sequence
  Description of Artificial Sequence: Synthetic oligonucleotide
aauauugggucagaaacca

SEQ ID NO: 72782 - RNA, 19 nt, Artificial Sequence
  Description of Artificial Sequence: Synthetic oligonucleotide
aaauuccgaaauuagcuaa

SEQ ID NO: 72783 - RNA, 19 nt, Artificial Sequence
  Description of Artificial Sequence: Synthetic oligonucleotide
cagaguaucacaauucaac

SEQ ID NO: 72784 - RNA, 19 nt, Artificial Sequence
  Description of Artificial Sequence: Synthetic oligonucleotide
auaucgcucuucuauauag

SEQ ID NO: 72785 - RNA, 19 nt, Artificial Sequence
  Description of Artificial Sequence: Synthetic oligonucleotide
uucuauauagccuccgucu

SEQ ID NO: 72786 - RNA, 19 nt, Artificial Sequence
  Description of Artificial Sequence: Synthetic oligonucleotide
uggguauuuaaccauggga

SEQ ID NO: 72787 - RNA, 19 nt, Artificial Sequence
  Description of Artificial Sequence: Synthetic oligonucleotide
gacugcauuaugaugaaag

SEQ ID NO: 72788 - RNA, 19 nt, Artificial Sequence
  Description of Artificial Sequence: Synthetic oligonucleotide
aaaauuccgaaauuagcua

SEQ ID NO: 72789 - RNA, 19 nt, Artificial Sequence
  Description of Artificial Sequence: Synthetic oligonucleotide
gugagguguacuaagaggg

SEQ ID NO: 72790 - RNA, 19 nt, Artificial Sequence
  Description of Artificial Sequence: Synthetic oligonucleotide
aguuuaacgagcuuauuau

SEQ ID NO: 72791 - RNA, 19 nt, Artificial Sequence
  Description of Artificial Sequence: Synthetic oligonucleotide
aacaugcuuaacuaauaga

SEQ ID NO: 72792 - RNA, 19 nt, Artificial Sequence
  Description of Artificial Sequence: Synthetic oligonucleotide
uguuaucacaaaauaccca

SEQ ID NO: 72793 - RNA, 19 nt, Artificial Sequence
  Description of Artificial Sequence: Synthetic oligonucleotide
aacgagcuuauuaucacgg

SEQ ID NO: 72794 - RNA, 19 nt, Artificial Sequence
  Description of Artificial Sequence: Synthetic oligonucleotide
uuuaugaaauuccccguga

SEQ ID NO: 72795 - RNA, 19 nt, Artificial Sequence
  Description of Artificial Sequence: Synthetic oligonucleotide
uaugaauaacaauucccug

SEQ ID NO: 72796 - RNA, 19 nt, Artificial Sequence
  Description of Artificial Sequence: Synthetic oligonucleotide
auaaacuggaccauaucac

SEQ ID NO: 72797 - RNA, 19 nt, Artificial Sequence
  Description of Artificial Sequence: Synthetic oligonucleotide
aaucugguauguucaagug

SEQ ID NO: 72798 - RNA, 19 nt, Artificial Sequence
  Description of Artificial Sequence: Synthetic oligonucleotide
acauaaguguaagaacugc

SEQ ID NO: 72799 - RNA, 19 nt, Artificial Sequence
  Description of Artificial Sequence: Synthetic oligonucleotide
aaaccagaagcuccccugg

SEQ ID NO: 72800 - RNA, 19 nt, Artificial Sequence
  Description of Artificial Sequence: Synthetic oligonucleotide
uucucuagaauacucuuaa

SEQ ID NO: 72801 - RNA, 19 nt, Artificial Sequence
  Description of Artificial Sequence: Synthetic oligonucleotide
uauuaguuuacauuucaua

SEQ ID NO: 72802 - RNA, 19 nt, Artificial Sequence
  Description of Artificial Sequence: Synthetic oligonucleotide
uaucacaaaauacccacuc

SEQ ID NO: 72803 - RNA, 19 nt, Artificial Sequence
  Description of Artificial Sequence: Synthetic oligonucleotide
aguauguauacacaauuaa

SEQ ID NO: 72804 - RNA, 19 nt, Artificial Sequence
  Description of Artificial Sequence: Synthetic oligonucleotide
uggaccauaucacugacau

SEQ ID NO: 72805 - RNA, 19 nt, Artificial Sequence
  Description of Artificial Sequence: Synthetic oligonucleotide
auaacaauucccuggcuca

SEQ ID NO: 72806 - RNA, 19 nt, Artificial Sequence
  Description of Artificial Sequence: Synthetic oligonucleotide
uggacacaaacuaugaaua

SEQ ID NO: 72807 - RNA, 19 nt, Artificial Sequence
  Description of Artificial Sequence: Synthetic oligonucleotide
acaauuaauucugaagcag

SEQ ID NO: 72808 - RNA, 19 nt, Artificial Sequence
  Description of Artificial Sequence: Synthetic oligonucleotide
uaacuaauguguaguaaac

SEQ ID NO: 72809 - RNA, 19 nt, Artificial Sequence
  Description of Artificial Sequence: Synthetic oligonucleotide
aauuaacuaauguguagua

SEQ ID NO: 72810 - RNA, 19 nt, Artificial Sequence
  Description of Artificial Sequence: Synthetic oligonucleotide
cuuucaagggugauucucc

SEQ ID NO: 72811 - RNA, 19 nt, Artificial Sequence
  Description of Artificial Sequence: Synthetic oligonucleotide
uacauggucgaacauuugu

SEQ ID NO: 72812 - RNA, 19 nt, Artificial Sequence
  Description of Artificial Sequence: Synthetic oligonucleotide
uuugaaguauucaguacaa

SEQ ID NO: 72813 - RNA, 19 nt, Artificial Sequence
  Description of Artificial Sequence: Synthetic oligonucleotide
agguaaaaguacuauuucu

SEQ ID NO: 72814 - RNA, 19 nt, Artificial Sequence
  Description of Artificial Sequence: Synthetic oligonucleotide
guaagugucaucuuugaaa

SEQ ID NO: 72815 - RNA, 19 nt, Artificial Sequence
  Description of Artificial Sequence: Synthetic oligonucleotide
augaaauuccccgugacug

SEQ ID NO: 72816 - RNA, 19 nt, Artificial Sequence
  Description of Artificial Sequence: Synthetic oligonucleotide
ucugaaauccuaucaaaua

SEQ ID NO: 72817 - RNA, 19 nt, Artificial Sequence
  Description of Artificial Sequence: Synthetic oligonucleotide
ucauuuagaucuucuacaa

SEQ ID NO: 72818 - RNA, 19 nt, Artificial Sequence
  Description of Artificial Sequence: Synthetic oligonucleotide
uggaguaggaaguagcauc

SEQ ID NO: 72819 - RNA, 19 nt, Artificial Sequence
  Description of Artificial Sequence: Synthetic oligonucleotide
uuggauacuucauaucgcu

SEQ ID NO: 72820 - RNA, 19 nt, Artificial Sequence
  Description of Artificial Sequence: Synthetic oligonucleotide
cacacuauaggugugggag

SEQ ID NO: 72821 - RNA, 19 nt, Artificial Sequence
  Description of Artificial Sequence: Synthetic oligonucleotide
auuaucacggacaaguccu

SEQ ID NO: 72822 - RNA, 19 nt, Artificial Sequence
  Description of Artificial Sequence: Synthetic oligonucleotide
uaaacccauacacuacuca

SEQ ID NO: 72823 - RNA, 19 nt, Artificial Sequence
  Description of Artificial Sequence: Synthetic oligonucleotide
uuaacgagcuuauuaucac

SEQ ID NO: 72824 - RNA, 19 nt, Artificial Sequence
  Description of Artificial Sequence: Synthetic oligonucleotide
cuguuguggguauuuaacc

SEQ ID NO: 72825 - RNA, 19 nt, Artificial Sequence
  Description of Artificial Sequence: Synthetic oligonucleotide
aucacggacaaguccuccc

SEQ ID NO: 72826 - RNA, 19 nt, Artificial Sequence
  Description of Artificial Sequence: Synthetic oligonucleotide
uauuacgauuauuuuguuc

SEQ ID NO: 72827 - RNA, 19 nt, Artificial Sequence
  Description of Artificial Sequence: Synthetic oligonucleotide
aucucuauggaaguggucu

SEQ ID NO: 72828 - RNA, 19 nt, Artificial Sequence
  Description of Artificial Sequence: Synthetic oligonucleotide
ucccugcuaauccaugagg

SEQ ID NO: 72829 - RNA, 19 nt, Artificial Sequence
  Description of Artificial Sequence: Synthetic oligonucleotide
cuuauuaucacggacaagu

SEQ ID NO: 72830 - RNA, 19 nt, Artificial Sequence
  Description of Artificial Sequence: Synthetic oligonucleotide
aaaguuaaugauggguggu

SEQ ID NO: 72831 - RNA, 19 nt, Artificial Sequence
  Description of Artificial Sequence: Synthetic oligonucleotide
caauucaugagaccacagc

SEQ ID NO: 72832 - RNA, 19 nt, Artificial Sequence
  Description of Artificial Sequence: Synthetic oligonucleotide
aacauaaguguaagaacug

SEQ ID NO: 72833 - RNA, 19 nt, Artificial Sequence
  Description of Artificial Sequence: Synthetic oligonucleotide
uuauuaguuuacauuucau

SEQ ID NO: 72834 - RNA, 19 nt, Artificial Sequence
  Description of Artificial Sequence: Synthetic oligonucleotide
cuuacaguguuuaucuuca

SEQ ID NO: 72835 - RNA, 19 nt, Artificial Sequence
  Description of Artificial Sequence: Synthetic oligonucleotide
uagcuaauuccaaacuaga

SEQ ID NO: 72836 - RNA, 19 nt, Artificial Sequence
  Description of Artificial Sequence: Synthetic oligonucleotide
uacuaagagggccuguccu

SEQ ID NO: 72837 - RNA, 19 nt, Artificial Sequence
  Description of Artificial Sequence: Synthetic oligonucleotide
agcccuaaguaacauaagu

SEQ ID NO: 72838 - RNA, 19 nt, Artificial Sequence
  Description of Artificial Sequence: Synthetic oligonucleotide
ugcaagguaaaugaugaaa

SEQ ID NO: 72839 - RNA, 19 nt, Artificial Sequence
  Description of Artificial Sequence: Synthetic oligonucleotide
aguccucccacacuauagg

SEQ ID NO: 72840 - RNA, 19 nt, Artificial Sequence
  Description of Artificial Sequence: Synthetic oligonucleotide
uacacgaugccucuuccgu

SEQ ID NO: 72841 - RNA, 19 nt, Artificial Sequence
  Description of Artificial Sequence: Synthetic oligonucleotide
uuucaugcaguuguuauua

SEQ ID NO: 72842 - RNA, 19 nt, Artificial Sequence
  Description of Artificial Sequence: Synthetic oligonucleotide
uccauuucgcuuuuggaua

SEQ ID NO: 72843 - RNA, 19 nt, Artificial Sequence
  Description of Artificial Sequence: Synthetic oligonucleotide
ugugggaguacauuuuaaa

SEQ ID NO: 72844 - RNA, 19 nt, Artificial Sequence
  Description of Artificial Sequence: Synthetic oligonucleotide
uuggaaguggccgaaucag

SEQ ID NO: 72845 - RNA, 19 nt, Artificial Sequence
  Description of Artificial Sequence: Synthetic oligonucleotide
uuaaucugguauguucaag

SEQ ID NO: 72846 - RNA, 19 nt, Artificial Sequence
  Description of Artificial Sequence: Synthetic oligonucleotide
acuuggaaguggccgaauc

SEQ ID NO: 72847 - RNA, 19 nt, Artificial Sequence
  Description of Artificial Sequence: Synthetic oligonucleotide
uaugggaggauuacuuuau

SEQ ID NO: 72848 - RNA, 19 nt, Artificial Sequence
  Description of Artificial Sequence: Synthetic oligonucleotide
auacucuuuaauaaucuga

SEQ ID NO: 72849 - RNA, 19 nt, Artificial Sequence
  Description of Artificial Sequence: Synthetic oligonucleotide
uuauuaucacggacaaguc

SEQ ID NO: 72850 - RNA, 19 nt, Artificial Sequence
  Description of Artificial Sequence: Synthetic oligonucleotide
auauuaggcugcuuuggcu

SEQ ID NO: 72851 - RNA, 19 nt, Artificial Sequence
  Description of Artificial Sequence: Synthetic oligonucleotide
cuaugaauaacaauucccu

SEQ ID NO: 72852 - RNA, 19 nt, Artificial Sequence
  Description of Artificial Sequence: Synthetic oligonucleotide
uccaauaucuucccacuua

SEQ ID NO: 72853 - RNA, 19 nt, Artificial Sequence
  Description of Artificial Sequence: Synthetic oligonucleotide
caauuguagauuuggcauc

SEQ ID NO: 72854 - RNA, 19 nt, Artificial Sequence
  Description of Artificial Sequence: Synthetic oligonucleotide
ucuucuauauagccuccgu

SEQ ID NO: 72855 - RNA, 19 nt, Artificial Sequence
  Description of Artificial Sequence: Synthetic oligonucleotide
aacuuugucacaggacaug

SEQ ID NO: 72856 - RNA, 19 nt, Artificial Sequence
  Description of Artificial Sequence: Synthetic oligonucleotide
acccauacacuacucaaca

SEQ ID NO: 72857 - RNA, 19 nt, Artificial Sequence
  Description of Artificial Sequence: Synthetic oligonucleotide
ugcuggacuacguaugcac

SEQ ID NO: 72858 - RNA, 19 nt, Artificial Sequence
  Description of Artificial Sequence: Synthetic oligonucleotide
ugagguguacuaagagggc

SEQ ID NO: 72859 - RNA, 19 nt, Artificial Sequence
  Description of Artificial Sequence: Synthetic oligonucleotide
aaacagucaccuaaauacu

SEQ ID NO: 72860 - RNA, 19 nt, Artificial Sequence
  Description of Artificial Sequence: Synthetic oligonucleotide
uacaucuaauaaaucucaa

SEQ ID NO: 72861 - RNA, 19 nt, Artificial Sequence
  Description of Artificial Sequence: Synthetic oligonucleotide
ggguauuuaaccaugggac

SEQ ID NO: 72862 - RNA, 19 nt, Artificial Sequence
  Description of Artificial Sequence: Synthetic oligonucleotide
cauaaguguaagaacugca

SEQ ID NO: 72863 - RNA, 19 nt, Artificial Sequence
  Description of Artificial Sequence: Synthetic oligonucleotide
aaaucucuauggaaguggu

SEQ ID NO: 72864 - RNA, 19 nt, Artificial Sequence
  Description of Artificial Sequence: Synthetic oligonucleotide
acuauuucucucugcaaaa

SEQ ID NO: 72865 - RNA, 19 nt, Artificial Sequence
  Description of Artificial Sequence: Synthetic oligonucleotide
ucgaacauuuguugacuug

SEQ ID NO: 72866 - RNA, 19 nt, Artificial Sequence
  Description of Artificial Sequence: Synthetic oligonucleotide
uccaucuuuccacuuuaac

SEQ ID NO: 72867 - RNA, 19 nt, Artificial Sequence
  Description of Artificial Sequence: Synthetic oligonucleotide
auacacgaugccucuuccg

SEQ ID NO: 72868 - RNA, 19 nt, Artificial Sequence
  Description of Artificial Sequence: Synthetic oligonucleotide
uuccguacauggucgaaca

SEQ ID NO: 72869 - RNA, 19 nt, Artificial Sequence
  Description of Artificial Sequence: Synthetic oligonucleotide
uccaaacuagaaaauuauu

SEQ ID NO: 72870 - RNA, 19 nt, Artificial Sequence
  Description of Artificial Sequence: Synthetic oligonucleotide
accuaaauacuaucuaaua

SEQ ID NO: 72871 - RNA, 19 nt, Artificial Sequence
  Description of Artificial Sequence: Synthetic oligonucleotide
gagcuuauuaucacggaca

SEQ ID NO: 72872 - RNA, 19 nt, Artificial Sequence
  Description of Artificial Sequence: Synthetic oligonucleotide
agaauggcugagucauuuc

SEQ ID NO: 72873 - RNA, 19 nt, Artificial Sequence
  Description of Artificial Sequence: Synthetic oligonucleotide
guuuaacgagcuuauuauc

SEQ ID NO: 72874 - RNA, 19 nt, Artificial Sequence
  Description of Artificial Sequence: Synthetic oligonucleotide
auggucgaacauuuguuga

SEQ ID NO: 72875 - RNA, 19 nt, Artificial Sequence
  Description of Artificial Sequence: Synthetic oligonucleotide
uauaucucacacuggcuua

SEQ ID NO: 72876 - RNA, 19 nt, Artificial Sequence
  Description of Artificial Sequence: Synthetic oligonucleotide
gcaacauaccaucaccucc

SEQ ID NO: 72877 - RNA, 19 nt, Artificial Sequence
  Description of Artificial Sequence: Synthetic oligonucleotide
uuucaagggugauucucca

SEQ ID NO: 72878 - RNA, 19 nt, Artificial Sequence
  Description of Artificial Sequence: Synthetic oligonucleotide
uuagacacgacugcauuau

SEQ ID NO: 72879 - RNA, 19 nt, Artificial Sequence
  Description of Artificial Sequence: Synthetic oligonucleotide
caaaauacccacucuuaga

SEQ ID NO: 72880 - RNA, 19 nt, Artificial Sequence
  Description of Artificial Sequence: Synthetic oligonucleotide
auauuauaucucacacugg

SEQ ID NO: 72881 - RNA, 19 nt, Artificial Sequence
  Description of Artificial Sequence: Synthetic oligonucleotide
agcuuauuaucacggacaa

SEQ ID NO: 72882 - RNA, 19 nt, Artificial Sequence
  Description of Artificial Sequence: Synthetic oligonucleotide
auuaacuaauguguaguaa

SEQ ID NO: 72883 - RNA, 19 nt, Artificial Sequence
  Description of Artificial Sequence: Synthetic oligonucleotide
gagguguacuaagagggcc

SEQ ID NO: 72884 - RNA, 19 nt, Artificial Sequence
  Description of Artificial Sequence: Synthetic oligonucleotide
cuucuauauagccuccguc

SEQ ID NO: 72885 - RNA, 19 nt, Artificial Sequence
  Description of Artificial Sequence: Synthetic oligonucleotide
uuaguccggaagcaaugcu

SEQ ID NO: 72886 - RNA, 19 nt, Artificial Sequence
  Description of Artificial Sequence: Synthetic oligonucleotide
gggaggauuacuuuauuuc

SEQ ID NO: 72887 - RNA, 19 nt, Artificial Sequence
  Description of Artificial Sequence: Synthetic oligonucleotide
uuuuccccugugaaguuuc

SEQ ID NO: 72888 - RNA, 19 nt, Artificial Sequence
  Description of Artificial Sequence: Synthetic oligonucleotide
aguuuugaacuuugucaca

SEQ ID NO: 72889 - RNA, 19 nt, Artificial Sequence
  Description of Artificial Sequence: Synthetic oligonucleotide
guggguauuuaaccauggg

SEQ ID NO: 72890 - RNA, 19 nt, Artificial Sequence
  Description of Artificial Sequence: Synthetic oligonucleotide
ugccauaaggcagaguauc

SEQ ID NO: 72891 - RNA, 19 nt, Artificial Sequence
  Description of Artificial Sequence: Synthetic oligonucleotide
uucaugcaguuguuauuag

SEQ ID NO: 72892 - RNA, 19 nt, Artificial Sequence
  Description of Artificial Sequence: Synthetic oligonucleotide
agaauugauauaguaggua

SEQ ID NO: 72893 - RNA, 19 nt, Artificial Sequence
  Description of Artificial Sequence: Synthetic oligonucleotide
ugcaacauaccaucaccuc

SEQ ID NO: 72894 - RNA, 19 nt, Artificial Sequence
  Description of Artificial Sequence: Synthetic oligonucleotide
uaguagguaaaaguacuau

SEQ ID NO: 72895 - RNA, 19 nt, Artificial Sequence
  Description of Artificial Sequence: Synthetic oligonucleotide
uguacuaagagggccuguc

SEQ ID NO: 72896 - RNA, 19 nt, Artificial Sequence
  Description of Artificial Sequence: Synthetic oligonucleotide
agaucaugauuaaaucucu

SEQ ID NO: 72897 - RNA, 19 nt, Artificial Sequence
  Description of Artificial Sequence: Synthetic oligonucleotide
auaaacccauacacuacuc

SEQ ID NO: 72898 - RNA, 19 nt, Artificial Sequence
  Description of Artificial Sequence: Synthetic oligonucleotide
auaagauucuugucccaau

SEQ ID NO: 72899 - RNA, 19 nt, Artificial Sequence
  Description of Artificial Sequence: Synthetic oligonucleotide
aauuccgaaauuagcuaaa

SEQ ID NO: 72900 - RNA, 19 nt, Artificial Sequence
  Description of Artificial Sequence: Synthetic oligonucleotide
auaaaaucacuaugcuaua

SEQ ID NO: 72901 - RNA, 19 nt, Artificial Sequence
  Description of Artificial Sequence: Synthetic oligonucleotide
ugggaggauuacuuuauuu

SEQ ID NO: 72902 - RNA, 19 nt, Artificial Sequence
  Description of Artificial Sequence: Synthetic oligonucleotide
cuugucccaauucaugaga

SEQ ID NO: 72903 - RNA, 19 nt, Artificial Sequence
  Description of Artificial Sequence: Synthetic oligonucleotide
aacucagucccuccacuua

SEQ ID NO: 72904 - RNA, 19 nt, Artificial Sequence
  Description of Artificial Sequence: Synthetic oligonucleotide
guaugcacauucucuagaa

SEQ ID NO: 72905 - RNA, 19 nt, Artificial Sequence
  Description of Artificial Sequence: Synthetic oligonucleotide
aaguuaaugaugggugguu

SEQ ID NO: 72906 - RNA, 19 nt, Artificial Sequence
  Description of Artificial Sequence: Synthetic oligonucleotide
ucucuauggaaguggucuc

SEQ ID NO: 72907 - RNA, 19 nt, Artificial Sequence
  Description of Artificial Sequence: Synthetic oligonucleotide
guacuaagagggccugucc

SEQ ID NO: 72908 - RNA, 19 nt, Artificial Sequence
  Description of Artificial Sequence: Synthetic oligonucleotide
guuaaugaugggugguuaa

SEQ ID NO: 72909 - RNA, 19 nt, Artificial Sequence
  Description of Artificial Sequence: Synthetic oligonucleotide
aggccucagaauuaacuaa

SEQ ID NO: 72910 - RNA, 19 nt, Artificial Sequence
  Description of Artificial Sequence: Synthetic oligonucleotide
cuaauacauccuugggcuc

SEQ ID NO: 72911 - RNA, 19 nt, Artificial Sequence
  Description of Artificial Sequence: Synthetic oligonucleotide
cuuggaaguggccgaauca

SEQ ID NO: 72912 - RNA, 19 nt, Artificial Sequence
  Description of Artificial Sequence: Synthetic oligonucleotide
acacuacucaacaaacagu

SEQ ID NO: 72913 - RNA, 19 nt, Artificial Sequence
  Description of Artificial Sequence: Synthetic oligonucleotide
uuaucacggacaaguccuc

SEQ ID NO: 72914 - RNA, 19 nt, Artificial Sequence
  Description of Artificial Sequence: Synthetic oligonucleotide
acuauaggugugggaguac

SEQ ID NO: 72915 - RNA, 19 nt, Artificial Sequence
  Description of Artificial Sequence: Synthetic oligonucleotide
ucagucccuccacuuaaau

SEQ ID NO: 72916 - RNA, 19 nt, Artificial Sequence
  Description of Artificial Sequence: Synthetic oligonucleotide
uguucauucuugggacuca

SEQ ID NO: 72917 - RNA, 19 nt, Artificial Sequence
  Description of Artificial Sequence: Synthetic oligonucleotide
uaucacggacaaguccucc

SEQ ID NO: 72918 - RNA, 19 nt, Artificial Sequence
  Description of Artificial Sequence: Synthetic oligonucleotide
cuguaaauagaucaugauu

SEQ ID NO: 72919 - RNA, 19 nt, Artificial Sequence
  Description of Artificial Sequence: Synthetic oligonucleotide
aagcccuaaguaacauaag

SEQ ID NO: 72920 - RNA, 19 nt, Artificial Sequence
  Description of Artificial Sequence: Synthetic oligonucleotide
ucccuccacuuaaauauua

SEQ ID NO: 72921 - RNA, 19 nt, Artificial Sequence
  Description of Artificial Sequence: Synthetic oligonucleotide
agcaagguguuuauauagu

SEQ ID NO: 72922 - RNA, 19 nt, Artificial Sequence
  Description of Artificial Sequence: Synthetic oligonucleotide
acgagcuuauuaucacgga

SEQ ID NO: 72923 - RNA, 19 nt, Artificial Sequence
  Description of Artificial Sequence: Synthetic oligonucleotide
aagcagcccauaagugggg

SEQ ID NO: 72924 - RNA, 19 nt, Artificial Sequence
  Description of Artificial Sequence: Synthetic oligonucleotide
ggugcuggacuacguaugc

SEQ ID NO: 72925 - RNA, 19 nt, Artificial Sequence
  Description of Artificial Sequence: Synthetic oligonucleotide
agaagcccuaaguaacaua

SEQ ID NO: 72926 - RNA, 19 nt, Artificial Sequence
  Description of Artificial Sequence: Synthetic oligonucleotide
aguuaaugaugggugguua

SEQ ID NO: 72927 - RNA, 19 nt, Artificial Sequence
  Description of Artificial Sequence: Synthetic oligonucleotide
uuuccccugugaaguuuca

SEQ ID NO: 72928 - RNA, 19 nt, Artificial Sequence
  Description of Artificial Sequence: Synthetic oligonucleotide
gguauuuaaccaugggacu

SEQ ID NO: 72929 - RNA, 19 nt, Artificial Sequence
  Description of Artificial Sequence: Synthetic oligonucleotide
gaugagaggucaugacugu

SEQ ID NO: 72930 - RNA, 19 nt, Artificial Sequence
  Description of Artificial Sequence: Synthetic oligonucleotide
auuccgaaauuagcuaaaa

SEQ ID NO: 72931 - RNA, 19 nt, Artificial Sequence
  Description of Artificial Sequence: Synthetic oligonucleotide
acuaugguggggacuguca

SEQ ID NO: 72932 - RNA, 19 nt, Artificial Sequence
  Description of Artificial Sequence: Synthetic oligonucleotide
uaacaauucccuggcucaa

SEQ ID NO: 72933 - RNA, 19 nt, Artificial Sequence
  Description of Artificial Sequence: Synthetic oligonucleotide
uccccgugacuguauauuu

SEQ ID NO: 72934 - RNA, 19 nt, Artificial Sequence
  Description of Artificial Sequence: Synthetic oligonucleotide
gggacuuacaguguuuauc

SEQ ID NO: 72935 - RNA, 19 nt, Artificial Sequence
  Description of Artificial Sequence: Synthetic oligonucleotide
auaucucacacuggcuuaa

SEQ ID NO: 72936 - RNA, 19 nt, Artificial Sequence
  Description of Artificial Sequence: Synthetic oligonucleotide
cuuuucgauuaucuuuaaa

SEQ ID NO: 72937 - RNA, 19 nt, Artificial Sequence
  Description of Artificial Sequence: Synthetic oligonucleotide
uuugagcaccaaagagcua

SEQ ID NO: 72938 - RNA, 19 nt, Artificial Sequence
  Description of Artificial Sequence: Synthetic oligonucleotide
gugauucuccaccaauaua

SEQ ID NO: 72939 - RNA, 19 nt, Artificial Sequence
  Description of Artificial Sequence: Synthetic oligonucleotide
acgacugcauuaugaugaa

SEQ ID NO: 72940 - RNA, 19 nt, Artificial Sequence
  Description of Artificial Sequence: Synthetic oligonucleotide
ccauuucgcuuuuggauac

SEQ ID NO: 72941 - RNA, 19 nt, Artificial Sequence
  Description of Artificial Sequence: Synthetic oligonucleotide
ggacacaaacuaugaauaa

SEQ ID NO: 72942 - RNA, 19 nt, Artificial Sequence
  Description of Artificial Sequence: Synthetic oligonucleotide
cccuaaguaacauaagugu

SEQ ID NO: 72943 - RNA, 19 nt, Artificial Sequence
  Description of Artificial Sequence: Synthetic oligonucleotide
ugggacuuacaguguuuau

SEQ ID NO: 72944 - RNA, 19 nt, Artificial Sequence
  Description of Artificial Sequence: Synthetic oligonucleotide
uccguacauggucgaacau

SEQ ID NO: 72945 - RNA, 19 nt, Artificial Sequence
  Description of Artificial Sequence: Synthetic oligonucleotide
caccuaaauacuaucuaau

SEQ ID NO: 72946 - RNA, 19 nt, Artificial Sequence
  Description of Artificial Sequence: Synthetic oligonucleotide
auauagccuccgucugugu

SEQ ID NO: 72947 - RNA, 19 nt, Artificial Sequence
  Description of Artificial Sequence: Synthetic oligonucleotide
ccaauucaugagaccacag

SEQ ID NO: 72948 - RNA, 19 nt, Artificial Sequence
  Description of Artificial Sequence: Synthetic oligonucleotide
cucucccugcuaauccaug

SEQ ID NO: 72949 - RNA, 19 nt, Artificial Sequence
  Description of Artificial Sequence: Synthetic oligonucleotide
caucuuuaguccggaagca

SEQ ID NO: 72950 - RNA, 19 nt, Artificial Sequence
  Description of Artificial Sequence: Synthetic oligonucleotide
gcaguuguuauuagcaaaa

SEQ ID NO: 72951 - RNA, 19 nt, Artificial Sequence
  Description of Artificial Sequence: Synthetic oligonucleotide
gguguuuauauagucauuu

SEQ ID NO: 72952 - RNA, 19 nt, Artificial Sequence
  Description of Artificial Sequence: Synthetic oligonucleotide
auuccccgugacuguauau

SEQ ID NO: 72953 - RNA, 19 nt, Artificial Sequence
  Description of Artificial Sequence: Synthetic oligonucleotide
guauuuaaccaugggacuu

SEQ ID NO: 72954 - RNA, 19 nt, Artificial Sequence
  Description of Artificial Sequence: Synthetic oligonucleotide
uggacuacguaugcacauu

SEQ ID NO: 72955 - RNA, 19 nt, Artificial Sequence
  Description of Artificial Sequence: Synthetic oligonucleotide
cgagcuuauuaucacggac

SEQ ID NO: 72956 - RNA, 19 nt, Artificial Sequence
  Description of Artificial Sequence: Synthetic oligonucleotide
gcauacccuggucauuuug

SEQ ID NO: 72957 - RNA, 19 nt, Artificial Sequence
  Description of Artificial Sequence: Synthetic oligonucleotide
cacagcgggcaucucuuuc

SEQ ID NO: 72958 - RNA, 19 nt, Artificial Sequence
  Description of Artificial Sequence: Synthetic oligonucleotide
gcaacaaugagaggcuaga

SEQ ID NO: 72959 - RNA, 19 nt, Artificial Sequence
  Description of Artificial Sequence: Synthetic oligonucleotide
acaccuggacacaaacuau

SEQ ID NO: 72960 - RNA, 19 nt, Artificial Sequence
  Description of Artificial Sequence: Synthetic oligonucleotide
cauaucgcucuucuauaua

SEQ ID NO: 72961 - RNA, 19 nt, Artificial Sequence
  Description of Artificial Sequence: Synthetic oligonucleotide
ucccacuuaugggaggauu

SEQ ID NO: 72962 - RNA, 19 nt, Artificial Sequence
  Description of Artificial Sequence: Synthetic oligonucleotide
cuauauagccuccgucugu

SEQ ID NO: 72963 - RNA, 19 nt, Artificial Sequence
  Description of Artificial Sequence: Synthetic oligonucleotide
guacauggucgaacauuug

SEQ ID NO: 72964 - RNA, 19 nt, Artificial Sequence
  Description of Artificial Sequence: Synthetic oligonucleotide
cccugcuaauccaugagga

SEQ ID NO: 72965 - RNA, 19 nt, Artificial Sequence
  Description of Artificial Sequence: Synthetic oligonucleotide
cugcauuaugaugaaagau

SEQ ID NO: 72966 - RNA, 19 nt, Artificial Sequence
  Description of Artificial Sequence: Synthetic oligonucleotide
gagggugcuggacuacgua

SEQ ID NO: 72967 - RNA, 19 nt, Artificial Sequence
  Description of Artificial Sequence: Synthetic oligonucleotide
cucucccuuuguucaugac

SEQ ID NO: 72968 - RNA, 19 nt, Artificial Sequence
  Description of Artificial Sequence: Synthetic oligonucleotide
gaacuuugucacaggacau

SEQ ID NO: 72969 - RNA, 19 nt, Artificial Sequence
  Description of Artificial Sequence: Synthetic oligonucleotide
cacuauaggugugggagua

SEQ ID NO: 72970 - RNA, 19 nt, Artificial Sequence
  Description of Artificial Sequence: Synthetic oligonucleotide
acgaugccucuuccguaca

SEQ ID NO: 72971 - RNA, 19 nt, Artificial Sequence
  Description of Artificial Sequence: Synthetic oligonucleotide
ggacugucaauucauccau

SEQ ID NO: 72972 - RNA, 19 nt, Artificial Sequence
  Description of Artificial Sequence: Synthetic oligonucleotide
cacguaucuuccacugcaa

SEQ ID NO: 72973 - RNA, 19 nt, Artificial Sequence
  Description of Artificial Sequence: Synthetic oligonucleotide
gacuacguaugcacauucu

SEQ ID NO: 72974 - RNA, 19 nt, Artificial Sequence
  Description of Artificial Sequence: Synthetic oligonucleotide
agcacagcgggcaucucuu

SEQ ID NO: 72975 - RNA, 19 nt, Artificial Sequence
  Description of Artificial Sequence: Synthetic oligonucleotide
ggccgaaucagagccccag

SEQ ID NO: 72976 - RNA, 19 nt, Artificial Sequence
  Description of Artificial Sequence: Synthetic oligonucleotide
augccauaaggcagaguau

SEQ ID NO: 72977 - RNA, 19 nt, Artificial Sequence
  Description of Artificial Sequence: Synthetic oligonucleotide
cuggacuacguaugcacau

SEQ ID NO: 72978 - RNA, 19 nt, Artificial Sequence
  Description of Artificial Sequence: Synthetic oligonucleotide
guccucccacacuauaggu

SEQ ID NO: 72979 - RNA, 19 nt, Artificial Sequence
  Description of Artificial Sequence: Synthetic oligonucleotide
aggugugggaguacauuuu

SEQ ID NO: 72980 - RNA, 19 nt, Artificial Sequence
  Description of Artificial Sequence: Synthetic oligonucleotide
ccacuuaugggaggauuac

SEQ ID NO: 72981 - RNA, 19 nt, Artificial Sequence
  Description of Artificial Sequence: Synthetic oligonucleotide
acccacucuuagacacgac

SEQ ID NO: 72982 - RNA, 19 nt, Artificial Sequence
  Description of Artificial Sequence: Synthetic oligonucleotide
cccacacuauagguguggg

SEQ ID NO: 72983 - RNA, 19 nt, Artificial Sequence
  Description of Artificial Sequence: Synthetic oligonucleotide
ggucgaacauuuguugacu

SEQ ID NO: 72984 - RNA, 19 nt, Artificial Sequence
  Description of Artificial Sequence: Synthetic oligonucleotide
cccaauucaugagaccaca

SEQ ID NO: 72985 - RNA, 19 nt, Artificial Sequence
  Description of Artificial Sequence: Synthetic oligonucleotide
cacuuaugggaggauuacu

SEQ ID NO: 72986 - RNA, 19 nt, Artificial Sequence
  Description of Artificial Sequence: Synthetic oligonucleotide
caugggacuuacaguguuu

SEQ ID NO: 72987 - RNA, 19 nt, Artificial Sequence
  Description of Artificial Sequence: Synthetic oligonucleotide
ggucaauuauaagauucuu

SEQ ID NO: 72988 - RNA, 19 nt, Artificial Sequence
  Description of Artificial Sequence: Synthetic oligonucleotide
cccacucuuagacacgacu

SEQ ID NO: 72989 - RNA, 19 nt, Artificial Sequence
  Description of Artificial Sequence: Synthetic oligonucleotide
ccauaaguggggaacuuuu

SEQ ID NO: 72990 - RNA, 19 nt, Artificial Sequence
  Description of Artificial Sequence: Synthetic oligonucleotide
ccacacuauagguguggga

SEQ ID NO: 72991 - RNA, 19 nt, Artificial Sequence
  Description of Artificial Sequence: Synthetic oligonucleotide
cccgugacuguauauuuau

SEQ ID NO: 72992 - RNA, 19 nt, Artificial Sequence
  Description of Artificial Sequence: Synthetic oligonucleotide
ccaaaucgguuccaguuuu

SEQ ID NO: 72993 - RNA, 19 nt, Artificial Sequence
  Description of Artificial Sequence: Synthetic oligonucleotide
cauuucgcuuuuggauacu

SEQ ID NO: 72994 - RNA, 19 nt, Artificial Sequence
  Description of Artificial Sequence: Synthetic oligonucleotide
ccccgugacuguauauuua

SEQ ID NO: 72995 - RNA, 19 nt, Artificial Sequence
  Description of Artificial Sequence: Synthetic oligonucleotide
ccaugggacuuacaguguu

SEQ ID NO: 72996 - RNA, 19 nt, Artificial Sequence
  Description of Artificial Sequence: Synthetic oligonucleotide
ccguacauggucgaacauu

SEQ ID NO: 72997 - RNA, 19 nt, Artificial Sequence
  Description of Artificial Sequence: Synthetic oligonucleotide
aaaucagugaaauuugagg

SEQ ID NO: 72998 - RNA, 19 nt, Artificial Sequence
  Description of Artificial Sequence: Synthetic oligonucleotide
aguaugauuaauuauauca

SEQ ID NO: 72999 - RNA, 19 nt, Artificial Sequence
  Description of Artificial Sequence: Synthetic oligonucleotide
auaaauaccaguuucagca

SEQ ID NO: 73000 - RNA, 19 nt, Artificial Sequence
  Description of Artificial Sequence: Synthetic oligonucleotide
aauuaugucacugaaugac

SEQ ID NO: 73001 - RNA, 19 nt, Artificial Sequence
  Description of Artificial Sequence: Synthetic oligonucleotide
uauucuauuaauucuuugg

SEQ ID NO: 73002 - RNA, 19 nt, Artificial Sequence
  Description of Artificial Sequence: Synthetic oligonucleotide
uauauaauauucuuggaga

SEQ ID NO: 73003 - RNA, 19 nt, Artificial Sequence
  Description of Artificial Sequence: Synthetic oligonucleotide
ugaugugugauacugaccc

SEQ ID NO: 73004 - RNA, 19 nt, Artificial Sequence
  Description of Artificial Sequence: Synthetic oligonucleotide
agauacauacaauuguacc

SEQ ID NO: 73005 - RNA, 19 nt, Artificial Sequence
  Description of Artificial Sequence: Synthetic oligonucleotide
auauauaauauucuuggag

SEQ ID NO: 73006 - RNA, 19 nt, Artificial Sequence
  Description of Artificial Sequence: Synthetic oligonucleotide
ugucccauuauuauuaaag

SEQ ID NO: 73007 - RNA, 19 nt, Artificial Sequence
  Description of Artificial Sequence: Synthetic oligonucleotide
ggauauauaauauucuugg

SEQ ID NO: 73008 - RNA, 19 nt, Artificial Sequence
  Description of Artificial Sequence: Synthetic oligonucleotide
uguaauuaaagugauauaa

SEQ ID NO: 73009 - RNA, 19 nt, Artificial Sequence
  Description of Artificial Sequence: Synthetic oligonucleotide
aagguagaaggucaucacc

SEQ ID NO: 73010 - RNA, 19 nt, Artificial Sequence
  Description of Artificial Sequence: Synthetic oligonucleotide
gacggaauacuuuauaaag

SEQ ID NO: 73011 - RNA, 19 nt, Artificial Sequence
  Description of Artificial Sequence: Synthetic oligonucleotide
uaugauaaauaccaguuuc

SEQ ID NO: 73012 - RNA, 19 nt, Artificial Sequence
  Description of Artificial Sequence: Synthetic oligonucleotide
uauuugauuugaaagcugc

SEQ ID NO: 73013 - RNA, 19 nt, Artificial Sequence
  Description of Artificial Sequence: Synthetic oligonucleotide
aacaauguguaauauuuga

SEQ ID NO: 73014 - RNA, 19 nt, Artificial Sequence
  Description of Artificial Sequence: Synthetic oligonucleotide
aagucccuuagguuuaugc

SEQ ID NO: 73015 - RNA, 19 nt, Artificial Sequence
  Description of Artificial Sequence: Synthetic oligonucleotide
aguauagugaauuuugcca

SEQ ID NO: 73016 - RNA, 19 nt, Artificial Sequence
  Description of Artificial Sequence: Synthetic oligonucleotide
aacuugaaugauucgggac

SEQ ID NO: 73017 - RNA, 19 nt, Artificial Sequence
  Description of Artificial Sequence: Synthetic oligonucleotide
auaauuuggauaaagacca

SEQ ID NO: 73018 - RNA, 19 nt, Artificial Sequence
  Description of Artificial Sequence: Synthetic oligonucleotide
acacagguuauacuuaccc

SEQ ID NO: 73019 - RNA, 19 nt, Artificial Sequence
  Description of Artificial Sequence: Synthetic oligonucleotide
aucuaaacagauuucaaug

SEQ ID NO: 73020 - RNA, 19 nt, Artificial Sequence
  Description of Artificial Sequence: Synthetic oligonucleotide
auuaaaguggaggaaaagg

SEQ ID NO: 73021 - RNA, 19 nt, Artificial Sequence
  Description of Artificial Sequence: Synthetic oligonucleotide
uccuacauguaccagaaca

SEQ ID NO: 73022 - RNA, 19 nt, Artificial Sequence
  Description of Artificial Sequence: Synthetic oligonucleotide
uucaaaucaacauaauuau

SEQ ID NO: 73023 - RNA, 19 nt, Artificial Sequence
  Description of Artificial Sequence: Synthetic oligonucleotide
uguucauucacucucucac

SEQ ID NO: 73024 - RNA, 19 nt, Artificial Sequence
  Description of Artificial Sequence: Synthetic oligonucleotide
ucuaaacagauuucaauga

SEQ ID NO: 73025 - RNA, 19 nt, Artificial Sequence
  Description of Artificial Sequence: Synthetic oligonucleotide
gaagacaagaccuccucgg

SEQ ID NO: 73026 - RNA, 19 nt, Artificial Sequence
  Description of Artificial Sequence: Synthetic oligonucleotide
ugauguaucuacaaguuua

SEQ ID NO: 73027 - RNA, 19 nt, Artificial Sequence
  Description of Artificial Sequence: Synthetic oligonucleotide
uucaaggcaacaaacuggc

SEQ ID NO: 73028 - RNA, 19 nt, Artificial Sequence
  Description of Artificial Sequence: Synthetic oligonucleotide
ugaaauuugaggccaguga

SEQ ID NO: 73029 - RNA, 19 nt, Artificial Sequence
  Description of Artificial Sequence: Synthetic oligonucleotide
aaucuuugugaguagcuca

SEQ ID NO: 73030 - RNA, 19 nt, Artificial Sequence
  Description of Artificial Sequence: Synthetic oligonucleotide
guauaauugguuccaaaag

SEQ ID NO: 73031 - RNA, 19 nt, Artificial Sequence
  Description of Artificial Sequence: Synthetic oligonucleotide
ugucauaugacucgugaca

SEQ ID NO: 73032 - RNA, 19 nt, Artificial Sequence
  Description of Artificial Sequence: Synthetic oligonucleotide
auaaagaccauuugggcgu

SEQ ID NO: 73033 - RNA, 19 nt, Artificial Sequence
  Description of Artificial Sequence: Synthetic oligonucleotide
agucccuuagguuuaugcc

SEQ ID NO: 73034 - RNA, 19 nt, Artificial Sequence
  Description of Artificial Sequence: Synthetic oligonucleotide
aaguugauguaucuacaag

SEQ ID NO: 73035 - RNA, 19 nt, Artificial Sequence
  Description of Artificial Sequence: Synthetic oligonucleotide
uguaccuacaucauguaau

SEQ ID NO: 73036 - RNA, 19 nt, Artificial Sequence
  Description of Artificial Sequence: Synthetic oligonucleotide
uaaguaagggacccaaccc

SEQ ID NO: 73037 - RNA, 19 nt, Artificial Sequence
  Description of Artificial Sequence: Synthetic oligonucleotide
aaacccaccacugacucgg

SEQ ID NO: 73038 - RNA, 19 nt, Artificial Sequence
  Description of Artificial Sequence: Synthetic oligonucleotide
ucuacuuuucaagauaaca

SEQ ID NO: 73039 - RNA, 19 nt, Artificial Sequence
  Description of Artificial Sequence: Synthetic oligonucleotide
agucuaaguacucuacggg

SEQ ID NO: 73040 - RNA, 19 nt, Artificial Sequence
  Description of Artificial Sequence: Synthetic oligonucleotide
aaggaauggcauuucaacu

SEQ ID NO: 73041 - RNA, 19 nt, Artificial Sequence
  Description of Artificial Sequence: Synthetic oligonucleotide
uacucuacgggcuagcagc

SEQ ID NO: 73042 - RNA, 19 nt, Artificial Sequence
  Description of Artificial Sequence: Synthetic oligonucleotide
auuggaaucacaugaugug

SEQ ID NO: 73043 - RNA, 19 nt, Artificial Sequence
  Description of Artificial Sequence: Synthetic oligonucleotide
ugcauuagugauuaaagua

SEQ ID NO: 73044 - RNA, 19 nt, Artificial Sequence
  Description of Artificial Sequence: Synthetic oligonucleotide
uguaaggugaacaacucua

SEQ ID NO: 73045 - RNA, 19 nt, Artificial Sequence
  Description of Artificial Sequence: Synthetic oligonucleotide
aauaccaguuucagcauac

SEQ ID NO: 73046 - RNA, 19 nt, Artificial Sequence
  Description of Artificial Sequence: Synthetic oligonucleotide
auccuaaaacccaagagac

SEQ ID NO: 73047 - RNA, 19 nt, Artificial Sequence
  Description of Artificial Sequence: Synthetic oligonucleotide
cucucauacagaaaaugcc

SEQ ID NO: 73048 - RNA, 19 nt, Artificial Sequence
  Description of Artificial Sequence: Synthetic oligonucleotide
uaaacagauuucaaugaac

SEQ ID NO: 73049 - RNA, 19 nt, Artificial Sequence
  Description of Artificial Sequence: Synthetic oligonucleotide
auacuuacccacuuauuag

SEQ ID NO: 73050 - RNA, 19 nt, Artificial Sequence
  Description of Artificial Sequence: Synthetic oligonucleotide
gaauagaguggauccaucc

SEQ ID NO: 73051 - RNA, 19 nt, Artificial Sequence
  Description of Artificial Sequence: Synthetic oligonucleotide
agaaaguaguauuuugaug

SEQ ID NO: 73052 - RNA, 19 nt, Artificial Sequence
  Description of Artificial Sequence: Synthetic oligonucleotide
ugaaucgccauagauacca

SEQ ID NO: 73053 - RNA, 19 nt, Artificial Sequence
  Description of Artificial Sequence: Synthetic oligonucleotide
augguuaccagucugguaa

SEQ ID NO: 73054 - RNA, 19 nt, Artificial Sequence
  Description of Artificial Sequence: Synthetic oligonucleotide
uucauucacucucucacgc

SEQ ID NO: 73055 - RNA, 19 nt, Artificial Sequence
  Description of Artificial Sequence: Synthetic oligonucleotide
gagguaauuaaguaaggga

SEQ ID NO: 73056 - RNA, 19 nt, Artificial Sequence
  Description of Artificial Sequence: Synthetic oligonucleotide
aaguaagggacccaacccu

SEQ ID NO: 73057 - RNA, 19 nt, Artificial Sequence
  Description of Artificial Sequence: Synthetic oligonucleotide
auugcauuagugauuaaag

SEQ ID NO: 73058 - RNA, 19 nt, Artificial Sequence
  Description of Artificial Sequence: Synthetic oligonucleotide
aagacaagaccuccucggg

SEQ ID NO: 73059 - RNA, 19 nt, Artificial Sequence
  Description of Artificial Sequence: Synthetic oligonucleotide
agguacaaguauuuuaaug

SEQ ID NO: 73060 - RNA, 19 nt, Artificial Sequence
  Description of Artificial Sequence: Synthetic oligonucleotide
auaugcaauguuccauagc

SEQ ID NO: 73061 - RNA, 19 nt, Artificial Sequence
  Description of Artificial Sequence: Synthetic oligonucleotide
uucucucagacuuaagcug

SEQ ID NO: 73062 - RNA, 19 nt, Artificial Sequence
  Description of Artificial Sequence: Synthetic oligonucleotide
auacccaguggucuaaagg

SEQ ID NO: 73063 - RNA, 19 nt, Artificial Sequence
  Description of Artificial Sequence: Synthetic oligonucleotide
uuuuggucagguauaaaau

SEQ ID NO: 73064 - RNA, 19 nt, Artificial Sequence
  Description of Artificial Sequence: Synthetic oligonucleotide
ugauaaauaccaguuucag

SEQ ID NO: 73065 - RNA, 19 nt, Artificial Sequence
  Description of Artificial Sequence: Synthetic oligonucleotide
agugauuaaaguagguuuc

SEQ ID NO: 73066 - RNA, 19 nt, Artificial Sequence
  Description of Artificial Sequence: Synthetic oligonucleotide
ucuaaguacucuacgggcu

SEQ ID NO: 73067 - RNA, 19 nt, Artificial Sequence
  Description of Artificial Sequence: Synthetic oligonucleotide
ugaguaugauuaauuauau

SEQ ID NO: 73068 - RNA, 19 nt, Artificial Sequence
  Description of Artificial Sequence: Synthetic oligonucleotide
uugugaaagcuauucagcu

SEQ ID NO: 73069 - RNA, 19 nt, Artificial Sequence
  Description of Artificial Sequence: Synthetic oligonucleotide
ggugaaucgccauagauac

SEQ ID NO: 73070 - RNA, 19 nt, Artificial Sequence
  Description of Artificial Sequence: Synthetic oligonucleotide
aaugauucgggaccuaguu

SEQ ID NO: 73071 - RNA, 19 nt, Artificial Sequence
  Description of Artificial Sequence: Synthetic oligonucleotide
ugauacugaccccagcgcc

SEQ ID NO: 73072 - RNA, 19 nt, Artificial Sequence
  Description of Artificial Sequence: Synthetic oligonucleotide
uuguuaguauuauauagua

SEQ ID NO: 73073 - RNA, 19 nt, Artificial Sequence
  Description of Artificial Sequence: Synthetic oligonucleotide
aaguuguaaggugaacaac

SEQ ID NO: 73074 - RNA, 19 nt, Artificial Sequence
  Description of Artificial Sequence: Synthetic oligonucleotide
acagucuaaguacucuacg

SEQ ID NO: 73075 - RNA, 19 nt, Artificial Sequence
  Description of Artificial Sequence: Synthetic oligonucleotide
aaaccaguucaggagcagc

SEQ ID NO: 73076 - RNA, 19 nt, Artificial Sequence
  Description of Artificial Sequence: Synthetic oligonucleotide
cuaguucuaaauagugacc

SEQ ID NO: 73077 - RNA, 19 nt, Artificial Sequence
  Description of Artificial Sequence: Synthetic oligonucleotide
cagucuaaguacucuacgg

SEQ ID NO: 73078 - RNA, 19 nt, Artificial Sequence
  Description of Artificial Sequence: Synthetic oligonucleotide
guaauuaaguaagggaccc

SEQ ID NO: 73079 - RNA, 19 nt, Artificial Sequence
  Description of Artificial Sequence: Synthetic oligonucleotide
ucuaagggaauagagugga

SEQ ID NO: 73080 - RNA, 19 nt, Artificial Sequence
  Description of Artificial Sequence: Synthetic oligonucleotide
uacuguaguuaguuaaccc

SEQ ID NO: 73081 - RNA, 19 nt, Artificial Sequence
  Description of Artificial Sequence: Synthetic oligonucleotide
cacuuauuaguuuagggga

SEQ ID NO: 73082 - RNA, 19 nt, Artificial Sequence
  Description of Artificial Sequence: Synthetic oligonucleotide
uacuaauguaguugcacug

SEQ ID NO: 73083 - RNA, 19 nt, Artificial Sequence
  Description of Artificial Sequence: Synthetic oligonucleotide
cuguaguuaguuaacccag

SEQ ID NO: 73084 - RNA, 19 nt, Artificial Sequence
  Description of Artificial Sequence: Synthetic oligonucleotide
ugcacacucccacacuugg

SEQ ID NO: 73085 - RNA, 19 nt, Artificial Sequence
  Description of Artificial Sequence: Synthetic oligonucleotide
ucaagcaguaggaaaaguu

SEQ ID NO: 73086 - RNA, 19 nt, Artificial Sequence
  Description of Artificial Sequence: Synthetic oligonucleotide
ugccccuaguucuaaauag

SEQ ID NO: 73087 - RNA, 19 nt, Artificial Sequence
  Description of Artificial Sequence: Synthetic oligonucleotide
caguauagugaauuuugcc

SEQ ID NO: 73088 - RNA, 19 nt, Artificial Sequence
  Description of Artificial Sequence: Synthetic oligonucleotide
aauuaaguaagggacccaa

SEQ ID NO: 73089 - RNA, 19 nt, Artificial Sequence
  Description of Artificial Sequence: Synthetic oligonucleotide
augaaccacucucauacag

SEQ ID NO: 73090 - RNA, 19 nt, Artificial Sequence
  Description of Artificial Sequence: Synthetic oligonucleotide
guaugauuaauuauaucac

SEQ ID NO: 73091 - RNA, 19 nt, Artificial Sequence
  Description of Artificial Sequence: Synthetic oligonucleotide
aagaccauuugggcguucc

SEQ ID NO: 73092 - RNA, 19 nt, Artificial Sequence
  Description of Artificial Sequence: Synthetic oligonucleotide
uugccaagccacaugaagu

SEQ ID NO: 73093 - RNA, 19 nt, Artificial Sequence
  Description of Artificial Sequence: Synthetic oligonucleotide
uggucuaaagguagaaggu

SEQ ID NO: 73094 - RNA, 19 nt, Artificial Sequence
  Description of Artificial Sequence: Synthetic oligonucleotide
aguuguaaggugaacaacu

SEQ ID NO: 73095 - RNA, 19 nt, Artificial Sequence
  Description of Artificial Sequence: Synthetic oligonucleotide
aauacccaguggucuaaag

SEQ ID NO: 73096 - RNA, 19 nt, Artificial Sequence
  Description of Artificial Sequence: Synthetic oligonucleotide
uaugacucgugacauguuc

SEQ ID NO: 73097 - RNA, 19 nt, Artificial Sequence
  Description of Artificial Sequence: Synthetic oligonucleotide
agugaguaugauuaauuau

SEQ ID NO: 73098 - RNA, 19 nt, Artificial Sequence
  Description of Artificial Sequence: Synthetic oligonucleotide
aguggguaauaacacaggu

SEQ ID NO: 73099 - RNA, 19 nt, Artificial Sequence
  Description of Artificial Sequence: Synthetic oligonucleotide
uacacauccuucacuccgg

SEQ ID NO: 73100 - RNA, 19 nt, Artificial Sequence
  Description of Artificial Sequence: Synthetic oligonucleotide
acuaaguugggaaugaaau

SEQ ID NO: 73101 - RNA, 19 nt, Artificial Sequence
  Description of Artificial Sequence: Synthetic oligonucleotide
cucuaagggaauagagugg

SEQ ID NO: 73102 - RNA, 19 nt, Artificial Sequence
  Description of Artificial Sequence: Synthetic oligonucleotide
ugcacaucgucaugugugg

SEQ ID NO: 73103 - RNA, 19 nt, Artificial Sequence
  Description of Artificial Sequence: Synthetic oligonucleotide
ugauucgggaccuaguuuu

SEQ ID NO: 73104 - RNA, 19 nt, Artificial Sequence
  Description of Artificial Sequence: Synthetic oligonucleotide
uucuaaauagugaccugcu

SEQ ID NO: 73105 - RNA, 19 nt, Artificial Sequence
  Description of Artificial Sequence: Synthetic oligonucleotide
cacugcaccaucaaacuug

SEQ ID NO: 73106 - RNA, 19 nt, Artificial Sequence
  Description of Artificial Sequence: Synthetic oligonucleotide
ugaaccacucucauacaga

SEQ ID NO: 73107 - RNA, 19 nt, Artificial Sequence
  Description of Artificial Sequence: Synthetic oligonucleotide
uuccaagagacuuuaguua

SEQ ID NO: 73108 - RNA, 19 nt, Artificial Sequence
  Description of Artificial Sequence: Synthetic oligonucleotide
acuacaauuauaguuguua

SEQ ID NO: 73109 - RNA, 19 nt, Artificial Sequence
  Description of Artificial Sequence: Synthetic oligonucleotide
uugcacuaaugauacagac

SEQ ID NO: 73110 - RNA, 19 nt, Artificial Sequence
  Description of Artificial Sequence: Synthetic oligonucleotide
ccuaguucuaaauagugac

SEQ ID NO: 73111 - RNA, 19 nt, Artificial Sequence
  Description of Artificial Sequence: Synthetic oligonucleotide
gaauuucagagcacgauuc

SEQ ID NO: 73112 - RNA, 19 nt, Artificial Sequence
  Description of Artificial Sequence: Synthetic oligonucleotide
gaaguuguaaggugaacaa

SEQ ID NO: 73113 - RNA, 19 nt, Artificial Sequence
  Description of Artificial Sequence: Synthetic oligonucleotide
uccuaaaacccaagagacc

SEQ ID NO: 73114 - RNA, 19 nt, Artificial Sequence
  Description of Artificial Sequence: Synthetic oligonucleotide
cacauuauccuaaaaccca

SEQ ID NO: 73115 - RNA, 19 nt, Artificial Sequence
  Description of Artificial Sequence: Synthetic oligonucleotide
uuacccacuuauuaguuua

SEQ ID NO: 73116 - RNA, 19 nt, Artificial Sequence
  Description of Artificial Sequence: Synthetic oligonucleotide
ucuuggacggaauacuuua

SEQ ID NO: 73117 - RNA, 19 nt, Artificial Sequence
  Description of Artificial Sequence: Synthetic oligonucleotide
cauuaagagucaaagcaca

SEQ ID NO: 73118 - RNA, 19 nt, Artificial Sequence
  Description of Artificial Sequence: Synthetic oligonucleotide
uucuaaggcuugaauggug

SEQ ID NO: 73119 - RNA, 19 nt, Artificial Sequence
  Description of Artificial Sequence: Synthetic oligonucleotide
aagcucuaagggaauagag

SEQ ID NO: 73120 - RNA, 19 nt, Artificial Sequence
  Description of Artificial Sequence: Synthetic oligonucleotide
gacauguucgugcaauuuc

SEQ ID NO: 73121 - RNA, 19 nt, Artificial Sequence
  Description of Artificial Sequence: Synthetic oligonucleotide
agcacgauucauuuuggga

SEQ ID NO: 73122 - RNA, 19 nt, Artificial Sequence
  Description of Artificial Sequence: Synthetic oligonucleotide
uccauuagucaucguuuag

SEQ ID NO: 73123 - RNA, 19 nt, Artificial Sequence
  Description of Artificial Sequence: Synthetic oligonucleotide
ugguccauguaaacaaaac

SEQ ID NO: 73124 - RNA, 19 nt, Artificial Sequence
  Description of Artificial Sequence: Synthetic oligonucleotide
agaguuucauccggcaugg

SEQ ID NO: 73125 - RNA, 19 nt, Artificial Sequence
  Description of Artificial Sequence: Synthetic oligonucleotide
ucuacgggcuagcagcagc

SEQ ID NO: 73126 - RNA, 19 nt, Artificial Sequence
  Description of Artificial Sequence: Synthetic oligonucleotide
aaagcucuaagggaauaga

SEQ ID NO: 73127 - RNA, 19 nt, Artificial Sequence
  Description of Artificial Sequence: Synthetic oligonucleotide
aguguuggcuaaaugcaac

SEQ ID NO: 73128 - RNA, 19 nt, Artificial Sequence
  Description of Artificial Sequence: Synthetic oligonucleotide
ugagacguuuugcuuuugc

SEQ ID NO: 73129 - RNA, 19 nt, Artificial Sequence
  Description of Artificial Sequence: Synthetic oligonucleotide
uuaaauacccaguggucua

SEQ ID NO: 73130 - RNA, 19 nt, Artificial Sequence
  Description of Artificial Sequence: Synthetic oligonucleotide
aagaauuucagagcacgau

SEQ ID NO: 73131 - RNA, 19 nt, Artificial Sequence
  Description of Artificial Sequence: Synthetic oligonucleotide
ggauaaagaccauuugggc

SEQ ID NO: 73132 - RNA, 19 nt, Artificial Sequence
  Description of Artificial Sequence: Synthetic oligonucleotide
aaauaccaguuucagcaua

SEQ ID NO: 73133 - RNA, 19 nt, Artificial Sequence
  Description of Artificial Sequence: Synthetic oligonucleotide
ugauagacuugcugguuca

SEQ ID NO: 73134 - RNA, 19 nt, Artificial Sequence
  Description of Artificial Sequence: Synthetic oligonucleotide
aggaauggcauuucaacuu

SEQ ID NO: 73135 - RNA, 19 nt, Artificial Sequence
  Description of Artificial Sequence: Synthetic oligonucleotide
ucgggaccuaguuuuaaug

SEQ ID NO: 73136 - RNA, 19 nt, Artificial Sequence
  Description of Artificial Sequence: Synthetic oligonucleotide
ugugccaaggggugaacug

SEQ ID NO: 73137 - RNA, 19 nt, Artificial Sequence
  Description of Artificial Sequence: Synthetic oligonucleotide
caaugaacuaaguugggaa

SEQ ID NO: 73138 - RNA, 19 nt, Artificial Sequence
  Description of Artificial Sequence: Synthetic oligonucleotide
uaccaauagguuucaauua

SEQ ID NO: 73139 - RNA, 19 nt, Artificial Sequence
  Description of Artificial Sequence: Synthetic oligonucleotide
gagauacauacaauuguac

SEQ ID NO: 73140 - RNA, 19 nt, Artificial Sequence
  Description of Artificial Sequence: Synthetic oligonucleotide
acaagggauguugagacgu

SEQ ID NO: 73141 - RNA, 19 nt, Artificial Sequence
  Description of Artificial Sequence: Synthetic oligonucleotide
uaguuaguuaacccagcaa

SEQ ID NO: 73142 - RNA, 19 nt, Artificial Sequence
  Description of Artificial Sequence: Synthetic oligonucleotide
aaaggguaguguuggcuaa

SEQ ID NO: 73143 - RNA, 19 nt, Artificial Sequence
  Description of Artificial Sequence: Synthetic oligonucleotide
uaauguaguugcacuguuc

SEQ ID NO: 73144 - RNA, 19 nt, Artificial Sequence
  Description of Artificial Sequence: Synthetic oligonucleotide
ugaaaggguaguguuggcu

SEQ ID NO: 73145 - RNA, 19 nt, Artificial Sequence
  Description of Artificial Sequence: Synthetic oligonucleotide
uaagggacccaacccuugc

SEQ ID NO: 73146 - RNA, 19 nt, Artificial Sequence
  Description of Artificial Sequence: Synthetic oligonucleotide
gaaaggguaguguuggcua

SEQ ID NO: 73147 - RNA, 19 nt, Artificial Sequence
  Description of Artificial Sequence: Synthetic oligonucleotide
uggacggaggauguaauac

SEQ ID NO: 73148 - RNA, 19 nt, Artificial Sequence
  Description of Artificial Sequence: Synthetic oligonucleotide
auaaaguucucaucuuaua

SEQ ID NO: 73149 - RNA, 19 nt, Artificial Sequence
  Description of Artificial Sequence: Synthetic oligonucleotide
guaguguuggcuaaaugca

SEQ ID NO: 73150 - RNA, 19 nt, Artificial Sequence
  Description of Artificial Sequence: Synthetic oligonucleotide
gaguaugauuaauuauauc

SEQ ID NO: 73151 - RNA, 19 nt, Artificial Sequence
  Description of Artificial Sequence: Synthetic oligonucleotide
uguaguugcacuguuccuu

SEQ ID NO: 73152 - RNA, 19 nt, Artificial Sequence
  Description of Artificial Sequence: Synthetic oligonucleotide
uuauaguuguuaguauuau

SEQ ID NO: 73153 - RNA, 19 nt, Artificial Sequence
  Description of Artificial Sequence: Synthetic oligonucleotide
uaguguuggcuaaaugcaa

SEQ ID NO: 73154 - RNA, 19 nt, Artificial Sequence
  Description of Artificial Sequence: Synthetic oligonucleotide
caguggguaauaacacagg

SEQ ID NO: 73155 - RNA, 19 nt, Artificial Sequence
  Description of Artificial Sequence: Synthetic oligonucleotide
auaccauauggagacaaga

SEQ ID NO: 73156 - RNA, 19 nt, Artificial Sequence
  Description of Artificial Sequence: Synthetic oligonucleotide
uuauacuuacccacuuauu

SEQ ID NO: 73157 - RNA, 19 nt, Artificial Sequence
  Description of Artificial Sequence: Synthetic oligonucleotide
gauuucaaugaacuaaguu

SEQ ID NO: 73158 - RNA, 19 nt, Artificial Sequence
  Description of Artificial Sequence: Synthetic oligonucleotide
aaucgccauagauaccaau

SEQ ID NO: 73159 - RNA, 19 nt, Artificial Sequence
  Description of Artificial Sequence: Synthetic oligonucleotide
ucuaaauagugaccugcuu

SEQ ID NO: 73160 - RNA, 19 nt, Artificial Sequence
  Description of Artificial Sequence: Synthetic oligonucleotide
auacauacaauuguaccua

SEQ ID NO: 73161 - RNA, 19 nt, Artificial Sequence
  Description of Artificial Sequence: Synthetic oligonucleotide
aacccuugcacaagggaug

SEQ ID NO: 73162 - RNA, 19 nt, Artificial Sequence
  Description of Artificial Sequence: Synthetic oligonucleotide
gauacugaccccagcgccc

SEQ ID NO: 73163 - RNA, 19 nt, Artificial Sequence
  Description of Artificial Sequence: Synthetic oligonucleotide
aguuucccaagauuguuuu

SEQ ID NO: 73164 - RNA, 19 nt, Artificial Sequence
  Description of Artificial Sequence: Synthetic oligonucleotide
guaguuaguuaacccagca

SEQ ID NO: 73165 - RNA, 19 nt, Artificial Sequence
  Description of Artificial Sequence: Synthetic oligonucleotide
uugggcguuccauuaguca

SEQ ID NO: 73166 - RNA, 19 nt, Artificial Sequence
  Description of Artificial Sequence: Synthetic oligonucleotide
ucagacuuaagcugcucua

SEQ ID NO: 73167 - RNA, 19 nt, Artificial Sequence
  Description of Artificial Sequence: Synthetic oligonucleotide
aguggucuaaagguagaag

SEQ ID NO: 73168 - RNA, 19 nt, Artificial Sequence
  Description of Artificial Sequence: Synthetic oligonucleotide
augacucgugacauguucg

SEQ ID NO: 73169 - RNA, 19 nt, Artificial Sequence
  Description of Artificial Sequence: Synthetic oligonucleotide
gucccuuagguuuaugcca

SEQ ID NO: 73170 - RNA, 19 nt, Artificial Sequence
  Description of Artificial Sequence: Synthetic oligonucleotide
auuaugucacugaaugaca

SEQ ID NO: 73171 - RNA, 19 nt, Artificial Sequence
  Description of Artificial Sequence: Synthetic oligonucleotide
ucauaugacucgugacaug

SEQ ID NO: 73172 - RNA, 19 nt, Artificial Sequence
  Description of Artificial Sequence: Synthetic oligonucleotide
uccagacaauuucuguagu

SEQ ID NO: 73173 - RNA, 19 nt, Artificial Sequence
  Description of Artificial Sequence: Synthetic oligonucleotide
ggcuaaaugcaacaccggc

SEQ ID NO: 73174 - RNA, 19 nt, Artificial Sequence
  Description of Artificial Sequence: Synthetic oligonucleotide
ggauacuguaguuaguuaa

SEQ ID NO: 73175 - RNA, 19 nt, Artificial Sequence
  Description of Artificial Sequence: Synthetic oligonucleotide
auuugggcguuccauuagu

SEQ ID NO: 73176 - RNA, 19 nt, Artificial Sequence
  Description of Artificial Sequence: Synthetic oligonucleotide
acggaauacuuuauaaagu

SEQ ID NO: 73177 - RNA, 19 nt, Artificial Sequence
  Description of Artificial Sequence: Synthetic oligonucleotide
caagcaguaggaaaaguua

SEQ ID NO: 73178 - RNA, 19 nt, Artificial Sequence
  Description of Artificial Sequence: Synthetic oligonucleotide
gugauacugaccccagcgc

SEQ ID NO: 73179 - RNA, 19 nt, Artificial Sequence
  Description of Artificial Sequence: Synthetic oligonucleotide
uuugucccauuauuauuaa

SEQ ID NO: 73180 - RNA, 19 nt, Artificial Sequence
  Description of Artificial Sequence: Synthetic oligonucleotide
uguuggcuaaaugcaacac

SEQ ID NO: 73181 - RNA, 19 nt, Artificial Sequence
  Description of Artificial Sequence: Synthetic oligonucleotide
guuugucccauuauuauua

SEQ ID NO: 73182 - RNA, 19 nt, Artificial Sequence
  Description of Artificial Sequence: Synthetic oligonucleotide
ugacucgugacauguucgu

SEQ ID NO: 73183 - RNA, 19 nt, Artificial Sequence
  Description of Artificial Sequence: Synthetic oligonucleotide
gacagucuaaguacucuac

SEQ ID NO: 73184 - RNA, 19 nt, Artificial Sequence
  Description of Artificial Sequence: Synthetic oligonucleotide
auuagugauuaaaguaggu

SEQ ID NO: 73185 - RNA, 19 nt, Artificial Sequence
  Description of Artificial Sequence: Synthetic oligonucleotide
cuacauguaccagaacaug

SEQ ID NO: 73186 - RNA, 19 nt, Artificial Sequence
  Description of Artificial Sequence: Synthetic oligonucleotide
cuugcacuaaugauacaga

SEQ ID NO: 73187 - RNA, 19 nt, Artificial Sequence
  Description of Artificial Sequence: Synthetic oligonucleotide
uaaguacucuacgggcuag

SEQ ID NO: 73188 - RNA, 19 nt, Artificial Sequence
  Description of Artificial Sequence: Synthetic oligonucleotide
caugugagguaauuaagua

SEQ ID NO: 73189 - RNA, 19 nt, Artificial Sequence
  Description of Artificial Sequence: Synthetic oligonucleotide
uuugggcguuccauuaguc

SEQ ID NO: 73190 - RNA, 19 nt, Artificial Sequence
  Description of Artificial Sequence: Synthetic oligonucleotide
aggauuaccugaaagggua

SEQ ID NO: 73191 - RNA, 19 nt, Artificial Sequence
  Description of Artificial Sequence: Synthetic oligonucleotide
cauagauaccaauagguuu

SEQ ID NO: 73192 - RNA, 19 nt, Artificial Sequence
  Description of Artificial Sequence: Synthetic oligonucleotide
cacaagggauguugagacg

SEQ ID NO: 73193 - RNA, 19 nt, Artificial Sequence
  Description of Artificial Sequence: Synthetic oligonucleotide
uagcgugagcuacaugcac

SEQ ID NO: 73194 - RNA, 19 nt, Artificial Sequence
  Description of Artificial Sequence: Synthetic oligonucleotide
guacucuacgggcuagcag

SEQ ID NO: 73195 - RNA, 19 nt, Artificial Sequence
  Description of Artificial Sequence: Synthetic oligonucleotide
cagacuuaagcugcucuag

SEQ ID NO: 73196 - RNA, 19 nt, Artificial Sequence
  Description of Artificial Sequence: Synthetic oligonucleotide
cauguucgugcaauuucug

SEQ ID NO: 73197 - RNA, 19 nt, Artificial Sequence
  Description of Artificial Sequence: Synthetic oligonucleotide
cauuugggcguuccauuag

SEQ ID NO: 73198 - RNA, 19 nt, Artificial Sequence
  Description of Artificial Sequence: Synthetic oligonucleotide
acgauucauuuugggaaac

SEQ ID NO: 73199 - RNA, 19 nt, Artificial Sequence
  Description of Artificial Sequence: Synthetic oligonucleotide
caagggucaagcaguagga

SEQ ID NO: 73200 - RNA, 19 nt, Artificial Sequence
  Description of Artificial Sequence: Synthetic oligonucleotide
uugggucgugggugaaucg

SEQ ID NO: 73201 - RNA, 19 nt, Artificial Sequence
  Description of Artificial Sequence: Synthetic oligonucleotide
aggcucuuggacggaauac

SEQ ID NO: 73202 - RNA, 19 nt, Artificial Sequence
  Description of Artificial Sequence: Synthetic oligonucleotide
ucugccccuaguucuaaau

SEQ ID NO: 73203 - RNA, 19 nt, Artificial Sequence
  Description of Artificial Sequence: Synthetic oligonucleotide
ggaaaaguuagaaaguagu

SEQ ID NO: 73204 - RNA, 19 nt, Artificial Sequence
  Description of Artificial Sequence: Synthetic oligonucleotide
gauagacuugcugguucag

SEQ ID NO: 73205 - RNA, 19 nt, Artificial Sequence
  Description of Artificial Sequence: Synthetic oligonucleotide
gaaaccaguucaggagcag

SEQ ID NO: 73206 - RNA, 19 nt, Artificial Sequence
  Description of Artificial Sequence: Synthetic oligonucleotide
acuuauuaguuuaggggaa

SEQ ID NO: 73207 - RNA, 19 nt, Artificial Sequence
  Description of Artificial Sequence: Synthetic oligonucleotide
cacagguuauacuuaccca

SEQ ID NO: 73208 - RNA, 19 nt, Artificial Sequence
  Description of Artificial Sequence: Synthetic oligonucleotide
uagaggugacagucuaagu

SEQ ID NO: 73209 - RNA, 19 nt, Artificial Sequence
  Description of Artificial Sequence: Synthetic oligonucleotide
ugggucgugggugaaucgc

SEQ ID NO: 73210 - RNA, 19 nt, Artificial Sequence
  Description of Artificial Sequence: Synthetic oligonucleotide
uaaauacccaguggucuaa

SEQ ID NO: 73211 - RNA, 19 nt, Artificial Sequence
  Description of Artificial Sequence: Synthetic oligonucleotide
auuguaccuacaucaugua

SEQ ID NO: 73212 - RNA, 19 nt, Artificial Sequence
  Description of Artificial Sequence: Synthetic oligonucleotide
gggaaugaaaugguuacca

SEQ ID NO: 73213 - RNA, 19 nt, Artificial Sequence
  Description of Artificial Sequence: Synthetic oligonucleotide
uaggcucuuggacggaaua

SEQ ID NO: 73214 - RNA, 19 nt, Artificial Sequence
  Description of Artificial Sequence: Synthetic oligonucleotide
augauucgggaccuaguuu

SEQ ID NO: 73215 - RNA, 19 nt, Artificial Sequence
  Description of Artificial Sequence: Synthetic oligonucleotide
accauuugggcguuccauu

SEQ ID NO: 73216 - RNA, 19 nt, Artificial Sequence
  Description of Artificial Sequence: Synthetic oligonucleotide
agagcuuggcacauaugca

SEQ ID NO: 73217 - RNA, 19 nt, Artificial Sequence
  Description of Artificial Sequence: Synthetic oligonucleotide
ucacuccggaaaacccacc

SEQ ID NO: 73218 - RNA, 19 nt, Artificial Sequence
  Description of Artificial Sequence: Synthetic oligonucleotide
cugaaaggguaguguuggc

SEQ ID NO: 73219 - RNA, 19 nt, Artificial Sequence
  Description of Artificial Sequence: Synthetic oligonucleotide
uugucccauuauuauuaaa

SEQ ID NO: 73220 - RNA, 19 nt, Artificial Sequence
  Description of Artificial Sequence: Synthetic oligonucleotide
acaauuguaccuacaucau

SEQ ID NO: 73221 - RNA, 19 nt, Artificial Sequence
  Description of Artificial Sequence: Synthetic oligonucleotide
cauaugacucgugacaugu

SEQ ID NO: 73222 - RNA, 19 nt, Artificial Sequence
  Description of Artificial Sequence: Synthetic oligonucleotide
uggcaugaaccacucucau

SEQ ID NO: 73223 - RNA, 19 nt, Artificial Sequence
  Description of Artificial Sequence: Synthetic oligonucleotide
cguuuaggcucuuggacgg

SEQ ID NO: 73224 - RNA, 19 nt, Artificial Sequence
  Description of Artificial Sequence: Synthetic oligonucleotide
gguguucuauguucuuggc

SEQ ID NO: 73225 - RNA, 19 nt, Artificial Sequence
  Description of Artificial Sequence: Synthetic oligonucleotide
cagcuuauucuagcaaaug

SEQ ID NO: 73226 - RNA, 19 nt, Artificial Sequence
  Description of Artificial Sequence: Synthetic oligonucleotide
ugacauguucgugcaauuu

SEQ ID NO: 73227 - RNA, 19 nt, Artificial Sequence
  Description of Artificial Sequence: Synthetic oligonucleotide
cucgugacauguucgugca

SEQ ID NO: 73228 - RNA, 19 nt, Artificial Sequence
  Description of Artificial Sequence: Synthetic oligonucleotide
agacuggugccaaaagccu

SEQ ID NO: 73229 - RNA, 19 nt, Artificial Sequence
  Description of Artificial Sequence: Synthetic oligonucleotide
cuagcgugagcuacaugca

SEQ ID NO: 73230 - RNA, 19 nt, Artificial Sequence
  Description of Artificial Sequence: Synthetic oligonucleotide
ggcguuccauuagucaucg

SEQ ID NO: 73231 - RNA, 19 nt, Artificial Sequence
  Description of Artificial Sequence: Synthetic oligonucleotide
ugcaggggagaguuucauc

SEQ ID NO: 73232 - RNA, 19 nt, Artificial Sequence
  Description of Artificial Sequence: Synthetic oligonucleotide
caagagacuuuaguuauua

SEQ ID NO: 73233 - RNA, 19 nt, Artificial Sequence
  Description of Artificial Sequence: Synthetic oligonucleotide
aaauacccaguggucuaaa

SEQ ID NO: 73234 - RNA, 19 nt, Artificial Sequence
  Description of Artificial Sequence: Synthetic oligonucleotide
agcgugagcuacaugcaca

SEQ ID NO: 73235 - RNA, 19 nt, Artificial Sequence
  Description of Artificial Sequence: Synthetic oligonucleotide
uugacucuuucaugacaau

SEQ ID NO: 73236 - RNA, 19 nt, Artificial Sequence
  Description of Artificial Sequence: Synthetic oligonucleotide
aucgucaugugugggcgug

SEQ ID NO: 73237 - RNA, 19 nt, Artificial Sequence
  Description of Artificial Sequence: Synthetic oligonucleotide
ugggcgugagggaguacac

SEQ ID NO: 73238 - RNA, 19 nt, Artificial Sequence
  Description of Artificial Sequence: Synthetic oligonucleotide
guaagggacccaacccuug

SEQ ID NO: 73239 - RNA, 19 nt, Artificial Sequence
  Description of Artificial Sequence: Synthetic oligonucleotide
cuaaguacucuacgggcua

SEQ ID NO: 73240 - RNA, 19 nt, Artificial Sequence
  Description of Artificial Sequence: Synthetic oligonucleotide
gaccccagcgcccuguucu

SEQ ID NO: 73241 - RNA, 19 nt, Artificial Sequence
  Description of Artificial Sequence: Synthetic oligonucleotide
cugcuucccagccccacug

SEQ ID NO: 73242 - RNA, 19 nt, Artificial Sequence
  Description of Artificial Sequence: Synthetic oligonucleotide
ccccuaguucuaaauagug

SEQ ID NO: 73243 - RNA, 19 nt, Artificial Sequence
  Description of Artificial Sequence: Synthetic oligonucleotide
gccauagauaccaauaggu

SEQ ID NO: 73244 - RNA, 19 nt, Artificial Sequence
  Description of Artificial Sequence: Synthetic oligonucleotide
acucucucacgcaugcgcu

SEQ ID NO: 73245 - RNA, 19 nt, Artificial Sequence
  Description of Artificial Sequence: Synthetic oligonucleotide
cucggcaauacuuuucaau

SEQ ID NO: 73246 - RNA, 19 nt, Artificial Sequence
  Description of Artificial Sequence: Synthetic oligonucleotide
acuuacccacuuauuaguu

SEQ ID NO: 73247 - RNA, 19 nt, Artificial Sequence
  Description of Artificial Sequence: Synthetic oligonucleotide
aguaagggacccaacccuu

SEQ ID NO: 73248 - RNA, 19 nt, Artificial Sequence
  Description of Artificial Sequence: Synthetic oligonucleotide
ugaccugcuuuguccuuuc

SEQ ID NO: 73249 - RNA, 19 nt, Artificial Sequence
  Description of Artificial Sequence: Synthetic oligonucleotide
auggaggacacaacuggaa

SEQ ID NO: 73250 - RNA, 19 nt, Artificial Sequence
  Description of Artificial Sequence: Synthetic oligonucleotide
caggauuaccugaaagggu

SEQ ID NO: 73251 - RNA, 19 nt, Artificial Sequence
  Description of Artificial Sequence: Synthetic oligonucleotide
gcaacaccggcagagggug

SEQ ID NO: 73252 - RNA, 19 nt, Artificial Sequence
  Description of Artificial Sequence: Synthetic oligonucleotide
gggaguacacauccuucac

SEQ ID NO: 73253 - RNA, 19 nt, Artificial Sequence
  Description of Artificial Sequence: Synthetic oligonucleotide
guuccauuagucaucguuu

SEQ ID NO: 73254 - RNA, 19 nt, Artificial Sequence
  Description of Artificial Sequence: Synthetic oligonucleotide
caacccuugcacaagggau

SEQ ID NO: 73255 - RNA, 19 nt, Artificial Sequence
  Description of Artificial Sequence: Synthetic oligonucleotide
caugaaccacucucauaca

SEQ ID NO: 73256 - RNA, 19 nt, Artificial Sequence
  Description of Artificial Sequence: Synthetic oligonucleotide
gucauaugacucgugacau

SEQ ID NO: 73257 - RNA, 19 nt, Artificial Sequence
  Description of Artificial Sequence: Synthetic oligonucleotide
ggauuaccugaaaggguag

SEQ ID NO: 73258 - RNA, 19 nt, Artificial Sequence
  Description of Artificial Sequence: Synthetic oligonucleotide
gcacauaugcaauguucca

SEQ ID NO: 73259 - RNA, 19 nt, Artificial Sequence
  Description of Artificial Sequence: Synthetic oligonucleotide
auacugaccccagcgcccu

SEQ ID NO: 73260 - RNA, 19 nt, Artificial Sequence
  Description of Artificial Sequence: Synthetic oligonucleotide
gugggcgugagggaguaca

SEQ ID NO: 73261 - RNA, 19 nt, Artificial Sequence
  Description of Artificial Sequence: Synthetic oligonucleotide
gguuauacuuacccacuua

SEQ ID NO: 73262 - RNA, 19 nt, Artificial Sequence
  Description of Artificial Sequence: Synthetic oligonucleotide
ugccaguuuuagugaguau

SEQ ID NO: 73263 - RNA, 19 nt, Artificial Sequence
  Description of Artificial Sequence: Synthetic oligonucleotide
ggguaguguuggcuaaaug

SEQ ID NO: 73264 - RNA, 19 nt, Artificial Sequence
  Description of Artificial Sequence: Synthetic oligonucleotide
cuugaaugauucgggaccu

SEQ ID NO: 73265 - RNA, 19 nt, Artificial Sequence
  Description of Artificial Sequence: Synthetic oligonucleotide
ggugaacugggcacauacc

SEQ ID NO: 73266 - RNA, 19 nt, Artificial Sequence
  Description of Artificial Sequence: Synthetic oligonucleotide
gaaugauucgggaccuagu

SEQ ID NO: 73267 - RNA, 19 nt, Artificial Sequence
  Description of Artificial Sequence: Synthetic oligonucleotide
gugaaucgccauagauacc

SEQ ID NO: 73268 - RNA, 19 nt, Artificial Sequence
  Description of Artificial Sequence: Synthetic oligonucleotide
cccuaguucuaaauaguga

SEQ ID NO: 73269 - RNA, 19 nt, Artificial Sequence
  Description of Artificial Sequence: Synthetic oligonucleotide
acgcaugcgcucaugcaga

SEQ ID NO: 73270 - RNA, 19 nt, Artificial Sequence
  Description of Artificial Sequence: Synthetic oligonucleotide
ucgugacauguucgugcaa

SEQ ID NO: 73271 - RNA, 19 nt, Artificial Sequence
  Description of Artificial Sequence: Synthetic oligonucleotide
ggggcuguguucaucgaac

SEQ ID NO: 73272 - RNA, 19 nt, Artificial Sequence
  Description of Artificial Sequence: Synthetic oligonucleotide
gggugaaucgccauagaua

SEQ ID NO: 73273 - RNA, 19 nt, Artificial Sequence
  Description of Artificial Sequence: Synthetic oligonucleotide
ggaguacacauccuucacu

SEQ ID NO: 73274 - RNA, 19 nt, Artificial Sequence
  Description of Artificial Sequence: Synthetic oligonucleotide
guaguugcacuguuccuuu

SEQ ID NO: 73275 - RNA, 19 nt, Artificial Sequence
  Description of Artificial Sequence: Synthetic oligonucleotide
cuuacccacuuauuaguuu

SEQ ID NO: 73276 - RNA, 19 nt, Artificial Sequence
  Description of Artificial Sequence: Synthetic oligonucleotide
gacggaggauguaauacuu

SEQ ID NO: 73277 - RNA, 19 nt, Artificial Sequence
  Description of Artificial Sequence: Synthetic oligonucleotide
cuaauguaguugcacuguu

SEQ ID NO: 73278 - RNA, 19 nt, Artificial Sequence
  Description of Artificial Sequence: Synthetic oligonucleotide
caucccuacaucccagggu

SEQ ID NO: 73279 - RNA, 19 nt, Artificial Sequence
  Description of Artificial Sequence: Synthetic oligonucleotide
ucgucaugugugggcguga

SEQ ID NO: 73280 - RNA, 19 nt, Artificial Sequence
  Description of Artificial Sequence: Synthetic oligonucleotide
gaccauuugggcguuccau

SEQ ID NO: 73281 - RNA, 19 nt, Artificial Sequence
  Description of Artificial Sequence: Synthetic oligonucleotide
ccucgggauuucuuaauca

SEQ ID NO: 73282 - RNA, 19 nt, Artificial Sequence
  Description of Artificial Sequence: Synthetic oligonucleotide
cugccccuaguucuaaaua

SEQ ID NO: 73283 - RNA, 19 nt, Artificial Sequence
  Description of Artificial Sequence: Synthetic oligonucleotide
uugaaugauucgggaccua

SEQ ID NO: 73284 - RNA, 19 nt, Artificial Sequence
  Description of Artificial Sequence: Synthetic oligonucleotide
cuggacggaggauguaaua

SEQ ID NO: 73285 - RNA, 19 nt, Artificial Sequence
  Description of Artificial Sequence: Synthetic oligonucleotide
ggaagguguucuauguucu

SEQ ID NO: 73286 - RNA, 19 nt, Artificial Sequence
  Description of Artificial Sequence: Synthetic oligonucleotide
gggauacuguaguuaguua

SEQ ID NO: 73287 - RNA, 19 nt, Artificial Sequence
  Description of Artificial Sequence: Synthetic oligonucleotide
ggugaacaacucuauuaau

SEQ ID NO: 73288 - RNA, 19 nt, Artificial Sequence
  Description of Artificial Sequence: Synthetic oligonucleotide
cuuggacggaauacuuuau

SEQ ID NO: 73289 - RNA, 19 nt, Artificial Sequence
  Description of Artificial Sequence: Synthetic oligonucleotide
cuacgggcuagcagcagcu

SEQ ID NO: 73290 - RNA, 19 nt, Artificial Sequence
  Description of Artificial Sequence: Synthetic oligonucleotide
caacucuauuaauugcauu

SEQ ID NO: 73291 - RNA, 19 nt, Artificial Sequence
  Description of Artificial Sequence: Synthetic oligonucleotide
ggcgugagggaguacacau

SEQ ID NO: 73292 - RNA, 19 nt, Artificial Sequence
  Description of Artificial Sequence: Synthetic oligonucleotide
gaaucgccauagauaccaa

SEQ ID NO: 73293 - RNA, 19 nt, Artificial Sequence
  Description of Artificial Sequence: Synthetic oligonucleotide
ccuacauguaccagaacau

SEQ ID NO: 73294 - RNA, 19 nt, Artificial Sequence
  Description of Artificial Sequence: Synthetic oligonucleotide
auaugacucgugacauguu

SEQ ID NO: 73295 - RNA, 19 nt, Artificial Sequence
  Description of Artificial Sequence: Synthetic oligonucleotide
caguggucuaaagguagaa

SEQ ID NO: 73296 - RNA, 19 nt, Artificial Sequence
  Description of Artificial Sequence: Synthetic oligonucleotide
cucuuggacggaauacuuu

SEQ ID NO: 73297 - RNA, 19 nt, Artificial Sequence
  Description of Artificial Sequence: Synthetic oligonucleotide
ggagaguuucauccggcau

SEQ ID NO: 73298 - RNA, 19 nt, Artificial Sequence
  Description of Artificial Sequence: Synthetic oligonucleotide
ccauagauaccaauagguu

SEQ ID NO: 73299 - RNA, 19 nt, Artificial Sequence
  Description of Artificial Sequence: Synthetic oligonucleotide
gugacauguucgugcaauu

SEQ ID NO: 73300 - RNA, 19 nt, Artificial Sequence
  Description of Artificial Sequence: Synthetic oligonucleotide
ggucgugggugaaucgcca

SEQ ID NO: 73301 - RNA, 19 nt, Artificial Sequence
  Description of Artificial Sequence: Synthetic oligonucleotide
gggcacauacccauuuugu

SEQ ID NO: 73302 - RNA, 19 nt, Artificial Sequence
  Description of Artificial Sequence: Synthetic oligonucleotide
cauccggcauggugacaca

SEQ ID NO: 73303 - RNA, 19 nt, Artificial Sequence
  Description of Artificial Sequence: Synthetic oligonucleotide
cuggaagguguucuauguu

SEQ ID NO: 73304 - RNA, 19 nt, Artificial Sequence
  Description of Artificial Sequence: Synthetic oligonucleotide
guucaucgaacagcaggau

SEQ ID NO: 73305 - RNA, 19 nt, Artificial Sequence
  Description of Artificial Sequence: Synthetic oligonucleotide
ccggaaaacccaccacuga

SEQ ID NO: 73306 - RNA, 19 nt, Artificial Sequence
  Description of Artificial Sequence: Synthetic oligonucleotide
cguuccauuagucaucguu

SEQ ID NO: 73307 - RNA, 19 nt, Artificial Sequence
  Description of Artificial Sequence: Synthetic oligonucleotide
cgcaugcgcucaugcagag

SEQ ID NO: 73308 - RNA, 19 nt, Artificial Sequence
  Description of Artificial Sequence: Synthetic oligonucleotide
gcgugagggaguacacauc

SEQ ID NO: 73309 - RNA, 19 nt, Artificial Sequence
  Description of Artificial Sequence: Synthetic oligonucleotide
gugugggcgugagggagua

SEQ ID NO: 73310 - RNA, 19 nt, Artificial Sequence
  Description of Artificial Sequence: Synthetic oligonucleotide
gccccuaguucuaaauagu

SEQ ID NO: 73311 - RNA, 19 nt, Artificial Sequence
  Description of Artificial Sequence: Synthetic oligonucleotide
ccaucucauuaagagucaa

SEQ ID NO: 73312 - RNA, 19 nt, Artificial Sequence
  Description of Artificial Sequence: Synthetic oligonucleotide
ccagcgcccuguucuugga

SEQ ID NO: 73313 - RNA, 19 nt, Artificial Sequence
  Description of Artificial Sequence: Synthetic oligonucleotide
cucucacgcaugcgcucau

SEQ ID NO: 73314 - RNA, 19 nt, Artificial Sequence
  Description of Artificial Sequence: Synthetic oligonucleotide
gcguuccauuagucaucgu

SEQ ID NO: 73315 - RNA, 19 nt, Artificial Sequence
  Description of Artificial Sequence: Synthetic oligonucleotide
cccuugcacaagggauguu

SEQ ID NO: 73316 - RNA, 19 nt, Artificial Sequence
  Description of Artificial Sequence: Synthetic oligonucleotide
aaauugaugcacuccaucc

SEQ ID NO: 73317 - RNA, 19 nt, Artificial Sequence
  Description of Artificial Sequence: Synthetic oligonucleotide
aauacgaucacaucagaag

SEQ ID NO: 73318 - RNA, 19 nt, Artificial Sequence
  Description of Artificial Sequence: Synthetic oligonucleotide
aauacauugagaguaggac

SEQ ID NO: 73319 - RNA, 19 nt, Artificial Sequence
  Description of Artificial Sequence: Synthetic oligonucleotide
auacgaucacaucagaagc

SEQ ID NO: 73320 - RNA, 19 nt, Artificial Sequence
  Description of Artificial Sequence: Synthetic oligonucleotide
ugagagugaaaccagaugu

SEQ ID NO: 73321 - RNA, 19 nt, Artificial Sequence
  Description of Artificial Sequence: Synthetic oligonucleotide
ugaggaauuaaauuaacac

SEQ ID NO: 73322 - RNA, 19 nt, Artificial Sequence
  Description of Artificial Sequence: Synthetic oligonucleotide
agugccuaaacucacacuc

SEQ ID NO: 73323 - RNA, 19 nt, Artificial Sequence
  Description of Artificial Sequence: Synthetic oligonucleotide
cuagccaugagcauuagcc

SEQ ID NO: 73324 - RNA, 19 nt, Artificial Sequence
  Description of Artificial Sequence: Synthetic oligonucleotide
ucagguaagaacuaccacc

SEQ ID NO: 73325 - RNA, 19 nt, Artificial Sequence
  Description of Artificial Sequence: Synthetic oligonucleotide
aaauugugggcuuaagucu

SEQ ID NO: 73326 - RNA, 19 nt, Artificial Sequence
  Description of Artificial Sequence: Synthetic oligonucleotide
auacauugagaguaggacg

SEQ ID NO: 73327 - RNA, 19 nt, Artificial Sequence
  Description of Artificial Sequence: Synthetic oligonucleotide
uuauccuuaagccaaucug

SEQ ID NO: 73328 - RNA, 19 nt, Artificial Sequence
  Description of Artificial Sequence: Synthetic oligonucleotide
ugugacuucggcaacuuag

SEQ ID NO: 73329 - RNA, 19 nt, Artificial Sequence
  Description of Artificial Sequence: Synthetic oligonucleotide
  modified_base (2)..(2): a, c, u, g, unknown or other
anagcaaacagaugucucu

SEQ ID NO: 73330 - RNA, 19 nt, Artificial Sequence
  Description of Artificial Sequence: Synthetic oligonucleotide
aaauacgagaaccuucuca

SEQ ID NO: 73331 - RNA, 19 nt, Artificial Sequence
  Description of Artificial Sequence: Synthetic oligonucleotide
agugauacuuucucuaggg

SEQ ID NO: 73332 - RNA, 19 nt, Artificial Sequence
  Description of Artificial Sequence: Synthetic oligonucleotide
aguaggacgauguggcucc

SEQ ID NO: 73333 - RNA, 19 nt, Artificial Sequence
  Description of Artificial Sequence: Synthetic oligonucleotide
ugcaauauccaccagcccu

SEQ ID NO: 73334 - RNA, 19 nt, Artificial Sequence
  Description of Artificial Sequence: Synthetic oligonucleotide
aggaauuaaauuaacacug

SEQ ID NO: 73335 - RNA, 19 nt, Artificial Sequence
  Description of Artificial Sequence: Synthetic oligonucleotide
aaaggauauauuugggcga

SEQ ID NO: 73336 - RNA, 19 nt, Artificial Sequence
  Description of Artificial Sequence: Synthetic oligonucleotide
aagaauacacaaccuagga

SEQ ID NO: 73337 - RNA, 19 nt, Artificial Sequence
  Description of Artificial Sequence: Synthetic oligonucleotide
  modified_base (13)..(13): a, c, u, g, unknown or other
uuauaaugggaanagcaaa

SEQ ID NO: 73338 - RNA, 19 nt, Artificial Sequence
  Description of Artificial Sequence: Synthetic oligonucleotide
caugaaacggaauuccugc

SEQ ID NO: 73339 - RNA, 19 nt, Artificial Sequence
  Description of Artificial Sequence: Synthetic oligonucleotide
augccuaaagcucucaguc

SEQ ID NO: 73340 - RNA, 19 nt, Artificial Sequence
  Description of Artificial Sequence: Synthetic oligonucleotide
gagacaugcccauaaaccc

SEQ ID NO: 73341 - RNA, 19 nt, Artificial Sequence
  Description of Artificial Sequence: Synthetic oligonucleotide
ugugcuauggugaaccaga

SEQ ID NO: 73342 - RNA, 19 nt, Artificial Sequence
  Description of Artificial Sequence: Synthetic oligonucleotide
aagaacuaccaccugauua

SEQ ID NO: 73343 - RNA, 19 nt, Artificial Sequence
  Description of Artificial Sequence: Synthetic oligonucleotide
agaauacacaaccuaggag

SEQ ID NO: 73344 - RNA, 19 nt, Artificial Sequence
  Description of Artificial Sequence: Synthetic oligonucleotide
uauucagguaagaacuacc

SEQ ID NO: 73345 - RNA, 19 nt, Artificial Sequence
  Description of Artificial Sequence: Synthetic oligonucleotide
aaaggaaggacaacaauga

SEQ ID NO: 73346 - RNA, 19 nt, Artificial Sequence
  Description of Artificial Sequence: Synthetic oligonucleotide
ugauauagaggcuagccau

SEQ ID NO: 73347 - RNA, 19 nt, Artificial Sequence
  Description of Artificial Sequence: Synthetic oligonucleotide
  modified_base (3)..(3): a, c, u, g, unknown or other
aanagcaaacagaugucuc

SEQ ID NO: 73348 - RNA, 19 nt, Artificial Sequence
  Description of Artificial Sequence: Synthetic oligonucleotide
  modified_base (9)..(9): a, c, u, g, unknown or other
aaugggaanagcaaacaga

SEQ ID NO: 73349 - RNA, 19 nt, Artificial Sequence
  Description of Artificial Sequence: Synthetic oligonucleotide
ugagaguaggacgaugugg

SEQ ID NO: 73350 - RNA, 19 nt, Artificial Sequence
  Description of Artificial Sequence: Synthetic oligonucleotide
uaauacauugagaguagga

SEQ ID NO: 73351 - RNA, 19 nt, Artificial Sequence
  Description of Artificial Sequence: Synthetic oligonucleotide
ugacugcuaacaaacaacu

SEQ ID NO: 73352 - RNA, 19 nt, Artificial Sequence
  Description of Artificial Sequence: Synthetic oligonucleotide
gauggcuagaccuagccuc

SEQ ID NO: 73353 - RNA, 19 nt, Artificial Sequence
  Description of Artificial Sequence: Synthetic oligonucleotide
uacugcuuuaaggagagag

SEQ ID NO: 73354 - RNA, 19 nt, Artificial Sequence
  Description of Artificial Sequence: Synthetic oligonucleotide
gagaauggcgcccaagaag

SEQ ID NO: 73355 - RNA, 19 nt, Artificial Sequence
  Description of Artificial Sequence: Synthetic oligonucleotide
auuugggcgaaacauauaa

SEQ ID NO: 73356 - RNA, 19 nt, Artificial Sequence
  Description of Artificial Sequence: Synthetic oligonucleotide
uguuacacugcaauaucca

SEQ ID NO: 73357 - RNA, 19 nt, Artificial Sequence
  Description of Artificial Sequence: Synthetic oligonucleotide
uaugauccccaaaagugug

SEQ ID NO: 73358 - RNA, 19 nt, Artificial Sequence
  Description of Artificial Sequence: Synthetic oligonucleotide
gaagaugaaacacgugcgc

SEQ ID NO: 73359 - RNA, 19 nt, Artificial Sequence
  Description of Artificial Sequence: Synthetic oligonucleotide
cuggacuacacacuggcgg

SEQ ID NO: 73360 - RNA, 19 nt, Artificial Sequence
  Description of Artificial Sequence: Synthetic oligonucleotide
cauaaugcuguucacccag

SEQ ID NO: 73361 - RNA, 19 nt, Artificial Sequence
  Description of Artificial Sequence: Synthetic oligonucleotide
aauaccugguuucucacuu

SEQ ID NO: 73362 - RNA, 19 nt, Artificial Sequence
  Description of Artificial Sequence: Synthetic oligonucleotide
agaacuaccaccugauuaa

SEQ ID NO: 73363 - RNA, 19 nt, Artificial Sequence
  Description of Artificial Sequence: Synthetic oligonucleotide
uguuuggucuaccuagggc

SEQ ID NO: 73364 - RNA, 19 nt, Artificial Sequence
  Description of Artificial Sequence: Synthetic oligonucleotide
agagugccuaaacucacac

SEQ ID NO: 73365 - RNA, 19 nt, Artificial Sequence
  Description of Artificial Sequence: Synthetic oligonucleotide
auauauuugggcgaaacau

SEQ ID NO: 73366 - RNA, 19 nt, Artificial Sequence
  Description of Artificial Sequence: Synthetic oligonucleotide
ugaaccagacucuuccugc

SEQ ID NO: 73367 - RNA, 19 nt, Artificial Sequence
  Description of Artificial Sequence: Synthetic oligonucleotide
aauucuuauuuaaacagua

SEQ ID NO: 73368 - RNA, 19 nt, Artificial Sequence
  Description of Artificial Sequence: Synthetic oligonucleotide
gaagcguucagggaugcgg

SEQ ID NO: 73369 - RNA, 19 nt, Artificial Sequence
  Description of Artificial Sequence: Synthetic oligonucleotide
uuucccuaagaguuugugc

SEQ ID NO: 73370 - RNA, 19 nt, Artificial Sequence
  Description of Artificial Sequence: Synthetic oligonucleotide
guuaucggccuauggaagg

SEQ ID NO: 73371 - RNA, 19 nt, Artificial Sequence
  Description of Artificial Sequence: Synthetic oligonucleotide
uuaauacauugagaguagg

SEQ ID NO: 73372 - RNA, 19 nt, Artificial Sequence
  Description of Artificial Sequence: Synthetic oligonucleotide
aguggacaaaggcaccagc

SEQ ID NO: 73373 - RNA, 19 nt, Artificial Sequence
  Description of Artificial Sequence: Synthetic oligonucleotide
gagaguaggacgauguggc

SEQ ID NO: 73374 - RNA, 19 nt, Artificial Sequence
  Description of Artificial Sequence: Synthetic oligonucleotide
agaugaaacacgugcgcag

SEQ ID NO: 73375 - RNA, 19 nt, Artificial Sequence
  Description of Artificial Sequence: Synthetic oligonucleotide
ucucuaaaacccauaacuu

SEQ ID NO: 73376 - RNA, 19 nt, Artificial Sequence
  Description of Artificial Sequence: Synthetic oligonucleotide
gaugaaagaaugaaggugu

SEQ ID NO: 73377 - RNA, 19 nt, Artificial Sequence
  Description of Artificial Sequence: Synthetic oligonucleotide
aauggaaccaucacauaga

SEQ ID NO: 73378 - RNA, 19 nt, Artificial Sequence
  Description of Artificial Sequence: Synthetic oligonucleotide
augacauagugcaagguag

SEQ ID NO: 73379 - RNA, 19 nt, Artificial Sequence
  Description of Artificial Sequence: Synthetic oligonucleotide
gcuauggugaaccagacuc

SEQ ID NO: 73380 - RNA, 19 nt, Artificial Sequence
  Description of Artificial Sequence: Synthetic oligonucleotide
guuugugcuauggugaacc

SEQ ID NO: 73381 - RNA, 19 nt, Artificial Sequence
  Description of Artificial Sequence: Synthetic oligonucleotide
aauggcgcccaagaagaac

SEQ ID NO: 73382 - RNA, 19 nt, Artificial Sequence
  Description of Artificial Sequence: Synthetic oligonucleotide
auuauccuuaagccaaucu

SEQ ID NO: 73383 - RNA, 19 nt, Artificial Sequence
  Description of Artificial Sequence: Synthetic oligonucleotide
aguaaauuagaaaucuuau

SEQ ID NO: 73384 - RNA, 19 nt, Artificial Sequence
  Description of Artificial Sequence: Synthetic oligonucleotide
cuuaagccaaucugguagc

SEQ ID NO: 73385 - RNA, 19 nt, Artificial Sequence
  Description of Artificial Sequence: Synthetic oligonucleotide
caaccuaggagaugugucc

SEQ ID NO: 73386 - RNA, 19 nt, Artificial Sequence
  Description of Artificial Sequence: Synthetic oligonucleotide
uguaacuccuagcagcaau

SEQ ID NO: 73387 - RNA, 19 nt, Artificial Sequence
  Description of Artificial Sequence: Synthetic oligonucleotide
uacgagaaccuucucacau

SEQ ID NO: 73388 - RNA, 19 nt, Artificial Sequence
  Description of Artificial Sequence: Synthetic oligonucleotide
ucaugagggauuacucgcc

SEQ ID NO: 73389 - RNA, 19 nt, Artificial Sequence
  Description of Artificial Sequence: Synthetic oligonucleotide
accccaaccuucuaugauc

SEQ ID NO: 73390 - RNA, 19 nt, Artificial Sequence
  Description of Artificial Sequence: Synthetic oligonucleotide
gcaauaacauaccacuucc

SEQ ID NO: 73391 - RNA, 19 nt, Artificial Sequence
  Description of Artificial Sequence: Synthetic oligonucleotide
cacuacugaauaaauacga

SEQ ID NO: 73392 - RNA, 19 nt, Artificial Sequence
  Description of Artificial Sequence: Synthetic oligonucleotide
aagaugaaacacgugcgca

SEQ ID NO: 73393 - RNA, 19 nt, Artificial Sequence
  Description of Artificial Sequence: Synthetic oligonucleotide
agaauuucacuaguggcug

SEQ ID NO: 73394 - RNA, 19 nt, Artificial Sequence
  Description of Artificial Sequence: Synthetic oligonucleotide
ggcauaaugcuguucaccc

SEQ ID NO: 73395 - RNA, 19 nt, Artificial Sequence
  Description of Artificial Sequence: Synthetic oligonucleotide
guagggaaaucccauggug

SEQ ID NO: 73396 - RNA, 19 nt, Artificial Sequence
  Description of Artificial Sequence: Synthetic oligonucleotide
agccaugagcauuagccag

SEQ ID NO: 73397 - RNA, 19 nt, Artificial Sequence
  Description of Artificial Sequence: Synthetic oligonucleotide
cuaaacucacacuccuacc

SEQ ID NO: 73398 - RNA, 19 nt, Artificial Sequence
  Description of Artificial Sequence: Synthetic oligonucleotide
uguuguuaccacaaaccua

SEQ ID NO: 73399 - RNA, 19 nt, Artificial Sequence
  Description of Artificial Sequence: Synthetic oligonucleotide
gaaacacgugcgcagagca

SEQ ID NO: 73400 - RNA, 19 nt, Artificial Sequence
  Description of Artificial Sequence: Synthetic oligonucleotide
guuccuaacuggccuaggg

SEQ ID NO: 73401 - RNA, 19 nt, Artificial Sequence
  Description of Artificial Sequence: Synthetic oligonucleotide
ccuuaagccaaucugguag

SEQ ID NO: 73402 - RNA, 19 nt, Artificial Sequence
  Description of Artificial Sequence: Synthetic oligonucleotide
ugaugagagugaaaccaga

SEQ ID NO: 73403 - RNA, 19 nt, Artificial Sequence
  Description of Artificial Sequence: Synthetic oligonucleotide
cugaagguaaggcacucag

SEQ ID NO: 73404 - RNA, 19 nt, Artificial Sequence
  Description of Artificial Sequence: Synthetic oligonucleotide
  modified_base (7)..(7): a, c, u, g, unknown or other
ugggaanagcaaacagaug

SEQ ID NO: 73405 - RNA, 19 nt, Artificial Sequence
  Description of Artificial Sequence: Synthetic oligonucleotide
auggacauuguccugcuaa

SEQ ID NO: 73406 - RNA, 19 nt, Artificial Sequence
  Description of Artificial Sequence: Synthetic oligonucleotide
gacaccagcgaagaacuag

SEQ ID NO: 73407 - RNA, 19 nt, Artificial Sequence
  Description of Artificial Sequence: Synthetic oligonucleotide
cagccuaucugcccuaugg

SEQ ID NO: 73408 - RNA, 19 nt, Artificial Sequence
  Description of Artificial Sequence: Synthetic oligonucleotide
aaaggggccuacacgacag

SEQ ID NO: 73409 - RNA, 19 nt, Artificial Sequence
  Description of Artificial Sequence: Synthetic oligonucleotide
gagggauuacucgccaucg

SEQ ID NO: 73410 - RNA, 19 nt, Artificial Sequence
  Description of Artificial Sequence: Synthetic oligonucleotide
aaauacgaucacaucagaa

SEQ ID NO: 73411 - RNA, 19 nt, Artificial Sequence
  Description of Artificial Sequence: Synthetic oligonucleotide
acuagucaaggccuguaca

SEQ ID NO: 73412 - RNA, 19 nt, Artificial Sequence
  Description of Artificial Sequence: Synthetic oligonucleotide
acccauaacuugguggccc

SEQ ID NO: 73413 - RNA, 19 nt, Artificial Sequence
  Description of Artificial Sequence: Synthetic oligonucleotide
  modified_base (8)..(8): a, c, u, g, unknown or other
augggaanagcaaacagau

SEQ ID NO: 73414 - RNA, 19 nt, Artificial Sequence
  Description of Artificial Sequence: Synthetic oligonucleotide
caaauugaugcacuccauc

SEQ ID NO: 73415 - RNA, 19 nt, Artificial Sequence
  Description of Artificial Sequence: Synthetic oligonucleotide
gauauagaggcuagccaug

SEQ ID NO: 73416 - RNA, 19 nt, Artificial Sequence
  Description of Artificial Sequence: Synthetic oligonucleotide
caggccuaagcccacaaac

SEQ ID NO: 73417 - RNA, 19 nt, Artificial Sequence
  Description of Artificial Sequence: Synthetic oligonucleotide
aauacacaaccuaggagau

SEQ ID NO: 73418 - RNA, 19 nt, Artificial Sequence
  Description of Artificial Sequence: Synthetic oligonucleotide
ugagcauuagccagccuau

SEQ ID NO: 73419 - RNA, 19 nt, Artificial Sequence
  Description of Artificial Sequence: Synthetic oligonucleotide
cauguuacacugcaauauc

SEQ ID NO: 73420 - RNA, 19 nt, Artificial Sequence
  Description of Artificial Sequence: Synthetic oligonucleotide
cuaccaaccaugaaacgga

SEQ ID NO: 73421 - RNA, 19 nt, Artificial Sequence
  Description of Artificial Sequence: Synthetic oligonucleotide
ugaaacagugugugguacu

SEQ ID NO: 73422 - RNA, 19 nt, Artificial Sequence
  Description of Artificial Sequence: Synthetic oligonucleotide
acgacagccucucaaguga

SEQ ID NO: 73423 - RNA, 19 nt, Artificial Sequence
  Description of Artificial Sequence: Synthetic oligonucleotide
ugcccauaaacccuucauc

SEQ ID NO: 73424 - RNA, 19 nt, Artificial Sequence
  Description of Artificial Sequence: Synthetic oligonucleotide
ugagggauuacucgccauc

SEQ ID NO: 73425 - RNA, 19 nt, Artificial Sequence
  Description of Artificial Sequence: Synthetic oligonucleotide
uugagaguaggacgaugug

SEQ ID NO: 73426 - RNA, 19 nt, Artificial Sequence
  Description of Artificial Sequence: Synthetic oligonucleotide
acggaacucauguauuacu

SEQ ID NO: 73427 - RNA, 19 nt, Artificial Sequence
  Description of Artificial Sequence: Synthetic oligonucleotide
aguagggaaaucccauggu

SEQ ID NO: 73428 - RNA, 19 nt, Artificial Sequence
  Description of Artificial Sequence: Synthetic oligonucleotide
uagaccuagccucuacuuc

SEQ ID NO: 73429 - RNA, 19 nt, Artificial Sequence
  Description of Artificial Sequence: Synthetic oligonucleotide
ugauucucaguagagcaaa

SEQ ID NO: 73430 - RNA, 19 nt, Artificial Sequence
  Description of Artificial Sequence: Synthetic oligonucleotide
caaccugacgagcugccgg

SEQ ID NO: 73431 - RNA, 19 nt, Artificial Sequence
  Description of Artificial Sequence: Synthetic oligonucleotide
gugauauagaggcuagcca

SEQ ID NO: 73432 - RNA, 19 nt, Artificial Sequence
  Description of Artificial Sequence: Synthetic oligonucleotide
gguaagaacuaccaccuga

SEQ ID NO: 73433 - RNA, 19 nt, Artificial Sequence
  Description of Artificial Sequence: Synthetic oligonucleotide
gugacugcuaacaaacaac

SEQ ID NO: 73434 - RNA, 19 nt, Artificial Sequence
  Description of Artificial Sequence: Synthetic oligonucleotide
aaacacuacugaauaaaua

SEQ ID NO: 73435 - RNA, 19 nt, Artificial Sequence
  Description of Artificial Sequence: Synthetic oligonucleotide
aauugugggcuuaagucua

SEQ ID NO: 73436 - RNA, 19 nt, Artificial Sequence
  Description of Artificial Sequence: Synthetic oligonucleotide
agcaaccacgaagaugugg

SEQ ID NO: 73437 - RNA, 19 nt, Artificial Sequence
  Description of Artificial Sequence: Synthetic oligonucleotide
agggaaguuacuggacuac

SEQ ID NO: 73438 - RNA, 19 nt, Artificial Sequence
  Description of Artificial Sequence: Synthetic oligonucleotide
auauuugggcgaaacauau

SEQ ID NO: 73439 - RNA, 19 nt, Artificial Sequence
  Description of Artificial Sequence: Synthetic oligonucleotide
  modified_base (4)..(4): a, c, u, g, unknown or other
gaanagcaaacagaugucu

SEQ ID NO: 73440 - RNA, 19 nt, Artificial Sequence
  Description of Artificial Sequence: Synthetic oligonucleotide
aaccccaaccuucuaugau

SEQ ID NO: 73441 - RNA, 19 nt, Artificial Sequence
  Description of Artificial Sequence: Synthetic oligonucleotide
ucacauuugccaggaaaga

SEQ ID NO: 73442 - RNA, 19 nt, Artificial Sequence
  Description of Artificial Sequence: Synthetic oligonucleotide
augauccccaaaagugugc

SEQ ID NO: 73443 - RNA, 19 nt, Artificial Sequence
  Description of Artificial Sequence: Synthetic oligonucleotide
gacuucggcaacuuagaaa

SEQ ID NO: 73444 - RNA, 19 nt, Artificial Sequence
  Description of Artificial Sequence: Synthetic oligonucleotide
ugaaacacgugcgcagagc

SEQ ID NO: 73445 - RNA, 19 nt, Artificial Sequence
  Description of Artificial Sequence: Synthetic oligonucleotide
ucuccaaauugaugcacuc

SEQ ID NO: 73446 - RNA, 19 nt, Artificial Sequence
  Description of Artificial Sequence: Synthetic oligonucleotide
aagaacuagucaaggccug

SEQ ID NO: 73447 - RNA, 19 nt, Artificial Sequence
  Description of Artificial Sequence: Synthetic oligonucleotide
gaaaggggccuacacgaca

SEQ ID NO: 73448 - RNA, 19 nt, Artificial Sequence
  Description of Artificial Sequence: Synthetic oligonucleotide
cccgauguguggaagagcc

SEQ ID NO: 73449 - RNA, 19 nt, Artificial Sequence
  Description of Artificial Sequence: Synthetic oligonucleotide
agcguucagggaugcgggc

SEQ ID NO: 73450 - RNA, 19 nt, Artificial Sequence
  Description of Artificial Sequence: Synthetic oligonucleotide
uuugugcuauggugaacca

SEQ ID NO: 73451 - RNA, 19 nt, Artificial Sequence
  Description of Artificial Sequence: Synthetic oligonucleotide
ugccuaaagcucucagucu

SEQ ID NO: 73452 - RNA, 19 nt, Artificial Sequence
  Description of Artificial Sequence: Synthetic oligonucleotide
uuaucggccuauggaaggc

SEQ ID NO: 73453 - RNA, 19 nt, Artificial Sequence
  Description of Artificial Sequence: Synthetic oligonucleotide
cuguuuggucuaccuaggg

SEQ ID NO: 73454 - RNA, 19 nt, Artificial Sequence
  Description of Artificial Sequence: Synthetic oligonucleotide
uccugugauauagaggcua

SEQ ID NO: 73455 - RNA, 19 nt, Artificial Sequence
  Description of Artificial Sequence: Synthetic oligonucleotide
uugugcuauggugaaccag

SEQ ID NO: 73456 - RNA, 19 nt, Artificial Sequence
  Description of Artificial Sequence: Synthetic oligonucleotide
gacaccguggaaguggaca

SEQ ID NO: 73457 - RNA, 19 nt, Artificial Sequence
  Description of Artificial Sequence: Synthetic oligonucleotide
ucgccaucgaccuucccaa

SEQ ID NO: 73458 - RNA, 19 nt, Artificial Sequence
  Description of Artificial Sequence: Synthetic oligonucleotide
uaaauacgagaaccuucuc

SEQ ID NO: 73459 - RNA, 19 nt, Artificial Sequence
  Description of Artificial Sequence: Synthetic oligonucleotide
ugauccccaaaagugugcu

SEQ ID NO: 73460 - RNA, 19 nt, Artificial Sequence
  Description of Artificial Sequence: Synthetic oligonucleotide
acuaccuggcaauaacaua

SEQ ID NO: 73461 - RNA, 19 nt, Artificial Sequence
  Description of Artificial Sequence: Synthetic oligonucleotide
gauucucaguagagcaaag

SEQ ID NO: 73462 - RNA, 19 nt, Artificial Sequence
  Description of Artificial Sequence: Synthetic oligonucleotide
acuaguggcuggcuucaug

SEQ ID NO: 73463 - RNA, 19 nt, Artificial Sequence
  Description of Artificial Sequence: Synthetic oligonucleotide
uuucacuaguggcuggcuu

SEQ ID NO: 73464 - RNA, 19 nt, Artificial Sequence
  Description of Artificial Sequence: Synthetic oligonucleotide
auauagaggcuagccauga

SEQ ID NO: 73465 - RNA, 19 nt, Artificial Sequence
  Description of Artificial Sequence: Synthetic oligonucleotide
gaugaaacacgugcgcaga

SEQ ID NO: 73466 - RNA, 19 nt, Artificial Sequence
  Description of Artificial Sequence: Synthetic oligonucleotide
uggacauuguccugcuaaa

SEQ ID NO: 73467 - RNA, 19 nt, Artificial Sequence
  Description of Artificial Sequence: Synthetic oligonucleotide
ugcuauggugaaccagacu

SEQ ID NO: 73468 - RNA, 19 nt, Artificial Sequence
  Description of Artificial Sequence: Synthetic oligonucleotide
uguagcgagcugcgcagac

SEQ ID NO: 73469 - RNA, 19 nt, Artificial Sequence
  Description of Artificial Sequence: Synthetic oligonucleotide
auucucaguagagcaaagu

SEQ ID NO: 73470 - RNA, 19 nt, Artificial Sequence
  Description of Artificial Sequence: Synthetic oligonucleotide
caacuaccuggcaauaaca

SEQ ID NO: 73471 - RNA, 19 nt, Artificial Sequence
  Description of Artificial Sequence: Synthetic oligonucleotide
cuaugauccccaaaagugu

SEQ ID NO: 73472 - RNA, 19 nt, Artificial Sequence
  Description of Artificial Sequence: Synthetic oligonucleotide
accguggaaguggacaaag

SEQ ID NO: 73473 - RNA, 19 nt, Artificial Sequence
  Description of Artificial Sequence: Synthetic oligonucleotide
caacccgaagaccacuuuc

SEQ ID NO: 73474 - RNA, 19 nt, Artificial Sequence
  Description of Artificial Sequence: Synthetic oligonucleotide
auacgagaaccuucucaca

SEQ ID NO: 73475 - RNA, 19 nt, Artificial Sequence
  Description of Artificial Sequence: Synthetic oligonucleotide
agcuaugaugccagagggg

SEQ ID NO: 73476 - RNA, 19 nt, Artificial Sequence
  Description of Artificial Sequence: Synthetic oligonucleotide
gaguaggacgauguggcuc

SEQ ID NO: 73477 - RNA, 19 nt, Artificial Sequence
  Description of Artificial Sequence: Synthetic oligonucleotide
agaucccaaaaggaaguca

SEQ ID NO: 73478 - RNA, 19 nt, Artificial Sequence
  Description of Artificial Sequence: Synthetic oligonucleotide
ugaauggaaccaucacaua

SEQ ID NO: 73479 - RNA, 19 nt, Artificial Sequence
  Description of Artificial Sequence: Synthetic oligonucleotide
ucggccuauggaaggcacc

SEQ ID NO: 73480 - RNA, 19 nt, Artificial Sequence
  Description of Artificial Sequence: Synthetic oligonucleotide
aggagcuaugaugccagag

SEQ ID NO: 73481 - RNA, 19 nt, Artificial Sequence
  Description of Artificial Sequence: Synthetic oligonucleotide
auggcgcccaagaagaaca

SEQ ID NO: 73482 - RNA, 19 nt, Artificial Sequence
  Description of Artificial Sequence: Synthetic oligonucleotide
agaaaggggccuacacgac

SEQ ID NO: 73483 - RNA, 19 nt, Artificial Sequence
  Description of Artificial Sequence: Synthetic oligonucleotide
ggcaacuuagaaaggggag

SEQ ID NO: 73484 - RNA, 19 nt, Artificial Sequence
  Description of Artificial Sequence: Synthetic oligonucleotide
gagggauggcuagaccuag

SEQ ID NO: 73485 - RNA, 19 nt, Artificial Sequence
  Description of Artificial Sequence: Synthetic oligonucleotide
gaguuugugcuauggugaa

SEQ ID NO: 73486 - RNA, 19 nt, Artificial Sequence
  Description of Artificial Sequence: Synthetic oligonucleotide
agacaugcccauaaacccu

SEQ ID NO: 73487 - RNA, 19 nt, Artificial Sequence
  Description of Artificial Sequence: Synthetic oligonucleotide
agccuaucugcccuauggu

SEQ ID NO: 73488 - RNA, 19 nt, Artificial Sequence
  Description of Artificial Sequence: Synthetic oligonucleotide
uaccaaccaugaaacggaa

SEQ ID NO: 73489 - RNA, 19 nt, Artificial Sequence
  Description of Artificial Sequence: Synthetic oligonucleotide
ggauuacucgccaucgacc

SEQ ID NO: 73490 - RNA, 19 nt, Artificial Sequence
  Description of Artificial Sequence: Synthetic oligonucleotide
agagggcccauguuacacu

SEQ ID NO: 73491 - RNA, 19 nt, Artificial Sequence
  Description of Artificial Sequence: Synthetic oligonucleotide
cucagucuugagaguggcc

SEQ ID NO: 73492 - RNA, 19 nt, Artificial Sequence
  Description of Artificial Sequence: Synthetic oligonucleotide
uccuuaagccaaucuggua

SEQ ID NO: 73493 - RNA, 19 nt, Artificial Sequence
  Description of Artificial Sequence: Synthetic oligonucleotide
cucgccaucgaccuuccca

SEQ ID NO: 73494 - RNA, 19 nt, Artificial Sequence
  Description of Artificial Sequence: Synthetic oligonucleotide
gugcuuugugacuucggca

SEQ ID NO: 73495 - RNA, 19 nt, Artificial Sequence
  Description of Artificial Sequence: Synthetic oligonucleotide
cauugagaguaggacgaug

SEQ ID NO: 73496 - RNA, 19 nt, Artificial Sequence
  Description of Artificial Sequence: Synthetic oligonucleotide
gggauuacucgccaucgac

SEQ ID NO: 73497 - RNA, 19 nt, Artificial Sequence
  Description of Artificial Sequence: Synthetic oligonucleotide
uggucuaccuagggcagug

SEQ ID NO: 73498 - RNA, 19 nt, Artificial Sequence
  Description of Artificial Sequence: Synthetic oligonucleotide
gucuaccuagggcagugac

SEQ ID NO: 73499 - RNA, 19 nt, Artificial Sequence
  Description of Artificial Sequence: Synthetic oligonucleotide
gaagucuuggaaacucaaa

SEQ ID NO: 73500 - RNA, 19 nt, Artificial Sequence
  Description of Artificial Sequence: Synthetic oligonucleotide
ccagcgaagaacuagucaa

SEQ ID NO: 73501 - RNA, 19 nt, Artificial Sequence
  Description of Artificial Sequence: Synthetic oligonucleotide
ccaacuaccuggcaauaac

SEQ ID NO: 73502 - RNA, 19 nt, Artificial Sequence
  Description of Artificial Sequence: Synthetic oligonucleotide
ucccaaaagagugccuaaa

SEQ ID NO: 73503 - RNA, 19 nt, Artificial Sequence
  Description of Artificial Sequence: Synthetic oligonucleotide
agccucucaagugauacuu

SEQ ID NO: 73504 - RNA, 19 nt, Artificial Sequence
  Description of Artificial Sequence: Synthetic oligonucleotide
aggugccaaccugacgagc

SEQ ID NO: 73505 - RNA, 19 nt, Artificial Sequence
  Description of Artificial Sequence: Synthetic oligonucleotide
acaccagcgaagaacuagu

SEQ ID NO: 73506 - RNA, 19 nt, Artificial Sequence
  Description of Artificial Sequence: Synthetic oligonucleotide
aucggccuauggaaggcac

SEQ ID NO: 73507 - RNA, 19 nt, Artificial Sequence
  Description of Artificial Sequence: Synthetic oligonucleotide
agguagggaugauuccacu

SEQ ID NO: 73508 - RNA, 19 nt, Artificial Sequence
  Description of Artificial Sequence: Synthetic oligonucleotide
gcaaccacgaagaugugga

SEQ ID NO: 73509 - RNA, 19 nt, Artificial Sequence
  Description of Artificial Sequence: Synthetic oligonucleotide
ccaaccuucuaugaucccc

SEQ ID NO: 73510 - RNA, 19 nt, Artificial Sequence
  Description of Artificial Sequence: Synthetic oligonucleotide
ccugugauauagaggcuag

SEQ ID NO: 73511 - RNA, 19 nt, Artificial Sequence
  Description of Artificial Sequence: Synthetic oligonucleotide
gcgcccaagaagaacaacc

SEQ ID NO: 73512 - RNA, 19 nt, Artificial Sequence
  Description of Artificial Sequence: Synthetic oligonucleotide
aaccuucuaugauccccaa

SEQ ID NO: 73513 - RNA, 19 nt, Artificial Sequence
  Description of Artificial Sequence: Synthetic oligonucleotide
gccuaucugcccuauggug

SEQ ID NO: 73514 - RNA, 19 nt, Artificial Sequence
  Description of Artificial Sequence: Synthetic oligonucleotide
gauuccacucaggccuaag

SEQ ID NO: 73515 - RNA, 19 nt, Artificial Sequence
  Description of Artificial Sequence: Synthetic oligonucleotide
cuaaaacccauaacuuggu

SEQ ID NO: 73516 - RNA, 19 nt, Artificial Sequence
  Description of Artificial Sequence: Synthetic oligonucleotide
ggccacuauuuacugauga

SEQ ID NO: 73517 - RNA, 19 nt, Artificial Sequence
  Description of Artificial Sequence: Synthetic oligonucleotide
aacaacccgaagaccacuu

SEQ ID NO: 73518 - RNA, 19 nt, Artificial Sequence
  Description of Artificial Sequence: Synthetic oligonucleotide
caucuuccugggaauuguc

SEQ ID NO: 73519 - RNA, 19 nt, Artificial Sequence
  Description of Artificial Sequence: Synthetic oligonucleotide
agggauuacucgccaucga

SEQ ID NO: 73520 - RNA, 19 nt, Artificial Sequence
  Description of Artificial Sequence: Synthetic oligonucleotide
acgagaaccuucucacauu

SEQ ID NO: 73521 - RNA, 19 nt, Artificial Sequence
  Description of Artificial Sequence: Synthetic oligonucleotide
agaacuagucaaggccugu

SEQ ID NO: 73522 - RNA, 19 nt, Artificial Sequence
  Description of Artificial Sequence: Synthetic oligonucleotide
ccccaaccuucuaugaucc

SEQ ID NO: 73523 - RNA, 19 nt, Artificial Sequence
  Description of Artificial Sequence: Synthetic oligonucleotide
agugcacggaacucaugua

SEQ ID NO: 73524 - RNA, 19 nt, Artificial Sequence
  Description of Artificial Sequence: Synthetic oligonucleotide
cuacacgacagccucucaa

SEQ ID NO: 73525 - RNA, 19 nt, Artificial Sequence
  Description of Artificial Sequence: Synthetic oligonucleotide
gggaauugucaucuuugca

SEQ ID NO: 73526 - RNA, 19 nt, Artificial Sequence
  Description of Artificial Sequence: Synthetic oligonucleotide
agaaggcauaggaggucgg

SEQ ID NO: 73527 - RNA, 19 nt, Artificial Sequence
  Description of Artificial Sequence: Synthetic oligonucleotide
agggauggcuagaccuagc

SEQ ID NO: 73528 - RNA, 19 nt, Artificial Sequence
  Description of Artificial Sequence: Synthetic oligonucleotide
augagggauuacucgccau

SEQ ID NO: 73529 - RNA, 19 nt, Artificial Sequence
  Description of Artificial Sequence: Synthetic oligonucleotide
guaagaacuaccaccugau

SEQ ID NO: 73530 - RNA, 19 nt, Artificial Sequence
  Description of Artificial Sequence: Synthetic oligonucleotide
uacucgccaucgaccuucc

SEQ ID NO: 73531 - RNA, 19 nt, Artificial Sequence
  Description of Artificial Sequence: Synthetic oligonucleotide
gaaccagacucuuccugcu

SEQ ID NO: 73532 - RNA, 19 nt, Artificial Sequence
  Description of Artificial Sequence: Synthetic oligonucleotide
gaagagccaugaaaaugaa

SEQ ID NO: 73533 - RNA, 19 nt, Artificial Sequence
  Description of Artificial Sequence: Synthetic oligonucleotide
auaccugguuucucacuua

SEQ ID NO: 73534 - RNA, 19 nt, Artificial Sequence
  Description of Artificial Sequence: Synthetic oligonucleotide
aaacacgugcgcagagcaa

SEQ ID NO: 73535 - RNA, 19 nt, Artificial Sequence
  Description of Artificial Sequence: Synthetic oligonucleotide
accuucuaugauccccaaa

SEQ ID NO: 73536 - RNA, 19 nt, Artificial Sequence
  Description of Artificial Sequence: Synthetic oligonucleotide
gguacuugcauguuucauu

SEQ ID NO: 73537 - RNA, 19 nt, Artificial Sequence
  Description of Artificial Sequence: Synthetic oligonucleotide
gcaauucaaauugugggcu

SEQ ID NO: 73538 - RNA, 19 nt, Artificial Sequence
  Description of Artificial Sequence: Synthetic oligonucleotide
acucgccaucgaccuuccc

SEQ ID NO: 73539 - RNA, 19 nt, Artificial Sequence
  Description of Artificial Sequence: Synthetic oligonucleotide
gcgaaacauauaaaagauc

SEQ ID NO: 73540 - RNA, 19 nt, Artificial Sequence
  Description of Artificial Sequence: Synthetic oligonucleotide
caugcccauaaacccuuca

SEQ ID NO: 73541 - RNA, 19 nt, Artificial Sequence
  Description of Artificial Sequence: Synthetic oligonucleotide
gagugccuaaacucacacu

SEQ ID NO: 73542 - RNA, 19 nt, Artificial Sequence
  Description of Artificial Sequence: Synthetic oligonucleotide
gaacuagucaaggccugua

SEQ ID NO: 73543 - RNA, 19 nt, Artificial Sequence
  Description of Artificial Sequence: Synthetic oligonucleotide
cacgugcgcagagcaagcc

SEQ ID NO: 73544 - RNA, 19 nt, Artificial Sequence
  Description of Artificial Sequence: Synthetic oligonucleotide
ggagaagaaccaccaacua

SEQ ID NO: 73545 - RNA, 19 nt, Artificial Sequence
  Description of Artificial Sequence: Synthetic oligonucleotide
uuguagcgagcugcgcaga

SEQ ID NO: 73546 - RNA, 19 nt, Artificial Sequence
  Description of Artificial Sequence: Synthetic oligonucleotide
gugcuauggugaaccagac

SEQ ID NO: 73547 - RNA, 19 nt, Artificial Sequence
  Description of Artificial Sequence: Synthetic oligonucleotide
gcacucaggugccaaccug

SEQ ID NO: 73548 - RNA, 19 nt, Artificial Sequence
  Description of Artificial Sequence: Synthetic oligonucleotide
gccaucgaccuucccaaac

SEQ ID NO: 73549 - RNA, 19 nt, Artificial Sequence
  Description of Artificial Sequence: Synthetic oligonucleotide
ggcuuguaggagaggagac

SEQ ID NO: 73550 - RNA, 19 nt, Artificial Sequence
  Description of Artificial Sequence: Synthetic oligonucleotide
ucgugcauucuggggcuac

SEQ ID NO: 73551 - RNA, 19 nt, Artificial Sequence
  Description of Artificial Sequence: Synthetic oligonucleotide
cuccccgauguguggaaga

SEQ ID NO: 73552 - RNA, 19 nt, Artificial Sequence
  Description of Artificial Sequence: Synthetic oligonucleotide
gggaaguuacuggacuaca

SEQ ID NO: 73553 - RNA, 19 nt, Artificial Sequence
  Description of Artificial Sequence: Synthetic oligonucleotide
gacuccccgauguguggaa

SEQ ID NO: 73554 - RNA, 19 nt, Artificial Sequence
  Description of Artificial Sequence: Synthetic oligonucleotide
auugugggcuuaagucuau

SEQ ID NO: 73555 - RNA, 19 nt, Artificial Sequence
  Description of Artificial Sequence: Synthetic oligonucleotide
ggcuagaccuagccucuac

SEQ ID NO: 73556 - RNA, 19 nt, Artificial Sequence
  Description of Artificial Sequence: Synthetic oligonucleotide
caucgaccuucccaaaccu

SEQ ID NO: 73557 - RNA, 19 nt, Artificial Sequence
  Description of Artificial Sequence: Synthetic oligonucleotide
gacuacacacuggcggugu

SEQ ID NO: 73558 - RNA, 19 nt, Artificial Sequence
  Description of Artificial Sequence: Synthetic oligonucleotide
cccuaggaugugaugccug

SEQ ID NO: 73559 - RNA, 19 nt, Artificial Sequence
  Description of Artificial Sequence: Synthetic oligonucleotide
guaacuccuagcagcaauu

SEQ ID NO: 73560 - RNA, 19 nt, Artificial Sequence
  Description of Artificial Sequence: Synthetic oligonucleotide
cccggaaagaaggcauagg

SEQ ID NO: 73561 - RNA, 19 nt, Artificial Sequence
  Description of Artificial Sequence: Synthetic oligonucleotide
cagaauucucauccccacu

SEQ ID NO: 73562 - RNA, 19 nt, Artificial Sequence
  Description of Artificial Sequence: Synthetic oligonucleotide
cacaaccuaggagaugugu

SEQ ID NO: 73563 - RNA, 19 nt, Artificial Sequence
  Description of Artificial Sequence: Synthetic oligonucleotide
aggccacuauuuacugaug

SEQ ID NO: 73564 - RNA, 19 nt, Artificial Sequence
  Description of Artificial Sequence: Synthetic oligonucleotide
gcacggaacucauguauua

SEQ ID NO: 73565 - RNA, 19 nt, Artificial Sequence
  Description of Artificial Sequence: Synthetic oligonucleotide
cuugcagaguugcccucaa

SEQ ID NO: 73566 - RNA, 19 nt, Artificial Sequence
  Description of Artificial Sequence: Synthetic oligonucleotide
agccccuaccaaccaugaa

SEQ ID NO: 73567 - RNA, 19 nt, Artificial Sequence
  Description of Artificial Sequence: Synthetic oligonucleotide
gaauggcgcccaagaagaa

SEQ ID NO: 73568 - RNA, 19 nt, Artificial Sequence
  Description of Artificial Sequence: Synthetic oligonucleotide
cguucagggaugcgggcag

SEQ ID NO: 73569 - RNA, 19 nt, Artificial Sequence
  Description of Artificial Sequence: Synthetic oligonucleotide
gcuagaccuagccucuacu

SEQ ID NO: 73570 - RNA, 19 nt, Artificial Sequence
  Description of Artificial Sequence: Synthetic oligonucleotide
ggauggcuagaccuagccu

SEQ ID NO: 73571 - RNA, 19 nt, Artificial Sequence
  Description of Artificial Sequence: Synthetic oligonucleotide
gcuggagaucugaagcuaa

SEQ ID NO: 73572 - RNA, 19 nt, Artificial Sequence
  Description of Artificial Sequence: Synthetic oligonucleotide
gcucugacuccccgaugug

SEQ ID NO: 73573 - RNA, 19 nt, Artificial Sequence
  Description of Artificial Sequence: Synthetic oligonucleotide
cggcaacuuagaaagggga

SEQ ID NO: 73574 - RNA, 19 nt, Artificial Sequence
  Description of Artificial Sequence: Synthetic oligonucleotide
caccuaaauugguuuugau

SEQ ID NO: 73575 - RNA, 19 nt, Artificial Sequence
  Description of Artificial Sequence: Synthetic oligonucleotide
cauucccgucuucuacaaa

SEQ ID NO: 73576 - RNA, 19 nt, Artificial Sequence
  Description of Artificial Sequence: Synthetic oligonucleotide
guaaggcacucaggugcca

SEQ ID NO: 73577 - RNA, 19 nt, Artificial Sequence
  Description of Artificial Sequence: Synthetic oligonucleotide
cccaaccuucuaugauccc

SEQ ID NO: 73578 - RNA, 19 nt, Artificial Sequence
  Description of Artificial Sequence: Synthetic oligonucleotide
gcugaagguaaggcacuca

SEQ ID NO: 73579 - RNA, 19 nt, Artificial Sequence
  Description of Artificial Sequence: Synthetic oligonucleotide
caggagcuaugaugccaga

SEQ ID NO: 73580 - RNA, 19 nt, Artificial Sequence
  Description of Artificial Sequence: Synthetic oligonucleotide
gccuacacgacagccucuc

SEQ ID NO: 73581 - RNA, 19 nt, Artificial Sequence
  Description of Artificial Sequence: Synthetic oligonucleotide
cucugacuccccgaugugu

SEQ ID NO: 73582 - RNA, 19 nt, Artificial Sequence
  Description of Artificial Sequence: Synthetic oligonucleotide
cuggcaccgacagccagua

SEQ ID NO: 73583 - RNA, 19 nt, Artificial Sequence
  Description of Artificial Sequence: Synthetic oligonucleotide
ggcgcccaagaagaacaac

SEQ ID NO: 73584 - RNA, 19 nt, Artificial Sequence
  Description of Artificial Sequence: Synthetic oligonucleotide
uggcuagaccuagccucua

SEQ ID NO: 73585 - RNA, 19 nt, Artificial Sequence
  Description of Artificial Sequence: Synthetic oligonucleotide
ggcacucaggugccaaccu

SEQ ID NO: 73586 - RNA, 19 nt, Artificial Sequence
  Description of Artificial Sequence: Synthetic oligonucleotide
agcgagcugcgcagacaca

SEQ ID NO: 73587 - RNA, 19 nt, Artificial Sequence
  Description of Artificial Sequence: Synthetic oligonucleotide
ccccgauguguggaagagc

SEQ ID NO: 73588 - RNA, 19 nt, Artificial Sequence
  Description of Artificial Sequence: Synthetic oligonucleotide
guaggacgauguggcucca

SEQ ID NO: 73589 - RNA, 19 nt, Artificial Sequence
  Description of Artificial Sequence: Synthetic oligonucleotide
aucgugcauucuggggcua

SEQ ID NO: 73590 - RNA, 19 nt, Artificial Sequence
  Description of Artificial Sequence: Synthetic oligonucleotide
uccuaccccuuggcuggau

SEQ ID NO: 73591 - RNA, 19 nt, Artificial Sequence
  Description of Artificial Sequence: Synthetic oligonucleotide
ccagccuaucugcccuaug

SEQ ID NO: 73592 - RNA, 19 nt, Artificial Sequence
  Description of Artificial Sequence: Synthetic oligonucleotide
caccguggaaguggacaaa

SEQ ID NO: 73593 - RNA, 19 nt, Artificial Sequence
  Description of Artificial Sequence: Synthetic oligonucleotide
aggggccacaaaggauaua

SEQ ID NO: 73594 - RNA, 19 nt, Artificial Sequence
  Description of Artificial Sequence: Synthetic oligonucleotide
ccuacacgacagccucuca

SEQ ID NO: 73595 - RNA, 19 nt, Artificial Sequence
  Description of Artificial Sequence: Synthetic oligonucleotide
gcccuaggaugugaugccu

SEQ ID NO: 73596 - RNA, 19 nt, Artificial Sequence
  Description of Artificial Sequence: Synthetic oligonucleotide
gccucucaagugauacuuu

SEQ ID NO: 73597 - RNA, 19 nt, Artificial Sequence
  Description of Artificial Sequence: Synthetic oligonucleotide
ggccuacacgacagccucu

SEQ ID NO: 73598 - RNA, 19 nt, Artificial Sequence
  Description of Artificial Sequence: Synthetic oligonucleotide
gggccacaaaggauauauu

SEQ ID NO: 73599 - RNA, 19 nt, Artificial Sequence
  Description of Artificial Sequence: Synthetic oligonucleotide
cacuaguggcuggcuucau

SEQ ID NO: 73600 - RNA, 19 nt, Artificial Sequence
  Description of Artificial Sequence: Synthetic oligonucleotide
gccagccuaucugcccuau

SEQ ID NO: 73601 - RNA, 19 nt, Artificial Sequence
  Description of Artificial Sequence: Synthetic oligonucleotide
aagauaagcucauacaccc

SEQ ID NO: 73602 - RNA, 19 nt, Artificial Sequence
  Description of Artificial Sequence: Synthetic oligonucleotide
cauaauaugaucaucagag

SEQ ID NO: 73603 - RNA, 19 nt, Artificial Sequence
  Description of Artificial Sequence: Synthetic oligonucleotide
aaguaguuaaaauuccacc

SEQ ID NO: 73604 - RNA, 19 nt, Artificial Sequence
  Description of Artificial Sequence: Synthetic oligonucleotide
uaggguaacauuuauaacc

SEQ ID NO: 73605 - RNA, 19 nt, Artificial Sequence
  Description of Artificial Sequence: Synthetic oligonucleotide
ugugcuuagaccuugagca

SEQ ID NO: 73606 - RNA, 19 nt, Artificial Sequence
  Description of Artificial Sequence: Synthetic oligonucleotide
caucauauuagauagucgg

SEQ ID NO: 73607 - RNA, 19 nt, Artificial Sequence
  Description of Artificial Sequence: Synthetic oligonucleotide
ucuuucguccaauauaugg

SEQ ID NO: 73608 - RNA, 19 nt, Artificial Sequence
  Description of Artificial Sequence: Synthetic oligonucleotide
aaaaucuccaaguaaggcu

SEQ ID NO: 73609 - RNA, 19 nt, Artificial Sequence
  Description of Artificial Sequence: Synthetic oligonucleotide
uaauaugaucaucagagca

SEQ ID NO: 73610 - RNA, 19 nt, Artificial Sequence
  Description of Artificial Sequence: Synthetic oligonucleotide
uaguuuaucauauugugcu

SEQ ID NO: 73611 - RNA, 19 nt, Artificial Sequence
  Description of Artificial Sequence: Synthetic oligonucleotide
aauaccuacgacuaauaca

SEQ ID NO: 73612 - RNA, 19 nt, Artificial Sequence
  Description of Artificial Sequence: Synthetic oligonucleotide
cauacaaugauuaagugga

SEQ ID NO: 73613 - RNA, 19 nt, Artificial Sequence
  Description of Artificial Sequence: Synthetic oligonucleotide
aauaacugacaguugagga

SEQ ID NO: 73614 - RNA, 19 nt, Artificial Sequence
  Description of Artificial Sequence: Synthetic oligonucleotide
ucacccggaaaucaaaugg

SEQ ID NO: 73615 - RNA, 19 nt, Artificial Sequence
  Description of Artificial Sequence: Synthetic oligonucleotide
uuauaguuuaucauauugu

SEQ ID NO: 73616 - RNA, 19 nt, Artificial Sequence
  Description of Artificial Sequence: Synthetic oligonucleotide
uagauuaaggcaaugugga

SEQ ID NO: 73617 - RNA, 19 nt, Artificial Sequence
  Description of Artificial Sequence: Synthetic oligonucleotide
ucaccaaagugcaucaacg

SEQ ID NO: 73618 - RNA, 19 nt, Artificial Sequence
  Description of Artificial Sequence: Synthetic oligonucleotide
uuagauagucgguagaugu

SEQ ID NO: 73619 - RNA, 19 nt, Artificial Sequence
  Description of Artificial Sequence: Synthetic oligonucleotide
auaccuacgacuaauacag

SEQ ID NO: 73620 - RNA, 19 nt, Artificial Sequence
  Description of Artificial Sequence: Synthetic oligonucleotide
uuagcuuuaggauucuuca

SEQ ID NO: 73621 - RNA, 19 nt, Artificial Sequence
  Description of Artificial Sequence: Synthetic oligonucleotide
uaaaccgugaccacaaacu

SEQ ID NO: 73622 - RNA, 19 nt, Artificial Sequence
  Description of Artificial Sequence: Synthetic oligonucleotide
guaaguuuacuacucacag

SEQ ID NO: 73623 - RNA, 19 nt, Artificial Sequence
  Description of Artificial Sequence: Synthetic oligonucleotide
auagauuaaggcaaugugg

SEQ ID NO: 73624 - RNA, 19 nt, Artificial Sequence
  Description of Artificial Sequence: Synthetic oligonucleotide
uuaggauucuucaugauuu

SEQ ID NO: 73625 - RNA, 19 nt, Artificial Sequence
  Description of Artificial Sequence: Synthetic oligonucleotide
aucauauugugcucuaagg

SEQ ID NO: 73626 - RNA, 19 nt, Artificial Sequence
  Description of Artificial Sequence: Synthetic oligonucleotide
aagugcaucaacgcggccc

SEQ ID NO: 73627 - RNA, 19 nt, Artificial Sequence
  Description of Artificial Sequence: Synthetic oligonucleotide
uaucauauugugcucuaag

SEQ ID NO: 73628 - RNA, 19 nt, Artificial Sequence
  Description of Artificial Sequence: Synthetic oligonucleotide
acaaugauuaaguggaaga

SEQ ID NO: 73629 - RNA, 19 nt, Artificial Sequence
  Description of Artificial Sequence: Synthetic oligonucleotide
ucggaguacaacaccaccg

SEQ ID NO: 73630 - RNA, 19 nt, Artificial Sequence
  Description of Artificial Sequence: Synthetic oligonucleotide
auaguuuaucauauugugc

SEQ ID NO: 73631 - RNA, 19 nt, Artificial Sequence
  Description of Artificial Sequence: Synthetic oligonucleotide
cuaacaagggucaaaguuc

SEQ ID NO: 73632 - RNA, 19 nt, Artificial Sequence
  Description of Artificial Sequence: Synthetic oligonucleotide
cuuucguccaauauauggc

SEQ ID NO: 73633 - RNA, 19 nt, Artificial Sequence
  Description of Artificial Sequence: Synthetic oligonucleotide
ugaggaguaaguuuacuac

SEQ ID NO: 73634 - RNA, 19 nt, Artificial Sequence
  Description of Artificial Sequence: Synthetic oligonucleotide
ugcaaguaguuaaaauucc

SEQ ID NO: 73635 - RNA, 19 nt, Artificial Sequence
  Description of Artificial Sequence: Synthetic oligonucleotide
acuaacaagggucaaaguu

SEQ ID NO: 73636 - RNA, 19 nt, Artificial Sequence
  Description of Artificial Sequence: Synthetic oligonucleotide
ucucauugcccgcacaucc

SEQ ID NO: 73637 - RNA, 19 nt, Artificial Sequence
  Description of Artificial Sequence: Synthetic oligonucleotide
aagauaucuggaugcagug

SEQ ID NO: 73638 - RNA, 19 nt, Artificial Sequence
  Description of Artificial Sequence: Synthetic oligonucleotide
uauaaccagagcagacucg

SEQ ID NO: 73639 - RNA, 19 nt, Artificial Sequence
  Description of Artificial Sequence: Synthetic oligonucleotide
ucucgauaagccuugcaag

SEQ ID NO: 73640 - RNA, 19 nt, Artificial Sequence
  Description of Artificial Sequence: Synthetic oligonucleotide
uauggggucacaacagugc

SEQ ID NO: 73641 - RNA, 19 nt, Artificial Sequence
  Description of Artificial Sequence: Synthetic oligonucleotide
agacgguggauauuucugc

SEQ ID NO: 73642 - RNA, 19 nt, Artificial Sequence
  Description of Artificial Sequence: Synthetic oligonucleotide
ugauacgcacuguagagca

SEQ ID NO: 73643 - RNA, 19 nt, Artificial Sequence
  Description of Artificial Sequence: Synthetic oligonucleotide
uuauaaccagagcagacuc

SEQ ID NO: 73644 - RNA, 19 nt, Artificial Sequence
  Description of Artificial Sequence: Synthetic oligonucleotide
cuacgacuaauacagaaac

SEQ ID NO: 73645 - RNA, 19 nt, Artificial Sequence
  Description of Artificial Sequence: Synthetic oligonucleotide
aagacguuagaaaagaaua

SEQ ID NO: 73646 - RNA, 19 nt, Artificial Sequence
  Description of Artificial Sequence: Synthetic oligonucleotide
caugauacgcacuguagag

SEQ ID NO: 73647 - RNA, 19 nt, Artificial Sequence
  Description of Artificial Sequence: Synthetic oligonucleotide
uaugcauggagaugcguag

SEQ ID NO: 73648 - RNA, 19 nt, Artificial Sequence
  Description of Artificial Sequence: Synthetic oligonucleotide
ugaauacucaggaaucccu

SEQ ID NO: 73649 - RNA, 19 nt, Artificial Sequence
  Description of Artificial Sequence: Synthetic oligonucleotide
agaggcaaguaccauuuuc

SEQ ID NO: 73650 - RNA, 19 nt, Artificial Sequence
  Description of Artificial Sequence: Synthetic oligonucleotide
gauaucuggaugcagugga

SEQ ID NO: 73651 - RNA, 19 nt, Artificial Sequence
  Description of Artificial Sequence: Synthetic oligonucleotide
uggaauaugccuccaaaau

SEQ ID NO: 73652 - RNA, 19 nt, Artificial Sequence
  Description of Artificial Sequence: Synthetic oligonucleotide
uuuauaaccagagcagacu

SEQ ID NO: 73653 - RNA, 19 nt, Artificial Sequence
  Description of Artificial Sequence: Synthetic oligonucleotide
uuucguccaauauauggca

SEQ ID NO: 73654 - RNA, 19 nt, Artificial Sequence
  Description of Artificial Sequence: Synthetic oligonucleotide
aguaccauuuuccaaguau

SEQ ID NO: 73655 - RNA, 19 nt, Artificial Sequence
  Description of Artificial Sequence: Synthetic oligonucleotide
uaauaccuacgacuaauac

SEQ ID NO: 73656 - RNA, 19 nt, Artificial Sequence
  Description of Artificial Sequence: Synthetic oligonucleotide
agaacacauauugaugggg

SEQ ID NO: 73657 - RNA, 19 nt, Artificial Sequence
  Description of Artificial Sequence: Synthetic oligonucleotide
uuugugugaccgauucccg

SEQ ID NO: 73658 - RNA, 19 nt, Artificial Sequence
  Description of Artificial Sequence: Synthetic oligonucleotide
aucaacgcggcccaacagg

SEQ ID NO: 73659 - RNA, 19 nt, Artificial Sequence
  Description of Artificial Sequence: Synthetic oligonucleotide
cucgauaagccuugcaagc

SEQ ID NO: 73660 - RNA, 19 nt, Artificial Sequence
  Description of Artificial Sequence: Synthetic oligonucleotide
acuaagccacaugauacgc

SEQ ID NO: 73661 - RNA, 19 nt, Artificial Sequence
  Description of Artificial Sequence: Synthetic oligonucleotide
gaaguuagcauagggguug

SEQ ID NO: 73662 - RNA, 19 nt, Artificial Sequence
  Description of Artificial Sequence: Synthetic oligonucleotide
uguggcaccuacuaagcca

SEQ ID NO: 73663 - RNA, 19 nt, Artificial Sequence
  Description of Artificial Sequence: Synthetic oligonucleotide
gacguuagaaaagaauaug

SEQ ID NO: 73664 - RNA, 19 nt, Artificial Sequence
  Description of Artificial Sequence: Synthetic oligonucleotide
uuauggggucacaacagug

SEQ ID NO: 73665 - RNA, 19 nt, Artificial Sequence
  Description of Artificial Sequence: Synthetic oligonucleotide
aaagacguuagaaaagaau

SEQ ID NO: 73666 - RNA, 19 nt, Artificial Sequence
  Description of Artificial Sequence: Synthetic oligonucleotide
uauaaaggcuguccaagaa

SEQ ID NO: 73667 - RNA, 19 nt, Artificial Sequence
  Description of Artificial Sequence: Synthetic oligonucleotide
ucuaacuuccguaguccag

SEQ ID NO: 73668 - RNA, 19 nt, Artificial Sequence
  Description of Artificial Sequence: Synthetic oligonucleotide
uaugcaguggaauccuuca

SEQ ID NO: 73669 - RNA, 19 nt, Artificial Sequence
  Description of Artificial Sequence: Synthetic oligonucleotide
auagggguugguccugugc

SEQ ID NO: 73670 - RNA, 19 nt, Artificial Sequence
  Description of Artificial Sequence: Synthetic oligonucleotide
gucaaggacacuuggggag

SEQ ID NO: 73671 - RNA, 19 nt, Artificial Sequence
  Description of Artificial Sequence: Synthetic oligonucleotide
agagucaccauacaaugau

SEQ ID NO: 73672 - RNA, 19 nt, Artificial Sequence
  Description of Artificial Sequence: Synthetic oligonucleotide
ugcaacacguacaaucuuc

SEQ ID NO: 73673 - RNA, 19 nt, Artificial Sequence
  Description of Artificial Sequence: Synthetic oligonucleotide
uguccugugcaacacguac

SEQ ID NO: 73674 - RNA, 19 nt, Artificial Sequence
  Description of Artificial Sequence: Synthetic oligonucleotide
auaacugacaguugaggau

SEQ ID NO: 73675 - RNA, 19 nt, Artificial Sequence
  Description of Artificial Sequence: Synthetic oligonucleotide
acguacaaucuucauuccg

SEQ ID NO: 73676 - RNA, 19 nt, Artificial Sequence
  Description of Artificial Sequence: Synthetic oligonucleotide
ugaggaacauccaguaccu

SEQ ID NO: 73677 - RNA, 19 nt, Artificial Sequence
  Description of Artificial Sequence: Synthetic oligonucleotide
cuaacuuccguaguccagg

SEQ ID NO: 73678 - RNA, 19 nt, Artificial Sequence
  Description of Artificial Sequence: Synthetic oligonucleotide
gaaacuaaaugccaucgua

SEQ ID NO: 73679 - RNA, 19 nt, Artificial Sequence
  Description of Artificial Sequence: Synthetic oligonucleotide
gaacagaccagcauagcug

SEQ ID NO: 73680 - RNA, 19 nt, Artificial Sequence
  Description of Artificial Sequence: Synthetic oligonucleotide
uguggaauaugccuccaaa

SEQ ID NO: 73681 - RNA, 19 nt, Artificial Sequence
  Description of Artificial Sequence: Synthetic oligonucleotide
augauacgcacuguagagc

SEQ ID NO: 73682 - RNA, 19 nt, Artificial Sequence
  Description of Artificial Sequence: Synthetic oligonucleotide
acgacuaauacagaaacaa

SEQ ID NO: 73683 - RNA, 19 nt, Artificial Sequence
  Description of Artificial Sequence: Synthetic oligonucleotide
uggugcaauacccauucac

SEQ ID NO: 73684 - RNA, 19 nt, Artificial Sequence
  Description of Artificial Sequence: Synthetic oligonucleotide
cugguaauauuaaaaguga

SEQ ID NO: 73685 - RNA, 19 nt, Artificial Sequence
  Description of Artificial Sequence: Synthetic oligonucleotide
agaaggucgguacugggca

SEQ ID NO: 73686 - RNA, 19 nt, Artificial Sequence
  Description of Artificial Sequence: Synthetic oligonucleotide
auacuuaggcugaauacuc

SEQ ID NO: 73687 - RNA, 19 nt, Artificial Sequence
  Description of Artificial Sequence: Synthetic oligonucleotide
uggauugccacccgcuugc

SEQ ID NO: 73688 - RNA, 19 nt, Artificial Sequence
  Description of Artificial Sequence: Synthetic oligonucleotide
acauaaacgucuccugucu

SEQ ID NO: 73689 - RNA, 19 nt, Artificial Sequence
  Description of Artificial Sequence: Synthetic oligonucleotide
ucucacacuuucccuaagc

SEQ ID NO: 73690 - RNA, 19 nt, Artificial Sequence
  Description of Artificial Sequence: Synthetic oligonucleotide
ucauauuagauagucggua

SEQ ID NO: 73691 - RNA, 19 nt, Artificial Sequence
  Description of Artificial Sequence: Synthetic oligonucleotide
acaugauagauuaaggcaa

SEQ ID NO: 73692 - RNA, 19 nt, Artificial Sequence
  Description of Artificial Sequence: Synthetic oligonucleotide
ugcgaguguguacuaaugu

SEQ ID NO: 73693 - RNA, 19 nt, Artificial Sequence
  Description of Artificial Sequence: Synthetic oligonucleotide
cacgcaauuagcugccagg

SEQ ID NO: 73694 - RNA, 19 nt, Artificial Sequence
  Description of Artificial Sequence: Synthetic oligonucleotide
cuucauuccgaaauaguga

SEQ ID NO: 73695 - RNA, 19 nt, Artificial Sequence
  Description of Artificial Sequence: Synthetic oligonucleotide
uugugugaccgauucccgg

SEQ ID NO: 73696 - RNA, 19 nt, Artificial Sequence
  Description of Artificial Sequence: Synthetic oligonucleotide
uuaggugcuuaucuacacu

SEQ ID NO: 73697 - RNA, 19 nt, Artificial Sequence
  Description of Artificial Sequence: Synthetic oligonucleotide
uugauccccuucucuaagg

SEQ ID NO: 73698 - RNA, 19 nt, Artificial Sequence
  Description of Artificial Sequence: Synthetic oligonucleotide
aagacgguggauauuucug

SEQ ID NO: 73699 - RNA, 19 nt, Artificial Sequence
  Description of Artificial Sequence: Synthetic oligonucleotide
caaguaggugcuuuaggug

SEQ ID NO: 73700 - RNA, 19 nt, Artificial Sequence
  Description of Artificial Sequence: Synthetic oligonucleotide
uccgucuuaccaaggaacu

SEQ ID NO: 73701 - RNA, 19 nt, Artificial Sequence
  Description of Artificial Sequence: Synthetic oligonucleotide
aggaguaaguuuacuacuc

SEQ ID NO: 73702 - RNA, 19 nt, Artificial Sequence
  Description of Artificial Sequence: Synthetic oligonucleotide
aguaauaccuacgacuaau

SEQ ID NO: 73703 - RNA, 19 nt, Artificial Sequence
  Description of Artificial Sequence: Synthetic oligonucleotide
cagggcucauauuuggugc

SEQ ID NO: 73704 - RNA, 19 nt, Artificial Sequence
  Description of Artificial Sequence: Synthetic oligonucleotide
ugccuuucuacuacaaaau

SEQ ID NO: 73705 - RNA, 19 nt, Artificial Sequence
  Description of Artificial Sequence: Synthetic oligonucleotide
gacgucaaguugugugucg

SEQ ID NO: 73706 - RNA, 19 nt, Artificial Sequence
  Description of Artificial Sequence: Synthetic oligonucleotide
aaccagagcagacucguua

SEQ ID NO: 73707 - RNA, 19 nt, Artificial Sequence
  Description of Artificial Sequence: Synthetic oligonucleotide
ugauccccuucucuaaggc

SEQ ID NO: 73708 - RNA, 19 nt, Artificial Sequence
  Description of Artificial Sequence: Synthetic oligonucleotide
uuaugcaguggaauccuuc

SEQ ID NO: 73709 - RNA, 19 nt, Artificial Sequence
  Description of Artificial Sequence: Synthetic oligonucleotide
uggucuuagcuuuaggauu

SEQ ID NO: 73710 - RNA, 19 nt, Artificial Sequence
  Description of Artificial Sequence: Synthetic oligonucleotide
uacuuaugaguaucugcug

SEQ ID NO: 73711 - RNA, 19 nt, Artificial Sequence
  Description of Artificial Sequence: Synthetic oligonucleotide
guccguacuauaaaggcug

SEQ ID NO: 73712 - RNA, 19 nt, Artificial Sequence
  Description of Artificial Sequence: Synthetic oligonucleotide
ucguuaugcaguggaaucc

SEQ ID NO: 73713 - RNA, 19 nt, Artificial Sequence
  Description of Artificial Sequence: Synthetic oligonucleotide
agacucguuaugcagugga

SEQ ID NO: 73714 - RNA, 19 nt, Artificial Sequence
  Description of Artificial Sequence: Synthetic oligonucleotide
aaaugcggcaugagcacuc

SEQ ID NO: 73715 - RNA, 19 nt, Artificial Sequence
  Description of Artificial Sequence: Synthetic oligonucleotide
acacaguacauaaacgucu

SEQ ID NO: 73716 - RNA, 19 nt, Artificial Sequence
  Description of Artificial Sequence: Synthetic oligonucleotide
ugaagcuaucuuauaguuu

SEQ ID NO: 73717 - RNA, 19 nt, Artificial Sequence
  Description of Artificial Sequence: Synthetic oligonucleotide
ggcugaagcuaucuuauag

SEQ ID NO: 73718 - RNA, 19 nt, Artificial Sequence
  Description of Artificial Sequence: Synthetic oligonucleotide
uuucuaggguaacauuuau

SEQ ID NO: 73719 - RNA, 19 nt, Artificial Sequence
  Description of Artificial Sequence: Synthetic oligonucleotide
aggccaagucucgauaagc

SEQ ID NO: 73720 - RNA, 19 nt, Artificial Sequence
  Description of Artificial Sequence: Synthetic oligonucleotide
guugugugucgucuguucc

SEQ ID NO: 73721 - RNA, 19 nt, Artificial Sequence
  Description of Artificial Sequence: Synthetic oligonucleotide
guacuauaaaggcugucca

SEQ ID NO: 73722 - RNA, 19 nt, Artificial Sequence
  Description of Artificial Sequence: Synthetic oligonucleotide
uauuucucgucggaguaca

SEQ ID NO: 73723 - RNA, 19 nt, Artificial Sequence
  Description of Artificial Sequence: Synthetic oligonucleotide
ucgauaagccuugcaagcc

SEQ ID NO: 73724 - RNA, 19 nt, Artificial Sequence
  Description of Artificial Sequence: Synthetic oligonucleotide
accuacgacuaauacagaa

SEQ ID NO: 73725 - RNA, 19 nt, Artificial Sequence
  Description of Artificial Sequence: Synthetic oligonucleotide
uccugugcaacacguacaa

SEQ ID NO: 73726 - RNA, 19 nt, Artificial Sequence
  Description of Artificial Sequence: Synthetic oligonucleotide
agcaguuuugaugaucugu

SEQ ID NO: 73727 - RNA, 19 nt, Artificial Sequence
  Description of Artificial Sequence: Synthetic oligonucleotide
ccggauauccuuuaggaac

SEQ ID NO: 73728 - RNA, 19 nt, Artificial Sequence
  Description of Artificial Sequence: Synthetic oligonucleotide
ucauuccgaaauagugagc

SEQ ID NO: 73729 - RNA, 19 nt, Artificial Sequence
  Description of Artificial Sequence: Synthetic oligonucleotide
gaccgauucccggauaucc

SEQ ID NO: 73730 - RNA, 19 nt, Artificial Sequence
  Description of Artificial Sequence: Synthetic oligonucleotide
ggaacacaguacauaaacg

SEQ ID NO: 73731 - RNA, 19 nt, Artificial Sequence
  Description of Artificial Sequence: Synthetic oligonucleotide
auuagauagucgguagaug

SEQ ID NO: 73732 - RNA, 19 nt, Artificial Sequence
  Description of Artificial Sequence: Synthetic oligonucleotide
agguccagacgucaaguug

SEQ ID NO: 73733 - RNA, 19 nt, Artificial Sequence
  Description of Artificial Sequence: Synthetic oligonucleotide
ucgaucuuucguccaauau

SEQ ID NO: 73734 - RNA, 19 nt, Artificial Sequence
  Description of Artificial Sequence: Synthetic oligonucleotide
uucgcacuugcccuucaug

SEQ ID NO: 73735 - RNA, 19 nt, Artificial Sequence
  Description of Artificial Sequence: Synthetic oligonucleotide
cugaauacucaggaauccc

SEQ ID NO: 73736 - RNA, 19 nt, Artificial Sequence
  Description of Artificial Sequence: Synthetic oligonucleotide
auugcccgcacauccaccu

SEQ ID NO: 73737 - RNA, 19 nt, Artificial Sequence
  Description of Artificial Sequence: Synthetic oligonucleotide
gcacaauaaaaccacccug

SEQ ID NO: 73738 - RNA, 19 nt, Artificial Sequence
  Description of Artificial Sequence: Synthetic oligonucleotide
ucuggaguuuugauccccu

SEQ ID NO: 73739 - RNA, 19 nt, Artificial Sequence
  Description of Artificial Sequence: Synthetic oligonucleotide
gccgcagugaaagugaucc

SEQ ID NO: 73740 - RNA, 19 nt, Artificial Sequence
  Description of Artificial Sequence: Synthetic oligonucleotide
gucucgauaagccuugcaa

SEQ ID NO: 73741 - RNA, 19 nt, Artificial Sequence
  Description of Artificial Sequence: Synthetic oligonucleotide
ggguccguacuauaaaggc

SEQ ID NO: 73742 - RNA, 19 nt, Artificial Sequence
  Description of Artificial Sequence: Synthetic oligonucleotide
gccaucguaccuuuggaag

SEQ ID NO: 73743 - RNA, 19 nt, Artificial Sequence
  Description of Artificial Sequence: Synthetic oligonucleotide
gaggaguaaguuuacuacu

SEQ ID NO: 73744 - RNA, 19 nt, Artificial Sequence
  Description of Artificial Sequence: Synthetic oligonucleotide
ggugcuuaucuacacugcc

SEQ ID NO: 73745 - RNA, 19 nt, Artificial Sequence
  Description of Artificial Sequence: Synthetic oligonucleotide
guacuuaugaguaucugcu

SEQ ID NO: 73746 - RNA, 19 nt, Artificial Sequence
  Description of Artificial Sequence: Synthetic oligonucleotide
uaucucacacuuucccuaa

SEQ ID NO: 73747 - RNA, 19 nt, Artificial Sequence
  Description of Artificial Sequence: Synthetic oligonucleotide
ugcauggagaugcguagau

SEQ ID NO: 73748 - RNA, 19 nt, Artificial Sequence
  Description of Artificial Sequence: Synthetic oligonucleotide
cuuccguaguccagggaag

SEQ ID NO: 73749 - RNA, 19 nt, Artificial Sequence
  Description of Artificial Sequence: Synthetic oligonucleotide
aggugcuuaucuacacugc

SEQ ID NO: 73750 - RNA, 19 nt, Artificial Sequence
  Description of Artificial Sequence: Synthetic oligonucleotide
caccuacuaagccacauga

SEQ ID NO: 73751 - RNA, 19 nt, Artificial Sequence
  Description of Artificial Sequence: Synthetic oligonucleotide
aggguccguacuauaaagg

SEQ ID NO: 73752 - RNA, 19 nt, Artificial Sequence
  Description of Artificial Sequence: Synthetic oligonucleotide
aucauauuagauagucggu

SEQ ID NO: 73753 - RNA, 19 nt, Artificial Sequence
  Description of Artificial Sequence: Synthetic oligonucleotide
caauuagcugccagggcuc

SEQ ID NO: 73754 - RNA, 19 nt, Artificial Sequence
  Description of Artificial Sequence: Synthetic oligonucleotide
cucgucggaguacaacacc

SEQ ID NO: 73755 - RNA, 19 nt, Artificial Sequence
  Description of Artificial Sequence: Synthetic oligonucleotide
ccaucauauuagauagucg

SEQ ID NO: 73756 - RNA, 19 nt, Artificial Sequence
  Description of Artificial Sequence: Synthetic oligonucleotide
cauaaacgucuccugucug

SEQ ID NO: 73757 - RNA, 19 nt, Artificial Sequence
  Description of Artificial Sequence: Synthetic oligonucleotide
ccaccgaugaaccuuuggg

SEQ ID NO: 73758 - RNA, 19 nt, Artificial Sequence
  Description of Artificial Sequence: Synthetic oligonucleotide
uucguccaauauauggcau

SEQ ID NO: 73759 - RNA, 19 nt, Artificial Sequence
  Description of Artificial Sequence: Synthetic oligonucleotide
gacgguggauauuucugca

SEQ ID NO: 73760 - RNA, 19 nt, Artificial Sequence
  Description of Artificial Sequence: Synthetic oligonucleotide
uuuaaaccgugaccacaaa

SEQ ID NO: 73761 - RNA, 19 nt, Artificial Sequence
  Description of Artificial Sequence: Synthetic oligonucleotide
auuccgaaauagugagcug

SEQ ID NO: 73762 - RNA, 19 nt, Artificial Sequence
  Description of Artificial Sequence: Synthetic oligonucleotide
cuuaugaguaucugcugaa

SEQ ID NO: 73763 - RNA, 19 nt, Artificial Sequence
  Description of Artificial Sequence: Synthetic oligonucleotide
gagcagguagaguuuucac

SEQ ID NO: 73764 - RNA, 19 nt, Artificial Sequence
  Description of Artificial Sequence: Synthetic oligonucleotide
uuaugaguaucugcugaaa

SEQ ID NO: 73765 - RNA, 19 nt, Artificial Sequence
  Description of Artificial Sequence: Synthetic oligonucleotide
ugugcaaguaggugcuuua

SEQ ID NO: 73766 - RNA, 19 nt, Artificial Sequence
  Description of Artificial Sequence: Synthetic oligonucleotide
guuagcauagggguugguc

SEQ ID NO: 73767 - RNA, 19 nt, Artificial Sequence
  Description of Artificial Sequence: Synthetic oligonucleotide
gugaggaguaaguuuacua

SEQ ID NO: 73768 - RNA, 19 nt, Artificial Sequence
  Description of Artificial Sequence: Synthetic oligonucleotide
ccuccuguauuucucgucg

SEQ ID NO: 73769 - RNA, 19 nt, Artificial Sequence
  Description of Artificial Sequence: Synthetic oligonucleotide
gaagacgguggauauuucu

SEQ ID NO: 73770 - RNA, 19 nt, Artificial Sequence
  Description of Artificial Sequence: Synthetic oligonucleotide
ggcaauccgucuuaccaag

SEQ ID NO: 73771 - RNA, 19 nt, Artificial Sequence
  Description of Artificial Sequence: Synthetic oligonucleotide
guggaauaugccuccaaaa

SEQ ID NO: 73772 - RNA, 19 nt, Artificial Sequence
  Description of Artificial Sequence: Synthetic oligonucleotide
cuaugcauggagaugcgua

SEQ ID NO: 73773 - RNA, 19 nt, Artificial Sequence
  Description of Artificial Sequence: Synthetic oligonucleotide
cuccacgcaauuagcugcc

SEQ ID NO: 73774 - RNA, 19 nt, Artificial Sequence
  Description of Artificial Sequence: Synthetic oligonucleotide
cacguacaaucuucauucc

SEQ ID NO: 73775 - RNA, 19 nt, Artificial Sequence
  Description of Artificial Sequence: Synthetic oligonucleotide
aacagagcgaaggcuccug

SEQ ID NO: 73776 - RNA, 19 nt, Artificial Sequence
  Description of Artificial Sequence: Synthetic oligonucleotide
ccggaaaucaaaugguuuc

SEQ ID NO: 73777 - RNA, 19 nt, Artificial Sequence
  Description of Artificial Sequence: Synthetic oligonucleotide
ucaaggacacuuggggagu

SEQ ID NO: 73778 - RNA, 19 nt, Artificial Sequence
  Description of Artificial Sequence: Synthetic oligonucleotide
cauuccgaaauagugagcu

SEQ ID NO: 73779 - RNA, 19 nt, Artificial Sequence
  Description of Artificial Sequence: Synthetic oligonucleotide
uccguacuauaaaggcugu

SEQ ID NO: 73780 - RNA, 19 nt, Artificial Sequence
  Description of Artificial Sequence: Synthetic oligonucleotide
ugccaucguaccuuuggaa

SEQ ID NO: 73781 - RNA, 19 nt, Artificial Sequence
  Description of Artificial Sequence: Synthetic oligonucleotide
guauuggcugcagccaugc

SEQ ID NO: 73782 - RNA, 19 nt, Artificial Sequence
  Description of Artificial Sequence: Synthetic oligonucleotide
aguaaacaagccgcaguga

SEQ ID NO: 73783 - RNA, 19 nt, Artificial Sequence
  Description of Artificial Sequence: Synthetic oligonucleotide
agaugcguagaugccaccu

SEQ ID NO: 73784 - RNA, 19 nt, Artificial Sequence
  Description of Artificial Sequence: Synthetic oligonucleotide
gugccuguuaucaccuggg

SEQ ID NO: 73785 - RNA, 19 nt, Artificial Sequence
  Description of Artificial Sequence: Synthetic oligonucleotide
caccgaugaaccuuuggga

SEQ ID NO: 73786 - RNA, 19 nt, Artificial Sequence
  Description of Artificial Sequence: Synthetic oligonucleotide
ccaucguaccuuuggaagc

SEQ ID NO: 73787 - RNA, 19 nt, Artificial Sequence
  Description of Artificial Sequence: Synthetic oligonucleotide
cguacuauaaaggcugucc

SEQ ID NO: 73788 - RNA, 19 nt, Artificial Sequence
  Description of Artificial Sequence: Synthetic oligonucleotide
gggacgugcacauucgcac

SEQ ID NO: 73789 - RNA, 19 nt, Artificial Sequence
  Description of Artificial Sequence: Synthetic oligonucleotide
uuaucauauugugcucuaa

SEQ ID NO: 73790 - RNA, 19 nt, Artificial Sequence
  Description of Artificial Sequence: Synthetic oligonucleotide
gccguucucaccaaagugc

SEQ ID NO: 73791 - RNA, 19 nt, Artificial Sequence
  Description of Artificial Sequence: Synthetic oligonucleotide
cuggauugccacccgcuug

SEQ ID NO: 73792 - RNA, 19 nt, Artificial Sequence
  Description of Artificial Sequence: Synthetic oligonucleotide
gucgguacugggcaucuuc

SEQ ID NO: 73793 - RNA, 19 nt, Artificial Sequence
  Description of Artificial Sequence: Synthetic oligonucleotide
augccaucguaccuuugga

SEQ ID NO: 73794 - RNA, 19 nt, Artificial Sequence
  Description of Artificial Sequence: Synthetic oligonucleotide
guaaggcucaaaguccuuc

SEQ ID NO: 73795 - RNA, 19 nt, Artificial Sequence
  Description of Artificial Sequence: Synthetic oligonucleotide
gccaucauauuagauaguc

SEQ ID NO: 73796 - RNA, 19 nt, Artificial Sequence
  Description of Artificial Sequence: Synthetic oligonucleotide
ugugugucgucuguuccaa

SEQ ID NO: 73797 - RNA, 19 nt, Artificial Sequence
  Description of Artificial Sequence: Synthetic oligonucleotide
cauugcccgcacauccacc

SEQ ID NO: 73798 - RNA, 19 nt, Artificial Sequence
  Description of Artificial Sequence: Synthetic oligonucleotide
guggcaccuacuaagccac

SEQ ID NO: 73799 - RNA, 19 nt, Artificial Sequence
  Description of Artificial Sequence: Synthetic oligonucleotide
gcaauuagcugccagggcu

SEQ ID NO: 73800 - RNA, 19 nt, Artificial Sequence
  Description of Artificial Sequence: Synthetic oligonucleotide
aucucacacuuucccuaag

SEQ ID NO: 73801 - RNA, 19 nt, Artificial Sequence
  Description of Artificial Sequence: Synthetic oligonucleotide
gagggacgugcacauucgc

SEQ ID NO: 73802 - RNA, 19 nt, Artificial Sequence
  Description of Artificial Sequence: Synthetic oligonucleotide
aaugcggcaugagcacucu

SEQ ID NO: 73803 - RNA, 19 nt, Artificial Sequence
  Description of Artificial Sequence: Synthetic oligonucleotide
caucaacgcggcccaacag

SEQ ID NO: 73804 - RNA, 19 nt, Artificial Sequence
  Description of Artificial Sequence: Synthetic oligonucleotide
cucuaacuuccguagucca

SEQ ID NO: 73805 - RNA, 19 nt, Artificial Sequence
  Description of Artificial Sequence: Synthetic oligonucleotide
gacaguugaggauccccaa

SEQ ID NO: 73806 - RNA, 19 nt, Artificial Sequence
  Description of Artificial Sequence: Synthetic oligonucleotide
gagaugcguagaugccacc

SEQ ID NO: 73807 - RNA, 19 nt, Artificial Sequence
  Description of Artificial Sequence: Synthetic oligonucleotide
uuccguaguccagggaaga

SEQ ID NO: 73808 - RNA, 19 nt, Artificial Sequence
  Description of Artificial Sequence: Synthetic oligonucleotide
agucucgauaagccuugca

SEQ ID NO: 73809 - RNA, 19 nt, Artificial Sequence
  Description of Artificial Sequence: Synthetic oligonucleotide
cagagucaccauacaauga

SEQ ID NO: 73810 - RNA, 19 nt, Artificial Sequence
  Description of Artificial Sequence: Synthetic oligonucleotide
uuggugcaauacccauuca

SEQ ID NO: 73811 - RNA, 19 nt, Artificial Sequence
  Description of Artificial Sequence: Synthetic oligonucleotide
agaagcaagugggaaguua

SEQ ID NO: 73812 - RNA, 19 nt, Artificial Sequence
  Description of Artificial Sequence: Synthetic oligonucleotide
caaagacguuagaaaagaa

SEQ ID NO: 73813 - RNA, 19 nt, Artificial Sequence
  Description of Artificial Sequence: Synthetic oligonucleotide
guggucuuagcuuuaggau

SEQ ID NO: 73814 - RNA, 19 nt, Artificial Sequence
  Description of Artificial Sequence: Synthetic oligonucleotide
guauuucucgucggaguac

SEQ ID NO: 73815 - RNA, 19 nt, Artificial Sequence
  Description of Artificial Sequence: Synthetic oligonucleotide
uaccuacgacuaauacaga

SEQ ID NO: 73816 - RNA, 19 nt, Artificial Sequence
  Description of Artificial Sequence: Synthetic oligonucleotide
cauagccguacuuaugagu

SEQ ID NO: 73817 - RNA, 19 nt, Artificial Sequence
  Description of Artificial Sequence: Synthetic oligonucleotide
aguuuacuacucacagcug

SEQ ID NO: 73818 - RNA, 19 nt, Artificial Sequence
  Description of Artificial Sequence: Synthetic oligonucleotide
gugcaaguaggugcuuuag

SEQ ID NO: 73819 - RNA, 19 nt, Artificial Sequence
  Description of Artificial Sequence: Synthetic oligonucleotide
agaagacgguggauauuuc

SEQ ID NO: 73820 - RNA, 19 nt, Artificial Sequence
  Description of Artificial Sequence: Synthetic oligonucleotide
cugggcaauccgucuuacc

SEQ ID NO: 73821 - RNA, 19 nt, Artificial Sequence
  Description of Artificial Sequence: Synthetic oligonucleotide
acauucgcacuugcccuuc

SEQ ID NO: 73822 - RNA, 19 nt, Artificial Sequence
  Description of Artificial Sequence: Synthetic oligonucleotide
ccgaugaaccuuugggagc

SEQ ID NO: 73823 - RNA, 19 nt, Artificial Sequence
  Description of Artificial Sequence: Synthetic oligonucleotide
guuauggggucacaacagu

SEQ ID NO: 73824 - RNA, 19 nt, Artificial Sequence
  Description of Artificial Sequence: Synthetic oligonucleotide
cugaagcuaucuuauaguu

SEQ ID NO: 73825 - RNA, 19 nt, Artificial Sequence
  Description of Artificial Sequence: Synthetic oligonucleotide
auacgcacuguagagcaua

SEQ ID NO: 73826 - RNA, 19 nt, Artificial Sequence
  Description of Artificial Sequence: Synthetic oligonucleotide
ccauugaagagggaacaag

SEQ ID NO: 73827 - RNA, 19 nt, Artificial Sequence
  Description of Artificial Sequence: Synthetic oligonucleotide
gauucccggauauccuuua

SEQ ID NO: 73828 - RNA, 19 nt, Artificial Sequence
  Description of Artificial Sequence: Synthetic oligonucleotide
uucucauugcccgcacauc

SEQ ID NO: 73829 - RNA, 19 nt, Artificial Sequence
  Description of Artificial Sequence: Synthetic oligonucleotide
ugcaucaacgcggcccaac

SEQ ID NO: 73830 - RNA, 19 nt, Artificial Sequence
  Description of Artificial Sequence: Synthetic oligonucleotide
ggauaggaucuaucacacc

SEQ ID NO: 73831 - RNA, 19 nt, Artificial Sequence
  Description of Artificial Sequence: Synthetic oligonucleotide
ccaaagacguuagaaaaga

SEQ ID NO: 73832 - RNA, 19 nt, Artificial Sequence
  Description of Artificial Sequence: Synthetic oligonucleotide
acgucaaguugugugucgu

SEQ ID NO: 73833 - RNA, 19 nt, Artificial Sequence
  Description of Artificial Sequence: Synthetic oligonucleotide
cugaugguuauggggucac

SEQ ID NO: 73834 - RNA, 19 nt, Artificial Sequence
  Description of Artificial Sequence: Synthetic oligonucleotide
guaauaccuacgacuaaua

SEQ ID NO: 73835 - RNA, 19 nt, Artificial Sequence
  Description of Artificial Sequence: Synthetic oligonucleotide
aggugcuuuaggugcuuau

SEQ ID NO: 73836 - RNA, 19 nt, Artificial Sequence
  Description of Artificial Sequence: Synthetic oligonucleotide
gcugaagcuaucuuauagu

SEQ ID NO: 73837 - RNA, 19 nt, Artificial Sequence
  Description of Artificial Sequence: Synthetic oligonucleotide
ggucuuacucaacuguucu

SEQ ID NO: 73838 - RNA, 19 nt, Artificial Sequence
  Description of Artificial Sequence: Synthetic oligonucleotide
uuguccugugcaacacgua

SEQ ID NO: 73839 - RNA, 19 nt, Artificial Sequence
  Description of Artificial Sequence: Synthetic oligonucleotide
agcuaugcauggagaugcg

SEQ ID NO: 73840 - RNA, 19 nt, Artificial Sequence
  Description of Artificial Sequence: Synthetic oligonucleotide
ggagggacgugcacauucg

SEQ ID NO: 73841 - RNA, 19 nt, Artificial Sequence
  Description of Artificial Sequence: Synthetic oligonucleotide
uggaacuaacaagggucaa

SEQ ID NO: 73842 - RNA, 19 nt, Artificial Sequence
  Description of Artificial Sequence: Synthetic oligonucleotide
gcauagccguacuuaugag

SEQ ID NO: 73843 - RNA, 19 nt, Artificial Sequence
  Description of Artificial Sequence: Synthetic oligonucleotide
gacuaucagcagaguacac

SEQ ID NO: 73844 - RNA, 19 nt, Artificial Sequence
  Description of Artificial Sequence: Synthetic oligonucleotide
ccucuaacuuccguagucc

SEQ ID NO: 73845 - RNA, 19 nt, Artificial Sequence
  Description of Artificial Sequence: Synthetic oligonucleotide
gauugccacccgcuugcga

SEQ ID NO: 73846 - RNA, 19 nt, Artificial Sequence
  Description of Artificial Sequence: Synthetic oligonucleotide
ccuacuaagccacaugaua

SEQ ID NO: 73847 - RNA, 19 nt, Artificial Sequence
  Description of Artificial Sequence: Synthetic oligonucleotide
gaccagcauagcuguguuc

SEQ ID NO: 73848 - RNA, 19 nt, Artificial Sequence
  Description of Artificial Sequence: Synthetic oligonucleotide
cuaagcaaucaggacaggu

SEQ ID NO: 73849 - RNA, 19 nt, Artificial Sequence
  Description of Artificial Sequence: Synthetic oligonucleotide
cagacgucaaguugugugu

SEQ ID NO: 73850 - RNA, 19 nt, Artificial Sequence
  Description of Artificial Sequence: Synthetic oligonucleotide
ccuacgacuaauacagaaa

SEQ ID NO: 73851 - RNA, 19 nt, Artificial Sequence
  Description of Artificial Sequence: Synthetic oligonucleotide
gcaccuacuaagccacaug

SEQ ID NO: 73852 - RNA, 19 nt, Artificial Sequence
  Description of Artificial Sequence: Synthetic oligonucleotide
augcauggagaugcguaga

SEQ ID NO: 73853 - RNA, 19 nt, Artificial Sequence
  Description of Artificial Sequence: Synthetic oligonucleotide
ucacaccuuucacccggaa

SEQ ID NO: 73854 - RNA, 19 nt, Artificial Sequence
  Description of Artificial Sequence: Synthetic oligonucleotide
caugauuugugugaccgau

SEQ ID NO: 73855 - RNA, 19 nt, Artificial Sequence
  Description of Artificial Sequence: Synthetic oligonucleotide
ugaugguuauggggucaca

SEQ ID NO: 73856 - RNA, 19 nt, Artificial Sequence
  Description of Artificial Sequence: Synthetic oligonucleotide
uaaccagagcagacucguu

SEQ ID NO: 73857 - RNA, 19 nt, Artificial Sequence
  Description of Artificial Sequence: Synthetic oligonucleotide
auacaaugauuaaguggaa

SEQ ID NO: 73858 - RNA, 19 nt, Artificial Sequence
  Description of Artificial Sequence: Synthetic oligonucleotide
auucgcacuugcccuucau

SEQ ID NO: 73859 - RNA, 19 nt, Artificial Sequence
  Description of Artificial Sequence: Synthetic oligonucleotide
ggggcagaagaacacauau

SEQ ID NO: 73860 - RNA, 19 nt, Artificial Sequence
  Description of Artificial Sequence: Synthetic oligonucleotide
gaacugguaccuccuguau

SEQ ID NO: 73861 - RNA, 19 nt, Artificial Sequence
  Description of Artificial Sequence: Synthetic oligonucleotide
guccugugcaacacguaca

SEQ ID NO: 73862 - RNA, 19 nt, Artificial Sequence
  Description of Artificial Sequence: Synthetic oligonucleotide
ggaacuaacaagggucaaa

SEQ ID NO: 73863 - RNA, 19 nt, Artificial Sequence
  Description of Artificial Sequence: Synthetic oligonucleotide
cacaccuuucacccggaaa

SEQ ID NO: 73864 - RNA, 19 nt, Artificial Sequence
  Description of Artificial Sequence: Synthetic oligonucleotide
cuugcgaguguguacuaau

SEQ ID NO: 73865 - RNA, 19 nt, Artificial Sequence
  Description of Artificial Sequence: Synthetic oligonucleotide
gauaagccuugcaagccau

SEQ ID NO: 73866 - RNA, 19 nt, Artificial Sequence
  Description of Artificial Sequence: Synthetic oligonucleotide
gcgaguguguacuaaugua

SEQ ID NO: 73867 - RNA, 19 nt, Artificial Sequence
  Description of Artificial Sequence: Synthetic oligonucleotide
uccguaguccagggaagau

SEQ ID NO: 73868 - RNA, 19 nt, Artificial Sequence
  Description of Artificial Sequence: Synthetic oligonucleotide
uccagacgucaaguugugu

SEQ ID NO: 73869 - RNA, 19 nt, Artificial Sequence
  Description of Artificial Sequence: Synthetic oligonucleotide
uggccaaccugugcuugga

SEQ ID NO: 73870 - RNA, 19 nt, Artificial Sequence
  Description of Artificial Sequence: Synthetic oligonucleotide
gcuaucucacacuuucccu

SEQ ID NO: 73871 - RNA, 19 nt, Artificial Sequence
  Description of Artificial Sequence: Synthetic oligonucleotide
gguccagacgucaaguugu

SEQ ID NO: 73872 - RNA, 19 nt, Artificial Sequence
  Description of Artificial Sequence: Synthetic oligonucleotide
accuacuaagccacaugau

SEQ ID NO: 73873 - RNA, 19 nt, Artificial Sequence
  Description of Artificial Sequence: Synthetic oligonucleotide
aucguaccuuuggaagcug

SEQ ID NO: 73874 - RNA, 19 nt, Artificial Sequence
  Description of Artificial Sequence: Synthetic oligonucleotide
ugaccgauucccggauauc

SEQ ID NO: 73875 - RNA, 19 nt, Artificial Sequence
  Description of Artificial Sequence: Synthetic oligonucleotide
gcaauccgucuuaccaagg

SEQ ID NO: 73876 - RNA, 19 nt, Artificial Sequence
  Description of Artificial Sequence: Synthetic oligonucleotide
acgugcacauucgcacuug

SEQ ID NO: 73877 - RNA, 19 nt, Artificial Sequence
  Description of Artificial Sequence: Synthetic oligonucleotide
uggcaccuacuaagccaca

SEQ ID NO: 73878 - RNA, 19 nt, Artificial Sequence
  Description of Artificial Sequence: Synthetic oligonucleotide
gaagcuacuguggcaccua

SEQ ID NO: 73879 - RNA, 19 nt, Artificial Sequence
  Description of Artificial Sequence: Synthetic oligonucleotide
gaugcguagaugccaccuu

SEQ ID NO: 73880 - RNA, 19 nt, Artificial Sequence
  Description of Artificial Sequence: Synthetic oligonucleotide
guccagacgucaaguugug

SEQ ID NO: 73881 - RNA, 19 nt, Artificial Sequence
  Description of Artificial Sequence: Synthetic oligonucleotide
cugugccuguuaucaccug

SEQ ID NO: 73882 - RNA, 19 nt, Artificial Sequence
  Description of Artificial Sequence: Synthetic oligonucleotide
caguaauaccuacgacuaa

SEQ ID NO: 73883 - RNA, 19 nt, Artificial Sequence
  Description of Artificial Sequence: Synthetic oligonucleotide
gggcaauccgucuuaccaa

SEQ ID NO: 73884 - RNA, 19 nt, Artificial Sequence
  Description of Artificial Sequence: Synthetic oligonucleotide
acccggaaaucaaaugguu

SEQ ID NO: 73885 - RNA, 19 nt, Artificial Sequence
  Description of Artificial Sequence: Synthetic oligonucleotide
cgguggauauuucugcaac

SEQ ID NO: 73886 - RNA, 19 nt, Artificial Sequence
  Description of Artificial Sequence: Synthetic oligonucleotide
caccccuuggcagccauca

SEQ ID NO: 73887 - RNA, 19 nt, Artificial Sequence
  Description of Artificial Sequence: Synthetic oligonucleotide
gugaccgauucccggauau

SEQ ID NO: 73888 - RNA, 19 nt, Artificial Sequence
  Description of Artificial Sequence: Synthetic oligonucleotide
agccgcagugaaagugauc

SEQ ID NO: 73889 - RNA, 19 nt, Artificial Sequence
  Description of Artificial Sequence: Synthetic oligonucleotide
augcggcaugagcacucug

SEQ ID NO: 73890 - RNA, 19 nt, Artificial Sequence
  Description of Artificial Sequence: Synthetic oligonucleotide
uccacgcaauuagcugcca

SEQ ID NO: 73891 - RNA, 19 nt, Artificial Sequence
  Description of Artificial Sequence: Synthetic oligonucleotide
gcugaggaacacuucccaa

SEQ ID NO: 73892 - RNA, 19 nt, Artificial Sequence
  Description of Artificial Sequence: Synthetic oligonucleotide
gcauggagaugcguagaug

SEQ ID NO: 73893 - RNA, 19 nt, Artificial Sequence
  Description of Artificial Sequence: Synthetic oligonucleotide
ggggaaaguguccccugca

SEQ ID NO: 73894 - RNA, 19 nt, Artificial Sequence
  Description of Artificial Sequence: Synthetic oligonucleotide
agcgagcaguuuugaugau

SEQ ID NO: 73895 - RNA, 19 nt, Artificial Sequence
  Description of Artificial Sequence: Synthetic oligonucleotide
cucuaaggccaagucucga

SEQ ID NO: 73896 - RNA, 19 nt, Artificial Sequence
  Description of Artificial Sequence: Synthetic oligonucleotide
gacgugcacauucgcacuu

SEQ ID NO: 73897 - RNA, 19 nt, Artificial Sequence
  Description of Artificial Sequence: Synthetic oligonucleotide
gaaggucgguacugggcau

SEQ ID NO: 73898 - RNA, 19 nt, Artificial Sequence
  Description of Artificial Sequence: Synthetic oligonucleotide
cuacccugagucacagggu

SEQ ID NO: 73899 - RNA, 19 nt, Artificial Sequence
  Description of Artificial Sequence: Synthetic oligonucleotide
cgagcaguuuugaugaucu

SEQ ID NO: 73900 - RNA, 19 nt, Artificial Sequence
  Description of Artificial Sequence: Synthetic oligonucleotide
gggagcccagagcaauaac

SEQ ID NO: 73901 - RNA, 19 nt, Artificial Sequence
  Description of Artificial Sequence: Synthetic oligonucleotide
cgcaauuagcugccagggc

SEQ ID NO: 73902 - RNA, 19 nt, Artificial Sequence
  Description of Artificial Sequence: Synthetic oligonucleotide
ggccgugagccagcuaugc

SEQ ID NO: 73903 - RNA, 19 nt, Artificial Sequence
  Description of Artificial Sequence: Synthetic oligonucleotide
acgcacuguagagcauaca

SEQ ID NO: 73904 - RNA, 19 nt, Artificial Sequence
  Description of Artificial Sequence: Synthetic oligonucleotide
auuucucgucggaguacaa

SEQ ID NO: 73905 - RNA, 19 nt, Artificial Sequence
  Description of Artificial Sequence: Synthetic oligonucleotide
cauucgcacuugcccuuca

SEQ ID NO: 73906 - RNA, 19 nt, Artificial Sequence
  Description of Artificial Sequence: Synthetic oligonucleotide
ggauugccacccgcuugcg

SEQ ID NO: 73907 - RNA, 19 nt, Artificial Sequence
  Description of Artificial Sequence: Synthetic oligonucleotide
gguagaguuuucacauacu

SEQ ID NO: 73908 - RNA, 19 nt, Artificial Sequence
  Description of Artificial Sequence: Synthetic oligonucleotide
ccguacuuaugaguaucug

SEQ ID NO: 73909 - RNA, 19 nt, Artificial Sequence
  Description of Artificial Sequence: Synthetic oligonucleotide
ggacgugcacauucgcacu

SEQ ID NO: 73910 - RNA, 19 nt, Artificial Sequence
  Description of Artificial Sequence: Synthetic oligonucleotide
cgauaagccuugcaagcca

SEQ ID NO: 73911 - RNA, 19 nt, Artificial Sequence
  Description of Artificial Sequence: Synthetic oligonucleotide
cagagcgaaggcuccugcu

SEQ ID NO: 73912 - RNA, 19 nt, Artificial Sequence
  Description of Artificial Sequence: Synthetic oligonucleotide
cguaguccagggaagauau

SEQ ID NO: 73913 - RNA, 19 nt, Artificial Sequence
  Description of Artificial Sequence: Synthetic oligonucleotide
cgaugaaccuuugggagca

SEQ ID NO: 73914 - RNA, 19 nt, Artificial Sequence
  Description of Artificial Sequence: Synthetic oligonucleotide
acccgcuugcgagugugua

SEQ ID NO: 73915 - RNA, 19 nt, Artificial Sequence
  Description of Artificial Sequence: Synthetic oligonucleotide
gucacaggguccguacuau

SEQ ID NO: 73916 - RNA, 19 nt, Artificial Sequence
  Description of Artificial Sequence: Synthetic oligonucleotide
ccaagaagacgguggauau

SEQ ID NO: 73917 - RNA, 19 nt, Artificial Sequence
  Description of Artificial Sequence: Synthetic oligonucleotide
gugcaacacguacaaucuu

SEQ ID NO: 73918 - RNA, 19 nt, Artificial Sequence
  Description of Artificial Sequence: Synthetic oligonucleotide
augggagcccagagcaaua

SEQ ID NO: 73919 - RNA, 19 nt, Artificial Sequence
  Description of Artificial Sequence: Synthetic oligonucleotide
gccgugagccagcuaugca

SEQ ID NO: 73920 - RNA, 19 nt, Artificial Sequence
  Description of Artificial Sequence: Synthetic oligonucleotide
cugagucacaggguccgua

SEQ ID NO: 73921 - RNA, 19 nt, Artificial Sequence
  Description of Artificial Sequence: Synthetic oligonucleotide
cggauauccuuuaggaacu

SEQ ID NO: 73922 - RNA, 19 nt, Artificial Sequence
  Description of Artificial Sequence: Synthetic oligonucleotide
gugugucgucuguuccaaa

SEQ ID NO: 73923 - RNA, 19 nt, Artificial Sequence
  Description of Artificial Sequence: Synthetic oligonucleotide
gcuuagaccuugagcaggu

SEQ ID NO: 73924 - RNA, 19 nt, Artificial Sequence
  Description of Artificial Sequence: Synthetic oligonucleotide
ccgucuuaccaaggaacuc

SEQ ID NO: 73925 - RNA, 19 nt, Artificial Sequence
  Description of Artificial Sequence: Synthetic oligonucleotide
gcuugcgaguguguacuaa

SEQ ID NO: 73926 - RNA, 19 nt, Artificial Sequence
  Description of Artificial Sequence: Synthetic oligonucleotide
ccgugagccagcuaugcau

SEQ ID NO: 73927 - RNA, 19 nt, Artificial Sequence
  Description of Artificial Sequence: Synthetic oligonucleotide
ggauugcuccaugcaaacu

SEQ ID NO: 73928 - RNA, 19 nt, Artificial Sequence
  Description of Artificial Sequence: Synthetic oligonucleotide
cuuagaccuugagcaggua

SEQ ID NO: 73929 - RNA, 19 nt, Artificial Sequence
  Description of Artificial Sequence: Synthetic oligonucleotide
cccggaaaucaaaugguuu

SEQ ID NO: 73930 - RNA, 19 nt, Artificial Sequence
  Description of Artificial Sequence: Synthetic oligonucleotide
cagcaauacuuaggcugaa

SEQ ID NO: 73931 - RNA, 19 nt, Artificial Sequence
  Description of Artificial Sequence: Synthetic oligonucleotide
ccguacuauaaaggcuguc

SEQ ID NO: 73932 - RNA, 19 nt, Artificial Sequence
  Description of Artificial Sequence: Synthetic oligonucleotide
gccguacuuaugaguaucu

SEQ ID NO: 73933 - RNA, 19 nt, Artificial Sequence
  Description of Artificial Sequence: Synthetic oligonucleotide
caagaagacgguggauauu

SEQ ID NO: 73934 - RNA, 19 nt, Artificial Sequence
  Description of Artificial Sequence: Synthetic oligonucleotide
gcuaugcauggagaugcgu

SEQ ID NO: 73935 - RNA, 19 nt, Artificial Sequence
  Description of Artificial Sequence: Synthetic oligonucleotide
caacgcggcccaacaggcu

SEQ ID NO: 73936 - RNA, 19 nt, Artificial Sequence
  Description of Artificial Sequence: Synthetic oligonucleotide
cagcggggcuuuggagaac

SEQ ID NO: 73937 - RNA, 19 nt, Artificial Sequence
  Description of Artificial Sequence: Synthetic oligonucleotide
ggcaccuacuaagccacau

SEQ ID NO: 73938 - RNA, 19 nt, Artificial Sequence
  Description of Artificial Sequence: Synthetic oligonucleotide
gaugaaccuuugggagcau

SEQ ID NO: 73939 - RNA, 19 nt, Artificial Sequence
  Description of Artificial Sequence: Synthetic oligonucleotide
cccggaguauuggcugcag

SEQ ID NO: 73940 - RNA, 19 nt, Artificial Sequence
  Description of Artificial Sequence: Synthetic oligonucleotide
ccguaguccagggaagaua

SEQ ID NO: 73941 - RNA, 19 nt, Artificial Sequence
  Description of Artificial Sequence: Synthetic oligonucleotide
ggcucauauuuggugcaau

SEQ ID NO: 73942 - RNA, 19 nt, Artificial Sequence
  Description of Artificial Sequence: Synthetic oligonucleotide
ccgcuugcgaguguguacu

SEQ ID NO: 73943 - RNA, 19 nt, Artificial Sequence
  Description of Artificial Sequence: Synthetic oligonucleotide
ccaccccuuggcagccauc

SEQ ID NO: 73944 - RNA, 19 nt, Artificial Sequence
  Description of Artificial Sequence: Synthetic oligonucleotide
cacccgcuugcgagugugu

SEQ ID NO: 73945 - RNA, 19 nt, Artificial Sequence
  Description of Artificial Sequence: Synthetic oligonucleotide
ccgcagugaaagugauccu

SEQ ID NO: 73946 - RNA, 19 nt, Artificial Sequence
  Description of Artificial Sequence: Synthetic oligonucleotide
ccccggaguauuggcugca

SEQ ID NO: 73947 - RNA, 19 nt, Artificial Sequence
  Description of Artificial Sequence: Synthetic oligonucleotide
cgcuugcgaguguguacua

SEQ ID NO: 73948 - RNA, 19 nt, Artificial Sequence
  Description of Artificial Sequence: Synthetic oligonucleotide
gcggcccaacaggcugcaa

SEQ ID NO: 73949 - RNA, 19 nt, Artificial Sequence
  Description of Artificial Sequence: Synthetic oligonucleotide
cgcggcccaacaggcugca

SEQ ID NO: 73950 - RNA, 19 nt, Artificial Sequence
  Description of Artificial Sequence: Synthetic oligonucleotide
uuuguugauaaguagauac

SEQ ID NO: 73951 - RNA, 19 nt, Artificial Sequence
  Description of Artificial Sequence: Synthetic oligonucleotide
aauuaaucucguuacaaga

SEQ ID NO: 73952 - RNA, 19 nt, Artificial Sequence
  Description of Artificial Sequence: Synthetic oligonucleotide
ugauagacgagccuggcgg

SEQ ID NO: 73953 - RNA, 19 nt, Artificial Sequence
  Description of Artificial Sequence: Synthetic oligonucleotide
aagacagccacuacgaggc

SEQ ID NO: 73954 - RNA, 19 nt, Artificial Sequence
  Description of Artificial Sequence: Synthetic oligonucleotide
cauacauacacacacacac

SEQ ID NO: 73955 - RNA, 19 nt, Artificial Sequence
  Description of Artificial Sequence: Synthetic oligonucleotide
uuaaucucguuacaagagg

SEQ ID NO: 73956 - RNA, 19 nt, Artificial Sequence
  Description of Artificial Sequence: Synthetic oligonucleotide
ucaucaguagagcacagag

SEQ ID NO: 73957 - RNA, 19 nt, Artificial Sequence
  Description of Artificial Sequence: Synthetic oligonucleotide
aagauuacacccgugggac

SEQ ID NO: 73958 - RNA, 19 nt, Artificial Sequence
  Description of Artificial Sequence: Synthetic oligonucleotide
uuuagggucguuuagaguu

SEQ ID NO: 73959 - RNA, 19 nt, Artificial Sequence
  Description of Artificial Sequence: Synthetic oligonucleotide
aaguaauucagguaccggu

SEQ ID NO: 73960 - RNA, 19 nt, Artificial Sequence
  Description of Artificial Sequence: Synthetic oligonucleotide
auaggagauacacugacug

SEQ ID NO: 73961 - RNA, 19 nt, Artificial Sequence
  Description of Artificial Sequence: Synthetic oligonucleotide
accauauuggaauccaggg

SEQ ID NO: 73962 - RNA, 19 nt, Artificial Sequence
  Description of Artificial Sequence: Synthetic oligonucleotide
acauaggagauacacugac

SEQ ID NO: 73963 - RNA, 19 nt, Artificial Sequence
  Description of Artificial Sequence: Synthetic oligonucleotide
uacauacacacacacacac

SEQ ID NO: 73964 - RNA, 19 nt, Artificial Sequence
  Description of Artificial Sequence: Synthetic oligonucleotide
gaguuauagaccuugaucu

SEQ ID NO: 73965 - RNA, 19 nt, Artificial Sequence
  Description of Artificial Sequence: Synthetic oligonucleotide
  modified_base (16)..(16): a, c, u, g, unknown or other
ugacacacaaaucccngca

SEQ ID NO: 73966 - RNA, 19 nt, Artificial Sequence
  Description of Artificial Sequence: Synthetic oligonucleotide
gggugaauuagucauaggg

SEQ ID NO: 73967 - RNA, 19 nt, Artificial Sequence
  Description of Artificial Sequence: Synthetic oligonucleotide
uacacacacacacacacac

SEQ ID NO: 73968 - RNA, 19 nt, Artificial Sequence
  Description of Artificial Sequence: Synthetic oligonucleotide
  modified_base (11)..(11): a, c, u, g, unknown or other
cacaaaucccngcagaacc

SEQ ID NO: 73969 - RNA, 19 nt, Artificial Sequence
  Description of Artificial Sequence: Synthetic oligonucleotide
cauacacacacacacacac

SEQ ID NO: 73970 - RNA, 19 nt, Artificial Sequence
  Description of Artificial Sequence: Synthetic oligonucleotide
ucuucgguacaccaccacg

SEQ ID NO: 73971 - RNA, 19 nt, Artificial Sequence
  Description of Artificial Sequence: Synthetic oligonucleotide
ucuugaaguugacaggaug

SEQ ID NO: 73972 - RNA, 19 nt, Artificial Sequence
  Description of Artificial Sequence: Synthetic oligonucleotide
uaaucucguuacaagagga

SEQ ID NO: 73973 - RNA, 19 nt, Artificial Sequence
  Description of Artificial Sequence: Synthetic oligonucleotide
aaaguaauucagguaccgg

SEQ ID NO: 73974 - RNA, 19 nt, Artificial Sequence
  Description of Artificial Sequence: Synthetic oligonucleotide
cacacacacacacacaagc

SEQ ID NO: 73975 - RNA, 19 nt, Artificial Sequence
  Description of Artificial Sequence: Synthetic oligonucleotide
auuaaucucguuacaagag

SEQ ID NO: 73976 - RNA, 19 nt, Artificial Sequence
  Description of Artificial Sequence: Synthetic oligonucleotide
ucaaguaguguuccacugc

SEQ ID NO: 73977 - RNA, 19 nt, Artificial Sequence
  Description of Artificial Sequence: Synthetic oligonucleotide
guaacuguccuuaaagagc

SEQ ID NO: 73978 - RNA, 19 nt, Artificial Sequence
  Description of Artificial Sequence: Synthetic oligonucleotide
cuggguaugugccaggcgg

SEQ ID NO: 73979 - RNA, 19 nt, Artificial Sequence
  Description of Artificial Sequence: Synthetic oligonucleotide
uauuagacuaggaaauaua

SEQ ID NO: 73980 - RNA, 19 nt, Artificial Sequence
  Description of Artificial Sequence: Synthetic oligonucleotide
cuuuuagggucguuuagag

SEQ ID NO: 73981 - RNA, 19 nt, Artificial Sequence
  Description of Artificial Sequence: Synthetic oligonucleotide
cuuaggcugccccagaggc

SEQ ID NO: 73982 - RNA, 19 nt, Artificial Sequence
  Description of Artificial Sequence: Synthetic oligonucleotide
ucguuuagaguucucuuac

SEQ ID NO: 73983 - RNA, 19 nt, Artificial Sequence
  Description of Artificial Sequence: Synthetic oligonucleotide
  modified_base (7)..(7): a, c, u, g, unknown or other
aaucccngcagaacccggc

SEQ ID NO: 73984 - RNA, 19 nt, Artificial Sequence
  Description of Artificial Sequence: Synthetic oligonucleotide
ucuuacucugcacgcacag

SEQ ID NO: 73985 - RNA, 19 nt, Artificial Sequence
  Description of Artificial Sequence: Synthetic oligonucleotide
gguuuucuaaggcuggugg

SEQ ID NO: 73986 - RNA, 19 nt, Artificial Sequence
  Description of Artificial Sequence: Synthetic oligonucleotide
aagaggaaugcuaaaggcu

SEQ ID NO: 73987 - RNA, 19 nt, Artificial Sequence
  Description of Artificial Sequence: Synthetic oligonucleotide
cauacagcgccacaucucc

SEQ ID NO: 73988 - RNA, 19 nt, Artificial Sequence
  Description of Artificial Sequence: Synthetic oligonucleotide
ucgagguacgcccaagagc

SEQ ID NO: 73989 - RNA, 19 nt, Artificial Sequence
  Description of Artificial Sequence: Synthetic oligonucleotide
uccuuguacugucucauac

SEQ ID NO: 73990 - RNA, 19 nt, Artificial Sequence
  Description of Artificial Sequence: Synthetic oligonucleotide
aguaauucagguaccgguc

SEQ ID NO: 73991 - RNA, 19 nt, Artificial Sequence
  Description of Artificial Sequence: Synthetic oligonucleotide
cuucgguacaccaccacgc

SEQ ID NO: 73992 - RNA, 19 nt, Artificial Sequence
  Description of Artificial Sequence: Synthetic oligonucleotide
guaauucagguaccggucc

SEQ ID NO: 73993 - RNA, 19 nt, Artificial Sequence
  Description of Artificial Sequence: Synthetic oligonucleotide
caucgauuagagcagggug

SEQ ID NO: 73994 - RNA, 19 nt, Artificial Sequence
  Description of Artificial Sequence: Synthetic oligonucleotide
auuagacuaggaaauauaa

SEQ ID NO: 73995 - RNA, 19 nt, Artificial Sequence
  Description of Artificial Sequence: Synthetic oligonucleotide
uuauuagacuaggaaauau

SEQ ID NO: 73996 - RNA, 19 nt, Artificial Sequence
  Description of Artificial Sequence: Synthetic oligonucleotide
agagccgccagucguugcc

SEQ ID NO: 73997 - RNA, 19 nt, Artificial Sequence
  Description of Artificial Sequence: Synthetic oligonucleotide
ugucccgggagaaaucgcc

SEQ ID NO: 73998 - RNA, 19 nt, Artificial Sequence
  Description of Artificial Sequence: Synthetic oligonucleotide
auaggagagagguccuuag

SEQ ID NO: 73999 - RNA, 19 nt, Artificial Sequence
  Description of Artificial Sequence: Synthetic oligonucleotide
ugcggauguaggcucggcg

SEQ ID NO: 74000 - RNA, 19 nt, Artificial Sequence
  Description of Artificial Sequence: Synthetic oligonucleotide
cucggggacagcaaacagg

SEQ ID NO: 74001 - RNA, 19 nt, Artificial Sequence
  Description of Artificial Sequence: Synthetic oligonucleotide
acacacacacacacaagcc

SEQ ID NO: 74002 - RNA, 19 nt, Artificial Sequence
  Description of Artificial Sequence: Synthetic oligonucleotide
uccaagguuacuaccuccu

SEQ ID NO: 74003 - RNA, 19 nt, Artificial Sequence
  Description of Artificial Sequence: Synthetic oligonucleotide
caaguucgcagccacuugc

SEQ ID NO: 74004 - RNA, 19 nt, Artificial Sequence
  Description of Artificial Sequence: Synthetic oligonucleotide
guaagcaaugcggauguag

SEQ ID NO: 74005 - RNA, 19 nt, Artificial Sequence
  Description of Artificial Sequence: Synthetic oligonucleotide
aacccggcaacaccaagcu

SEQ ID NO: 74006 - RNA, 19 nt, Artificial Sequence
  Description of Artificial Sequence: Synthetic oligonucleotide
uacaguuuguuuacaggau

SEQ ID NO: 74007 - RNA, 19 nt, Artificial Sequence
  Description of Artificial Sequence: Synthetic oligonucleotide
aagcuaugcccacagggau

SEQ ID NO: 74008 - RNA, 19 nt, Artificial Sequence
  Description of Artificial Sequence: Synthetic oligonucleotide
ucucuuacucugcacgcac

SEQ ID NO: 74009 - RNA, 19 nt, Artificial Sequence
  Description of Artificial Sequence: Synthetic oligonucleotide
uaauucagguaccggucca

SEQ ID NO: 74010 - RNA, 19 nt, Artificial Sequence
  Description of Artificial Sequence: Synthetic oligonucleotide
guuguuaggccuugcaguc

SEQ ID NO: 74011 - RNA, 19 nt, Artificial Sequence
  Description of Artificial Sequence: Synthetic oligonucleotide
acgcacagcccaucggugc

SEQ ID NO: 74012 - RNA, 19 nt, Artificial Sequence
  Description of Artificial Sequence: Synthetic oligonucleotide
uuuuagggucguuuagagu

SEQ ID NO: 74013 - RNA, 19 nt, Artificial Sequence
  Description of Artificial Sequence: Synthetic oligonucleotide
ugugugaucugggaggggu

SEQ ID NO: 74014 - RNA, 19 nt, Artificial Sequence
  Description of Artificial Sequence: Synthetic oligonucleotide
cucagccuaucccagugcg

SEQ ID NO: 74015 - RNA, 19 nt, Artificial Sequence
  Description of Artificial Sequence: Synthetic oligonucleotide
gucaaguaguguuccacug

SEQ ID NO: 74016 - RNA, 19 nt, Artificial Sequence
  Description of Artificial Sequence: Synthetic oligonucleotide
aaagcgggagggugcuuuc

SEQ ID NO: 74017 - RNA, 19 nt, Artificial Sequence
  Description of Artificial Sequence: Synthetic oligonucleotide
ugugguaacuguccuuaaa

SEQ ID NO: 74018 - RNA, 19 nt, Artificial Sequence
  Description of Artificial Sequence: Synthetic oligonucleotide
auacuggucuccacugucc

SEQ ID NO: 74019 - RNA, 19 nt, Artificial Sequence
  Description of Artificial Sequence: Synthetic oligonucleotide
ucggccgcaucgauuagag

SEQ ID NO: 74020 - RNA, 19 nt, Artificial Sequence
  Description of Artificial Sequence: Synthetic oligonucleotide
uucgguacaccaccacgcc

SEQ ID NO: 74021 - RNA, 19 nt, Artificial Sequence
  Description of Artificial Sequence: Synthetic oligonucleotide
caaccaaguagccucccag

SEQ ID NO: 74022 - RNA, 19 nt, Artificial Sequence
  Description of Artificial Sequence: Synthetic oligonucleotide
uccguguucgcuucugcca

SEQ ID NO: 74023 - RNA, 19 nt, Artificial Sequence
  Description of Artificial Sequence: Synthetic oligonucleotide
ggccgcaucgauuagagca

SEQ ID NO: 74024 - RNA, 19 nt, Artificial Sequence
  Description of Artificial Sequence: Synthetic oligonucleotide
uacagcgccacaucuccug

SEQ ID NO: 74025 - RNA, 19 nt, Artificial Sequence
  Description of Artificial Sequence: Synthetic oligonucleotide
gaugugguagaagggaauc

SEQ ID NO: 74026 - RNA, 19 nt, Artificial Sequence
  Description of Artificial Sequence: Synthetic oligonucleotide
agguccuuagccaaggaca

SEQ ID NO: 74027 - RNA, 19 nt, Artificial Sequence
  Description of Artificial Sequence: Synthetic oligonucleotide
cugacugacccugugacuc

SEQ ID NO: 74028 - RNA, 19 nt, Artificial Sequence
  Description of Artificial Sequence: Synthetic oligonucleotide
auagggucccagcugggug

SEQ ID NO: 74029 - RNA, 19 nt, Artificial Sequence
  Description of Artificial Sequence: Synthetic oligonucleotide
agcgccacaucuccugagg

SEQ ID NO: 74030 - RNA, 19 nt, Artificial Sequence
  Description of Artificial Sequence: Synthetic oligonucleotide
  modified_base (9)..(9): a, c, u, g, unknown or other
caaaucccngcagaacccg

SEQ ID NO: 74031 - RNA, 19 nt, Artificial Sequence
  Description of Artificial Sequence: Synthetic oligonucleotide
  modified_base (8)..(8): a, c, u, g, unknown or other
aaaucccngcagaacccgg

SEQ ID NO: 74032 - RNA, 19 nt, Artificial Sequence
  Description of Artificial Sequence: Synthetic oligonucleotide
gaacccggcaacaccaagc

SEQ ID NO: 74033 - RNA, 19 nt, Artificial Sequence
  Description of Artificial Sequence: Synthetic oligonucleotide
acaagccugcuuucaaaca

SEQ ID NO: 74034 - RNA, 19 nt, Artificial Sequence
  Description of Artificial Sequence: Synthetic oligonucleotide
cacacacacacaagccugc

SEQ ID NO: 74035 - RNA, 19 nt, Artificial Sequence
  Description of Artificial Sequence: Synthetic oligonucleotide
uggacagugguaucuugaa

SEQ ID NO: 74036 - RNA, 19 nt, Artificial Sequence
  Description of Artificial Sequence: Synthetic oligonucleotide
uuagggucguuuagaguuc

SEQ ID NO: 74037 - RNA, 19 nt, Artificial Sequence
  Description of Artificial Sequence: Synthetic oligonucleotide
uggguuguuaggccuugca

SEQ ID NO: 74038 - RNA, 19 nt, Artificial Sequence
  Description of Artificial Sequence: Synthetic oligonucleotide
cauacuggucuccacuguc

SEQ ID NO: 74039 - RNA, 19 nt, Artificial Sequence
  Description of Artificial Sequence: Synthetic oligonucleotide
uguuaggccuugcagucuu

SEQ ID NO: 74040 - RNA, 19 nt, Artificial Sequence
  Description of Artificial Sequence: Synthetic oligonucleotide
ggugaauuagucauaggga

SEQ ID NO: 74041 - RNA, 19 nt, Artificial Sequence
  Description of Artificial Sequence: Synthetic oligonucleotide
cacacacacacacacacaa

SEQ ID NO: 74042 - RNA, 19 nt, Artificial Sequence
  Description of Artificial Sequence: Synthetic oligonucleotide
gaauugaaaccugugggcu

SEQ ID NO: 74043 - RNA, 19 nt, Artificial Sequence
  Description of Artificial Sequence: Synthetic oligonucleotide
acacacacacacaagccug

SEQ ID NO: 74044 - RNA, 19 nt, Artificial Sequence
  Description of Artificial Sequence: Synthetic oligonucleotide
ucuccggcgaugacuucag

SEQ ID NO: 74045 - RNA, 19 nt, Artificial Sequence
  Description of Artificial Sequence: Synthetic oligonucleotide
agucguugccccgugagcu

SEQ ID NO: 74046 - RNA, 19 nt, Artificial Sequence
  Description of Artificial Sequence: Synthetic oligonucleotide
aagucccggcaguuucuuc

SEQ ID NO: 74047 - RNA, 19 nt, Artificial Sequence
  Description of Artificial Sequence: Synthetic oligonucleotide
ucgauuagagcagggugac

SEQ ID NO: 74048 - RNA, 19 nt, Artificial Sequence
  Description of Artificial Sequence: Synthetic oligonucleotide
cauccaaguucgcagccac

SEQ ID NO: 74049 - RNA, 19 nt, Artificial Sequence
  Description of Artificial Sequence: Synthetic oligonucleotide
aaucucguuacaagaggaa

SEQ ID NO: 74050 - RNA, 19 nt, Artificial Sequence
  Description of Artificial Sequence: Synthetic oligonucleotide
uggcugugucugauagacg

SEQ ID NO: 74051 - RNA, 19 nt, Artificial Sequence
  Description of Artificial Sequence: Synthetic oligonucleotide
gagaaaucgccuggguaug

SEQ ID NO: 74052 - RNA, 19 nt, Artificial Sequence
  Description of Artificial Sequence: Synthetic oligonucleotide
cagugcgagccaagaaacg

SEQ ID NO: 74053 - RNA, 19 nt, Artificial Sequence
  Description of Artificial Sequence: Synthetic oligonucleotide
agccuaucccagugcgagc

SEQ ID NO: 74054 - RNA, 19 nt, Artificial Sequence
  Description of Artificial Sequence: Synthetic oligonucleotide
agaacccggcaacaccaag

SEQ ID NO: 74055 - RNA, 19 nt, Artificial Sequence
  Description of Artificial Sequence: Synthetic oligonucleotide
gguuacuaccuccucccag

SEQ ID NO: 74056 - RNA, 19 nt, Artificial Sequence
  Description of Artificial Sequence: Synthetic oligonucleotide
gauagacgagccuggcgga

SEQ ID NO: 74057 - RNA, 19 nt, Artificial Sequence
  Description of Artificial Sequence: Synthetic oligonucleotide
cagggcauacacaggcccc

SEQ ID NO: 74058 - RNA, 19 nt, Artificial Sequence
  Description of Artificial Sequence: Synthetic oligonucleotide
cagccuaucccagugcgag

SEQ ID NO: 74059 - RNA, 19 nt, Artificial Sequence
  Description of Artificial Sequence: Synthetic oligonucleotide
accugccgcacgcagaccu

SEQ ID NO: 74060 - RNA, 19 nt, Artificial Sequence
  Description of Artificial Sequence: Synthetic oligonucleotide
ccaagauuacacccguggg

SEQ ID NO: 74061 - RNA, 19 nt, Artificial Sequence
  Description of Artificial Sequence: Synthetic oligonucleotide
ggguuguuaggccuugcag

SEQ ID NO: 74062 - RNA, 19 nt, Artificial Sequence
  Description of Artificial Sequence: Synthetic oligonucleotide
aucucguuacaagaggaau

SEQ ID NO: 74063 - RNA, 19 nt, Artificial Sequence
  Description of Artificial Sequence: Synthetic oligonucleotide
aggcuccugaucgaaguuc

SEQ ID NO: 74064 - RNA, 19 nt, Artificial Sequence
  Description of Artificial Sequence: Synthetic oligonucleotide
gucguuuagaguucucuua

SEQ ID NO: 74065 - RNA, 19 nt, Artificial Sequence
  Description of Artificial Sequence: Synthetic oligonucleotide
agcgucaagauggggacca

SEQ ID NO: 74066 - RNA, 19 nt, Artificial Sequence
  Description of Artificial Sequence: Synthetic oligonucleotide
cugacccugugacucgggg

SEQ ID NO: 74067 - RNA, 19 nt, Artificial Sequence
  Description of Artificial Sequence: Synthetic oligonucleotide
auacauacacacacacaca

SEQ ID NO: 74068 - RNA, 19 nt, Artificial Sequence
  Description of Artificial Sequence: Synthetic oligonucleotide
caggcgguaggacacccag

SEQ ID NO: 74069 - RNA, 19 nt, Artificial Sequence
  Description of Artificial Sequence: Synthetic oligonucleotide
uggcuuuuagggucguuua

SEQ ID NO: 74070 - RNA, 19 nt, Artificial Sequence
  Description of Artificial Sequence: Synthetic oligonucleotide
aucaaggcuguugcagauc

SEQ ID NO: 74071 - RNA, 19 nt, Artificial Sequence
  Description of Artificial Sequence: Synthetic oligonucleotide
ucccgggagaaaucgccug

SEQ ID NO: 74072 - RNA, 19 nt, Artificial Sequence
  Description of Artificial Sequence: Synthetic oligonucleotide
agacagccacuacgaggcc

SEQ ID NO: 74073 - RNA, 19 nt, Artificial Sequence
  Description of Artificial Sequence: Synthetic oligonucleotide
acgcuguguggguuguuag

SEQ ID NO: 74074 - RNA, 19 nt, Artificial Sequence
  Description of Artificial Sequence: Synthetic oligonucleotide
aauuagucauagggaucgu

SEQ ID NO: 74075 - RNA, 19 nt, Artificial Sequence
  Description of Artificial Sequence: Synthetic oligonucleotide
ggagcgucaagauggggac

SEQ ID NO: 74076 - RNA, 19 nt, Artificial Sequence
  Description of Artificial Sequence: Synthetic oligonucleotide
gacaggacuuagccuccag

SEQ ID NO: 74077 - RNA, 19 nt, Artificial Sequence
  Description of Artificial Sequence: Synthetic oligonucleotide
gguuguuaggccuugcagu

SEQ ID NO: 74078 - RNA, 19 nt, Artificial Sequence
  Description of Artificial Sequence: Synthetic oligonucleotide
ccugaucgaaguucuugcg

SEQ ID NO: 74079 - RNA, 19 nt, Artificial Sequence
  Description of Artificial Sequence: Synthetic oligonucleotide
agauuacacccgugggacu

SEQ ID NO: 74080 - RNA, 19 nt, Artificial Sequence
  Description of Artificial Sequence: Synthetic oligonucleotide
ggggucucgagguacgccc

SEQ ID NO: 74081 - RNA, 19 nt, Artificial Sequence
  Description of Artificial Sequence: Synthetic oligonucleotide
ggcuuuuagggucguuuag

SEQ ID NO: 74082 - RNA, 19 nt, Artificial Sequence
  Description of Artificial Sequence: Synthetic oligonucleotide
gguacuccggcgcuuggcc

SEQ ID NO: 74083 - RNA, 19 nt, Artificial Sequence
  Description of Artificial Sequence: Synthetic oligonucleotide
ggagaaaucgccuggguau

SEQ ID NO: 74084 - RNA, 19 nt, Artificial Sequence
  Description of Artificial Sequence: Synthetic oligonucleotide
gaucccggccucucaucag

SEQ ID NO: 74085 - RNA, 19 nt, Artificial Sequence
  Description of Artificial Sequence: Synthetic oligonucleotide
cuuacucugcacgcacagc

SEQ ID NO: 74086 - RNA, 19 nt, Artificial Sequence
  Description of Artificial Sequence: Synthetic oligonucleotide
ccagugcgagccaagaaac

SEQ ID NO: 74087 - RNA, 19 nt, Artificial Sequence
  Description of Artificial Sequence: Synthetic oligonucleotide
uucuaaggcuggugguggu

SEQ ID NO: 74088 - RNA, 19 nt, Artificial Sequence
  Description of Artificial Sequence: Synthetic oligonucleotide
ugcccugaugugcccaagu

SEQ ID NO: 74089 - RNA, 19 nt, Artificial Sequence
  Description of Artificial Sequence: Synthetic oligonucleotide
uacuccggcgcuuggccac

SEQ ID NO: 74090 - RNA, 19 nt, Artificial Sequence
  Description of Artificial Sequence: Synthetic oligonucleotide
cugggagcgucaagauggg

SEQ ID NO: 74091 - RNA, 19 nt, Artificial Sequence
  Description of Artificial Sequence: Synthetic oligonucleotide
agccgccagucguugcccc

SEQ ID NO: 74092 - RNA, 19 nt, Artificial Sequence
  Description of Artificial Sequence: Synthetic oligonucleotide
ggcucggcgacucuuggug

SEQ ID NO: 74093 - RNA, 19 nt, Artificial Sequence
  Description of Artificial Sequence: Synthetic oligonucleotide
gucccggcaguuucuucgg

SEQ ID NO: 74094 - RNA, 19 nt, Artificial Sequence
  Description of Artificial Sequence: Synthetic oligonucleotide
uguggguuguuaggccuug

SEQ ID NO: 74095 - RNA, 19 nt, Artificial Sequence
  Description of Artificial Sequence: Synthetic oligonucleotide
ucuugacugcagagcggga

SEQ ID NO: 74096 - RNA, 19 nt, Artificial Sequence
  Description of Artificial Sequence: Synthetic oligonucleotide
gaucguugucggcggaguc

SEQ ID NO: 74097 - RNA, 19 nt, Artificial Sequence
  Description of Artificial Sequence: Synthetic oligonucleotide
  modified_base (6)..(6): a, c, u, g, unknown or other
aucccngcagaacccggca

SEQ ID NO: 74098 - RNA, 19 nt, Artificial Sequence
  Description of Artificial Sequence: Synthetic oligonucleotide
acauacacacacacacaca

SEQ ID NO: 74099 - RNA, 19 nt, Artificial Sequence
  Description of Artificial Sequence: Synthetic oligonucleotide
auuagucauagggaucguu

SEQ ID NO: 74100 - RNA, 19 nt, Artificial Sequence
  Description of Artificial Sequence: Synthetic oligonucleotide
gaaaccugugggcucccaa

SEQ ID NO: 74101 - RNA, 19 nt, Artificial Sequence
  Description of Artificial Sequence: Synthetic oligonucleotide
uucaaccaaguagccuccc

SEQ ID NO: 74102 - RNA, 19 nt, Artificial Sequence
  Description of Artificial Sequence: Synthetic oligonucleotide
ucguugccccgugagcuag

SEQ ID NO: 74103 - RNA, 19 nt, Artificial Sequence
  Description of Artificial Sequence: Synthetic oligonucleotide
cugcuaggccuccuuguac

SEQ ID NO: 74104 - RNA, 19 nt, Artificial Sequence
  Description of Artificial Sequence: Synthetic oligonucleotide
ucgccuggguaugugccag

SEQ ID NO: 74105 - RNA, 19 nt, Artificial Sequence
  Description of Artificial Sequence: Synthetic oligonucleotide
ccaucggugcaguucuugg

SEQ ID NO: 74106 - RNA, 19 nt, Artificial Sequence
  Description of Artificial Sequence: Synthetic oligonucleotide
acacacacacacacacaag

SEQ ID NO: 74107 - RNA, 19 nt, Artificial Sequence
  Description of Artificial Sequence: Synthetic oligonucleotide
agguacgcccaagagcugu

SEQ ID NO: 74108 - RNA, 19 nt, Artificial Sequence
  Description of Artificial Sequence: Synthetic oligonucleotide
auuacacccgugggacuag

SEQ ID NO: 74109 - RNA, 19 nt, Artificial Sequence
  Description of Artificial Sequence: Synthetic oligonucleotide
cagucguugccccgugagc

SEQ ID NO: 74110 - RNA, 19 nt, Artificial Sequence
  Description of Artificial Sequence: Synthetic oligonucleotide
ggucggcuccaucaggcag

SEQ ID NO: 74111 - RNA, 19 nt, Artificial Sequence
  Description of Artificial Sequence: Synthetic oligonucleotide
ucccagugcgagccaagaa

SEQ ID NO: 74112 - RNA, 19 nt, Artificial Sequence
  Description of Artificial Sequence: Synthetic oligonucleotide
uagacgagccuggcggaug

SEQ ID NO: 74113 - RNA, 19 nt, Artificial Sequence
  Description of Artificial Sequence: Synthetic oligonucleotide
acagcgccacaucuccuga

SEQ ID NO: 74114 - RNA, 19 nt, Artificial Sequence
  Description of Artificial Sequence: Synthetic oligonucleotide
guuuggguccccucagaaa

SEQ ID NO: 74115 - RNA, 19 nt, Artificial Sequence
  Description of Artificial Sequence: Synthetic oligonucleotide
auacacacacacacacaca

SEQ ID NO: 74116 - RNA, 19 nt, Artificial Sequence
  Description of Artificial Sequence: Synthetic oligonucleotide
ucguuacaagaggaaugcu

SEQ ID NO: 74117 - RNA, 19 nt, Artificial Sequence
  Description of Artificial Sequence: Synthetic oligonucleotide
cacacacacacacaagccu

SEQ ID NO: 74118 - RNA, 19 nt, Artificial Sequence
  Description of Artificial Sequence: Synthetic oligonucleotide
uagggucguuuagaguucu

SEQ ID NO: 74119 - RNA, 19 nt, Artificial Sequence
  Description of Artificial Sequence: Synthetic oligonucleotide
ccggcgaugacuucagcac

SEQ ID NO: 74120 - RNA, 19 nt, Artificial Sequence
  Description of Artificial Sequence: Synthetic oligonucleotide
aaagucccggcaguuucuu

SEQ ID NO: 74121 - RNA, 19 nt, Artificial Sequence
  Description of Artificial Sequence: Synthetic oligonucleotide
ugggagcgucaagaugggg

SEQ ID NO: 74122 - RNA, 19 nt, Artificial Sequence
  Description of Artificial Sequence: Synthetic oligonucleotide
guugccccgugagcuaggg

SEQ ID NO: 74123 - RNA, 19 nt, Artificial Sequence
  Description of Artificial Sequence: Synthetic oligonucleotide
gggugagggaccauuccag

SEQ ID NO: 74124 - RNA, 19 nt, Artificial Sequence
  Description of Artificial Sequence: Synthetic oligonucleotide
cacuugcccucugagggug

SEQ ID NO: 74125 - RNA, 19 nt, Artificial Sequence
  Description of Artificial Sequence: Synthetic oligonucleotide
guguucgcuucugccagcc

SEQ ID NO: 74126 - RNA, 19 nt, Artificial Sequence
  Description of Artificial Sequence: Synthetic oligonucleotide
agaggcgcagguuguggua

SEQ ID NO: 74127 - RNA, 19 nt, Artificial Sequence
  Description of Artificial Sequence: Synthetic oligonucleotide
acacacacacacacacaca

SEQ ID NO: 74128 - RNA, 19 nt, Artificial Sequence
  Description of Artificial Sequence: Synthetic oligonucleotide
gcgccacaucuccugaggg

SEQ ID NO: 74129 - RNA, 19 nt, Artificial Sequence
  Description of Artificial Sequence: Synthetic oligonucleotide
gcggauguaggcucggcga

SEQ ID NO: 74130 - RNA, 19 nt, Artificial Sequence
  Description of Artificial Sequence: Synthetic oligonucleotide
gccgcaucgauuagagcag

SEQ ID NO: 74131 - RNA, 19 nt, Artificial Sequence
  Description of Artificial Sequence: Synthetic oligonucleotide
aagcgggagggugcuuuca

SEQ ID NO: 74132 - RNA, 19 nt, Artificial Sequence
  Description of Artificial Sequence: Synthetic oligonucleotide
aggaaugcuaaaggcuauu

SEQ ID NO: 74133 - RNA, 19 nt, Artificial Sequence
  Description of Artificial Sequence: Synthetic oligonucleotide
cagcgccacaucuccugag

SEQ ID NO: 74134 - RNA, 19 nt, Artificial Sequence
  Description of Artificial Sequence: Synthetic oligonucleotide
ccguguucgcuucugccag

SEQ ID NO: 74135 - RNA, 19 nt, Artificial Sequence
  Description of Artificial Sequence: Synthetic oligonucleotide
ccagucguugccccgugag

SEQ ID NO: 74136 - RNA, 19 nt, Artificial Sequence
  Description of Artificial Sequence: Synthetic oligonucleotide
cgagguacgcccaagagcu

SEQ ID NO: 74137 - RNA, 19 nt, Artificial Sequence
  Description of Artificial Sequence: Synthetic oligonucleotide
ugaaaccugugggcuccca

SEQ ID NO: 74138 - RNA, 19 nt, Artificial Sequence
  Description of Artificial Sequence: Synthetic oligonucleotide
  modified_base (4)..(4): a, c, u, g, unknown or other
cccngcagaacccggcaac

SEQ ID NO: 74139 - RNA, 19 nt, Artificial Sequence
  Description of Artificial Sequence: Synthetic oligonucleotide
aucccagugcgagccaaga

SEQ ID NO: 74140 - RNA, 19 nt, Artificial Sequence
  Description of Artificial Sequence: Synthetic oligonucleotide
guacuccggcgcuuggcca

SEQ ID NO: 74141 - RNA, 19 nt, Artificial Sequence
  Description of Artificial Sequence: Synthetic oligonucleotide
  modified_base (2)..(2): a, c, u, g, unknown or other
cngcagaacccggcaacac

SEQ ID NO: 74142 - RNA, 19 nt, Artificial Sequence
  Description of Artificial Sequence: Synthetic oligonucleotide
gggaccauuccagcuauga

SEQ ID NO: 74143 - RNA, 19 nt, Artificial Sequence
  Description of Artificial Sequence: Synthetic oligonucleotide
cccgggagaaaucgccugg

SEQ ID NO: 74144 - RNA, 19 nt, Artificial Sequence
  Description of Artificial Sequence: Synthetic oligonucleotide
auagacgagccuggcggau

SEQ ID NO: 74145 - RNA, 19 nt, Artificial Sequence
  Description of Artificial Sequence: Synthetic oligonucleotide
aggcucggcgacucuuggu

SEQ ID NO: 74146 - RNA, 19 nt, Artificial Sequence
  Description of Artificial Sequence: Synthetic oligonucleotide
ccuugcagucuugaaguug

SEQ ID NO: 74147 - RNA, 19 nt, Artificial Sequence
  Description of Artificial Sequence: Synthetic oligonucleotide
guacugucucauacugguc

SEQ ID NO: 74148 - RNA, 19 nt, Artificial Sequence
  Description of Artificial Sequence: Synthetic oligonucleotide
gagccgccagucguugccc

SEQ ID NO: 74149 - RNA, 19 nt, Artificial Sequence
  Description of Artificial Sequence: Synthetic oligonucleotide
ggagucggugaugucugug

SEQ ID NO: 74150 - RNA, 19 nt, Artificial Sequence
  Description of Artificial Sequence: Synthetic oligonucleotide
gcucuucaaccaaguagcc

SEQ ID NO: 74151 - RNA, 19 nt, Artificial Sequence
  Description of Artificial Sequence: Synthetic oligonucleotide
ggaaguugguauccugagu

SEQ ID NO: 74152 - RNA, 19 nt, Artificial Sequence
  Description of Artificial Sequence: Synthetic oligonucleotide
cccagugcgagccaagaaa

SEQ ID NO: 74153 - RNA, 19 nt, Artificial Sequence
  Description of Artificial Sequence: Synthetic oligonucleotide
cuguuuggguccccucaga

SEQ ID NO: 74154 - RNA, 19 nt, Artificial Sequence
  Description of Artificial Sequence: Synthetic oligonucleotide
gagguuuucuaaggcuggu

SEQ ID NO: 74155 - RNA, 19 nt, Artificial Sequence
  Description of Artificial Sequence: Synthetic oligonucleotide
gcgggaguaggacucgcca

SEQ ID NO: 74156 - RNA, 19 nt, Artificial Sequence
  Description of Artificial Sequence: Synthetic oligonucleotide
ggcggaugaugagauugug

SEQ ID NO: 74157 - RNA, 19 nt, Artificial Sequence
  Description of Artificial Sequence: Synthetic oligonucleotide
cguagacgaugacuguggc

SEQ ID NO: 74158 - RNA, 19 nt, Artificial Sequence
  Description of Artificial Sequence: Synthetic oligonucleotide
agggucguuuagaguucuc

SEQ ID NO: 74159 - RNA, 19 nt, Artificial Sequence
  Description of Artificial Sequence: Synthetic oligonucleotide
auacagcgccacaucuccu

SEQ ID NO: 74160 - RNA, 19 nt, Artificial Sequence
  Description of Artificial Sequence: Synthetic oligonucleotide
uggccacgcagguguaguu

SEQ ID NO: 74161 - RNA, 19 nt, Artificial Sequence
  Description of Artificial Sequence: Synthetic oligonucleotide
cggccucucaucaguagag

SEQ ID NO: 74162 - RNA, 19 nt, Artificial Sequence
  Description of Artificial Sequence: Synthetic oligonucleotide
cuaggggcaucaaggcugu

SEQ ID NO: 74163 - RNA, 19 nt, Artificial Sequence
  Description of Artificial Sequence: Synthetic oligonucleotide
caugcggaaacaggugugu

SEQ ID NO: 74164 - RNA, 19 nt, Artificial Sequence
  Description of Artificial Sequence: Synthetic oligonucleotide
cgcagguaagcaaugcgga

SEQ ID NO: 74165 - RNA, 19 nt, Artificial Sequence
  Description of Artificial Sequence: Synthetic oligonucleotide
guggguuguuaggccuugc

SEQ ID NO: 74166 - RNA, 19 nt, Artificial Sequence
  Description of Artificial Sequence: Synthetic oligonucleotide
gccaagagccgccagucgu

SEQ ID NO: 74167 - RNA, 19 nt, Artificial Sequence
  Description of Artificial Sequence: Synthetic oligonucleotide
guagacccugaggcuguac

SEQ ID NO: 74168 - RNA, 19 nt, Artificial Sequence
  Description of Artificial Sequence: Synthetic oligonucleotide
cuccggcgaugacuucagc

SEQ ID NO: 74169 - RNA, 19 nt, Artificial Sequence
  Description of Artificial Sequence: Synthetic oligonucleotide
gugcgagccaagaaacggu

SEQ ID NO: 74170 - RNA, 19 nt, Artificial Sequence
  Description of Artificial Sequence: Synthetic oligonucleotide
gcgguaggacacccagcag

SEQ ID NO: 74171 - RNA, 19 nt, Artificial Sequence
  Description of Artificial Sequence: Synthetic oligonucleotide
cucggccgcaucgauuaga

SEQ ID NO: 74172 - RNA, 19 nt, Artificial Sequence
  Description of Artificial Sequence: Synthetic oligonucleotide
ccgggagaaaucgccuggg

SEQ ID NO: 74173 - RNA, 19 nt, Artificial Sequence
  Description of Artificial Sequence: Synthetic oligonucleotide
gccgccagucguugccccg

SEQ ID NO: 74174 - RNA, 19 nt, Artificial Sequence
  Description of Artificial Sequence: Synthetic oligonucleotide
ggacuaguuuugguggcaa

SEQ ID NO: 74175 - RNA, 19 nt, Artificial Sequence
  Description of Artificial Sequence: Synthetic oligonucleotide
gucguugccccgugagcua

SEQ ID NO: 74176 - RNA, 19 nt, Artificial Sequence
  Description of Artificial Sequence: Synthetic oligonucleotide
gggucguuuagaguucucu

SEQ ID NO: 74177 - RNA, 19 nt, Artificial Sequence
  Description of Artificial Sequence: Synthetic oligonucleotide
agcguggugugcagcugga

SEQ ID NO: 74178 - RNA, 19 nt, Artificial Sequence
  Description of Artificial Sequence: Synthetic oligonucleotide
ggcccgugggaccacaggu

SEQ ID NO: 74179 - RNA, 19 nt, Artificial Sequence
  Description of Artificial Sequence: Synthetic oligonucleotide
acccggcaacaccaagcua

SEQ ID NO: 74180 - RNA, 19 nt, Artificial Sequence
  Description of Artificial Sequence: Synthetic oligonucleotide
cucggcgacucuugguggu

SEQ ID NO: 74181 - RNA, 19 nt, Artificial Sequence
  Description of Artificial Sequence: Synthetic oligonucleotide
gcagaucuucuggcggaug

SEQ ID NO: 74182 - RNA, 19 nt, Artificial Sequence
  Description of Artificial Sequence: Synthetic oligonucleotide
cccgugggaccacagguca

SEQ ID NO: 74183 - RNA, 19 nt, Artificial Sequence
  Description of Artificial Sequence: Synthetic oligonucleotide
ucggcgacucuuggugguu

SEQ ID NO: 74184 - RNA, 19 nt, Artificial Sequence
  Description of Artificial Sequence: Synthetic oligonucleotide
ccgcaucgauuagagcagg

SEQ ID NO: 74185 - RNA, 19 nt, Artificial Sequence
  Description of Artificial Sequence: Synthetic oligonucleotide
gcggauggacagugguauc

SEQ ID NO: 74186 - RNA, 19 nt, Artificial Sequence
  Description of Artificial Sequence: Synthetic oligonucleotide
ccggccucucaucaguaga

SEQ ID NO: 74187 - RNA, 19 nt, Artificial Sequence
  Description of Artificial Sequence: Synthetic oligonucleotide
gcacagcccaucggugcag

SEQ ID NO: 74188 - RNA, 19 nt, Artificial Sequence
  Description of Artificial Sequence: Synthetic oligonucleotide
cguguucgcuucugccagc

SEQ ID NO: 74189 - RNA, 19 nt, Artificial Sequence
  Description of Artificial Sequence: Synthetic oligonucleotide
  modified_base (3)..(3): a, c, u, g, unknown or other
ccngcagaacccggcaaca

SEQ ID NO: 74190 - RNA, 19 nt, Artificial Sequence
  Description of Artificial Sequence: Synthetic oligonucleotide
gucccgggagaaaucgccu

SEQ ID NO: 74191 - RNA, 19 nt, Artificial Sequence
  Description of Artificial Sequence: Synthetic oligonucleotide
gcagugguacuccggcgcu

SEQ ID NO: 74192 - RNA, 19 nt, Artificial Sequence
  Description of Artificial Sequence: Synthetic oligonucleotide
cccgguagaugccagcacu

SEQ ID NO: 74193 - RNA, 19 nt, Artificial Sequence
  Description of Artificial Sequence: Synthetic oligonucleotide
ggugggcggcacugcagaa

SEQ ID NO: 74194 - RNA, 19 nt, Artificial Sequence
  Description of Artificial Sequence: Synthetic oligonucleotide
ggaucguugucggcggagu

SEQ ID NO: 74195 - RNA, 19 nt, Artificial Sequence
  Description of Artificial Sequence: Synthetic oligonucleotide
gccgcacgcagaccuuaca

SEQ ID NO: 74196 - RNA, 19 nt, Artificial Sequence
  Description of Artificial Sequence: Synthetic oligonucleotide
cgauuagagcagggugacc

SEQ ID NO: 74197 - RNA, 19 nt, Artificial Sequence
  Description of Artificial Sequence: Synthetic oligonucleotide
gcccgugggaccacagguc

SEQ ID NO: 74198 - RNA, 19 nt, Artificial Sequence
  Description of Artificial Sequence: Synthetic oligonucleotide
ggcaggacgcugugugggu

SEQ ID NO: 74199 - RNA, 19 nt, Artificial Sequence
  Description of Artificial Sequence: Synthetic oligonucleotide
gcgucaagauggggaccag

SEQ ID NO: 74200 - RNA, 19 nt, Artificial Sequence
  Description of Artificial Sequence: Synthetic oligonucleotide
cguugccccgugagcuagg

SEQ ID NO: 74201 - RNA, 19 nt, Artificial Sequence
  Description of Artificial Sequence: Synthetic oligonucleotide
cggcgaugacuucagcaca

SEQ ID NO: 74202 - RNA, 19 nt, Artificial Sequence
  Description of Artificial Sequence: Synthetic oligonucleotide
guguggguuguuaggccuu

SEQ ID NO: 74203 - RNA, 19 nt, Artificial Sequence
  Description of Artificial Sequence: Synthetic oligonucleotide
cgcacagcccaucggugca

SEQ ID NO: 74204 - RNA, 19 nt, Artificial Sequence
  Description of Artificial Sequence: Synthetic oligonucleotide
ccucggccgcaucgauuag

SEQ ID NO: 74205 - RNA, 19 nt, Artificial Sequence
  Description of Artificial Sequence: Synthetic oligonucleotide
cacagcccaucggugcagu

SEQ ID NO: 74206 - RNA, 19 nt, Artificial Sequence
  Description of Artificial Sequence: Synthetic oligonucleotide
ccaagagccgccagucguu

SEQ ID NO: 74207 - RNA, 19 nt, Artificial Sequence
  Description of Artificial Sequence: Synthetic oligonucleotide
cucccuccggugggcggca

SEQ ID NO: 74208 - RNA, 19 nt, Artificial Sequence
  Description of Artificial Sequence: Synthetic oligonucleotide
ggcguguccuccagacagu

SEQ ID NO: 74209 - RNA, 19 nt, Artificial Sequence
  Description of Artificial Sequence: Synthetic oligonucleotide
cccgugagcuaggggcauc

SEQ ID NO: 74210 - RNA, 19 nt, Artificial Sequence
  Description of Artificial Sequence: Synthetic oligonucleotide
ccgugggacuaguuuuggu

SEQ ID NO: 74211 - RNA, 19 nt, Artificial Sequence
  Description of Artificial Sequence: Synthetic oligonucleotide
gcguggugugcagcuggaa

SEQ ID NO: 74212 - RNA, 19 nt, Artificial Sequence
  Description of Artificial Sequence: Synthetic oligonucleotide
cggcgacucuuggugguuc

SEQ ID NO: 74213 - RNA, 19 nt, Artificial Sequence
  Description of Artificial Sequence: Synthetic oligonucleotide
cgggagaaaucgccugggu

SEQ ID NO: 74214 - RNA, 19 nt, Artificial Sequence
  Description of Artificial Sequence: Synthetic oligonucleotide
cauaaauugaccauaaccc

SEQ ID NO: 74215 - RNA, 19 nt, Artificial Sequence
  Description of Artificial Sequence: Synthetic oligonucleotide
uguaaauauauauauaugu

SEQ ID NO: 74216 - RNA, 19 nt, Artificial Sequence
  Description of Artificial Sequence: Synthetic oligonucleotide
aagacuaggagucugcuuc

SEQ ID NO: 74217 - RNA, 19 nt, Artificial Sequence
  Description of Artificial Sequence: Synthetic oligonucleotide
aaauauauauauaugucuc

SEQ ID NO: 74218 - RNA, 19 nt, Artificial Sequence
  Description of Artificial Sequence: Synthetic oligonucleotide
aaucucuacacugaggccc

SEQ ID NO: 74219 - RNA, 19 nt, Artificial Sequence
  Description of Artificial Sequence: Synthetic oligonucleotide
uaaauauauauauaugucu

SEQ ID NO: 74220 - RNA, 19 nt, Artificial Sequence
  Description of Artificial Sequence: Synthetic oligonucleotide
uguguaaauauauauauau

SEQ ID NO: 74221 - RNA, 19 nt, Artificial Sequence
  Description of Artificial Sequence: Synthetic oligonucleotide
uuuguggcgacauaaauug

SEQ ID NO: 74222 - RNA, 19 nt, Artificial Sequence
  Description of Artificial Sequence: Synthetic oligonucleotide
uuacuuauggcccaagcag

SEQ ID NO: 74223 - RNA, 19 nt, Artificial Sequence
  Description of Artificial Sequence: Synthetic oligonucleotide
uauuaagucaucaauuggu

SEQ ID NO: 74224 - RNA, 19 nt, Artificial Sequence
  Description of Artificial Sequence: Synthetic oligonucleotide
aauugguggauuucgauca

SEQ ID NO: 74225 - RNA, 19 nt, Artificial Sequence
  Description of Artificial Sequence: Synthetic oligonucleotide
uuacucucaaccuagauaa

SEQ ID NO: 74226 - RNA, 19 nt, Artificial Sequence
  Description of Artificial Sequence: Synthetic oligonucleotide
caaaugaggaacuauuccg

SEQ ID NO: 74227 - RNA, 19 nt, Artificial Sequence
  Description of Artificial Sequence: Synthetic oligonucleotide
aauauauauauaugucuca

SEQ ID NO: 74228 - RNA, 19 nt, Artificial Sequence
  Description of Artificial Sequence: Synthetic oligonucleotide
uguaauuuaccucaugcaa

SEQ ID NO: 74229 - RNA, 19 nt, Artificial Sequence
  Description of Artificial Sequence: Synthetic oligonucleotide
gaaucguuuccauuggugg

SEQ ID NO: 74230 - RNA, 19 nt, Artificial Sequence
  Description of Artificial Sequence: Synthetic oligonucleotide
uucuuaagaauguuauagg

SEQ ID NO: 74231 - RNA, 19 nt, Artificial Sequence
  Description of Artificial Sequence: Synthetic oligonucleotide
aaacagauuaggcauauua

SEQ ID NO: 74232 - RNA, 19 nt, Artificial Sequence
  Description of Artificial Sequence: Synthetic oligonucleotide
auauaugucucagugcugc

SEQ ID NO: 74233 - RNA, 19 nt, Artificial Sequence
  Description of Artificial Sequence: Synthetic oligonucleotide
cuaaaguggcucaaaauag

SEQ ID NO: 74234 - RNA, 19 nt, Artificial Sequence
  Description of Artificial Sequence: Synthetic oligonucleotide
aagcuugauggaucaaacc

SEQ ID NO: 74235 - RNA, 19 nt, Artificial Sequence
  Description of Artificial Sequence: Synthetic oligonucleotide
uuuuauccauucuacagug

SEQ ID NO: 74236 - RNA, 19 nt, Artificial Sequence
  Description of Artificial Sequence: Synthetic oligonucleotide
uuaagucaucaauuggugg

SEQ ID NO: 74237 - RNA, 19 nt, Artificial Sequence
  Description of Artificial Sequence: Synthetic oligonucleotide
uguucaaaccauuacuuga

SEQ ID NO: 74238 - RNA, 19 nt, Artificial Sequence
  Description of Artificial Sequence: Synthetic oligonucleotide
auuuccuacaaugagccac

SEQ ID NO: 74239 - RNA, 19 nt, Artificial Sequence
  Description of Artificial Sequence: Synthetic oligonucleotide
ucaccuaugauauuuccca

SEQ ID NO: 74240 - RNA, 19 nt, Artificial Sequence
  Description of Artificial Sequence: Synthetic oligonucleotide
ugguauguuucuuauagca

SEQ ID NO: 74241 - RNA, 19 nt, Artificial Sequence
  Description of Artificial Sequence: Synthetic oligonucleotide
aauagacggacuuaugaau

SEQ ID NO: 74242 - RNA, 19 nt, Artificial Sequence
  Description of Artificial Sequence: Synthetic oligonucleotide
auauagaugcuaauggugg

SEQ ID NO: 74243 - RNA, 19 nt, Artificial Sequence
  Description of Artificial Sequence: Synthetic oligonucleotide
uaugaucacaaaauaauuu

SEQ ID NO: 74244 - RNA, 19 nt, Artificial Sequence
  Description of Artificial Sequence: Synthetic oligonucleotide
ucuucaucggucuuuauuc

SEQ ID NO: 74245 - RNA, 19 nt, Artificial Sequence
  Description of Artificial Sequence: Synthetic oligonucleotide
uuucuuauagcaaauuguu

SEQ ID NO: 74246 - RNA, 19 nt, Artificial Sequence
  Description of Artificial Sequence: Synthetic oligonucleotide
uuucagaauuaccaguuga

SEQ ID NO: 74247 - RNA, 19 nt, Artificial Sequence
  Description of Artificial Sequence: Synthetic oligonucleotide
agaguaaaccaaugucugc

SEQ ID NO: 74248 - RNA, 19 nt, Artificial Sequence
  Description of Artificial Sequence: Synthetic oligonucleotide
agagcccuagauuugaaag

SEQ ID NO: 74249 - RNA, 19 nt, Artificial Sequence
  Description of Artificial Sequence: Synthetic oligonucleotide
uagccuguagucuacuugg

SEQ ID NO: 74250 - RNA, 19 nt, Artificial Sequence
  Description of Artificial Sequence: Synthetic oligonucleotide
auaaauugaccauaaccca

SEQ ID NO: 74251 - RNA, 19 nt, Artificial Sequence
  Description of Artificial Sequence: Synthetic oligonucleotide
gcaucaaacacucaucugg

SEQ ID NO: 74252 - RNA, 19 nt, Artificial Sequence
  Description of Artificial Sequence: Synthetic oligonucleotide
auagucucuaagucgcggc

SEQ ID NO: 74253 - RNA, 19 nt, Artificial Sequence
  Description of Artificial Sequence: Synthetic oligonucleotide
agcuugauggaucaaaccu

SEQ ID NO: 74254 - RNA, 19 nt, Artificial Sequence
  Description of Artificial Sequence: Synthetic oligonucleotide
acugcacuuaauugaauuc

SEQ ID NO: 74255 - RNA, 19 nt, Artificial Sequence
  Description of Artificial Sequence: Synthetic oligonucleotide
uuacaagcuaguuuucuug

SEQ ID NO: 74256 - RNA, 19 nt, Artificial Sequence
  Description of Artificial Sequence: Synthetic oligonucleotide
uuuaauuuagugugcguaa

SEQ ID NO: 74257 - RNA, 19 nt, Artificial Sequence
  Description of Artificial Sequence: Synthetic oligonucleotide
uuugcacucuauaaucacc

SEQ ID NO: 74258 - RNA, 19 nt, Artificial Sequence
  Description of Artificial Sequence: Synthetic oligonucleotide
uucaagacaaugaacuaaa

SEQ ID NO: 74259 - RNA, 19 nt, Artificial Sequence
  Description of Artificial Sequence: Synthetic oligonucleotide
auauauauauaugucucag

SEQ ID NO: 74260 - RNA, 19 nt, Artificial Sequence
  Description of Artificial Sequence: Synthetic oligonucleotide
uccaagacuuaucacauaa

SEQ ID NO: 74261 - RNA, 19 nt, Artificial Sequence
  Description of Artificial Sequence: Synthetic oligonucleotide
ugaugaucuacuagguuug

SEQ ID NO: 74262 - RNA, 19 nt, Artificial Sequence
  Description of Artificial Sequence: Synthetic oligonucleotide
uaaauugaccauaacccaa

SEQ ID NO: 74263 - RNA, 19 nt, Artificial Sequence
  Description of Artificial Sequence: Synthetic oligonucleotide
uucucucccgauuuaaugc

SEQ ID NO: 74264 - RNA, 19 nt, Artificial Sequence
  Description of Artificial Sequence: Synthetic oligonucleotide
uuaucauugguacaagauu

SEQ ID NO: 74265 - RNA, 19 nt, Artificial Sequence
  Description of Artificial Sequence: Synthetic oligonucleotide
aaguacuacuugcacaacu

SEQ ID NO: 74266 - RNA, 19 nt, Artificial Sequence
  Description of Artificial Sequence: Synthetic oligonucleotide
uacuauuauggcaacuugu

SEQ ID NO: 74267 - RNA, 19 nt, Artificial Sequence
  Description of Artificial Sequence: Synthetic oligonucleotide
uacuuaguccaucaaguac

SEQ ID NO: 74268 - RNA, 19 nt, Artificial Sequence
  Description of Artificial Sequence: Synthetic oligonucleotide
ugaaucguuuccauuggug

SEQ ID NO: 74269 - RNA, 19 nt, Artificial Sequence
  Description of Artificial Sequence: Synthetic oligonucleotide
uuuaccucaugcaaagauc

SEQ ID NO: 74270 - RNA, 19 nt, Artificial Sequence
  Description of Artificial Sequence: Synthetic oligonucleotide
aacacuugugaucucacuu

SEQ ID NO: 74271 - RNA, 19 nt, Artificial Sequence
  Description of Artificial Sequence: Synthetic oligonucleotide
uuuuaaacuuuaaccuaug

SEQ ID NO: 74272 - RNA, 19 nt, Artificial Sequence
  Description of Artificial Sequence: Synthetic oligonucleotide
guaaauauauauauauguc

SEQ ID NO: 74273 - RNA, 19 nt, Artificial Sequence
  Description of Artificial Sequence: Synthetic oligonucleotide
uaauugaauuccuugguua

SEQ ID NO: 74274 - RNA, 19 nt, Artificial Sequence
  Description of Artificial Sequence: Synthetic oligonucleotide
uguggcgacauaaauugac

SEQ ID NO: 74275 - RNA, 19 nt, Artificial Sequence
  Description of Artificial Sequence: Synthetic oligonucleotide
caugcguccacauacagca

SEQ ID NO: 74276 - RNA, 19 nt, Artificial Sequence
  Description of Artificial Sequence: Synthetic oligonucleotide
gauagaguaagucaaugcu

SEQ ID NO: 74277 - RNA, 19 nt, Artificial Sequence
  Description of Artificial Sequence: Synthetic oligonucleotide
uacuuauggcccaagcagc

SEQ ID NO: 74278 - RNA, 19 nt, Artificial Sequence
  Description of Artificial Sequence: Synthetic oligonucleotide
aaucguuuccauugguggu

SEQ ID NO: 74279 - RNA, 19 nt, Artificial Sequence
  Description of Artificial Sequence: Synthetic oligonucleotide
uacaucuacucaaaccucu

SEQ ID NO: 74280 - RNA, 19 nt, Artificial Sequence
  Description of Artificial Sequence: Synthetic oligonucleotide
ugcguaaccucaaaacuga

SEQ ID NO: 74281 - RNA, 19 nt, Artificial Sequence
  Description of Artificial Sequence: Synthetic oligonucleotide
uuaaguuacuuauggccca

SEQ ID NO: 74282 - RNA, 19 nt, Artificial Sequence
  Description of Artificial Sequence: Synthetic oligonucleotide
acucauucucacucgcacc

SEQ ID NO: 74283 - RNA, 19 nt, Artificial Sequence
  Description of Artificial Sequence: Synthetic oligonucleotide
uacaagcuaguuuucuugc

SEQ ID NO: 74284 - RNA, 19 nt, Artificial Sequence
  Description of Artificial Sequence: Synthetic oligonucleotide
uuaauugaauuccuugguu

SEQ ID NO: 74285 - RNA, 19 nt, Artificial Sequence
  Description of Artificial Sequence: Synthetic oligonucleotide
uggauuucgaucacuggac

SEQ ID NO: 74286 - RNA, 19 nt, Artificial Sequence
  Description of Artificial Sequence: Synthetic oligonucleotide
gguguauuaucauugguac

SEQ ID NO: 74287 - RNA, 19 nt, Artificial Sequence
  Description of Artificial Sequence: Synthetic oligonucleotide
ucaucggucuuuauucagc

SEQ ID NO: 74288 - RNA, 19 nt, Artificial Sequence
  Description of Artificial Sequence: Synthetic oligonucleotide
cacauacagcacuacaacc

SEQ ID NO: 74289 - RNA, 19 nt, Artificial Sequence
  Description of Artificial Sequence: Synthetic oligonucleotide
auuaggcauauuauuaaag

SEQ ID NO: 74290 - RNA, 19 nt, Artificial Sequence
  Description of Artificial Sequence: Synthetic oligonucleotide
ucuaugagauuggcuaugg

SEQ ID NO: 74291 - RNA, 19 nt, Artificial Sequence
  Description of Artificial Sequence: Synthetic oligonucleotide
uacaggacucaacaaaauc

SEQ ID NO: 74292 - RNA, 19 nt, Artificial Sequence
  Description of Artificial Sequence: Synthetic oligonucleotide
acaaugagccaccuuauaa

SEQ ID NO: 74293 - RNA, 19 nt, Artificial Sequence
  Description of Artificial Sequence: Synthetic oligonucleotide
aucaccuaugauauuuccc

SEQ ID NO: 74294 - RNA, 19 nt, Artificial Sequence
  Description of Artificial Sequence: Synthetic oligonucleotide
acuaugcuguaauuuaccu

SEQ ID NO: 74295 - RNA, 19 nt, Artificial Sequence
  Description of Artificial Sequence: Synthetic oligonucleotide
uuuugcacucuauaaucac

SEQ ID NO: 74296 - RNA, 19 nt, Artificial Sequence
  Description of Artificial Sequence: Synthetic oligonucleotide
acuuaguccaucaaguacu

SEQ ID NO: 74297 - RNA, 19 nt, Artificial Sequence
  Description of Artificial Sequence: Synthetic oligonucleotide
acauuuaaacacagcacgg

SEQ ID NO: 74298 - RNA, 19 nt, Artificial Sequence
  Description of Artificial Sequence: Synthetic oligonucleotide
acuuauauggguaucacuu

SEQ ID NO: 74299 - RNA, 19 nt, Artificial Sequence
  Description of Artificial Sequence: Synthetic oligonucleotide
acaggacucaacaaaaucu

SEQ ID NO: 74300 - RNA, 19 nt, Artificial Sequence
  Description of Artificial Sequence: Synthetic oligonucleotide
caagauuggcaucaauuac

SEQ ID NO: 74301 - RNA, 19 nt, Artificial Sequence
  Description of Artificial Sequence: Synthetic oligonucleotide
acuuccccucaauugauag

SEQ ID NO: 74302 - RNA, 19 nt, Artificial Sequence
  Description of Artificial Sequence: Synthetic oligonucleotide
uacuagguuuguuaucagc

SEQ ID NO: 74303 - RNA, 19 nt, Artificial Sequence
  Description of Artificial Sequence: Synthetic oligonucleotide
gaauagacggacuuaugaa

SEQ ID NO: 74304 - RNA, 19 nt, Artificial Sequence
  Description of Artificial Sequence: Synthetic oligonucleotide
aagguguauuaucauuggu

SEQ ID NO: 74305 - RNA, 19 nt, Artificial Sequence
  Description of Artificial Sequence: Synthetic oligonucleotide
guuauaggaauagacggac

SEQ ID NO: 74306 - RNA, 19 nt, Artificial Sequence
  Description of Artificial Sequence: Synthetic oligonucleotide
uacguacuagguaaaguaa

SEQ ID NO: 74307 - RNA, 19 nt, Artificial Sequence
  Description of Artificial Sequence: Synthetic oligonucleotide
uauauaugucucagugcug

SEQ ID NO: 74308 - RNA, 19 nt, Artificial Sequence
  Description of Artificial Sequence: Synthetic oligonucleotide
auagcuucuagagagguau

SEQ ID NO: 74309 - RNA, 19 nt, Artificial Sequence
  Description of Artificial Sequence: Synthetic oligonucleotide
auuuaauuuagugugcgua

SEQ ID NO: 74310 - RNA, 19 nt, Artificial Sequence
  Description of Artificial Sequence: Synthetic oligonucleotide
uacuugguauaaauuuuac

SEQ ID NO: 74311 - RNA, 19 nt, Artificial Sequence
  Description of Artificial Sequence: Synthetic oligonucleotide
aaagaguuaugaucacaaa

SEQ ID NO: 74312 - RNA, 19 nt, Artificial Sequence
  Description of Artificial Sequence: Synthetic oligonucleotide
aacagauuaggcauauuau

SEQ ID NO: 74313 - RNA, 19 nt, Artificial Sequence
  Description of Artificial Sequence: Synthetic oligonucleotide
cugcacuuaauugaauucc

SEQ ID NO: 74314 - RNA, 19 nt, Artificial Sequence
  Description of Artificial Sequence: Synthetic oligonucleotide
uauuuaauuuagugugcgu

SEQ ID NO: 74315 - RNA, 19 nt, Artificial Sequence
  Description of Artificial Sequence: Synthetic oligonucleotide
ccugguauguuucuuauag

SEQ ID NO: 74316 - RNA, 19 nt, Artificial Sequence
  Description of Artificial Sequence: Synthetic oligonucleotide
guuacuuauggcccaagca

SEQ ID NO: 74317 - RNA, 19 nt, Artificial Sequence
  Description of Artificial Sequence: Synthetic oligonucleotide
gaagguagagggagaauag

SEQ ID NO: 74318 - RNA, 19 nt, Artificial Sequence
  Description of Artificial Sequence: Synthetic oligonucleotide
auaugcaccaaauuccauu

SEQ ID NO: 74319 - RNA, 19 nt, Artificial Sequence
  Description of Artificial Sequence: Synthetic oligonucleotide
aaugaacuaugcuguaauu

SEQ ID NO: 74320 - RNA, 19 nt, Artificial Sequence
  Description of Artificial Sequence: Synthetic oligonucleotide
augcuaaugguggcuaacc

SEQ ID NO: 74321 - RNA, 19 nt, Artificial Sequence
  Description of Artificial Sequence: Synthetic oligonucleotide
caauugguggauuucgauc

SEQ ID NO: 74322 - RNA, 19 nt, Artificial Sequence
  Description of Artificial Sequence: Synthetic oligonucleotide
aaaaugaacuaugcuguaa

SEQ ID NO: 74323 - RNA, 19 nt, Artificial Sequence
  Description of Artificial Sequence: Synthetic oligonucleotide
uugacuuauauggguauca

SEQ ID NO: 74324 - RNA, 19 nt, Artificial Sequence
  Description of Artificial Sequence: Synthetic oligonucleotide
uaagucgcggccuuuguuc

SEQ ID NO: 74325 - RNA, 19 nt, Artificial Sequence
  Description of Artificial Sequence: Synthetic oligonucleotide
cauccguaagguaggagag

SEQ ID NO: 74326 - RNA, 19 nt, Artificial Sequence
  Description of Artificial Sequence: Synthetic oligonucleotide
guguaaauauauauauaug

SEQ ID NO: 74327 - RNA, 19 nt, Artificial Sequence
  Description of Artificial Sequence: Synthetic oligonucleotide
auuuaaacacagcacggua

SEQ ID NO: 74328 - RNA, 19 nt, Artificial Sequence
  Description of Artificial Sequence: Synthetic oligonucleotide
uuaauuuagugugcguaac

SEQ ID NO: 74329 - RNA, 19 nt, Artificial Sequence
  Description of Artificial Sequence: Synthetic oligonucleotide
aaaaccacuugcauaacuu

SEQ ID NO: 74330 - RNA, 19 nt, Artificial Sequence
  Description of Artificial Sequence: Synthetic oligonucleotide
caagcuugauggaucaaac

SEQ ID NO: 74331 - RNA, 19 nt, Artificial Sequence
  Description of Artificial Sequence: Synthetic oligonucleotide
aucuacuagguuuguuauc

SEQ ID NO: 74332 - RNA, 19 nt, Artificial Sequence
  Description of Artificial Sequence: Synthetic oligonucleotide
auuaucauugguacaagau

SEQ ID NO: 74333 - RNA, 19 nt, Artificial Sequence
  Description of Artificial Sequence: Synthetic oligonucleotide
uuccuugacuuauaugggu

SEQ ID NO: 74334 - RNA, 19 nt, Artificial Sequence
  Description of Artificial Sequence: Synthetic oligonucleotide
auagacggacuuaugaaug

SEQ ID NO: 74335 - RNA, 19 nt, Artificial Sequence
  Description of Artificial Sequence: Synthetic oligonucleotide
uggcgacauaaauugacca

SEQ ID NO: 74336 - RNA, 19 nt, Artificial Sequence
  Description of Artificial Sequence: Synthetic oligonucleotide
ucucucccgauuuaaugca

SEQ ID NO: 74337 - RNA, 19 nt, Artificial Sequence
  Description of Artificial Sequence: Synthetic oligonucleotide
uaccuaacauccacaauau

SEQ ID NO: 74338 - RNA, 19 nt, Artificial Sequence
  Description of Artificial Sequence: Synthetic oligonucleotide
cuuuacaggacucaacaaa

SEQ ID NO: 74339 - RNA, 19 nt, Artificial Sequence
  Description of Artificial Sequence: Synthetic oligonucleotide
augauauuucccagugccc

SEQ ID NO: 74340 - RNA, 19 nt, Artificial Sequence
  Description of Artificial Sequence: Synthetic oligonucleotide
aaguagauauagaugcuaa

SEQ ID NO: 74341 - RNA, 19 nt, Artificial Sequence
  Description of Artificial Sequence: Synthetic oligonucleotide
ggaauagacggacuuauga

SEQ ID NO: 74342 - RNA, 19 nt, Artificial Sequence
  Description of Artificial Sequence: Synthetic oligonucleotide
agcacgguauucuaucaca

SEQ ID NO: 74343 - RNA, 19 nt, Artificial Sequence
  Description of Artificial Sequence: Synthetic oligonucleotide
cagcacuacaaccacacuc

SEQ ID NO: 74344 - RNA, 19 nt, Artificial Sequence
  Description of Artificial Sequence: Synthetic oligonucleotide
aaccuagauaagcauucau

SEQ ID NO: 74345 - RNA, 19 nt, Artificial Sequence
  Description of Artificial Sequence: Synthetic oligonucleotide
aaaguggcucaaaauagau

SEQ ID NO: 74346 - RNA, 19 nt, Artificial Sequence
  Description of Artificial Sequence: Synthetic oligonucleotide
caccgaagcucccaggacg

SEQ ID NO: 74347 - RNA, 19 nt, Artificial Sequence
  Description of Artificial Sequence: Synthetic oligonucleotide
guacguacuagguaaagua

SEQ ID NO: 74348 - RNA, 19 nt, Artificial Sequence
  Description of Artificial Sequence: Synthetic oligonucleotide
uguacguacuagguaaagu

SEQ ID NO: 74349 - RNA, 19 nt, Artificial Sequence
  Description of Artificial Sequence: Synthetic oligonucleotide
accuagauaagcauucaug

SEQ ID NO: 74350 - RNA, 19 nt, Artificial Sequence
  Description of Artificial Sequence: Synthetic oligonucleotide
ucaauugguggauuucgau

SEQ ID NO: 74351 - RNA, 19 nt, Artificial Sequence
  Description of Artificial Sequence: Synthetic oligonucleotide
auugguggauuucgaucac

SEQ ID NO: 74352 - RNA, 19 nt, Artificial Sequence
  Description of Artificial Sequence: Synthetic oligonucleotide
guuaugaucacaaaauaau

SEQ ID NO: 74353 - RNA, 19 nt, Artificial Sequence
  Description of Artificial Sequence: Synthetic oligonucleotide
uucaugcaacauuugugcu

SEQ ID NO: 74354 - RNA, 19 nt, Artificial Sequence
  Description of Artificial Sequence: Synthetic oligonucleotide
ggcgaaucaagcuugcaug

SEQ ID NO: 74355 - RNA, 19 nt, Artificial Sequence
  Description of Artificial Sequence: Synthetic oligonucleotide
uuuucauguccaguguaca

SEQ ID NO: 74356 - RNA, 19 nt, Artificial Sequence
  Description of Artificial Sequence: Synthetic oligonucleotide
ugcuaaugguggcuaaccu

SEQ ID NO: 74357 - RNA, 19 nt, Artificial Sequence
  Description of Artificial Sequence: Synthetic oligonucleotide
ugcuaaaccggucuuuguu

SEQ ID NO: 74358 - RNA, 19 nt, Artificial Sequence
  Description of Artificial Sequence: Synthetic oligonucleotide
uuuauccauucuacagugu

SEQ ID NO: 74359 - RNA, 19 nt, Artificial Sequence
  Description of Artificial Sequence: Synthetic oligonucleotide
cuaugauauuucccagugc

SEQ ID NO: 74360 - RNA, 19 nt, Artificial Sequence
  Description of Artificial Sequence: Synthetic oligonucleotide
aguagauauagaugcuaau

SEQ ID NO: 74361 - RNA, 19 nt, Artificial Sequence
  Description of Artificial Sequence: Synthetic oligonucleotide
uucgaucacuggacaaaag

SEQ ID NO: 74362 - RNA, 19 nt, Artificial Sequence
  Description of Artificial Sequence: Synthetic oligonucleotide
aaccugguauguuucuuau

SEQ ID NO: 74363 - RNA, 19 nt, Artificial Sequence
  Description of Artificial Sequence: Synthetic oligonucleotide
uuaaacagauuaggcauau

SEQ ID NO: 74364 - RNA, 19 nt, Artificial Sequence
  Description of Artificial Sequence: Synthetic oligonucleotide
agcacuacaaccacacucu

SEQ ID NO: 74365 - RNA, 19 nt, Artificial Sequence
  Description of Artificial Sequence: Synthetic oligonucleotide
ugaaauucuugagccguug

SEQ ID NO: 74366 - RNA, 19 nt, Artificial Sequence
  Description of Artificial Sequence: Synthetic oligonucleotide
cacauaaucucuacacuga

SEQ ID NO: 74367 - RNA, 19 nt, Artificial Sequence
  Description of Artificial Sequence: Synthetic oligonucleotide
auuuugcacucuauaauca

SEQ ID NO: 74368 - RNA, 19 nt, Artificial Sequence
  Description of Artificial Sequence: Synthetic oligonucleotide
cugguauguuucuuauagc

SEQ ID NO: 74369 - RNA, 19 nt, Artificial Sequence
  Description of Artificial Sequence: Synthetic oligonucleotide
accuaugauauuucccagu

SEQ ID NO: 74370 - RNA, 19 nt, Artificial Sequence
  Description of Artificial Sequence: Synthetic oligonucleotide
ucucguacacagucacucc

SEQ ID NO: 74371 - RNA, 19 nt, Artificial Sequence
  Description of Artificial Sequence: Synthetic oligonucleotide
uaggaauagacggacuuau

SEQ ID NO: 74372 - RNA, 19 nt, Artificial Sequence
  Description of Artificial Sequence: Synthetic oligonucleotide
ucucaaccuagauaagcau

SEQ ID NO: 74373 - RNA, 19 nt, Artificial Sequence
  Description of Artificial Sequence: Synthetic oligonucleotide
guaauuuaccucaugcaaa

SEQ ID NO: 74374 - RNA, 19 nt, Artificial Sequence
  Description of Artificial Sequence: Synthetic oligonucleotide
gugcguaaccucaaaacug

SEQ ID NO: 74375 - RNA, 19 nt, Artificial Sequence
  Description of Artificial Sequence: Synthetic oligonucleotide
agugcugcauuguaccuaa

SEQ ID NO: 74376 - RNA, 19 nt, Artificial Sequence
  Description of Artificial Sequence: Synthetic oligonucleotide
uuggauaagauaggccacu

SEQ ID NO: 74377 - RNA, 19 nt, Artificial Sequence
  Description of Artificial Sequence: Synthetic oligonucleotide
acucgcacccacucgccac

SEQ ID NO: 74378 - RNA, 19 nt, Artificial Sequence
  Description of Artificial Sequence: Synthetic oligonucleotide
aagucgcggccuuuguucu

SEQ ID NO: 74379 - RNA, 19 nt, Artificial Sequence
  Description of Artificial Sequence: Synthetic oligonucleotide
uauccauucuacaguguuu

SEQ ID NO: 74380 - RNA, 19 nt, Artificial Sequence
  Description of Artificial Sequence: Synthetic oligonucleotide
cuacaacuucguuucguug

SEQ ID NO: 74381 - RNA, 19 nt, Artificial Sequence
  Description of Artificial Sequence: Synthetic oligonucleotide
aguguacauuaacacuugu

SEQ ID NO: 74382 - RNA, 19 nt, Artificial Sequence
  Description of Artificial Sequence: Synthetic oligonucleotide
agaugaauugaaaccaaau

SEQ ID NO: 74383 - RNA, 19 nt, Artificial Sequence
  Description of Artificial Sequence: Synthetic oligonucleotide
uguaccuaacauccacaau

SEQ ID NO: 74384 - RNA, 19 nt, Artificial Sequence
  Description of Artificial Sequence: Synthetic oligonucleotide
uaaccugguauguuucuua

SEQ ID NO: 74385 - RNA, 19 nt, Artificial Sequence
  Description of Artificial Sequence: Synthetic oligonucleotide
aguucaacaaagaguuaug

SEQ ID NO: 74386 - RNA, 19 nt, Artificial Sequence
  Description of Artificial Sequence: Synthetic oligonucleotide
cucucguacacagucacuc

SEQ ID NO: 74387 - RNA, 19 nt, Artificial Sequence
  Description of Artificial Sequence: Synthetic oligonucleotide
uaacacuugugaucucacu

SEQ ID NO: 74388 - RNA, 19 nt, Artificial Sequence
  Description of Artificial Sequence: Synthetic oligonucleotide
uguugguacauuggcagau

SEQ ID NO: 74389 - RNA, 19 nt, Artificial Sequence
  Description of Artificial Sequence: Synthetic oligonucleotide
cagauuuuauuaagucauc

SEQ ID NO: 74390 - RNA, 19 nt, Artificial Sequence
  Description of Artificial Sequence: Synthetic oligonucleotide
accuaacauccacaauauc

SEQ ID NO: 74391 - RNA, 19 nt, Artificial Sequence
  Description of Artificial Sequence: Synthetic oligonucleotide
agagguauuuugcacucua

SEQ ID NO: 74392 - RNA, 19 nt, Artificial Sequence
  Description of Artificial Sequence: Synthetic oligonucleotide
gcuaaugguggcuaaccug

SEQ ID NO: 74393 - RNA, 19 nt, Artificial Sequence
  Description of Artificial Sequence: Synthetic oligonucleotide
cauagcaucaaacacucau

SEQ ID NO: 74394 - RNA, 19 nt, Artificial Sequence
  Description of Artificial Sequence: Synthetic oligonucleotide
ugacuuauauggguaucac

SEQ ID NO: 74395 - RNA, 19 nt, Artificial Sequence
  Description of Artificial Sequence: Synthetic oligonucleotide
auuucgaucacuggacaaa

SEQ ID NO: 74396 - RNA, 19 nt, Artificial Sequence
  Description of Artificial Sequence: Synthetic oligonucleotide
acuauuccggagucuauua

SEQ ID NO: 74397 - RNA, 19 nt, Artificial Sequence
  Description of Artificial Sequence: Synthetic oligonucleotide
cuuaauugaauuccuuggu

SEQ ID NO: 74398 - RNA, 19 nt, Artificial Sequence
  Description of Artificial Sequence: Synthetic oligonucleotide
ccuaugauauuucccagug

SEQ ID NO: 74399 - RNA, 19 nt, Artificial Sequence
  Description of Artificial Sequence: Synthetic oligonucleotide
gguauucuaucacaacuga

SEQ ID NO: 74400 - RNA, 19 nt, Artificial Sequence
  Description of Artificial Sequence: Synthetic oligonucleotide
agggaaauuuaugauuuau

SEQ ID NO: 74401 - RNA, 19 nt, Artificial Sequence
  Description of Artificial Sequence: Synthetic oligonucleotide
auaagauaggccacuuggu

SEQ ID NO: 74402 - RNA, 19 nt, Artificial Sequence
  Description of Artificial Sequence: Synthetic oligonucleotide
uacucucaaccuagauaag

SEQ ID NO: 74403 - RNA, 19 nt, Artificial Sequence
  Description of Artificial Sequence: Synthetic oligonucleotide
guauuaucauugguacaag

SEQ ID NO: 74404 - RNA, 19 nt, Artificial Sequence
  Description of Artificial Sequence: Synthetic oligonucleotide
caccuaugauauuucccag

SEQ ID NO: 74405 - RNA, 19 nt, Artificial Sequence
  Description of Artificial Sequence: Synthetic oligonucleotide
aacuauuccggagucuauu

SEQ ID NO: 74406 - RNA, 19 nt, Artificial Sequence
  Description of Artificial Sequence: Synthetic oligonucleotide
cauaacccaaguaacauuu

SEQ ID NO: 74407 - RNA, 19 nt, Artificial Sequence
  Description of Artificial Sequence: Synthetic oligonucleotide
ucuaagucgcggccuuugu

SEQ ID NO: 74408 - RNA, 19 nt, Artificial Sequence
  Description of Artificial Sequence: Synthetic oligonucleotide
gaugcuaaugguggcuaac

SEQ ID NO: 74409 - RNA, 19 nt, Artificial Sequence
  Description of Artificial Sequence: Synthetic oligonucleotide
accugugaccuguagcccu

SEQ ID NO: 74410 - RNA, 19 nt, Artificial Sequence
  Description of Artificial Sequence: Synthetic oligonucleotide
auuccggagucuauuacca

SEQ ID NO: 74411 - RNA, 19 nt, Artificial Sequence
  Description of Artificial Sequence: Synthetic oligonucleotide
gcauccguaagguaggaga

SEQ ID NO: 74412 - RNA, 19 nt, Artificial Sequence
  Description of Artificial Sequence: Synthetic oligonucleotide
auuguaccuaacauccaca

SEQ ID NO: 74413 - RNA, 19 nt, Artificial Sequence
  Description of Artificial Sequence: Synthetic oligonucleotide
agccaagcuugauggauca

SEQ ID NO: 74414 - RNA, 19 nt, Artificial Sequence
  Description of Artificial Sequence: Synthetic oligonucleotide
auaacccaaguaacauuuc

SEQ ID NO: 74415 - RNA, 19 nt, Artificial Sequence
  Description of Artificial Sequence: Synthetic oligonucleotide
guggcgacauaaauugacc

SEQ ID NO: 74416 - RNA, 19 nt, Artificial Sequence
  Description of Artificial Sequence: Synthetic oligonucleotide
gcaacuuguguacugcaac

SEQ ID NO: 74417 - RNA, 19 nt, Artificial Sequence
  Description of Artificial Sequence: Synthetic oligonucleotide
uuguggcgacauaaauuga

SEQ ID NO: 74418 - RNA, 19 nt, Artificial Sequence
  Description of Artificial Sequence: Synthetic oligonucleotide
ugucugcugcuaaaccggu

SEQ ID NO: 74419 - RNA, 19 nt, Artificial Sequence
  Description of Artificial Sequence: Synthetic oligonucleotide
cagggaaaccuuccugaag

SEQ ID NO: 74420 - RNA, 19 nt, Artificial Sequence
  Description of Artificial Sequence: Synthetic oligonucleotide
uguagcccuuuuacucuca

SEQ ID NO: 74421 - RNA, 19 nt, Artificial Sequence
  Description of Artificial Sequence: Synthetic oligonucleotide
aguacuacuugcacaacuu

SEQ ID NO: 74422 - RNA, 19 nt, Artificial Sequence
  Description of Artificial Sequence: Synthetic oligonucleotide
aaguuacuuauggcccaag

SEQ ID NO: 74423 - RNA, 19 nt, Artificial Sequence
  Description of Artificial Sequence: Synthetic oligonucleotide
guaagguaggagagggccc

SEQ ID NO: 74424 - RNA, 19 nt, Artificial Sequence
  Description of Artificial Sequence: Synthetic oligonucleotide
caucggucuuuauucagca

SEQ ID NO: 74425 - RNA, 19 nt, Artificial Sequence
  Description of Artificial Sequence: Synthetic oligonucleotide
gacuuauauggguaucacu

SEQ ID NO: 74426 - RNA, 19 nt, Artificial Sequence
  Description of Artificial Sequence: Synthetic oligonucleotide
acuccaagacuuaucacau

SEQ ID NO: 74427 - RNA, 19 nt, Artificial Sequence
  Description of Artificial Sequence: Synthetic oligonucleotide
uggcuaaccugguauguuu

SEQ ID NO: 74428 - RNA, 19 nt, Artificial Sequence
  Description of Artificial Sequence: Synthetic oligonucleotide
cuugacuuauauggguauc

SEQ ID NO: 74429 - RNA, 19 nt, Artificial Sequence
  Description of Artificial Sequence: Synthetic oligonucleotide
gacuuaucacauaaucucu

SEQ ID NO: 74430 - RNA, 19 nt, Artificial Sequence
  Description of Artificial Sequence: Synthetic oligonucleotide
agcccuagauuugaaagau

SEQ ID NO: 74431 - RNA, 19 nt, Artificial Sequence
  Description of Artificial Sequence: Synthetic oligonucleotide
agacuaggagucugcuuca

SEQ ID NO: 74432 - RNA, 19 nt, Artificial Sequence
  Description of Artificial Sequence: Synthetic oligonucleotide
cucucccgauuuaaugcag

SEQ ID NO: 74433 - RNA, 19 nt, Artificial Sequence
  Description of Artificial Sequence: Synthetic oligonucleotide
gguacauuccuucucuuua

SEQ ID NO: 74434 - RNA, 19 nt, Artificial Sequence
  Description of Artificial Sequence: Synthetic oligonucleotide
gguggaauaacauuuuguu

SEQ ID NO: 74435 - RNA, 19 nt, Artificial Sequence
  Description of Artificial Sequence: Synthetic oligonucleotide
agagguuuuacaacuccaa

SEQ ID NO: 74436 - RNA, 19 nt, Artificial Sequence
  Description of Artificial Sequence: Synthetic oligonucleotide
cuucaucggucuuuauuca

SEQ ID NO: 74437 - RNA, 19 nt, Artificial Sequence
  Description of Artificial Sequence: Synthetic oligonucleotide
acagccuagccuguagucu

SEQ ID NO: 74438 - RNA, 19 nt, Artificial Sequence
  Description of Artificial Sequence: Synthetic oligonucleotide
cagcaguacauaugcacca

SEQ ID NO: 74439 - RNA, 19 nt, Artificial Sequence
  Description of Artificial Sequence: Synthetic oligonucleotide
uggcucaaaauagauuguu

SEQ ID NO: 74440 - RNA, 19 nt, Artificial Sequence
  Description of Artificial Sequence: Synthetic oligonucleotide
uagaugcuaaugguggcua

SEQ ID NO: 74441 - RNA, 19 nt, Artificial Sequence
  Description of Artificial Sequence: Synthetic oligonucleotide
acguacuagguaaaguaaa

SEQ ID NO: 74442 - RNA, 19 nt, Artificial Sequence
  Description of Artificial Sequence: Synthetic oligonucleotide
aaccacacucucguacaca

SEQ ID NO: 74443 - RNA, 19 nt, Artificial Sequence
  Description of Artificial Sequence: Synthetic oligonucleotide
acuuaucacauaaucucua

SEQ ID NO: 74444 - RNA, 19 nt, Artificial Sequence
  Description of Artificial Sequence: Synthetic oligonucleotide
gcugccuacaucuaagaua

SEQ ID NO: 74445 - RNA, 19 nt, Artificial Sequence
  Description of Artificial Sequence: Synthetic oligonucleotide
ccuagauaagcauucaugu

SEQ ID NO: 74446 - RNA, 19 nt, Artificial Sequence
  Description of Artificial Sequence: Synthetic oligonucleotide
ggauaagauaggccacuug

SEQ ID NO: 74447 - RNA, 19 nt, Artificial Sequence
  Description of Artificial Sequence: Synthetic oligonucleotide
guuguucaugcaacauuug

SEQ ID NO: 74448 - RNA, 19 nt, Artificial Sequence
  Description of Artificial Sequence: Synthetic oligonucleotide
gguauuauuccaauuuaua

SEQ ID NO: 74449 - RNA, 19 nt, Artificial Sequence
  Description of Artificial Sequence: Synthetic oligonucleotide
cuguacguacuagguaaag

SEQ ID NO: 74450 - RNA, 19 nt, Artificial Sequence
  Description of Artificial Sequence: Synthetic oligonucleotide
ucaugcgugaagagcccua

SEQ ID NO: 74451 - RNA, 19 nt, Artificial Sequence
  Description of Artificial Sequence: Synthetic oligonucleotide
acacugcccuuucaagaca

SEQ ID NO: 74452 - RNA, 19 nt, Artificial Sequence
  Description of Artificial Sequence: Synthetic oligonucleotide
accucaugcaaagaucuuu

SEQ ID NO: 74453 - RNA, 19 nt, Artificial Sequence
  Description of Artificial Sequence: Synthetic oligonucleotide
aaccauuacuugauuugua

SEQ ID NO: 74454 - RNA, 19 nt, Artificial Sequence
  Description of Artificial Sequence: Synthetic oligonucleotide
guuuuacaacuccaagacu

SEQ ID NO: 74455 - RNA, 19 nt, Artificial Sequence
  Description of Artificial Sequence: Synthetic oligonucleotide
cacucaucuggugcaaaug

SEQ ID NO: 74456 - RNA, 19 nt, Artificial Sequence
  Description of Artificial Sequence: Synthetic oligonucleotide
cuguagcccuuuuacucuc

SEQ ID NO: 74457 - RNA, 19 nt, Artificial Sequence
  Description of Artificial Sequence: Synthetic oligonucleotide
agaugcuaaugguggcuaa

SEQ ID NO: 74458 - RNA, 19 nt, Artificial Sequence
  Description of Artificial Sequence: Synthetic oligonucleotide
cagcacgguauucuaucac

SEQ ID NO: 74459 - RNA, 19 nt, Artificial Sequence
  Description of Artificial Sequence: Synthetic oligonucleotide
agucucuaagucgcggccu

SEQ ID NO: 74460 - RNA, 19 nt, Artificial Sequence
  Description of Artificial Sequence: Synthetic oligonucleotide
uuaguccaucaaguacuac

SEQ ID NO: 74461 - RNA, 19 nt, Artificial Sequence
  Description of Artificial Sequence: Synthetic oligonucleotide
gacggacuuaugaaugaaa

SEQ ID NO: 74462 - RNA, 19 nt, Artificial Sequence
  Description of Artificial Sequence: Synthetic oligonucleotide
cuugauggaucaaaccuuu

SEQ ID NO: 74463 - RNA, 19 nt, Artificial Sequence
  Description of Artificial Sequence: Synthetic oligonucleotide
cuuccccucaauugauaga

SEQ ID NO: 74464 - RNA, 19 nt, Artificial Sequence
  Description of Artificial Sequence: Synthetic oligonucleotide
ccuucuuaggcgcucaaga

SEQ ID NO: 74465 - RNA, 19 nt, Artificial Sequence
  Description of Artificial Sequence: Synthetic oligonucleotide
aggaauagacggacuuaug

SEQ ID NO: 74466 - RNA, 19 nt, Artificial Sequence
  Description of Artificial Sequence: Synthetic oligonucleotide
gaaccccucuguugguaca

SEQ ID NO: 74467 - RNA, 19 nt, Artificial Sequence
  Description of Artificial Sequence: Synthetic oligonucleotide
cucaauugauagaguaagu

SEQ ID NO: 74468 - RNA, 19 nt, Artificial Sequence
  Description of Artificial Sequence: Synthetic oligonucleotide
ccauuacuugauuuguaca

SEQ ID NO: 74469 - RNA, 19 nt, Artificial Sequence
  Description of Artificial Sequence: Synthetic oligonucleotide
cugaguagaggaaccaaau

SEQ ID NO: 74470 - RNA, 19 nt, Artificial Sequence
  Description of Artificial Sequence: Synthetic oligonucleotide
agcauccguaagguaggag

SEQ ID NO: 74471 - RNA, 19 nt, Artificial Sequence
  Description of Artificial Sequence: Synthetic oligonucleotide
auacagcacuacaaccaca

SEQ ID NO: 74472 - RNA, 19 nt, Artificial Sequence
  Description of Artificial Sequence: Synthetic oligonucleotide
ggaacuauuccggagucua

SEQ ID NO: 74473 - RNA, 19 nt, Artificial Sequence
  Description of Artificial Sequence: Synthetic oligonucleotide
cuuauauggguaucacuuu

SEQ ID NO: 74474 - RNA, 19 nt, Artificial Sequence
  Description of Artificial Sequence: Synthetic oligonucleotide
cucaaccuagauaagcauu

SEQ ID NO: 74475 - RNA, 19 nt, Artificial Sequence
  Description of Artificial Sequence: Synthetic oligonucleotide
ggcucaaaauagauuguuc

SEQ ID NO: 74476 - RNA, 19 nt, Artificial Sequence
  Description of Artificial Sequence: Synthetic oligonucleotide
gccuacaucuaagauaaaa

SEQ ID NO: 74477 - RNA, 19 nt, Artificial Sequence
  Description of Artificial Sequence: Synthetic oligonucleotide
ggcgcucaagaccugugac

SEQ ID NO: 74478 - RNA, 19 nt, Artificial Sequence
  Description of Artificial Sequence: Synthetic oligonucleotide
ggaaccccucuguugguac

SEQ ID NO: 74479 - RNA, 19 nt, Artificial Sequence
  Description of Artificial Sequence: Synthetic oligonucleotide
cccacuaauuguuaaguua

SEQ ID NO: 74480 - RNA, 19 nt, Artificial Sequence
  Description of Artificial Sequence: Synthetic oligonucleotide
agccuagccuguagucuac

SEQ ID NO: 74481 - RNA, 19 nt, Artificial Sequence
  Description of Artificial Sequence: Synthetic oligonucleotide
cuaccacggagccagacau

SEQ ID NO: 74482 - RNA, 19 nt, Artificial Sequence
  Description of Artificial Sequence: Synthetic oligonucleotide
caaguacuacuugcacaac

SEQ ID NO: 74483 - RNA, 19 nt, Artificial Sequence
  Description of Artificial Sequence: Synthetic oligonucleotide
gccacucauucucacucgc

SEQ ID NO: 74484 - RNA, 19 nt, Artificial Sequence
  Description of Artificial Sequence: Synthetic oligonucleotide
cuuaggcgcucaagaccug

SEQ ID NO: 74485 - RNA, 19 nt, Artificial Sequence
  Description of Artificial Sequence: Synthetic oligonucleotide
uaaacagauuaggcauauu

SEQ ID NO: 74486 - RNA, 19 nt, Artificial Sequence
  Description of Artificial Sequence: Synthetic oligonucleotide
augcgugaagagcccuaga

SEQ ID NO: 74487 - RNA, 19 nt, Artificial Sequence
  Description of Artificial Sequence: Synthetic oligonucleotide
uaucuucuugugguacauu

SEQ ID NO: 74488 - RNA, 19 nt, Artificial Sequence
  Description of Artificial Sequence: Synthetic oligonucleotide
cuaaaccggucuuuguuuu

SEQ ID NO: 74489 - RNA, 19 nt, Artificial Sequence
  Description of Artificial Sequence: Synthetic oligonucleotide
cuaguucaacaaagaguua

SEQ ID NO: 74490 - RNA, 19 nt, Artificial Sequence
  Description of Artificial Sequence: Synthetic oligonucleotide
uuccuacaaugagccaccu

SEQ ID NO: 74491 - RNA, 19 nt, Artificial Sequence
  Description of Artificial Sequence: Synthetic oligonucleotide
ggagucuauuaccaucugu

SEQ ID NO: 74492 - RNA, 19 nt, Artificial Sequence
  Description of Artificial Sequence: Synthetic oligonucleotide
guuaucacuugaagcauuu

SEQ ID NO: 74493 - RNA, 19 nt, Artificial Sequence
  Description of Artificial Sequence: Synthetic oligonucleotide
ccgauuuaaugcagcagca

SEQ ID NO: 74494 - RNA, 19 nt, Artificial Sequence
  Description of Artificial Sequence: Synthetic oligonucleotide
gcgacauaaauugaccaua

SEQ ID NO: 74495 - RNA, 19 nt, Artificial Sequence
  Description of Artificial Sequence: Synthetic oligonucleotide
uggaaccccucuguuggua

SEQ ID NO: 74496 - RNA, 19 nt, Artificial Sequence
  Description of Artificial Sequence: Synthetic oligonucleotide
agucaucaauugguggauu

SEQ ID NO: 74497 - RNA, 19 nt, Artificial Sequence
  Description of Artificial Sequence: Synthetic oligonucleotide
cuacaaugagccaccuuau

SEQ ID NO: 74498 - RNA, 19 nt, Artificial Sequence
  Description of Artificial Sequence: Synthetic oligonucleotide
gaguaagucaaugcuccuu

SEQ ID NO: 74499 - RNA, 19 nt, Artificial Sequence
  Description of Artificial Sequence: Synthetic oligonucleotide
gaagagcccuagauuugaa

SEQ ID NO: 74500 - RNA, 19 nt, Artificial Sequence
  Description of Artificial Sequence: Synthetic oligonucleotide
ggcgacauaaauugaccau

SEQ ID NO: 74501 - RNA, 19 nt, Artificial Sequence
  Description of Artificial Sequence: Synthetic oligonucleotide
ccguugguuguccaauuuc

SEQ ID NO: 74502 - RNA, 19 nt, Artificial Sequence
  Description of Artificial Sequence: Synthetic oligonucleotide
gggacuccgccccaaccac

SEQ ID NO: 74503 - RNA, 19 nt, Artificial Sequence
  Description of Artificial Sequence: Synthetic oligonucleotide
gagauuggcuaugguuucu

SEQ ID NO: 74504 - RNA, 19 nt, Artificial Sequence
  Description of Artificial Sequence: Synthetic oligonucleotide
gcuaaaccggucuuuguuu

SEQ ID NO: 74505 - RNA, 19 nt, Artificial Sequence
  Description of Artificial Sequence: Synthetic oligonucleotide
cccucaauugauagaguaa

SEQ ID NO: 74506 - RNA, 19 nt, Artificial Sequence
  Description of Artificial Sequence: Synthetic oligonucleotide
ccccucuguugguacauug

SEQ ID NO: 74507 - RNA, 19 nt, Artificial Sequence
  Description of Artificial Sequence: Synthetic oligonucleotide
gagguauuuugcacucuau

SEQ ID NO: 74508 - RNA, 19 nt, Artificial Sequence
  Description of Artificial Sequence: Synthetic oligonucleotide
ugccuacaucuaagauaaa

SEQ ID NO: 74509 - RNA, 19 nt, Artificial Sequence
  Description of Artificial Sequence: Synthetic oligonucleotide
agccuguagucuacuuggu

SEQ ID NO: 74510 - RNA, 19 nt, Artificial Sequence
  Description of Artificial Sequence: Synthetic oligonucleotide
ccguaagguaggagagggc

SEQ ID NO: 74511 - RNA, 19 nt, Artificial Sequence
  Description of Artificial Sequence: Synthetic oligonucleotide
cgacauaaauugaccauaa

SEQ ID NO: 74512 - RNA, 19 nt, Artificial Sequence
  Description of Artificial Sequence: Synthetic oligonucleotide
gagagguauuuugcacucu

SEQ ID NO: 74513 - RNA, 19 nt, Artificial Sequence
  Description of Artificial Sequence: Synthetic oligonucleotide
gcuaaccugguauguuucu

SEQ ID NO: 74514 - RNA, 19 nt, Artificial Sequence
  Description of Artificial Sequence: Synthetic oligonucleotide
gcacuacaaccacacucuc

SEQ ID NO: 74515 - RNA, 19 nt, Artificial Sequence
  Description of Artificial Sequence: Synthetic oligonucleotide
caagacuaggagucugcuu

SEQ ID NO: 74516 - RNA, 19 nt, Artificial Sequence
  Description of Artificial Sequence: Synthetic oligonucleotide
gaacuauuccggagucuau

SEQ ID NO: 74517 - RNA, 19 nt, Artificial Sequence
  Description of Artificial Sequence: Synthetic oligonucleotide
ccggagucuauuaccaucu

SEQ ID NO: 74518 - RNA, 19 nt, Artificial Sequence
  Description of Artificial Sequence: Synthetic oligonucleotide
cacucgcacccacucgcca

SEQ ID NO: 74519 - RNA, 19 nt, Artificial Sequence
  Description of Artificial Sequence: Synthetic oligonucleotide
gcccuagauuugaaagaug

SEQ ID NO: 74520 - RNA, 19 nt, Artificial Sequence
  Description of Artificial Sequence: Synthetic oligonucleotide
gguacaagauuggcaucaa

SEQ ID NO: 74521 - RNA, 19 nt, Artificial Sequence
  Description of Artificial Sequence: Synthetic oligonucleotide
cuaagucgcggccuuuguu

SEQ ID NO: 74522 - RNA, 19 nt, Artificial Sequence
  Description of Artificial Sequence: Synthetic oligonucleotide
gcuugcaugcguccacaua

SEQ ID NO: 74523 - RNA, 19 nt, Artificial Sequence
  Description of Artificial Sequence: Synthetic oligonucleotide
ggacuccgccccaaccacc

SEQ ID NO: 74524 - RNA, 19 nt, Artificial Sequence
  Description of Artificial Sequence: Synthetic oligonucleotide
cuaaccugguauguuucuu

SEQ ID NO: 74525 - RNA, 19 nt, Artificial Sequence
  Description of Artificial Sequence: Synthetic oligonucleotide
gguggcuaaccugguaugu

SEQ ID NO: 74526 - RNA, 19 nt, Artificial Sequence
  Description of Artificial Sequence: Synthetic oligonucleotide
acggagccagacauucauu

SEQ ID NO: 74527 - RNA, 19 nt, Artificial Sequence
  Description of Artificial Sequence: Synthetic oligonucleotide
cguacuagguaaaguaaau

SEQ ID NO: 74528 - RNA, 19 nt, Artificial Sequence
  Description of Artificial Sequence: Synthetic oligonucleotide
ccgggacuccgccccaacc

SEQ ID NO: 74529 - RNA, 19 nt, Artificial Sequence
  Description of Artificial Sequence: Synthetic oligonucleotide
gcgugaagagcccuagauu

SEQ ID NO: 74530 - RNA, 19 nt, Artificial Sequence
  Description of Artificial Sequence: Synthetic oligonucleotide
guggcuaaccugguauguu

SEQ ID NO: 74531 - RNA, 19 nt, Artificial Sequence
  Description of Artificial Sequence: Synthetic oligonucleotide
cgcaccgaagcucccagga

SEQ ID NO: 74532 - RNA, 19 nt, Artificial Sequence
  Description of Artificial Sequence: Synthetic oligonucleotide
ccauaacccaaguaacauu

SEQ ID NO: 74533 - RNA, 19 nt, Artificial Sequence
  Description of Artificial Sequence: Synthetic oligonucleotide
cggagucuauuaccaucug

SEQ ID NO: 74534 - RNA, 19 nt, Artificial Sequence
  Description of Artificial Sequence: Synthetic oligonucleotide
gugcugcauuguaccuaac

SEQ ID NO: 74535 - RNA, 19 nt, Artificial Sequence
  Description of Artificial Sequence: Synthetic oligonucleotide
cgcucaagaccugugaccu

SEQ ID NO: 74536 - RNA, 19 nt, Artificial Sequence
  Description of Artificial Sequence: Synthetic oligonucleotide
ggacgccggccgccgcccg

SEQ ID NO: 74537 - RNA, 19 nt, Artificial Sequence
  Description of Artificial Sequence: Synthetic oligonucleotide
gccguugguuguccaauuu

SEQ ID NO: 74538 - RNA, 19 nt, Artificial Sequence
  Description of Artificial Sequence: Synthetic oligonucleotide
gggaagugugaaagagcau

SEQ ID NO: 74539 - RNA, 19 nt, Artificial Sequence
  Description of Artificial Sequence: Synthetic oligonucleotide
ccgcgccgcaccgaagcuc

SEQ ID NO: 74540 - RNA, 19 nt, Artificial Sequence
  Description of Artificial Sequence: Synthetic oligonucleotide
gcgccgcaccgaagcuccc

SEQ ID NO: 74541 - RNA, 19 nt, Artificial Sequence
  Description of Artificial Sequence: Synthetic oligonucleotide
aauaauguguagcaggagu

SEQ ID NO: 74542 - RNA, 19 nt, Artificial Sequence
  Description of Artificial Sequence: Synthetic oligonucleotide
acagcaugaacccaggagg

SEQ ID NO: 74543 - RNA, 19 nt, Artificial Sequence
  Description of Artificial Sequence: Synthetic oligonucleotide
uuaguuggaacaaaguuuc

SEQ ID NO: 74544 - RNA, 19 nt, Artificial Sequence
  Description of Artificial Sequence: Synthetic oligonucleotide
aaagucacggucuugggga

SEQ ID NO: 74545 - RNA, 19 nt, Artificial Sequence
  Description of Artificial Sequence: Synthetic oligonucleotide
aauggaguaacuccaguga

SEQ ID NO: 74546 - RNA, 19 nt, Artificial Sequence
  Description of Artificial Sequence: Synthetic oligonucleotide
ucaaggauggucuaacuca

SEQ ID NO: 74547 - RNA, 19 nt, Artificial Sequence
  Description of Artificial Sequence: Synthetic oligonucleotide
cuugaccuuagguauaugg

SEQ ID NO: 74548 - RNA, 19 nt, Artificial Sequence
  Description of Artificial Sequence: Synthetic oligonucleotide
ugaacaauaccuuggaguc

SEQ ID NO: 74549 - RNA, 19 nt, Artificial Sequence
  Description of Artificial Sequence: Synthetic oligonucleotide
uaguuaauggaguaacucc

SEQ ID NO: 74550 - RNA, 19 nt, Artificial Sequence
  Description of Artificial Sequence: Synthetic oligonucleotide
uguuccauuaacaggcgag

SEQ ID NO: 74551 - RNA, 19 nt, Artificial Sequence
  Description of Artificial Sequence: Synthetic oligonucleotide
gguguuaggauucaugagg

SEQ ID NO: 74552 - RNA, 19 nt, Artificial Sequence
  Description of Artificial Sequence: Synthetic oligonucleotide
cuaugauucucaucuaggg

SEQ ID NO: 74553 - RNA, 19 nt, Artificial Sequence
  Description of Artificial Sequence: Synthetic oligonucleotide
aaaaccgggccucugggag

SEQ ID NO: 74554 - RNA, 19 nt, Artificial Sequence
  Description of Artificial Sequence: Synthetic oligonucleotide
ugugguaauagugaggaga

SEQ ID NO: 74555 - RNA, 19 nt, Artificial Sequence
  Description of Artificial Sequence: Synthetic oligonucleotide
uuuaucucaauagagcagu

SEQ ID NO: 74556 - RNA, 19 nt, Artificial Sequence
  Description of Artificial Sequence: Synthetic oligonucleotide
ugaccuuagguauauggcc

SEQ ID NO: 74557 - RNA, 19 nt, Artificial Sequence
  Description of Artificial Sequence: Synthetic oligonucleotide
uaccuuauccacagcaggg

SEQ ID NO: 74558 - RNA, 19 nt, Artificial Sequence
  Description of Artificial Sequence: Synthetic oligonucleotide
ucauaaguuccuccagugg

SEQ ID NO: 74559 - RNA, 19 nt, Artificial Sequence
  Description of Artificial Sequence: Synthetic oligonucleotide
agccaggguaccuucaugc

SEQ ID NO: 74560 - RNA, 19 nt, Artificial Sequence
  Description of Artificial Sequence: Synthetic oligonucleotide
uugaccuuagguauauggc

SEQ ID NO: 74561 - RNA, 19 nt, Artificial Sequence
  Description of Artificial Sequence: Synthetic oligonucleotide
gaugggaccccauaccagg

SEQ ID NO: 74562 - RNA, 19 nt, Artificial Sequence
  Description of Artificial Sequence: Synthetic oligonucleotide
aucaaggauggucuaacuc

SEQ ID NO: 74563 - RNA, 19 nt, Artificial Sequence
  Description of Artificial Sequence: Synthetic oligonucleotide
uuaggugucgcuuacuguc

SEQ ID NO: 74564 - RNA, 19 nt, Artificial Sequence
  Description of Artificial Sequence: Synthetic oligonucleotide
gauucaugaggguaacaag

SEQ ID NO: 74565 - RNA, 19 nt, Artificial Sequence
  Description of Artificial Sequence: Synthetic oligonucleotide
cugguuagagguuaccagg

SEQ ID NO: 74566 - RNA, 19 nt, Artificial Sequence
  Description of Artificial Sequence: Synthetic oligonucleotide
auaccuuggagucagaaua

SEQ ID NO: 74567 - RNA, 19 nt, Artificial Sequence
  Description of Artificial Sequence: Synthetic oligonucleotide
agauagaggcuguagagga

SEQ ID NO: 74568 - RNA, 19 nt, Artificial Sequence
  Description of Artificial Sequence: Synthetic oligonucleotide
aacaaguuggugaaggaga

SEQ ID NO: 74569 - RNA, 19 nt, Artificial Sequence
  Description of Artificial Sequence: Synthetic oligonucleotide
accauaggcagcccuauuc

SEQ ID NO: 74570 - RNA, 19 nt, Artificial Sequence
  Description of Artificial Sequence: Synthetic oligonucleotide
uguccgauucccauggcgc

SEQ ID NO: 74571 - RNA, 19 nt, Artificial Sequence
  Description of Artificial Sequence: Synthetic oligonucleotide
ucguguccgauucccaugg

SEQ ID NO: 74572 - RNA, 19 nt, Artificial Sequence
  Description of Artificial Sequence: Synthetic oligonucleotide
aggguguuaggauucauga

SEQ ID NO: 74573 - RNA, 19 nt, Artificial Sequence
  Description of Artificial Sequence: Synthetic oligonucleotide
uaacaaguuggugaaggag

SEQ ID NO: 74574 - RNA, 19 nt, Artificial Sequence
  Description of Artificial Sequence: Synthetic oligonucleotide
aguguagcaugaccugacc

SEQ ID NO: 74575 - RNA, 19 nt, Artificial Sequence
  Description of Artificial Sequence: Synthetic oligonucleotide
aaaaccgcugccaaauucu

SEQ ID NO: 74576 - RNA, 19 nt, Artificial Sequence
  Description of Artificial Sequence: Synthetic oligonucleotide
aaaccgggccucugggagc

SEQ ID NO: 74577 - RNA, 19 nt, Artificial Sequence
  Description of Artificial Sequence: Synthetic oligonucleotide
acaguaacacagaaauuac

SEQ ID NO: 74578 - RNA, 19 nt, Artificial Sequence
  Description of Artificial Sequence: Synthetic oligonucleotide
auuaacaggcgagggaagg

SEQ ID NO: 74579 - RNA, 19 nt, Artificial Sequence
  Description of Artificial Sequence: Synthetic oligonucleotide
uguggacaagcaccaaaag

SEQ ID NO: 74580 - RNA, 19 nt, Artificial Sequence
  Description of Artificial Sequence: Synthetic oligonucleotide
accgcugccaaauucuuug

SEQ ID NO: 74581 - RNA, 19 nt, Artificial Sequence
  Description of Artificial Sequence: Synthetic oligonucleotide
aggauggucuaacucaaca

SEQ ID NO: 74582 - RNA, 19 nt, Artificial Sequence
  Description of Artificial Sequence: Synthetic oligonucleotide
ugguuuccaagcgugggcg

SEQ ID NO: 74583 - RNA, 19 nt, Artificial Sequence
  Description of Artificial Sequence: Synthetic oligonucleotide
uccuaaggguuuuauuucu

SEQ ID NO: 74584 - RNA, 19 nt, Artificial Sequence
  Description of Artificial Sequence: Synthetic oligonucleotide
ugguguggcacaauacaga

SEQ ID NO: 74585 - RNA, 19 nt, Artificial Sequence
  Description of Artificial Sequence: Synthetic oligonucleotide
uggaaacuauacuucaaua

SEQ ID NO: 74586 - RNA, 19 nt, Artificial Sequence
  Description of Artificial Sequence: Synthetic oligonucleotide
aggucugaacaauaccuug

SEQ ID NO: 74587 - RNA, 19 nt, Artificial Sequence
  Description of Artificial Sequence: Synthetic oligonucleotide
ggugcgacgaagcugcagg

SEQ ID NO: 74588 - RNA, 19 nt, Artificial Sequence
  Description of Artificial Sequence: Synthetic oligonucleotide
uuccauuaacaggcgaggg

SEQ ID NO: 74589 - RNA, 19 nt, Artificial Sequence
  Description of Artificial Sequence: Synthetic oligonucleotide
agcgcauacacagagggca

SEQ ID NO: 74590 - RNA, 19 nt, Artificial Sequence
  Description of Artificial Sequence: Synthetic oligonucleotide
acuaccacuagcacuguag

SEQ ID NO: 74591 - RNA, 19 nt, Artificial Sequence
  Description of Artificial Sequence: Synthetic oligonucleotide
ugcgaguggacuuggcuug

SEQ ID NO: 74592 - RNA, 19 nt, Artificial Sequence
  Description of Artificial Sequence: Synthetic oligonucleotide
aguggacuuggcuuggcug

SEQ ID NO: 74593 - RNA, 19 nt, Artificial Sequence
  Description of Artificial Sequence: Synthetic oligonucleotide
guaguuaauggaguaacuc

SEQ ID NO: 74594 - RNA, 19 nt, Artificial Sequence
  Description of Artificial Sequence: Synthetic oligonucleotide
uacuucaauaaagccacga

SEQ ID NO: 74595 - RNA, 19 nt, Artificial Sequence
  Description of Artificial Sequence: Synthetic oligonucleotide
uuaguguagcaugaccuga

SEQ ID NO: 74596 - RNA, 19 nt, Artificial Sequence
  Description of Artificial Sequence: Synthetic oligonucleotide
gugauccucaauaugccag

SEQ ID NO: 74597 - RNA, 19 nt, Artificial Sequence
  Description of Artificial Sequence: Synthetic oligonucleotide
cuaccacuagcacuguagc

SEQ ID NO: 74598 - RNA, 19 nt, Artificial Sequence
  Description of Artificial Sequence: Synthetic oligonucleotide
cuuuauagcauggaaacua

SEQ ID NO: 74599 - RNA, 19 nt, Artificial Sequence
  Description of Artificial Sequence: Synthetic oligonucleotide
agcccucggacguggaacc

SEQ ID NO: 74600 - RNA, 19 nt, Artificial Sequence
  Description of Artificial Sequence: Synthetic oligonucleotide
gguaaaaccgggccucugg

SEQ ID NO: 74601 - RNA, 19 nt, Artificial Sequence
  Description of Artificial Sequence: Synthetic oligonucleotide
agugauccucaauaugcca

SEQ ID NO: 74602 - RNA, 19 nt, Artificial Sequence
  Description of Artificial Sequence: Synthetic oligonucleotide
uaguguagcaugaccugac

SEQ ID NO: 74603 - RNA, 19 nt, Artificial Sequence
  Description of Artificial Sequence: Synthetic oligonucleotide
acagccaugugaaguuucc

SEQ ID NO: 74604 - RNA, 19 nt, Artificial Sequence
  Description of Artificial Sequence: Synthetic oligonucleotide
aacuaacaguccccgcaug

SEQ ID NO: 74605 - RNA, 19 nt, Artificial Sequence
  Description of Artificial Sequence: Synthetic oligonucleotide
ggagucagaauauaaaagu

SEQ ID NO: 74606 - RNA, 19 nt, Artificial Sequence
  Description of Artificial Sequence: Synthetic oligonucleotide
auuguugccgagguggcug

SEQ ID NO: 74607 - RNA, 19 nt, Artificial Sequence
  Description of Artificial Sequence: Synthetic oligonucleotide
ucgcuuacugucacugaca

SEQ ID NO: 74608 - RNA, 19 nt, Artificial Sequence
  Description of Artificial Sequence: Synthetic oligonucleotide
gcuaugauucucaucuagg

SEQ ID NO: 74609 - RNA, 19 nt, Artificial Sequence
  Description of Artificial Sequence: Synthetic oligonucleotide
agcccuauucaaccccaac

SEQ ID NO: 74610 - RNA, 19 nt, Artificial Sequence
  Description of Artificial Sequence: Synthetic oligonucleotide
uauauggccagcgcccucu

SEQ ID NO: 74611 - RNA, 19 nt, Artificial Sequence
  Description of Artificial Sequence: Synthetic oligonucleotide
gucgcuuacugucacugac

SEQ ID NO: 74612 - RNA, 19 nt, Artificial Sequence
  Description of Artificial Sequence: Synthetic oligonucleotide
uuuucaggacuggucacac

SEQ ID NO: 74613 - RNA, 19 nt, Artificial Sequence
  Description of Artificial Sequence: Synthetic oligonucleotide
uaggugucgcuuacuguca

SEQ ID NO: 74614 - RNA, 19 nt, Artificial Sequence
  Description of Artificial Sequence: Synthetic oligonucleotide
uaaaaccgggccucuggga

SEQ ID NO: 74615 - RNA, 19 nt, Artificial Sequence
  Description of Artificial Sequence: Synthetic oligonucleotide
gcuucagguaccucaaccc

SEQ ID NO: 74616 - RNA, 19 nt, Artificial Sequence
  Description of Artificial Sequence: Synthetic oligonucleotide
caaccaagggacgugcagc

SEQ ID NO: 74617 - RNA, 19 nt, Artificial Sequence
  Description of Artificial Sequence: Synthetic oligonucleotide
gguuaggugucgcuuacug

SEQ ID NO: 74618 - RNA, 19 nt, Artificial Sequence
  Description of Artificial Sequence: Synthetic oligonucleotide
uagagagaagcugguaagu

SEQ ID NO: 74619 - RNA, 19 nt, Artificial Sequence
  Description of Artificial Sequence: Synthetic oligonucleotide
agcuucgcacccucuuugg

SEQ ID NO: 74620 - RNA, 19 nt, Artificial Sequence
  Description of Artificial Sequence: Synthetic oligonucleotide
gaggguguuaggauucaug

SEQ ID NO: 74621 - RNA, 19 nt, Artificial Sequence
  Description of Artificial Sequence: Synthetic oligonucleotide
acuuuauagcauggaaacu

SEQ ID NO: 74622 - RNA, 19 nt, Artificial Sequence
  Description of Artificial Sequence: Synthetic oligonucleotide
auuggcgcccgcaacuaac

SEQ ID NO: 74623 - RNA, 19 nt, Artificial Sequence
  Description of Artificial Sequence: Synthetic oligonucleotide
aggugucgcuuacugucac

SEQ ID NO: 74624 - RNA, 19 nt, Artificial Sequence
  Description of Artificial Sequence: Synthetic oligonucleotide
auaauguguagcaggaguu

SEQ ID NO: 74625 - RNA, 19 nt, Artificial Sequence
  Description of Artificial Sequence: Synthetic oligonucleotide
ucggacguggaaccggcac

SEQ ID NO: 74626 - RNA, 19 nt, Artificial Sequence
  Description of Artificial Sequence: Synthetic oligonucleotide
uucgcacccucuuuggcuc

SEQ ID NO: 74627 - RNA, 19 nt, Artificial Sequence
  Description of Artificial Sequence: Synthetic oligonucleotide
aggaugguuuccaagcgug

SEQ ID NO: 74628 - RNA, 19 nt, Artificial Sequence
  Description of Artificial Sequence: Synthetic oligonucleotide
gucugaacaauaccuugga

SEQ ID NO: 74629 - RNA, 19 nt, Artificial Sequence
  Description of Artificial Sequence: Synthetic oligonucleotide
ggggcacugucacacaccg

SEQ ID NO: 74630 - RNA, 19 nt, Artificial Sequence
  Description of Artificial Sequence: Synthetic oligonucleotide
uucgccgccuucucucuag

SEQ ID NO: 74631 - RNA, 19 nt, Artificial Sequence
  Description of Artificial Sequence: Synthetic oligonucleotide
ggcuucagguaccucaacc

SEQ ID NO: 74632 - RNA, 19 nt, Artificial Sequence
  Description of Artificial Sequence: Synthetic oligonucleotide
aggggcuacauuggcgccc

SEQ ID NO: 74633 - RNA, 19 nt, Artificial Sequence
  Description of Artificial Sequence: Synthetic oligonucleotide
acguggaaccggcacacca

SEQ ID NO: 74634 - RNA, 19 nt, Artificial Sequence
  Description of Artificial Sequence: Synthetic oligonucleotide
ggaaccggcacaccauggg

SEQ ID NO: 74635 - RNA, 19 nt, Artificial Sequence
  Description of Artificial Sequence: Synthetic oligonucleotide
uagccguuggcggaguuca

SEQ ID NO: 74636 - RNA, 19 nt, Artificial Sequence
  Description of Artificial Sequence: Synthetic oligonucleotide
augcgaguggacuuggcuu

SEQ ID NO: 74637 - RNA, 19 nt, Artificial Sequence
  Description of Artificial Sequence: Synthetic oligonucleotide
uguaugugcccuggauuug

SEQ ID NO: 74638 - RNA, 19 nt, Artificial Sequence
  Description of Artificial Sequence: Synthetic oligonucleotide
cugaguuggugcgacgaag

SEQ ID NO: 74639 - RNA, 19 nt, Artificial Sequence
  Description of Artificial Sequence: Synthetic oligonucleotide
gcaaacucccaaaagggac

SEQ ID NO: 74640 - RNA, 19 nt, Artificial Sequence
  Description of Artificial Sequence: Synthetic oligonucleotide
ucuccaaccaagggacgug

SEQ ID NO: 74641 - RNA, 19 nt, Artificial Sequence
  Description of Artificial Sequence: Synthetic oligonucleotide
gugucgcuuacugucacug

SEQ ID NO: 74642 - RNA, 19 nt, Artificial Sequence
  Description of Artificial Sequence: Synthetic oligonucleotide
gaugcgaguggacuuggcu

SEQ ID NO: 74643 - RNA, 19 nt, Artificial Sequence
  Description of Artificial Sequence: Synthetic oligonucleotide
ugucgcuuacugucacuga

SEQ ID NO: 74644 - RNA, 19 nt, Artificial Sequence
  Description of Artificial Sequence: Synthetic oligonucleotide
gggaugagguaaaaccggg

SEQ ID NO: 74645 - RNA, 19 nt, Artificial Sequence
  Description of Artificial Sequence: Synthetic oligonucleotide
cucguguccgauucccaug

SEQ ID NO: 74646 - RNA, 19 nt, Artificial Sequence
  Description of Artificial Sequence: Synthetic oligonucleotide
uaucucaauagagcaguuu

SEQ ID NO: 74647 - RNA, 19 nt, Artificial Sequence
  Description of Artificial Sequence: Synthetic oligonucleotide
uccaaccaagggacgugca

SEQ ID NO: 74648 - RNA, 19 nt, Artificial Sequence
  Description of Artificial Sequence: Synthetic oligonucleotide
agccagcgugcguuuuacc

SEQ ID NO: 74649 - RNA, 19 nt, Artificial Sequence
  Description of Artificial Sequence: Synthetic oligonucleotide
ugggagguuaguguagcau

SEQ ID NO: 74650 - RNA, 19 nt, Artificial Sequence
  Description of Artificial Sequence: Synthetic oligonucleotide
uccaaccacuuguagcgua

SEQ ID NO: 74651 - RNA, 19 nt, Artificial Sequence
  Description of Artificial Sequence: Synthetic oligonucleotide
ugggguuaggugucgcuua

SEQ ID NO: 74652 - RNA, 19 nt, Artificial Sequence
  Description of Artificial Sequence: Synthetic oligonucleotide
gguuaguguagcaugaccu

SEQ ID NO: 74653 - RNA, 19 nt, Artificial Sequence
  Description of Artificial Sequence: Synthetic oligonucleotide
caccggcugcguuuggugc

SEQ ID NO: 74654 - RNA, 19 nt, Artificial Sequence
  Description of Artificial Sequence: Synthetic oligonucleotide
gagguaguuaauggaguaa

SEQ ID NO: 74655 - RNA, 19 nt, Artificial Sequence
  Description of Artificial Sequence: Synthetic oligonucleotide
uaugugcccuggauuuguc

SEQ ID NO: 74656 - RNA, 19 nt, Artificial Sequence
  Description of Artificial Sequence: Synthetic oligonucleotide
uaggggcuacauuggcgcc

SEQ ID NO: 74657 - RNA, 19 nt, Artificial Sequence
  Description of Artificial Sequence: Synthetic oligonucleotide
cagcaugaacccaggagga

SEQ ID NO: 74658 - RNA, 19 nt, Artificial Sequence
  Description of Artificial Sequence: Synthetic oligonucleotide
cuccaaccaagggacgugc

SEQ ID NO: 74659 - RNA, 19 nt, Artificial Sequence
  Description of Artificial Sequence: Synthetic oligonucleotide
uggcgcccgcaacuaacag

SEQ ID NO: 74660 - RNA, 19 nt, Artificial Sequence
  Description of Artificial Sequence: Synthetic oligonucleotide
caagcgugggcgccgugag

SEQ ID NO: 74661 - RNA, 19 nt, Artificial Sequence
  Description of Artificial Sequence: Synthetic oligonucleotide
cuacccgcccaccuccaag

SEQ ID NO: 74662 - RNA, 19 nt, Artificial Sequence
  Description of Artificial Sequence: Synthetic oligonucleotide
gcuaggggcuacauuggcg

SEQ ID NO: 74663 - RNA, 19 nt, Artificial Sequence
  Description of Artificial Sequence: Synthetic oligonucleotide
uaacaggcgagggaagguu

SEQ ID NO: 74664 - RNA, 19 nt, Artificial Sequence
  Description of Artificial Sequence: Synthetic oligonucleotide
caucauaaguuccuccagu

SEQ ID NO: 74665 - RNA, 19 nt, Artificial Sequence
  Description of Artificial Sequence: Synthetic oligonucleotide
guuuguaugugcccuggau

SEQ ID NO: 74666 - RNA, 19 nt, Artificial Sequence
  Description of Artificial Sequence: Synthetic oligonucleotide
cagcgugcguuuuaccuca

SEQ ID NO: 74667 - RNA, 19 nt, Artificial Sequence
  Description of Artificial Sequence: Synthetic oligonucleotide
uuguagcguacuccuccuc

SEQ ID NO: 74668 - RNA, 19 nt, Artificial Sequence
  Description of Artificial Sequence: Synthetic oligonucleotide
ggagguaguuaauggagua

SEQ ID NO: 74669 - RNA, 19 nt, Artificial Sequence
  Description of Artificial Sequence: Synthetic oligonucleotide
guuaggugucgcuuacugu

SEQ ID NO: 74670 - RNA, 19 nt, Artificial Sequence
  Description of Artificial Sequence: Synthetic oligonucleotide
gcgagggaagguucuacug

SEQ ID NO: 74671 - RNA, 19 nt, Artificial Sequence
  Description of Artificial Sequence: Synthetic oligonucleotide
ggugggagguuaguguagc

SEQ ID NO: 74672 - RNA, 19 nt, Artificial Sequence
  Description of Artificial Sequence: Synthetic oligonucleotide
gcugaggucugaacaauac

SEQ ID NO: 74673 - RNA, 19 nt, Artificial Sequence
  Description of Artificial Sequence: Synthetic oligonucleotide
cauucagguuccaaccacu

SEQ ID NO: 74674 - RNA, 19 nt, Artificial Sequence
  Description of Artificial Sequence: Synthetic oligonucleotide
uggugcgacgaagcugcag

SEQ ID NO: 74675 - RNA, 19 nt, Artificial Sequence
  Description of Artificial Sequence: Synthetic oligonucleotide
gagcccuaacucccuggac

SEQ ID NO: 74676 - RNA, 19 nt, Artificial Sequence
  Description of Artificial Sequence: Synthetic oligonucleotide
ggagguuaguguagcauga

SEQ ID NO: 74677 - RNA, 19 nt, Artificial Sequence
  Description of Artificial Sequence: Synthetic oligonucleotide
gauucucaucuagggucac

SEQ ID NO: 74678 - RNA, 19 nt, Artificial Sequence
  Description of Artificial Sequence: Synthetic oligonucleotide
cugcaagugaugggacccc

SEQ ID NO: 74679 - RNA, 19 nt, Artificial Sequence
  Description of Artificial Sequence: Synthetic oligonucleotide
ccucuugaaggccacgauc

SEQ ID NO: 74680 - RNA, 19 nt, Artificial Sequence
  Description of Artificial Sequence: Synthetic oligonucleotide
ccaaccacuuguagcguac

SEQ ID NO: 74681 - RNA, 19 nt, Artificial Sequence
  Description of Artificial Sequence: Synthetic oligonucleotide
ccagccgucccaacggagc

SEQ ID NO: 74682 - RNA, 19 nt, Artificial Sequence
  Description of Artificial Sequence: Synthetic oligonucleotide
gguuuccaagcgugggcgc

SEQ ID NO: 74683 - RNA, 19 nt, Artificial Sequence
  Description of Artificial Sequence: Synthetic oligonucleotide
gcgacgaagcugcaggauc

SEQ ID NO: 74684 - RNA, 19 nt, Artificial Sequence
  Description of Artificial Sequence: Synthetic oligonucleotide
cagcccucggacguggaac

SEQ ID NO: 74685 - RNA, 19 nt, Artificial Sequence
  Description of Artificial Sequence: Synthetic oligonucleotide
ggcuaggggcuacauuggc

SEQ ID NO: 74686 - RNA, 19 nt, Artificial Sequence
  Description of Artificial Sequence: Synthetic oligonucleotide
gcguuuuaccucauccagc

SEQ ID NO: 74687 - RNA, 19 nt, Artificial Sequence
  Description of Artificial Sequence: Synthetic oligonucleotide
accccgauccaccuuccuu

SEQ ID NO: 74688 - RNA, 19 nt, Artificial Sequence
  Description of Artificial Sequence: Synthetic oligonucleotide
acaccgcccauggaaccag

SEQ ID NO: 74689 - RNA, 19 nt, Artificial Sequence
  Description of Artificial Sequence: Synthetic oligonucleotide
gagccagcgugcguuuuac

SEQ ID NO: 74690 - RNA, 19 nt, Artificial Sequence
  Description of Artificial Sequence: Synthetic oligonucleotide
uccgauucccauggcgcuc

SEQ ID NO: 74691 - RNA, 19 nt, Artificial Sequence
  Description of Artificial Sequence: Synthetic oligonucleotide
guggugcucggguugccuc

SEQ ID NO: 74692 - RNA, 19 nt, Artificial Sequence
  Description of Artificial Sequence: Synthetic oligonucleotide
augcuaugauucucaucua

SEQ ID NO: 74693 - RNA, 19 nt, Artificial Sequence
  Description of Artificial Sequence: Synthetic oligonucleotide
uccaccggcugcguuuggu

SEQ ID NO: 74694 - RNA, 19 nt, Artificial Sequence
  Description of Artificial Sequence: Synthetic oligonucleotide
aguggugcucggguugccu

SEQ ID NO: 74695 - RNA, 19 nt, Artificial Sequence
  Description of Artificial Sequence: Synthetic oligonucleotide
ccagcgugcguuuuaccuc

SEQ ID NO: 74696 - RNA, 19 nt, Artificial Sequence
  Description of Artificial Sequence: Synthetic oligonucleotide
agguaaaaccgggccucug

SEQ ID NO: 74697 - RNA, 19 nt, Artificial Sequence
  Description of Artificial Sequence: Synthetic oligonucleotide
cagaccauaggcagcccua

SEQ ID NO: 74698 - RNA, 19 nt, Artificial Sequence
  Description of Artificial Sequence: Synthetic oligonucleotide
gcuacauuggcgcccgcaa

SEQ ID NO: 74699 - RNA, 19 nt, Artificial Sequence
  Description of Artificial Sequence: Synthetic oligonucleotide
uccauccaccggcugcguu

SEQ ID NO: 74700 - RNA, 19 nt, Artificial Sequence
  Description of Artificial Sequence: Synthetic oligonucleotide
aguccccgcaugguggcca

SEQ ID NO: 74701 - RNA, 19 nt, Artificial Sequence
  Description of Artificial Sequence: Synthetic oligonucleotide
gugggagguuaguguagca

SEQ ID NO: 74702 - RNA, 19 nt, Artificial Sequence
  Description of Artificial Sequence: Synthetic oligonucleotide
caaugaugcgaguggacuu

SEQ ID NO: 74703 - RNA, 19 nt, Artificial Sequence
  Description of Artificial Sequence: Synthetic oligonucleotide
agagguuaccagggacgca

SEQ ID NO: 74704 - RNA, 19 nt, Artificial Sequence
  Description of Artificial Sequence: Synthetic oligonucleotide
gugcgacgaagcugcagga

SEQ ID NO: 74705 - RNA, 19 nt, Artificial Sequence
  Description of Artificial Sequence: Synthetic oligonucleotide
caucaaggauggucuaacu

SEQ ID NO: 74706 - RNA, 19 nt, Artificial Sequence
  Description of Artificial Sequence: Synthetic oligonucleotide
gggguuaggugucgcuuac

SEQ ID NO: 74707 - RNA, 19 nt, Artificial Sequence
  Description of Artificial Sequence: Synthetic oligonucleotide
caagaauuuggugucccau

SEQ ID NO: 74708 - RNA, 19 nt, Artificial Sequence
  Description of Artificial Sequence: Synthetic oligonucleotide
accgcccauggaaccaguc

SEQ ID NO: 74709 - RNA, 19 nt, Artificial Sequence
  Description of Artificial Sequence: Synthetic oligonucleotide
ggcggaguucagccagccg

SEQ ID NO: 74710 - RNA, 19 nt, Artificial Sequence
  Description of Artificial Sequence: Synthetic oligonucleotide
ccgcccauggaaccagucc

SEQ ID NO: 74711 - RNA, 19 nt, Artificial Sequence
  Description of Artificial Sequence: Synthetic oligonucleotide
gguaguuaauggaguaacu

SEQ ID NO: 74712 - RNA, 19 nt, Artificial Sequence
  Description of Artificial Sequence: Synthetic oligonucleotide
ucgcacccucuuuggcucu

SEQ ID NO: 74713 - RNA, 19 nt, Artificial Sequence
  Description of Artificial Sequence: Synthetic oligonucleotide
gcguuuggugcugucugag

SEQ ID NO: 74714 - RNA, 19 nt, Artificial Sequence
  Description of Artificial Sequence: Synthetic oligonucleotide
acauuggcgcccgcaacua

SEQ ID NO: 74715 - RNA, 19 nt, Artificial Sequence
  Description of Artificial Sequence: Synthetic oligonucleotide
ggcugaguuggugcgacga

SEQ ID NO: 74716 - RNA, 19 nt, Artificial Sequence
  Description of Artificial Sequence: Synthetic oligonucleotide
cagccgucccaacggagca

SEQ ID NO: 74717 - RNA, 19 nt, Artificial Sequence
  Description of Artificial Sequence: Synthetic oligonucleotide
ggcuaccuuuucaggacug

SEQ ID NO: 74718 - RNA, 19 nt, Artificial Sequence
  Description of Artificial Sequence: Synthetic oligonucleotide
agccgucccaacggagcag

SEQ ID NO: 74719 - RNA, 19 nt, Artificial Sequence
  Description of Artificial Sequence: Synthetic oligonucleotide
cuaacaguccccgcauggu

SEQ ID NO: 74720 - RNA, 19 nt, Artificial Sequence
  Description of Artificial Sequence: Synthetic oligonucleotide
gguacaggagggaccucac

SEQ ID NO: 74721 - RNA, 19 nt, Artificial Sequence
  Description of Artificial Sequence: Synthetic oligonucleotide
gugcucggguugccucagg

SEQ ID NO: 74722 - RNA, 19 nt, Artificial Sequence
  Description of Artificial Sequence: Synthetic oligonucleotide
caggcuugauggucagaaa

SEQ ID NO: 74723 - RNA, 19 nt, Artificial Sequence
  Description of Artificial Sequence: Synthetic oligonucleotide
cccaccccgauccaccuuc

SEQ ID NO: 74724 - RNA, 19 nt, Artificial Sequence
  Description of Artificial Sequence: Synthetic oligonucleotide
caucaacagccgggaaguc

SEQ ID NO: 74725 - RNA, 19 nt, Artificial Sequence
  Description of Artificial Sequence: Synthetic oligonucleotide
cugagccggcgucugcaca

SEQ ID NO: 74726 - RNA, 19 nt, Artificial Sequence
  Description of Artificial Sequence: Synthetic oligonucleotide
gcgaguggacuuggcuugg

SEQ ID NO: 74727 - RNA, 19 nt, Artificial Sequence
  Description of Artificial Sequence: Synthetic oligonucleotide
ccaacggagcagucacuuc

SEQ ID NO: 74728 - RNA, 19 nt, Artificial Sequence
  Description of Artificial Sequence: Synthetic oligonucleotide
gacucggcccuggcacuac

SEQ ID NO: 74729 - RNA, 19 nt, Artificial Sequence
  Description of Artificial Sequence: Synthetic oligonucleotide
acaauaccuuggagucaga

SEQ ID NO: 74730 - RNA, 19 nt, Artificial Sequence
  Description of Artificial Sequence: Synthetic oligonucleotide
aggcuuggauucagccugu

SEQ ID NO: 74731 - RNA, 19 nt, Artificial Sequence
  Description of Artificial Sequence: Synthetic oligonucleotide
ggcgagggaagguucuacu

SEQ ID NO: 74732 - RNA, 19 nt, Artificial Sequence
  Description of Artificial Sequence: Synthetic oligonucleotide
gcugaguuggugcgacgaa

SEQ ID NO: 74733 - RNA, 19 nt, Artificial Sequence
  Description of Artificial Sequence: Synthetic oligonucleotide
cgcaacuaacaguccccgc

SEQ ID NO: 74734 - RNA, 19 nt, Artificial Sequence
  Description of Artificial Sequence: Synthetic oligonucleotide
cucggacguggaaccggca

SEQ ID NO: 74735 - RNA, 19 nt, Artificial Sequence
  Description of Artificial Sequence: Synthetic oligonucleotide
cccucggacguggaaccgg

SEQ ID NO: 74736 - RNA, 19 nt, Artificial Sequence
  Description of Artificial Sequence: Synthetic oligonucleotide
caguggugcucggguugcc

SEQ ID NO: 74737 - RNA, 19 nt, Artificial Sequence
  Description of Artificial Sequence: Synthetic oligonucleotide
ggcgcccgcaacuaacagu

SEQ ID NO: 74738 - RNA, 19 nt, Artificial Sequence
  Description of Artificial Sequence: Synthetic oligonucleotide
gcgcauacacagagggcac

SEQ ID NO: 74739 - RNA, 19 nt, Artificial Sequence
  Description of Artificial Sequence: Synthetic oligonucleotide
ccaugugaaguuuccuccu

SEQ ID NO: 74740 - RNA, 19 nt, Artificial Sequence
  Description of Artificial Sequence: Synthetic oligonucleotide
caguccccgcaugguggcc

SEQ ID NO: 74741 - RNA, 19 nt, Artificial Sequence
  Description of Artificial Sequence: Synthetic oligonucleotide
gcccuggcacuaccacuag

SEQ ID NO: 74742 - RNA, 19 nt, Artificial Sequence
  Description of Artificial Sequence: Synthetic oligonucleotide
gccagccgucccaacggag

SEQ ID NO: 74743 - RNA, 19 nt, Artificial Sequence
  Description of Artificial Sequence: Synthetic oligonucleotide
guucugagcuucgcacccu

SEQ ID NO: 74744 - RNA, 19 nt, Artificial Sequence
  Description of Artificial Sequence: Synthetic oligonucleotide
ggugucgcuuacugucacu

SEQ ID NO: 74745 - RNA, 19 nt, Artificial Sequence
  Description of Artificial Sequence: Synthetic oligonucleotide
gcccucggacguggaaccg

SEQ ID NO: 74746 - RNA, 19 nt, Artificial Sequence
  Description of Artificial Sequence: Synthetic oligonucleotide
ccucuaacacugguucuaa

SEQ ID NO: 74747 - RNA, 19 nt, Artificial Sequence
  Description of Artificial Sequence: Synthetic oligonucleotide
gcccacauagagccagggu

SEQ ID NO: 74748 - RNA, 19 nt, Artificial Sequence
  Description of Artificial Sequence: Synthetic oligonucleotide
cuucgccgccuucucucua

SEQ ID NO: 74749 - RNA, 19 nt, Artificial Sequence
  Description of Artificial Sequence: Synthetic oligonucleotide
gcgugcguuuuaccucauc

SEQ ID NO: 74750 - RNA, 19 nt, Artificial Sequence
  Description of Artificial Sequence: Synthetic oligonucleotide
ccaagcgugggcgccguga

SEQ ID NO: 74751 - RNA, 19 nt, Artificial Sequence
  Description of Artificial Sequence: Synthetic oligonucleotide
caguggggaugagguaaaa

SEQ ID NO: 74752 - RNA, 19 nt, Artificial Sequence
  Description of Artificial Sequence: Synthetic oligonucleotide
ccuugaccuuagguauaug

SEQ ID NO: 74753 - RNA, 19 nt, Artificial Sequence
  Description of Artificial Sequence: Synthetic oligonucleotide
gcagcccucggacguggaa

SEQ ID NO: 74754 - RNA, 19 nt, Artificial Sequence
  Description of Artificial Sequence: Synthetic oligonucleotide
ccccucuugaaggccacga

SEQ ID NO: 74755 - RNA, 19 nt, Artificial Sequence
  Description of Artificial Sequence: Synthetic oligonucleotide
ggcggggcacugucacaca

SEQ ID NO: 74756 - RNA, 19 nt, Artificial Sequence
  Description of Artificial Sequence: Synthetic oligonucleotide
ccgugagcgcauacacaga

SEQ ID NO: 74757 - RNA, 19 nt, Artificial Sequence
  Description of Artificial Sequence: Synthetic oligonucleotide
ccucguguccgauucccau

SEQ ID NO: 74758 - RNA, 19 nt, Artificial Sequence
  Description of Artificial Sequence: Synthetic oligonucleotide
agcgugcguuuuaccucau

SEQ ID NO: 74759 - RNA, 19 nt, Artificial Sequence
  Description of Artificial Sequence: Synthetic oligonucleotide
ccauccaccggcugcguuu

SEQ ID NO: 74760 - RNA, 19 nt, Artificial Sequence
  Description of Artificial Sequence: Synthetic oligonucleotide
cgcccgcaacuaacagucc

SEQ ID NO: 74761 - RNA, 19 nt, Artificial Sequence
  Description of Artificial Sequence: Synthetic oligonucleotide
cgucccaacggagcaguca

SEQ ID NO: 74762 - RNA, 19 nt, Artificial Sequence
  Description of Artificial Sequence: Synthetic oligonucleotide
ggguuaggugucgcuuacu

SEQ ID NO: 74763 - RNA, 19 nt, Artificial Sequence
  Description of Artificial Sequence: Synthetic oligonucleotide
cguggaaccggcacaccau

SEQ ID NO: 74764 - RNA, 19 nt, Artificial Sequence
  Description of Artificial Sequence: Synthetic oligonucleotide
caccgcccauggaaccagu

SEQ ID NO: 74765 - RNA, 19 nt, Artificial Sequence
  Description of Artificial Sequence: Synthetic oligonucleotide
caccccgauccaccuuccu

SEQ ID NO: 74766 - RNA, 19 nt, Artificial Sequence
  Description of Artificial Sequence: Synthetic oligonucleotide
cggcacaccaugggacaug

SEQ ID NO: 74767 - RNA, 19 nt, Artificial Sequence
  Description of Artificial Sequence: Synthetic oligonucleotide
cccaacggagcagucacuu

SEQ ID NO: 74768 - RNA, 19 nt, Artificial Sequence
  Description of Artificial Sequence: Synthetic oligonucleotide
ggaccccauaccagguuuu

SEQ ID NO: 74769 - RNA, 19 nt, Artificial Sequence
  Description of Artificial Sequence: Synthetic oligonucleotide
ggcuuggauucagccugua

SEQ ID NO: 74770 - RNA, 19 nt, Artificial Sequence
  Description of Artificial Sequence: Synthetic oligonucleotide
cccuugaccuuagguauau

SEQ ID NO: 74771 - RNA, 19 nt, Artificial Sequence
  Description of Artificial Sequence: Synthetic oligonucleotide
gugggcgccgugagcgcau

SEQ ID NO: 74772 - RNA, 19 nt, Artificial Sequence
  Description of Artificial Sequence: Synthetic oligonucleotide
cgauucccauggcgcucug

SEQ ID NO: 74773 - RNA, 19 nt, Artificial Sequence
  Description of Artificial Sequence: Synthetic oligonucleotide
cgugggcgccgugagcgca

SEQ ID NO: 74774 - RNA, 19 nt, Artificial Sequence
  Description of Artificial Sequence: Synthetic oligonucleotide
ccgcacaggcagucucugu

SEQ ID NO: 74775 - RNA, 19 nt, Artificial Sequence
  Description of Artificial Sequence: Synthetic oligonucleotide
ugaauuaucaucuacagca

SEQ ID NO: 74776 - RNA, 19 nt, Artificial Sequence
  Description of Artificial Sequence: Synthetic oligonucleotide
aauauuggcaccucuagac

SEQ ID NO: 74777 - RNA, 19 nt, Artificial Sequence
  Description of Artificial Sequence: Synthetic oligonucleotide
uuacaauaaaagcagagcc

SEQ ID NO: 74778 - RNA, 19 nt, Artificial Sequence
  Description of Artificial Sequence: Synthetic oligonucleotide
uaagguaucaauaagcauc

SEQ ID NO: 74779 - RNA, 19 nt, Artificial Sequence
  Description of Artificial Sequence: Synthetic oligonucleotide
ugaucauuccacuagaggc

SEQ ID NO: 74780 - RNA, 19 nt, Artificial Sequence
  Description of Artificial Sequence: Synthetic oligonucleotide
uucucuauuaccugaaagg

SEQ ID NO: 74781 - RNA, 19 nt, Artificial Sequence
  Description of Artificial Sequence: Synthetic oligonucleotide
aacauauaaucuuuuacga

SEQ ID NO: 74782 - RNA, 19 nt, Artificial Sequence
  Description of Artificial Sequence: Synthetic oligonucleotide
aguuucaugacccuugccg

SEQ ID NO: 74783 - RNA, 19 nt, Artificial Sequence
  Description of Artificial Sequence: Synthetic oligonucleotide
uccaguauuaacaaggcac

SEQ ID NO: 74784 - RNA, 19 nt, Artificial Sequence
  Description of Artificial Sequence: Synthetic oligonucleotide
ugaacaaccauuguuagcc

SEQ ID NO: 74785 - RNA, 19 nt, Artificial Sequence
  Description of Artificial Sequence: Synthetic oligonucleotide
uauuaucugaaucacucag

SEQ ID NO: 74786 - RNA, 19 nt, Artificial Sequence
  Description of Artificial Sequence: Synthetic oligonucleotide
uguuuaaaagccuaauuca

SEQ ID NO: 74787 - RNA, 19 nt, Artificial Sequence
  Description of Artificial Sequence: Synthetic oligonucleotide
aaaggggcuuauuuguugc

SEQ ID NO: 74788 - RNA, 19 nt, Artificial Sequence
  Description of Artificial Sequence: Synthetic oligonucleotide
ugcuguauacccaugauug

SEQ ID NO: 74789 - RNA, 19 nt, Artificial Sequence
  Description of Artificial Sequence: Synthetic oligonucleotide
uguguaagacuucuuaucc

SEQ ID NO: 74790 - RNA, 19 nt, Artificial Sequence
  Description of Artificial Sequence: Synthetic oligonucleotide
ugagguguugguauaacgg

SEQ ID NO: 74791 - RNA, 19 nt, Artificial Sequence
  Description of Artificial Sequence: Synthetic oligonucleotide
auagcauugaaugucaggg

SEQ ID NO: 74792 - RNA, 19 nt, Artificial Sequence
  Description of Artificial Sequence: Synthetic oligonucleotide
ucuuuuacgaggauugaag

SEQ ID NO: 74793 - RNA, 19 nt, Artificial Sequence
  Description of Artificial Sequence: Synthetic oligonucleotide
agcauuauggcugagcagc

SEQ ID NO: 74794 - RNA, 19 nt, Artificial Sequence
  Description of Artificial Sequence: Synthetic oligonucleotide
aauuuugcccaauauagaa

SEQ ID NO: 74795 - RNA, 19 nt, Artificial Sequence
  Description of Artificial Sequence: Synthetic oligonucleotide
gacaguagcaguuugacca

SEQ ID NO: 74796 - RNA, 19 nt, Artificial Sequence
  Description of Artificial Sequence: Synthetic oligonucleotide
ugcauuauauccuugaaau

SEQ ID NO: 74797 - RNA, 19 nt, Artificial Sequence
  Description of Artificial Sequence: Synthetic oligonucleotide
uuaauauuggcaccucuag

SEQ ID NO: 74798 - RNA, 19 nt, Artificial Sequence
  Description of Artificial Sequence: Synthetic oligonucleotide
aaauggagugggaacaucc

SEQ ID NO: 74799 - RNA, 19 nt, Artificial Sequence
  Description of Artificial Sequence: Synthetic oligonucleotide
uguacaaguacucuuguuc

SEQ ID NO: 74800 - RNA, 19 nt, Artificial Sequence
  Description of Artificial Sequence: Synthetic oligonucleotide
ugggguauaaccauuuuca

SEQ ID NO: 74801 - RNA, 19 nt, Artificial Sequence
  Description of Artificial Sequence: Synthetic oligonucleotide
ugagucaaaccuaaaaccu

SEQ ID NO: 74802 - RNA, 19 nt, Artificial Sequence
  Description of Artificial Sequence: Synthetic oligonucleotide
aaaacauccugcucuaaca

SEQ ID NO: 74803 - RNA, 19 nt, Artificial Sequence
  Description of Artificial Sequence: Synthetic oligonucleotide
uggaacuuuauccagcucu

SEQ ID NO: 74804 - RNA, 19 nt, Artificial Sequence
  Description of Artificial Sequence: Synthetic oligonucleotide
cugagucaaaccuaaaacc

SEQ ID NO: 74805 - RNA, 19 nt, Artificial Sequence
  Description of Artificial Sequence: Synthetic oligonucleotide
uccgacagaaucaagcugc

SEQ ID NO: 74806 - RNA, 19 nt, Artificial Sequence
  Description of Artificial Sequence: Synthetic oligonucleotide
acuacuagacgagacaggc

SEQ ID NO: 74807 - RNA, 19 nt, Artificial Sequence
  Description of Artificial Sequence: Synthetic oligonucleotide
uacuauuucuuacaucaag

SEQ ID NO: 74808 - RNA, 19 nt, Artificial Sequence
  Description of Artificial Sequence: Synthetic oligonucleotide
uaaccauuuucaucgacgg

SEQ ID NO: 74809 - RNA, 19 nt, Artificial Sequence
  Description of Artificial Sequence: Synthetic oligonucleotide
ugauuagcaguucauggcc

SEQ ID NO: 74810 - RNA, 19 nt, Artificial Sequence
  Description of Artificial Sequence: Synthetic oligonucleotide
aacacacuacucuaggucu

SEQ ID NO: 74811 - RNA, 19 nt, Artificial Sequence
  Description of Artificial Sequence: Synthetic oligonucleotide
uuaauagcauugaauguca

SEQ ID NO: 74812 - RNA, 19 nt, Artificial Sequence
  Description of Artificial Sequence: Synthetic oligonucleotide
uuaaugaguacauccacac

SEQ ID NO: 74813 - RNA, 19 nt, Artificial Sequence
  Description of Artificial Sequence: Synthetic oligonucleotide
ucuugaacaaccauuguua

SEQ ID NO: 74814 - RNA, 19 nt, Artificial Sequence
  Description of Artificial Sequence: Synthetic oligonucleotide
uguucaauagugaguauac

SEQ ID NO: 74815 - RNA, 19 nt, Artificial Sequence
  Description of Artificial Sequence: Synthetic oligonucleotide
accacuaguaauaagagug

SEQ ID NO: 74816 - RNA, 19 nt, Artificial Sequence
  Description of Artificial Sequence: Synthetic oligonucleotide
ugagcauuauggcugagca

SEQ ID NO: 74817 - RNA, 19 nt, Artificial Sequence
  Description of Artificial Sequence: Synthetic oligonucleotide
acaauggacuacuagacga

SEQ ID NO: 74818 - RNA, 19 nt, Artificial Sequence
  Description of Artificial Sequence: Synthetic oligonucleotide
aaguguauagguguccgac

SEQ ID NO: 74819 - RNA, 19 nt, Artificial Sequence
  Description of Artificial Sequence: Synthetic oligonucleotide
auaccgggcugcuauaugc

SEQ ID NO: 74820 - RNA, 19 nt, Artificial Sequence
  Description of Artificial Sequence: Synthetic oligonucleotide
uugauuagcaguucauggc

SEQ ID NO: 74821 - RNA, 19 nt, Artificial Sequence
  Description of Artificial Sequence: Synthetic oligonucleotide
aaaaggggcuuauuuguug

SEQ ID NO: 74822 - RNA, 19 nt, Artificial Sequence
  Description of Artificial Sequence: Synthetic oligonucleotide
uugaaacugcaauaggagc

SEQ ID NO: 74823 - RNA, 19 nt, Artificial Sequence
  Description of Artificial Sequence: Synthetic oligonucleotide
uguauaaugguuugugauc

SEQ ID NO: 74824 - RNA, 19 nt, Artificial Sequence
  Description of Artificial Sequence: Synthetic oligonucleotide
aaaagccuaauucagccua

SEQ ID NO: 74825 - RNA, 19 nt, Artificial Sequence
  Description of Artificial Sequence: Synthetic oligonucleotide
uuauauccuugaaaucccg

SEQ ID NO: 74826 - RNA, 19 nt, Artificial Sequence
  Description of Artificial Sequence: Synthetic oligonucleotide
aguguauagguguccgacc

SEQ ID NO: 74827 - RNA, 19 nt, Artificial Sequence
  Description of Artificial Sequence: Synthetic oligonucleotide
uugacuacacugaucauuc

SEQ ID NO: 74828 - RNA, 19 nt, Artificial Sequence
  Description of Artificial Sequence: Synthetic oligonucleotide
agugucagaacuuccuuag

SEQ ID NO: 74829 - RNA, 19 nt, Artificial Sequence
  Description of Artificial Sequence: Synthetic oligonucleotide
aguacacuugcuccuuucc

SEQ ID NO: 74830 - RNA, 19 nt, Artificial Sequence
  Description of Artificial Sequence: Synthetic oligonucleotide
auaaccauuuucaucgacg

SEQ ID NO: 74831 - RNA, 19 nt, Artificial Sequence
  Description of Artificial Sequence: Synthetic oligonucleotide
cuuacaucaagaucuaaca

SEQ ID NO: 74832 - RNA, 19 nt, Artificial Sequence
  Description of Artificial Sequence: Synthetic oligonucleotide
aucucucuccgacagaauc

SEQ ID NO: 74833 - RNA, 19 nt, Artificial Sequence
  Description of Artificial Sequence: Synthetic oligonucleotide
gaaucuaccguggagagca

SEQ ID NO: 74834 - RNA, 19 nt, Artificial Sequence
  Description of Artificial Sequence: Synthetic oligonucleotide
ucacauuacucagaagagg

SEQ ID NO: 74835 - RNA, 19 nt, Artificial Sequence
  Description of Artificial Sequence: Synthetic oligonucleotide
gaaguaaugcaucuacaca

SEQ ID NO: 74836 - RNA, 19 nt, Artificial Sequence
  Description of Artificial Sequence: Synthetic oligonucleotide
uugcccaauauagaaaugc

SEQ ID NO: 74837 - RNA, 19 nt, Artificial Sequence
  Description of Artificial Sequence: Synthetic oligonucleotide
ugcaaacacacuacucuag

SEQ ID NO: 74838 - RNA, 19 nt, Artificial Sequence
  Description of Artificial Sequence: Synthetic oligonucleotide
cucuccgacagaaucaagc

SEQ ID NO: 74839 - RNA, 19 nt, Artificial Sequence
  Description of Artificial Sequence: Synthetic oligonucleotide
aguauuaacaaggcacuag

SEQ ID NO: 74840 - RNA, 19 nt, Artificial Sequence
  Description of Artificial Sequence: Synthetic oligonucleotide
ugcaaggcugcauugguug

SEQ ID NO: 74841 - RNA, 19 nt, Artificial Sequence
  Description of Artificial Sequence: Synthetic oligonucleotide
uccacuagaguccacggaa

SEQ ID NO: 74842 - RNA, 19 nt, Artificial Sequence
  Description of Artificial Sequence: Synthetic oligonucleotide
ucugaaucacucagcaugu

SEQ ID NO: 74843 - RNA, 19 nt, Artificial Sequence
  Description of Artificial Sequence: Synthetic oligonucleotide
aguuacaauaaaagcagag

SEQ ID NO: 74844 - RNA, 19 nt, Artificial Sequence
  Description of Artificial Sequence: Synthetic oligonucleotide
aagguaucaauaagcaucu

SEQ ID NO: 74845 - RNA, 19 nt, Artificial Sequence
  Description of Artificial Sequence: Synthetic oligonucleotide
cacggaauugacuugagca

SEQ ID NO: 74846 - RNA, 19 nt, Artificial Sequence
  Description of Artificial Sequence: Synthetic oligonucleotide
ugaccauuguagcaagccc

SEQ ID NO: 74847 - RNA, 19 nt, Artificial Sequence
  Description of Artificial Sequence: Synthetic oligonucleotide
cugaucauuccacuagagg

SEQ ID NO: 74848 - RNA, 19 nt, Artificial Sequence
  Description of Artificial Sequence: Synthetic oligonucleotide
ugcccaauauagaaaugcc

SEQ ID NO: 74849 - RNA, 19 nt, Artificial Sequence
  Description of Artificial Sequence: Synthetic oligonucleotide
auaacgguuaauagcauug

SEQ ID NO: 74850 - RNA, 19 nt, Artificial Sequence
  Description of Artificial Sequence: Synthetic oligonucleotide
uuccucaugauaggcaagg

SEQ ID NO: 74851 - RNA, 19 nt, Artificial Sequence
  Description of Artificial Sequence: Synthetic oligonucleotide
gagaaucuaccguggagag

SEQ ID NO: 74852 - RNA, 19 nt, Artificial Sequence
  Description of Artificial Sequence: Synthetic oligonucleotide
auagguguccgaccccugc

SEQ ID NO: 74853 - RNA, 19 nt, Artificial Sequence
  Description of Artificial Sequence: Synthetic oligonucleotide
uuacgaggauugaagcucc

SEQ ID NO: 74854 - RNA, 19 nt, Artificial Sequence
  Description of Artificial Sequence: Synthetic oligonucleotide
uggagaaucuaccguggag

SEQ ID NO: 74855 - RNA, 19 nt, Artificial Sequence
  Description of Artificial Sequence: Synthetic oligonucleotide
ugaaagagugcaaguaaau

SEQ ID NO: 74856 - RNA, 19 nt, Artificial Sequence
  Description of Artificial Sequence: Synthetic oligonucleotide
ucccguaguaagcacuuag

SEQ ID NO: 74857 - RNA, 19 nt, Artificial Sequence
  Description of Artificial Sequence: Synthetic oligonucleotide
ucaucgacggcaaguacac

SEQ ID NO: 74858 - RNA, 19 nt, Artificial Sequence
  Description of Artificial Sequence: Synthetic oligonucleotide
uugaacaaccauuguuagc

SEQ ID NO: 74859 - RNA, 19 nt, Artificial Sequence
  Description of Artificial Sequence: Synthetic oligonucleotide
aguuuccuacagcaguccg

SEQ ID NO: 74860 - RNA, 19 nt, Artificial Sequence
  Description of Artificial Sequence: Synthetic oligonucleotide
ucucucuccgacagaauca

SEQ ID NO: 74861 - RNA, 19 nt, Artificial Sequence
  Description of Artificial Sequence: Synthetic oligonucleotide
uaauagcauugaaugucag

SEQ ID NO: 74862 - RNA, 19 nt, Artificial Sequence
  Description of Artificial Sequence: Synthetic oligonucleotide
acaaguguauagguguccg

SEQ ID NO: 74863 - RNA, 19 nt, Artificial Sequence
  Description of Artificial Sequence: Synthetic oligonucleotide
aauaugagagccaggcagu

SEQ ID NO: 74864 - RNA, 19 nt, Artificial Sequence
  Description of Artificial Sequence: Synthetic oligonucleotide
uggcaucuauauuugcucc

SEQ ID NO: 74865 - RNA, 19 nt, Artificial Sequence
  Description of Artificial Sequence: Synthetic oligonucleotide
ucuccgacagaaucaagcu

SEQ ID NO: 74866 - RNA, 19 nt, Artificial Sequence
  Description of Artificial Sequence: Synthetic oligonucleotide
agcauugaaugucagggau

SEQ ID NO: 74867 - RNA, 19 nt, Artificial Sequence
  Description of Artificial Sequence: Synthetic oligonucleotide
auacaacucacaucugugu

SEQ ID NO: 74868 - RNA, 19 nt, Artificial Sequence
  Description of Artificial Sequence: Synthetic oligonucleotide
cugcuauaugcaaagggug

SEQ ID NO: 74869 - RNA, 19 nt, Artificial Sequence
  Description of Artificial Sequence: Synthetic oligonucleotide
guucauuccucaugauagg

SEQ ID NO: 74870 - RNA, 19 nt, Artificial Sequence
  Description of Artificial Sequence: Synthetic oligonucleotide
cuugccgcaagcuaaguga

SEQ ID NO: 74871 - RNA, 19 nt, Artificial Sequence
  Description of Artificial Sequence: Synthetic oligonucleotide
auaagaguguugauuagca

SEQ ID NO: 74872 - RNA, 19 nt, Artificial Sequence
  Description of Artificial Sequence: Synthetic oligonucleotide
ucauaucaacuccaagauc

SEQ ID NO: 74873 - RNA, 19 nt, Artificial Sequence
  Description of Artificial Sequence: Synthetic oligonucleotide
uauaacgguuaauagcauu

SEQ ID NO: 74874 - RNA, 19 nt, Artificial Sequence
  Description of Artificial Sequence: Synthetic oligonucleotide
gaaucugucauggauaggu

SEQ ID NO: 74875 - RNA, 19 nt, Artificial Sequence
  Description of Artificial Sequence: Synthetic oligonucleotide
auauacgcugcccaaugga

SEQ ID NO: 74876 - RNA, 19 nt, Artificial Sequence
  Description of Artificial Sequence: Synthetic oligonucleotide
aacgguuaauagcauugaa

SEQ ID NO: 74877 - RNA, 19 nt, Artificial Sequence
  Description of Artificial Sequence: Synthetic oligonucleotide
uauacgcugcccaauggau

SEQ ID NO: 74878 - RNA, 19 nt, Artificial Sequence
  Description of Artificial Sequence: Synthetic oligonucleotide
caauggacuacuagacgag

SEQ ID NO: 74879 - RNA, 19 nt, Artificial Sequence
  Description of Artificial Sequence: Synthetic oligonucleotide
cuauaaagaaaagauccga

SEQ ID NO: 74880 - RNA, 19 nt, Artificial Sequence
  Description of Artificial Sequence: Synthetic oligonucleotide
uccgauacguucacauuac

SEQ ID NO: 74881 - RNA, 19 nt, Artificial Sequence
  Description of Artificial Sequence: Synthetic oligonucleotide
cauauacgcugcccaaugg

SEQ ID NO: 74882 - RNA, 19 nt, Artificial Sequence
  Description of Artificial Sequence: Synthetic oligonucleotide
acggugaccauaugcagcu

SEQ ID NO: 74883 - RNA, 19 nt, Artificial Sequence
  Description of Artificial Sequence: Synthetic oligonucleotide
uacaacucacaucuguguu

SEQ ID NO: 74884 - RNA, 19 nt, Artificial Sequence
  Description of Artificial Sequence: Synthetic oligonucleotide
agaacuuccuuagaccucu

SEQ ID NO: 74885 - RNA, 19 nt, Artificial Sequence
  Description of Artificial Sequence: Synthetic oligonucleotide
cucuaacucagccuuucag

SEQ ID NO: 74886 - RNA, 19 nt, Artificial Sequence
  Description of Artificial Sequence: Synthetic oligonucleotide
auacccaugauugucuacu

SEQ ID NO: 74887 - RNA, 19 nt, Artificial Sequence
  Description of Artificial Sequence: Synthetic oligonucleotide
uguauagguguccgacccc

SEQ ID NO: 74888 - RNA, 19 nt, Artificial Sequence
  Description of Artificial Sequence: Synthetic oligonucleotide
ucgacggcaaguacacuug

SEQ ID NO: 74889 - RNA, 19 nt, Artificial Sequence
  Description of Artificial Sequence: Synthetic oligonucleotide
cucuguauaaugguuugug

SEQ ID NO: 74890 - RNA, 19 nt, Artificial Sequence
  Description of Artificial Sequence: Synthetic oligonucleotide
uacguucacauuacucaga

SEQ ID NO: 74891 - RNA, 19 nt, Artificial Sequence
  Description of Artificial Sequence: Synthetic oligonucleotide
acugcaauaggagcuaggu

SEQ ID NO: 74892 - RNA, 19 nt, Artificial Sequence
  Description of Artificial Sequence: Synthetic oligonucleotide
cuaguuucaugacccuugc

SEQ ID NO: 74893 - RNA, 19 nt, Artificial Sequence
  Description of Artificial Sequence: Synthetic oligonucleotide
aauguuguugaaacugcaa

SEQ ID NO: 74894 - RNA, 19 nt, Artificial Sequence
  Description of Artificial Sequence: Synthetic oligonucleotide
acagcaguccgaaaaccac

SEQ ID NO: 74895 - RNA, 19 nt, Artificial Sequence
  Description of Artificial Sequence: Synthetic oligonucleotide
aggagcuagguucauuccu

SEQ ID NO: 74896 - RNA, 19 nt, Artificial Sequence
  Description of Artificial Sequence: Synthetic oligonucleotide
aauggacuacuagacgaga

SEQ ID NO: 74897 - RNA, 19 nt, Artificial Sequence
  Description of Artificial Sequence: Synthetic oligonucleotide
uuucaugacccuugccgca

SEQ ID NO: 74898 - RNA, 19 nt, Artificial Sequence
  Description of Artificial Sequence: Synthetic oligonucleotide
aaaagcccgguuugaaguu

SEQ ID NO: 74899 - RNA, 19 nt, Artificial Sequence
  Description of Artificial Sequence: Synthetic oligonucleotide
uuuucaucgacggcaagua

SEQ ID NO: 74900 - RNA, 19 nt, Artificial Sequence
  Description of Artificial Sequence: Synthetic oligonucleotide
agaaucuaccguggagagc

SEQ ID NO: 74901 - RNA, 19 nt, Artificial Sequence
  Description of Artificial Sequence: Synthetic oligonucleotide
agacggugaccauaugcag

SEQ ID NO: 74902 - RNA, 19 nt, Artificial Sequence
  Description of Artificial Sequence: Synthetic oligonucleotide
uacucuaggucugagucaa

SEQ ID NO: 74903 - RNA, 19 nt, Artificial Sequence
  Description of Artificial Sequence: Synthetic oligonucleotide
aucgacggcaaguacacuu

SEQ ID NO: 74904 - RNA, 19 nt, Artificial Sequence
  Description of Artificial Sequence: Synthetic oligonucleotide
auggacuacuagacgagac

SEQ ID NO: 74905 - RNA, 19 nt, Artificial Sequence
  Description of Artificial Sequence: Synthetic oligonucleotide
agcugacaaguguauaggu

SEQ ID NO: 74906 - RNA, 19 nt, Artificial Sequence
  Description of Artificial Sequence: Synthetic oligonucleotide
gacggugaccauaugcagc

SEQ ID NO: 74907 - RNA, 19 nt, Artificial Sequence
  Description of Artificial Sequence: Synthetic oligonucleotide
uugagcauuauggcugagc

SEQ ID NO: 74908 - RNA, 19 nt, Artificial Sequence
  Description of Artificial Sequence: Synthetic oligonucleotide
gagcauuauggcugagcag

SEQ ID NO: 74909 - RNA, 19 nt, Artificial Sequence
  Description of Artificial Sequence: Synthetic oligonucleotide
aacugcaauaggagcuagg

SEQ ID NO: 74910 - RNA, 19 nt, Artificial Sequence
  Description of Artificial Sequence: Synthetic oligonucleotide
gccaauaugagagccaggc

SEQ ID NO: 74911 - RNA, 19 nt, Artificial Sequence
  Description of Artificial Sequence: Synthetic oligonucleotide
uguuuauguuaugaauuau

SEQ ID NO: 74912 - RNA, 19 nt, Artificial Sequence
  Description of Artificial Sequence: Synthetic oligonucleotide
gucagaucugcacuagcac

SEQ ID NO: 74913 - RNA, 19 nt, Artificial Sequence
  Description of Artificial Sequence: Synthetic oligonucleotide
uuucaucgacggcaaguac

SEQ ID NO: 74914 - RNA, 19 nt, Artificial Sequence
  Description of Artificial Sequence: Synthetic oligonucleotide
cauugaaugucagggauga

SEQ ID NO: 74915 - RNA, 19 nt, Artificial Sequence
  Description of Artificial Sequence: Synthetic oligonucleotide
gggaacaucccauguauac

SEQ ID NO: 74916 - RNA, 19 nt, Artificial Sequence
  Description of Artificial Sequence: Synthetic oligonucleotide
cuaacaguaguuccacaca

SEQ ID NO: 74917 - RNA, 19 nt, Artificial Sequence
  Description of Artificial Sequence: Synthetic oligonucleotide
cuauuaucugaaucacuca

SEQ ID NO: 74918 - RNA, 19 nt, Artificial Sequence
  Description of Artificial Sequence: Synthetic oligonucleotide
uaacgguuaauagcauuga

SEQ ID NO: 74919 - RNA, 19 nt, Artificial Sequence
  Description of Artificial Sequence: Synthetic oligonucleotide
aacaguaguuccacacaug

SEQ ID NO: 74920 - RNA, 19 nt, Artificial Sequence
  Description of Artificial Sequence: Synthetic oligonucleotide
uaggagcuagguucauucc

SEQ ID NO: 74921 - RNA, 19 nt, Artificial Sequence
  Description of Artificial Sequence: Synthetic oligonucleotide
uauuaccugaaaggcaguc

SEQ ID NO: 74922 - RNA, 19 nt, Artificial Sequence
  Description of Artificial Sequence: Synthetic oligonucleotide
ggcacgucuaucuuucuug

SEQ ID NO: 74923 - RNA, 19 nt, Artificial Sequence
  Description of Artificial Sequence: Synthetic oligonucleotide
cacaucgguguacaaguac

SEQ ID NO: 74924 - RNA, 19 nt, Artificial Sequence
  Description of Artificial Sequence: Synthetic oligonucleotide
cuaggucugagucaaaccu

SEQ ID NO: 74925 - RNA, 19 nt, Artificial Sequence
  Description of Artificial Sequence: Synthetic oligonucleotide
aaggggcuuauuuguugcu

SEQ ID NO: 74926 - RNA, 19 nt, Artificial Sequence
  Description of Artificial Sequence: Synthetic oligonucleotide
ucguuuaaauuuugcccaa

SEQ ID NO: 74927 - RNA, 19 nt, Artificial Sequence
  Description of Artificial Sequence: Synthetic oligonucleotide
acaucgguguacaaguacu

SEQ ID NO: 74928 - RNA, 19 nt, Artificial Sequence
  Description of Artificial Sequence: Synthetic oligonucleotide
ugcaaaggagugaauccuu

SEQ ID NO: 74929 - RNA, 19 nt, Artificial Sequence
  Description of Artificial Sequence: Synthetic oligonucleotide
aucaacuccaagaucuaga

SEQ ID NO: 74930 - RNA, 19 nt, Artificial Sequence
  Description of Artificial Sequence: Synthetic oligonucleotide
uaguuucaugacccuugcc

SEQ ID NO: 74931 - RNA, 19 nt, Artificial Sequence
  Description of Artificial Sequence: Synthetic oligonucleotide
agguuucuaucaguuaucu

SEQ ID NO: 74932 - RNA, 19 nt, Artificial Sequence
  Description of Artificial Sequence: Synthetic oligonucleotide
agucagaucugcacuagca

SEQ ID NO: 74933 - RNA, 19 nt, Artificial Sequence
  Description of Artificial Sequence: Synthetic oligonucleotide
auggaacuuuauccagcuc

SEQ ID NO: 74934 - RNA, 19 nt, Artificial Sequence
  Description of Artificial Sequence: Synthetic oligonucleotide
cuacagcaguccgaaaacc

SEQ ID NO: 74935 - RNA, 19 nt, Artificial Sequence
  Description of Artificial Sequence: Synthetic oligonucleotide
acgguuaauagcauugaau

SEQ ID NO: 74936 - RNA, 19 nt, Artificial Sequence
  Description of Artificial Sequence: Synthetic oligonucleotide
agaguguugauuagcaguu

SEQ ID NO: 74937 - RNA, 19 nt, Artificial Sequence
  Description of Artificial Sequence: Synthetic oligonucleotide
ugaaucugucauggauagg

SEQ ID NO: 74938 - RNA, 19 nt, Artificial Sequence
  Description of Artificial Sequence: Synthetic oligonucleotide
gauuagcaguucauggcca

SEQ ID NO: 74939 - RNA, 19 nt, Artificial Sequence
  Description of Artificial Sequence: Synthetic oligonucleotide
aggguaagauaaauggggu

SEQ ID NO: 74940 - RNA, 19 nt, Artificial Sequence
  Description of Artificial Sequence: Synthetic oligonucleotide
gaagagguguguaagacuu

SEQ ID NO: 74941 - RNA, 19 nt, Artificial Sequence
  Description of Artificial Sequence: Synthetic oligonucleotide
guggagagcagucaugugu

SEQ ID NO: 74942 - RNA, 19 nt, Artificial Sequence
  Description of Artificial Sequence: Synthetic oligonucleotide
ugacccauauacgcugccc

SEQ ID NO: 74943 - RNA, 19 nt, Artificial Sequence
  Description of Artificial Sequence: Synthetic oligonucleotide
aaccauuguuagcccauuu

SEQ ID NO: 74944 - RNA, 19 nt, Artificial Sequence
  Description of Artificial Sequence: Synthetic oligonucleotide
cagugaagugcuguauacc

SEQ ID NO: 74945 - RNA, 19 nt, Artificial Sequence
  Description of Artificial Sequence: Synthetic oligonucleotide
agcugauaauuuacaaugu

SEQ ID NO: 74946 - RNA, 19 nt, Artificial Sequence
  Description of Artificial Sequence: Synthetic oligonucleotide
cugcccaauggauggcacg

SEQ ID NO: 74947 - RNA, 19 nt, Artificial Sequence
  Description of Artificial Sequence: Synthetic oligonucleotide
ugucccguaguaagcacuu

SEQ ID NO: 74948 - RNA, 19 nt, Artificial Sequence
  Description of Artificial Sequence: Synthetic oligonucleotide
guaagauaaaugggguauc

SEQ ID NO: 74949 - RNA, 19 nt, Artificial Sequence
  Description of Artificial Sequence: Synthetic oligonucleotide
agaggcguuugcaaggcug

SEQ ID NO: 74950 - RNA, 19 nt, Artificial Sequence
  Description of Artificial Sequence: Synthetic oligonucleotide
cuccgacagaaucaagcug

SEQ ID NO: 74951 - RNA, 19 nt, Artificial Sequence
  Description of Artificial Sequence: Synthetic oligonucleotide
aggcagccaaauguaaaag

SEQ ID NO: 74952 - RNA, 19 nt, Artificial Sequence
  Description of Artificial Sequence: Synthetic oligonucleotide
gaggcguuugcaaggcugc

SEQ ID NO: 74953 - RNA, 19 nt, Artificial Sequence
  Description of Artificial Sequence: Synthetic oligonucleotide
gccgcaagcuaagugaagg

SEQ ID NO: 74954 - RNA, 19 nt, Artificial Sequence
  Description of Artificial Sequence: Synthetic oligonucleotide
uauagguguccgaccccug

SEQ ID NO: 74955 - RNA, 19 nt, Artificial Sequence
  Description of Artificial Sequence: Synthetic oligonucleotide
aggcuucgaagcuaacagu

SEQ ID NO: 74956 - RNA, 19 nt, Artificial Sequence
  Description of Artificial Sequence: Synthetic oligonucleotide
accauuguagcaagcccag

SEQ ID NO: 74957 - RNA, 19 nt, Artificial Sequence
  Description of Artificial Sequence: Synthetic oligonucleotide
cuagacgagacaggcauca

SEQ ID NO: 74958 - RNA, 19 nt, Artificial Sequence
  Description of Artificial Sequence: Synthetic oligonucleotide
aagcccgguuugaaguuuc

SEQ ID NO: 74959 - RNA, 19 nt, Artificial Sequence
  Description of Artificial Sequence: Synthetic oligonucleotide
cucaugaccauuguagcaa

SEQ ID NO: 74960 - RNA, 19 nt, Artificial Sequence
  Description of Artificial Sequence: Synthetic oligonucleotide
ugacccuugccgcaagcua

SEQ ID NO: 74961 - RNA, 19 nt, Artificial Sequence
  Description of Artificial Sequence: Synthetic oligonucleotide
uaugagagccaggcaguca

SEQ ID NO: 74962 - RNA, 19 nt, Artificial Sequence
  Description of Artificial Sequence: Synthetic oligonucleotide
caccucuagacaguagcag

SEQ ID NO: 74963 - RNA, 19 nt, Artificial Sequence
  Description of Artificial Sequence: Synthetic oligonucleotide
guuagcccauuucgggcag

SEQ ID NO: 74964 - RNA, 19 nt, Artificial Sequence
  Description of Artificial Sequence: Synthetic oligonucleotide
uagguguccgaccccugcu

SEQ ID NO: 74965 - RNA, 19 nt, Artificial Sequence
  Description of Artificial Sequence: Synthetic oligonucleotide
ucucuccgacagaaucaag

SEQ ID NO: 74966 - RNA, 19 nt, Artificial Sequence
  Description of Artificial Sequence: Synthetic oligonucleotide
agcucccugauuaaugagu

SEQ ID NO: 74967 - RNA, 19 nt, Artificial Sequence
  Description of Artificial Sequence: Synthetic oligonucleotide
augucuguucccgagguuu

SEQ ID NO: 74968 - RNA, 19 nt, Artificial Sequence
  Description of Artificial Sequence: Synthetic oligonucleotide
gaaaucucucuccgacaga

SEQ ID NO: 74969 - RNA, 19 nt, Artificial Sequence
  Description of Artificial Sequence: Synthetic oligonucleotide
aaagccuaauucagccuaa

SEQ ID NO: 74970 - RNA, 19 nt, Artificial Sequence
  Description of Artificial Sequence: Synthetic oligonucleotide
uugucuacuauggcuggau

SEQ ID NO: 74971 - RNA, 19 nt, Artificial Sequence
  Description of Artificial Sequence: Synthetic oligonucleotide
gaugagguuucuaucaguu

SEQ ID NO: 74972 - RNA, 19 nt, Artificial Sequence
  Description of Artificial Sequence: Synthetic oligonucleotide
auaggcagccaaauguaaa

SEQ ID NO: 74973 - RNA, 19 nt, Artificial Sequence
  Description of Artificial Sequence: Synthetic oligonucleotide
caguaguuccacacauguc

SEQ ID NO: 74974 - RNA, 19 nt, Artificial Sequence
  Description of Artificial Sequence: Synthetic oligonucleotide
gcauuauauccuugaaauc

SEQ ID NO: 74975 - RNA, 19 nt, Artificial Sequence
  Description of Artificial Sequence: Synthetic oligonucleotide
uaccacgcuuugcaguguc

SEQ ID NO: 74976 - RNA, 19 nt, Artificial Sequence
  Description of Artificial Sequence: Synthetic oligonucleotide
cauaccgggcugcuauaug

SEQ ID NO: 74977 - RNA, 19 nt, Artificial Sequence
  Description of Artificial Sequence: Synthetic oligonucleotide
aagcuaagugaagggcggu

SEQ ID NO: 74978 - RNA, 19 nt, Artificial Sequence
  Description of Artificial Sequence: Synthetic oligonucleotide
gguaagauaaaugggguau

SEQ ID NO: 74979 - RNA, 19 nt, Artificial Sequence
  Description of Artificial Sequence: Synthetic oligonucleotide
guucaauagugaguauaca

SEQ ID NO: 74980 - RNA, 19 nt, Artificial Sequence
  Description of Artificial Sequence: Synthetic oligonucleotide
ccuacagcaguccgaaaac

SEQ ID NO: 74981 - RNA, 19 nt, Artificial Sequence
  Description of Artificial Sequence: Synthetic oligonucleotide
cacaaugcaauggacugaa

SEQ ID NO: 74982 - RNA, 19 nt, Artificial Sequence
  Description of Artificial Sequence: Synthetic oligonucleotide
aaagcccgguuugaaguuu

SEQ ID NO: 74983 - RNA, 19 nt, Artificial Sequence
  Description of Artificial Sequence: Synthetic oligonucleotide
cccguaguaagcacuuagc

SEQ ID NO: 74984 - RNA, 19 nt, Artificial Sequence
  Description of Artificial Sequence: Synthetic oligonucleotide
guuuccuacagcaguccga

SEQ ID NO: 74985 - RNA, 19 nt, Artificial Sequence
  Description of Artificial Sequence: Synthetic oligonucleotide
uggcuccuaagguaucaau

SEQ ID NO: 74986 - RNA, 19 nt, Artificial Sequence
  Description of Artificial Sequence: Synthetic oligonucleotide
cuaagguaucaauaagcau

SEQ ID NO: 74987 - RNA, 19 nt, Artificial Sequence
  Description of Artificial Sequence: Synthetic oligonucleotide
gaccccugcugucccguag

SEQ ID NO: 74988 - RNA, 19 nt, Artificial Sequence
  Description of Artificial Sequence: Synthetic oligonucleotide
acccauauacgcugcccaa

SEQ ID NO: 74989 - RNA, 19 nt, Artificial Sequence
  Description of Artificial Sequence: Synthetic oligonucleotide
uguucccgagguuuccauu

SEQ ID NO: 74990 - RNA, 19 nt, Artificial Sequence
  Description of Artificial Sequence: Synthetic oligonucleotide
ccauauacgcugcccaaug

SEQ ID NO: 74991 - RNA, 19 nt, Artificial Sequence
  Description of Artificial Sequence: Synthetic oligonucleotide
acacacuacucuaggucug

SEQ ID NO: 74992 - RNA, 19 nt, Artificial Sequence
  Description of Artificial Sequence: Synthetic oligonucleotide
gacccuugccgcaagcuaa

SEQ ID NO: 74993 - RNA, 19 nt, Artificial Sequence
  Description of Artificial Sequence: Synthetic oligonucleotide
acgagacaggcaucauggu

SEQ ID NO: 74994 - RNA, 19 nt, Artificial Sequence
  Description of Artificial Sequence: Synthetic oligonucleotide
caaacacacuacucuaggu

SEQ ID NO: 74995 - RNA, 19 nt, Artificial Sequence
  Description of Artificial Sequence: Synthetic oligonucleotide
acugagaaagugacaguua

SEQ ID NO: 74996 - RNA, 19 nt, Artificial Sequence
  Description of Artificial Sequence: Synthetic oligonucleotide
agaguccacggaauugacu

SEQ ID NO: 74997 - RNA, 19 nt, Artificial Sequence
  Description of Artificial Sequence: Synthetic oligonucleotide
gugacccauauacgcugcc

SEQ ID NO: 74998 - RNA, 19 nt, Artificial Sequence
  Description of Artificial Sequence: Synthetic oligonucleotide
cacgucuaucuuucuuguc

SEQ ID NO: 74999 - RNA, 19 nt, Artificial Sequence
  Description of Artificial Sequence: Synthetic oligonucleotide
caaguguauagguguccga

SEQ ID NO: 75000 - RNA, 19 nt, Artificial Sequence
  Description of Artificial Sequence: Synthetic oligonucleotide
augauaggcaaggcuucga

SEQ ID NO: 75001 - RNA, 19 nt, Artificial Sequence
  Description of Artificial Sequence: Synthetic oligonucleotide
cagugucagaacuuccuua

SEQ ID NO: 75002 - RNA, 19 nt, Artificial Sequence
  Description of Artificial Sequence: Synthetic oligonucleotide
cugaguaaugaacugcauu

SEQ ID NO: 75003 - RNA, 19 nt, Artificial Sequence
  Description of Artificial Sequence: Synthetic oligonucleotide
augacccuugccgcaagcu

SEQ ID NO: 75004 - RNA, 19 nt, Artificial Sequence
  Description of Artificial Sequence: Synthetic oligonucleotide
aaucuaccguggagagcag

SEQ ID NO: 75005 - RNA, 19 nt, Artificial Sequence
  Description of Artificial Sequence: Synthetic oligonucleotide
guagugggguuuucccauc

SEQ ID NO: 75006 - RNA, 19 nt, Artificial Sequence
  Description of Artificial Sequence: Synthetic oligonucleotide
gguguguaagacuucuuau

SEQ ID NO: 75007 - RNA, 19 nt, Artificial Sequence
  Description of Artificial Sequence: Synthetic oligonucleotide
acacuacucuaggucugag

SEQ ID NO: 75008 - RNA, 19 nt, Artificial Sequence
  Description of Artificial Sequence: Synthetic oligonucleotide
agguaucaauaagcaucuc

SEQ ID NO: 75009 - RNA, 19 nt, Artificial Sequence
  Description of Artificial Sequence: Synthetic oligonucleotide
ccgcaagcuaagugaaggg

SEQ ID NO: 75010 - RNA, 19 nt, Artificial Sequence
  Description of Artificial Sequence: Synthetic oligonucleotide
gagugggaacaucccaugu

SEQ ID NO: 75011 - RNA, 19 nt, Artificial Sequence
  Description of Artificial Sequence: Synthetic oligonucleotide
guguugguauaacgguuaa

SEQ ID NO: 75012 - RNA, 19 nt, Artificial Sequence
  Description of Artificial Sequence: Synthetic oligonucleotide
cuggagaaucuaccgugga

SEQ ID NO: 75013 - RNA, 19 nt, Artificial Sequence
  Description of Artificial Sequence: Synthetic oligonucleotide
ggguaagauaaauggggua

SEQ ID NO: 75014 - RNA, 19 nt, Artificial Sequence
  Description of Artificial Sequence: Synthetic oligonucleotide
agcaguccgaaaaccacuu

SEQ ID NO: 75015 - RNA, 19 nt, Artificial Sequence
  Description of Artificial Sequence: Synthetic oligonucleotide
guauagguguccgaccccu

SEQ ID NO: 75016 - RNA, 19 nt, Artificial Sequence
  Description of Artificial Sequence: Synthetic oligonucleotide
cgaggauugaagcucccug

SEQ ID NO: 75017 - RNA, 19 nt, Artificial Sequence
  Description of Artificial Sequence: Synthetic oligonucleotide
ucgauccgauacguucaca

SEQ ID NO: 75018 - RNA, 19 nt, Artificial Sequence
  Description of Artificial Sequence: Synthetic oligonucleotide
acacaguccguguguccau

SEQ ID NO: 75019 - RNA, 19 nt, Artificial Sequence
  Description of Artificial Sequence: Synthetic oligonucleotide
agugggguuuucccaucuu

SEQ ID NO: 75020 - RNA, 19 nt, Artificial Sequence
  Description of Artificial Sequence: Synthetic oligonucleotide
cagcauaagaggugucugu

SEQ ID NO: 75021 - RNA, 19 nt, Artificial Sequence
  Description of Artificial Sequence: Synthetic oligonucleotide
cucucuccgacagaaucaa

SEQ ID NO: 75022 - RNA, 19 nt, Artificial Sequence
  Description of Artificial Sequence: Synthetic oligonucleotide
ccuugccgcaagcuaagug

SEQ ID NO: 75023 - RNA, 19 nt, Artificial Sequence
  Description of Artificial Sequence: Synthetic oligonucleotide
accguggagagcagucaug

SEQ ID NO: 75024 - RNA, 19 nt, Artificial Sequence
  Description of Artificial Sequence: Synthetic oligonucleotide
acccuugccgcaagcuaag

SEQ ID NO: 75025 - RNA, 19 nt, Artificial Sequence
  Description of Artificial Sequence: Synthetic oligonucleotide
cugaaucacucagcauguc

SEQ ID NO: 75026 - RNA, 19 nt, Artificial Sequence
  Description of Artificial Sequence: Synthetic oligonucleotide
cgcaagcuaagugaagggc

SEQ ID NO: 75027 - RNA, 19 nt, Artificial Sequence
  Description of Artificial Sequence: Synthetic oligonucleotide
cuugagcauuauggcugag

SEQ ID NO: 75028 - RNA, 19 nt, Artificial Sequence
  Description of Artificial Sequence: Synthetic oligonucleotide
gcagaggcguuugcaaggc

SEQ ID NO: 75029 - RNA, 19 nt, Artificial Sequence
  Description of Artificial Sequence: Synthetic oligonucleotide
cacacuacucuaggucuga

SEQ ID NO: 75030 - RNA, 19 nt, Artificial Sequence
  Description of Artificial Sequence: Synthetic oligonucleotide
gcugucccguaguaagcac

SEQ ID NO: 75031 - RNA, 19 nt, Artificial Sequence
  Description of Artificial Sequence: Synthetic oligonucleotide
uagacgagacaggcaucau

SEQ ID NO: 75032 - RNA, 19 nt, Artificial Sequence
  Description of Artificial Sequence: Synthetic oligonucleotide
cguuugcaaggcugcauug

SEQ ID NO: 75033 - RNA, 19 nt, Artificial Sequence
  Description of Artificial Sequence: Synthetic oligonucleotide
gcuguauacccaugauugu

SEQ ID NO: 75034 - RNA, 19 nt, Artificial Sequence
  Description of Artificial Sequence: Synthetic oligonucleotide
ggccaauaugagagccagg

SEQ ID NO: 75035 - RNA, 19 nt, Artificial Sequence
  Description of Artificial Sequence: Synthetic oligonucleotide
gugggguuuucccaucuuu

SEQ ID NO: 75036 - RNA, 19 nt, Artificial Sequence
  Description of Artificial Sequence: Synthetic oligonucleotide
gcuuauuuguugcucuauu

SEQ ID NO: 75037 - RNA, 19 nt, Artificial Sequence
  Description of Artificial Sequence: Synthetic oligonucleotide
gcccaauauagaaaugccu

SEQ ID NO: 75038 - RNA, 19 nt, Artificial Sequence
  Description of Artificial Sequence: Synthetic oligonucleotide
guauaacgguuaauagcau

SEQ ID NO: 75039 - RNA, 19 nt, Artificial Sequence
  Description of Artificial Sequence: Synthetic oligonucleotide
ccacuaguaauaagagugu

SEQ ID NO: 75040 - RNA, 19 nt, Artificial Sequence
  Description of Artificial Sequence: Synthetic oligonucleotide
gcacgucuaucuuucuugu

SEQ ID NO: 75041 - RNA, 19 nt, Artificial Sequence
  Description of Artificial Sequence: Synthetic oligonucleotide
ggccauaccgggcugcuau

SEQ ID NO: 75042 - RNA, 19 nt, Artificial Sequence
  Description of Artificial Sequence: Synthetic oligonucleotide
cacuaguaauaagaguguu

SEQ ID NO: 75043 - RNA, 19 nt, Artificial Sequence
  Description of Artificial Sequence: Synthetic oligonucleotide
gcaaggucuaaggguguuc

SEQ ID NO: 75044 - RNA, 19 nt, Artificial Sequence
  Description of Artificial Sequence: Synthetic oligonucleotide
gcccgguuugaaguuucag

SEQ ID NO: 75045 - RNA, 19 nt, Artificial Sequence
  Description of Artificial Sequence: Synthetic oligonucleotide
cugcaauaggagcuagguu

SEQ ID NO: 75046 - RNA, 19 nt, Artificial Sequence
  Description of Artificial Sequence: Synthetic oligonucleotide
cgacggcaaguacacuugc

SEQ ID NO: 75047 - RNA, 19 nt, Artificial Sequence
  Description of Artificial Sequence: Synthetic oligonucleotide
gccccauugccaaccagga

SEQ ID NO: 75048 - RNA, 19 nt, Artificial Sequence
  Description of Artificial Sequence: Synthetic oligonucleotide
agcccgguuugaaguuuca

SEQ ID NO: 75049 - RNA, 19 nt, Artificial Sequence
  Description of Artificial Sequence: Synthetic oligonucleotide
gcuauaugcaaaggguguu

SEQ ID NO: 75050 - RNA, 19 nt, Artificial Sequence
  Description of Artificial Sequence: Synthetic oligonucleotide
gcaauggacugaaagcauu

SEQ ID NO: 75051 - RNA, 19 nt, Artificial Sequence
  Description of Artificial Sequence: Synthetic oligonucleotide
ggauugaagcucccugauu

SEQ ID NO: 75052 - RNA, 19 nt, Artificial Sequence
  Description of Artificial Sequence: Synthetic oligonucleotide
cgauccgauacguucacau

SEQ ID NO: 75053 - RNA, 19 nt, Artificial Sequence
  Description of Artificial Sequence: Synthetic oligonucleotide
cccauguauaccacgcuuu

SEQ ID NO: 75054 - RNA, 19 nt, Artificial Sequence
  Description of Artificial Sequence: Synthetic oligonucleotide
gcaguccgaaaaccacuua

SEQ ID NO: 75055 - RNA, 19 nt, Artificial Sequence
  Description of Artificial Sequence: Synthetic oligonucleotide
gucccguaguaagcacuua

SEQ ID NO: 75056 - RNA, 19 nt, Artificial Sequence
  Description of Artificial Sequence: Synthetic oligonucleotide
gcuucgaagcuaacaguuu

SEQ ID NO: 75057 - RNA, 19 nt, Artificial Sequence
  Description of Artificial Sequence: Synthetic oligonucleotide
gcugaguaaugaacugcau

SEQ ID NO: 75058 - RNA, 19 nt, Artificial Sequence
  Description of Artificial Sequence: Synthetic oligonucleotide
ccacaucgguguacaagua

SEQ ID NO: 75059 - RNA, 19 nt, Artificial Sequence
  Description of Artificial Sequence: Synthetic oligonucleotide
gccauaccgggcugcuaua

SEQ ID NO: 75060 - RNA, 19 nt, Artificial Sequence
  Description of Artificial Sequence: Synthetic oligonucleotide
caucgacggcaaguacacu

SEQ ID NO: 75061 - RNA, 19 nt, Artificial Sequence
  Description of Artificial Sequence: Synthetic oligonucleotide
cugcucgauccgauacguu

SEQ ID NO: 75062 - RNA, 19 nt, Artificial Sequence
  Description of Artificial Sequence: Synthetic oligonucleotide
ccauaccgggcugcuauau

SEQ ID NO: 75063 - RNA, 19 nt, Artificial Sequence
  Description of Artificial Sequence: Synthetic oligonucleotide
ccauuguagcaagcccagu

SEQ ID NO: 75064 - RNA, 19 nt, Artificial Sequence
  Description of Artificial Sequence: Synthetic oligonucleotide
ccgaccccugcugucccgu

SEQ ID NO: 75065 - RNA, 19 nt, Artificial Sequence
  Description of Artificial Sequence: Synthetic oligonucleotide
cccuugccgcaagcuaagu

SEQ ID NO: 75066 - RNA, 19 nt, Artificial Sequence
  Description of Artificial Sequence: Synthetic oligonucleotide
aauaaugaaguguugaaag

SEQ ID NO: 75067 - RNA, 19 nt, Artificial Sequence
  Description of Artificial Sequence: Synthetic oligonucleotide
aguuaagagacacacaggg

SEQ ID NO: 75068 - RNA, 19 nt, Artificial Sequence
  Description of Artificial Sequence: Synthetic oligonucleotide
ucugaucuaaugcacaugc

SEQ ID NO: 75069 - RNA, 19 nt, Artificial Sequence
  Description of Artificial Sequence: Synthetic oligonucleotide
uauaauacugcaccaagca

SEQ ID NO: 75070 - RNA, 19 nt, Artificial Sequence
  Description of Artificial Sequence: Synthetic oligonucleotide
aaauuuaccuaagaagggg

SEQ ID NO: 75071 - RNA, 19 nt, Artificial Sequence
  Description of Artificial Sequence: Synthetic oligonucleotide
cuuccagccgacuagaugg

SEQ ID NO: 75072 - RNA, 19 nt, Artificial Sequence
  Description of Artificial Sequence: Synthetic oligonucleotide
guugccuuaaaucacagug

SEQ ID NO: 75073 - RNA, 19 nt, Artificial Sequence
  Description of Artificial Sequence: Synthetic oligonucleotide
aaaauuuaccuaagaaggg

SEQ ID NO: 75074 - RNA, 19 nt, Artificial Sequence
  Description of Artificial Sequence: Synthetic oligonucleotide
ucaauaacaugcccagucg

SEQ ID NO: 75075 - RNA, 19 nt, Artificial Sequence
  Description of Artificial Sequence: Synthetic oligonucleotide
ugugauauucuccaaauuu

SEQ ID NO: 75076 - RNA, 19 nt, Artificial Sequence
  Description of Artificial Sequence: Synthetic oligonucleotide
accaaagcccauuuuaaac

SEQ ID NO: 75077 - RNA, 19 nt, Artificial Sequence
  Description of Artificial Sequence: Synthetic oligonucleotide
aaguaucaaccacauagag

SEQ ID NO: 75078 - RNA, 19 nt, Artificial Sequence
  Description of Artificial Sequence: Synthetic oligonucleotide
aacacuuguaagcuaacgu

SEQ ID NO: 75079 - RNA, 19 nt, Artificial Sequence
  Description of Artificial Sequence: Synthetic oligonucleotide
acacuuguaagcuaacguc

SEQ ID NO: 75080 - RNA, 19 nt, Artificial Sequence
  Description of Artificial Sequence: Synthetic oligonucleotide
caugccaggaucuuauugg

SEQ ID NO: 75081 - RNA, 19 nt, Artificial Sequence
  Description of Artificial Sequence: Synthetic oligonucleotide
ugugugcuaaaacaaacac

SEQ ID NO: 75082 - RNA, 19 nt, Artificial Sequence
  Description of Artificial Sequence: Synthetic oligonucleotide
ugaaugauacuaaucaaua

SEQ ID NO: 75083 - RNA, 19 nt, Artificial Sequence
  Description of Artificial Sequence: Synthetic oligonucleotide
ugaucuaaugcacaugcgu

SEQ ID NO: 75084 - RNA, 19 nt, Artificial Sequence
  Description of Artificial Sequence: Synthetic oligonucleotide
caucuguaagaauaggugc

SEQ ID NO: 75085 - RNA, 19 nt, Artificial Sequence
  Description of Artificial Sequence: Synthetic oligonucleotide
ggaacaaccauucucguag

SEQ ID NO: 75086 - RNA, 19 nt, Artificial Sequence
  Description of Artificial Sequence: Synthetic oligonucleotide
aaagcagaccauucuaacu

SEQ ID NO: 75087 - RNA, 19 nt, Artificial Sequence
  Description of Artificial Sequence: Synthetic oligonucleotide
auauuuuagcuuaaucuac

SEQ ID NO: 75088 - RNA, 19 nt, Artificial Sequence
  Description of Artificial Sequence: Synthetic oligonucleotide
uauagaauaggguguacgu

SEQ ID NO: 75089 - RNA, 19 nt, Artificial Sequence
  Description of Artificial Sequence: Synthetic oligonucleotide
guuugcuugaauaaugaag

SEQ ID NO: 75090 - RNA, 19 nt, Artificial Sequence
  Description of Artificial Sequence: Synthetic oligonucleotide
aaaauaguguuaaaauacu

SEQ ID NO: 75091 - RNA, 19 nt, Artificial Sequence
  Description of Artificial Sequence: Synthetic oligonucleotide
aaguacacucaaguagucc

SEQ ID NO: 75092 - RNA, 19 nt, Artificial Sequence
  Description of Artificial Sequence: Synthetic oligonucleotide
aguugaguauaacaauuag

SEQ ID NO: 75093 - RNA, 19 nt, Artificial Sequence
  Description of Artificial Sequence: Synthetic oligonucleotide
aguacacucaaguaguccu

SEQ ID NO: 75094 - RNA, 19 nt, Artificial Sequence
  Description of Artificial Sequence: Synthetic oligonucleotide
auucaguucagauauccca

SEQ ID NO: 75095 - RNA, 19 nt, Artificial Sequence
  Description of Artificial Sequence: Synthetic oligonucleotide
agcauauguagguggaaac

SEQ ID NO: 75096 - RNA, 19 nt, Artificial Sequence
  Description of Artificial Sequence: Synthetic oligonucleotide
uccaaucucguuuucagac

SEQ ID NO: 75097 - RNA, 19 nt, Artificial Sequence
  Description of Artificial Sequence: Synthetic oligonucleotide
auaaaggauucaaaacugc

SEQ ID NO: 75098 - RNA, 19 nt, Artificial Sequence
  Description of Artificial Sequence: Synthetic oligonucleotide
accuaagcacaucuggccc

SEQ ID NO: 75099 - RNA, 19 nt, Artificial Sequence
  Description of Artificial Sequence: Synthetic oligonucleotide
ugcguagaugucaauaaca

SEQ ID NO: 75100 - RNA, 19 nt, Artificial Sequence
  Description of Artificial Sequence: Synthetic oligonucleotide
agugucaauguaucucggc

SEQ ID NO: 75101 - RNA, 19 nt, Artificial Sequence
  Description of Artificial Sequence: Synthetic oligonucleotide
uguaucucggcauuggaaa

SEQ ID NO: 75102 - RNA, 19 nt, Artificial Sequence
  Description of Artificial Sequence: Synthetic oligonucleotide
ucugcaauacaaagcagac

SEQ ID NO: 75103 - RNA, 19 nt, Artificial Sequence
  Description of Artificial Sequence: Synthetic oligonucleotide
aaauaguguuaaaauacug

SEQ ID NO: 75104 - RNA, 19 nt, Artificial Sequence
  Description of Artificial Sequence: Synthetic oligonucleotide
auauagaauaggguguacg

SEQ ID NO: 75105 - RNA, 19 nt, Artificial Sequence
  Description of Artificial Sequence: Synthetic oligonucleotide
aacugauuccuuuggcaag

SEQ ID NO: 75106 - RNA, 19 nt, Artificial Sequence
  Description of Artificial Sequence: Synthetic oligonucleotide
aaacacuuguaagcuaacg

SEQ ID NO: 75107 - RNA, 19 nt, Artificial Sequence
  Description of Artificial Sequence: Synthetic oligonucleotide
gcugcuauuaaauacuccc

SEQ ID NO: 75108 - RNA, 19 nt, Artificial Sequence
  Description of Artificial Sequence: Synthetic oligonucleotide
uucgaguuaagagacacac

SEQ ID NO: 75109 - RNA, 19 nt, Artificial Sequence
  Description of Artificial Sequence: Synthetic oligonucleotide
uccuuucgaguuaagagac

SEQ ID NO: 75110 - RNA, 19 nt, Artificial Sequence
  Description of Artificial Sequence: Synthetic oligonucleotide
uaagcuaacgucaucugua

SEQ ID NO: 75111 - RNA, 19 nt, Artificial Sequence
  Description of Artificial Sequence: Synthetic oligonucleotide
aucuugacgcaugaaaugg

SEQ ID NO: 75112 - RNA, 19 nt, Artificial Sequence
  Description of Artificial Sequence: Synthetic oligonucleotide
accacauagagaaauauca

SEQ ID NO: 75113 - RNA, 19 nt, Artificial Sequence
  Description of Artificial Sequence: Synthetic oligonucleotide
uuuggaaaggaggaaacgu

SEQ ID NO: 75114 - RNA, 19 nt, Artificial Sequence
  Description of Artificial Sequence: Synthetic oligonucleotide
aucuaaugcacaugcguag

SEQ ID NO: 75115 - RNA, 19 nt, Artificial Sequence
  Description of Artificial Sequence: Synthetic oligonucleotide
uagugcuugauccuuauuu

SEQ ID NO: 75116 - RNA, 19 nt, Artificial Sequence
  Description of Artificial Sequence: Synthetic oligonucleotide
gaucuugacgcaugaaaug

SEQ ID NO: 75117 - RNA, 19 nt, Artificial Sequence
  Description of Artificial Sequence: Synthetic oligonucleotide
uguauauugccagucgggc

SEQ ID NO: 75118 - RNA, 19 nt, Artificial Sequence
  Description of Artificial Sequence: Synthetic oligonucleotide
aauggugugggucauccuu

SEQ ID NO: 75119 - RNA, 19 nt, Artificial Sequence
  Description of Artificial Sequence: Synthetic oligonucleotide
uucacuauuuaauguuagc

SEQ ID NO: 75120 - RNA, 19 nt, Artificial Sequence
  Description of Artificial Sequence: Synthetic oligonucleotide
uugcucuuauauuuuagcu

SEQ ID NO: 75121 - RNA, 19 nt, Artificial Sequence
  Description of Artificial Sequence: Synthetic oligonucleotide
aaccacauagagaaauauc

SEQ ID NO: 75122 - RNA, 19 nt, Artificial Sequence
  Description of Artificial Sequence: Synthetic oligonucleotide
aauaggguguacgugugug

SEQ ID NO: 75123 - RNA, 19 nt, Artificial Sequence
  Description of Artificial Sequence: Synthetic oligonucleotide
aauaggugcuccagacucc

SEQ ID NO: 75124 - RNA, 19 nt, Artificial Sequence
  Description of Artificial Sequence: Synthetic oligonucleotide
cucggcauuggaaaucugg

SEQ ID NO: 75125 - RNA, 19 nt, Artificial Sequence
  Description of Artificial Sequence: Synthetic oligonucleotide
uaagaaucuauuggaagga

SEQ ID NO: 75126 - RNA, 19 nt, Artificial Sequence
  Description of Artificial Sequence: Synthetic oligonucleotide
aauuuaccuaagaagggga

SEQ ID NO: 75127 - RNA, 19 nt, Artificial Sequence
  Description of Artificial Sequence: Synthetic oligonucleotide
auacauguuauuaugaguu

SEQ ID NO: 75128 - RNA, 19 nt, Artificial Sequence
  Description of Artificial Sequence: Synthetic oligonucleotide
cuguauauugccagucggg

SEQ ID NO: 75129 - RNA, 19 nt, Artificial Sequence
  Description of Artificial Sequence: Synthetic oligonucleotide
uguacgugugugcuaaaac

SEQ ID NO: 75130 - RNA, 19 nt, Artificial Sequence
  Description of Artificial Sequence: Synthetic oligonucleotide
ggaguaauauuucaucuug

SEQ ID NO: 75131 - RNA, 19 nt, Artificial Sequence
  Description of Artificial Sequence: Synthetic oligonucleotide
uuugccaucgucugauugu

SEQ ID NO: 75132 - RNA, 19 nt, Artificial Sequence
  Description of Artificial Sequence: Synthetic oligonucleotide
ugauccauaaacacuugua

SEQ ID NO: 75133 - RNA, 19 nt, Artificial Sequence
  Description of Artificial Sequence: Synthetic oligonucleotide
aacugaaccggaccccauc

SEQ ID NO: 75134 - RNA, 19 nt, Artificial Sequence
  Description of Artificial Sequence: Synthetic oligonucleotide
accggaacaaccauucucg

SEQ ID NO: 75135 - RNA, 19 nt, Artificial Sequence
  Description of Artificial Sequence: Synthetic oligonucleotide
uacgugugugcuaaaacaa

SEQ ID NO: 75136 - RNA, 19 nt, Artificial Sequence
  Description of Artificial Sequence: Synthetic oligonucleotide
uacauggcuaagguugucg

SEQ ID NO: 75137 - RNA, 19 nt, Artificial Sequence
  Description of Artificial Sequence: Synthetic oligonucleotide
augcguagaugucaauaac

SEQ ID NO: 75138 - RNA, 19 nt, Artificial Sequence
  Description of Artificial Sequence: Synthetic oligonucleotide
uguccguguauaucuuugg

SEQ ID NO: 75139 - RNA, 19 nt, Artificial Sequence
  Description of Artificial Sequence: Synthetic oligonucleotide
guugucgugggacugaguc

SEQ ID NO: 75140 - RNA, 19 nt, Artificial Sequence
  Description of Artificial Sequence: Synthetic oligonucleotide
ucccagcauauguaggugg

SEQ ID NO: 75141 - RNA, 19 nt, Artificial Sequence
  Description of Artificial Sequence: Synthetic oligonucleotide
ucuaugcaaguaucaacca

SEQ ID NO: 75142 - RNA, 19 nt, Artificial Sequence
  Description of Artificial Sequence: Synthetic oligonucleotide
uguauaucuuugguaaaga

SEQ ID NO: 75143 - RNA, 19 nt, Artificial Sequence
  Description of Artificial Sequence: Synthetic oligonucleotide
ucggcauuggaaaucugga

SEQ ID NO: 75144 - RNA, 19 nt, Artificial Sequence
  Description of Artificial Sequence: Synthetic oligonucleotide
ucaaaagaugcagcaaugu

SEQ ID NO: 75145 - RNA, 19 nt, Artificial Sequence
  Description of Artificial Sequence: Synthetic oligonucleotide
uguaagcuaacgucaucug

SEQ ID NO: 75146 - RNA, 19 nt, Artificial Sequence
  Description of Artificial Sequence: Synthetic oligonucleotide
guacgugugugcuaaaaca

SEQ ID NO: 75147 - RNA, 19 nt, Artificial Sequence
  Description of Artificial Sequence: Synthetic oligonucleotide
aaaguacacucaaguaguc

SEQ ID NO: 75148 - RNA, 19 nt, Artificial Sequence
  Description of Artificial Sequence: Synthetic oligonucleotide
aguuccuagcaauuguggu

SEQ ID NO: 75149 - RNA, 19 nt, Artificial Sequence
  Description of Artificial Sequence: Synthetic oligonucleotide
cuugaauaaugaaguguug

SEQ ID NO: 75150 - RNA, 19 nt, Artificial Sequence
  Description of Artificial Sequence: Synthetic oligonucleotide
caaccauucucguagcuuc

SEQ ID NO: 75151 - RNA, 19 nt, Artificial Sequence
  Description of Artificial Sequence: Synthetic oligonucleotide
auagguugucauuguagug

SEQ ID NO: 75152 - RNA, 19 nt, Artificial Sequence
  Description of Artificial Sequence: Synthetic oligonucleotide
auaacaugcccagucguag

SEQ ID NO: 75153 - RNA, 19 nt, Artificial Sequence
  Description of Artificial Sequence: Synthetic oligonucleotide
acaaauuguacugcaccuc

SEQ ID NO: 75154 - RNA, 19 nt, Artificial Sequence
  Description of Artificial Sequence: Synthetic oligonucleotide
acauguuauuaugaguuug

SEQ ID NO: 75155 - RNA, 19 nt, Artificial Sequence
  Description of Artificial Sequence: Synthetic oligonucleotide
cuugacgcaugaaauggug

SEQ ID NO: 75156 - RNA, 19 nt, Artificial Sequence
  Description of Artificial Sequence: Synthetic oligonucleotide
guagcuuccagccgacuag

SEQ ID NO: 75157 - RNA, 19 nt, Artificial Sequence
  Description of Artificial Sequence: Synthetic oligonucleotide
uacgucucugcccacuuga

SEQ ID NO: 75158 - RNA, 19 nt, Artificial Sequence
  Description of Artificial Sequence: Synthetic oligonucleotide
agucguagcagcccgauua

SEQ ID NO: 75159 - RNA, 19 nt, Artificial Sequence
  Description of Artificial Sequence: Synthetic oligonucleotide
uggucacucgaauacgucu

SEQ ID NO: 75160 - RNA, 19 nt, Artificial Sequence
  Description of Artificial Sequence: Synthetic oligonucleotide
uucaugcaaguucaaucac

SEQ ID NO: 75161 - RNA, 19 nt, Artificial Sequence
  Description of Artificial Sequence: Synthetic oligonucleotide
gcccauuuuaaacuguccg

SEQ ID NO: 75162 - RNA, 19 nt, Artificial Sequence
  Description of Artificial Sequence: Synthetic oligonucleotide
uggcgggccacuaaaagaa

SEQ ID NO: 75163 - RNA, 19 nt, Artificial Sequence
  Description of Artificial Sequence: Synthetic oligonucleotide
guccuuagcaacuaucaga

SEQ ID NO: 75164 - RNA, 19 nt, Artificial Sequence
  Description of Artificial Sequence: Synthetic oligonucleotide
caccuaagcacaucuggcc

SEQ ID NO: 75165 - RNA, 19 nt, Artificial Sequence
  Description of Artificial Sequence: Synthetic oligonucleotide
ugcacaugcguagauguca

SEQ ID NO: 75166 - RNA, 19 nt, Artificial Sequence
  Description of Artificial Sequence: Synthetic oligonucleotide
gaaaguacacucaaguagu

SEQ ID NO: 75167 - RNA, 19 nt, Artificial Sequence
  Description of Artificial Sequence: Synthetic oligonucleotide
guccuacagcuauagaaag

SEQ ID NO: 75168 - RNA, 19 nt, Artificial Sequence
  Description of Artificial Sequence: Synthetic oligonucleotide
aguaguccuacagcuauag

SEQ ID NO: 75169 - RNA, 19 nt, Artificial Sequence
  Description of Artificial Sequence: Synthetic oligonucleotide
ugguaaagacucuuugaaa

SEQ ID NO: 75170 - RNA, 19 nt, Artificial Sequence
  Description of Artificial Sequence: Synthetic oligonucleotide
ugucgugggacugagucca

SEQ ID NO: 75171 - RNA, 19 nt, Artificial Sequence
  Description of Artificial Sequence: Synthetic oligonucleotide
gacgcaugaaauggugugg

SEQ ID NO: 75172 - RNA, 19 nt, Artificial Sequence
  Description of Artificial Sequence: Synthetic oligonucleotide
guugaguauaacaauuaga

SEQ ID NO: 75173 - RNA, 19 nt, Artificial Sequence
  Description of Artificial Sequence: Synthetic oligonucleotide
aggaaacgugccuggcugc

SEQ ID NO: 75174 - RNA, 19 nt, Artificial Sequence
  Description of Artificial Sequence: Synthetic oligonucleotide
augguuaauagugugggaa

SEQ ID NO: 75175 - RNA, 19 nt, Artificial Sequence
  Description of Artificial Sequence: Synthetic oligonucleotide
ugaaagagucacccauuac

SEQ ID NO: 75176 - RNA, 19 nt, Artificial Sequence
  Description of Artificial Sequence: Synthetic oligonucleotide
ucuugacgcaugaaauggu

SEQ ID NO: 75177 - RNA, 19 nt, Artificial Sequence
  Description of Artificial Sequence: Synthetic oligonucleotide
agagagggaucucuguugu

SEQ ID NO: 75178 - RNA, 19 nt, Artificial Sequence
  Description of Artificial Sequence: Synthetic oligonucleotide
aguaucaaccacauagaga

SEQ ID NO: 75179 - RNA, 19 nt, Artificial Sequence
  Description of Artificial Sequence: Synthetic oligonucleotide
aacuaucagagcaccaccu

SEQ ID NO: 75180 - RNA, 19 nt, Artificial Sequence
  Description of Artificial Sequence: Synthetic oligonucleotide
aagcuaacgucaucuguaa

SEQ ID NO: 75181 - RNA, 19 nt, Artificial Sequence
  Description of Artificial Sequence: Synthetic oligonucleotide
uccuacagcuauagaaagu

SEQ ID NO: 75182 - RNA, 19 nt, Artificial Sequence
  Description of Artificial Sequence: Synthetic oligonucleotide
cacuuguaagcuaacguca

SEQ ID NO: 75183 - RNA, 19 nt, Artificial Sequence
  Description of Artificial Sequence: Synthetic oligonucleotide
gugugcuaaaacaaacacc

SEQ ID NO: 75184 - RNA, 19 nt, Artificial Sequence
  Description of Artificial Sequence: Synthetic oligonucleotide
ucuaaugcacaugcguaga

SEQ ID NO: 75185 - RNA, 19 nt, Artificial Sequence
  Description of Artificial Sequence: Synthetic oligonucleotide
uggaguaauauuucaucuu

SEQ ID NO: 75186 - RNA, 19 nt, Artificial Sequence
  Description of Artificial Sequence: Synthetic oligonucleotide
gaacaucaugauccgagca

SEQ ID NO: 75187 - RNA, 19 nt, Artificial Sequence
  Description of Artificial Sequence: Synthetic oligonucleotide
cugaucuaaugcacaugcg

SEQ ID NO: 75188 - RNA, 19 nt, Artificial Sequence
  Description of Artificial Sequence: Synthetic oligonucleotide
aaacugcucggcaaguugu

SEQ ID NO: 75189 - RNA, 19 nt, Artificial Sequence
  Description of Artificial Sequence: Synthetic oligonucleotide
cacuugcaacacaugauac

SEQ ID NO: 75190 - RNA, 19 nt, Artificial Sequence
  Description of Artificial Sequence: Synthetic oligonucleotide
ugguuaauagugugggaau

SEQ ID NO: 75191 - RNA, 19 nt, Artificial Sequence
  Description of Artificial Sequence: Synthetic oligonucleotide
uuguccuacugcacaagac

SEQ ID NO: 75192 - RNA, 19 nt, Artificial Sequence
  Description of Artificial Sequence: Synthetic oligonucleotide
ugcgucaucuacuggggcu

SEQ ID NO: 75193 - RNA, 19 nt, Artificial Sequence
  Description of Artificial Sequence: Synthetic oligonucleotide
aucuguaagaauaggugcu

SEQ ID NO: 75194 - RNA, 19 nt, Artificial Sequence
  Description of Artificial Sequence: Synthetic oligonucleotide
uuaaacaguugaguauaac

SEQ ID NO: 75195 - RNA, 19 nt, Artificial Sequence
  Description of Artificial Sequence: Synthetic oligonucleotide
gaccggaacaaccauucuc

SEQ ID NO: 75196 - RNA, 19 nt, Artificial Sequence
  Description of Artificial Sequence: Synthetic oligonucleotide
uaaugcacaugcguagaug

SEQ ID NO: 75197 - RNA, 19 nt, Artificial Sequence
  Description of Artificial Sequence: Synthetic oligonucleotide
caucuucuaugcaaguauc

SEQ ID NO: 75198 - RNA, 19 nt, Artificial Sequence
  Description of Artificial Sequence: Synthetic oligonucleotide
uccguguauaucuuuggua

SEQ ID NO: 75199 - RNA, 19 nt, Artificial Sequence
  Description of Artificial Sequence: Synthetic oligonucleotide
cuccuuuagagguguaaac

SEQ ID NO: 75200 - RNA, 19 nt, Artificial Sequence
  Description of Artificial Sequence: Synthetic oligonucleotide
gcauuggaaaucuggagug

SEQ ID NO: 75201 - RNA, 19 nt, Artificial Sequence
  Description of Artificial Sequence: Synthetic oligonucleotide
caaguaucaaccacauaga

SEQ ID NO: 75202 - RNA, 19 nt, Artificial Sequence
  Description of Artificial Sequence: Synthetic oligonucleotide
ugcuugaaaacugggguaa

SEQ ID NO: 75203 - RNA, 19 nt, Artificial Sequence
  Description of Artificial Sequence: Synthetic oligonucleotide
gcuaacgucaucuguaaga

SEQ ID NO: 75204 - RNA, 19 nt, Artificial Sequence
  Description of Artificial Sequence: Synthetic oligonucleotide
gauccgagcaccaguguug

SEQ ID NO: 75205 - RNA, 19 nt, Artificial Sequence
  Description of Artificial Sequence: Synthetic oligonucleotide
acgcaugaaaugguguggg

SEQ ID NO: 75206 - RNA, 19 nt, Artificial Sequence
  Description of Artificial Sequence: Synthetic oligonucleotide
aguauaacaauuagauguu

SEQ ID NO: 75207 - RNA, 19 nt, Artificial Sequence
  Description of Artificial Sequence: Synthetic oligonucleotide
gccaccuaagcacaucugg

SEQ ID NO: 75208 - RNA, 19 nt, Artificial Sequence
  Description of Artificial Sequence: Synthetic oligonucleotide
accaugcucagugucaaug

SEQ ID NO: 75209 - RNA, 19 nt, Artificial Sequence
  Description of Artificial Sequence: Synthetic oligonucleotide
cuguccguguauaucuuug

SEQ ID NO: 75210 - RNA, 19 nt, Artificial Sequence
  Description of Artificial Sequence: Synthetic oligonucleotide
cacuugagugcugauacug

SEQ ID NO: 75211 - RNA, 19 nt, Artificial Sequence
  Description of Artificial Sequence: Synthetic oligonucleotide
acauggcuaagguugucgu

SEQ ID NO: 75212 - RNA, 19 nt, Artificial Sequence
  Description of Artificial Sequence: Synthetic oligonucleotide
gaucuaaugcacaugcgua

SEQ ID NO: 75213 - RNA, 19 nt, Artificial Sequence
  Description of Artificial Sequence: Synthetic oligonucleotide
gucaaaagaugcagcaaug

SEQ ID NO: 75214 - RNA, 19 nt, Artificial Sequence
  Description of Artificial Sequence: Synthetic oligonucleotide
ucuguaagaauaggugcuc

SEQ ID NO: 75215 - RNA, 19 nt, Artificial Sequence
  Description of Artificial Sequence: Synthetic oligonucleotide
acagcuauagaaagugcca

SEQ ID NO: 75216 - RNA, 19 nt, Artificial Sequence
  Description of Artificial Sequence: Synthetic oligonucleotide
ugccagucgggccaugaga

SEQ ID NO: 75217 - RNA, 19 nt, Artificial Sequence
  Description of Artificial Sequence: Synthetic oligonucleotide
caugcguagaugucaauaa

SEQ ID NO: 75218 - RNA, 19 nt, Artificial Sequence
  Description of Artificial Sequence: Synthetic oligonucleotide
acugcucggcaaguugucc

SEQ ID NO: 75219 - RNA, 19 nt, Artificial Sequence
  Description of Artificial Sequence: Synthetic oligonucleotide
cacauaucuuccauugaca

SEQ ID NO: 75220 - RNA, 19 nt, Artificial Sequence
  Description of Artificial Sequence: Synthetic oligonucleotide
gcucguacugaaugggugg

SEQ ID NO: 75221 - RNA, 19 nt, Artificial Sequence
  Description of Artificial Sequence: Synthetic oligonucleotide
uacauguuauuaugaguuu

SEQ ID NO: 75222 - RNA, 19 nt, Artificial Sequence
  Description of Artificial Sequence: Synthetic oligonucleotide
agcccauuuuaaacugucc

SEQ ID NO: 75223 - RNA, 19 nt, Artificial Sequence
  Description of Artificial Sequence: Synthetic oligonucleotide
ggaaacugauuccuuuggc

SEQ ID NO: 75224 - RNA, 19 nt, Artificial Sequence
  Description of Artificial Sequence: Synthetic oligonucleotide
cucgauaauccacuugaca

SEQ ID NO: 75225 - RNA, 19 nt, Artificial Sequence
  Description of Artificial Sequence: Synthetic oligonucleotide
ccuaacaggucaaugagga

SEQ ID NO: 75226 - RNA, 19 nt, Artificial Sequence
  Description of Artificial Sequence: Synthetic oligonucleotide
ucucaccaugauaaaucaa

SEQ ID NO: 75227 - RNA, 19 nt, Artificial Sequence
  Description of Artificial Sequence: Synthetic oligonucleotide
uguauccuccaguaagguu

SEQ ID NO: 75228 - RNA, 19 nt, Artificial Sequence
  Description of Artificial Sequence: Synthetic oligonucleotide
agguuguuaccucacucaa

SEQ ID NO: 75229 - RNA, 19 nt, Artificial Sequence
  Description of Artificial Sequence: Synthetic oligonucleotide
ugcucuguauauugccagu

SEQ ID NO: 75230 - RNA, 19 nt, Artificial Sequence
  Description of Artificial Sequence: Synthetic oligonucleotide
agcuaacgucaucuguaag

SEQ ID NO: 75231 - RNA, 19 nt, Artificial Sequence
  Description of Artificial Sequence: Synthetic oligonucleotide
uacacucaaguaguccuac

SEQ ID NO: 75232 - RNA, 19 nt, Artificial Sequence
  Description of Artificial Sequence: Synthetic oligonucleotide
cagcuauagaaagugccac

SEQ ID NO: 75233 - RNA, 19 nt, Artificial Sequence
  Description of Artificial Sequence: Synthetic oligonucleotide
uuauuggcauuuuggccua

SEQ ID NO: 75234 - RNA, 19 nt, Artificial Sequence
  Description of Artificial Sequence: Synthetic oligonucleotide
guuguccuacugcacaaga

SEQ ID NO: 75235 - RNA, 19 nt, Artificial Sequence
  Description of Artificial Sequence: Synthetic oligonucleotide
gaccugaggaccacgugug

SEQ ID NO: 75236 - RNA, 19 nt, Artificial Sequence
  Description of Artificial Sequence: Synthetic oligonucleotide
gaaaucuggagugaagaau

SEQ ID NO: 75237 - RNA, 19 nt, Artificial Sequence
  Description of Artificial Sequence: Synthetic oligonucleotide
gauuagccaaugcuucaaa

SEQ ID NO: 75238 - RNA, 19 nt, Artificial Sequence
  Description of Artificial Sequence: Synthetic oligonucleotide
gucguagcagcccgauuag

SEQ ID NO: 75239 - RNA, 19 nt, Artificial Sequence
  Description of Artificial Sequence: Synthetic oligonucleotide
uuugcucgauaauccacuu

SEQ ID NO: 75240 - RNA, 19 nt, Artificial Sequence
  Description of Artificial Sequence: Synthetic oligonucleotide
acuaucagagcaccaccuu

SEQ ID NO: 75241 - RNA, 19 nt, Artificial Sequence
  Description of Artificial Sequence: Synthetic oligonucleotide
guaagcuaacgucaucugu

SEQ ID NO: 75242 - RNA, 19 nt, Artificial Sequence
  Description of Artificial Sequence: Synthetic oligonucleotide
uuccagccgacuagauggc

SEQ ID NO: 75243 - RNA, 19 nt, Artificial Sequence
  Description of Artificial Sequence: Synthetic oligonucleotide
caggcucguacugaauggg

SEQ ID NO: 75244 - RNA, 19 nt, Artificial Sequence
  Description of Artificial Sequence: Synthetic oligonucleotide
aucucggcauuggaaaucu

SEQ ID NO: 75245 - RNA, 19 nt, Artificial Sequence
  Description of Artificial Sequence: Synthetic oligonucleotide
gugugugcuaaaacaaaca

SEQ ID NO: 75246 - RNA, 19 nt, Artificial Sequence
  Description of Artificial Sequence: Synthetic oligonucleotide
gugaaugauacuaaucaau

SEQ ID NO: 75247 - RNA, 19 nt, Artificial Sequence
  Description of Artificial Sequence: Synthetic oligonucleotide
caguugaguauaacaauua

SEQ ID NO: 75248 - RNA, 19 nt, Artificial Sequence
  Description of Artificial Sequence: Synthetic oligonucleotide
cccuaacaggucaaugagg

SEQ ID NO: 75249 - RNA, 19 nt, Artificial Sequence
  Description of Artificial Sequence: Synthetic oligonucleotide
aaguucaaucacagucaca

SEQ ID NO: 75250 - RNA, 19 nt, Artificial Sequence
  Description of Artificial Sequence: Synthetic oligonucleotide
ucgucugauuguguucaug

SEQ ID NO: 75251 - RNA, 19 nt, Artificial Sequence
  Description of Artificial Sequence: Synthetic oligonucleotide
cuugcaacacaugauacau

SEQ ID NO: 75252 - RNA, 19 nt, Artificial Sequence
  Description of Artificial Sequence: Synthetic oligonucleotide
gugggaauuucacuauuua

SEQ ID NO: 75253 - RNA, 19 nt, Artificial Sequence
  Description of Artificial Sequence: Synthetic oligonucleotide
ucacucgaauacgucucug

SEQ ID NO: 75254 - RNA, 19 nt, Artificial Sequence
  Description of Artificial Sequence: Synthetic oligonucleotide
ugcgaccggaacaaccauu

SEQ ID NO: 75255 - RNA, 19 nt, Artificial Sequence
  Description of Artificial Sequence: Synthetic oligonucleotide
augcaaguucaaucacagu

SEQ ID NO: 75256 - RNA, 19 nt, Artificial Sequence
  Description of Artificial Sequence: Synthetic oligonucleotide
caaguaguccuacagcuau

SEQ ID NO: 75257 - RNA, 19 nt, Artificial Sequence
  Description of Artificial Sequence: Synthetic oligonucleotide
agguccuuucgaguuaaga

SEQ ID NO: 75258 - RNA, 19 nt, Artificial Sequence
  Description of Artificial Sequence: Synthetic oligonucleotide
ccguguauaucuuugguaa

SEQ ID NO: 75259 - RNA, 19 nt, Artificial Sequence
  Description of Artificial Sequence: Synthetic oligonucleotide
ugcaaguaucaaccacaua

SEQ ID NO: 75260 - RNA, 19 nt, Artificial Sequence
  Description of Artificial Sequence: Synthetic oligonucleotide
aguauacaaauaaguggua

SEQ ID NO: 75261 - RNA, 19 nt, Artificial Sequence
  Description of Artificial Sequence: Synthetic oligonucleotide
auguugccuuaaaucacag

SEQ ID NO: 75262 - RNA, 19 nt, Artificial Sequence
  Description of Artificial Sequence: Synthetic oligonucleotide
acuguccguguauaucuuu

SEQ ID NO: 75263 - RNA, 19 nt, Artificial Sequence
  Description of Artificial Sequence: Synthetic oligonucleotide
cccgauuagccaaugcuuc

SEQ ID NO: 75264 - RNA, 19 nt, Artificial Sequence
  Description of Artificial Sequence: Synthetic oligonucleotide
augauccgagcaccagugu

SEQ ID NO: 75265 - RNA, 19 nt, Artificial Sequence
  Description of Artificial Sequence: Synthetic oligonucleotide
guaggugguaaaagacuca

SEQ ID NO: 75266 - RNA, 19 nt, Artificial Sequence
  Description of Artificial Sequence: Synthetic oligonucleotide
uagcuuccagccgacuaga

SEQ ID NO: 75267 - RNA, 19 nt, Artificial Sequence
  Description of Artificial Sequence: Synthetic oligonucleotide
agguguaaacagggcugcg

SEQ ID NO: 75268 - RNA, 19 nt, Artificial Sequence
  Description of Artificial Sequence: Synthetic oligonucleotide
cugcuauuaaauacucccu

SEQ ID NO: 75269 - RNA, 19 nt, Artificial Sequence
  Description of Artificial Sequence: Synthetic oligonucleotide
uuguuaccucacucaaauu

SEQ ID NO: 75270 - RNA, 19 nt, Artificial Sequence
  Description of Artificial Sequence: Synthetic oligonucleotide
guauccggacuuccgccac

SEQ ID NO: 75271 - RNA, 19 nt, Artificial Sequence
  Description of Artificial Sequence: Synthetic oligonucleotide
cugauucaguucagauauc

SEQ ID NO: 75272 - RNA, 19 nt, Artificial Sequence
  Description of Artificial Sequence: Synthetic oligonucleotide
ugcucggcaaguuguccua

SEQ ID NO: 75273 - RNA, 19 nt, Artificial Sequence
  Description of Artificial Sequence: Synthetic oligonucleotide
ucguagcagcccgauuagc

SEQ ID NO: 75274 - RNA, 19 nt, Artificial Sequence
  Description of Artificial Sequence: Synthetic oligonucleotide
ggugccggaaauuuucaua

SEQ ID NO: 75275 - RNA, 19 nt, Artificial Sequence
  Description of Artificial Sequence: Synthetic oligonucleotide
ugccaucgucugauugugu

SEQ ID NO: 75276 - RNA, 19 nt, Artificial Sequence
  Description of Artificial Sequence: Synthetic oligonucleotide
gugcgucaucuacuggggc

SEQ ID NO: 75277 - RNA, 19 nt, Artificial Sequence
  Description of Artificial Sequence: Synthetic oligonucleotide
cauuggaaaucuggaguga

SEQ ID NO: 75278 - RNA, 19 nt, Artificial Sequence
  Description of Artificial Sequence: Synthetic oligonucleotide
cucguagcuuccagccgac

SEQ ID NO: 75279 - RNA, 19 nt, Artificial Sequence
  Description of Artificial Sequence: Synthetic oligonucleotide
uccagccgacuagauggcc

SEQ ID NO: 75280 - RNA, 19 nt, Artificial Sequence
  Description of Artificial Sequence: Synthetic oligonucleotide
gguauccggacuuccgcca

SEQ ID NO: 75281 - RNA, 19 nt, Artificial Sequence
  Description of Artificial Sequence: Synthetic oligonucleotide
guaguccuacagcuauaga

SEQ ID NO: 75282 - RNA, 19 nt, Artificial Sequence
  Description of Artificial Sequence: Synthetic oligonucleotide
acgugugugcuaaaacaaa

SEQ ID NO: 75283 - RNA, 19 nt, Artificial Sequence
  Description of Artificial Sequence: Synthetic oligonucleotide
cgggccacuaaaagaauag

SEQ ID NO: 75284 - RNA, 19 nt, Artificial Sequence
  Description of Artificial Sequence: Synthetic oligonucleotide
gaauaggguguacgugugu

SEQ ID NO: 75285 - RNA, 19 nt, Artificial Sequence
  Description of Artificial Sequence: Synthetic oligonucleotide
cacaagguccuuucgaguu

SEQ ID NO: 75286 - RNA, 19 nt, Artificial Sequence
  Description of Artificial Sequence: Synthetic oligonucleotide
gccuagcacaguucaauuc

SEQ ID NO: 75287 - RNA, 19 nt, Artificial Sequence
  Description of Artificial Sequence: Synthetic oligonucleotide
ggucacucgaauacgucuc

SEQ ID NO: 75288 - RNA, 19 nt, Artificial Sequence
  Description of Artificial Sequence: Synthetic oligonucleotide
ggcucguacugaaugggug

SEQ ID NO: 75289 - RNA, 19 nt, Artificial Sequence
  Description of Artificial Sequence: Synthetic oligonucleotide
guuaccucacucaaauuuu

SEQ ID NO: 75290 - RNA, 19 nt, Artificial Sequence
  Description of Artificial Sequence: Synthetic oligonucleotide
accuugcacuugcaacaca

SEQ ID NO: 75291 - RNA, 19 nt, Artificial Sequence
  Description of Artificial Sequence: Synthetic oligonucleotide
caccuugcacuugcaacac

SEQ ID NO: 75292 - RNA, 19 nt, Artificial Sequence
  Description of Artificial Sequence: Synthetic oligonucleotide
ugccggaaauuuucauauu

SEQ ID NO: 75293 - RNA, 19 nt, Artificial Sequence
  Description of Artificial Sequence: Synthetic oligonucleotide
gcccagucguagcagcccg

SEQ ID NO: 75294 - RNA, 19 nt, Artificial Sequence
  Description of Artificial Sequence: Synthetic oligonucleotide
uccuagcaauuguggucac

SEQ ID NO: 75295 - RNA, 19 nt, Artificial Sequence
  Description of Artificial Sequence: Synthetic oligonucleotide
agaaugcgaucugcaagaa

SEQ ID NO: 75296 - RNA, 19 nt, Artificial Sequence
  Description of Artificial Sequence: Synthetic oligonucleotide
aaguaguccuacagcuaua

SEQ ID NO: 75297 - RNA, 19 nt, Artificial Sequence
  Description of Artificial Sequence: Synthetic oligonucleotide
guaucucggcauuggaaau

SEQ ID NO: 75298 - RNA, 19 nt, Artificial Sequence
  Description of Artificial Sequence: Synthetic oligonucleotide
gaaugcgaucugcaagaau

SEQ ID NO: 75299 - RNA, 19 nt, Artificial Sequence
  Description of Artificial Sequence: Synthetic oligonucleotide
ggaaacgugccuggcugcc

SEQ ID NO: 75300 - RNA, 19 nt, Artificial Sequence
  Description of Artificial Sequence: Synthetic oligonucleotide
gccacgcagaacuacauau

SEQ ID NO: 75301 - RNA, 19 nt, Artificial Sequence
  Description of Artificial Sequence: Synthetic oligonucleotide
ucgugggacugaguccaca

SEQ ID NO: 75302 - RNA, 19 nt, Artificial Sequence
  Description of Artificial Sequence: Synthetic oligonucleotide
gcaggaccaccaaugaaca

SEQ ID NO: 75303 - RNA, 19 nt, Artificial Sequence
  Description of Artificial Sequence: Synthetic oligonucleotide
ggcugcgaccggaacaacc

SEQ ID NO: 75304 - RNA, 19 nt, Artificial Sequence
  Description of Artificial Sequence: Synthetic oligonucleotide
gcugcgaccggaacaacca

SEQ ID NO: 75305 - RNA, 19 nt, Artificial Sequence
  Description of Artificial Sequence: Synthetic oligonucleotide
uacucccuaacaggucaau

SEQ ID NO: 75306 - RNA, 19 nt, Artificial Sequence
  Description of Artificial Sequence: Synthetic oligonucleotide
aggcucguacugaaugggu

SEQ ID NO: 75307 - RNA, 19 nt, Artificial Sequence
  Description of Artificial Sequence: Synthetic oligonucleotide
aggaccacguguggcuuga

SEQ ID NO: 75308 - RNA, 19 nt, Artificial Sequence
  Description of Artificial Sequence: Synthetic oligonucleotide
aucgucugauuguguucau

SEQ ID NO: 75309 - RNA, 19 nt, Artificial Sequence
  Description of Artificial Sequence: Synthetic oligonucleotide
guguacgugugugcuaaaa

SEQ ID NO: 75310 - RNA, 19 nt, Artificial Sequence
  Description of Artificial Sequence: Synthetic oligonucleotide
gucacucgaauacgucucu

SEQ ID NO: 75311 - RNA, 19 nt, Artificial Sequence
  Description of Artificial Sequence: Synthetic oligonucleotide
cggcauuggaaaucuggag

SEQ ID NO: 75312 - RNA, 19 nt, Artificial Sequence
  Description of Artificial Sequence: Synthetic oligonucleotide
gcgaccggaacaaccauuc

SEQ ID NO: 75313 - RNA, 19 nt, Artificial Sequence
  Description of Artificial Sequence: Synthetic oligonucleotide
ucguacugaauggguggua

SEQ ID NO: 75314 - RNA, 19 nt, Artificial Sequence
  Description of Artificial Sequence: Synthetic oligonucleotide
cuaaugcacaugcguagau

SEQ ID NO: 75315 - RNA, 19 nt, Artificial Sequence
  Description of Artificial Sequence: Synthetic oligonucleotide
guacacucaaguaguccua

SEQ ID NO: 75316 - RNA, 19 nt, Artificial Sequence
  Description of Artificial Sequence: Synthetic oligonucleotide
uccggacuuccgccacugu

SEQ ID NO: 75317 - RNA, 19 nt, Artificial Sequence
  Description of Artificial Sequence: Synthetic oligonucleotide
agccaccuaagcacaucug

SEQ ID NO: 75318 - RNA, 19 nt, Artificial Sequence
  Description of Artificial Sequence: Synthetic oligonucleotide
gcauauguagguggaaacu

SEQ ID NO: 75319 - RNA, 19 nt, Artificial Sequence
  Description of Artificial Sequence: Synthetic oligonucleotide
aggugguaaaagacucaau

SEQ ID NO: 75320 - RNA, 19 nt, Artificial Sequence
  Description of Artificial Sequence: Synthetic oligonucleotide
ccggacuuccgccacugug

SEQ ID NO: 75321 - RNA, 19 nt, Artificial Sequence
  Description of Artificial Sequence: Synthetic oligonucleotide
auauugccagucgggccau

SEQ ID NO: 75322 - RNA, 19 nt, Artificial Sequence
  Description of Artificial Sequence: Synthetic oligonucleotide
ccgauuagccaaugcuuca

SEQ ID NO: 75323 - RNA, 19 nt, Artificial Sequence
  Description of Artificial Sequence: Synthetic oligonucleotide
ccagccgacuagauggcca

SEQ ID NO: 75324 - RNA, 19 nt, Artificial Sequence
  Description of Artificial Sequence: Synthetic oligonucleotide
ucguagcuuccagccgacu

SEQ ID NO: 75325 - RNA, 19 nt, Artificial Sequence
  Description of Artificial Sequence: Synthetic oligonucleotide
ccaagggucucgcugaagu

SEQ ID NO: 75326 - RNA, 19 nt, Artificial Sequence
  Description of Artificial Sequence: Synthetic oligonucleotide
guguucaugcaaguucaau

SEQ ID NO: 75327 - RNA, 19 nt, Artificial Sequence
  Description of Artificial Sequence: Synthetic oligonucleotide
cucuggcgggccacuaaaa

SEQ ID NO: 75328 - RNA, 19 nt, Artificial Sequence
  Description of Artificial Sequence: Synthetic oligonucleotide
cgauaauccacuugacaua

SEQ ID NO: 75329 - RNA, 19 nt, Artificial Sequence
  Description of Artificial Sequence: Synthetic oligonucleotide
uauuucccuggaggucuuu

SEQ ID NO: 75330 - RNA, 19 nt, Artificial Sequence
  Description of Artificial Sequence: Synthetic oligonucleotide
gugccaccuguuccaaucu

SEQ ID NO: 75331 - RNA, 19 nt, Artificial Sequence
  Description of Artificial Sequence: Synthetic oligonucleotide
cucguacugaauggguggu

SEQ ID NO: 75332 - RNA, 19 nt, Artificial Sequence
  Description of Artificial Sequence: Synthetic oligonucleotide
ccuuucgaguuaagagaca

SEQ ID NO: 75333 - RNA, 19 nt, Artificial Sequence
  Description of Artificial Sequence: Synthetic oligonucleotide
agcagcccgauuagccaau

SEQ ID NO: 75334 - RNA, 19 nt, Artificial Sequence
  Description of Artificial Sequence: Synthetic oligonucleotide
gcacaugcguagaugucaa

SEQ ID NO: 75335 - RNA, 19 nt, Artificial Sequence
  Description of Artificial Sequence: Synthetic oligonucleotide
gugucagaucuugacgcau

SEQ ID NO: 75336 - RNA, 19 nt, Artificial Sequence
  Description of Artificial Sequence: Synthetic oligonucleotide
ggcuaagguugucguggga

SEQ ID NO: 75337 - RNA, 19 nt, Artificial Sequence
  Description of Artificial Sequence: Synthetic oligonucleotide
gagaccugucugaucuaau

SEQ ID NO: 75338 - RNA, 19 nt, Artificial Sequence
  Description of Artificial Sequence: Synthetic oligonucleotide
agcuuccagccgacuagau

SEQ ID NO: 75339 - RNA, 19 nt, Artificial Sequence
  Description of Artificial Sequence: Synthetic oligonucleotide
gcacuugacacagcaaguu

SEQ ID NO: 75340 - RNA, 19 nt, Artificial Sequence
  Description of Artificial Sequence: Synthetic oligonucleotide
cccaguuccuagcaauugu

SEQ ID NO: 75341 - RNA, 19 nt, Artificial Sequence
  Description of Artificial Sequence: Synthetic oligonucleotide
gcucggcaaguuguccuac

SEQ ID NO: 75342 - RNA, 19 nt, Artificial Sequence
  Description of Artificial Sequence: Synthetic oligonucleotide
gcgggccacuaaaagaaua

SEQ ID NO: 75343 - RNA, 19 nt, Artificial Sequence
  Description of Artificial Sequence: Synthetic oligonucleotide
agccgacuagauggccaaa

SEQ ID NO: 75344 - RNA, 19 nt, Artificial Sequence
  Description of Artificial Sequence: Synthetic oligonucleotide
gucgugggacugaguccac

SEQ ID NO: 75345 - RNA, 19 nt, Artificial Sequence
  Description of Artificial Sequence: Synthetic oligonucleotide
gguguacgugugugcuaaa

SEQ ID NO: 75346 - RNA, 19 nt, Artificial Sequence
  Description of Artificial Sequence: Synthetic oligonucleotide
gcccgauuagccaaugcuu

SEQ ID NO: 75347 - RNA, 19 nt, Artificial Sequence
  Description of Artificial Sequence: Synthetic oligonucleotide
cacaugcguagaugucaau

SEQ ID NO: 75348 - RNA, 19 nt, Artificial Sequence
  Description of Artificial Sequence: Synthetic oligonucleotide
cgauuagccaaugcuucaa

SEQ ID NO: 75349 - RNA, 19 nt, Artificial Sequence
  Description of Artificial Sequence: Synthetic oligonucleotide
cugcgaccggaacaaccau

SEQ ID NO: 75350 - RNA, 19 nt, Artificial Sequence
  Description of Artificial Sequence: Synthetic oligonucleotide
ggccaagggucucgcugaa

SEQ ID NO: 75351 - RNA, 19 nt, Artificial Sequence
  Description of Artificial Sequence: Synthetic oligonucleotide
ccacgcagaacuacauauu

SEQ ID NO: 75352 - RNA, 19 nt, Artificial Sequence
  Description of Artificial Sequence: Synthetic oligonucleotide
cccagucguagcagcccga

SEQ ID NO: 75353 - RNA, 19 nt, Artificial Sequence
  Description of Artificial Sequence: Synthetic oligonucleotide
gcgucaucuacuggggcuu

SEQ ID NO: 75354 - RNA, 19 nt, Artificial Sequence
  Description of Artificial Sequence: Synthetic oligonucleotide
ccggaacaaccauucucgu

SEQ ID NO: 75355 - RNA, 19 nt, Artificial Sequence
  Description of Artificial Sequence: Synthetic oligonucleotide
cagucguagcagcccgauu

SEQ ID NO: 75356 - RNA, 19 nt, Artificial Sequence
  Description of Artificial Sequence: Synthetic oligonucleotide
ccuagcaauuguggucacu

SEQ ID NO: 75357 - RNA, 19 nt, Artificial Sequence
  Description of Artificial Sequence: Synthetic oligonucleotide
gggccacgcagaacuacau

SEQ ID NO: 75358 - RNA, 19 nt, Artificial Sequence
  Description of Artificial Sequence: Synthetic oligonucleotide
gggcugcgaccggaacaac

SEQ ID NO: 75359 - RNA, 19 nt, Artificial Sequence
  Description of Artificial Sequence: Synthetic oligonucleotide
ccagucguagcagcccgau

SEQ ID NO: 75360 - RNA, 19 nt, Artificial Sequence
  Description of Artificial Sequence: Synthetic oligonucleotide
uuuaaauaugccaaggagg

SEQ ID NO: 75361 - RNA, 19 nt, Artificial Sequence
  Description of Artificial Sequence: Synthetic oligonucleotide
gauuaauugaaacaccagg

SEQ ID NO: 75362 - RNA, 19 nt, Artificial Sequence
  Description of Artificial Sequence: Synthetic oligonucleotide
ugaauguuuacacacagug

SEQ ID NO: 75363 - RNA, 19 nt, Artificial Sequence
  Description of Artificial Sequence: Synthetic oligonucleotide
gaaacuauaggcacuaugg

SEQ ID NO: 75364 - RNA, 19 nt, Artificial Sequence
  Description of Artificial Sequence: Synthetic oligonucleotide
gauauuaguguacacuacg

SEQ ID NO: 75365 - RNA, 19 nt, Artificial Sequence
  Description of Artificial Sequence: Synthetic oligonucleotide
uuaauagucaggaaguuaa

SEQ ID NO: 75366 - RNA, 19 nt, Artificial Sequence
  Description of Artificial Sequence: Synthetic oligonucleotide
ucaacaacccucuagauuc

SEQ ID NO: 75367 - RNA, 19 nt, Artificial Sequence
  Description of Artificial Sequence: Synthetic oligonucleotide
uguuguaaggaucucgcgg

SEQ ID NO: 75368 - RNA, 19 nt, Artificial Sequence
  Description of Artificial Sequence: Synthetic oligonucleotide
aacacaugaggaaaagucc

SEQ ID NO: 75369 - RNA, 19 nt, Artificial Sequence
  Description of Artificial Sequence: Synthetic oligonucleotide
agaaccucuaaucaauugg

SEQ ID NO: 75370 - RNA, 19 nt, Artificial Sequence
  Description of Artificial Sequence: Synthetic oligonucleotide
cuugauguuaacugcaccg

SEQ ID NO: 75371 - RNA, 19 nt, Artificial Sequence
  Description of Artificial Sequence: Synthetic oligonucleotide
ugcaauucaacacggauga

SEQ ID NO: 75372 - RNA, 19 nt, Artificial Sequence
  Description of Artificial Sequence: Synthetic oligonucleotide
auuccuaaaguuaagcggc

SEQ ID NO: 75373 - RNA, 19 nt, Artificial Sequence
  Description of Artificial Sequence: Synthetic oligonucleotide
auuaauugaaacaccaggg

SEQ ID NO: 75374 - RNA, 19 nt, Artificial Sequence
  Description of Artificial Sequence: Synthetic oligonucleotide
ugaauucucaccuugagua

SEQ ID NO: 75375 - RNA, 19 nt, Artificial Sequence
  Description of Artificial Sequence: Synthetic oligonucleotide
ucuacuguuucugagaacc

SEQ ID NO: 75376 - RNA, 19 nt, Artificial Sequence
  Description of Artificial Sequence: Synthetic oligonucleotide
uaugcuauauggaaccuca

SEQ ID NO: 75377 - RNA, 19 nt, Artificial Sequence
  Description of Artificial Sequence: Synthetic oligonucleotide
agagcaaccaugcaucuuc

SEQ ID NO: 75378 - RNA, 19 nt, Artificial Sequence
  Description of Artificial Sequence: Synthetic oligonucleotide
aaagcuuaagacagcaggg

SEQ ID NO: 75379 - RNA, 19 nt, Artificial Sequence
  Description of Artificial Sequence: Synthetic oligonucleotide
auaccuguuauguuugaac

SEQ ID NO: 75380 - RNA, 19 nt, Artificial Sequence
  Description of Artificial Sequence: Synthetic oligonucleotide
aguuaagcggcuuuuccac

SEQ ID NO: 75381 - RNA, 19 nt, Artificial Sequence
  Description of Artificial Sequence: Synthetic oligonucleotide
ucugauuaauugaaacacc

SEQ ID NO: 75382 - RNA, 19 nt, Artificial Sequence
  Description of Artificial Sequence: Synthetic oligonucleotide
aaacacuggcuaucguacc

SEQ ID NO: 75383 - RNA, 19 nt, Artificial Sequence
  Description of Artificial Sequence: Synthetic oligonucleotide
aauaaagaugcuaacuccu

SEQ ID NO: 75384 - RNA, 19 nt, Artificial Sequence
  Description of Artificial Sequence: Synthetic oligonucleotide
ugauuaagucacuacacac

SEQ ID NO: 75385 - RNA, 19 nt, Artificial Sequence
  Description of Artificial Sequence: Synthetic oligonucleotide
ugauuaauugaaacaccag

SEQ ID NO: 75386 - RNA, 19 nt, Artificial Sequence
  Description of Artificial Sequence: Synthetic oligonucleotide
ugaguggucacaaaagaaa

SEQ ID NO: 75387 - RNA, 19 nt, Artificial Sequence
  Description of Artificial Sequence: Synthetic oligonucleotide
ucuaggagagcguucaucu

SEQ ID NO: 75388 - RNA, 19 nt, Artificial Sequence
  Description of Artificial Sequence: Synthetic oligonucleotide
aguaagagaccaccuggcc

SEQ ID NO: 75389 - RNA, 19 nt, Artificial Sequence
  Description of Artificial Sequence: Synthetic oligonucleotide
aaauaucgccauucugaac

SEQ ID NO: 75390 - RNA, 19 nt, Artificial Sequence
  Description of Artificial Sequence: Synthetic oligonucleotide
uacaguuagguaacuauac

SEQ ID NO: 75391 - RNA, 19 nt, Artificial Sequence
  Description of Artificial Sequence: Synthetic oligonucleotide
gauagaaucacacucaauu

SEQ ID NO: 75392 - RNA, 19 nt, Artificial Sequence
  Description of Artificial Sequence: Synthetic oligonucleotide
ugguuaacagccuauuuac

SEQ ID NO: 75393 - RNA, 19 nt, Artificial Sequence
  Description of Artificial Sequence: Synthetic oligonucleotide
ucgggcaacaucuuugucc

SEQ ID NO: 75394 - RNA, 19 nt, Artificial Sequence
  Description of Artificial Sequence: Synthetic oligonucleotide
uuuaguucaguuucccaca

SEQ ID NO: 75395 - RNA, 19 nt, Artificial Sequence
  Description of Artificial Sequence: Synthetic oligonucleotide
gaaccucuaaucaauuggg

SEQ ID NO: 75396 - RNA, 19 nt, Artificial Sequence
  Description of Artificial Sequence: Synthetic oligonucleotide
acacaugaggaaaaguccc

SEQ ID NO: 75397 - RNA, 19 nt, Artificial Sequence
  Description of Artificial Sequence: Synthetic oligonucleotide
uaccuguuauguuugaaca

SEQ ID NO: 75398 - RNA, 19 nt, Artificial Sequence
  Description of Artificial Sequence: Synthetic oligonucleotide
aacaccacgagaagugcgc

SEQ ID NO: 75399 - RNA, 19 nt, Artificial Sequence
  Description of Artificial Sequence: Synthetic oligonucleotide
uguaucaguaaacuaguuu

SEQ ID NO: 75400 - RNA, 19 nt, Artificial Sequence
  Description of Artificial Sequence: Synthetic oligonucleotide
uugguuaacagccuauuua

SEQ ID NO: 75401 - RNA, 19 nt, Artificial Sequence
  Description of Artificial Sequence: Synthetic oligonucleotide
uccgguuguagcaaggucu

SEQ ID NO: 75402 - RNA, 19 nt, Artificial Sequence
  Description of Artificial Sequence: Synthetic oligonucleotide
ugaggcaggauauuagugu

SEQ ID NO: 75403 - RNA, 19 nt, Artificial Sequence
  Description of Artificial Sequence: Synthetic oligonucleotide
agugauaaagacccugcug

SEQ ID NO: 75404 - RNA, 19 nt, Artificial Sequence
  Description of Artificial Sequence: Synthetic oligonucleotide
aaucaauugggguggcuga

SEQ ID NO: 75405 - RNA, 19 nt, Artificial Sequence
  Description of Artificial Sequence: Synthetic oligonucleotide
accagaaucccuuugucca

SEQ ID NO: 75406 - RNA, 19 nt, Artificial Sequence
  Description of Artificial Sequence: Synthetic oligonucleotide
uguuauguuugaacaguca

SEQ ID NO: 75407 - RNA, 19 nt, Artificial Sequence
  Description of Artificial Sequence: Synthetic oligonucleotide
ugcguuuacacgcccagug

SEQ ID NO: 75408 - RNA, 19 nt, Artificial Sequence
  Description of Artificial Sequence: Synthetic oligonucleotide
guaggugagcucuugucgg

SEQ ID NO: 75409 - RNA, 19 nt, Artificial Sequence
  Description of Artificial Sequence: Synthetic oligonucleotide
aagucaccagcucuaccgg

SEQ ID NO: 75410 - RNA, 19 nt, Artificial Sequence
  Description of Artificial Sequence: Synthetic oligonucleotide
cauuaaagcacuugggaga

SEQ ID NO: 75411 - RNA, 19 nt, Artificial Sequence
  Description of Artificial Sequence: Synthetic oligonucleotide
aaaccugaguaacauuuau

SEQ ID NO: 75412 - RNA, 19 nt, Artificial Sequence
  Description of Artificial Sequence: Synthetic oligonucleotide
ugaggaaaaguccccguga

SEQ ID NO: 75413 - RNA, 19 nt, Artificial Sequence
  Description of Artificial Sequence: Synthetic oligonucleotide
uaaucaauugggguggcug

SEQ ID NO: 75414 - RNA, 19 nt, Artificial Sequence
  Description of Artificial Sequence: Synthetic oligonucleotide
ucauuuugggaguucacau

SEQ ID NO: 75415 - RNA, 19 nt, Artificial Sequence
  Description of Artificial Sequence: Synthetic oligonucleotide
aacacuggcuaucguaccu

SEQ ID NO: 75416 - RNA, 19 nt, Artificial Sequence
  Description of Artificial Sequence: Synthetic oligonucleotide
ucucuacuguuucugagaa

SEQ ID NO: 75417 - RNA, 19 nt, Artificial Sequence
  Description of Artificial Sequence: Synthetic oligonucleotide
cucuaaucaauuggggugg

SEQ ID NO: 75418 - RNA, 19 nt, Artificial Sequence
  Description of Artificial Sequence: Synthetic oligonucleotide
ugugcaccaagagacuugg

SEQ ID NO: 75419 - RNA, 19 nt, Artificial Sequence
  Description of Artificial Sequence: Synthetic oligonucleotide
ugcuaugcaaacacucuac

SEQ ID NO: 75420 - RNA, 19 nt, Artificial Sequence
  Description of Artificial Sequence: Synthetic oligonucleotide
uuaacacccagcucacagc

SEQ ID NO: 75421 - RNA, 19 nt, Artificial Sequence
  Description of Artificial Sequence: Synthetic oligonucleotide
cuagauucugcacauaaaa

SEQ ID NO: 75422 - RNA, 19 nt, Artificial Sequence
  Description of Artificial Sequence: Synthetic oligonucleotide
accucuaaucaauuggggu

SEQ ID NO: 75423 - RNA, 19 nt, Artificial Sequence
  Description of Artificial Sequence: Synthetic oligonucleotide
gaugcuaacuccuuuaguu

SEQ ID NO: 75424 - RNA, 19 nt, Artificial Sequence
  Description of Artificial Sequence: Synthetic oligonucleotide
gagaaccucuaaucaauug

SEQ ID NO: 75425 - RNA, 19 nt, Artificial Sequence
  Description of Artificial Sequence: Synthetic oligonucleotide
aaccucuaaucaauugggg

SEQ ID NO: 75426 - RNA, 19 nt, Artificial Sequence
  Description of Artificial Sequence: Synthetic oligonucleotide
acaguuagguaacuauacu

SEQ ID NO: 75427 - RNA, 19 nt, Artificial Sequence
  Description of Artificial Sequence: Synthetic oligonucleotide
gauucggccgccccacucg

SEQ ID NO: 75428 - RNA, 19 nt, Artificial Sequence
  Description of Artificial Sequence: Synthetic oligonucleotide
ucuagauucugcacauaaa

SEQ ID NO: 75429 - RNA, 19 nt, Artificial Sequence
  Description of Artificial Sequence: Synthetic oligonucleotide
acauacugucacaauacuc

SEQ ID NO: 75430 - RNA, 19 nt, Artificial Sequence
  Description of Artificial Sequence: Synthetic oligonucleotide
gaagcucuccgguuguagc

SEQ ID NO: 75431 - RNA, 19 nt, Artificial Sequence
  Description of Artificial Sequence: Synthetic oligonucleotide
gaauucucaccuugaguac

SEQ ID NO: 75432 - RNA, 19 nt, Artificial Sequence
  Description of Artificial Sequence: Synthetic oligonucleotide
auaauaccuguuauguuug

SEQ ID NO: 75433 - RNA, 19 nt, Artificial Sequence
  Description of Artificial Sequence: Synthetic oligonucleotide
aggaaaggccccuagcaga

SEQ ID NO: 75434 - RNA, 19 nt, Artificial Sequence
  Description of Artificial Sequence: Synthetic oligonucleotide
ugacgagcaaccaccacuc

SEQ ID NO: 75435 - RNA, 19 nt, Artificial Sequence
  Description of Artificial Sequence: Synthetic oligonucleotide
aauaugcuauauggaaccu

SEQ ID NO: 75436 - RNA, 19 nt, Artificial Sequence
  Description of Artificial Sequence: Synthetic oligonucleotide
aagcucuccgguuguagca

SEQ ID NO: 75437 - RNA, 19 nt, Artificial Sequence
  Description of Artificial Sequence: Synthetic oligonucleotide
uuugguuaacagccuauuu

SEQ ID NO: 75438 - RNA, 19 nt, Artificial Sequence
  Description of Artificial Sequence: Synthetic oligonucleotide
cacaggucacaccagaauc

SEQ ID NO: 75439 - RNA, 19 nt, Artificial Sequence
  Description of Artificial Sequence: Synthetic oligonucleotide
auaugcuauauggaaccuc

SEQ ID NO: 75440 - RNA, 19 nt, Artificial Sequence
  Description of Artificial Sequence: Synthetic oligonucleotide
acgagaagugcgccuggcc

SEQ ID NO: 75441 - RNA, 19 nt, Artificial Sequence
  Description of Artificial Sequence: Synthetic oligonucleotide
gguaugauuaagucacuac

SEQ ID NO: 75442 - RNA, 19 nt, Artificial Sequence
  Description of Artificial Sequence: Synthetic oligonucleotide
gaaggggugacgagcaacc

SEQ ID NO: 75443 - RNA, 19 nt, Artificial Sequence
  Description of Artificial Sequence: Synthetic oligonucleotide
aggggugacgagcaaccac

SEQ ID NO: 75444 - RNA, 19 nt, Artificial Sequence
  Description of Artificial Sequence: Synthetic oligonucleotide
agaaggggugacgagcaac

SEQ ID NO: 75445 - RNA, 19 nt, Artificial Sequence
  Description of Artificial Sequence: Synthetic oligonucleotide
ugcagcguucuaauaaaau

SEQ ID NO: 75446 - RNA, 19 nt, Artificial Sequence
  Description of Artificial Sequence: Synthetic oligonucleotide
uaaaccugaguaacauuua

SEQ ID NO: 75447 - RNA, 19 nt, Artificial Sequence
  Description of Artificial Sequence: Synthetic oligonucleotide
acuacgcagugacaccagg

SEQ ID NO: 75448 - RNA, 19 nt, Artificial Sequence
  Description of Artificial Sequence: Synthetic oligonucleotide
uacacuacgcagugacacc

SEQ ID NO: 75449 - RNA, 19 nt, Artificial Sequence
  Description of Artificial Sequence: Synthetic oligonucleotide
guaaggaucucgcggucag

SEQ ID NO: 75450 - RNA, 19 nt, Artificial Sequence
  Description of Artificial Sequence: Synthetic oligonucleotide
ugcauuaguaugucaguuu

SEQ ID NO: 75451 - RNA, 19 nt, Artificial Sequence
  Description of Artificial Sequence: Synthetic oligonucleotide
ggaaacuauaggcacuaug

SEQ ID NO: 75452 - RNA, 19 nt, Artificial Sequence
  Description of Artificial Sequence: Synthetic oligonucleotide
guugcguuuacacgcccag

SEQ ID NO: 75453 - RNA, 19 nt, Artificial Sequence
  Description of Artificial Sequence: Synthetic oligonucleotide
ugucgguccaguucaauuu

SEQ ID NO: 75454 - RNA, 19 nt, Artificial Sequence
  Description of Artificial Sequence: Synthetic oligonucleotide
cagaaauaucgccauucug

SEQ ID NO: 75455 - RNA, 19 nt, Artificial Sequence
  Description of Artificial Sequence: Synthetic oligonucleotide
gggaaagauucuuaugcug

SEQ ID NO: 75456 - RNA, 19 nt, Artificial Sequence
  Description of Artificial Sequence: Synthetic oligonucleotide
cagaguguuggguaacuuc

SEQ ID NO: 75457 - RNA, 19 nt, Artificial Sequence
  Description of Artificial Sequence: Synthetic oligonucleotide
cagcguucuaauaaaauua

SEQ ID NO: 75458 - RNA, 19 nt, Artificial Sequence
  Description of Artificial Sequence: Synthetic oligonucleotide
ccuaagauucaacaauuug

SEQ ID NO: 75459 - RNA, 19 nt, Artificial Sequence
  Description of Artificial Sequence: Synthetic oligonucleotide
agguccuauuccuaaaguu

SEQ ID NO: 75460 - RNA, 19 nt, Artificial Sequence
  Description of Artificial Sequence: Synthetic oligonucleotide
gagguuaguacaucaagau

SEQ ID NO: 75461 - RNA, 19 nt, Artificial Sequence
  Description of Artificial Sequence: Synthetic oligonucleotide
cuaccgguggguaugauua

SEQ ID NO: 75462 - RNA, 19 nt, Artificial Sequence
  Description of Artificial Sequence: Synthetic oligonucleotide
uccuaagauucaacaauuu

SEQ ID NO: 75463 - RNA, 19 nt, Artificial Sequence
  Description of Artificial Sequence: Synthetic oligonucleotide
gguggguaugauuaaguca

SEQ ID NO: 75464 - RNA, 19 nt, Artificial Sequence
  Description of Artificial Sequence: Synthetic oligonucleotide
uaagcggcuuuuccacuug

SEQ ID NO: 75465 - RNA, 19 nt, Artificial Sequence
  Description of Artificial Sequence: Synthetic oligonucleotide
aaccucagcauaacauucu

SEQ ID NO: 75466 - RNA, 19 nt, Artificial Sequence
  Description of Artificial Sequence: Synthetic oligonucleotide
uggcuaucguaccuccggc

SEQ ID NO: 75467 - RNA, 19 nt, Artificial Sequence
  Description of Artificial Sequence: Synthetic oligonucleotide
gaguggucacaaaagaaaa

SEQ ID NO: 75468 - RNA, 19 nt, Artificial Sequence
  Description of Artificial Sequence: Synthetic oligonucleotide
auucggccgccccacucgc

SEQ ID NO: 75469 - RNA, 19 nt, Artificial Sequence
  Description of Artificial Sequence: Synthetic oligonucleotide
accccuuguuauaaauuac

SEQ ID NO: 75470 - RNA, 19 nt, Artificial Sequence
  Description of Artificial Sequence: Synthetic oligonucleotide
cugaaggaguuugaacccc

SEQ ID NO: 75471 - RNA, 19 nt, Artificial Sequence
  Description of Artificial Sequence: Synthetic oligonucleotide
aaagacccugcugcauuag

SEQ ID NO: 75472 - RNA, 19 nt, Artificial Sequence
  Description of Artificial Sequence: Synthetic oligonucleotide
aacucacucugagcaguuc

SEQ ID NO: 75473 - RNA, 19 nt, Artificial Sequence
  Description of Artificial Sequence: Synthetic oligonucleotide
uaaagacccugcugcauua

SEQ ID NO: 75474 - RNA, 19 nt, Artificial Sequence
  Description of Artificial Sequence: Synthetic oligonucleotide
agcguucuaauaaaauuaa

SEQ ID NO: 75475 - RNA, 19 nt, Artificial Sequence
  Description of Artificial Sequence: Synthetic oligonucleotide
uuguaucaguaaacuaguu

SEQ ID NO: 75476 - RNA, 19 nt, Artificial Sequence
  Description of Artificial Sequence: Synthetic oligonucleotide
aggcacuauggggagaaag

SEQ ID NO: 75477 - RNA, 19 nt, Artificial Sequence
  Description of Artificial Sequence: Synthetic oligonucleotide
uuuugguuaacagccuauu

SEQ ID NO: 75478 - RNA, 19 nt, Artificial Sequence
  Description of Artificial Sequence: Synthetic oligonucleotide
acaccacgagaagugcgcc

SEQ ID NO: 75479 - RNA, 19 nt, Artificial Sequence
  Description of Artificial Sequence: Synthetic oligonucleotide
ccuauuccuaaaguuaagc

SEQ ID NO: 75480 - RNA, 19 nt, Artificial Sequence
  Description of Artificial Sequence: Synthetic oligonucleotide
uuacacgcccaguguaaac

SEQ ID NO: 75481 - RNA, 19 nt, Artificial Sequence
  Description of Artificial Sequence: Synthetic oligonucleotide
agacaugaauuaauacuga

SEQ ID NO: 75482 - RNA, 19 nt, Artificial Sequence
  Description of Artificial Sequence: Synthetic oligonucleotide
uuuggcccagaggugacac

SEQ ID NO: 75483 - RNA, 19 nt, Artificial Sequence
  Description of Artificial Sequence: Synthetic oligonucleotide
auaucgccauucugaacca

SEQ ID NO: 75484 - RNA, 19 nt, Artificial Sequence
  Description of Artificial Sequence: Synthetic oligonucleotide
ucgguccaguucaauuucu

SEQ ID NO: 75485 - RNA, 19 nt, Artificial Sequence
  Description of Artificial Sequence: Synthetic oligonucleotide
ucuaccgguggguaugauu

SEQ ID NO: 75486 - RNA, 19 nt, Artificial Sequence
  Description of Artificial Sequence: Synthetic oligonucleotide
cucauuuugggaguucaca

SEQ ID NO: 75487 - RNA, 19 nt, Artificial Sequence
  Description of Artificial Sequence: Synthetic oligonucleotide
uuuacacgcccaguguaaa

SEQ ID NO: 75488 - RNA, 19 nt, Artificial Sequence
  Description of Artificial Sequence: Synthetic oligonucleotide
ucuaaucaauugggguggc

SEQ ID NO: 75489 - RNA, 19 nt, Artificial Sequence
  Description of Artificial Sequence: Synthetic oligonucleotide
agcgccaaagaaguguggu

SEQ ID NO: 75490 - RNA, 19 nt, Artificial Sequence
  Description of Artificial Sequence: Synthetic oligonucleotide
gugacgagcaaccaccacu

SEQ ID NO: 75491 - RNA, 19 nt, Artificial Sequence
  Description of Artificial Sequence: Synthetic oligonucleotide
ccaugguugcguuuacacg

SEQ ID NO: 75492 - RNA, 19 nt, Artificial Sequence
  Description of Artificial Sequence: Synthetic oligonucleotide
cucuccgguuguagcaagg

SEQ ID NO: 75493 - RNA, 19 nt, Artificial Sequence
  Description of Artificial Sequence: Synthetic oligonucleotide
cugaucaggugcucacaac

SEQ ID NO: 75494 - RNA, 19 nt, Artificial Sequence
  Description of Artificial Sequence: Synthetic oligonucleotide
ggagguuaguacaucaaga

SEQ ID NO: 75495 - RNA, 19 nt, Artificial Sequence
  Description of Artificial Sequence: Synthetic oligonucleotide
auguuuacacacaguguga

SEQ ID NO: 75496 - RNA, 19 nt, Artificial Sequence
  Description of Artificial Sequence: Synthetic oligonucleotide
gacucaccuaagagcaacc

SEQ ID NO: 75497 - RNA, 19 nt, Artificial Sequence
  Description of Artificial Sequence: Synthetic oligonucleotide
aggccauaaccucagcaua

SEQ ID NO: 75498 - RNA, 19 nt, Artificial Sequence
  Description of Artificial Sequence: Synthetic oligonucleotide
cuaucguaccuccggcuuc

SEQ ID NO: 75499 - RNA, 19 nt, Artificial Sequence
  Description of Artificial Sequence: Synthetic oligonucleotide
gggagcgucggauucggcc

SEQ ID NO: 75500 - RNA, 19 nt, Artificial Sequence
  Description of Artificial Sequence: Synthetic oligonucleotide
cuggauuaacacccagcuc

SEQ ID NO: 75501 - RNA, 19 nt, Artificial Sequence
  Description of Artificial Sequence: Synthetic oligonucleotide
accacgagaagugcgccug

SEQ ID NO: 75502 - RNA, 19 nt, Artificial Sequence
  Description of Artificial Sequence: Synthetic oligonucleotide
gccaugguugcguuuacac

SEQ ID NO: 75503 - RNA, 19 nt, Artificial Sequence
  Description of Artificial Sequence: Synthetic oligonucleotide
gagggagcgucggauucgg

SEQ ID NO: 75504 - RNA, 19 nt, Artificial Sequence
  Description of Artificial Sequence: Synthetic oligonucleotide
cugcauguuuccacucaac

SEQ ID NO: 75505 - RNA, 19 nt, Artificial Sequence
  Description of Artificial Sequence: Synthetic oligonucleotide
auuuucccgaagagauggg

SEQ ID NO: 75506 - RNA, 19 nt, Artificial Sequence
  Description of Artificial Sequence: Synthetic oligonucleotide
ggggugacgagcaaccacc

SEQ ID NO: 75507 - RNA, 19 nt, Artificial Sequence
  Description of Artificial Sequence: Synthetic oligonucleotide
ucguaccuccggcuucugc

SEQ ID NO: 75508 - RNA, 19 nt, Artificial Sequence
  Description of Artificial Sequence: Synthetic oligonucleotide
ucuccgguuguagcaaggu

SEQ ID NO: 75509 - RNA, 19 nt, Artificial Sequence
  Description of Artificial Sequence: Synthetic oligonucleotide
ggaaaggccccuagcagag

SEQ ID NO: 75510 - RNA, 19 nt, Artificial Sequence
  Description of Artificial Sequence: Synthetic oligonucleotide
ucggccgccccacucgcgc

SEQ ID NO: 75511 - RNA, 19 nt, Artificial Sequence
  Description of Artificial Sequence: Synthetic oligonucleotide
aguccccgugaauguuuac

SEQ ID NO: 75512 - RNA, 19 nt, Artificial Sequence
  Description of Artificial Sequence: Synthetic oligonucleotide
accgguggguaugauuaag

SEQ ID NO: 75513 - RNA, 19 nt, Artificial Sequence
  Description of Artificial Sequence: Synthetic oligonucleotide
cucuaggagagcguucauc

SEQ ID NO: 75514 - RNA, 19 nt, Artificial Sequence
  Description of Artificial Sequence: Synthetic oligonucleotide
ggauauuaguguacacuac

SEQ ID NO: 75515 - RNA, 19 nt, Artificial Sequence
  Description of Artificial Sequence: Synthetic oligonucleotide
uaucgccauucugaaccag

SEQ ID NO: 75516 - RNA, 19 nt, Artificial Sequence
  Description of Artificial Sequence: Synthetic oligonucleotide
ccucucaagacuacuuuuc

SEQ ID NO: 75517 - RNA, 19 nt, Artificial Sequence
  Description of Artificial Sequence: Synthetic oligonucleotide
ugguuccuuuagaaagcau

SEQ ID NO: 75518 - RNA, 19 nt, Artificial Sequence
  Description of Artificial Sequence: Synthetic oligonucleotide
cacacagcgaccccacgca

SEQ ID NO: 75519 - RNA, 19 nt, Artificial Sequence
  Description of Artificial Sequence: Synthetic oligonucleotide
ggucuggauuaacacccag

SEQ ID NO: 75520 - RNA, 19 nt, Artificial Sequence
  Description of Artificial Sequence: Synthetic oligonucleotide
cucccuagucaguucaaaa

SEQ ID NO: 75521 - RNA, 19 nt, Artificial Sequence
  Description of Artificial Sequence: Synthetic oligonucleotide
guuuacacgcccaguguaa

SEQ ID NO: 75522 - RNA, 19 nt, Artificial Sequence
  Description of Artificial Sequence: Synthetic oligonucleotide
aaggggugacgagcaacca

SEQ ID NO: 75523 - RNA, 19 nt, Artificial Sequence
  Description of Artificial Sequence: Synthetic oligonucleotide
cacaacugacugucccgug

SEQ ID NO: 75524 - RNA, 19 nt, Artificial Sequence
  Description of Artificial Sequence: Synthetic oligonucleotide
gaccccacgcagcugaccu

SEQ ID NO: 75525 - RNA, 19 nt, Artificial Sequence
  Description of Artificial Sequence: Synthetic oligonucleotide
ccagguccuauuccuaaag

SEQ ID NO: 75526 - RNA, 19 nt, Artificial Sequence
  Description of Artificial Sequence: Synthetic oligonucleotide
cuccgguuguagcaagguc

SEQ ID NO: 75527 - RNA, 19 nt, Artificial Sequence
  Description of Artificial Sequence: Synthetic oligonucleotide
cuccucccuagucaguuca

SEQ ID NO: 75528 - RNA, 19 nt, Artificial Sequence
  Description of Artificial Sequence: Synthetic oligonucleotide
ggcaggauauuaguguaca

SEQ ID NO: 75529 - RNA, 19 nt, Artificial Sequence
  Description of Artificial Sequence: Synthetic oligonucleotide
guuaacugcaccggcauuu

SEQ ID NO: 75530 - RNA, 19 nt, Artificial Sequence
  Description of Artificial Sequence: Synthetic oligonucleotide
aucaauugggguggcugaa

SEQ ID NO: 75531 - RNA, 19 nt, Artificial Sequence
  Description of Artificial Sequence: Synthetic oligonucleotide
uccucccuagucaguucaa

SEQ ID NO: 75532 - RNA, 19 nt, Artificial Sequence
  Description of Artificial Sequence: Synthetic oligonucleotide
gcagggauccucgucaaca

SEQ ID NO: 75533 - RNA, 19 nt, Artificial Sequence
  Description of Artificial Sequence: Synthetic oligonucleotide
agcaaccaugcaucuucau

SEQ ID NO: 75534 - RNA, 19 nt, Artificial Sequence
  Description of Artificial Sequence: Synthetic oligonucleotide
gcagcguucuaauaaaauu

SEQ ID NO: 75535 - RNA, 19 nt, Artificial Sequence
  Description of Artificial Sequence: Synthetic oligonucleotide
uugcguuuacacgcccagu

SEQ ID NO: 75536 - RNA, 19 nt, Artificial Sequence
  Description of Artificial Sequence: Synthetic oligonucleotide
uaccgguggguaugauuaa

SEQ ID NO: 75537 - RNA, 19 nt, Artificial Sequence
  Description of Artificial Sequence: Synthetic oligonucleotide
ggauuaacacccagcucac

SEQ ID NO: 75538 - RNA, 19 nt, Artificial Sequence
  Description of Artificial Sequence: Synthetic oligonucleotide
ggagggagcgucggauucg

SEQ ID NO: 75539 - RNA, 19 nt, Artificial Sequence
  Description of Artificial Sequence: Synthetic oligonucleotide
gguuaacagccuauuuaca

SEQ ID NO: 75540 - RNA, 19 nt, Artificial Sequence
  Description of Artificial Sequence: Synthetic oligonucleotide
gucggauucggccgcccca

SEQ ID NO: 75541 - RNA, 19 nt, Artificial Sequence
  Description of Artificial Sequence: Synthetic oligonucleotide
agcgucggauucggccgcc

SEQ ID NO: 75542 - RNA, 19 nt, Artificial Sequence
  Description of Artificial Sequence: Synthetic oligonucleotide
gguccgcccucucaguuuc

SEQ ID NO: 75543 - RNA, 19 nt, Artificial Sequence
  Description of Artificial Sequence: Synthetic oligonucleotide
ccgguuguagcaaggucuc

SEQ ID NO: 75544 - RNA, 19 nt, Artificial Sequence
  Description of Artificial Sequence: Synthetic oligonucleotide
agguccgcccucucaguuu

SEQ ID NO: 75545 - RNA, 19 nt, Artificial Sequence
  Description of Artificial Sequence: Synthetic oligonucleotide
ucgcggucagccccugauu

SEQ ID NO: 75546 - RNA, 19 nt, Artificial Sequence
  Description of Artificial Sequence: Synthetic oligonucleotide
gucgggcaacaucuuuguc

SEQ ID NO: 75547 - RNA, 19 nt, Artificial Sequence
  Description of Artificial Sequence: Synthetic oligonucleotide
ucucgcggucagccccuga

SEQ ID NO: 75548 - RNA, 19 nt, Artificial Sequence
  Description of Artificial Sequence: Synthetic oligonucleotide
ccuguuauguuugaacagu

SEQ ID NO: 75549 - RNA, 19 nt, Artificial Sequence
  Description of Artificial Sequence: Synthetic oligonucleotide
agggagcgucggauucggc

SEQ ID NO: 75550 - RNA, 19 nt, Artificial Sequence
  Description of Artificial Sequence: Synthetic oligonucleotide
gguugcguuuacacgccca

SEQ ID NO: 75551 - RNA, 19 nt, Artificial Sequence
  Description of Artificial Sequence: Synthetic oligonucleotide
cccuaggaaaggccccuag

SEQ ID NO: 75552 - RNA, 19 nt, Artificial Sequence
  Description of Artificial Sequence: Synthetic oligonucleotide
ggcuggaaacagguccgcc

SEQ ID NO: 75553 - RNA, 19 nt, Artificial Sequence
  Description of Artificial Sequence: Synthetic oligonucleotide
agccaggucucuacuguuu

SEQ ID NO: 75554 - RNA, 19 nt, Artificial Sequence
  Description of Artificial Sequence: Synthetic oligonucleotide
cagccaugaguggucacaa

SEQ ID NO: 75555 - RNA, 19 nt, Artificial Sequence
  Description of Artificial Sequence: Synthetic oligonucleotide
gacgagcaaccaccacucu

SEQ ID NO: 75556 - RNA, 19 nt, Artificial Sequence
  Description of Artificial Sequence: Synthetic oligonucleotide
cagccguugaccucauuuu

SEQ ID NO: 75557 - RNA, 19 nt, Artificial Sequence
  Description of Artificial Sequence: Synthetic oligonucleotide
ccacgagaagugcgccugg

SEQ ID NO: 75558 - RNA, 19 nt, Artificial Sequence
  Description of Artificial Sequence: Synthetic oligonucleotide
cuaacuccuuuaguucagu

SEQ ID NO: 75559 - RNA, 19 nt, Artificial Sequence
  Description of Artificial Sequence: Synthetic oligonucleotide
ucccuaggaaaggccccua

SEQ ID NO: 75560 - RNA, 19 nt, Artificial Sequence
  Description of Artificial Sequence: Synthetic oligonucleotide
gcuaucguaccuccggcuu

SEQ ID NO: 75561 - RNA, 19 nt, Artificial Sequence
  Description of Artificial Sequence: Synthetic oligonucleotide
ggcuaucguaccuccggcu

SEQ ID NO: 75562 - RNA, 19 nt, Artificial Sequence
  Description of Artificial Sequence: Synthetic oligonucleotide
gaucucgcggucagccccu

SEQ ID NO: 75563 - RNA, 19 nt, Artificial Sequence
  Description of Artificial Sequence: Synthetic oligonucleotide
gcaauucaacacggaugac

SEQ ID NO: 75564 - RNA, 19 nt, Artificial Sequence
  Description of Artificial Sequence: Synthetic oligonucleotide
gcguuuacacgcccagugu

SEQ ID NO: 75565 - RNA, 19 nt, Artificial Sequence
  Description of Artificial Sequence: Synthetic oligonucleotide
ccaccacucugcuaugcaa

SEQ ID NO: 75566 - RNA, 19 nt, Artificial Sequence
  Description of Artificial Sequence: Synthetic oligonucleotide
caccacgagaagugcgccu

SEQ ID NO: 75567 - RNA, 19 nt, Artificial Sequence
  Description of Artificial Sequence: Synthetic oligonucleotide
cucgcggucagccccugau

SEQ ID NO: 75568 - RNA, 19 nt, Artificial Sequence
  Description of Artificial Sequence: Synthetic oligonucleotide
ccccagucauuuagacaug

SEQ ID NO: 75569 - RNA, 19 nt, Artificial Sequence
  Description of Artificial Sequence: Synthetic oligonucleotide
aucguaccuccggcuucug

SEQ ID NO: 75570 - RNA, 19 nt, Artificial Sequence
  Description of Artificial Sequence: Synthetic oligonucleotide
gcccucuaguggcugugga

SEQ ID NO: 75571 - RNA, 19 nt, Artificial Sequence
  Description of Artificial Sequence: Synthetic oligonucleotide
caacucacucugagcaguu

SEQ ID NO: 75572 - RNA, 19 nt, Artificial Sequence
  Description of Artificial Sequence: Synthetic oligonucleotide
ccagccguugaccucauuu

SEQ ID NO: 75573 - RNA, 19 nt, Artificial Sequence
  Description of Artificial Sequence: Synthetic oligonucleotide
ggagucgggcaacaucuuu

SEQ ID NO: 75574 - RNA, 19 nt, Artificial Sequence
  Description of Artificial Sequence: Synthetic oligonucleotide
gaagugcgccuggcccuuc

SEQ ID NO: 75575 - RNA, 19 nt, Artificial Sequence
  Description of Artificial Sequence: Synthetic oligonucleotide
cugaggcuccaaagacacu

SEQ ID NO: 75576 - RNA, 19 nt, Artificial Sequence
  Description of Artificial Sequence: Synthetic oligonucleotide
ccgguggguaugauuaagu

SEQ ID NO: 75577 - RNA, 19 nt, Artificial Sequence
  Description of Artificial Sequence: Synthetic oligonucleotide
cgucggauucggccgcccc

SEQ ID NO: 75578 - RNA, 19 nt, Artificial Sequence
  Description of Artificial Sequence: Synthetic oligonucleotide
cuugucgguccaguucaau

SEQ ID NO: 75579 - RNA, 19 nt, Artificial Sequence
  Description of Artificial Sequence: Synthetic oligonucleotide
gcuggguuggccagauagu

SEQ ID NO: 75580 - RNA, 19 nt, Artificial Sequence
  Description of Artificial Sequence: Synthetic oligonucleotide
gcucuaccgguggguauga

SEQ ID NO: 75581 - RNA, 19 nt, Artificial Sequence
  Description of Artificial Sequence: Synthetic oligonucleotide
cagcucuaccgguggguau

SEQ ID NO: 75582 - RNA, 19 nt, Artificial Sequence
  Description of Artificial Sequence: Synthetic oligonucleotide
cagguccgcccucucaguu

SEQ ID NO: 75583 - RNA, 19 nt, Artificial Sequence
  Description of Artificial Sequence: Synthetic oligonucleotide
guccugcauaugucccauu

SEQ ID NO: 75584 - RNA, 19 nt, Artificial Sequence
  Description of Artificial Sequence: Synthetic oligonucleotide
gcagaguguuggguaacuu

SEQ ID NO: 75585 - RNA, 19 nt, Artificial Sequence
  Description of Artificial Sequence: Synthetic oligonucleotide
ggagcgguucuggcucacu

SEQ ID NO: 75586 - RNA, 19 nt, Artificial Sequence
  Description of Artificial Sequence: Synthetic oligonucleotide
cgcggucagccccugauuu

SEQ ID NO: 75587 - RNA, 19 nt, Artificial Sequence
  Description of Artificial Sequence: Synthetic oligonucleotide
cucuaccgguggguaugau

SEQ ID NO: 75588 - RNA, 19 nt, Artificial Sequence
  Description of Artificial Sequence: Synthetic oligonucleotide
cgguuguagcaaggucucu

SEQ ID NO: 75589 - RNA, 19 nt, Artificial Sequence
  Description of Artificial Sequence: Synthetic oligonucleotide
aaaaugauaucuucaggcc

SEQ ID NO: 75590 - RNA, 19 nt, Artificial Sequence
  Description of Artificial Sequence: Synthetic oligonucleotide
aguaugggaguuuacaacc

SEQ ID NO: 75591 - RNA, 19 nt, Artificial Sequence
  Description of Artificial Sequence: Synthetic oligonucleotide
uugugaaacaaucuuguag

SEQ ID NO: 75592 - RNA, 19 nt, Artificial Sequence
  Description of Artificial Sequence: Synthetic oligonucleotide
uuaaguuuaaaccugcgau

SEQ ID NO: 75593 - RNA, 19 nt, Artificial Sequence
  Description of Artificial Sequence: Synthetic oligonucleotide
auguugaaccuucugaagc

SEQ ID NO: 75594 - RNA, 19 nt, Artificial Sequence
  Description of Artificial Sequence: Synthetic oligonucleotide
uaaccuaauuucuagacug

SEQ ID NO: 75595 - RNA, 19 nt, Artificial Sequence
  Description of Artificial Sequence: Synthetic oligonucleotide
aauauaauuacgggugacg

SEQ ID NO: 75596 - RNA, 19 nt, Artificial Sequence
  Description of Artificial Sequence: Synthetic oligonucleotide
uuaacugucucccaauacc

SEQ ID NO: 75597 - RNA, 19 nt, Artificial Sequence
  Description of Artificial Sequence: Synthetic oligonucleotide
aagcgcuagaguuaacacc

SEQ ID NO: 75598 - RNA, 19 nt, Artificial Sequence
  Description of Artificial Sequence: Synthetic oligonucleotide
ucuaaggauauucugacuc

SEQ ID NO: 75599 - RNA, 19 nt, Artificial Sequence
  Description of Artificial Sequence: Synthetic oligonucleotide
aaggccgucauccagagga

SEQ ID NO: 75600 - RNA, 19 nt, Artificial Sequence
  Description of Artificial Sequence: Synthetic oligonucleotide
aaacuguuagaguacgguc

SEQ ID NO: 75601 - RNA, 19 nt, Artificial Sequence
  Description of Artificial Sequence: Synthetic oligonucleotide
  modified_base (7)..(7): a, c, u, g, unknown or other
acuugcngaacacagcagg

SEQ ID NO: 75602 - RNA, 19 nt, Artificial Sequence
  Description of Artificial Sequence: Synthetic oligonucleotide
uuagaguacggucacuggg

SEQ ID NO: 75603 - RNA, 19 nt, Artificial Sequence
  Description of Artificial Sequence: Synthetic oligonucleotide
uaaguauuggguaucaguc

SEQ ID NO: 75604 - RNA, 19 nt, Artificial Sequence
  Description of Artificial Sequence: Synthetic oligonucleotide
auauaauuacgggugacgc

SEQ ID NO: 75605 - RNA, 19 nt, Artificial Sequence
  Description of Artificial Sequence: Synthetic oligonucleotide
caaacuuccaaauauccac

SEQ ID NO: 75606 - RNA, 19 nt, Artificial Sequence
  Description of Artificial Sequence: Synthetic oligonucleotide
aguacggucacugggaacc

SEQ ID NO: 75607 - RNA, 19 nt, Artificial Sequence
  Description of Artificial Sequence: Synthetic oligonucleotide
uaugggucaacacacuaag

SEQ ID NO: 75608 - RNA, 19 nt, Artificial Sequence
  Description of Artificial Sequence: Synthetic oligonucleotide
uguuacgucacugagaauc

SEQ ID NO: 75609 - RNA, 19 nt, Artificial Sequence
  Description of Artificial Sequence: Synthetic oligonucleotide
ugauuauucagguuaaaau

SEQ ID NO: 75610 - RNA, 19 nt, Artificial Sequence
  Description of Artificial Sequence: Synthetic oligonucleotide
ugcauguuaaggauucccg

SEQ ID NO: 75611 - RNA, 19 nt, Artificial Sequence
  Description of Artificial Sequence: Synthetic oligonucleotide
ugggaauuaaauuugguua

SEQ ID NO: 75612 - RNA, 19 nt, Artificial Sequence
  Description of Artificial Sequence: Synthetic oligonucleotide
cucgaaauacgcauggucc

SEQ ID NO: 75613 - RNA, 19 nt, Artificial Sequence
  Description of Artificial Sequence: Synthetic oligonucleotide
cuuaaccuaauuucuagac

SEQ ID NO: 75614 - RNA, 19 nt, Artificial Sequence
  Description of Artificial Sequence: Synthetic oligonucleotide
uuuacaacccaaacaauua

SEQ ID NO: 75615 - RNA, 19 nt, Artificial Sequence
  Description of Artificial Sequence: Synthetic oligonucleotide
acauuuugcugcgaggucc

SEQ ID NO: 75616 - RNA, 19 nt, Artificial Sequence
  Description of Artificial Sequence: Synthetic oligonucleotide
uuaaccuaauuucuagacu

SEQ ID NO: 75617 - RNA, 19 nt, Artificial Sequence
  Description of Artificial Sequence: Synthetic oligonucleotide
aauagguaagguugugugu

SEQ ID NO: 75618 - RNA, 19 nt, Artificial Sequence
  Description of Artificial Sequence: Synthetic oligonucleotide
cugaucucaauauaauuac

SEQ ID NO: 75619 - RNA, 19 nt, Artificial Sequence
  Description of Artificial Sequence: Synthetic oligonucleotide
uuaaagggaagugaguuac

SEQ ID NO: 75620 - RNA, 19 nt, Artificial Sequence
  Description of Artificial Sequence: Synthetic oligonucleotide
aaaacuguuagaguacggu

SEQ ID NO: 75621 - RNA, 19 nt, Artificial Sequence
  Description of Artificial Sequence: Synthetic oligonucleotide
gaaucaauaacacacuccu

SEQ ID NO: 75622 - RNA, 19 nt, Artificial Sequence
  Description of Artificial Sequence: Synthetic oligonucleotide
uuagagacacuuaaccuaa

SEQ ID NO: 75623 - RNA, 19 nt, Artificial Sequence
  Description of Artificial Sequence: Synthetic oligonucleotide
uucaggaaaagacccucgg

SEQ ID NO: 75624 - RNA, 19 nt, Artificial Sequence
  Description of Artificial Sequence: Synthetic oligonucleotide
acaugauaggcuuaaggcu

SEQ ID NO: 75625 - RNA, 19 nt, Artificial Sequence
  Description of Artificial Sequence: Synthetic oligonucleotide
aaccugcgaugacagaggc

SEQ ID NO: 75626 - RNA, 19 nt, Artificial Sequence
  Description of Artificial Sequence: Synthetic oligonucleotide
aaguuuaaaccugcgauga

SEQ ID NO: 75627 - RNA, 19 nt, Artificial Sequence
  Description of Artificial Sequence: Synthetic oligonucleotide
auguuaaggauucccgagg

SEQ ID NO: 75628 - RNA, 19 nt, Artificial Sequence
  Description of Artificial Sequence: Synthetic oligonucleotide
aauacgcaugguccuuggc

SEQ ID NO: 75629 - RNA, 19 nt, Artificial Sequence
  Description of Artificial Sequence: Synthetic oligonucleotide
guagagacaggccucaggc

SEQ ID NO: 75630 - RNA, 19 nt, Artificial Sequence
  Description of Artificial Sequence: Synthetic oligonucleotide
ugucuaaggauauucugac

SEQ ID NO: 75631 - RNA, 19 nt, Artificial Sequence
  Description of Artificial Sequence: Synthetic oligonucleotide
uuugguuaaagggaaguga

SEQ ID NO: 75632 - RNA, 19 nt, Artificial Sequence
  Description of Artificial Sequence: Synthetic oligonucleotide
uugguguauauauacacau

SEQ ID NO: 75633 - RNA, 19 nt, Artificial Sequence
  Description of Artificial Sequence: Synthetic oligonucleotide
aaguauuggguaucaguca

SEQ ID NO: 75634 - RNA, 19 nt, Artificial Sequence
  Description of Artificial Sequence: Synthetic oligonucleotide
  modified_base (9)..(9): a, c, u, g, unknown or other
agacuugcngaacacagca

SEQ ID NO: 75635 - RNA, 19 nt, Artificial Sequence
  Description of Artificial Sequence: Synthetic oligonucleotide
aacuacaaggucacagugg

SEQ ID NO: 75636 - RNA, 19 nt, Artificial Sequence
  Description of Artificial Sequence: Synthetic oligonucleotide
uguugaaccuucugaagca

SEQ ID NO: 75637 - RNA, 19 nt, Artificial Sequence
  Description of Artificial Sequence: Synthetic oligonucleotide
gaaaagacccucggaaacg

SEQ ID NO: 75638 - RNA, 19 nt, Artificial Sequence
  Description of Artificial Sequence: Synthetic oligonucleotide
aaauacgcaugguccuugg

SEQ ID NO: 75639 - RNA, 19 nt, Artificial Sequence
  Description of Artificial Sequence: Synthetic oligonucleotide
cuuuaggugauuaacugga

SEQ ID NO: 75640 - RNA, 19 nt, Artificial Sequence
  Description of Artificial Sequence: Synthetic oligonucleotide
uguaugacugcaauaggua

SEQ ID NO: 75641 - RNA, 19 nt, Artificial Sequence
  Description of Artificial Sequence: Synthetic oligonucleotide
guuacugaugcuaacugcc

SEQ ID NO: 75642 - RNA, 19 nt, Artificial Sequence
  Description of Artificial Sequence: Synthetic oligonucleotide
agaggaugaaucaauaaca

SEQ ID NO: 75643 - RNA, 19 nt, Artificial Sequence
  Description of Artificial Sequence: Synthetic oligonucleotide
  modified_base (10)..(10): a, c, u, g, unknown or other
uagacuugcngaacacagc

SEQ ID NO: 75644 - RNA, 19 nt, Artificial Sequence
  Description of Artificial Sequence: Synthetic oligonucleotide
aaccuaauuucuagacugc

SEQ ID NO: 75645 - RNA, 19 nt, Artificial Sequence
  Description of Artificial Sequence: Synthetic oligonucleotide
aagaguaugggaguuuaca

SEQ ID NO: 75646 - RNA, 19 nt, Artificial Sequence
  Description of Artificial Sequence: Synthetic oligonucleotide
uauaauuacgggugacgca

SEQ ID NO: 75647 - RNA, 19 nt, Artificial Sequence
  Description of Artificial Sequence: Synthetic oligonucleotide
uauucagguuaaaauaaua

SEQ ID NO: 75648 - RNA, 19 nt, Artificial Sequence
  Description of Artificial Sequence: Synthetic oligonucleotide
uaacugucucccaauaccu

SEQ ID NO: 75649 - RNA, 19 nt, Artificial Sequence
  Description of Artificial Sequence: Synthetic oligonucleotide
uggauguccugccugaaac

SEQ ID NO: 75650 - RNA, 19 nt, Artificial Sequence
  Description of Artificial Sequence: Synthetic oligonucleotide
ucccacgcaaccuugcuag

SEQ ID NO: 75651 - RNA, 19 nt, Artificial Sequence
  Description of Artificial Sequence: Synthetic oligonucleotide
acacaacaaucuuugguag

SEQ ID NO: 75652 - RNA, 19 nt, Artificial Sequence
  Description of Artificial Sequence: Synthetic oligonucleotide
uguuagaguacggucacug

SEQ ID NO: 75653 - RNA, 19 nt, Artificial Sequence
  Description of Artificial Sequence: Synthetic oligonucleotide
auagguaagguugugugug

SEQ ID NO: 75654 - RNA, 19 nt, Artificial Sequence
  Description of Artificial Sequence: Synthetic oligonucleotide
aaacaaucuuguaggcagc

SEQ ID NO: 75655 - RNA, 19 nt, Artificial Sequence
  Description of Artificial Sequence: Synthetic oligonucleotide
cugcaauuaaacugaguag

SEQ ID NO: 75656 - RNA, 19 nt, Artificial Sequence
  Description of Artificial Sequence: Synthetic oligonucleotide
aggugauuaacuggaagcg

SEQ ID NO: 75657 - RNA, 19 nt, Artificial Sequence
  Description of Artificial Sequence: Synthetic oligonucleotide
auagcugcaauuaaacuga

SEQ ID NO: 75658 - RNA, 19 nt, Artificial Sequence
  Description of Artificial Sequence: Synthetic oligonucleotide
agagcgaucuuuuaaguuu

SEQ ID NO: 75659 - RNA, 19 nt, Artificial Sequence
  Description of Artificial Sequence: Synthetic oligonucleotide
gaguaugggaguuuacaac

SEQ ID NO: 75660 - RNA, 19 nt, Artificial Sequence
  Description of Artificial Sequence: Synthetic oligonucleotide
acagacauuuugcugcgag

SEQ ID NO: 75661 - RNA, 19 nt, Artificial Sequence
  Description of Artificial Sequence: Synthetic oligonucleotide
  modified_base (11)..(11): a, c, u, g, unknown or other
guagacuugcngaacacag

SEQ ID NO: 75662 - RNA, 19 nt, Artificial Sequence
  Description of Artificial Sequence: Synthetic oligonucleotide
uagaguacggucacuggga

SEQ ID NO: 75663 - RNA, 19 nt, Artificial Sequence
  Description of Artificial Sequence: Synthetic oligonucleotide
aauaaagaguaugggaguu

SEQ ID NO: 75664 - RNA, 19 nt, Artificial Sequence
  Description of Artificial Sequence: Synthetic oligonucleotide
aguauuggguaucagucaa

SEQ ID NO: 75665 - RNA, 19 nt, Artificial Sequence
  Description of Artificial Sequence: Synthetic oligonucleotide
uagugucgggaauauuugg

SEQ ID NO: 75666 - RNA, 19 nt, Artificial Sequence
  Description of Artificial Sequence: Synthetic oligonucleotide
agucaacccugaccuaucc

SEQ ID NO: 75667 - RNA, 19 nt, Artificial Sequence
  Description of Artificial Sequence: Synthetic oligonucleotide
uuugugauauuuucuggua

SEQ ID NO: 75668 - RNA, 19 nt, Artificial Sequence
  Description of Artificial Sequence: Synthetic oligonucleotide
auaauuacgggugacgcau

SEQ ID NO: 75669 - RNA, 19 nt, Artificial Sequence
  Description of Artificial Sequence: Synthetic oligonucleotide
ucucuuucuacugagucaa

SEQ ID NO: 75670 - RNA, 19 nt, Artificial Sequence
  Description of Artificial Sequence: Synthetic oligonucleotide
aauuacgggugacgcauga

SEQ ID NO: 75671 - RNA, 19 nt, Artificial Sequence
  Description of Artificial Sequence: Synthetic oligonucleotide
aagacccucggaaacgcac

SEQ ID NO: 75672 - RNA, 19 nt, Artificial Sequence
  Description of Artificial Sequence: Synthetic oligonucleotide
acuuaaccuaauuucuaga

SEQ ID NO: 75673 - RNA, 19 nt, Artificial Sequence
  Description of Artificial Sequence: Synthetic oligonucleotide
cauguugaaccuucugaag

SEQ ID NO: 75674 - RNA, 19 nt, Artificial Sequence
  Description of Artificial Sequence: Synthetic oligonucleotide
uaugggaguuuacaaccca

SEQ ID NO: 75675 - RNA, 19 nt, Artificial Sequence
  Description of Artificial Sequence: Synthetic oligonucleotide
ucgaaauacgcaugguccu

SEQ ID NO: 75676 - RNA, 19 nt, Artificial Sequence
  Description of Artificial Sequence: Synthetic oligonucleotide
gaagcgcuagaguuaacac

SEQ ID NO: 75677 - RNA, 19 nt, Artificial Sequence
  Description of Artificial Sequence: Synthetic oligonucleotide
acuuagauuuauugagacu

SEQ ID NO: 75678 - RNA, 19 nt, Artificial Sequence
  Description of Artificial Sequence: Synthetic oligonucleotide
guuagaguacggucacugg

SEQ ID NO: 75679 - RNA, 19 nt, Artificial Sequence
  Description of Artificial Sequence: Synthetic oligonucleotide
uauugcuuugugaaacaau

SEQ ID NO: 75680 - RNA, 19 nt, Artificial Sequence
  Description of Artificial Sequence: Synthetic oligonucleotide
uuacgggugacgcaugaaa

SEQ ID NO: 75681 - RNA, 19 nt, Artificial Sequence
  Description of Artificial Sequence: Synthetic oligonucleotide
ugucgggaauauuuggaca

SEQ ID NO: 75682 - RNA, 19 nt, Artificial Sequence
  Description of Artificial Sequence: Synthetic oligonucleotide
caaaucccugauuauucag

SEQ ID NO: 75683 - RNA, 19 nt, Artificial Sequence
  Description of Artificial Sequence: Synthetic oligonucleotide
agcgcuagaguuaacacca

SEQ ID NO: 75684 - RNA, 19 nt, Artificial Sequence
  Description of Artificial Sequence: Synthetic oligonucleotide
auggcuagucaauucccuc

SEQ ID NO: 75685 - RNA, 19 nt, Artificial Sequence
  Description of Artificial Sequence: Synthetic oligonucleotide
ugaugcuaacugccugugg

SEQ ID NO: 75686 - RNA, 19 nt, Artificial Sequence
  Description of Artificial Sequence: Synthetic oligonucleotide
uugaaucugcgcaggcucc

SEQ ID NO: 75687 - RNA, 19 nt, Artificial Sequence
  Description of Artificial Sequence: Synthetic oligonucleotide
ugacgcaugaaagaauggu

SEQ ID NO: 75688 - RNA, 19 nt, Artificial Sequence
  Description of Artificial Sequence: Synthetic oligonucleotide
aaagaguaugggaguuuac

SEQ ID NO: 75689 - RNA, 19 nt, Artificial Sequence
  Description of Artificial Sequence: Synthetic oligonucleotide
ugaccuauccuugacugcu

SEQ ID NO: 75690 - RNA, 19 nt, Artificial Sequence
  Description of Artificial Sequence: Synthetic oligonucleotide
uauguccccagccuagcac

SEQ ID NO: 75691 - RNA, 19 nt, Artificial Sequence
  Description of Artificial Sequence: Synthetic oligonucleotide
gauuaacuggaagcgcuag

SEQ ID NO: 75692 - RNA, 19 nt, Artificial Sequence
  Description of Artificial Sequence: Synthetic oligonucleotide
acgcaaccuugcuaguugc

SEQ ID NO: 75693 - RNA, 19 nt, Artificial Sequence
  Description of Artificial Sequence: Synthetic oligonucleotide
uggcuagucaauucccuca

SEQ ID NO: 75694 - RNA, 19 nt, Artificial Sequence
  Description of Artificial Sequence: Synthetic oligonucleotide
uccucuuuaggugauuaac

SEQ ID NO: 75695 - RNA, 19 nt, Artificial Sequence
  Description of Artificial Sequence: Synthetic oligonucleotide
ucaacccugaccuauccuu

SEQ ID NO: 75696 - RNA, 19 nt, Artificial Sequence
  Description of Artificial Sequence: Synthetic oligonucleotide
ugcuaaaaucagagguuug

SEQ ID NO: 75697 - RNA, 19 nt, Artificial Sequence
  Description of Artificial Sequence: Synthetic oligonucleotide
uaaggauucccgaggccug

SEQ ID NO: 75698 - RNA, 19 nt, Artificial Sequence
  Description of Artificial Sequence: Synthetic oligonucleotide
aagugaguuacugaugcua

SEQ ID NO: 75699 - RNA, 19 nt, Artificial Sequence
  Description of Artificial Sequence: Synthetic oligonucleotide
acugagucaaaaguugaca

SEQ ID NO: 75700 - RNA, 19 nt, Artificial Sequence
  Description of Artificial Sequence: Synthetic oligonucleotide
ucggagagcgaucuuuuaa

SEQ ID NO: 75701 - RNA, 19 nt, Artificial Sequence
  Description of Artificial Sequence: Synthetic oligonucleotide
agggaagggcgcuaaagca

SEQ ID NO: 75702 - RNA, 19 nt, Artificial Sequence
  Description of Artificial Sequence: Synthetic oligonucleotide
auaccaauuugugauauuu

SEQ ID NO: 75703 - RNA, 19 nt, Artificial Sequence
  Description of Artificial Sequence: Synthetic oligonucleotide
guaauuacuuccacucagc

SEQ ID NO: 75704 - RNA, 19 nt, Artificial Sequence
  Description of Artificial Sequence: Synthetic oligonucleotide
guuuagagacacuuaaccu

SEQ ID NO: 75705 - RNA, 19 nt, Artificial Sequence
  Description of Artificial Sequence: Synthetic oligonucleotide
uuuaggugauuaacuggaa

SEQ ID NO: 75706 - RNA, 19 nt, Artificial Sequence
  Description of Artificial Sequence: Synthetic oligonucleotide
guuuaaaccugcgaugaca

SEQ ID NO: 75707 - RNA, 19 nt, Artificial Sequence
  Description of Artificial Sequence: Synthetic oligonucleotide
aauggcuagucaauucccu

SEQ ID NO: 75708 - RNA, 19 nt, Artificial Sequence
  Description of Artificial Sequence: Synthetic oligonucleotide
ugguuaaagggaagugagu

SEQ ID NO: 75709 - RNA, 19 nt, Artificial Sequence
  Description of Artificial Sequence: Synthetic oligonucleotide
auuaacuggaagcgcuaga

SEQ ID NO: 75710 - RNA, 19 nt, Artificial Sequence
  Description of Artificial Sequence: Synthetic oligonucleotide
uuccccaagauuguuugca

SEQ ID NO: 75711 - RNA, 19 nt, Artificial Sequence
  Description of Artificial Sequence: Synthetic oligonucleotide
aggaaaagacccucggaaa

SEQ ID NO: 75712 - RNA, 19 nt, Artificial Sequence
  Description of Artificial Sequence: Synthetic oligonucleotide
aagggcgcuaaagcaaaag

SEQ ID NO: 75713 - RNA, 19 nt, Artificial Sequence
  Description of Artificial Sequence: Synthetic oligonucleotide
gugcucauuagucagcuaa

SEQ ID NO: 75714 - RNA, 19 nt, Artificial Sequence
  Description of Artificial Sequence: Synthetic oligonucleotide
guugucugaaccuuuggcu

SEQ ID NO: 75715 - RNA, 19 nt, Artificial Sequence
  Description of Artificial Sequence: Synthetic oligonucleotide
accggcuauugguucauag

SEQ ID NO: 75716 - RNA, 19 nt, Artificial Sequence
  Description of Artificial Sequence: Synthetic oligonucleotide
gaaauacgcaugguccuug

SEQ ID NO: 75717 - RNA, 19 nt, Artificial Sequence
  Description of Artificial Sequence: Synthetic oligonucleotide
gauaugggucaacacacua

SEQ ID NO: 75718 - RNA, 19 nt, Artificial Sequence
  Description of Artificial Sequence: Synthetic oligonucleotide
cuaaguauuggguaucagu

SEQ ID NO: 75719 - RNA, 19 nt, Artificial Sequence
  Description of Artificial Sequence: Synthetic oligonucleotide
auagugucgggaauauuug

SEQ ID NO: 75720 - RNA, 19 nt, Artificial Sequence
  Description of Artificial Sequence: Synthetic oligonucleotide
uagguaagguugugugugc

SEQ ID NO: 75721 - RNA, 19 nt, Artificial Sequence
  Description of Artificial Sequence: Synthetic oligonucleotide
ugauuaacuggaagcgcua

SEQ ID NO: 75722 - RNA, 19 nt, Artificial Sequence
  Description of Artificial Sequence: Synthetic oligonucleotide
ggugacgcaugaaagaaug

SEQ ID NO: 75723 - RNA, 19 nt, Artificial Sequence
  Description of Artificial Sequence: Synthetic oligonucleotide
guuacgucacugagaaucc

SEQ ID NO: 75724 - RNA, 19 nt, Artificial Sequence
  Description of Artificial Sequence: Synthetic oligonucleotide
gucgggaauauuuggacaa

SEQ ID NO: 75725 - RNA, 19 nt, Artificial Sequence
  Description of Artificial Sequence: Synthetic oligonucleotide
caggaaaagacccucggaa

SEQ ID NO: 75726 - RNA, 19 nt, Artificial Sequence
  Description of Artificial Sequence: Synthetic oligonucleotide
gacccucggaaacgcaccg

SEQ ID NO: 75727 - RNA, 19 nt, Artificial Sequence
  Description of Artificial Sequence: Synthetic oligonucleotide
ccuaauuacccuguaaaac

SEQ ID NO: 75728 - RNA, 19 nt, Artificial Sequence
  Description of Artificial Sequence: Synthetic oligonucleotide
uauugagacuggccucagc

SEQ ID NO: 75729 - RNA, 19 nt, Artificial Sequence
  Description of Artificial Sequence: Synthetic oligonucleotide
caauauaauuacgggugac

SEQ ID NO: 75730 - RNA, 19 nt, Artificial Sequence
  Description of Artificial Sequence: Synthetic oligonucleotide
uaauuacgggugacgcaug

SEQ ID NO: 75731 - RNA, 19 nt, Artificial Sequence
  Description of Artificial Sequence: Synthetic oligonucleotide
aggugcuuacuugggaagg

SEQ ID NO: 75732 - RNA, 19 nt, Artificial Sequence
  Description of Artificial Sequence: Synthetic oligonucleotide
aacgcugcgugcauuuucu

SEQ ID NO: 75733 - RNA, 19 nt, Artificial Sequence
  Description of Artificial Sequence: Synthetic oligonucleotide
gggcgcuaaagcaaaaggg

SEQ ID NO: 75734 - RNA, 19 nt, Artificial Sequence
  Description of Artificial Sequence: Synthetic oligonucleotide
cauuaguacaugauaggcu

SEQ ID NO: 75735 - RNA, 19 nt, Artificial Sequence
  Description of Artificial Sequence: Synthetic oligonucleotide
cucacggcuucaccuaugc

SEQ ID NO: 75736 - RNA, 19 nt, Artificial Sequence
  Description of Artificial Sequence: Synthetic oligonucleotide
gggaacuacaaggucacag

SEQ ID NO: 75737 - RNA, 19 nt, Artificial Sequence
  Description of Artificial Sequence: Synthetic oligonucleotide
agacccucggaaacgcacc

SEQ ID NO: 75738 - RNA, 19 nt, Artificial Sequence
  Description of Artificial Sequence: Synthetic oligonucleotide
gagacacuuaaccuaauuu

SEQ ID NO: 75739 - RNA, 19 nt, Artificial Sequence
  Description of Artificial Sequence: Synthetic oligonucleotide
agagacacuuaaccuaauu

SEQ ID NO: 75740 - RNA, 19 nt, Artificial Sequence
  Description of Artificial Sequence: Synthetic oligonucleotide
cacgcaaccuugcuaguug

SEQ ID NO: 75741 - RNA, 19 nt, Artificial Sequence
  Description of Artificial Sequence: Synthetic oligonucleotide
acgggugacgcaugaaaga

SEQ ID NO: 75742 - RNA, 19 nt, Artificial Sequence
  Description of Artificial Sequence: Synthetic oligonucleotide
cugaccuauccuugacugc

SEQ ID NO: 75743 - RNA, 19 nt, Artificial Sequence
  Description of Artificial Sequence: Synthetic oligonucleotide
guuaaagggaagugaguua

SEQ ID NO: 75744 - RNA, 19 nt, Artificial Sequence
  Description of Artificial Sequence: Synthetic oligonucleotide
gaagccugcugagucauca

SEQ ID NO: 75745 - RNA, 19 nt, Artificial Sequence
  Description of Artificial Sequence: Synthetic oligonucleotide
gagguuugguuaaagggaa

SEQ ID NO: 75746 - RNA, 19 nt, Artificial Sequence
  Description of Artificial Sequence: Synthetic oligonucleotide
guaugggaguuuacaaccc

SEQ ID NO: 75747 - RNA, 19 nt, Artificial Sequence
  Description of Artificial Sequence: Synthetic oligonucleotide
acccugaccuauccuugac

SEQ ID NO: 75748 - RNA, 19 nt, Artificial Sequence
  Description of Artificial Sequence: Synthetic oligonucleotide
agauccucagucagucaac

SEQ ID NO: 75749 - RNA, 19 nt, Artificial Sequence
  Description of Artificial Sequence: Synthetic oligonucleotide
augcuaaaaucagagguuu

SEQ ID NO: 75750 - RNA, 19 nt, Artificial Sequence
  Description of Artificial Sequence: Synthetic oligonucleotide
cuaccacaaggcagcacag

SEQ ID NO: 75751 - RNA, 19 nt, Artificial Sequence
  Description of Artificial Sequence: Synthetic oligonucleotide
acuguguguuacgucacug

SEQ ID NO: 75752 - RNA, 19 nt, Artificial Sequence
  Description of Artificial Sequence: Synthetic oligonucleotide
caugauaggcuuaaggcuu

SEQ ID NO: 75753 - RNA, 19 nt, Artificial Sequence
  Description of Artificial Sequence: Synthetic oligonucleotide
  modified_base (8)..(8): a, c, u, g, unknown or other
gacuugcngaacacagcag

SEQ ID NO: 75754 - RNA, 19 nt, Artificial Sequence
  Description of Artificial Sequence: Synthetic oligonucleotide
gacuggauaugggucaaca

SEQ ID NO: 75755 - RNA, 19 nt, Artificial Sequence
  Description of Artificial Sequence: Synthetic oligonucleotide
accuaauuucuagacugca

SEQ ID NO: 75756 - RNA, 19 nt, Artificial Sequence
  Description of Artificial Sequence: Synthetic oligonucleotide
ugcgugcauuuucuuucag

SEQ ID NO: 75757 - RNA, 19 nt, Artificial Sequence
  Description of Artificial Sequence: Synthetic oligonucleotide
agggaauugagcagugacu

SEQ ID NO: 75758 - RNA, 19 nt, Artificial Sequence
  Description of Artificial Sequence: Synthetic oligonucleotide
cugaggcugugguaauacc

SEQ ID NO: 75759 - RNA, 19 nt, Artificial Sequence
  Description of Artificial Sequence: Synthetic oligonucleotide
guauuugcccauauuuuaa

SEQ ID NO: 75760 - RNA, 19 nt, Artificial Sequence
  Description of Artificial Sequence: Synthetic oligonucleotide
gcaaaagggucaagcagcg

SEQ ID NO: 75761 - RNA, 19 nt, Artificial Sequence
  Description of Artificial Sequence: Synthetic oligonucleotide
acugcacuguguguuacgu

SEQ ID NO: 75762 - RNA, 19 nt, Artificial Sequence
  Description of Artificial Sequence: Synthetic oligonucleotide
agacugcacuguguguuac

SEQ ID NO: 75763 - RNA, 19 nt, Artificial Sequence
  Description of Artificial Sequence: Synthetic oligonucleotide
gugacgcaugaaagaaugg

SEQ ID NO: 75764 - RNA, 19 nt, Artificial Sequence
  Description of Artificial Sequence: Synthetic oligonucleotide
agaguacggucacugggaa

SEQ ID NO: 75765 - RNA, 19 nt, Artificial Sequence
  Description of Artificial Sequence: Synthetic oligonucleotide
aguggugugaugggugcug

SEQ ID NO: 75766 - RNA, 19 nt, Artificial Sequence
  Description of Artificial Sequence: Synthetic oligonucleotide
ugguuaucugggagggaaa

SEQ ID NO: 75767 - RNA, 19 nt, Artificial Sequence
  Description of Artificial Sequence: Synthetic oligonucleotide
acgcaugaaagaaugguuu

SEQ ID NO: 75768 - RNA, 19 nt, Artificial Sequence
  Description of Artificial Sequence: Synthetic oligonucleotide
gguaauaccacagcagucu

SEQ ID NO: 75769 - RNA, 19 nt, Artificial Sequence
  Description of Artificial Sequence: Synthetic oligonucleotide
caguaauuacuuccacuca

SEQ ID NO: 75770 - RNA, 19 nt, Artificial Sequence
  Description of Artificial Sequence: Synthetic oligonucleotide
ggauauucugacucaucuc

SEQ ID NO: 75771 - RNA, 19 nt, Artificial Sequence
  Description of Artificial Sequence: Synthetic oligonucleotide
caacugccggguccuaggg

SEQ ID NO: 75772 - RNA, 19 nt, Artificial Sequence
  Description of Artificial Sequence: Synthetic oligonucleotide
cuguguguuacgucacuga

SEQ ID NO: 75773 - RNA, 19 nt, Artificial Sequence
  Description of Artificial Sequence: Synthetic oligonucleotide
cgcgacaugucccaggccg

SEQ ID NO: 75774 - RNA, 19 nt, Artificial Sequence
  Description of Artificial Sequence: Synthetic oligonucleotide
guagguagagacaggccuc

SEQ ID NO: 75775 - RNA, 19 nt, Artificial Sequence
  Description of Artificial Sequence: Synthetic oligonucleotide
auaaagaguaugggaguuu

SEQ ID NO: 75776 - RNA, 19 nt, Artificial Sequence
  Description of Artificial Sequence: Synthetic oligonucleotide
acccuggaugguuggaggu

SEQ ID NO: 75777 - RNA, 19 nt, Artificial Sequence
  Description of Artificial Sequence: Synthetic oligonucleotide
  modified_base (2)..(2): a, c, u, g, unknown or other
cngaacacagcaggaguuc

SEQ ID NO: 75778 - RNA, 19 nt, Artificial Sequence
  Description of Artificial Sequence: Synthetic oligonucleotide
guaagguugugugugcuua

SEQ ID NO: 75779 - RNA, 19 nt, Artificial Sequence
  Description of Artificial Sequence: Synthetic oligonucleotide
ccagccuagcacaucauuc

SEQ ID NO: 75780 - RNA, 19 nt, Artificial Sequence
  Description of Artificial Sequence: Synthetic oligonucleotide
gcauguuaaggauucccga

SEQ ID NO: 75781 - RNA, 19 nt, Artificial Sequence
  Description of Artificial Sequence: Synthetic oligonucleotide
gaguacggucacugggaac

SEQ ID NO: 75782 - RNA, 19 nt, Artificial Sequence
  Description of Artificial Sequence: Synthetic oligonucleotide
ggcggaauugcuugccagc

SEQ ID NO: 75783 - RNA, 19 nt, Artificial Sequence
  Description of Artificial Sequence: Synthetic oligonucleotide
aaucagagguuugguuaaa

SEQ ID NO: 75784 - RNA, 19 nt, Artificial Sequence
  Description of Artificial Sequence: Synthetic oligonucleotide
ggaagcgcuagaguuaaca

SEQ ID NO: 75785 - RNA, 19 nt, Artificial Sequence
  Description of Artificial Sequence: Synthetic oligonucleotide
acgcaugguccuuggccuc

SEQ ID NO: 75786 - RNA, 19 nt, Artificial Sequence
  Description of Artificial Sequence: Synthetic oligonucleotide
cuguguuuccuaugaaaua

SEQ ID NO: 75787 - RNA, 19 nt, Artificial Sequence
  Description of Artificial Sequence: Synthetic oligonucleotide
gaagcaauggcuagucaau

SEQ ID NO: 75788 - RNA, 19 nt, Artificial Sequence
  Description of Artificial Sequence: Synthetic oligonucleotide
ugagugccucccugggaca

SEQ ID NO: 75789 - RNA, 19 nt, Artificial Sequence
  Description of Artificial Sequence: Synthetic oligonucleotide
ccucgaaauacgcaugguc

SEQ ID NO: 75790 - RNA, 19 nt, Artificial Sequence
  Description of Artificial Sequence: Synthetic oligonucleotide
gcuagaguuaacaccacaa

SEQ ID NO: 75791 - RNA, 19 nt, Artificial Sequence
  Description of Artificial Sequence: Synthetic oligonucleotide
uccucggagagcgaucuuu

SEQ ID NO: 75792 - RNA, 19 nt, Artificial Sequence
  Description of Artificial Sequence: Synthetic oligonucleotide
cggcuauugguucauagac

SEQ ID NO: 75793 - RNA, 19 nt, Artificial Sequence
  Description of Artificial Sequence: Synthetic oligonucleotide
gagagcgaucuuuuaaguu

SEQ ID NO: 75794 - RNA, 19 nt, Artificial Sequence
  Description of Artificial Sequence: Synthetic oligonucleotide
cugaugcuaacugccugug

SEQ ID NO: 75795 - RNA, 19 nt, Artificial Sequence
  Description of Artificial Sequence: Synthetic oligonucleotide
gcuuucaaugaugugagcu

SEQ ID NO: 75796 - RNA, 19 nt, Artificial Sequence
  Description of Artificial Sequence: Synthetic oligonucleotide
ugauaggcuuaaggcuuug

SEQ ID NO: 75797 - RNA, 19 nt, Artificial Sequence
  Description of Artificial Sequence: Synthetic oligonucleotide
uagagacacuuaaccuaau

SEQ ID NO: 75798 - RNA, 19 nt, Artificial Sequence
  Description of Artificial Sequence: Synthetic oligonucleotide
gagcgaucuuuuaaguuua

SEQ ID NO: 75799 - RNA, 19 nt, Artificial Sequence
  Description of Artificial Sequence: Synthetic oligonucleotide
ggcuagucaauucccucac

SEQ ID NO: 75800 - RNA, 19 nt, Artificial Sequence
  Description of Artificial Sequence: Synthetic oligonucleotide
gaagugaguuacugaugcu

SEQ ID NO: 75801 - RNA, 19 nt, Artificial Sequence
  Description of Artificial Sequence: Synthetic oligonucleotide
agguuugguuaaagggaag

SEQ ID NO: 75802 - RNA, 19 nt, Artificial Sequence
  Description of Artificial Sequence: Synthetic oligonucleotide
gguuaaagggaagugaguu

SEQ ID NO: 75803 - RNA, 19 nt, Artificial Sequence
  Description of Artificial Sequence: Synthetic oligonucleotide
cagucaacccugaccuauc

SEQ ID NO: 75804 - RNA, 19 nt, Artificial Sequence
  Description of Artificial Sequence: Synthetic oligonucleotide
ggaaccggcuauugguuca

SEQ ID NO: 75805 - RNA, 19 nt, Artificial Sequence
  Description of Artificial Sequence: Synthetic oligonucleotide
gguaucagucaacccugac

SEQ ID NO: 75806 - RNA, 19 nt, Artificial Sequence
  Description of Artificial Sequence: Synthetic oligonucleotide
gacgcaugaaagaaugguu

SEQ ID NO: 75807 - RNA, 19 nt, Artificial Sequence
  Description of Artificial Sequence: Synthetic oligonucleotide
cagccccgcgacauguccc

SEQ ID NO: 75808 - RNA, 19 nt, Artificial Sequence
  Description of Artificial Sequence: Synthetic oligonucleotide
uaccagccccgcgacaugu

SEQ ID NO: 75809 - RNA, 19 nt, Artificial Sequence
  Description of Artificial Sequence: Synthetic oligonucleotide
augggaguuuacaacccaa

SEQ ID NO: 75810 - RNA, 19 nt, Artificial Sequence
  Description of Artificial Sequence: Synthetic oligonucleotide
guacggucacugggaaccg

SEQ ID NO: 75811 - RNA, 19 nt, Artificial Sequence
  Description of Artificial Sequence: Synthetic oligonucleotide
gggcggaauugcuugccag

SEQ ID NO: 75812 - RNA, 19 nt, Artificial Sequence
  Description of Artificial Sequence: Synthetic oligonucleotide
gcgagguccuuggagagcc

SEQ ID NO: 75813 - RNA, 19 nt, Artificial Sequence
  Description of Artificial Sequence: Synthetic oligonucleotide
cacuaaguauuggguauca

SEQ ID NO: 75814 - RNA, 19 nt, Artificial Sequence
  Description of Artificial Sequence: Synthetic oligonucleotide
cugcacuguguguuacguc

SEQ ID NO: 75815 - RNA, 19 nt, Artificial Sequence
  Description of Artificial Sequence: Synthetic oligonucleotide
caggagggugauuguucac

SEQ ID NO: 75816 - RNA, 19 nt, Artificial Sequence
  Description of Artificial Sequence: Synthetic oligonucleotide
ggcgcuaaagcaaaagggu

SEQ ID NO: 75817 - RNA, 19 nt, Artificial Sequence
  Description of Artificial Sequence: Synthetic oligonucleotide
gggucaacacacuaaguau

SEQ ID NO: 75818 - RNA, 19 nt, Artificial Sequence
  Description of Artificial Sequence: Synthetic oligonucleotide
cugcugcugcugcugcugc

SEQ ID NO: 75819 - RNA, 19 nt, Artificial Sequence
  Description of Artificial Sequence: Synthetic oligonucleotide
gcuagucaauucccucacc

SEQ ID NO: 75820 - RNA, 19 nt, Artificial Sequence
  Description of Artificial Sequence: Synthetic oligonucleotide
agccccgcgacauguccca

SEQ ID NO: 75821 - RNA, 19 nt, Artificial Sequence
  Description of Artificial Sequence: Synthetic oligonucleotide
cugcgugcauuuucuuuca

SEQ ID NO: 75822 - RNA, 19 nt, Artificial Sequence
  Description of Artificial Sequence: Synthetic oligonucleotide
cuauguccccagccuagca

SEQ ID NO: 75823 - RNA, 19 nt, Artificial Sequence
  Description of Artificial Sequence: Synthetic oligonucleotide
ugcugcugcugcugcugcu

SEQ ID NO: 75824 - RNA, 19 nt, Artificial Sequence
  Description of Artificial Sequence: Synthetic oligonucleotide
gcgcuaaagcaaaaggguc

SEQ ID NO: 75825 - RNA, 19 nt, Artificial Sequence
  Description of Artificial Sequence: Synthetic oligonucleotide
auuacgggugacgcaugaa

SEQ ID NO: 75826 - RNA, 19 nt, Artificial Sequence
  Description of Artificial Sequence: Synthetic oligonucleotide
agcugcaauuaaacugagu

SEQ ID NO: 75827 - RNA, 19 nt, Artificial Sequence
  Description of Artificial Sequence: Synthetic oligonucleotide
gcugcgcacagauccucag

SEQ ID NO: 75828 - RNA, 19 nt, Artificial Sequence
  Description of Artificial Sequence: Synthetic oligonucleotide
gggaagagcucacggcuuc

SEQ ID NO: 75829 - RNA, 19 nt, Artificial Sequence
  Description of Artificial Sequence: Synthetic oligonucleotide
cccucggaaacgcaccggc

SEQ ID NO: 75830 - RNA, 19 nt, Artificial Sequence
  Description of Artificial Sequence: Synthetic oligonucleotide
acccucggaaacgcaccgg

SEQ ID NO: 75831 - RNA, 19 nt, Artificial Sequence
  Description of Artificial Sequence: Synthetic oligonucleotide
gggaaccggcuauugguuc

SEQ ID NO: 75832 - RNA, 19 nt, Artificial Sequence
  Description of Artificial Sequence: Synthetic oligonucleotide
gcucauuagucagcuaaca

SEQ ID NO: 75833 - RNA, 19 nt, Artificial Sequence
  Description of Artificial Sequence: Synthetic oligonucleotide
agugcucauuagucagcua

SEQ ID NO: 75834 - RNA, 19 nt, Artificial Sequence
  Description of Artificial Sequence: Synthetic oligonucleotide
ggagagcgaucuuuuaagu

SEQ ID NO: 75835 - RNA, 19 nt, Artificial Sequence
  Description of Artificial Sequence: Synthetic oligonucleotide
uggaagcgcuagaguuaac

SEQ ID NO: 75836 - RNA, 19 nt, Artificial Sequence
  Description of Artificial Sequence: Synthetic oligonucleotide
cacuagcggcggcucggcg

SEQ ID NO: 75837 - RNA, 19 nt, Artificial Sequence
  Description of Artificial Sequence: Synthetic oligonucleotide
agccgugaguuuggagaag

SEQ ID NO: 75838 - RNA, 19 nt, Artificial Sequence
  Description of Artificial Sequence: Synthetic oligonucleotide
ggaagggcgcuaaagcaaa

SEQ ID NO: 75839 - RNA, 19 nt, Artificial Sequence
  Description of Artificial Sequence: Synthetic oligonucleotide
agcccaacugccggguccu

SEQ ID NO: 75840 - RNA, 19 nt, Artificial Sequence
  Description of Artificial Sequence: Synthetic oligonucleotide
ugcugcugcugcugcuguc

SEQ ID NO: 75841 - RNA, 19 nt, Artificial Sequence
  Description of Artificial Sequence: Synthetic oligonucleotide
gggaagggcgcuaaagcaa

SEQ ID NO: 75842 - RNA, 19 nt, Artificial Sequence
  Description of Artificial Sequence: Synthetic oligonucleotide
cuaccagccccgcgacaug

SEQ ID NO: 75843 - RNA, 19 nt, Artificial Sequence
  Description of Artificial Sequence: Synthetic oligonucleotide
ccgucauccagaggaaaac

SEQ ID NO: 75844 - RNA, 19 nt, Artificial Sequence
  Description of Artificial Sequence: Synthetic oligonucleotide
ccggcuauugguucauaga

SEQ ID NO: 75845 - RNA, 19 nt, Artificial Sequence
  Description of Artificial Sequence: Synthetic oligonucleotide
ggauucccgaggccugcug

SEQ ID NO: 75846 - RNA, 19 nt, Artificial Sequence
  Description of Artificial Sequence: Synthetic oligonucleotide
agccugcaaugagagguau

SEQ ID NO: 75847 - RNA, 19 nt, Artificial Sequence
  Description of Artificial Sequence: Synthetic oligonucleotide
gcugcugcugcugcugcug

SEQ ID NO: 75848 - RNA, 19 nt, Artificial Sequence
  Description of Artificial Sequence: Synthetic oligonucleotide
ccagccccgcgacaugucc

SEQ ID NO: 75849 - RNA, 19 nt, Artificial Sequence
  Description of Artificial Sequence: Synthetic oligonucleotide
gaagggcgcuaaagcaaaa

SEQ ID NO: 75850 - RNA, 19 nt, Artificial Sequence
  Description of Artificial Sequence: Synthetic oligonucleotide
ggcuauugguucauagacu

SEQ ID NO: 75851 - RNA, 19 nt, Artificial Sequence
  Description of Artificial Sequence: Synthetic oligonucleotide
gacuuucagcacuccuaau

SEQ ID NO: 75852 - RNA, 19 nt, Artificial Sequence
  Description of Artificial Sequence: Synthetic oligonucleotide
agcgaucuuuuaaguuuaa

SEQ ID NO: 75853 - RNA, 19 nt, Artificial Sequence
  Description of Artificial Sequence: Synthetic oligonucleotide
aggauucccgaggccugcu

SEQ ID NO: 75854 - RNA, 19 nt, Artificial Sequence
  Description of Artificial Sequence: Synthetic oligonucleotide
cucggagagcgaucuuuua

SEQ ID NO: 75855 - RNA, 19 nt, Artificial Sequence
  Description of Artificial Sequence: Synthetic oligonucleotide
cagugcucauuagucagcu

SEQ ID NO: 75856 - RNA, 19 nt, Artificial Sequence
  Description of Artificial Sequence: Synthetic oligonucleotide
cucccacgcaaccuugcua

SEQ ID NO: 75857 - RNA, 19 nt, Artificial Sequence
  Description of Artificial Sequence: Synthetic oligonucleotide
accagccccgcgacauguc

SEQ ID NO: 75858 - RNA, 19 nt, Artificial Sequence
  Description of Artificial Sequence: Synthetic oligonucleotide
cccggacacccacuagcgg

SEQ ID NO: 75859 - RNA, 19 nt, Artificial Sequence
  Description of Artificial Sequence: Synthetic oligonucleotide
caccggcccagaaaaggcu

SEQ ID NO: 75860 - RNA, 19 nt, Artificial Sequence
  Description of Artificial Sequence: Synthetic oligonucleotide
ggggcggaauugcuugcca

SEQ ID NO: 75861 - RNA, 19 nt, Artificial Sequence
  Description of Artificial Sequence: Synthetic oligonucleotide
aaccggcuauugguucaua

SEQ ID NO: 75862 - RNA, 19 nt, Artificial Sequence
  Description of Artificial Sequence: Synthetic oligonucleotide
ccugcugcugcugcugcug

SEQ ID NO: 75863 - RNA, 19 nt, Artificial Sequence
  Description of Artificial Sequence: Synthetic oligonucleotide
cacuguguguuacgucacu

SEQ ID NO: 75864 - RNA, 19 nt, Artificial Sequence
  Description of Artificial Sequence: Synthetic oligonucleotide
acgcugcgugcauuuucuu

SEQ ID NO: 75865 - RNA, 19 nt, Artificial Sequence
  Description of Artificial Sequence: Synthetic oligonucleotide
gcgacaugucccaggccgc

SEQ ID NO: 75866 - RNA, 19 nt, Artificial Sequence
  Description of Artificial Sequence: Synthetic oligonucleotide
ccccgcgacaugucccagg

SEQ ID NO: 75867 - RNA, 19 nt, Artificial Sequence
  Description of Artificial Sequence: Synthetic oligonucleotide
  modified_base (3)..(3): a, c, u, g, unknown or other
gcngaacacagcaggaguu

SEQ ID NO: 75868 - RNA, 19 nt, Artificial Sequence
  Description of Artificial Sequence: Synthetic oligonucleotide
gaguggugugaugggugcu

SEQ ID NO: 75869 - RNA, 19 nt, Artificial Sequence
  Description of Artificial Sequence: Synthetic oligonucleotide
cacccagagugaacaacau

SEQ ID NO: 75870 - RNA, 19 nt, Artificial Sequence
  Description of Artificial Sequence: Synthetic oligonucleotide
gaaccggcuauugguucau

SEQ ID NO: 75871 - RNA, 19 nt, Artificial Sequence
  Description of Artificial Sequence: Synthetic oligonucleotide
cugcgcacagauccucagu

SEQ ID NO: 75872 - RNA, 19 nt, Artificial Sequence
  Description of Artificial Sequence: Synthetic oligonucleotide
ggguaucagucaacccuga

SEQ ID NO: 75873 - RNA, 19 nt, Artificial Sequence
  Description of Artificial Sequence: Synthetic oligonucleotide
gcuaccagccccgcgacau

SEQ ID NO: 75874 - RNA, 19 nt, Artificial Sequence
  Description of Artificial Sequence: Synthetic oligonucleotide
ccccgagcuuggcaaaguc

SEQ ID NO: 75875 - RNA, 19 nt, Artificial Sequence
  Description of Artificial Sequence: Synthetic oligonucleotide
gccgugaguuuggagaagu

SEQ ID NO: 75876 - RNA, 19 nt, Artificial Sequence
  Description of Artificial Sequence: Synthetic oligonucleotide
cccaacugccggguccuag

SEQ ID NO: 75877 - RNA, 19 nt, Artificial Sequence
  Description of Artificial Sequence: Synthetic oligonucleotide
cgcuagaguuaacaccaca

SEQ ID NO: 75878 - RNA, 19 nt, Artificial Sequence
  Description of Artificial Sequence: Synthetic oligonucleotide
cuguuagaguacggucacu

SEQ ID NO: 75879 - RNA, 19 nt, Artificial Sequence
  Description of Artificial Sequence: Synthetic oligonucleotide
caccuaugccaaguucccu

SEQ ID NO: 75880 - RNA, 19 nt, Artificial Sequence
  Description of Artificial Sequence: Synthetic oligonucleotide
cugcugcugcugcugcugu

SEQ ID NO: 75881 - RNA, 19 nt, Artificial Sequence
  Description of Artificial Sequence: Synthetic oligonucleotide
ccacuagcggcggcucggc

SEQ ID NO: 75882 - RNA, 19 nt, Artificial Sequence
  Description of Artificial Sequence: Synthetic oligonucleotide
gcgcuagaguuaacaccac

SEQ ID NO: 75883 - RNA, 19 nt, Artificial Sequence
  Description of Artificial Sequence: Synthetic oligonucleotide
ccgcgacaugucccaggcc

SEQ ID NO: 75884 - RNA, 19 nt, Artificial Sequence
  Description of Artificial Sequence: Synthetic oligonucleotide
gggugacgcaugaaagaau

SEQ ID NO: 75885 - RNA, 19 nt, Artificial Sequence
  Description of Artificial Sequence: Synthetic oligonucleotide
ccucggagagcgaucuuuu

SEQ ID NO: 75886 - RNA, 19 nt, Artificial Sequence
  Description of Artificial Sequence: Synthetic oligonucleotide
gccccgcgacaugucccag

SEQ ID NO: 75887 - RNA, 19 nt, Artificial Sequence
  Description of Artificial Sequence: Synthetic oligonucleotide
gccugcugcugcugcugcu

SEQ ID NO: 75888 - RNA, 19 nt, Artificial Sequence
  Description of Artificial Sequence: Synthetic oligonucleotide
caguccucuuuaggugauu

SEQ ID NO: 75889 - RNA, 19 nt, Artificial Sequence
  Description of Artificial Sequence: Synthetic oligonucleotide
cgaaauacgcaugguccuu

SEQ ID NO: 75890 - RNA, 19 nt, Artificial Sequence
  Description of Artificial Sequence: Synthetic oligonucleotide
gccugcaaugagagguauu

SEQ ID NO: 75891 - RNA, 19 nt, Artificial Sequence
  Description of Artificial Sequence: Synthetic oligonucleotide
ccgugaguuuggagaaguu

SEQ ID NO: 75892 - RNA, 19 nt, Artificial Sequence
  Description of Artificial Sequence: Synthetic oligonucleotide
ccacgcaaccuugcuaguu

SEQ ID NO: 75893 - RNA, 19 nt, Artificial Sequence
  Description of Artificial Sequence: Synthetic oligonucleotide
gcccaacugccggguccua

SEQ ID NO: 75894 - RNA, 19 nt, Artificial Sequence
  Description of Artificial Sequence: Synthetic oligonucleotide
auuuauauagguuauuagc

SEQ ID NO: 75895 - RNA, 19 nt, Artificial Sequence
  Description of Artificial Sequence: Synthetic oligonucleotide
acugauaccgaauugaccg

SEQ ID NO: 75896 - RNA, 19 nt, Artificial Sequence
  Description of Artificial Sequence: Synthetic oligonucleotide
aaauuaguaaaauagcaga

SEQ ID NO: 75897 - RNA, 19 nt, Artificial Sequence
  Description of Artificial Sequence: Synthetic oligonucleotide
aauauuaccaaucuaggaa

SEQ ID NO: 75898 - RNA, 19 nt, Artificial Sequence
  Description of Artificial Sequence: Synthetic oligonucleotide
cuauaauuggguuauauag

SEQ ID NO: 75899 - RNA, 19 nt, Artificial Sequence
  Description of Artificial Sequence: Synthetic oligonucleotide
ugagauauacuccaauacg

SEQ ID NO: 75900 - RNA, 19 nt, Artificial Sequence
  Description of Artificial Sequence: Synthetic oligonucleotide
uguauuauaggccucaagu

SEQ ID NO: 75901 - RNA, 19 nt, Artificial Sequence
  Description of Artificial Sequence: Synthetic oligonucleotide
uuguuaagaacucugauac

SEQ ID NO: 75902 - RNA, 19 nt, Artificial Sequence
  Description of Artificial Sequence: Synthetic oligonucleotide
auuaacacgagauuaaaga

SEQ ID NO: 75903 - RNA, 19 nt, Artificial Sequence
  Description of Artificial Sequence: Synthetic oligonucleotide
auacauaugauauguuagc

SEQ ID NO: 75904 - RNA, 19 nt, Artificial Sequence
  Description of Artificial Sequence: Synthetic oligonucleotide
ucuuuuacuacaaagcggu

SEQ ID NO: 75905 - RNA, 19 nt, Artificial Sequence
  Description of Artificial Sequence: Synthetic oligonucleotide
agucuuuuacuacaaagcg

SEQ ID NO: 75906 - RNA, 19 nt, Artificial Sequence
  Description of Artificial Sequence: Synthetic oligonucleotide
aacgagaacguccaaauga

SEQ ID NO: 75907 - RNA, 19 nt, Artificial Sequence
  Description of Artificial Sequence: Synthetic oligonucleotide
aauacuuugaugaucauau

SEQ ID NO: 75908 - RNA, 19 nt, Artificial Sequence
  Description of Artificial Sequence: Synthetic oligonucleotide
aguuaauagguuuuggcag

SEQ ID NO: 75909 - RNA, 19 nt, Artificial Sequence
  Description of Artificial Sequence: Synthetic oligonucleotide
uuggcaacaaauauuacac

SEQ ID NO: 75910 - RNA, 19 nt, Artificial Sequence
  Description of Artificial Sequence: Synthetic oligonucleotide
aaauauuaccaaucuagga

SEQ ID NO: 75911 - RNA, 19 nt, Artificial Sequence
  Description of Artificial Sequence: Synthetic oligonucleotide
uguauaucugaaauguuac

SEQ ID NO: 75912 - RNA, 19 nt, Artificial Sequence
  Description of Artificial Sequence: Synthetic oligonucleotide
gagauauacuccaauacgg

SEQ ID NO: 75913 - RNA, 19 nt, Artificial Sequence
  Description of Artificial Sequence: Synthetic oligonucleotide
uuaaugagauacaugcccc

SEQ ID NO: 75914 - RNA, 19 nt, Artificial Sequence
  Description of Artificial Sequence: Synthetic oligonucleotide
uaaacaacguggcuuuugg

SEQ ID NO: 75915 - RNA, 19 nt, Artificial Sequence
  Description of Artificial Sequence: Synthetic oligonucleotide
uggaauuugaagcaucaug

SEQ ID NO: 75916 - RNA, 19 nt, Artificial Sequence
  Description of Artificial Sequence: Synthetic oligonucleotide
ucuaucuagaguacuucgg

SEQ ID NO: 75917 - RNA, 19 nt, Artificial Sequence
  Description of Artificial Sequence: Synthetic oligonucleotide
ugagguuuguuguaugacg

SEQ ID NO: 75918 - RNA, 19 nt, Artificial Sequence
  Description of Artificial Sequence: Synthetic oligonucleotide
aacaacguggcuuuuggcu

SEQ ID NO: 75919 - RNA, 19 nt, Artificial Sequence
  Description of Artificial Sequence: Synthetic oligonucleotide
caucaacuuacuaaagugg

SEQ ID NO: 75920 - RNA, 19 nt, Artificial Sequence
  Description of Artificial Sequence: Synthetic oligonucleotide
ucuauuauuuccauucuau

SEQ ID NO: 75921 - RNA, 19 nt, Artificial Sequence
  Description of Artificial Sequence: Synthetic oligonucleotide
acguccaaaugacaaaagc

SEQ ID NO: 75922 - RNA, 19 nt, Artificial Sequence
  Description of Artificial Sequence: Synthetic oligonucleotide
uccacgucuagaaacacgc

SEQ ID NO: 75923 - RNA, 19 nt, Artificial Sequence
  Description of Artificial Sequence: Synthetic oligonucleotide
cauaugauauguuagccuc

SEQ ID NO: 75924 - RNA, 19 nt, Artificial Sequence
  Description of Artificial Sequence: Synthetic oligonucleotide
uuaucuucggaggaggagg

SEQ ID NO: 75925 - RNA, 19 nt, Artificial Sequence
  Description of Artificial Sequence: Synthetic oligonucleotide
guacuaacgucucugagcc

SEQ ID NO: 75926 - RNA, 19 nt, Artificial Sequence
  Description of Artificial Sequence: Synthetic oligonucleotide
uggacauguacuaacgucu

SEQ ID NO: 75927 - RNA, 19 nt, Artificial Sequence
  Description of Artificial Sequence: Synthetic oligonucleotide
uucauagggaucaaaugcu

SEQ ID NO: 75928 - RNA, 19 nt, Artificial Sequence
  Description of Artificial Sequence: Synthetic oligonucleotide
uguuguaugacgaaucauu

SEQ ID NO: 75929 - RNA, 19 nt, Artificial Sequence
  Description of Artificial Sequence: Synthetic oligonucleotide
aauugcccauuaucaaugg

SEQ ID NO: 75930 - RNA, 19 nt, Artificial Sequence
  Description of Artificial Sequence: Synthetic oligonucleotide
auaauuggguuauauagaa

SEQ ID NO: 75931 - RNA, 19 nt, Artificial Sequence
  Description of Artificial Sequence: Synthetic oligonucleotide
ugguauuacugccacagga

SEQ ID NO: 75932 - RNA, 19 nt, Artificial Sequence
  Description of Artificial Sequence: Synthetic oligonucleotide
uguuucauagggaucaaau

SEQ ID NO: 75933 - RNA, 19 nt, Artificial Sequence
  Description of Artificial Sequence: Synthetic oligonucleotide
aauacggccacaauguaga

SEQ ID NO: 75934 - RNA, 19 nt, Artificial Sequence
  Description of Artificial Sequence: Synthetic oligonucleotide
acuucgaacgagaacgucc

SEQ ID NO: 75935 - RNA, 19 nt, Artificial Sequence
  Description of Artificial Sequence: Synthetic oligonucleotide
cuuuacugcauacauauga

SEQ ID NO: 75936 - RNA, 19 nt, Artificial Sequence
  Description of Artificial Sequence: Synthetic oligonucleotide
auauuaccaaucuaggaaa

SEQ ID NO: 75937 - RNA, 19 nt, Artificial Sequence
  Description of Artificial Sequence: Synthetic oligonucleotide
uaucuguguaaauuuguug

SEQ ID NO: 75938 - RNA, 19 nt, Artificial Sequence
  Description of Artificial Sequence: Synthetic oligonucleotide
ccuuugaccacuucgaacg

SEQ ID NO: 75939 - RNA, 19 nt, Artificial Sequence
  Description of Artificial Sequence: Synthetic oligonucleotide
aaugacuacgcauggcuaa

SEQ ID NO: 75940 - RNA, 19 nt, Artificial Sequence
  Description of Artificial Sequence: Synthetic oligonucleotide
uauauagaauuguuuguaa

SEQ ID NO: 75941 - RNA, 19 nt, Artificial Sequence
  Description of Artificial Sequence: Synthetic oligonucleotide
ugucaaugacuacgcaugg

SEQ ID NO: 75942 - RNA, 19 nt, Artificial Sequence
  Description of Artificial Sequence: Synthetic oligonucleotide
uacauaugauauguuagcc

SEQ ID NO: 75943 - RNA, 19 nt, Artificial Sequence
  Description of Artificial Sequence: Synthetic oligonucleotide
uuuuggcuacuuuacaacu

SEQ ID NO: 75944 - RNA, 19 nt, Artificial Sequence
  Description of Artificial Sequence: Synthetic oligonucleotide
ugugaaaauguagagcaac

SEQ ID NO: 75945 - RNA, 19 nt, Artificial Sequence
  Description of Artificial Sequence: Synthetic oligonucleotide
ucuugacuuacaaauuagu

SEQ ID NO: 75946 - RNA, 19 nt, Artificial Sequence
  Description of Artificial Sequence: Synthetic oligonucleotide
uuuacugcauacauaugau

SEQ ID NO: 75947 - RNA, 19 nt, Artificial Sequence
  Description of Artificial Sequence: Synthetic oligonucleotide
auaauggggauuccacuuc

SEQ ID NO: 75948 - RNA, 19 nt, Artificial Sequence
  Description of Artificial Sequence: Synthetic oligonucleotide
gauaauguuucauagggau

SEQ ID NO: 75949 - RNA, 19 nt, Artificial Sequence
  Description of Artificial Sequence: Synthetic oligonucleotide
acauaugauauguuagccu

SEQ ID NO: 75950 - RNA, 19 nt, Artificial Sequence
  Description of Artificial Sequence: Synthetic oligonucleotide
uguacacugauaccgaauu

SEQ ID NO: 75951 - RNA, 19 nt, Artificial Sequence
  Description of Artificial Sequence: Synthetic oligonucleotide
uucuauuauucuacugagc

SEQ ID NO: 75952 - RNA, 19 nt, Artificial Sequence
  Description of Artificial Sequence: Synthetic oligonucleotide
caaagcgguauacaucugg

SEQ ID NO: 75953 - RNA, 19 nt, Artificial Sequence
  Description of Artificial Sequence: Synthetic oligonucleotide
agauacaugccccuuuucu

SEQ ID NO: 75954 - RNA, 19 nt, Artificial Sequence
  Description of Artificial Sequence: Synthetic oligonucleotide
uauuacugccacaggaacu

SEQ ID NO: 75955 - RNA, 19 nt, Artificial Sequence
  Description of Artificial Sequence: Synthetic oligonucleotide
ucuauaauuggguuauaua

SEQ ID NO: 75956 - RNA, 19 nt, Artificial Sequence
  Description of Artificial Sequence: Synthetic oligonucleotide
agauuaaauggacaguuua

SEQ ID NO: 75957 - RNA, 19 nt, Artificial Sequence
  Description of Artificial Sequence: Synthetic oligonucleotide
cuacgcauggcuaagguca

SEQ ID NO: 75958 - RNA, 19 nt, Artificial Sequence
  Description of Artificial Sequence: Synthetic oligonucleotide
cacgccauugaaauuauuc

SEQ ID NO: 75959 - RNA, 19 nt, Artificial Sequence
  Description of Artificial Sequence: Synthetic oligonucleotide
acuaacgucucugagccag

SEQ ID NO: 75960 - RNA, 19 nt, Artificial Sequence
  Description of Artificial Sequence: Synthetic oligonucleotide
uaaagaggauucuucguuc

SEQ ID NO: 75961 - RNA, 19 nt, Artificial Sequence
  Description of Artificial Sequence: Synthetic oligonucleotide
uuguauuauaggccucaag

SEQ ID NO: 75962 - RNA, 19 nt, Artificial Sequence
  Description of Artificial Sequence: Synthetic oligonucleotide
agaccaguagauaaacaac

SEQ ID NO: 75963 - RNA, 19 nt, Artificial Sequence
  Description of Artificial Sequence: Synthetic oligonucleotide
aguaaagaggauucuucgu

SEQ ID NO: 75964 - RNA, 19 nt, Artificial Sequence
  Description of Artificial Sequence: Synthetic oligonucleotide
uuggacauguacuaacguc

SEQ ID NO: 75965 - RNA, 19 nt, Artificial Sequence
  Description of Artificial Sequence: Synthetic oligonucleotide
uuuggacauguacuaacgu

SEQ ID NO: 75966 - RNA, 19 nt, Artificial Sequence
  Description of Artificial Sequence: Synthetic oligonucleotide
uaauggaugaggacuacuu

SEQ ID NO: 75967 - RNA, 19 nt, Artificial Sequence
  Description of Artificial Sequence: Synthetic oligonucleotide
acgccauugaaauuauuca

SEQ ID NO: 75968 - RNA, 19 nt, Artificial Sequence
  Description of Artificial Sequence: Synthetic oligonucleotide
acuuuacaacugcugcuac

SEQ ID NO: 75969 - RNA, 19 nt, Artificial Sequence
  Description of Artificial Sequence: Synthetic oligonucleotide
aaagaugguauuacugcca

SEQ ID NO: 75970 - RNA, 19 nt, Artificial Sequence
  Description of Artificial Sequence: Synthetic oligonucleotide
aauggaugaggacuacuuu

SEQ ID NO: 75971 - RNA, 19 nt, Artificial Sequence
  Description of Artificial Sequence: Synthetic oligonucleotide
auacuaauucaaaagcaug

SEQ ID NO: 75972 - RNA, 19 nt, Artificial Sequence
  Description of Artificial Sequence: Synthetic oligonucleotide
cucuaucggcauaacaccc

SEQ ID NO: 75973 - RNA, 19 nt, Artificial Sequence
  Description of Artificial Sequence: Synthetic oligonucleotide
aggucauaauaguuuagcu

SEQ ID NO: 75974 - RNA, 19 nt, Artificial Sequence
  Description of Artificial Sequence: Synthetic oligonucleotide
aucggcauaacacccuuug

SEQ ID NO: 75975 - RNA, 19 nt, Artificial Sequence
  Description of Artificial Sequence: Synthetic oligonucleotide
aggugauuuauuaaucuug

SEQ ID NO: 75976 - RNA, 19 nt, Artificial Sequence
  Description of Artificial Sequence: Synthetic oligonucleotide
aucaaugggaugaggaaag

SEQ ID NO: 75977 - RNA, 19 nt, Artificial Sequence
  Description of Artificial Sequence: Synthetic oligonucleotide
acaaggucauaauaguuua

SEQ ID NO: 75978 - RNA, 19 nt, Artificial Sequence
  Description of Artificial Sequence: Synthetic oligonucleotide
ucuaucggcauaacacccu

SEQ ID NO: 75979 - RNA, 19 nt, Artificial Sequence
  Description of Artificial Sequence: Synthetic oligonucleotide
acgagaacguccaaaugac

SEQ ID NO: 75980 - RNA, 19 nt, Artificial Sequence
  Description of Artificial Sequence: Synthetic oligonucleotide
uacuaugccucuuuugaau

SEQ ID NO: 75981 - RNA, 19 nt, Artificial Sequence
  Description of Artificial Sequence: Synthetic oligonucleotide
aaccuaugucaucauccug

SEQ ID NO: 75982 - RNA, 19 nt, Artificial Sequence
  Description of Artificial Sequence: Synthetic oligonucleotide
uaccgaauugaccgcacug

SEQ ID NO: 75983 - RNA, 19 nt, Artificial Sequence
  Description of Artificial Sequence: Synthetic oligonucleotide
guauuacugccacaggaac

SEQ ID NO: 75984 - RNA, 19 nt, Artificial Sequence
  Description of Artificial Sequence: Synthetic oligonucleotide
augagugagauuguuguga

SEQ ID NO: 75985 - RNA, 19 nt, Artificial Sequence
  Description of Artificial Sequence: Synthetic oligonucleotide
cuuguuaagaacucugaua

SEQ ID NO: 75986 - RNA, 19 nt, Artificial Sequence
  Description of Artificial Sequence: Synthetic oligonucleotide
gaugaggacuacuuucauc

SEQ ID NO: 75987 - RNA, 19 nt, Artificial Sequence
  Description of Artificial Sequence: Synthetic oligonucleotide
cagcauucuaucuagagua

SEQ ID NO: 75988 - RNA, 19 nt, Artificial Sequence
  Description of Artificial Sequence: Synthetic oligonucleotide
aucaacuuacuaaaguggu

SEQ ID NO: 75989 - RNA, 19 nt, Artificial Sequence
  Description of Artificial Sequence: Synthetic oligonucleotide
gauuguauuauaggccuca

SEQ ID NO: 75990 - RNA, 19 nt, Artificial Sequence
  Description of Artificial Sequence: Synthetic oligonucleotide
acauguacuaacgucucug

SEQ ID NO: 75991 - RNA, 19 nt, Artificial Sequence
  Description of Artificial Sequence: Synthetic oligonucleotide
aacaaaaggugcaucuuaa

SEQ ID NO: 75992 - RNA, 19 nt, Artificial Sequence
  Description of Artificial Sequence: Synthetic oligonucleotide
uaaugagauacaugccccu

SEQ ID NO: 75993 - RNA, 19 nt, Artificial Sequence
  Description of Artificial Sequence: Synthetic oligonucleotide
cauguuuguauucacaagu

SEQ ID NO: 75994 - RNA, 19 nt, Artificial Sequence
  Description of Artificial Sequence: Synthetic oligonucleotide
cacgucuagaaacacgcug

SEQ ID NO: 75995 - RNA, 19 nt, Artificial Sequence
  Description of Artificial Sequence: Synthetic oligonucleotide
aacuuacuaaaguggucau

SEQ ID NO: 75996 - RNA, 19 nt, Artificial Sequence
  Description of Artificial Sequence: Synthetic oligonucleotide
cacugauaccgaauugacc

SEQ ID NO: 75997 - RNA, 19 nt, Artificial Sequence
  Description of Artificial Sequence: Synthetic oligonucleotide
caacuuacuaaagugguca

SEQ ID NO: 75998 - RNA, 19 nt, Artificial Sequence
  Description of Artificial Sequence: Synthetic oligonucleotide
ugugaaaguucccguuugu

SEQ ID NO: 75999 - RNA, 19 nt, Artificial Sequence
  Description of Artificial Sequence: Synthetic oligonucleotide
cagucuguacaaugguggg

SEQ ID NO: 76000 - RNA, 19 nt, Artificial Sequence
  Description of Artificial Sequence: Synthetic oligonucleotide
ucuuuacugcauacauaug

SEQ ID NO: 76001 - RNA, 19 nt, Artificial Sequence
  Description of Artificial Sequence: Synthetic oligonucleotide
cagcaauugcccauuauca

SEQ ID NO: 76002 - RNA, 19 nt, Artificial Sequence
  Description of Artificial Sequence: Synthetic oligonucleotide
acaauguagagggacacau

SEQ ID NO: 76003 - RNA, 19 nt, Artificial Sequence
  Description of Artificial Sequence: Synthetic oligonucleotide
uucggacaaggucauaaua

SEQ ID NO: 76004 - RNA, 19 nt, Artificial Sequence
  Description of Artificial Sequence: Synthetic oligonucleotide
gagaacguccaaaugacaa

SEQ ID NO: 76005 - RNA, 19 nt, Artificial Sequence
  Description of Artificial Sequence: Synthetic oligonucleotide
auuucauaguucccuugga

SEQ ID NO: 76006 - RNA, 19 nt, Artificial Sequence
  Description of Artificial Sequence: Synthetic oligonucleotide
aagauagucagaggguuua

SEQ ID NO: 76007 - RNA, 19 nt, Artificial Sequence
  Description of Artificial Sequence: Synthetic oligonucleotide
gauacuaauucaaaagcau

SEQ ID NO: 76008 - RNA, 19 nt, Artificial Sequence
  Description of Artificial Sequence: Synthetic oligonucleotide
gaacgagaacguccaaaug

SEQ ID NO: 76009 - RNA, 19 nt, Artificial Sequence
  Description of Artificial Sequence: Synthetic oligonucleotide
uaauuggguuauauagaau

SEQ ID NO: 76010 - RNA, 19 nt, Artificial Sequence
  Description of Artificial Sequence: Synthetic oligonucleotide
guacuaaaauacuaugccu

SEQ ID NO: 76011 - RNA, 19 nt, Artificial Sequence
  Description of Artificial Sequence: Synthetic oligonucleotide
auaaacaacguggcuuuug

SEQ ID NO: 76012 - RNA, 19 nt, Artificial Sequence
  Description of Artificial Sequence: Synthetic oligonucleotide
gagguuuguuguaugacga

SEQ ID NO: 76013 - RNA, 19 nt, Artificial Sequence
  Description of Artificial Sequence: Synthetic oligonucleotide
agcaauugcccauuaucaa

SEQ ID NO: 76014 - RNA, 19 nt, Artificial Sequence
  Description of Artificial Sequence: Synthetic oligonucleotide
aggauucuucguuccguuc

SEQ ID NO: 76015 - RNA, 19 nt, Artificial Sequence
  Description of Artificial Sequence: Synthetic oligonucleotide
gcagauuguauuauaggcc

SEQ ID NO: 76016 - RNA, 19 nt, Artificial Sequence
  Description of Artificial Sequence: Synthetic oligonucleotide
uggguguuauucacuagau

SEQ ID NO: 76017 - RNA, 19 nt, Artificial Sequence
  Description of Artificial Sequence: Synthetic oligonucleotide
uacuuuacaacugcugcua

SEQ ID NO: 76018 - RNA, 19 nt, Artificial Sequence
  Description of Artificial Sequence: Synthetic oligonucleotide
acuaugccucuuuugaaua

SEQ ID NO: 76019 - RNA, 19 nt, Artificial Sequence
  Description of Artificial Sequence: Synthetic oligonucleotide
uuugaccacuucgaacgag

SEQ ID NO: 76020 - RNA, 19 nt, Artificial Sequence
  Description of Artificial Sequence: Synthetic oligonucleotide
auuacugccacaggaacua

SEQ ID NO: 76021 - RNA, 19 nt, Artificial Sequence
  Description of Artificial Sequence: Synthetic oligonucleotide
uuauaggccucaagucacu

SEQ ID NO: 76022 - RNA, 19 nt, Artificial Sequence
  Description of Artificial Sequence: Synthetic oligonucleotide
cugauaccgaauugaccgc

SEQ ID NO: 76023 - RNA, 19 nt, Artificial Sequence
  Description of Artificial Sequence: Synthetic oligonucleotide
ugauaccgaauugaccgca

SEQ ID NO: 76024 - RNA, 19 nt, Artificial Sequence
  Description of Artificial Sequence: Synthetic oligonucleotide
acaacguggcuuuuggcua

SEQ ID NO: 76025 - RNA, 19 nt, Artificial Sequence
  Description of Artificial Sequence: Synthetic oligonucleotide
uuacuaaaguggucauuaa

SEQ ID NO: 76026 - RNA, 19 nt, Artificial Sequence
  Description of Artificial Sequence: Synthetic oligonucleotide
acgagauuaaagaaaguua

SEQ ID NO: 76027 - RNA, 19 nt, Artificial Sequence
  Description of Artificial Sequence: Synthetic oligonucleotide
uuguaugacgaaucauuuu

SEQ ID NO: 76028 - RNA, 19 nt, Artificial Sequence
  Description of Artificial Sequence: Synthetic oligonucleotide
gugugaaaguucccguuug

SEQ ID NO: 76029 - RNA, 19 nt, Artificial Sequence
  Description of Artificial Sequence: Synthetic oligonucleotide
auacuaugccucuuuugaa

SEQ ID NO: 76030 - RNA, 19 nt, Artificial Sequence
  Description of Artificial Sequence: Synthetic oligonucleotide
uuaagacugaggugauuua

SEQ ID NO: 76031 - RNA, 19 nt, Artificial Sequence
  Description of Artificial Sequence: Synthetic oligonucleotide
aagcauguuuguauucaca

SEQ ID NO: 76032 - RNA, 19 nt, Artificial Sequence
  Description of Artificial Sequence: Synthetic oligonucleotide
gguagugaagggaaauaag

SEQ ID NO: 76033 - RNA, 19 nt, Artificial Sequence
  Description of Artificial Sequence: Synthetic oligonucleotide
ucuagucuguacacugaua

SEQ ID NO: 76034 - RNA, 19 nt, Artificial Sequence
  Description of Artificial Sequence: Synthetic oligonucleotide
auaaugccggauauuaaaa

SEQ ID NO: 76035 - RNA, 19 nt, Artificial Sequence
  Description of Artificial Sequence: Synthetic oligonucleotide
gcuaaaucuucaaaacagc

SEQ ID NO: 76036 - RNA, 19 nt, Artificial Sequence
  Description of Artificial Sequence: Synthetic oligonucleotide
agccucucaauuaauuuca

SEQ ID NO: 76037 - RNA, 19 nt, Artificial Sequence
  Description of Artificial Sequence: Synthetic oligonucleotide
ccucuuacuaaaauugauc

SEQ ID NO: 76038 - RNA, 19 nt, Artificial Sequence
  Description of Artificial Sequence: Synthetic oligonucleotide
aaugagauacaugccccuu

SEQ ID NO: 76039 - RNA, 19 nt, Artificial Sequence
  Description of Artificial Sequence: Synthetic oligonucleotide
ccaucaaacgcaccagugg

SEQ ID NO: 76040 - RNA, 19 nt, Artificial Sequence
  Description of Artificial Sequence: Synthetic oligonucleotide
ugccccuuuucuucuauaa

SEQ ID NO: 76041 - RNA, 19 nt, Artificial Sequence
  Description of Artificial Sequence: Synthetic oligonucleotide
acgucuagaaacacgcugu

SEQ ID NO: 76042 - RNA, 19 nt, Artificial Sequence
  Description of Artificial Sequence: Synthetic oligonucleotide
ucggcauaacacccuuuga

SEQ ID NO: 76043 - RNA, 19 nt, Artificial Sequence
  Description of Artificial Sequence: Synthetic oligonucleotide
ugacuacgcauggcuaagg

SEQ ID NO: 76044 - RNA, 19 nt, Artificial Sequence
  Description of Artificial Sequence: Synthetic oligonucleotide
ugccucuuuugaauaaauu

SEQ ID NO: 76045 - RNA, 19 nt, Artificial Sequence
  Description of Artificial Sequence: Synthetic oligonucleotide
uaugccucuuuugaauaaa

SEQ ID NO: 76046 - RNA, 19 nt, Artificial Sequence
  Description of Artificial Sequence: Synthetic oligonucleotide
uuguaccccaaaacuuccu

SEQ ID NO: 76047 - RNA, 19 nt, Artificial Sequence
  Description of Artificial Sequence: Synthetic oligonucleotide
ggaugagugagauuguugu

SEQ ID NO: 76048 - RNA, 19 nt, Artificial Sequence
  Description of Artificial Sequence: Synthetic oligonucleotide
gugacuggaacugagcaaa

SEQ ID NO: 76049 - RNA, 19 nt, Artificial Sequence
  Description of Artificial Sequence: Synthetic oligonucleotide
guaaagaggauucuucguu

SEQ ID NO: 76050 - RNA, 19 nt, Artificial Sequence
  Description of Artificial Sequence: Synthetic oligonucleotide
ucgaacgagaacguccaaa

SEQ ID NO: 76051 - RNA, 19 nt, Artificial Sequence
  Description of Artificial Sequence: Synthetic oligonucleotide
aauugaccgcacugacuau

SEQ ID NO: 76052 - RNA, 19 nt, Artificial Sequence
  Description of Artificial Sequence: Synthetic oligonucleotide
agauuguauuauaggccuc

SEQ ID NO: 76053 - RNA, 19 nt, Artificial Sequence
  Description of Artificial Sequence: Synthetic oligonucleotide
cauguacuaacgucucuga

SEQ ID NO: 76054 - RNA, 19 nt, Artificial Sequence
  Description of Artificial Sequence: Synthetic oligonucleotide
accgaauugaccgcacuga

SEQ ID NO: 76055 - RNA, 19 nt, Artificial Sequence
  Description of Artificial Sequence: Synthetic oligonucleotide
cuagaguacuucgguagug

SEQ ID NO: 76056 - RNA, 19 nt, Artificial Sequence
  Description of Artificial Sequence: Synthetic oligonucleotide
ggagcaaagaugguauuac

SEQ ID NO: 76057 - RNA, 19 nt, Artificial Sequence
  Description of Artificial Sequence: Synthetic oligonucleotide
auccacgucuagaaacacg

SEQ ID NO: 76058 - RNA, 19 nt, Artificial Sequence
  Description of Artificial Sequence: Synthetic oligonucleotide
uucgguagugaagggaaau

SEQ ID NO: 76059 - RNA, 19 nt, Artificial Sequence
  Description of Artificial Sequence: Synthetic oligonucleotide
gacaaggucauaauaguuu

SEQ ID NO: 76060 - RNA, 19 nt, Artificial Sequence
  Description of Artificial Sequence: Synthetic oligonucleotide
agacaccauacacugcaaa

SEQ ID NO: 76061 - RNA, 19 nt, Artificial Sequence
  Description of Artificial Sequence: Synthetic oligonucleotide
uggcuacuuuacaacugcu

SEQ ID NO: 76062 - RNA, 19 nt, Artificial Sequence
  Description of Artificial Sequence: Synthetic oligonucleotide
augacuacgcauggcuaag

SEQ ID NO: 76063 - RNA, 19 nt, Artificial Sequence
  Description of Artificial Sequence: Synthetic oligonucleotide
auaccgaauugaccgcacu

SEQ ID NO: 76064 - RNA, 19 nt, Artificial Sequence
  Description of Artificial Sequence: Synthetic oligonucleotide
auaugauauguuagccucu

SEQ ID NO: 76065 - RNA, 19 nt, Artificial Sequence
  Description of Artificial Sequence: Synthetic oligonucleotide
aacgcaccaguggggacag

SEQ ID NO: 76066 - RNA, 19 nt, Artificial Sequence
  Description of Artificial Sequence: Synthetic oligonucleotide
guauaucugaaauguuacu

SEQ ID NO: 76067 - RNA, 19 nt, Artificial Sequence
  Description of Artificial Sequence: Synthetic oligonucleotide
gauacaugccccuuuucuu

SEQ ID NO: 76068 - RNA, 19 nt, Artificial Sequence
  Description of Artificial Sequence: Synthetic oligonucleotide
agugugagguuuguuguau

SEQ ID NO: 76069 - RNA, 19 nt, Artificial Sequence
  Description of Artificial Sequence: Synthetic oligonucleotide
caacguggcuuuuggcuac

SEQ ID NO: 76070 - RNA, 19 nt, Artificial Sequence
  Description of Artificial Sequence: Synthetic oligonucleotide
cuaucuagaguacuucggu

SEQ ID NO: 76071 - RNA, 19 nt, Artificial Sequence
  Description of Artificial Sequence: Synthetic oligonucleotide
uugaccgcacugacuauuu

SEQ ID NO: 76072 - RNA, 19 nt, Artificial Sequence
  Description of Artificial Sequence: Synthetic oligonucleotide
auacggccacaauguagag

SEQ ID NO: 76073 - RNA, 19 nt, Artificial Sequence
  Description of Artificial Sequence: Synthetic oligonucleotide
gauaccgaauugaccgcac

SEQ ID NO: 76074 - RNA, 19 nt, Artificial Sequence
  Description of Artificial Sequence: Synthetic oligonucleotide
gacuggagcaaagauggua

SEQ ID NO: 76075 - RNA, 19 nt, Artificial Sequence
  Description of Artificial Sequence: Synthetic oligonucleotide
gucaaugacuacgcauggc

SEQ ID NO: 76076 - RNA, 19 nt, Artificial Sequence
  Description of Artificial Sequence: Synthetic oligonucleotide
auacuauuccagugucaau

SEQ ID NO: 76077 - RNA, 19 nt, Artificial Sequence
  Description of Artificial Sequence: Synthetic oligonucleotide
agguuuguuguaugacgaa

SEQ ID NO: 76078 - RNA, 19 nt, Artificial Sequence
  Description of Artificial Sequence: Synthetic oligonucleotide
guugguuccuaugccauaa

SEQ ID NO: 76079 - RNA, 19 nt, Artificial Sequence
  Description of Artificial Sequence: Synthetic oligonucleotide
cuacuuuacaacugcugcu

SEQ ID NO: 76080 - RNA, 19 nt, Artificial Sequence
  Description of Artificial Sequence: Synthetic oligonucleotide
auguuuguauucacaagua

SEQ ID NO: 76081 - RNA, 19 nt, Artificial Sequence
  Description of Artificial Sequence: Synthetic oligonucleotide
gauccacgucuagaaacac

SEQ ID NO: 76082 - RNA, 19 nt, Artificial Sequence
  Description of Artificial Sequence: Synthetic oligonucleotide
ucccguuuguaggucuuug

SEQ ID NO: 76083 - RNA, 19 nt, Artificial Sequence
  Description of Artificial Sequence: Synthetic oligonucleotide
ccucaagucacuuaaauuu

SEQ ID NO: 76084 - RNA, 19 nt, Artificial Sequence
  Description of Artificial Sequence: Synthetic oligonucleotide
gcugagauauacuccaaua

SEQ ID NO: 76085 - RNA, 19 nt, Artificial Sequence
  Description of Artificial Sequence: Synthetic oligonucleotide
uacgcauggcuaaggucau

SEQ ID NO: 76086 - RNA, 19 nt, Artificial Sequence
  Description of Artificial Sequence: Synthetic oligonucleotide
ucgguagugaagggaaaua

SEQ ID NO: 76087 - RNA, 19 nt, Artificial Sequence
  Description of Artificial Sequence: Synthetic oligonucleotide
guaaaauagcagauuguau

SEQ ID NO: 76088 - RNA, 19 nt, Artificial Sequence
  Description of Artificial Sequence: Synthetic oligonucleotide
gguuccuaugccauaagaa

SEQ ID NO: 76089 - RNA, 19 nt, Artificial Sequence
  Description of Artificial Sequence: Synthetic oligonucleotide
agguaguaaagaggauucu

SEQ ID NO: 76090 - RNA, 19 nt, Artificial Sequence
  Description of Artificial Sequence: Synthetic oligonucleotide
auugaccgcacugacuauu

SEQ ID NO: 76091 - RNA, 19 nt, Artificial Sequence
  Description of Artificial Sequence: Synthetic oligonucleotide
cuaugccucuuuugaauaa

SEQ ID NO: 76092 - RNA, 19 nt, Artificial Sequence
  Description of Artificial Sequence: Synthetic oligonucleotide
agcuaauggaugaggacua

SEQ ID NO: 76093 - RNA, 19 nt, Artificial Sequence
  Description of Artificial Sequence: Synthetic oligonucleotide
gcuaaagacaccauacacu

SEQ ID NO: 76094 - RNA, 19 nt, Artificial Sequence
  Description of Artificial Sequence: Synthetic oligonucleotide
aaagugguccugacuuaau

SEQ ID NO: 76095 - RNA, 19 nt, Artificial Sequence
  Description of Artificial Sequence: Synthetic oligonucleotide
cacgagauuaaagaaaguu

SEQ ID NO: 76096 - RNA, 19 nt, Artificial Sequence
  Description of Artificial Sequence: Synthetic oligonucleotide
cuguacaauggugggugug

SEQ ID NO: 76097 - RNA, 19 nt, Artificial Sequence
  Description of Artificial Sequence: Synthetic oligonucleotide
cagcuaauggaugaggacu

SEQ ID NO: 76098 - RNA, 19 nt, Artificial Sequence
  Description of Artificial Sequence: Synthetic oligonucleotide
aguugguuccuaugccaua

SEQ ID NO: 76099 - RNA, 19 nt, Artificial Sequence
  Description of Artificial Sequence: Synthetic oligonucleotide
auuguauuauaggccucaa

SEQ ID NO: 76100 - RNA, 19 nt, Artificial Sequence
  Description of Artificial Sequence: Synthetic oligonucleotide
acuccaauacggccacaau

SEQ ID NO: 76101 - RNA, 19 nt, Artificial Sequence
  Description of Artificial Sequence: Synthetic oligonucleotide
caaugacuacgcauggcua

SEQ ID NO: 76102 - RNA, 19 nt, Artificial Sequence
  Description of Artificial Sequence: Synthetic oligonucleotide
uacuaacgucucugagcca

SEQ ID NO: 76103 - RNA, 19 nt, Artificial Sequence
  Description of Artificial Sequence: Synthetic oligonucleotide
acccuuugaccacuucgaa

SEQ ID NO: 76104 - RNA, 19 nt, Artificial Sequence
  Description of Artificial Sequence: Synthetic oligonucleotide
uaucggcauaacacccuuu

SEQ ID NO: 76105 - RNA, 19 nt, Artificial Sequence
  Description of Artificial Sequence: Synthetic oligonucleotide
gacauguacuaacgucucu

SEQ ID NO: 76106 - RNA, 19 nt, Artificial Sequence
  Description of Artificial Sequence: Synthetic oligonucleotide
guuguaugacgaaucauuu

SEQ ID NO: 76107 - RNA, 19 nt, Artificial Sequence
  Description of Artificial Sequence: Synthetic oligonucleotide
cggcauaacacccuuugac

SEQ ID NO: 76108 - RNA, 19 nt, Artificial Sequence
  Description of Artificial Sequence: Synthetic oligonucleotide
cuuugaccacuucgaacga

SEQ ID NO: 76109 - RNA, 19 nt, Artificial Sequence
  Description of Artificial Sequence: Synthetic oligonucleotide
auuuaagacugaggugauu

SEQ ID NO: 76110 - RNA, 19 nt, Artificial Sequence
  Description of Artificial Sequence: Synthetic oligonucleotide
guuauucacuagauaugua

SEQ ID NO: 76111 - RNA, 19 nt, Artificial Sequence
  Description of Artificial Sequence: Synthetic oligonucleotide
auguuucauagggaucaaa

SEQ ID NO: 76112 - RNA, 19 nt, Artificial Sequence
  Description of Artificial Sequence: Synthetic oligonucleotide
ucccguagauacugucuuu

SEQ ID NO: 76113 - RNA, 19 nt, Artificial Sequence
  Description of Artificial Sequence: Synthetic oligonucleotide
acacgagauuaaagaaagu

SEQ ID NO: 76114 - RNA, 19 nt, Artificial Sequence
  Description of Artificial Sequence: Synthetic oligonucleotide
ccaaaccuaugucaucauc

SEQ ID NO: 76115 - RNA, 19 nt, Artificial Sequence
  Description of Artificial Sequence: Synthetic oligonucleotide
cgcacugacuauuuccaac

SEQ ID NO: 76116 - RNA, 19 nt, Artificial Sequence
  Description of Artificial Sequence: Synthetic oligonucleotide
gcccauuaucaaugggaug

SEQ ID NO: 76117 - RNA, 19 nt, Artificial Sequence
  Description of Artificial Sequence: Synthetic oligonucleotide
ggauuuauccacagguagu

SEQ ID NO: 76118 - RNA, 19 nt, Artificial Sequence
  Description of Artificial Sequence: Synthetic oligonucleotide
cacuucgaacgagaacguc

SEQ ID NO: 76119 - RNA, 19 nt, Artificial Sequence
  Description of Artificial Sequence: Synthetic oligonucleotide
ggacauguacuaacgucuc

SEQ ID NO: 76120 - RNA, 19 nt, Artificial Sequence
  Description of Artificial Sequence: Synthetic oligonucleotide
cuaaggucauugaggaguu

SEQ ID NO: 76121 - RNA, 19 nt, Artificial Sequence
  Description of Artificial Sequence: Synthetic oligonucleotide
gagugagauuguugugacu

SEQ ID NO: 76122 - RNA, 19 nt, Artificial Sequence
  Description of Artificial Sequence: Synthetic oligonucleotide
ucguuccguucucgauggc

SEQ ID NO: 76123 - RNA, 19 nt, Artificial Sequence
  Description of Artificial Sequence: Synthetic oligonucleotide
cuaauggaugaggacuacu

SEQ ID NO: 76124 - RNA, 19 nt, Artificial Sequence
  Description of Artificial Sequence: Synthetic oligonucleotide
uuacugccacaggaacuau

SEQ ID NO: 76125 - RNA, 19 nt, Artificial Sequence
  Description of Artificial Sequence: Synthetic oligonucleotide
gcaaugccucaaaugugug

SEQ ID NO: 76126 - RNA, 19 nt, Artificial Sequence
  Description of Artificial Sequence: Synthetic oligonucleotide
guucggacaaggucauaau

SEQ ID NO: 76127 - RNA, 19 nt, Artificial Sequence
  Description of Artificial Sequence: Synthetic oligonucleotide
gguaguaaagaggauucuu

SEQ ID NO: 76128 - RNA, 19 nt, Artificial Sequence
  Description of Artificial Sequence: Synthetic oligonucleotide
gguggacugugcacaggcc

SEQ ID NO: 76129 - RNA, 19 nt, Artificial Sequence
  Description of Artificial Sequence: Synthetic oligonucleotide
gcuaauggaugaggacuac

SEQ ID NO: 76130 - RNA, 19 nt, Artificial Sequence
  Description of Artificial Sequence: Synthetic oligonucleotide
gccucaagucacuuaaauu

SEQ ID NO: 76131 - RNA, 19 nt, Artificial Sequence
  Description of Artificial Sequence: Synthetic oligonucleotide
gguucugauacugcugaau

SEQ ID NO: 76132 - RNA, 19 nt, Artificial Sequence
  Description of Artificial Sequence: Synthetic oligonucleotide
cuaacgucucugagccagu

SEQ ID NO: 76133 - RNA, 19 nt, Artificial Sequence
  Description of Artificial Sequence: Synthetic oligonucleotide
ccguuuguaggucuuuggu

SEQ ID NO: 76134 - RNA, 19 nt, Artificial Sequence
  Description of Artificial Sequence: Synthetic oligonucleotide
gggugugaaaguucccguu

SEQ ID NO: 76135 - RNA, 19 nt, Artificial Sequence
  Description of Artificial Sequence: Synthetic oligonucleotide
cgagaacguccaaaugaca

SEQ ID NO: 76136 - RNA, 19 nt, Artificial Sequence
  Description of Artificial Sequence: Synthetic oligonucleotide
cuggagcaaagaugguauu

SEQ ID NO: 76137 - RNA, 19 nt, Artificial Sequence
  Description of Artificial Sequence: Synthetic oligonucleotide
ccaauacggccacaaugua

SEQ ID NO: 76138 - RNA, 19 nt, Artificial Sequence
  Description of Artificial Sequence: Synthetic oligonucleotide
cguuccguucucgauggca

SEQ ID NO: 76139 - RNA, 19 nt, Artificial Sequence
  Description of Artificial Sequence: Synthetic oligonucleotide
ccguagauacugucuuucu

SEQ ID NO: 76140 - RNA, 19 nt, Artificial Sequence
  Description of Artificial Sequence: Synthetic oligonucleotide
acgcauggcuaaggucauu

SEQ ID NO: 76141 - RNA, 19 nt, Artificial Sequence
  Description of Artificial Sequence: Synthetic oligonucleotide
ccacuucgaacgagaacgu

SEQ ID NO: 76142 - RNA, 19 nt, Artificial Sequence
  Description of Artificial Sequence: Synthetic oligonucleotide
acguggcuuuuggcuacuu

SEQ ID NO: 76143 - RNA, 19 nt, Artificial Sequence
  Description of Artificial Sequence: Synthetic oligonucleotide
ccacgucuagaaacacgcu

SEQ ID NO: 76144 - RNA, 19 nt, Artificial Sequence
  Description of Artificial Sequence: Synthetic oligonucleotide
caguucggacaaggucaua

SEQ ID NO: 76145 - RNA, 19 nt, Artificial Sequence
  Description of Artificial Sequence: Synthetic oligonucleotide
cccuuggaauuugaagcau

SEQ ID NO: 76146 - RNA, 19 nt, Artificial Sequence
  Description of Artificial Sequence: Synthetic oligonucleotide
uuuagagugacccugaugg

SEQ ID NO: 76147 - RNA, 19 nt, Artificial Sequence
  Description of Artificial Sequence: Synthetic oligonucleotide
uauauugcuagucagagca

SEQ ID NO: 76148 - RNA, 19 nt, Artificial Sequence
  Description of Artificial Sequence: Synthetic oligonucleotide
uuaaccaauguuaacacag

SEQ ID NO: 76149 - RNA, 19 nt, Artificial Sequence
  Description of Artificial Sequence: Synthetic oligonucleotide
acgaaaaguguuuaaaggc

SEQ ID NO: 76150 - RNA, 19 nt, Artificial Sequence
  Description of Artificial Sequence: Synthetic oligonucleotide
aacauugaccgugauaucc

SEQ ID NO: 76151 - RNA, 19 nt, Artificial Sequence
  Description of Artificial Sequence: Synthetic oligonucleotide
auaacuugcucucacaggg

SEQ ID NO: 76152 - RNA, 19 nt, Artificial Sequence
  Description of Artificial Sequence: Synthetic oligonucleotide
aaaauaugcagggcuagcc

SEQ ID NO: 76153 - RNA, 19 nt, Artificial Sequence
  Description of Artificial Sequence: Synthetic oligonucleotide
aacuuggaaaugugcagcc

SEQ ID NO: 76154 - RNA, 19 nt, Artificial Sequence
  Description of Artificial Sequence: Synthetic oligonucleotide
auaacuaaaggauaaagua

SEQ ID NO: 76155 - RNA, 19 nt, Artificial Sequence
  Description of Artificial Sequence: Synthetic oligonucleotide
uaucgauccauuccuaccg

SEQ ID NO: 76156 - RNA, 19 nt, Artificial Sequence
  Description of Artificial Sequence: Synthetic oligonucleotide
uguuauucaacuaucgauc

SEQ ID NO: 76157 - RNA, 19 nt, Artificial Sequence
  Description of Artificial Sequence: Synthetic oligonucleotide
ugaacauugaccgugauau

SEQ ID NO: 76158 - RNA, 19 nt, Artificial Sequence
  Description of Artificial Sequence: Synthetic oligonucleotide
uauuuaaguaauacccucc

SEQ ID NO: 76159 - RNA, 19 nt, Artificial Sequence
  Description of Artificial Sequence: Synthetic oligonucleotide
aaaguaggaauuuggcuug

SEQ ID NO: 76160 - RNA, 19 nt, Artificial Sequence
  Description of Artificial Sequence: Synthetic oligonucleotide
aauguuauucaacuaucga

SEQ ID NO: 76161 - RNA, 19 nt, Artificial Sequence
  Description of Artificial Sequence: Synthetic oligonucleotide
aagauuaccccaguuuccc

SEQ ID NO: 76162 - RNA, 19 nt, Artificial Sequence
  Description of Artificial Sequence: Synthetic oligonucleotide
aucacggcaucuuuaauac

SEQ ID NO: 76163 - RNA, 19 nt, Artificial Sequence
  Description of Artificial Sequence: Synthetic oligonucleotide
uuuguuacaagcacucaug

SEQ ID NO: 76164 - RNA, 19 nt, Artificial Sequence
  Description of Artificial Sequence: Synthetic oligonucleotide
cucaguaaaagauuacccc

SEQ ID NO: 76165 - RNA, 19 nt, Artificial Sequence
  Description of Artificial Sequence: Synthetic oligonucleotide
cacgaaaaguguuuaaagg

SEQ ID NO: 76166 - RNA, 19 nt, Artificial Sequence
  Description of Artificial Sequence: Synthetic oligonucleotide
acuuuguacaaaucacggc

SEQ ID NO: 76167 - RNA, 19 nt, Artificial Sequence
  Description of Artificial Sequence: Synthetic oligonucleotide
ucuuagacuuccagaaccg

SEQ ID NO: 76168 - RNA, 19 nt, Artificial Sequence
  Description of Artificial Sequence: Synthetic oligonucleotide
uuauuuaaguaauacccuc

SEQ ID NO: 76169 - RNA, 19 nt, Artificial Sequence
  Description of Artificial Sequence: Synthetic oligonucleotide
uuaaguaauacccuccauu

SEQ ID NO: 76170 - RNA, 19 nt, Artificial Sequence
  Description of Artificial Sequence: Synthetic oligonucleotide
aauaugcagggcuagcccu

SEQ ID NO: 76171 - RNA, 19 nt, Artificial Sequence
  Description of Artificial Sequence: Synthetic oligonucleotide
gaaaugugcagccgugucg

SEQ ID NO: 76172 - RNA, 19 nt, Artificial Sequence
  Description of Artificial Sequence: Synthetic oligonucleotide
augcaaggauagcagaacc

SEQ ID NO: 76173 - RNA, 19 nt, Artificial Sequence
  Description of Artificial Sequence: Synthetic oligonucleotide
uaacaugcauuauucacug

SEQ ID NO: 76174 - RNA, 19 nt, Artificial Sequence
  Description of Artificial Sequence: Synthetic oligonucleotide
gacuuuguacaaaucacgg

SEQ ID NO: 76175 - RNA, 19 nt, Artificial Sequence
  Description of Artificial Sequence: Synthetic oligonucleotide
agcucaguaaaagauuacc

SEQ ID NO: 76176 - RNA, 19 nt, Artificial Sequence
  Description of Artificial Sequence: Synthetic oligonucleotide
auaacauccucgcaauguc

SEQ ID NO: 76177 - RNA, 19 nt, Artificial Sequence
  Description of Artificial Sequence: Synthetic oligonucleotide
ugaagaaacuccaugccuc

SEQ ID NO: 76178 - RNA, 19 nt, Artificial Sequence
  Description of Artificial Sequence: Synthetic oligonucleotide
cauuuuagcccaaaccagc

SEQ ID NO: 76179 - RNA, 19 nt, Artificial Sequence
  Description of Artificial Sequence: Synthetic oligonucleotide
auguuauucaacuaucgau

SEQ ID NO: 76180 - RNA, 19 nt, Artificial Sequence
  Description of Artificial Sequence: Synthetic oligonucleotide
uuggucugagaaaugagcu

SEQ ID NO: 76181 - RNA, 19 nt, Artificial Sequence
  Description of Artificial Sequence: Synthetic oligonucleotide
ucuaagauccagcucagua

SEQ ID NO: 76182 - RNA, 19 nt, Artificial Sequence
  Description of Artificial Sequence: Synthetic oligonucleotide
acgauggguacuuacaaug

SEQ ID NO: 76183 - RNA, 19 nt, Artificial Sequence
  Description of Artificial Sequence: Synthetic oligonucleotide
aguaauacccuccauugau

SEQ ID NO: 76184 - RNA, 19 nt, Artificial Sequence
  Description of Artificial Sequence: Synthetic oligonucleotide
acuaucgauccauuccuac

SEQ ID NO: 76185 - RNA, 19 nt, Artificial Sequence
  Description of Artificial Sequence: Synthetic oligonucleotide
uguucauuacugguggagg

SEQ ID NO: 76186 - RNA, 19 nt, Artificial Sequence
  Description of Artificial Sequence: Synthetic oligonucleotide
uuuggcaguaguuuguaaa

SEQ ID NO: 76187 - RNA, 19 nt, Artificial Sequence
  Description of Artificial Sequence: Synthetic oligonucleotide
cauacugcgcuucacgugc

SEQ ID NO: 76188 - RNA, 19 nt, Artificial Sequence
  Description of Artificial Sequence: Synthetic oligonucleotide
ggaucgaaguuuuaaaacc

SEQ ID NO: 76189 - RNA, 19 nt, Artificial Sequence
  Description of Artificial Sequence: Synthetic oligonucleotide
uauaacauccucgcaaugu

SEQ ID NO: 76190 - RNA, 19 nt, Artificial Sequence
  Description of Artificial Sequence: Synthetic oligonucleotide
ugcuccauagaaaaucacu

SEQ ID NO: 76191 - RNA, 19 nt, Artificial Sequence
  Description of Artificial Sequence: Synthetic oligonucleotide
aacaaaaccgcugcgugug

SEQ ID NO: 76192 - RNA, 19 nt, Artificial Sequence
  Description of Artificial Sequence: Synthetic oligonucleotide
aacaccuugauagagcuuu

SEQ ID NO: 76193 - RNA, 19 nt, Artificial Sequence
  Description of Artificial Sequence: Synthetic oligonucleotide
aaacaaaaccgcugcgugu

SEQ ID NO: 76194 - RNA, 19 nt, Artificial Sequence
  Description of Artificial Sequence: Synthetic oligonucleotide
uucucaauuagaauuuauu

SEQ ID NO: 76195 - RNA, 19 nt, Artificial Sequence
  Description of Artificial Sequence: Synthetic oligonucleotide
uguuucacgcuuguggucc

SEQ ID NO: 76196 - RNA, 19 nt, Artificial Sequence
  Description of Artificial Sequence: Synthetic oligonucleotide
acaucggaugcuuacuguc

SEQ ID NO: 76197 - RNA, 19 nt, Artificial Sequence
  Description of Artificial Sequence: Synthetic oligonucleotide
aacuuacugcuuccguuuc

SEQ ID NO: 76198 - RNA, 19 nt, Artificial Sequence
  Description of Artificial Sequence: Synthetic oligonucleotide
ugaaccucagguaggugcc

SEQ ID NO: 76199 - RNA, 19 nt, Artificial Sequence
  Description of Artificial Sequence: Synthetic oligonucleotide
uccgcucuuacauucagcu

SEQ ID NO: 76200 - RNA, 19 nt, Artificial Sequence
  Description of Artificial Sequence: Synthetic oligonucleotide
uuguuacaagcacucaugu

SEQ ID NO: 76201 - RNA, 19 nt, Artificial Sequence
  Description of Artificial Sequence: Synthetic oligonucleotide
ucuuguaugguagggacgu

SEQ ID NO: 76202 - RNA, 19 nt, Artificial Sequence
  Description of Artificial Sequence: Synthetic oligonucleotide
uguguaaccuggaggaggu

SEQ ID NO: 76203 - RNA, 19 nt, Artificial Sequence
  Description of Artificial Sequence: Synthetic oligonucleotide
acguucugaguacagguag

SEQ ID NO: 76204 - RNA, 19 nt, Artificial Sequence
  Description of Artificial Sequence: Synthetic oligonucleotide
aagcuaauaauuuguuaua

SEQ ID NO: 76205 - RNA, 19 nt, Artificial Sequence
  Description of Artificial Sequence: Synthetic oligonucleotide
cuaucagguaaauaguaca

SEQ ID NO: 76206 - RNA, 19 nt, Artificial Sequence
  Description of Artificial Sequence: Synthetic oligonucleotide
ugcauuauucacuguguac

SEQ ID NO: 76207 - RNA, 19 nt, Artificial Sequence
  Description of Artificial Sequence: Synthetic oligonucleotide
gacggaguucguuaguagc

SEQ ID NO: 76208 - RNA, 19 nt, Artificial Sequence
  Description of Artificial Sequence: Synthetic oligonucleotide
uauucaacuaucgauccau

SEQ ID NO: 76209 - RNA, 19 nt, Artificial Sequence
  Description of Artificial Sequence: Synthetic oligonucleotide
aaguaauacccuccauuga

SEQ ID NO: 76210 - RNA, 19 nt, Artificial Sequence
  Description of Artificial Sequence: Synthetic oligonucleotide
aaguuacuguguaaccugg

SEQ ID NO: 76211 - RNA, 19 nt, Artificial Sequence
  Description of Artificial Sequence: Synthetic oligonucleotide
gauuaccccaguuucccug

SEQ ID NO: 76212 - RNA, 19 nt, Artificial Sequence
  Description of Artificial Sequence: Synthetic oligonucleotide
guuagacucacucguauuc

SEQ ID NO: 76213 - RNA, 19 nt, Artificial Sequence
  Description of Artificial Sequence: Synthetic oligonucleotide
agaagcgaacaucaacuug

SEQ ID NO: 76214 - RNA, 19 nt, Artificial Sequence
  Description of Artificial Sequence: Synthetic oligonucleotide
uagucgucuggguacuucg

SEQ ID NO: 76215 - RNA, 19 nt, Artificial Sequence
  Description of Artificial Sequence: Synthetic oligonucleotide
uuauucaacuaucgaucca

SEQ ID NO: 76216 - RNA, 19 nt, Artificial Sequence
  Description of Artificial Sequence: Synthetic oligonucleotide
uuaugauugcagaaauuuu

SEQ ID NO: 76217 - RNA, 19 nt, Artificial Sequence
  Description of Artificial Sequence: Synthetic oligonucleotide
acucguauucaccuguugu

SEQ ID NO: 76218 - RNA, 19 nt, Artificial Sequence
  Description of Artificial Sequence: Synthetic oligonucleotide
gaguucguuaguagcaggg

SEQ ID NO: 76219 - RNA, 19 nt, Artificial Sequence
  Description of Artificial Sequence: Synthetic oligonucleotide
guucguuaguagcagggag

SEQ ID NO: 76220 - RNA, 19 nt, Artificial Sequence
  Description of Artificial Sequence: Synthetic oligonucleotide
ugcguugcuagcuucuuga

SEQ ID NO: 76221 - RNA, 19 nt, Artificial Sequence
  Description of Artificial Sequence: Synthetic oligonucleotide
aacuccgguauuuccccuc

SEQ ID NO: 76222 - RNA, 19 nt, Artificial Sequence
  Description of Artificial Sequence: Synthetic oligonucleotide
aguguccuugguuagggca

SEQ ID NO: 76223 - RNA, 19 nt, Artificial Sequence
  Description of Artificial Sequence: Synthetic oligonucleotide
ugauuagguaugcaaggau

SEQ ID NO: 76224 - RNA, 19 nt, Artificial Sequence
  Description of Artificial Sequence: Synthetic oligonucleotide
uccguuuggcaguaguuug

SEQ ID NO: 76225 - RNA, 19 nt, Artificial Sequence
  Description of Artificial Sequence: Synthetic oligonucleotide
guaacuccgguauuucccc

SEQ ID NO: 76226 - RNA, 19 nt, Artificial Sequence
  Description of Artificial Sequence: Synthetic oligonucleotide
cuggaaugauuuuacacca

SEQ ID NO: 76227 - RNA, 19 nt, Artificial Sequence
  Description of Artificial Sequence: Synthetic oligonucleotide
gguuaugcggcagaggagg

SEQ ID NO: 76228 - RNA, 19 nt, Artificial Sequence
  Description of Artificial Sequence: Synthetic oligonucleotide
uccucauucuuagacuucc

SEQ ID NO: 76229 - RNA, 19 nt, Artificial Sequence
  Description of Artificial Sequence: Synthetic oligonucleotide
acuacaagaucaaagcuaa

SEQ ID NO: 76230 - RNA, 19 nt, Artificial Sequence
  Description of Artificial Sequence: Synthetic oligonucleotide
ugacagacgccaucaguag

SEQ ID NO: 76231 - RNA, 19 nt, Artificial Sequence
  Description of Artificial Sequence: Synthetic oligonucleotide
uuuaaguaauacccuccau

SEQ ID NO: 76232 - RNA, 19 nt, Artificial Sequence
  Description of Artificial Sequence: Synthetic oligonucleotide
accgugauauccugaaugu

SEQ ID NO: 76233 - RNA, 19 nt, Artificial Sequence
  Description of Artificial Sequence: Synthetic oligonucleotide
aacauccucgcaaugucug

SEQ ID NO: 76234 - RNA, 19 nt, Artificial Sequence
  Description of Artificial Sequence: Synthetic oligonucleotide
uuccucguaacuccgguau

SEQ ID NO: 76235 - RNA, 19 nt, Artificial Sequence
  Description of Artificial Sequence: Synthetic oligonucleotide
aagaagcgaacaucaacuu

SEQ ID NO: 76236 - RNA, 19 nt, Artificial Sequence
  Description of Artificial Sequence: Synthetic oligonucleotide
cucuuguaugguagggacg

SEQ ID NO: 76237 - RNA, 19 nt, Artificial Sequence
  Description of Artificial Sequence: Synthetic oligonucleotide
aacagugagcaagcugcac

SEQ ID NO: 76238 - RNA, 19 nt, Artificial Sequence
  Description of Artificial Sequence: Synthetic oligonucleotide
ucguauucaccuguuguug

SEQ ID NO: 76239 - RNA, 19 nt, Artificial Sequence
  Description of Artificial Sequence: Synthetic oligonucleotide
uuuguuagacucacucgua

SEQ ID NO: 76240 - RNA, 19 nt, Artificial Sequence
  Description of Artificial Sequence: Synthetic oligonucleotide
aacacaauugggaaauauu

SEQ ID NO: 76241 - RNA, 19 nt, Artificial Sequence
  Description of Artificial Sequence: Synthetic oligonucleotide
acacaauugggaaauauuu

SEQ ID NO: 76242 - RNA, 19 nt, Artificial Sequence
  Description of Artificial Sequence: Synthetic oligonucleotide
uuggucuaugaucagucuu

SEQ ID NO: 76243 - RNA, 19 nt, Artificial Sequence
  Description of Artificial Sequence: Synthetic oligonucleotide
cuaagauccagcucaguaa

SEQ ID NO: 76244 - RNA, 19 nt, Artificial Sequence
  Description of Artificial Sequence: Synthetic oligonucleotide
gguacuuacaaugugcaga

SEQ ID NO: 76245 - RNA, 19 nt, Artificial Sequence
  Description of Artificial Sequence: Synthetic oligonucleotide
uacauucagcucuguuccg

SEQ ID NO: 76246 - RNA, 19 nt, Artificial Sequence
  Description of Artificial Sequence: Synthetic oligonucleotide
acacgugucuuuauauaac

SEQ ID NO: 76247 - RNA, 19 nt, Artificial Sequence
  Description of Artificial Sequence: Synthetic oligonucleotide
agcucaugauuagguaugc

SEQ ID NO: 76248 - RNA, 19 nt, Artificial Sequence
  Description of Artificial Sequence: Synthetic oligonucleotide
aucgauccauuccuaccgg

SEQ ID NO: 76249 - RNA, 19 nt, Artificial Sequence
  Description of Artificial Sequence: Synthetic oligonucleotide
uccacguucugaguacagg

SEQ ID NO: 76250 - RNA, 19 nt, Artificial Sequence
  Description of Artificial Sequence: Synthetic oligonucleotide
cugacaccuucucaauugg

SEQ ID NO: 76251 - RNA, 19 nt, Artificial Sequence
  Description of Artificial Sequence: Synthetic oligonucleotide
uuagguaugcaaggauagc

SEQ ID NO: 76252 - RNA, 19 nt, Artificial Sequence
  Description of Artificial Sequence: Synthetic oligonucleotide
guacaucggaugcuuacug

SEQ ID NO: 76253 - RNA, 19 nt, Artificial Sequence
  Description of Artificial Sequence: Synthetic oligonucleotide
ugcuagucagagcagcuua

SEQ ID NO: 76254 - RNA, 19 nt, Artificial Sequence
  Description of Artificial Sequence: Synthetic oligonucleotide
ugacggaguucguuaguag

SEQ ID NO: 76255 - RNA, 19 nt, Artificial Sequence
  Description of Artificial Sequence: Synthetic oligonucleotide
uacaaaucacggcaucuuu

SEQ ID NO: 76256 - RNA, 19 nt, Artificial Sequence
  Description of Artificial Sequence: Synthetic oligonucleotide
gagugacccugauggaccg

SEQ ID NO: 76257 - RNA, 19 nt, Artificial Sequence
  Description of Artificial Sequence: Synthetic oligonucleotide
auauaacauccucgcaaug

SEQ ID NO: 76258 - RNA, 19 nt, Artificial Sequence
  Description of Artificial Sequence: Synthetic oligonucleotide
gauuagguaugcaaggaua

SEQ ID NO: 76259 - RNA, 19 nt, Artificial Sequence
  Description of Artificial Sequence: Synthetic oligonucleotide
gaacuccuagcuuucaucu

SEQ ID NO: 76260 - RNA, 19 nt, Artificial Sequence
  Description of Artificial Sequence: Synthetic oligonucleotide
ugguguauuugucguggca

SEQ ID NO: 76261 - RNA, 19 nt, Artificial Sequence
  Description of Artificial Sequence: Synthetic oligonucleotide
augacacgugucuuuauau

SEQ ID NO: 76262 - RNA, 19 nt, Artificial Sequence
  Description of Artificial Sequence: Synthetic oligonucleotide
uuuuagcccaaaccagcuc

SEQ ID NO: 76263 - RNA, 19 nt, Artificial Sequence
  Description of Artificial Sequence: Synthetic oligonucleotide
ccgugcauuugauagauag

SEQ ID NO: 76264 - RNA, 19 nt, Artificial Sequence
  Description of Artificial Sequence: Synthetic oligonucleotide
cuuuguuagacucacucgu

SEQ ID NO: 76265 - RNA, 19 nt, Artificial Sequence
  Description of Artificial Sequence: Synthetic oligonucleotide
uggaacuuacugcuuccgu

SEQ ID NO: 76266 - RNA, 19 nt, Artificial Sequence
  Description of Artificial Sequence: Synthetic oligonucleotide
agccacgauggguacuuac

SEQ ID NO: 76267 - RNA, 19 nt, Artificial Sequence
  Description of Artificial Sequence: Synthetic oligonucleotide
ucgucuggguacuucgaug

SEQ ID NO: 76268 - RNA, 19 nt, Artificial Sequence
  Description of Artificial Sequence: Synthetic oligonucleotide
uacaucggaugcuuacugu

SEQ ID NO: 76269 - RNA, 19 nt, Artificial Sequence
  Description of Artificial Sequence: Synthetic oligonucleotide
guucauuacugguggagga

SEQ ID NO: 76270 - RNA, 19 nt, Artificial Sequence
  Description of Artificial Sequence: Synthetic oligonucleotide
augauuagguaugcaagga

SEQ ID NO: 76271 - RNA, 19 nt, Artificial Sequence
  Description of Artificial Sequence: Synthetic oligonucleotide
aaaucacggcaucuuuaau

SEQ ID NO: 76272 - RNA, 19 nt, Artificial Sequence
  Description of Artificial Sequence: Synthetic oligonucleotide
ugaugguuaugcggcagag

SEQ ID NO: 76273 - RNA, 19 nt, Artificial Sequence
  Description of Artificial Sequence: Synthetic oligonucleotide
uuauuucucuaaccucaaa

SEQ ID NO: 76274 - RNA, 19 nt, Artificial Sequence
  Description of Artificial Sequence: Synthetic oligonucleotide
uucucuuguaugguaggga

SEQ ID NO: 76275 - RNA, 19 nt, Artificial Sequence
  Description of Artificial Sequence: Synthetic oligonucleotide
acuccuagcuuucaucuuu

SEQ ID NO: 76276 - RNA, 19 nt, Artificial Sequence
  Description of Artificial Sequence: Synthetic oligonucleotide
cacuuaacuucuuggucug

SEQ ID NO: 76277 - RNA, 19 nt, Artificial Sequence
  Description of Artificial Sequence: Synthetic oligonucleotide
guaguaacuuggaaaugug

SEQ ID NO: 76278 - RNA, 19 nt, Artificial Sequence
  Description of Artificial Sequence: Synthetic oligonucleotide
uuagagugacccugaugga

SEQ ID NO: 76279 - RNA, 19 nt, Artificial Sequence
  Description of Artificial Sequence: Synthetic oligonucleotide
cuugauagagcuuuaugau

SEQ ID NO: 76280 - RNA, 19 nt, Artificial Sequence
  Description of Artificial Sequence: Synthetic oligonucleotide
accugcuuacacuuucugu

SEQ ID NO: 76281 - RNA, 19 nt, Artificial Sequence
  Description of Artificial Sequence: Synthetic oligonucleotide
ccacgaaaaguguuuaaag

SEQ ID NO: 76282 - RNA, 19 nt, Artificial Sequence
  Description of Artificial Sequence: Synthetic oligonucleotide
acagugacggaguucguua

SEQ ID NO: 76283 - RNA, 19 nt, Artificial Sequence
  Description of Artificial Sequence: Synthetic oligonucleotide
gaauuccucguaacuccgg

SEQ ID NO: 76284 - RNA, 19 nt, Artificial Sequence
  Description of Artificial Sequence: Synthetic oligonucleotide
gcuccauagaaaaucacug

SEQ ID NO: 76285 - RNA, 19 nt, Artificial Sequence
  Description of Artificial Sequence: Synthetic oligonucleotide
ugacacgugucuuuauaua

SEQ ID NO: 76286 - RNA, 19 nt, Artificial Sequence
  Description of Artificial Sequence: Synthetic oligonucleotide
augccggaggagcauuaac

SEQ ID NO: 76287 - RNA, 19 nt, Artificial Sequence
  Description of Artificial Sequence: Synthetic oligonucleotide
guaauacccuccauugaug

SEQ ID NO: 76288 - RNA, 19 nt, Artificial Sequence
  Description of Artificial Sequence: Synthetic oligonucleotide
ugucgggccgugcauuuga

SEQ ID NO: 76289 - RNA, 19 nt, Artificial Sequence
  Description of Artificial Sequence: Synthetic oligonucleotide
auuccuaccgguaaugcuu

SEQ ID NO: 76290 - RNA, 19 nt, Artificial Sequence
  Description of Artificial Sequence: Synthetic oligonucleotide
gacucacucguauucaccu

SEQ ID NO: 76291 - RNA, 19 nt, Artificial Sequence
  Description of Artificial Sequence: Synthetic oligonucleotide
caaaucacggcaucuuuaa

SEQ ID NO: 76292 - RNA, 19 nt, Artificial Sequence
  Description of Artificial Sequence: Synthetic oligonucleotide
caucagcgccggaugaagg

SEQ ID NO: 76293 - RNA, 19 nt, Artificial Sequence
  Description of Artificial Sequence: Synthetic oligonucleotide
acgucaacagcugaaugga

SEQ ID NO: 76294 - RNA, 19 nt, Artificial Sequence
  Description of Artificial Sequence: Synthetic oligonucleotide
uuccacguucugaguacag

SEQ ID NO: 76295 - RNA, 19 nt, Artificial Sequence
  Description of Artificial Sequence: Synthetic oligonucleotide
uuccuaccgguaaugcuuc

SEQ ID NO: 76296 - RNA, 19 nt, Artificial Sequence
  Description of Artificial Sequence: Synthetic oligonucleotide
ugcacguuggcuacagcuu

SEQ ID NO: 76297 - RNA, 19 nt, Artificial Sequence
  Description of Artificial Sequence: Synthetic oligonucleotide
uccucgcaaugucugcuug

SEQ ID NO: 76298 - RNA, 19 nt, Artificial Sequence
  Description of Artificial Sequence: Synthetic oligonucleotide
auacccuccauugauguua

SEQ ID NO: 76299 - RNA, 19 nt, Artificial Sequence
  Description of Artificial Sequence: Synthetic oligonucleotide
gcuugugcugcguugcuag

SEQ ID NO: 76300 - RNA, 19 nt, Artificial Sequence
  Description of Artificial Sequence: Synthetic oligonucleotide
acucuggaaugauuuuaca

SEQ ID NO: 76301 - RNA, 19 nt, Artificial Sequence
  Description of Artificial Sequence: Synthetic oligonucleotide
aucagcgccggaugaagga

SEQ ID NO: 76302 - RNA, 19 nt, Artificial Sequence
  Description of Artificial Sequence: Synthetic oligonucleotide
acuucgaugcagcauucuu

SEQ ID NO: 76303 - RNA, 19 nt, Artificial Sequence
  Description of Artificial Sequence: Synthetic oligonucleotide
accacgaaaaguguuuaaa

SEQ ID NO: 76304 - RNA, 19 nt, Artificial Sequence
  Description of Artificial Sequence: Synthetic oligonucleotide
gguguauuugucguggcac

SEQ ID NO: 76305 - RNA, 19 nt, Artificial Sequence
  Description of Artificial Sequence: Synthetic oligonucleotide
ugcuccguuuggcaguagu

SEQ ID NO: 76306 - RNA, 19 nt, Artificial Sequence
  Description of Artificial Sequence: Synthetic oligonucleotide
gaaccggccuucacggagg

SEQ ID NO: 76307 - RNA, 19 nt, Artificial Sequence
  Description of Artificial Sequence: Synthetic oligonucleotide
gugcagucggugaacauug

SEQ ID NO: 76308 - RNA, 19 nt, Artificial Sequence
  Description of Artificial Sequence: Synthetic oligonucleotide
acgcuugugguccgacuuc

SEQ ID NO: 76309 - RNA, 19 nt, Artificial Sequence
  Description of Artificial Sequence: Synthetic oligonucleotide
cagugacggaguucguuag

SEQ ID NO: 76310 - RNA, 19 nt, Artificial Sequence
  Description of Artificial Sequence: Synthetic oligonucleotide
ggaguucguuaguagcagg

SEQ ID NO: 76311 - RNA, 19 nt, Artificial Sequence
  Description of Artificial Sequence: Synthetic oligonucleotide
ugcgugugaggguggcggg

SEQ ID NO: 76312 - RNA, 19 nt, Artificial Sequence
  Description of Artificial Sequence: Synthetic oligonucleotide
uacccuccauugauguuac

SEQ ID NO: 76313 - RNA, 19 nt, Artificial Sequence
  Description of Artificial Sequence: Synthetic oligonucleotide
uagggacgucaacagcuga

SEQ ID NO: 76314 - RNA, 19 nt, Artificial Sequence
  Description of Artificial Sequence: Synthetic oligonucleotide
ugcgggagacaaugaaccu

SEQ ID NO: 76315 - RNA, 19 nt, Artificial Sequence
  Description of Artificial Sequence: Synthetic oligonucleotide
gacgccaucaguagucguc

SEQ ID NO: 76316 - RNA, 19 nt, Artificial Sequence
  Description of Artificial Sequence: Synthetic oligonucleotide
guuucacgcuugugguccg

SEQ ID NO: 76317 - RNA, 19 nt, Artificial Sequence
  Description of Artificial Sequence: Synthetic oligonucleotide
ggcacuuaacuucuugguc

SEQ ID NO: 76318 - RNA, 19 nt, Artificial Sequence
  Description of Artificial Sequence: Synthetic oligonucleotide
uuagggcagcgcagcagca

SEQ ID NO: 76319 - RNA, 19 nt, Artificial Sequence
  Description of Artificial Sequence: Synthetic oligonucleotide
acggaguucguuaguagca

SEQ ID NO: 76320 - RNA, 19 nt, Artificial Sequence
  Description of Artificial Sequence: Synthetic oligonucleotide
ugaggcauuguggggauuu

SEQ ID NO: 76321 - RNA, 19 nt, Artificial Sequence
  Description of Artificial Sequence: Synthetic oligonucleotide
uaccgguaaugcuucuuaa

SEQ ID NO: 76322 - RNA, 19 nt, Artificial Sequence
  Description of Artificial Sequence: Synthetic oligonucleotide
agugacggaguucguuagu

SEQ ID NO: 76323 - RNA, 19 nt, Artificial Sequence
  Description of Artificial Sequence: Synthetic oligonucleotide
caacuaucgauccauuccu

SEQ ID NO: 76324 - RNA, 19 nt, Artificial Sequence
  Description of Artificial Sequence: Synthetic oligonucleotide
auugcuagucagagcagcu

SEQ ID NO: 76325 - RNA, 19 nt, Artificial Sequence
  Description of Artificial Sequence: Synthetic oligonucleotide
caugcagcuaucagguaaa

SEQ ID NO: 76326 - RNA, 19 nt, Artificial Sequence
  Description of Artificial Sequence: Synthetic oligonucleotide
gaacuuacugcuuccguuu

SEQ ID NO: 76327 - RNA, 19 nt, Artificial Sequence
  Description of Artificial Sequence: Synthetic oligonucleotide
acagggguggaucgaaguu

SEQ ID NO: 76328 - RNA, 19 nt, Artificial Sequence
  Description of Artificial Sequence: Synthetic oligonucleotide
cagcucaguaaaagauuac

SEQ ID NO: 76329 - RNA, 19 nt, Artificial Sequence
  Description of Artificial Sequence: Synthetic oligonucleotide
gaacauugaccgugauauc

SEQ ID NO: 76330 - RNA, 19 nt, Artificial Sequence
  Description of Artificial Sequence: Synthetic oligonucleotide
guauuugucguggcacaug

SEQ ID NO: 76331 - RNA, 19 nt, Artificial Sequence
  Description of Artificial Sequence: Synthetic oligonucleotide
acauucagcucuguuccgu

SEQ ID NO: 76332 - RNA, 19 nt, Artificial Sequence
  Description of Artificial Sequence: Synthetic oligonucleotide
cagcgccggaugaaggagg

SEQ ID NO: 76333 - RNA, 19 nt, Artificial Sequence
  Description of Artificial Sequence: Synthetic oligonucleotide
ggucuaugaucagucuugg

SEQ ID NO: 76334 - RNA, 19 nt, Artificial Sequence
  Description of Artificial Sequence: Synthetic oligonucleotide
gguggaucgaaguuuuaaa

SEQ ID NO: 76335 - RNA, 19 nt, Artificial Sequence
  Description of Artificial Sequence: Synthetic oligonucleotide
gggauuuccuggcuggaac

SEQ ID NO: 76336 - RNA, 19 nt, Artificial Sequence
  Description of Artificial Sequence: Synthetic oligonucleotide
uaaggucuauagcccgcuc

SEQ ID NO: 76337 - RNA, 19 nt, Artificial Sequence
  Description of Artificial Sequence: Synthetic oligonucleotide
cagccgugucgacagagac

SEQ ID NO: 76338 - RNA, 19 nt, Artificial Sequence
  Description of Artificial Sequence: Synthetic oligonucleotide
cuguuucacgcuugugguc

SEQ ID NO: 76339 - RNA, 19 nt, Artificial Sequence
  Description of Artificial Sequence: Synthetic oligonucleotide
acacucugauuacgucguc

SEQ ID NO: 76340 - RNA, 19 nt, Artificial Sequence
  Description of Artificial Sequence: Synthetic oligonucleotide
gcccauacugcgcuucacg

SEQ ID NO: 76341 - RNA, 19 nt, Artificial Sequence
  Description of Artificial Sequence: Synthetic oligonucleotide
uggcuuaacucaacaccuu

SEQ ID NO: 76342 - RNA, 19 nt, Artificial Sequence
  Description of Artificial Sequence: Synthetic oligonucleotide
cuccauagaaaaucacugu

SEQ ID NO: 76343 - RNA, 19 nt, Artificial Sequence
  Description of Artificial Sequence: Synthetic oligonucleotide
caugacacgugucuuuaua

SEQ ID NO: 76344 - RNA, 19 nt, Artificial Sequence
  Description of Artificial Sequence: Synthetic oligonucleotide
ugcagucggugaacauuga

SEQ ID NO: 76345 - RNA, 19 nt, Artificial Sequence
  Description of Artificial Sequence: Synthetic oligonucleotide
cgggccgugcauuugauag

SEQ ID NO: 76346 - RNA, 19 nt, Artificial Sequence
  Description of Artificial Sequence: Synthetic oligonucleotide
gcauuguggggauuuccug

SEQ ID NO: 76347 - RNA, 19 nt, Artificial Sequence
  Description of Artificial Sequence: Synthetic oligonucleotide
cacucguauucaccuguug

SEQ ID NO: 76348 - RNA, 19 nt, Artificial Sequence
  Description of Artificial Sequence: Synthetic oligonucleotide
ggacgucaacagcugaaug

SEQ ID NO: 76349 - RNA, 19 nt, Artificial Sequence
  Description of Artificial Sequence: Synthetic oligonucleotide
acaaaaccgcugcguguga

SEQ ID NO: 76350 - RNA, 19 nt, Artificial Sequence
  Description of Artificial Sequence: Synthetic oligonucleotide
gacccugauggaccggaga

SEQ ID NO: 76351 - RNA, 19 nt, Artificial Sequence
  Description of Artificial Sequence: Synthetic oligonucleotide
ucacucguauucaccuguu

SEQ ID NO: 76352 - RNA, 19 nt, Artificial Sequence
  Description of Artificial Sequence: Synthetic oligonucleotide
auuccacguucugaguaca

SEQ ID NO: 76353 - RNA, 19 nt, Artificial Sequence
  Description of Artificial Sequence: Synthetic oligonucleotide
cuguggugccaaguuacug

SEQ ID NO: 76354 - RNA, 19 nt, Artificial Sequence
  Description of Artificial Sequence: Synthetic oligonucleotide
ucaccucgguccucauucu

SEQ ID NO: 76355 - RNA, 19 nt, Artificial Sequence
  Description of Artificial Sequence: Synthetic oligonucleotide
acgccaucaguagucgucu

SEQ ID NO: 76356 - RNA, 19 nt, Artificial Sequence
  Description of Artificial Sequence: Synthetic oligonucleotide
cacccugcacguuggcuac

SEQ ID NO: 76357 - RNA, 19 nt, Artificial Sequence
  Description of Artificial Sequence: Synthetic oligonucleotide
aacuaucgauccauuccua

SEQ ID NO: 76358 - RNA, 19 nt, Artificial Sequence
  Description of Artificial Sequence: Synthetic oligonucleotide
cuaccgguaaugcuucuua

SEQ ID NO: 76359 - RNA, 19 nt, Artificial Sequence
  Description of Artificial Sequence: Synthetic oligonucleotide
cugcguugcuagcuucuug

SEQ ID NO: 76360 - RNA, 19 nt, Artificial Sequence
  Description of Artificial Sequence: Synthetic oligonucleotide
acgugucuuuauauaacau

SEQ ID NO: 76361 - RNA, 19 nt, Artificial Sequence
  Description of Artificial Sequence: Synthetic oligonucleotide
uccucguaacuccgguauu

SEQ ID NO: 76362 - RNA, 19 nt, Artificial Sequence
  Description of Artificial Sequence: Synthetic oligonucleotide
cucacucguauucaccugu

SEQ ID NO: 76363 - RNA, 19 nt, Artificial Sequence
  Description of Artificial Sequence: Synthetic oligonucleotide
agcacucaugucaggacaa

SEQ ID NO: 76364 - RNA, 19 nt, Artificial Sequence
  Description of Artificial Sequence: Synthetic oligonucleotide
agacgccaucaguagucgu

SEQ ID NO: 76365 - RNA, 19 nt, Artificial Sequence
  Description of Artificial Sequence: Synthetic oligonucleotide
gucuaugaucagucuugga

SEQ ID NO: 76366 - RNA, 19 nt, Artificial Sequence
  Description of Artificial Sequence: Synthetic oligonucleotide
guagcaccacugcuucuuc

SEQ ID NO: 76367 - RNA, 19 nt, Artificial Sequence
  Description of Artificial Sequence: Synthetic oligonucleotide
cucccgacucuuucacuuc

SEQ ID NO: 76368 - RNA, 19 nt, Artificial Sequence
  Description of Artificial Sequence: Synthetic oligonucleotide
agcccauacugcgcuucac

SEQ ID NO: 76369 - RNA, 19 nt, Artificial Sequence
  Description of Artificial Sequence: Synthetic oligonucleotide
cuagucagagcagcuuaca

SEQ ID NO: 76370 - RNA, 19 nt, Artificial Sequence
  Description of Artificial Sequence: Synthetic oligonucleotide
cacguucugaguacaggua

SEQ ID NO: 76371 - RNA, 19 nt, Artificial Sequence
  Description of Artificial Sequence: Synthetic oligonucleotide
aaccaguugucgggccgug

SEQ ID NO: 76372 - RNA, 19 nt, Artificial Sequence
  Description of Artificial Sequence: Synthetic oligonucleotide
gcagucggugaacauugac

SEQ ID NO: 76373 - RNA, 19 nt, Artificial Sequence
  Description of Artificial Sequence: Synthetic oligonucleotide
agcgaacaucaacuugauu

SEQ ID NO: 76374 - RNA, 19 nt, Artificial Sequence
  Description of Artificial Sequence: Synthetic oligonucleotide
ccauacugcgcuucacgug

SEQ ID NO: 76375 - RNA, 19 nt, Artificial Sequence
  Description of Artificial Sequence: Synthetic oligonucleotide
cucguauucaccuguuguu

SEQ ID NO: 76376 - RNA, 19 nt, Artificial Sequence
  Description of Artificial Sequence: Synthetic oligonucleotide
cuuggucuaugaucagucu

SEQ ID NO: 76377 - RNA, 19 nt, Artificial Sequence
  Description of Artificial Sequence: Synthetic oligonucleotide
gcgcuucacgugcagucgg

SEQ ID NO: 76378 - RNA, 19 nt, Artificial Sequence
  Description of Artificial Sequence: Synthetic oligonucleotide
agcgccucccggacuacuc

SEQ ID NO: 76379 - RNA, 19 nt, Artificial Sequence
  Description of Artificial Sequence: Synthetic oligonucleotide
agggacgucaacagcugaa

SEQ ID NO: 76380 - RNA, 19 nt, Artificial Sequence
  Description of Artificial Sequence: Synthetic oligonucleotide
gauggaccggagaaaacuu

SEQ ID NO: 76381 - RNA, 19 nt, Artificial Sequence
  Description of Artificial Sequence: Synthetic oligonucleotide
gugacggaguucguuagua

SEQ ID NO: 76382 - RNA, 19 nt, Artificial Sequence
  Description of Artificial Sequence: Synthetic oligonucleotide
ggaacuuacugcuuccguu

SEQ ID NO: 76383 - RNA, 19 nt, Artificial Sequence
  Description of Artificial Sequence: Synthetic oligonucleotide
uccuaccgguaaugcuucu

SEQ ID NO: 76384 - RNA, 19 nt, Artificial Sequence
  Description of Artificial Sequence: Synthetic oligonucleotide
ccucgcaaugucugcuugc

SEQ ID NO: 76385 - RNA, 19 nt, Artificial Sequence
  Description of Artificial Sequence: Synthetic oligonucleotide
guccgcucuuacauucagc

SEQ ID NO: 76386 - RNA, 19 nt, Artificial Sequence
  Description of Artificial Sequence: Synthetic oligonucleotide
aguugucgggccgugcauu

SEQ ID NO: 76387 - RNA, 19 nt, Artificial Sequence
  Description of Artificial Sequence: Synthetic oligonucleotide
gcaucagcgccggaugaag

SEQ ID NO: 76388 - RNA, 19 nt, Artificial Sequence
  Description of Artificial Sequence: Synthetic oligonucleotide
cucaugacacgugucuuua

SEQ ID NO: 76389 - RNA, 19 nt, Artificial Sequence
  Description of Artificial Sequence: Synthetic oligonucleotide
gcauaacuuuggcuggcca

SEQ ID NO: 76390 - RNA, 19 nt, Artificial Sequence
  Description of Artificial Sequence: Synthetic oligonucleotide
auucaacuaucgauccauu

SEQ ID NO: 76391 - RNA, 19 nt, Artificial Sequence
  Description of Artificial Sequence: Synthetic oligonucleotide
uugucgggccgugcauuug

SEQ ID NO: 76392 - RNA, 19 nt, Artificial Sequence
  Description of Artificial Sequence: Synthetic oligonucleotide
ugcuugugcugcguugcua

SEQ ID NO: 76393 - RNA, 19 nt, Artificial Sequence
  Description of Artificial Sequence: Synthetic oligonucleotide
ggauuuccuggcuggaacu

SEQ ID NO: 76394 - RNA, 19 nt, Artificial Sequence
  Description of Artificial Sequence: Synthetic oligonucleotide
auggaccggagaaaacuuu

SEQ ID NO: 76395 - RNA, 19 nt, Artificial Sequence
  Description of Artificial Sequence: Synthetic oligonucleotide
agucgucuggguacuucga

SEQ ID NO: 76396 - RNA, 19 nt, Artificial Sequence
  Description of Artificial Sequence: Synthetic oligonucleotide
cgcucuuacauucagcucu

SEQ ID NO: 76397 - RNA, 19 nt, Artificial Sequence
  Description of Artificial Sequence: Synthetic oligonucleotide
ucgggccgugcauuugaua

SEQ ID NO: 76398 - RNA, 19 nt, Artificial Sequence
  Description of Artificial Sequence: Synthetic oligonucleotide
gugcugcguugcuagcuuc

SEQ ID NO: 76399 - RNA, 19 nt, Artificial Sequence
  Description of Artificial Sequence: Synthetic oligonucleotide
agcgccggaugaaggaggu

SEQ ID NO: 76400 - RNA, 19 nt, Artificial Sequence
  Description of Artificial Sequence: Synthetic oligonucleotide
acgugcagucggugaacau

SEQ ID NO: 76401 - RNA, 19 nt, Artificial Sequence
  Description of Artificial Sequence: Synthetic oligonucleotide
guacaaaucacggcaucuu

SEQ ID NO: 76402 - RNA, 19 nt, Artificial Sequence
  Description of Artificial Sequence: Synthetic oligonucleotide
cgguacaucggaugcuuac

SEQ ID NO: 76403 - RNA, 19 nt, Artificial Sequence
  Description of Artificial Sequence: Synthetic oligonucleotide
cacgauggguacuuacaau

SEQ ID NO: 76404 - RNA, 19 nt, Artificial Sequence
  Description of Artificial Sequence: Synthetic oligonucleotide
accagacauccugcaaaau

SEQ ID NO: 76405 - RNA, 19 nt, Artificial Sequence
  Description of Artificial Sequence: Synthetic oligonucleotide
gaaccaguugucgggccgu

SEQ ID NO: 76406 - RNA, 19 nt, Artificial Sequence
  Description of Artificial Sequence: Synthetic oligonucleotide
cacgugcagucggugaaca

SEQ ID NO: 76407 - RNA, 19 nt, Artificial Sequence
  Description of Artificial Sequence: Synthetic oligonucleotide
gguacaucggaugcuuacu

SEQ ID NO: 76408 - RNA, 19 nt, Artificial Sequence
  Description of Artificial Sequence: Synthetic oligonucleotide
caucaguagucgucugggu

SEQ ID NO: 76409 - RNA, 19 nt, Artificial Sequence
  Description of Artificial Sequence: Synthetic oligonucleotide
gucgucuggguacuucgau

SEQ ID NO: 76410 - RNA, 19 nt, Artificial Sequence
  Description of Artificial Sequence: Synthetic oligonucleotide
cacguuggcuacagcuuua

SEQ ID NO: 76411 - RNA, 19 nt, Artificial Sequence
  Description of Artificial Sequence: Synthetic oligonucleotide
ccacgauggguacuuacaa

SEQ ID NO: 76412 - RNA, 19 nt, Artificial Sequence
  Description of Artificial Sequence: Synthetic oligonucleotide
uccagcccauacugcgcuu

SEQ ID NO: 76413 - RNA, 19 nt, Artificial Sequence
  Description of Artificial Sequence: Synthetic oligonucleotide
gggccgugcauuugauaga

SEQ ID NO: 76414 - RNA, 19 nt, Artificial Sequence
  Description of Artificial Sequence: Synthetic oligonucleotide
ccaguugucgggccgugca

SEQ ID NO: 76415 - RNA, 19 nt, Artificial Sequence
  Description of Artificial Sequence: Synthetic oligonucleotide
cacgcuugugguccgacuu

SEQ ID NO: 76416 - RNA, 19 nt, Artificial Sequence
  Description of Artificial Sequence: Synthetic oligonucleotide
guugucgggccgugcauuu

SEQ ID NO: 76417 - RNA, 19 nt, Artificial Sequence
  Description of Artificial Sequence: Synthetic oligonucleotide
cacaugccgccagcacggc

SEQ ID NO: 76418 - RNA, 19 nt, Artificial Sequence
  Description of Artificial Sequence: Synthetic oligonucleotide
cggguccgcucuuacauuc

SEQ ID NO: 76419 - RNA, 19 nt, Artificial Sequence
  Description of Artificial Sequence: Synthetic oligonucleotide
gggcuagcccugcuguguc

SEQ ID NO: 76420 - RNA, 19 nt, Artificial Sequence
  Description of Artificial Sequence: Synthetic oligonucleotide
ccgcucuuacauucagcuc

SEQ ID NO: 76421 - RNA, 19 nt, Artificial Sequence
  Description of Artificial Sequence: Synthetic oligonucleotide
acccuccauugauguuacu

SEQ ID NO: 76422 - RNA, 19 nt, Artificial Sequence
  Description of Artificial Sequence: Synthetic oligonucleotide
gccggguccgcucuuacau

SEQ ID NO: 76423 - RNA, 19 nt, Artificial Sequence
  Description of Artificial Sequence: Synthetic oligonucleotide
ccucauucuuagacuucca

SEQ ID NO: 76424 - RNA, 19 nt, Artificial Sequence
  Description of Artificial Sequence: Synthetic oligonucleotide
ggcuagcccugcuguguca

SEQ ID NO: 76425 - RNA, 19 nt, Artificial Sequence
  Description of Artificial Sequence: Synthetic oligonucleotide
gcacguuggcuacagcuuu

SEQ ID NO: 76426 - RNA, 19 nt, Artificial Sequence
  Description of Artificial Sequence: Synthetic oligonucleotide
ggccgugcauuugauagau

SEQ ID NO: 76427 - RNA, 19 nt, Artificial Sequence
  Description of Artificial Sequence: Synthetic oligonucleotide
cgauggguacuuacaaugu

SEQ ID NO: 76428 - RNA, 19 nt, Artificial Sequence
  Description of Artificial Sequence: Synthetic oligonucleotide
ggaauuuggcuuggucuau

SEQ ID NO: 76429 - RNA, 19 nt, Artificial Sequence
  Description of Artificial Sequence: Synthetic oligonucleotide
ccgguauuuccccucauuu

SEQ ID NO: 76430 - RNA, 19 nt, Artificial Sequence
  Description of Artificial Sequence: Synthetic oligonucleotide
gcagccgugucgacagaga

SEQ ID NO: 76431 - RNA, 19 nt, Artificial Sequence
  Description of Artificial Sequence: Synthetic oligonucleotide
gggacgucaacagcugaau

SEQ ID NO: 76432 - RNA, 19 nt, Artificial Sequence
  Description of Artificial Sequence: Synthetic oligonucleotide
caacaccuugauagagcuu

SEQ ID NO: 76433 - RNA, 19 nt, Artificial Sequence
  Description of Artificial Sequence: Synthetic oligonucleotide
ggccggguccgcucuuaca

SEQ ID NO: 76434 - RNA, 19 nt, Artificial Sequence
  Description of Artificial Sequence: Synthetic oligonucleotide
acccugcacguuggcuaca

SEQ ID NO: 76435 - RNA, 19 nt, Artificial Sequence
  Description of Artificial Sequence: Synthetic oligonucleotide
ggguccgcucuuacauuca

SEQ ID NO: 76436 - RNA, 19 nt, Artificial Sequence
  Description of Artificial Sequence: Synthetic oligonucleotide
caccuugauagagcuuuau

SEQ ID NO: 76437 - RNA, 19 nt, Artificial Sequence
  Description of Artificial Sequence: Synthetic oligonucleotide
gcacucaugucaggacaaa

SEQ ID NO: 76438 - RNA, 19 nt, Artificial Sequence
  Description of Artificial Sequence: Synthetic oligonucleotide
gugcagccgugucgacaga

SEQ ID NO: 76439 - RNA, 19 nt, Artificial Sequence
  Description of Artificial Sequence: Synthetic oligonucleotide
gcuguggugccaaguuacu

SEQ ID NO: 76440 - RNA, 19 nt, Artificial Sequence
  Description of Artificial Sequence: Synthetic oligonucleotide
gcuccguuuggcaguaguu

SEQ ID NO: 76441 - RNA, 19 nt, Artificial Sequence
  Description of Artificial Sequence: Synthetic oligonucleotide
ccgugucgacagagacaag

SEQ ID NO: 76442 - RNA, 19 nt, Artificial Sequence
  Description of Artificial Sequence: Synthetic oligonucleotide
caccucgguccucauucuu

SEQ ID NO: 76443 - RNA, 19 nt, Artificial Sequence
  Description of Artificial Sequence: Synthetic oligonucleotide
gucgggccgugcauuugau

SEQ ID NO: 76444 - RNA, 19 nt, Artificial Sequence
  Description of Artificial Sequence: Synthetic oligonucleotide
cgcugcgugugaggguggc

SEQ ID NO: 76445 - RNA, 19 nt, Artificial Sequence
  Description of Artificial Sequence: Synthetic oligonucleotide
gggguggaucgaaguuuua

SEQ ID NO: 76446 - RNA, 19 nt, Artificial Sequence
  Description of Artificial Sequence: Synthetic oligonucleotide
cgccggaugaaggagguuu

SEQ ID NO: 76447 - RNA, 19 nt, Artificial Sequence
  Description of Artificial Sequence: Synthetic oligonucleotide
gccgugcauuugauagaua

SEQ ID NO: 76448 - RNA, 19 nt, Artificial Sequence
  Description of Artificial Sequence: Synthetic oligonucleotide
ccuaccgguaaugcuucuu

SEQ ID NO: 76449 - RNA, 19 nt, Artificial Sequence
  Description of Artificial Sequence: Synthetic oligonucleotide
ccgugauauccugaauguu

SEQ ID NO: 76450 - RNA, 19 nt, Artificial Sequence
  Description of Artificial Sequence: Synthetic oligonucleotide
cggccggguccgcucuuac

SEQ ID NO: 76451 - RNA, 19 nt, Artificial Sequence
  Description of Artificial Sequence: Synthetic oligonucleotide
cgcuucacgugcagucggu

SEQ ID NO: 76452 - RNA, 19 nt, Artificial Sequence
  Description of Artificial Sequence: Synthetic oligonucleotide
ccggguccgcucuuacauu

SEQ ID NO: 76453 - RNA, 19 nt, Artificial Sequence
  Description of Artificial Sequence: Synthetic oligonucleotide
cguuggcuacagcuuuauu

SEQ ID NO: 76454 - RNA, 19 nt, Artificial Sequence
  Description of Artificial Sequence: Synthetic oligonucleotide
gcgccggaugaaggagguu

SEQ ID NO: 76455 - RNA, 19 nt, Artificial Sequence
  Description of Artificial Sequence: Synthetic oligonucleotide
ugcauauuaaaccuuaacg

SEQ ID NO: 76456 - RNA, 19 nt, Artificial Sequence
  Description of Artificial Sequence: Synthetic oligonucleotide
ucgauauuuauaauuaaca

SEQ ID NO: 76457 - RNA, 19 nt, Artificial Sequence
  Description of Artificial Sequence: Synthetic oligonucleotide
aauauagauccccuaaugu

SEQ ID NO: 76458 - RNA, 19 nt, Artificial Sequence
  Description of Artificial Sequence: Synthetic oligonucleotide
uguacuauuuaguaaaagu

SEQ ID NO: 76459 - RNA, 19 nt, Artificial Sequence
  Description of Artificial Sequence: Synthetic oligonucleotide
auauuaguuaaagacaagg

SEQ ID NO: 76460 - RNA, 19 nt, Artificial Sequence
  Description of Artificial Sequence: Synthetic oligonucleotide
aaacuaacaacugugguug

SEQ ID NO: 76461 - RNA, 19 nt, Artificial Sequence
  Description of Artificial Sequence: Synthetic oligonucleotide
cuuaucaacauucauccgc

SEQ ID NO: 76462 - RNA, 19 nt, Artificial Sequence
  Description of Artificial Sequence: Synthetic oligonucleotide
aaagcuauccuaccaugcg

SEQ ID NO: 76463 - RNA, 19 nt, Artificial Sequence
  Description of Artificial Sequence: Synthetic oligonucleotide
uuuaauauagauccccuaa

SEQ ID NO: 76464 - RNA, 19 nt, Artificial Sequence
  Description of Artificial Sequence: Synthetic oligonucleotide
gcauauuaaaccuuaacgg

SEQ ID NO: 76465 - RNA, 19 nt, Artificial Sequence
  Description of Artificial Sequence: Synthetic oligonucleotide
aaccuuaacggaauaaugg

SEQ ID NO: 76466 - RNA, 19 nt, Artificial Sequence
  Description of Artificial Sequence: Synthetic oligonucleotide
uauagauccccuaauguga

SEQ ID NO: 76467 - RNA, 19 nt, Artificial Sequence
  Description of Artificial Sequence: Synthetic oligonucleotide
aaguugaagguaugugacc

SEQ ID NO: 76468 - RNA, 19 nt, Artificial Sequence
  Description of Artificial Sequence: Synthetic oligonucleotide
aaaacuaacaacugugguu

SEQ ID NO: 76469 - RNA, 19 nt, Artificial Sequence
  Description of Artificial Sequence: Synthetic oligonucleotide
auuacugagaucuccuggg

SEQ ID NO: 76470 - RNA, 19 nt, Artificial Sequence
  Description of Artificial Sequence: Synthetic oligonucleotide
gacacgaugucauuaaccc

SEQ ID NO: 76471 - RNA, 19 nt, Artificial Sequence
  Description of Artificial Sequence: Synthetic oligonucleotide
uuaucgauauuuauaauua

SEQ ID NO: 76472 - RNA, 19 nt, Artificial Sequence
  Description of Artificial Sequence: Synthetic oligonucleotide
ucuagggcaaguuucaaug

SEQ ID NO: 76473 - RNA, 19 nt, Artificial Sequence
  Description of Artificial Sequence: Synthetic oligonucleotide
uaguguugugaguagaggg

SEQ ID NO: 76474 - RNA, 19 nt, Artificial Sequence
  Description of Artificial Sequence: Synthetic oligonucleotide
uggaauuaccuuaucaaca

SEQ ID NO: 76475 - RNA, 19 nt, Artificial Sequence
  Description of Artificial Sequence: Synthetic oligonucleotide
aaaagcuauccuaccaugc

SEQ ID NO: 76476 - RNA, 19 nt, Artificial Sequence
  Description of Artificial Sequence: Synthetic oligonucleotide
cauuaaagcaccacaaaug

SEQ ID NO: 76477 - RNA, 19 nt, Artificial Sequence
  Description of Artificial Sequence: Synthetic oligonucleotide
caacuggugaaguugaagg

SEQ ID NO: 76478 - RNA, 19 nt, Artificial Sequence
  Description of Artificial Sequence: Synthetic oligonucleotide
caaugaauguaccugcucg

SEQ ID NO: 76479 - RNA, 19 nt, Artificial Sequence
  Description of Artificial Sequence: Synthetic oligonucleotide
uuucaaugaauguaccugc

SEQ ID NO: 76480 - RNA, 19 nt, Artificial Sequence
  Description of Artificial Sequence: Synthetic oligonucleotide
aaugggaccaagugcaaug

SEQ ID NO: 76481 - RNA, 19 nt, Artificial Sequence
  Description of Artificial Sequence: Synthetic oligonucleotide
uauagcacagccacuacca

SEQ ID NO: 76482 - RNA, 19 nt, Artificial Sequence
  Description of Artificial Sequence: Synthetic oligonucleotide
aauaacacgagagccuggg

SEQ ID NO: 76483 - RNA, 19 nt, Artificial Sequence
  Description of Artificial Sequence: Synthetic oligonucleotide
gacccuaugaccucgcagg

SEQ ID NO: 76484 - RNA, 19 nt, Artificial Sequence
  Description of Artificial Sequence: Synthetic oligonucleotide
gaguccuuacuccauaggg

SEQ ID NO: 76485 - RNA, 19 nt, Artificial Sequence
  Description of Artificial Sequence: Synthetic oligonucleotide
ucuauuaugucauuacuua

SEQ ID NO: 76486 - RNA, 19 nt, Artificial Sequence
  Description of Artificial Sequence: Synthetic oligonucleotide
gacgagaagauguggaucc

SEQ ID NO: 76487 - RNA, 19 nt, Artificial Sequence
  Description of Artificial Sequence: Synthetic oligonucleotide
cucgcaaacauuaaagcac

SEQ ID NO: 76488 - RNA, 19 nt, Artificial Sequence
  Description of Artificial Sequence: Synthetic oligonucleotide
accucuuuauaauagauau

SEQ ID NO: 76489 - RNA, 19 nt, Artificial Sequence
  Description of Artificial Sequence: Synthetic oligonucleotide
guaguuuagagacacgaug

SEQ ID NO: 76490 - RNA, 19 nt, Artificial Sequence
  Description of Artificial Sequence: Synthetic oligonucleotide
guuccaauuacuuaucuga

SEQ ID NO: 76491 - RNA, 19 nt, Artificial Sequence
  Description of Artificial Sequence: Synthetic oligonucleotide
ucauccgcuuaaaugaugc

SEQ ID NO: 76492 - RNA, 19 nt, Artificial Sequence
  Description of Artificial Sequence: Synthetic oligonucleotide
uccgcuuaaaugaugcuug

SEQ ID NO: 76493 - RNA, 19 nt, Artificial Sequence
  Description of Artificial Sequence: Synthetic oligonucleotide
agaucgaucucucucaacu

SEQ ID NO: 76494 - RNA, 19 nt, Artificial Sequence
  Description of Artificial Sequence: Synthetic oligonucleotide
ugguguacuauuuaguaaa

SEQ ID NO: 76495 - RNA, 19 nt, Artificial Sequence
  Description of Artificial Sequence: Synthetic oligonucleotide
uaccuuaucaacauucauc

SEQ ID NO: 76496 - RNA, 19 nt, Artificial Sequence
  Description of Artificial Sequence: Synthetic oligonucleotide
uuuauuguaccucuuuaua

SEQ ID NO: 76497 - RNA, 19 nt, Artificial Sequence
  Description of Artificial Sequence: Synthetic oligonucleotide
auguuauaaauugccaugg

SEQ ID NO: 76498 - RNA, 19 nt, Artificial Sequence
  Description of Artificial Sequence: Synthetic oligonucleotide
agaucuguucgccaggguc

SEQ ID NO: 76499 - RNA, 19 nt, Artificial Sequence
  Description of Artificial Sequence: Synthetic oligonucleotide
gcuguaaaggguuauuucg

SEQ ID NO: 76500 - RNA, 19 nt, Artificial Sequence
  Description of Artificial Sequence: Synthetic oligonucleotide
ucaaaaggggaagacaggc

SEQ ID NO: 76501 - RNA, 19 nt, Artificial Sequence
  Description of Artificial Sequence: Synthetic oligonucleotide
aaaagcuuuaugguguacu

SEQ ID NO: 76502 - RNA, 19 nt, Artificial Sequence
  Description of Artificial Sequence: Synthetic oligonucleotide
cuguaaaggguuauuucgg

SEQ ID NO: 76503 - RNA, 19 nt, Artificial Sequence
  Description of Artificial Sequence: Synthetic oligonucleotide
uuaauauagauccccuaau

SEQ ID NO: 76504 - RNA, 19 nt, Artificial Sequence
  Description of Artificial Sequence: Synthetic oligonucleotide
gaugguaacggcagguugg

SEQ ID NO: 76505 - RNA, 19 nt, Artificial Sequence
  Description of Artificial Sequence: Synthetic oligonucleotide
ucauaauuagcaucauaga

SEQ ID NO: 76506 - RNA, 19 nt, Artificial Sequence
  Description of Artificial Sequence: Synthetic oligonucleotide
ucaacauucauccgcuuaa

SEQ ID NO: 76507 - RNA, 19 nt, Artificial Sequence
  Description of Artificial Sequence: Synthetic oligonucleotide
aacgcaagucaaguuauuc

SEQ ID NO: 76508 - RNA, 19 nt, Artificial Sequence
  Description of Artificial Sequence: Synthetic oligonucleotide
uuaacggaauaauggagac

SEQ ID NO: 76509 - RNA, 19 nt, Artificial Sequence
  Description of Artificial Sequence: Synthetic oligonucleotide
uaccaugcgacaauaggug

SEQ ID NO: 76510 - RNA, 19 nt, Artificial Sequence
  Description of Artificial Sequence: Synthetic oligonucleotide
ucaagcagccaacugguga

SEQ ID NO: 76511 - RNA, 19 nt, Artificial Sequence
  Description of Artificial Sequence: Synthetic oligonucleotide
ugaauaagaccuuuucauc

SEQ ID NO: 76512 - RNA, 19 nt, Artificial Sequence
  Description of Artificial Sequence: Synthetic oligonucleotide
augucauuaacccaugcaa

SEQ ID NO: 76513 - RNA, 19 nt, Artificial Sequence
  Description of Artificial Sequence: Synthetic oligonucleotide
cuuugucggaucuggaugc

SEQ ID NO: 76514 - RNA, 19 nt, Artificial Sequence
  Description of Artificial Sequence: Synthetic oligonucleotide
uauaaauugccaugguuua

SEQ ID NO: 76515 - RNA, 19 nt, Artificial Sequence
  Description of Artificial Sequence: Synthetic oligonucleotide
aaguuacccuuuaauauag

SEQ ID NO: 76516 - RNA, 19 nt, Artificial Sequence
  Description of Artificial Sequence: Synthetic oligonucleotide
uuaugguguacuauuuagu

SEQ ID NO: 76517 - RNA, 19 nt, Artificial Sequence
  Description of Artificial Sequence: Synthetic oligonucleotide
gacaucuagugacacuggg

SEQ ID NO: 76518 - RNA, 19 nt, Artificial Sequence
  Description of Artificial Sequence: Synthetic oligonucleotide
cuuaacggaauaauggaga

SEQ ID NO: 76519 - RNA, 19 nt, Artificial Sequence
  Description of Artificial Sequence: Synthetic oligonucleotide
aaaccuuaacggaauaaug

SEQ ID NO: 76520 - RNA, 19 nt, Artificial Sequence
  Description of Artificial Sequence: Synthetic oligonucleotide
uccaauuacuuaucugacc

SEQ ID NO: 76521 - RNA, 19 nt, Artificial Sequence
  Description of Artificial Sequence: Synthetic oligonucleotide
ugcgauuucgcuguggaug

SEQ ID NO: 76522 - RNA, 19 nt, Artificial Sequence
  Description of Artificial Sequence: Synthetic oligonucleotide
gaauaagaccuuuucaucu

SEQ ID NO: 76523 - RNA, 19 nt, Artificial Sequence
  Description of Artificial Sequence: Synthetic oligonucleotide
ugcgaaugcaucuuggcaa

SEQ ID NO: 76524 - RNA, 19 nt, Artificial Sequence
  Description of Artificial Sequence: Synthetic oligonucleotide
aguuuagagacacgauguc

SEQ ID NO: 76525 - RNA, 19 nt, Artificial Sequence
  Description of Artificial Sequence: Synthetic oligonucleotide
acaggaucguacuccuucc

SEQ ID NO: 76526 - RNA, 19 nt, Artificial Sequence
  Description of Artificial Sequence: Synthetic oligonucleotide
cauuagucgcuguaugagg

SEQ ID NO: 76527 - RNA, 19 nt, Artificial Sequence
  Description of Artificial Sequence: Synthetic oligonucleotide
cuggaauuaccuuaucaac

SEQ ID NO: 76528 - RNA, 19 nt, Artificial Sequence
  Description of Artificial Sequence: Synthetic oligonucleotide
uguaaaggguuauuucgga

SEQ ID NO: 76529 - RNA, 19 nt, Artificial Sequence
  Description of Artificial Sequence: Synthetic oligonucleotide
agacacgaugucauuaacc

SEQ ID NO: 76530 - RNA, 19 nt, Artificial Sequence
  Description of Artificial Sequence: Synthetic oligonucleotide
aaauuuaugauaggagguu

SEQ ID NO: 76531 - RNA, 19 nt, Artificial Sequence
  Description of Artificial Sequence: Synthetic oligonucleotide
aucgagguagaauacacau

SEQ ID NO: 76532 - RNA, 19 nt, Artificial Sequence
  Description of Artificial Sequence: Synthetic oligonucleotide
aauuacuuaucugaccaaa

SEQ ID NO: 76533 - RNA, 19 nt, Artificial Sequence
  Description of Artificial Sequence: Synthetic oligonucleotide
uagaauacacauugaccgc

SEQ ID NO: 76534 - RNA, 19 nt, Artificial Sequence
  Description of Artificial Sequence: Synthetic oligonucleotide
aauggaucggccccguuau

SEQ ID NO: 76535 - RNA, 19 nt, Artificial Sequence
  Description of Artificial Sequence: Synthetic oligonucleotide
gaugucauuaacccaugca

SEQ ID NO: 76536 - RNA, 19 nt, Artificial Sequence
  Description of Artificial Sequence: Synthetic oligonucleotide
uuuuggcagaugagggacg

SEQ ID NO: 76537 - RNA, 19 nt, Artificial Sequence
  Description of Artificial Sequence: Synthetic oligonucleotide
accuuaacggaauaaugga

SEQ ID NO: 76538 - RNA, 19 nt, Artificial Sequence
  Description of Artificial Sequence: Synthetic oligonucleotide
ugagcuacugcuguagggc

SEQ ID NO: 76539 - RNA, 19 nt, Artificial Sequence
  Description of Artificial Sequence: Synthetic oligonucleotide
ugggcaauguaaaaugaau

SEQ ID NO: 76540 - RNA, 19 nt, Artificial Sequence
  Description of Artificial Sequence: Synthetic oligonucleotide
aggaguagaaccaauuuca

SEQ ID NO: 76541 - RNA, 19 nt, Artificial Sequence
  Description of Artificial Sequence: Synthetic oligonucleotide
uaaaauccagguugucuug

SEQ ID NO: 76542 - RNA, 19 nt, Artificial Sequence
  Description of Artificial Sequence: Synthetic oligonucleotide
uuucuaccgagcuccaggc

SEQ ID NO: 76543 - RNA, 19 nt, Artificial Sequence
  Description of Artificial Sequence: Synthetic oligonucleotide
aagucaugcuaccagucaa

SEQ ID NO: 76544 - RNA, 19 nt, Artificial Sequence
  Description of Artificial Sequence: Synthetic oligonucleotide
uuucccuuuaguguuguga

SEQ ID NO: 76545 - RNA, 19 nt, Artificial Sequence
  Description of Artificial Sequence: Synthetic oligonucleotide
aagcuauccuaccaugcga

SEQ ID NO: 76546 - RNA, 19 nt, Artificial Sequence
  Description of Artificial Sequence: Synthetic oligonucleotide
ucgugccucgacaggaucg

SEQ ID NO: 76547 - RNA, 19 nt, Artificial Sequence
  Description of Artificial Sequence: Synthetic oligonucleotide
caggcaacggccaggaaag

SEQ ID NO: 76548 - RNA, 19 nt, Artificial Sequence
  Description of Artificial Sequence: Synthetic oligonucleotide
uguguaguuuagagacacg

SEQ ID NO: 76549 - RNA, 19 nt, Artificial Sequence
  Description of Artificial Sequence: Synthetic oligonucleotide
aguaaaccuaaaguuagga

SEQ ID NO: 76550 - RNA, 19 nt, Artificial Sequence
  Description of Artificial Sequence: Synthetic oligonucleotide
guagaaccaauuucaagca

SEQ ID NO: 76551 - RNA, 19 nt, Artificial Sequence
  Description of Artificial Sequence: Synthetic oligonucleotide
ucauuacuuaucgauauuu

SEQ ID NO: 76552 - RNA, 19 nt, Artificial Sequence
  Description of Artificial Sequence: Synthetic oligonucleotide
uaucgagguagaauacaca

SEQ ID NO: 76553 - RNA, 19 nt, Artificial Sequence
  Description of Artificial Sequence: Synthetic oligonucleotide
gaagguaugugacccuaug

SEQ ID NO: 76554 - RNA, 19 nt, Artificial Sequence
  Description of Artificial Sequence: Synthetic oligonucleotide
ucggaaagccuucucuuga

SEQ ID NO: 76555 - RNA, 19 nt, Artificial Sequence
  Description of Artificial Sequence: Synthetic oligonucleotide
guauagcacagccacuacc

SEQ ID NO: 76556 - RNA, 19 nt, Artificial Sequence
  Description of Artificial Sequence: Synthetic oligonucleotide
ugacccuaugaccucgcag

SEQ ID NO: 76557 - RNA, 19 nt, Artificial Sequence
  Description of Artificial Sequence: Synthetic oligonucleotide
cuucccauaaagaccucag

SEQ ID NO: 76558 - RNA, 19 nt, Artificial Sequence
  Description of Artificial Sequence: Synthetic oligonucleotide
ucaaugaauguaccugcuc

SEQ ID NO: 76559 - RNA, 19 nt, Artificial Sequence
  Description of Artificial Sequence: Synthetic oligonucleotide
uuuaugauaggagguuaga

SEQ ID NO: 76560 - RNA, 19 nt, Artificial Sequence
  Description of Artificial Sequence: Synthetic oligonucleotide
uagacucgcaaacauuaaa

SEQ ID NO: 76561 - RNA, 19 nt, Artificial Sequence
  Description of Artificial Sequence: Synthetic oligonucleotide
aaccaaaugaaaggaggga

SEQ ID NO: 76562 - RNA, 19 nt, Artificial Sequence
  Description of Artificial Sequence: Synthetic oligonucleotide
aagaucaacgcaagucaag

SEQ ID NO: 76563 - RNA, 19 nt, Artificial Sequence
  Description of Artificial Sequence: Synthetic oligonucleotide
agggcuuguguugaagccc

SEQ ID NO: 76564 - RNA, 19 nt, Artificial Sequence
  Description of Artificial Sequence: Synthetic oligonucleotide
cucguugagcuguaugacc

SEQ ID NO: 76565 - RNA, 19 nt, Artificial Sequence
  Description of Artificial Sequence: Synthetic oligonucleotide
gauccccuaaugugaauug

SEQ ID NO: 76566 - RNA, 19 nt, Artificial Sequence
  Description of Artificial Sequence: Synthetic oligonucleotide
uuacugagaucuccugggc

SEQ ID NO: 76567 - RNA, 19 nt, Artificial Sequence
  Description of Artificial Sequence: Synthetic oligonucleotide
ugaaugcauauuaaaccuu

SEQ ID NO: 76568 - RNA, 19 nt, Artificial Sequence
  Description of Artificial Sequence: Synthetic oligonucleotide
gaugcgauuucgcugugga

SEQ ID NO: 76569 - RNA, 19 nt, Artificial Sequence
  Description of Artificial Sequence: Synthetic oligonucleotide
ugcuguaaaggguuauuuc

SEQ ID NO: 76570 - RNA, 19 nt, Artificial Sequence
  Description of Artificial Sequence: Synthetic oligonucleotide
ucaauucauuaauguuucc

SEQ ID NO: 76571 - RNA, 19 nt, Artificial Sequence
  Description of Artificial Sequence: Synthetic oligonucleotide
uaccucuuuauaauagaua

SEQ ID NO: 76572 - RNA, 19 nt, Artificial Sequence
  Description of Artificial Sequence: Synthetic oligonucleotide
uuaccuuaucaacauucau

SEQ ID NO: 76573 - RNA, 19 nt, Artificial Sequence
  Description of Artificial Sequence: Synthetic oligonucleotide
gaaaacuaacaacuguggu

SEQ ID NO: 76574 - RNA, 19 nt, Artificial Sequence
  Description of Artificial Sequence: Synthetic oligonucleotide
uuccggaaaggaauggauc

SEQ ID NO: 76575 - RNA, 19 nt, Artificial Sequence
  Description of Artificial Sequence: Synthetic oligonucleotide
agcuauccuaccaugcgac

SEQ ID NO: 76576 - RNA, 19 nt, Artificial Sequence
  Description of Artificial Sequence: Synthetic oligonucleotide
uaggagguuagacucgcaa

SEQ ID NO: 76577 - RNA, 19 nt, Artificial Sequence
  Description of Artificial Sequence: Synthetic oligonucleotide
guagagcuacacuucuucc

SEQ ID NO: 76578 - RNA, 19 nt, Artificial Sequence
  Description of Artificial Sequence: Synthetic oligonucleotide
aaacuaaugcagcccggaa

SEQ ID NO: 76579 - RNA, 19 nt, Artificial Sequence
  Description of Artificial Sequence: Synthetic oligonucleotide
gaaacgcccuuucaccagc

SEQ ID NO: 76580 - RNA, 19 nt, Artificial Sequence
  Description of Artificial Sequence: Synthetic oligonucleotide
cugaaugcauauuaaaccu

SEQ ID NO: 76581 - RNA, 19 nt, Artificial Sequence
  Description of Artificial Sequence: Synthetic oligonucleotide
aaagaucaacgcaagucaa

SEQ ID NO: 76582 - RNA, 19 nt, Artificial Sequence
  Description of Artificial Sequence: Synthetic oligonucleotide
aguuauucacauauucaga

SEQ ID NO: 76583 - RNA, 19 nt, Artificial Sequence
  Description of Artificial Sequence: Synthetic oligonucleotide
auuagucgcuguaugaggu

SEQ ID NO: 76584 - RNA, 19 nt, Artificial Sequence
  Description of Artificial Sequence: Synthetic oligonucleotide
cucgacaggaucguacucc

SEQ ID NO: 76585 - RNA, 19 nt, Artificial Sequence
  Description of Artificial Sequence: Synthetic oligonucleotide
gaaguguggccaugaauca

SEQ ID NO: 76586 - RNA, 19 nt, Artificial Sequence
  Description of Artificial Sequence: Synthetic oligonucleotide
augguguacuauuuaguaa

SEQ ID NO: 76587 - RNA, 19 nt, Artificial Sequence
  Description of Artificial Sequence: Synthetic oligonucleotide
uuagacucgcaaacauuaa

SEQ ID NO: 76588 - RNA, 19 nt, Artificial Sequence
  Description of Artificial Sequence: Synthetic oligonucleotide
cugaauaagaccuuuucau

SEQ ID NO: 76589 - RNA, 19 nt, Artificial Sequence
  Description of Artificial Sequence: Synthetic oligonucleotide
uguauagcacagccacuac

SEQ ID NO: 76590 - RNA, 19 nt, Artificial Sequence
  Description of Artificial Sequence: Synthetic oligonucleotide
caucuugcggggaauggac

SEQ ID NO: 76591 - RNA, 19 nt, Artificial Sequence
  Description of Artificial Sequence: Synthetic oligonucleotide
guuggguacauccucaagu

SEQ ID NO: 76592 - RNA, 19 nt, Artificial Sequence
  Description of Artificial Sequence: Synthetic oligonucleotide
aaugacaaggaaggccccu

SEQ ID NO: 76593 - RNA, 19 nt, Artificial Sequence
  Description of Artificial Sequence: Synthetic oligonucleotide
uauccuaccaugcgacaau

SEQ ID NO: 76594 - RNA, 19 nt, Artificial Sequence
  Description of Artificial Sequence: Synthetic oligonucleotide
guguaguuuagagacacga

SEQ ID NO: 76595 - RNA, 19 nt, Artificial Sequence
  Description of Artificial Sequence: Synthetic oligonucleotide
auaugcugcucuaucaaca

SEQ ID NO: 76596 - RNA, 19 nt, Artificial Sequence
  Description of Artificial Sequence: Synthetic oligonucleotide
cuguucgucugaagcauag

SEQ ID NO: 76597 - RNA, 19 nt, Artificial Sequence
  Description of Artificial Sequence: Synthetic oligonucleotide
aucuagugacacuggguug

SEQ ID NO: 76598 - RNA, 19 nt, Artificial Sequence
  Description of Artificial Sequence: Synthetic oligonucleotide
gcaauguaaaaugaaugug

SEQ ID NO: 76599 - RNA, 19 nt, Artificial Sequence
  Description of Artificial Sequence: Synthetic oligonucleotide
aagaggacccugagaaaag

SEQ ID NO: 76600 - RNA, 19 nt, Artificial Sequence
  Description of Artificial Sequence: Synthetic oligonucleotide
uucccauaaagaccucagu

SEQ ID NO: 76601 - RNA, 19 nt, Artificial Sequence
  Description of Artificial Sequence: Synthetic oligonucleotide
guaacggcagguugggaac

SEQ ID NO: 76602 - RNA, 19 nt, Artificial Sequence
  Description of Artificial Sequence: Synthetic oligonucleotide
gaaugcauauuaaaccuua

SEQ ID NO: 76603 - RNA, 19 nt, Artificial Sequence
  Description of Artificial Sequence: Synthetic oligonucleotide
ucgugguucccuucuggag

SEQ ID NO: 76604 - RNA, 19 nt, Artificial Sequence
  Description of Artificial Sequence: Synthetic oligonucleotide
gaagcuguuuauuguaccu

SEQ ID NO: 76605 - RNA, 19 nt, Artificial Sequence
  Description of Artificial Sequence: Synthetic oligonucleotide
aguguugugaguagaggga

SEQ ID NO: 76606 - RNA, 19 nt, Artificial Sequence
  Description of Artificial Sequence: Synthetic oligonucleotide
agugcaauggcuggcagau

SEQ ID NO: 76607 - RNA, 19 nt, Artificial Sequence
  Description of Artificial Sequence: Synthetic oligonucleotide
ccuaccaugcgacaauagg

SEQ ID NO: 76608 - RNA, 19 nt, Artificial Sequence
  Description of Artificial Sequence: Synthetic oligonucleotide
ccuuaacggaauaauggag

SEQ ID NO: 76609 - RNA, 19 nt, Artificial Sequence
  Description of Artificial Sequence: Synthetic oligonucleotide
uccuaccaugcgacaauag

SEQ ID NO: 76610 - RNA, 19 nt, Artificial Sequence
  Description of Artificial Sequence: Synthetic oligonucleotide
caugcgacaauaggugggc

SEQ ID NO: 76611 - RNA, 19 nt, Artificial Sequence
  Description of Artificial Sequence: Synthetic oligonucleotide
gcgauuucgcuguggaugg

SEQ ID NO: 76612 - RNA, 19 nt, Artificial Sequence
  Description of Artificial Sequence: Synthetic oligonucleotide
guguugugaguagagggag

SEQ ID NO: 76613 - RNA, 19 nt, Artificial Sequence
  Description of Artificial Sequence: Synthetic oligonucleotide
aaugcauauuaaaccuuaa

SEQ ID NO: 76614 - RNA, 19 nt, Artificial Sequence
  Description of Artificial Sequence: Synthetic oligonucleotide
cuugucgugccucgacagg

SEQ ID NO: 76615 - RNA, 19 nt, Artificial Sequence
  Description of Artificial Sequence: Synthetic oligonucleotide
cuguauugcagaggugggg

SEQ ID NO: 76616 - RNA, 19 nt, Artificial Sequence
  Description of Artificial Sequence: Synthetic oligonucleotide
ugcgacaauaggugggcaa

SEQ ID NO: 76617 - RNA, 19 nt, Artificial Sequence
  Description of Artificial Sequence: Synthetic oligonucleotide
cauauguuuacauuccuuu

SEQ ID NO: 76618 - RNA, 19 nt, Artificial Sequence
  Description of Artificial Sequence: Synthetic oligonucleotide
uggguuaucgagguagaau

SEQ ID NO: 76619 - RNA, 19 nt, Artificial Sequence
  Description of Artificial Sequence: Synthetic oligonucleotide
aggagguuagacucgcaaa

SEQ ID NO: 76620 - RNA, 19 nt, Artificial Sequence
  Description of Artificial Sequence: Synthetic oligonucleotide
ucaugcuaccagucaaguc

SEQ ID NO: 76621 - RNA, 19 nt, Artificial Sequence
  Description of Artificial Sequence: Synthetic oligonucleotide
uugucgugccucgacagga

SEQ ID NO: 76622 - RNA, 19 nt, Artificial Sequence
  Description of Artificial Sequence: Synthetic oligonucleotide
gaugagggacgagaagaug

SEQ ID NO: 76623 - RNA, 19 nt, Artificial Sequence
  Description of Artificial Sequence: Synthetic oligonucleotide
cuaccaugcgacaauaggu

SEQ ID NO: 76624 - RNA, 19 nt, Artificial Sequence
  Description of Artificial Sequence: Synthetic oligonucleotide
cuguaugaccuguguuucc

SEQ ID NO: 76625 - RNA, 19 nt, Artificial Sequence
  Description of Artificial Sequence: Synthetic oligonucleotide
ugagaugguucaguacucu

SEQ ID NO: 76626 - RNA, 19 nt, Artificial Sequence
  Description of Artificial Sequence: Synthetic oligonucleotide
ggguuaucgagguagaaua

SEQ ID NO: 76627 - RNA, 19 nt, Artificial Sequence
  Description of Artificial Sequence: Synthetic oligonucleotide
agcuacacuucuuccuuga

SEQ ID NO: 76628 - RNA, 19 nt, Artificial Sequence
  Description of Artificial Sequence: Synthetic oligonucleotide
aaaugggaccaagugcaau

SEQ ID NO: 76629 - RNA, 19 nt, Artificial Sequence
  Description of Artificial Sequence: Synthetic oligonucleotide
guggugguggugguggugg

SEQ ID NO: 76630 - RNA, 19 nt, Artificial Sequence
  Description of Artificial Sequence: Synthetic oligonucleotide
guuauaaauugccaugguu

SEQ ID NO: 76631 - RNA, 19 nt, Artificial Sequence
  Description of Artificial Sequence: Synthetic oligonucleotide
uuauuucggaaagccuucu

SEQ ID NO: 76632 - RNA, 19 nt, Artificial Sequence
  Description of Artificial Sequence: Synthetic oligonucleotide
ucccugguacccauucaca

SEQ ID NO: 76633 - RNA, 19 nt, Artificial Sequence
  Description of Artificial Sequence: Synthetic oligonucleotide
ccuaugaccucgcaggcag

SEQ ID NO: 76634 - RNA, 19 nt, Artificial Sequence
  Description of Artificial Sequence: Synthetic oligonucleotide
guaaaggguuauuucggaa

SEQ ID NO: 76635 - RNA, 19 nt, Artificial Sequence
  Description of Artificial Sequence: Synthetic oligonucleotide
ggcagaugcgauuucgcug

SEQ ID NO: 76636 - RNA, 19 nt, Artificial Sequence
  Description of Artificial Sequence: Synthetic oligonucleotide
gagacacgaugucauuaac

SEQ ID NO: 76637 - RNA, 19 nt, Artificial Sequence
  Description of Artificial Sequence: Synthetic oligonucleotide
ucugaagcauagagcacuu

SEQ ID NO: 76638 - RNA, 19 nt, Artificial Sequence
  Description of Artificial Sequence: Synthetic oligonucleotide
uggugaaguugaagguaug

SEQ ID NO: 76639 - RNA, 19 nt, Artificial Sequence
  Description of Artificial Sequence: Synthetic oligonucleotide
gacaacaucuugcggggaa

SEQ ID NO: 76640 - RNA, 19 nt, Artificial Sequence
  Description of Artificial Sequence: Synthetic oligonucleotide
ugcuuccggaaaggaaugg

SEQ ID NO: 76641 - RNA, 19 nt, Artificial Sequence
  Description of Artificial Sequence: Synthetic oligonucleotide
augguaacggcagguuggg

SEQ ID NO: 76642 - RNA, 19 nt, Artificial Sequence
  Description of Artificial Sequence: Synthetic oligonucleotide
cagcagaucgaucucucuc

SEQ ID NO: 76643 - RNA, 19 nt, Artificial Sequence
  Description of Artificial Sequence: Synthetic oligonucleotide
cauuacuuaucgauauuua

SEQ ID NO: 76644 - RNA, 19 nt, Artificial Sequence
  Description of Artificial Sequence: Synthetic oligonucleotide
ugaagguaugugacccuau

SEQ ID NO: 76645 - RNA, 19 nt, Artificial Sequence
  Description of Artificial Sequence: Synthetic oligonucleotide
ugugacccuaugaccucgc

SEQ ID NO: 76646 - RNA, 19 nt, Artificial Sequence
  Description of Artificial Sequence: Synthetic oligonucleotide
gaaucgugguucccuucug

SEQ ID NO: 76647 - RNA, 19 nt, Artificial Sequence
  Description of Artificial Sequence: Synthetic oligonucleotide
ccuccuguucgucugaagc

SEQ ID NO: 76648 - RNA, 19 nt, Artificial Sequence
  Description of Artificial Sequence: Synthetic oligonucleotide
guccuuacuccauagggua

SEQ ID NO: 76649 - RNA, 19 nt, Artificial Sequence
  Description of Artificial Sequence: Synthetic oligonucleotide
cacaaccaggcgugggagg

SEQ ID NO: 76650 - RNA, 19 nt, Artificial Sequence
  Description of Artificial Sequence: Synthetic oligonucleotide
ggaugguaacggcagguug

SEQ ID NO: 76651 - RNA, 19 nt, Artificial Sequence
  Description of Artificial Sequence: Synthetic oligonucleotide
uuagagacacgaugucauu

SEQ ID NO: 76652 - RNA, 19 nt, Artificial Sequence
  Description of Artificial Sequence: Synthetic oligonucleotide
ccaugcgacaauagguggg

SEQ ID NO: 76653 - RNA, 19 nt, Artificial Sequence
  Description of Artificial Sequence: Synthetic oligonucleotide
uggguacauccucaaguua

SEQ ID NO: 76654 - RNA, 19 nt, Artificial Sequence
  Description of Artificial Sequence: Synthetic oligonucleotide
agauccccuaaugugaauu

SEQ ID NO: 76655 - RNA, 19 nt, Artificial Sequence
  Description of Artificial Sequence: Synthetic oligonucleotide
auguggaucccggcuuagc

SEQ ID NO: 76656 - RNA, 19 nt, Artificial Sequence
  Description of Artificial Sequence: Synthetic oligonucleotide
acaucuagugacacugggu

SEQ ID NO: 76657 - RNA, 19 nt, Artificial Sequence
  Description of Artificial Sequence: Synthetic oligonucleotide
uccuguucgucugaagcau

SEQ ID NO: 76658 - RNA, 19 nt, Artificial Sequence
  Description of Artificial Sequence: Synthetic oligonucleotide
gggcaaguuucaaugaaug

SEQ ID NO: 76659 - RNA, 19 nt, Artificial Sequence
  Description of Artificial Sequence: Synthetic oligonucleotide
gucauauggcuuucauauc

SEQ ID NO: 76660 - RNA, 19 nt, Artificial Sequence
  Description of Artificial Sequence: Synthetic oligonucleotide
gcuuuaugaugcauaauuc

SEQ ID NO: 76661 - RNA, 19 nt, Artificial Sequence
  Description of Artificial Sequence: Synthetic oligonucleotide
uaggguacugggagucacu

SEQ ID NO: 76662 - RNA, 19 nt, Artificial Sequence
  Description of Artificial Sequence: Synthetic oligonucleotide
caaaucuuugucggaucug

SEQ ID NO: 76663 - RNA, 19 nt, Artificial Sequence
  Description of Artificial Sequence: Synthetic oligonucleotide
ggaaacgcccuuucaccag

SEQ ID NO: 76664 - RNA, 19 nt, Artificial Sequence
  Description of Artificial Sequence: Synthetic oligonucleotide
ccccuaaugugaauuguag

SEQ ID NO: 76665 - RNA, 19 nt, Artificial Sequence
  Description of Artificial Sequence: Synthetic oligonucleotide
caucuauuaugucauuacu

SEQ ID NO: 76666 - RNA, 19 nt, Artificial Sequence
  Description of Artificial Sequence: Synthetic oligonucleotide
auccgcuuaaaugaugcuu

SEQ ID NO: 76667 - RNA, 19 nt, Artificial Sequence
  Description of Artificial Sequence: Synthetic oligonucleotide
augacaaggaaggccccug

SEQ ID NO: 76668 - RNA, 19 nt, Artificial Sequence
  Description of Artificial Sequence: Synthetic oligonucleotide
agaugcgauuucgcugugg

SEQ ID NO: 76669 - RNA, 19 nt, Artificial Sequence
  Description of Artificial Sequence: Synthetic oligonucleotide
caggaucguacuccuuccc

SEQ ID NO: 76670 - RNA, 19 nt, Artificial Sequence
  Description of Artificial Sequence: Synthetic oligonucleotide
cuaugaccucgcaggcagg

SEQ ID NO: 76671 - RNA, 19 nt, Artificial Sequence
  Description of Artificial Sequence: Synthetic oligonucleotide
gguugucuuggaaacgccc

SEQ ID NO: 76672 - RNA, 19 nt, Artificial Sequence
  Description of Artificial Sequence: Synthetic oligonucleotide
auagauccccuaaugugaa

SEQ ID NO: 76673 - RNA, 19 nt, Artificial Sequence
  Description of Artificial Sequence: Synthetic oligonucleotide
uguucgucugaagcauaga

SEQ ID NO: 76674 - RNA, 19 nt, Artificial Sequence
  Description of Artificial Sequence: Synthetic oligonucleotide
caaacuaaugcagcccgga

SEQ ID NO: 76675 - RNA, 19 nt, Artificial Sequence
  Description of Artificial Sequence: Synthetic oligonucleotide
caucuagugacacuggguu

SEQ ID NO: 76676 - RNA, 19 nt, Artificial Sequence
  Description of Artificial Sequence: Synthetic oligonucleotide
cacacacgauggaaguguc

SEQ ID NO: 76677 - RNA, 19 nt, Artificial Sequence
  Description of Artificial Sequence: Synthetic oligonucleotide
cacacgauggaagugucaa

SEQ ID NO: 76678 - RNA, 19 nt, Artificial Sequence
  Description of Artificial Sequence: Synthetic oligonucleotide
cugcucguugagcuguaug

SEQ ID NO: 76679 - RNA, 19 nt, Artificial Sequence
  Description of Artificial Sequence: Synthetic oligonucleotide
aaaugaccagugacaguaa

SEQ ID NO: 76680 - RNA, 19 nt, Artificial Sequence
  Description of Artificial Sequence: Synthetic oligonucleotide
ugaccgccauuccccaacu

SEQ ID NO: 76681 - RNA, 19 nt, Artificial Sequence
  Description of Artificial Sequence: Synthetic oligonucleotide
cagcugguuucuaccgagc

SEQ ID NO: 76682 - RNA, 19 nt, Artificial Sequence
  Description of Artificial Sequence: Synthetic oligonucleotide
cagaucgaucucucucaac

SEQ ID NO: 76683 - RNA, 19 nt, Artificial Sequence
  Description of Artificial Sequence: Synthetic oligonucleotide
ugucgugccucgacaggau

SEQ ID NO: 76684 - RNA, 19 nt, Artificial Sequence
  Description of Artificial Sequence: Synthetic oligonucleotide
gcagaugcgauuucgcugu

SEQ ID NO: 76685 - RNA, 19 nt, Artificial Sequence
  Description of Artificial Sequence: Synthetic oligonucleotide
agggcaaguuucaaugaau

SEQ ID NO: 76686 - RNA, 19 nt, Artificial Sequence
  Description of Artificial Sequence: Synthetic oligonucleotide
gguuaucgagguagaauac

SEQ ID NO: 76687 - RNA, 19 nt, Artificial Sequence
  Description of Artificial Sequence: Synthetic oligonucleotide
ugguuucuaccgagcucca

SEQ ID NO: 76688 - RNA, 19 nt, Artificial Sequence
  Description of Artificial Sequence: Synthetic oligonucleotide
cuauccuaccaugcgacaa

SEQ ID NO: 76689 - RNA, 19 nt, Artificial Sequence
  Description of Artificial Sequence: Synthetic oligonucleotide
ggggugguggugguggugg

SEQ ID NO: 76690 - RNA, 19 nt, Artificial Sequence
  Description of Artificial Sequence: Synthetic oligonucleotide
ccuugucgugccucgacag

SEQ ID NO: 76691 - RNA, 19 nt, Artificial Sequence
  Description of Artificial Sequence: Synthetic oligonucleotide
augaauguaccugcucguu

SEQ ID NO: 76692 - RNA, 19 nt, Artificial Sequence
  Description of Artificial Sequence: Synthetic oligonucleotide
acacgagagccugggaagu

SEQ ID NO: 76693 - RNA, 19 nt, Artificial Sequence
  Description of Artificial Sequence: Synthetic oligonucleotide
guugucuuggaaacgcccu

SEQ ID NO: 76694 - RNA, 19 nt, Artificial Sequence
  Description of Artificial Sequence: Synthetic oligonucleotide
gguauuacugagaucuccu

SEQ ID NO: 76695 - RNA, 19 nt, Artificial Sequence
  Description of Artificial Sequence: Synthetic oligonucleotide
gugguggugguggugguga

SEQ ID NO: 76696 - RNA, 19 nt, Artificial Sequence
  Description of Artificial Sequence: Synthetic oligonucleotide
gcuguaugaccuguguuuc

SEQ ID NO: 76697 - RNA, 19 nt, Artificial Sequence
  Description of Artificial Sequence: Synthetic oligonucleotide
uagauccccuaaugugaau

SEQ ID NO: 76698 - RNA, 19 nt, Artificial Sequence
  Description of Artificial Sequence: Synthetic oligonucleotide
guaccucuuuauaauagau

SEQ ID NO: 76699 - RNA, 19 nt, Artificial Sequence
  Description of Artificial Sequence: Synthetic oligonucleotide
ugcggagccacuggaugaa

SEQ ID NO: 76700 - RNA, 19 nt, Artificial Sequence
  Description of Artificial Sequence: Synthetic oligonucleotide
guugaagguaugugacccu

SEQ ID NO: 76701 - RNA, 19 nt, Artificial Sequence
  Description of Artificial Sequence: Synthetic oligonucleotide
gaaaugggaccaagugcaa

SEQ ID NO: 76702 - RNA, 19 nt, Artificial Sequence
  Description of Artificial Sequence: Synthetic oligonucleotide
gaucgaucucucucaacuu

SEQ ID NO: 76703 - RNA, 19 nt, Artificial Sequence
  Description of Artificial Sequence: Synthetic oligonucleotide
ggcaaguuucaaugaaugu

SEQ ID NO: 76704 - RNA, 19 nt, Artificial Sequence
  Description of Artificial Sequence: Synthetic oligonucleotide
augcgauuucgcuguggau

SEQ ID NO: 76705 - RNA, 19 nt, Artificial Sequence
  Description of Artificial Sequence: Synthetic oligonucleotide
gagggagcuaggagggaca

SEQ ID NO: 76706 - RNA, 19 nt, Artificial Sequence
  Description of Artificial Sequence: Synthetic oligonucleotide
auugaccgccauuccccaa

SEQ ID NO: 76707 - RNA, 19 nt, Artificial Sequence
  Description of Artificial Sequence: Synthetic oligonucleotide
agcccggaaagagcauguc

SEQ ID NO: 76708 - RNA, 19 nt, Artificial Sequence
  Description of Artificial Sequence: Synthetic oligonucleotide
gcugguuucuaccgagcuc

SEQ ID NO: 76709 - RNA, 19 nt, Artificial Sequence
  Description of Artificial Sequence: Synthetic oligonucleotide
accgagcuccaggccacac

SEQ ID NO: 76710 - RNA, 19 nt, Artificial Sequence
  Description of Artificial Sequence: Synthetic oligonucleotide
ccgcuuaaaugaugcuugc

SEQ ID NO: 76711 - RNA, 19 nt, Artificial Sequence
  Description of Artificial Sequence: Synthetic oligonucleotide
gucgugccucgacaggauc

SEQ ID NO: 76712 - RNA, 19 nt, Artificial Sequence
  Description of Artificial Sequence: Synthetic oligonucleotide
cuacugucauauggcuuuc

SEQ ID NO: 76713 - RNA, 19 nt, Artificial Sequence
  Description of Artificial Sequence: Synthetic oligonucleotide
ccggaaaggaauggaucgg

SEQ ID NO: 76714 - RNA, 19 nt, Artificial Sequence
  Description of Artificial Sequence: Synthetic oligonucleotide
cugaagcauagagcacuuc

SEQ ID NO: 76715 - RNA, 19 nt, Artificial Sequence
  Description of Artificial Sequence: Synthetic oligonucleotide
ggugaaguugaagguaugu

SEQ ID NO: 76716 - RNA, 19 nt, Artificial Sequence
  Description of Artificial Sequence: Synthetic oligonucleotide
cacgagagccugggaagug

SEQ ID NO: 76717 - RNA, 19 nt, Artificial Sequence
  Description of Artificial Sequence: Synthetic oligonucleotide
gguguacuauuuaguaaaa

SEQ ID NO: 76718 - RNA, 19 nt, Artificial Sequence
  Description of Artificial Sequence: Synthetic oligonucleotide
ugguggugguggugguggu

SEQ ID NO: 76719 - RNA, 19 nt, Artificial Sequence
  Description of Artificial Sequence: Synthetic oligonucleotide
gcucguugagcuguaugac

SEQ ID NO: 76720 - RNA, 19 nt, Artificial Sequence
  Description of Artificial Sequence: Synthetic oligonucleotide
ccuagguauuacugagauc

SEQ ID NO: 76721 - RNA, 19 nt, Artificial Sequence
  Description of Artificial Sequence: Synthetic oligonucleotide
auccuaccaugcgacaaua

SEQ ID NO: 76722 - RNA, 19 nt, Artificial Sequence
  Description of Artificial Sequence: Synthetic oligonucleotide
cuaaugcagcccggaaaga

SEQ ID NO: 76723 - RNA, 19 nt, Artificial Sequence
  Description of Artificial Sequence: Synthetic oligonucleotide
guaggaccgcucccgcgca

SEQ ID NO: 76724 - RNA, 19 nt, Artificial Sequence
  Description of Artificial Sequence: Synthetic oligonucleotide
gucauuacuuaucgauauu

SEQ ID NO: 76725 - RNA, 19 nt, Artificial Sequence
  Description of Artificial Sequence: Synthetic oligonucleotide
gguuucuaccgagcuccag

SEQ ID NO: 76726 - RNA, 19 nt, Artificial Sequence
  Description of Artificial Sequence: Synthetic oligonucleotide
ccugguacccauucacaga

SEQ ID NO: 76727 - RNA, 19 nt, Artificial Sequence
  Description of Artificial Sequence: Synthetic oligonucleotide
gcgcacagugugcuuccgg

SEQ ID NO: 76728 - RNA, 19 nt, Artificial Sequence
  Description of Artificial Sequence: Synthetic oligonucleotide
uaggaccgcucccgcgcac

SEQ ID NO: 76729 - RNA, 19 nt, Artificial Sequence
  Description of Artificial Sequence: Synthetic oligonucleotide
gcuauccuaccaugcgaca

SEQ ID NO: 76730 - RNA, 19 nt, Artificial Sequence
  Description of Artificial Sequence: Synthetic oligonucleotide
gcuaggagggacaccaucu

SEQ ID NO: 76731 - RNA, 19 nt, Artificial Sequence
  Description of Artificial Sequence: Synthetic oligonucleotide
auaggagguuagacucgca

SEQ ID NO: 76732 - RNA, 19 nt, Artificial Sequence
  Description of Artificial Sequence: Synthetic oligonucleotide
caacauucauccgcuuaaa

SEQ ID NO: 76733 - RNA, 19 nt, Artificial Sequence
  Description of Artificial Sequence: Synthetic oligonucleotide
gggcacauuuguuucuugu

SEQ ID NO: 76734 - RNA, 19 nt, Artificial Sequence
  Description of Artificial Sequence: Synthetic oligonucleotide
ggaagugucaagagcugcu

SEQ ID NO: 76735 - RNA, 19 nt, Artificial Sequence
  Description of Artificial Sequence: Synthetic oligonucleotide
gcuggccaaaugaccagug

SEQ ID NO: 76736 - RNA, 19 nt, Artificial Sequence
  Description of Artificial Sequence: Synthetic oligonucleotide
augcgacaauaggugggca

SEQ ID NO: 76737 - RNA, 19 nt, Artificial Sequence
  Description of Artificial Sequence: Synthetic oligonucleotide
gugacccuaugaccucgca

SEQ ID NO: 76738 - RNA, 19 nt, Artificial Sequence
  Description of Artificial Sequence: Synthetic oligonucleotide
acggaauaauggagacacu

SEQ ID NO: 76739 - RNA, 19 nt, Artificial Sequence
  Description of Artificial Sequence: Synthetic oligonucleotide
caacuucccgaaguagaaa

SEQ ID NO: 76740 - RNA, 19 nt, Artificial Sequence
  Description of Artificial Sequence: Synthetic oligonucleotide
uggugguggugguggugau

SEQ ID NO: 76741 - RNA, 19 nt, Artificial Sequence
  Description of Artificial Sequence: Synthetic oligonucleotide
cagaugcgauuucgcugug

SEQ ID NO: 76742 - RNA, 19 nt, Artificial Sequence
  Description of Artificial Sequence: Synthetic oligonucleotide
gggaguuugcauggugaga

SEQ ID NO: 76743 - RNA, 19 nt, Artificial Sequence
  Description of Artificial Sequence: Synthetic oligonucleotide
ggaaggaguagaaccaauu

SEQ ID NO: 76744 - RNA, 19 nt, Artificial Sequence
  Description of Artificial Sequence: Synthetic oligonucleotide
gcaaagcuucaaugcuaga

SEQ ID NO: 76745 - RNA, 19 nt, Artificial Sequence
  Description of Artificial Sequence: Synthetic oligonucleotide
cgucugaagcauagagcac

SEQ ID NO: 76746 - RNA, 19 nt, Artificial Sequence
  Description of Artificial Sequence: Synthetic oligonucleotide
ggagggaaucgugguuccc

SEQ ID NO: 76747 - RNA, 19 nt, Artificial Sequence
  Description of Artificial Sequence: Synthetic oligonucleotide
gguggugguggugguggug

SEQ ID NO: 76748 - RNA, 19 nt, Artificial Sequence
  Description of Artificial Sequence: Synthetic oligonucleotide
ggaccgcucccgcgcacag

SEQ ID NO: 76749 - RNA, 19 nt, Artificial Sequence
  Description of Artificial Sequence: Synthetic oligonucleotide
accaggcgugggaggaugu

SEQ ID NO: 76750 - RNA, 19 nt, Artificial Sequence
  Description of Artificial Sequence: Synthetic oligonucleotide
cccuagguauuacugagau

SEQ ID NO: 76751 - RNA, 19 nt, Artificial Sequence
  Description of Artificial Sequence: Synthetic oligonucleotide
ggaucggccccguuauccu

SEQ ID NO: 76752 - RNA, 19 nt, Artificial Sequence
  Description of Artificial Sequence: Synthetic oligonucleotide
gguuagacucgcaaacauu

SEQ ID NO: 76753 - RNA, 19 nt, Artificial Sequence
  Description of Artificial Sequence: Synthetic oligonucleotide
ccgcgcacagugugcuucc

SEQ ID NO: 76754 - RNA, 19 nt, Artificial Sequence
  Description of Artificial Sequence: Synthetic oligonucleotide
gcuuuaugguguacuauuu

SEQ ID NO: 76755 - RNA, 19 nt, Artificial Sequence
  Description of Artificial Sequence: Synthetic oligonucleotide
gcucccgcgcacagugugc

SEQ ID NO: 76756 - RNA, 19 nt, Artificial Sequence
  Description of Artificial Sequence: Synthetic oligonucleotide
caacgcaagucaaguuauu

SEQ ID NO: 76757 - RNA, 19 nt, Artificial Sequence
  Description of Artificial Sequence: Synthetic oligonucleotide
ggcuggcagaugcgauuuc

SEQ ID NO: 76758 - RNA, 19 nt, Artificial Sequence
  Description of Artificial Sequence: Synthetic oligonucleotide
cgaaugcaucuuggcaaag

SEQ ID NO: 76759 - RNA, 19 nt, Artificial Sequence
  Description of Artificial Sequence: Synthetic oligonucleotide
gcggagccacuggaugaag

SEQ ID NO: 76760 - RNA, 19 nt, Artificial Sequence
  Description of Artificial Sequence: Synthetic oligonucleotide
cucccgcgcacagugugcu

SEQ ID NO: 76761 - RNA, 19 nt, Artificial Sequence
  Description of Artificial Sequence: Synthetic oligonucleotide
cccuaugaccucgcaggca

SEQ ID NO: 76762 - RNA, 19 nt, Artificial Sequence
  Description of Artificial Sequence: Synthetic oligonucleotide
ccggaaagagcauguccau

SEQ ID NO: 76763 - RNA, 19 nt, Artificial Sequence
  Description of Artificial Sequence: Synthetic oligonucleotide
gaccgcucccgcgcacagu

SEQ ID NO: 76764 - RNA, 19 nt, Artificial Sequence
  Description of Artificial Sequence: Synthetic oligonucleotide
ggguggugguggugguggu

SEQ ID NO: 76765 - RNA, 19 nt, Artificial Sequence
  Description of Artificial Sequence: Synthetic oligonucleotide
cgcgcacagugugcuuccg

SEQ ID NO: 76766 - RNA, 19 nt, Artificial Sequence
  Description of Artificial Sequence: Synthetic oligonucleotide
ggaauggaucggccccguu

SEQ ID NO: 76767 - RNA, 19 nt, Artificial Sequence
  Description of Artificial Sequence: Synthetic oligonucleotide
ccugcucguugagcuguau

SEQ ID NO: 76768 - RNA, 19 nt, Artificial Sequence
  Description of Artificial Sequence: Synthetic oligonucleotide
aguuauagugcuuagagcc

SEQ ID NO: 76769 - RNA, 19 nt, Artificial Sequence
  Description of Artificial Sequence: Synthetic oligonucleotide
uuaauuaggcgcuagaaag

SEQ ID NO: 76770 - RNA, 19 nt, Artificial Sequence
  Description of Artificial Sequence: Synthetic oligonucleotide
aauccuagacacuaggaac

SEQ ID NO: 76771 - RNA, 19 nt, Artificial Sequence
  Description of Artificial Sequence: Synthetic oligonucleotide
uaaguuauagugcuuagag

SEQ ID NO: 76772 - RNA, 19 nt, Artificial Sequence
  Description of Artificial Sequence: Synthetic oligonucleotide
gaaucuagaaccuuggacc

SEQ ID NO: 76773 - RNA, 19 nt, Artificial Sequence
  Description of Artificial Sequence: Synthetic oligonucleotide
aacccucucgaucagaacc

SEQ ID NO: 76774 - RNA, 19 nt, Artificial Sequence
  Description of Artificial Sequence: Synthetic oligonucleotide
aguacauaccaccagggcc

SEQ ID NO: 76775 - RNA, 19 nt, Artificial Sequence
  Description of Artificial Sequence: Synthetic oligonucleotide
aaaaucuagagccacagaa

SEQ ID NO: 76776 - RNA, 19 nt, Artificial Sequence
  Description of Artificial Sequence: Synthetic oligonucleotide
aaguuauagugcuuagagc

SEQ ID NO: 76777 - RNA, 19 nt, Artificial Sequence
  Description of Artificial Sequence: Synthetic oligonucleotide
auguuaaugccuccgaggc

SEQ ID NO: 76778 - RNA, 19 nt, Artificial Sequence
  Description of Artificial Sequence: Synthetic oligonucleotide
agaaucuagaaccuuggac

SEQ ID NO: 76779 - RNA, 19 nt, Artificial Sequence
  Description of Artificial Sequence: Synthetic oligonucleotide
aauuaggcgcuagaaaggc

SEQ ID NO: 76780 - RNA, 19 nt, Artificial Sequence
  Description of Artificial Sequence: Synthetic oligonucleotide
augguuagaacuuuggugu

SEQ ID NO: 76781 - RNA, 19 nt, Artificial Sequence
  Description of Artificial Sequence: Synthetic oligonucleotide
acaaccgaaaaccaugggg

SEQ ID NO: 76782 - RNA, 19 nt, Artificial Sequence
  Description of Artificial Sequence: Synthetic oligonucleotide
uuaggcgcuagaaaggcgg

SEQ ID NO: 76783 - RNA, 19 nt, Artificial Sequence
  Description of Artificial Sequence: Synthetic oligonucleotide
ugccuuacaaccuucacgc

SEQ ID NO: 76784 - RNA, 19 nt, Artificial Sequence
  Description of Artificial Sequence: Synthetic oligonucleotide
uacaacaagagccugaauu

SEQ ID NO: 76785 - RNA, 19 nt, Artificial Sequence
  Description of Artificial Sequence: Synthetic oligonucleotide
guagucguaaaucucacug

SEQ ID NO: 76786 - RNA, 19 nt, Artificial Sequence
  Description of Artificial Sequence: Synthetic oligonucleotide
aucgcagagcuguacaacc

SEQ ID NO: 76787 - RNA, 19 nt, Artificial Sequence
  Description of Artificial Sequence: Synthetic oligonucleotide
agcuuagaaacucaggcug

SEQ ID NO: 76788 - RNA, 19 nt, Artificial Sequence
  Description of Artificial Sequence: Synthetic oligonucleotide
aaucucuugguacucagau

SEQ ID NO: 76789 - RNA, 19 nt, Artificial Sequence
  Description of Artificial Sequence: Synthetic oligonucleotide
ucuaugauguuaaugccuc

SEQ ID NO: 76790 - RNA, 19 nt, Artificial Sequence
  Description of Artificial Sequence: Synthetic oligonucleotide
aaucuagaaccuuggacca

SEQ ID NO: 76791 - RNA, 19 nt, Artificial Sequence
  Description of Artificial Sequence: Synthetic oligonucleotide
uggguaagcggguaaaugc

SEQ ID NO: 76792 - RNA, 19 nt, Artificial Sequence
  Description of Artificial Sequence: Synthetic oligonucleotide
uauuaugacacggagcgcu

SEQ ID NO: 76793 - RNA, 19 nt, Artificial Sequence
  Description of Artificial Sequence: Synthetic oligonucleotide
uuucaggcgauuucccugg

SEQ ID NO: 76794 - RNA, 19 nt, Artificial Sequence
  Description of Artificial Sequence: Synthetic oligonucleotide
guaaaucucacuguucucc

SEQ ID NO: 76795 - RNA, 19 nt, Artificial Sequence
  Description of Artificial Sequence: Synthetic oligonucleotide
acugugagccucuuaggac

SEQ ID NO: 76796 - RNA, 19 nt, Artificial Sequence
  Description of Artificial Sequence: Synthetic oligonucleotide
gacuauaggacuuccggac

SEQ ID NO: 76797 - RNA, 19 nt, Artificial Sequence
  Description of Artificial Sequence: Synthetic oligonucleotide
agugcuuagagccuuaaua

SEQ ID NO: 76798 - RNA, 19 nt, Artificial Sequence
  Description of Artificial Sequence: Synthetic oligonucleotide
uuaucagccaggucuaaga

SEQ ID NO: 76799 - RNA, 19 nt, Artificial Sequence
  Description of Artificial Sequence: Synthetic oligonucleotide
agcauuauggucuggagua

SEQ ID NO: 76800 - RNA, 19 nt, Artificial Sequence
  Description of Artificial Sequence: Synthetic oligonucleotide
aagaugguccgucacuuga

SEQ ID NO: 76801 - RNA, 19 nt, Artificial Sequence
  Description of Artificial Sequence: Synthetic oligonucleotide
gaugaggacacaggcagcg

SEQ ID NO: 76802 - RNA, 19 nt, Artificial Sequence
  Description of Artificial Sequence: Synthetic oligonucleotide
aaccuucacgccuagaauu

SEQ ID NO: 76803 - RNA, 19 nt, Artificial Sequence
  Description of Artificial Sequence: Synthetic oligonucleotide
augccgaucuaccaugacg

SEQ ID NO: 76804 - RNA, 19 nt, Artificial Sequence
  Description of Artificial Sequence: Synthetic oligonucleotide
guuuaaugaucuguaaccc

SEQ ID NO: 76805 - RNA, 19 nt, Artificial Sequence
  Description of Artificial Sequence: Synthetic oligonucleotide
uugguacucagauauucca

SEQ ID NO: 76806 - RNA, 19 nt, Artificial Sequence
  Description of Artificial Sequence: Synthetic oligonucleotide
acgccuagaauucuuuauc

SEQ ID NO: 76807 - RNA, 19 nt, Artificial Sequence
  Description of Artificial Sequence: Synthetic oligonucleotide
aaggacguagcguccagca

SEQ ID NO: 76808 - RNA, 19 nt, Artificial Sequence
  Description of Artificial Sequence: Synthetic oligonucleotide
cuuaugccgaucuaccaug

SEQ ID NO: 76809 - RNA, 19 nt, Artificial Sequence
  Description of Artificial Sequence: Synthetic oligonucleotide
gaagcauuauggucuggag

SEQ ID NO: 76810 - RNA, 19 nt, Artificial Sequence
  Description of Artificial Sequence: Synthetic oligonucleotide
uccaugguuggcucgaaca

SEQ ID NO: 76811 - RNA, 19 nt, Artificial Sequence
  Description of Artificial Sequence: Synthetic oligonucleotide
gagccuucggacaaguggg

SEQ ID NO: 76812 - RNA, 19 nt, Artificial Sequence
  Description of Artificial Sequence: Synthetic oligonucleotide
guacggaagaccuuccagc

SEQ ID NO: 76813 - RNA, 19 nt, Artificial Sequence
  Description of Artificial Sequence: Synthetic oligonucleotide
ugcuuagagccuuaauaug

SEQ ID NO: 76814 - RNA, 19 nt, Artificial Sequence
  Description of Artificial Sequence: Synthetic oligonucleotide
cuaaggccaccuuaugccg

SEQ ID NO: 76815 - RNA, 19 nt, Artificial Sequence
  Description of Artificial Sequence: Synthetic oligonucleotide
agcgcuuacuguuaaauuu

SEQ ID NO: 76816 - RNA, 19 nt, Artificial Sequence
  Description of Artificial Sequence: Synthetic oligonucleotide
agagccugaauuugagaag

SEQ ID NO: 76817 - RNA, 19 nt, Artificial Sequence
  Description of Artificial Sequence: Synthetic oligonucleotide
gaauccuagacacuaggaa

SEQ ID NO: 76818 - RNA, 19 nt, Artificial Sequence
  Description of Artificial Sequence: Synthetic oligonucleotide
cuuggauccugagagggcg

SEQ ID NO: 76819 - RNA, 19 nt, Artificial Sequence
  Description of Artificial Sequence: Synthetic oligonucleotide
aaaggacguagcguccagc

SEQ ID NO: 76820 - RNA, 19 nt, Artificial Sequence
  Description of Artificial Sequence: Synthetic oligonucleotide
acuguuaaauuugggaaca

SEQ ID NO: 76821 - RNA, 19 nt, Artificial Sequence
  Description of Artificial Sequence: Synthetic oligonucleotide
uuaacugaccaucgcugga

SEQ ID NO: 76822 - RNA, 19 nt, Artificial Sequence
  Description of Artificial Sequence: Synthetic oligonucleotide
ucuaccaugacgucucgua

SEQ ID NO: 76823 - RNA, 19 nt, Artificial Sequence
  Description of Artificial Sequence: Synthetic oligonucleotide
gaggcuuuaacugaccauc

SEQ ID NO: 76824 - RNA, 19 nt, Artificial Sequence
  Description of Artificial Sequence: Synthetic oligonucleotide
uacaaccgaaaaccauggg

SEQ ID NO: 76825 - RNA, 19 nt, Artificial Sequence
  Description of Artificial Sequence: Synthetic oligonucleotide
ugaagcauuauggucugga

SEQ ID NO: 76826 - RNA, 19 nt, Artificial Sequence
  Description of Artificial Sequence: Synthetic oligonucleotide
gucaaccucagucugugug

SEQ ID NO: 76827 - RNA, 19 nt, Artificial Sequence
  Description of Artificial Sequence: Synthetic oligonucleotide
cauaugauguggaaucuga

SEQ ID NO: 76828 - RNA, 19 nt, Artificial Sequence
  Description of Artificial Sequence: Synthetic oligonucleotide
uucguaccuaacauucuac

SEQ ID NO: 76829 - RNA, 19 nt, Artificial Sequence
  Description of Artificial Sequence: Synthetic oligonucleotide
cugacuaccaguucaccuc

SEQ ID NO: 76830 - RNA, 19 nt, Artificial Sequence
  Description of Artificial Sequence: Synthetic oligonucleotide
ucgcagagcuguacaaccg

SEQ ID NO: 76831 - RNA, 19 nt, Artificial Sequence
  Description of Artificial Sequence: Synthetic oligonucleotide
ugguccggcgacuauagga

SEQ ID NO: 76832 - RNA, 19 nt, Artificial Sequence
  Description of Artificial Sequence: Synthetic oligonucleotide
accacuaccgcaaacgaug

SEQ ID NO: 76833 - RNA, 19 nt, Artificial Sequence
  Description of Artificial Sequence: Synthetic oligonucleotide
ucguaccuaacauucuaca

SEQ ID NO: 76834 - RNA, 19 nt, Artificial Sequence
  Description of Artificial Sequence: Synthetic oligonucleotide
ucauauagugccugagauc

SEQ ID NO: 76835 - RNA, 19 nt, Artificial Sequence
  Description of Artificial Sequence: Synthetic oligonucleotide
guuucaggcgauuucccug

SEQ ID NO: 76836 - RNA, 19 nt, Artificial Sequence
  Description of Artificial Sequence: Synthetic oligonucleotide
ucaaccucagucugugugu

SEQ ID NO: 76837 - RNA, 19 nt, Artificial Sequence
  Description of Artificial Sequence: Synthetic oligonucleotide
guggaagacugucucaggc

SEQ ID NO: 76838 - RNA, 19 nt, Artificial Sequence
  Description of Artificial Sequence: Synthetic oligonucleotide
ucuucgcugaugcccaggc

SEQ ID NO: 76839 - RNA, 19 nt, Artificial Sequence
  Description of Artificial Sequence: Synthetic oligonucleotide
guagcugugcgggaggugg

SEQ ID NO: 76840 - RNA, 19 nt, Artificial Sequence
  Description of Artificial Sequence: Synthetic oligonucleotide
accgcaaacgaugccaaac

SEQ ID NO: 76841 - RNA, 19 nt, Artificial Sequence
  Description of Artificial Sequence: Synthetic oligonucleotide
aucacaucauagcuuagaa

SEQ ID NO: 76842 - RNA, 19 nt, Artificial Sequence
  Description of Artificial Sequence: Synthetic oligonucleotide
ucacucaccagauggugga

SEQ ID NO: 76843 - RNA, 19 nt, Artificial Sequence
  Description of Artificial Sequence: Synthetic oligonucleotide
acuuggccggucucgaggg

SEQ ID NO: 76844 - RNA, 19 nt, Artificial Sequence
  Description of Artificial Sequence: Synthetic oligonucleotide
aaaucuagagccacagaau

SEQ ID NO: 76845 - RNA, 19 nt, Artificial Sequence
  Description of Artificial Sequence: Synthetic oligonucleotide
cucaauggcaauccacuug

SEQ ID NO: 76846 - RNA, 19 nt, Artificial Sequence
  Description of Artificial Sequence: Synthetic oligonucleotide
cuuuagaguuuaaugaucu

SEQ ID NO: 76847 - RNA, 19 nt, Artificial Sequence
  Description of Artificial Sequence: Synthetic oligonucleotide
agaaccuagagguguccag

SEQ ID NO: 76848 - RNA, 19 nt, Artificial Sequence
  Description of Artificial Sequence: Synthetic oligonucleotide
agcgaucucccacauuguc

SEQ ID NO: 76849 - RNA, 19 nt, Artificial Sequence
  Description of Artificial Sequence: Synthetic oligonucleotide
ugacugacgacuuuccauu

SEQ ID NO: 76850 - RNA, 19 nt, Artificial Sequence
  Description of Artificial Sequence: Synthetic oligonucleotide
agguacaccaugcacuggu

SEQ ID NO: 76851 - RNA, 19 nt, Artificial Sequence
  Description of Artificial Sequence: Synthetic oligonucleotide
ugcaaaacuuggccggucu

SEQ ID NO: 76852 - RNA, 19 nt, Artificial Sequence
  Description of Artificial Sequence: Synthetic oligonucleotide
aacaagagccugaauuuga

SEQ ID NO: 76853 - RNA, 19 nt, Artificial Sequence
  Description of Artificial Sequence: Synthetic oligonucleotide
acuaccgcaaacgaugcca

SEQ ID NO: 76854 - RNA, 19 nt, Artificial Sequence
  Description of Artificial Sequence: Synthetic oligonucleotide
acuauaggacuuccggaca

SEQ ID NO: 76855 - RNA, 19 nt, Artificial Sequence
  Description of Artificial Sequence: Synthetic oligonucleotide
gcgacuauaggacuuccgg

SEQ ID NO: 76856 - RNA, 19 nt, Artificial Sequence
  Description of Artificial Sequence: Synthetic oligonucleotide
caccuuaugccgaucuacc

SEQ ID NO: 76857 - RNA, 19 nt, Artificial Sequence
  Description of Artificial Sequence: Synthetic oligonucleotide
uaugacacggagcgcuuac

SEQ ID NO: 76858 - RNA, 19 nt, Artificial Sequence
  Description of Artificial Sequence: Synthetic oligonucleotide
aguuuucgcccagaggcac

SEQ ID NO: 76859 - RNA, 19 nt, Artificial Sequence
  Description of Artificial Sequence: Synthetic oligonucleotide
cuauaggacuuccggacac

SEQ ID NO: 76860 - RNA, 19 nt, Artificial Sequence
  Description of Artificial Sequence: Synthetic oligonucleotide
cagugccuagcuuggaucc

SEQ ID NO: 76861 - RNA, 19 nt, Artificial Sequence
  Description of Artificial Sequence: Synthetic oligonucleotide
uauaggacuuccggacacg

SEQ ID NO: 76862 - RNA, 19 nt, Artificial Sequence
  Description of Artificial Sequence: Synthetic oligonucleotide
ucucgaaaccacguggaga

SEQ ID NO: 76863 - RNA, 19 nt, Artificial Sequence
  Description of Artificial Sequence: Synthetic oligonucleotide
cacgauaccugacuaccag

SEQ ID NO: 76864 - RNA, 19 nt, Artificial Sequence
  Description of Artificial Sequence: Synthetic oligonucleotide
uguuaaugccuccgaggcu

SEQ ID NO: 76865 - RNA, 19 nt, Artificial Sequence
  Description of Artificial Sequence: Synthetic oligonucleotide
uuaugccgaucuaccauga

SEQ ID NO: 76866 - RNA, 19 nt, Artificial Sequence
  Description of Artificial Sequence: Synthetic oligonucleotide
guacauaccaccagggcca

SEQ ID NO: 76867 - RNA, 19 nt, Artificial Sequence
  Description of Artificial Sequence: Synthetic oligonucleotide
uuaucgcagagcuguacaa

SEQ ID NO: 76868 - RNA, 19 nt, Artificial Sequence
  Description of Artificial Sequence: Synthetic oligonucleotide
gcuaccucuagcuccgugg

SEQ ID NO: 76869 - RNA, 19 nt, Artificial Sequence
  Description of Artificial Sequence: Synthetic oligonucleotide
augauguuaaugccuccga

SEQ ID NO: 76870 - RNA, 19 nt, Artificial Sequence
  Description of Artificial Sequence: Synthetic oligonucleotide
accggugauauuccccggg

SEQ ID NO: 76871 - RNA, 19 nt, Artificial Sequence
  Description of Artificial Sequence: Synthetic oligonucleotide
cuaccaugacgucucguag

SEQ ID NO: 76872 - RNA, 19 nt, Artificial Sequence
  Description of Artificial Sequence: Synthetic oligonucleotide
uaccaugacgucucguagu

SEQ ID NO: 76873 - RNA, 19 nt, Artificial Sequence
  Description of Artificial Sequence: Synthetic oligonucleotide
agaguagguucacgggauc

SEQ ID NO: 76874 - RNA, 19 nt, Artificial Sequence
  Description of Artificial Sequence: Synthetic oligonucleotide
cuaugauguuaaugccucc

SEQ ID NO: 76875 - RNA, 19 nt, Artificial Sequence
  Description of Artificial Sequence: Synthetic oligonucleotide
caguacauaccaccagggc

SEQ ID NO: 76876 - RNA, 19 nt, Artificial Sequence
  Description of Artificial Sequence: Synthetic oligonucleotide
gaacaccuccccauagcgg

SEQ ID NO: 76877 - RNA, 19 nt, Artificial Sequence
  Description of Artificial Sequence: Synthetic oligonucleotide
gacaaguggguccaugucu

SEQ ID NO: 76878 - RNA, 19 nt, Artificial Sequence
  Description of Artificial Sequence: Synthetic oligonucleotide
gauagggagucuggccucg

SEQ ID NO: 76879 - RNA, 19 nt, Artificial Sequence
  Description of Artificial Sequence: Synthetic oligonucleotide
cuuggcuucguaccuaaca

SEQ ID NO: 76880 - RNA, 19 nt, Artificial Sequence
  Description of Artificial Sequence: Synthetic oligonucleotide
cggaaagcagcacagaacc

SEQ ID NO: 76881 - RNA, 19 nt, Artificial Sequence
  Description of Artificial Sequence: Synthetic oligonucleotide
augucuacaacaagagccu

SEQ ID NO: 76882 - RNA, 19 nt, Artificial Sequence
  Description of Artificial Sequence: Synthetic oligonucleotide
cgguguaugaaucucuugg

SEQ ID NO: 76883 - RNA, 19 nt, Artificial Sequence
  Description of Artificial Sequence: Synthetic oligonucleotide
gaagaugguccgucacuug

SEQ ID NO: 76884 - RNA, 19 nt, Artificial Sequence
  Description of Artificial Sequence: Synthetic oligonucleotide
uuggaccacauucuagguu

SEQ ID NO: 76885 - RNA, 19 nt, Artificial Sequence
  Description of Artificial Sequence: Synthetic oligonucleotide
uaccugacuaccaguucac

SEQ ID NO: 76886 - RNA, 19 nt, Artificial Sequence
  Description of Artificial Sequence: Synthetic oligonucleotide
aguagguucacgggaucag

SEQ ID NO: 76887 - RNA, 19 nt, Artificial Sequence
  Description of Artificial Sequence: Synthetic oligonucleotide
cucgaagccacaucaccuc

SEQ ID NO: 76888 - RNA, 19 nt, Artificial Sequence
  Description of Artificial Sequence: Synthetic oligonucleotide
acugacgacuuuccauuca

SEQ ID NO: 76889 - RNA, 19 nt, Artificial Sequence
  Description of Artificial Sequence: Synthetic oligonucleotide
uccucgggacaccacuacc

SEQ ID NO: 76890 - RNA, 19 nt, Artificial Sequence
  Description of Artificial Sequence: Synthetic oligonucleotide
accuuaugccgaucuacca

SEQ ID NO: 76891 - RNA, 19 nt, Artificial Sequence
  Description of Artificial Sequence: Synthetic oligonucleotide
gaucuaccaugacgucucg

SEQ ID NO: 76892 - RNA, 19 nt, Artificial Sequence
  Description of Artificial Sequence: Synthetic oligonucleotide
uaucgcagagcuguacaac

SEQ ID NO: 76893 - RNA, 19 nt, Artificial Sequence
  Description of Artificial Sequence: Synthetic oligonucleotide
agaauccuagacacuagga

SEQ ID NO: 76894 - RNA, 19 nt, Artificial Sequence
  Description of Artificial Sequence: Synthetic oligonucleotide
gacaaaggacguagcgucc

SEQ ID NO: 76895 - RNA, 19 nt, Artificial Sequence
  Description of Artificial Sequence: Synthetic oligonucleotide
cugagaucaagaggaggcc

SEQ ID NO: 76896 - RNA, 19 nt, Artificial Sequence
  Description of Artificial Sequence: Synthetic oligonucleotide
ggcuggagacucuuaaagc

SEQ ID NO: 76897 - RNA, 19 nt, Artificial Sequence
  Description of Artificial Sequence: Synthetic oligonucleotide
uaacugaccaucgcuggaa

SEQ ID NO: 76898 - RNA, 19 nt, Artificial Sequence
  Description of Artificial Sequence: Synthetic oligonucleotide
auuaggcgcuagaaaggcg

SEQ ID NO: 76899 - RNA, 19 nt, Artificial Sequence
  Description of Artificial Sequence: Synthetic oligonucleotide
aggcuuuaacugaccaucg

SEQ ID NO: 76900 - RNA, 19 nt, Artificial Sequence
  Description of Artificial Sequence: Synthetic oligonucleotide
gugcuuagagccuuaauau

SEQ ID NO: 76901 - RNA, 19 nt, Artificial Sequence
  Description of Artificial Sequence: Synthetic oligonucleotide
guacaccaugcacugguac

SEQ ID NO: 76902 - RNA, 19 nt, Artificial Sequence
  Description of Artificial Sequence: Synthetic oligonucleotide
agguuaucaucacaucaua

SEQ ID NO: 76903 - RNA, 19 nt, Artificial Sequence
  Description of Artificial Sequence: Synthetic oligonucleotide
caaccuuuaauuaggcgcu

SEQ ID NO: 76904 - RNA, 19 nt, Artificial Sequence
  Description of Artificial Sequence: Synthetic oligonucleotide
uuacaaccuucacgccuag

SEQ ID NO: 76905 - RNA, 19 nt, Artificial Sequence
  Description of Artificial Sequence: Synthetic oligonucleotide
aguaguccccguuguagau

SEQ ID NO: 76906 - RNA, 19 nt, Artificial Sequence
  Description of Artificial Sequence: Synthetic oligonucleotide
ugucuacaacaagagccug

SEQ ID NO: 76907 - RNA, 19 nt, Artificial Sequence
  Description of Artificial Sequence: Synthetic oligonucleotide
gaaguacggaagaccuucc

SEQ ID NO: 76908 - RNA, 19 nt, Artificial Sequence
  Description of Artificial Sequence: Synthetic oligonucleotide
ggaaguacggaagaccuuc

SEQ ID NO: 76909 - RNA, 19 nt, Artificial Sequence
  Description of Artificial Sequence: Synthetic oligonucleotide
ugguuagaacuuugguguc

SEQ ID NO: 76910 - RNA, 19 nt, Artificial Sequence
  Description of Artificial Sequence: Synthetic oligonucleotide
caucgcuggaaucucagaa

SEQ ID NO: 76911 - RNA, 19 nt, Artificial Sequence
  Description of Artificial Sequence: Synthetic oligonucleotide
acuuccggacacgauaccu

SEQ ID NO: 76912 - RNA, 19 nt, Artificial Sequence
  Description of Artificial Sequence: Synthetic oligonucleotide
uccccguuguagaucuucu

SEQ ID NO: 76913 - RNA, 19 nt, Artificial Sequence
  Description of Artificial Sequence: Synthetic oligonucleotide
uaugccgaucuaccaugac

SEQ ID NO: 76914 - RNA, 19 nt, Artificial Sequence
  Description of Artificial Sequence: Synthetic oligonucleotide
cuuuaucgcagagcuguac

SEQ ID NO: 76915 - RNA, 19 nt, Artificial Sequence
  Description of Artificial Sequence: Synthetic oligonucleotide
cuaaguuauagugcuuaga

SEQ ID NO: 76916 - RNA, 19 nt, Artificial Sequence
  Description of Artificial Sequence: Synthetic oligonucleotide
agcauaugauguggaaucu

SEQ ID NO: 76917 - RNA, 19 nt, Artificial Sequence
  Description of Artificial Sequence: Synthetic oligonucleotide
cucgggacaccacuaccgc

SEQ ID NO: 76918 - RNA, 19 nt, Artificial Sequence
  Description of Artificial Sequence: Synthetic oligonucleotide
gucucgaaaccacguggag

SEQ ID NO: 76919 - RNA, 19 nt, Artificial Sequence
  Description of Artificial Sequence: Synthetic oligonucleotide
cucgaaaccacguggagau

SEQ ID NO: 76920 - RNA, 19 nt, Artificial Sequence
  Description of Artificial Sequence: Synthetic oligonucleotide
guauucuccaaccuuuaau

SEQ ID NO: 76921 - RNA, 19 nt, Artificial Sequence
  Description of Artificial Sequence: Synthetic oligonucleotide
gguccguccuuccagguac

SEQ ID NO: 76922 - RNA, 19 nt, Artificial Sequence
  Description of Artificial Sequence: Synthetic oligonucleotide
gccuagaauucuuuaucgc

SEQ ID NO: 76923 - RNA, 19 nt, Artificial Sequence
  Description of Artificial Sequence: Synthetic oligonucleotide
gauauuccccggguucccc

SEQ ID NO: 76924 - RNA, 19 nt, Artificial Sequence
  Description of Artificial Sequence: Synthetic oligonucleotide
ucugcaaaacuuggccggu

SEQ ID NO: 76925 - RNA, 19 nt, Artificial Sequence
  Description of Artificial Sequence: Synthetic oligonucleotide
acaaaggacguagcgucca

SEQ ID NO: 76926 - RNA, 19 nt, Artificial Sequence
  Description of Artificial Sequence: Synthetic oligonucleotide
ccuuaauauguuuagaaau

SEQ ID NO: 76927 - RNA, 19 nt, Artificial Sequence
  Description of Artificial Sequence: Synthetic oligonucleotide
caggaaguacggaagaccu

SEQ ID NO: 76928 - RNA, 19 nt, Artificial Sequence
  Description of Artificial Sequence: Synthetic oligonucleotide
guggguaagcggguaaaug

SEQ ID NO: 76929 - RNA, 19 nt, Artificial Sequence
  Description of Artificial Sequence: Synthetic oligonucleotide
gguccaagcuaccucuagc

SEQ ID NO: 76930 - RNA, 19 nt, Artificial Sequence
  Description of Artificial Sequence: Synthetic oligonucleotide
ccucgggacaccacuaccg

SEQ ID NO: 76931 - RNA, 19 nt, Artificial Sequence
  Description of Artificial Sequence: Synthetic oligonucleotide
uuuucgcccagaggcaccu

SEQ ID NO: 76932 - RNA, 19 nt, Artificial Sequence
  Description of Artificial Sequence: Synthetic oligonucleotide
guaagcggguaaaugccac

SEQ ID NO: 76933 - RNA, 19 nt, Artificial Sequence
  Description of Artificial Sequence: Synthetic oligonucleotide
uccuagacacuaggaaccu

SEQ ID NO: 76934 - RNA, 19 nt, Artificial Sequence
  Description of Artificial Sequence: Synthetic oligonucleotide
cuguuaaauuugggaacag

SEQ ID NO: 76935 - RNA, 19 nt, Artificial Sequence
  Description of Artificial Sequence: Synthetic oligonucleotide
uaggcgcuagaaaggcgga

SEQ ID NO: 76936 - RNA, 19 nt, Artificial Sequence
  Description of Artificial Sequence: Synthetic oligonucleotide
agcggguaaaugccacuca

SEQ ID NO: 76937 - RNA, 19 nt, Artificial Sequence
  Description of Artificial Sequence: Synthetic oligonucleotide
auauuccccggguucccca

SEQ ID NO: 76938 - RNA, 19 nt, Artificial Sequence
  Description of Artificial Sequence: Synthetic oligonucleotide
ggcuucguaccuaacauuc

SEQ ID NO: 76939 - RNA, 19 nt, Artificial Sequence
  Description of Artificial Sequence: Synthetic oligonucleotide
gaguagguucacgggauca

SEQ ID NO: 76940 - RNA, 19 nt, Artificial Sequence
  Description of Artificial Sequence: Synthetic oligonucleotide
uaccucuagcuccgugggc

SEQ ID NO: 76941 - RNA, 19 nt, Artificial Sequence
  Description of Artificial Sequence: Synthetic oligonucleotide
cagcccuacaaagccaggc

SEQ ID NO: 76942 - RNA, 19 nt, Artificial Sequence
  Description of Artificial Sequence: Synthetic oligonucleotide
caucacaucauagcuuaga

SEQ ID NO: 76943 - RNA, 19 nt, Artificial Sequence
  Description of Artificial Sequence: Synthetic oligonucleotide
gccuuaauauguuuagaaa

SEQ ID NO: 76944 - RNA, 19 nt, Artificial Sequence
  Description of Artificial Sequence: Synthetic oligonucleotide
caaaggacguagcguccag

SEQ ID NO: 76945 - RNA, 19 nt, Artificial Sequence
  Description of Artificial Sequence: Synthetic oligonucleotide
gcggguaaaugccacucag

SEQ ID NO: 76946 - RNA, 19 nt, Artificial Sequence
  Description of Artificial Sequence: Synthetic oligonucleotide
auaggacuuccggacacga

SEQ ID NO: 76947 - RNA, 19 nt, Artificial Sequence
  Description of Artificial Sequence: Synthetic oligonucleotide
ggguaagcggguaaaugcc

SEQ ID NO: 76948 - RNA, 19 nt, Artificial Sequence
  Description of Artificial Sequence: Synthetic oligonucleotide
gcuuacuguuaaauuuggg

SEQ ID NO: 76949 - RNA, 19 nt, Artificial Sequence
  Description of Artificial Sequence: Synthetic oligonucleotide
ucccaaugcauugcaccca

SEQ ID NO: 76950 - RNA, 19 nt, Artificial Sequence
  Description of Artificial Sequence: Synthetic oligonucleotide
ucuacaccuguggaccuuc

SEQ ID NO: 76951 - RNA, 19 nt, Artificial Sequence
  Description of Artificial Sequence: Synthetic oligonucleotide
uccggcgacuauaggacuu

SEQ ID NO: 76952 - RNA, 19 nt, Artificial Sequence
  Description of Artificial Sequence: Synthetic oligonucleotide
ccaagaauuugagaaccag

SEQ ID NO: 76953 - RNA, 19 nt, Artificial Sequence
  Description of Artificial Sequence: Synthetic oligonucleotide
guccaagcuaccucuagcu

SEQ ID NO: 76954 - RNA, 19 nt, Artificial Sequence
  Description of Artificial Sequence: Synthetic oligonucleotide
acaguggguaagcggguaa

SEQ ID NO: 76955 - RNA, 19 nt, Artificial Sequence
  Description of Artificial Sequence: Synthetic oligonucleotide
guauuaugacacggagcgc

SEQ ID NO: 76956 - RNA, 19 nt, Artificial Sequence
  Description of Artificial Sequence: Synthetic oligonucleotide
uagcgaucucccacauugu

SEQ ID NO: 76957 - RNA, 19 nt, Artificial Sequence
  Description of Artificial Sequence: Synthetic oligonucleotide
ugccuagcuuggauccuga

SEQ ID NO: 76958 - RNA, 19 nt, Artificial Sequence
  Description of Artificial Sequence: Synthetic oligonucleotide
auacaggaggaaacugugu

SEQ ID NO: 76959 - RNA, 19 nt, Artificial Sequence
  Description of Artificial Sequence: Synthetic oligonucleotide
gaguccgaagucugcuaca

SEQ ID NO: 76960 - RNA, 19 nt, Artificial Sequence
  Description of Artificial Sequence: Synthetic oligonucleotide
uccgugggcugucucgaaa

SEQ ID NO: 76961 - RNA, 19 nt, Artificial Sequence
  Description of Artificial Sequence: Synthetic oligonucleotide
cguaccuaacauucuacac

SEQ ID NO: 76962 - RNA, 19 nt, Artificial Sequence
  Description of Artificial Sequence: Synthetic oligonucleotide
uccggacacgauaccugac

SEQ ID NO: 76963 - RNA, 19 nt, Artificial Sequence
  Description of Artificial Sequence: Synthetic oligonucleotide
gcgcuuacuguuaaauuug

SEQ ID NO: 76964 - RNA, 19 nt, Artificial Sequence
  Description of Artificial Sequence: Synthetic oligonucleotide
uggcguugugggcuucaca

SEQ ID NO: 76965 - RNA, 19 nt, Artificial Sequence
  Description of Artificial Sequence: Synthetic oligonucleotide
aggacggagucauccuggu

SEQ ID NO: 76966 - RNA, 19 nt, Artificial Sequence
  Description of Artificial Sequence: Synthetic oligonucleotide
uagaaggacaaaggacgua

SEQ ID NO: 76967 - RNA, 19 nt, Artificial Sequence
  Description of Artificial Sequence: Synthetic oligonucleotide
ccaggucuaagaccugucc

SEQ ID NO: 76968 - RNA, 19 nt, Artificial Sequence
  Description of Artificial Sequence: Synthetic oligonucleotide
ucggacaaguggguccaug

SEQ ID NO: 76969 - RNA, 19 nt, Artificial Sequence
  Description of Artificial Sequence: Synthetic oligonucleotide
uaggacuuccggacacgau

SEQ ID NO: 76970 - RNA, 19 nt, Artificial Sequence
  Description of Artificial Sequence: Synthetic oligonucleotide
cacuaccgcaaacgaugcc

SEQ ID NO: 76971 - RNA, 19 nt, Artificial Sequence
  Description of Artificial Sequence: Synthetic oligonucleotide
uggcaccggugauauuccc

SEQ ID NO: 76972 - RNA, 19 nt, Artificial Sequence
  Description of Artificial Sequence: Synthetic oligonucleotide
gcccuacaaagccaggcug

SEQ ID NO: 76973 - RNA, 19 nt, Artificial Sequence
  Description of Artificial Sequence: Synthetic oligonucleotide
ccaugguuggcucgaacac

SEQ ID NO: 76974 - RNA, 19 nt, Artificial Sequence
  Description of Artificial Sequence: Synthetic oligonucleotide
cgcuuacuguuaaauuugg

SEQ ID NO: 76975 - RNA, 19 nt, Artificial Sequence
  Description of Artificial Sequence: Synthetic oligonucleotide
cugacugacgacuuuccau

SEQ ID NO: 76976 - RNA, 19 nt, Artificial Sequence
  Description of Artificial Sequence: Synthetic oligonucleotide
uuaugacacggagcgcuua

SEQ ID NO: 76977 - RNA, 19 nt, Artificial Sequence
  Description of Artificial Sequence: Synthetic oligonucleotide
ccuugggagcugcacaccc

SEQ ID NO: 76978 - RNA, 19 nt, Artificial Sequence
  Description of Artificial Sequence: Synthetic oligonucleotide
cacuaggggaacagcaucu

SEQ ID NO: 76979 - RNA, 19 nt, Artificial Sequence
  Description of Artificial Sequence: Synthetic oligonucleotide
uguuaucagccaggucuaa

SEQ ID NO: 76980 - RNA, 19 nt, Artificial Sequence
  Description of Artificial Sequence: Synthetic oligonucleotide
uacaguggguaagcgggua

SEQ ID NO: 76981 - RNA, 19 nt, Artificial Sequence
  Description of Artificial Sequence: Synthetic oligonucleotide
acacgauaccugacuacca

SEQ ID NO: 76982 - RNA, 19 nt, Artificial Sequence
  Description of Artificial Sequence: Synthetic oligonucleotide
cuucggacaagugggucca

SEQ ID NO: 76983 - RNA, 19 nt, Artificial Sequence
  Description of Artificial Sequence: Synthetic oligonucleotide
uagaaccuuggaccacauu

SEQ ID NO: 76984 - RNA, 19 nt, Artificial Sequence
  Description of Artificial Sequence: Synthetic oligonucleotide
aguggguaagcggguaaau

SEQ ID NO: 76985 - RNA, 19 nt, Artificial Sequence
  Description of Artificial Sequence: Synthetic oligonucleotide
ggugguccggcgacuauag

SEQ ID NO: 76986 - RNA, 19 nt, Artificial Sequence
  Description of Artificial Sequence: Synthetic oligonucleotide
guagaaggacaaaggacgu

SEQ ID NO: 76987 - RNA, 19 nt, Artificial Sequence
  Description of Artificial Sequence: Synthetic oligonucleotide
aaccuuuaauuaggcgcua

SEQ ID NO: 76988 - RNA, 19 nt, Artificial Sequence
  Description of Artificial Sequence: Synthetic oligonucleotide
caauuaacugugagccucu

SEQ ID NO: 76989 - RNA, 19 nt, Artificial Sequence
  Description of Artificial Sequence: Synthetic oligonucleotide
ggccggcacagcuuugucc

SEQ ID NO: 76990 - RNA, 19 nt, Artificial Sequence
  Description of Artificial Sequence: Synthetic oligonucleotide
gguaagcggguaaaugcca

SEQ ID NO: 76991 - RNA, 19 nt, Artificial Sequence
  Description of Artificial Sequence: Synthetic oligonucleotide
gugguccggcgacuauagg

SEQ ID NO: 76992 - RNA, 19 nt, Artificial Sequence
  Description of Artificial Sequence: Synthetic oligonucleotide
gccucaugacauuggggug

SEQ ID NO: 76993 - RNA, 19 nt, Artificial Sequence
  Description of Artificial Sequence: Synthetic oligonucleotide
acacggacauguucucauu

SEQ ID NO: 76994 - RNA, 19 nt, Artificial Sequence
  Description of Artificial Sequence: Synthetic oligonucleotide
ggacaaguggguccauguc

SEQ ID NO: 76995 - RNA, 19 nt, Artificial Sequence
  Description of Artificial Sequence: Synthetic oligonucleotide
uggccucggguagcgaucu

SEQ ID NO: 76996 - RNA, 19 nt, Artificial Sequence
  Description of Artificial Sequence: Synthetic oligonucleotide
uggauccugagagggcguc

SEQ ID NO: 76997 - RNA, 19 nt, Artificial Sequence
  Description of Artificial Sequence: Synthetic oligonucleotide
uaccgcaaacgaugccaaa

SEQ ID NO: 76998 - RNA, 19 nt, Artificial Sequence
  Description of Artificial Sequence: Synthetic oligonucleotide
ucgaaaccacguggagaug

SEQ ID NO: 76999 - RNA, 19 nt, Artificial Sequence
  Description of Artificial Sequence: Synthetic oligonucleotide
acggagcgcuuacuguuaa

SEQ ID NO: 77000 - RNA, 19 nt, Artificial Sequence
  Description of Artificial Sequence: Synthetic oligonucleotide
cuuggaccacauucuaggu

SEQ ID NO: 77001 - RNA, 19 nt, Artificial Sequence
  Description of Artificial Sequence: Synthetic oligonucleotide
guacucuccugugucugca

SEQ ID NO: 77002 - RNA, 19 nt, Artificial Sequence
  Description of Artificial Sequence: Synthetic oligonucleotide
uacaaccuucacgccuaga

SEQ ID NO: 77003 - RNA, 19 nt, Artificial Sequence
  Description of Artificial Sequence: Synthetic oligonucleotide
cuucgggucagguuggguu

SEQ ID NO: 77004 - RNA, 19 nt, Artificial Sequence
  Description of Artificial Sequence: Synthetic oligonucleotide
ccucggguagcgaucuccc

SEQ ID NO: 77005 - RNA, 19 nt, Artificial Sequence
  Description of Artificial Sequence: Synthetic oligonucleotide
auuaugacacggagcgcuu

SEQ ID NO: 77006 - RNA, 19 nt, Artificial Sequence
  Description of Artificial Sequence: Synthetic oligonucleotide
caccgaaggguucccguga

SEQ ID NO: 77007 - RNA, 19 nt, Artificial Sequence
  Description of Artificial Sequence: Synthetic oligonucleotide
cagaaccuagaggugucca

SEQ ID NO: 77008 - RNA, 19 nt, Artificial Sequence
  Description of Artificial Sequence: Synthetic oligonucleotide
cccauagcgggucuccuuc

SEQ ID NO: 77009 - RNA, 19 nt, Artificial Sequence
  Description of Artificial Sequence: Synthetic oligonucleotide
cacacggacauguucucau

SEQ ID NO: 77010 - RNA, 19 nt, Artificial Sequence
  Description of Artificial Sequence: Synthetic oligonucleotide
ccuacaaagccaggcugag

SEQ ID NO: 77011 - RNA, 19 nt, Artificial Sequence
  Description of Artificial Sequence: Synthetic oligonucleotide
cacucaccagaugguggag

SEQ ID NO: 77012 - RNA, 19 nt, Artificial Sequence
  Description of Artificial Sequence: Synthetic oligonucleotide
uuggccggucucgaggguu

SEQ ID NO: 77013 - RNA, 19 nt, Artificial Sequence
  Description of Artificial Sequence: Synthetic oligonucleotide
gcugacugacgacuuucca

SEQ ID NO: 77014 - RNA, 19 nt, Artificial Sequence
  Description of Artificial Sequence: Synthetic oligonucleotide
aggaauccuucgggucagg

SEQ ID NO: 77015 - RNA, 19 nt, Artificial Sequence
  Description of Artificial Sequence: Synthetic oligonucleotide
cugacgacuuuccauucau

SEQ ID NO: 77016 - RNA, 19 nt, Artificial Sequence
  Description of Artificial Sequence: Synthetic oligonucleotide
gucccgguguaugaaucuc

SEQ ID NO: 77017 - RNA, 19 nt, Artificial Sequence
  Description of Artificial Sequence: Synthetic oligonucleotide
cugcaaaacuuggccgguc

SEQ ID NO: 77018 - RNA, 19 nt, Artificial Sequence
  Description of Artificial Sequence: Synthetic oligonucleotide
gccggcacagcuuuguccu

SEQ ID NO: 77019 - RNA, 19 nt, Artificial Sequence
  Description of Artificial Sequence: Synthetic oligonucleotide
gccuuacaaccuucacgcc

SEQ ID NO: 77020 - RNA, 19 nt, Artificial Sequence
  Description of Artificial Sequence: Synthetic oligonucleotide
accuaacauucuacaccug

SEQ ID NO: 77021 - RNA, 19 nt, Artificial Sequence
  Description of Artificial Sequence: Synthetic oligonucleotide
cauccucgggacaccacua

SEQ ID NO: 77022 - RNA, 19 nt, Artificial Sequence
  Description of Artificial Sequence: Synthetic oligonucleotide
ucggugguccggcgacuau

SEQ ID NO: 77023 - RNA, 19 nt, Artificial Sequence
  Description of Artificial Sequence: Synthetic oligonucleotide
cugcaggaauccuucgggu

SEQ ID NO: 77024 - RNA, 19 nt, Artificial Sequence
  Description of Artificial Sequence: Synthetic oligonucleotide
cggguuccccacaaauggg

SEQ ID NO: 77025 - RNA, 19 nt, Artificial Sequence
  Description of Artificial Sequence: Synthetic oligonucleotide
cgaaggguucccgugaguc

SEQ ID NO: 77026 - RNA, 19 nt, Artificial Sequence
  Description of Artificial Sequence: Synthetic oligonucleotide
ccgguguaugaaucucuug

SEQ ID NO: 77027 - RNA, 19 nt, Artificial Sequence
  Description of Artificial Sequence: Synthetic oligonucleotide
cucggguagcgaucuccca

SEQ ID NO: 77028 - RNA, 19 nt, Artificial Sequence
  Description of Artificial Sequence: Synthetic oligonucleotide
gcacagaaccuagaggugu

SEQ ID NO: 77029 - RNA, 19 nt, Artificial Sequence
  Description of Artificial Sequence: Synthetic oligonucleotide
cgacuauaggacuuccgga

SEQ ID NO: 77030 - RNA, 19 nt, Artificial Sequence
  Description of Artificial Sequence: Synthetic oligonucleotide
cccgagccgggaauacagg

SEQ ID NO: 77031 - RNA, 19 nt, Artificial Sequence
  Description of Artificial Sequence: Synthetic oligonucleotide
cacggagcgcuuacuguua

SEQ ID NO: 77032 - RNA, 19 nt, Artificial Sequence
  Description of Artificial Sequence: Synthetic oligonucleotide
ggcgcuagaaaggcggaaa

SEQ ID NO: 77033 - RNA, 19 nt, Artificial Sequence
  Description of Artificial Sequence: Synthetic oligonucleotide
ggagcgcuuacuguuaaau

SEQ ID NO: 77034 - RNA, 19 nt, Artificial Sequence
  Description of Artificial Sequence: Synthetic oligonucleotide
caguaugccuuacaaccuu

SEQ ID NO: 77035 - RNA, 19 nt, Artificial Sequence
  Description of Artificial Sequence: Synthetic oligonucleotide
gagccucuuaggacccaga

SEQ ID NO: 77036 - RNA, 19 nt, Artificial Sequence
  Description of Artificial Sequence: Synthetic oligonucleotide
caguggguaagcggguaaa

SEQ ID NO: 77037 - RNA, 19 nt, Artificial Sequence
  Description of Artificial Sequence: Synthetic oligonucleotide
cuucacgccuagaauucuu

SEQ ID NO: 77038 - RNA, 19 nt, Artificial Sequence
  Description of Artificial Sequence: Synthetic oligonucleotide
ggaaacccucucgaucaga

SEQ ID NO: 77039 - RNA, 19 nt, Artificial Sequence
  Description of Artificial Sequence: Synthetic oligonucleotide
gcaaacgaugccaaacuuu

SEQ ID NO: 77040 - RNA, 19 nt, Artificial Sequence
  Description of Artificial Sequence: Synthetic oligonucleotide
ccgaagucugcuacacaca

SEQ ID NO: 77041 - RNA, 19 nt, Artificial Sequence
  Description of Artificial Sequence: Synthetic oligonucleotide
ccgagccgggaauacagga

SEQ ID NO: 77042 - RNA, 19 nt, Artificial Sequence
  Description of Artificial Sequence: Synthetic oligonucleotide
aggcgcuagaaaggcggaa

SEQ ID NO: 77043 - RNA, 19 nt, Artificial Sequence
  Description of Artificial Sequence: Synthetic oligonucleotide
caccuccccauagcggguc

SEQ ID NO: 77044 - RNA, 19 nt, Artificial Sequence
  Description of Artificial Sequence: Synthetic oligonucleotide
guccggcgacuauaggacu

SEQ ID NO: 77045 - RNA, 19 nt, Artificial Sequence
  Description of Artificial Sequence: Synthetic oligonucleotide
cauuauggucuggaguauu

SEQ ID NO: 77046 - RNA, 19 nt, Artificial Sequence
  Description of Artificial Sequence: Synthetic oligonucleotide
gccgaucuaccaugacguc

SEQ ID NO: 77047 - RNA, 19 nt, Artificial Sequence
  Description of Artificial Sequence: Synthetic oligonucleotide
cuagaaccuuggaccacau

SEQ ID NO: 77048 - RNA, 19 nt, Artificial Sequence
  Description of Artificial Sequence: Synthetic oligonucleotide
ggcuucggugguccggcga

SEQ ID NO: 77049 - RNA, 19 nt, Artificial Sequence
  Description of Artificial Sequence: Synthetic oligonucleotide
gguucccgugaguccucug

SEQ ID NO: 77050 - RNA, 19 nt, Artificial Sequence
  Description of Artificial Sequence: Synthetic oligonucleotide
gcgggagguggugacuccc

SEQ ID NO: 77051 - RNA, 19 nt, Artificial Sequence
  Description of Artificial Sequence: Synthetic oligonucleotide
uucggacaaguggguccau

SEQ ID NO: 77052 - RNA, 19 nt, Artificial Sequence
  Description of Artificial Sequence: Synthetic oligonucleotide
acccaaccuuggcuucgua

SEQ ID NO: 77053 - RNA, 19 nt, Artificial Sequence
  Description of Artificial Sequence: Synthetic oligonucleotide
cuguaacccuggagcauau

SEQ ID NO: 77054 - RNA, 19 nt, Artificial Sequence
  Description of Artificial Sequence: Synthetic oligonucleotide
ccgcaaacgaugccaaacu

SEQ ID NO: 77055 - RNA, 19 nt, Artificial Sequence
  Description of Artificial Sequence: Synthetic oligonucleotide
cucuugguacucagauauu

SEQ ID NO: 77056 - RNA, 19 nt, Artificial Sequence
  Description of Artificial Sequence: Synthetic oligonucleotide
gcuucguaccuaacauucu

SEQ ID NO: 77057 - RNA, 19 nt, Artificial Sequence
  Description of Artificial Sequence: Synthetic oligonucleotide
gcugucaaccucagucugu

SEQ ID NO: 77058 - RNA, 19 nt, Artificial Sequence
  Description of Artificial Sequence: Synthetic oligonucleotide
ggaauccuucgggucaggu

SEQ ID NO: 77059 - RNA, 19 nt, Artificial Sequence
  Description of Artificial Sequence: Synthetic oligonucleotide
gugagccucuuaggaccca

SEQ ID NO: 77060 - RNA, 19 nt, Artificial Sequence
  Description of Artificial Sequence: Synthetic oligonucleotide
ccggacacgauaccugacu

SEQ ID NO: 77061 - RNA, 19 nt, Artificial Sequence
  Description of Artificial Sequence: Synthetic oligonucleotide
ccggcgacuauaggacuuc

SEQ ID NO: 77062 - RNA, 19 nt, Artificial Sequence
  Description of Artificial Sequence: Synthetic oligonucleotide
augcgccccuggcgguagu

SEQ ID NO: 77063 - RNA, 19 nt, Artificial Sequence
  Description of Artificial Sequence: Synthetic oligonucleotide
cuccgugggcugucucgaa

SEQ ID NO: 77064 - RNA, 19 nt, Artificial Sequence
  Description of Artificial Sequence: Synthetic oligonucleotide
gccgggaauacaggaggaa

SEQ ID NO: 77065 - RNA, 19 nt, Artificial Sequence
  Description of Artificial Sequence: Synthetic oligonucleotide
caaugcgccccuggcggua

SEQ ID NO: 77066 - RNA, 19 nt, Artificial Sequence
  Description of Artificial Sequence: Synthetic oligonucleotide
cuuggccggucucgagggu

SEQ ID NO: 77067 - RNA, 19 nt, Artificial Sequence
  Description of Artificial Sequence: Synthetic oligonucleotide
ccggugauauuccccgggu

SEQ ID NO: 77068 - RNA, 19 nt, Artificial Sequence
  Description of Artificial Sequence: Synthetic oligonucleotide
cggcgacuauaggacuucc

SEQ ID NO: 77069 - RNA, 19 nt, Artificial Sequence
  Description of Artificial Sequence: Synthetic oligonucleotide
gguccccgagccgggaaua

SEQ ID NO: 77070 - RNA, 19 nt, Artificial Sequence
  Description of Artificial Sequence: Synthetic oligonucleotide
cuucggugguccggcgacu

SEQ ID NO: 77071 - RNA, 19 nt, Artificial Sequence
  Description of Artificial Sequence: Synthetic oligonucleotide
cgaggcuuuaacugaccau

SEQ ID NO: 77072 - RNA, 19 nt, Artificial Sequence
  Description of Artificial Sequence: Synthetic oligonucleotide
ccauagcgggucuccuucu

SEQ ID NO: 77073 - RNA, 19 nt, Artificial Sequence
  Description of Artificial Sequence: Synthetic oligonucleotide
ccccggguuccccacaaau

SEQ ID NO: 77074 - RNA, 19 nt, Artificial Sequence
  Description of Artificial Sequence: Synthetic oligonucleotide
cgcaaacgaugccaaacuu

SEQ ID NO: 77075 - RNA, 19 nt, Artificial Sequence
  Description of Artificial Sequence: Synthetic oligonucleotide
ccgggacaucagggcauac

SEQ ID NO: 77076 - RNA, 19 nt, Artificial Sequence
  Description of Artificial Sequence: Synthetic oligonucleotide
cggagcgcuuacuguuaaa

SEQ ID NO: 77077 - RNA, 19 nt, Artificial Sequence
  Description of Artificial Sequence: Synthetic oligonucleotide
ccgaaggguucccgugagu

SEQ ID NO: 77078 - RNA, 19 nt, Artificial Sequence
  Description of Artificial Sequence: Synthetic oligonucleotide
ccuagacacuaggaaccuu

SEQ ID NO: 77079 - RNA, 19 nt, Artificial Sequence
  Description of Artificial Sequence: Synthetic oligonucleotide
cggugguccggcgacuaua

SEQ ID NO: 77080 - RNA, 19 nt, Artificial Sequence
  Description of Artificial Sequence: Synthetic oligonucleotide
cggugauauuccccggguu

SEQ ID NO: 77081 - RNA, 19 nt, Artificial Sequence
  Description of Artificial Sequence: Synthetic oligonucleotide
aauacgaccauauuaucac

SEQ ID NO: 77082 - RNA, 19 nt, Artificial Sequence
  Description of Artificial Sequence: Synthetic oligonucleotide
aguuggcauaauuagaacc

SEQ ID NO: 77083 - RNA, 19 nt, Artificial Sequence
  Description of Artificial Sequence: Synthetic oligonucleotide
aagaguuugauccauggcu

SEQ ID NO: 77084 - RNA, 19 nt, Artificial Sequence
  Description of Artificial Sequence: Synthetic oligonucleotide
ucuuuuaagacuucguacc

SEQ ID NO: 77085 - RNA, 19 nt, Artificial Sequence
  Description of Artificial Sequence: Synthetic oligonucleotide
ucuuguuugguccaggcag

SEQ ID NO: 77086 - RNA, 19 nt, Artificial Sequence
  Description of Artificial Sequence: Synthetic oligonucleotide
cauuuaucuagccaaaggg

SEQ ID NO: 77087 - RNA, 19 nt, Artificial Sequence
  Description of Artificial Sequence: Synthetic oligonucleotide
augagcaugauccccaacc

SEQ ID NO: 77088 - RNA, 19 nt, Artificial Sequence
  Description of Artificial Sequence: Synthetic oligonucleotide
aaaguaaacagagaauuug

SEQ ID NO: 77089 - RNA, 19 nt, Artificial Sequence
  Description of Artificial Sequence: Synthetic oligonucleotide
cuuauaaugguucauguuc

SEQ ID NO: 77090 - RNA, 19 nt, Artificial Sequence
  Description of Artificial Sequence: Synthetic oligonucleotide
aagauuuagggguucagug

SEQ ID NO: 77091 - RNA, 19 nt, Artificial Sequence
  Description of Artificial Sequence: Synthetic oligonucleotide
aacccauccaguuugaggu

SEQ ID NO: 77092 - RNA, 19 nt, Artificial Sequence
  Description of Artificial Sequence: Synthetic oligonucleotide
caguuuauguuuuauacag

SEQ ID NO: 77093 - RNA, 19 nt, Artificial Sequence
  Description of Artificial Sequence: Synthetic oligonucleotide
ucaauuuugacguacccac

SEQ ID NO: 77094 - RNA, 19 nt, Artificial Sequence
  Description of Artificial Sequence: Synthetic oligonucleotide
gacuucuagaagaagaacg

SEQ ID NO: 77095 - RNA, 19 nt, Artificial Sequence
  Description of Artificial Sequence: Synthetic oligonucleotide
uagcaaguaaaccagggcc

SEQ ID NO: 77096 - RNA, 19 nt, Artificial Sequence
  Description of Artificial Sequence: Synthetic oligonucleotide
uguagcaaaaguaguacug

SEQ ID NO: 77097 - RNA, 19 nt, Artificial Sequence
  Description of Artificial Sequence: Synthetic oligonucleotide
aauuuaaggaaggcuggcc

SEQ ID NO: 77098 - RNA, 19 nt, Artificial Sequence
  Description of Artificial Sequence: Synthetic oligonucleotide
uagaauacgaccauauuau

SEQ ID NO: 77099 - RNA, 19 nt, Artificial Sequence
  Description of Artificial Sequence: Synthetic oligonucleotide
agggacuuauguuuuauac

SEQ ID NO: 77100 - RNA, 19 nt, Artificial Sequence
  Description of Artificial Sequence: Synthetic oligonucleotide
uugccugguauuaacauag

SEQ ID NO: 77101 - RNA, 19 nt, Artificial Sequence
  Description of Artificial Sequence: Synthetic oligonucleotide
aaauugaaccaguguuacc

SEQ ID NO: 77102 - RNA, 19 nt, Artificial Sequence
  Description of Artificial Sequence: Synthetic oligonucleotide
ucgaaguuggcauaauuag

SEQ ID NO: 77103 - RNA, 19 nt, Artificial Sequence
  Description of Artificial Sequence: Synthetic oligonucleotide
auggaacaguuauugaccc

SEQ ID NO: 77104 - RNA, 19 nt, Artificial Sequence
  Description of Artificial Sequence: Synthetic oligonucleotide
aauagcaggugcuaggaau

SEQ ID NO: 77105 - RNA, 19 nt, Artificial Sequence
  Description of Artificial Sequence: Synthetic oligonucleotide
auuaagggugccaagcucc

SEQ ID NO: 77106 - RNA, 19 nt, Artificial Sequence
  Description of Artificial Sequence: Synthetic oligonucleotide
aguaccacguguuggacgg

SEQ ID NO: 77107 - RNA, 19 nt, Artificial Sequence
  Description of Artificial Sequence: Synthetic oligonucleotide
aaauugaguguugggaacg

SEQ ID NO: 77108 - RNA, 19 nt, Artificial Sequence
  Description of Artificial Sequence: Synthetic oligonucleotide
auauguaacuuggucaagc

SEQ ID NO: 77109 - RNA, 19 nt, Artificial Sequence
  Description of Artificial Sequence: Synthetic oligonucleotide
cuauguauaaacgugcuug

SEQ ID NO: 77110 - RNA, 19 nt, Artificial Sequence
  Description of Artificial Sequence: Synthetic oligonucleotide
auauaugccccgcuuuugc

SEQ ID NO: 77111 - RNA, 19 nt, Artificial Sequence
  Description of Artificial Sequence: Synthetic oligonucleotide
uguuggacggacuugugag

SEQ ID NO: 77112 - RNA, 19 nt, Artificial Sequence
  Description of Artificial Sequence: Synthetic oligonucleotide
uagaauauguaacuugguc

SEQ ID NO: 77113 - RNA, 19 nt, Artificial Sequence
  Description of Artificial Sequence: Synthetic oligonucleotide
ggacuuauguuuuauacag

SEQ ID NO: 77114 - RNA, 19 nt, Artificial Sequence
  Description of Artificial Sequence: Synthetic oligonucleotide
uccuagauuagucaccgug

SEQ ID NO: 77115 - RNA, 19 nt, Artificial Sequence
  Description of Artificial Sequence: Synthetic oligonucleotide
caugaaacagcucuauggc

SEQ ID NO: 77116 - RNA, 19 nt, Artificial Sequence
  Description of Artificial Sequence: Synthetic oligonucleotide
uccagacuaaucagcagcg

SEQ ID NO: 77117 - RNA, 19 nt, Artificial Sequence
  Description of Artificial Sequence: Synthetic oligonucleotide
ugcgcugggagacacaaag

SEQ ID NO: 77118 - RNA, 19 nt, Artificial Sequence
  Description of Artificial Sequence: Synthetic oligonucleotide
aagcaaggaaugcugaacu

SEQ ID NO: 77119 - RNA, 19 nt, Artificial Sequence
  Description of Artificial Sequence: Synthetic oligonucleotide
gguaauaagacugagucug

SEQ ID NO: 77120 - RNA, 19 nt, Artificial Sequence
  Description of Artificial Sequence: Synthetic oligonucleotide
aagacuucguaccgauuac

SEQ ID NO: 77121 - RNA, 19 nt, Artificial Sequence
  Description of Artificial Sequence: Synthetic oligonucleotide
gaagucacgauauguauuc

SEQ ID NO: 77122 - RNA, 19 nt, Artificial Sequence
  Description of Artificial Sequence: Synthetic oligonucleotide
uuuacugaaucugacucag

SEQ ID NO: 77123 - RNA, 19 nt, Artificial Sequence
  Description of Artificial Sequence: Synthetic oligonucleotide
uaagacuucguaccgauua

SEQ ID NO: 77124 - RNA, 19 nt, Artificial Sequence
  Description of Artificial Sequence: Synthetic oligonucleotide
uauacagacauagaaccca

SEQ ID NO: 77125 - RNA, 19 nt, Artificial Sequence
  Description of Artificial Sequence: Synthetic oligonucleotide
ugcacauacguacacgcgc

SEQ ID NO: 77126 - RNA, 19 nt, Artificial Sequence
  Description of Artificial Sequence: Synthetic oligonucleotide
gcaaaaguaguacugcucg

SEQ ID NO: 77127 - RNA, 19 nt, Artificial Sequence
  Description of Artificial Sequence: Synthetic oligonucleotide
aaguaccacguguuggacg

SEQ ID NO: 77128 - RNA, 19 nt, Artificial Sequence
  Description of Artificial Sequence: Synthetic oligonucleotide
uucaauaaguuuaggacuu

SEQ ID NO: 77129 - RNA, 19 nt, Artificial Sequence
  Description of Artificial Sequence: Synthetic oligonucleotide
aguuauugacccuccgugg

SEQ ID NO: 77130 - RNA, 19 nt, Artificial Sequence
  Description of Artificial Sequence: Synthetic oligonucleotide
aguaccaauauaagcauuc

SEQ ID NO: 77131 - RNA, 19 nt, Artificial Sequence
  Description of Artificial Sequence: Synthetic oligonucleotide
gguaauuuaaggaaggcug

SEQ ID NO: 77132 - RNA, 19 nt, Artificial Sequence
  Description of Artificial Sequence: Synthetic oligonucleotide
agacuaaucagcagcgucc

SEQ ID NO: 77133 - RNA, 19 nt, Artificial Sequence
  Description of Artificial Sequence: Synthetic oligonucleotide
cuuuuaagacuucguaccg

SEQ ID NO: 77134 - RNA, 19 nt, Artificial Sequence
  Description of Artificial Sequence: Synthetic oligonucleotide
accacauuuaucuagccaa

SEQ ID NO: 77135 - RNA, 19 nt, Artificial Sequence
  Description of Artificial Sequence: Synthetic oligonucleotide
aauugaguguugggaacgc

SEQ ID NO: 77136 - RNA, 19 nt, Artificial Sequence
  Description of Artificial Sequence: Synthetic oligonucleotide
aucgaagggaucugggugg

SEQ ID NO: 77137 - RNA, 19 nt, Artificial Sequence
  Description of Artificial Sequence: Synthetic oligonucleotide
aaugagggaagcugcugag

SEQ ID NO: 77138 - RNA, 19 nt, Artificial Sequence
  Description of Artificial Sequence: Synthetic oligonucleotide
aagaucuuauuacaguaua

SEQ ID NO: 77139 - RNA, 19 nt, Artificial Sequence
  Description of Artificial Sequence: Synthetic oligonucleotide
aacgcuugauucuauuccu

SEQ ID NO: 77140 - RNA, 19 nt, Artificial Sequence
  Description of Artificial Sequence: Synthetic oligonucleotide
aagaucaaguucgaaguug

SEQ ID NO: 77141 - RNA, 19 nt, Artificial Sequence
  Description of Artificial Sequence: Synthetic oligonucleotide
aguuuaggacuuucuugcc

SEQ ID NO: 77142 - RNA, 19 nt, Artificial Sequence
  Description of Artificial Sequence: Synthetic oligonucleotide
uguaaucugucugaguaug

SEQ ID NO: 77143 - RNA, 19 nt, Artificial Sequence
  Description of Artificial Sequence: Synthetic oligonucleotide
aacaaguuggaugggcagg

SEQ ID NO: 77144 - RNA, 19 nt, Artificial Sequence
  Description of Artificial Sequence: Synthetic oligonucleotide
gaauuaagaacacauugcu

SEQ ID NO: 77145 - RNA, 19 nt, Artificial Sequence
  Description of Artificial Sequence: Synthetic oligonucleotide
aacuaccucauccagucaa

SEQ ID NO: 77146 - RNA, 19 nt, Artificial Sequence
  Description of Artificial Sequence: Synthetic oligonucleotide
aacaguuauugacccuccg

SEQ ID NO: 77147 - RNA, 19 nt, Artificial Sequence
  Description of Artificial Sequence: Synthetic oligonucleotide
ugaaugcucaccaaaccuc

SEQ ID NO: 77148 - RNA, 19 nt, Artificial Sequence
  Description of Artificial Sequence: Synthetic oligonucleotide
ugaaguaccacguguugga

SEQ ID NO: 77149 - RNA, 19 nt, Artificial Sequence
  Description of Artificial Sequence: Synthetic oligonucleotide
caaccuauaggcucagcgg

SEQ ID NO: 77150 - RNA, 19 nt, Artificial Sequence
  Description of Artificial Sequence: Synthetic oligonucleotide
uucagcguaacugauggca

SEQ ID NO: 77151 - RNA, 19 nt, Artificial Sequence
  Description of Artificial Sequence: Synthetic oligonucleotide
aaucuggccagcuuaggaa

SEQ ID NO: 77152 - RNA, 19 nt, Artificial Sequence
  Description of Artificial Sequence: Synthetic oligonucleotide
cuaguccagacuaaucagc

SEQ ID NO: 77153 - RNA, 19 nt, Artificial Sequence
  Description of Artificial Sequence: Synthetic oligonucleotide
cugaaucugacucaguuca

SEQ ID NO: 77154 - RNA, 19 nt, Artificial Sequence
  Description of Artificial Sequence: Synthetic oligonucleotide
gguauuaacauagucuacc

SEQ ID NO: 77155 - RNA, 19 nt, Artificial Sequence
  Description of Artificial Sequence: Synthetic oligonucleotide
agaauacgaccauauuauc

SEQ ID NO: 77156 - RNA, 19 nt, Artificial Sequence
  Description of Artificial Sequence: Synthetic oligonucleotide
auaugaacauuacaauuau

SEQ ID NO: 77157 - RNA, 19 nt, Artificial Sequence
  Description of Artificial Sequence: Synthetic oligonucleotide
uaaucuggccagcuuagga

SEQ ID NO: 77158 - RNA, 19 nt, Artificial Sequence
  Description of Artificial Sequence: Synthetic oligonucleotide
uuuaagacuucguaccgau

SEQ ID NO: 77159 - RNA, 19 nt, Artificial Sequence
  Description of Artificial Sequence: Synthetic oligonucleotide
caggguaauuuaaggaagg

SEQ ID NO: 77160 - RNA, 19 nt, Artificial Sequence
  Description of Artificial Sequence: Synthetic oligonucleotide
aagaagaacggcauuggga

SEQ ID NO: 77161 - RNA, 19 nt, Artificial Sequence
  Description of Artificial Sequence: Synthetic oligonucleotide
cuguaaauucaucucuagc

SEQ ID NO: 77162 - RNA, 19 nt, Artificial Sequence
  Description of Artificial Sequence: Synthetic oligonucleotide
uauguaacuuggucaagcu

SEQ ID NO: 77163 - RNA, 19 nt, Artificial Sequence
  Description of Artificial Sequence: Synthetic oligonucleotide
cuauaagauauugaauaug

SEQ ID NO: 77164 - RNA, 19 nt, Artificial Sequence
  Description of Artificial Sequence: Synthetic oligonucleotide
gaauacgaccauauuauca

SEQ ID NO: 77165 - RNA, 19 nt, Artificial Sequence
  Description of Artificial Sequence: Synthetic oligonucleotide
guccagacuaaucagcagc

SEQ ID NO: 77166 - RNA, 19 nt, Artificial Sequence
  Description of Artificial Sequence: Synthetic oligonucleotide
auaaguuuaggacuuucuu

SEQ ID NO: 77167 - RNA, 19 nt, Artificial Sequence
  Description of Artificial Sequence: Synthetic oligonucleotide
guuauugacccuccguggc

SEQ ID NO: 77168 - RNA, 19 nt, Artificial Sequence
  Description of Artificial Sequence: Synthetic oligonucleotide
cuuguagcaaaaguaguac

SEQ ID NO: 77169 - RNA, 19 nt, Artificial Sequence
  Description of Artificial Sequence: Synthetic oligonucleotide
acuccuagauuagucaccg

SEQ ID NO: 77170 - RNA, 19 nt, Artificial Sequence
  Description of Artificial Sequence: Synthetic oligonucleotide
ggaauuaagaacacauugc

SEQ ID NO: 77171 - RNA, 19 nt, Artificial Sequence
  Description of Artificial Sequence: Synthetic oligonucleotide
aaagcggguggucauuaca

SEQ ID NO: 77172 - RNA, 19 nt, Artificial Sequence
  Description of Artificial Sequence: Synthetic oligonucleotide
cuagauuagucaccgugag

SEQ ID NO: 77173 - RNA, 19 nt, Artificial Sequence
  Description of Artificial Sequence: Synthetic oligonucleotide
gaugauguaaccuggcagu

SEQ ID NO: 77174 - RNA, 19 nt, Artificial Sequence
  Description of Artificial Sequence: Synthetic oligonucleotide
uguaaccuggcagugaaaa

SEQ ID NO: 77175 - RNA, 19 nt, Artificial Sequence
  Description of Artificial Sequence: Synthetic oligonucleotide
cugucaaauccuagcauag

SEQ ID NO: 77176 - RNA, 19 nt, Artificial Sequence
  Description of Artificial Sequence: Synthetic oligonucleotide
agaagaagaacggcauugg

SEQ ID NO: 77177 - RNA, 19 nt, Artificial Sequence
  Description of Artificial Sequence: Synthetic oligonucleotide
caguuauugacccuccgug

SEQ ID NO: 77178 - RNA, 19 nt, Artificial Sequence
  Description of Artificial Sequence: Synthetic oligonucleotide
ggcuccaacaagcauagag

SEQ ID NO: 77179 - RNA, 19 nt, Artificial Sequence
  Description of Artificial Sequence: Synthetic oligonucleotide
auuuaucuagccaaaggga

SEQ ID NO: 77180 - RNA, 19 nt, Artificial Sequence
  Description of Artificial Sequence: Synthetic oligonucleotide
guagcaaaaguaguacugc

SEQ ID NO: 77181 - RNA, 19 nt, Artificial Sequence
  Description of Artificial Sequence: Synthetic oligonucleotide
aauauguaacuuggucaag

SEQ ID NO: 77182 - RNA, 19 nt, Artificial Sequence
  Description of Artificial Sequence: Synthetic oligonucleotide
uuuugccugguauuaacau

SEQ ID NO: 77183 - RNA, 19 nt, Artificial Sequence
  Description of Artificial Sequence: Synthetic oligonucleotide
aggguaauuuaaggaaggc

SEQ ID NO: 77184 - RNA, 19 nt, Artificial Sequence
  Description of Artificial Sequence: Synthetic oligonucleotide
cuaaucagcagcguccaag

SEQ ID NO: 77185 - RNA, 19 nt, Artificial Sequence
  Description of Artificial Sequence: Synthetic oligonucleotide
ugucaaauccuagcauagg

SEQ ID NO: 77186 - RNA, 19 nt, Artificial Sequence
  Description of Artificial Sequence: Synthetic oligonucleotide
uaauuuaaggaaggcuggc

SEQ ID NO: 77187 - RNA, 19 nt, Artificial Sequence
  Description of Artificial Sequence: Synthetic oligonucleotide
cacauuaagggugccaagc

SEQ ID NO: 77188 - RNA, 19 nt, Artificial Sequence
  Description of Artificial Sequence: Synthetic oligonucleotide
ucaaccgagccggaaaugc

SEQ ID NO: 77189 - RNA, 19 nt, Artificial Sequence
  Description of Artificial Sequence: Synthetic oligonucleotide
guuggcauaauuagaacca

SEQ ID NO: 77190 - RNA, 19 nt, Artificial Sequence
  Description of Artificial Sequence: Synthetic oligonucleotide
auguugguauauuuauaug

SEQ ID NO: 77191 - RNA, 19 nt, Artificial Sequence
  Description of Artificial Sequence: Synthetic oligonucleotide
cuucaauaaguuuaggacu

SEQ ID NO: 77192 - RNA, 19 nt, Artificial Sequence
  Description of Artificial Sequence: Synthetic oligonucleotide
ucgaacauucaagauggug

SEQ ID NO: 77193 - RNA, 19 nt, Artificial Sequence
  Description of Artificial Sequence: Synthetic oligonucleotide
guauuaacauagucuacca

SEQ ID NO: 77194 - RNA, 19 nt, Artificial Sequence
  Description of Artificial Sequence: Synthetic oligonucleotide
caucgaagggaucugggug

SEQ ID NO: 77195 - RNA, 19 nt, Artificial Sequence
  Description of Artificial Sequence: Synthetic oligonucleotide
gucacgauauguauucucc

SEQ ID NO: 77196 - RNA, 19 nt, Artificial Sequence
  Description of Artificial Sequence: Synthetic oligonucleotide
aacaugagcaugaucccca

SEQ ID NO: 77197 - RNA, 19 nt, Artificial Sequence
  Description of Artificial Sequence: Synthetic oligonucleotide
uggguaauuucagaugucu

SEQ ID NO: 77198 - RNA, 19 nt, Artificial Sequence
  Description of Artificial Sequence: Synthetic oligonucleotide
ucucagaacggagagguuc

SEQ ID NO: 77199 - RNA, 19 nt, Artificial Sequence
  Description of Artificial Sequence: Synthetic oligonucleotide
acaaguuggaugggcaggg

SEQ ID NO: 77200 - RNA, 19 nt, Artificial Sequence
  Description of Artificial Sequence: Synthetic oligonucleotide
auaaacgugcuuggcacuc

SEQ ID NO: 77201 - RNA, 19 nt, Artificial Sequence
  Description of Artificial Sequence: Synthetic oligonucleotide
uucguaccgauuacuuuug

SEQ ID NO: 77202 - RNA, 19 nt, Artificial Sequence
  Description of Artificial Sequence: Synthetic oligonucleotide
cuugcgugcacaugugcgc

SEQ ID NO: 77203 - RNA, 19 nt, Artificial Sequence
  Description of Artificial Sequence: Synthetic oligonucleotide
uaccgauuacuuuuggcuc

SEQ ID NO: 77204 - RNA, 19 nt, Artificial Sequence
  Description of Artificial Sequence: Synthetic oligonucleotide
cacgcccuauguauaaacg

SEQ ID NO: 77205 - RNA, 19 nt, Artificial Sequence
  Description of Artificial Sequence: Synthetic oligonucleotide
ugcaggaaaauugaguguu

SEQ ID NO: 77206 - RNA, 19 nt, Artificial Sequence
  Description of Artificial Sequence: Synthetic oligonucleotide
uuuuaagacuucguaccga

SEQ ID NO: 77207 - RNA, 19 nt, Artificial Sequence
  Description of Artificial Sequence: Synthetic oligonucleotide
ucacgauauguauucucca

SEQ ID NO: 77208 - RNA, 19 nt, Artificial Sequence
  Description of Artificial Sequence: Synthetic oligonucleotide
aguuggaugggcaggggac

SEQ ID NO: 77209 - RNA, 19 nt, Artificial Sequence
  Description of Artificial Sequence: Synthetic oligonucleotide
cauagaguccagagggaag

SEQ ID NO: 77210 - RNA, 19 nt, Artificial Sequence
  Description of Artificial Sequence: Synthetic oligonucleotide
uucagaugucuuuaauauc

SEQ ID NO: 77211 - RNA, 19 nt, Artificial Sequence
  Description of Artificial Sequence: Synthetic oligonucleotide
ggcauugcccuuuggaccg

SEQ ID NO: 77212 - RNA, 19 nt, Artificial Sequence
  Description of Artificial Sequence: Synthetic oligonucleotide
gaagcaaggaaugcugaac

SEQ ID NO: 77213 - RNA, 19 nt, Artificial Sequence
  Description of Artificial Sequence: Synthetic oligonucleotide
cuaaauugaaccaguguua

SEQ ID NO: 77214 - RNA, 19 nt, Artificial Sequence
  Description of Artificial Sequence: Synthetic oligonucleotide
uauaaacgugcuuggcacu

SEQ ID NO: 77215 - RNA, 19 nt, Artificial Sequence
  Description of Artificial Sequence: Synthetic oligonucleotide
gugcuaggaauuaagaaca

SEQ ID NO: 77216 - RNA, 19 nt, Artificial Sequence
  Description of Artificial Sequence: Synthetic oligonucleotide
agaaccacacaugucauaa

SEQ ID NO: 77217 - RNA, 19 nt, Artificial Sequence
  Description of Artificial Sequence: Synthetic oligonucleotide
guaaauucaucucuagccu

SEQ ID NO: 77218 - RNA, 19 nt, Artificial Sequence
  Description of Artificial Sequence: Synthetic oligonucleotide
gguagaaauucauggaaca

SEQ ID NO: 77219 - RNA, 19 nt, Artificial Sequence
  Description of Artificial Sequence: Synthetic oligonucleotide
caaauccuagcauagggaa

SEQ ID NO: 77220 - RNA, 19 nt, Artificial Sequence
  Description of Artificial Sequence: Synthetic oligonucleotide
gaauacacgcccuauguau

SEQ ID NO: 77221 - RNA, 19 nt, Artificial Sequence
  Description of Artificial Sequence: Synthetic oligonucleotide
uuugccugguauuaacaua

SEQ ID NO: 77222 - RNA, 19 nt, Artificial Sequence
  Description of Artificial Sequence: Synthetic oligonucleotide
ugggguaauaagacugagu

SEQ ID NO: 77223 - RNA, 19 nt, Artificial Sequence
  Description of Artificial Sequence: Synthetic oligonucleotide
ucguuuucuuauaaugguu

SEQ ID NO: 77224 - RNA, 19 nt, Artificial Sequence
  Description of Artificial Sequence: Synthetic oligonucleotide
accgauuacuuuuggcucu

SEQ ID NO: 77225 - RNA, 19 nt, Artificial Sequence
  Description of Artificial Sequence: Synthetic oligonucleotide
gauccccaaccccagcuag

SEQ ID NO: 77226 - RNA, 19 nt, Artificial Sequence
  Description of Artificial Sequence: Synthetic oligonucleotide
uagagucguuuucuuauaa

SEQ ID NO: 77227 - RNA, 19 nt, Artificial Sequence
  Description of Artificial Sequence: Synthetic oligonucleotide
guaccgauuacuuuuggcu

SEQ ID NO: 77228 - RNA, 19 nt, Artificial Sequence
  Description of Artificial Sequence: Synthetic oligonucleotide
ucagcguaacugauggcaa

SEQ ID NO: 77229 - RNA, 19 nt, Artificial Sequence
  Description of Artificial Sequence: Synthetic oligonucleotide
uacagauuaucugugugua

SEQ ID NO: 77230 - RNA, 19 nt, Artificial Sequence
  Description of Artificial Sequence: Synthetic oligonucleotide
aggucaauuuugacguacc

SEQ ID NO: 77231 - RNA, 19 nt, Artificial Sequence
  Description of Artificial Sequence: Synthetic oligonucleotide
guaauaagacugagucugg

SEQ ID NO: 77232 - RNA, 19 nt, Artificial Sequence
  Description of Artificial Sequence: Synthetic oligonucleotide
uaauaagacugagucugga

SEQ ID NO: 77233 - RNA, 19 nt, Artificial Sequence
  Description of Artificial Sequence: Synthetic oligonucleotide
cacuccuagauuagucacc

SEQ ID NO: 77234 - RNA, 19 nt, Artificial Sequence
  Description of Artificial Sequence: Synthetic oligonucleotide
caaaucggacccgagaguc

SEQ ID NO: 77235 - RNA, 19 nt, Artificial Sequence
  Description of Artificial Sequence: Synthetic oligonucleotide
cuaggagauggcaggcuag

SEQ ID NO: 77236 - RNA, 19 nt, Artificial Sequence
  Description of Artificial Sequence: Synthetic oligonucleotide
aaaaggggccccauuuugu

SEQ ID NO: 77237 - RNA, 19 nt, Artificial Sequence
  Description of Artificial Sequence: Synthetic oligonucleotide
cagacuaaucagcagcguc

SEQ ID NO: 77238 - RNA, 19 nt, Artificial Sequence
  Description of Artificial Sequence: Synthetic oligonucleotide
accauaugggcgccccuac

SEQ ID NO: 77239 - RNA, 19 nt, Artificial Sequence
  Description of Artificial Sequence: Synthetic oligonucleotide
acgcccuauguauaaacgu

SEQ ID NO: 77240 - RNA, 19 nt, Artificial Sequence
  Description of Artificial Sequence: Synthetic oligonucleotide
ucguaccgauuacuuuugg

SEQ ID NO: 77241 - RNA, 19 nt, Artificial Sequence
  Description of Artificial Sequence: Synthetic oligonucleotide
uugacguacccacccagau

SEQ ID NO: 77242 - RNA, 19 nt, Artificial Sequence
  Description of Artificial Sequence: Synthetic oligonucleotide
uggaccgugcucccaagcu

SEQ ID NO: 77243 - RNA, 19 nt, Artificial Sequence
  Description of Artificial Sequence: Synthetic oligonucleotide
ggccacuucguuuugucag

SEQ ID NO: 77244 - RNA, 19 nt, Artificial Sequence
  Description of Artificial Sequence: Synthetic oligonucleotide
acacauuaagggugccaag

SEQ ID NO: 77245 - RNA, 19 nt, Artificial Sequence
  Description of Artificial Sequence: Synthetic oligonucleotide
aauucauggaacaguuauu

SEQ ID NO: 77246 - RNA, 19 nt, Artificial Sequence
  Description of Artificial Sequence: Synthetic oligonucleotide
gcuaguccagacuaaucag

SEQ ID NO: 77247 - RNA, 19 nt, Artificial Sequence
  Description of Artificial Sequence: Synthetic oligonucleotide
auacgaccauauuaucaca

SEQ ID NO: 77248 - RNA, 19 nt, Artificial Sequence
  Description of Artificial Sequence: Synthetic oligonucleotide
uaugggcgccccuacaauc

SEQ ID NO: 77249 - RNA, 19 nt, Artificial Sequence
  Description of Artificial Sequence: Synthetic oligonucleotide
gacguacccacccagauuu

SEQ ID NO: 77250 - RNA, 19 nt, Artificial Sequence
  Description of Artificial Sequence: Synthetic oligonucleotide
uguguccucaugcgagaca

SEQ ID NO: 77251 - RNA, 19 nt, Artificial Sequence
  Description of Artificial Sequence: Synthetic oligonucleotide
uuggcauaauuagaaccac

SEQ ID NO: 77252 - RNA, 19 nt, Artificial Sequence
  Description of Artificial Sequence: Synthetic oligonucleotide
ccaggguaauuuaaggaag

SEQ ID NO: 77253 - RNA, 19 nt, Artificial Sequence
  Description of Artificial Sequence: Synthetic oligonucleotide
aauacacgcccuauguaua

SEQ ID NO: 77254 - RNA, 19 nt, Artificial Sequence
  Description of Artificial Sequence: Synthetic oligonucleotide
cauuaaggaagagggcuug

SEQ ID NO: 77255 - RNA, 19 nt, Artificial Sequence
  Description of Artificial Sequence: Synthetic oligonucleotide
ggaaggugaaugcucacca

SEQ ID NO: 77256 - RNA, 19 nt, Artificial Sequence
  Description of Artificial Sequence: Synthetic oligonucleotide
ugaguauggccacuucguu

SEQ ID NO: 77257 - RNA, 19 nt, Artificial Sequence
  Description of Artificial Sequence: Synthetic oligonucleotide
auaaucuggccagcuuagg

SEQ ID NO: 77258 - RNA, 19 nt, Artificial Sequence
  Description of Artificial Sequence: Synthetic oligonucleotide
accgagccggaaaugcucc

SEQ ID NO: 77259 - RNA, 19 nt, Artificial Sequence
  Description of Artificial Sequence: Synthetic oligonucleotide
auugaaccaguguuaccau

SEQ ID NO: 77260 - RNA, 19 nt, Artificial Sequence
  Description of Artificial Sequence: Synthetic oligonucleotide
cgaacauucaagaugguga

SEQ ID NO: 77261 - RNA, 19 nt, Artificial Sequence
  Description of Artificial Sequence: Synthetic oligonucleotide
ugacaacaugagcaugauc

SEQ ID NO: 77262 - RNA, 19 nt, Artificial Sequence
  Description of Artificial Sequence: Synthetic oligonucleotide
aaucagcagcguccaagaa

SEQ ID NO: 77263 - RNA, 19 nt, Artificial Sequence
  Description of Artificial Sequence: Synthetic oligonucleotide
uugcaaggaacuaccucau

SEQ ID NO: 77264 - RNA, 19 nt, Artificial Sequence
  Description of Artificial Sequence: Synthetic oligonucleotide
aaguaaaccagggccugaa

SEQ ID NO: 77265 - RNA, 19 nt, Artificial Sequence
  Description of Artificial Sequence: Synthetic oligonucleotide
caauaaguuuaggacuuuc

SEQ ID NO: 77266 - RNA, 19 nt, Artificial Sequence
  Description of Artificial Sequence: Synthetic oligonucleotide
acuucguaccgauuacuuu

SEQ ID NO: 77267 - RNA, 19 nt, Artificial Sequence
  Description of Artificial Sequence: Synthetic oligonucleotide
auacacgcccuauguauaa

SEQ ID NO: 77268 - RNA, 19 nt, Artificial Sequence
  Description of Artificial Sequence: Synthetic oligonucleotide
ggucaauuuugacguaccc

SEQ ID NO: 77269 - RNA, 19 nt, Artificial Sequence
  Description of Artificial Sequence: Synthetic oligonucleotide
cuccacuccuagauuaguc

SEQ ID NO: 77270 - RNA, 19 nt, Artificial Sequence
  Description of Artificial Sequence: Synthetic oligonucleotide
uuggaccgugcucccaagc

SEQ ID NO: 77271 - RNA, 19 nt, Artificial Sequence
  Description of Artificial Sequence: Synthetic oligonucleotide
auaagauauugaauaugaa

SEQ ID NO: 77272 - RNA, 19 nt, Artificial Sequence
  Description of Artificial Sequence: Synthetic oligonucleotide
uuuggaccgugcucccaag

SEQ ID NO: 77273 - RNA, 19 nt, Artificial Sequence
  Description of Artificial Sequence: Synthetic oligonucleotide
guguccucaugcgagacac

SEQ ID NO: 77274 - RNA, 19 nt, Artificial Sequence
  Description of Artificial Sequence: Synthetic oligonucleotide
ccuugcgugcacaugugcg

SEQ ID NO: 77275 - RNA, 19 nt, Artificial Sequence
  Description of Artificial Sequence: Synthetic oligonucleotide
cauauaugccccgcuuuug

SEQ ID NO: 77276 - RNA, 19 nt, Artificial Sequence
  Description of Artificial Sequence: Synthetic oligonucleotide
aaucggacccgagagucuu

SEQ ID NO: 77277 - RNA, 19 nt, Artificial Sequence
  Description of Artificial Sequence: Synthetic oligonucleotide
cacaugugcgcugggagac

SEQ ID NO: 77278 - RNA, 19 nt, Artificial Sequence
  Description of Artificial Sequence: Synthetic oligonucleotide
gacuaaucagcagcgucca

SEQ ID NO: 77279 - RNA, 19 nt, Artificial Sequence
  Description of Artificial Sequence: Synthetic oligonucleotide
uuaagacuucguaccgauu

SEQ ID NO: 77280 - RNA, 19 nt, Artificial Sequence
  Description of Artificial Sequence: Synthetic oligonucleotide
cacgauauguauucuccaa

SEQ ID NO: 77281 - RNA, 19 nt, Artificial Sequence
  Description of Artificial Sequence: Synthetic oligonucleotide
aagucacgauauguauucu

SEQ ID NO: 77282 - RNA, 19 nt, Artificial Sequence
  Description of Artificial Sequence: Synthetic oligonucleotide
gaagauuuagggguucagu

SEQ ID NO: 77283 - RNA, 19 nt, Artificial Sequence
  Description of Artificial Sequence: Synthetic oligonucleotide
cgugaggaagccaaaucgg

SEQ ID NO: 77284 - RNA, 19 nt, Artificial Sequence
  Description of Artificial Sequence: Synthetic oligonucleotide
gacuuauguuuuauacaga

SEQ ID NO: 77285 - RNA, 19 nt, Artificial Sequence
  Description of Artificial Sequence: Synthetic oligonucleotide
ucaagggacuuauguuuua

SEQ ID NO: 77286 - RNA, 19 nt, Artificial Sequence
  Description of Artificial Sequence: Synthetic oligonucleotide
cuucguaccgauuacuuuu

SEQ ID NO: 77287 - RNA, 19 nt, Artificial Sequence
  Description of Artificial Sequence: Synthetic oligonucleotide
gugcacauacguacacgcg

SEQ ID NO: 77288 - RNA, 19 nt, Artificial Sequence
  Description of Artificial Sequence: Synthetic oligonucleotide
gccaacaggguucucacga

SEQ ID NO: 77289 - RNA, 19 nt, Artificial Sequence
  Description of Artificial Sequence: Synthetic oligonucleotide
acgaccauauuaucacaua

SEQ ID NO: 77290 - RNA, 19 nt, Artificial Sequence
  Description of Artificial Sequence: Synthetic oligonucleotide
ugacguacccacccagauu

SEQ ID NO: 77291 - RNA, 19 nt, Artificial Sequence
  Description of Artificial Sequence: Synthetic oligonucleotide
guguuggacggacuuguga

SEQ ID NO: 77292 - RNA, 19 nt, Artificial Sequence
  Description of Artificial Sequence: Synthetic oligonucleotide
aaaucggacccgagagucu

SEQ ID NO: 77293 - RNA, 19 nt, Artificial Sequence
  Description of Artificial Sequence: Synthetic oligonucleotide
gaaguaccacguguuggac

SEQ ID NO: 77294 - RNA, 19 nt, Artificial Sequence
  Description of Artificial Sequence: Synthetic oligonucleotide
uugggaacgcuugauucua

SEQ ID NO: 77295 - RNA, 19 nt, Artificial Sequence
  Description of Artificial Sequence: Synthetic oligonucleotide
guugggaacgcuugauucu

SEQ ID NO: 77296 - RNA, 19 nt, Artificial Sequence
  Description of Artificial Sequence: Synthetic oligonucleotide
acguguuggacggacuugu

SEQ ID NO: 77297 - RNA, 19 nt, Artificial Sequence
  Description of Artificial Sequence: Synthetic oligonucleotide
ucucacgacggaugucuuc

SEQ ID NO: 77298 - RNA, 19 nt, Artificial Sequence
  Description of Artificial Sequence: Synthetic oligonucleotide
uucaaccgagccggaaaug

SEQ ID NO: 77299 - RNA, 19 nt, Artificial Sequence
  Description of Artificial Sequence: Synthetic oligonucleotide
cucacgacggaugucuuca

SEQ ID NO: 77300 - RNA, 19 nt, Artificial Sequence
  Description of Artificial Sequence: Synthetic oligonucleotide
auuaaggaagagggcuugu

SEQ ID NO: 77301 - RNA, 19 nt, Artificial Sequence
  Description of Artificial Sequence: Synthetic oligonucleotide
agacuucguaccgauuacu

SEQ ID NO: 77302 - RNA, 19 nt, Artificial Sequence
  Description of Artificial Sequence: Synthetic oligonucleotide
uaaacgugcuuggcacuca

SEQ ID NO: 77303 - RNA, 19 nt, Artificial Sequence
  Description of Artificial Sequence: Synthetic oligonucleotide
ccaugcuaaauugaaccag

SEQ ID NO: 77304 - RNA, 19 nt, Artificial Sequence
  Description of Artificial Sequence: Synthetic oligonucleotide
augcgagacacugucugga

SEQ ID NO: 77305 - RNA, 19 nt, Artificial Sequence
  Description of Artificial Sequence: Synthetic oligonucleotide
ugcgagacacugucuggaa

SEQ ID NO: 77306 - RNA, 19 nt, Artificial Sequence
  Description of Artificial Sequence: Synthetic oligonucleotide
cauaugggcgccccuacaa

SEQ ID NO: 77307 - RNA, 19 nt, Artificial Sequence
  Description of Artificial Sequence: Synthetic oligonucleotide
aaccauaugggcgccccua

SEQ ID NO: 77308 - RNA, 19 nt, Artificial Sequence
  Description of Artificial Sequence: Synthetic oligonucleotide
ggcaugaaacagcucuaug

SEQ ID NO: 77309 - RNA, 19 nt, Artificial Sequence
  Description of Artificial Sequence: Synthetic oligonucleotide
ucuccacuccuagauuagu

SEQ ID NO: 77310 - RNA, 19 nt, Artificial Sequence
  Description of Artificial Sequence: Synthetic oligonucleotide
guucucacgacggaugucu

SEQ ID NO: 77311 - RNA, 19 nt, Artificial Sequence
  Description of Artificial Sequence: Synthetic oligonucleotide
ccuagauuagucaccguga

SEQ ID NO: 77312 - RNA, 19 nt, Artificial Sequence
  Description of Artificial Sequence: Synthetic oligonucleotide
ccaagaucaaguucgaagu

SEQ ID NO: 77313 - RNA, 19 nt, Artificial Sequence
  Description of Artificial Sequence: Synthetic oligonucleotide
cagcuaguccagacuaauc

SEQ ID NO: 77314 - RNA, 19 nt, Artificial Sequence
  Description of Artificial Sequence: Synthetic oligonucleotide
cgaccauauuaucacauac

SEQ ID NO: 77315 - RNA, 19 nt, Artificial Sequence
  Description of Artificial Sequence: Synthetic oligonucleotide
guaacugauggcaaccuau

SEQ ID NO: 77316 - RNA, 19 nt, Artificial Sequence
  Description of Artificial Sequence: Synthetic oligonucleotide
uaccuguccugccgaugcc

SEQ ID NO: 77317 - RNA, 19 nt, Artificial Sequence
  Description of Artificial Sequence: Synthetic oligonucleotide
caaaguaaacagagaauuu

SEQ ID NO: 77318 - RNA, 19 nt, Artificial Sequence
  Description of Artificial Sequence: Synthetic oligonucleotide
gcccuauguauaaacgugc

SEQ ID NO: 77319 - RNA, 19 nt, Artificial Sequence
  Description of Artificial Sequence: Synthetic oligonucleotide
ggucaagcucucugggcag

SEQ ID NO: 77320 - RNA, 19 nt, Artificial Sequence
  Description of Artificial Sequence: Synthetic oligonucleotide
ggaagauuuagggguucag

SEQ ID NO: 77321 - RNA, 19 nt, Artificial Sequence
  Description of Artificial Sequence: Synthetic oligonucleotide
ggacaaaccaugcuaaauu

SEQ ID NO: 77322 - RNA, 19 nt, Artificial Sequence
  Description of Artificial Sequence: Synthetic oligonucleotide
caaagcggguggucauuac

SEQ ID NO: 77323 - RNA, 19 nt, Artificial Sequence
  Description of Artificial Sequence: Synthetic oligonucleotide
uuagggguucagugggguu

SEQ ID NO: 77324 - RNA, 19 nt, Artificial Sequence
  Description of Artificial Sequence: Synthetic oligonucleotide
uaccacguguuggacggac

SEQ ID NO: 77325 - RNA, 19 nt, Artificial Sequence
  Description of Artificial Sequence: Synthetic oligonucleotide
ugcgugcacaugugcgcug

SEQ ID NO: 77326 - RNA, 19 nt, Artificial Sequence
  Description of Artificial Sequence: Synthetic oligonucleotide
ccucaugcgagacacuguc

SEQ ID NO: 77327 - RNA, 19 nt, Artificial Sequence
  Description of Artificial Sequence: Synthetic oligonucleotide
aagccaaaucggacccgag

SEQ ID NO: 77328 - RNA, 19 nt, Artificial Sequence
  Description of Artificial Sequence: Synthetic oligonucleotide
caugugcgcugggagacac

SEQ ID NO: 77329 - RNA, 19 nt, Artificial Sequence
  Description of Artificial Sequence: Synthetic oligonucleotide
cguaccgauuacuuuuggc

SEQ ID NO: 77330 - RNA, 19 nt, Artificial Sequence
  Description of Artificial Sequence: Synthetic oligonucleotide
ugggaacgcuugauucuau

SEQ ID NO: 77331 - RNA, 19 nt, Artificial Sequence
  Description of Artificial Sequence: Synthetic oligonucleotide
cuagagucguuuucuuaua

SEQ ID NO: 77332 - RNA, 19 nt, Artificial Sequence
  Description of Artificial Sequence: Synthetic oligonucleotide
ccccacuuaccucagggac

SEQ ID NO: 77333 - RNA, 19 nt, Artificial Sequence
  Description of Artificial Sequence: Synthetic oligonucleotide
acccuccguggccaacagg

SEQ ID NO: 77334 - RNA, 19 nt, Artificial Sequence
  Description of Artificial Sequence: Synthetic oligonucleotide
cgcccuauguauaaacgug

SEQ ID NO: 77335 - RNA, 19 nt, Artificial Sequence
  Description of Artificial Sequence: Synthetic oligonucleotide
gcaaguaaaccagggccug

SEQ ID NO: 77336 - RNA, 19 nt, Artificial Sequence
  Description of Artificial Sequence: Synthetic oligonucleotide
gacccuccguggccaacag

SEQ ID NO: 77337 - RNA, 19 nt, Artificial Sequence
  Description of Artificial Sequence: Synthetic oligonucleotide
augggcgccccuacaauca

SEQ ID NO: 77338 - RNA, 19 nt, Artificial Sequence
  Description of Artificial Sequence: Synthetic oligonucleotide
acuaaucagcagcguccaa

SEQ ID NO: 77339 - RNA, 19 nt, Artificial Sequence
  Description of Artificial Sequence: Synthetic oligonucleotide
gcacucccuaggcaggugc

SEQ ID NO: 77340 - RNA, 19 nt, Artificial Sequence
  Description of Artificial Sequence: Synthetic oligonucleotide
uucucacgacggaugucuu

SEQ ID NO: 77341 - RNA, 19 nt, Artificial Sequence
  Description of Artificial Sequence: Synthetic oligonucleotide
cacguguuggacggacuug

SEQ ID NO: 77342 - RNA, 19 nt, Artificial Sequence
  Description of Artificial Sequence: Synthetic oligonucleotide
ggaauacacgcccuaugua

SEQ ID NO: 77343 - RNA, 19 nt, Artificial Sequence
  Description of Artificial Sequence: Synthetic oligonucleotide
gcguccaagaagcaaggaa

SEQ ID NO: 77344 - RNA, 19 nt, Artificial Sequence
  Description of Artificial Sequence: Synthetic oligonucleotide
uggacggacuugugaggau

SEQ ID NO: 77345 - RNA, 19 nt, Artificial Sequence
  Description of Artificial Sequence: Synthetic oligonucleotide
ggguaauaagacugagucu

SEQ ID NO: 77346 - RNA, 19 nt, Artificial Sequence
  Description of Artificial Sequence: Synthetic oligonucleotide
augccccgcuuuugccugg

SEQ ID NO: 77347 - RNA, 19 nt, Artificial Sequence
  Description of Artificial Sequence: Synthetic oligonucleotide
gaacggagagguucuucau

SEQ ID NO: 77348 - RNA, 19 nt, Artificial Sequence
  Description of Artificial Sequence: Synthetic oligonucleotide
cuucaaccgagccggaaau

SEQ ID NO: 77349 - RNA, 19 nt, Artificial Sequence
  Description of Artificial Sequence: Synthetic oligonucleotide
gacuucguaccgauuacuu

SEQ ID NO: 77350 - RNA, 19 nt, Artificial Sequence
  Description of Artificial Sequence: Synthetic oligonucleotide
ccaggaacggaauuucaua

SEQ ID NO: 77351 - RNA, 19 nt, Artificial Sequence
  Description of Artificial Sequence: Synthetic oligonucleotide
gccuugcgugcacaugugc

SEQ ID NO: 77352 - RNA, 19 nt, Artificial Sequence
  Description of Artificial Sequence: Synthetic oligonucleotide
gcgugcacaugugcgcugg

SEQ ID NO: 77353 - RNA, 19 nt, Artificial Sequence
  Description of Artificial Sequence: Synthetic oligonucleotide
ggcgccccuacaaucagca

SEQ ID NO: 77354 - RNA, 19 nt, Artificial Sequence
  Description of Artificial Sequence: Synthetic oligonucleotide
gguaccuguccugccgaug

SEQ ID NO: 77355 - RNA, 19 nt, Artificial Sequence
  Description of Artificial Sequence: Synthetic oligonucleotide
acaugugcgcugggagaca

SEQ ID NO: 77356 - RNA, 19 nt, Artificial Sequence
  Description of Artificial Sequence: Synthetic oligonucleotide
ggguucagugggguuuugc

SEQ ID NO: 77357 - RNA, 19 nt, Artificial Sequence
  Description of Artificial Sequence: Synthetic oligonucleotide
gggaagauuuagggguuca

SEQ ID NO: 77358 - RNA, 19 nt, Artificial Sequence
  Description of Artificial Sequence: Synthetic oligonucleotide
accacguguuggacggacu

SEQ ID NO: 77359 - RNA, 19 nt, Artificial Sequence
  Description of Artificial Sequence: Synthetic oligonucleotide
cuucuucaaccgagccgga

SEQ ID NO: 77360 - RNA, 19 nt, Artificial Sequence
  Description of Artificial Sequence: Synthetic oligonucleotide
caucgaacuuucuggccau

SEQ ID NO: 77361 - RNA, 19 nt, Artificial Sequence
  Description of Artificial Sequence: Synthetic oligonucleotide
ggucucgaacauucaagau

SEQ ID NO: 77362 - RNA, 19 nt, Artificial Sequence
  Description of Artificial Sequence: Synthetic oligonucleotide
caagggacuuauguuuuau

SEQ ID NO: 77363 - RNA, 19 nt, Artificial Sequence
  Description of Artificial Sequence: Synthetic oligonucleotide
cacgacggaugucuucaua

SEQ ID NO: 77364 - RNA, 19 nt, Artificial Sequence
  Description of Artificial Sequence: Synthetic oligonucleotide
ggguucucacgacggaugu

SEQ ID NO: 77365 - RNA, 19 nt, Artificial Sequence
  Description of Artificial Sequence: Synthetic oligonucleotide
ggccguucacuuggggcag

SEQ ID NO: 77366 - RNA, 19 nt, Artificial Sequence
  Description of Artificial Sequence: Synthetic oligonucleotide
auguaaccuggcagugaaa

SEQ ID NO: 77367 - RNA, 19 nt, Artificial Sequence
  Description of Artificial Sequence: Synthetic oligonucleotide
acggacuugugaggaugau

SEQ ID NO: 77368 - RNA, 19 nt, Artificial Sequence
  Description of Artificial Sequence: Synthetic oligonucleotide
gugaauuucuagagucguu

SEQ ID NO: 77369 - RNA, 19 nt, Artificial Sequence
  Description of Artificial Sequence: Synthetic oligonucleotide
ccgagccggaaaugcuccc

SEQ ID NO: 77370 - RNA, 19 nt, Artificial Sequence
  Description of Artificial Sequence: Synthetic oligonucleotide
cucgaacauucaagauggu

SEQ ID NO: 77371 - RNA, 19 nt, Artificial Sequence
  Description of Artificial Sequence: Synthetic oligonucleotide
cguguuggacggacuugug

SEQ ID NO: 77372 - RNA, 19 nt, Artificial Sequence
  Description of Artificial Sequence: Synthetic oligonucleotide
caggguucucacgacggau

SEQ ID NO: 77373 - RNA, 19 nt, Artificial Sequence
  Description of Artificial Sequence: Synthetic oligonucleotide
ccauaugggcgccccuaca

SEQ ID NO: 77374 - RNA, 19 nt, Artificial Sequence
  Description of Artificial Sequence: Synthetic oligonucleotide
ccaaaucggacccgagagu

SEQ ID NO: 77375 - RNA, 19 nt, Artificial Sequence
  Description of Artificial Sequence: Synthetic oligonucleotide
ggcacucccuaggcaggug

SEQ ID NO: 77376 - RNA, 19 nt, Artificial Sequence
  Description of Artificial Sequence: Synthetic oligonucleotide
caaccccagcuaguccaga

SEQ ID NO: 77377 - RNA, 19 nt, Artificial Sequence
  Description of Artificial Sequence: Synthetic oligonucleotide
cuccuagauuagucaccgu

SEQ ID NO: 77378 - RNA, 19 nt, Artificial Sequence
  Description of Artificial Sequence: Synthetic oligonucleotide
guaccacguguuggacgga

SEQ ID NO: 77379 - RNA, 19 nt, Artificial Sequence
  Description of Artificial Sequence: Synthetic oligonucleotide
ccaaguggcaaggucaauu

SEQ ID NO: 77380 - RNA, 19 nt, Artificial Sequence
  Description of Artificial Sequence: Synthetic oligonucleotide
ccuauguauaaacgugcuu

SEQ ID NO: 77381 - RNA, 19 nt, Artificial Sequence
  Description of Artificial Sequence: Synthetic oligonucleotide
gcgguguccaggguaauuu

SEQ ID NO: 77382 - RNA, 19 nt, Artificial Sequence
  Description of Artificial Sequence: Synthetic oligonucleotide
cccgcuuuugccugguauu

SEQ ID NO: 77383 - RNA, 19 nt, Artificial Sequence
  Description of Artificial Sequence: Synthetic oligonucleotide
gugcgcugggagacacaaa

SEQ ID NO: 77384 - RNA, 19 nt, Artificial Sequence
  Description of Artificial Sequence: Synthetic oligonucleotide
ccacguguuggacggacuu

SEQ ID NO: 77385 - RNA, 19 nt, Artificial Sequence
  Description of Artificial Sequence: Synthetic oligonucleotide
ccagacuaaucagcagcgu

SEQ ID NO: 77386 - RNA, 19 nt, Artificial Sequence
  Description of Artificial Sequence: Synthetic oligonucleotide
cgguguccaggguaauuua

SEQ ID NO: 77387 - RNA, 19 nt, Artificial Sequence
  Description of Artificial Sequence: Synthetic oligonucleotide
ccacuucguuuugucagcu

SEQ ID NO: 77388 - RNA, 19 nt, Artificial Sequence
  Description of Artificial Sequence: Synthetic oligonucleotide
ccccgcuuuugccugguau

SEQ ID NO: 77389 - RNA, 19 nt, Artificial Sequence
  Description of Artificial Sequence: Synthetic oligonucleotide
cgagccggaaaugcucccu

SEQ ID NO: 77390 - RNA, 19 nt, Artificial Sequence
  Description of Artificial Sequence: Synthetic oligonucleotide
cacuuaccucagggacccu

SEQ ID NO: 77391 - RNA, 19 nt, Artificial Sequence
  Description of Artificial Sequence: Synthetic oligonucleotide
gccccgcuuuugccuggua

SEQ ID NO: 77392 - RNA, 19 nt, Artificial Sequence
  Description of Artificial Sequence: Synthetic oligonucleotide
aaacuuaucucgcaagacc

SEQ ID NO: 77393 - RNA, 19 nt, Artificial Sequence
  Description of Artificial Sequence: Synthetic oligonucleotide
cagacuaugaccuacagag

SEQ ID NO: 77394 - RNA, 19 nt, Artificial Sequence
  Description of Artificial Sequence: Synthetic oligonucleotide
acuacaacugccaugaggc

SEQ ID NO: 77395 - RNA, 19 nt, Artificial Sequence
  Description of Artificial Sequence: Synthetic oligonucleotide
ugucauaugugcaaagcgg

SEQ ID NO: 77396 - RNA, 19 nt, Artificial Sequence
  Description of Artificial Sequence: Synthetic oligonucleotide
ucuacuaacaaagucauac

SEQ ID NO: 77397 - RNA, 19 nt, Artificial Sequence
  Description of Artificial Sequence: Synthetic oligonucleotide
ugcuuaggaaauaaagugg

SEQ ID NO: 77398 - RNA, 19 nt, Artificial Sequence
  Description of Artificial Sequence: Synthetic oligonucleotide
aacccguacagguacaaac

SEQ ID NO: 77399 - RNA, 19 nt, Artificial Sequence
  Description of Artificial Sequence: Synthetic oligonucleotide
  modified_base (15)..(15): a, c, u, g, unknown or other
cauauugacaccaanaaga

SEQ ID NO: 77400 - RNA, 19 nt, Artificial Sequence
  Description of Artificial Sequence: Synthetic oligonucleotide
agguguuaggaguagaugg

SEQ ID NO: 77401 - RNA, 19 nt, Artificial Sequence
  Description of Artificial Sequence: Synthetic oligonucleotide
aagccuacccuguaaacac

SEQ ID NO: 77402 - RNA, 19 nt, Artificial Sequence
  Description of Artificial Sequence: Synthetic oligonucleotide
aagucauacaaagagcagg

SEQ ID NO: 77403 - RNA, 19 nt, Artificial Sequence
  Description of Artificial Sequence: Synthetic oligonucleotide
ugugcugaaccacagcacg

SEQ ID NO: 77404 - RNA, 19 nt, Artificial Sequence
  Description of Artificial Sequence: Synthetic oligonucleotide
aaauacgccauacggaaca

SEQ ID NO: 77405 - RNA, 19 nt, Artificial Sequence
  Description of Artificial Sequence: Synthetic oligonucleotide
uaugcaggaaagauaaaug

SEQ ID NO: 77406 - RNA, 19 nt, Artificial Sequence
  Description of Artificial Sequence: Synthetic oligonucleotide
uucgaacagacuaugaccu

SEQ ID NO: 77407 - RNA, 19 nt, Artificial Sequence
  Description of Artificial Sequence: Synthetic oligonucleotide
aaagacguggucacaaugg

SEQ ID NO: 77408 - RNA, 19 nt, Artificial Sequence
  Description of Artificial Sequence: Synthetic oligonucleotide
gaacaugagaaacggauug

SEQ ID NO: 77409 - RNA, 19 nt, Artificial Sequence
  Description of Artificial Sequence: Synthetic oligonucleotide
  modified_base (8)..(8): a, c, u, g, unknown or other
acaccaanaagacuacaac

SEQ ID NO: 77410 - RNA, 19 nt, Artificial Sequence
  Description of Artificial Sequence: Synthetic oligonucleotide
  modified_base (4)..(4): a, c, u, g, unknown or other
caanaagacuacaacugcc

SEQ ID NO: 77411 - RNA, 19 nt, Artificial Sequence
  Description of Artificial Sequence: Synthetic oligonucleotide
augucauaugugcaaagcg

SEQ ID NO: 77412 - RNA, 19 nt, Artificial Sequence
  Description of Artificial Sequence: Synthetic oligonucleotide
cuucgaacagacuaugacc

SEQ ID NO: 77413 - RNA, 19 nt, Artificial Sequence
  Description of Artificial Sequence: Synthetic oligonucleotide
aacaugagaaacggauugc

SEQ ID NO: 77414 - RNA, 19 nt, Artificial Sequence
  Description of Artificial Sequence: Synthetic oligonucleotide
cauucuagccccaaggaac

SEQ ID NO: 77415 - RNA, 19 nt, Artificial Sequence
  Description of Artificial Sequence: Synthetic oligonucleotide
  modified_base (18)..(18): a, c, u, g, unknown or other
ugacauauugacaccaana

SEQ ID NO: 77416 - RNA, 19 nt, Artificial Sequence
  Description of Artificial Sequence: Synthetic oligonucleotide
uuagcgucuucucauaggu

SEQ ID NO: 77417 - RNA, 19 nt, Artificial Sequence
  Description of Artificial Sequence: Synthetic oligonucleotide
uuuccaugaccaaacaccu

SEQ ID NO: 77418 - RNA, 19 nt, Artificial Sequence
  Description of Artificial Sequence: Synthetic oligonucleotide
uuuugggcgucuuugaggu

SEQ ID NO: 77419 - RNA, 19 nt, Artificial Sequence
  Description of Artificial Sequence: Synthetic oligonucleotide
gucacuaaagcgcucuugg

SEQ ID NO: 77420 - RNA, 19 nt, Artificial Sequence
  Description of Artificial Sequence: Synthetic oligonucleotide
  modified_base (3)..(3): a, c, u, g, unknown or other
aanaagacuacaacugcca

SEQ ID NO: 77421 - RNA, 19 nt, Artificial Sequence
  Description of Artificial Sequence: Synthetic oligonucleotide
ugccuaacaaaaucugagg

SEQ ID NO: 77422 - RNA, 19 nt, Artificial Sequence
  Description of Artificial Sequence: Synthetic oligonucleotide
aguacagaagugucagugg

SEQ ID NO: 77423 - RNA, 19 nt, Artificial Sequence
  Description of Artificial Sequence: Synthetic oligonucleotide
ucuaucaagcuuccccagg

SEQ ID NO: 77424 - RNA, 19 nt, Artificial Sequence
  Description of Artificial Sequence: Synthetic oligonucleotide
gacuaugaccuacagagca

SEQ ID NO: 77425 - RNA, 19 nt, Artificial Sequence
  Description of Artificial Sequence: Synthetic oligonucleotide
uuguucuguauaaaguacu

SEQ ID NO: 77426 - RNA, 19 nt, Artificial Sequence
  Description of Artificial Sequence: Synthetic oligonucleotide
caugggaagcgauacgugg

SEQ ID NO: 77427 - RNA, 19 nt, Artificial Sequence
  Description of Artificial Sequence: Synthetic oligonucleotide
  modified_base (6)..(6): a, c, u, g, unknown or other
accaanaagacuacaacug

SEQ ID NO: 77428 - RNA, 19 nt, Artificial Sequence
  Description of Artificial Sequence: Synthetic oligonucleotide
aaacuaucucuaucaagcu

SEQ ID NO: 77429 - RNA, 19 nt, Artificial Sequence
  Description of Artificial Sequence: Synthetic oligonucleotide
gacguauacaggcacugag

SEQ ID NO: 77430 - RNA, 19 nt, Artificial Sequence
  Description of Artificial Sequence: Synthetic oligonucleotide
agggguguuacguccaugg

SEQ ID NO: 77431 - RNA, 19 nt, Artificial Sequence
  Description of Artificial Sequence: Synthetic oligonucleotide
cugccuaacaaaaucugag

SEQ ID NO: 77432 - RNA, 19 nt, Artificial Sequence
  Description of Artificial Sequence: Synthetic oligonucleotide
aacuuaucucgcaagacca

SEQ ID NO: 77433 - RNA, 19 nt, Artificial Sequence
  Description of Artificial Sequence: Synthetic oligonucleotide
auuagcgucuucucauagg

SEQ ID NO: 77434 - RNA, 19 nt, Artificial Sequence
  Description of Artificial Sequence: Synthetic oligonucleotide
  modified_base (2)..(2): a, c, u, g, unknown or other
anaagacuacaacugccau

SEQ ID NO: 77435 - RNA, 19 nt, Artificial Sequence
  Description of Artificial Sequence: Synthetic oligonucleotide
cuaucaagcuuccccaggg

SEQ ID NO: 77436 - RNA, 19 nt, Artificial Sequence
  Description of Artificial Sequence: Synthetic oligonucleotide
aacagacuaugaccuacag

SEQ ID NO: 77437 - RNA, 19 nt, Artificial Sequence
  Description of Artificial Sequence: Synthetic oligonucleotide
gaaagacguggucacaaug

SEQ ID NO: 77438 - RNA, 19 nt, Artificial Sequence
  Description of Artificial Sequence: Synthetic oligonucleotide
uccggcuuuaggcugaaga

SEQ ID NO: 77439 - RNA, 19 nt, Artificial Sequence
  Description of Artificial Sequence: Synthetic oligonucleotide
cauaccuaccauuacccac

SEQ ID NO: 77440 - RNA, 19 nt, Artificial Sequence
  Description of Artificial Sequence: Synthetic oligonucleotide
gaauaugugcuccacaggu

SEQ ID NO: 77441 - RNA, 19 nt, Artificial Sequence
  Description of Artificial Sequence: Synthetic oligonucleotide
uucugcgggaacaagucga

SEQ ID NO: 77442 - RNA, 19 nt, Artificial Sequence
  Description of Artificial Sequence: Synthetic oligonucleotide
uuugaagcccgaagcacug

SEQ ID NO: 77443 - RNA, 19 nt, Artificial Sequence
  Description of Artificial Sequence: Synthetic oligonucleotide
uccgagggcauucacucag

SEQ ID NO: 77444 - RNA, 19 nt, Artificial Sequence
  Description of Artificial Sequence: Synthetic oligonucleotide
ucgugaaucagcugggccu

SEQ ID NO: 77445 - RNA, 19 nt, Artificial Sequence
  Description of Artificial Sequence: Synthetic oligonucleotide
gggguauccacacagaaac

SEQ ID NO: 77446 - RNA, 19 nt, Artificial Sequence
  Description of Artificial Sequence: Synthetic oligonucleotide
aucauuagcgucuucucau

SEQ ID NO: 77447 - RNA, 19 nt, Artificial Sequence
  Description of Artificial Sequence: Synthetic oligonucleotide
uaggugaaugcagauaugu

SEQ ID NO: 77448 - RNA, 19 nt, Artificial Sequence
  Description of Artificial Sequence: Synthetic oligonucleotide
ucggucaagaccucaagaa

SEQ ID NO: 77449 - RNA, 19 nt, Artificial Sequence
  Description of Artificial Sequence: Synthetic oligonucleotide
agugucacggacagugucc

SEQ ID NO: 77450 - RNA, 19 nt, Artificial Sequence
  Description of Artificial Sequence: Synthetic oligonucleotide
aacuaucucuaucaagcuu

SEQ ID NO: 77451 - RNA, 19 nt, Artificial Sequence
  Description of Artificial Sequence: Synthetic oligonucleotide
uccccuaaugggaacuucc

SEQ ID NO: 77452 - RNA, 19 nt, Artificial Sequence
  Description of Artificial Sequence: Synthetic oligonucleotide
agagcgguuggauccugcc

SEQ ID NO: 77453 - RNA, 19 nt, Artificial Sequence
  Description of Artificial Sequence: Synthetic oligonucleotide
uaagaguggacaguccuca

SEQ ID NO: 77454 - RNA, 19 nt, Artificial Sequence
  Description of Artificial Sequence: Synthetic oligonucleotide
guuacguccaugggaagcg

SEQ ID NO: 77455 - RNA, 19 nt, Artificial Sequence
  Description of Artificial Sequence: Synthetic oligonucleotide
uuaucucgcaagaccacac

SEQ ID NO: 77456 - RNA, 19 nt, Artificial Sequence
  Description of Artificial Sequence: Synthetic oligonucleotide
aaagccgacuagcugcaga

SEQ ID NO: 77457 - RNA, 19 nt, Artificial Sequence
  Description of Artificial Sequence: Synthetic oligonucleotide
aauggugacccaagccuac

SEQ ID NO: 77458 - RNA, 19 nt, Artificial Sequence
  Description of Artificial Sequence: Synthetic oligonucleotide
ugucuguaaggacguauac

SEQ ID NO: 77459 - RNA, 19 nt, Artificial Sequence
  Description of Artificial Sequence: Synthetic oligonucleotide
caugucauaugugcaaagc

SEQ ID NO: 77460 - RNA, 19 nt, Artificial Sequence
  Description of Artificial Sequence: Synthetic oligonucleotide
agaaaggguuaucugccug

SEQ ID NO: 77461 - RNA, 19 nt, Artificial Sequence
  Description of Artificial Sequence: Synthetic oligonucleotide
uaaauacgccauacggaac

SEQ ID NO: 77462 - RNA, 19 nt, Artificial Sequence
  Description of Artificial Sequence: Synthetic oligonucleotide
uggcucggcagaacaaagg

SEQ ID NO: 77463 - RNA, 19 nt, Artificial Sequence
  Description of Artificial Sequence: Synthetic oligonucleotide
agcgauacguggcaggaga

SEQ ID NO: 77464 - RNA, 19 nt, Artificial Sequence
  Description of Artificial Sequence: Synthetic oligonucleotide
uugggcgucuuugaggucc

SEQ ID NO: 77465 - RNA, 19 nt, Artificial Sequence
  Description of Artificial Sequence: Synthetic oligonucleotide
aaacggauugcugcuguug

SEQ ID NO: 77466 - RNA, 19 nt, Artificial Sequence
  Description of Artificial Sequence: Synthetic oligonucleotide
uaucucgcaagaccacacc

SEQ ID NO: 77467 - RNA, 19 nt, Artificial Sequence
  Description of Artificial Sequence: Synthetic oligonucleotide
gacguggucacaauggcca

SEQ ID NO: 77468 - RNA, 19 nt, Artificial Sequence
  Description of Artificial Sequence: Synthetic oligonucleotide
agguuauccaugguagggg

SEQ ID NO: 77469 - RNA, 19 nt, Artificial Sequence
  Description of Artificial Sequence: Synthetic oligonucleotide
aauagggacaagauugauu

SEQ ID NO: 77470 - RNA, 19 nt, Artificial Sequence
  Description of Artificial Sequence: Synthetic oligonucleotide
ugacuucccguccaccacc

SEQ ID NO: 77471 - RNA, 19 nt, Artificial Sequence
  Description of Artificial Sequence: Synthetic oligonucleotide
uccaugggaagcgauacgu

SEQ ID NO: 77472 - RNA, 19 nt, Artificial Sequence
  Description of Artificial Sequence: Synthetic oligonucleotide
  modified_base (5)..(5): a, c, u, g, unknown or other
ccaanaagacuacaacugc

SEQ ID NO: 77473 - RNA, 19 nt, Artificial Sequence
  Description of Artificial Sequence: Synthetic oligonucleotide
uggcaaguugaccucuggc

SEQ ID NO: 77474 - RNA, 19 nt, Artificial Sequence
  Description of Artificial Sequence: Synthetic oligonucleotide
caacucucagcguucuugc

SEQ ID NO: 77475 - RNA, 19 nt, Artificial Sequence
  Description of Artificial Sequence: Synthetic oligonucleotide
uguuacggaggggaaguag

SEQ ID NO: 77476 - RNA, 19 nt, Artificial Sequence
  Description of Artificial Sequence: Synthetic oligonucleotide
aagccgacuagcugcagau

SEQ ID NO: 77477 - RNA, 19 nt, Artificial Sequence
  Description of Artificial Sequence: Synthetic oligonucleotide
agucauacaaagagcagga

SEQ ID NO: 77478 - RNA, 19 nt, Artificial Sequence
  Description of Artificial Sequence: Synthetic oligonucleotide
acccuguucaaucccucgg

SEQ ID NO: 77479 - RNA, 19 nt, Artificial Sequence
  Description of Artificial Sequence: Synthetic oligonucleotide
augauccccuguuacggag

SEQ ID NO: 77480 - RNA, 19 nt, Artificial Sequence
  Description of Artificial Sequence: Synthetic oligonucleotide
  modified_base (7)..(7): a, c, u, g, unknown or other
caccaanaagacuacaacu

SEQ ID NO: 77481 - RNA, 19 nt, Artificial Sequence
  Description of Artificial Sequence: Synthetic oligonucleotide
acagacuaugaccuacaga

SEQ ID NO: 77482 - RNA, 19 nt, Artificial Sequence
  Description of Artificial Sequence: Synthetic oligonucleotide
agaaacggauugcugcugu

SEQ ID NO: 77483 - RNA, 19 nt, Artificial Sequence
  Description of Artificial Sequence: Synthetic oligonucleotide
acugugggcuccccguucg

SEQ ID NO: 77484 - RNA, 19 nt, Artificial Sequence
  Description of Artificial Sequence: Synthetic oligonucleotide
gacccuguucaaucccucg

SEQ ID NO: 77485 - RNA, 19 nt, Artificial Sequence
  Description of Artificial Sequence: Synthetic oligonucleotide
ugccaugauccccuguuac

SEQ ID NO: 77486 - RNA, 19 nt, Artificial Sequence
  Description of Artificial Sequence: Synthetic oligonucleotide
ucgcaagaccacaccuucg

SEQ ID NO: 77487 - RNA, 19 nt, Artificial Sequence
  Description of Artificial Sequence: Synthetic oligonucleotide
ugggaagcgauacguggca

SEQ ID NO: 77488 - RNA, 19 nt, Artificial Sequence
  Description of Artificial Sequence: Synthetic oligonucleotide
guucugcgggaacaagucg

SEQ ID NO: 77489 - RNA, 19 nt, Artificial Sequence
  Description of Artificial Sequence: Synthetic oligonucleotide
acguauacaggcacugagg

SEQ ID NO: 77490 - RNA, 19 nt, Artificial Sequence
  Description of Artificial Sequence: Synthetic oligonucleotide
acauucuagccccaaggaa

SEQ ID NO: 77491 - RNA, 19 nt, Artificial Sequence
  Description of Artificial Sequence: Synthetic oligonucleotide
gaucaggugggaugcacca

SEQ ID NO: 77492 - RNA, 19 nt, Artificial Sequence
  Description of Artificial Sequence: Synthetic oligonucleotide
aaugaaagacguggucaca

SEQ ID NO: 77493 - RNA, 19 nt, Artificial Sequence
  Description of Artificial Sequence: Synthetic oligonucleotide
ugaagcccgaagcacuggu

SEQ ID NO: 77494 - RNA, 19 nt, Artificial Sequence
  Description of Artificial Sequence: Synthetic oligonucleotide
agacguggucacaauggcc

SEQ ID NO: 77495 - RNA, 19 nt, Artificial Sequence
  Description of Artificial Sequence: Synthetic oligonucleotide
aagcgcucuugguucugcg

SEQ ID NO: 77496 - RNA, 19 nt, Artificial Sequence
  Description of Artificial Sequence: Synthetic oligonucleotide
gagguaagaguggacaguc

SEQ ID NO: 77497 - RNA, 19 nt, Artificial Sequence
  Description of Artificial Sequence: Synthetic oligonucleotide
caaacuuaucucgcaagac

SEQ ID NO: 77498 - RNA, 19 nt, Artificial Sequence
  Description of Artificial Sequence: Synthetic oligonucleotide
ucuugguucugcgggaaca

SEQ ID NO: 77499 - RNA, 19 nt, Artificial Sequence
  Description of Artificial Sequence: Synthetic oligonucleotide
ggcauauucaacaggacca

SEQ ID NO: 77500 - RNA, 19 nt, Artificial Sequence
  Description of Artificial Sequence: Synthetic oligonucleotide
ugaccccagagucccuugg

SEQ ID NO: 77501 - RNA, 19 nt, Artificial Sequence
  Description of Artificial Sequence: Synthetic oligonucleotide
caaauggugacccaagccu

SEQ ID NO: 77502 - RNA, 19 nt, Artificial Sequence
  Description of Artificial Sequence: Synthetic oligonucleotide
agaagccuagggguguuac

SEQ ID NO: 77503 - RNA, 19 nt, Artificial Sequence
  Description of Artificial Sequence: Synthetic oligonucleotide
auaccuaccauuacccaca

SEQ ID NO: 77504 - RNA, 19 nt, Artificial Sequence
  Description of Artificial Sequence: Synthetic oligonucleotide
cuaccauuacccacaaaga

SEQ ID NO: 77505 - RNA, 19 nt, Artificial Sequence
  Description of Artificial Sequence: Synthetic oligonucleotide
guaugggaugcuguguucc

SEQ ID NO: 77506 - RNA, 19 nt, Artificial Sequence
  Description of Artificial Sequence: Synthetic oligonucleotide
gggaaaagcacaacacagg

SEQ ID NO: 77507 - RNA, 19 nt, Artificial Sequence
  Description of Artificial Sequence: Synthetic oligonucleotide
cugucgugaaucagcuggg

SEQ ID NO: 77508 - RNA, 19 nt, Artificial Sequence
  Description of Artificial Sequence: Synthetic oligonucleotide
uccccuguuacggagggga

SEQ ID NO: 77509 - RNA, 19 nt, Artificial Sequence
  Description of Artificial Sequence: Synthetic oligonucleotide
ggucaagaccucaagaaac

SEQ ID NO: 77510 - RNA, 19 nt, Artificial Sequence
  Description of Artificial Sequence: Synthetic oligonucleotide
aaaggguuaucugccugcu

SEQ ID NO: 77511 - RNA, 19 nt, Artificial Sequence
  Description of Artificial Sequence: Synthetic oligonucleotide
uuggucguucucugcaaca

SEQ ID NO: 77512 - RNA, 19 nt, Artificial Sequence
  Description of Artificial Sequence: Synthetic oligonucleotide
gccaucacgggcuauggcc

SEQ ID NO: 77513 - RNA, 19 nt, Artificial Sequence
  Description of Artificial Sequence: Synthetic oligonucleotide
cugaaccacagcacgguuc

SEQ ID NO: 77514 - RNA, 19 nt, Artificial Sequence
  Description of Artificial Sequence: Synthetic oligonucleotide
acuuaucucgcaagaccac

SEQ ID NO: 77515 - RNA, 19 nt, Artificial Sequence
  Description of Artificial Sequence: Synthetic oligonucleotide
cucgcaagaccacaccuuc

SEQ ID NO: 77516 - RNA, 19 nt, Artificial Sequence
  Description of Artificial Sequence: Synthetic oligonucleotide
uucccguccaccaccccug

SEQ ID NO: 77517 - RNA, 19 nt, Artificial Sequence
  Description of Artificial Sequence: Synthetic oligonucleotide
uuuaggcugaagaggucuu

SEQ ID NO: 77518 - RNA, 19 nt, Artificial Sequence
  Description of Artificial Sequence: Synthetic oligonucleotide
acguguucugggaagagcu

SEQ ID NO: 77519 - RNA, 19 nt, Artificial Sequence
  Description of Artificial Sequence: Synthetic oligonucleotide
aggugaaugcagauauguc

SEQ ID NO: 77520 - RNA, 19 nt, Artificial Sequence
  Description of Artificial Sequence: Synthetic oligonucleotide
aggaguuccgagggcauuc

SEQ ID NO: 77521 - RNA, 19 nt, Artificial Sequence
  Description of Artificial Sequence: Synthetic oligonucleotide
ggcauaccuaccauuaccc

SEQ ID NO: 77522 - RNA, 19 nt, Artificial Sequence
  Description of Artificial Sequence: Synthetic oligonucleotide
agacagaccgggaugucag

SEQ ID NO: 77523 - RNA, 19 nt, Artificial Sequence
  Description of Artificial Sequence: Synthetic oligonucleotide
gcgguucccaagcagacag

SEQ ID NO: 77524 - RNA, 19 nt, Artificial Sequence
  Description of Artificial Sequence: Synthetic oligonucleotide
gacagaccgggaugucagg

SEQ ID NO: 77525 - RNA, 19 nt, Artificial Sequence
  Description of Artificial Sequence: Synthetic oligonucleotide
gggcauaccuaccauuacc

SEQ ID NO: 77526 - RNA, 19 nt, Artificial Sequence
  Description of Artificial Sequence: Synthetic oligonucleotide
uccccaaacuuaucucgca

SEQ ID NO: 77527 - RNA, 19 nt, Artificial Sequence
  Description of Artificial Sequence: Synthetic oligonucleotide
uucacguguucugggaaga

SEQ ID NO: 77528 - RNA, 19 nt, Artificial Sequence
  Description of Artificial Sequence: Synthetic oligonucleotide
ugggcauaccuaccauuac

SEQ ID NO: 77529 - RNA, 19 nt, Artificial Sequence
  Description of Artificial Sequence: Synthetic oligonucleotide
aauaugugcuccacagguu

SEQ ID NO: 77530 - RNA, 19 nt, Artificial Sequence
  Description of Artificial Sequence: Synthetic oligonucleotide
ucauuagcgucuucucaua

SEQ ID NO: 77531 - RNA, 19 nt, Artificial Sequence
  Description of Artificial Sequence: Synthetic oligonucleotide
guuacggaggggaaguaga

SEQ ID NO: 77532 - RNA, 19 nt, Artificial Sequence
  Description of Artificial Sequence: Synthetic oligonucleotide
gaagcgauacguggcagga

SEQ ID NO: 77533 - RNA, 19 nt, Artificial Sequence
  Description of Artificial Sequence: Synthetic oligonucleotide
agaugcgcauccugggacu

SEQ ID NO: 77534 - RNA, 19 nt, Artificial Sequence
  Description of Artificial Sequence: Synthetic oligonucleotide
cuggcucggcagaacaaag

SEQ ID NO: 77535 - RNA, 19 nt, Artificial Sequence
  Description of Artificial Sequence: Synthetic oligonucleotide
ccaaauggugacccaagcc

SEQ ID NO: 77536 - RNA, 19 nt, Artificial Sequence
  Description of Artificial Sequence: Synthetic oligonucleotide
auggugacccaagccuacc

SEQ ID NO: 77537 - RNA, 19 nt, Artificial Sequence
  Description of Artificial Sequence: Synthetic oligonucleotide
aggacguauacaggcacug

SEQ ID NO: 77538 - RNA, 19 nt, Artificial Sequence
  Description of Artificial Sequence: Synthetic oligonucleotide
caaugacgaugacccaggg

SEQ ID NO: 77539 - RNA, 19 nt, Artificial Sequence
  Description of Artificial Sequence: Synthetic oligonucleotide
ucugcgggaacaagucgau

SEQ ID NO: 77540 - RNA, 19 nt, Artificial Sequence
  Description of Artificial Sequence: Synthetic oligonucleotide
agcccgaagcacugguguc

SEQ ID NO: 77541 - RNA, 19 nt, Artificial Sequence
  Description of Artificial Sequence: Synthetic oligonucleotide
guguuaggaguagauggug

SEQ ID NO: 77542 - RNA, 19 nt, Artificial Sequence
  Description of Artificial Sequence: Synthetic oligonucleotide
caagccuacccuguaaaca

SEQ ID NO: 77543 - RNA, 19 nt, Artificial Sequence
  Description of Artificial Sequence: Synthetic oligonucleotide
cuuugaagcccgaagcacu

SEQ ID NO: 77544 - RNA, 19 nt, Artificial Sequence
  Description of Artificial Sequence: Synthetic oligonucleotide
acgggguauccacacagaa

SEQ ID NO: 77545 - RNA, 19 nt, Artificial Sequence
  Description of Artificial Sequence: Synthetic oligonucleotide
ucuagccccaaggaacggu

SEQ ID NO: 77546 - RNA, 19 nt, Artificial Sequence
  Description of Artificial Sequence: Synthetic oligonucleotide
aauacgccauacggaacau

SEQ ID NO: 77547 - RNA, 19 nt, Artificial Sequence
  Description of Artificial Sequence: Synthetic oligonucleotide
cuuaucucgcaagaccaca

SEQ ID NO: 77548 - RNA, 19 nt, Artificial Sequence
  Description of Artificial Sequence: Synthetic oligonucleotide
augaccuacagagcagagu

SEQ ID NO: 77549 - RNA, 19 nt, Artificial Sequence
  Description of Artificial Sequence: Synthetic oligonucleotide
aagcgauacguggcaggag

SEQ ID NO: 77550 - RNA, 19 nt, Artificial Sequence
  Description of Artificial Sequence: Synthetic oligonucleotide
ugucgugaaucagcugggc

SEQ ID NO: 77551 - RNA, 19 nt, Artificial Sequence
  Description of Artificial Sequence: Synthetic oligonucleotide
ccaugauccccuguuacgg

SEQ ID NO: 77552 - RNA, 19 nt, Artificial Sequence
  Description of Artificial Sequence: Synthetic oligonucleotide
agagugcacaaggguaaag

SEQ ID NO: 77553 - RNA, 19 nt, Artificial Sequence
  Description of Artificial Sequence: Synthetic oligonucleotide
gguaagaguggacaguccu

SEQ ID NO: 77554 - RNA, 19 nt, Artificial Sequence
  Description of Artificial Sequence: Synthetic oligonucleotide
aguuccgagggcauucacu

SEQ ID NO: 77555 - RNA, 19 nt, Artificial Sequence
  Description of Artificial Sequence: Synthetic oligonucleotide
cccaaacuuaucucgcaag

SEQ ID NO: 77556 - RNA, 19 nt, Artificial Sequence
  Description of Artificial Sequence: Synthetic oligonucleotide
ggacuuuugggcgucuuug

SEQ ID NO: 77557 - RNA, 19 nt, Artificial Sequence
  Description of Artificial Sequence: Synthetic oligonucleotide
ucgaugcaggccccaaaua

SEQ ID NO: 77558 - RNA, 19 nt, Artificial Sequence
  Description of Artificial Sequence: Synthetic oligonucleotide
uccccguucggcuuuccau

SEQ ID NO: 77559 - RNA, 19 nt, Artificial Sequence
  Description of Artificial Sequence: Synthetic oligonucleotide
acccguacagguacaaacu

SEQ ID NO: 77560 - RNA, 19 nt, Artificial Sequence
  Description of Artificial Sequence: Synthetic oligonucleotide
guaagaguggacaguccuc

SEQ ID NO: 77561 - RNA, 19 nt, Artificial Sequence
  Description of Artificial Sequence: Synthetic oligonucleotide
ugucauggacugugugcac

SEQ ID NO: 77562 - RNA, 19 nt, Artificial Sequence
  Description of Artificial Sequence: Synthetic oligonucleotide
gaagcccgaagcacuggug

SEQ ID NO: 77563 - RNA, 19 nt, Artificial Sequence
  Description of Artificial Sequence: Synthetic oligonucleotide
uuccgagggcauucacuca

SEQ ID NO: 77564 - RNA, 19 nt, Artificial Sequence
  Description of Artificial Sequence: Synthetic oligonucleotide
gccccaaauagcacuaugc

SEQ ID NO: 77565 - RNA, 19 nt, Artificial Sequence
  Description of Artificial Sequence: Synthetic oligonucleotide
agaaagccgacuagcugca

SEQ ID NO: 77566 - RNA, 19 nt, Artificial Sequence
  Description of Artificial Sequence: Synthetic oligonucleotide
uucacucaggugggaacac

SEQ ID NO: 77567 - RNA, 19 nt, Artificial Sequence
  Description of Artificial Sequence: Synthetic oligonucleotide
ucgaacagacuaugaccua

SEQ ID NO: 77568 - RNA, 19 nt, Artificial Sequence
  Description of Artificial Sequence: Synthetic oligonucleotide
ccaaggaacggugugcuug

SEQ ID NO: 77569 - RNA, 19 nt, Artificial Sequence
  Description of Artificial Sequence: Synthetic oligonucleotide
agaagaccaaugccagcuu

SEQ ID NO: 77570 - RNA, 19 nt, Artificial Sequence
  Description of Artificial Sequence: Synthetic oligonucleotide
augcaaggagccauuccug

SEQ ID NO: 77571 - RNA, 19 nt, Artificial Sequence
  Description of Artificial Sequence: Synthetic oligonucleotide
gccuagggguguuacgucc

SEQ ID NO: 77572 - RNA, 19 nt, Artificial Sequence
  Description of Artificial Sequence: Synthetic oligonucleotide
ggcaaguugaccucuggcu

SEQ ID NO: 77573 - RNA, 19 nt, Artificial Sequence
  Description of Artificial Sequence: Synthetic oligonucleotide
caacaggaccagaugcgca

SEQ ID NO: 77574 - RNA, 19 nt, Artificial Sequence
  Description of Artificial Sequence: Synthetic oligonucleotide
cuucuccccuaaugggaac

SEQ ID NO: 77575 - RNA, 19 nt, Artificial Sequence
  Description of Artificial Sequence: Synthetic oligonucleotide
gaugucagguggggcgaag

SEQ ID NO: 77576 - RNA, 19 nt, Artificial Sequence
  Description of Artificial Sequence: Synthetic oligonucleotide
gagcgguuggauccugcca

SEQ ID NO: 77577 - RNA, 19 nt, Artificial Sequence
  Description of Artificial Sequence: Synthetic oligonucleotide
caugauccccuguuacgga

SEQ ID NO: 77578 - RNA, 19 nt, Artificial Sequence
  Description of Artificial Sequence: Synthetic oligonucleotide
gucauggacugugugcaca

SEQ ID NO: 77579 - RNA, 19 nt, Artificial Sequence
  Description of Artificial Sequence: Synthetic oligonucleotide
cagagcgguuggauccugc

SEQ ID NO: 77580 - RNA, 19 nt, Artificial Sequence
  Description of Artificial Sequence: Synthetic oligonucleotide
ccguacagguacaaacuug

SEQ ID NO: 77581 - RNA, 19 nt, Artificial Sequence
  Description of Artificial Sequence: Synthetic oligonucleotide
gggguguuacguccauggg

SEQ ID NO: 77582 - RNA, 19 nt, Artificial Sequence
  Description of Artificial Sequence: Synthetic oligonucleotide
ccaaacuuaucucgcaaga

SEQ ID NO: 77583 - RNA, 19 nt, Artificial Sequence
  Description of Artificial Sequence: Synthetic oligonucleotide
gguucugcgggaacaaguc

SEQ ID NO: 77584 - RNA, 19 nt, Artificial Sequence
  Description of Artificial Sequence: Synthetic oligonucleotide
uuacguccaugggaagcga

SEQ ID NO: 77585 - RNA, 19 nt, Artificial Sequence
  Description of Artificial Sequence: Synthetic oligonucleotide
gcacgguucacacucugga

SEQ ID NO: 77586 - RNA, 19 nt, Artificial Sequence
  Description of Artificial Sequence: Synthetic oligonucleotide
caucacgggcuauggccug

SEQ ID NO: 77587 - RNA, 19 nt, Artificial Sequence
  Description of Artificial Sequence: Synthetic oligonucleotide
caccagcauagauggccag

SEQ ID NO: 77588 - RNA, 19 nt, Artificial Sequence
  Description of Artificial Sequence: Synthetic oligonucleotide
ggcugccuaacaaaaucug

SEQ ID NO: 77589 - RNA, 19 nt, Artificial Sequence
  Description of Artificial Sequence: Synthetic oligonucleotide
gaguuccgagggcauucac

SEQ ID NO: 77590 - RNA, 19 nt, Artificial Sequence
  Description of Artificial Sequence: Synthetic oligonucleotide
cuacaacugccaugaggca

SEQ ID NO: 77591 - RNA, 19 nt, Artificial Sequence
  Description of Artificial Sequence: Synthetic oligonucleotide
auacgccauacggaacaug

SEQ ID NO: 77592 - RNA, 19 nt, Artificial Sequence
  Description of Artificial Sequence: Synthetic oligonucleotide
auacguggcaggagaccag

SEQ ID NO: 77593 - RNA, 19 nt, Artificial Sequence
  Description of Artificial Sequence: Synthetic oligonucleotide
gaaagccgacuagcugcag

SEQ ID NO: 77594 - RNA, 19 nt, Artificial Sequence
  Description of Artificial Sequence: Synthetic oligonucleotide
cuugucacacuguggcucu

SEQ ID NO: 77595 - RNA, 19 nt, Artificial Sequence
  Description of Artificial Sequence: Synthetic oligonucleotide
caggccauaaggacagugu

SEQ ID NO: 77596 - RNA, 19 nt, Artificial Sequence
  Description of Artificial Sequence: Synthetic oligonucleotide
uagggguguuacguccaug

SEQ ID NO: 77597 - RNA, 19 nt, Artificial Sequence
  Description of Artificial Sequence: Synthetic oligonucleotide
gguaugggaugcuguguuc

SEQ ID NO: 77598 - RNA, 19 nt, Artificial Sequence
  Description of Artificial Sequence: Synthetic oligonucleotide
gggaugcaccaucucgcag

SEQ ID NO: 77599 - RNA, 19 nt, Artificial Sequence
  Description of Artificial Sequence: Synthetic oligonucleotide
gggacggcaugucauaugu

SEQ ID NO: 77600 - RNA, 19 nt, Artificial Sequence
  Description of Artificial Sequence: Synthetic oligonucleotide
gcugccuaacaaaaucuga

SEQ ID NO: 77601 - RNA, 19 nt, Artificial Sequence
  Description of Artificial Sequence: Synthetic oligonucleotide
ggucguucucugcaacaac

SEQ ID NO: 77602 - RNA, 19 nt, Artificial Sequence
  Description of Artificial Sequence: Synthetic oligonucleotide
ggccccaaauagcacuaug

SEQ ID NO: 77603 - RNA, 19 nt, Artificial Sequence
  Description of Artificial Sequence: Synthetic oligonucleotide
gaaucagcugggccucucu

SEQ ID NO: 77604 - RNA, 19 nt, Artificial Sequence
  Description of Artificial Sequence: Synthetic oligonucleotide
gcauaccuaccauuaccca

SEQ ID NO: 77605 - RNA, 19 nt, Artificial Sequence
  Description of Artificial Sequence: Synthetic oligonucleotide
uuugggcgucuuugagguc

SEQ ID NO: 77606 - RNA, 19 nt, Artificial Sequence
  Description of Artificial Sequence: Synthetic oligonucleotide
agcgugcgguucccaagca

SEQ ID NO: 77607 - RNA, 19 nt, Artificial Sequence
  Description of Artificial Sequence: Synthetic oligonucleotide
cccuaaugggaacuuccug

SEQ ID NO: 77608 - RNA, 19 nt, Artificial Sequence
  Description of Artificial Sequence: Synthetic oligonucleotide
ggcucggcagaacaaaggu

SEQ ID NO: 77609 - RNA, 19 nt, Artificial Sequence
  Description of Artificial Sequence: Synthetic oligonucleotide
gaauagggacaagauugau

SEQ ID NO: 77610 - RNA, 19 nt, Artificial Sequence
  Description of Artificial Sequence: Synthetic oligonucleotide
caaggaacggugugcuugu

SEQ ID NO: 77611 - RNA, 19 nt, Artificial Sequence
  Description of Artificial Sequence: Synthetic oligonucleotide
cguucggcuuuccaugacc

SEQ ID NO: 77612 - RNA, 19 nt, Artificial Sequence
  Description of Artificial Sequence: Synthetic oligonucleotide
cacgucaucugcacuuugu

SEQ ID NO: 77613 - RNA, 19 nt, Artificial Sequence
  Description of Artificial Sequence: Synthetic oligonucleotide
gugcgguucccaagcagac

SEQ ID NO: 77614 - RNA, 19 nt, Artificial Sequence
  Description of Artificial Sequence: Synthetic oligonucleotide
gguguuaggaguagauggu

SEQ ID NO: 77615 - RNA, 19 nt, Artificial Sequence
  Description of Artificial Sequence: Synthetic oligonucleotide
ccccguucggcuuuccaug

SEQ ID NO: 77616 - RNA, 19 nt, Artificial Sequence
  Description of Artificial Sequence: Synthetic oligonucleotide
aagaagccuagggguguua

SEQ ID NO: 77617 - RNA, 19 nt, Artificial Sequence
  Description of Artificial Sequence: Synthetic oligonucleotide
gaacccguacagguacaaa

SEQ ID NO: 77618 - RNA, 19 nt, Artificial Sequence
  Description of Artificial Sequence: Synthetic oligonucleotide
ucacgggcuauggccugca

SEQ ID NO: 77619 - RNA, 19 nt, Artificial Sequence
  Description of Artificial Sequence: Synthetic oligonucleotide
auccccuguuacggagggg

SEQ ID NO: 77620 - RNA, 19 nt, Artificial Sequence
  Description of Artificial Sequence: Synthetic oligonucleotide
cuucgaugcaggccccaaa

SEQ ID NO: 77621 - RNA, 19 nt, Artificial Sequence
  Description of Artificial Sequence: Synthetic oligonucleotide
gaaacggauugcugcuguu

SEQ ID NO: 77622 - RNA, 19 nt, Artificial Sequence
  Description of Artificial Sequence: Synthetic oligonucleotide
gcgugcgguucccaagcag

SEQ ID NO: 77623 - RNA, 19 nt, Artificial Sequence
  Description of Artificial Sequence: Synthetic oligonucleotide
cugcgggaacaagucgaug

SEQ ID NO: 77624 - RNA, 19 nt, Artificial Sequence
  Description of Artificial Sequence: Synthetic oligonucleotide
acguccaugggaagcgaua

SEQ ID NO: 77625 - RNA, 19 nt, Artificial Sequence
  Description of Artificial Sequence: Synthetic oligonucleotide
agaccucaagaaacuccau

SEQ ID NO: 77626 - RNA, 19 nt, Artificial Sequence
  Description of Artificial Sequence: Synthetic oligonucleotide
ccugcauuuuggcacaggu

SEQ ID NO: 77627 - RNA, 19 nt, Artificial Sequence
  Description of Artificial Sequence: Synthetic oligonucleotide
ccauacggaacaugagaaa

SEQ ID NO: 77628 - RNA, 19 nt, Artificial Sequence
  Description of Artificial Sequence: Synthetic oligonucleotide
gccuacccuguaaacacuc

SEQ ID NO: 77629 - RNA, 19 nt, Artificial Sequence
  Description of Artificial Sequence: Synthetic oligonucleotide
ggacguauacaggcacuga

SEQ ID NO: 77630 - RNA, 19 nt, Artificial Sequence
  Description of Artificial Sequence: Synthetic oligonucleotide
caaugccugaugugcugcu

SEQ ID NO: 77631 - RNA, 19 nt, Artificial Sequence
  Description of Artificial Sequence: Synthetic oligonucleotide
ggaagaagccuaggggugu

SEQ ID NO: 77632 - RNA, 19 nt, Artificial Sequence
  Description of Artificial Sequence: Synthetic oligonucleotide
gcggugugcugaaccacag

SEQ ID NO: 77633 - RNA, 19 nt, Artificial Sequence
  Description of Artificial Sequence: Synthetic oligonucleotide
cacgggcuauggccugcag

SEQ ID NO: 77634 - RNA, 19 nt, Artificial Sequence
  Description of Artificial Sequence: Synthetic oligonucleotide
uccugacguuggacugguc

SEQ ID NO: 77635 - RNA, 19 nt, Artificial Sequence
  Description of Artificial Sequence: Synthetic oligonucleotide
gggauggacuuuugggcgu

SEQ ID NO: 77636 - RNA, 19 nt, Artificial Sequence
  Description of Artificial Sequence: Synthetic oligonucleotide
cgauacguggcaggagacc

SEQ ID NO: 77637 - RNA, 19 nt, Artificial Sequence
  Description of Artificial Sequence: Synthetic oligonucleotide
gggaacaagucgauguuuu

SEQ ID NO: 77638 - RNA, 19 nt, Artificial Sequence
  Description of Artificial Sequence: Synthetic oligonucleotide
caucugcacuuugucaggu

SEQ ID NO: 77639 - RNA, 19 nt, Artificial Sequence
  Description of Artificial Sequence: Synthetic oligonucleotide
gcgauacguggcaggagac

SEQ ID NO: 77640 - RNA, 19 nt, Artificial Sequence
  Description of Artificial Sequence: Synthetic oligonucleotide
ggaguuccgagggcauuca

SEQ ID NO: 77641 - RNA, 19 nt, Artificial Sequence
  Description of Artificial Sequence: Synthetic oligonucleotide
ggaacccguacagguacaa

SEQ ID NO: 77642 - RNA, 19 nt, Artificial Sequence
  Description of Artificial Sequence: Synthetic oligonucleotide
ccaucacgggcuauggccu

SEQ ID NO: 77643 - RNA, 19 nt, Artificial Sequence
  Description of Artificial Sequence: Synthetic oligonucleotide
agccgacuagcugcagaua

SEQ ID NO: 77644 - RNA, 19 nt, Artificial Sequence
  Description of Artificial Sequence: Synthetic oligonucleotide
gguuggauccugccaugau

SEQ ID NO: 77645 - RNA, 19 nt, Artificial Sequence
  Description of Artificial Sequence: Synthetic oligonucleotide
cccguucggcuuuccauga

SEQ ID NO: 77646 - RNA, 19 nt, Artificial Sequence
  Description of Artificial Sequence: Synthetic oligonucleotide
ggcauucacucagguggga

SEQ ID NO: 77647 - RNA, 19 nt, Artificial Sequence
  Description of Artificial Sequence: Synthetic oligonucleotide
gguucccuugcagggccuc

SEQ ID NO: 77648 - RNA, 19 nt, Artificial Sequence
  Description of Artificial Sequence: Synthetic oligonucleotide
cuguuacggaggggaagua

SEQ ID NO: 77649 - RNA, 19 nt, Artificial Sequence
  Description of Artificial Sequence: Synthetic oligonucleotide
cuccugacguuggacuggu

SEQ ID NO: 77650 - RNA, 19 nt, Artificial Sequence
  Description of Artificial Sequence: Synthetic oligonucleotide
cccuguucaaucccucggu

SEQ ID NO: 77651 - RNA, 19 nt, Artificial Sequence
  Description of Artificial Sequence: Synthetic oligonucleotide
gcgggaacaagucgauguu

SEQ ID NO: 77652 - RNA, 19 nt, Artificial Sequence
  Description of Artificial Sequence: Synthetic oligonucleotide
ccuacccuguaaacacucu

SEQ ID NO: 77653 - RNA, 19 nt, Artificial Sequence
  Description of Artificial Sequence: Synthetic oligonucleotide
ccacccaaauggugaccca

SEQ ID NO: 77654 - RNA, 19 nt, Artificial Sequence
  Description of Artificial Sequence: Synthetic oligonucleotide
cccacugugggcuccccgu

SEQ ID NO: 77655 - RNA, 19 nt, Artificial Sequence
  Description of Artificial Sequence: Synthetic oligonucleotide
cccguccagguguguccag

SEQ ID NO: 77656 - RNA, 19 nt, Artificial Sequence
  Description of Artificial Sequence: Synthetic oligonucleotide
ggaugucagguggggcgaa

SEQ ID NO: 77657 - RNA, 19 nt, Artificial Sequence
  Description of Artificial Sequence: Synthetic oligonucleotide
cccguacagguacaaacuu

SEQ ID NO: 77658 - RNA, 19 nt, Artificial Sequence
  Description of Artificial Sequence: Synthetic oligonucleotide
cccguccaccaccccugac

SEQ ID NO: 77659 - RNA, 19 nt, Artificial Sequence
  Description of Artificial Sequence: Synthetic oligonucleotide
ccccuguuacggaggggaa

SEQ ID NO: 77660 - RNA, 19 nt, Artificial Sequence
  Description of Artificial Sequence: Synthetic oligonucleotide
cgggaacaagucgauguuu

SEQ ID NO: 77661 - RNA, 19 nt, Artificial Sequence
  Description of Artificial Sequence: Synthetic oligonucleotide
ccgucacuaaagcgcucuu

SEQ ID NO: 77662 - RNA, 19 nt, Artificial Sequence
  Description of Artificial Sequence: Synthetic oligonucleotide
agugauucuagacagaugg

SEQ ID NO: 77663 - RNA, 19 nt, Artificial Sequence
  Description of Artificial Sequence: Synthetic oligonucleotide
aauagcauaaauguccagc

SEQ ID NO: 77664 - RNA, 19 nt, Artificial Sequence
  Description of Artificial Sequence: Synthetic oligonucleotide
cucaauagcauaaaugucc

SEQ ID NO: 77665 - RNA, 19 nt, Artificial Sequence
  Description of Artificial Sequence: Synthetic oligonucleotide
gauuaggacggauagggcg

SEQ ID NO: 77666 - RNA, 19 nt, Artificial Sequence
  Description of Artificial Sequence: Synthetic oligonucleotide
uuuaccauccaucaggccu

SEQ ID NO: 77667 - RNA, 19 nt, Artificial Sequence
  Description of Artificial Sequence: Synthetic oligonucleotide
uguuauacuggauaaacac

SEQ ID NO: 77668 - RNA, 19 nt, Artificial Sequence
  Description of Artificial Sequence: Synthetic oligonucleotide
ugaacaucggcuuugcuag

SEQ ID NO: 77669 - RNA, 19 nt, Artificial Sequence
  Description of Artificial Sequence: Synthetic oligonucleotide
aacauagagucuuucaacu

SEQ ID NO: 77670 - RNA, 19 nt, Artificial Sequence
  Description of Artificial Sequence: Synthetic oligonucleotide
uggauaaacacaagguucc

SEQ ID NO: 77671 - RNA, 19 nt, Artificial Sequence
  Description of Artificial Sequence: Synthetic oligonucleotide
uggauuaggacggauaggg

SEQ ID NO: 77672 - RNA, 19 nt, Artificial Sequence
  Description of Artificial Sequence: Synthetic oligonucleotide
aauuccguagaugcguucc

SEQ ID NO: 77673 - RNA, 19 nt, Artificial Sequence
  Description of Artificial Sequence: Synthetic oligonucleotide
uccgaaguauugcacaugg

SEQ ID NO: 77674 - RNA, 19 nt, Artificial Sequence
  Description of Artificial Sequence: Synthetic oligonucleotide
uauagacaggcuuagcugc

SEQ ID NO: 77675 - RNA, 19 nt, Artificial Sequence
  Description of Artificial Sequence: Synthetic oligonucleotide
acaacaucaacuaauguag

SEQ ID NO: 77676 - RNA, 19 nt, Artificial Sequence
  Description of Artificial Sequence: Synthetic oligonucleotide
aacccgaacggauacgacg

SEQ ID NO: 77677 - RNA, 19 nt, Artificial Sequence
  Description of Artificial Sequence: Synthetic oligonucleotide
aaacgacucgcacaggguc

SEQ ID NO: 77678 - RNA, 19 nt, Artificial Sequence
  Description of Artificial Sequence: Synthetic oligonucleotide
uccuauaugcagcacauac

SEQ ID NO: 77679 - RNA, 19 nt, Artificial Sequence
  Description of Artificial Sequence: Synthetic oligonucleotide
aaaagccgaacuugauccc

SEQ ID NO: 77680 - RNA, 19 nt, Artificial Sequence
  Description of Artificial Sequence: Synthetic oligonucleotide
uucgaaguaaggaacaaaa

SEQ ID NO: 77681 - RNA, 19 nt, Artificial Sequence
  Description of Artificial Sequence: Synthetic oligonucleotide
aaggucggcaaucucccgc

SEQ ID NO: 77682 - RNA, 19 nt, Artificial Sequence
  Description of Artificial Sequence: Synthetic oligonucleotide
ugaccuagaagccucaggu

SEQ ID NO: 77683 - RNA, 19 nt, Artificial Sequence
  Description of Artificial Sequence: Synthetic oligonucleotide
aaacucuugggugagaagu

SEQ ID NO: 77684 - RNA, 19 nt, Artificial Sequence
  Description of Artificial Sequence: Synthetic oligonucleotide
aguggucuuaucuagacau

SEQ ID NO: 77685 - RNA, 19 nt, Artificial Sequence
  Description of Artificial Sequence: Synthetic oligonucleotide
uuugcuagcacggucuagg

SEQ ID NO: 77686 - RNA, 19 nt, Artificial Sequence
  Description of Artificial Sequence: Synthetic oligonucleotide
auaaacacaagguuccaga

SEQ ID NO: 77687 - RNA, 19 nt, Artificial Sequence
  Description of Artificial Sequence: Synthetic oligonucleotide
uccguaagugucauagagg

SEQ ID NO: 77688 - RNA, 19 nt, Artificial Sequence
  Description of Artificial Sequence: Synthetic oligonucleotide
uguacgacaacaucaacua

SEQ ID NO: 77689 - RNA, 19 nt, Artificial Sequence
  Description of Artificial Sequence: Synthetic oligonucleotide
cuggauaaacacaagguuc

SEQ ID NO: 77690 - RNA, 19 nt, Artificial Sequence
  Description of Artificial Sequence: Synthetic oligonucleotide
ucuaguccuaaauuuugcc

SEQ ID NO: 77691 - RNA, 19 nt, Artificial Sequence
  Description of Artificial Sequence: Synthetic oligonucleotide
aacccuguaggccauguca

SEQ ID NO: 77692 - RNA, 19 nt, Artificial Sequence
  Description of Artificial Sequence: Synthetic oligonucleotide
uucaucguagaucugcccu

SEQ ID NO: 77693 - RNA, 19 nt, Artificial Sequence
  Description of Artificial Sequence: Synthetic oligonucleotide
uacgacaacaucaacuaau

SEQ ID NO: 77694 - RNA, 19 nt, Artificial Sequence
  Description of Artificial Sequence: Synthetic oligonucleotide
ucuguuuacacuccagauc

SEQ ID NO: 77695 - RNA, 19 nt, Artificial Sequence
  Description of Artificial Sequence: Synthetic oligonucleotide
ucucaugggaauaucgaac

SEQ ID NO: 77696 - RNA, 19 nt, Artificial Sequence
  Description of Artificial Sequence: Synthetic oligonucleotide
uguuugauggggaaacgcu

SEQ ID NO: 77697 - RNA, 19 nt, Artificial Sequence
  Description of Artificial Sequence: Synthetic oligonucleotide
agacuaccuaaccggaacc

SEQ ID NO: 77698 - RNA, 19 nt, Artificial Sequence
  Description of Artificial Sequence: Synthetic oligonucleotide
cauucgcuggcuuuuaggc

SEQ ID NO: 77699 - RNA, 19 nt, Artificial Sequence
  Description of Artificial Sequence: Synthetic oligonucleotide
uaucacgaaagcuccugcg

SEQ ID NO: 77700 - RNA, 19 nt, Artificial Sequence
  Description of Artificial Sequence: Synthetic oligonucleotide
ugauucuagacagauggug

SEQ ID NO: 77701 - RNA, 19 nt, Artificial Sequence
  Description of Artificial Sequence: Synthetic oligonucleotide
caucuuacaugccaauucc

SEQ ID NO: 77702 - RNA, 19 nt, Artificial Sequence
  Description of Artificial Sequence: Synthetic oligonucleotide
auaggucucaucaaacacg

SEQ ID NO: 77703 - RNA, 19 nt, Artificial Sequence
  Description of Artificial Sequence: Synthetic oligonucleotide
auucgcuggcuuuuaggcc

SEQ ID NO: 77704 - RNA, 19 nt, Artificial Sequence
  Description of Artificial Sequence: Synthetic oligonucleotide
aaugugcguggcuguaugg

SEQ ID NO: 77705 - RNA, 19 nt, Artificial Sequence
  Description of Artificial Sequence: Synthetic oligonucleotide
uauacuggauaaacacaag

SEQ ID NO: 77706 - RNA, 19 nt, Artificial Sequence
  Description of Artificial Sequence: Synthetic oligonucleotide
guauagacaggcuuagcug

SEQ ID NO: 77707 - RNA, 19 nt, Artificial Sequence
  Description of Artificial Sequence: Synthetic oligonucleotide
aacuggaauaccaaacucu

SEQ ID NO: 77708 - RNA, 19 nt, Artificial Sequence
  Description of Artificial Sequence: Synthetic oligonucleotide
ucuagacaugaucacggug

SEQ ID NO: 77709 - RNA, 19 nt, Artificial Sequence
  Description of Artificial Sequence: Synthetic oligonucleotide
aagagcauugcagacgucu

SEQ ID NO: 77710 - RNA, 19 nt, Artificial Sequence
  Description of Artificial Sequence: Synthetic oligonucleotide
acagcaacaauccuccgga

SEQ ID NO: 77711 - RNA, 19 nt, Artificial Sequence
  Description of Artificial Sequence: Synthetic oligonucleotide
ucaccguaaacucaguuuu

SEQ ID NO: 77712 - RNA, 19 nt, Artificial Sequence
  Description of Artificial Sequence: Synthetic oligonucleotide
uuaccauccaucaggccug

SEQ ID NO: 77713 - RNA, 19 nt, Artificial Sequence
  Description of Artificial Sequence: Synthetic oligonucleotide
uuucgguccaggaugcgcc

SEQ ID NO: 77714 - RNA, 19 nt, Artificial Sequence
  Description of Artificial Sequence: Synthetic oligonucleotide
cuuacaugccaauuccuug

SEQ ID NO: 77715 - RNA, 19 nt, Artificial Sequence
  Description of Artificial Sequence: Synthetic oligonucleotide
cuaaccggaacccgaacgg

SEQ ID NO: 77716 - RNA, 19 nt, Artificial Sequence
  Description of Artificial Sequence: Synthetic oligonucleotide
gcugagacuaccuaaccgg

SEQ ID NO: 77717 - RNA, 19 nt, Artificial Sequence
  Description of Artificial Sequence: Synthetic oligonucleotide
ucgaacagcccuucgaaga

SEQ ID NO: 77718 - RNA, 19 nt, Artificial Sequence
  Description of Artificial Sequence: Synthetic oligonucleotide
uagggcgacugaaaggucc

SEQ ID NO: 77719 - RNA, 19 nt, Artificial Sequence
  Description of Artificial Sequence: Synthetic oligonucleotide
ucacgaaagcuccugcgug

SEQ ID NO: 77720 - RNA, 19 nt, Artificial Sequence
  Description of Artificial Sequence: Synthetic oligonucleotide
gaugcguuccuccacagaa

SEQ ID NO: 77721 - RNA, 19 nt, Artificial Sequence
  Description of Artificial Sequence: Synthetic oligonucleotide
ccuuguucggcauagaaac

SEQ ID NO: 77722 - RNA, 19 nt, Artificial Sequence
  Description of Artificial Sequence: Synthetic oligonucleotide
gauaaacacaagguuccag

SEQ ID NO: 77723 - RNA, 19 nt, Artificial Sequence
  Description of Artificial Sequence: Synthetic oligonucleotide
uaucgaacagcccuucgaa

SEQ ID NO: 77724 - RNA, 19 nt, Artificial Sequence
  Description of Artificial Sequence: Synthetic oligonucleotide
gacaugaucacggugaugu

SEQ ID NO: 77725 - RNA, 19 nt, Artificial Sequence
  Description of Artificial Sequence: Synthetic oligonucleotide
ggaaacgacucgcacaggg

SEQ ID NO: 77726 - RNA, 19 nt, Artificial Sequence
  Description of Artificial Sequence: Synthetic oligonucleotide
ugugucacccaucucccca

SEQ ID NO: 77727 - RNA, 19 nt, Artificial Sequence
  Description of Artificial Sequence: Synthetic oligonucleotide
cauagcuaccauuggaguc

SEQ ID NO: 77728 - RNA, 19 nt, Artificial Sequence
  Description of Artificial Sequence: Synthetic oligonucleotide
aggcuuagcugccucaauc

SEQ ID NO: 77729 - RNA, 19 nt, Artificial Sequence
  Description of Artificial Sequence: Synthetic oligonucleotide
gagacuaccuaaccggaac

SEQ ID NO: 77730 - RNA, 19 nt, Artificial Sequence
  Description of Artificial Sequence: Synthetic oligonucleotide
ggggcaauaagucacagga

SEQ ID NO: 77731 - RNA, 19 nt, Artificial Sequence
  Description of Artificial Sequence: Synthetic oligonucleotide
cugggaauccguaaguguc

SEQ ID NO: 77732 - RNA, 19 nt, Artificial Sequence
  Description of Artificial Sequence: Synthetic oligonucleotide
cucaugacaggucuccgcc

SEQ ID NO: 77733 - RNA, 19 nt, Artificial Sequence
  Description of Artificial Sequence: Synthetic oligonucleotide
auggcuucgaaguaaggaa

SEQ ID NO: 77734 - RNA, 19 nt, Artificial Sequence
  Description of Artificial Sequence: Synthetic oligonucleotide
acauagagucuuucaacug

SEQ ID NO: 77735 - RNA, 19 nt, Artificial Sequence
  Description of Artificial Sequence: Synthetic oligonucleotide
auagcuaccauuggaguca

SEQ ID NO: 77736 - RNA, 19 nt, Artificial Sequence
  Description of Artificial Sequence: Synthetic oligonucleotide
caccaauccggucauagug

SEQ ID NO: 77737 - RNA, 19 nt, Artificial Sequence
  Description of Artificial Sequence: Synthetic oligonucleotide
auaucgaacagcccuucga

SEQ ID NO: 77738 - RNA, 19 nt, Artificial Sequence
  Description of Artificial Sequence: Synthetic oligonucleotide
uggaauuccguagaugcgu

SEQ ID NO: 77739 - RNA, 19 nt, Artificial Sequence
  Description of Artificial Sequence: Synthetic oligonucleotide
caaccuucaccaaguagcc

SEQ ID NO: 77740 - RNA, 19 nt, Artificial Sequence
  Description of Artificial Sequence: Synthetic oligonucleotide
ggguagugauucuagacag

SEQ ID NO: 77741 - RNA, 19 nt, Artificial Sequence
  Description of Artificial Sequence: Synthetic oligonucleotide
ggcaauaagucacaggaca

SEQ ID NO: 77742 - RNA, 19 nt, Artificial Sequence
  Description of Artificial Sequence: Synthetic oligonucleotide
cuuagcugccucaaucaug

SEQ ID NO: 77743 - RNA, 19 nt, Artificial Sequence
  Description of Artificial Sequence: Synthetic oligonucleotide
uucaccguaaacucaguuu

SEQ ID NO: 77744 - RNA, 19 nt, Artificial Sequence
  Description of Artificial Sequence: Synthetic oligonucleotide
uguauggccgggcaccugu

SEQ ID NO: 77745 - RNA, 19 nt, Artificial Sequence
  Description of Artificial Sequence: Synthetic oligonucleotide
ugggguagugauucuagac

SEQ ID NO: 77746 - RNA, 19 nt, Artificial Sequence
  Description of Artificial Sequence: Synthetic oligonucleotide
aauccgccucagcacguac

SEQ ID NO: 77747 - RNA, 19 nt, Artificial Sequence
  Description of Artificial Sequence: Synthetic oligonucleotide
gcgaaguucagaaugugcg

SEQ ID NO: 77748 - RNA, 19 nt, Artificial Sequence
  Description of Artificial Sequence: Synthetic oligonucleotide
ugggaauccguaaguguca

SEQ ID NO: 77749 - RNA, 19 nt, Artificial Sequence
  Description of Artificial Sequence: Synthetic oligonucleotide
ucaugacaggucuccgccg

SEQ ID NO: 77750 - RNA, 19 nt, Artificial Sequence
  Description of Artificial Sequence: Synthetic oligonucleotide
gaaugugcguggcuguaug

SEQ ID NO: 77751 - RNA, 19 nt, Artificial Sequence
  Description of Artificial Sequence: Synthetic oligonucleotide
acugggaauccguaagugu

SEQ ID NO: 77752 - RNA, 19 nt, Artificial Sequence
  Description of Artificial Sequence: Synthetic oligonucleotide
gauagggcgacugaaaggu

SEQ ID NO: 77753 - RNA, 19 nt, Artificial Sequence
  Description of Artificial Sequence: Synthetic oligonucleotide
aauccguaagugucauaga

SEQ ID NO: 77754 - RNA, 19 nt, Artificial Sequence
  Description of Artificial Sequence: Synthetic oligonucleotide
ucuugagaaacuguaccuc

SEQ ID NO: 77755 - RNA, 19 nt, Artificial Sequence
  Description of Artificial Sequence: Synthetic oligonucleotide
aucacgaaagcuccugcgu

SEQ ID NO: 77756 - RNA, 19 nt, Artificial Sequence
  Description of Artificial Sequence: Synthetic oligonucleotide
uccguagaugcguuccucc

SEQ ID NO: 77757 - RNA, 19 nt, Artificial Sequence
  Description of Artificial Sequence: Synthetic oligonucleotide
ugccagaucuguuuacacu

SEQ ID NO: 77758 - RNA, 19 nt, Artificial Sequence
  Description of Artificial Sequence: Synthetic oligonucleotide
uagugauucuagacagaug

SEQ ID NO: 77759 - RNA, 19 nt, Artificial Sequence
  Description of Artificial Sequence: Synthetic oligonucleotide
acuaccuaaccggaacccg

SEQ ID NO: 77760 - RNA, 19 nt, Artificial Sequence
  Description of Artificial Sequence: Synthetic oligonucleotide
caucaggccugaaaccugc

SEQ ID NO: 77761 - RNA, 19 nt, Artificial Sequence
  Description of Artificial Sequence: Synthetic oligonucleotide
guaaacucaguuuuauccu

SEQ ID NO: 77762 - RNA, 19 nt, Artificial Sequence
  Description of Artificial Sequence: Synthetic oligonucleotide
aucgaacagcccuucgaag

SEQ ID NO: 77763 - RNA, 19 nt, Artificial Sequence
  Description of Artificial Sequence: Synthetic oligonucleotide
cuaucacgaaagcuccugc

SEQ ID NO: 77764 - RNA, 19 nt, Artificial Sequence
  Description of Artificial Sequence: Synthetic oligonucleotide
caguacggagcgcagggcg

SEQ ID NO: 77765 - RNA, 19 nt, Artificial Sequence
  Description of Artificial Sequence: Synthetic oligonucleotide
ucccuguuauacuggauaa

SEQ ID NO: 77766 - RNA, 19 nt, Artificial Sequence
  Description of Artificial Sequence: Synthetic oligonucleotide
aggggcaauaagucacagg

SEQ ID NO: 77767 - RNA, 19 nt, Artificial Sequence
  Description of Artificial Sequence: Synthetic oligonucleotide
uuaggccucgguuggcugc

SEQ ID NO: 77768 - RNA, 19 nt, Artificial Sequence
  Description of Artificial Sequence: Synthetic oligonucleotide
ucaucaaacacggcgcgaa

SEQ ID NO: 77769 - RNA, 19 nt, Artificial Sequence
  Description of Artificial Sequence: Synthetic oligonucleotide
cacauacccgccucggacc

SEQ ID NO: 77770 - RNA, 19 nt, Artificial Sequence
  Description of Artificial Sequence: Synthetic oligonucleotide
ucggaccugaguauucuuc

SEQ ID NO: 77771 - RNA, 19 nt, Artificial Sequence
  Description of Artificial Sequence: Synthetic oligonucleotide
ggauagggcgacugaaagg

SEQ ID NO: 77772 - RNA, 19 nt, Artificial Sequence
  Description of Artificial Sequence: Synthetic oligonucleotide
acccgaacggauacgacgg

SEQ ID NO: 77773 - RNA, 19 nt, Artificial Sequence
  Description of Artificial Sequence: Synthetic oligonucleotide
uggguauagacaggcuuag

SEQ ID NO: 77774 - RNA, 19 nt, Artificial Sequence
  Description of Artificial Sequence: Synthetic oligonucleotide
caucugucgccuccaaacc

SEQ ID NO: 77775 - RNA, 19 nt, Artificial Sequence
  Description of Artificial Sequence: Synthetic oligonucleotide
caucggcuuugcuagcacg

SEQ ID NO: 77776 - RNA, 19 nt, Artificial Sequence
  Description of Artificial Sequence: Synthetic oligonucleotide
aacacucgcuucugaacau

SEQ ID NO: 77777 - RNA, 19 nt, Artificial Sequence
  Description of Artificial Sequence: Synthetic oligonucleotide
aucuccaccaaaguaagua

SEQ ID NO: 77778 - RNA, 19 nt, Artificial Sequence
  Description of Artificial Sequence: Synthetic oligonucleotide
cuucaucguagaucugccc

SEQ ID NO: 77779 - RNA, 19 nt, Artificial Sequence
  Description of Artificial Sequence: Synthetic oligonucleotide
ggcuuuuaggccucgguug

SEQ ID NO: 77780 - RNA, 19 nt, Artificial Sequence
  Description of Artificial Sequence: Synthetic oligonucleotide
auuaggacggauagggcga

SEQ ID NO: 77781 - RNA, 19 nt, Artificial Sequence
  Description of Artificial Sequence: Synthetic oligonucleotide
ugcgugacuggaauuccgu

SEQ ID NO: 77782 - RNA, 19 nt, Artificial Sequence
  Description of Artificial Sequence: Synthetic oligonucleotide
ugagacuaccuaaccggaa

SEQ ID NO: 77783 - RNA, 19 nt, Artificial Sequence
  Description of Artificial Sequence: Synthetic oligonucleotide
gacuaccuaaccggaaccc

SEQ ID NO: 77784 - RNA, 19 nt, Artificial Sequence
  Description of Artificial Sequence: Synthetic oligonucleotide
cugaacaucggcuuugcua

SEQ ID NO: 77785 - RNA, 19 nt, Artificial Sequence
  Description of Artificial Sequence: Synthetic oligonucleotide
gugacuggaauuccguaga

SEQ ID NO: 77786 - RNA, 19 nt, Artificial Sequence
  Description of Artificial Sequence: Synthetic oligonucleotide
agucaaaccgaaggcgauc

SEQ ID NO: 77787 - RNA, 19 nt, Artificial Sequence
  Description of Artificial Sequence: Synthetic oligonucleotide
ugcaucccuaccaccaauc

SEQ ID NO: 77788 - RNA, 19 nt, Artificial Sequence
  Description of Artificial Sequence: Synthetic oligonucleotide
aguuucucaugggaauauc

SEQ ID NO: 77789 - RNA, 19 nt, Artificial Sequence
  Description of Artificial Sequence: Synthetic oligonucleotide
uuuaggccucgguuggcug

SEQ ID NO: 77790 - RNA, 19 nt, Artificial Sequence
  Description of Artificial Sequence: Synthetic oligonucleotide
cuguacgacaacaucaacu

SEQ ID NO: 77791 - RNA, 19 nt, Artificial Sequence
  Description of Artificial Sequence: Synthetic oligonucleotide
ugcuggauuaggacggaua

SEQ ID NO: 77792 - RNA, 19 nt, Artificial Sequence
  Description of Artificial Sequence: Synthetic oligonucleotide
gguauagacaggcuuagcu

SEQ ID NO: 77793 - RNA, 19 nt, Artificial Sequence
  Description of Artificial Sequence: Synthetic oligonucleotide
ucaaaccgaaggcgaucag

SEQ ID NO: 77794 - RNA, 19 nt, Artificial Sequence
  Description of Artificial Sequence: Synthetic oligonucleotide
gccagaucuguuuacacuc

SEQ ID NO: 77795 - RNA, 19 nt, Artificial Sequence
  Description of Artificial Sequence: Synthetic oligonucleotide
cuuuaccauccaucaggcc

SEQ ID NO: 77796 - RNA, 19 nt, Artificial Sequence
  Description of Artificial Sequence: Synthetic oligonucleotide
ccuaaccggaacccgaacg

SEQ ID NO: 77797 - RNA, 19 nt, Artificial Sequence
  Description of Artificial Sequence: Synthetic oligonucleotide
aacccuuugcccggagcuc

SEQ ID NO: 77798 - RNA, 19 nt, Artificial Sequence
  Description of Artificial Sequence: Synthetic oligonucleotide
cugcgugacuggaauuccg

SEQ ID NO: 77799 - RNA, 19 nt, Artificial Sequence
  Description of Artificial Sequence: Synthetic oligonucleotide
ccuguuauacuggauaaac

SEQ ID NO: 77800 - RNA, 19 nt, Artificial Sequence
  Description of Artificial Sequence: Synthetic oligonucleotide
accuaaccggaacccgaac

SEQ ID NO: 77801 - RNA, 19 nt, Artificial Sequence
  Description of Artificial Sequence: Synthetic oligonucleotide
cugcauucugacacauuug

SEQ ID NO: 77802 - RNA, 19 nt, Artificial Sequence
  Description of Artificial Sequence: Synthetic oligonucleotide
gcaauaagucacaggacag

SEQ ID NO: 77803 - RNA, 19 nt, Artificial Sequence
  Description of Artificial Sequence: Synthetic oligonucleotide
ugcguggcuguaugguugc

SEQ ID NO: 77804 - RNA, 19 nt, Artificial Sequence
  Description of Artificial Sequence: Synthetic oligonucleotide
caguguauggccgggcacc

SEQ ID NO: 77805 - RNA, 19 nt, Artificial Sequence
  Description of Artificial Sequence: Synthetic oligonucleotide
ggauaggucucaucaaaca

SEQ ID NO: 77806 - RNA, 19 nt, Artificial Sequence
  Description of Artificial Sequence: Synthetic oligonucleotide
aacgacucgcacaggguca

SEQ ID NO: 77807 - RNA, 19 nt, Artificial Sequence
  Description of Artificial Sequence: Synthetic oligonucleotide
uccugcgugacuggaauuc

SEQ ID NO: 77808 - RNA, 19 nt, Artificial Sequence
  Description of Artificial Sequence: Synthetic oligonucleotide
gcuuccuaccugcagauga

SEQ ID NO: 77809 - RNA, 19 nt, Artificial Sequence
  Description of Artificial Sequence: Synthetic oligonucleotide
cuggauuaggacggauagg

SEQ ID NO: 77810 - RNA, 19 nt, Artificial Sequence
  Description of Artificial Sequence: Synthetic oligonucleotide
uaccuaaccggaacccgaa

SEQ ID NO: 77811 - RNA, 19 nt, Artificial Sequence
  Description of Artificial Sequence: Synthetic oligonucleotide
agcaacaauccuccggaua

SEQ ID NO: 77812 - RNA, 19 nt, Artificial Sequence
  Description of Artificial Sequence: Synthetic oligonucleotide
cagcccuucgaagaauccg

SEQ ID NO: 77813 - RNA, 19 nt, Artificial Sequence
  Description of Artificial Sequence: Synthetic oligonucleotide
acagcccuucgaagaaucc

SEQ ID NO: 77814 - RNA, 19 nt, Artificial Sequence
  Description of Artificial Sequence: Synthetic oligonucleotide
gagucagaaugguaguugu

SEQ ID NO: 77815 - RNA, 19 nt, Artificial Sequence
  Description of Artificial Sequence: Synthetic oligonucleotide
acgaaagcuccugcgugac

SEQ ID NO: 77816 - RNA, 19 nt, Artificial Sequence
  Description of Artificial Sequence: Synthetic oligonucleotide
ccguaagugucauagagga

SEQ ID NO: 77817 - RNA, 19 nt, Artificial Sequence
  Description of Artificial Sequence: Synthetic oligonucleotide
cagccagaacccuguaggc

SEQ ID NO: 77818 - RNA, 19 nt, Artificial Sequence
  Description of Artificial Sequence: Synthetic oligonucleotide
uaccaaacucuugggugag

SEQ ID NO: 77819 - RNA, 19 nt, Artificial Sequence
  Description of Artificial Sequence: Synthetic oligonucleotide
gaguggucuuaucuagaca

SEQ ID NO: 77820 - RNA, 19 nt, Artificial Sequence
  Description of Artificial Sequence: Synthetic oligonucleotide
auuccguagaugcguuccu

SEQ ID NO: 77821 - RNA, 19 nt, Artificial Sequence
  Description of Artificial Sequence: Synthetic oligonucleotide
cuaccuaaccggaacccga

SEQ ID NO: 77822 - RNA, 19 nt, Artificial Sequence
  Description of Artificial Sequence: Synthetic oligonucleotide
gaugaccuagaagccucag

SEQ ID NO: 77823 - RNA, 19 nt, Artificial Sequence
  Description of Artificial Sequence: Synthetic oligonucleotide
aucaggccggccaccaucg

SEQ ID NO: 77824 - RNA, 19 nt, Artificial Sequence
  Description of Artificial Sequence: Synthetic oligonucleotide
ggagucagaaugguaguug

SEQ ID NO: 77825 - RNA, 19 nt, Artificial Sequence
  Description of Artificial Sequence: Synthetic oligonucleotide
ugcuagcacggucuagguc

SEQ ID NO: 77826 - RNA, 19 nt, Artificial Sequence
  Description of Artificial Sequence: Synthetic oligonucleotide
acauacccgccucggaccu

SEQ ID NO: 77827 - RNA, 19 nt, Artificial Sequence
  Description of Artificial Sequence: Synthetic oligonucleotide
cagcacuacuccacacucc

SEQ ID NO: 77828 - RNA, 19 nt, Artificial Sequence
  Description of Artificial Sequence: Synthetic oligonucleotide
ucuucaccguaaacucagu

SEQ ID NO: 77829 - RNA, 19 nt, Artificial Sequence
  Description of Artificial Sequence: Synthetic oligonucleotide
uuccgaaguauugcacaug

SEQ ID NO: 77830 - RNA, 19 nt, Artificial Sequence
  Description of Artificial Sequence: Synthetic oligonucleotide
gucaaaccgaaggcgauca

SEQ ID NO: 77831 - RNA, 19 nt, Artificial Sequence
  Description of Artificial Sequence: Synthetic oligonucleotide
ugugcguggcuguaugguu

SEQ ID NO: 77832 - RNA, 19 nt, Artificial Sequence
  Description of Artificial Sequence: Synthetic oligonucleotide
gaauuccguagaugcguuc

SEQ ID NO: 77833 - RNA, 19 nt, Artificial Sequence
  Description of Artificial Sequence: Synthetic oligonucleotide
caggagcaaccagugagcc

SEQ ID NO: 77834 - RNA, 19 nt, Artificial Sequence
  Description of Artificial Sequence: Synthetic oligonucleotide
caucguagaucugcccucc

SEQ ID NO: 77835 - RNA, 19 nt, Artificial Sequence
  Description of Artificial Sequence: Synthetic oligonucleotide
cuggguauagacaggcuua

SEQ ID NO: 77836 - RNA, 19 nt, Artificial Sequence
  Description of Artificial Sequence: Synthetic oligonucleotide
aagucaaaccgaaggcgau

SEQ ID NO: 77837 - RNA, 19 nt, Artificial Sequence
  Description of Artificial Sequence: Synthetic oligonucleotide
cugagacuaccuaaccgga

SEQ ID NO: 77838 - RNA, 19 nt, Artificial Sequence
  Description of Artificial Sequence: Synthetic oligonucleotide
uuccuaccugcagaugacc

SEQ ID NO: 77839 - RNA, 19 nt, Artificial Sequence
  Description of Artificial Sequence: Synthetic oligonucleotide
gaacaucggcuuugcuagc

SEQ ID NO: 77840 - RNA, 19 nt, Artificial Sequence
  Description of Artificial Sequence: Synthetic oligonucleotide
uaaccggaacccgaacgga

SEQ ID NO: 77841 - RNA, 19 nt, Artificial Sequence
  Description of Artificial Sequence: Synthetic oligonucleotide
ugacgaggugugcugcauc

SEQ ID NO: 77842 - RNA, 19 nt, Artificial Sequence
  Description of Artificial Sequence: Synthetic oligonucleotide
agagcauugcagacgucug

SEQ ID NO: 77843 - RNA, 19 nt, Artificial Sequence
  Description of Artificial Sequence: Synthetic oligonucleotide
cuuguucggcauagaaaca

SEQ ID NO: 77844 - RNA, 19 nt, Artificial Sequence
  Description of Artificial Sequence: Synthetic oligonucleotide
uccgccggggcucaucaau

SEQ ID NO: 77845 - RNA, 19 nt, Artificial Sequence
  Description of Artificial Sequence: Synthetic oligonucleotide
augcguuccuccacagaac

SEQ ID NO: 77846 - RNA, 19 nt, Artificial Sequence
  Description of Artificial Sequence: Synthetic oligonucleotide
ccucaauagcauaaauguc

SEQ ID NO: 77847 - RNA, 19 nt, Artificial Sequence
  Description of Artificial Sequence: Synthetic oligonucleotide
caaggucggcaaucucccg

SEQ ID NO: 77848 - RNA, 19 nt, Artificial Sequence
  Description of Artificial Sequence: Synthetic oligonucleotide
cacugggaauccguaagug

SEQ ID NO: 77849 - RNA, 19 nt, Artificial Sequence
  Description of Artificial Sequence: Synthetic oligonucleotide
acgaggugugcugcauccc

SEQ ID NO: 77850 - RNA, 19 nt, Artificial Sequence
  Description of Artificial Sequence: Synthetic oligonucleotide
aggacggauagggcgacug

SEQ ID NO: 77851 - RNA, 19 nt, Artificial Sequence
  Description of Artificial Sequence: Synthetic oligonucleotide
cgaacggauacgacggugg

SEQ ID NO: 77852 - RNA, 19 nt, Artificial Sequence
  Description of Artificial Sequence: Synthetic oligonucleotide
ccauucgcuggcuuuuagg

SEQ ID NO: 77853 - RNA, 19 nt, Artificial Sequence
  Description of Artificial Sequence: Synthetic oligonucleotide
agaugcguuccuccacaga

SEQ ID NO: 77854 - RNA, 19 nt, Artificial Sequence
  Description of Artificial Sequence: Synthetic oligonucleotide
guagugauucuagacagau

SEQ ID NO: 77855 - RNA, 19 nt, Artificial Sequence
  Description of Artificial Sequence: Synthetic oligonucleotide
cccaauggaaacgacucgc

SEQ ID NO: 77856 - RNA, 19 nt, Artificial Sequence
  Description of Artificial Sequence: Synthetic oligonucleotide
cgugacuggaauuccguag

SEQ ID NO: 77857 - RNA, 19 nt, Artificial Sequence
  Description of Artificial Sequence: Synthetic oligonucleotide
ucguagaucugcccuccuu

SEQ ID NO: 77858 - RNA, 19 nt, Artificial Sequence
  Description of Artificial Sequence: Synthetic oligonucleotide
acugcgguagccagggccu

SEQ ID NO: 77859 - RNA, 19 nt, Artificial Sequence
  Description of Artificial Sequence: Synthetic oligonucleotide
cucgguuggcugcauucug

SEQ ID NO: 77860 - RNA, 19 nt, Artificial Sequence
  Description of Artificial Sequence: Synthetic oligonucleotide
gaaggcgaucaggagcaac

SEQ ID NO: 77861 - RNA, 19 nt, Artificial Sequence
  Description of Artificial Sequence: Synthetic oligonucleotide
agcacauacccgccucgga

SEQ ID NO: 77862 - RNA, 19 nt, Artificial Sequence
  Description of Artificial Sequence: Synthetic oligonucleotide
uuaggacggauagggcgac

SEQ ID NO: 77863 - RNA, 19 nt, Artificial Sequence
  Description of Artificial Sequence: Synthetic oligonucleotide
aaccggaacccgaacggau

SEQ ID NO: 77864 - RNA, 19 nt, Artificial Sequence
  Description of Artificial Sequence: Synthetic oligonucleotide
uagcuaccauuggagucag

SEQ ID NO: 77865 - RNA, 19 nt, Artificial Sequence
  Description of Artificial Sequence: Synthetic oligonucleotide
acucgcuucugaacaucgg

SEQ ID NO: 77866 - RNA, 19 nt, Artificial Sequence
  Description of Artificial Sequence: Synthetic oligonucleotide
cugaauggcuucgaaguaa

SEQ ID NO: 77867 - RNA, 19 nt, Artificial Sequence
  Description of Artificial Sequence: Synthetic oligonucleotide
ugagccuuucugguccgcu

SEQ ID NO: 77868 - RNA, 19 nt, Artificial Sequence
  Description of Artificial Sequence: Synthetic oligonucleotide
cuaggcccaucccuguauc

SEQ ID NO: 77869 - RNA, 19 nt, Artificial Sequence
  Description of Artificial Sequence: Synthetic oligonucleotide
gcacauacccgccucggac

SEQ ID NO: 77870 - RNA, 19 nt, Artificial Sequence
  Description of Artificial Sequence: Synthetic oligonucleotide
ggcaccuguacccuucuga

SEQ ID NO: 77871 - RNA, 19 nt, Artificial Sequence
  Description of Artificial Sequence: Synthetic oligonucleotide
auaguggaucucgcugcag

SEQ ID NO: 77872 - RNA, 19 nt, Artificial Sequence
  Description of Artificial Sequence: Synthetic oligonucleotide
cauaguggaucucgcugca

SEQ ID NO: 77873 - RNA, 19 nt, Artificial Sequence
  Description of Artificial Sequence: Synthetic oligonucleotide
cuuugcuagcacggucuag

SEQ ID NO: 77874 - RNA, 19 nt, Artificial Sequence
  Description of Artificial Sequence: Synthetic oligonucleotide
agacgucugaggagaauga

SEQ ID NO: 77875 - RNA, 19 nt, Artificial Sequence
  Description of Artificial Sequence: Synthetic oligonucleotide
cagaguggucuuaucuaga

SEQ ID NO: 77876 - RNA, 19 nt, Artificial Sequence
  Description of Artificial Sequence: Synthetic oligonucleotide
uggaaacgacucgcacagg

SEQ ID NO: 77877 - RNA, 19 nt, Artificial Sequence
  Description of Artificial Sequence: Synthetic oligonucleotide
gacggauagggcgacugaa

SEQ ID NO: 77878 - RNA, 19 nt, Artificial Sequence
  Description of Artificial Sequence: Synthetic oligonucleotide
guggucuuaucuagacaug

SEQ ID NO: 77879 - RNA, 19 nt, Artificial Sequence
  Description of Artificial Sequence: Synthetic oligonucleotide
auagggcgacugaaagguc

SEQ ID NO: 77880 - RNA, 19 nt, Artificial Sequence
  Description of Artificial Sequence: Synthetic oligonucleotide
ugcagacgucugaggagaa

SEQ ID NO: 77881 - RNA, 19 nt, Artificial Sequence
  Description of Artificial Sequence: Synthetic oligonucleotide
uuaucaggccggccaccau

SEQ ID NO: 77882 - RNA, 19 nt, Artificial Sequence
  Description of Artificial Sequence: Synthetic oligonucleotide
uuccguagaugcguuccuc

SEQ ID NO: 77883 - RNA, 19 nt, Artificial Sequence
  Description of Artificial Sequence: Synthetic oligonucleotide
cuucgaaguaaggaacaaa

SEQ ID NO: 77884 - RNA, 19 nt, Artificial Sequence
  Description of Artificial Sequence: Synthetic oligonucleotide
cuguacccuucugaauggc

SEQ ID NO: 77885 - RNA, 19 nt, Artificial Sequence
  Description of Artificial Sequence: Synthetic oligonucleotide
agaaugugcguggcuguau

SEQ ID NO: 77886 - RNA, 19 nt, Artificial Sequence
  Description of Artificial Sequence: Synthetic oligonucleotide
agacaugaucacggugaug

SEQ ID NO: 77887 - RNA, 19 nt, Artificial Sequence
  Description of Artificial Sequence: Synthetic oligonucleotide
aguacggagcgcagggcga

SEQ ID NO: 77888 - RNA, 19 nt, Artificial Sequence
  Description of Artificial Sequence: Synthetic oligonucleotide
gaacccgaacggauacgac

SEQ ID NO: 77889 - RNA, 19 nt, Artificial Sequence
  Description of Artificial Sequence: Synthetic oligonucleotide
auagaggagccaagcagua

SEQ ID NO: 77890 - RNA, 19 nt, Artificial Sequence
  Description of Artificial Sequence: Synthetic oligonucleotide
gaacggauacgacgguggu

SEQ ID NO: 77891 - RNA, 19 nt, Artificial Sequence
  Description of Artificial Sequence: Synthetic oligonucleotide
ggauuaggacggauagggc

SEQ ID NO: 77892 - RNA, 19 nt, Artificial Sequence
  Description of Artificial Sequence: Synthetic oligonucleotide
ccgacuuucccaguguaug

SEQ ID NO: 77893 - RNA, 19 nt, Artificial Sequence
  Description of Artificial Sequence: Synthetic oligonucleotide
ggaacccgaacggauacga

SEQ ID NO: 77894 - RNA, 19 nt, Artificial Sequence
  Description of Artificial Sequence: Synthetic oligonucleotide
gaaacgacucgcacagggu

SEQ ID NO: 77895 - RNA, 19 nt, Artificial Sequence
  Description of Artificial Sequence: Synthetic oligonucleotide
cggauagggcgacugaaag

SEQ ID NO: 77896 - RNA, 19 nt, Artificial Sequence
  Description of Artificial Sequence: Synthetic oligonucleotide
cccguccuguguuaucagg

SEQ ID NO: 77897 - RNA, 19 nt, Artificial Sequence
  Description of Artificial Sequence: Synthetic oligonucleotide
auacccgccucggaccuga

SEQ ID NO: 77898 - RNA, 19 nt, Artificial Sequence
  Description of Artificial Sequence: Synthetic oligonucleotide
cuguguuaucaggccggcc

SEQ ID NO: 77899 - RNA, 19 nt, Artificial Sequence
  Description of Artificial Sequence: Synthetic oligonucleotide
acaauccuccggauacccu

SEQ ID NO: 77900 - RNA, 19 nt, Artificial Sequence
  Description of Artificial Sequence: Synthetic oligonucleotide
acggauagggcgacugaaa

SEQ ID NO: 77901 - RNA, 19 nt, Artificial Sequence
  Description of Artificial Sequence: Synthetic oligonucleotide
caauccuccggauacccuu

SEQ ID NO: 77902 - RNA, 19 nt, Artificial Sequence
  Description of Artificial Sequence: Synthetic oligonucleotide
ggcucccuugcccugugac

SEQ ID NO: 77903 - RNA, 19 nt, Artificial Sequence
  Description of Artificial Sequence: Synthetic oligonucleotide
cuaccauuggagucagaau

SEQ ID NO: 77904 - RNA, 19 nt, Artificial Sequence
  Description of Artificial Sequence: Synthetic oligonucleotide
ccaauggaaacgacucgca

SEQ ID NO: 77905 - RNA, 19 nt, Artificial Sequence
  Description of Artificial Sequence: Synthetic oligonucleotide
gguagugauucuagacaga

SEQ ID NO: 77906 - RNA, 19 nt, Artificial Sequence
  Description of Artificial Sequence: Synthetic oligonucleotide
ggagaaucaucugucgccu

SEQ ID NO: 77907 - RNA, 19 nt, Artificial Sequence
  Description of Artificial Sequence: Synthetic oligonucleotide
accgacuuucccaguguau

SEQ ID NO: 77908 - RNA, 19 nt, Artificial Sequence
  Description of Artificial Sequence: Synthetic oligonucleotide
ucccuguaucaaugcuuuu

SEQ ID NO: 77909 - RNA, 19 nt, Artificial Sequence
  Description of Artificial Sequence: Synthetic oligonucleotide
ccggaacccgaacggauac

SEQ ID NO: 77910 - RNA, 19 nt, Artificial Sequence
  Description of Artificial Sequence: Synthetic oligonucleotide
cuggcuuuuaggccucggu

SEQ ID NO: 77911 - RNA, 19 nt, Artificial Sequence
  Description of Artificial Sequence: Synthetic oligonucleotide
cuucaccguaaacucaguu

SEQ ID NO: 77912 - RNA, 19 nt, Artificial Sequence
  Description of Artificial Sequence: Synthetic oligonucleotide
accggaacccgaacggaua

SEQ ID NO: 77913 - RNA, 19 nt, Artificial Sequence
  Description of Artificial Sequence: Synthetic oligonucleotide
gugauucuagacagauggu

SEQ ID NO: 77914 - RNA, 19 nt, Artificial Sequence
  Description of Artificial Sequence: Synthetic oligonucleotide
ggaucucgcugcaggggcc

SEQ ID NO: 77915 - RNA, 19 nt, Artificial Sequence
  Description of Artificial Sequence: Synthetic oligonucleotide
gggcgaaguucagaaugug

SEQ ID NO: 77916 - RNA, 19 nt, Artificial Sequence
  Description of Artificial Sequence: Synthetic oligonucleotide
gaggugugcugcaucccua

SEQ ID NO: 77917 - RNA, 19 nt, Artificial Sequence
  Description of Artificial Sequence: Synthetic oligonucleotide
gcgaucaggagcaaccagu

SEQ ID NO: 77918 - RNA, 19 nt, Artificial Sequence
  Description of Artificial Sequence: Synthetic oligonucleotide
uaggacggauagggcgacu

SEQ ID NO: 77919 - RNA, 19 nt, Artificial Sequence
  Description of Artificial Sequence: Synthetic oligonucleotide
gcccuucgaagaauccgcc

SEQ ID NO: 77920 - RNA, 19 nt, Artificial Sequence
  Description of Artificial Sequence: Synthetic oligonucleotide
cccauucgcuggcuuuuag

SEQ ID NO: 77921 - RNA, 19 nt, Artificial Sequence
  Description of Artificial Sequence: Synthetic oligonucleotide
cggaccugaguauucuuca

SEQ ID NO: 77922 - RNA, 19 nt, Artificial Sequence
  Description of Artificial Sequence: Synthetic oligonucleotide
uacccgccucggaccugag

SEQ ID NO: 77923 - RNA, 19 nt, Artificial Sequence
  Description of Artificial Sequence: Synthetic oligonucleotide
gacuucagcugagcuaguu

SEQ ID NO: 77924 - RNA, 19 nt, Artificial Sequence
  Description of Artificial Sequence: Synthetic oligonucleotide
ggggaaccugacacaagca

SEQ ID NO: 77925 - RNA, 19 nt, Artificial Sequence
  Description of Artificial Sequence: Synthetic oligonucleotide
ccgaacggauacgacggug

SEQ ID NO: 77926 - RNA, 19 nt, Artificial Sequence
  Description of Artificial Sequence: Synthetic oligonucleotide
cgacugaaaggucccaaga

SEQ ID NO: 77927 - RNA, 19 nt, Artificial Sequence
  Description of Artificial Sequence: Synthetic oligonucleotide
guacggagcgcagggcgaa

SEQ ID NO: 77928 - RNA, 19 nt, Artificial Sequence
  Description of Artificial Sequence: Synthetic oligonucleotide
gugagccuuucugguccgc

SEQ ID NO: 77929 - RNA, 19 nt, Artificial Sequence
  Description of Artificial Sequence: Synthetic oligonucleotide
ccguagaugcguuccucca

SEQ ID NO: 77930 - RNA, 19 nt, Artificial Sequence
  Description of Artificial Sequence: Synthetic oligonucleotide
cccgccucggaccugagua

SEQ ID NO: 77931 - RNA, 19 nt, Artificial Sequence
  Description of Artificial Sequence: Synthetic oligonucleotide
cuccuaagcucugaauuuu

SEQ ID NO: 77932 - RNA, 19 nt, Artificial Sequence
  Description of Artificial Sequence: Synthetic oligonucleotide
cagguauguuccaguuacu

SEQ ID NO: 77933 - RNA, 19 nt, Artificial Sequence
  Description of Artificial Sequence: Synthetic oligonucleotide
cuaccaccaauccggucau

SEQ ID NO: 77934 - RNA, 19 nt, Artificial Sequence
  Description of Artificial Sequence: Synthetic oligonucleotide
cauacccgccucggaccug

SEQ ID NO: 77935 - RNA, 19 nt, Artificial Sequence
  Description of Artificial Sequence: Synthetic oligonucleotide
gcacggucuaggucaucca

SEQ ID NO: 77936 - RNA, 19 nt, Artificial Sequence
  Description of Artificial Sequence: Synthetic oligonucleotide
ccuaccugcagaugaccua

SEQ ID NO: 77937 - RNA, 19 nt, Artificial Sequence
  Description of Artificial Sequence: Synthetic oligonucleotide
gcgugacuggaauuccgua

SEQ ID NO: 77938 - RNA, 19 nt, Artificial Sequence
  Description of Artificial Sequence: Synthetic oligonucleotide
cuagcacggucuaggucau

SEQ ID NO: 77939 - RNA, 19 nt, Artificial Sequence
  Description of Artificial Sequence: Synthetic oligonucleotide
gcagcccacguucuugccu

SEQ ID NO: 77940 - RNA, 19 nt, Artificial Sequence
  Description of Artificial Sequence: Synthetic oligonucleotide
caccuguacccuucugaau

SEQ ID NO: 77941 - RNA, 19 nt, Artificial Sequence
  Description of Artificial Sequence: Synthetic oligonucleotide
ccccaguacggagcgcagg

SEQ ID NO: 77942 - RNA, 19 nt, Artificial Sequence
  Description of Artificial Sequence: Synthetic oligonucleotide
acccauucgcuggcuuuua

SEQ ID NO: 77943 - RNA, 19 nt, Artificial Sequence
  Description of Artificial Sequence: Synthetic oligonucleotide
ccgggcaccuguacccuuc

SEQ ID NO: 77944 - RNA, 19 nt, Artificial Sequence
  Description of Artificial Sequence: Synthetic oligonucleotide
caauccggucauaguggau

SEQ ID NO: 77945 - RNA, 19 nt, Artificial Sequence
  Description of Artificial Sequence: Synthetic oligonucleotide
cugcgguagccagggccuc

SEQ ID NO: 77946 - RNA, 19 nt, Artificial Sequence
  Description of Artificial Sequence: Synthetic oligonucleotide
ccgcccucugcugaguguc

SEQ ID NO: 77947 - RNA, 19 nt, Artificial Sequence
  Description of Artificial Sequence: Synthetic oligonucleotide
ggaauuccguagaugcguu

SEQ ID NO: 77948 - RNA, 19 nt, Artificial Sequence
  Description of Artificial Sequence: Synthetic oligonucleotide
uagcacggucuaggucauc

SEQ ID NO: 77949 - RNA, 19 nt, Artificial Sequence
  Description of Artificial Sequence: Synthetic oligonucleotide
cucggaccugaguauucuu

SEQ ID NO: 77950 - RNA, 19 nt, Artificial Sequence
  Description of Artificial Sequence: Synthetic oligonucleotide
gccucggaccugaguauuc

SEQ ID NO: 77951 - RNA, 19 nt, Artificial Sequence
  Description of Artificial Sequence: Synthetic oligonucleotide
cggaacccgaacggauacg

SEQ ID NO: 77952 - RNA, 19 nt, Artificial Sequence
  Description of Artificial Sequence: Synthetic oligonucleotide
cccuaccaccaauccgguc

SEQ ID NO: 77953 - RNA, 19 nt, Artificial Sequence
  Description of Artificial Sequence: Synthetic oligonucleotide
guauggccgggcaccugua

SEQ ID NO: 77954 - RNA, 19 nt, Artificial Sequence
  Description of Artificial Sequence: Synthetic oligonucleotide
ccacugggaauccguaagu

SEQ ID NO: 77955 - RNA, 19 nt, Artificial Sequence
  Description of Artificial Sequence: Synthetic oligonucleotide
agcuaccauuggagucaga

SEQ ID NO: 77956 - RNA, 19 nt, Artificial Sequence
  Description of Artificial Sequence: Synthetic oligonucleotide
gcccacguucuugccugug

SEQ ID NO: 77957 - RNA, 19 nt, Artificial Sequence
  Description of Artificial Sequence: Synthetic oligonucleotide
cgacaacaucaacuaaugu

SEQ ID NO: 77958 - RNA, 19 nt, Artificial Sequence
  Description of Artificial Sequence: Synthetic oligonucleotide
cccuucgaagaauccgccu

SEQ ID NO: 77959 - RNA, 19 nt, Artificial Sequence
  Description of Artificial Sequence: Synthetic oligonucleotide
gggcgacugaaagguccca

SEQ ID NO: 77960 - RNA, 19 nt, Artificial Sequence
  Description of Artificial Sequence: Synthetic oligonucleotide
ccgaaguauugcacauggu

SEQ ID NO: 77961 - RNA, 19 nt, Artificial Sequence
  Description of Artificial Sequence: Synthetic oligonucleotide
ccgccucagcacguacccc

SEQ ID NO: 77962 - RNA, 19 nt, Artificial Sequence
  Description of Artificial Sequence: Synthetic oligonucleotide
cuccgccggggcucaucaa

SEQ ID NO: 77963 - RNA, 19 nt, Artificial Sequence
  Description of Artificial Sequence: Synthetic oligonucleotide
ccucgguuggcugcauucu

SEQ ID NO: 77964 - RNA, 19 nt, Artificial Sequence
  Description of Artificial Sequence: Synthetic oligonucleotide
cgccgcccucugcugagug

SEQ ID NO: 77965 - RNA, 19 nt, Artificial Sequence
  Description of Artificial Sequence: Synthetic oligonucleotide
cgacucgcacagggucagg

SEQ ID NO: 77966 - RNA, 19 nt, Artificial Sequence
  Description of Artificial Sequence: Synthetic oligonucleotide
cccgaacggauacgacggu

SEQ ID NO: 77967 - RNA, 19 nt, Artificial Sequence
  Description of Artificial Sequence: Synthetic oligonucleotide
ccgccucggaccugaguau

SEQ ID NO: 77968 - RNA, 19 nt, Artificial Sequence
  Description of Artificial Sequence: Synthetic oligonucleotide
cgaaagcuccugcgugacu

SEQ ID NO: 77969 - RNA, 19 nt, Artificial Sequence
  Description of Artificial Sequence: Synthetic oligonucleotide
cggcggcugagacuaccua

SEQ ID NO: 77970 - RNA, 19 nt, Artificial Sequence
  Description of Artificial Sequence: Synthetic oligonucleotide
cgccucggaccugaguauu

SEQ ID NO: 77971 - RNA, 19 nt, Artificial Sequence
  Description of Artificial Sequence: Synthetic oligonucleotide
aagauuaagugccuuaggc

SEQ ID NO: 77972 - RNA, 19 nt, Artificial Sequence
  Description of Artificial Sequence: Synthetic oligonucleotide
aaugccaccgauuaaaauc

SEQ ID NO: 77973 - RNA, 19 nt, Artificial Sequence
  Description of Artificial Sequence: Synthetic oligonucleotide
aaaacuuccuaguacaagg

SEQ ID NO: 77974 - RNA, 19 nt, Artificial Sequence
  Description of Artificial Sequence: Synthetic oligonucleotide
aaagcuacaaugcugccgg

SEQ ID NO: 77975 - RNA, 19 nt, Artificial Sequence
  Description of Artificial Sequence: Synthetic oligonucleotide
auucagauaauuuacauga

SEQ ID NO: 77976 - RNA, 19 nt, Artificial Sequence
  Description of Artificial Sequence: Synthetic oligonucleotide
aacuaagcuauucaagaac

SEQ ID NO: 77977 - RNA, 19 nt, Artificial Sequence
  Description of Artificial Sequence: Synthetic oligonucleotide
uguuacaugccucauagcc

SEQ ID NO: 77978 - RNA, 19 nt, Artificial Sequence
  Description of Artificial Sequence: Synthetic oligonucleotide
caagauauugcucacagcc

SEQ ID NO: 77979 - RNA, 19 nt, Artificial Sequence
  Description of Artificial Sequence: Synthetic oligonucleotide
aauaacguaaucaguacac

SEQ ID NO: 77980 - RNA, 19 nt, Artificial Sequence
  Description of Artificial Sequence: Synthetic oligonucleotide
caugauaugagcuugcuug

SEQ ID NO: 77981 - RNA, 19 nt, Artificial Sequence
  Description of Artificial Sequence: Synthetic oligonucleotide
uuacauuccuguuacaugc

SEQ ID NO: 77982 - RNA, 19 nt, Artificial Sequence
  Description of Artificial Sequence: Synthetic oligonucleotide
auaaaguaccaacaauggc

SEQ ID NO: 77983 - RNA, 19 nt, Artificial Sequence
  Description of Artificial Sequence: Synthetic oligonucleotide
cugacuaugauguucggcg

SEQ ID NO: 77984 - RNA, 19 nt, Artificial Sequence
  Description of Artificial Sequence: Synthetic oligonucleotide
augggauaaauccauugcc

SEQ ID NO: 77985 - RNA, 19 nt, Artificial Sequence
  Description of Artificial Sequence: Synthetic oligonucleotide
uucaguuaagcucucaugu

SEQ ID NO: 77986 - RNA, 19 nt, Artificial Sequence
  Description of Artificial Sequence: Synthetic oligonucleotide
ucgaaaagacaacagcacg

SEQ ID NO: 77987 - RNA, 19 nt, Artificial Sequence
  Description of Artificial Sequence: Synthetic oligonucleotide
aucucgaaaagacaacagc

SEQ ID NO: 77988 - RNA, 19 nt, Artificial Sequence
  Description of Artificial Sequence: Synthetic oligonucleotide
ucucgaaaagacaacagca

SEQ ID NO: 77989 - RNA, 19 nt, Artificial Sequence
  Description of Artificial Sequence: Synthetic oligonucleotide
ugacuaaugcuagauaugg

SEQ ID NO: 77990 - RNA, 19 nt, Artificial Sequence
  Description of Artificial Sequence: Synthetic oligonucleotide
acuaagcuauucaagaacc

SEQ ID NO: 77991 - RNA, 19 nt, Artificial Sequence
  Description of Artificial Sequence: Synthetic oligonucleotide
ugucccgauacuuagauac

SEQ ID NO: 77992 - RNA, 19 nt, Artificial Sequence
  Description of Artificial Sequence: Synthetic oligonucleotide
aaagauuaagugccuuagg

SEQ ID NO: 77993 - RNA, 19 nt, Artificial Sequence
  Description of Artificial Sequence: Synthetic oligonucleotide
aaagagauaaguucaguua

SEQ ID NO: 77994 - RNA, 19 nt, Artificial Sequence
  Description of Artificial Sequence: Synthetic oligonucleotide
guaaucaguacacugauuc

SEQ ID NO: 77995 - RNA, 19 nt, Artificial Sequence
  Description of Artificial Sequence: Synthetic oligonucleotide
uguaugagcaaacuucucu

SEQ ID NO: 77996 - RNA, 19 nt, Artificial Sequence
  Description of Artificial Sequence: Synthetic oligonucleotide
aaucauuugaaagccauca

SEQ ID NO: 77997 - RNA, 19 nt, Artificial Sequence
  Description of Artificial Sequence: Synthetic oligonucleotide
ucucuuuuacauuaauacc

SEQ ID NO: 77998 - RNA, 19 nt, Artificial Sequence
  Description of Artificial Sequence: Synthetic oligonucleotide
uggauagggacgaugaaug

SEQ ID NO: 77999 - RNA, 19 nt, Artificial Sequence
  Description of Artificial Sequence: Synthetic oligonucleotide
auuguuguaaucaagucug

SEQ ID NO: 78000 - RNA, 19 nt, Artificial Sequence
  Description of Artificial Sequence: Synthetic oligonucleotide
auuaaugaucaugacuccc

SEQ ID NO: 78001 - RNA, 19 nt, Artificial Sequence
  Description of Artificial Sequence: Synthetic oligonucleotide
uggaugacaaauaaguaau

SEQ ID NO: 78002 - RNA, 19 nt, Artificial Sequence
  Description of Artificial Sequence: Synthetic oligonucleotide
uaugacaauacagucacca

SEQ ID NO: 78003 - RNA, 19 nt, Artificial Sequence
  Description of Artificial Sequence: Synthetic oligonucleotide
uggauacagaaauuaggcg

SEQ ID NO: 78004 - RNA, 19 nt, Artificial Sequence
  Description of Artificial Sequence: Synthetic oligonucleotide
agaauuagcuuugagcuuc

SEQ ID NO: 78005 - RNA, 19 nt, Artificial Sequence
  Description of Artificial Sequence: Synthetic oligonucleotide
ucuaccacaccauuguccc

SEQ ID NO: 78006 - RNA, 19 nt, Artificial Sequence
  Description of Artificial Sequence: Synthetic oligonucleotide
uaaaacucugcucaggcau

SEQ ID NO: 78007 - RNA, 19 nt, Artificial Sequence
  Description of Artificial Sequence: Synthetic oligonucleotide
acuuagauaccaucagaac

SEQ ID NO: 78008 - RNA, 19 nt, Artificial Sequence
  Description of Artificial Sequence: Synthetic oligonucleotide
ugucaaaagucucuuguga

SEQ ID NO: 78009 - RNA, 19 nt, Artificial Sequence
  Description of Artificial Sequence: Synthetic oligonucleotide
aaauuacugauugagccca

SEQ ID NO: 78010 - RNA, 19 nt, Artificial Sequence
  Description of Artificial Sequence: Synthetic oligonucleotide
auaugagcuugcuugacag

SEQ ID NO: 78011 - RNA, 19 nt, Artificial Sequence
  Description of Artificial Sequence: Synthetic oligonucleotide
guauggaauaggcucaggg

SEQ ID NO: 78012 - RNA, 19 nt, Artificial Sequence
  Description of Artificial Sequence: Synthetic oligonucleotide
aucuuuugaaauaaaugac

SEQ ID NO: 78013 - RNA, 19 nt, Artificial Sequence
  Description of Artificial Sequence: Synthetic oligonucleotide
uacuuagauaccaucagaa

SEQ ID NO: 78014 - RNA, 19 nt, Artificial Sequence
  Description of Artificial Sequence: Synthetic oligonucleotide
cuuagauaccaucagaaca

SEQ ID NO: 78015 - RNA, 19 nt, Artificial Sequence
  Description of Artificial Sequence: Synthetic oligonucleotide
agggauagacgguaugacc

SEQ ID NO: 78016 - RNA, 19 nt, Artificial Sequence
  Description of Artificial Sequence: Synthetic oligonucleotide
agugcuaaaacuuccuagu

SEQ ID NO: 78017 - RNA, 19 nt, Artificial Sequence
  Description of Artificial Sequence: Synthetic oligonucleotide
uagauaaaaguucacucau

SEQ ID NO: 78018 - RNA, 19 nt, Artificial Sequence
  Description of Artificial Sequence: Synthetic oligonucleotide
uugguuugacuaaugcuag

SEQ ID NO: 78019 - RNA, 19 nt, Artificial Sequence
  Description of Artificial Sequence: Synthetic oligonucleotide
cuaucgggauccuugauag

SEQ ID NO: 78020 - RNA, 19 nt, Artificial Sequence
  Description of Artificial Sequence: Synthetic oligonucleotide
aguaugucccgauacuuag

SEQ ID NO: 78021 - RNA, 19 nt, Artificial Sequence
  Description of Artificial Sequence: Synthetic oligonucleotide
aauuacauuccuguuacau

SEQ ID NO: 78022 - RNA, 19 nt, Artificial Sequence
  Description of Artificial Sequence: Synthetic oligonucleotide
ucgaaauuacugauugagc

SEQ ID NO: 78023 - RNA, 19 nt, Artificial Sequence
  Description of Artificial Sequence: Synthetic oligonucleotide
cugaauaucuucacccggg

SEQ ID NO: 78024 - RNA, 19 nt, Artificial Sequence
  Description of Artificial Sequence: Synthetic oligonucleotide
ucauaguauaugaugcagu

SEQ ID NO: 78025 - RNA, 19 nt, Artificial Sequence
  Description of Artificial Sequence: Synthetic oligonucleotide
agauauugcucacagccug

SEQ ID NO: 78026 - RNA, 19 nt, Artificial Sequence
  Description of Artificial Sequence: Synthetic oligonucleotide
gauuaagugccuuaggcua

SEQ ID NO: 78027 - RNA, 19 nt, Artificial Sequence
  Description of Artificial Sequence: Synthetic oligonucleotide
uucuaguaugucccgauac

SEQ ID NO: 78028 - RNA, 19 nt, Artificial Sequence
  Description of Artificial Sequence: Synthetic oligonucleotide
ugaaaaugucgaaauuacu

SEQ ID NO: 78029 - RNA, 19 nt, Artificial Sequence
  Description of Artificial Sequence: Synthetic oligonucleotide
ucaaacuuggaugagggau

SEQ ID NO: 78030 - RNA, 19 nt, Artificial Sequence
  Description of Artificial Sequence: Synthetic oligonucleotide
uugacuaaugcuagauaug

SEQ ID NO: 78031 - RNA, 19 nt, Artificial Sequence
  Description of Artificial Sequence: Synthetic oligonucleotide
cuuccuacaaccuuucuca

SEQ ID NO: 78032 - RNA, 19 nt, Artificial Sequence
  Description of Artificial Sequence: Synthetic oligonucleotide
agcaauaaauaaugguaug

SEQ ID NO: 78033 - RNA, 19 nt, Artificial Sequence
  Description of Artificial Sequence: Synthetic oligonucleotide
ugugcucucacuugaacgu

SEQ ID NO: 78034 - RNA, 19 nt, Artificial Sequence
  Description of Artificial Sequence: Synthetic oligonucleotide
acuuccuaguacaaggugg

SEQ ID NO: 78035 - RNA, 19 nt, Artificial Sequence
  Description of Artificial Sequence: Synthetic oligonucleotide
aacuuccuaguacaaggug

SEQ ID NO: 78036 - RNA, 19 nt, Artificial Sequence
  Description of Artificial Sequence: Synthetic oligonucleotide
gaucaugacucccauuuac

SEQ ID NO: 78037 - RNA, 19 nt, Artificial Sequence
  Description of Artificial Sequence: Synthetic oligonucleotide
guagggagcaugcagguug

SEQ ID NO: 78038 - RNA, 19 nt, Artificial Sequence
  Description of Artificial Sequence: Synthetic oligonucleotide
aacgucuccuaauucagau

SEQ ID NO: 78039 - RNA, 19 nt, Artificial Sequence
  Description of Artificial Sequence: Synthetic oligonucleotide
ucuaguaugucccgauacu

SEQ ID NO: 78040 - RNA, 19 nt, Artificial Sequence
  Description of Artificial Sequence: Synthetic oligonucleotide
uugaacguggcuucugcag

SEQ ID NO: 78041 - RNA, 19 nt, Artificial Sequence
  Description of Artificial Sequence: Synthetic oligonucleotide
gaauaacguaaucaguaca

SEQ ID NO: 78042 - RNA, 19 nt, Artificial Sequence
  Description of Artificial Sequence: Synthetic oligonucleotide
cuucccaauucuaagcuac

SEQ ID NO: 78043 - RNA, 19 nt, Artificial Sequence
  Description of Artificial Sequence: Synthetic oligonucleotide
auauguacaucuaugacaa

SEQ ID NO: 78044 - RNA, 19 nt, Artificial Sequence
  Description of Artificial Sequence: Synthetic oligonucleotide
acgauauguacaucuauga

SEQ ID NO: 78045 - RNA, 19 nt, Artificial Sequence
  Description of Artificial Sequence: Synthetic oligonucleotide
acaacuggacacaagguuc

SEQ ID NO: 78046 - RNA, 19 nt, Artificial Sequence
  Description of Artificial Sequence: Synthetic oligonucleotide
ucuccauuugagccaaaag

SEQ ID NO: 78047 - RNA, 19 nt, Artificial Sequence
  Description of Artificial Sequence: Synthetic oligonucleotide
aaugaguggguaaaacucu

SEQ ID NO: 78048 - RNA, 19 nt, Artificial Sequence
  Description of Artificial Sequence: Synthetic oligonucleotide
uuuccuagcuugaaugcac

SEQ ID NO: 78049 - RNA, 19 nt, Artificial Sequence
  Description of Artificial Sequence: Synthetic oligonucleotide
uaaucaguacacugauucc

SEQ ID NO: 78050 - RNA, 19 nt, Artificial Sequence
  Description of Artificial Sequence: Synthetic oligonucleotide
caaaacguggggaguaggg

SEQ ID NO: 78051 - RNA, 19 nt, Artificial Sequence
  Description of Artificial Sequence: Synthetic oligonucleotide
uguaacaacuggacacaag

SEQ ID NO: 78052 - RNA, 19 nt, Artificial Sequence
  Description of Artificial Sequence: Synthetic oligonucleotide
cacgauauguacaucuaug

SEQ ID NO: 78053 - RNA, 19 nt, Artificial Sequence
  Description of Artificial Sequence: Synthetic oligonucleotide
uauccaaacgguguaugag

SEQ ID NO: 78054 - RNA, 19 nt, Artificial Sequence
  Description of Artificial Sequence: Synthetic oligonucleotide
cuuaggcuaggaauguggc

SEQ ID NO: 78055 - RNA, 19 nt, Artificial Sequence
  Description of Artificial Sequence: Synthetic oligonucleotide
uuauuaaacuaagcuauuc

SEQ ID NO: 78056 - RNA, 19 nt, Artificial Sequence
  Description of Artificial Sequence: Synthetic oligonucleotide
uuaguauccaaacggugua

SEQ ID NO: 78057 - RNA, 19 nt, Artificial Sequence
  Description of Artificial Sequence: Synthetic oligonucleotide
uaugucccgauacuuagau

SEQ ID NO: 78058 - RNA, 19 nt, Artificial Sequence
  Description of Artificial Sequence: Synthetic oligonucleotide
uuacaugauaugagcuugc

SEQ ID NO: 78059 - RNA, 19 nt, Artificial Sequence
  Description of Artificial Sequence: Synthetic oligonucleotide
accuuucucaauaaacgac

SEQ ID NO: 78060 - RNA, 19 nt, Artificial Sequence
  Description of Artificial Sequence: Synthetic oligonucleotide
gaagguagcgucuggaaaa

SEQ ID NO: 78061 - RNA, 19 nt, Artificial Sequence
  Description of Artificial Sequence: Synthetic oligonucleotide
auacuuagauaccaucaga

SEQ ID NO: 78062 - RNA, 19 nt, Artificial Sequence
  Description of Artificial Sequence: Synthetic oligonucleotide
ucaugacucccauuuacac

SEQ ID NO: 78063 - RNA, 19 nt, Artificial Sequence
  Description of Artificial Sequence: Synthetic oligonucleotide
uguuggcgaauuuauuucu

SEQ ID NO: 78064 - RNA, 19 nt, Artificial Sequence
  Description of Artificial Sequence: Synthetic oligonucleotide
ucuaucgggauccuugaua

SEQ ID NO: 78065 - RNA, 19 nt, Artificial Sequence
  Description of Artificial Sequence: Synthetic oligonucleotide
uuguuggcgaauuuauuuc

SEQ ID NO: 78066 - RNA, 19 nt, Artificial Sequence
  Description of Artificial Sequence: Synthetic oligonucleotide
guacaaaguaucaaacgug

SEQ ID NO: 78067 - RNA, 19 nt, Artificial Sequence
  Description of Artificial Sequence: Synthetic oligonucleotide
cuaauucagauaauuuaca

SEQ ID NO: 78068 - RNA, 19 nt, Artificial Sequence
  Description of Artificial Sequence: Synthetic oligonucleotide
ugcucucacuugaacgugg

SEQ ID NO: 78069 - RNA, 19 nt, Artificial Sequence
  Description of Artificial Sequence: Synthetic oligonucleotide
ugcauaugauguacaaagu

SEQ ID NO: 78070 - RNA, 19 nt, Artificial Sequence
  Description of Artificial Sequence: Synthetic oligonucleotide
gggaaguugaugcaauggg

SEQ ID NO: 78071 - RNA, 19 nt, Artificial Sequence
  Description of Artificial Sequence: Synthetic oligonucleotide
aaacuuggaugagggauag

SEQ ID NO: 78072 - RNA, 19 nt, Artificial Sequence
  Description of Artificial Sequence: Synthetic oligonucleotide
ugcuaaaccguccucgcuc

SEQ ID NO: 78073 - RNA, 19 nt, Artificial Sequence
  Description of Artificial Sequence: Synthetic oligonucleotide
gugaugaauaacguaauca

SEQ ID NO: 78074 - RNA, 19 nt, Artificial Sequence
  Description of Artificial Sequence: Synthetic oligonucleotide
gguaaaacucugcucaggc

SEQ ID NO: 78075 - RNA, 19 nt, Artificial Sequence
  Description of Artificial Sequence: Synthetic oligonucleotide
aucacauccaggguaaaug

SEQ ID NO: 78076 - RNA, 19 nt, Artificial Sequence
  Description of Artificial Sequence: Synthetic oligonucleotide
auuguggugaaaaugucga

SEQ ID NO: 78077 - RNA, 19 nt, Artificial Sequence
  Description of Artificial Sequence: Synthetic oligonucleotide
uuuguaaaaugagugggua

SEQ ID NO: 78078 - RNA, 19 nt, Artificial Sequence
  Description of Artificial Sequence: Synthetic oligonucleotide
uguucaguuaagcucucau

SEQ ID NO: 78079 - RNA, 19 nt, Artificial Sequence
  Description of Artificial Sequence: Synthetic oligonucleotide
aauuaggcgugggaacagg

SEQ ID NO: 78080 - RNA, 19 nt, Artificial Sequence
  Description of Artificial Sequence: Synthetic oligonucleotide
ugagcaaacuucucuuaga

SEQ ID NO: 78081 - RNA, 19 nt, Artificial Sequence
  Description of Artificial Sequence: Synthetic oligonucleotide
uacugauugagcccaaauu

SEQ ID NO: 78082 - RNA, 19 nt, Artificial Sequence
  Description of Artificial Sequence: Synthetic oligonucleotide
ugauugagcccaaauucaa

SEQ ID NO: 78083 - RNA, 19 nt, Artificial Sequence
  Description of Artificial Sequence: Synthetic oligonucleotide
uugauaggagaaagguuac

SEQ ID NO: 78084 - RNA, 19 nt, Artificial Sequence
  Description of Artificial Sequence: Synthetic oligonucleotide
cucauaguauaugaugcag

SEQ ID NO: 78085 - RNA, 19 nt, Artificial Sequence
  Description of Artificial Sequence: Synthetic oligonucleotide
agaauugucaaaagucucu

SEQ ID NO: 78086 - RNA, 19 nt, Artificial Sequence
  Description of Artificial Sequence: Synthetic oligonucleotide
uguggugaaaaugucgaaa

SEQ ID NO: 78087 - RNA, 19 nt, Artificial Sequence
  Description of Artificial Sequence: Synthetic oligonucleotide
uuguaaaaugaguggguaa

SEQ ID NO: 78088 - RNA, 19 nt, Artificial Sequence
  Description of Artificial Sequence: Synthetic oligonucleotide
cuaccgacacgauauguac

SEQ ID NO: 78089 - RNA, 19 nt, Artificial Sequence
  Description of Artificial Sequence: Synthetic oligonucleotide
ggauguacagagccgaugc

SEQ ID NO: 78090 - RNA, 19 nt, Artificial Sequence
  Description of Artificial Sequence: Synthetic oligonucleotide
gaaauuaggcgugggaaca

SEQ ID NO: 78091 - RNA, 19 nt, Artificial Sequence
  Description of Artificial Sequence: Synthetic oligonucleotide
agacgguaugaccacaacu

SEQ ID NO: 78092 - RNA, 19 nt, Artificial Sequence
  Description of Artificial Sequence: Synthetic oligonucleotide
ugaguggguaaaacucugc

SEQ ID NO: 78093 - RNA, 19 nt, Artificial Sequence
  Description of Artificial Sequence: Synthetic oligonucleotide
aaauuaggcgugggaacag

SEQ ID NO: 78094 - RNA, 19 nt, Artificial Sequence
  Description of Artificial Sequence: Synthetic oligonucleotide
guuacaugccucauagccc

SEQ ID NO: 78095 - RNA, 19 nt, Artificial Sequence
  Description of Artificial Sequence: Synthetic oligonucleotide
auuaccaaaacgucuccua

SEQ ID NO: 78096 - RNA, 19 nt, Artificial Sequence
  Description of Artificial Sequence: Synthetic oligonucleotide
ucccuuuaaauaagaugca

SEQ ID NO: 78097 - RNA, 19 nt, Artificial Sequence
  Description of Artificial Sequence: Synthetic oligonucleotide
uuuggucaugggauaaauc

SEQ ID NO: 78098 - RNA, 19 nt, Artificial Sequence
  Description of Artificial Sequence: Synthetic oligonucleotide
uggcagucacacuuugggg

SEQ ID NO: 78099 - RNA, 19 nt, Artificial Sequence
  Description of Artificial Sequence: Synthetic oligonucleotide
aaguaucaaacguggguuu

SEQ ID NO: 78100 - RNA, 19 nt, Artificial Sequence
  Description of Artificial Sequence: Synthetic oligonucleotide
aggcgauugauaucaacgu

SEQ ID NO: 78101 - RNA, 19 nt, Artificial Sequence
  Description of Artificial Sequence: Synthetic oligonucleotide
  modified_base (7)..(7): a, c, u, g, unknown or other
uuucccnugaacgucccuc

SEQ ID NO: 78102 - RNA, 19 nt, Artificial Sequence
  Description of Artificial Sequence: Synthetic oligonucleotide
augucuaggugcugggaag

SEQ ID NO: 78103 - RNA, 19 nt, Artificial Sequence
  Description of Artificial Sequence: Synthetic oligonucleotide
ucucugggguucuaguaug

SEQ ID NO: 78104 - RNA, 19 nt, Artificial Sequence
  Description of Artificial Sequence: Synthetic oligonucleotide
cgugauucaaacuuggaug

SEQ ID NO: 78105 - RNA, 19 nt, Artificial Sequence
  Description of Artificial Sequence: Synthetic oligonucleotide
aauggcuccugacuaugau

SEQ ID NO: 78106 - RNA, 19 nt, Artificial Sequence
  Description of Artificial Sequence: Synthetic oligonucleotide
ugccucauagcccuaccga

SEQ ID NO: 78107 - RNA, 19 nt, Artificial Sequence
  Description of Artificial Sequence: Synthetic oligonucleotide
ugccaauacaaagaaccca

SEQ ID NO: 78108 - RNA, 19 nt, Artificial Sequence
  Description of Artificial Sequence: Synthetic oligonucleotide
uuacugauugagcccaaau

SEQ ID NO: 78109 - RNA, 19 nt, Artificial Sequence
  Description of Artificial Sequence: Synthetic oligonucleotide
gggauguucaguuaagcuc

SEQ ID NO: 78110 - RNA, 19 nt, Artificial Sequence
  Description of Artificial Sequence: Synthetic oligonucleotide
uacauuccuguuacaugcc

SEQ ID NO: 78111 - RNA, 19 nt, Artificial Sequence
  Description of Artificial Sequence: Synthetic oligonucleotide
gaaagagauaaguucaguu

SEQ ID NO: 78112 - RNA, 19 nt, Artificial Sequence
  Description of Artificial Sequence: Synthetic oligonucleotide
uggcgaauuuauuucuugu

SEQ ID NO: 78113 - RNA, 19 nt, Artificial Sequence
  Description of Artificial Sequence: Synthetic oligonucleotide
aagauauugcucacagccu

SEQ ID NO: 78114 - RNA, 19 nt, Artificial Sequence
  Description of Artificial Sequence: Synthetic oligonucleotide
ccgauuaaaaucuauauua

SEQ ID NO: 78115 - RNA, 19 nt, Artificial Sequence
  Description of Artificial Sequence: Synthetic oligonucleotide
uaugauguucggcgacugc

SEQ ID NO: 78116 - RNA, 19 nt, Artificial Sequence
  Description of Artificial Sequence: Synthetic oligonucleotide
cuaguucugccccauccag

SEQ ID NO: 78117 - RNA, 19 nt, Artificial Sequence
  Description of Artificial Sequence: Synthetic oligonucleotide
agaugcauaugauguacaa

SEQ ID NO: 78118 - RNA, 19 nt, Artificial Sequence
  Description of Artificial Sequence: Synthetic oligonucleotide
gaugucuaggugcugggaa

SEQ ID NO: 78119 - RNA, 19 nt, Artificial Sequence
  Description of Artificial Sequence: Synthetic oligonucleotide
guugcuaaaccguccucgc

SEQ ID NO: 78120 - RNA, 19 nt, Artificial Sequence
  Description of Artificial Sequence: Synthetic oligonucleotide
uucagauaauuuacaugau

SEQ ID NO: 78121 - RNA, 19 nt, Artificial Sequence
  Description of Artificial Sequence: Synthetic oligonucleotide
uggguaaaacucugcucag

SEQ ID NO: 78122 - RNA, 19 nt, Artificial Sequence
  Description of Artificial Sequence: Synthetic oligonucleotide
accgacacgauauguacau

SEQ ID NO: 78123 - RNA, 19 nt, Artificial Sequence
  Description of Artificial Sequence: Synthetic oligonucleotide
aucgggauccuugauagga

SEQ ID NO: 78124 - RNA, 19 nt, Artificial Sequence
  Description of Artificial Sequence: Synthetic oligonucleotide
accaaaacgucuccuaauu

SEQ ID NO: 78125 - RNA, 19 nt, Artificial Sequence
  Description of Artificial Sequence: Synthetic oligonucleotide
aguacaagguggaugacaa

SEQ ID NO: 78126 - RNA, 19 nt, Artificial Sequence
  Description of Artificial Sequence: Synthetic oligonucleotide
auuaagugccuuaggcuag

SEQ ID NO: 78127 - RNA, 19 nt, Artificial Sequence
  Description of Artificial Sequence: Synthetic oligonucleotide
uaguaugucccgauacuua

SEQ ID NO: 78128 - RNA, 19 nt, Artificial Sequence
  Description of Artificial Sequence: Synthetic oligonucleotide
uacaaccuuucucaauaaa

SEQ ID NO: 78129 - RNA, 19 nt, Artificial Sequence
  Description of Artificial Sequence: Synthetic oligonucleotide
ugacuaugauguucggcga

SEQ ID NO: 78130 - RNA, 19 nt, Artificial Sequence
  Description of Artificial Sequence: Synthetic oligonucleotide
caaaccauagcuggucccc

SEQ ID NO: 78131 - RNA, 19 nt, Artificial Sequence
  Description of Artificial Sequence: Synthetic oligonucleotide
gcugaauaucuucacccgg

SEQ ID NO: 78132 - RNA, 19 nt, Artificial Sequence
  Description of Artificial Sequence: Synthetic oligonucleotide
gcucguaucucacugaaca

SEQ ID NO: 78133 - RNA, 19 nt, Artificial Sequence
  Description of Artificial Sequence: Synthetic oligonucleotide
gauaggagaaagguuaccu

SEQ ID NO: 78134 - RNA, 19 nt, Artificial Sequence
  Description of Artificial Sequence: Synthetic oligonucleotide
uucggcgacugcugggugg

SEQ ID NO: 78135 - RNA, 19 nt, Artificial Sequence
  Description of Artificial Sequence: Synthetic oligonucleotide
cucauaaugccaccgauua

SEQ ID NO: 78136 - RNA, 19 nt, Artificial Sequence
  Description of Artificial Sequence: Synthetic oligonucleotide
uaaugguaugugucuggug

SEQ ID NO: 78137 - RNA, 19 nt, Artificial Sequence
  Description of Artificial Sequence: Synthetic oligonucleotide
gauagggacgaugaaugga

SEQ ID NO: 78138 - RNA, 19 nt, Artificial Sequence
  Description of Artificial Sequence: Synthetic oligonucleotide
uccaacccgaggcaagcug

SEQ ID NO: 78139 - RNA, 19 nt, Artificial Sequence
  Description of Artificial Sequence: Synthetic oligonucleotide
uauaugaugcaguggccuu

SEQ ID NO: 78140 - RNA, 19 nt, Artificial Sequence
  Description of Artificial Sequence: Synthetic oligonucleotide
auggcuccugacuaugaug

SEQ ID NO: 78141 - RNA, 19 nt, Artificial Sequence
  Description of Artificial Sequence: Synthetic oligonucleotide
uaccgacacgauauguaca

SEQ ID NO: 78142 - RNA, 19 nt, Artificial Sequence
  Description of Artificial Sequence: Synthetic oligonucleotide
auaugaugcaguggccuuc

SEQ ID NO: 78143 - RNA, 19 nt, Artificial Sequence
  Description of Artificial Sequence: Synthetic oligonucleotide
acguaaucaguacacugau

SEQ ID NO: 78144 - RNA, 19 nt, Artificial Sequence
  Description of Artificial Sequence: Synthetic oligonucleotide
gacuaugauguucggcgac

SEQ ID NO: 78145 - RNA, 19 nt, Artificial Sequence
  Description of Artificial Sequence: Synthetic oligonucleotide
gaaauggcuccugacuaug

SEQ ID NO: 78146 - RNA, 19 nt, Artificial Sequence
  Description of Artificial Sequence: Synthetic oligonucleotide
aacgguguaugagcaaacu

SEQ ID NO: 78147 - RNA, 19 nt, Artificial Sequence
  Description of Artificial Sequence: Synthetic oligonucleotide
ugccagaccucuaccacac

SEQ ID NO: 78148 - RNA, 19 nt, Artificial Sequence
  Description of Artificial Sequence: Synthetic oligonucleotide
ucguaucucacugaacauc

SEQ ID NO: 78149 - RNA, 19 nt, Artificial Sequence
  Description of Artificial Sequence: Synthetic oligonucleotide
uuguuguaaucaagucuga

SEQ ID NO: 78150 - RNA, 19 nt, Artificial Sequence
  Description of Artificial Sequence: Synthetic oligonucleotide
aguauccaaacgguguaug

SEQ ID NO: 78151 - RNA, 19 nt, Artificial Sequence
  Description of Artificial Sequence: Synthetic oligonucleotide
gguaugaccacaacuguac

SEQ ID NO: 78152 - RNA, 19 nt, Artificial Sequence
  Description of Artificial Sequence: Synthetic oligonucleotide
cacaucucgaaaagacaac

SEQ ID NO: 78153 - RNA, 19 nt, Artificial Sequence
  Description of Artificial Sequence: Synthetic oligonucleotide
  modified_base (6)..(6): a, c, u, g, unknown or other
uucccnugaacgucccuca

SEQ ID NO: 78154 - RNA, 19 nt, Artificial Sequence
  Description of Artificial Sequence: Synthetic oligonucleotide
auaucuucacccgggguug

SEQ ID NO: 78155 - RNA, 19 nt, Artificial Sequence
  Description of Artificial Sequence: Synthetic oligonucleotide
uggcuuguggcaaaccaua

SEQ ID NO: 78156 - RNA, 19 nt, Artificial Sequence
  Description of Artificial Sequence: Synthetic oligonucleotide
cuuccuaguacaaggugga

SEQ ID NO: 78157 - RNA, 19 nt, Artificial Sequence
  Description of Artificial Sequence: Synthetic oligonucleotide
acauuccuguuacaugccu

SEQ ID NO: 78158 - RNA, 19 nt, Artificial Sequence
  Description of Artificial Sequence: Synthetic oligonucleotide
auagggacgaugaauggaa

SEQ ID NO: 78159 - RNA, 19 nt, Artificial Sequence
  Description of Artificial Sequence: Synthetic oligonucleotide
agcaugcagguuguaacuc

SEQ ID NO: 78160 - RNA, 19 nt, Artificial Sequence
  Description of Artificial Sequence: Synthetic oligonucleotide
ucccgauacuuagauacca

SEQ ID NO: 78161 - RNA, 19 nt, Artificial Sequence
  Description of Artificial Sequence: Synthetic oligonucleotide
ggagcaugcagguuguaac

SEQ ID NO: 78162 - RNA, 19 nt, Artificial Sequence
  Description of Artificial Sequence: Synthetic oligonucleotide
uucuaaggcuguguucugc

SEQ ID NO: 78163 - RNA, 19 nt, Artificial Sequence
  Description of Artificial Sequence: Synthetic oligonucleotide
cguaucucacugaacaucc

SEQ ID NO: 78164 - RNA, 19 nt, Artificial Sequence
  Description of Artificial Sequence: Synthetic oligonucleotide
agucuaucgggauccuuga

SEQ ID NO: 78165 - RNA, 19 nt, Artificial Sequence
  Description of Artificial Sequence: Synthetic oligonucleotide
uaaugccaccgauuaaaau

SEQ ID NO: 78166 - RNA, 19 nt, Artificial Sequence
  Description of Artificial Sequence: Synthetic oligonucleotide
cuaggugcugggaaguuga

SEQ ID NO: 78167 - RNA, 19 nt, Artificial Sequence
  Description of Artificial Sequence: Synthetic oligonucleotide
uaucgggauccuugauagg

SEQ ID NO: 78168 - RNA, 19 nt, Artificial Sequence
  Description of Artificial Sequence: Synthetic oligonucleotide
ucuaggugcugggaaguug

SEQ ID NO: 78169 - RNA, 19 nt, Artificial Sequence
  Description of Artificial Sequence: Synthetic oligonucleotide
acgguaugaccacaacugu

SEQ ID NO: 78170 - RNA, 19 nt, Artificial Sequence
  Description of Artificial Sequence: Synthetic oligonucleotide
aucuggauagggacgauga

SEQ ID NO: 78171 - RNA, 19 nt, Artificial Sequence
  Description of Artificial Sequence: Synthetic oligonucleotide
ugaccuugucuuccagaug

SEQ ID NO: 78172 - RNA, 19 nt, Artificial Sequence
  Description of Artificial Sequence: Synthetic oligonucleotide
ggauagggacgaugaaugg

SEQ ID NO: 78173 - RNA, 19 nt, Artificial Sequence
  Description of Artificial Sequence: Synthetic oligonucleotide
aguaucccuuuaaauaaga

SEQ ID NO: 78174 - RNA, 19 nt, Artificial Sequence
  Description of Artificial Sequence: Synthetic oligonucleotide
gugccuuaggcuaggaaug

SEQ ID NO: 78175 - RNA, 19 nt, Artificial Sequence
  Description of Artificial Sequence: Synthetic oligonucleotide
ucuggauagggacgaugaa

SEQ ID NO: 78176 - RNA, 19 nt, Artificial Sequence
  Description of Artificial Sequence: Synthetic oligonucleotide
aauccgugggaggaacuga

SEQ ID NO: 78177 - RNA, 19 nt, Artificial Sequence
  Description of Artificial Sequence: Synthetic oligonucleotide
gaugcauaugauguacaaa

SEQ ID NO: 78178 - RNA, 19 nt, Artificial Sequence
  Description of Artificial Sequence: Synthetic oligonucleotide
uugcuaaaccguccucgcu

SEQ ID NO: 78179 - RNA, 19 nt, Artificial Sequence
  Description of Artificial Sequence: Synthetic oligonucleotide
uccuagcuugaaugcacca

SEQ ID NO: 78180 - RNA, 19 nt, Artificial Sequence
  Description of Artificial Sequence: Synthetic oligonucleotide
gugccaauacaaagaaccc

SEQ ID NO: 78181 - RNA, 19 nt, Artificial Sequence
  Description of Artificial Sequence: Synthetic oligonucleotide
  modified_base (5)..(5): a, c, u, g, unknown or other
ucccnugaacgucccucag

SEQ ID NO: 78182 - RNA, 19 nt, Artificial Sequence
  Description of Artificial Sequence: Synthetic oligonucleotide
gggauagacgguaugacca

SEQ ID NO: 78183 - RNA, 19 nt, Artificial Sequence
  Description of Artificial Sequence: Synthetic oligonucleotide
  modified_base (3)..(3): a, c, u, g, unknown or other
ccnugaacgucccucagug

SEQ ID NO: 78184 - RNA, 19 nt, Artificial Sequence
  Description of Artificial Sequence: Synthetic oligonucleotide
  modified_base (9)..(9): a, c, u, g, unknown or other
cauuucccnugaacguccc

SEQ ID NO: 78185 - RNA, 19 nt, Artificial Sequence
  Description of Artificial Sequence: Synthetic oligonucleotide
ugguuugacuaaugcuaga

SEQ ID NO: 78186 - RNA, 19 nt, Artificial Sequence
  Description of Artificial Sequence: Synthetic oligonucleotide
agauaccaucagaacagag

SEQ ID NO: 78187 - RNA, 19 nt, Artificial Sequence
  Description of Artificial Sequence: Synthetic oligonucleotide
uagacgguaugaccacaac

SEQ ID NO: 78188 - RNA, 19 nt, Artificial Sequence
  Description of Artificial Sequence: Synthetic oligonucleotide
gaaguugaugcaaugggau

SEQ ID NO: 78189 - RNA, 19 nt, Artificial Sequence
  Description of Artificial Sequence: Synthetic oligonucleotide
acuaugauguucggcgacu

SEQ ID NO: 78190 - RNA, 19 nt, Artificial Sequence
  Description of Artificial Sequence: Synthetic oligonucleotide
ugauaugagcuugcuugac

SEQ ID NO: 78191 - RNA, 19 nt, Artificial Sequence
  Description of Artificial Sequence: Synthetic oligonucleotide
accguccucgcucauagua

SEQ ID NO: 78192 - RNA, 19 nt, Artificial Sequence
  Description of Artificial Sequence: Synthetic oligonucleotide
aucaaaacguggggaguag

SEQ ID NO: 78193 - RNA, 19 nt, Artificial Sequence
  Description of Artificial Sequence: Synthetic oligonucleotide
agccgaugcggacaagugu

SEQ ID NO: 78194 - RNA, 19 nt, Artificial Sequence
  Description of Artificial Sequence: Synthetic oligonucleotide
agaauagcccgaguggaau

SEQ ID NO: 78195 - RNA, 19 nt, Artificial Sequence
  Description of Artificial Sequence: Synthetic oligonucleotide
aaacgucuccuaauucaga

SEQ ID NO: 78196 - RNA, 19 nt, Artificial Sequence
  Description of Artificial Sequence: Synthetic oligonucleotide
ggcgaauuuauuucuuguc

SEQ ID NO: 78197 - RNA, 19 nt, Artificial Sequence
  Description of Artificial Sequence: Synthetic oligonucleotide
gggauuaaugaucaugacu

SEQ ID NO: 78198 - RNA, 19 nt, Artificial Sequence
  Description of Artificial Sequence: Synthetic oligonucleotide
aucaugacucccauuuaca

SEQ ID NO: 78199 - RNA, 19 nt, Artificial Sequence
  Description of Artificial Sequence: Synthetic oligonucleotide
uguucggcgacugcugggu

SEQ ID NO: 78200 - RNA, 19 nt, Artificial Sequence
  Description of Artificial Sequence: Synthetic oligonucleotide
uagauaccaucagaacaga

SEQ ID NO: 78201 - RNA, 19 nt, Artificial Sequence
  Description of Artificial Sequence: Synthetic oligonucleotide
uggcaaauaauggcuuagu

SEQ ID NO: 78202 - RNA, 19 nt, Artificial Sequence
  Description of Artificial Sequence: Synthetic oligonucleotide
ugaccacaacuguacuugu

SEQ ID NO: 78203 - RNA, 19 nt, Artificial Sequence
  Description of Artificial Sequence: Synthetic oligonucleotide
augcuagauauggauggug

SEQ ID NO: 78204 - RNA, 19 nt, Artificial Sequence
  Description of Artificial Sequence: Synthetic oligonucleotide
guaucaaacguggguuuug

SEQ ID NO: 78205 - RNA, 19 nt, Artificial Sequence
  Description of Artificial Sequence: Synthetic oligonucleotide
aaauggcuccugacuauga

SEQ ID NO: 78206 - RNA, 19 nt, Artificial Sequence
  Description of Artificial Sequence: Synthetic oligonucleotide
uagggagcaugcagguugu

SEQ ID NO: 78207 - RNA, 19 nt, Artificial Sequence
  Description of Artificial Sequence: Synthetic oligonucleotide
agcccuaccgacacgauau

SEQ ID NO: 78208 - RNA, 19 nt, Artificial Sequence
  Description of Artificial Sequence: Synthetic oligonucleotide
aaguccuaaagggcagggu

SEQ ID NO: 78209 - RNA, 19 nt, Artificial Sequence
  Description of Artificial Sequence: Synthetic oligonucleotide
guuugacuaaugcuagaua

SEQ ID NO: 78210 - RNA, 19 nt, Artificial Sequence
  Description of Artificial Sequence: Synthetic oligonucleotide
guggugaaaaugucgaaau

SEQ ID NO: 78211 - RNA, 19 nt, Artificial Sequence
  Description of Artificial Sequence: Synthetic oligonucleotide
gguagcgucuggaaaacac

SEQ ID NO: 78212 - RNA, 19 nt, Artificial Sequence
  Description of Artificial Sequence: Synthetic oligonucleotide
gguuaccuggaacauuuuc

SEQ ID NO: 78213 - RNA, 19 nt, Artificial Sequence
  Description of Artificial Sequence: Synthetic oligonucleotide
guuagguucaaagcuuaaa

SEQ ID NO: 78214 - RNA, 19 nt, Artificial Sequence
  Description of Artificial Sequence: Synthetic oligonucleotide
guauaugaugcaguggccu

SEQ ID NO: 78215 - RNA, 19 nt, Artificial Sequence
  Description of Artificial Sequence: Synthetic oligonucleotide
gauagacgguaugaccaca

SEQ ID NO: 78216 - RNA, 19 nt, Artificial Sequence
  Description of Artificial Sequence: Synthetic oligonucleotide
ggaacugaacuuucuagcu

SEQ ID NO: 78217 - RNA, 19 nt, Artificial Sequence
  Description of Artificial Sequence: Synthetic oligonucleotide
cuagcuugaaugcaccagu

SEQ ID NO: 78218 - RNA, 19 nt, Artificial Sequence
  Description of Artificial Sequence: Synthetic oligonucleotide
cuaugauguucggcgacug

SEQ ID NO: 78219 - RNA, 19 nt, Artificial Sequence
  Description of Artificial Sequence: Synthetic oligonucleotide
aguaucaaacguggguuuu

SEQ ID NO: 78220 - RNA, 19 nt, Artificial Sequence
  Description of Artificial Sequence: Synthetic oligonucleotide
acccgaggcaagcuguagu

SEQ ID NO: 78221 - RNA, 19 nt, Artificial Sequence
  Description of Artificial Sequence: Synthetic oligonucleotide
ggauagacgguaugaccac

SEQ ID NO: 78222 - RNA, 19 nt, Artificial Sequence
  Description of Artificial Sequence: Synthetic oligonucleotide
ggcgauugauaucaacguc

SEQ ID NO: 78223 - RNA, 19 nt, Artificial Sequence
  Description of Artificial Sequence: Synthetic oligonucleotide
gcuuaguauccaaacggug

SEQ ID NO: 78224 - RNA, 19 nt, Artificial Sequence
  Description of Artificial Sequence: Synthetic oligonucleotide
uagcccuaccgacacgaua

SEQ ID NO: 78225 - RNA, 19 nt, Artificial Sequence
  Description of Artificial Sequence: Synthetic oligonucleotide
uaguauccaaacgguguau

SEQ ID NO: 78226 - RNA, 19 nt, Artificial Sequence
  Description of Artificial Sequence: Synthetic oligonucleotide
cuaccacaccauugucccc

SEQ ID NO: 78227 - RNA, 19 nt, Artificial Sequence
  Description of Artificial Sequence: Synthetic oligonucleotide
gcuagauauggauggugca

SEQ ID NO: 78228 - RNA, 19 nt, Artificial Sequence
  Description of Artificial Sequence: Synthetic oligonucleotide
agcucguaucucacugaac

SEQ ID NO: 78229 - RNA, 19 nt, Artificial Sequence
  Description of Artificial Sequence: Synthetic oligonucleotide
gggguucuaguaugucccg

SEQ ID NO: 78230 - RNA, 19 nt, Artificial Sequence
  Description of Artificial Sequence: Synthetic oligonucleotide
gugcuaaaacuuccuagua

SEQ ID NO: 78231 - RNA, 19 nt, Artificial Sequence
  Description of Artificial Sequence: Synthetic oligonucleotide
auagacgguaugaccacaa

SEQ ID NO: 78232 - RNA, 19 nt, Artificial Sequence
  Description of Artificial Sequence: Synthetic oligonucleotide
ggcaaauaauggcuuagua

SEQ ID NO: 78233 - RNA, 19 nt, Artificial Sequence
  Description of Artificial Sequence: Synthetic oligonucleotide
gaaguccgugauucaaacu

SEQ ID NO: 78234 - RNA, 19 nt, Artificial Sequence
  Description of Artificial Sequence: Synthetic oligonucleotide
cgauauguacaucuaugac

SEQ ID NO: 78235 - RNA, 19 nt, Artificial Sequence
  Description of Artificial Sequence: Synthetic oligonucleotide
  modified_base (8)..(8): a, c, u, g, unknown or other
auuucccnugaacgucccu

SEQ ID NO: 78236 - RNA, 19 nt, Artificial Sequence
  Description of Artificial Sequence: Synthetic oligonucleotide
caagaaguccgugauucaa

SEQ ID NO: 78237 - RNA, 19 nt, Artificial Sequence
  Description of Artificial Sequence: Synthetic oligonucleotide
guacagagccgaugcggac

SEQ ID NO: 78238 - RNA, 19 nt, Artificial Sequence
  Description of Artificial Sequence: Synthetic oligonucleotide
cagaauccgugggaggaac

SEQ ID NO: 78239 - RNA, 19 nt, Artificial Sequence
  Description of Artificial Sequence: Synthetic oligonucleotide
aauuacugauugagcccaa

SEQ ID NO: 78240 - RNA, 19 nt, Artificial Sequence
  Description of Artificial Sequence: Synthetic oligonucleotide
guucucacggucucucucu

SEQ ID NO: 78241 - RNA, 19 nt, Artificial Sequence
  Description of Artificial Sequence: Synthetic oligonucleotide
gccucauagcccuaccgac

SEQ ID NO: 78242 - RNA, 19 nt, Artificial Sequence
  Description of Artificial Sequence: Synthetic oligonucleotide
uaaaccguccucgcucaua

SEQ ID NO: 78243 - RNA, 19 nt, Artificial Sequence
  Description of Artificial Sequence: Synthetic oligonucleotide
ccgauacuuagauaccauc

SEQ ID NO: 78244 - RNA, 19 nt, Artificial Sequence
  Description of Artificial Sequence: Synthetic oligonucleotide
cuacaaccuuucucaauaa

SEQ ID NO: 78245 - RNA, 19 nt, Artificial Sequence
  Description of Artificial Sequence: Synthetic oligonucleotide
gucccgauacuuagauacc

SEQ ID NO: 78246 - RNA, 19 nt, Artificial Sequence
  Description of Artificial Sequence: Synthetic oligonucleotide
aggcauuagcuuggcaaga

SEQ ID NO: 78247 - RNA, 19 nt, Artificial Sequence
  Description of Artificial Sequence: Synthetic oligonucleotide
caucaaaacguggggagua

SEQ ID NO: 78248 - RNA, 19 nt, Artificial Sequence
  Description of Artificial Sequence: Synthetic oligonucleotide
gguuguaacuccacaguaa

SEQ ID NO: 78249 - RNA, 19 nt, Artificial Sequence
  Description of Artificial Sequence: Synthetic oligonucleotide
acagcacgaaggcgauuga

SEQ ID NO: 78250 - RNA, 19 nt, Artificial Sequence
  Description of Artificial Sequence: Synthetic oligonucleotide
gcuaaaccguccucgcuca

SEQ ID NO: 78251 - RNA, 19 nt, Artificial Sequence
  Description of Artificial Sequence: Synthetic oligonucleotide
ggagucuuggaugcugcug

SEQ ID NO: 78252 - RNA, 19 nt, Artificial Sequence
  Description of Artificial Sequence: Synthetic oligonucleotide
guucuaguaugucccgaua

SEQ ID NO: 78253 - RNA, 19 nt, Artificial Sequence
  Description of Artificial Sequence: Synthetic oligonucleotide
ccugacuaugauguucggc

SEQ ID NO: 78254 - RNA, 19 nt, Artificial Sequence
  Description of Artificial Sequence: Synthetic oligonucleotide
agguuagguucaaagcuua

SEQ ID NO: 78255 - RNA, 19 nt, Artificial Sequence
  Description of Artificial Sequence: Synthetic oligonucleotide
cuaguacaagguggaugac

SEQ ID NO: 78256 - RNA, 19 nt, Artificial Sequence
  Description of Artificial Sequence: Synthetic oligonucleotide
gugcucucacuugaacgug

SEQ ID NO: 78257 - RNA, 19 nt, Artificial Sequence
  Description of Artificial Sequence: Synthetic oligonucleotide
gccgaugcggacaaguguc

SEQ ID NO: 78258 - RNA, 19 nt, Artificial Sequence
  Description of Artificial Sequence: Synthetic oligonucleotide
aacuuggaugagggauaga

SEQ ID NO: 78259 - RNA, 19 nt, Artificial Sequence
  Description of Artificial Sequence: Synthetic oligonucleotide
guaugucccgauacuuaga

SEQ ID NO: 78260 - RNA, 19 nt, Artificial Sequence
  Description of Artificial Sequence: Synthetic oligonucleotide
gggauaaauuuagauuaaa

SEQ ID NO: 78261 - RNA, 19 nt, Artificial Sequence
  Description of Artificial Sequence: Synthetic oligonucleotide
agaauccgugggaggaacu

SEQ ID NO: 78262 - RNA, 19 nt, Artificial Sequence
  Description of Artificial Sequence: Synthetic oligonucleotide
ccucgcucauaguauauga

SEQ ID NO: 78263 - RNA, 19 nt, Artificial Sequence
  Description of Artificial Sequence: Synthetic oligonucleotide
augucccgauacuuagaua

SEQ ID NO: 78264 - RNA, 19 nt, Artificial Sequence
  Description of Artificial Sequence: Synthetic oligonucleotide
guguaugagcaaacuucuc

SEQ ID NO: 78265 - RNA, 19 nt, Artificial Sequence
  Description of Artificial Sequence: Synthetic oligonucleotide
gcuaggaauguggcuuuag

SEQ ID NO: 78266 - RNA, 19 nt, Artificial Sequence
  Description of Artificial Sequence: Synthetic oligonucleotide
ugccaccgauuaaaaucua

SEQ ID NO: 78267 - RNA, 19 nt, Artificial Sequence
  Description of Artificial Sequence: Synthetic oligonucleotide
ccaaggaggggaaauguua

SEQ ID NO: 78268 - RNA, 19 nt, Artificial Sequence
  Description of Artificial Sequence: Synthetic oligonucleotide
uuccuaguacaagguggau

SEQ ID NO: 78269 - RNA, 19 nt, Artificial Sequence
  Description of Artificial Sequence: Synthetic oligonucleotide
cagcucguaucucacugaa

SEQ ID NO: 78270 - RNA, 19 nt, Artificial Sequence
  Description of Artificial Sequence: Synthetic oligonucleotide
ugcggacaaguguccccac

SEQ ID NO: 78271 - RNA, 19 nt, Artificial Sequence
  Description of Artificial Sequence: Synthetic oligonucleotide
gguuugacuaaugcuagau

SEQ ID NO: 78272 - RNA, 19 nt, Artificial Sequence
  Description of Artificial Sequence: Synthetic oligonucleotide
guucggcgacugcugggug

SEQ ID NO: 78273 - RNA, 19 nt, Artificial Sequence
  Description of Artificial Sequence: Synthetic oligonucleotide
cuggauagggacgaugaau

SEQ ID NO: 78274 - RNA, 19 nt, Artificial Sequence
  Description of Artificial Sequence: Synthetic oligonucleotide
auguggcuuuaggugagaa

SEQ ID NO: 78275 - RNA, 19 nt, Artificial Sequence
  Description of Artificial Sequence: Synthetic oligonucleotide
cucucugggguucuaguau

SEQ ID NO: 78276 - RNA, 19 nt, Artificial Sequence
  Description of Artificial Sequence: Synthetic oligonucleotide
cucgcucauaguauaugau

SEQ ID NO: 78277 - RNA, 19 nt, Artificial Sequence
  Description of Artificial Sequence: Synthetic oligonucleotide
ccaccgauuaaaaucuaua

SEQ ID NO: 78278 - RNA, 19 nt, Artificial Sequence
  Description of Artificial Sequence: Synthetic oligonucleotide
uacaugccucauagcccua

SEQ ID NO: 78279 - RNA, 19 nt, Artificial Sequence
  Description of Artificial Sequence: Synthetic oligonucleotide
ccuaccgacacgauaugua

SEQ ID NO: 78280 - RNA, 19 nt, Artificial Sequence
  Description of Artificial Sequence: Synthetic oligonucleotide
ccgaugcggacaagugucc

SEQ ID NO: 78281 - RNA, 19 nt, Artificial Sequence
  Description of Artificial Sequence: Synthetic oligonucleotide
gaacaagcugcguccuuuu

SEQ ID NO: 78282 - RNA, 19 nt, Artificial Sequence
  Description of Artificial Sequence: Synthetic oligonucleotide
agguagcgucuggaaaaca

SEQ ID NO: 78283 - RNA, 19 nt, Artificial Sequence
  Description of Artificial Sequence: Synthetic oligonucleotide
cucguaucucacugaacau

SEQ ID NO: 78284 - RNA, 19 nt, Artificial Sequence
  Description of Artificial Sequence: Synthetic oligonucleotide
auagcccgaguggaaucau

SEQ ID NO: 78285 - RNA, 19 nt, Artificial Sequence
  Description of Artificial Sequence: Synthetic oligonucleotide
gcucucacuugaacguggc

SEQ ID NO: 78286 - RNA, 19 nt, Artificial Sequence
  Description of Artificial Sequence: Synthetic oligonucleotide
ggcauuagcuuggcaagaa

SEQ ID NO: 78287 - RNA, 19 nt, Artificial Sequence
  Description of Artificial Sequence: Synthetic oligonucleotide
  modified_base (2)..(2): a, c, u, g, unknown or other
cnugaacgucccucagugu

SEQ ID NO: 78288 - RNA, 19 nt, Artificial Sequence
  Description of Artificial Sequence: Synthetic oligonucleotide
cgacacgauauguacaucu

SEQ ID NO: 78289 - RNA, 19 nt, Artificial Sequence
  Description of Artificial Sequence: Synthetic oligonucleotide
gggagcaugcagguuguaa

SEQ ID NO: 78290 - RNA, 19 nt, Artificial Sequence
  Description of Artificial Sequence: Synthetic oligonucleotide
gcccgaguggaaucauuga

SEQ ID NO: 78291 - RNA, 19 nt, Artificial Sequence
  Description of Artificial Sequence: Synthetic oligonucleotide
guuggcgaauuuauuucuu

SEQ ID NO: 78292 - RNA, 19 nt, Artificial Sequence
  Description of Artificial Sequence: Synthetic oligonucleotide
ucacccgggguugguguuu

SEQ ID NO: 78293 - RNA, 19 nt, Artificial Sequence
  Description of Artificial Sequence: Synthetic oligonucleotide
gccuuaggcuaggaaugug

SEQ ID NO: 78294 - RNA, 19 nt, Artificial Sequence
  Description of Artificial Sequence: Synthetic oligonucleotide
ggguucuaguaugucccga

SEQ ID NO: 78295 - RNA, 19 nt, Artificial Sequence
  Description of Artificial Sequence: Synthetic oligonucleotide
agcucucaugugauuucuu

SEQ ID NO: 78296 - RNA, 19 nt, Artificial Sequence
  Description of Artificial Sequence: Synthetic oligonucleotide
gaagucuaucgggauccuu

SEQ ID NO: 78297 - RNA, 19 nt, Artificial Sequence
  Description of Artificial Sequence: Synthetic oligonucleotide
auagcccuaccgacacgau

SEQ ID NO: 78298 - RNA, 19 nt, Artificial Sequence
  Description of Artificial Sequence: Synthetic oligonucleotide
gucuaucgggauccuugau

SEQ ID NO: 78299 - RNA, 19 nt, Artificial Sequence
  Description of Artificial Sequence: Synthetic oligonucleotide
cucucacuugaacguggcu

SEQ ID NO: 78300 - RNA, 19 nt, Artificial Sequence
  Description of Artificial Sequence: Synthetic oligonucleotide
gcccuaccgacacgauaug

SEQ ID NO: 78301 - RNA, 19 nt, Artificial Sequence
  Description of Artificial Sequence: Synthetic oligonucleotide
cccgaggcaagcuguagua

SEQ ID NO: 78302 - RNA, 19 nt, Artificial Sequence
  Description of Artificial Sequence: Synthetic oligonucleotide
caguggccuucacuggaua

SEQ ID NO: 78303 - RNA, 19 nt, Artificial Sequence
  Description of Artificial Sequence: Synthetic oligonucleotide
caguaccuguucugaugcu

SEQ ID NO: 78304 - RNA, 19 nt, Artificial Sequence
  Description of Artificial Sequence: Synthetic oligonucleotide
cccugacauggagacugag

SEQ ID NO: 78305 - RNA, 19 nt, Artificial Sequence
  Description of Artificial Sequence: Synthetic oligonucleotide
cccgaguggaaucauugau

SEQ ID NO: 78306 - RNA, 19 nt, Artificial Sequence
  Description of Artificial Sequence: Synthetic oligonucleotide
cagagccgaugcggacaag

SEQ ID NO: 78307 - RNA, 19 nt, Artificial Sequence
  Description of Artificial Sequence: Synthetic oligonucleotide
gccuggugaugaauaacgu

SEQ ID NO: 78308 - RNA, 19 nt, Artificial Sequence
  Description of Artificial Sequence: Synthetic oligonucleotide
  modified_base (4)..(4): a, c, u, g, unknown or other
cccnugaacgucccucagu

SEQ ID NO: 78309 - RNA, 19 nt, Artificial Sequence
  Description of Artificial Sequence: Synthetic oligonucleotide
gccaccgauuaaaaucuau

SEQ ID NO: 78310 - RNA, 19 nt, Artificial Sequence
  Description of Artificial Sequence: Synthetic oligonucleotide
cagcacgaaggcgauugau

SEQ ID NO: 78311 - RNA, 19 nt, Artificial Sequence
  Description of Artificial Sequence: Synthetic oligonucleotide
ggcuuccuacaaccuuucu

SEQ ID NO: 78312 - RNA, 19 nt, Artificial Sequence
  Description of Artificial Sequence: Synthetic oligonucleotide
ccccugggugauaucugga

SEQ ID NO: 78313 - RNA, 19 nt, Artificial Sequence
  Description of Artificial Sequence: Synthetic oligonucleotide
ccgacacgauauguacauc

SEQ ID NO: 78314 - RNA, 19 nt, Artificial Sequence
  Description of Artificial Sequence: Synthetic oligonucleotide
cccgauacuuagauaccau

SEQ ID NO: 78315 - RNA, 19 nt, Artificial Sequence
  Description of Artificial Sequence: Synthetic oligonucleotide
cuaaaccguccucgcucau

SEQ ID NO: 78316 - RNA, 19 nt, Artificial Sequence
  Description of Artificial Sequence: Synthetic oligonucleotide
ggcgacugcugggugggau

SEQ ID NO: 78317 - RNA, 19 nt, Artificial Sequence
  Description of Artificial Sequence: Synthetic oligonucleotide
cccuaccgacacgauaugu

SEQ ID NO: 78318 - RNA, 19 nt, Artificial Sequence
  Description of Artificial Sequence: Synthetic oligonucleotide
caacagcacgaaggcgauu

SEQ ID NO: 78319 - RNA, 19 nt, Artificial Sequence
  Description of Artificial Sequence: Synthetic oligonucleotide
aauacugacacacaaucac

SEQ ID NO: 78320 - RNA, 19 nt, Artificial Sequence
  Description of Artificial Sequence: Synthetic oligonucleotide
cacacaaucacuaagaggc

SEQ ID NO: 78321 - RNA, 19 nt, Artificial Sequence
  Description of Artificial Sequence: Synthetic oligonucleotide
auuauaaucucuguaaggc

SEQ ID NO: 78322 - RNA, 19 nt, Artificial Sequence
  Description of Artificial Sequence: Synthetic oligonucleotide
aacucgaagcauuagauag

SEQ ID NO: 78323 - RNA, 19 nt, Artificial Sequence
  Description of Artificial Sequence: Synthetic oligonucleotide
aagcuaagagcuuuuaugg

SEQ ID NO: 78324 - RNA, 19 nt, Artificial Sequence
  Description of Artificial Sequence: Synthetic oligonucleotide
uuaguaauuguacaaaaca

SEQ ID NO: 78325 - RNA, 19 nt, Artificial Sequence
  Description of Artificial Sequence: Synthetic oligonucleotide
uuaagauucaacaacucug

SEQ ID NO: 78326 - RNA, 19 nt, Artificial Sequence
  Description of Artificial Sequence: Synthetic oligonucleotide
aguaguuaccacuaacugc

SEQ ID NO: 78327 - RNA, 19 nt, Artificial Sequence
  Description of Artificial Sequence: Synthetic oligonucleotide
aaugauucagucaccaagc

SEQ ID NO: 78328 - RNA, 19 nt, Artificial Sequence
  Description of Artificial Sequence: Synthetic oligonucleotide
aaaugaauuauuagguuac

SEQ ID NO: 78329 - RNA, 19 nt, Artificial Sequence
  Description of Artificial Sequence: Synthetic oligonucleotide
gaacuuugcaccuuucucg

SEQ ID NO: 78330 - RNA, 19 nt, Artificial Sequence
  Description of Artificial Sequence: Synthetic oligonucleotide
uuuagcaagaugacauugg

SEQ ID NO: 78331 - RNA, 19 nt, Artificial Sequence
  Description of Artificial Sequence: Synthetic oligonucleotide
augagaacaauuuagcacu

SEQ ID NO: 78332 - RNA, 19 nt, Artificial Sequence
  Description of Artificial Sequence: Synthetic oligonucleotide
gaagcuaagagcuuuuaug

SEQ ID NO: 78333 - RNA, 19 nt, Artificial Sequence
  Description of Artificial Sequence: Synthetic oligonucleotide
ugaguuuccauuaagguuu

SEQ ID NO: 78334 - RNA, 19 nt, Artificial Sequence
  Description of Artificial Sequence: Synthetic oligonucleotide
caaucaauagaccagcacc

SEQ ID NO: 78335 - RNA, 19 nt, Artificial Sequence
  Description of Artificial Sequence: Synthetic oligonucleotide
ucaaucauagcuuccguag

SEQ ID NO: 78336 - RNA, 19 nt, Artificial Sequence
  Description of Artificial Sequence: Synthetic oligonucleotide
agaccuauugcccugcagc

SEQ ID NO: 78337 - RNA, 19 nt, Artificial Sequence
  Description of Artificial Sequence: Synthetic oligonucleotide
aaaucugcuagugcuaucg

SEQ ID NO: 78338 - RNA, 19 nt, Artificial Sequence
  Description of Artificial Sequence: Synthetic oligonucleotide
uuuaucuucgaucuguuau

SEQ ID NO: 78339 - RNA, 19 nt, Artificial Sequence
  Description of Artificial Sequence: Synthetic oligonucleotide
aguacugucagcuacagua

SEQ ID NO: 78340 - RNA, 19 nt, Artificial Sequence
  Description of Artificial Sequence: Synthetic oligonucleotide
aagaaguagguccccaauc

SEQ ID NO: 78341 - RNA, 19 nt, Artificial Sequence
  Description of Artificial Sequence: Synthetic oligonucleotide
aauaaggagcucuuuauua

SEQ ID NO: 78342 - RNA, 19 nt, Artificial Sequence
  Description of Artificial Sequence: Synthetic oligonucleotide
ucugcuagugcuaucgaag

SEQ ID NO: 78343 - RNA, 19 nt, Artificial Sequence
  Description of Artificial Sequence: Synthetic oligonucleotide
aauagauacaccacguuca

SEQ ID NO: 78344 - RNA, 19 nt, Artificial Sequence
  Description of Artificial Sequence: Synthetic oligonucleotide
aucacguccauucaucuuc

SEQ ID NO: 78345 - RNA, 19 nt, Artificial Sequence
  Description of Artificial Sequence: Synthetic oligonucleotide
uaaacuccuagcauaagac

SEQ ID NO: 78346 - RNA, 19 nt, Artificial Sequence
  Description of Artificial Sequence: Synthetic oligonucleotide
aacgcuaaugagcacuguc

SEQ ID NO: 78347 - RNA, 19 nt, Artificial Sequence
  Description of Artificial Sequence: Synthetic oligonucleotide
guaguuaccacuaacugcc

SEQ ID NO: 78348 - RNA, 19 nt, Artificial Sequence
  Description of Artificial Sequence: Synthetic oligonucleotide
accgaugaaagcuucucgc

SEQ ID NO: 78349 - RNA, 19 nt, Artificial Sequence
  Description of Artificial Sequence: Synthetic oligonucleotide
cuucgaucuguuaugaacc

SEQ ID NO: 78350 - RNA, 19 nt, Artificial Sequence
  Description of Artificial Sequence: Synthetic oligonucleotide
cuugagaacccaaugcccg

SEQ ID NO: 78351 - RNA, 19 nt, Artificial Sequence
  Description of Artificial Sequence: Synthetic oligonucleotide
ugugacuucuaacaagaug

SEQ ID NO: 78352 - RNA, 19 nt, Artificial Sequence
  Description of Artificial Sequence: Synthetic oligonucleotide
acaccuagcaucugcagac

SEQ ID NO: 78353 - RNA, 19 nt, Artificial Sequence
  Description of Artificial Sequence: Synthetic oligonucleotide
cacuaaugguuuuauaacc

SEQ ID NO: 78354 - RNA, 19 nt, Artificial Sequence
  Description of Artificial Sequence: Synthetic oligonucleotide
acaagauucuuguuaaugu

SEQ ID NO: 78355 - RNA, 19 nt, Artificial Sequence
  Description of Artificial Sequence: Synthetic oligonucleotide
uugucuaaguaacaccaag

SEQ ID NO: 78356 - RNA, 19 nt, Artificial Sequence
  Description of Artificial Sequence: Synthetic oligonucleotide
ucuucgaucuguuaugaac

SEQ ID NO: 78357 - RNA, 19 nt, Artificial Sequence
  Description of Artificial Sequence: Synthetic oligonucleotide
aaccgaugaaagcuucucg

SEQ ID NO: 78358 - RNA, 19 nt, Artificial Sequence
  Description of Artificial Sequence: Synthetic oligonucleotide
aauuaagauucaacaacuc

SEQ ID NO: 78359 - RNA, 19 nt, Artificial Sequence
  Description of Artificial Sequence: Synthetic oligonucleotide
uuuauggguccaucaaagg

SEQ ID NO: 78360 - RNA, 19 nt, Artificial Sequence
  Description of Artificial Sequence: Synthetic oligonucleotide
auaaacuccuagcauaaga

SEQ ID NO: 78361 - RNA, 19 nt, Artificial Sequence
  Description of Artificial Sequence: Synthetic oligonucleotide
gauuugauaguuuacccaa

SEQ ID NO: 78362 - RNA, 19 nt, Artificial Sequence
  Description of Artificial Sequence: Synthetic oligonucleotide
agaaacgagcugcagauca

SEQ ID NO: 78363 - RNA, 19 nt, Artificial Sequence
  Description of Artificial Sequence: Synthetic oligonucleotide
cuggacaacgcuaaugagc

SEQ ID NO: 78364 - RNA, 19 nt, Artificial Sequence
  Description of Artificial Sequence: Synthetic oligonucleotide
aacucagcuaaauaaguua

SEQ ID NO: 78365 - RNA, 19 nt, Artificial Sequence
  Description of Artificial Sequence: Synthetic oligonucleotide
aauguagauagcagugacg

SEQ ID NO: 78366 - RNA, 19 nt, Artificial Sequence
  Description of Artificial Sequence: Synthetic oligonucleotide
agugcuaucgaaggcgucc

SEQ ID NO: 78367 - RNA, 19 nt, Artificial Sequence
  Description of Artificial Sequence: Synthetic oligonucleotide
acacacaaucacuaagagg

SEQ ID NO: 78368 - RNA, 19 nt, Artificial Sequence
  Description of Artificial Sequence: Synthetic oligonucleotide
uuauaaucucuguaaggca

SEQ ID NO: 78369 - RNA, 19 nt, Artificial Sequence
  Description of Artificial Sequence: Synthetic oligonucleotide
aguaauuguacaaaacaug

SEQ ID NO: 78370 - RNA, 19 nt, Artificial Sequence
  Description of Artificial Sequence: Synthetic oligonucleotide
agauucaacaacucugcug

SEQ ID NO: 78371 - RNA, 19 nt, Artificial Sequence
  Description of Artificial Sequence: Synthetic oligonucleotide
uacaacaguugucuggagc

SEQ ID NO: 78372 - RNA, 19 nt, Artificial Sequence
  Description of Artificial Sequence: Synthetic oligonucleotide
uagauugcaaaguucuaca

SEQ ID NO: 78373 - RNA, 19 nt, Artificial Sequence
  Description of Artificial Sequence: Synthetic oligonucleotide
agauuugauaguuuaccca

SEQ ID NO: 78374 - RNA, 19 nt, Artificial Sequence
  Description of Artificial Sequence: Synthetic oligonucleotide
ugaacucgaagcauuagau

SEQ ID NO: 78375 - RNA, 19 nt, Artificial Sequence
  Description of Artificial Sequence: Synthetic oligonucleotide
agggaauaauuauaaucuc

SEQ ID NO: 78376 - RNA, 19 nt, Artificial Sequence
  Description of Artificial Sequence: Synthetic oligonucleotide
cagauuugauaguuuaccc

SEQ ID NO: 78377 - RNA, 19 nt, Artificial Sequence
  Description of Artificial Sequence: Synthetic oligonucleotide
agcaaaggaccucagacgu

SEQ ID NO: 78378 - RNA, 19 nt, Artificial Sequence
  Description of Artificial Sequence: Synthetic oligonucleotide
uuugauaguuuacccaaaa

SEQ ID NO: 78379 - RNA, 19 nt, Artificial Sequence
  Description of Artificial Sequence: Synthetic oligonucleotide
uaauguuuacgucaaucau

SEQ ID NO: 78380 - RNA, 19 nt, Artificial Sequence
  Description of Artificial Sequence: Synthetic oligonucleotide
cauuucaggaaagaacucc

SEQ ID NO: 78381 - RNA, 19 nt, Artificial Sequence
  Description of Artificial Sequence: Synthetic oligonucleotide
aaggcguccuuuaucaccg

SEQ ID NO: 78382 - RNA, 19 nt, Artificial Sequence
  Description of Artificial Sequence: Synthetic oligonucleotide
gaaggcguccuuuaucacc

SEQ ID NO: 78383 - RNA, 19 nt, Artificial Sequence
  Description of Artificial Sequence: Synthetic oligonucleotide
agacgucucugaaagagcc

SEQ ID NO: 78384 - RNA, 19 nt, Artificial Sequence
  Description of Artificial Sequence: Synthetic oligonucleotide
aacuuagauugcaaaguuc

SEQ ID NO: 78385 - RNA, 19 nt, Artificial Sequence
  Description of Artificial Sequence: Synthetic oligonucleotide
uacaguuugaacuccccac

SEQ ID NO: 78386 - RNA, 19 nt, Artificial Sequence
  Description of Artificial Sequence: Synthetic oligonucleotide
uauaaccucaacuuuucua

SEQ ID NO: 78387 - RNA, 19 nt, Artificial Sequence
  Description of Artificial Sequence: Synthetic oligonucleotide
agaaucacaagcacgagga

SEQ ID NO: 78388 - RNA, 19 nt, Artificial Sequence
  Description of Artificial Sequence: Synthetic oligonucleotide
gaaccugguacucuuuacc

SEQ ID NO: 78389 - RNA, 19 nt, Artificial Sequence
  Description of Artificial Sequence: Synthetic oligonucleotide
acucuugucuaaguaacac

SEQ ID NO: 78390 - RNA, 19 nt, Artificial Sequence
  Description of Artificial Sequence: Synthetic oligonucleotide
guuuccaauuuguaggcug

SEQ ID NO: 78391 - RNA, 19 nt, Artificial Sequence
  Description of Artificial Sequence: Synthetic oligonucleotide
aauguuuacgucaaucaua

SEQ ID NO: 78392 - RNA, 19 nt, Artificial Sequence
  Description of Artificial Sequence: Synthetic oligonucleotide
gaagcuucuguagacgugc

SEQ ID NO: 78393 - RNA, 19 nt, Artificial Sequence
  Description of Artificial Sequence: Synthetic oligonucleotide
aucagaaguacugucagcu

SEQ ID NO: 78394 - RNA, 19 nt, Artificial Sequence
  Description of Artificial Sequence: Synthetic oligonucleotide
gaagacgcaccacugggcc

SEQ ID NO: 78395 - RNA, 19 nt, Artificial Sequence
  Description of Artificial Sequence: Synthetic oligonucleotide
uagaguauuuuaucagugu

SEQ ID NO: 78396 - RNA, 19 nt, Artificial Sequence
  Description of Artificial Sequence: Synthetic oligonucleotide
aagacgcaccacugggccc

SEQ ID NO: 78397 - RNA, 19 nt, Artificial Sequence
  Description of Artificial Sequence: Synthetic oligonucleotide
augggcauauauccgauca

SEQ ID NO: 78398 - RNA, 19 nt, Artificial Sequence
  Description of Artificial Sequence: Synthetic oligonucleotide
agaggagcaaucugaaacu

SEQ ID NO: 78399 - RNA, 19 nt, Artificial Sequence
  Description of Artificial Sequence: Synthetic oligonucleotide
ucuagaacucagcuaaaua

SEQ ID NO: 78400 - RNA, 19 nt, Artificial Sequence
  Description of Artificial Sequence: Synthetic oligonucleotide
ugaacaccuagcaucugca

SEQ ID NO: 78401 - RNA, 19 nt, Artificial Sequence
  Description of Artificial Sequence: Synthetic oligonucleotide
ggcgaauagauacaccacg

SEQ ID NO: 78402 - RNA, 19 nt, Artificial Sequence
  Description of Artificial Sequence: Synthetic oligonucleotide
aucgcuaaggaacuuugca

SEQ ID NO: 78403 - RNA, 19 nt, Artificial Sequence
  Description of Artificial Sequence: Synthetic oligonucleotide
guuccuaucucuauagaug

SEQ ID NO: 78404 - RNA, 19 nt, Artificial Sequence
  Description of Artificial Sequence: Synthetic oligonucleotide
uguuaguccuugagaaccc

SEQ ID NO: 78405 - RNA, 19 nt, Artificial Sequence
  Description of Artificial Sequence: Synthetic oligonucleotide
aaggccuacagagauaaau

SEQ ID NO: 78406 - RNA, 19 nt, Artificial Sequence
  Description of Artificial Sequence: Synthetic oligonucleotide
uagcauaagacacuuuauu

SEQ ID NO: 78407 - RNA, 19 nt, Artificial Sequence
  Description of Artificial Sequence: Synthetic oligonucleotide
uuaugaaccaugugacuuc

SEQ ID NO: 78408 - RNA, 19 nt, Artificial Sequence
  Description of Artificial Sequence: Synthetic oligonucleotide
ucaaaggagcccguaaaug

SEQ ID NO: 78409 - RNA, 19 nt, Artificial Sequence
  Description of Artificial Sequence: Synthetic oligonucleotide
aaugcccguguuucaguuc

SEQ ID NO: 78410 - RNA, 19 nt, Artificial Sequence
  Description of Artificial Sequence: Synthetic oligonucleotide
ugcaguaguuaccacuaac

SEQ ID NO: 78411 - RNA, 19 nt, Artificial Sequence
  Description of Artificial Sequence: Synthetic oligonucleotide
aagauucaacaacucugcu

SEQ ID NO: 78412 - RNA, 19 nt, Artificial Sequence
  Description of Artificial Sequence: Synthetic oligonucleotide
caauguagauagcagugac

SEQ ID NO: 78413 - RNA, 19 nt, Artificial Sequence
  Description of Artificial Sequence: Synthetic oligonucleotide
cugcuagugcuaucgaagg

SEQ ID NO: 78414 - RNA, 19 nt, Artificial Sequence
  Description of Artificial Sequence: Synthetic oligonucleotide
uccaguuuauggcggcagg

SEQ ID NO: 78415 - RNA, 19 nt, Artificial Sequence
  Description of Artificial Sequence: Synthetic oligonucleotide
acgacaggagacgugauag

SEQ ID NO: 78416 - RNA, 19 nt, Artificial Sequence
  Description of Artificial Sequence: Synthetic oligonucleotide
uuuagugcagagcguggca

SEQ ID NO: 78417 - RNA, 19 nt, Artificial Sequence
  Description of Artificial Sequence: Synthetic oligonucleotide
uccguaguugucuuuaaua

SEQ ID NO: 78418 - RNA, 19 nt, Artificial Sequence
  Description of Artificial Sequence: Synthetic oligonucleotide
aauaaacuccuagcauaag

SEQ ID NO: 78419 - RNA, 19 nt, Artificial Sequence
  Description of Artificial Sequence: Synthetic oligonucleotide
uauacagauuugauaguuu

SEQ ID NO: 78420 - RNA, 19 nt, Artificial Sequence
  Description of Artificial Sequence: Synthetic oligonucleotide
cuucuaacaagauguccug

SEQ ID NO: 78421 - RNA, 19 nt, Artificial Sequence
  Description of Artificial Sequence: Synthetic oligonucleotide
agguccgacuugcucauac

SEQ ID NO: 78422 - RNA, 19 nt, Artificial Sequence
  Description of Artificial Sequence: Synthetic oligonucleotide
caaaggagcccguaaauga

SEQ ID NO: 78423 - RNA, 19 nt, Artificial Sequence
  Description of Artificial Sequence: Synthetic oligonucleotide
gaccuauugcccugcagcc

SEQ ID NO: 78424 - RNA, 19 nt, Artificial Sequence
  Description of Artificial Sequence: Synthetic oligonucleotide
uucggguguuucaagccag

SEQ ID NO: 78425 - RNA, 19 nt, Artificial Sequence
  Description of Artificial Sequence: Synthetic oligonucleotide
uuuucuaucuuggcucacc

SEQ ID NO: 78426 - RNA, 19 nt, Artificial Sequence
  Description of Artificial Sequence: Synthetic oligonucleotide
uaccacacacaauucgggc

SEQ ID NO: 78427 - RNA, 19 nt, Artificial Sequence
  Description of Artificial Sequence: Synthetic oligonucleotide
ugaacuccccacauucugu

SEQ ID NO: 78428 - RNA, 19 nt, Artificial Sequence
  Description of Artificial Sequence: Synthetic oligonucleotide
uuauaaccucaacuuuucu

SEQ ID NO: 78429 - RNA, 19 nt, Artificial Sequence
  Description of Artificial Sequence: Synthetic oligonucleotide
ugauucagucaccaagcuc

SEQ ID NO: 78430 - RNA, 19 nt, Artificial Sequence
  Description of Artificial Sequence: Synthetic oligonucleotide
cuucauuaggccgaggcuc

SEQ ID NO: 78431 - RNA, 19 nt, Artificial Sequence
  Description of Artificial Sequence: Synthetic oligonucleotide
caaauguagcucugcuugc

SEQ ID NO: 78432 - RNA, 19 nt, Artificial Sequence
  Description of Artificial Sequence: Synthetic oligonucleotide
aagauucuuguuaauguuu

SEQ ID NO: 78433 - RNA, 19 nt, Artificial Sequence
  Description of Artificial Sequence: Synthetic oligonucleotide
gacuucuuggugcacguuc

SEQ ID NO: 78434 - RNA, 19 nt, Artificial Sequence
  Description of Artificial Sequence: Synthetic oligonucleotide
ucauucgugggaccacuug

SEQ ID NO: 78435 - RNA, 19 nt, Artificial Sequence
  Description of Artificial Sequence: Synthetic oligonucleotide
uucgaucuguuaugaacca

SEQ ID NO: 78436 - RNA, 19 nt, Artificial Sequence
  Description of Artificial Sequence: Synthetic oligonucleotide
auauacagauuugauaguu

SEQ ID NO: 78437 - RNA, 19 nt, Artificial Sequence
  Description of Artificial Sequence: Synthetic oligonucleotide
agaggcgccaagcacaaau

SEQ ID NO: 78438 - RNA, 19 nt, Artificial Sequence
  Description of Artificial Sequence: Synthetic oligonucleotide
aaacccuucggguguuuca

SEQ ID NO: 78439 - RNA, 19 nt, Artificial Sequence
  Description of Artificial Sequence: Synthetic oligonucleotide
gcuagugcuaucgaaggcg

SEQ ID NO: 78440 - RNA, 19 nt, Artificial Sequence
  Description of Artificial Sequence: Synthetic oligonucleotide
ugcuagugcuaucgaaggc

SEQ ID NO: 78441 - RNA, 19 nt, Artificial Sequence
  Description of Artificial Sequence: Synthetic oligonucleotide
acguucaugaguuuccauu

SEQ ID NO: 78442 - RNA, 19 nt, Artificial Sequence
  Description of Artificial Sequence: Synthetic oligonucleotide
uccaugacaagcucaggua

SEQ ID NO: 78443 - RNA, 19 nt, Artificial Sequence
  Description of Artificial Sequence: Synthetic oligonucleotide
acuuugcaccuuucucggc

SEQ ID NO: 78444 - RNA, 19 nt, Artificial Sequence
  Description of Artificial Sequence: Synthetic oligonucleotide
guagguccccaaucaauag

SEQ ID NO: 78445 - RNA, 19 nt, Artificial Sequence
  Description of Artificial Sequence: Synthetic oligonucleotide
gagcccguaaaugauucag

SEQ ID NO: 78446 - RNA, 19 nt, Artificial Sequence
  Description of Artificial Sequence: Synthetic oligonucleotide
guuaccacuaacugccaga

SEQ ID NO: 78447 - RNA, 19 nt, Artificial Sequence
  Description of Artificial Sequence: Synthetic oligonucleotide
auacuuuucacugccacuu

SEQ ID NO: 78448 - RNA, 19 nt, Artificial Sequence
  Description of Artificial Sequence: Synthetic oligonucleotide
uaucuucgaucuguuauga

SEQ ID NO: 78449 - RNA, 19 nt, Artificial Sequence
  Description of Artificial Sequence: Synthetic oligonucleotide
uaucuuuagugcagagcgu

SEQ ID NO: 78450 - RNA, 19 nt, Artificial Sequence
  Description of Artificial Sequence: Synthetic oligonucleotide
uauauccgaucacauucuc

SEQ ID NO: 78451 - RNA, 19 nt, Artificial Sequence
  Description of Artificial Sequence: Synthetic oligonucleotide
gaacccacaagauucuugu

SEQ ID NO: 78452 - RNA, 19 nt, Artificial Sequence
  Description of Artificial Sequence: Synthetic oligonucleotide
ucaaccgaugaaagcuucu

SEQ ID NO: 78453 - RNA, 19 nt, Artificial Sequence
  Description of Artificial Sequence: Synthetic oligonucleotide
guaccacacacaauucggg

SEQ ID NO: 78454 - RNA, 19 nt, Artificial Sequence
  Description of Artificial Sequence: Synthetic oligonucleotide
gcugccggcgaauagauac

SEQ ID NO: 78455 - RNA, 19 nt, Artificial Sequence
  Description of Artificial Sequence: Synthetic oligonucleotide
agcauuagauagaauacaa

SEQ ID NO: 78456 - RNA, 19 nt, Artificial Sequence
  Description of Artificial Sequence: Synthetic oligonucleotide
ggccuacagagauaaaugc

SEQ ID NO: 78457 - RNA, 19 nt, Artificial Sequence
  Description of Artificial Sequence: Synthetic oligonucleotide
augcccguguuucaguuca

SEQ ID NO: 78458 - RNA, 19 nt, Artificial Sequence
  Description of Artificial Sequence: Synthetic oligonucleotide
acggauguacagguugcgc

SEQ ID NO: 78459 - RNA, 19 nt, Artificial Sequence
  Description of Artificial Sequence: Synthetic oligonucleotide
uucuaucuuggcucacccc

SEQ ID NO: 78460 - RNA, 19 nt, Artificial Sequence
  Description of Artificial Sequence: Synthetic oligonucleotide
cuguaguuugagaauaaaa

SEQ ID NO: 78461 - RNA, 19 nt, Artificial Sequence
  Description of Artificial Sequence: Synthetic oligonucleotide
aggguaaccacuuguucaa

SEQ ID NO: 78462 - RNA, 19 nt, Artificial Sequence
  Description of Artificial Sequence: Synthetic oligonucleotide
augauucagucaccaagcu

SEQ ID NO: 78463 - RNA, 19 nt, Artificial Sequence
  Description of Artificial Sequence: Synthetic oligonucleotide
auagauacaccacguucau

SEQ ID NO: 78464 - RNA, 19 nt, Artificial Sequence
  Description of Artificial Sequence: Synthetic oligonucleotide
aguuuauggcggcagguuu

SEQ ID NO: 78465 - RNA, 19 nt, Artificial Sequence
  Description of Artificial Sequence: Synthetic oligonucleotide
uccuaucucuauagauggc

SEQ ID NO: 78466 - RNA, 19 nt, Artificial Sequence
  Description of Artificial Sequence: Synthetic oligonucleotide
uuaccacuaacugccagaa

SEQ ID NO: 78467 - RNA, 19 nt, Artificial Sequence
  Description of Artificial Sequence: Synthetic oligonucleotide
ccguguuucaguucaauac

SEQ ID NO: 78468 - RNA, 19 nt, Artificial Sequence
  Description of Artificial Sequence: Synthetic oligonucleotide
gguguuucaagccaggccu

SEQ ID NO: 78469 - RNA, 19 nt, Artificial Sequence
  Description of Artificial Sequence: Synthetic oligonucleotide
aaaggagcccguaaaugau

SEQ ID NO: 78470 - RNA, 19 nt, Artificial Sequence
  Description of Artificial Sequence: Synthetic oligonucleotide
acucagcuaaauaaguuaa

SEQ ID NO: 78471 - RNA, 19 nt, Artificial Sequence
  Description of Artificial Sequence: Synthetic oligonucleotide
gacagccuuccguuguugc

SEQ ID NO: 78472 - RNA, 19 nt, Artificial Sequence
  Description of Artificial Sequence: Synthetic oligonucleotide
cuggaagcuuuguggagag

SEQ ID NO: 78473 - RNA, 19 nt, Artificial Sequence
  Description of Artificial Sequence: Synthetic oligonucleotide
uccuccucaaccgaugaaa

SEQ ID NO: 78474 - RNA, 19 nt, Artificial Sequence
  Description of Artificial Sequence: Synthetic oligonucleotide
ccacuaaugguuuuauaac

SEQ ID NO: 78475 - RNA, 19 nt, Artificial Sequence
  Description of Artificial Sequence: Synthetic oligonucleotide
aaucugcauuucaggaaag

SEQ ID NO: 78476 - RNA, 19 nt, Artificial Sequence
  Description of Artificial Sequence: Synthetic oligonucleotide
augaucucugcaucgcuaa

SEQ ID NO: 78477 - RNA, 19 nt, Artificial Sequence
  Description of Artificial Sequence: Synthetic oligonucleotide
gaaaagcuaagcucagggu

SEQ ID NO: 78478 - RNA, 19 nt, Artificial Sequence
  Description of Artificial Sequence: Synthetic oligonucleotide
cuaucuuggcucaccccag

SEQ ID NO: 78479 - RNA, 19 nt, Artificial Sequence
  Description of Artificial Sequence: Synthetic oligonucleotide
ggcauugaccaacuggaug

SEQ ID NO: 78480 - RNA, 19 nt, Artificial Sequence
  Description of Artificial Sequence: Synthetic oligonucleotide
caucgcuaaggaacuuugc

SEQ ID NO: 78481 - RNA, 19 nt, Artificial Sequence
  Description of Artificial Sequence: Synthetic oligonucleotide
ucccgucuacaacaguugu

SEQ ID NO: 78482 - RNA, 19 nt, Artificial Sequence
  Description of Artificial Sequence: Synthetic oligonucleotide
uagacgugcaaaucugcua

SEQ ID NO: 78483 - RNA, 19 nt, Artificial Sequence
  Description of Artificial Sequence: Synthetic oligonucleotide
aggccuacagagauaaaug

SEQ ID NO: 78484 - RNA, 19 nt, Artificial Sequence
  Description of Artificial Sequence: Synthetic oligonucleotide
aaauuggcuuagagaaaug

SEQ ID NO: 78485 - RNA, 19 nt, Artificial Sequence
  Description of Artificial Sequence: Synthetic oligonucleotide
uuaggccgaggcucacugg

SEQ ID NO: 78486 - RNA, 19 nt, Artificial Sequence
  Description of Artificial Sequence: Synthetic oligonucleotide
accacccacaguuccuauc

SEQ ID NO: 78487 - RNA, 19 nt, Artificial Sequence
  Description of Artificial Sequence: Synthetic oligonucleotide
uugagaacccaaugcccgu

SEQ ID NO: 78488 - RNA, 19 nt, Artificial Sequence
  Description of Artificial Sequence: Synthetic oligonucleotide
ucggcacucuccaguaucu

SEQ ID NO: 78489 - RNA, 19 nt, Artificial Sequence
  Description of Artificial Sequence: Synthetic oligonucleotide
agagauaaaugcagugacu

SEQ ID NO: 78490 - RNA, 19 nt, Artificial Sequence
  Description of Artificial Sequence: Synthetic oligonucleotide
aggagcccguaaaugauuc

SEQ ID NO: 78491 - RNA, 19 nt, Artificial Sequence
  Description of Artificial Sequence: Synthetic oligonucleotide
agugacgauguuugcugca

SEQ ID NO: 78492 - RNA, 19 nt, Artificial Sequence
  Description of Artificial Sequence: Synthetic oligonucleotide
ucagcuucccaagacugaa

SEQ ID NO: 78493 - RNA, 19 nt, Artificial Sequence
  Description of Artificial Sequence: Synthetic oligonucleotide
gaacucgaagcauuagaua

SEQ ID NO: 78494 - RNA, 19 nt, Artificial Sequence
  Description of Artificial Sequence: Synthetic oligonucleotide
uuuauggcggcagguuucu

SEQ ID NO: 78495 - RNA, 19 nt, Artificial Sequence
  Description of Artificial Sequence: Synthetic oligonucleotide
auacugacacacaaucacu

SEQ ID NO: 78496 - RNA, 19 nt, Artificial Sequence
  Description of Artificial Sequence: Synthetic oligonucleotide
cuucccucgauccaguuua

SEQ ID NO: 78497 - RNA, 19 nt, Artificial Sequence
  Description of Artificial Sequence: Synthetic oligonucleotide
acgauguuugcugcauggg

SEQ ID NO: 78498 - RNA, 19 nt, Artificial Sequence
  Description of Artificial Sequence: Synthetic oligonucleotide
cacuaagaggcucccauga

SEQ ID NO: 78499 - RNA, 19 nt, Artificial Sequence
  Description of Artificial Sequence: Synthetic oligonucleotide
uccaauuuguaggcuggga

SEQ ID NO: 78500 - RNA, 19 nt, Artificial Sequence
  Description of Artificial Sequence: Synthetic oligonucleotide
gacaacgcuaaugagcacu

SEQ ID NO: 78501 - RNA, 19 nt, Artificial Sequence
  Description of Artificial Sequence: Synthetic oligonucleotide
cagugacgauguuugcugc

SEQ ID NO: 78502 - RNA, 19 nt, Artificial Sequence
  Description of Artificial Sequence: Synthetic oligonucleotide
acugaacucgaagcauuag

SEQ ID NO: 78503 - RNA, 19 nt, Artificial Sequence
  Description of Artificial Sequence: Synthetic oligonucleotide
agaaguacugucagcuaca

SEQ ID NO: 78504 - RNA, 19 nt, Artificial Sequence
  Description of Artificial Sequence: Synthetic oligonucleotide
ccaugugacuucuaacaag

SEQ ID NO: 78505 - RNA, 19 nt, Artificial Sequence
  Description of Artificial Sequence: Synthetic oligonucleotide
acgcuaaugagcacugucu

SEQ ID NO: 78506 - RNA, 19 nt, Artificial Sequence
  Description of Artificial Sequence: Synthetic oligonucleotide
caauagaccagcaccaaau

SEQ ID NO: 78507 - RNA, 19 nt, Artificial Sequence
  Description of Artificial Sequence: Synthetic oligonucleotide
agcuaagcucaggguaacc

SEQ ID NO: 78508 - RNA, 19 nt, Artificial Sequence
  Description of Artificial Sequence: Synthetic oligonucleotide
cgcuaaggaacuuugcacc

SEQ ID NO: 78509 - RNA, 19 nt, Artificial Sequence
  Description of Artificial Sequence: Synthetic oligonucleotide
uugccauuggaaccuggua

SEQ ID NO: 78510 - RNA, 19 nt, Artificial Sequence
  Description of Artificial Sequence: Synthetic oligonucleotide
uggguccaucaaaggagcc

SEQ ID NO: 78511 - RNA, 19 nt, Artificial Sequence
  Description of Artificial Sequence: Synthetic oligonucleotide
gaugggcauauauccgauc

SEQ ID NO: 78512 - RNA, 19 nt, Artificial Sequence
  Description of Artificial Sequence: Synthetic oligonucleotide
gggucaucccaucugcaag

SEQ ID NO: 78513 - RNA, 19 nt, Artificial Sequence
  Description of Artificial Sequence: Synthetic oligonucleotide
gcaggcgucucacugauca

SEQ ID NO: 78514 - RNA, 19 nt, Artificial Sequence
  Description of Artificial Sequence: Synthetic oligonucleotide
aguagguccccaaucaaua

SEQ ID NO: 78515 - RNA, 19 nt, Artificial Sequence
  Description of Artificial Sequence: Synthetic oligonucleotide
caauucgggcaaguugccg

SEQ ID NO: 78516 - RNA, 19 nt, Artificial Sequence
  Description of Artificial Sequence: Synthetic oligonucleotide
gcgccaagcacaaauguag

SEQ ID NO: 78517 - RNA, 19 nt, Artificial Sequence
  Description of Artificial Sequence: Synthetic oligonucleotide
acaacgcuaaugagcacug

SEQ ID NO: 78518 - RNA, 19 nt, Artificial Sequence
  Description of Artificial Sequence: Synthetic oligonucleotide
ucucuauagauggcauggu

SEQ ID NO: 78519 - RNA, 19 nt, Artificial Sequence
  Description of Artificial Sequence: Synthetic oligonucleotide
uuaucaccgcaaacccuuc

SEQ ID NO: 78520 - RNA, 19 nt, Artificial Sequence
  Description of Artificial Sequence: Synthetic oligonucleotide
guuuauggcggcagguuuc

SEQ ID NO: 78521 - RNA, 19 nt, Artificial Sequence
  Description of Artificial Sequence: Synthetic oligonucleotide
gucaaucauagcuuccgua

SEQ ID NO: 78522 - RNA, 19 nt, Artificial Sequence
  Description of Artificial Sequence: Synthetic oligonucleotide
auauccgaucacauucuca

SEQ ID NO: 78523 - RNA, 19 nt, Artificial Sequence
  Description of Artificial Sequence: Synthetic oligonucleotide
agucaaucuuccacaauaa

SEQ ID NO: 78524 - RNA, 19 nt, Artificial Sequence
  Description of Artificial Sequence: Synthetic oligonucleotide
cuuagcacauuguucugua

SEQ ID NO: 78525 - RNA, 19 nt, Artificial Sequence
  Description of Artificial Sequence: Synthetic oligonucleotide
acugggccccgggucaucc

SEQ ID NO: 78526 - RNA, 19 nt, Artificial Sequence
  Description of Artificial Sequence: Synthetic oligonucleotide
acgugcaaaucugcuagug

SEQ ID NO: 78527 - RNA, 19 nt, Artificial Sequence
  Description of Artificial Sequence: Synthetic oligonucleotide
caacaacucugcugacccc

SEQ ID NO: 78528 - RNA, 19 nt, Artificial Sequence
  Description of Artificial Sequence: Synthetic oligonucleotide
caaccgaugaaagcuucuc

SEQ ID NO: 78529 - RNA, 19 nt, Artificial Sequence
  Description of Artificial Sequence: Synthetic oligonucleotide
ccuagcauaagacacuuua

SEQ ID NO: 78530 - RNA, 19 nt, Artificial Sequence
  Description of Artificial Sequence: Synthetic oligonucleotide
ucucugcaucgcuaaggaa

SEQ ID NO: 78531 - RNA, 19 nt, Artificial Sequence
  Description of Artificial Sequence: Synthetic oligonucleotide
ugcaucgcuaaggaacuuu

SEQ ID NO: 78532 - RNA, 19 nt, Artificial Sequence
  Description of Artificial Sequence: Synthetic oligonucleotide
cauauacagauuugauagu

SEQ ID NO: 78533 - RNA, 19 nt, Artificial Sequence
  Description of Artificial Sequence: Synthetic oligonucleotide
auuugauaguuuacccaaa

SEQ ID NO: 78534 - RNA, 19 nt, Artificial Sequence
  Description of Artificial Sequence: Synthetic oligonucleotide
ccguuguugccauuggaac

SEQ ID NO: 78535 - RNA, 19 nt, Artificial Sequence
  Description of Artificial Sequence: Synthetic oligonucleotide
aucuucgaucuguuaugaa

SEQ ID NO: 78536 - RNA, 19 nt, Artificial Sequence
  Description of Artificial Sequence: Synthetic oligonucleotide
cauuguagccuccuaugcu

SEQ ID NO: 78537 - RNA, 19 nt, Artificial Sequence
  Description of Artificial Sequence: Synthetic oligonucleotide
ugcacguuccuugcagauc

SEQ ID NO: 78538 - RNA, 19 nt, Artificial Sequence
  Description of Artificial Sequence: Synthetic oligonucleotide
ugccggcgaauagauacac

SEQ ID NO: 78539 - RNA, 19 nt, Artificial Sequence
  Description of Artificial Sequence: Synthetic oligonucleotide
cacuaacugccagaaucug

SEQ ID NO: 78540 - RNA, 19 nt, Artificial Sequence
  Description of Artificial Sequence: Synthetic oligonucleotide
acccuucggguguuucaag

SEQ ID NO: 78541 - RNA, 19 nt, Artificial Sequence
  Description of Artificial Sequence: Synthetic oligonucleotide
aggcguccuuuaucaccgc

SEQ ID NO: 78542 - RNA, 19 nt, Artificial Sequence
  Description of Artificial Sequence: Synthetic oligonucleotide
ugaugccgcugcacucuug

SEQ ID NO: 78543 - RNA, 19 nt, Artificial Sequence
  Description of Artificial Sequence: Synthetic oligonucleotide
uagugcuaucgaaggcguc

SEQ ID NO: 78544 - RNA, 19 nt, Artificial Sequence
  Description of Artificial Sequence: Synthetic oligonucleotide
acaggagacgugauaggau

SEQ ID NO: 78545 - RNA, 19 nt, Artificial Sequence
  Description of Artificial Sequence: Synthetic oligonucleotide
guugcgcccugccaugguc

SEQ ID NO: 78546 - RNA, 19 nt, Artificial Sequence
  Description of Artificial Sequence: Synthetic oligonucleotide
cuaucucuauagauggcau

SEQ ID NO: 78547 - RNA, 19 nt, Artificial Sequence
  Description of Artificial Sequence: Synthetic oligonucleotide
cgugcaaaucugcuagugc

SEQ ID NO: 78548 - RNA, 19 nt, Artificial Sequence
  Description of Artificial Sequence: Synthetic oligonucleotide
ucuccgagcaaaggaccuc

SEQ ID NO: 78549 - RNA, 19 nt, Artificial Sequence
  Description of Artificial Sequence: Synthetic oligonucleotide
ggaagacgcaccacugggc

SEQ ID NO: 78550 - RNA, 19 nt, Artificial Sequence
  Description of Artificial Sequence: Synthetic oligonucleotide
gcaucgcuaaggaacuuug

SEQ ID NO: 78551 - RNA, 19 nt, Artificial Sequence
  Description of Artificial Sequence: Synthetic oligonucleotide
gcacguuccuugcagaucu

SEQ ID NO: 78552 - RNA, 19 nt, Artificial Sequence
  Description of Artificial Sequence: Synthetic oligonucleotide
cagguugcgcccugccaug

SEQ ID NO: 78553 - RNA, 19 nt, Artificial Sequence
  Description of Artificial Sequence: Synthetic oligonucleotide
guuaguccuugagaaccca

SEQ ID NO: 78554 - RNA, 19 nt, Artificial Sequence
  Description of Artificial Sequence: Synthetic oligonucleotide
gccuacagagauaaaugca

SEQ ID NO: 78555 - RNA, 19 nt, Artificial Sequence
  Description of Artificial Sequence: Synthetic oligonucleotide
ucacgacaggagacgugau

SEQ ID NO: 78556 - RNA, 19 nt, Artificial Sequence
  Description of Artificial Sequence: Synthetic oligonucleotide
cuucuguagacgugcaaau

SEQ ID NO: 78557 - RNA, 19 nt, Artificial Sequence
  Description of Artificial Sequence: Synthetic oligonucleotide
ccccaaucaauagaccagc

SEQ ID NO: 78558 - RNA, 19 nt, Artificial Sequence
  Description of Artificial Sequence: Synthetic oligonucleotide
ccauuaaaguaauacaguu

SEQ ID NO: 78559 - RNA, 19 nt, Artificial Sequence
  Description of Artificial Sequence: Synthetic oligonucleotide
uucgggcaaguugccgugc

SEQ ID NO: 78560 - RNA, 19 nt, Artificial Sequence
  Description of Artificial Sequence: Synthetic oligonucleotide
caaucauagcuuccguagu

SEQ ID NO: 78561 - RNA, 19 nt, Artificial Sequence
  Description of Artificial Sequence: Synthetic oligonucleotide
guagacgugcaaaucugcu

SEQ ID NO: 78562 - RNA, 19 nt, Artificial Sequence
  Description of Artificial Sequence: Synthetic oligonucleotide
gacgucucugaaagagcca

SEQ ID NO: 78563 - RNA, 19 nt, Artificial Sequence
  Description of Artificial Sequence: Synthetic oligonucleotide
ucccaucugcaaggacccg

SEQ ID NO: 78564 - RNA, 19 nt, Artificial Sequence
  Description of Artificial Sequence: Synthetic oligonucleotide
gcaugaauacucaauacuu

SEQ ID NO: 78565 - RNA, 19 nt, Artificial Sequence
  Description of Artificial Sequence: Synthetic oligonucleotide
caaacccuucggguguuuc

SEQ ID NO: 78566 - RNA, 19 nt, Artificial Sequence
  Description of Artificial Sequence: Synthetic oligonucleotide
caggagacgugauaggauu

SEQ ID NO: 78567 - RNA, 19 nt, Artificial Sequence
  Description of Artificial Sequence: Synthetic oligonucleotide
cuccgagcaaaggaccuca

SEQ ID NO: 78568 - RNA, 19 nt, Artificial Sequence
  Description of Artificial Sequence: Synthetic oligonucleotide
ggagcugccggcgaauaga

SEQ ID NO: 78569 - RNA, 19 nt, Artificial Sequence
  Description of Artificial Sequence: Synthetic oligonucleotide
gauguacagguugcgcccu

SEQ ID NO: 78570 - RNA, 19 nt, Artificial Sequence
  Description of Artificial Sequence: Synthetic oligonucleotide
cugccggcgaauagauaca

SEQ ID NO: 78571 - RNA, 19 nt, Artificial Sequence
  Description of Artificial Sequence: Synthetic oligonucleotide
gacgugcaaaucugcuagu

SEQ ID NO: 78572 - RNA, 19 nt, Artificial Sequence
  Description of Artificial Sequence: Synthetic oligonucleotide
cuacaugagaugucagcuu

SEQ ID NO: 78573 - RNA, 19 nt, Artificial Sequence
  Description of Artificial Sequence: Synthetic oligonucleotide
ugcuaucgaaggcguccuu

SEQ ID NO: 78574 - RNA, 19 nt, Artificial Sequence
  Description of Artificial Sequence: Synthetic oligonucleotide
aggccgaggcucacugggg

SEQ ID NO: 78575 - RNA, 19 nt, Artificial Sequence
  Description of Artificial Sequence: Synthetic oligonucleotide
aggagacgugauaggauuu

SEQ ID NO: 78576 - RNA, 19 nt, Artificial Sequence
  Description of Artificial Sequence: Synthetic oligonucleotide
aguguaaauuugaguccuu

SEQ ID NO: 78577 - RNA, 19 nt, Artificial Sequence
  Description of Artificial Sequence: Synthetic oligonucleotide
cgccaagcacaaauguagc

SEQ ID NO: 78578 - RNA, 19 nt, Artificial Sequence
  Description of Artificial Sequence: Synthetic oligonucleotide
cacgacaggagacgugaua

SEQ ID NO: 78579 - RNA, 19 nt, Artificial Sequence
  Description of Artificial Sequence: Synthetic oligonucleotide
cccgucuacaacaguuguc

SEQ ID NO: 78580 - RNA, 19 nt, Artificial Sequence
  Description of Artificial Sequence: Synthetic oligonucleotide
ccacuggagggcugguccc

SEQ ID NO: 78581 - RNA, 19 nt, Artificial Sequence
  Description of Artificial Sequence: Synthetic oligonucleotide
ugcccguguuucaguucaa

SEQ ID NO: 78582 - RNA, 19 nt, Artificial Sequence
  Description of Artificial Sequence: Synthetic oligonucleotide
ccaagaccuauugcccugc

SEQ ID NO: 78583 - RNA, 19 nt, Artificial Sequence
  Description of Artificial Sequence: Synthetic oligonucleotide
ggagcccguaaaugauuca

SEQ ID NO: 78584 - RNA, 19 nt, Artificial Sequence
  Description of Artificial Sequence: Synthetic oligonucleotide
gcgaauagauacaccacgu

SEQ ID NO: 78585 - RNA, 19 nt, Artificial Sequence
  Description of Artificial Sequence: Synthetic oligonucleotide
cugggccccgggucauccc

SEQ ID NO: 78586 - RNA, 19 nt, Artificial Sequence
  Description of Artificial Sequence: Synthetic oligonucleotide
caccagacagccuuccguu

SEQ ID NO: 78587 - RNA, 19 nt, Artificial Sequence
  Description of Artificial Sequence: Synthetic oligonucleotide
ccuccuaugcucccagcca

SEQ ID NO: 78588 - RNA, 19 nt, Artificial Sequence
  Description of Artificial Sequence: Synthetic oligonucleotide
gucuccgagcaaaggaccu

SEQ ID NO: 78589 - RNA, 19 nt, Artificial Sequence
  Description of Artificial Sequence: Synthetic oligonucleotide
cggcgaauagauacaccac

SEQ ID NO: 78590 - RNA, 19 nt, Artificial Sequence
  Description of Artificial Sequence: Synthetic oligonucleotide
ggacaacgcuaaugagcac

SEQ ID NO: 78591 - RNA, 19 nt, Artificial Sequence
  Description of Artificial Sequence: Synthetic oligonucleotide
ccgucuacaacaguugucu

SEQ ID NO: 78592 - RNA, 19 nt, Artificial Sequence
  Description of Artificial Sequence: Synthetic oligonucleotide
caaugcccguguuucaguu

SEQ ID NO: 78593 - RNA, 19 nt, Artificial Sequence
  Description of Artificial Sequence: Synthetic oligonucleotide
gacgcaccacugggccccg

SEQ ID NO: 78594 - RNA, 19 nt, Artificial Sequence
  Description of Artificial Sequence: Synthetic oligonucleotide
agcaggcgucucacugauc

SEQ ID NO: 78595 - RNA, 19 nt, Artificial Sequence
  Description of Artificial Sequence: Synthetic oligonucleotide
ggccacaugcaauguagau

SEQ ID NO: 78596 - RNA, 19 nt, Artificial Sequence
  Description of Artificial Sequence: Synthetic oligonucleotide
ggcaaguugccgugcauuu

SEQ ID NO: 78597 - RNA, 19 nt, Artificial Sequence
  Description of Artificial Sequence: Synthetic oligonucleotide
cacguccauucaucuucca

SEQ ID NO: 78598 - RNA, 19 nt, Artificial Sequence
  Description of Artificial Sequence: Synthetic oligonucleotide
ucccuucauuaggcuuggc

SEQ ID NO: 78599 - RNA, 19 nt, Artificial Sequence
  Description of Artificial Sequence: Synthetic oligonucleotide
caccuagcaucugcagaca

SEQ ID NO: 78600 - RNA, 19 nt, Artificial Sequence
  Description of Artificial Sequence: Synthetic oligonucleotide
gcaaaggaccucagacguc

SEQ ID NO: 78601 - RNA, 19 nt, Artificial Sequence
  Description of Artificial Sequence: Synthetic oligonucleotide
gugcuaucgaaggcguccu

SEQ ID NO: 78602 - RNA, 19 nt, Artificial Sequence
  Description of Artificial Sequence: Synthetic oligonucleotide
gccggcgaauagauacacc

SEQ ID NO: 78603 - RNA, 19 nt, Artificial Sequence
  Description of Artificial Sequence: Synthetic oligonucleotide
gcagaacccacaagauucu

SEQ ID NO: 78604 - RNA, 19 nt, Artificial Sequence
  Description of Artificial Sequence: Synthetic oligonucleotide
cgaaggcguccuuuaucac

SEQ ID NO: 78605 - RNA, 19 nt, Artificial Sequence
  Description of Artificial Sequence: Synthetic oligonucleotide
caguuuauggcggcagguu

SEQ ID NO: 78606 - RNA, 19 nt, Artificial Sequence
  Description of Artificial Sequence: Synthetic oligonucleotide
ccccgggucaucccaucug

SEQ ID NO: 78607 - RNA, 19 nt, Artificial Sequence
  Description of Artificial Sequence: Synthetic oligonucleotide
ggcgucucacugaucacgu

SEQ ID NO: 78608 - RNA, 19 nt, Artificial Sequence
  Description of Artificial Sequence: Synthetic oligonucleotide
gcaugggaaggaccacacu

SEQ ID NO: 78609 - RNA, 19 nt, Artificial Sequence
  Description of Artificial Sequence: Synthetic oligonucleotide
ccaguuuauggcggcaggu

SEQ ID NO: 78610 - RNA, 19 nt, Artificial Sequence
  Description of Artificial Sequence: Synthetic oligonucleotide
ccaaugcccguguuucagu

SEQ ID NO: 78611 - RNA, 19 nt, Artificial Sequence
  Description of Artificial Sequence: Synthetic oligonucleotide
caacgcuaaugagcacugu

SEQ ID NO: 78612 - RNA, 19 nt, Artificial Sequence
  Description of Artificial Sequence: Synthetic oligonucleotide
cgggucaucccaucugcaa

SEQ ID NO: 78613 - RNA, 19 nt, Artificial Sequence
  Description of Artificial Sequence: Synthetic oligonucleotide
gagguccgacuugcucaua

SEQ ID NO: 78614 - RNA, 19 nt, Artificial Sequence
  Description of Artificial Sequence: Synthetic oligonucleotide
cgcuaaugagcacugucuu

SEQ ID NO: 78615 - RNA, 19 nt, Artificial Sequence
  Description of Artificial Sequence: Synthetic oligonucleotide
ggguaaccacuuguucaau

SEQ ID NO: 78616 - RNA, 19 nt, Artificial Sequence
  Description of Artificial Sequence: Synthetic oligonucleotide
gccccgggucaucccaucu

SEQ ID NO: 78617 - RNA, 19 nt, Artificial Sequence
  Description of Artificial Sequence: Synthetic oligonucleotide
cacguuccuugcagaucuu

SEQ ID NO: 78618 - RNA, 19 nt, Artificial Sequence
  Description of Artificial Sequence: Synthetic oligonucleotide
cagaggcgccaagcacaaa

SEQ ID NO: 78619 - RNA, 19 nt, Artificial Sequence
  Description of Artificial Sequence: Synthetic oligonucleotide
gcccguguuucaguucaau

SEQ ID NO: 78620 - RNA, 19 nt, Artificial Sequence
  Description of Artificial Sequence: Synthetic oligonucleotide
cugcaucgcuaaggaacuu

SEQ ID NO: 78621 - RNA, 19 nt, Artificial Sequence
  Description of Artificial Sequence: Synthetic oligonucleotide
gcgcccugccauggucaca

SEQ ID NO: 78622 - RNA, 19 nt, Artificial Sequence
  Description of Artificial Sequence: Synthetic oligonucleotide
gcaaacccuucggguguuu

SEQ ID NO: 78623 - RNA, 19 nt, Artificial Sequence
  Description of Artificial Sequence: Synthetic oligonucleotide
gggccccgggucaucccau

SEQ ID NO: 78624 - RNA, 19 nt, Artificial Sequence
  Description of Artificial Sequence: Synthetic oligonucleotide
cgcaaacccuucggguguu

SEQ ID NO: 78625 - RNA, 19 nt, Artificial Sequence
  Description of Artificial Sequence: Synthetic oligonucleotide
aaggggacuauauaggacc

SEQ ID NO: 78626 - RNA, 19 nt, Artificial Sequence
  Description of Artificial Sequence: Synthetic oligonucleotide
gaucauuucacucauggag

SEQ ID NO: 78627 - RNA, 19 nt, Artificial Sequence
  Description of Artificial Sequence: Synthetic oligonucleotide
gacaaaaugacugacauac

SEQ ID NO: 78628 - RNA, 19 nt, Artificial Sequence
  Description of Artificial Sequence: Synthetic oligonucleotide
uagaucauuucacucaugg

SEQ ID NO: 78629 - RNA, 19 nt, Artificial Sequence
  Description of Artificial Sequence: Synthetic oligonucleotide
agagguaucuuccacaggg

SEQ ID NO: 78630 - RNA, 19 nt, Artificial Sequence
  Description of Artificial Sequence: Synthetic oligonucleotide
acauauuuacucuacacag

SEQ ID NO: 78631 - RNA, 19 nt, Artificial Sequence
  Description of Artificial Sequence: Synthetic oligonucleotide
uauaguucaucauucuucg

SEQ ID NO: 78632 - RNA, 19 nt, Artificial Sequence
  Description of Artificial Sequence: Synthetic oligonucleotide
gacauuagcgcucaagacg

SEQ ID NO: 78633 - RNA, 19 nt, Artificial Sequence
  Description of Artificial Sequence: Synthetic oligonucleotide
ucucaauuaacaauggaac

SEQ ID NO: 78634 - RNA, 19 nt, Artificial Sequence
  Description of Artificial Sequence: Synthetic oligonucleotide
aaauauccuucccauuacc

SEQ ID NO: 78635 - RNA, 19 nt, Artificial Sequence
  Description of Artificial Sequence: Synthetic oligonucleotide
ugucuaaccagccugaacu

SEQ ID NO: 78636 - RNA, 19 nt, Artificial Sequence
  Description of Artificial Sequence: Synthetic oligonucleotide
ucuaaaaugggcuuugccu

SEQ ID NO: 78637 - RNA, 19 nt, Artificial Sequence
  Description of Artificial Sequence: Synthetic oligonucleotide
uggauuuucccgaacaucc

SEQ ID NO: 78638 - RNA, 19 nt, Artificial Sequence
  Description of Artificial Sequence: Synthetic oligonucleotide
aaaguugaaaucauggcug

SEQ ID NO: 78639 - RNA, 19 nt, Artificial Sequence
  Description of Artificial Sequence: Synthetic oligonucleotide
aacuagaucauuucacuca

SEQ ID NO: 78640 - RNA, 19 nt, Artificial Sequence
  Description of Artificial Sequence: Synthetic oligonucleotide
cucaagacgguuuuaaggc

SEQ ID NO: 78641 - RNA, 19 nt, Artificial Sequence
  Description of Artificial Sequence: Synthetic oligonucleotide
agaacgagccagcucaucc

SEQ ID NO: 78642 - RNA, 19 nt, Artificial Sequence
  Description of Artificial Sequence: Synthetic oligonucleotide
auuuacucuacacagugug

SEQ ID NO: 78643 - RNA, 19 nt, Artificial Sequence
  Description of Artificial Sequence: Synthetic oligonucleotide
gaaaucauggcuguagcgg

SEQ ID NO: 78644 - RNA, 19 nt, Artificial Sequence
  Description of Artificial Sequence: Synthetic oligonucleotide
aaaugauacucagagaaga

SEQ ID NO: 78645 - RNA, 19 nt, Artificial Sequence
  Description of Artificial Sequence: Synthetic oligonucleotide
aacacgaguggccccaccc

SEQ ID NO: 78646 - RNA, 19 nt, Artificial Sequence
  Description of Artificial Sequence: Synthetic oligonucleotide
cuagugucccaaaauaucc

SEQ ID NO: 78647 - RNA, 19 nt, Artificial Sequence
  Description of Artificial Sequence: Synthetic oligonucleotide
ucagguucuaaaaugggcu

SEQ ID NO: 78648 - RNA, 19 nt, Artificial Sequence
  Description of Artificial Sequence: Synthetic oligonucleotide
uuauccagagcugaaagcc

SEQ ID NO: 78649 - RNA, 19 nt, Artificial Sequence
  Description of Artificial Sequence: Synthetic oligonucleotide
uauccuucccauuaccagg

SEQ ID NO: 78650 - RNA, 19 nt, Artificial Sequence
  Description of Artificial Sequence: Synthetic oligonucleotide
aagaguagauucuucuucu

SEQ ID NO: 78651 - RNA, 19 nt, Artificial Sequence
  Description of Artificial Sequence: Synthetic oligonucleotide
uuagcuucacuguagucag

SEQ ID NO: 78652 - RNA, 19 nt, Artificial Sequence
  Description of Artificial Sequence: Synthetic oligonucleotide
gugaaaguugaaaucaugg

SEQ ID NO: 78653 - RNA, 19 nt, Artificial Sequence
  Description of Artificial Sequence: Synthetic oligonucleotide
auauaggaccuuuaggucu

SEQ ID NO: 78654 - RNA, 19 nt, Artificial Sequence
  Description of Artificial Sequence: Synthetic oligonucleotide
aagauacuugcacccuugc

SEQ ID NO: 78655 - RNA, 19 nt, Artificial Sequence
  Description of Artificial Sequence: Synthetic oligonucleotide
gauucaaaccugucuaacc

SEQ ID NO: 78656 - RNA, 19 nt, Artificial Sequence
  Description of Artificial Sequence: Synthetic oligonucleotide
gauacuguaccucacgguc

SEQ ID NO: 78657 - RNA, 19 nt, Artificial Sequence
  Description of Artificial Sequence: Synthetic oligonucleotide
auucaaaccugucuaacca

SEQ ID NO: 78658 - RNA, 19 nt, Artificial Sequence
  Description of Artificial Sequence: Synthetic oligonucleotide
ugugccaugugacauuagc

SEQ ID NO: 78659 - RNA, 19 nt, Artificial Sequence
  Description of Artificial Sequence: Synthetic oligonucleotide
ugugaaaguugaaaucaug

SEQ ID NO: 78660 - RNA, 19 nt, Artificial Sequence
  Description of Artificial Sequence: Synthetic oligonucleotide
ucuaacguugucaucucca

SEQ ID NO: 78661 - RNA, 19 nt, Artificial Sequence
  Description of Artificial Sequence: Synthetic oligonucleotide
ucaagacgguuuuaaggcg

SEQ ID NO: 78662 - RNA, 19 nt, Artificial Sequence
  Description of Artificial Sequence: Synthetic oligonucleotide
gaaaguugaaaucauggcu

SEQ ID NO: 78663 - RNA, 19 nt, Artificial Sequence
  Description of Artificial Sequence: Synthetic oligonucleotide
aaaaggggcucacaguaga

SEQ ID NO: 78664 - RNA, 19 nt, Artificial Sequence
  Description of Artificial Sequence: Synthetic oligonucleotide
acauuagcgcucaagacgg

SEQ ID NO: 78665 - RNA, 19 nt, Artificial Sequence
  Description of Artificial Sequence: Synthetic oligonucleotide
uauccagagcugaaagccg

SEQ ID NO: 78666 - RNA, 19 nt, Artificial Sequence
  Description of Artificial Sequence: Synthetic oligonucleotide
cuauauaggaccuuuaggu

SEQ ID NO: 78667 - RNA, 19 nt, Artificial Sequence
  Description of Artificial Sequence: Synthetic oligonucleotide
ucgggauauuucuugaagc

SEQ ID NO: 78668 - RNA, 19 nt, Artificial Sequence
  Description of Artificial Sequence: Synthetic oligonucleotide
uccucaaguuucuucacag

SEQ ID NO: 78669 - RNA, 19 nt, Artificial Sequence
  Description of Artificial Sequence: Synthetic oligonucleotide
ugcuacaggugcaauacug

SEQ ID NO: 78670 - RNA, 19 nt, Artificial Sequence
  Description of Artificial Sequence: Synthetic oligonucleotide
agauacuugcacccuugcc

SEQ ID NO: 78671 - RNA, 19 nt, Artificial Sequence
  Description of Artificial Sequence: Synthetic oligonucleotide
aguagggcuuuccucuucc

SEQ ID NO: 78672 - RNA, 19 nt, Artificial Sequence
  Description of Artificial Sequence: Synthetic oligonucleotide
uuuacccacaggcaaacaa

SEQ ID NO: 78673 - RNA, 19 nt, Artificial Sequence
  Description of Artificial Sequence: Synthetic oligonucleotide
uucuaaaaugggcuuugcc

SEQ ID NO: 78674 - RNA, 19 nt, Artificial Sequence
  Description of Artificial Sequence: Synthetic oligonucleotide
uauauaggaccuuuagguc

SEQ ID NO: 78675 - RNA, 19 nt, Artificial Sequence
  Description of Artificial Sequence: Synthetic oligonucleotide
ucaucauucuucgaagacc

SEQ ID NO: 78676 - RNA, 19 nt, Artificial Sequence
  Description of Artificial Sequence: Synthetic oligonucleotide
agaaguggcgcugaguuuc

SEQ ID NO: 78677 - RNA, 19 nt, Artificial Sequence
  Description of Artificial Sequence: Synthetic oligonucleotide
ucgaagaccgcuucugucc

SEQ ID NO: 78678 - RNA, 19 nt, Artificial Sequence
  Description of Artificial Sequence: Synthetic oligonucleotide
aggcacucuagacaugggc

SEQ ID NO: 78679 - RNA, 19 nt, Artificial Sequence
  Description of Artificial Sequence: Synthetic oligonucleotide
aguagucucuucuuuguca

SEQ ID NO: 78680 - RNA, 19 nt, Artificial Sequence
  Description of Artificial Sequence: Synthetic oligonucleotide
acucgagucacuuucgccu

SEQ ID NO: 78681 - RNA, 19 nt, Artificial Sequence
  Description of Artificial Sequence: Synthetic oligonucleotide
cuaagggcaaaacccaccc

SEQ ID NO: 78682 - RNA, 19 nt, Artificial Sequence
  Description of Artificial Sequence: Synthetic oligonucleotide
aauacccgaagauccucag

SEQ ID NO: 78683 - RNA, 19 nt, Artificial Sequence
  Description of Artificial Sequence: Synthetic oligonucleotide
uuacccacaaagcuugccu

SEQ ID NO: 78684 - RNA, 19 nt, Artificial Sequence
  Description of Artificial Sequence: Synthetic oligonucleotide
uucaaaccugucuaaccag

SEQ ID NO: 78685 - RNA, 19 nt, Artificial Sequence
  Description of Artificial Sequence: Synthetic oligonucleotide
cacaaagcuugccugagag

SEQ ID NO: 78686 - RNA, 19 nt, Artificial Sequence
  Description of Artificial Sequence: Synthetic oligonucleotide
aggggcucacaguagauag

SEQ ID NO: 78687 - RNA, 19 nt, Artificial Sequence
  Description of Artificial Sequence: Synthetic oligonucleotide
ugaagcucucuccaacacc

SEQ ID NO: 78688 - RNA, 19 nt, Artificial Sequence
  Description of Artificial Sequence: Synthetic oligonucleotide
gauacucagagaagacugg

SEQ ID NO: 78689 - RNA, 19 nt, Artificial Sequence
  Description of Artificial Sequence: Synthetic oligonucleotide
uaaacugagcaccccacuc

SEQ ID NO: 78690 - RNA, 19 nt, Artificial Sequence
  Description of Artificial Sequence: Synthetic oligonucleotide
uuacucuacacagugugga

SEQ ID NO: 78691 - RNA, 19 nt, Artificial Sequence
  Description of Artificial Sequence: Synthetic oligonucleotide
uguccuugggucguggccg

SEQ ID NO: 78692 - RNA, 19 nt, Artificial Sequence
  Description of Artificial Sequence: Synthetic oligonucleotide
caggcuucgaaccccaggg

SEQ ID NO: 78693 - RNA, 19 nt, Artificial Sequence
  Description of Artificial Sequence: Synthetic oligonucleotide
uuccguaguagucucuucu

SEQ ID NO: 78694 - RNA, 19 nt, Artificial Sequence
  Description of Artificial Sequence: Synthetic oligonucleotide
gagucuguugguuccguag

SEQ ID NO: 78695 - RNA, 19 nt, Artificial Sequence
  Description of Artificial Sequence: Synthetic oligonucleotide
accguaguugaugugaaag

SEQ ID NO: 78696 - RNA, 19 nt, Artificial Sequence
  Description of Artificial Sequence: Synthetic oligonucleotide
gaacuagaucauuucacuc

SEQ ID NO: 78697 - RNA, 19 nt, Artificial Sequence
  Description of Artificial Sequence: Synthetic oligonucleotide
cagaguugcauucuuccag

SEQ ID NO: 78698 - RNA, 19 nt, Artificial Sequence
  Description of Artificial Sequence: Synthetic oligonucleotide
gacgguuuuaaggcgauug

SEQ ID NO: 78699 - RNA, 19 nt, Artificial Sequence
  Description of Artificial Sequence: Synthetic oligonucleotide
uacucaggcugguagagcu

SEQ ID NO: 78700 - RNA, 19 nt, Artificial Sequence
  Description of Artificial Sequence: Synthetic oligonucleotide
cacagaacgagccagcuca

SEQ ID NO: 78701 - RNA, 19 nt, Artificial Sequence
  Description of Artificial Sequence: Synthetic oligonucleotide
ucugcuuccgggcagguuu

SEQ ID NO: 78702 - RNA, 19 nt, Artificial Sequence
  Description of Artificial Sequence: Synthetic oligonucleotide
ugugacauuagcgcucaag

SEQ ID NO: 78703 - RNA, 19 nt, Artificial Sequence
  Description of Artificial Sequence: Synthetic oligonucleotide
acgguuuuaaggcgauugg

SEQ ID NO: 78704 - RNA, 19 nt, Artificial Sequence
  Description of Artificial Sequence: Synthetic oligonucleotide
aaaccugucuaaccagccu

SEQ ID NO: 78705 - RNA, 19 nt, Artificial Sequence
  Description of Artificial Sequence: Synthetic oligonucleotide
aaacaagucugcacacaac

SEQ ID NO: 78706 - RNA, 19 nt, Artificial Sequence
  Description of Artificial Sequence: Synthetic oligonucleotide
cugcaagauacuugcaccc

SEQ ID NO: 78707 - RNA, 19 nt, Artificial Sequence
  Description of Artificial Sequence: Synthetic oligonucleotide
uccuagcaaguacacuggg

SEQ ID NO: 78708 - RNA, 19 nt, Artificial Sequence
  Description of Artificial Sequence: Synthetic oligonucleotide
ugacauaccagguuugcuu

SEQ ID NO: 78709 - RNA, 19 nt, Artificial Sequence
  Description of Artificial Sequence: Synthetic oligonucleotide
ugacauuagcgcucaagac

SEQ ID NO: 78710 - RNA, 19 nt, Artificial Sequence
  Description of Artificial Sequence: Synthetic oligonucleotide
uauaggaccuuuaggucuc

SEQ ID NO: 78711 - RNA, 19 nt, Artificial Sequence
  Description of Artificial Sequence: Synthetic oligonucleotide
uggggauaaggauuccaag

SEQ ID NO: 78712 - RNA, 19 nt, Artificial Sequence
  Description of Artificial Sequence: Synthetic oligonucleotide
acugacauaccagguuugc

SEQ ID NO: 78713 - RNA, 19 nt, Artificial Sequence
  Description of Artificial Sequence: Synthetic oligonucleotide
gaggguagggccccauucg

SEQ ID NO: 78714 - RNA, 19 nt, Artificial Sequence
  Description of Artificial Sequence: Synthetic oligonucleotide
gugacauuagcgcucaaga

SEQ ID NO: 78715 - RNA, 19 nt, Artificial Sequence
  Description of Artificial Sequence: Synthetic oligonucleotide
acccugucuaaacugagca

SEQ ID NO: 78716 - RNA, 19 nt, Artificial Sequence
  Description of Artificial Sequence: Synthetic oligonucleotide
uagcgguuaaaggugauga

SEQ ID NO: 78717 - RNA, 19 nt, Artificial Sequence
  Description of Artificial Sequence: Synthetic oligonucleotide
gucgggauauuucuugaag

SEQ ID NO: 78718 - RNA, 19 nt, Artificial Sequence
  Description of Artificial Sequence: Synthetic oligonucleotide
aguuguggcuccgaacccc

SEQ ID NO: 78719 - RNA, 19 nt, Artificial Sequence
  Description of Artificial Sequence: Synthetic oligonucleotide
agagcugaaagccguucag

SEQ ID NO: 78720 - RNA, 19 nt, Artificial Sequence
  Description of Artificial Sequence: Synthetic oligonucleotide
auacuguaccucacggucc

SEQ ID NO: 78721 - RNA, 19 nt, Artificial Sequence
  Description of Artificial Sequence: Synthetic oligonucleotide
agccguucaggccauuuuc

SEQ ID NO: 78722 - RNA, 19 nt, Artificial Sequence
  Description of Artificial Sequence: Synthetic oligonucleotide
agcgguuaaaggugaugac

SEQ ID NO: 78723 - RNA, 19 nt, Artificial Sequence
  Description of Artificial Sequence: Synthetic oligonucleotide
ggccuuauugagcagauac

SEQ ID NO: 78724 - RNA, 19 nt, Artificial Sequence
  Description of Artificial Sequence: Synthetic oligonucleotide
aaugacugacauaccaggu

SEQ ID NO: 78725 - RNA, 19 nt, Artificial Sequence
  Description of Artificial Sequence: Synthetic oligonucleotide
agccaaauacccgaagauc

SEQ ID NO: 78726 - RNA, 19 nt, Artificial Sequence
  Description of Artificial Sequence: Synthetic oligonucleotide
ccaagugccugcaagauac

SEQ ID NO: 78727 - RNA, 19 nt, Artificial Sequence
  Description of Artificial Sequence: Synthetic oligonucleotide
caaaccugucuaaccagcc

SEQ ID NO: 78728 - RNA, 19 nt, Artificial Sequence
  Description of Artificial Sequence: Synthetic oligonucleotide
acucuagugucccaaaaua

SEQ ID NO: 78729 - RNA, 19 nt, Artificial Sequence
  Description of Artificial Sequence: Synthetic oligonucleotide
acaauuugauucaaaccug

SEQ ID NO: 78730 - RNA, 19 nt, Artificial Sequence
  Description of Artificial Sequence: Synthetic oligonucleotide
guaguugaugugaaaguug

SEQ ID NO: 78731 - RNA, 19 nt, Artificial Sequence
  Description of Artificial Sequence: Synthetic oligonucleotide
agugguugaggagauuauc

SEQ ID NO: 78732 - RNA, 19 nt, Artificial Sequence
  Description of Artificial Sequence: Synthetic oligonucleotide
uguugguuccguaguaguc

SEQ ID NO: 78733 - RNA, 19 nt, Artificial Sequence
  Description of Artificial Sequence: Synthetic oligonucleotide
cugacgagguaccaccucc

SEQ ID NO: 78734 - RNA, 19 nt, Artificial Sequence
  Description of Artificial Sequence: Synthetic oligonucleotide
cuccuagcaaguacacugg

SEQ ID NO: 78735 - RNA, 19 nt, Artificial Sequence
  Description of Artificial Sequence: Synthetic oligonucleotide
acaucacaguuguggcucc

SEQ ID NO: 78736 - RNA, 19 nt, Artificial Sequence
  Description of Artificial Sequence: Synthetic oligonucleotide
agcacguggauuuucccga

SEQ ID NO: 78737 - RNA, 19 nt, Artificial Sequence
  Description of Artificial Sequence: Synthetic oligonucleotide
aaucugugccaugugacau

SEQ ID NO: 78738 - RNA, 19 nt, Artificial Sequence
  Description of Artificial Sequence: Synthetic oligonucleotide
cuuucgguucagauucugc

SEQ ID NO: 78739 - RNA, 19 nt, Artificial Sequence
  Description of Artificial Sequence: Synthetic oligonucleotide
uccuaauuccagaggcuca

SEQ ID NO: 78740 - RNA, 19 nt, Artificial Sequence
  Description of Artificial Sequence: Synthetic oligonucleotide
cuaacguugucaucuccac

SEQ ID NO: 78741 - RNA, 19 nt, Artificial Sequence
  Description of Artificial Sequence: Synthetic oligonucleotide
uacuguaccucacggucca

SEQ ID NO: 78742 - RNA, 19 nt, Artificial Sequence
  Description of Artificial Sequence: Synthetic oligonucleotide
gguaccaccuccaaacagg

SEQ ID NO: 78743 - RNA, 19 nt, Artificial Sequence
  Description of Artificial Sequence: Synthetic oligonucleotide
uugaagcucucuccaacac

SEQ ID NO: 78744 - RNA, 19 nt, Artificial Sequence
  Description of Artificial Sequence: Synthetic oligonucleotide
agacugggcacucuagugu

SEQ ID NO: 78745 - RNA, 19 nt, Artificial Sequence
  Description of Artificial Sequence: Synthetic oligonucleotide
acacaacuccucgaacucc

SEQ ID NO: 78746 - RNA, 19 nt, Artificial Sequence
  Description of Artificial Sequence: Synthetic oligonucleotide
uucgccuugaaguccacau

SEQ ID NO: 78747 - RNA, 19 nt, Artificial Sequence
  Description of Artificial Sequence: Synthetic oligonucleotide
aagcuugccugagagugag

SEQ ID NO: 78748 - RNA, 19 nt, Artificial Sequence
  Description of Artificial Sequence: Synthetic oligonucleotide
acaaaaugacugacauacc

SEQ ID NO: 78749 - RNA, 19 nt, Artificial Sequence
  Description of Artificial Sequence: Synthetic oligonucleotide
uacagcccaaucuguacug

SEQ ID NO: 78750 - RNA, 19 nt, Artificial Sequence
  Description of Artificial Sequence: Synthetic oligonucleotide
ucuagacaugggcaucaug

SEQ ID NO: 78751 - RNA, 19 nt, Artificial Sequence
  Description of Artificial Sequence: Synthetic oligonucleotide
uuguccuugggucguggcc

SEQ ID NO: 78752 - RNA, 19 nt, Artificial Sequence
  Description of Artificial Sequence: Synthetic oligonucleotide
cacacguuuauugugcuuc

SEQ ID NO: 78753 - RNA, 19 nt, Artificial Sequence
  Description of Artificial Sequence: Synthetic oligonucleotide
ugaggagauuauccagagc

SEQ ID NO: 78754 - RNA, 19 nt, Artificial Sequence
  Description of Artificial Sequence: Synthetic oligonucleotide
agauacuguaccucacggu

SEQ ID NO: 78755 - RNA, 19 nt, Artificial Sequence
  Description of Artificial Sequence: Synthetic oligonucleotide
ugauucaaaccugucuaac

SEQ ID NO: 78756 - RNA, 19 nt, Artificial Sequence
  Description of Artificial Sequence: Synthetic oligonucleotide
aaauacccgaagauccuca

SEQ ID NO: 78757 - RNA, 19 nt, Artificial Sequence
  Description of Artificial Sequence: Synthetic oligonucleotide
aguaggagaccagagcgug

SEQ ID NO: 78758 - RNA, 19 nt, Artificial Sequence
  Description of Artificial Sequence: Synthetic oligonucleotide
cuuccaagcuguuggcagc

SEQ ID NO: 78759 - RNA, 19 nt, Artificial Sequence
  Description of Artificial Sequence: Synthetic oligonucleotide
ugcgcugaggguagggccc

SEQ ID NO: 78760 - RNA, 19 nt, Artificial Sequence
  Description of Artificial Sequence: Synthetic oligonucleotide
agaucauuucacucaugga

SEQ ID NO: 78761 - RNA, 19 nt, Artificial Sequence
  Description of Artificial Sequence: Synthetic oligonucleotide
uguugccaagcuugguaag

SEQ ID NO: 78762 - RNA, 19 nt, Artificial Sequence
  Description of Artificial Sequence: Synthetic oligonucleotide
auacccgaagauccucagg

SEQ ID NO: 78763 - RNA, 19 nt, Artificial Sequence
  Description of Artificial Sequence: Synthetic oligonucleotide
gagcacacguuuauugugc

SEQ ID NO: 78764 - RNA, 19 nt, Artificial Sequence
  Description of Artificial Sequence: Synthetic oligonucleotide
uuuacccacaaagcuugcc

SEQ ID NO: 78765 - RNA, 19 nt, Artificial Sequence
  Description of Artificial Sequence: Synthetic oligonucleotide
cuggauaugguguugccaa

SEQ ID NO: 78766 - RNA, 19 nt, Artificial Sequence
  Description of Artificial Sequence: Synthetic oligonucleotide
gaaaaggggcucacaguag

SEQ ID NO: 78767 - RNA, 19 nt, Artificial Sequence
  Description of Artificial Sequence: Synthetic oligonucleotide
agucuguugguuccguagu

SEQ ID NO: 78768 - RNA, 19 nt, Artificial Sequence
  Description of Artificial Sequence: Synthetic oligonucleotide
acguggauuuucccgaaca

SEQ ID NO: 78769 - RNA, 19 nt, Artificial Sequence
  Description of Artificial Sequence: Synthetic oligonucleotide
ugacuuugcgcugagggua

SEQ ID NO: 78770 - RNA, 19 nt, Artificial Sequence
  Description of Artificial Sequence: Synthetic oligonucleotide
cucuacacaguguggauga

SEQ ID NO: 78771 - RNA, 19 nt, Artificial Sequence
  Description of Artificial Sequence: Synthetic oligonucleotide
uuaggucucucugccaaug

SEQ ID NO: 78772 - RNA, 19 nt, Artificial Sequence
  Description of Artificial Sequence: Synthetic oligonucleotide
uuuuagcuucacuguaguc

SEQ ID NO: 78773 - RNA, 19 nt, Artificial Sequence
  Description of Artificial Sequence: Synthetic oligonucleotide
guagacacuggcccaaaca

SEQ ID NO: 78774 - RNA, 19 nt, Artificial Sequence
  Description of Artificial Sequence: Synthetic oligonucleotide
aggguagggccccauucgg

SEQ ID NO: 78775 - RNA, 19 nt, Artificial Sequence
  Description of Artificial Sequence: Synthetic oligonucleotide
aguagcauugaggggaggu

SEQ ID NO: 78776 - RNA, 19 nt, Artificial Sequence
  Description of Artificial Sequence: Synthetic oligonucleotide
augaaagaacucaaacaca

SEQ ID NO: 78777 - RNA, 19 nt, Artificial Sequence
  Description of Artificial Sequence: Synthetic oligonucleotide
cuguagucagauuuugaga

SEQ ID NO: 78778 - RNA, 19 nt, Artificial Sequence
  Description of Artificial Sequence: Synthetic oligonucleotide
uggauaugguguugccaag

SEQ ID NO: 78779 - RNA, 19 nt, Artificial Sequence
  Description of Artificial Sequence: Synthetic oligonucleotide
uagucgggauauuucuuga

SEQ ID NO: 78780 - RNA, 19 nt, Artificial Sequence
  Description of Artificial Sequence: Synthetic oligonucleotide
uuagcgcucaagacgguuu

SEQ ID NO: 78781 - RNA, 19 nt, Artificial Sequence
  Description of Artificial Sequence: Synthetic oligonucleotide
augacugacauaccagguu

SEQ ID NO: 78782 - RNA, 19 nt, Artificial Sequence
  Description of Artificial Sequence: Synthetic oligonucleotide
uucgaagaccgcuucuguc

SEQ ID NO: 78783 - RNA, 19 nt, Artificial Sequence
  Description of Artificial Sequence: Synthetic oligonucleotide
ggucucuagucccucagag

SEQ ID NO: 78784 - RNA, 19 nt, Artificial Sequence
  Description of Artificial Sequence: Synthetic oligonucleotide
gacuccacccugucuaaac

SEQ ID NO: 78785 - RNA, 19 nt, Artificial Sequence
  Description of Artificial Sequence: Synthetic oligonucleotide
aggcuucgaaccccagggc

SEQ ID NO: 78786 - RNA, 19 nt, Artificial Sequence
  Description of Artificial Sequence: Synthetic oligonucleotide
gguagggccccauucgggg

SEQ ID NO: 78787 - RNA, 19 nt, Artificial Sequence
  Description of Artificial Sequence: Synthetic oligonucleotide
uuugggcuagaagacuaca

SEQ ID NO: 78788 - RNA, 19 nt, Artificial Sequence
  Description of Artificial Sequence: Synthetic oligonucleotide
uuuggcaucugacgaggua

SEQ ID NO: 78789 - RNA, 19 nt, Artificial Sequence
  Description of Artificial Sequence: Synthetic oligonucleotide
cuugaagcucucuccaaca

SEQ ID NO: 78790 - RNA, 19 nt, Artificial Sequence
  Description of Artificial Sequence: Synthetic oligonucleotide
aagagccaaggaggaaggg

SEQ ID NO: 78791 - RNA, 19 nt, Artificial Sequence
  Description of Artificial Sequence: Synthetic oligonucleotide
acucuacacaguguggaug

SEQ ID NO: 78792 - RNA, 19 nt, Artificial Sequence
  Description of Artificial Sequence: Synthetic oligonucleotide
uugccaaccacuuccgcuu

SEQ ID NO: 78793 - RNA, 19 nt, Artificial Sequence
  Description of Artificial Sequence: Synthetic oligonucleotide
ucauggguaagaggcuucc

SEQ ID NO: 78794 - RNA, 19 nt, Artificial Sequence
  Description of Artificial Sequence: Synthetic oligonucleotide
ggaaaaggggcucacagua

SEQ ID NO: 78795 - RNA, 19 nt, Artificial Sequence
  Description of Artificial Sequence: Synthetic oligonucleotide
uuugcgcugaggguagggc

SEQ ID NO: 78796 - RNA, 19 nt, Artificial Sequence
  Description of Artificial Sequence: Synthetic oligonucleotide
ugcacacaacuccucgaac

SEQ ID NO: 78797 - RNA, 19 nt, Artificial Sequence
  Description of Artificial Sequence: Synthetic oligonucleotide
cacucgagucacuuucgcc

SEQ ID NO: 78798 - RNA, 19 nt, Artificial Sequence
  Description of Artificial Sequence: Synthetic oligonucleotide
gaacuuugggaacacgagu

SEQ ID NO: 78799 - RNA, 19 nt, Artificial Sequence
  Description of Artificial Sequence: Synthetic oligonucleotide
cacaccuaucuccucuacc

SEQ ID NO: 78800 - RNA, 19 nt, Artificial Sequence
  Description of Artificial Sequence: Synthetic oligonucleotide
caagacgguuuuaaggcga

SEQ ID NO: 78801 - RNA, 19 nt, Artificial Sequence
  Description of Artificial Sequence: Synthetic oligonucleotide
ugagagccaaauacccgaa

SEQ ID NO: 78802 - RNA, 19 nt, Artificial Sequence
  Description of Artificial Sequence: Synthetic oligonucleotide
gaagcucucuccaacaccu

SEQ ID NO: 78803 - RNA, 19 nt, Artificial Sequence
  Description of Artificial Sequence: Synthetic oligonucleotide
ucaccguaguugaugugaa

SEQ ID NO: 78804 - RNA, 19 nt, Artificial Sequence
  Description of Artificial Sequence: Synthetic oligonucleotide
gggcgcaugaaccauaaga

SEQ ID NO: 78805 - RNA, 19 nt, Artificial Sequence
  Description of Artificial Sequence: Synthetic oligonucleotide
cuuugggcuagaagacuac

SEQ ID NO: 78806 - RNA, 19 nt, Artificial Sequence
  Description of Artificial Sequence: Synthetic oligonucleotide
uagggccccauucggggag

SEQ ID NO: 78807 - RNA, 19 nt, Artificial Sequence
  Description of Artificial Sequence: Synthetic oligonucleotide
cacacaacuccucgaacuc

SEQ ID NO: 78808 - RNA, 19 nt, Artificial Sequence
  Description of Artificial Sequence: Synthetic oligonucleotide
gucaccguaguugauguga

SEQ ID NO: 78809 - RNA, 19 nt, Artificial Sequence
  Description of Artificial Sequence: Synthetic oligonucleotide
gguaagaguagauucuucu

SEQ ID NO: 78810 - RNA, 19 nt, Artificial Sequence
  Description of Artificial Sequence: Synthetic oligonucleotide
guagaaguggcgcugaguu

SEQ ID NO: 78811 - RNA, 19 nt, Artificial Sequence
  Description of Artificial Sequence: Synthetic oligonucleotide
cucuaacguugucaucucc

SEQ ID NO: 78812 - RNA, 19 nt, Artificial Sequence
  Description of Artificial Sequence: Synthetic oligonucleotide
agcuguuggcagcuuucuc

SEQ ID NO: 78813 - RNA, 19 nt, Artificial Sequence
  Description of Artificial Sequence: Synthetic oligonucleotide
accugcagguggaaugacc

SEQ ID NO: 78814 - RNA, 19 nt, Artificial Sequence
  Description of Artificial Sequence: Synthetic oligonucleotide
cauuuacccacaggcaaac

SEQ ID NO: 78815 - RNA, 19 nt, Artificial Sequence
  Description of Artificial Sequence: Synthetic oligonucleotide
ugucuaaacugagcacccc

SEQ ID NO: 78816 - RNA, 19 nt, Artificial Sequence
  Description of Artificial Sequence: Synthetic oligonucleotide
cgagguaccaccuccaaac

SEQ ID NO: 78817 - RNA, 19 nt, Artificial Sequence
  Description of Artificial Sequence: Synthetic oligonucleotide
ucugacgagguaccaccuc

SEQ ID NO: 78818 - RNA, 19 nt, Artificial Sequence
  Description of Artificial Sequence: Synthetic oligonucleotide
ccaaucuguacugggaagg

SEQ ID NO: 78819 - RNA, 19 nt, Artificial Sequence
  Description of Artificial Sequence: Synthetic oligonucleotide
augaaaggcuuugggcuag

SEQ ID NO: 78820 - RNA, 19 nt, Artificial Sequence
  Description of Artificial Sequence: Synthetic oligonucleotide
agcacacguuuauugugcu

SEQ ID NO: 78821 - RNA, 19 nt, Artificial Sequence
  Description of Artificial Sequence: Synthetic oligonucleotide
acacguuuauugugcuuca

SEQ ID NO: 78822 - RNA, 19 nt, Artificial Sequence
  Description of Artificial Sequence: Synthetic oligonucleotide
aguggggauacaggagggg

SEQ ID NO: 78823 - RNA, 19 nt, Artificial Sequence
  Description of Artificial Sequence: Synthetic oligonucleotide
gcgauuggcuucucgaagc

SEQ ID NO: 78824 - RNA, 19 nt, Artificial Sequence
  Description of Artificial Sequence: Synthetic oligonucleotide
cauuaccaggucuccaaca

SEQ ID NO: 78825 - RNA, 19 nt, Artificial Sequence
  Description of Artificial Sequence: Synthetic oligonucleotide
gacuuugcgcugaggguag

SEQ ID NO: 78826 - RNA, 19 nt, Artificial Sequence
  Description of Artificial Sequence: Synthetic oligonucleotide
gaguugaaccaugacucuc

SEQ ID NO: 78827 - RNA, 19 nt, Artificial Sequence
  Description of Artificial Sequence: Synthetic oligonucleotide
acucuagacaugggcauca

SEQ ID NO: 78828 - RNA, 19 nt, Artificial Sequence
  Description of Artificial Sequence: Synthetic oligonucleotide
cuagaucauuucacucaug

SEQ ID NO: 78829 - RNA, 19 nt, Artificial Sequence
  Description of Artificial Sequence: Synthetic oligonucleotide
ucucuaacguugucaucuc

SEQ ID NO: 78830 - RNA, 19 nt, Artificial Sequence
  Description of Artificial Sequence: Synthetic oligonucleotide
gccccuaagggcaaaaccc

SEQ ID NO: 78831 - RNA, 19 nt, Artificial Sequence
  Description of Artificial Sequence: Synthetic oligonucleotide
ggcaaaacccaccccuugc

SEQ ID NO: 78832 - RNA, 19 nt, Artificial Sequence
  Description of Artificial Sequence: Synthetic oligonucleotide
cagcaguagcauugagggg

SEQ ID NO: 78833 - RNA, 19 nt, Artificial Sequence
  Description of Artificial Sequence: Synthetic oligonucleotide
ggcgauuggcuucucgaag

SEQ ID NO: 78834 - RNA, 19 nt, Artificial Sequence
  Description of Artificial Sequence: Synthetic oligonucleotide
uuuaggucucucugccaau

SEQ ID NO: 78835 - RNA, 19 nt, Artificial Sequence
  Description of Artificial Sequence: Synthetic oligonucleotide
aagccguucaggccauuuu

SEQ ID NO: 78836 - RNA, 19 nt, Artificial Sequence
  Description of Artificial Sequence: Synthetic oligonucleotide
uggaggcgagacagugggg

SEQ ID NO: 78837 - RNA, 19 nt, Artificial Sequence
  Description of Artificial Sequence: Synthetic oligonucleotide
caaauacccgaagauccuc

SEQ ID NO: 78838 - RNA, 19 nt, Artificial Sequence
  Description of Artificial Sequence: Synthetic oligonucleotide
uccugcuacaggugcaaua

SEQ ID NO: 78839 - RNA, 19 nt, Artificial Sequence
  Description of Artificial Sequence: Synthetic oligonucleotide
ggcuguagcgguuaaaggu

SEQ ID NO: 78840 - RNA, 19 nt, Artificial Sequence
  Description of Artificial Sequence: Synthetic oligonucleotide
uccguaguagucucuucuu

SEQ ID NO: 78841 - RNA, 19 nt, Artificial Sequence
  Description of Artificial Sequence: Synthetic oligonucleotide
ccaagcuugguaagaguag

SEQ ID NO: 78842 - RNA, 19 nt, Artificial Sequence
  Description of Artificial Sequence: Synthetic oligonucleotide
cucacaguagauagcacgu

SEQ ID NO: 78843 - RNA, 19 nt, Artificial Sequence
  Description of Artificial Sequence: Synthetic oligonucleotide
ucgccuugaaguccacauc

SEQ ID NO: 78844 - RNA, 19 nt, Artificial Sequence
  Description of Artificial Sequence: Synthetic oligonucleotide
cgcaugaaccauaagaaca

SEQ ID NO: 78845 - RNA, 19 nt, Artificial Sequence
  Description of Artificial Sequence: Synthetic oligonucleotide
accuaucuccucuaccauu

SEQ ID NO: 78846 - RNA, 19 nt, Artificial Sequence
  Description of Artificial Sequence: Synthetic oligonucleotide
cacuuucgccuugaagucc

SEQ ID NO: 78847 - RNA, 19 nt, Artificial Sequence
  Description of Artificial Sequence: Synthetic oligonucleotide
gcaaaacccaccccuugcc

SEQ ID NO: 78848 - RNA, 19 nt, Artificial Sequence
  Description of Artificial Sequence: Synthetic oligonucleotide
acuuucgccuugaagucca

SEQ ID NO: 78849 - RNA, 19 nt, Artificial Sequence
  Description of Artificial Sequence: Synthetic oligonucleotide
agucgggauauuucuugaa

SEQ ID NO: 78850 - RNA, 19 nt, Artificial Sequence
  Description of Artificial Sequence: Synthetic oligonucleotide
guagcgguuaaaggugaug

SEQ ID NO: 78851 - RNA, 19 nt, Artificial Sequence
  Description of Artificial Sequence: Synthetic oligonucleotide
ggauauuucuugaagcucu

SEQ ID NO: 78852 - RNA, 19 nt, Artificial Sequence
  Description of Artificial Sequence: Synthetic oligonucleotide
aggagauuauccagagcug

SEQ ID NO: 78853 - RNA, 19 nt, Artificial Sequence
  Description of Artificial Sequence: Synthetic oligonucleotide
acucauagucgggauauuu

SEQ ID NO: 78854 - RNA, 19 nt, Artificial Sequence
  Description of Artificial Sequence: Synthetic oligonucleotide
cuggggauaaggauuccaa

SEQ ID NO: 78855 - RNA, 19 nt, Artificial Sequence
  Description of Artificial Sequence: Synthetic oligonucleotide
gguacucaggcugguagag

SEQ ID NO: 78856 - RNA, 19 nt, Artificial Sequence
  Description of Artificial Sequence: Synthetic oligonucleotide
ugccaaccacuuccgcuug

SEQ ID NO: 78857 - RNA, 19 nt, Artificial Sequence
  Description of Artificial Sequence: Synthetic oligonucleotide
gccugcaagauacuugcac

SEQ ID NO: 78858 - RNA, 19 nt, Artificial Sequence
  Description of Artificial Sequence: Synthetic oligonucleotide
ggauaugguguugccaagc

SEQ ID NO: 78859 - RNA, 19 nt, Artificial Sequence
  Description of Artificial Sequence: Synthetic oligonucleotide
ugaaagccguucaggccau

SEQ ID NO: 78860 - RNA, 19 nt, Artificial Sequence
  Description of Artificial Sequence: Synthetic oligonucleotide
gagccaaauacccgaagau

SEQ ID NO: 78861 - RNA, 19 nt, Artificial Sequence
  Description of Artificial Sequence: Synthetic oligonucleotide
cuuugcgcugaggguaggg

SEQ ID NO: 78862 - RNA, 19 nt, Artificial Sequence
  Description of Artificial Sequence: Synthetic oligonucleotide
acaguagauagcacguuuu

SEQ ID NO: 78863 - RNA, 19 nt, Artificial Sequence
  Description of Artificial Sequence: Synthetic oligonucleotide
cuugggucguggccggggc

SEQ ID NO: 78864 - RNA, 19 nt, Artificial Sequence
  Description of Artificial Sequence: Synthetic oligonucleotide
ccaucaagcccucaaucug

SEQ ID NO: 78865 - RNA, 19 nt, Artificial Sequence
  Description of Artificial Sequence: Synthetic oligonucleotide
ccugcuacaggugcaauac

SEQ ID NO: 78866 - RNA, 19 nt, Artificial Sequence
  Description of Artificial Sequence: Synthetic oligonucleotide
aaagccguucaggccauuu

SEQ ID NO: 78867 - RNA, 19 nt, Artificial Sequence
  Description of Artificial Sequence: Synthetic oligonucleotide
guaccucacgguccagggc

SEQ ID NO: 78868 - RNA, 19 nt, Artificial Sequence
  Description of Artificial Sequence: Synthetic oligonucleotide
aagugccugcaagauacuu

SEQ ID NO: 78869 - RNA, 19 nt, Artificial Sequence
  Description of Artificial Sequence: Synthetic oligonucleotide
gagauuauccagagcugaa

SEQ ID NO: 78870 - RNA, 19 nt, Artificial Sequence
  Description of Artificial Sequence: Synthetic oligonucleotide
cuguagcgguuaaagguga

SEQ ID NO: 78871 - RNA, 19 nt, Artificial Sequence
  Description of Artificial Sequence: Synthetic oligonucleotide
ggcgcaugaaccauaagaa

SEQ ID NO: 78872 - RNA, 19 nt, Artificial Sequence
  Description of Artificial Sequence: Synthetic oligonucleotide
aaaggggcucacaguagau

SEQ ID NO: 78873 - RNA, 19 nt, Artificial Sequence
  Description of Artificial Sequence: Synthetic oligonucleotide
cuuuuagcuucacuguagu

SEQ ID NO: 78874 - RNA, 19 nt, Artificial Sequence
  Description of Artificial Sequence: Synthetic oligonucleotide
aagacgguuuuaaggcgau

SEQ ID NO: 78875 - RNA, 19 nt, Artificial Sequence
  Description of Artificial Sequence: Synthetic oligonucleotide
agcuugguaagaguagauu

SEQ ID NO: 78876 - RNA, 19 nt, Artificial Sequence
  Description of Artificial Sequence: Synthetic oligonucleotide
auccagagcugaaagccgu

SEQ ID NO: 78877 - RNA, 19 nt, Artificial Sequence
  Description of Artificial Sequence: Synthetic oligonucleotide
gacuuucucuaacguuguc

SEQ ID NO: 78878 - RNA, 19 nt, Artificial Sequence
  Description of Artificial Sequence: Synthetic oligonucleotide
acgagguaccaccuccaaa

SEQ ID NO: 78879 - RNA, 19 nt, Artificial Sequence
  Description of Artificial Sequence: Synthetic oligonucleotide
gaagaccgcuucuguccug

SEQ ID NO: 78880 - RNA, 19 nt, Artificial Sequence
  Description of Artificial Sequence: Synthetic oligonucleotide
ggcacucuagacaugggca

SEQ ID NO: 78881 - RNA, 19 nt, Artificial Sequence
  Description of Artificial Sequence: Synthetic oligonucleotide
uagaaguggcgcugaguuu

SEQ ID NO: 78882 - RNA, 19 nt, Artificial Sequence
  Description of Artificial Sequence: Synthetic oligonucleotide
agcauugaggggagguucu

SEQ ID NO: 78883 - RNA, 19 nt, Artificial Sequence
  Description of Artificial Sequence: Synthetic oligonucleotide
aggcacucuuucaaacaag

SEQ ID NO: 78884 - RNA, 19 nt, Artificial Sequence
  Description of Artificial Sequence: Synthetic oligonucleotide
cucuagugucccaaaauau

SEQ ID NO: 78885 - RNA, 19 nt, Artificial Sequence
  Description of Artificial Sequence: Synthetic oligonucleotide
gaacacgaguggccccacc

SEQ ID NO: 78886 - RNA, 19 nt, Artificial Sequence
  Description of Artificial Sequence: Synthetic oligonucleotide
gcgcaugaaccauaagaac

SEQ ID NO: 78887 - RNA, 19 nt, Artificial Sequence
  Description of Artificial Sequence: Synthetic oligonucleotide
ugguuccguaguagucucu

SEQ ID NO: 78888 - RNA, 19 nt, Artificial Sequence
  Description of Artificial Sequence: Synthetic oligonucleotide
gagguucuguccgggugcc

SEQ ID NO: 78889 - RNA, 19 nt, Artificial Sequence
  Description of Artificial Sequence: Synthetic oligonucleotide
uccgaaccccucguccucc

SEQ ID NO: 78890 - RNA, 19 nt, Artificial Sequence
  Description of Artificial Sequence: Synthetic oligonucleotide
agacuacagcccaaucugu

SEQ ID NO: 78891 - RNA, 19 nt, Artificial Sequence
  Description of Artificial Sequence: Synthetic oligonucleotide
auuagcgcucaagacgguu

SEQ ID NO: 78892 - RNA, 19 nt, Artificial Sequence
  Description of Artificial Sequence: Synthetic oligonucleotide
uucuguccgggugccauuc

SEQ ID NO: 78893 - RNA, 19 nt, Artificial Sequence
  Description of Artificial Sequence: Synthetic oligonucleotide
ccaugugacauuagcgcuc

SEQ ID NO: 78894 - RNA, 19 nt, Artificial Sequence
  Description of Artificial Sequence: Synthetic oligonucleotide
acacuggcccaaacaggac

SEQ ID NO: 78895 - RNA, 19 nt, Artificial Sequence
  Description of Artificial Sequence: Synthetic oligonucleotide
ggcuccgaaccccucgucc

SEQ ID NO: 78896 - RNA, 19 nt, Artificial Sequence
  Description of Artificial Sequence: Synthetic oligonucleotide
cuuggccauagcacgugga

SEQ ID NO: 78897 - RNA, 19 nt, Artificial Sequence
  Description of Artificial Sequence: Synthetic oligonucleotide
cccaaucuguacugggaag

SEQ ID NO: 78898 - RNA, 19 nt, Artificial Sequence
  Description of Artificial Sequence: Synthetic oligonucleotide
ucacaguagauagcacguu

SEQ ID NO: 78899 - RNA, 19 nt, Artificial Sequence
  Description of Artificial Sequence: Synthetic oligonucleotide
cacguuuauugugcuucag

SEQ ID NO: 78900 - RNA, 19 nt, Artificial Sequence
  Description of Artificial Sequence: Synthetic oligonucleotide
ugagcaccccacucucauc

SEQ ID NO: 78901 - RNA, 19 nt, Artificial Sequence
  Description of Artificial Sequence: Synthetic oligonucleotide
gcuaaugaaagaacucaaa

SEQ ID NO: 78902 - RNA, 19 nt, Artificial Sequence
  Description of Artificial Sequence: Synthetic oligonucleotide
ugguaaacuuggccuuauu

SEQ ID NO: 78903 - RNA, 19 nt, Artificial Sequence
  Description of Artificial Sequence: Synthetic oligonucleotide
ggagugguugaggagauua

SEQ ID NO: 78904 - RNA, 19 nt, Artificial Sequence
  Description of Artificial Sequence: Synthetic oligonucleotide
caucacaguuguggcuccg

SEQ ID NO: 78905 - RNA, 19 nt, Artificial Sequence
  Description of Artificial Sequence: Synthetic oligonucleotide
cuacagcccaaucuguacu

SEQ ID NO: 78906 - RNA, 19 nt, Artificial Sequence
  Description of Artificial Sequence: Synthetic oligonucleotide
auuuacccacaggcaaaca

SEQ ID NO: 78907 - RNA, 19 nt, Artificial Sequence
  Description of Artificial Sequence: Synthetic oligonucleotide
gggguuauaguucaucauu

SEQ ID NO: 78908 - RNA, 19 nt, Artificial Sequence
  Description of Artificial Sequence: Synthetic oligonucleotide
gcacacaacuccucgaacu

SEQ ID NO: 78909 - RNA, 19 nt, Artificial Sequence
  Description of Artificial Sequence: Synthetic oligonucleotide
agagucuguugguuccgua

SEQ ID NO: 78910 - RNA, 19 nt, Artificial Sequence
  Description of Artificial Sequence: Synthetic oligonucleotide
accugucuaaccagccuga

SEQ ID NO: 78911 - RNA, 19 nt, Artificial Sequence
  Description of Artificial Sequence: Synthetic oligonucleotide
cacguggauuuucccgaac

SEQ ID NO: 78912 - RNA, 19 nt, Artificial Sequence
  Description of Artificial Sequence: Synthetic oligonucleotide
gacgagguaccaccuccaa

SEQ ID NO: 78913 - RNA, 19 nt, Artificial Sequence
  Description of Artificial Sequence: Synthetic oligonucleotide
cuaaacugagcaccccacu

SEQ ID NO: 78914 - RNA, 19 nt, Artificial Sequence
  Description of Artificial Sequence: Synthetic oligonucleotide
uggccauagcacguggauu

SEQ ID NO: 78915 - RNA, 19 nt, Artificial Sequence
  Description of Artificial Sequence: Synthetic oligonucleotide
uccgggugccauucuuguc

SEQ ID NO: 78916 - RNA, 19 nt, Artificial Sequence
  Description of Artificial Sequence: Synthetic oligonucleotide
gggcaaaacccaccccuug

SEQ ID NO: 78917 - RNA, 19 nt, Artificial Sequence
  Description of Artificial Sequence: Synthetic oligonucleotide
ggcgagacaguggggauac

SEQ ID NO: 78918 - RNA, 19 nt, Artificial Sequence
  Description of Artificial Sequence: Synthetic oligonucleotide
ggcacccuugaggaaaaug

SEQ ID NO: 78919 - RNA, 19 nt, Artificial Sequence
  Description of Artificial Sequence: Synthetic oligonucleotide
cauucuucgaagaccgcuu

SEQ ID NO: 78920 - RNA, 19 nt, Artificial Sequence
  Description of Artificial Sequence: Synthetic oligonucleotide
guagggccccauucgggga

SEQ ID NO: 78921 - RNA, 19 nt, Artificial Sequence
  Description of Artificial Sequence: Synthetic oligonucleotide
cuguugguuccguaguagu

SEQ ID NO: 78922 - RNA, 19 nt, Artificial Sequence
  Description of Artificial Sequence: Synthetic oligonucleotide
gucucuagucccucagagu

SEQ ID NO: 78923 - RNA, 19 nt, Artificial Sequence
  Description of Artificial Sequence: Synthetic oligonucleotide
cugugccaugugacauuag

SEQ ID NO: 78924 - RNA, 19 nt, Artificial Sequence
  Description of Artificial Sequence: Synthetic oligonucleotide
caguagggcuuuccucuuc

SEQ ID NO: 78925 - RNA, 19 nt, Artificial Sequence
  Description of Artificial Sequence: Synthetic oligonucleotide
acuuugcgcugaggguagg

SEQ ID NO: 78926 - RNA, 19 nt, Artificial Sequence
  Description of Artificial Sequence: Synthetic oligonucleotide
cugcuuccgggcagguuuc

SEQ ID NO: 78927 - RNA, 19 nt, Artificial Sequence
  Description of Artificial Sequence: Synthetic oligonucleotide
cuuucgccuugaaguccac

SEQ ID NO: 78928 - RNA, 19 nt, Artificial Sequence
  Description of Artificial Sequence: Synthetic oligonucleotide
cacucuagugucccaaaau

SEQ ID NO: 78929 - RNA, 19 nt, Artificial Sequence
  Description of Artificial Sequence: Synthetic oligonucleotide
gccccauucggggagaaga

SEQ ID NO: 78930 - RNA, 19 nt, Artificial Sequence
  Description of Artificial Sequence: Synthetic oligonucleotide
ccauuaccaggucuccaac

SEQ ID NO: 78931 - RNA, 19 nt, Artificial Sequence
  Description of Artificial Sequence: Synthetic oligonucleotide
guagcccuagcuccugcua

SEQ ID NO: 78932 - RNA, 19 nt, Artificial Sequence
  Description of Artificial Sequence: Synthetic oligonucleotide
cgguuuuaaggcgauuggc

SEQ ID NO: 78933 - RNA, 19 nt, Artificial Sequence
  Description of Artificial Sequence: Synthetic oligonucleotide
ccccauucggggagaagag

SEQ ID NO: 78934 - RNA, 19 nt, Artificial Sequence
  Description of Artificial Sequence: Synthetic oligonucleotide
guaagaggcuuccccuccu

SEQ ID NO: 78935 - RNA, 19 nt, Artificial Sequence
  Description of Artificial Sequence: Synthetic oligonucleotide
cuccgaaccccucguccuc

SEQ ID NO: 78936 - RNA, 19 nt, Artificial Sequence
  Description of Artificial Sequence: Synthetic oligonucleotide
ggcacucuuucaaacaagu

SEQ ID NO: 78937 - RNA, 19 nt, Artificial Sequence
  Description of Artificial Sequence: Synthetic oligonucleotide
ccacccugucuaaacugag

SEQ ID NO: 78938 - RNA, 19 nt, Artificial Sequence
  Description of Artificial Sequence: Synthetic oligonucleotide
cuucgaagaccgcuucugu

SEQ ID NO: 78939 - RNA, 19 nt, Artificial Sequence
  Description of Artificial Sequence: Synthetic oligonucleotide
cacuuccgcuugcuccagc

SEQ ID NO: 78940 - RNA, 19 nt, Artificial Sequence
  Description of Artificial Sequence: Synthetic oligonucleotide
ggaguugaaccaugacucu

SEQ ID NO: 78941 - RNA, 19 nt, Artificial Sequence
  Description of Artificial Sequence: Synthetic oligonucleotide
acaaccacuggcagccauu

SEQ ID NO: 78942 - RNA, 19 nt, Artificial Sequence
  Description of Artificial Sequence: Synthetic oligonucleotide
gcgguuaaaggugaugacu

SEQ ID NO: 78943 - RNA, 19 nt, Artificial Sequence
  Description of Artificial Sequence: Synthetic oligonucleotide
uggcuccgaaccccucguc

SEQ ID NO: 78944 - RNA, 19 nt, Artificial Sequence
  Description of Artificial Sequence: Synthetic oligonucleotide
ccauaagaacauauuuacu

SEQ ID NO: 78945 - RNA, 19 nt, Artificial Sequence
  Description of Artificial Sequence: Synthetic oligonucleotide
caguagcauugaggggagg

SEQ ID NO: 78946 - RNA, 19 nt, Artificial Sequence
  Description of Artificial Sequence: Synthetic oligonucleotide
guggccggggcuugguaaa

SEQ ID NO: 78947 - RNA, 19 nt, Artificial Sequence
  Description of Artificial Sequence: Synthetic oligonucleotide
ccugcagguggaaugaccu

SEQ ID NO: 78948 - RNA, 19 nt, Artificial Sequence
  Description of Artificial Sequence: Synthetic oligonucleotide
uccuugggucguggccggg

SEQ ID NO: 78949 - RNA, 19 nt, Artificial Sequence
  Description of Artificial Sequence: Synthetic oligonucleotide
gguuugcuuugucccagaa

SEQ ID NO: 78950 - RNA, 19 nt, Artificial Sequence
  Description of Artificial Sequence: Synthetic oligonucleotide
ugggucguggccggggcuu

SEQ ID NO: 78951 - RNA, 19 nt, Artificial Sequence
  Description of Artificial Sequence: Synthetic oligonucleotide
ucucggcacucuggagggc

SEQ ID NO: 78952 - RNA, 19 nt, Artificial Sequence
  Description of Artificial Sequence: Synthetic oligonucleotide
gcacucuuucaaacaaguc

SEQ ID NO: 78953 - RNA, 19 nt, Artificial Sequence
  Description of Artificial Sequence: Synthetic oligonucleotide
cagaacgagccagcucauc

SEQ ID NO: 78954 - RNA, 19 nt, Artificial Sequence
  Description of Artificial Sequence: Synthetic oligonucleotide
cgcucaagacgguuuuaag

SEQ ID NO: 78955 - RNA, 19 nt, Artificial Sequence
  Description of Artificial Sequence: Synthetic oligonucleotide
agggcaaaacccaccccuu

SEQ ID NO: 78956 - RNA, 19 nt, Artificial Sequence
  Description of Artificial Sequence: Synthetic oligonucleotide
aggcgagacaguggggaua

SEQ ID NO: 78957 - RNA, 19 nt, Artificial Sequence
  Description of Artificial Sequence: Synthetic oligonucleotide
gcacucuagugucccaaaa

SEQ ID NO: 78958 - RNA, 19 nt, Artificial Sequence
  Description of Artificial Sequence: Synthetic oligonucleotide
ggcccaaacaggacacuga

SEQ ID NO: 78959 - RNA, 19 nt, Artificial Sequence
  Description of Artificial Sequence: Synthetic oligonucleotide
gaggcgagacaguggggau

SEQ ID NO: 78960 - RNA, 19 nt, Artificial Sequence
  Description of Artificial Sequence: Synthetic oligonucleotide
caucaguaccauucucuuu

SEQ ID NO: 78961 - RNA, 19 nt, Artificial Sequence
  Description of Artificial Sequence: Synthetic oligonucleotide
uggccuuauugagcagaua

SEQ ID NO: 78962 - RNA, 19 nt, Artificial Sequence
  Description of Artificial Sequence: Synthetic oligonucleotide
ccggggcuugguaaacuug

SEQ ID NO: 78963 - RNA, 19 nt, Artificial Sequence
  Description of Artificial Sequence: Synthetic oligonucleotide
acagaacgagccagcucau

SEQ ID NO: 78964 - RNA, 19 nt, Artificial Sequence
  Description of Artificial Sequence: Synthetic oligonucleotide
caccguaguugaugugaaa

SEQ ID NO: 78965 - RNA, 19 nt, Artificial Sequence
  Description of Artificial Sequence: Synthetic oligonucleotide
uuaaggcgauuggcuucuc

SEQ ID NO: 78966 - RNA, 19 nt, Artificial Sequence
  Description of Artificial Sequence: Synthetic oligonucleotide
cauuucacucauggagcua

SEQ ID NO: 78967 - RNA, 19 nt, Artificial Sequence
  Description of Artificial Sequence: Synthetic oligonucleotide
cugagagugaggugacauu

SEQ ID NO: 78968 - RNA, 19 nt, Artificial Sequence
  Description of Artificial Sequence: Synthetic oligonucleotide
gggacuauauaggaccuuu

SEQ ID NO: 78969 - RNA, 19 nt, Artificial Sequence
  Description of Artificial Sequence: Synthetic oligonucleotide
cccuagcuccugcuacagg

SEQ ID NO: 78970 - RNA, 19 nt, Artificial Sequence
  Description of Artificial Sequence: Synthetic oligonucleotide
cgggauauuucuugaagcu

SEQ ID NO: 78971 - RNA, 19 nt, Artificial Sequence
  Description of Artificial Sequence: Synthetic oligonucleotide
acagcccuuggcacaguuu

SEQ ID NO: 78972 - RNA, 19 nt, Artificial Sequence
  Description of Artificial Sequence: Synthetic oligonucleotide
ccgaacauccuuggcuuuc

SEQ ID NO: 78973 - RNA, 19 nt, Artificial Sequence
  Description of Artificial Sequence: Synthetic oligonucleotide
cucgagucacuuucgccuu

SEQ ID NO: 78974 - RNA, 19 nt, Artificial Sequence
  Description of Artificial Sequence: Synthetic oligonucleotide
ggggcgcaugaaccauaag

SEQ ID NO: 78975 - RNA, 19 nt, Artificial Sequence
  Description of Artificial Sequence: Synthetic oligonucleotide
agacgguuuuaaggcgauu

SEQ ID NO: 78976 - RNA, 19 nt, Artificial Sequence
  Description of Artificial Sequence: Synthetic oligonucleotide
agcgcucaagacgguuuua

SEQ ID NO: 78977 - RNA, 19 nt, Artificial Sequence
  Description of Artificial Sequence: Synthetic oligonucleotide
cucuuucgguucagauucu

SEQ ID NO: 78978 - RNA, 19 nt, Artificial Sequence
  Description of Artificial Sequence: Synthetic oligonucleotide
gcgcucaagacgguuuuaa

SEQ ID NO: 78979 - RNA, 19 nt, Artificial Sequence
  Description of Artificial Sequence: Synthetic oligonucleotide
cgguuaaaggugaugacuu

SEQ ID NO: 78980 - RNA, 19 nt, Artificial Sequence
  Description of Artificial Sequence: Synthetic oligonucleotide
caccuaucuccucuaccau

SEQ ID NO: 78981 - RNA, 19 nt, Artificial Sequence
  Description of Artificial Sequence: Synthetic oligonucleotide
cauuagcgcucaagacggu

SEQ ID NO: 78982 - RNA, 19 nt, Artificial Sequence
  Description of Artificial Sequence: Synthetic oligonucleotide
gcacguggauuuucccgaa

SEQ ID NO: 78983 - RNA, 19 nt, Artificial Sequence
  Description of Artificial Sequence: Synthetic oligonucleotide
gcccaggcacucuuucaaa

SEQ ID NO: 78984 - RNA, 19 nt, Artificial Sequence
  Description of Artificial Sequence: Synthetic oligonucleotide
gggcacucuagugucccaa

SEQ ID NO: 78985 - RNA, 19 nt, Artificial Sequence
  Description of Artificial Sequence: Synthetic oligonucleotide
gguuccguaguagucucuu

SEQ ID NO: 78986 - RNA, 19 nt, Artificial Sequence
  Description of Artificial Sequence: Synthetic oligonucleotide
gccguucaggccauuuucu

SEQ ID NO: 78987 - RNA, 19 nt, Artificial Sequence
  Description of Artificial Sequence: Synthetic oligonucleotide
ggaacacgaguggccccac

SEQ ID NO: 78988 - RNA, 19 nt, Artificial Sequence
  Description of Artificial Sequence: Synthetic oligonucleotide
guucuguccgggugccauu

SEQ ID NO: 78989 - RNA, 19 nt, Artificial Sequence
  Description of Artificial Sequence: Synthetic oligonucleotide
ccccucaguagggcuuucc

SEQ ID NO: 78990 - RNA, 19 nt, Artificial Sequence
  Description of Artificial Sequence: Synthetic oligonucleotide
gccccaacccugauguaua

SEQ ID NO: 78991 - RNA, 19 nt, Artificial Sequence
  Description of Artificial Sequence: Synthetic oligonucleotide
gcgcugaggguagggcccc

SEQ ID NO: 78992 - RNA, 19 nt, Artificial Sequence
  Description of Artificial Sequence: Synthetic oligonucleotide
cugcagguggaaugaccuu

SEQ ID NO: 78993 - RNA, 19 nt, Artificial Sequence
  Description of Artificial Sequence: Synthetic oligonucleotide
cucguccuccagccaggua

SEQ ID NO: 78994 - RNA, 19 nt, Artificial Sequence
  Description of Artificial Sequence: Synthetic oligonucleotide
cccucaguagggcuuuccu

SEQ ID NO: 78995 - RNA, 19 nt, Artificial Sequence
  Description of Artificial Sequence: Synthetic oligonucleotide
cgaagaccgcuucuguccu

SEQ ID NO: 78996 - RNA, 19 nt, Artificial Sequence
  Description of Artificial Sequence: Synthetic oligonucleotide
ccguaguagucucuucuuu

SEQ ID NO: 78997 - RNA, 19 nt, Artificial Sequence
  Description of Artificial Sequence: Synthetic oligonucleotide
ccugucuaaccagccugaa

SEQ ID NO: 78998 - RNA, 19 nt, Artificial Sequence
  Description of Artificial Sequence: Synthetic oligonucleotide
gccggggcuugguaaacuu

SEQ ID NO: 78999 - RNA, 19 nt, Artificial Sequence
  Description of Artificial Sequence: Synthetic oligonucleotide
ccaaccacuuccgcuugcu

SEQ ID NO: 79000 - RNA, 19 nt, Artificial Sequence
  Description of Artificial Sequence: Synthetic oligonucleotide
gucguggccggggcuuggu

SEQ ID NO: 79001 - RNA, 19 nt, Artificial Sequence
  Description of Artificial Sequence: Synthetic oligonucleotide
ggggacuauauaggaccuu

SEQ ID NO: 79002 - RNA, 19 nt, Artificial Sequence
  Description of Artificial Sequence: Synthetic oligonucleotide
ccgggcagguuucugcuuu

SEQ ID NO: 79003 - RNA, 19 nt, Artificial Sequence
  Description of Artificial Sequence: Synthetic oligonucleotide
cccuccuagcaaguacacu

SEQ ID NO: 79004 - RNA, 19 nt, Artificial Sequence
  Description of Artificial Sequence: Synthetic oligonucleotide
gcgagacaguggggauaca

SEQ ID NO: 79005 - RNA, 19 nt, Artificial Sequence
  Description of Artificial Sequence: Synthetic oligonucleotide
cccgaacauccuuggcuuu

SEQ ID NO: 79006 - RNA, 19 nt, Artificial Sequence
  Description of Artificial Sequence: Synthetic oligonucleotide
gggugccauucuuguccuu

SEQ ID NO: 79007 - RNA, 19 nt, Artificial Sequence
  Description of Artificial Sequence: Synthetic oligonucleotide
ccucguccuccagccaggu

SEQ ID NO: 79008 - RNA, 19 nt, Artificial Sequence
  Description of Artificial Sequence: Synthetic oligonucleotide
aauuauauccaucaggagg

SEQ ID NO: 79009 - RNA, 19 nt, Artificial Sequence
  Description of Artificial Sequence: Synthetic oligonucleotide
aaaagauuacaucagauca

SEQ ID NO: 79010 - RNA, 19 nt, Artificial Sequence
  Description of Artificial Sequence: Synthetic oligonucleotide
aguuaucuagauuaguugc

SEQ ID NO: 79011 - RNA, 19 nt, Artificial Sequence
  Description of Artificial Sequence: Synthetic oligonucleotide
aaucagugaucuuagaaag

SEQ ID NO: 79012 - RNA, 19 nt, Artificial Sequence
  Description of Artificial Sequence: Synthetic oligonucleotide
acaugugaaacaaagauac

SEQ ID NO: 79013 - RNA, 19 nt, Artificial Sequence
  Description of Artificial Sequence: Synthetic oligonucleotide
ugaaauaaaagugagucug

SEQ ID NO: 79014 - RNA, 19 nt, Artificial Sequence
  Description of Artificial Sequence: Synthetic oligonucleotide
cauguuaaugcaaaguagg

SEQ ID NO: 79015 - RNA, 19 nt, Artificial Sequence
  Description of Artificial Sequence: Synthetic oligonucleotide
aucagugucuguuagacuc

SEQ ID NO: 79016 - RNA, 19 nt, Artificial Sequence
  Description of Artificial Sequence: Synthetic oligonucleotide
augaauaggagucgcaggc

SEQ ID NO: 79017 - RNA, 19 nt, Artificial Sequence
  Description of Artificial Sequence: Synthetic oligonucleotide
aaacguacaagaaaauuac

SEQ ID NO: 79018 - RNA, 19 nt, Artificial Sequence
  Description of Artificial Sequence: Synthetic oligonucleotide
aaauuaaaggugcugguga

SEQ ID NO: 79019 - RNA, 19 nt, Artificial Sequence
  Description of Artificial Sequence: Synthetic oligonucleotide
ggcauuacaacuuaaagcc

SEQ ID NO: 79020 - RNA, 19 nt, Artificial Sequence
  Description of Artificial Sequence: Synthetic oligonucleotide
aagauuacaucagaucagc

SEQ ID NO: 79021 - RNA, 19 nt, Artificial Sequence
  Description of Artificial Sequence: Synthetic oligonucleotide
uagaaaguagaucaagacc

SEQ ID NO: 79022 - RNA, 19 nt, Artificial Sequence
  Description of Artificial Sequence: Synthetic oligonucleotide
uguagugucuguuacacug

SEQ ID NO: 79023 - RNA, 19 nt, Artificial Sequence
  Description of Artificial Sequence: Synthetic oligonucleotide
cuaagcuuagguaacagag

SEQ ID NO: 79024 - RNA, 19 nt, Artificial Sequence
  Description of Artificial Sequence: Synthetic oligonucleotide
aguacugccuauaauaccc

SEQ ID NO: 79025 - RNA, 19 nt, Artificial Sequence
  Description of Artificial Sequence: Synthetic oligonucleotide
uuuaggaucucugacagcc

SEQ ID NO: 79026 - RNA, 19 nt, Artificial Sequence
  Description of Artificial Sequence: Synthetic oligonucleotide
aaguacugccuauaauacc

SEQ ID NO: 79027 - RNA, 19 nt, Artificial Sequence
  Description of Artificial Sequence: Synthetic oligonucleotide
gaaauuauauccaucagga

SEQ ID NO: 79028 - RNA, 19 nt, Artificial Sequence
  Description of Artificial Sequence: Synthetic oligonucleotide
acaaagauacuucagugug

SEQ ID NO: 79029 - RNA, 19 nt, Artificial Sequence
  Description of Artificial Sequence: Synthetic oligonucleotide
caagcacgaaauuauaucc

SEQ ID NO: 79030 - RNA, 19 nt, Artificial Sequence
  Description of Artificial Sequence: Synthetic oligonucleotide
acaagcacgaaauuauauc

SEQ ID NO: 79031 - RNA, 19 nt, Artificial Sequence
  Description of Artificial Sequence: Synthetic oligonucleotide
aacauuggacaauauuaag

SEQ ID NO: 79032 - RNA, 19 nt, Artificial Sequence
  Description of Artificial Sequence: Synthetic oligonucleotide
agaaaguagaucaagaccu

SEQ ID NO: 79033 - RNA, 19 nt, Artificial Sequence
  Description of Artificial Sequence: Synthetic oligonucleotide
guaagcuauaaaaugaugc

SEQ ID NO: 79034 - RNA, 19 nt, Artificial Sequence
  Description of Artificial Sequence: Synthetic oligonucleotide
aguuuaugaaaguguaagg

SEQ ID NO: 79035 - RNA, 19 nt, Artificial Sequence
  Description of Artificial Sequence: Synthetic oligonucleotide
uuagaaaguagaucaagac

SEQ ID NO: 79036 - RNA, 19 nt, Artificial Sequence
  Description of Artificial Sequence: Synthetic oligonucleotide
uuaguugcuuccuuaauga

SEQ ID NO: 79037 - RNA, 19 nt, Artificial Sequence
  Description of Artificial Sequence: Synthetic oligonucleotide
uacguuuggaugcacagug

SEQ ID NO: 79038 - RNA, 19 nt, Artificial Sequence
  Description of Artificial Sequence: Synthetic oligonucleotide
ucuguuagacucauuacgu

SEQ ID NO: 79039 - RNA, 19 nt, Artificial Sequence
  Description of Artificial Sequence: Synthetic oligonucleotide
uccaacuaugguaacagca

SEQ ID NO: 79040 - RNA, 19 nt, Artificial Sequence
  Description of Artificial Sequence: Synthetic oligonucleotide
uaugaauaggagucgcagg

SEQ ID NO: 79041 - RNA, 19 nt, Artificial Sequence
  Description of Artificial Sequence: Synthetic oligonucleotide
aauacaagcacgaaauuau

SEQ ID NO: 79042 - RNA, 19 nt, Artificial Sequence
  Description of Artificial Sequence: Synthetic oligonucleotide
uccaauagguucucuaucc

SEQ ID NO: 79043 - RNA, 19 nt, Artificial Sequence
  Description of Artificial Sequence: Synthetic oligonucleotide
aagcuggugugauuuauuc

SEQ ID NO: 79044 - RNA, 19 nt, Artificial Sequence
  Description of Artificial Sequence: Synthetic oligonucleotide
aauucauacagcauagccu

SEQ ID NO: 79045 - RNA, 19 nt, Artificial Sequence
  Description of Artificial Sequence: Synthetic oligonucleotide
ggauguauauaacucaggg

SEQ ID NO: 79046 - RNA, 19 nt, Artificial Sequence
  Description of Artificial Sequence: Synthetic oligonucleotide
aguagaucaagaccuauca

SEQ ID NO: 79047 - RNA, 19 nt, Artificial Sequence
  Description of Artificial Sequence: Synthetic oligonucleotide
ugaaucagugaucuuagaa

SEQ ID NO: 79048 - RNA, 19 nt, Artificial Sequence
  Description of Artificial Sequence: Synthetic oligonucleotide
auuacguuuggaugcacag

SEQ ID NO: 79049 - RNA, 19 nt, Artificial Sequence
  Description of Artificial Sequence: Synthetic oligonucleotide
gacucauuacguuuggaug

SEQ ID NO: 79050 - RNA, 19 nt, Artificial Sequence
  Description of Artificial Sequence: Synthetic oligonucleotide
auuuuaguacugcacaagu

SEQ ID NO: 79051 - RNA, 19 nt, Artificial Sequence
  Description of Artificial Sequence: Synthetic oligonucleotide
ugacucacuacacuaguca

SEQ ID NO: 79052 - RNA, 19 nt, Artificial Sequence
  Description of Artificial Sequence: Synthetic oligonucleotide
aauguuacuaggacaagga

SEQ ID NO: 79053 - RNA, 19 nt, Artificial Sequence
  Description of Artificial Sequence: Synthetic oligonucleotide
gauaugacugaaauaacca

SEQ ID NO: 79054 - RNA, 19 nt, Artificial Sequence
  Description of Artificial Sequence: Synthetic oligonucleotide
aacuugcucuuaaauaagg

SEQ ID NO: 79055 - RNA, 19 nt, Artificial Sequence
  Description of Artificial Sequence: Synthetic oligonucleotide
accucgcuuaaccagacuc

SEQ ID NO: 79056 - RNA, 19 nt, Artificial Sequence
  Description of Artificial Sequence: Synthetic oligonucleotide
auauaacucaggguagagc

SEQ ID NO: 79057 - RNA, 19 nt, Artificial Sequence
  Description of Artificial Sequence: Synthetic oligonucleotide
ugucugaccucgcuuaacc

SEQ ID NO: 79058 - RNA, 19 nt, Artificial Sequence
  Description of Artificial Sequence: Synthetic oligonucleotide
acuguacaugauaagaguc

SEQ ID NO: 79059 - RNA, 19 nt, Artificial Sequence
  Description of Artificial Sequence: Synthetic oligonucleotide
cacgaaauuauauccauca

SEQ ID NO: 79060 - RNA, 19 nt, Artificial Sequence
  Description of Artificial Sequence: Synthetic oligonucleotide
uuaaauggcucuuuccuua

SEQ ID NO: 79061 - RNA, 19 nt, Artificial Sequence
  Description of Artificial Sequence: Synthetic oligonucleotide
uuaaugcaaaguaggcaug

SEQ ID NO: 79062 - RNA, 19 nt, Artificial Sequence
  Description of Artificial Sequence: Synthetic oligonucleotide
aaguagaucaagaccuauc

SEQ ID NO: 79063 - RNA, 19 nt, Artificial Sequence
  Description of Artificial Sequence: Synthetic oligonucleotide
caccuuaaaacguacaaga

SEQ ID NO: 79064 - RNA, 19 nt, Artificial Sequence
  Description of Artificial Sequence: Synthetic oligonucleotide
acuacuaagcuuagguaac

SEQ ID NO: 79065 - RNA, 19 nt, Artificial Sequence
  Description of Artificial Sequence: Synthetic oligonucleotide
aaccuccugacacguuugc

SEQ ID NO: 79066 - RNA, 19 nt, Artificial Sequence
  Description of Artificial Sequence: Synthetic oligonucleotide
uguuggacuugaacauucg

SEQ ID NO: 79067 - RNA, 19 nt, Artificial Sequence
  Description of Artificial Sequence: Synthetic oligonucleotide
caauguuacuaggacaagg

SEQ ID NO: 79068 - RNA, 19 nt, Artificial Sequence
  Description of Artificial Sequence: Synthetic oligonucleotide
uccuaguacaccgagauuu

SEQ ID NO: 79069 - RNA, 19 nt, Artificial Sequence
  Description of Artificial Sequence: Synthetic oligonucleotide
aguguuuaagggcaaagua

SEQ ID NO: 79070 - RNA, 19 nt, Artificial Sequence
  Description of Artificial Sequence: Synthetic oligonucleotide
uguuacuccggaccgcugc

SEQ ID NO: 79071 - RNA, 19 nt, Artificial Sequence
  Description of Artificial Sequence: Synthetic oligonucleotide
uguaugaauaggagucgca

SEQ ID NO: 79072 - RNA, 19 nt, Artificial Sequence
  Description of Artificial Sequence: Synthetic oligonucleotide
ucgugaucagcucaugacu

SEQ ID NO: 79073 - RNA, 19 nt, Artificial Sequence
  Description of Artificial Sequence: Synthetic oligonucleotide
caaagauacuucagugugc

SEQ ID NO: 79074 - RNA, 19 nt, Artificial Sequence
  Description of Artificial Sequence: Synthetic oligonucleotide
ucagcucaacucaacuugc

SEQ ID NO: 79075 - RNA, 19 nt, Artificial Sequence
  Description of Artificial Sequence: Synthetic oligonucleotide
acacucacugcauaggagu

SEQ ID NO: 79076 - RNA, 19 nt, Artificial Sequence
  Description of Artificial Sequence: Synthetic oligonucleotide
aaggacggcugguaaguag

SEQ ID NO: 79077 - RNA, 19 nt, Artificial Sequence
  Description of Artificial Sequence: Synthetic oligonucleotide
uacaagcacgaaauuauau

SEQ ID NO: 79078 - RNA, 19 nt, Artificial Sequence
  Description of Artificial Sequence: Synthetic oligonucleotide
uucgugaucagcucaugac

SEQ ID NO: 79079 - RNA, 19 nt, Artificial Sequence
  Description of Artificial Sequence: Synthetic oligonucleotide
acauuggacaauauuaaga

SEQ ID NO: 79080 - RNA, 19 nt, Artificial Sequence
  Description of Artificial Sequence: Synthetic oligonucleotide
uaagccccgaguaacuaca

SEQ ID NO: 79081 - RNA, 19 nt, Artificial Sequence
  Description of Artificial Sequence: Synthetic oligonucleotide
guaugaauaggagucgcag

SEQ ID NO: 79082 - RNA, 19 nt, Artificial Sequence
  Description of Artificial Sequence: Synthetic oligonucleotide
cuaggauguauauaacuca

SEQ ID NO: 79083 - RNA, 19 nt, Artificial Sequence
  Description of Artificial Sequence: Synthetic oligonucleotide
uaaucuaccagagcggguc

SEQ ID NO: 79084 - RNA, 19 nt, Artificial Sequence
  Description of Artificial Sequence: Synthetic oligonucleotide
ugacuagaaacagaacuac

SEQ ID NO: 79085 - RNA, 19 nt, Artificial Sequence
  Description of Artificial Sequence: Synthetic oligonucleotide
aacauucguugcugcgucg

SEQ ID NO: 79086 - RNA, 19 nt, Artificial Sequence
  Description of Artificial Sequence: Synthetic oligonucleotide
ucaggguagagcacuugcc

SEQ ID NO: 79087 - RNA, 19 nt, Artificial Sequence
  Description of Artificial Sequence: Synthetic oligonucleotide
gaaaacuacuaagcuuagg

SEQ ID NO: 79088 - RNA, 19 nt, Artificial Sequence
  Description of Artificial Sequence: Synthetic oligonucleotide
cuagcaugugcaagguucc

SEQ ID NO: 79089 - RNA, 19 nt, Artificial Sequence
  Description of Artificial Sequence: Synthetic oligonucleotide
agacucauuacguuuggau

SEQ ID NO: 79090 - RNA, 19 nt, Artificial Sequence
  Description of Artificial Sequence: Synthetic oligonucleotide
acaucuagccaacuucgug

SEQ ID NO: 79091 - RNA, 19 nt, Artificial Sequence
  Description of Artificial Sequence: Synthetic oligonucleotide
agcucaacucaacuugcuc

SEQ ID NO: 79092 - RNA, 19 nt, Artificial Sequence
  Description of Artificial Sequence: Synthetic oligonucleotide
acuaagcuuagguaacaga

SEQ ID NO: 79093 - RNA, 19 nt, Artificial Sequence
  Description of Artificial Sequence: Synthetic oligonucleotide
uggugugauuuauucaacu

SEQ ID NO: 79094 - RNA, 19 nt, Artificial Sequence
  Description of Artificial Sequence: Synthetic oligonucleotide
acuugcucuuaaauaaggg

SEQ ID NO: 79095 - RNA, 19 nt, Artificial Sequence
  Description of Artificial Sequence: Synthetic oligonucleotide
ugcacaaguaagccccgag

SEQ ID NO: 79096 - RNA, 19 nt, Artificial Sequence
  Description of Artificial Sequence: Synthetic oligonucleotide
uaguacaccgagauuuccu

SEQ ID NO: 79097 - RNA, 19 nt, Artificial Sequence
  Description of Artificial Sequence: Synthetic oligonucleotide
ggaggagugggauccaugg

SEQ ID NO: 79098 - RNA, 19 nt, Artificial Sequence
  Description of Artificial Sequence: Synthetic oligonucleotide
aagaccuaucaguuucaca

SEQ ID NO: 79099 - RNA, 19 nt, Artificial Sequence
  Description of Artificial Sequence: Synthetic oligonucleotide
aaucagugucuguuagacu

SEQ ID NO: 79100 - RNA, 19 nt, Artificial Sequence
  Description of Artificial Sequence: Synthetic oligonucleotide
auaucugcuguguaugaau

SEQ ID NO: 79101 - RNA, 19 nt, Artificial Sequence
  Description of Artificial Sequence: Synthetic oligonucleotide
ucaccaccgacugugaugu

SEQ ID NO: 79102 - RNA, 19 nt, Artificial Sequence
  Description of Artificial Sequence: Synthetic oligonucleotide
caucuagccaacuucguga

SEQ ID NO: 79103 - RNA, 19 nt, Artificial Sequence
  Description of Artificial Sequence: Synthetic oligonucleotide
aggacggcugguaaguagc

SEQ ID NO: 79104 - RNA, 19 nt, Artificial Sequence
  Description of Artificial Sequence: Synthetic oligonucleotide
ugaacauucguugcugcgu

SEQ ID NO: 79105 - RNA, 19 nt, Artificial Sequence
  Description of Artificial Sequence: Synthetic oligonucleotide
ucgcaggcuaguuuuaggu

SEQ ID NO: 79106 - RNA, 19 nt, Artificial Sequence
  Description of Artificial Sequence: Synthetic oligonucleotide
gcacuuuuaauuuacaccu

SEQ ID NO: 79107 - RNA, 19 nt, Artificial Sequence
  Description of Artificial Sequence: Synthetic oligonucleotide
uagauuaguugcuuccuua

SEQ ID NO: 79108 - RNA, 19 nt, Artificial Sequence
  Description of Artificial Sequence: Synthetic oligonucleotide
uaucuagauuaguugcuuc

SEQ ID NO: 79109 - RNA, 19 nt, Artificial Sequence
  Description of Artificial Sequence: Synthetic oligonucleotide
uaccagaacaucacuuuau

SEQ ID NO: 79110 - RNA, 19 nt, Artificial Sequence
  Description of Artificial Sequence: Synthetic oligonucleotide
caugguguugggcguaucc

SEQ ID NO: 79111 - RNA, 19 nt, Artificial Sequence
  Description of Artificial Sequence: Synthetic oligonucleotide
agcacgaaauuauauccau

SEQ ID NO: 79112 - RNA, 19 nt, Artificial Sequence
  Description of Artificial Sequence: Synthetic oligonucleotide
cuaugguaacagcauggag

SEQ ID NO: 79113 - RNA, 19 nt, Artificial Sequence
  Description of Artificial Sequence: Synthetic oligonucleotide
aguaagcuauaaaaugaug

SEQ ID NO: 79114 - RNA, 19 nt, Artificial Sequence
  Description of Artificial Sequence: Synthetic oligonucleotide
guacuuacuggucaaccca

SEQ ID NO: 79115 - RNA, 19 nt, Artificial Sequence
  Description of Artificial Sequence: Synthetic oligonucleotide
ucagugucuguuagacuca

SEQ ID NO: 79116 - RNA, 19 nt, Artificial Sequence
  Description of Artificial Sequence: Synthetic oligonucleotide
caaguaagccccgaguaac

SEQ ID NO: 79117 - RNA, 19 nt, Artificial Sequence
  Description of Artificial Sequence: Synthetic oligonucleotide
ugguacuuacuggucaacc

SEQ ID NO: 79118 - RNA, 19 nt, Artificial Sequence
  Description of Artificial Sequence: Synthetic oligonucleotide
caacuaugguaacagcaug

SEQ ID NO: 79119 - RNA, 19 nt, Artificial Sequence
  Description of Artificial Sequence: Synthetic oligonucleotide
aucgugacucacuacacua

SEQ ID NO: 79120 - RNA, 19 nt, Artificial Sequence
  Description of Artificial Sequence: Synthetic oligonucleotide
uucguugcugcgucgguga

SEQ ID NO: 79121 - RNA, 19 nt, Artificial Sequence
  Description of Artificial Sequence: Synthetic oligonucleotide
gugucuguuagacucauua

SEQ ID NO: 79122 - RNA, 19 nt, Artificial Sequence
  Description of Artificial Sequence: Synthetic oligonucleotide
uuuuaggaucucugacagc

SEQ ID NO: 79123 - RNA, 19 nt, Artificial Sequence
  Description of Artificial Sequence: Synthetic oligonucleotide
uuuggaugccugaggcuca

SEQ ID NO: 79124 - RNA, 19 nt, Artificial Sequence
  Description of Artificial Sequence: Synthetic oligonucleotide
cagauaugacugaaauaac

SEQ ID NO: 79125 - RNA, 19 nt, Artificial Sequence
  Description of Artificial Sequence: Synthetic oligonucleotide
cuuagguaacagaggcaag

SEQ ID NO: 79126 - RNA, 19 nt, Artificial Sequence
  Description of Artificial Sequence: Synthetic oligonucleotide
uggucaacccaaccaguac

SEQ ID NO: 79127 - RNA, 19 nt, Artificial Sequence
  Description of Artificial Sequence: Synthetic oligonucleotide
ugcgucggugacguaaggg

SEQ ID NO: 79128 - RNA, 19 nt, Artificial Sequence
  Description of Artificial Sequence: Synthetic oligonucleotide
accaccgacugugaugugg

SEQ ID NO: 79129 - RNA, 19 nt, Artificial Sequence
  Description of Artificial Sequence: Synthetic oligonucleotide
agcuggcuaaucuaccaga

SEQ ID NO: 79130 - RNA, 19 nt, Artificial Sequence
  Description of Artificial Sequence: Synthetic oligonucleotide
uuaucuagauuaguugcuu

SEQ ID NO: 79131 - RNA, 19 nt, Artificial Sequence
  Description of Artificial Sequence: Synthetic oligonucleotide
gauucagcucaacucaacu

SEQ ID NO: 79132 - RNA, 19 nt, Artificial Sequence
  Description of Artificial Sequence: Synthetic oligonucleotide
gcuaaucuaccagagcggg

SEQ ID NO: 79133 - RNA, 19 nt, Artificial Sequence
  Description of Artificial Sequence: Synthetic oligonucleotide
cuacacuagucacucaaca

SEQ ID NO: 79134 - RNA, 19 nt, Artificial Sequence
  Description of Artificial Sequence: Synthetic oligonucleotide
uacaucuagccaacuucgu

SEQ ID NO: 79135 - RNA, 19 nt, Artificial Sequence
  Description of Artificial Sequence: Synthetic oligonucleotide
acauucguugcugcgucgg

SEQ ID NO: 79136 - RNA, 19 nt, Artificial Sequence
  Description of Artificial Sequence: Synthetic oligonucleotide
ugguguugggcguaucccu

SEQ ID NO: 79137 - RNA, 19 nt, Artificial Sequence
  Description of Artificial Sequence: Synthetic oligonucleotide
acuaugguaacagcaugga

SEQ ID NO: 79138 - RNA, 19 nt, Artificial Sequence
  Description of Artificial Sequence: Synthetic oligonucleotide
uguugggcguaucccugag

SEQ ID NO: 79139 - RNA, 19 nt, Artificial Sequence
  Description of Artificial Sequence: Synthetic oligonucleotide
auguuacuaggacaaggau

SEQ ID NO: 79140 - RNA, 19 nt, Artificial Sequence
  Description of Artificial Sequence: Synthetic oligonucleotide
aagucacucugugcuccgc

SEQ ID NO: 79141 - RNA, 19 nt, Artificial Sequence
  Description of Artificial Sequence: Synthetic oligonucleotide
cagcuuuccccguuuuagg

SEQ ID NO: 79142 - RNA, 19 nt, Artificial Sequence
  Description of Artificial Sequence: Synthetic oligonucleotide
acucucacccugaacuugg

SEQ ID NO: 79143 - RNA, 19 nt, Artificial Sequence
  Description of Artificial Sequence: Synthetic oligonucleotide
agcuggugugauuuauuca

SEQ ID NO: 79144 - RNA, 19 nt, Artificial Sequence
  Description of Artificial Sequence: Synthetic oligonucleotide
uacugccuauaauacccca

SEQ ID NO: 79145 - RNA, 19 nt, Artificial Sequence
  Description of Artificial Sequence: Synthetic oligonucleotide
gucgcaggcuaguuuuagg

SEQ ID NO: 79146 - RNA, 19 nt, Artificial Sequence
  Description of Artificial Sequence: Synthetic oligonucleotide
auuuacaccuuaaaacgua

SEQ ID NO: 79147 - RNA, 19 nt, Artificial Sequence
  Description of Artificial Sequence: Synthetic oligonucleotide
gcuaggauguauauaacuc

SEQ ID NO: 79148 - RNA, 19 nt, Artificial Sequence
  Description of Artificial Sequence: Synthetic oligonucleotide
aggcaaguguuuaagggca

SEQ ID NO: 79149 - RNA, 19 nt, Artificial Sequence
  Description of Artificial Sequence: Synthetic oligonucleotide
cagcuaaccuccugacacg

SEQ ID NO: 79150 - RNA, 19 nt, Artificial Sequence
  Description of Artificial Sequence: Synthetic oligonucleotide
ugccuauaauaccccagau

SEQ ID NO: 79151 - RNA, 19 nt, Artificial Sequence
  Description of Artificial Sequence: Synthetic oligonucleotide
cacguuugcagcuguucug

SEQ ID NO: 79152 - RNA, 19 nt, Artificial Sequence
  Description of Artificial Sequence: Synthetic oligonucleotide
guguaugaauaggagucgc

SEQ ID NO: 79153 - RNA, 19 nt, Artificial Sequence
  Description of Artificial Sequence: Synthetic oligonucleotide
uuacguuuggaugcacagu

SEQ ID NO: 79154 - RNA, 19 nt, Artificial Sequence
  Description of Artificial Sequence: Synthetic oligonucleotide
acugccuauaauaccccag

SEQ ID NO: 79155 - RNA, 19 nt, Artificial Sequence
  Description of Artificial Sequence: Synthetic oligonucleotide
gaccuaucaguuucacaca

SEQ ID NO: 79156 - RNA, 19 nt, Artificial Sequence
  Description of Artificial Sequence: Synthetic oligonucleotide
agaaaacuacuaagcuuag

SEQ ID NO: 79157 - RNA, 19 nt, Artificial Sequence
  Description of Artificial Sequence: Synthetic oligonucleotide
gguuuccucagaguaacgc

SEQ ID NO: 79158 - RNA, 19 nt, Artificial Sequence
  Description of Artificial Sequence: Synthetic oligonucleotide
cauuacguuuggaugcaca

SEQ ID NO: 79159 - RNA, 19 nt, Artificial Sequence
  Description of Artificial Sequence: Synthetic oligonucleotide
gacaugacaucagguugag

SEQ ID NO: 79160 - RNA, 19 nt, Artificial Sequence
  Description of Artificial Sequence: Synthetic oligonucleotide
uguaagggcuaggauguau

SEQ ID NO: 79161 - RNA, 19 nt, Artificial Sequence
  Description of Artificial Sequence: Synthetic oligonucleotide
gguugagucuucuggccag

SEQ ID NO: 79162 - RNA, 19 nt, Artificial Sequence
  Description of Artificial Sequence: Synthetic oligonucleotide
aguguuacuccggaccgcu

SEQ ID NO: 79163 - RNA, 19 nt, Artificial Sequence
  Description of Artificial Sequence: Synthetic oligonucleotide
uacuccggaccgcugcagc

SEQ ID NO: 79164 - RNA, 19 nt, Artificial Sequence
  Description of Artificial Sequence: Synthetic oligonucleotide
ccuguuuggaucaacaucu

SEQ ID NO: 79165 - RNA, 19 nt, Artificial Sequence
  Description of Artificial Sequence: Synthetic oligonucleotide
ucugagcgggguuuguuuu

SEQ ID NO: 79166 - RNA, 19 nt, Artificial Sequence
  Description of Artificial Sequence: Synthetic oligonucleotide
aaguaagccccgaguaacu

SEQ ID NO: 79167 - RNA, 19 nt, Artificial Sequence
  Description of Artificial Sequence: Synthetic oligonucleotide
uccuagguuuccucagagu

SEQ ID NO: 79168 - RNA, 19 nt, Artificial Sequence
  Description of Artificial Sequence: Synthetic oligonucleotide
gacuugaacauucguugcu

SEQ ID NO: 79169 - RNA, 19 nt, Artificial Sequence
  Description of Artificial Sequence: Synthetic oligonucleotide
gucaacccaaccaguacug

SEQ ID NO: 79170 - RNA, 19 nt, Artificial Sequence
  Description of Artificial Sequence: Synthetic oligonucleotide
acuuacuggucaacccaac

SEQ ID NO: 79171 - RNA, 19 nt, Artificial Sequence
  Description of Artificial Sequence: Synthetic oligonucleotide
ugaccucgcuuaaccagac

SEQ ID NO: 79172 - RNA, 19 nt, Artificial Sequence
  Description of Artificial Sequence: Synthetic oligonucleotide
cuagguuuccucagaguaa

SEQ ID NO: 79173 - RNA, 19 nt, Artificial Sequence
  Description of Artificial Sequence: Synthetic oligonucleotide
agagcgggucaauggggag

SEQ ID NO: 79174 - RNA, 19 nt, Artificial Sequence
  Description of Artificial Sequence: Synthetic oligonucleotide
accuccuaccagaacauca

SEQ ID NO: 79175 - RNA, 19 nt, Artificial Sequence
  Description of Artificial Sequence: Synthetic oligonucleotide
cugccuauaauaccccaga

SEQ ID NO: 79176 - RNA, 19 nt, Artificial Sequence
  Description of Artificial Sequence: Synthetic oligonucleotide
agccccaauucucaaggau

SEQ ID NO: 79177 - RNA, 19 nt, Artificial Sequence
  Description of Artificial Sequence: Synthetic oligonucleotide
cugaccucgcuuaaccaga

SEQ ID NO: 79178 - RNA, 19 nt, Artificial Sequence
  Description of Artificial Sequence: Synthetic oligonucleotide
ugcugcgucggugacguaa

SEQ ID NO: 79179 - RNA, 19 nt, Artificial Sequence
  Description of Artificial Sequence: Synthetic oligonucleotide
augucugaccucgcuuaac

SEQ ID NO: 79180 - RNA, 19 nt, Artificial Sequence
  Description of Artificial Sequence: Synthetic oligonucleotide
gacguaagggugaccuggc

SEQ ID NO: 79181 - RNA, 19 nt, Artificial Sequence
  Description of Artificial Sequence: Synthetic oligonucleotide
auguagugucuguuacacu

SEQ ID NO: 79182 - RNA, 19 nt, Artificial Sequence
  Description of Artificial Sequence: Synthetic oligonucleotide
gcuuagguaacagaggcaa

SEQ ID NO: 79183 - RNA, 19 nt, Artificial Sequence
  Description of Artificial Sequence: Synthetic oligonucleotide
auucguugcugcgucggug

SEQ ID NO: 79184 - RNA, 19 nt, Artificial Sequence
  Description of Artificial Sequence: Synthetic oligonucleotide
ucuucgcggccccaguuuu

SEQ ID NO: 79185 - RNA, 19 nt, Artificial Sequence
  Description of Artificial Sequence: Synthetic oligonucleotide
caucagguugagucuucug

SEQ ID NO: 79186 - RNA, 19 nt, Artificial Sequence
  Description of Artificial Sequence: Synthetic oligonucleotide
uagacucauuacguuugga

SEQ ID NO: 79187 - RNA, 19 nt, Artificial Sequence
  Description of Artificial Sequence: Synthetic oligonucleotide
gagcgggucaauggggagc

SEQ ID NO: 79188 - RNA, 19 nt, Artificial Sequence
  Description of Artificial Sequence: Synthetic oligonucleotide
gaucgugacucacuacacu

SEQ ID NO: 79189 - RNA, 19 nt, Artificial Sequence
  Description of Artificial Sequence: Synthetic oligonucleotide
cacagauaugacugaaaua

SEQ ID NO: 79190 - RNA, 19 nt, Artificial Sequence
  Description of Artificial Sequence: Synthetic oligonucleotide
uucuucgcggccccaguuu

SEQ ID NO: 79191 - RNA, 19 nt, Artificial Sequence
  Description of Artificial Sequence: Synthetic oligonucleotide
guauuauaacucucacccu

SEQ ID NO: 79192 - RNA, 19 nt, Artificial Sequence
  Description of Artificial Sequence: Synthetic oligonucleotide
ucuagccaacuucgugauc

SEQ ID NO: 79193 - RNA, 19 nt, Artificial Sequence
  Description of Artificial Sequence: Synthetic oligonucleotide
ucuauccuggcugcuuaaa

SEQ ID NO: 79194 - RNA, 19 nt, Artificial Sequence
  Description of Artificial Sequence: Synthetic oligonucleotide
ucgcuuaaccagacucauc

SEQ ID NO: 79195 - RNA, 19 nt, Artificial Sequence
  Description of Artificial Sequence: Synthetic oligonucleotide
acuccggaccgcugcagca

SEQ ID NO: 79196 - RNA, 19 nt, Artificial Sequence
  Description of Artificial Sequence: Synthetic oligonucleotide
ggggagugcacaugaaauc

SEQ ID NO: 79197 - RNA, 19 nt, Artificial Sequence
  Description of Artificial Sequence: Synthetic oligonucleotide
gcucaacucaacuugcucu

SEQ ID NO: 79198 - RNA, 19 nt, Artificial Sequence
  Description of Artificial Sequence: Synthetic oligonucleotide
ggagugcacaugaaaucag

SEQ ID NO: 79199 - RNA, 19 nt, Artificial Sequence
  Description of Artificial Sequence: Synthetic oligonucleotide
uuacuccggaccgcugcag

SEQ ID NO: 79200 - RNA, 19 nt, Artificial Sequence
  Description of Artificial Sequence: Synthetic oligonucleotide
ggcuaggauguauauaacu

SEQ ID NO: 79201 - RNA, 19 nt, Artificial Sequence
  Description of Artificial Sequence: Synthetic oligonucleotide
cuaccagagcgggucaaug

SEQ ID NO: 79202 - RNA, 19 nt, Artificial Sequence
  Description of Artificial Sequence: Synthetic oligonucleotide
gugacguaagggugaccug

SEQ ID NO: 79203 - RNA, 19 nt, Artificial Sequence
  Description of Artificial Sequence: Synthetic oligonucleotide
gaguucuucgcggccccag

SEQ ID NO: 79204 - RNA, 19 nt, Artificial Sequence
  Description of Artificial Sequence: Synthetic oligonucleotide
ccuagguuuccucagagua

SEQ ID NO: 79205 - RNA, 19 nt, Artificial Sequence
  Description of Artificial Sequence: Synthetic oligonucleotide
uucgcggccccaguuuucu

SEQ ID NO: 79206 - RNA, 19 nt, Artificial Sequence
  Description of Artificial Sequence: Synthetic oligonucleotide
cugagcgggguuuguuuuc

SEQ ID NO: 79207 - RNA, 19 nt, Artificial Sequence
  Description of Artificial Sequence: Synthetic oligonucleotide
cuacuaagcuuagguaaca

SEQ ID NO: 79208 - RNA, 19 nt, Artificial Sequence
  Description of Artificial Sequence: Synthetic oligonucleotide
ggugacguaagggugaccu

SEQ ID NO: 79209 - RNA, 19 nt, Artificial Sequence
  Description of Artificial Sequence: Synthetic oligonucleotide
acaucagguugagucuucu

SEQ ID NO: 79210 - RNA, 19 nt, Artificial Sequence
  Description of Artificial Sequence: Synthetic oligonucleotide
acuuccuaguacaccgaga

SEQ ID NO: 79211 - RNA, 19 nt, Artificial Sequence
  Description of Artificial Sequence: Synthetic oligonucleotide
gugacucacuacacuaguc

SEQ ID NO: 79212 - RNA, 19 nt, Artificial Sequence
  Description of Artificial Sequence: Synthetic oligonucleotide
gcaggcuaguuuuaggugu

SEQ ID NO: 79213 - RNA, 19 nt, Artificial Sequence
  Description of Artificial Sequence: Synthetic oligonucleotide
aaaggacggcugguaagua

SEQ ID NO: 79214 - RNA, 19 nt, Artificial Sequence
  Description of Artificial Sequence: Synthetic oligonucleotide
cuggucaacccaaccagua

SEQ ID NO: 79215 - RNA, 19 nt, Artificial Sequence
  Description of Artificial Sequence: Synthetic oligonucleotide
gcuaguuguaagggcuagg

SEQ ID NO: 79216 - RNA, 19 nt, Artificial Sequence
  Description of Artificial Sequence: Synthetic oligonucleotide
ggcauguauuaaauggcuc

SEQ ID NO: 79217 - RNA, 19 nt, Artificial Sequence
  Description of Artificial Sequence: Synthetic oligonucleotide
ucuaccagagcgggucaau

SEQ ID NO: 79218 - RNA, 19 nt, Artificial Sequence
  Description of Artificial Sequence: Synthetic oligonucleotide
cugaaucagugaucuuaga

SEQ ID NO: 79219 - RNA, 19 nt, Artificial Sequence
  Description of Artificial Sequence: Synthetic oligonucleotide
guucuguggcagaaagaca

SEQ ID NO: 79220 - RNA, 19 nt, Artificial Sequence
  Description of Artificial Sequence: Synthetic oligonucleotide
uccggaccgcugcagcaaa

SEQ ID NO: 79221 - RNA, 19 nt, Artificial Sequence
  Description of Artificial Sequence: Synthetic oligonucleotide
agcaaugcucuugccaguu

SEQ ID NO: 79222 - RNA, 19 nt, Artificial Sequence
  Description of Artificial Sequence: Synthetic oligonucleotide
ucggugacguaagggugac

SEQ ID NO: 79223 - RNA, 19 nt, Artificial Sequence
  Description of Artificial Sequence: Synthetic oligonucleotide
ccaacuucgugaucagcuc

SEQ ID NO: 79224 - RNA, 19 nt, Artificial Sequence
  Description of Artificial Sequence: Synthetic oligonucleotide
ucguugcugcgucggugac

SEQ ID NO: 79225 - RNA, 19 nt, Artificial Sequence
  Description of Artificial Sequence: Synthetic oligonucleotide
ccuaguacaccgagauuuc

SEQ ID NO: 79226 - RNA, 19 nt, Artificial Sequence
  Description of Artificial Sequence: Synthetic oligonucleotide
cuaaccuccugacacguuu

SEQ ID NO: 79227 - RNA, 19 nt, Artificial Sequence
  Description of Artificial Sequence: Synthetic oligonucleotide
aggauucagcucaacucaa

SEQ ID NO: 79228 - RNA, 19 nt, Artificial Sequence
  Description of Artificial Sequence: Synthetic oligonucleotide
cagcuacuuuacuaugaaa

SEQ ID NO: 79229 - RNA, 19 nt, Artificial Sequence
  Description of Artificial Sequence: Synthetic oligonucleotide
caaaggacggcugguaagu

SEQ ID NO: 79230 - RNA, 19 nt, Artificial Sequence
  Description of Artificial Sequence: Synthetic oligonucleotide
accgacugugauguggcuu

SEQ ID NO: 79231 - RNA, 19 nt, Artificial Sequence
  Description of Artificial Sequence: Synthetic oligonucleotide
agccccgaguaacuacaaa

SEQ ID NO: 79232 - RNA, 19 nt, Artificial Sequence
  Description of Artificial Sequence: Synthetic oligonucleotide
ggauucagcucaacucaac

SEQ ID NO: 79233 - RNA, 19 nt, Artificial Sequence
  Description of Artificial Sequence: Synthetic oligonucleotide
cccgauuucuuucucagcu

SEQ ID NO: 79234 - RNA, 19 nt, Artificial Sequence
  Description of Artificial Sequence: Synthetic oligonucleotide
cuaaucuaccagagcgggu

SEQ ID NO: 79235 - RNA, 19 nt, Artificial Sequence
  Description of Artificial Sequence: Synthetic oligonucleotide
uaccuccuaccagaacauc

SEQ ID NO: 79236 - RNA, 19 nt, Artificial Sequence
  Description of Artificial Sequence: Synthetic oligonucleotide
caggaggcauuacaacuua

SEQ ID NO: 79237 - RNA, 19 nt, Artificial Sequence
  Description of Artificial Sequence: Synthetic oligonucleotide
auacuucagugugcuaguu

SEQ ID NO: 79238 - RNA, 19 nt, Artificial Sequence
  Description of Artificial Sequence: Synthetic oligonucleotide
cuucgcggccccaguuuuc

SEQ ID NO: 79239 - RNA, 19 nt, Artificial Sequence
  Description of Artificial Sequence: Synthetic oligonucleotide
cuagauuaguugcuuccuu

SEQ ID NO: 79240 - RNA, 19 nt, Artificial Sequence
  Description of Artificial Sequence: Synthetic oligonucleotide
cgcuuaaccagacucaucu

SEQ ID NO: 79241 - RNA, 19 nt, Artificial Sequence
  Description of Artificial Sequence: Synthetic oligonucleotide
ccucgcuuaaccagacuca

SEQ ID NO: 79242 - RNA, 19 nt, Artificial Sequence
  Description of Artificial Sequence: Synthetic oligonucleotide
gcugcgucggugacguaag

SEQ ID NO: 79243 - RNA, 19 nt, Artificial Sequence
  Description of Artificial Sequence: Synthetic oligonucleotide
ccaacuaugguaacagcau

SEQ ID NO: 79244 - RNA, 19 nt, Artificial Sequence
  Description of Artificial Sequence: Synthetic oligonucleotide
gcucaugacuagaaacaga

SEQ ID NO: 79245 - RNA, 19 nt, Artificial Sequence
  Description of Artificial Sequence: Synthetic oligonucleotide
cuaccuccuaccagaacau

SEQ ID NO: 79246 - RNA, 19 nt, Artificial Sequence
  Description of Artificial Sequence: Synthetic oligonucleotide
ggggagguucuaaauuaca

SEQ ID NO: 79247 - RNA, 19 nt, Artificial Sequence
  Description of Artificial Sequence: Synthetic oligonucleotide
gcgucggugacguaagggu

SEQ ID NO: 79248 - RNA, 19 nt, Artificial Sequence
  Description of Artificial Sequence: Synthetic oligonucleotide
aggaggcauuacaacuuaa

SEQ ID NO: 79249 - RNA, 19 nt, Artificial Sequence
  Description of Artificial Sequence: Synthetic oligonucleotide
gcacaaguaagccccgagu

SEQ ID NO: 79250 - RNA, 19 nt, Artificial Sequence
  Description of Artificial Sequence: Synthetic oligonucleotide
cagcuuguuuugagggaaa

SEQ ID NO: 79251 - RNA, 19 nt, Artificial Sequence
  Description of Artificial Sequence: Synthetic oligonucleotide
gccuauaauaccccagauu

SEQ ID NO: 79252 - RNA, 19 nt, Artificial Sequence
  Description of Artificial Sequence: Synthetic oligonucleotide
ccaagcaacaaguguuucu

SEQ ID NO: 79253 - RNA, 19 nt, Artificial Sequence
  Description of Artificial Sequence: Synthetic oligonucleotide
ccuugaucgugacucacua

SEQ ID NO: 79254 - RNA, 19 nt, Artificial Sequence
  Description of Artificial Sequence: Synthetic oligonucleotide
guguuacuccggaccgcug

SEQ ID NO: 79255 - RNA, 19 nt, Artificial Sequence
  Description of Artificial Sequence: Synthetic oligonucleotide
cuccuaccagaacaucacu

SEQ ID NO: 79256 - RNA, 19 nt, Artificial Sequence
  Description of Artificial Sequence: Synthetic oligonucleotide
ggcguaucccugagugcag

SEQ ID NO: 79257 - RNA, 19 nt, Artificial Sequence
  Description of Artificial Sequence: Synthetic oligonucleotide
caaucuccgugugcaggca

SEQ ID NO: 79258 - RNA, 19 nt, Artificial Sequence
  Description of Artificial Sequence: Synthetic oligonucleotide
cacucacugcauaggaguu

SEQ ID NO: 79259 - RNA, 19 nt, Artificial Sequence
  Description of Artificial Sequence: Synthetic oligonucleotide
cagcucaacucaacuugcu

SEQ ID NO: 79260 - RNA, 19 nt, Artificial Sequence
  Description of Artificial Sequence: Synthetic oligonucleotide
gcuuaaccagacucaucua

SEQ ID NO: 79261 - RNA, 19 nt, Artificial Sequence
  Description of Artificial Sequence: Synthetic oligonucleotide
cucgcuuaaccagacucau

SEQ ID NO: 79262 - RNA, 19 nt, Artificial Sequence
  Description of Artificial Sequence: Synthetic oligonucleotide
gcguaucccugagugcagc

SEQ ID NO: 79263 - RNA, 19 nt, Artificial Sequence
  Description of Artificial Sequence: Synthetic oligonucleotide
guugggcguaucccugagu

SEQ ID NO: 79264 - RNA, 19 nt, Artificial Sequence
  Description of Artificial Sequence: Synthetic oligonucleotide
gccaccugacauuccaggu

SEQ ID NO: 79265 - RNA, 19 nt, Artificial Sequence
  Description of Artificial Sequence: Synthetic oligonucleotide
cccugcuuggcauguauua

SEQ ID NO: 79266 - RNA, 19 nt, Artificial Sequence
  Description of Artificial Sequence: Synthetic oligonucleotide
auggugcuugguggaguau

SEQ ID NO: 79267 - RNA, 19 nt, Artificial Sequence
  Description of Artificial Sequence: Synthetic oligonucleotide
gaccucgcuuaaccagacu

SEQ ID NO: 79268 - RNA, 19 nt, Artificial Sequence
  Description of Artificial Sequence: Synthetic oligonucleotide
gcaucccgauuucuuucuc

SEQ ID NO: 79269 - RNA, 19 nt, Artificial Sequence
  Description of Artificial Sequence: Synthetic oligonucleotide
gagucgcaggcuaguuuua

SEQ ID NO: 79270 - RNA, 19 nt, Artificial Sequence
  Description of Artificial Sequence: Synthetic oligonucleotide
cugcaggauucacuuccua

SEQ ID NO: 79271 - RNA, 19 nt, Artificial Sequence
  Description of Artificial Sequence: Synthetic oligonucleotide
cauucguugcugcgucggu

SEQ ID NO: 79272 - RNA, 19 nt, Artificial Sequence
  Description of Artificial Sequence: Synthetic oligonucleotide
cguugcugcgucggugacg

SEQ ID NO: 79273 - RNA, 19 nt, Artificial Sequence
  Description of Artificial Sequence: Synthetic oligonucleotide
cuccggaccgcugcagcaa

SEQ ID NO: 79274 - RNA, 19 nt, Artificial Sequence
  Description of Artificial Sequence: Synthetic oligonucleotide
caccaccgacugugaugug

SEQ ID NO: 79275 - RNA, 19 nt, Artificial Sequence
  Description of Artificial Sequence: Synthetic oligonucleotide
ccacuauuuguacaauguu

SEQ ID NO: 79276 - RNA, 19 nt, Artificial Sequence
  Description of Artificial Sequence: Synthetic oligonucleotide
ccggaccgcugcagcaaag

SEQ ID NO: 79277 - RNA, 19 nt, Artificial Sequence
  Description of Artificial Sequence: Synthetic oligonucleotide
ccgacugugauguggcuuu

SEQ ID NO: 79278 - RNA, 19 nt, Artificial Sequence
  Description of Artificial Sequence: Synthetic oligonucleotide
gccggggaacagguagaug

SEQ ID NO: 79279 - RNA, 19 nt, Artificial Sequence
  Description of Artificial Sequence: Synthetic oligonucleotide
cgugacucacuacacuagu

SEQ ID NO: 79280 - RNA, 19 nt, Artificial Sequence
  Description of Artificial Sequence: Synthetic oligonucleotide
gccuugaucgugacucacu

SEQ ID NO: 79281 - RNA, 19 nt, Artificial Sequence
  Description of Artificial Sequence: Synthetic oligonucleotide
caccgacugugauguggcu

SEQ ID NO: 79282 - RNA, 19 nt, Artificial Sequence
  Description of Artificial Sequence: Synthetic oligonucleotide
gggagccggggaacaggua

SEQ ID NO: 79283 - RNA, 19 nt, Artificial Sequence
  Description of Artificial Sequence: Synthetic oligonucleotide
gcccugcuuggcauguauu

SEQ ID NO: 79284 - RNA, 19 nt, Artificial Sequence
  Description of Artificial Sequence: Synthetic oligonucleotide
ugaaguuucgauaugccag

SEQ ID NO: 79285 - RNA, 19 nt, Artificial Sequence
  Description of Artificial Sequence: Synthetic oligonucleotide
uaagugucaaucaugaagu

SEQ ID NO: 79286 - RNA, 19 nt, Artificial Sequence
  Description of Artificial Sequence: Synthetic oligonucleotide
gaaaauguuaggucgagac

SEQ ID NO: 79287 - RNA, 19 nt, Artificial Sequence
  Description of Artificial Sequence: Synthetic oligonucleotide
ucuggaaaucguaacgccg

SEQ ID NO: 79288 - RNA, 19 nt, Artificial Sequence
  Description of Artificial Sequence: Synthetic oligonucleotide
aaauggcggaguuugaucu

SEQ ID NO: 79289 - RNA, 19 nt, Artificial Sequence
  Description of Artificial Sequence: Synthetic oligonucleotide
cuagacagggacuuguugg

SEQ ID NO: 79290 - RNA, 19 nt, Artificial Sequence
  Description of Artificial Sequence: Synthetic oligonucleotide
guuucgauaugccagguag

SEQ ID NO: 79291 - RNA, 19 nt, Artificial Sequence
  Description of Artificial Sequence: Synthetic oligonucleotide
aggaucaacuauugggucc

SEQ ID NO: 79292 - RNA, 19 nt, Artificial Sequence
  Description of Artificial Sequence: Synthetic oligonucleotide
augcaagaugcacucaucc

SEQ ID NO: 79293 - RNA, 19 nt, Artificial Sequence
  Description of Artificial Sequence: Synthetic oligonucleotide
gaaguuucgauaugccagg

SEQ ID NO: 79294 - RNA, 19 nt, Artificial Sequence
  Description of Artificial Sequence: Synthetic oligonucleotide
aacgcuguuguagucaaac

SEQ ID NO: 79295 - RNA, 19 nt, Artificial Sequence
  Description of Artificial Sequence: Synthetic oligonucleotide
ugaucggcaguuuaguaag

SEQ ID NO: 79296 - RNA, 19 nt, Artificial Sequence
  Description of Artificial Sequence: Synthetic oligonucleotide
guuagcgugaacuggaaug

SEQ ID NO: 79297 - RNA, 19 nt, Artificial Sequence
  Description of Artificial Sequence: Synthetic oligonucleotide
uccucuuaaaaccugcccu

SEQ ID NO: 79298 - RNA, 19 nt, Artificial Sequence
  Description of Artificial Sequence: Synthetic oligonucleotide
aaaugcaagaugcacucau

SEQ ID NO: 79299 - RNA, 19 nt, Artificial Sequence
  Description of Artificial Sequence: Synthetic oligonucleotide
ucuacauugcgguccaugc

SEQ ID NO: 79300 - RNA, 19 nt, Artificial Sequence
  Description of Artificial Sequence: Synthetic oligonucleotide
uaccugguaguuaauaaga

SEQ ID NO: 79301 - RNA, 19 nt, Artificial Sequence
  Description of Artificial Sequence: Synthetic oligonucleotide
uacauugcgguccaugcga

SEQ ID NO: 79302 - RNA, 19 nt, Artificial Sequence
  Description of Artificial Sequence: Synthetic oligonucleotide
aguacuaccaaggggcucg

SEQ ID NO: 79303 - RNA, 19 nt, Artificial Sequence
  Description of Artificial Sequence: Synthetic oligonucleotide
gauagcgcagacaucaccc

SEQ ID NO: 79304 - RNA, 19 nt, Artificial Sequence
  Description of Artificial Sequence: Synthetic oligonucleotide
cuuaggcucaaucucuggg

SEQ ID NO: 79305 - RNA, 19 nt, Artificial Sequence
  Description of Artificial Sequence: Synthetic oligonucleotide
uuaaaaccugcccuucccc

SEQ ID NO: 79306 - RNA, 19 nt, Artificial Sequence
  Description of Artificial Sequence: Synthetic oligonucleotide
uaguuaauaagaccccacu

SEQ ID NO: 79307 - RNA, 19 nt, Artificial Sequence
  Description of Artificial Sequence: Synthetic oligonucleotide
uccgucgggacagugaugg

SEQ ID NO: 79308 - RNA, 19 nt, Artificial Sequence
  Description of Artificial Sequence: Synthetic oligonucleotide
gauucagucgguaaguguc

SEQ ID NO: 79309 - RNA, 19 nt, Artificial Sequence
  Description of Artificial Sequence: Synthetic oligonucleotide
cuggaaaucguaacgccgc

SEQ ID NO: 79310 - RNA, 19 nt, Artificial Sequence
  Description of Artificial Sequence: Synthetic oligonucleotide
uccgccaagacauggaagu

SEQ ID NO: 79311 - RNA, 19 nt, Artificial Sequence
  Description of Artificial Sequence: Synthetic oligonucleotide
uuauaguucccucccuucu

SEQ ID NO: 79312 - RNA, 19 nt, Artificial Sequence
  Description of Artificial Sequence: Synthetic oligonucleotide
cauuugaucggcaguuuag

SEQ ID NO: 79313 - RNA, 19 nt, Artificial Sequence
  Description of Artificial Sequence: Synthetic oligonucleotide
ucuaccugguaguuaauaa

SEQ ID NO: 79314 - RNA, 19 nt, Artificial Sequence
  Description of Artificial Sequence: Synthetic oligonucleotide
ucggcaguuuaguaagggg

SEQ ID NO: 79315 - RNA, 19 nt, Artificial Sequence
  Description of Artificial Sequence: Synthetic oligonucleotide
aauccgggcuguuuaccuc

SEQ ID NO: 79316 - RNA, 19 nt, Artificial Sequence
  Description of Artificial Sequence: Synthetic oligonucleotide
aaacauuugaucggcaguu

SEQ ID NO: 79317 - RNA, 19 nt, Artificial Sequence
  Description of Artificial Sequence: Synthetic oligonucleotide
ugauagcgcagacaucacc

SEQ ID NO: 79318 - RNA, 19 nt, Artificial Sequence
  Description of Artificial Sequence: Synthetic oligonucleotide
auugcgguccaugcgagac

SEQ ID NO: 79319 - RNA, 19 nt, Artificial Sequence
  Description of Artificial Sequence: Synthetic oligonucleotide
cucggcaucuaccugguag

SEQ ID NO: 79320 - RNA, 19 nt, Artificial Sequence
  Description of Artificial Sequence: Synthetic oligonucleotide
uaggaaacauuugaucggc

SEQ ID NO: 79321 - RNA, 19 nt, Artificial Sequence
  Description of Artificial Sequence: Synthetic oligonucleotide
cuuuccuuacguagugccg

SEQ ID NO: 79322 - RNA, 19 nt, Artificial Sequence
  Description of Artificial Sequence: Synthetic oligonucleotide
aaugcaagaugcacucauc

SEQ ID NO: 79323 - RNA, 19 nt, Artificial Sequence
  Description of Artificial Sequence: Synthetic oligonucleotide
aaaucguaacgccgccauc

SEQ ID NO: 79324 - RNA, 19 nt, Artificial Sequence
  Description of Artificial Sequence: Synthetic oligonucleotide
guccgcaucgcucuucucg

SEQ ID NO: 79325 - RNA, 19 nt, Artificial Sequence
  Description of Artificial Sequence: Synthetic oligonucleotide
agacggauucuggaaaucg

SEQ ID NO: 79326 - RNA, 19 nt, Artificial Sequence
  Description of Artificial Sequence: Synthetic oligonucleotide
gcuuugacuugguauaagg

SEQ ID NO: 79327 - RNA, 19 nt, Artificial Sequence
  Description of Artificial Sequence: Synthetic oligonucleotide
uguuaggucgagacaggca

SEQ ID NO: 79328 - RNA, 19 nt, Artificial Sequence
  Description of Artificial Sequence: Synthetic oligonucleotide
cuugguacccuauuccauc

SEQ ID NO: 79329 - RNA, 19 nt, Artificial Sequence
  Description of Artificial Sequence: Synthetic oligonucleotide
uccgcaucgcucuucucgg

SEQ ID NO: 79330 - RNA, 19 nt, Artificial Sequence
  Description of Artificial Sequence: Synthetic oligonucleotide
ggaaacauuugaucggcag

SEQ ID NO: 79331 - RNA, 19 nt, Artificial Sequence
  Description of Artificial Sequence: Synthetic oligonucleotide
uuucgauaugccagguaga

SEQ ID NO: 79332 - RNA, 19 nt, Artificial Sequence
  Description of Artificial Sequence: Synthetic oligonucleotide
auguuaggucgagacaggc

SEQ ID NO: 79333 - RNA, 19 nt, Artificial Sequence
  Description of Artificial Sequence: Synthetic oligonucleotide
uaggcucaaucucugggca

SEQ ID NO: 79334 - RNA, 19 nt, Artificial Sequence
  Description of Artificial Sequence: Synthetic oligonucleotide
ugguguguccgccaagaca

SEQ ID NO: 79335 - RNA, 19 nt, Artificial Sequence
  Description of Artificial Sequence: Synthetic oligonucleotide
cuagggaggccucugaguc

SEQ ID NO: 79336 - RNA, 19 nt, Artificial Sequence
  Description of Artificial Sequence: Synthetic oligonucleotide
uggacccucaugauagcgc

SEQ ID NO: 79337 - RNA, 19 nt, Artificial Sequence
  Description of Artificial Sequence: Synthetic oligonucleotide
uuaguaaggggugcauugc

SEQ ID NO: 79338 - RNA, 19 nt, Artificial Sequence
  Description of Artificial Sequence: Synthetic oligonucleotide
ucccgguccauuaucgucu

SEQ ID NO: 79339 - RNA, 19 nt, Artificial Sequence
  Description of Artificial Sequence: Synthetic oligonucleotide
uagugccgaacucuccagg

SEQ ID NO: 79340 - RNA, 19 nt, Artificial Sequence
  Description of Artificial Sequence: Synthetic oligonucleotide
auaguucccucccuucuug

SEQ ID NO: 79341 - RNA, 19 nt, Artificial Sequence
  Description of Artificial Sequence: Synthetic oligonucleotide
uuacguagugccgaacucu

SEQ ID NO: 79342 - RNA, 19 nt, Artificial Sequence
  Description of Artificial Sequence: Synthetic oligonucleotide
cuacauugcgguccaugcg

SEQ ID NO: 79343 - RNA, 19 nt, Artificial Sequence
  Description of Artificial Sequence: Synthetic oligonucleotide
ugucccgucgguccgaauc

SEQ ID NO: 79344 - RNA, 19 nt, Artificial Sequence
  Description of Artificial Sequence: Synthetic oligonucleotide
auacuccagugcuucucgc

SEQ ID NO: 79345 - RNA, 19 nt, Artificial Sequence
  Description of Artificial Sequence: Synthetic oligonucleotide
ucuauggccucgcuuugac

SEQ ID NO: 79346 - RNA, 19 nt, Artificial Sequence
  Description of Artificial Sequence: Synthetic oligonucleotide
acauucagagggaaagguc

SEQ ID NO: 79347 - RNA, 19 nt, Artificial Sequence
  Description of Artificial Sequence: Synthetic oligonucleotide
uaguaaggggugcauugcu

SEQ ID NO: 79348 - RNA, 19 nt, Artificial Sequence
  Description of Artificial Sequence: Synthetic oligonucleotide
uucacgacuuccuccuggc

SEQ ID NO: 79349 - RNA, 19 nt, Artificial Sequence
  Description of Artificial Sequence: Synthetic oligonucleotide
ucaauggcgugaacgcugu

SEQ ID NO: 79350 - RNA, 19 nt, Artificial Sequence
  Description of Artificial Sequence: Synthetic oligonucleotide
aggcaauuauucuguacca

SEQ ID NO: 79351 - RNA, 19 nt, Artificial Sequence
  Description of Artificial Sequence: Synthetic oligonucleotide
uggaaaucguaacgccgcc

SEQ ID NO: 79352 - RNA, 19 nt, Artificial Sequence
  Description of Artificial Sequence: Synthetic oligonucleotide
ugcgguccaugcgagacgg

SEQ ID NO: 79353 - RNA, 19 nt, Artificial Sequence
  Description of Artificial Sequence: Synthetic oligonucleotide
caucugucaaugucuuagc

SEQ ID NO: 79354 - RNA, 19 nt, Artificial Sequence
  Description of Artificial Sequence: Synthetic oligonucleotide
uuugaucggcaguuuagua

SEQ ID NO: 79355 - RNA, 19 nt, Artificial Sequence
  Description of Artificial Sequence: Synthetic oligonucleotide
ucuuccgucgggacaguga

SEQ ID NO: 79356 - RNA, 19 nt, Artificial Sequence
  Description of Artificial Sequence: Synthetic oligonucleotide
ucacccgccaaguuccgcc

SEQ ID NO: 79357 - RNA, 19 nt, Artificial Sequence
  Description of Artificial Sequence: Synthetic oligonucleotide
acuauuggguccgcaucgc

SEQ ID NO: 79358 - RNA, 19 nt, Artificial Sequence
  Description of Artificial Sequence: Synthetic oligonucleotide
ucaguacuaccaaggggcu

SEQ ID NO: 79359 - RNA, 19 nt, Artificial Sequence
  Description of Artificial Sequence: Synthetic oligonucleotide
gagggguuagcgugaacug

SEQ ID NO: 79360 - RNA, 19 nt, Artificial Sequence
  Description of Artificial Sequence: Synthetic oligonucleotide
gagcccuccguucaauggc

SEQ ID NO: 79361 - RNA, 19 nt, Artificial Sequence
  Description of Artificial Sequence: Synthetic oligonucleotide
ucggcaucuaccugguagu

SEQ ID NO: 79362 - RNA, 19 nt, Artificial Sequence
  Description of Artificial Sequence: Synthetic oligonucleotide
uucuacauugcgguccaug

SEQ ID NO: 79363 - RNA, 19 nt, Artificial Sequence
  Description of Artificial Sequence: Synthetic oligonucleotide
guaaggggugcauugcuga

SEQ ID NO: 79364 - RNA, 19 nt, Artificial Sequence
  Description of Artificial Sequence: Synthetic oligonucleotide
uucgauaugccagguagau

SEQ ID NO: 79365 - RNA, 19 nt, Artificial Sequence
  Description of Artificial Sequence: Synthetic oligonucleotide
aaaaugcaagaugcacuca

SEQ ID NO: 79366 - RNA, 19 nt, Artificial Sequence
  Description of Artificial Sequence: Synthetic oligonucleotide
uacguagugccgaacucuc

SEQ ID NO: 79367 - RNA, 19 nt, Artificial Sequence
  Description of Artificial Sequence: Synthetic oligonucleotide
gcauggacccucaugauag

SEQ ID NO: 79368 - RNA, 19 nt, Artificial Sequence
  Description of Artificial Sequence: Synthetic oligonucleotide
uccgaauccgggcuguuua

SEQ ID NO: 79369 - RNA, 19 nt, Artificial Sequence
  Description of Artificial Sequence: Synthetic oligonucleotide
auuugaucggcaguuuagu

SEQ ID NO: 79370 - RNA, 19 nt, Artificial Sequence
  Description of Artificial Sequence: Synthetic oligonucleotide
uugcgguccaugcgagacg

SEQ ID NO: 79371 - RNA, 19 nt, Artificial Sequence
  Description of Artificial Sequence: Synthetic oligonucleotide
guaguuaauaagaccccac

SEQ ID NO: 79372 - RNA, 19 nt, Artificial Sequence
  Description of Artificial Sequence: Synthetic oligonucleotide
ugcgagacggauucuggaa

SEQ ID NO: 79373 - RNA, 19 nt, Artificial Sequence
  Description of Artificial Sequence: Synthetic oligonucleotide
cucaugauagcgcagacau

SEQ ID NO: 79374 - RNA, 19 nt, Artificial Sequence
  Description of Artificial Sequence: Synthetic oligonucleotide
ucccuucuugucccgucgg

SEQ ID NO: 79375 - RNA, 19 nt, Artificial Sequence
  Description of Artificial Sequence: Synthetic oligonucleotide
ugcgcaguccaaaguuuug

SEQ ID NO: 79376 - RNA, 19 nt, Artificial Sequence
  Description of Artificial Sequence: Synthetic oligonucleotide
guccaugcgagacggauuc

SEQ ID NO: 79377 - RNA, 19 nt, Artificial Sequence
  Description of Artificial Sequence: Synthetic oligonucleotide
acuugguauaagguguuga

SEQ ID NO: 79378 - RNA, 19 nt, Artificial Sequence
  Description of Artificial Sequence: Synthetic oligonucleotide
aggcucaaucucugggcac

SEQ ID NO: 79379 - RNA, 19 nt, Artificial Sequence
  Description of Artificial Sequence: Synthetic oligonucleotide
aggaaaauguuaggucgag

SEQ ID NO: 79380 - RNA, 19 nt, Artificial Sequence
  Description of Artificial Sequence: Synthetic oligonucleotide
caacuauuggguccgcauc

SEQ ID NO: 79381 - RNA, 19 nt, Artificial Sequence
  Description of Artificial Sequence: Synthetic oligonucleotide
agagcuuuccuuacguagu

SEQ ID NO: 79382 - RNA, 19 nt, Artificial Sequence
  Description of Artificial Sequence: Synthetic oligonucleotide
aagugucaaucaugaaguu

SEQ ID NO: 79383 - RNA, 19 nt, Artificial Sequence
  Description of Artificial Sequence: Synthetic oligonucleotide
gaugguguguccgccaaga

SEQ ID NO: 79384 - RNA, 19 nt, Artificial Sequence
  Description of Artificial Sequence: Synthetic oligonucleotide
gguggccuaaaacagcaac

SEQ ID NO: 79385 - RNA, 19 nt, Artificial Sequence
  Description of Artificial Sequence: Synthetic oligonucleotide
augguguguccgccaagac

SEQ ID NO: 79386 - RNA, 19 nt, Artificial Sequence
  Description of Artificial Sequence: Synthetic oligonucleotide
guagugccgaacucuccag

SEQ ID NO: 79387 - RNA, 19 nt, Artificial Sequence
  Description of Artificial Sequence: Synthetic oligonucleotide
ggaucgacgacagaggcca

SEQ ID NO: 79388 - RNA, 19 nt, Artificial Sequence
  Description of Artificial Sequence: Synthetic oligonucleotide
ucccuuguugccgugcugu

SEQ ID NO: 79389 - RNA, 19 nt, Artificial Sequence
  Description of Artificial Sequence: Synthetic oligonucleotide
uuaccucaucugucaaugu

SEQ ID NO: 79390 - RNA, 19 nt, Artificial Sequence
  Description of Artificial Sequence: Synthetic oligonucleotide
uguggaaggcuugucgguc

SEQ ID NO: 79391 - RNA, 19 nt, Artificial Sequence
  Description of Artificial Sequence: Synthetic oligonucleotide
gucugugcgcaguccaaag

SEQ ID NO: 79392 - RNA, 19 nt, Artificial Sequence
  Description of Artificial Sequence: Synthetic oligonucleotide
gguacccuauuccaucccc

SEQ ID NO: 79393 - RNA, 19 nt, Artificial Sequence
  Description of Artificial Sequence: Synthetic oligonucleotide
acggcuaggccaugggcug

SEQ ID NO: 79394 - RNA, 19 nt, Artificial Sequence
  Description of Artificial Sequence: Synthetic oligonucleotide
gaaaucguaacgccgccau

SEQ ID NO: 79395 - RNA, 19 nt, Artificial Sequence
  Description of Artificial Sequence: Synthetic oligonucleotide
aagguguugaggguccuuu

SEQ ID NO: 79396 - RNA, 19 nt, Artificial Sequence
  Description of Artificial Sequence: Synthetic oligonucleotide
ggagucuuggacuuguucu

SEQ ID NO: 79397 - RNA, 19 nt, Artificial Sequence
  Description of Artificial Sequence: Synthetic oligonucleotide
gaucggcaguuuaguaagg

SEQ ID NO: 79398 - RNA, 19 nt, Artificial Sequence
  Description of Artificial Sequence: Synthetic oligonucleotide
cucccuucuugucccgucg

SEQ ID NO: 79399 - RNA, 19 nt, Artificial Sequence
  Description of Artificial Sequence: Synthetic oligonucleotide
cguucaauggcgugaacgc

SEQ ID NO: 79400 - RNA, 19 nt, Artificial Sequence
  Description of Artificial Sequence: Synthetic oligonucleotide
augcgagacggauucugga

SEQ ID NO: 79401 - RNA, 19 nt, Artificial Sequence
  Description of Artificial Sequence: Synthetic oligonucleotide
ggucaugaacauuucuaca

SEQ ID NO: 79402 - RNA, 19 nt, Artificial Sequence
  Description of Artificial Sequence: Synthetic oligonucleotide
acuugccccaaacuuuaau

SEQ ID NO: 79403 - RNA, 19 nt, Artificial Sequence
  Description of Artificial Sequence: Synthetic oligonucleotide
aaguuucgauaugccaggu

SEQ ID NO: 79404 - RNA, 19 nt, Artificial Sequence
  Description of Artificial Sequence: Synthetic oligonucleotide
ggcgugaacgcuguuguag

SEQ ID NO: 79405 - RNA, 19 nt, Artificial Sequence
  Description of Artificial Sequence: Synthetic oligonucleotide
ucacgacuuccuccuggcc

SEQ ID NO: 79406 - RNA, 19 nt, Artificial Sequence
  Description of Artificial Sequence: Synthetic oligonucleotide
ggcaguuuaguaaggggug

SEQ ID NO: 79407 - RNA, 19 nt, Artificial Sequence
  Description of Artificial Sequence: Synthetic oligonucleotide
gucccgucgguccgaaucc

SEQ ID NO: 79408 - RNA, 19 nt, Artificial Sequence
  Description of Artificial Sequence: Synthetic oligonucleotide
uuguugccgugcuguagug

SEQ ID NO: 79409 - RNA, 19 nt, Artificial Sequence
  Description of Artificial Sequence: Synthetic oligonucleotide
ggggaucgacgacagaggc

SEQ ID NO: 79410 - RNA, 19 nt, Artificial Sequence
  Description of Artificial Sequence: Synthetic oligonucleotide
gaauccgggcuguuuaccu

SEQ ID NO: 79411 - RNA, 19 nt, Artificial Sequence
  Description of Artificial Sequence: Synthetic oligonucleotide
aucgacgacagaggccagg

SEQ ID NO: 79412 - RNA, 19 nt, Artificial Sequence
  Description of Artificial Sequence: Synthetic oligonucleotide
aguuucgauaugccaggua

SEQ ID NO: 79413 - RNA, 19 nt, Artificial Sequence
  Description of Artificial Sequence: Synthetic oligonucleotide
gcuagacagggacuuguug

SEQ ID NO: 79414 - RNA, 19 nt, Artificial Sequence
  Description of Artificial Sequence: Synthetic oligonucleotide
gacuugguauaagguguug

SEQ ID NO: 79415 - RNA, 19 nt, Artificial Sequence
  Description of Artificial Sequence: Synthetic oligonucleotide
uccucgugcaggucugggu

SEQ ID NO: 79416 - RNA, 19 nt, Artificial Sequence
  Description of Artificial Sequence: Synthetic oligonucleotide
gucgggacagugaugguuc

SEQ ID NO: 79417 - RNA, 19 nt, Artificial Sequence
  Description of Artificial Sequence: Synthetic oligonucleotide
uugccgugcuguaguguug

SEQ ID NO: 79418 - RNA, 19 nt, Artificial Sequence
  Description of Artificial Sequence: Synthetic oligonucleotide
cucuaggagcagcagcguc

SEQ ID NO: 79419 - RNA, 19 nt, Artificial Sequence
  Description of Artificial Sequence: Synthetic oligonucleotide
cuucaaugggaaggcgaag

SEQ ID NO: 79420 - RNA, 19 nt, Artificial Sequence
  Description of Artificial Sequence: Synthetic oligonucleotide
ucgguccgaauccgggcug

SEQ ID NO: 79421 - RNA, 19 nt, Artificial Sequence
  Description of Artificial Sequence: Synthetic oligonucleotide
gugguucccgcaaugccgc

SEQ ID NO: 79422 - RNA, 19 nt, Artificial Sequence
  Description of Artificial Sequence: Synthetic oligonucleotide
ggcaacucggggaucgacg

SEQ ID NO: 79423 - RNA, 19 nt, Artificial Sequence
  Description of Artificial Sequence: Synthetic oligonucleotide
aguuuaguaaggggugcau

SEQ ID NO: 79424 - RNA, 19 nt, Artificial Sequence
  Description of Artificial Sequence: Synthetic oligonucleotide
gugaacgcuguuguaguca

SEQ ID NO: 79425 - RNA, 19 nt, Artificial Sequence
  Description of Artificial Sequence: Synthetic oligonucleotide
acguagugccgaacucucc

SEQ ID NO: 79426 - RNA, 19 nt, Artificial Sequence
  Description of Artificial Sequence: Synthetic oligonucleotide
ugcaugucuguugguuucu

SEQ ID NO: 79427 - RNA, 19 nt, Artificial Sequence
  Description of Artificial Sequence: Synthetic oligonucleotide
uuccuuacguagugccgaa

SEQ ID NO: 79428 - RNA, 19 nt, Artificial Sequence
  Description of Artificial Sequence: Synthetic oligonucleotide
agcccuccguucaauggcg

SEQ ID NO: 79429 - RNA, 19 nt, Artificial Sequence
  Description of Artificial Sequence: Synthetic oligonucleotide
cuuguugccgugcuguagu

SEQ ID NO: 79430 - RNA, 19 nt, Artificial Sequence
  Description of Artificial Sequence: Synthetic oligonucleotide
ggcggcauagcugggaaug

SEQ ID NO: 79431 - RNA, 19 nt, Artificial Sequence
  Description of Artificial Sequence: Synthetic oligonucleotide
uggcugcugcugcugcugc

SEQ ID NO: 79432 - RNA, 19 nt, Artificial Sequence
  Description of Artificial Sequence: Synthetic oligonucleotide
cuugccccaaacuuuaauu

SEQ ID NO: 79433 - RNA, 19 nt, Artificial Sequence
  Description of Artificial Sequence: Synthetic oligonucleotide
ugcucauaacaggguuucc

SEQ ID NO: 79434 - RNA, 19 nt, Artificial Sequence
  Description of Artificial Sequence: Synthetic oligonucleotide
aggcuagacagggacuugu

SEQ ID NO: 79435 - RNA, 19 nt, Artificial Sequence
  Description of Artificial Sequence: Synthetic oligonucleotide
uccugcgugcggcuuccca

SEQ ID NO: 79436 - RNA, 19 nt, Artificial Sequence
  Description of Artificial Sequence: Synthetic oligonucleotide
uguugccgugcuguagugu

SEQ ID NO: 79437 - RNA, 19 nt, Artificial Sequence
  Description of Artificial Sequence: Synthetic oligonucleotide
gcaguuuaguaaggggugc

SEQ ID NO: 79438 - RNA, 19 nt, Artificial Sequence
  Description of Artificial Sequence: Synthetic oligonucleotide
ucucgcucccgguccauua

SEQ ID NO: 79439 - RNA, 19 nt, Artificial Sequence
  Description of Artificial Sequence: Synthetic oligonucleotide
gcaacucggggaucgacga

SEQ ID NO: 79440 - RNA, 19 nt, Artificial Sequence
  Description of Artificial Sequence: Synthetic oligonucleotide
ucccgucgguccgaauccg

SEQ ID NO: 79441 - RNA, 19 nt, Artificial Sequence
  Description of Artificial Sequence: Synthetic oligonucleotide
ugcugcugcugcugcugca

SEQ ID NO: 79442 - RNA, 19 nt, Artificial Sequence
  Description of Artificial Sequence: Synthetic oligonucleotide
cugcugcugcugcugcugc

SEQ ID NO: 79443 - RNA, 19 nt, Artificial Sequence
  Description of Artificial Sequence: Synthetic oligonucleotide
acccgccaaguuccgccgg

SEQ ID NO: 79444 - RNA, 19 nt, Artificial Sequence
  Description of Artificial Sequence: Synthetic oligonucleotide
acucggggaucgacgacag

SEQ ID NO: 79445 - RNA, 19 nt, Artificial Sequence
  Description of Artificial Sequence: Synthetic oligonucleotide
gacccucaugauagcgcag

SEQ ID NO: 79446 - RNA, 19 nt, Artificial Sequence
  Description of Artificial Sequence: Synthetic oligonucleotide
ggagggguuagcgugaacu

SEQ ID NO: 79447 - RNA, 19 nt, Artificial Sequence
  Description of Artificial Sequence: Synthetic oligonucleotide
gacggauucuggaaaucgu

SEQ ID NO: 79448 - RNA, 19 nt, Artificial Sequence
  Description of Artificial Sequence: Synthetic oligonucleotide
guugccgugcuguaguguu

SEQ ID NO: 79449 - RNA, 19 nt, Artificial Sequence
  Description of Artificial Sequence: Synthetic oligonucleotide
aggaaacauuugaucggca

SEQ ID NO: 79450 - RNA, 19 nt, Artificial Sequence
  Description of Artificial Sequence: Synthetic oligonucleotide
guacccuauuccaucccca

SEQ ID NO: 79451 - RNA, 19 nt, Artificial Sequence
  Description of Artificial Sequence: Synthetic oligonucleotide
ccuuucgccuucugacucc

SEQ ID NO: 79452 - RNA, 19 nt, Artificial Sequence
  Description of Artificial Sequence: Synthetic oligonucleotide
gggauucagucgguaagug

SEQ ID NO: 79453 - RNA, 19 nt, Artificial Sequence
  Description of Artificial Sequence: Synthetic oligonucleotide
ugcugcugcugcugcugcu

SEQ ID NO: 79454 - RNA, 19 nt, Artificial Sequence
  Description of Artificial Sequence: Synthetic oligonucleotide
cuugucggucggccaggag

SEQ ID NO: 79455 - RNA, 19 nt, Artificial Sequence
  Description of Artificial Sequence: Synthetic oligonucleotide
ucuggcccucugcccgugc

SEQ ID NO: 79456 - RNA, 19 nt, Artificial Sequence
  Description of Artificial Sequence: Synthetic oligonucleotide
caacucggggaucgacgac

SEQ ID NO: 79457 - RNA, 19 nt, Artificial Sequence
  Description of Artificial Sequence: Synthetic oligonucleotide
ggaaaauguuaggucgaga

SEQ ID NO: 79458 - RNA, 19 nt, Artificial Sequence
  Description of Artificial Sequence: Synthetic oligonucleotide
uccuuacguagugccgaac

SEQ ID NO: 79459 - RNA, 19 nt, Artificial Sequence
  Description of Artificial Sequence: Synthetic oligonucleotide
agauacuccuggggauuca

SEQ ID NO: 79460 - RNA, 19 nt, Artificial Sequence
  Description of Artificial Sequence: Synthetic oligonucleotide
ggcugacucaguacuacca

SEQ ID NO: 79461 - RNA, 19 nt, Artificial Sequence
  Description of Artificial Sequence: Synthetic oligonucleotide
gggguuagcgugaacugga

SEQ ID NO: 79462 - RNA, 19 nt, Artificial Sequence
  Description of Artificial Sequence: Synthetic oligonucleotide
gguaagugucaaucaugaa

SEQ ID NO: 79463 - RNA, 19 nt, Artificial Sequence
  Description of Artificial Sequence: Synthetic oligonucleotide
ggcauggacccucaugaua

SEQ ID NO: 79464 - RNA, 19 nt, Artificial Sequence
  Description of Artificial Sequence: Synthetic oligonucleotide
ggauucagucgguaagugu

SEQ ID NO: 79465 - RNA, 19 nt, Artificial Sequence
  Description of Artificial Sequence: Synthetic oligonucleotide
ggcaauuauucuguaccaa

SEQ ID NO: 79466 - RNA, 19 nt, Artificial Sequence
  Description of Artificial Sequence: Synthetic oligonucleotide
cccuauuccauccccacaa

SEQ ID NO: 79467 - RNA, 19 nt, Artificial Sequence
  Description of Artificial Sequence: Synthetic oligonucleotide
gggaucgacgacagaggcc

SEQ ID NO: 79468 - RNA, 19 nt, Artificial Sequence
  Description of Artificial Sequence: Synthetic oligonucleotide
caguacuaccaaggggcuc

SEQ ID NO: 79469 - RNA, 19 nt, Artificial Sequence
  Description of Artificial Sequence: Synthetic oligonucleotide
guucaauggcgugaacgcu

SEQ ID NO: 79470 - RNA, 19 nt, Artificial Sequence
  Description of Artificial Sequence: Synthetic oligonucleotide
ccgucgguccgaauccggg

SEQ ID NO: 79471 - RNA, 19 nt, Artificial Sequence
  Description of Artificial Sequence: Synthetic oligonucleotide
cugcgugcggcuucccaca

SEQ ID NO: 79472 - RNA, 19 nt, Artificial Sequence
  Description of Artificial Sequence: Synthetic oligonucleotide
ugcgugcggcuucccacau

SEQ ID NO: 79473 - RNA, 19 nt, Artificial Sequence
  Description of Artificial Sequence: Synthetic oligonucleotide
gcgagacggauucuggaaa

SEQ ID NO: 79474 - RNA, 19 nt, Artificial Sequence
  Description of Artificial Sequence: Synthetic oligonucleotide
cuugggagccucacuggcu

SEQ ID NO: 79475 - RNA, 19 nt, Artificial Sequence
  Description of Artificial Sequence: Synthetic oligonucleotide
gccacggcuaggccauggg

SEQ ID NO: 79476 - RNA, 19 nt, Artificial Sequence
  Description of Artificial Sequence: Synthetic oligonucleotide
gaucgacgacagaggccag

SEQ ID NO: 79477 - RNA, 19 nt, Artificial Sequence
  Description of Artificial Sequence: Synthetic oligonucleotide
ggaaaucguaacgccgcca

SEQ ID NO: 79478 - RNA, 19 nt, Artificial Sequence
  Description of Artificial Sequence: Synthetic oligonucleotide
cuuucgccuucugacucca

SEQ ID NO: 79479 - RNA, 19 nt, Artificial Sequence
  Description of Artificial Sequence: Synthetic oligonucleotide
cggggaucgacgacagagg

SEQ ID NO: 79480 - RNA, 19 nt, Artificial Sequence
  Description of Artificial Sequence: Synthetic oligonucleotide
ccuauuccauccccacaac

SEQ ID NO: 79481 - RNA, 19 nt, Artificial Sequence
  Description of Artificial Sequence: Synthetic oligonucleotide
cauugcgguccaugcgaga

SEQ ID NO: 79482 - RNA, 19 nt, Artificial Sequence
  Description of Artificial Sequence: Synthetic oligonucleotide
uggcgugaacgcuguugua

SEQ ID NO: 79483 - RNA, 19 nt, Artificial Sequence
  Description of Artificial Sequence: Synthetic oligonucleotide
gcugcugcugcugcugcug

SEQ ID NO: 79484 - RNA, 19 nt, Artificial Sequence
  Description of Artificial Sequence: Synthetic oligonucleotide
gguccgccacgccugggug

SEQ ID NO: 79485 - RNA, 19 nt, Artificial Sequence
  Description of Artificial Sequence: Synthetic oligonucleotide
cguagugccgaacucucca

SEQ ID NO: 79486 - RNA, 19 nt, Artificial Sequence
  Description of Artificial Sequence: Synthetic oligonucleotide
cucuauggccucgcuuuga

SEQ ID NO: 79487 - RNA, 19 nt, Artificial Sequence
  Description of Artificial Sequence: Synthetic oligonucleotide
uccucccucccaggcauua

SEQ ID NO: 79488 - RNA, 19 nt, Artificial Sequence
  Description of Artificial Sequence: Synthetic oligonucleotide
caggguuucccgacugacu

SEQ ID NO: 79489 - RNA, 19 nt, Artificial Sequence
  Description of Artificial Sequence: Synthetic oligonucleotide
ccgaauccgggcuguuuac

SEQ ID NO: 79490 - RNA, 19 nt, Artificial Sequence
  Description of Artificial Sequence: Synthetic oligonucleotide
gguugcccucaccaauguc

SEQ ID NO: 79491 - RNA, 19 nt, Artificial Sequence
  Description of Artificial Sequence: Synthetic oligonucleotide
ccuuacguagugccgaacu

SEQ ID NO: 79492 - RNA, 19 nt, Artificial Sequence
  Description of Artificial Sequence: Synthetic oligonucleotide
gugccgaacucuccaggcu

SEQ ID NO: 79493 - RNA, 19 nt, Artificial Sequence
  Description of Artificial Sequence: Synthetic oligonucleotide
ggcuugucggucggccagg

SEQ ID NO: 79494 - RNA, 19 nt, Artificial Sequence
  Description of Artificial Sequence: Synthetic oligonucleotide
cuauuggguccgcaucgcu

SEQ ID NO: 79495 - RNA, 19 nt, Artificial Sequence
  Description of Artificial Sequence: Synthetic oligonucleotide
cggauucuggaaaucguaa

SEQ ID NO: 79496 - RNA, 19 nt, Artificial Sequence
  Description of Artificial Sequence: Synthetic oligonucleotide
cgucgguccgaauccgggc

SEQ ID NO: 79497 - RNA, 19 nt, Artificial Sequence
  Description of Artificial Sequence: Synthetic oligonucleotide
cccgucgguccgaauccgg

SEQ ID NO: 79498 - RNA, 19 nt, Artificial Sequence
  Description of Artificial Sequence: Synthetic oligonucleotide
gcgugaacgcuguuguagu

SEQ ID NO: 79499 - RNA, 19 nt, Artificial Sequence
  Description of Artificial Sequence: Synthetic oligonucleotide
ccucgcuuugacuugguau

SEQ ID NO: 79500 - RNA, 19 nt, Artificial Sequence
  Description of Artificial Sequence: Synthetic oligonucleotide
ucggggagacaggcuuggu

SEQ ID NO: 79501 - RNA, 19 nt, Artificial Sequence
  Description of Artificial Sequence: Synthetic oligonucleotide
gguuagcgugaacuggaau

SEQ ID NO: 79502 - RNA, 19 nt, Artificial Sequence
  Description of Artificial Sequence: Synthetic oligonucleotide
cgugaacgcuguuguaguc

SEQ ID NO: 79503 - RNA, 19 nt, Artificial Sequence
  Description of Artificial Sequence: Synthetic oligonucleotide
cugugaccuuggccgcuuc

SEQ ID NO: 79504 - RNA, 19 nt, Artificial Sequence
  Description of Artificial Sequence: Synthetic oligonucleotide
cggcaguuuaguaaggggu

SEQ ID NO: 79505 - RNA, 19 nt, Artificial Sequence
  Description of Artificial Sequence: Synthetic oligonucleotide
gaggcaacucggggaucga

SEQ ID NO: 79506 - RNA, 19 nt, Artificial Sequence
  Description of Artificial Sequence: Synthetic oligonucleotide
gaacgcuguuguagucaaa

SEQ ID NO: 79507 - RNA, 19 nt, Artificial Sequence
  Description of Artificial Sequence: Synthetic oligonucleotide
uuccgccggcaggcagugg

SEQ ID NO: 79508 - RNA, 19 nt, Artificial Sequence
  Description of Artificial Sequence: Synthetic oligonucleotide
cagcaggagggguuagcgu

SEQ ID NO: 79509 - RNA, 19 nt, Artificial Sequence
  Description of Artificial Sequence: Synthetic oligonucleotide
cccgccaaguuccgccggc

SEQ ID NO: 79510 - RNA, 19 nt, Artificial Sequence
  Description of Artificial Sequence: Synthetic oligonucleotide
uugucccgucgguccgaau

SEQ ID NO: 79511 - RNA, 19 nt, Artificial Sequence
  Description of Artificial Sequence: Synthetic oligonucleotide
caaguuccgccggcaggca

SEQ ID NO: 79512 - RNA, 19 nt, Artificial Sequence
  Description of Artificial Sequence: Synthetic oligonucleotide
gugcgcaguccaaaguuuu

SEQ ID NO: 79513 - RNA, 19 nt, Artificial Sequence
  Description of Artificial Sequence: Synthetic oligonucleotide
ggagccacggcuaggccau

SEQ ID NO: 79514 - RNA, 19 nt, Artificial Sequence
  Description of Artificial Sequence: Synthetic oligonucleotide
ggguuagcgugaacuggaa

SEQ ID NO: 79515 - RNA, 19 nt, Artificial Sequence
  Description of Artificial Sequence: Synthetic oligonucleotide
gucggucggccaggagcug

SEQ ID NO: 79516 - RNA, 19 nt, Artificial Sequence
  Description of Artificial Sequence: Synthetic oligonucleotide
cucggggaucgacgacaga

SEQ ID NO: 79517 - RNA, 19 nt, Artificial Sequence
  Description of Artificial Sequence: Synthetic oligonucleotide
caucuaccugguaguuaau

SEQ ID NO: 79518 - RNA, 19 nt, Artificial Sequence
  Description of Artificial Sequence: Synthetic oligonucleotide
cgugcggcuucccacaugu

SEQ ID NO: 79519 - RNA, 19 nt, Artificial Sequence
  Description of Artificial Sequence: Synthetic oligonucleotide
cucgcucccgguccauuau

SEQ ID NO: 79520 - RNA, 19 nt, Artificial Sequence
  Description of Artificial Sequence: Synthetic oligonucleotide
ccgcaaugccgcugcuuuc

SEQ ID NO: 79521 - RNA, 19 nt, Artificial Sequence
  Description of Artificial Sequence: Synthetic oligonucleotide
gcgugcggcuucccacaug

SEQ ID NO: 79522 - RNA, 19 nt, Artificial Sequence
  Description of Artificial Sequence: Synthetic oligonucleotide
gccucuuaacaaugucuuu

SEQ ID NO: 79523 - RNA, 19 nt, Artificial Sequence
  Description of Artificial Sequence: Synthetic oligonucleotide
gccgugcuguaguguugac

SEQ ID NO: 79524 - RNA, 19 nt, Artificial Sequence
  Description of Artificial Sequence: Synthetic oligonucleotide
gguccgcaucgcucuucuc

SEQ ID NO: 79525 - RNA, 19 nt, Artificial Sequence
  Description of Artificial Sequence: Synthetic oligonucleotide
gcucccgguccauuaucgu

SEQ ID NO: 79526 - RNA, 19 nt, Artificial Sequence
  Description of Artificial Sequence: Synthetic oligonucleotide
gcuugucggucggccagga

SEQ ID NO: 79527 - RNA, 19 nt, Artificial Sequence
  Description of Artificial Sequence: Synthetic oligonucleotide
gccucgcuuugacuuggua

SEQ ID NO: 79528 - RNA, 19 nt, Artificial Sequence
  Description of Artificial Sequence: Synthetic oligonucleotide
gguccaugcgagacggauu

SEQ ID NO: 79529 - RNA, 19 nt, Artificial Sequence
  Description of Artificial Sequence: Synthetic oligonucleotide
ccgacugacugaaggggau

SEQ ID NO: 79530 - RNA, 19 nt, Artificial Sequence
  Description of Artificial Sequence: Synthetic oligonucleotide
gcugcugcugcugcugcau

SEQ ID NO: 79531 - RNA, 19 nt, Artificial Sequence
  Description of Artificial Sequence: Synthetic oligonucleotide
guccgaauccgggcuguuu

SEQ ID NO: 79532 - RNA, 19 nt, Artificial Sequence
  Description of Artificial Sequence: Synthetic oligonucleotide
ggcugcugcugcugcugcu

SEQ ID NO: 79533 - RNA, 19 nt, Artificial Sequence
  Description of Artificial Sequence: Synthetic oligonucleotide
ccgggcuguuuaccucauc

SEQ ID NO: 79534 - RNA, 19 nt, Artificial Sequence
  Description of Artificial Sequence: Synthetic oligonucleotide
ggcuagacagggacuuguu

SEQ ID NO: 79535 - RNA, 19 nt, Artificial Sequence
  Description of Artificial Sequence: Synthetic oligonucleotide
cgaguggcgcuggcugcag

SEQ ID NO: 79536 - RNA, 19 nt, Artificial Sequence
  Description of Artificial Sequence: Synthetic oligonucleotide
cccgugccucaucaguacu

SEQ ID NO: 79537 - RNA, 19 nt, Artificial Sequence
  Description of Artificial Sequence: Synthetic oligonucleotide
caauggcgugaacgcuguu

SEQ ID NO: 79538 - RNA, 19 nt, Artificial Sequence
  Description of Artificial Sequence: Synthetic oligonucleotide
ccgccaaguuccgccggca

SEQ ID NO: 79539 - RNA, 19 nt, Artificial Sequence
  Description of Artificial Sequence: Synthetic oligonucleotide
cgucgggacagugaugguu

SEQ ID NO: 79540 - RNA, 19 nt, Artificial Sequence
  Description of Artificial Sequence: Synthetic oligonucleotide
gcgguccaugcgagacgga

SEQ ID NO: 79541 - RNA, 19 nt, Artificial Sequence
  Description of Artificial Sequence: Synthetic oligonucleotide
ccgucgggacagugauggu

SEQ ID NO: 79542 - RNA, 19 nt, Artificial Sequence
  Description of Artificial Sequence: Synthetic oligonucleotide
ccgccggcaggcaguggau

SEQ ID NO: 79543 - RNA, 19 nt, Artificial Sequence
  Description of Artificial Sequence: Synthetic oligonucleotide
cggcaucuaccugguaguu

SEQ ID NO: 79544 - RNA, 19 nt, Artificial Sequence
  Description of Artificial Sequence: Synthetic oligonucleotide
auugguaacacguacauag

SEQ ID NO: 79545 - RNA, 19 nt, Artificial Sequence
  Description of Artificial Sequence: Synthetic oligonucleotide
aagaaagugguuuaugauc

SEQ ID NO: 79546 - RNA, 19 nt, Artificial Sequence
  Description of Artificial Sequence: Synthetic oligonucleotide
uagauaucgagucagagga

SEQ ID NO: 79547 - RNA, 19 nt, Artificial Sequence
  Description of Artificial Sequence: Synthetic oligonucleotide
aaacucaauacauuuaaca

SEQ ID NO: 79548 - RNA, 19 nt, Artificial Sequence
  Description of Artificial Sequence: Synthetic oligonucleotide
uuuuagaccacuagaauug

SEQ ID NO: 79549 - RNA, 19 nt, Artificial Sequence
  Description of Artificial Sequence: Synthetic oligonucleotide
uuuugauaagguauccucg

SEQ ID NO: 79550 - RNA, 19 nt, Artificial Sequence
  Description of Artificial Sequence: Synthetic oligonucleotide
aauguuuuagaccacuaga

SEQ ID NO: 79551 - RNA, 19 nt, Artificial Sequence
  Description of Artificial Sequence: Synthetic oligonucleotide
auagagaccuucuuugugc

SEQ ID NO: 79552 - RNA, 19 nt, Artificial Sequence
  Description of Artificial Sequence: Synthetic oligonucleotide
ugcuaaaacaauuucauuc

SEQ ID NO: 79553 - RNA, 19 nt, Artificial Sequence
  Description of Artificial Sequence: Synthetic oligonucleotide
auaguagcuucuuugaggg

SEQ ID NO: 79554 - RNA, 19 nt, Artificial Sequence
  Description of Artificial Sequence: Synthetic oligonucleotide
augaucuaugcauaguagc

SEQ ID NO: 79555 - RNA, 19 nt, Artificial Sequence
  Description of Artificial Sequence: Synthetic oligonucleotide
aguaaaaucuugcaucauc

SEQ ID NO: 79556 - RNA, 19 nt, Artificial Sequence
  Description of Artificial Sequence: Synthetic oligonucleotide
uaguuagagaguaacacug

SEQ ID NO: 79557 - RNA, 19 nt, Artificial Sequence
  Description of Artificial Sequence: Synthetic oligonucleotide
uucuaaagugcucugaacu

SEQ ID NO: 79558 - RNA, 19 nt, Artificial Sequence
  Description of Artificial Sequence: Synthetic oligonucleotide
aucguuauuagauuguucu

SEQ ID NO: 79559 - RNA, 19 nt, Artificial Sequence
  Description of Artificial Sequence: Synthetic oligonucleotide
agaguauugggguuaauag

SEQ ID NO: 79560 - RNA, 19 nt, Artificial Sequence
  Description of Artificial Sequence: Synthetic oligonucleotide
aauauuguggcccgccguc

SEQ ID NO: 79561 - RNA, 19 nt, Artificial Sequence
  Description of Artificial Sequence: Synthetic oligonucleotide
ugcaaauugauuagaacac

SEQ ID NO: 79562 - RNA, 19 nt, Artificial Sequence
  Description of Artificial Sequence: Synthetic oligonucleotide
aggacaauuguccagccgg

SEQ ID NO: 79563 - RNA, 19 nt, Artificial Sequence
  Description of Artificial Sequence: Synthetic oligonucleotide
aaaacaggugucaauauug

SEQ ID NO: 79564 - RNA, 19 nt, Artificial Sequence
  Description of Artificial Sequence: Synthetic oligonucleotide
uacauaguuauccacggga

SEQ ID NO: 79565 - RNA, 19 nt, Artificial Sequence
  Description of Artificial Sequence: Synthetic oligonucleotide
uuauuuaaccaacaucaac

SEQ ID NO: 79566 - RNA, 19 nt, Artificial Sequence
  Description of Artificial Sequence: Synthetic oligonucleotide
uuccgguuuagauugaucc

SEQ ID NO: 79567 - RNA, 19 nt, Artificial Sequence
  Description of Artificial Sequence: Synthetic oligonucleotide
gugauuauaaccucugagc

SEQ ID NO: 79568 - RNA, 19 nt, Artificial Sequence
  Description of Artificial Sequence: Synthetic oligonucleotide
agauucguggaauugucac

SEQ ID NO: 79569 - RNA, 19 nt, Artificial Sequence
  Description of Artificial Sequence: Synthetic oligonucleotide
aagaaggcaguugauuacc

SEQ ID NO: 79570 - RNA, 19 nt, Artificial Sequence
  Description of Artificial Sequence: Synthetic oligonucleotide
aaucuucgcaauuacauuu

SEQ ID NO: 79571 - RNA, 19 nt, Artificial Sequence
  Description of Artificial Sequence: Synthetic oligonucleotide
uauuauugguaacacguac

SEQ ID NO: 79572 - RNA, 19 nt, Artificial Sequence
  Description of Artificial Sequence: Synthetic oligonucleotide
ugucuuuacaucaaccaac

SEQ ID NO: 79573 - RNA, 19 nt, Artificial Sequence
  Description of Artificial Sequence: Synthetic oligonucleotide
uagaccacuagaauugaag

SEQ ID NO: 79574 - RNA, 19 nt, Artificial Sequence
  Description of Artificial Sequence: Synthetic oligonucleotide
aaguauaucacuccuuuua

SEQ ID NO: 79575 - RNA, 19 nt, Artificial Sequence
  Description of Artificial Sequence: Synthetic oligonucleotide
auggcuugaaaguauauca

SEQ ID NO: 79576 - RNA, 19 nt, Artificial Sequence
  Description of Artificial Sequence: Synthetic oligonucleotide
uacauagguauaaaaguac

SEQ ID NO: 79577 - RNA, 19 nt, Artificial Sequence
  Description of Artificial Sequence: Synthetic oligonucleotide
guagauaucgagucagagg

SEQ ID NO: 79578 - RNA, 19 nt, Artificial Sequence
  Description of Artificial Sequence: Synthetic oligonucleotide
gauaagguauccucggcag

SEQ ID NO: 79579 - RNA, 19 nt, Artificial Sequence
  Description of Artificial Sequence: Synthetic oligonucleotide
ugaucuaugcauaguagcu

SEQ ID NO: 79580 - RNA, 19 nt, Artificial Sequence
  Description of Artificial Sequence: Synthetic oligonucleotide
gaaggggauagauucgugg

SEQ ID NO: 79581 - RNA, 19 nt, Artificial Sequence
  Description of Artificial Sequence: Synthetic oligonucleotide
auauuagaugugcuggcac

SEQ ID NO: 79582 - RNA, 19 nt, Artificial Sequence
  Description of Artificial Sequence: Synthetic oligonucleotide
aauggaaacuauucaagua

SEQ ID NO: 79583 - RNA, 19 nt, Artificial Sequence
  Description of Artificial Sequence: Synthetic oligonucleotide
uuccuagcgacaauguucc

SEQ ID NO: 79584 - RNA, 19 nt, Artificial Sequence
  Description of Artificial Sequence: Synthetic oligonucleotide
gauaucgagucagaggacg

SEQ ID NO: 79585 - RNA, 19 nt, Artificial Sequence
  Description of Artificial Sequence: Synthetic oligonucleotide
gaguuuaugagaaaugcac

SEQ ID NO: 79586 - RNA, 19 nt, Artificial Sequence
  Description of Artificial Sequence: Synthetic oligonucleotide
accacuagaauugaagggg

SEQ ID NO: 79587 - RNA, 19 nt, Artificial Sequence
  Description of Artificial Sequence: Synthetic oligonucleotide
auaguuauccacgggaggg

SEQ ID NO: 79588 - RNA, 19 nt, Artificial Sequence
  Description of Artificial Sequence: Synthetic oligonucleotide
uuagauugauccagaaucu

SEQ ID NO: 79589 - RNA, 19 nt, Artificial Sequence
  Description of Artificial Sequence: Synthetic oligonucleotide
agaaaaguugugucuuuac

SEQ ID NO: 79590 - RNA, 19 nt, Artificial Sequence
  Description of Artificial Sequence: Synthetic oligonucleotide
gaccacuagaauugaaggg

SEQ ID NO: 79591 - RNA, 19 nt, Artificial Sequence
  Description of Artificial Sequence: Synthetic oligonucleotide
uucaaguaaaaucuugcau

SEQ ID NO: 79592 - RNA, 19 nt, Artificial Sequence
  Description of Artificial Sequence: Synthetic oligonucleotide
aaaacuaccugaugucaca

SEQ ID NO: 79593 - RNA, 19 nt, Artificial Sequence
  Description of Artificial Sequence: Synthetic oligonucleotide
auuuaaccaacaucaacug

SEQ ID NO: 79594 - RNA, 19 nt, Artificial Sequence
  Description of Artificial Sequence: Synthetic oligonucleotide
uggagcaucguuauuagau

SEQ ID NO: 79595 - RNA, 19 nt, Artificial Sequence
  Description of Artificial Sequence: Synthetic oligonucleotide
uuagagaguaacacugaug

SEQ ID NO: 79596 - RNA, 19 nt, Artificial Sequence
  Description of Artificial Sequence: Synthetic oligonucleotide
cacgaaguggucuuguucc

SEQ ID NO: 79597 - RNA, 19 nt, Artificial Sequence
  Description of Artificial Sequence: Synthetic oligonucleotide
guaaaaucuugcaucaucc

SEQ ID NO: 79598 - RNA, 19 nt, Artificial Sequence
  Description of Artificial Sequence: Synthetic oligonucleotide
ugcgguuguaaaauucagg

SEQ ID NO: 79599 - RNA, 19 nt, Artificial Sequence
  Description of Artificial Sequence: Synthetic oligonucleotide
ucgcaauuacauuuuaaug

SEQ ID NO: 79600 - RNA, 19 nt, Artificial Sequence
  Description of Artificial Sequence: Synthetic oligonucleotide
agugcguauaucccucugc

SEQ ID NO: 79601 - RNA, 19 nt, Artificial Sequence
  Description of Artificial Sequence: Synthetic oligonucleotide
ugauaagguauccucggca

SEQ ID NO: 79602 - RNA, 19 nt, Artificial Sequence
  Description of Artificial Sequence: Synthetic oligonucleotide
aguuuguuaacuugaauuu

SEQ ID NO: 79603 - RNA, 19 nt, Artificial Sequence
  Description of Artificial Sequence: Synthetic oligonucleotide
uucgcaauuacauuuuaau

SEQ ID NO: 79604 - RNA, 19 nt, Artificial Sequence
  Description of Artificial Sequence: Synthetic oligonucleotide
cuugaggugaucguaauac

SEQ ID NO: 79605 - RNA, 19 nt, Artificial Sequence
  Description of Artificial Sequence: Synthetic oligonucleotide
uguaaaucaggucaacauu

SEQ ID NO: 79606 - RNA, 19 nt, Artificial Sequence
  Description of Artificial Sequence: Synthetic oligonucleotide
ugaggugaucguaauacac

SEQ ID NO: 79607 - RNA, 19 nt, Artificial Sequence
  Description of Artificial Sequence: Synthetic oligonucleotide
cauagaguuuguuaacuug

SEQ ID NO: 79608 - RNA, 19 nt, Artificial Sequence
  Description of Artificial Sequence: Synthetic oligonucleotide
ugauugacacaugaaaaca

SEQ ID NO: 79609 - RNA, 19 nt, Artificial Sequence
  Description of Artificial Sequence: Synthetic oligonucleotide
uuauugguaacacguacau

SEQ ID NO: 79610 - RNA, 19 nt, Artificial Sequence
  Description of Artificial Sequence: Synthetic oligonucleotide
uaucuaaaagguucagaca

SEQ ID NO: 79611 - RNA, 19 nt, Artificial Sequence
  Description of Artificial Sequence: Synthetic oligonucleotide
uuacauaguuauccacggg

SEQ ID NO: 79612 - RNA, 19 nt, Artificial Sequence
  Description of Artificial Sequence: Synthetic oligonucleotide
guaauggaaacuauucaag

SEQ ID NO: 79613 - RNA, 19 nt, Artificial Sequence
  Description of Artificial Sequence: Synthetic oligonucleotide
acugauaaaagaguuuaug

SEQ ID NO: 79614 - RNA, 19 nt, Artificial Sequence
  Description of Artificial Sequence: Synthetic oligonucleotide
uccuccgagauucugaguc

SEQ ID NO: 79615 - RNA, 19 nt, Artificial Sequence
  Description of Artificial Sequence: Synthetic oligonucleotide
agacaugcaaauugauuag

SEQ ID NO: 79616 - RNA, 19 nt, Artificial Sequence
  Description of Artificial Sequence: Synthetic oligonucleotide
cuuccuagcgacaauguuc

SEQ ID NO: 79617 - RNA, 19 nt, Artificial Sequence
  Description of Artificial Sequence: Synthetic oligonucleotide
aauguuccguugauacucc

SEQ ID NO: 79618 - RNA, 19 nt, Artificial Sequence
  Description of Artificial Sequence: Synthetic oligonucleotide
gaguaaagcuccugaagcc

SEQ ID NO: 79619 - RNA, 19 nt, Artificial Sequence
  Description of Artificial Sequence: Synthetic oligonucleotide
ucuuucgaggcaaaguguc

SEQ ID NO: 79620 - RNA, 19 nt, Artificial Sequence
  Description of Artificial Sequence: Synthetic oligonucleotide
auuagcauucuugagguga

SEQ ID NO: 79621 - RNA, 19 nt, Artificial Sequence
  Description of Artificial Sequence: Synthetic oligonucleotide
ucuaaucauuauuuucuac

SEQ ID NO: 79622 - RNA, 19 nt, Artificial Sequence
  Description of Artificial Sequence: Synthetic oligonucleotide
agauucugaguccuugguc

SEQ ID NO: 79623 - RNA, 19 nt, Artificial Sequence
  Description of Artificial Sequence: Synthetic oligonucleotide
aauauuagaugugcuggca

SEQ ID NO: 79624 - RNA, 19 nt, Artificial Sequence
  Description of Artificial Sequence: Synthetic oligonucleotide
aaaucuucgcaauuacauu

SEQ ID NO: 79625 - RNA, 19 nt, Artificial Sequence
  Description of Artificial Sequence: Synthetic oligonucleotide
uauuagaugugcuggcacu

SEQ ID NO: 79626 - RNA, 19 nt, Artificial Sequence
  Description of Artificial Sequence: Synthetic oligonucleotide
uucacacuaaaugugagua

SEQ ID NO: 79627 - RNA, 19 nt, Artificial Sequence
  Description of Artificial Sequence: Synthetic oligonucleotide
aacuaccugaugucacagg

SEQ ID NO: 79628 - RNA, 19 nt, Artificial Sequence
  Description of Artificial Sequence: Synthetic oligonucleotide
gagacuauugcagucugcc

SEQ ID NO: 79629 - RNA, 19 nt, Artificial Sequence
  Description of Artificial Sequence: Synthetic oligonucleotide
uccuauggagaaaguacag

SEQ ID NO: 79630 - RNA, 19 nt, Artificial Sequence
  Description of Artificial Sequence: Synthetic oligonucleotide
aagagacuauugcagucug

SEQ ID NO: 79631 - RNA, 19 nt, Artificial Sequence
  Description of Artificial Sequence: Synthetic oligonucleotide
ucguaauacacuucuucga

SEQ ID NO: 79632 - RNA, 19 nt, Artificial Sequence
  Description of Artificial Sequence: Synthetic oligonucleotide
uaaaaucuugcaucaucca

SEQ ID NO: 79633 - RNA, 19 nt, Artificial Sequence
  Description of Artificial Sequence: Synthetic oligonucleotide
uuaaagggauggucuauug

SEQ ID NO: 79634 - RNA, 19 nt, Artificial Sequence
  Description of Artificial Sequence: Synthetic oligonucleotide
uguccgcuuauuccgauca

SEQ ID NO: 79635 - RNA, 19 nt, Artificial Sequence
  Description of Artificial Sequence: Synthetic oligonucleotide
gagcaucguuauuagauug

SEQ ID NO: 79636 - RNA, 19 nt, Artificial Sequence
  Description of Artificial Sequence: Synthetic oligonucleotide
aaauaccuccuacagucau

SEQ ID NO: 79637 - RNA, 19 nt, Artificial Sequence
  Description of Artificial Sequence: Synthetic oligonucleotide
ugaaguggaccauugccga

SEQ ID NO: 79638 - RNA, 19 nt, Artificial Sequence
  Description of Artificial Sequence: Synthetic oligonucleotide
uuucuaggauuucccggcg

SEQ ID NO: 79639 - RNA, 19 nt, Artificial Sequence
  Description of Artificial Sequence: Synthetic oligonucleotide
uaaagugcucugaacucug

SEQ ID NO: 79640 - RNA, 19 nt, Artificial Sequence
  Description of Artificial Sequence: Synthetic oligonucleotide
cuucuauccauuuggcaug

SEQ ID NO: 79641 - RNA, 19 nt, Artificial Sequence
  Description of Artificial Sequence: Synthetic oligonucleotide
cagacaugcaaauugauua

SEQ ID NO: 79642 - RNA, 19 nt, Artificial Sequence
  Description of Artificial Sequence: Synthetic oligonucleotide
uucugcucggaguaaagcu

SEQ ID NO: 79643 - RNA, 19 nt, Artificial Sequence
  Description of Artificial Sequence: Synthetic oligonucleotide
cagaggacgagccugugcc

SEQ ID NO: 79644 - RNA, 19 nt, Artificial Sequence
  Description of Artificial Sequence: Synthetic oligonucleotide
aaccaaccaaaucuucgca

SEQ ID NO: 79645 - RNA, 19 nt, Artificial Sequence
  Description of Artificial Sequence: Synthetic oligonucleotide
cuggcaauauuagaugugc

SEQ ID NO: 79646 - RNA, 19 nt, Artificial Sequence
  Description of Artificial Sequence: Synthetic oligonucleotide
auaagguauccucggcagg

SEQ ID NO: 79647 - RNA, 19 nt, Artificial Sequence
  Description of Artificial Sequence: Synthetic oligonucleotide
acaguuaaagggauggucu

SEQ ID NO: 79648 - RNA, 19 nt, Artificial Sequence
  Description of Artificial Sequence: Synthetic oligonucleotide
aaacuaccugaugucacag

SEQ ID NO: 79649 - RNA, 19 nt, Artificial Sequence
  Description of Artificial Sequence: Synthetic oligonucleotide
uugcucucgacauccaaca

SEQ ID NO: 79650 - RNA, 19 nt, Artificial Sequence
  Description of Artificial Sequence: Synthetic oligonucleotide
uuugacucagaugcugugc

SEQ ID NO: 79651 - RNA, 19 nt, Artificial Sequence
  Description of Artificial Sequence: Synthetic oligonucleotide
uccggacagguagauaucg

SEQ ID NO: 79652 - RNA, 19 nt, Artificial Sequence
  Description of Artificial Sequence: Synthetic oligonucleotide
uucuuucgaggcaaagugu

SEQ ID NO: 79653 - RNA, 19 nt, Artificial Sequence
  Description of Artificial Sequence: Synthetic oligonucleotide
ucaggucaacauuuuaauc

SEQ ID NO: 79654 - RNA, 19 nt, Artificial Sequence
  Description of Artificial Sequence: Synthetic oligonucleotide
uaguaagaaaauguccgcu

SEQ ID NO: 79655 - RNA, 19 nt, Artificial Sequence
  Description of Artificial Sequence: Synthetic oligonucleotide
uguuccguugauacuccgc

SEQ ID NO: 79656 - RNA, 19 nt, Artificial Sequence
  Description of Artificial Sequence: Synthetic oligonucleotide
uucgucuuuucaccuacga

SEQ ID NO: 79657 - RNA, 19 nt, Artificial Sequence
  Description of Artificial Sequence: Synthetic oligonucleotide
ggcaauauuagaugugcug

SEQ ID NO: 79658 - RNA, 19 nt, Artificial Sequence
  Description of Artificial Sequence: Synthetic oligonucleotide
cguuacaacaggaagugcg

SEQ ID NO: 79659 - RNA, 19 nt, Artificial Sequence
  Description of Artificial Sequence: Synthetic oligonucleotide
uagauucguggaauuguca

SEQ ID NO: 79660 - RNA, 19 nt, Artificial Sequence
  Description of Artificial Sequence: Synthetic oligonucleotide
auuugucccucauuauuca

SEQ ID NO: 79661 - RNA, 19 nt, Artificial Sequence
  Description of Artificial Sequence: Synthetic oligonucleotide
auuugacucagaugcugug

SEQ ID NO: 79662 - RNA, 19 nt, Artificial Sequence
  Description of Artificial Sequence: Synthetic oligonucleotide
ugggugcuaaaacaauuuc

SEQ ID NO: 79663 - RNA, 19 nt, Artificial Sequence
  Description of Artificial Sequence: Synthetic oligonucleotide
uucuaaucauuauuuucua

SEQ ID NO: 79664 - RNA, 19 nt, Artificial Sequence
  Description of Artificial Sequence: Synthetic oligonucleotide
ucacgaaguggucuuguuc

SEQ ID NO: 79665 - RNA, 19 nt, Artificial Sequence
  Description of Artificial Sequence: Synthetic oligonucleotide
uccacccauuuugauaagg

SEQ ID NO: 79666 - RNA, 19 nt, Artificial Sequence
  Description of Artificial Sequence: Synthetic oligonucleotide
uggaccauugccgaaguuc

SEQ ID NO: 79667 - RNA, 19 nt, Artificial Sequence
  Description of Artificial Sequence: Synthetic oligonucleotide
aguuuuauggacauuucua

SEQ ID NO: 79668 - RNA, 19 nt, Artificial Sequence
  Description of Artificial Sequence: Synthetic oligonucleotide
cacuagagauauugucugg

SEQ ID NO: 79669 - RNA, 19 nt, Artificial Sequence
  Description of Artificial Sequence: Synthetic oligonucleotide
ucuaugcauaguagcuucu

SEQ ID NO: 79670 - RNA, 19 nt, Artificial Sequence
  Description of Artificial Sequence: Synthetic oligonucleotide
ucuuuacaucaaccaacca

SEQ ID NO: 79671 - RNA, 19 nt, Artificial Sequence
  Description of Artificial Sequence: Synthetic oligonucleotide
acuagagauauugucuggu

SEQ ID NO: 79672 - RNA, 19 nt, Artificial Sequence
  Description of Artificial Sequence: Synthetic oligonucleotide
cagguagauaucgagucag

SEQ ID NO: 79673 - RNA, 19 nt, Artificial Sequence
  Description of Artificial Sequence: Synthetic oligonucleotide
uuucgaggcaaagugucac

SEQ ID NO: 79674 - RNA, 19 nt, Artificial Sequence
  Description of Artificial Sequence: Synthetic oligonucleotide
gaugcugugcgguuguaaa

SEQ ID NO: 79675 - RNA, 19 nt, Artificial Sequence
  Description of Artificial Sequence: Synthetic oligonucleotide
uacgauguucuuucuaguu

SEQ ID NO: 79676 - RNA, 19 nt, Artificial Sequence
  Description of Artificial Sequence: Synthetic oligonucleotide
aauaccuccuacagucaug

SEQ ID NO: 79677 - RNA, 19 nt, Artificial Sequence
  Description of Artificial Sequence: Synthetic oligonucleotide
uucagacaugcaaauugau

SEQ ID NO: 79678 - RNA, 19 nt, Artificial Sequence
  Description of Artificial Sequence: Synthetic oligonucleotide
agcgacaauguuccguuga

SEQ ID NO: 79679 - RNA, 19 nt, Artificial Sequence
  Description of Artificial Sequence: Synthetic oligonucleotide
uuccuuccuagcgacaaug

SEQ ID NO: 79680 - RNA, 19 nt, Artificial Sequence
  Description of Artificial Sequence: Synthetic oligonucleotide
aagugcguauaucccucug

SEQ ID NO: 79681 - RNA, 19 nt, Artificial Sequence
  Description of Artificial Sequence: Synthetic oligonucleotide
auucguggaauugucacau

SEQ ID NO: 79682 - RNA, 19 nt, Artificial Sequence
  Description of Artificial Sequence: Synthetic oligonucleotide
ucaucaagacggcucucgu

SEQ ID NO: 79683 - RNA, 19 nt, Artificial Sequence
  Description of Artificial Sequence: Synthetic oligonucleotide
uuacaucaaccaaccaaau

SEQ ID NO: 79684 - RNA, 19 nt, Artificial Sequence
  Description of Artificial Sequence: Synthetic oligonucleotide
guaguuagagaguaacacu

SEQ ID NO: 79685 - RNA, 19 nt, Artificial Sequence
  Description of Artificial Sequence: Synthetic oligonucleotide
gcacuagagauauugucug

SEQ ID NO: 79686 - RNA, 19 nt, Artificial Sequence
  Description of Artificial Sequence: Synthetic oligonucleotide
gcucuuauuagcauucuug

SEQ ID NO: 79687 - RNA, 19 nt, Artificial Sequence
  Description of Artificial Sequence: Synthetic oligonucleotide
gauagauucguggaauugu

SEQ ID NO: 79688 - RNA, 19 nt, Artificial Sequence
  Description of Artificial Sequence: Synthetic oligonucleotide
ggaccauugccgaaguucg

SEQ ID NO: 79689 - RNA, 19 nt, Artificial Sequence
  Description of Artificial Sequence: Synthetic oligonucleotide
auugauuagaacacccuua

SEQ ID NO: 79690 - RNA, 19 nt, Artificial Sequence
  Description of Artificial Sequence: Synthetic oligonucleotide
gguuagggcucuuauuagc

SEQ ID NO: 79691 - RNA, 19 nt, Artificial Sequence
  Description of Artificial Sequence: Synthetic oligonucleotide
ugucaugcgucuucacacu

SEQ ID NO: 79692 - RNA, 19 nt, Artificial Sequence
  Description of Artificial Sequence: Synthetic oligonucleotide
uuagaccacuagaauugaa

SEQ ID NO: 79693 - RNA, 19 nt, Artificial Sequence
  Description of Artificial Sequence: Synthetic oligonucleotide
guaacacguacauagguau

SEQ ID NO: 79694 - RNA, 19 nt, Artificial Sequence
  Description of Artificial Sequence: Synthetic oligonucleotide
auaccuccuacagucauga

SEQ ID NO: 79695 - RNA, 19 nt, Artificial Sequence
  Description of Artificial Sequence: Synthetic oligonucleotide
agggcucuuauuagcauuc

SEQ ID NO: 79696 - RNA, 19 nt, Artificial Sequence
  Description of Artificial Sequence: Synthetic oligonucleotide
accaaccaaaucuucgcaa

SEQ ID NO: 79697 - RNA, 19 nt, Artificial Sequence
  Description of Artificial Sequence: Synthetic oligonucleotide
gaaguggucuuguucccuc

SEQ ID NO: 79698 - RNA, 19 nt, Artificial Sequence
  Description of Artificial Sequence: Synthetic oligonucleotide
aauguccgcuuauuccgau

SEQ ID NO: 79699 - RNA, 19 nt, Artificial Sequence
  Description of Artificial Sequence: Synthetic oligonucleotide
ccucccacuaaauauuccc

SEQ ID NO: 79700 - RNA, 19 nt, Artificial Sequence
  Description of Artificial Sequence: Synthetic oligonucleotide
ucgggaggaaacuggcuac

SEQ ID NO: 79701 - RNA, 19 nt, Artificial Sequence
  Description of Artificial Sequence: Synthetic oligonucleotide
agagacuauugcagucugc

SEQ ID NO: 79702 - RNA, 19 nt, Artificial Sequence
  Description of Artificial Sequence: Synthetic oligonucleotide
uauggacauuucuaaucau

SEQ ID NO: 79703 - RNA, 19 nt, Artificial Sequence
  Description of Artificial Sequence: Synthetic oligonucleotide
cauugccgaaguucguuac

SEQ ID NO: 79704 - RNA, 19 nt, Artificial Sequence
  Description of Artificial Sequence: Synthetic oligonucleotide
gguagauaucgagucagag

SEQ ID NO: 79705 - RNA, 19 nt, Artificial Sequence
  Description of Artificial Sequence: Synthetic oligonucleotide
auugccgaaguucguuaca

SEQ ID NO: 79706 - RNA, 19 nt, Artificial Sequence
  Description of Artificial Sequence: Synthetic oligonucleotide
guuagggcucuuauuagca

SEQ ID NO: 79707 - RNA, 19 nt, Artificial Sequence
  Description of Artificial Sequence: Synthetic oligonucleotide
uccuuccuagcgacaaugu

SEQ ID NO: 79708 - RNA, 19 nt, Artificial Sequence
  Description of Artificial Sequence: Synthetic oligonucleotide
auuuuaauccaaacucaau

SEQ ID NO: 79709 - RNA, 19 nt, Artificial Sequence
  Description of Artificial Sequence: Synthetic oligonucleotide
ucuucgcaauuacauuuua

SEQ ID NO: 79710 - RNA, 19 nt, Artificial Sequence
  Description of Artificial Sequence: Synthetic oligonucleotide
ucaugcgucuucacacuaa

SEQ ID NO: 79711 - RNA, 19 nt, Artificial Sequence
  Description of Artificial Sequence: Synthetic oligonucleotide
uaacacguacauagguaua

SEQ ID NO: 79712 - RNA, 19 nt, Artificial Sequence
  Description of Artificial Sequence: Synthetic oligonucleotide
gacaugcaaauugauuaga

SEQ ID NO: 79713 - RNA, 19 nt, Artificial Sequence
  Description of Artificial Sequence: Synthetic oligonucleotide
uucuaggauuucccggcgu

SEQ ID NO: 79714 - RNA, 19 nt, Artificial Sequence
  Description of Artificial Sequence: Synthetic oligonucleotide
aaguucguuacaacaggaa

SEQ ID NO: 79715 - RNA, 19 nt, Artificial Sequence
  Description of Artificial Sequence: Synthetic oligonucleotide
uuagggcucuuauuagcau

SEQ ID NO: 79716 - RNA, 19 nt, Artificial Sequence
  Description of Artificial Sequence: Synthetic oligonucleotide
cuaggauuucccggcgucg

SEQ ID NO: 79717 - RNA, 19 nt, Artificial Sequence
  Description of Artificial Sequence: Synthetic oligonucleotide
ugcugugcgguuguaaaau

SEQ ID NO: 79718 - RNA, 19 nt, Artificial Sequence
  Description of Artificial Sequence: Synthetic oligonucleotide
aaauguccgcuuauuccga

SEQ ID NO: 79719 - RNA, 19 nt, Artificial Sequence
  Description of Artificial Sequence: Synthetic oligonucleotide
uagauugauccagaaucuc

SEQ ID NO: 79720 - RNA, 19 nt, Artificial Sequence
  Description of Artificial Sequence: Synthetic oligonucleotide
gcaaauugauuagaacacc

SEQ ID NO: 79721 - RNA, 19 nt, Artificial Sequence
  Description of Artificial Sequence: Synthetic oligonucleotide
cuuccggacagguagauau

SEQ ID NO: 79722 - RNA, 19 nt, Artificial Sequence
  Description of Artificial Sequence: Synthetic oligonucleotide
auguccgcuuauuccgauc

SEQ ID NO: 79723 - RNA, 19 nt, Artificial Sequence
  Description of Artificial Sequence: Synthetic oligonucleotide
agauaucgagucagaggac

SEQ ID NO: 79724 - RNA, 19 nt, Artificial Sequence
  Description of Artificial Sequence: Synthetic oligonucleotide
ggguaauggaaacuauuca

SEQ ID NO: 79725 - RNA, 19 nt, Artificial Sequence
  Description of Artificial Sequence: Synthetic oligonucleotide
uuucacgaaguggucuugu

SEQ ID NO: 79726 - RNA, 19 nt, Artificial Sequence
  Description of Artificial Sequence: Synthetic oligonucleotide
cccauuuugauaagguauc

SEQ ID NO: 79727 - RNA, 19 nt, Artificial Sequence
  Description of Artificial Sequence: Synthetic oligonucleotide
aguggucuuguucccucug

SEQ ID NO: 79728 - RNA, 19 nt, Artificial Sequence
  Description of Artificial Sequence: Synthetic oligonucleotide
cuggcucaccggcacagcc

SEQ ID NO: 79729 - RNA, 19 nt, Artificial Sequence
  Description of Artificial Sequence: Synthetic oligonucleotide
cacgugacuccgcaaauca

SEQ ID NO: 79730 - RNA, 19 nt, Artificial Sequence
  Description of Artificial Sequence: Synthetic oligonucleotide
aggggauagauucguggaa

SEQ ID NO: 79731 - RNA, 19 nt, Artificial Sequence
  Description of Artificial Sequence: Synthetic oligonucleotide
agccuguuucaagagucuc

SEQ ID NO: 79732 - RNA, 19 nt, Artificial Sequence
  Description of Artificial Sequence: Synthetic oligonucleotide
uuccguugauacuccgcca

SEQ ID NO: 79733 - RNA, 19 nt, Artificial Sequence
  Description of Artificial Sequence: Synthetic oligonucleotide
ugaucguaauacacuucuu

SEQ ID NO: 79734 - RNA, 19 nt, Artificial Sequence
  Description of Artificial Sequence: Synthetic oligonucleotide
ucggcaggucuucucugug

SEQ ID NO: 79735 - RNA, 19 nt, Artificial Sequence
  Description of Artificial Sequence: Synthetic oligonucleotide
gcgguuguaaaauucaggu

SEQ ID NO: 79736 - RNA, 19 nt, Artificial Sequence
  Description of Artificial Sequence: Synthetic oligonucleotide
gccgaaguucguuacaaca

SEQ ID NO: 79737 - RNA, 19 nt, Artificial Sequence
  Description of Artificial Sequence: Synthetic oligonucleotide
uucuauccauuuggcaugu

SEQ ID NO: 79738 - RNA, 19 nt, Artificial Sequence
  Description of Artificial Sequence: Synthetic oligonucleotide
aguuaaagggauggucuau

SEQ ID NO: 79739 - RNA, 19 nt, Artificial Sequence
  Description of Artificial Sequence: Synthetic oligonucleotide
uauuguggcccgccgucuc

SEQ ID NO: 79740 - RNA, 19 nt, Artificial Sequence
  Description of Artificial Sequence: Synthetic oligonucleotide
gacuucuaaagugcucuga

SEQ ID NO: 79741 - RNA, 19 nt, Artificial Sequence
  Description of Artificial Sequence: Synthetic oligonucleotide
cuuucgaggcaaaguguca

SEQ ID NO: 79742 - RNA, 19 nt, Artificial Sequence
  Description of Artificial Sequence: Synthetic oligonucleotide
ccgcaaaucaaagucuucc

SEQ ID NO: 79743 - RNA, 19 nt, Artificial Sequence
  Description of Artificial Sequence: Synthetic oligonucleotide
guuuagauugauccagaau

SEQ ID NO: 79744 - RNA, 19 nt, Artificial Sequence
  Description of Artificial Sequence: Synthetic oligonucleotide
uccgcuuauuccgaucaaa

SEQ ID NO: 79745 - RNA, 19 nt, Artificial Sequence
  Description of Artificial Sequence: Synthetic oligonucleotide
uuacaauccuauggagaaa

SEQ ID NO: 79746 - RNA, 19 nt, Artificial Sequence
  Description of Artificial Sequence: Synthetic oligonucleotide
uauugguaacacguacaua

SEQ ID NO: 79747 - RNA, 19 nt, Artificial Sequence
  Description of Artificial Sequence: Synthetic oligonucleotide
gaggugaucguaauacacu

SEQ ID NO: 79748 - RNA, 19 nt, Artificial Sequence
  Description of Artificial Sequence: Synthetic oligonucleotide
auuugggugcuaaaacaau

SEQ ID NO: 79749 - RNA, 19 nt, Artificial Sequence
  Description of Artificial Sequence: Synthetic oligonucleotide
auuagaugugcuggcacua

SEQ ID NO: 79750 - RNA, 19 nt, Artificial Sequence
  Description of Artificial Sequence: Synthetic oligonucleotide
ucguuacaacaggaagugc

SEQ ID NO: 79751 - RNA, 19 nt, Artificial Sequence
  Description of Artificial Sequence: Synthetic oligonucleotide
guuagagaguaacacugau

SEQ ID NO: 79752 - RNA, 19 nt, Artificial Sequence
  Description of Artificial Sequence: Synthetic oligonucleotide
uauaaccucugagcauccu

SEQ ID NO: 79753 - RNA, 19 nt, Artificial Sequence
  Description of Artificial Sequence: Synthetic oligonucleotide
guagccgggucuucucggc

SEQ ID NO: 79754 - RNA, 19 nt, Artificial Sequence
  Description of Artificial Sequence: Synthetic oligonucleotide
  modified_base (17)..(17): a, c, u, g, unknown or other
gagaccuucuuugugcngu

SEQ ID NO: 79755 - RNA, 19 nt, Artificial Sequence
  Description of Artificial Sequence: Synthetic oligonucleotide
gggugcuaaaacaauuuca

SEQ ID NO: 79756 - RNA, 19 nt, Artificial Sequence
  Description of Artificial Sequence: Synthetic oligonucleotide
uuccggacagguagauauc

SEQ ID NO: 79757 - RNA, 19 nt, Artificial Sequence
  Description of Artificial Sequence: Synthetic oligonucleotide
uccuagcgacaauguuccg

SEQ ID NO: 79758 - RNA, 19 nt, Artificial Sequence
  Description of Artificial Sequence: Synthetic oligonucleotide
cagacuucuaaagugcucu

SEQ ID NO: 79759 - RNA, 19 nt, Artificial Sequence
  Description of Artificial Sequence: Synthetic oligonucleotide
uucacgaaguggucuuguu

SEQ ID NO: 79760 - RNA, 19 nt, Artificial Sequence
  Description of Artificial Sequence: Synthetic oligonucleotide
ccgguuuagauugauccag

SEQ ID NO: 79761 - RNA, 19 nt, Artificial Sequence
  Description of Artificial Sequence: Synthetic oligonucleotide
agaaggcaguugauuacca

SEQ ID NO: 79762 - RNA, 19 nt, Artificial Sequence
  Description of Artificial Sequence: Synthetic oligonucleotide
uagcgacaauguuccguug

SEQ ID NO: 79763 - RNA, 19 nt, Artificial Sequence
  Description of Artificial Sequence: Synthetic oligonucleotide
guuacaacaggaagugcgu

SEQ ID NO: 79764 - RNA, 19 nt, Artificial Sequence
  Description of Artificial Sequence: Synthetic oligonucleotide
cagaguauugggguuaaua

SEQ ID NO: 79765 - RNA, 19 nt, Artificial Sequence
  Description of Artificial Sequence: Synthetic oligonucleotide
auuucccguucccuggauu

SEQ ID NO: 79766 - RNA, 19 nt, Artificial Sequence
  Description of Artificial Sequence: Synthetic oligonucleotide
uggcccgccgucuccacgu

SEQ ID NO: 79767 - RNA, 19 nt, Artificial Sequence
  Description of Artificial Sequence: Synthetic oligonucleotide
gguaacacguacauaggua

SEQ ID NO: 79768 - RNA, 19 nt, Artificial Sequence
  Description of Artificial Sequence: Synthetic oligonucleotide
auauuguggcccgccgucu

SEQ ID NO: 79769 - RNA, 19 nt, Artificial Sequence
  Description of Artificial Sequence: Synthetic oligonucleotide
caguuaaagggauggucua

SEQ ID NO: 79770 - RNA, 19 nt, Artificial Sequence
  Description of Artificial Sequence: Synthetic oligonucleotide
gugcguauaucccucugcu

SEQ ID NO: 79771 - RNA, 19 nt, Artificial Sequence
  Description of Artificial Sequence: Synthetic oligonucleotide
gaucuaugcauaguagcuu

SEQ ID NO: 79772 - RNA, 19 nt, Artificial Sequence
  Description of Artificial Sequence: Synthetic oligonucleotide
accauugccgaaguucguu

SEQ ID NO: 79773 - RNA, 19 nt, Artificial Sequence
  Description of Artificial Sequence: Synthetic oligonucleotide
gauauagcauagaguuugu

SEQ ID NO: 79774 - RNA, 19 nt, Artificial Sequence
  Description of Artificial Sequence: Synthetic oligonucleotide
cuagcgacaauguuccguu

SEQ ID NO: 79775 - RNA, 19 nt, Artificial Sequence
  Description of Artificial Sequence: Synthetic oligonucleotide
cugaguguacacaguuaaa

SEQ ID NO: 79776 - RNA, 19 nt, Artificial Sequence
  Description of Artificial Sequence: Synthetic oligonucleotide
ggaagugcguauaucccuc

SEQ ID NO: 79777 - RNA, 19 nt, Artificial Sequence
  Description of Artificial Sequence: Synthetic oligonucleotide
cuucgauggcuugaaagua

SEQ ID NO: 79778 - RNA, 19 nt, Artificial Sequence
  Description of Artificial Sequence: Synthetic oligonucleotide
gaagugcguauaucccucu

SEQ ID NO: 79779 - RNA, 19 nt, Artificial Sequence
  Description of Artificial Sequence: Synthetic oligonucleotide
cauuuugauaagguauccu

SEQ ID NO: 79780 - RNA, 19 nt, Artificial Sequence
  Description of Artificial Sequence: Synthetic oligonucleotide
uccgagauucugaguccuu

SEQ ID NO: 79781 - RNA, 19 nt, Artificial Sequence
  Description of Artificial Sequence: Synthetic oligonucleotide
gucaugcgucuucacacua

SEQ ID NO: 79782 - RNA, 19 nt, Artificial Sequence
  Description of Artificial Sequence: Synthetic oligonucleotide
caauauuguggcccgccgu

SEQ ID NO: 79783 - RNA, 19 nt, Artificial Sequence
  Description of Artificial Sequence: Synthetic oligonucleotide
gacgagccugugcccuuug

SEQ ID NO: 79784 - RNA, 19 nt, Artificial Sequence
  Description of Artificial Sequence: Synthetic oligonucleotide
agucgggaggaaacuggcu

SEQ ID NO: 79785 - RNA, 19 nt, Artificial Sequence
  Description of Artificial Sequence: Synthetic oligonucleotide
aggcaaagugucacucaga

SEQ ID NO: 79786 - RNA, 19 nt, Artificial Sequence
  Description of Artificial Sequence: Synthetic oligonucleotide
gguuaauaggaaauccuuu

SEQ ID NO: 79787 - RNA, 19 nt, Artificial Sequence
  Description of Artificial Sequence: Synthetic oligonucleotide
acgagccugugcccuuugu

SEQ ID NO: 79788 - RNA, 19 nt, Artificial Sequence
  Description of Artificial Sequence: Synthetic oligonucleotide
gacggcucucgugcucaag

SEQ ID NO: 79789 - RNA, 19 nt, Artificial Sequence
  Description of Artificial Sequence: Synthetic oligonucleotide
agucugcccugaaguggac

SEQ ID NO: 79790 - RNA, 19 nt, Artificial Sequence
  Description of Artificial Sequence: Synthetic oligonucleotide
ccgcuuauuccgaucaaaa

SEQ ID NO: 79791 - RNA, 19 nt, Artificial Sequence
  Description of Artificial Sequence: Synthetic oligonucleotide
ucagaguauugggguuaau

SEQ ID NO: 79792 - RNA, 19 nt, Artificial Sequence
  Description of Artificial Sequence: Synthetic oligonucleotide
uguggcccgccgucuccac

SEQ ID NO: 79793 - RNA, 19 nt, Artificial Sequence
  Description of Artificial Sequence: Synthetic oligonucleotide
ggguuaauaggaaauccuu

SEQ ID NO: 79794 - RNA, 19 nt, Artificial Sequence
  Description of Artificial Sequence: Synthetic oligonucleotide
acgugacuccgcaaaucaa

SEQ ID NO: 79795 - RNA, 19 nt, Artificial Sequence
  Description of Artificial Sequence: Synthetic oligonucleotide
cccgccgucuccacgugac

SEQ ID NO: 79796 - RNA, 19 nt, Artificial Sequence
  Description of Artificial Sequence: Synthetic oligonucleotide
cccacuaaauauuccccua

SEQ ID NO: 79797 - RNA, 19 nt, Artificial Sequence
  Description of Artificial Sequence: Synthetic oligonucleotide
ggggauagauucguggaau

SEQ ID NO: 79798 - RNA, 19 nt, Artificial Sequence
  Description of Artificial Sequence: Synthetic oligonucleotide
guccgcuuauuccgaucaa

SEQ ID NO: 79799 - RNA, 19 nt, Artificial Sequence
  Description of Artificial Sequence: Synthetic oligonucleotide
gggauagauucguggaauu

SEQ ID NO: 79800 - RNA, 19 nt, Artificial Sequence
  Description of Artificial Sequence: Synthetic oligonucleotide
agacggcucucgugcucaa

SEQ ID NO: 79801 - RNA, 19 nt, Artificial Sequence
  Description of Artificial Sequence: Synthetic oligonucleotide
ccauugccgaaguucguua

SEQ ID NO: 79802 - RNA, 19 nt, Artificial Sequence
  Description of Artificial Sequence: Synthetic oligonucleotide
gaccauugccgaaguucgu

SEQ ID NO: 79803 - RNA, 19 nt, Artificial Sequence
  Description of Artificial Sequence: Synthetic oligonucleotide
cgguuuagauugauccaga

SEQ ID NO: 79804 - RNA, 19 nt, Artificial Sequence
  Description of Artificial Sequence: Synthetic oligonucleotide
ggcucuuauuagcauucuu

SEQ ID NO: 79805 - RNA, 19 nt, Artificial Sequence
  Description of Artificial Sequence: Synthetic oligonucleotide
ccggacagguagauaucga

SEQ ID NO: 79806 - RNA, 19 nt, Artificial Sequence
  Description of Artificial Sequence: Synthetic oligonucleotide
ccuagcgacaauguuccgu

SEQ ID NO: 79807 - RNA, 19 nt, Artificial Sequence
  Description of Artificial Sequence: Synthetic oligonucleotide
gcaucguuauuagauuguu

SEQ ID NO: 79808 - RNA, 19 nt, Artificial Sequence
  Description of Artificial Sequence: Synthetic oligonucleotide
ggcaaugauuugggugcua

SEQ ID NO: 79809 - RNA, 19 nt, Artificial Sequence
  Description of Artificial Sequence: Synthetic oligonucleotide
guggaccauugccgaaguu

SEQ ID NO: 79810 - RNA, 19 nt, Artificial Sequence
  Description of Artificial Sequence: Synthetic oligonucleotide
ccuuccuagcgacaauguu

SEQ ID NO: 79811 - RNA, 19 nt, Artificial Sequence
  Description of Artificial Sequence: Synthetic oligonucleotide
gggcagucgggaggaaacu

SEQ ID NO: 79812 - RNA, 19 nt, Artificial Sequence
  Description of Artificial Sequence: Synthetic oligonucleotide
cuccuacagucaugauauu

SEQ ID NO: 79813 - RNA, 19 nt, Artificial Sequence
  Description of Artificial Sequence: Synthetic oligonucleotide
cgggagggcacagguaaaa

SEQ ID NO: 79814 - RNA, 19 nt, Artificial Sequence
  Description of Artificial Sequence: Synthetic oligonucleotide
ccuuccggacagguagaua

SEQ ID NO: 79815 - RNA, 19 nt, Artificial Sequence
  Description of Artificial Sequence: Synthetic oligonucleotide
ggacgagccugugcccuuu

SEQ ID NO: 79816 - RNA, 19 nt, Artificial Sequence
  Description of Artificial Sequence: Synthetic oligonucleotide
ccgccgucuccacgugacu

SEQ ID NO: 79817 - RNA, 19 nt, Artificial Sequence
  Description of Artificial Sequence: Synthetic oligonucleotide
ugaauuaugaaucugacgu

SEQ ID NO: 79818 - RNA, 19 nt, Artificial Sequence
  Description of Artificial Sequence: Synthetic oligonucleotide
gauacaaugauuacuaggg

SEQ ID NO: 79819 - RNA, 19 nt, Artificial Sequence
  Description of Artificial Sequence: Synthetic oligonucleotide
ucauguauggggcagaggg

SEQ ID NO: 79820 - RNA, 19 nt, Artificial Sequence
  Description of Artificial Sequence: Synthetic oligonucleotide
aauuaugaaucugacgucc

SEQ ID NO: 79821 - RNA, 19 nt, Artificial Sequence
  Description of Artificial Sequence: Synthetic oligonucleotide
aguuuauuaacucagggug

SEQ ID NO: 79822 - RNA, 19 nt, Artificial Sequence
  Description of Artificial Sequence: Synthetic oligonucleotide
uuaacaauggguacuuacg

SEQ ID NO: 79823 - RNA, 19 nt, Artificial Sequence
  Description of Artificial Sequence: Synthetic oligonucleotide
aauaagguuauccccugac

SEQ ID NO: 79824 - RNA, 19 nt, Artificial Sequence
  Description of Artificial Sequence: Synthetic oligonucleotide
aaucugacguccuagauaa

SEQ ID NO: 79825 - RNA, 19 nt, Artificial Sequence
  Description of Artificial Sequence: Synthetic oligonucleotide
uuuacacacacacacacac

SEQ ID NO: 79826 - RNA, 19 nt, Artificial Sequence
  Description of Artificial Sequence: Synthetic oligonucleotide
aacaauggguacuuacgac

SEQ ID NO: 79827 - RNA, 19 nt, Artificial Sequence
  Description of Artificial Sequence: Synthetic oligonucleotide
uacgacaucuacuaaagca

SEQ ID NO: 79828 - RNA, 19 nt, Artificial Sequence
  Description of Artificial Sequence: Synthetic oligonucleotide
aucauuggaguuuauuaac

SEQ ID NO: 79829 - RNA, 19 nt, Artificial Sequence
  Description of Artificial Sequence: Synthetic oligonucleotide
uuguuuaguguaaagggug

SEQ ID NO: 79830 - RNA, 19 nt, Artificial Sequence
  Description of Artificial Sequence: Synthetic oligonucleotide
uuagugaccaguuuggaaa

SEQ ID NO: 79831 - RNA, 19 nt, Artificial Sequence
  Description of Artificial Sequence: Synthetic oligonucleotide
uguuuaguguaaagggugg

SEQ ID NO: 79832 - RNA, 19 nt, Artificial Sequence
  Description of Artificial Sequence: Synthetic oligonucleotide
uggauuuacuaaaacauaa

SEQ ID NO: 79833 - RNA, 19 nt, Artificial Sequence
  Description of Artificial Sequence: Synthetic oligonucleotide
aaaugaagggccuucugcu

SEQ ID NO: 79834 - RNA, 19 nt, Artificial Sequence
  Description of Artificial Sequence: Synthetic oligonucleotide
uccaguaauaguuuauuga

SEQ ID NO: 79835 - RNA, 19 nt, Artificial Sequence
  Description of Artificial Sequence: Synthetic oligonucleotide
aauaugaccuaggaauggg

SEQ ID NO: 79836 - RNA, 19 nt, Artificial Sequence
  Description of Artificial Sequence: Synthetic oligonucleotide
ugaaaagugugguuguaag

SEQ ID NO: 79837 - RNA, 19 nt, Artificial Sequence
  Description of Artificial Sequence: Synthetic oligonucleotide
ucccuugaaagauugagug

SEQ ID NO: 79838 - RNA, 19 nt, Artificial Sequence
  Description of Artificial Sequence: Synthetic oligonucleotide
gauaucagaagccauuaca

SEQ ID NO: 79839 - RNA, 19 nt, Artificial Sequence
  Description of Artificial Sequence: Synthetic oligonucleotide
ucuacacuccuuaaaguca

SEQ ID NO: 79840 - RNA, 19 nt, Artificial Sequence
  Description of Artificial Sequence: Synthetic oligonucleotide
uacacacacacacacacac

SEQ ID NO: 79841 - RNA, 19 nt, Artificial Sequence
  Description of Artificial Sequence: Synthetic oligonucleotide
ucuagaugugcucaacccc

SEQ ID NO: 79842 - RNA, 19 nt, Artificial Sequence
  Description of Artificial Sequence: Synthetic oligonucleotide
uagauaaccucacauacua

SEQ ID NO: 79843 - RNA, 19 nt, Artificial Sequence
  Description of Artificial Sequence: Synthetic oligonucleotide
agaguuaccuuccaagucu

SEQ ID NO: 79844 - RNA, 19 nt, Artificial Sequence
  Description of Artificial Sequence: Synthetic oligonucleotide
uaacaauggguacuuacga

SEQ ID NO: 79845 - RNA, 19 nt, Artificial Sequence
  Description of Artificial Sequence: Synthetic oligonucleotide
ucuaacauaacugauuguu

SEQ ID NO: 79846 - RNA, 19 nt, Artificial Sequence
  Description of Artificial Sequence: Synthetic oligonucleotide
auaucauuggaguuuauua

SEQ ID NO: 79847 - RNA, 19 nt, Artificial Sequence
  Description of Artificial Sequence: Synthetic oligonucleotide
cauuuacacacacacacac

SEQ ID NO: 79848 - RNA, 19 nt, Artificial Sequence
  Description of Artificial Sequence: Synthetic oligonucleotide
agucaguaugcauaaaacu

SEQ ID NO: 79849 - RNA, 19 nt, Artificial Sequence
  Description of Artificial Sequence: Synthetic oligonucleotide
auggacauacuauacugag

SEQ ID NO: 79850 - RNA, 19 nt, Artificial Sequence
  Description of Artificial Sequence: Synthetic oligonucleotide
cugaauuaugaaucugacg

SEQ ID NO: 79851 - RNA, 19 nt, Artificial Sequence
  Description of Artificial Sequence: Synthetic oligonucleotide
uguaauucccuugaaagau

SEQ ID NO: 79852 - RNA, 19 nt, Artificial Sequence
  Description of Artificial Sequence: Synthetic oligonucleotide
ugaaacauuaacucagaua

SEQ ID NO: 79853 - RNA, 19 nt, Artificial Sequence
  Description of Artificial Sequence: Synthetic oligonucleotide
agcaacuacagacaaguga

SEQ ID NO: 79854 - RNA, 19 nt, Artificial Sequence
  Description of Artificial Sequence: Synthetic oligonucleotide
ucauuggaguuuauuaacu

SEQ ID NO: 79855 - RNA, 19 nt, Artificial Sequence
  Description of Artificial Sequence: Synthetic oligonucleotide
ugggauagcaguaaaucuc

SEQ ID NO: 79856 - RNA, 19 nt, Artificial Sequence
  Description of Artificial Sequence: Synthetic oligonucleotide
uggacauacuauacugagg

SEQ ID NO: 79857 - RNA, 19 nt, Artificial Sequence
  Description of Artificial Sequence: Synthetic oligonucleotide
ggauacaaugauuacuagg

SEQ ID NO: 79858 - RNA, 19 nt, Artificial Sequence
  Description of Artificial Sequence: Synthetic oligonucleotide
caugcaaccaauuuacuga

SEQ ID NO: 79859 - RNA, 19 nt, Artificial Sequence
  Description of Artificial Sequence: Synthetic oligonucleotide
uguguuuggguaucuacca

SEQ ID NO: 79860 - RNA, 19 nt, Artificial Sequence
  Description of Artificial Sequence: Synthetic oligonucleotide
gaauguuaaggaaaucagc

SEQ ID NO: 79861 - RNA, 19 nt, Artificial Sequence
  Description of Artificial Sequence: Synthetic oligonucleotide
uugaauuggcaccuuuuca

SEQ ID NO: 79862 - RNA, 19 nt, Artificial Sequence
  Description of Artificial Sequence: Synthetic oligonucleotide
cuugcaaacaagaguuacc

SEQ ID NO: 79863 - RNA, 19 nt, Artificial Sequence
  Description of Artificial Sequence: Synthetic oligonucleotide
ccuuguuuaguguaaaggg

SEQ ID NO: 79864 - RNA, 19 nt, Artificial Sequence
  Description of Artificial Sequence: Synthetic oligonucleotide
auucguugguucuacccac

SEQ ID NO: 79865 - RNA, 19 nt, Artificial Sequence
  Description of Artificial Sequence: Synthetic oligonucleotide
guaggugagucauguaugg

SEQ ID NO: 79866 - RNA, 19 nt, Artificial Sequence
  Description of Artificial Sequence: Synthetic oligonucleotide
caguuuggaaaauuugggc

SEQ ID NO: 79867 - RNA, 19 nt, Artificial Sequence
  Description of Artificial Sequence: Synthetic oligonucleotide
gaagucuagaccuggguca

SEQ ID NO: 79868 - RNA, 19 nt, Artificial Sequence
  Description of Artificial Sequence: Synthetic oligonucleotide
gaauaugaccuaggaaugg

SEQ ID NO: 79869 - RNA, 19 nt, Artificial Sequence
  Description of Artificial Sequence: Synthetic oligonucleotide
aaaucuagaugugcucaac

SEQ ID NO: 79870 - RNA, 19 nt, Artificial Sequence
  Description of Artificial Sequence: Synthetic oligonucleotide
acacacacacaccaggaag

SEQ ID NO: 79871 - RNA, 19 nt, Artificial Sequence
  Description of Artificial Sequence: Synthetic oligonucleotide
cauacuauacugagggaac

SEQ ID NO: 79872 - RNA, 19 nt, Artificial Sequence
  Description of Artificial Sequence: Synthetic oligonucleotide
ggaguuuauuaacucaggg

SEQ ID NO: 79873 - RNA, 19 nt, Artificial Sequence
  Description of Artificial Sequence: Synthetic oligonucleotide
cacgaaaacaggcagaaga

SEQ ID NO: 79874 - RNA, 19 nt, Artificial Sequence
  Description of Artificial Sequence: Synthetic oligonucleotide
gacguacucggccaggcgg

SEQ ID NO: 79875 - RNA, 19 nt, Artificial Sequence
  Description of Artificial Sequence: Synthetic oligonucleotide
cauuagagguaucaaguug

SEQ ID NO: 79876 - RNA, 19 nt, Artificial Sequence
  Description of Artificial Sequence: Synthetic oligonucleotide
cuaggaaugggagaaggcc

SEQ ID NO: 79877 - RNA, 19 nt, Artificial Sequence
  Description of Artificial Sequence: Synthetic oligonucleotide
acuagggaaagacaauaca

SEQ ID NO: 79878 - RNA, 19 nt, Artificial Sequence
  Description of Artificial Sequence: Synthetic oligonucleotide
cacuguuauaugaaagcag

SEQ ID NO: 79879 - RNA, 19 nt, Artificial Sequence
  Description of Artificial Sequence: Synthetic oligonucleotide
acuuacgacaucuacuaaa

SEQ ID NO: 79880 - RNA, 19 nt, Artificial Sequence
  Description of Artificial Sequence: Synthetic oligonucleotide
uugcaaacaagaguuaccu

SEQ ID NO: 79881 - RNA, 19 nt, Artificial Sequence
  Description of Artificial Sequence: Synthetic oligonucleotide
gaauguugagucuucaugu

SEQ ID NO: 79882 - RNA, 19 nt, Artificial Sequence
  Description of Artificial Sequence: Synthetic oligonucleotide
cauaucuacagagagccug

SEQ ID NO: 79883 - RNA, 19 nt, Artificial Sequence
  Description of Artificial Sequence: Synthetic oligonucleotide
ugggucaauagcaacccca

SEQ ID NO: 79884 - RNA, 19 nt, Artificial Sequence
  Description of Artificial Sequence: Synthetic oligonucleotide
uuccaguaauaguuuauug

SEQ ID NO: 79885 - RNA, 19 nt, Artificial Sequence
  Description of Artificial Sequence: Synthetic oligonucleotide
ugucacauacacacgggga

SEQ ID NO: 79886 - RNA, 19 nt, Artificial Sequence
  Description of Artificial Sequence: Synthetic oligonucleotide
agauaucagaagccauuac

SEQ ID NO: 79887 - RNA, 19 nt, Artificial Sequence
  Description of Artificial Sequence: Synthetic oligonucleotide
acuguuauaugaaagcaga

SEQ ID NO: 79888 - RNA, 19 nt, Artificial Sequence
  Description of Artificial Sequence: Synthetic oligonucleotide
cuaacauaacugauuguuc

SEQ ID NO: 79889 - RNA, 19 nt, Artificial Sequence
  Description of Artificial Sequence: Synthetic oligonucleotide
uguggcaggccuauuaauc

SEQ ID NO: 79890 - RNA, 19 nt, Artificial Sequence
  Description of Artificial Sequence: Synthetic oligonucleotide
ggcauaucuacagagagcc

SEQ ID NO: 79891 - RNA, 19 nt, Artificial Sequence
  Description of Artificial Sequence: Synthetic oligonucleotide
cacacacacacacacacac

SEQ ID NO: 79892 - RNA, 19 nt, Artificial Sequence
  Description of Artificial Sequence: Synthetic oligonucleotide
uggugcacacgaaugagcu

SEQ ID NO: 79893 - RNA, 19 nt, Artificial Sequence
  Description of Artificial Sequence: Synthetic oligonucleotide
auagcaaccccaaggcugc

SEQ ID NO: 79894 - RNA, 19 nt, Artificial Sequence
  Description of Artificial Sequence: Synthetic oligonucleotide
acgacaucuacuaaagcag

SEQ ID NO: 79895 - RNA, 19 nt, Artificial Sequence
  Description of Artificial Sequence: Synthetic oligonucleotide
aguccgaacauccugggau

SEQ ID NO: 79896 - RNA, 19 nt, Artificial Sequence
  Description of Artificial Sequence: Synthetic oligonucleotide
cagugauuugaauuggcac

SEQ ID NO: 79897 - RNA, 19 nt, Artificial Sequence
  Description of Artificial Sequence: Synthetic oligonucleotide
aguaugaaaaugauauacu

SEQ ID NO: 79898 - RNA, 19 nt, Artificial Sequence
  Description of Artificial Sequence: Synthetic oligonucleotide
gauucguugguucuaccca

SEQ ID NO: 79899 - RNA, 19 nt, Artificial Sequence
  Description of Artificial Sequence: Synthetic oligonucleotide
auauguaauucccuugaaa

SEQ ID NO: 79900 - RNA, 19 nt, Artificial Sequence
  Description of Artificial Sequence: Synthetic oligonucleotide
ucuuauuucggggucaaau

SEQ ID NO: 79901 - RNA, 19 nt, Artificial Sequence
  Description of Artificial Sequence: Synthetic oligonucleotide
gcaaacaagaguuaccuuc

SEQ ID NO: 79902 - RNA, 19 nt, Artificial Sequence
  Description of Artificial Sequence: Synthetic oligonucleotide
uguccacuaaaugaagggc

SEQ ID NO: 79903 - RNA, 19 nt, Artificial Sequence
  Description of Artificial Sequence: Synthetic oligonucleotide
gaauuaugaaucugacguc

SEQ ID NO: 79904 - RNA, 19 nt, Artificial Sequence
  Description of Artificial Sequence: Synthetic oligonucleotide
cagucaguaugcauaaaac

SEQ ID NO: 79905 - RNA, 19 nt, Artificial Sequence
  Description of Artificial Sequence: Synthetic oligonucleotide
cacacacacacacaccagg

SEQ ID NO: 79906 - RNA, 19 nt, Artificial Sequence
  Description of Artificial Sequence: Synthetic oligonucleotide
aaugauuacuagggaaaga

SEQ ID NO: 79907 - RNA, 19 nt, Artificial Sequence
  Description of Artificial Sequence: Synthetic oligonucleotide
uugaaagauugaguguucc

SEQ ID NO: 79908 - RNA, 19 nt, Artificial Sequence
  Description of Artificial Sequence: Synthetic oligonucleotide
caucuauggaagucuagac

SEQ ID NO: 79909 - RNA, 19 nt, Artificial Sequence
  Description of Artificial Sequence: Synthetic oligonucleotide
aguauacaucagugguccc

SEQ ID NO: 79910 - RNA, 19 nt, Artificial Sequence
  Description of Artificial Sequence: Synthetic oligonucleotide
uucuagcaacuacagacaa

SEQ ID NO: 79911 - RNA, 19 nt, Artificial Sequence
  Description of Artificial Sequence: Synthetic oligonucleotide
uaaaggguggaagggguag

SEQ ID NO: 79912 - RNA, 19 nt, Artificial Sequence
  Description of Artificial Sequence: Synthetic oligonucleotide
cccauuuacacacacacac

SEQ ID NO: 79913 - RNA, 19 nt, Artificial Sequence
  Description of Artificial Sequence: Synthetic oligonucleotide
uauaaugugaauggacaua

SEQ ID NO: 79914 - RNA, 19 nt, Artificial Sequence
  Description of Artificial Sequence: Synthetic oligonucleotide
gaagggguguuuuccucgg

SEQ ID NO: 79915 - RNA, 19 nt, Artificial Sequence
  Description of Artificial Sequence: Synthetic oligonucleotide
ucacgucaaguccagcaug

SEQ ID NO: 79916 - RNA, 19 nt, Artificial Sequence
  Description of Artificial Sequence: Synthetic oligonucleotide
agggaaugugacuguguac

SEQ ID NO: 79917 - RNA, 19 nt, Artificial Sequence
  Description of Artificial Sequence: Synthetic oligonucleotide
auaagguuauccccugacu

SEQ ID NO: 79918 - RNA, 19 nt, Artificial Sequence
  Description of Artificial Sequence: Synthetic oligonucleotide
auuucggggucaaauucgc

SEQ ID NO: 79919 - RNA, 19 nt, Artificial Sequence
  Description of Artificial Sequence: Synthetic oligonucleotide
cacgagaacaagaagcaca

SEQ ID NO: 79920 - RNA, 19 nt, Artificial Sequence
  Description of Artificial Sequence: Synthetic oligonucleotide
gucuaagccaucuauggaa

SEQ ID NO: 79921 - RNA, 19 nt, Artificial Sequence
  Description of Artificial Sequence: Synthetic oligonucleotide
ccuagauaaccucacauac

SEQ ID NO: 79922 - RNA, 19 nt, Artificial Sequence
  Description of Artificial Sequence: Synthetic oligonucleotide
uccuagauaaccucacaua

SEQ ID NO: 79923 - RNA, 19 nt, Artificial Sequence
  Description of Artificial Sequence: Synthetic oligonucleotide
augugaacaugggaauacc

SEQ ID NO: 79924 - RNA, 19 nt, Artificial Sequence
  Description of Artificial Sequence: Synthetic oligonucleotide
uguacacucaggcccauuu

SEQ ID NO: 79925 - RNA, 19 nt, Artificial Sequence
  Description of Artificial Sequence: Synthetic oligonucleotide
guacuuacgacaucuacua

SEQ ID NO: 79926 - RNA, 19 nt, Artificial Sequence
  Description of Artificial Sequence: Synthetic oligonucleotide
cugaaaagcaaguacugaa

SEQ ID NO: 79927 - RNA, 19 nt, Artificial Sequence
  Description of Artificial Sequence: Synthetic oligonucleotide
uuuauuaacucagggugua

SEQ ID NO: 79928 - RNA, 19 nt, Artificial Sequence
  Description of Artificial Sequence: Synthetic oligonucleotide
uauccccugacuucaaauc

SEQ ID NO: 79929 - RNA, 19 nt, Artificial Sequence
  Description of Artificial Sequence: Synthetic oligonucleotide
caguaaaucucucuuacaa

SEQ ID NO: 79930 - RNA, 19 nt, Artificial Sequence
  Description of Artificial Sequence: Synthetic oligonucleotide
ugguuguaaggaauaugac

SEQ ID NO: 79931 - RNA, 19 nt, Artificial Sequence
  Description of Artificial Sequence: Synthetic oligonucleotide
agggguguuuuccucgggg

SEQ ID NO: 79932 - RNA, 19 nt, Artificial Sequence
  Description of Artificial Sequence: Synthetic oligonucleotide
guccacuaaaugaagggcc

SEQ ID NO: 79933 - RNA, 19 nt, Artificial Sequence
  Description of Artificial Sequence: Synthetic oligonucleotide
uuacacacacacacacaca

SEQ ID NO: 79934 - RNA, 19 nt, Artificial Sequence
  Description of Artificial Sequence: Synthetic oligonucleotide
aaauucgcuuucugccuca

SEQ ID NO: 79935 - RNA, 19 nt, Artificial Sequence
  Description of Artificial Sequence: Synthetic oligonucleotide
auggguacuuacgacaucu

SEQ ID NO: 79936 - RNA, 19 nt, Artificial Sequence
  Description of Artificial Sequence: Synthetic oligonucleotide
uguggugcacacgaaugag

SEQ ID NO: 79937 - RNA, 19 nt, Artificial Sequence
  Description of Artificial Sequence: Synthetic oligonucleotide
cacacacacacacacacca

SEQ ID NO: 79938 - RNA, 19 nt, Artificial Sequence
  Description of Artificial Sequence: Synthetic oligonucleotide
aucuagcguggacagcugg

SEQ ID NO: 79939 - RNA, 19 nt, Artificial Sequence
  Description of Artificial Sequence: Synthetic oligonucleotide
uccgccaguaucucaguca

SEQ ID NO: 79940 - RNA, 19 nt, Artificial Sequence
  Description of Artificial Sequence: Synthetic oligonucleotide
aacugauuguucuguuaaa

SEQ ID NO: 79941 - RNA, 19 nt, Artificial Sequence
  Description of Artificial Sequence: Synthetic oligonucleotide
gaaagauugaguguucccu

SEQ ID NO: 79942 - RNA, 19 nt, Artificial Sequence
  Description of Artificial Sequence: Synthetic oligonucleotide
uggaaaauuugggcaaucu

SEQ ID NO: 79943 - RNA, 19 nt, Artificial Sequence
  Description of Artificial Sequence: Synthetic oligonucleotide
uguugucccuuggagaugu

SEQ ID NO: 79944 - RNA, 19 nt, Artificial Sequence
  Description of Artificial Sequence: Synthetic oligonucleotide
cauguauggggcagagggc

SEQ ID NO: 79945 - RNA, 19 nt, Artificial Sequence
  Description of Artificial Sequence: Synthetic oligonucleotide
gaacuucuggcggugcgcg

SEQ ID NO: 79946 - RNA, 19 nt, Artificial Sequence
  Description of Artificial Sequence: Synthetic oligonucleotide
aggguguauuaaauucucc

SEQ ID NO: 79947 - RNA, 19 nt, Artificial Sequence
  Description of Artificial Sequence: Synthetic oligonucleotide
uggcaauauacaugccagc

SEQ ID NO: 79948 - RNA, 19 nt, Artificial Sequence
  Description of Artificial Sequence: Synthetic oligonucleotide
uccggacacuuccucuugg

SEQ ID NO: 79949 - RNA, 19 nt, Artificial Sequence
  Description of Artificial Sequence: Synthetic oligonucleotide
ggauuuacuaaaacauaag

SEQ ID NO: 79950 - RNA, 19 nt, Artificial Sequence
  Description of Artificial Sequence: Synthetic oligonucleotide
ucuagcguggacagcuggu

SEQ ID NO: 79951 - RNA, 19 nt, Artificial Sequence
  Description of Artificial Sequence: Synthetic oligonucleotide
ggcaauauacaugccagcc

SEQ ID NO: 79952 - RNA, 19 nt, Artificial Sequence
  Description of Artificial Sequence: Synthetic oligonucleotide
uucggggucaaauucgcuu

SEQ ID NO: 79953 - RNA, 19 nt, Artificial Sequence
  Description of Artificial Sequence: Synthetic oligonucleotide
uacuauacugagggaacug

SEQ ID NO: 79954 - RNA, 19 nt, Artificial Sequence
  Description of Artificial Sequence: Synthetic oligonucleotide
uuaugaaucugacguccua

SEQ ID NO: 79955 - RNA, 19 nt, Artificial Sequence
  Description of Artificial Sequence: Synthetic oligonucleotide
gugagauuggauguccgcc

SEQ ID NO: 79956 - RNA, 19 nt, Artificial Sequence
  Description of Artificial Sequence: Synthetic oligonucleotide
gacgucuucggggaccacg

SEQ ID NO: 79957 - RNA, 19 nt, Artificial Sequence
  Description of Artificial Sequence: Synthetic oligonucleotide
aucugagucaucaaccuau

SEQ ID NO: 79958 - RNA, 19 nt, Artificial Sequence
  Description of Artificial Sequence: Synthetic oligonucleotide
ggauucguugguucuaccc

SEQ ID NO: 79959 - RNA, 19 nt, Artificial Sequence
  Description of Artificial Sequence: Synthetic oligonucleotide
agggguagaugacuaagaa

SEQ ID NO: 79960 - RNA, 19 nt, Artificial Sequence
  Description of Artificial Sequence: Synthetic oligonucleotide
cuuguuuaguguaaagggu

SEQ ID NO: 79961 - RNA, 19 nt, Artificial Sequence
  Description of Artificial Sequence: Synthetic oligonucleotide
acugauuguucuguuaaaa

SEQ ID NO: 79962 - RNA, 19 nt, Artificial Sequence
  Description of Artificial Sequence: Synthetic oligonucleotide
aagggguguuuuccucggg

SEQ ID NO: 79963 - RNA, 19 nt, Artificial Sequence
  Description of Artificial Sequence: Synthetic oligonucleotide
agauguggugcacacgaau

SEQ ID NO: 79964 - RNA, 19 nt, Artificial Sequence
  Description of Artificial Sequence: Synthetic oligonucleotide
caggguguauuaaauucuc

SEQ ID NO: 79965 - RNA, 19 nt, Artificial Sequence
  Description of Artificial Sequence: Synthetic oligonucleotide
gauauguaauucccuugaa

SEQ ID NO: 79966 - RNA, 19 nt, Artificial Sequence
  Description of Artificial Sequence: Synthetic oligonucleotide
gcuuggauacaguucagac

SEQ ID NO: 79967 - RNA, 19 nt, Artificial Sequence
  Description of Artificial Sequence: Synthetic oligonucleotide
acacacacacacacacacc

SEQ ID NO: 79968 - RNA, 19 nt, Artificial Sequence
  Description of Artificial Sequence: Synthetic oligonucleotide
cuauggaagucuagaccug

SEQ ID NO: 79969 - RNA, 19 nt, Artificial Sequence
  Description of Artificial Sequence: Synthetic oligonucleotide
cagagcuagaagucaaaca

SEQ ID NO: 79970 - RNA, 19 nt, Artificial Sequence
  Description of Artificial Sequence: Synthetic oligonucleotide
uucuauguuguggcaggcc

SEQ ID NO: 79971 - RNA, 19 nt, Artificial Sequence
  Description of Artificial Sequence: Synthetic oligonucleotide
uaccuuccaagucuccuau

SEQ ID NO: 79972 - RNA, 19 nt, Artificial Sequence
  Description of Artificial Sequence: Synthetic oligonucleotide
uuccugugaccuaccacac

SEQ ID NO: 79973 - RNA, 19 nt, Artificial Sequence
  Description of Artificial Sequence: Synthetic oligonucleotide
gacuuccuagaccucugac

SEQ ID NO: 79974 - RNA, 19 nt, Artificial Sequence
  Description of Artificial Sequence: Synthetic oligonucleotide
ugacguccuagauaaccuc

SEQ ID NO: 79975 - RNA, 19 nt, Artificial Sequence
  Description of Artificial Sequence: Synthetic oligonucleotide
aagucacgucaaguccagc

SEQ ID NO: 79976 - RNA, 19 nt, Artificial Sequence
  Description of Artificial Sequence: Synthetic oligonucleotide
uuccccucuacacuccuua

SEQ ID NO: 79977 - RNA, 19 nt, Artificial Sequence
  Description of Artificial Sequence: Synthetic oligonucleotide
uguuucgacuuuccuucuc

SEQ ID NO: 79978 - RNA, 19 nt, Artificial Sequence
  Description of Artificial Sequence: Synthetic oligonucleotide
gcaaccaauuuacugaaaa

SEQ ID NO: 79979 - RNA, 19 nt, Artificial Sequence
  Description of Artificial Sequence: Synthetic oligonucleotide
agaagggaaugugacugug

SEQ ID NO: 79980 - RNA, 19 nt, Artificial Sequence
  Description of Artificial Sequence: Synthetic oligonucleotide
auguccgccaguaucucag

SEQ ID NO: 79981 - RNA, 19 nt, Artificial Sequence
  Description of Artificial Sequence: Synthetic oligonucleotide
uacaucaguggucccucaa

SEQ ID NO: 79982 - RNA, 19 nt, Artificial Sequence
  Description of Artificial Sequence: Synthetic oligonucleotide
uccccugacuucaaaucau

SEQ ID NO: 79983 - RNA, 19 nt, Artificial Sequence
  Description of Artificial Sequence: Synthetic oligonucleotide
ggcaauaggugcucaaauc

SEQ ID NO: 79984 - RNA, 19 nt, Artificial Sequence
  Description of Artificial Sequence: Synthetic oligonucleotide
uauguuguggcaggccuau

SEQ ID NO: 79985 - RNA, 19 nt, Artificial Sequence
  Description of Artificial Sequence: Synthetic oligonucleotide
gacuugauuuagauuggga

SEQ ID NO: 79986 - RNA, 19 nt, Artificial Sequence
  Description of Artificial Sequence: Synthetic oligonucleotide
auuuacacacacacacaca

SEQ ID NO: 79987 - RNA, 19 nt, Artificial Sequence
  Description of Artificial Sequence: Synthetic oligonucleotide
aacaugcaaccaauuuacu

SEQ ID NO: 79988 - RNA, 19 nt, Artificial Sequence
  Description of Artificial Sequence: Synthetic oligonucleotide
gucaguaugcauaaaacuu

SEQ ID NO: 79989 - RNA, 19 nt, Artificial Sequence
  Description of Artificial Sequence: Synthetic oligonucleotide
uauacaugccagccuucua

SEQ ID NO: 79990 - RNA, 19 nt, Artificial Sequence
  Description of Artificial Sequence: Synthetic oligonucleotide
uacuuacgacaucuacuaa

SEQ ID NO: 79991 - RNA, 19 nt, Artificial Sequence
  Description of Artificial Sequence: Synthetic oligonucleotide
aauucgcuuucugccucag

SEQ ID NO: 79992 - RNA, 19 nt, Artificial Sequence
  Description of Artificial Sequence: Synthetic oligonucleotide
gacguccuagauaaccuca

SEQ ID NO: 79993 - RNA, 19 nt, Artificial Sequence
  Description of Artificial Sequence: Synthetic oligonucleotide
acguccuagauaaccucac

SEQ ID NO: 79994 - RNA, 19 nt, Artificial Sequence
  Description of Artificial Sequence: Synthetic oligonucleotide
agggcuggacuugauuuag

SEQ ID NO: 79995 - RNA, 19 nt, Artificial Sequence
  Description of Artificial Sequence: Synthetic oligonucleotide
caagaguuaccuuccaagu

SEQ ID NO: 79996 - RNA, 19 nt, Artificial Sequence
  Description of Artificial Sequence: Synthetic oligonucleotide
augugagauuggauguccg

SEQ ID NO: 79997 - RNA, 19 nt, Artificial Sequence
  Description of Artificial Sequence: Synthetic oligonucleotide
ggcgccauggacguacucg

SEQ ID NO: 79998 - RNA, 19 nt, Artificial Sequence
  Description of Artificial Sequence: Synthetic oligonucleotide
cuauacugagggaacugaa

SEQ ID NO: 79999 - RNA, 19 nt, Artificial Sequence
  Description of Artificial Sequence: Synthetic oligonucleotide
auaugaccuaggaauggga

SEQ ID NO: 80000 - RNA, 19 nt, Artificial Sequence
  Description of Artificial Sequence: Synthetic oligonucleotide
uuguuucgacuuuccuucu

SEQ ID NO: 80001 - RNA, 19 nt, Artificial Sequence
  Description of Artificial Sequence: Synthetic oligonucleotide
gauuggauguccgccagua

SEQ ID NO: 80002 - RNA, 19 nt, Artificial Sequence
  Description of Artificial Sequence: Synthetic oligonucleotide
uuguggcaggccuauuaau

SEQ ID NO: 80003 - RNA, 19 nt, Artificial Sequence
  Description of Artificial Sequence: Synthetic oligonucleotide
cauggacguacucggccag

SEQ ID NO: 80004 - RNA, 19 nt, Artificial Sequence
  Description of Artificial Sequence: Synthetic oligonucleotide
cugggauagcaguaaaucu

SEQ ID NO: 80005 - RNA, 19 nt, Artificial Sequence
  Description of Artificial Sequence: Synthetic oligonucleotide
aucucuuauuucgggguca

SEQ ID NO: 80006 - RNA, 19 nt, Artificial Sequence
  Description of Artificial Sequence: Synthetic oligonucleotide
cuucuauguuguggcaggc

SEQ ID NO: 80007 - RNA, 19 nt, Artificial Sequence
  Description of Artificial Sequence: Synthetic oligonucleotide
cuacuaaagcagaggaaua

SEQ ID NO: 80008 - RNA, 19 nt, Artificial Sequence
  Description of Artificial Sequence: Synthetic oligonucleotide
caccacuagguccuucuuc

SEQ ID NO: 80009 - RNA, 19 nt, Artificial Sequence
  Description of Artificial Sequence: Synthetic oligonucleotide
uuauuaacucaggguguau

SEQ ID NO: 80010 - RNA, 19 nt, Artificial Sequence
  Description of Artificial Sequence: Synthetic oligonucleotide
acacacacacacaccagga

SEQ ID NO: 80011 - RNA, 19 nt, Artificial Sequence
  Description of Artificial Sequence: Synthetic oligonucleotide
ggccucgacgucuucgggg

SEQ ID NO: 80012 - RNA, 19 nt, Artificial Sequence
  Description of Artificial Sequence: Synthetic oligonucleotide
cuucuggcggugcgcgucg

SEQ ID NO: 80013 - RNA, 19 nt, Artificial Sequence
  Description of Artificial Sequence: Synthetic oligonucleotide
cuguaggugagucauguau

SEQ ID NO: 80014 - RNA, 19 nt, Artificial Sequence
  Description of Artificial Sequence: Synthetic oligonucleotide
cuuauuucggggucaaauu

SEQ ID NO: 80015 - RNA, 19 nt, Artificial Sequence
  Description of Artificial Sequence: Synthetic oligonucleotide
ucucuuauuucggggucaa

SEQ ID NO: 80016 - RNA, 19 nt, Artificial Sequence
  Description of Artificial Sequence: Synthetic oligonucleotide
gcgccauggacguacucgg

SEQ ID NO: 80017 - RNA, 19 nt, Artificial Sequence
  Description of Artificial Sequence: Synthetic oligonucleotide
gaguuaccuuccaagucuc

SEQ ID NO: 80018 - RNA, 19 nt, Artificial Sequence
  Description of Artificial Sequence: Synthetic oligonucleotide
caguaugcauaaaacuugu

SEQ ID NO: 80019 - RNA, 19 nt, Artificial Sequence
  Description of Artificial Sequence: Synthetic oligonucleotide
ucggggaauguugagucuu

SEQ ID NO: 80020 - RNA, 19 nt, Artificial Sequence
  Description of Artificial Sequence: Synthetic oligonucleotide
aacuucuggcggugcgcgu

SEQ ID NO: 80021 - RNA, 19 nt, Artificial Sequence
  Description of Artificial Sequence: Synthetic oligonucleotide
gccauggacguacucggcc

SEQ ID NO: 80022 - RNA, 19 nt, Artificial Sequence
  Description of Artificial Sequence: Synthetic oligonucleotide
ccucaucuagcguggacag

SEQ ID NO: 80023 - RNA, 19 nt, Artificial Sequence
  Description of Artificial Sequence: Synthetic oligonucleotide
ugcgcgucggcguggcggc

SEQ ID NO: 80024 - RNA, 19 nt, Artificial Sequence
  Description of Artificial Sequence: Synthetic oligonucleotide
ggggcaugccugcucaugc

SEQ ID NO: 80025 - RNA, 19 nt, Artificial Sequence
  Description of Artificial Sequence: Synthetic oligonucleotide
guccuagauaaccucacau

SEQ ID NO: 80026 - RNA, 19 nt, Artificial Sequence
  Description of Artificial Sequence: Synthetic oligonucleotide
acacacacacacacaccag

SEQ ID NO: 80027 - RNA, 19 nt, Artificial Sequence
  Description of Artificial Sequence: Synthetic oligonucleotide
acacgaaaacaggcagaag

SEQ ID NO: 80028 - RNA, 19 nt, Artificial Sequence
  Description of Artificial Sequence: Synthetic oligonucleotide
cugacguccuagauaaccu

SEQ ID NO: 80029 - RNA, 19 nt, Artificial Sequence
  Description of Artificial Sequence: Synthetic oligonucleotide
ccucggggaauguugaguc

SEQ ID NO: 80030 - RNA, 19 nt, Artificial Sequence
  Description of Artificial Sequence: Synthetic oligonucleotide
gugcgcgucggcguggcgg

SEQ ID NO: 80031 - RNA, 19 nt, Artificial Sequence
  Description of Artificial Sequence: Synthetic oligonucleotide
cugaaaagugugguuguaa

SEQ ID NO: 80032 - RNA, 19 nt, Artificial Sequence
  Description of Artificial Sequence: Synthetic oligonucleotide
cuuuagugaccaguuugga

SEQ ID NO: 80033 - RNA, 19 nt, Artificial Sequence
  Description of Artificial Sequence: Synthetic oligonucleotide
uggguacuuacgacaucua

SEQ ID NO: 80034 - RNA, 19 nt, Artificial Sequence
  Description of Artificial Sequence: Synthetic oligonucleotide
gggucaaauucgcuuucug

SEQ ID NO: 80035 - RNA, 19 nt, Artificial Sequence
  Description of Artificial Sequence: Synthetic oligonucleotide
ccaguaauaguuuauugau

SEQ ID NO: 80036 - RNA, 19 nt, Artificial Sequence
  Description of Artificial Sequence: Synthetic oligonucleotide
acacucaggcccauuuaca

SEQ ID NO: 80037 - RNA, 19 nt, Artificial Sequence
  Description of Artificial Sequence: Synthetic oligonucleotide
caauggguacuuacgacau

SEQ ID NO: 80038 - RNA, 19 nt, Artificial Sequence
  Description of Artificial Sequence: Synthetic oligonucleotide
aucggcggcacaccuccgu

SEQ ID NO: 80039 - RNA, 19 nt, Artificial Sequence
  Description of Artificial Sequence: Synthetic oligonucleotide
guuaccuuccaagucuccu

SEQ ID NO: 80040 - RNA, 19 nt, Artificial Sequence
  Description of Artificial Sequence: Synthetic oligonucleotide
gccuucuauguuguggcag

SEQ ID NO: 80041 - RNA, 19 nt, Artificial Sequence
  Description of Artificial Sequence: Synthetic oligonucleotide
uguccgccaguaucucagu

SEQ ID NO: 80042 - RNA, 19 nt, Artificial Sequence
  Description of Artificial Sequence: Synthetic oligonucleotide
cucaucuagcguggacagc

SEQ ID NO: 80043 - RNA, 19 nt, Artificial Sequence
  Description of Artificial Sequence: Synthetic oligonucleotide
ucuggcggugcgcgucggc

SEQ ID NO: 80044 - RNA, 19 nt, Artificial Sequence
  Description of Artificial Sequence: Synthetic oligonucleotide
uccccucuacacuccuuaa

SEQ ID NO: 80045 - RNA, 19 nt, Artificial Sequence
  Description of Artificial Sequence: Synthetic oligonucleotide
cacacgaaugagcuugugu

SEQ ID NO: 80046 - RNA, 19 nt, Artificial Sequence
  Description of Artificial Sequence: Synthetic oligonucleotide
acacacacacacacacaca

SEQ ID NO: 80047 - RNA, 19 nt, Artificial Sequence
  Description of Artificial Sequence: Synthetic oligonucleotide
gcaauauacaugccagccu

SEQ ID NO: 80048 - RNA, 19 nt, Artificial Sequence
  Description of Artificial Sequence: Synthetic oligonucleotide
aaucggcggcacaccuccg

SEQ ID NO: 80049 - RNA, 19 nt, Artificial Sequence
  Description of Artificial Sequence: Synthetic oligonucleotide
cacacacacacaccaggaa

SEQ ID NO: 80050 - RNA, 19 nt, Artificial Sequence
  Description of Artificial Sequence: Synthetic oligonucleotide
uuuccccucuacacuccuu

SEQ ID NO: 80051 - RNA, 19 nt, Artificial Sequence
  Description of Artificial Sequence: Synthetic oligonucleotide
cuauguuguggcaggccua

SEQ ID NO: 80052 - RNA, 19 nt, Artificial Sequence
  Description of Artificial Sequence: Synthetic oligonucleotide
gagucauguauggggcaga

SEQ ID NO: 80053 - RNA, 19 nt, Artificial Sequence
  Description of Artificial Sequence: Synthetic oligonucleotide
acgucuucggggaccacgu

SEQ ID NO: 80054 - RNA, 19 nt, Artificial Sequence
  Description of Artificial Sequence: Synthetic oligonucleotide
aguaugcauaaaacuuguu

SEQ ID NO: 80055 - RNA, 19 nt, Artificial Sequence
  Description of Artificial Sequence: Synthetic oligonucleotide
augcccaccuggcaauaua

SEQ ID NO: 80056 - RNA, 19 nt, Artificial Sequence
  Description of Artificial Sequence: Synthetic oligonucleotide
ccauuuacacacacacaca

SEQ ID NO: 80057 - RNA, 19 nt, Artificial Sequence
  Description of Artificial Sequence: Synthetic oligonucleotide
caagcugaucaaaggggcu

SEQ ID NO: 80058 - RNA, 19 nt, Artificial Sequence
  Description of Artificial Sequence: Synthetic oligonucleotide
guacacucaggcccauuua

SEQ ID NO: 80059 - RNA, 19 nt, Artificial Sequence
  Description of Artificial Sequence: Synthetic oligonucleotide
ccgccaguaucucagucac

SEQ ID NO: 80060 - RNA, 19 nt, Artificial Sequence
  Description of Artificial Sequence: Synthetic oligonucleotide
gcgccaaguccgaacaucc

SEQ ID NO: 80061 - RNA, 19 nt, Artificial Sequence
  Description of Artificial Sequence: Synthetic oligonucleotide
acaaaacauuguagcugga

SEQ ID NO: 80062 - RNA, 19 nt, Artificial Sequence
  Description of Artificial Sequence: Synthetic oligonucleotide
cauaacugauuguucuguu

SEQ ID NO: 80063 - RNA, 19 nt, Artificial Sequence
  Description of Artificial Sequence: Synthetic oligonucleotide
gccccggugagccccaaug

SEQ ID NO: 80064 - RNA, 19 nt, Artificial Sequence
  Description of Artificial Sequence: Synthetic oligonucleotide
gggcaugccugcucaugcc

SEQ ID NO: 80065 - RNA, 19 nt, Artificial Sequence
  Description of Artificial Sequence: Synthetic oligonucleotide
ggggcgccaaguccgaaca

SEQ ID NO: 80066 - RNA, 19 nt, Artificial Sequence
  Description of Artificial Sequence: Synthetic oligonucleotide
aucugacguccuagauaac

SEQ ID NO: 80067 - RNA, 19 nt, Artificial Sequence
  Description of Artificial Sequence: Synthetic oligonucleotide
uucuggcggugcgcgucgg

SEQ ID NO: 80068 - RNA, 19 nt, Artificial Sequence
  Description of Artificial Sequence: Synthetic oligonucleotide
cuagcccaagaauccagau

SEQ ID NO: 80069 - RNA, 19 nt, Artificial Sequence
  Description of Artificial Sequence: Synthetic oligonucleotide
gccgcaaucggcggcacac

SEQ ID NO: 80070 - RNA, 19 nt, Artificial Sequence
  Description of Artificial Sequence: Synthetic oligonucleotide
ggguguuuuccucggggaa

SEQ ID NO: 80071 - RNA, 19 nt, Artificial Sequence
  Description of Artificial Sequence: Synthetic oligonucleotide
cacgaaugagcuuguguuu

SEQ ID NO: 80072 - RNA, 19 nt, Artificial Sequence
  Description of Artificial Sequence: Synthetic oligonucleotide
acgucaaguccagcaugga

SEQ ID NO: 80073 - RNA, 19 nt, Artificial Sequence
  Description of Artificial Sequence: Synthetic oligonucleotide
ccuggauacaaugauuacu

SEQ ID NO: 80074 - RNA, 19 nt, Artificial Sequence
  Description of Artificial Sequence: Synthetic oligonucleotide
cgacucgcucucuucuucc

SEQ ID NO: 80075 - RNA, 19 nt, Artificial Sequence
  Description of Artificial Sequence: Synthetic oligonucleotide
agccgcaaucggcggcaca

SEQ ID NO: 80076 - RNA, 19 nt, Artificial Sequence
  Description of Artificial Sequence: Synthetic oligonucleotide
ggaaaucagcaggacauuu

SEQ ID NO: 80077 - RNA, 19 nt, Artificial Sequence
  Description of Artificial Sequence: Synthetic oligonucleotide
ggggaauguugagucuuca

SEQ ID NO: 80078 - RNA, 19 nt, Artificial Sequence
  Description of Artificial Sequence: Synthetic oligonucleotide
caccucgcucucuaccucu

SEQ ID NO: 80079 - RNA, 19 nt, Artificial Sequence
  Description of Artificial Sequence: Synthetic oligonucleotide
cucggggaauguugagucu

SEQ ID NO: 80080 - RNA, 19 nt, Artificial Sequence
  Description of Artificial Sequence: Synthetic oligonucleotide
gcaggccuauuaauccaca

SEQ ID NO: 80081 - RNA, 19 nt, Artificial Sequence
  Description of Artificial Sequence: Synthetic oligonucleotide
gcacacgaaugagcuugug

SEQ ID NO: 80082 - RNA, 19 nt, Artificial Sequence
  Description of Artificial Sequence: Synthetic oligonucleotide
cucuuauuucggggucaaa

SEQ ID NO: 80083 - RNA, 19 nt, Artificial Sequence
  Description of Artificial Sequence: Synthetic oligonucleotide
cguccuagauaaccucaca

SEQ ID NO: 80084 - RNA, 19 nt, Artificial Sequence
  Description of Artificial Sequence: Synthetic oligonucleotide
ccgcaaucggcggcacacc

SEQ ID NO: 80085 - RNA, 19 nt, Artificial Sequence
  Description of Artificial Sequence: Synthetic oligonucleotide
gcauaucuacagagagccu

SEQ ID NO: 80086 - RNA, 19 nt, Artificial Sequence
  Description of Artificial Sequence: Synthetic oligonucleotide
caugcccaccuggcaauau

SEQ ID NO: 80087 - RNA, 19 nt, Artificial Sequence
  Description of Artificial Sequence: Synthetic oligonucleotide
ccgggcgcccucgucuggc

SEQ ID NO: 80088 - RNA, 19 nt, Artificial Sequence
  Description of Artificial Sequence: Synthetic oligonucleotide
ccccgggcgcccucgucug

SEQ ID NO: 80089 - RNA, 19 nt, Artificial Sequence
  Description of Artificial Sequence: Synthetic oligonucleotide
ccgcuuccaucucuuauuu

SEQ ID NO: 80090 - RNA, 19 nt, Artificial Sequence
  Description of Artificial Sequence: Synthetic oligonucleotide
gcaccacuagguccuucuu

SEQ ID NO: 80091 - RNA, 19 nt, Artificial Sequence
  Description of Artificial Sequence: Synthetic oligonucleotide
cgcaaucggcggcacaccu

SEQ ID NO: 80092 - RNA, 19 nt, Artificial Sequence
  Description of Artificial Sequence: Synthetic oligonucleotide
cgccaguaucucagucaca

SEQ ID NO: 80093 - RNA, 19 nt, Artificial Sequence
  Description of Artificial Sequence: Synthetic oligonucleotide
cuguacacucaggcccauu

SEQ ID NO: 80094 - RNA, 19 nt, Artificial Sequence
  Description of Artificial Sequence: Synthetic oligonucleotide
gggcgccaaguccgaacau

SEQ ID NO: 80095 - RNA, 19 nt, Artificial Sequence
  Description of Artificial Sequence: Synthetic oligonucleotide
gcgcgucggcguggcggcg

SEQ ID NO: 80096 - RNA, 19 nt, Artificial Sequence
  Description of Artificial Sequence: Synthetic oligonucleotide
cgucggcguggcggcggca

SEQ ID NO: 80097 - RNA, 19 nt, Artificial Sequence
  Description of Artificial Sequence: Synthetic oligonucleotide
aaucuuaagaaauggcgcc

SEQ ID NO: 80098 - RNA, 19 nt, Artificial Sequence
  Description of Artificial Sequence: Synthetic oligonucleotide
acuauaacugucuugauuc

SEQ ID NO: 80099 - RNA, 19 nt, Artificial Sequence
  Description of Artificial Sequence: Synthetic oligonucleotide
uggauugacaugcagaucg

SEQ ID NO: 80100 - RNA, 19 nt, Artificial Sequence
  Description of Artificial Sequence: Synthetic oligonucleotide
uuaaucauaccucaaaagc

SEQ ID NO: 80101 - RNA, 19 nt, Artificial Sequence
  Description of Artificial Sequence: Synthetic oligonucleotide
aagucuuacaccaaaauac

SEQ ID NO: 80102 - RNA, 19 nt, Artificial Sequence
  Description of Artificial Sequence: Synthetic oligonucleotide
aaguuuucgccacugaggc

SEQ ID NO: 80103 - RNA, 19 nt, Artificial Sequence
  Description of Artificial Sequence: Synthetic oligonucleotide
uaaaccauaauauugggga

SEQ ID NO: 80104 - RNA, 19 nt, Artificial Sequence
  Description of Artificial Sequence: Synthetic oligonucleotide
aaagacuacaauuuggggu

SEQ ID NO: 80105 - RNA, 19 nt, Artificial Sequence
  Description of Artificial Sequence: Synthetic oligonucleotide
aagaguuuacgauuuaauc

SEQ ID NO: 80106 - RNA, 19 nt, Artificial Sequence
  Description of Artificial Sequence: Synthetic oligonucleotide
uguagcaugauguuaagcc

SEQ ID NO: 80107 - RNA, 19 nt, Artificial Sequence
  Description of Artificial Sequence: Synthetic oligonucleotide
agaugaaucaauaaugccc

SEQ ID NO: 80108 - RNA, 19 nt, Artificial Sequence
  Description of Artificial Sequence: Synthetic oligonucleotide
uuagcuagagauuaagugc

SEQ ID NO: 80109 - RNA, 19 nt, Artificial Sequence
  Description of Artificial Sequence: Synthetic oligonucleotide
aagacuacaauuuggggug

SEQ ID NO: 80110 - RNA, 19 nt, Artificial Sequence
  Description of Artificial Sequence: Synthetic oligonucleotide
ugguguaacaaccuaaaag

SEQ ID NO: 80111 - RNA, 19 nt, Artificial Sequence
  Description of Artificial Sequence: Synthetic oligonucleotide
aagaauuaccuauuguuug

SEQ ID NO: 80112 - RNA, 19 nt, Artificial Sequence
  Description of Artificial Sequence: Synthetic oligonucleotide
aauaacacuuauuuuggca

SEQ ID NO: 80113 - RNA, 19 nt, Artificial Sequence
  Description of Artificial Sequence: Synthetic oligonucleotide
auaagcaaacuacaacugc

SEQ ID NO: 80114 - RNA, 19 nt, Artificial Sequence
  Description of Artificial Sequence: Synthetic oligonucleotide
augacccuaaguuaaaugg

SEQ ID NO: 80115 - RNA, 19 nt, Artificial Sequence
  Description of Artificial Sequence: Synthetic oligonucleotide
aaacggggcaucuuguagc

SEQ ID NO: 80116 - RNA, 19 nt, Artificial Sequence
  Description of Artificial Sequence: Synthetic oligonucleotide
agaguuuacgauuuaauca

SEQ ID NO: 80117 - RNA, 19 nt, Artificial Sequence
  Description of Artificial Sequence: Synthetic oligonucleotide
uacuguuaagcuaaguugc

SEQ ID NO: 80118 - RNA, 19 nt, Artificial Sequence
  Description of Artificial Sequence: Synthetic oligonucleotide
agaacuuuagcauggucac

SEQ ID NO: 80119 - RNA, 19 nt, Artificial Sequence
  Description of Artificial Sequence: Synthetic oligonucleotide
uuaacaucaaacugggucu

SEQ ID NO: 80120 - RNA, 19 nt, Artificial Sequence
  Description of Artificial Sequence: Synthetic oligonucleotide
aauaugugguaucuuggag

SEQ ID NO: 80121 - RNA, 19 nt, Artificial Sequence
  Description of Artificial Sequence: Synthetic oligonucleotide
ugauguuaagccauuuuag

SEQ ID NO: 80122 - RNA, 19 nt, Artificial Sequence
  Description of Artificial Sequence: Synthetic oligonucleotide
ugucacuauucucaggugg

SEQ ID NO: 80123 - RNA, 19 nt, Artificial Sequence
  Description of Artificial Sequence: Synthetic oligonucleotide
uauguuuccccaauacagg

SEQ ID NO: 80124 - RNA, 19 nt, Artificial Sequence
  Description of Artificial Sequence: Synthetic oligonucleotide
agcuaaguugcauccaucc

SEQ ID NO: 80125 - RNA, 19 nt, Artificial Sequence
  Description of Artificial Sequence: Synthetic oligonucleotide
uaaaguacaagcuauuaua

SEQ ID NO: 80126 - RNA, 19 nt, Artificial Sequence
  Description of Artificial Sequence: Synthetic oligonucleotide
aaaucuaaaguacaagcua

SEQ ID NO: 80127 - RNA, 19 nt, Artificial Sequence
  Description of Artificial Sequence: Synthetic oligonucleotide
aauuugcagcauuauacug

SEQ ID NO: 80128 - RNA, 19 nt, Artificial Sequence
  Description of Artificial Sequence: Synthetic oligonucleotide
uugacuauaacugucuuga

SEQ ID NO: 80129 - RNA, 19 nt, Artificial Sequence
  Description of Artificial Sequence: Synthetic oligonucleotide
ugaauguacacaaacugaa

SEQ ID NO: 80130 - RNA, 19 nt, Artificial Sequence
  Description of Artificial Sequence: Synthetic oligonucleotide
ugcuccuaaaaccauagga

SEQ ID NO: 80131 - RNA, 19 nt, Artificial Sequence
  Description of Artificial Sequence: Synthetic oligonucleotide
caguauaagccauucauag

SEQ ID NO: 80132 - RNA, 19 nt, Artificial Sequence
  Description of Artificial Sequence: Synthetic oligonucleotide
ugugguaucuuggagauca

SEQ ID NO: 80133 - RNA, 19 nt, Artificial Sequence
  Description of Artificial Sequence: Synthetic oligonucleotide
uuugacgcgaaucucuuug

SEQ ID NO: 80134 - RNA, 19 nt, Artificial Sequence
  Description of Artificial Sequence: Synthetic oligonucleotide
aauuaucaguugccaaaac

SEQ ID NO: 80135 - RNA, 19 nt, Artificial Sequence
  Description of Artificial Sequence: Synthetic oligonucleotide
uauuuggugggauacguug

SEQ ID NO: 80136 - RNA, 19 nt, Artificial Sequence
  Description of Artificial Sequence: Synthetic oligonucleotide
aguaugucuaaacaucuug

SEQ ID NO: 80137 - RNA, 19 nt, Artificial Sequence
  Description of Artificial Sequence: Synthetic oligonucleotide
uuucgucaaauaaagacau

SEQ ID NO: 80138 - RNA, 19 nt, Artificial Sequence
  Description of Artificial Sequence: Synthetic oligonucleotide
uacgauuuaaucauaccuc

SEQ ID NO: 80139 - RNA, 19 nt, Artificial Sequence
  Description of Artificial Sequence: Synthetic oligonucleotide
uaauuauagaccacucaca

SEQ ID NO: 80140 - RNA, 19 nt, Artificial Sequence
  Description of Artificial Sequence: Synthetic oligonucleotide
acaagaauuaccuauuguu

SEQ ID NO: 80141 - RNA, 19 nt, Artificial Sequence
  Description of Artificial Sequence: Synthetic oligonucleotide
uccaaauuaaaaggcauug

SEQ ID NO: 80142 - RNA, 19 nt, Artificial Sequence
  Description of Artificial Sequence: Synthetic oligonucleotide
aucgcugaguguuagaacu

SEQ ID NO: 80143 - RNA, 19 nt, Artificial Sequence
  Description of Artificial Sequence: Synthetic oligonucleotide
uguuaauuauuucccuggc

SEQ ID NO: 80144 - RNA, 19 nt, Artificial Sequence
  Description of Artificial Sequence: Synthetic oligonucleotide
auaugugguaucuuggaga

SEQ ID NO: 80145 - RNA, 19 nt, Artificial Sequence
  Description of Artificial Sequence: Synthetic oligonucleotide
acugauauguauggacucc

SEQ ID NO: 80146 - RNA, 19 nt, Artificial Sequence
  Description of Artificial Sequence: Synthetic oligonucleotide
uccuaaaaccauaggacac

SEQ ID NO: 80147 - RNA, 19 nt, Artificial Sequence
  Description of Artificial Sequence: Synthetic oligonucleotide
cuuguagcgauagaacugg

SEQ ID NO: 80148 - RNA, 19 nt, Artificial Sequence
  Description of Artificial Sequence: Synthetic oligonucleotide
uuaacacgcuccucuauag

SEQ ID NO: 80149 - RNA, 19 nt, Artificial Sequence
  Description of Artificial Sequence: Synthetic oligonucleotide
aaguaauguagcuguuuug

SEQ ID NO: 80150 - RNA, 19 nt, Artificial Sequence
  Description of Artificial Sequence: Synthetic oligonucleotide
acaaccuaaaaguagccaa

SEQ ID NO: 80151 - RNA, 19 nt, Artificial Sequence
  Description of Artificial Sequence: Synthetic oligonucleotide
  modified_base (7)..(7): a, c, u, g, unknown or other
uuuuggnggacaguguaca

SEQ ID NO: 80152 - RNA, 19 nt, Artificial Sequence
  Description of Artificial Sequence: Synthetic oligonucleotide
aacggggcaucuuguagcg

SEQ ID NO: 80153 - RNA, 19 nt, Artificial Sequence
  Description of Artificial Sequence: Synthetic oligonucleotide
uccuucaaccauuuaauaa

SEQ ID NO: 80154 - RNA, 19 nt, Artificial Sequence
  Description of Artificial Sequence: Synthetic oligonucleotide
aagaauuaucaguugccaa

SEQ ID NO: 80155 - RNA, 19 nt, Artificial Sequence
  Description of Artificial Sequence: Synthetic oligonucleotide
ucaaccauguugacuauaa

SEQ ID NO: 80156 - RNA, 19 nt, Artificial Sequence
  Description of Artificial Sequence: Synthetic oligonucleotide
aacuucauuugguggagga

SEQ ID NO: 80157 - RNA, 19 nt, Artificial Sequence
  Description of Artificial Sequence: Synthetic oligonucleotide
aacccaacgcggcucgccc

SEQ ID NO: 80158 - RNA, 19 nt, Artificial Sequence
  Description of Artificial Sequence: Synthetic oligonucleotide
uugacguugacagacauuu

SEQ ID NO: 80159 - RNA, 19 nt, Artificial Sequence
  Description of Artificial Sequence: Synthetic oligonucleotide
agauccguugacaauguac

SEQ ID NO: 80160 - RNA, 19 nt, Artificial Sequence
  Description of Artificial Sequence: Synthetic oligonucleotide
ucucccaaauagaaucaag

SEQ ID NO: 80161 - RNA, 19 nt, Artificial Sequence
  Description of Artificial Sequence: Synthetic oligonucleotide
augcacaugacuccaaaga

SEQ ID NO: 80162 - RNA, 19 nt, Artificial Sequence
  Description of Artificial Sequence: Synthetic oligonucleotide
uggugggauacguuggagg

SEQ ID NO: 80163 - RNA, 19 nt, Artificial Sequence
  Description of Artificial Sequence: Synthetic oligonucleotide
uaugugguaucuuggagau

SEQ ID NO: 80164 - RNA, 19 nt, Artificial Sequence
  Description of Artificial Sequence: Synthetic oligonucleotide
uuggaggccgauuaagcgc

SEQ ID NO: 80165 - RNA, 19 nt, Artificial Sequence
  Description of Artificial Sequence: Synthetic oligonucleotide
gauguuaacacgcuccucu

SEQ ID NO: 80166 - RNA, 19 nt, Artificial Sequence
  Description of Artificial Sequence: Synthetic oligonucleotide
aaaugugauccaaaugugu

SEQ ID NO: 80167 - RNA, 19 nt, Artificial Sequence
  Description of Artificial Sequence: Synthetic oligonucleotide
auuaagcgccuuugcaacg

SEQ ID NO: 80168 - RNA, 19 nt, Artificial Sequence
  Description of Artificial Sequence: Synthetic oligonucleotide
ugcuauguuuccccaauac

SEQ ID NO: 80169 - RNA, 19 nt, Artificial Sequence
  Description of Artificial Sequence: Synthetic oligonucleotide
ccaaagacuacaauuuggg

SEQ ID NO: 80170 - RNA, 19 nt, Artificial Sequence
  Description of Artificial Sequence: Synthetic oligonucleotide
  modified_base (4)..(4): a, c, u, g, unknown or other
uggnggacaguguacacuc

SEQ ID NO: 80171 - RNA, 19 nt, Artificial Sequence
  Description of Artificial Sequence: Synthetic oligonucleotide
cagucuucgaauauaccac

SEQ ID NO: 80172 - RNA, 19 nt, Artificial Sequence
  Description of Artificial Sequence: Synthetic oligonucleotide
agcuauauucaaugugaag

SEQ ID NO: 80173 - RNA, 19 nt, Artificial Sequence
  Description of Artificial Sequence: Synthetic oligonucleotide
auagcccgaagucugaaga

SEQ ID NO: 80174 - RNA, 19 nt, Artificial Sequence
  Description of Artificial Sequence: Synthetic oligonucleotide
ugcuuugacgcgaaucucu

SEQ ID NO: 80175 - RNA, 19 nt, Artificial Sequence
  Description of Artificial Sequence: Synthetic oligonucleotide
guaccggucauucuuaaca

SEQ ID NO: 80176 - RNA, 19 nt, Artificial Sequence
  Description of Artificial Sequence: Synthetic oligonucleotide
guuuucgccacugaggcug

SEQ ID NO: 80177 - RNA, 19 nt, Artificial Sequence
  Description of Artificial Sequence: Synthetic oligonucleotide
uuuggggugaauguacaca

SEQ ID NO: 80178 - RNA, 19 nt, Artificial Sequence
  Description of Artificial Sequence: Synthetic oligonucleotide
aacauugguuuaaucaagu

SEQ ID NO: 80179 - RNA, 19 nt, Artificial Sequence
  Description of Artificial Sequence: Synthetic oligonucleotide
agaaauggcgccuguauuu

SEQ ID NO: 80180 - RNA, 19 nt, Artificial Sequence
  Description of Artificial Sequence: Synthetic oligonucleotide
ucgcucugacugaacaacg

SEQ ID NO: 80181 - RNA, 19 nt, Artificial Sequence
  Description of Artificial Sequence: Synthetic oligonucleotide
  modified_base (2)..(2): a, c, u, g, unknown or other
gnggacaguguacacuccc

SEQ ID NO: 80182 - RNA, 19 nt, Artificial Sequence
  Description of Artificial Sequence: Synthetic oligonucleotide
gaguuuacgauuuaaucau

SEQ ID NO: 80183 - RNA, 19 nt, Artificial Sequence
  Description of Artificial Sequence: Synthetic oligonucleotide
acgacugcaagaguucucg

SEQ ID NO: 80184 - RNA, 19 nt, Artificial Sequence
  Description of Artificial Sequence: Synthetic oligonucleotide
aaugguguaacaaccuaaa

SEQ ID NO: 80185 - RNA, 19 nt, Artificial Sequence
  Description of Artificial Sequence: Synthetic oligonucleotide
cauccaacgugcaaugcac

SEQ ID NO: 80186 - RNA, 19 nt, Artificial Sequence
  Description of Artificial Sequence: Synthetic oligonucleotide
aaaugguguaacaaccuaa

SEQ ID NO: 80187 - RNA, 19 nt, Artificial Sequence
  Description of Artificial Sequence: Synthetic oligonucleotide
uucgaauauaccaccucaa

SEQ ID NO: 80188 - RNA, 19 nt, Artificial Sequence
  Description of Artificial Sequence: Synthetic oligonucleotide
cucaaugacccuaaguuaa

SEQ ID NO: 80189 - RNA, 19 nt, Artificial Sequence
  Description of Artificial Sequence: Synthetic oligonucleotide
uugacgcgaaucucuuugg

SEQ ID NO: 80190 - RNA, 19 nt, Artificial Sequence
  Description of Artificial Sequence: Synthetic oligonucleotide
uguaugcuauguuucccca

SEQ ID NO: 80191 - RNA, 19 nt, Artificial Sequence
  Description of Artificial Sequence: Synthetic oligonucleotide
uuuggugggauacguugga

SEQ ID NO: 80192 - RNA, 19 nt, Artificial Sequence
  Description of Artificial Sequence: Synthetic oligonucleotide
uuuaaggguaaaagcugaa

SEQ ID NO: 80193 - RNA, 19 nt, Artificial Sequence
  Description of Artificial Sequence: Synthetic oligonucleotide
aaacccaacgcggcucgcc

SEQ ID NO: 80194 - RNA, 19 nt, Artificial Sequence
  Description of Artificial Sequence: Synthetic oligonucleotide
acuguauaaaugugaucca

SEQ ID NO: 80195 - RNA, 19 nt, Artificial Sequence
  Description of Artificial Sequence: Synthetic oligonucleotide
cuuggcaaucaaacggggc

SEQ ID NO: 80196 - RNA, 19 nt, Artificial Sequence
  Description of Artificial Sequence: Synthetic oligonucleotide
ucgaauauaccaccucaau

SEQ ID NO: 80197 - RNA, 19 nt, Artificial Sequence
  Description of Artificial Sequence: Synthetic oligonucleotide
gauccaaauguguccacca

SEQ ID NO: 80198 - RNA, 19 nt, Artificial Sequence
  Description of Artificial Sequence: Synthetic oligonucleotide
uuacuucaguauaagccau

SEQ ID NO: 80199 - RNA, 19 nt, Artificial Sequence
  Description of Artificial Sequence: Synthetic oligonucleotide
ucuucgaauauaccaccuc

SEQ ID NO: 80200 - RNA, 19 nt, Artificial Sequence
  Description of Artificial Sequence: Synthetic oligonucleotide
gucacuauucucagguggg

SEQ ID NO: 80201 - RNA, 19 nt, Artificial Sequence
  Description of Artificial Sequence: Synthetic oligonucleotide
gacccuaaguuaaauggug

SEQ ID NO: 80202 - RNA, 19 nt, Artificial Sequence
  Description of Artificial Sequence: Synthetic oligonucleotide
cuccuaaaaccauaggaca

SEQ ID NO: 80203 - RNA, 19 nt, Artificial Sequence
  Description of Artificial Sequence: Synthetic oligonucleotide
uuacaccaaaauacaggcu

SEQ ID NO: 80204 - RNA, 19 nt, Artificial Sequence
  Description of Artificial Sequence: Synthetic oligonucleotide
uugaaaccuagaagucaag

SEQ ID NO: 80205 - RNA, 19 nt, Artificial Sequence
  Description of Artificial Sequence: Synthetic oligonucleotide
uggaaacggagccauuuuc

SEQ ID NO: 80206 - RNA, 19 nt, Artificial Sequence
  Description of Artificial Sequence: Synthetic oligonucleotide
aacgucaaccauguugacu

SEQ ID NO: 80207 - RNA, 19 nt, Artificial Sequence
  Description of Artificial Sequence: Synthetic oligonucleotide
cuucgaauauaccaccuca

SEQ ID NO: 80208 - RNA, 19 nt, Artificial Sequence
  Description of Artificial Sequence: Synthetic oligonucleotide
auuuggugggauacguugg

SEQ ID NO: 80209 - RNA, 19 nt, Artificial Sequence
  Description of Artificial Sequence: Synthetic oligonucleotide
uguagcgauagaacugguc

SEQ ID NO: 80210 - RNA, 19 nt, Artificial Sequence
  Description of Artificial Sequence: Synthetic oligonucleotide
agggaugacauaaacgacu

SEQ ID NO: 80211 - RNA, 19 nt, Artificial Sequence
  Description of Artificial Sequence: Synthetic oligonucleotide
ugauccaaauguguccacc

SEQ ID NO: 80212 - RNA, 19 nt, Artificial Sequence
  Description of Artificial Sequence: Synthetic oligonucleotide
ccuacaaucuaccaggcuc

SEQ ID NO: 80213 - RNA, 19 nt, Artificial Sequence
  Description of Artificial Sequence: Synthetic oligonucleotide
aguaucaaguguagcauga

SEQ ID NO: 80214 - RNA, 19 nt, Artificial Sequence
  Description of Artificial Sequence: Synthetic oligonucleotide
caaacggggcaucuuguag

SEQ ID NO: 80215 - RNA, 19 nt, Artificial Sequence
  Description of Artificial Sequence: Synthetic oligonucleotide
cuuguaugcuauguuuccc

SEQ ID NO: 80216 - RNA, 19 nt, Artificial Sequence
  Description of Artificial Sequence: Synthetic oligonucleotide
cauugcuaccacacauucc

SEQ ID NO: 80217 - RNA, 19 nt, Artificial Sequence
  Description of Artificial Sequence: Synthetic oligonucleotide
uccgcguccacaccagcag

SEQ ID NO: 80218 - RNA, 19 nt, Artificial Sequence
  Description of Artificial Sequence: Synthetic oligonucleotide
acuauucucagguggguuu

SEQ ID NO: 80219 - RNA, 19 nt, Artificial Sequence
  Description of Artificial Sequence: Synthetic oligonucleotide
ugcaaugcacaugacucca

SEQ ID NO: 80220 - RNA, 19 nt, Artificial Sequence
  Description of Artificial Sequence: Synthetic oligonucleotide
uacaagcuauuauauccaa

SEQ ID NO: 80221 - RNA, 19 nt, Artificial Sequence
  Description of Artificial Sequence: Synthetic oligonucleotide
aggauguuaacacgcuccu

SEQ ID NO: 80222 - RNA, 19 nt, Artificial Sequence
  Description of Artificial Sequence: Synthetic oligonucleotide
uggcuuuuacauccagucu

SEQ ID NO: 80223 - RNA, 19 nt, Artificial Sequence
  Description of Artificial Sequence: Synthetic oligonucleotide
uaaaaccauaggacacaca

SEQ ID NO: 80224 - RNA, 19 nt, Artificial Sequence
  Description of Artificial Sequence: Synthetic oligonucleotide
uaacuguauaaaugugauc

SEQ ID NO: 80225 - RNA, 19 nt, Artificial Sequence
  Description of Artificial Sequence: Synthetic oligonucleotide
ugacgcgaaucucuuuggc

SEQ ID NO: 80226 - RNA, 19 nt, Artificial Sequence
  Description of Artificial Sequence: Synthetic oligonucleotide
uugagacauauuucuuaga

SEQ ID NO: 80227 - RNA, 19 nt, Artificial Sequence
  Description of Artificial Sequence: Synthetic oligonucleotide
ucaaguguagcaugauguu

SEQ ID NO: 80228 - RNA, 19 nt, Artificial Sequence
  Description of Artificial Sequence: Synthetic oligonucleotide
ugagauccguugacaaugu

SEQ ID NO: 80229 - RNA, 19 nt, Artificial Sequence
  Description of Artificial Sequence: Synthetic oligonucleotide
aguguagcaugauguuaag

SEQ ID NO: 80230 - RNA, 19 nt, Artificial Sequence
  Description of Artificial Sequence: Synthetic oligonucleotide
cuacaaucuaccaggcuca

SEQ ID NO: 80231 - RNA, 19 nt, Artificial Sequence
  Description of Artificial Sequence: Synthetic oligonucleotide
gaagaagguaccgcugagc

SEQ ID NO: 80232 - RNA, 19 nt, Artificial Sequence
  Description of Artificial Sequence: Synthetic oligonucleotide
uuaagcuaaguugcaucca

SEQ ID NO: 80233 - RNA, 19 nt, Artificial Sequence
  Description of Artificial Sequence: Synthetic oligonucleotide
acgugcaaugcacaugacu

SEQ ID NO: 80234 - RNA, 19 nt, Artificial Sequence
  Description of Artificial Sequence: Synthetic oligonucleotide
ccucaauagagcaaugaac

SEQ ID NO: 80235 - RNA, 19 nt, Artificial Sequence
  Description of Artificial Sequence: Synthetic oligonucleotide
guagccaauuacuucagua

SEQ ID NO: 80236 - RNA, 19 nt, Artificial Sequence
  Description of Artificial Sequence: Synthetic oligonucleotide
guacccacaggcuuuacaa

SEQ ID NO: 80237 - RNA, 19 nt, Artificial Sequence
  Description of Artificial Sequence: Synthetic oligonucleotide
gucuuacaccaaaauacag

SEQ ID NO: 80238 - RNA, 19 nt, Artificial Sequence
  Description of Artificial Sequence: Synthetic oligonucleotide
cuuguuaccauuccaggua

SEQ ID NO: 80239 - RNA, 19 nt, Artificial Sequence
  Description of Artificial Sequence: Synthetic oligonucleotide
uggaaaccggguccggagc

SEQ ID NO: 80240 - RNA, 19 nt, Artificial Sequence
  Description of Artificial Sequence: Synthetic oligonucleotide
gaauuaucaguugccaaaa

SEQ ID NO: 80241 - RNA, 19 nt, Artificial Sequence
  Description of Artificial Sequence: Synthetic oligonucleotide
  modified_base (6)..(6): a, c, u, g, unknown or other
uuuggnggacaguguacac

SEQ ID NO: 80242 - RNA, 19 nt, Artificial Sequence
  Description of Artificial Sequence: Synthetic oligonucleotide
auacguuggaggccgauua

SEQ ID NO: 80243 - RNA, 19 nt, Artificial Sequence
  Description of Artificial Sequence: Synthetic oligonucleotide
uauagaccacucacaguaa

SEQ ID NO: 80244 - RNA, 19 nt, Artificial Sequence
  Description of Artificial Sequence: Synthetic oligonucleotide
uguuaacacgcuccucuau

SEQ ID NO: 80245 - RNA, 19 nt, Artificial Sequence
  Description of Artificial Sequence: Synthetic oligonucleotide
ugcgcaacagcucguuuuc

SEQ ID NO: 80246 - RNA, 19 nt, Artificial Sequence
  Description of Artificial Sequence: Synthetic oligonucleotide
aggacuaacuucauuuggu

SEQ ID NO: 80247 - RNA, 19 nt, Artificial Sequence
  Description of Artificial Sequence: Synthetic oligonucleotide
ugcauugcuaccacacauu

SEQ ID NO: 80248 - RNA, 19 nt, Artificial Sequence
  Description of Artificial Sequence: Synthetic oligonucleotide
aacgacugcaagaguucuc

SEQ ID NO: 80249 - RNA, 19 nt, Artificial Sequence
  Description of Artificial Sequence: Synthetic oligonucleotide
gauauguauggacucccua

SEQ ID NO: 80250 - RNA, 19 nt, Artificial Sequence
  Description of Artificial Sequence: Synthetic oligonucleotide
caggcuuuacaagaauuac

SEQ ID NO: 80251 - RNA, 19 nt, Artificial Sequence
  Description of Artificial Sequence: Synthetic oligonucleotide
gcuuguaugcuauguuucc

SEQ ID NO: 80252 - RNA, 19 nt, Artificial Sequence
  Description of Artificial Sequence: Synthetic oligonucleotide
gguacacuggcagucuucg

SEQ ID NO: 80253 - RNA, 19 nt, Artificial Sequence
  Description of Artificial Sequence: Synthetic oligonucleotide
aaccuaaaaguagccaauu

SEQ ID NO: 80254 - RNA, 19 nt, Artificial Sequence
  Description of Artificial Sequence: Synthetic oligonucleotide
acuucauuugguggaggag

SEQ ID NO: 80255 - RNA, 19 nt, Artificial Sequence
  Description of Artificial Sequence: Synthetic oligonucleotide
ugucaagcaugccucggua

SEQ ID NO: 80256 - RNA, 19 nt, Artificial Sequence
  Description of Artificial Sequence: Synthetic oligonucleotide
uccaacgugcaaugcacau

SEQ ID NO: 80257 - RNA, 19 nt, Artificial Sequence
  Description of Artificial Sequence: Synthetic oligonucleotide
cucgcucugacugaacaac

SEQ ID NO: 80258 - RNA, 19 nt, Artificial Sequence
  Description of Artificial Sequence: Synthetic oligonucleotide
uuauucgccucaugagauc

SEQ ID NO: 80259 - RNA, 19 nt, Artificial Sequence
  Description of Artificial Sequence: Synthetic oligonucleotide
uucugcuuugacgcgaauc

SEQ ID NO: 80260 - RNA, 19 nt, Artificial Sequence
  Description of Artificial Sequence: Synthetic oligonucleotide
accuaaaaguagccaauua

SEQ ID NO: 80261 - RNA, 19 nt, Artificial Sequence
  Description of Artificial Sequence: Synthetic oligonucleotide
ggaaacggagccauuuucc

SEQ ID NO: 80262 - RNA, 19 nt, Artificial Sequence
  Description of Artificial Sequence: Synthetic oligonucleotide
guuaacacgcuccucuaua

SEQ ID NO: 80263 - RNA, 19 nt, Artificial Sequence
  Description of Artificial Sequence: Synthetic oligonucleotide
gacaaauggacgggcgggc

SEQ ID NO: 80264 - RNA, 19 nt, Artificial Sequence
  Description of Artificial Sequence: Synthetic oligonucleotide
ugacacgcugcgguugacg

SEQ ID NO: 80265 - RNA, 19 nt, Artificial Sequence
  Description of Artificial Sequence: Synthetic oligonucleotide
aauguaccggucauucuua

SEQ ID NO: 80266 - RNA, 19 nt, Artificial Sequence
  Description of Artificial Sequence: Synthetic oligonucleotide
cauaaacccaacgcggcuc

SEQ ID NO: 80267 - RNA, 19 nt, Artificial Sequence
  Description of Artificial Sequence: Synthetic oligonucleotide
gcuuauucgccucaugaga

SEQ ID NO: 80268 - RNA, 19 nt, Artificial Sequence
  Description of Artificial Sequence: Synthetic oligonucleotide
ggaaaccggguccggagcg

SEQ ID NO: 80269 - RNA, 19 nt, Artificial Sequence
  Description of Artificial Sequence: Synthetic oligonucleotide
ugguaucuuggagaucagc

SEQ ID NO: 80270 - RNA, 19 nt, Artificial Sequence
  Description of Artificial Sequence: Synthetic oligonucleotide
guuaauuauuucccuggcu

SEQ ID NO: 80271 - RNA, 19 nt, Artificial Sequence
  Description of Artificial Sequence: Synthetic oligonucleotide
gaaacggagccauuuuccu

SEQ ID NO: 80272 - RNA, 19 nt, Artificial Sequence
  Description of Artificial Sequence: Synthetic oligonucleotide
agcuaguggguaaagaauu

SEQ ID NO: 80273 - RNA, 19 nt, Artificial Sequence
  Description of Artificial Sequence: Synthetic oligonucleotide
guauguggcucccacucca

SEQ ID NO: 80274 - RNA, 19 nt, Artificial Sequence
  Description of Artificial Sequence: Synthetic oligonucleotide
aguuuaugaugugugucaa

SEQ ID NO: 80275 - RNA, 19 nt, Artificial Sequence
  Description of Artificial Sequence: Synthetic oligonucleotide
ugaacgggcuggucaggcc

SEQ ID NO: 80276 - RNA, 19 nt, Artificial Sequence
  Description of Artificial Sequence: Synthetic oligonucleotide
gucaagcaugccucgguac

SEQ ID NO: 80277 - RNA, 19 nt, Artificial Sequence
  Description of Artificial Sequence: Synthetic oligonucleotide
caccuacaaucuaccaggc

SEQ ID NO: 80278 - RNA, 19 nt, Artificial Sequence
  Description of Artificial Sequence: Synthetic oligonucleotide
augguguaacaaccuaaaa

SEQ ID NO: 80279 - RNA, 19 nt, Artificial Sequence
  Description of Artificial Sequence: Synthetic oligonucleotide
uucgucaaauaaagacaua

SEQ ID NO: 80280 - RNA, 19 nt, Artificial Sequence
  Description of Artificial Sequence: Synthetic oligonucleotide
cuuauucgccucaugagau

SEQ ID NO: 80281 - RNA, 19 nt, Artificial Sequence
  Description of Artificial Sequence: Synthetic oligonucleotide
gacguccgcguccacacca

SEQ ID NO: 80282 - RNA, 19 nt, Artificial Sequence
  Description of Artificial Sequence: Synthetic oligonucleotide
gcuauguuuccccaauaca

SEQ ID NO: 80283 - RNA, 19 nt, Artificial Sequence
  Description of Artificial Sequence: Synthetic oligonucleotide
uacguuggaggccgauuaa

SEQ ID NO: 80284 - RNA, 19 nt, Artificial Sequence
  Description of Artificial Sequence: Synthetic oligonucleotide
aguggccaucaccagacuu

SEQ ID NO: 80285 - RNA, 19 nt, Artificial Sequence
  Description of Artificial Sequence: Synthetic oligonucleotide
acguuggaggccgauuaag

SEQ ID NO: 80286 - RNA, 19 nt, Artificial Sequence
  Description of Artificial Sequence: Synthetic oligonucleotide
uagcccgaagucugaagaa

SEQ ID NO: 80287 - RNA, 19 nt, Artificial Sequence
  Description of Artificial Sequence: Synthetic oligonucleotide
caaaucaucgcugaguguu

SEQ ID NO: 80288 - RNA, 19 nt, Artificial Sequence
  Description of Artificial Sequence: Synthetic oligonucleotide
caaccauguugacuauaac

SEQ ID NO: 80289 - RNA, 19 nt, Artificial Sequence
  Description of Artificial Sequence: Synthetic oligonucleotide
aacgugcaaugcacaugac

SEQ ID NO: 80290 - RNA, 19 nt, Artificial Sequence
  Description of Artificial Sequence: Synthetic oligonucleotide
uuguagcgauagaacuggu

SEQ ID NO: 80291 - RNA, 19 nt, Artificial Sequence
  Description of Artificial Sequence: Synthetic oligonucleotide
acccuaaguuaaauggugu

SEQ ID NO: 80292 - RNA, 19 nt, Artificial Sequence
  Description of Artificial Sequence: Synthetic oligonucleotide
ccauucauagcccgaaguc

SEQ ID NO: 80293 - RNA, 19 nt, Artificial Sequence
  Description of Artificial Sequence: Synthetic oligonucleotide
gcauugcuaccacacauuc

SEQ ID NO: 80294 - RNA, 19 nt, Artificial Sequence
  Description of Artificial Sequence: Synthetic oligonucleotide
gucucccuuagaaugacaa

SEQ ID NO: 80295 - RNA, 19 nt, Artificial Sequence
  Description of Artificial Sequence: Synthetic oligonucleotide
uggcugaguaaggucauua

SEQ ID NO: 80296 - RNA, 19 nt, Artificial Sequence
  Description of Artificial Sequence: Synthetic oligonucleotide
cugaacgggcuggucaggc

SEQ ID NO: 80297 - RNA, 19 nt, Artificial Sequence
  Description of Artificial Sequence: Synthetic oligonucleotide
ggcaagauagcaaccaaaa

SEQ ID NO: 80298 - RNA, 19 nt, Artificial Sequence
  Description of Artificial Sequence: Synthetic oligonucleotide
cucauccaacgugcaaugc

SEQ ID NO: 80299 - RNA, 19 nt, Artificial Sequence
  Description of Artificial Sequence: Synthetic oligonucleotide
ccuagcaacuguacccacc

SEQ ID NO: 80300 - RNA, 19 nt, Artificial Sequence
  Description of Artificial Sequence: Synthetic oligonucleotide
aagcaugccucgguaccca

SEQ ID NO: 80301 - RNA, 19 nt, Artificial Sequence
  Description of Artificial Sequence: Synthetic oligonucleotide
gguauguggcucccacucc

SEQ ID NO: 80302 - RNA, 19 nt, Artificial Sequence
  Description of Artificial Sequence: Synthetic oligonucleotide
aucaucgcugaguguuaga

SEQ ID NO: 80303 - RNA, 19 nt, Artificial Sequence
  Description of Artificial Sequence: Synthetic oligonucleotide
aucaagaguuuacgauuua

SEQ ID NO: 80304 - RNA, 19 nt, Artificial Sequence
  Description of Artificial Sequence: Synthetic oligonucleotide
uggcucauccaacgugcaa

SEQ ID NO: 80305 - RNA, 19 nt, Artificial Sequence
  Description of Artificial Sequence: Synthetic oligonucleotide
ucgcugaguguuagaacuu

SEQ ID NO: 80306 - RNA, 19 nt, Artificial Sequence
  Description of Artificial Sequence: Synthetic oligonucleotide
gcgguugacguugacagac

SEQ ID NO: 80307 - RNA, 19 nt, Artificial Sequence
  Description of Artificial Sequence: Synthetic oligonucleotide
uaagcgccuuugcaacguc

SEQ ID NO: 80308 - RNA, 19 nt, Artificial Sequence
  Description of Artificial Sequence: Synthetic oligonucleotide
acccaacgcggcucgcccg

SEQ ID NO: 80309 - RNA, 19 nt, Artificial Sequence
  Description of Artificial Sequence: Synthetic oligonucleotide
ucauagcccgaagucugaa

SEQ ID NO: 80310 - RNA, 19 nt, Artificial Sequence
  Description of Artificial Sequence: Synthetic oligonucleotide
cugaucuacuugagaacaa

SEQ ID NO: 80311 - RNA, 19 nt, Artificial Sequence
  Description of Artificial Sequence: Synthetic oligonucleotide
gccgauuaagcgccuuugc

SEQ ID NO: 80312 - RNA, 19 nt, Artificial Sequence
  Description of Artificial Sequence: Synthetic oligonucleotide
caccucaauagagcaauga

SEQ ID NO: 80313 - RNA, 19 nt, Artificial Sequence
  Description of Artificial Sequence: Synthetic oligonucleotide
caaauggacgggcgggcca

SEQ ID NO: 80314 - RNA, 19 nt, Artificial Sequence
  Description of Artificial Sequence: Synthetic oligonucleotide
auagagcaaugaaccugag

SEQ ID NO: 80315 - RNA, 19 nt, Artificial Sequence
  Description of Artificial Sequence: Synthetic oligonucleotide
augcuauguuuccccaaua

SEQ ID NO: 80316 - RNA, 19 nt, Artificial Sequence
  Description of Artificial Sequence: Synthetic oligonucleotide
agcaaccacuaaauucaca

SEQ ID NO: 80317 - RNA, 19 nt, Artificial Sequence
  Description of Artificial Sequence: Synthetic oligonucleotide
uacaaucuaccaggcucaa

SEQ ID NO: 80318 - RNA, 19 nt, Artificial Sequence
  Description of Artificial Sequence: Synthetic oligonucleotide
caacgucaaccauguugac

SEQ ID NO: 80319 - RNA, 19 nt, Artificial Sequence
  Description of Artificial Sequence: Synthetic oligonucleotide
agaucgguuucaggauucu

SEQ ID NO: 80320 - RNA, 19 nt, Artificial Sequence
  Description of Artificial Sequence: Synthetic oligonucleotide
auauuuggugggauacguu

SEQ ID NO: 80321 - RNA, 19 nt, Artificial Sequence
  Description of Artificial Sequence: Synthetic oligonucleotide
ggccaugcaacaaagaauu

SEQ ID NO: 80322 - RNA, 19 nt, Artificial Sequence
  Description of Artificial Sequence: Synthetic oligonucleotide
agacuacaauuugggguga

SEQ ID NO: 80323 - RNA, 19 nt, Artificial Sequence
  Description of Artificial Sequence: Synthetic oligonucleotide
uguugcacuucuggcugau

SEQ ID NO: 80324 - RNA, 19 nt, Artificial Sequence
  Description of Artificial Sequence: Synthetic oligonucleotide
gagcuuccucgguuguauc

SEQ ID NO: 80325 - RNA, 19 nt, Artificial Sequence
  Description of Artificial Sequence: Synthetic oligonucleotide
gcuaguggguaaagaauuc

SEQ ID NO: 80326 - RNA, 19 nt, Artificial Sequence
  Description of Artificial Sequence: Synthetic oligonucleotide
uaaacccaacgcggcucgc

SEQ ID NO: 80327 - RNA, 19 nt, Artificial Sequence
  Description of Artificial Sequence: Synthetic oligonucleotide
cagcuaguggguaaagaau

SEQ ID NO: 80328 - RNA, 19 nt, Artificial Sequence
  Description of Artificial Sequence: Synthetic oligonucleotide
cugcuuugacgcgaaucuc

SEQ ID NO: 80329 - RNA, 19 nt, Artificial Sequence
  Description of Artificial Sequence: Synthetic oligonucleotide
acgggcgggccaugcaaca

SEQ ID NO: 80330 - RNA, 19 nt, Artificial Sequence
  Description of Artificial Sequence: Synthetic oligonucleotide
uaccuauuguuugcuucuu

SEQ ID NO: 80331 - RNA, 19 nt, Artificial Sequence
  Description of Artificial Sequence: Synthetic oligonucleotide
gaaauggcgccuguauuuu

SEQ ID NO: 80332 - RNA, 19 nt, Artificial Sequence
  Description of Artificial Sequence: Synthetic oligonucleotide
gacgggcgggccaugcaac

SEQ ID NO: 80333 - RNA, 19 nt, Artificial Sequence
  Description of Artificial Sequence: Synthetic oligonucleotide
aggccgauuaagcgccuuu

SEQ ID NO: 80334 - RNA, 19 nt, Artificial Sequence
  Description of Artificial Sequence: Synthetic oligonucleotide
agaacuggucugacacgcu

SEQ ID NO: 80335 - RNA, 19 nt, Artificial Sequence
  Description of Artificial Sequence: Synthetic oligonucleotide
agcgccuuugcaacgucaa

SEQ ID NO: 80336 - RNA, 19 nt, Artificial Sequence
  Description of Artificial Sequence: Synthetic oligonucleotide
cagcaccuacaaucuacca

SEQ ID NO: 80337 - RNA, 19 nt, Artificial Sequence
  Description of Artificial Sequence: Synthetic oligonucleotide
cgauuaagcgccuuugcaa

SEQ ID NO: 80338 - RNA, 19 nt, Artificial Sequence
  Description of Artificial Sequence: Synthetic oligonucleotide
agcaugauguuaagccauu

SEQ ID NO: 80339 - RNA, 19 nt, Artificial Sequence
  Description of Artificial Sequence: Synthetic oligonucleotide
gcgacguccgcguccacac

SEQ ID NO: 80340 - RNA, 19 nt, Artificial Sequence
  Description of Artificial Sequence: Synthetic oligonucleotide
ccgauuaagcgccuuugca

SEQ ID NO: 80341 - RNA, 19 nt, Artificial Sequence
  Description of Artificial Sequence: Synthetic oligonucleotide
ggccgauuaagcgccuuug

SEQ ID NO: 80342 - RNA, 19 nt, Artificial Sequence
  Description of Artificial Sequence: Synthetic oligonucleotide
cgccucaugagauccguug

SEQ ID NO: 80343 - RNA, 19 nt, Artificial Sequence
  Description of Artificial Sequence: Synthetic oligonucleotide
gagauccguugacaaugua

SEQ ID NO: 80344 - RNA, 19 nt, Artificial Sequence
  Description of Artificial Sequence: Synthetic oligonucleotide
ggcgggccaugcaacaaag

SEQ ID NO: 80345 - RNA, 19 nt, Artificial Sequence
  Description of Artificial Sequence: Synthetic oligonucleotide
uggcugcgcaacagcucgu

SEQ ID NO: 80346 - RNA, 19 nt, Artificial Sequence
  Description of Artificial Sequence: Synthetic oligonucleotide
agucucccuuagaaugaca

SEQ ID NO: 80347 - RNA, 19 nt, Artificial Sequence
  Description of Artificial Sequence: Synthetic oligonucleotide
ccgaagucugaagaaugac

SEQ ID NO: 80348 - RNA, 19 nt, Artificial Sequence
  Description of Artificial Sequence: Synthetic oligonucleotide
ccaacgugcaaugcacaug

SEQ ID NO: 80349 - RNA, 19 nt, Artificial Sequence
  Description of Artificial Sequence: Synthetic oligonucleotide
cuuuagcauggucacugau

SEQ ID NO: 80350 - RNA, 19 nt, Artificial Sequence
  Description of Artificial Sequence: Synthetic oligonucleotide
gauacguuggaggccgauu

SEQ ID NO: 80351 - RNA, 19 nt, Artificial Sequence
  Description of Artificial Sequence: Synthetic oligonucleotide
cacuggcagucuucgaaua

SEQ ID NO: 80352 - RNA, 19 nt, Artificial Sequence
  Description of Artificial Sequence: Synthetic oligonucleotide
ccuuguuaccauuccaggu

SEQ ID NO: 80353 - RNA, 19 nt, Artificial Sequence
  Description of Artificial Sequence: Synthetic oligonucleotide
  modified_base (3)..(3): a, c, u, g, unknown or other
ggnggacaguguacacucc

SEQ ID NO: 80354 - RNA, 19 nt, Artificial Sequence
  Description of Artificial Sequence: Synthetic oligonucleotide
ucgguacccacaggcuuua

SEQ ID NO: 80355 - RNA, 19 nt, Artificial Sequence
  Description of Artificial Sequence: Synthetic oligonucleotide
ggacaguguacacuccccu

SEQ ID NO: 80356 - RNA, 19 nt, Artificial Sequence
  Description of Artificial Sequence: Synthetic oligonucleotide
cugcgcaacagcucguuuu

SEQ ID NO: 80357 - RNA, 19 nt, Artificial Sequence
  Description of Artificial Sequence: Synthetic oligonucleotide
caguguacacuccccuugu

SEQ ID NO: 80358 - RNA, 19 nt, Artificial Sequence
  Description of Artificial Sequence: Synthetic oligonucleotide
ggauguuaacacgcuccuc

SEQ ID NO: 80359 - RNA, 19 nt, Artificial Sequence
  Description of Artificial Sequence: Synthetic oligonucleotide
gguugacguugacagacau

SEQ ID NO: 80360 - RNA, 19 nt, Artificial Sequence
  Description of Artificial Sequence: Synthetic oligonucleotide
acguccgcguccacaccag

SEQ ID NO: 80361 - RNA, 19 nt, Artificial Sequence
  Description of Artificial Sequence: Synthetic oligonucleotide
cccagcgacguccgcgucc

SEQ ID NO: 80362 - RNA, 19 nt, Artificial Sequence
  Description of Artificial Sequence: Synthetic oligonucleotide
cccaacgcggcucgcccgg

SEQ ID NO: 80363 - RNA, 19 nt, Artificial Sequence
  Description of Artificial Sequence: Synthetic oligonucleotide
auucugcgccucugagcuu

SEQ ID NO: 80364 - RNA, 19 nt, Artificial Sequence
  Description of Artificial Sequence: Synthetic oligonucleotide
gcgcaacagcucguuuucg

SEQ ID NO: 80365 - RNA, 19 nt, Artificial Sequence
  Description of Artificial Sequence: Synthetic oligonucleotide
ccguugacaauguaccggu

SEQ ID NO: 80366 - RNA, 19 nt, Artificial Sequence
  Description of Artificial Sequence: Synthetic oligonucleotide
ggacgggcgggccaugcaa

SEQ ID NO: 80367 - RNA, 19 nt, Artificial Sequence
  Description of Artificial Sequence: Synthetic oligonucleotide
gcgauagaacuggucugac

SEQ ID NO: 80368 - RNA, 19 nt, Artificial Sequence
  Description of Artificial Sequence: Synthetic oligonucleotide
ucccagcgacguccgcguc

SEQ ID NO: 80369 - RNA, 19 nt, Artificial Sequence
  Description of Artificial Sequence: Synthetic oligonucleotide
gcgccuuugcaacgucaac

SEQ ID NO: 80370 - RNA, 19 nt, Artificial Sequence
  Description of Artificial Sequence: Synthetic oligonucleotide
cuuugacgcgaaucucuuu

SEQ ID NO: 80371 - RNA, 19 nt, Artificial Sequence
  Description of Artificial Sequence: Synthetic oligonucleotide
gguucugcuuugacgcgaa

SEQ ID NO: 80372 - RNA, 19 nt, Artificial Sequence
  Description of Artificial Sequence: Synthetic oligonucleotide
gcuuccucgguuguauccu

SEQ ID NO: 80373 - RNA, 19 nt, Artificial Sequence
  Description of Artificial Sequence: Synthetic oligonucleotide
acggggcaucuuguagcga

SEQ ID NO: 80374 - RNA, 19 nt, Artificial Sequence
  Description of Artificial Sequence: Synthetic oligonucleotide
gggcgggccaugcaacaaa

SEQ ID NO: 80375 - RNA, 19 nt, Artificial Sequence
  Description of Artificial Sequence: Synthetic oligonucleotide
ggcuuauuagugacuuuau

SEQ ID NO: 80376 - RNA, 19 nt, Artificial Sequence
  Description of Artificial Sequence: Synthetic oligonucleotide
gcuuugacgcgaaucucuu

SEQ ID NO: 80377 - RNA, 19 nt, Artificial Sequence
  Description of Artificial Sequence: Synthetic oligonucleotide
cgguugacguugacagaca

SEQ ID NO: 80378 - RNA, 19 nt, Artificial Sequence
  Description of Artificial Sequence: Synthetic oligonucleotide
gcgggccaugcaacaaaga

SEQ ID NO: 80379 - RNA, 19 nt, Artificial Sequence
  Description of Artificial Sequence: Synthetic oligonucleotide
gcaugauguuaagccauuu

SEQ ID NO: 80380 - RNA, 19 nt, Artificial Sequence
  Description of Artificial Sequence: Synthetic oligonucleotide
gaggccgauuaagcgccuu

SEQ ID NO: 80381 - RNA, 19 nt, Artificial Sequence
  Description of Artificial Sequence: Synthetic oligonucleotide
agguaccgcugagccuuuu

SEQ ID NO: 80382 - RNA, 19 nt, Artificial Sequence
  Description of Artificial Sequence: Synthetic oligonucleotide
ccucgguacccacaggcuu

SEQ ID NO: 80383 - RNA, 19 nt, Artificial Sequence
  Description of Artificial Sequence: Synthetic oligonucleotide
ggauacguuggaggccgau

SEQ ID NO: 80384 - RNA, 19 nt, Artificial Sequence
  Description of Artificial Sequence: Synthetic oligonucleotide
cgacguccgcguccacacc

SEQ ID NO: 80385 - RNA, 19 nt, Artificial Sequence
  Description of Artificial Sequence: Synthetic oligonucleotide
gggcugucccagcgacguc

SEQ ID NO: 80386 - RNA, 19 nt, Artificial Sequence
  Description of Artificial Sequence: Synthetic oligonucleotide
gggauacguuggaggccga

SEQ ID NO: 80387 - RNA, 19 nt, Artificial Sequence
  Description of Artificial Sequence: Synthetic oligonucleotide
gccuggcgaccucuggaau

SEQ ID NO: 80388 - RNA, 19 nt, Artificial Sequence
  Description of Artificial Sequence: Synthetic oligonucleotide
ggaggccgauuaagcgccu

SEQ ID NO: 80389 - RNA, 19 nt, Artificial Sequence
  Description of Artificial Sequence: Synthetic oligonucleotide
cgcugaguguuagaacuuu

SEQ ID NO: 80390 - RNA, 19 nt, Artificial Sequence
  Description of Artificial Sequence: Synthetic oligonucleotide
auauauauauaauauacag

SEQ ID NO: 80391 - RNA, 19 nt, Artificial Sequence
  Description of Artificial Sequence: Synthetic oligonucleotide
uuaucaacuaccaaagagg

SEQ ID NO: 80392 - RNA, 19 nt, Artificial Sequence
  Description of Artificial Sequence: Synthetic oligonucleotide
auauauauauauaauauac

SEQ ID NO: 80393 - RNA, 19 nt, Artificial Sequence
  Description of Artificial Sequence: Synthetic oligonucleotide
aacacuaacuuucagccac

SEQ ID NO: 80394 - RNA, 19 nt, Artificial Sequence
  Description of Artificial Sequence: Synthetic oligonucleotide
caauuuaugacccucaacc

SEQ ID NO: 80395 - RNA, 19 nt, Artificial Sequence
  Description of Artificial Sequence: Synthetic oligonucleotide
uuuggauucagcauggugc

SEQ ID NO: 80396 - RNA, 19 nt, Artificial Sequence
  Description of Artificial Sequence: Synthetic oligonucleotide
uguauauauauauauauaa

SEQ ID NO: 80397 - RNA, 19 nt, Artificial Sequence
  Description of Artificial Sequence: Synthetic oligonucleotide
uauauauauauauauaaua

SEQ ID NO: 80398 - RNA, 19 nt, Artificial Sequence
  Description of Artificial Sequence: Synthetic oligonucleotide
aaucgguccaguucgaagg

SEQ ID NO: 80399 - RNA, 19 nt, Artificial Sequence
  Description of Artificial Sequence: Synthetic oligonucleotide
uauguauauauauauauau

SEQ ID NO: 80400 - RNA, 19 nt, Artificial Sequence
  Description of Artificial Sequence: Synthetic oligonucleotide
uauauauauaauauacaga

SEQ ID NO: 80401 - RNA, 19 nt, Artificial Sequence
  Description of Artificial Sequence: Synthetic oligonucleotide
uauauauauauaauauaca

SEQ ID NO: 80402 - RNA, 19 nt, Artificial Sequence
  Description of Artificial Sequence: Synthetic oligonucleotide
uucugaaguauauagaaca

SEQ ID NO: 80403 - RNA, 19 nt, Artificial Sequence
  Description of Artificial Sequence: Synthetic oligonucleotide
aacgacaucaucuuacaug

SEQ ID NO: 80404 - RNA, 19 nt, Artificial Sequence
  Description of Artificial Sequence: Synthetic oligonucleotide
uuguuaucuauauacgacg

SEQ ID NO: 80405 - RNA, 19 nt, Artificial Sequence
  Description of Artificial Sequence: Synthetic oligonucleotide
guaacacuaacuuucagcc

SEQ ID NO: 80406 - RNA, 19 nt, Artificial Sequence
  Description of Artificial Sequence: Synthetic oligonucleotide
acgacaucaucuuacaugg

SEQ ID NO: 80407 - RNA, 19 nt, Artificial Sequence
  Description of Artificial Sequence: Synthetic oligonucleotide
uuuaugacccucaaccaag

SEQ ID NO: 80408 - RNA, 19 nt, Artificial Sequence
  Description of Artificial Sequence: Synthetic oligonucleotide
uaacacauuauuccagagg

SEQ ID NO: 80409 - RNA, 19 nt, Artificial Sequence
  Description of Artificial Sequence: Synthetic oligonucleotide
ucaacccauaguaacaugc

SEQ ID NO: 80410 - RNA, 19 nt, Artificial Sequence
  Description of Artificial Sequence: Synthetic oligonucleotide
ugauuuacgaugucaaucu

SEQ ID NO: 80411 - RNA, 19 nt, Artificial Sequence
  Description of Artificial Sequence: Synthetic oligonucleotide
aguaacaugcguccgagag

SEQ ID NO: 80412 - RNA, 19 nt, Artificial Sequence
  Description of Artificial Sequence: Synthetic oligonucleotide
uugggauuuagccugagcu

SEQ ID NO: 80413 - RNA, 19 nt, Artificial Sequence
  Description of Artificial Sequence: Synthetic oligonucleotide
uauauauauauauaauaua

SEQ ID NO: 80414 - RNA, 19 nt, Artificial Sequence
  Description of Artificial Sequence: Synthetic oligonucleotide
uuuauaaagauagcguggc

SEQ ID NO: 80415 - RNA, 19 nt, Artificial Sequence
  Description of Artificial Sequence: Synthetic oligonucleotide
gauugguuaagacagacaa

SEQ ID NO: 80416 - RNA, 19 nt, Artificial Sequence
  Description of Artificial Sequence: Synthetic oligonucleotide
aacacuuacuugccuuugc

SEQ ID NO: 80417 - RNA, 19 nt, Artificial Sequence
  Description of Artificial Sequence: Synthetic oligonucleotide
uauaaagauagcguggccc

SEQ ID NO: 80418 - RNA, 19 nt, Artificial Sequence
  Description of Artificial Sequence: Synthetic oligonucleotide
agaaguagcuauaaggaac

SEQ ID NO: 80419 - RNA, 19 nt, Artificial Sequence
  Description of Artificial Sequence: Synthetic oligonucleotide
uguuaucuauauacgacgc

SEQ ID NO: 80420 - RNA, 19 nt, Artificial Sequence
  Description of Artificial Sequence: Synthetic oligonucleotide
cuaaaaguacuaauuuacc

SEQ ID NO: 80421 - RNA, 19 nt, Artificial Sequence
  Description of Artificial Sequence: Synthetic oligonucleotide
aauuuaugacccucaacca

SEQ ID NO: 80422 - RNA, 19 nt, Artificial Sequence
  Description of Artificial Sequence: Synthetic oligonucleotide
aauagcucaugauauucca

SEQ ID NO: 80423 - RNA, 19 nt, Artificial Sequence
  Description of Artificial Sequence: Synthetic oligonucleotide
ugacccucaaccaagggug

SEQ ID NO: 80424 - RNA, 19 nt, Artificial Sequence
  Description of Artificial Sequence: Synthetic oligonucleotide
auauauauauauauaauau

SEQ ID NO: 80425 - RNA, 19 nt, Artificial Sequence
  Description of Artificial Sequence: Synthetic oligonucleotide
uuaagauuacacuugucuc

SEQ ID NO: 80426 - RNA, 19 nt, Artificial Sequence
  Description of Artificial Sequence: Synthetic oligonucleotide
uguuguaugcaagugaaga

SEQ ID NO: 80427 - RNA, 19 nt, Artificial Sequence
  Description of Artificial Sequence: Synthetic oligonucleotide
ucaagcuagaaauguagug

SEQ ID NO: 80428 - RNA, 19 nt, Artificial Sequence
  Description of Artificial Sequence: Synthetic oligonucleotide
cucuuaucaacuaccaaag

SEQ ID NO: 80429 - RNA, 19 nt, Artificial Sequence
  Description of Artificial Sequence: Synthetic oligonucleotide
aaacggugaaggcugcaac

SEQ ID NO: 80430 - RNA, 19 nt, Artificial Sequence
  Description of Artificial Sequence: Synthetic oligonucleotide
ugauuuugauuuccugacg

SEQ ID NO: 80431 - RNA, 19 nt, Artificial Sequence
  Description of Artificial Sequence: Synthetic oligonucleotide
uaauagcucaugauauucc

SEQ ID NO: 80432 - RNA, 19 nt, Artificial Sequence
  Description of Artificial Sequence: Synthetic oligonucleotide
uuaucuauauacgacgccu

SEQ ID NO: 80433 - RNA, 19 nt, Artificial Sequence
  Description of Artificial Sequence: Synthetic oligonucleotide
ggaaauuuccguucuaucc

SEQ ID NO: 80434 - RNA, 19 nt, Artificial Sequence
  Description of Artificial Sequence: Synthetic oligonucleotide
agaaaggcaaugaaagacg

SEQ ID NO: 80435 - RNA, 19 nt, Artificial Sequence
  Description of Artificial Sequence: Synthetic oligonucleotide
ugcagcucgaucuaauagc

SEQ ID NO: 80436 - RNA, 19 nt, Artificial Sequence
  Description of Artificial Sequence: Synthetic oligonucleotide
uauacgacgccucauuaaa

SEQ ID NO: 80437 - RNA, 19 nt, Artificial Sequence
  Description of Artificial Sequence: Synthetic oligonucleotide
auagaaaacagcagagggg

SEQ ID NO: 80438 - RNA, 19 nt, Artificial Sequence
  Description of Artificial Sequence: Synthetic oligonucleotide
ugaacauguuugaucuagg

SEQ ID NO: 80439 - RNA, 19 nt, Artificial Sequence
  Description of Artificial Sequence: Synthetic oligonucleotide
ucauuaaaguuuaccggca

SEQ ID NO: 80440 - RNA, 19 nt, Artificial Sequence
  Description of Artificial Sequence: Synthetic oligonucleotide
aaaaccccuuuauaaagau

SEQ ID NO: 80441 - RNA, 19 nt, Artificial Sequence
  Description of Artificial Sequence: Synthetic oligonucleotide
agcgucaaucagcuaaggc

SEQ ID NO: 80442 - RNA, 19 nt, Artificial Sequence
  Description of Artificial Sequence: Synthetic oligonucleotide
ucgauuucagcgucaauca

SEQ ID NO: 80443 - RNA, 19 nt, Artificial Sequence
  Description of Artificial Sequence: Synthetic oligonucleotide
uauauagaacaggucaggc

SEQ ID NO: 80444 - RNA, 19 nt, Artificial Sequence
  Description of Artificial Sequence: Synthetic oligonucleotide
agcucgaucuaauagcuca

SEQ ID NO: 80445 - RNA, 19 nt, Artificial Sequence
  Description of Artificial Sequence: Synthetic oligonucleotide
gaucuaauagcucaugaua

SEQ ID NO: 80446 - RNA, 19 nt, Artificial Sequence
  Description of Artificial Sequence: Synthetic oligonucleotide
ucccuuacaaacaugggua

SEQ ID NO: 80447 - RNA, 19 nt, Artificial Sequence
  Description of Artificial Sequence: Synthetic oligonucleotide
cuuacgcagaucuuggcug

SEQ ID NO: 80448 - RNA, 19 nt, Artificial Sequence
  Description of Artificial Sequence: Synthetic oligonucleotide
uuaugacccucaaccaagg

SEQ ID NO: 80449 - RNA, 19 nt, Artificial Sequence
  Description of Artificial Sequence: Synthetic oligonucleotide
ucuuacgcagaucuuggcu

SEQ ID NO: 80450 - RNA, 19 nt, Artificial Sequence
  Description of Artificial Sequence: Synthetic oligonucleotide
uuuccuaacaugagaccug

SEQ ID NO: 80451 - RNA, 19 nt, Artificial Sequence
  Description of Artificial Sequence: Synthetic oligonucleotide
uuuaccggcauugggaucu

SEQ ID NO: 80452 - RNA, 19 nt, Artificial Sequence
  Description of Artificial Sequence: Synthetic oligonucleotide
auuuccuaacaugagaccu

SEQ ID NO: 80453 - RNA, 19 nt, Artificial Sequence
  Description of Artificial Sequence: Synthetic oligonucleotide
uccuuugaguuacagccgc

SEQ ID NO: 80454 - RNA, 19 nt, Artificial Sequence
  Description of Artificial Sequence: Synthetic oligonucleotide
uuaaaccaaccccacgugu

SEQ ID NO: 80455 - RNA, 19 nt, Artificial Sequence
  Description of Artificial Sequence: Synthetic oligonucleotide
agcacuugguaagaguccc

SEQ ID NO: 80456 - RNA, 19 nt, Artificial Sequence
  Description of Artificial Sequence: Synthetic oligonucleotide
uuauaaagauagcguggcc

SEQ ID NO: 80457 - RNA, 19 nt, Artificial Sequence
  Description of Artificial Sequence: Synthetic oligonucleotide
ucgaucuaauagcucauga

SEQ ID NO: 80458 - RNA, 19 nt, Artificial Sequence
  Description of Artificial Sequence: Synthetic oligonucleotide
uucguggccucucugacga

SEQ ID NO: 80459 - RNA, 19 nt, Artificial Sequence
  Description of Artificial Sequence: Synthetic oligonucleotide
agagugaacgacaucaucu

SEQ ID NO: 80460 - RNA, 19 nt, Artificial Sequence
  Description of Artificial Sequence: Synthetic oligonucleotide
uaaaguuuaccggcauugg

SEQ ID NO: 80461 - RNA, 19 nt, Artificial Sequence
  Description of Artificial Sequence: Synthetic oligonucleotide
uaagcuucuuccguuagca

SEQ ID NO: 80462 - RNA, 19 nt, Artificial Sequence
  Description of Artificial Sequence: Synthetic oligonucleotide
guauauagaacaggucagg

SEQ ID NO: 80463 - RNA, 19 nt, Artificial Sequence
  Description of Artificial Sequence: Synthetic oligonucleotide
gacucaccugcucacaaag

SEQ ID NO: 80464 - RNA, 19 nt, Artificial Sequence
  Description of Artificial Sequence: Synthetic oligonucleotide
aaguuuaccggcauuggga

SEQ ID NO: 80465 - RNA, 19 nt, Artificial Sequence
  Description of Artificial Sequence: Synthetic oligonucleotide
cauauguauauauauauau

SEQ ID NO: 80466 - RNA, 19 nt, Artificial Sequence
  Description of Artificial Sequence: Synthetic oligonucleotide
ucagcgucaaucagcuaag

SEQ ID NO: 80467 - RNA, 19 nt, Artificial Sequence
  Description of Artificial Sequence: Synthetic oligonucleotide
aguagauagaaaacagcag

SEQ ID NO: 80468 - RNA, 19 nt, Artificial Sequence
  Description of Artificial Sequence: Synthetic oligonucleotide
uuagagagcucuuuuccaa

SEQ ID NO: 80469 - RNA, 19 nt, Artificial Sequence
  Description of Artificial Sequence: Synthetic oligonucleotide
acuacgucgauuucagcgu

SEQ ID NO: 80470 - RNA, 19 nt, Artificial Sequence
  Description of Artificial Sequence: Synthetic oligonucleotide
aacaugagaccugugcaug

SEQ ID NO: 80471 - RNA, 19 nt, Artificial Sequence
  Description of Artificial Sequence: Synthetic oligonucleotide
uggagagguauuugccucg

SEQ ID NO: 80472 - RNA, 19 nt, Artificial Sequence
  Description of Artificial Sequence: Synthetic oligonucleotide
uccguucuauccaaagucu

SEQ ID NO: 80473 - RNA, 19 nt, Artificial Sequence
  Description of Artificial Sequence: Synthetic oligonucleotide
caacccauaguaacaugcg

SEQ ID NO: 80474 - RNA, 19 nt, Artificial Sequence
  Description of Artificial Sequence: Synthetic oligonucleotide
cuaauagcucaugauauuc

SEQ ID NO: 80475 - RNA, 19 nt, Artificial Sequence
  Description of Artificial Sequence: Synthetic oligonucleotide
guuaucuauauacgacgcc

SEQ ID NO: 80476 - RNA, 19 nt, Artificial Sequence
  Description of Artificial Sequence: Synthetic oligonucleotide
uggguaucuacuacgucga

SEQ ID NO: 80477 - RNA, 19 nt, Artificial Sequence
  Description of Artificial Sequence: Synthetic oligonucleotide
ugacuuucuacccguacuc

SEQ ID NO: 80478 - RNA, 19 nt, Artificial Sequence
  Description of Artificial Sequence: Synthetic oligonucleotide
uaacaugcguccgagaguc

SEQ ID NO: 80479 - RNA, 19 nt, Artificial Sequence
  Description of Artificial Sequence: Synthetic oligonucleotide
agcccuagagaacaaucuc

SEQ ID NO: 80480 - RNA, 19 nt, Artificial Sequence
  Description of Artificial Sequence: Synthetic oligonucleotide
guuugaucuagggagggag

SEQ ID NO: 80481 - RNA, 19 nt, Artificial Sequence
  Description of Artificial Sequence: Synthetic oligonucleotide
cauuuccuaacaugagacc

SEQ ID NO: 80482 - RNA, 19 nt, Artificial Sequence
  Description of Artificial Sequence: Synthetic oligonucleotide
acccauucuccuccaaucg

SEQ ID NO: 80483 - RNA, 19 nt, Artificial Sequence
  Description of Artificial Sequence: Synthetic oligonucleotide
aucuuacgcagaucuuggc

SEQ ID NO: 80484 - RNA, 19 nt, Artificial Sequence
  Description of Artificial Sequence: Synthetic oligonucleotide
uuccguggcuuucauagcu

SEQ ID NO: 80485 - RNA, 19 nt, Artificial Sequence
  Description of Artificial Sequence: Synthetic oligonucleotide
gucgauuucagcgucaauc

SEQ ID NO: 80486 - RNA, 19 nt, Artificial Sequence
  Description of Artificial Sequence: Synthetic oligonucleotide
aucacaaucuuacgcagau

SEQ ID NO: 80487 - RNA, 19 nt, Artificial Sequence
  Description of Artificial Sequence: Synthetic oligonucleotide
gauguaggguaacacuaac

SEQ ID NO: 80488 - RNA, 19 nt, Artificial Sequence
  Description of Artificial Sequence: Synthetic oligonucleotide
cuaacaugagaccugugca

SEQ ID NO: 80489 - RNA, 19 nt, Artificial Sequence
  Description of Artificial Sequence: Synthetic oligonucleotide
augacccucaaccaagggu

SEQ ID NO: 80490 - RNA, 19 nt, Artificial Sequence
  Description of Artificial Sequence: Synthetic oligonucleotide
uaucuauauacgacgccuc

SEQ ID NO: 80491 - RNA, 19 nt, Artificial Sequence
  Description of Artificial Sequence: Synthetic oligonucleotide
ucuucuccgauccacccuc

SEQ ID NO: 80492 - RNA, 19 nt, Artificial Sequence
  Description of Artificial Sequence: Synthetic oligonucleotide
ucuuccguuagcagggauc

SEQ ID NO: 80493 - RNA, 19 nt, Artificial Sequence
  Description of Artificial Sequence: Synthetic oligonucleotide
gugauuuacgaugucaauc

SEQ ID NO: 80494 - RNA, 19 nt, Artificial Sequence
  Description of Artificial Sequence: Synthetic oligonucleotide
aagaccacgaacacuuacu

SEQ ID NO: 80495 - RNA, 19 nt, Artificial Sequence
  Description of Artificial Sequence: Synthetic oligonucleotide
aaagacgggauaggaagga

SEQ ID NO: 80496 - RNA, 19 nt, Artificial Sequence
  Description of Artificial Sequence: Synthetic oligonucleotide
uagcagagcuguucuagag

SEQ ID NO: 80497 - RNA, 19 nt, Artificial Sequence
  Description of Artificial Sequence: Synthetic oligonucleotide
uagcguggcccucuuauca

SEQ ID NO: 80498 - RNA, 19 nt, Artificial Sequence
  Description of Artificial Sequence: Synthetic oligonucleotide
ugugacuuuauuccaucuu

SEQ ID NO: 80499 - RNA, 19 nt, Artificial Sequence
  Description of Artificial Sequence: Synthetic oligonucleotide
acugguaaugugccaggag

SEQ ID NO: 80500 - RNA, 19 nt, Artificial Sequence
  Description of Artificial Sequence: Synthetic oligonucleotide
ucaaucagcuaaggcaacc

SEQ ID NO: 80501 - RNA, 19 nt, Artificial Sequence
  Description of Artificial Sequence: Synthetic oligonucleotide
guagcuauaaggaacaaau

SEQ ID NO: 80502 - RNA, 19 nt, Artificial Sequence
  Description of Artificial Sequence: Synthetic oligonucleotide
agagguauuugccucgaaa

SEQ ID NO: 80503 - RNA, 19 nt, Artificial Sequence
  Description of Artificial Sequence: Synthetic oligonucleotide
uugagagugagggcgagcu

SEQ ID NO: 80504 - RNA, 19 nt, Artificial Sequence
  Description of Artificial Sequence: Synthetic oligonucleotide
aguuuaccggcauugggau

SEQ ID NO: 80505 - RNA, 19 nt, Artificial Sequence
  Description of Artificial Sequence: Synthetic oligonucleotide
ucuaauagcucaugauauu

SEQ ID NO: 80506 - RNA, 19 nt, Artificial Sequence
  Description of Artificial Sequence: Synthetic oligonucleotide
aaagauagcguggcccucu

SEQ ID NO: 80507 - RNA, 19 nt, Artificial Sequence
  Description of Artificial Sequence: Synthetic oligonucleotide
aucuauauacgacgccuca

SEQ ID NO: 80508 - RNA, 19 nt, Artificial Sequence
  Description of Artificial Sequence: Synthetic oligonucleotide
aggcucaauaguuaaggaa

SEQ ID NO: 80509 - RNA, 19 nt, Artificial Sequence
  Description of Artificial Sequence: Synthetic oligonucleotide
auuuacgaugucaaucuca

SEQ ID NO: 80510 - RNA, 19 nt, Artificial Sequence
  Description of Artificial Sequence: Synthetic oligonucleotide
gaaggcaccucaauuuaug

SEQ ID NO: 80511 - RNA, 19 nt, Artificial Sequence
  Description of Artificial Sequence: Synthetic oligonucleotide
gaggaaauuccccagugcu

SEQ ID NO: 80512 - RNA, 19 nt, Artificial Sequence
  Description of Artificial Sequence: Synthetic oligonucleotide
gggauuuagccugagcugg

SEQ ID NO: 80513 - RNA, 19 nt, Artificial Sequence
  Description of Artificial Sequence: Synthetic oligonucleotide
agggacuaaaaguacuaau

SEQ ID NO: 80514 - RNA, 19 nt, Artificial Sequence
  Description of Artificial Sequence: Synthetic oligonucleotide
caaucgguccaguucgaag

SEQ ID NO: 80515 - RNA, 19 nt, Artificial Sequence
  Description of Artificial Sequence: Synthetic oligonucleotide
ugugauuuacgaugucaau

SEQ ID NO: 80516 - RNA, 19 nt, Artificial Sequence
  Description of Artificial Sequence: Synthetic oligonucleotide
auauguauauauauauaua

SEQ ID NO: 80517 - RNA, 19 nt, Artificial Sequence
  Description of Artificial Sequence: Synthetic oligonucleotide
cagugggucaccgugacac

SEQ ID NO: 80518 - RNA, 19 nt, Artificial Sequence
  Description of Artificial Sequence: Synthetic oligonucleotide
guacauguuuucugcauuc

SEQ ID NO: 80519 - RNA, 19 nt, Artificial Sequence
  Description of Artificial Sequence: Synthetic oligonucleotide
ggcaucaacccauaguaac

SEQ ID NO: 80520 - RNA, 19 nt, Artificial Sequence
  Description of Artificial Sequence: Synthetic oligonucleotide
auauacgacgccucauuaa

SEQ ID NO: 80521 - RNA, 19 nt, Artificial Sequence
  Description of Artificial Sequence: Synthetic oligonucleotide
cacuaaaccgcucccuuac

SEQ ID NO: 80522 - RNA, 19 nt, Artificial Sequence
  Description of Artificial Sequence: Synthetic oligonucleotide
uuacgcagaucuuggcuga

SEQ ID NO: 80523 - RNA, 19 nt, Artificial Sequence
  Description of Artificial Sequence: Synthetic oligonucleotide
guaucuacuacgucgauuu

SEQ ID NO: 80524 - RNA, 19 nt, Artificial Sequence
  Description of Artificial Sequence: Synthetic oligonucleotide
caaugaaagacgggauagg

SEQ ID NO: 80525 - RNA, 19 nt, Artificial Sequence
  Description of Artificial Sequence: Synthetic oligonucleotide
ucggaagacaguaguggaa

SEQ ID NO: 80526 - RNA, 19 nt, Artificial Sequence
  Description of Artificial Sequence: Synthetic oligonucleotide
cuuucuacccguacuccuc

SEQ ID NO: 80527 - RNA, 19 nt, Artificial Sequence
  Description of Artificial Sequence: Synthetic oligonucleotide
ugcagauguaggguaacac

SEQ ID NO: 80528 - RNA, 19 nt, Artificial Sequence
  Description of Artificial Sequence: Synthetic oligonucleotide
gagagugaacgacaucauc

SEQ ID NO: 80529 - RNA, 19 nt, Artificial Sequence
  Description of Artificial Sequence: Synthetic oligonucleotide
auguauauauauauauaua

SEQ ID NO: 80530 - RNA, 19 nt, Artificial Sequence
  Description of Artificial Sequence: Synthetic oligonucleotide
gauuuacgaugucaaucuc

SEQ ID NO: 80531 - RNA, 19 nt, Artificial Sequence
  Description of Artificial Sequence: Synthetic oligonucleotide
uuugcagcucgaucuaaua

SEQ ID NO: 80532 - RNA, 19 nt, Artificial Sequence
  Description of Artificial Sequence: Synthetic oligonucleotide
gggagagugaacgacauca

SEQ ID NO: 80533 - RNA, 19 nt, Artificial Sequence
  Description of Artificial Sequence: Synthetic oligonucleotide
ucaucccauguucccagga

SEQ ID NO: 80534 - RNA, 19 nt, Artificial Sequence
  Description of Artificial Sequence: Synthetic oligonucleotide
ggaucgauacccauucucc

SEQ ID NO: 80535 - RNA, 19 nt, Artificial Sequence
  Description of Artificial Sequence: Synthetic oligonucleotide
aucccagcgcccauuuucc

SEQ ID NO: 80536 - RNA, 19 nt, Artificial Sequence
  Description of Artificial Sequence: Synthetic oligonucleotide
aggaaauuccccagugcuc

SEQ ID NO: 80537 - RNA, 19 nt, Artificial Sequence
  Description of Artificial Sequence: Synthetic oligonucleotide
gaggcucaauaguuaagga

SEQ ID NO: 80538 - RNA, 19 nt, Artificial Sequence
  Description of Artificial Sequence: Synthetic oligonucleotide
aguaaggcgcugaagcaug

SEQ ID NO: 80539 - RNA, 19 nt, Artificial Sequence
  Description of Artificial Sequence: Synthetic oligonucleotide
cacaugugacccugcuugg

SEQ ID NO: 80540 - RNA, 19 nt, Artificial Sequence
  Description of Artificial Sequence: Synthetic oligonucleotide
acaugagaccugugcauga

SEQ ID NO: 80541 - RNA, 19 nt, Artificial Sequence
  Description of Artificial Sequence: Synthetic oligonucleotide
guauauauauauauauaau

SEQ ID NO: 80542 - RNA, 19 nt, Artificial Sequence
  Description of Artificial Sequence: Synthetic oligonucleotide
acgacgccucauuaaacca

SEQ ID NO: 80543 - RNA, 19 nt, Artificial Sequence
  Description of Artificial Sequence: Synthetic oligonucleotide
ucuauauacgacgccucau

SEQ ID NO: 80544 - RNA, 19 nt, Artificial Sequence
  Description of Artificial Sequence: Synthetic oligonucleotide
aggcaaccagccaaucacc

SEQ ID NO: 80545 - RNA, 19 nt, Artificial Sequence
  Description of Artificial Sequence: Synthetic oligonucleotide
auacgacgccucauuaaac

SEQ ID NO: 80546 - RNA, 19 nt, Artificial Sequence
  Description of Artificial Sequence: Synthetic oligonucleotide
uggcugaggcucaauaguu

SEQ ID NO: 80547 - RNA, 19 nt, Artificial Sequence
  Description of Artificial Sequence: Synthetic oligonucleotide
aucaagcuagaaauguagu

SEQ ID NO: 80548 - RNA, 19 nt, Artificial Sequence
  Description of Artificial Sequence: Synthetic oligonucleotide
acauauguauauauauaua

SEQ ID NO: 80549 - RNA, 19 nt, Artificial Sequence
  Description of Artificial Sequence: Synthetic oligonucleotide
caagggagagugaacgaca

SEQ ID NO: 80550 - RNA, 19 nt, Artificial Sequence
  Description of Artificial Sequence: Synthetic oligonucleotide
agaccacgaacacuuacuu

SEQ ID NO: 80551 - RNA, 19 nt, Artificial Sequence
  Description of Artificial Sequence: Synthetic oligonucleotide
aguagcuauaaggaacaaa

SEQ ID NO: 80552 - RNA, 19 nt, Artificial Sequence
  Description of Artificial Sequence: Synthetic oligonucleotide
aacugguaaugugccagga

SEQ ID NO: 80553 - RNA, 19 nt, Artificial Sequence
  Description of Artificial Sequence: Synthetic oligonucleotide
uuugcagauguaggguaac

SEQ ID NO: 80554 - RNA, 19 nt, Artificial Sequence
  Description of Artificial Sequence: Synthetic oligonucleotide
ugguuaagucuuguguuuc

SEQ ID NO: 80555 - RNA, 19 nt, Artificial Sequence
  Description of Artificial Sequence: Synthetic oligonucleotide
guacaaguggcuagcaguc

SEQ ID NO: 80556 - RNA, 19 nt, Artificial Sequence
  Description of Artificial Sequence: Synthetic oligonucleotide
gcaagugaagauaaaaucu

SEQ ID NO: 80557 - RNA, 19 nt, Artificial Sequence
  Description of Artificial Sequence: Synthetic oligonucleotide
acgggugucugcuucuggu

SEQ ID NO: 80558 - RNA, 19 nt, Artificial Sequence
  Description of Artificial Sequence: Synthetic oligonucleotide
ggaaauuccccagugcuca

SEQ ID NO: 80559 - RNA, 19 nt, Artificial Sequence
  Description of Artificial Sequence: Synthetic oligonucleotide
uacgucgauuucagcguca

SEQ ID NO: 80560 - RNA, 19 nt, Artificial Sequence
  Description of Artificial Sequence: Synthetic oligonucleotide
ccugacgcaauguccagcc

SEQ ID NO: 80561 - RNA, 19 nt, Artificial Sequence
  Description of Artificial Sequence: Synthetic oligonucleotide
ggggcaucaacccauagua

SEQ ID NO: 80562 - RNA, 19 nt, Artificial Sequence
  Description of Artificial Sequence: Synthetic oligonucleotide
uuccugacgcaauguccag

SEQ ID NO: 80563 - RNA, 19 nt, Artificial Sequence
  Description of Artificial Sequence: Synthetic oligonucleotide
gacgccucauuaaaccaac

SEQ ID NO: 80564 - RNA, 19 nt, Artificial Sequence
  Description of Artificial Sequence: Synthetic oligonucleotide
caaggguuacauuucugaa

SEQ ID NO: 80565 - RNA, 19 nt, Artificial Sequence
  Description of Artificial Sequence: Synthetic oligonucleotide
gaucgauacccauucuccu

SEQ ID NO: 80566 - RNA, 19 nt, Artificial Sequence
  Description of Artificial Sequence: Synthetic oligonucleotide
ccuuacauucccaguauuc

SEQ ID NO: 80567 - RNA, 19 nt, Artificial Sequence
  Description of Artificial Sequence: Synthetic oligonucleotide
guguaauggugcccaguug

SEQ ID NO: 80568 - RNA, 19 nt, Artificial Sequence
  Description of Artificial Sequence: Synthetic oligonucleotide
acuaaaccgcucccuuaca

SEQ ID NO: 80569 - RNA, 19 nt, Artificial Sequence
  Description of Artificial Sequence: Synthetic oligonucleotide
accgcucccuuacaaacau

SEQ ID NO: 80570 - RNA, 19 nt, Artificial Sequence
  Description of Artificial Sequence: Synthetic oligonucleotide
cacaauaauguuguguacu

SEQ ID NO: 80571 - RNA, 19 nt, Artificial Sequence
  Description of Artificial Sequence: Synthetic oligonucleotide
gagggguguuguaugcaag

SEQ ID NO: 80572 - RNA, 19 nt, Artificial Sequence
  Description of Artificial Sequence: Synthetic oligonucleotide
uaucuacuacgucgauuuc

SEQ ID NO: 80573 - RNA, 19 nt, Artificial Sequence
  Description of Artificial Sequence: Synthetic oligonucleotide
aagguacaaguggcuagca

SEQ ID NO: 80574 - RNA, 19 nt, Artificial Sequence
  Description of Artificial Sequence: Synthetic oligonucleotide
aacaugcguccgagagucc

SEQ ID NO: 80575 - RNA, 19 nt, Artificial Sequence
  Description of Artificial Sequence: Synthetic oligonucleotide
uugcagauguaggguaaca

SEQ ID NO: 80576 - RNA, 19 nt, Artificial Sequence
  Description of Artificial Sequence: Synthetic oligonucleotide
uuuugggauuuagccugag

SEQ ID NO: 80577 - RNA, 19 nt, Artificial Sequence
  Description of Artificial Sequence: Synthetic oligonucleotide
agcuagaaauguagugcag

SEQ ID NO: 80578 - RNA, 19 nt, Artificial Sequence
  Description of Artificial Sequence: Synthetic oligonucleotide
cuucaguaaggcgcugaag

SEQ ID NO: 80579 - RNA, 19 nt, Artificial Sequence
  Description of Artificial Sequence: Synthetic oligonucleotide
agacgggauaggaaggacu

SEQ ID NO: 80580 - RNA, 19 nt, Artificial Sequence
  Description of Artificial Sequence: Synthetic oligonucleotide
cuacgucgauuucagcguc

SEQ ID NO: 80581 - RNA, 19 nt, Artificial Sequence
  Description of Artificial Sequence: Synthetic oligonucleotide
cuacuacgucgauuucagc

SEQ ID NO: 80582 - RNA, 19 nt, Artificial Sequence
  Description of Artificial Sequence: Synthetic oligonucleotide
gcaccucaauuuaugaccc

SEQ ID NO: 80583 - RNA, 19 nt, Artificial Sequence
  Description of Artificial Sequence: Synthetic oligonucleotide
gcguccgagagucccaggg

SEQ ID NO: 80584 - RNA, 19 nt, Artificial Sequence
  Description of Artificial Sequence: Synthetic oligonucleotide
uccaaucgguccaguucga

SEQ ID NO: 80585 - RNA, 19 nt, Artificial Sequence
  Description of Artificial Sequence: Synthetic oligonucleotide
aacuaccaaagaggccucu

SEQ ID NO: 80586 - RNA, 19 nt, Artificial Sequence
  Description of Artificial Sequence: Synthetic oligonucleotide
uccuaacaugagaccugug

SEQ ID NO: 80587 - RNA, 19 nt, Artificial Sequence
  Description of Artificial Sequence: Synthetic oligonucleotide
agauguaggguaacacuaa

SEQ ID NO: 80588 - RNA, 19 nt, Artificial Sequence
  Description of Artificial Sequence: Synthetic oligonucleotide
agaaaaugucugggcaaga

SEQ ID NO: 80589 - RNA, 19 nt, Artificial Sequence
  Description of Artificial Sequence: Synthetic oligonucleotide
gggaaauuuccguucuauc

SEQ ID NO: 80590 - RNA, 19 nt, Artificial Sequence
  Description of Artificial Sequence: Synthetic oligonucleotide
ucuacccguacuccuccua

SEQ ID NO: 80591 - RNA, 19 nt, Artificial Sequence
  Description of Artificial Sequence: Synthetic oligonucleotide
gggaaucaagcuagaaaug

SEQ ID NO: 80592 - RNA, 19 nt, Artificial Sequence
  Description of Artificial Sequence: Synthetic oligonucleotide
gguucggaagacaguagug

SEQ ID NO: 80593 - RNA, 19 nt, Artificial Sequence
  Description of Artificial Sequence: Synthetic oligonucleotide
acgggauaggaaggacugg

SEQ ID NO: 80594 - RNA, 19 nt, Artificial Sequence
  Description of Artificial Sequence: Synthetic oligonucleotide
gugagggcgagcucugaga

SEQ ID NO: 80595 - RNA, 19 nt, Artificial Sequence
  Description of Artificial Sequence: Synthetic oligonucleotide
uaaagauagcguggcccuc

SEQ ID NO: 80596 - RNA, 19 nt, Artificial Sequence
  Description of Artificial Sequence: Synthetic oligonucleotide
acgccucauuaaaccaacc

SEQ ID NO: 80597 - RNA, 19 nt, Artificial Sequence
  Description of Artificial Sequence: Synthetic oligonucleotide
guaaccccuuguacugggg

SEQ ID NO: 80598 - RNA, 19 nt, Artificial Sequence
  Description of Artificial Sequence: Synthetic oligonucleotide
cccuagagaacaaucucuc

SEQ ID NO: 80599 - RNA, 19 nt, Artificial Sequence
  Description of Artificial Sequence: Synthetic oligonucleotide
uucuuccguuagcagggau

SEQ ID NO: 80600 - RNA, 19 nt, Artificial Sequence
  Description of Artificial Sequence: Synthetic oligonucleotide
ccuccugacuuucuacccg

SEQ ID NO: 80601 - RNA, 19 nt, Artificial Sequence
  Description of Artificial Sequence: Synthetic oligonucleotide
caaucagcuaaggcaacca

SEQ ID NO: 80602 - RNA, 19 nt, Artificial Sequence
  Description of Artificial Sequence: Synthetic oligonucleotide
aagauagcguggcccucuu

SEQ ID NO: 80603 - RNA, 19 nt, Artificial Sequence
  Description of Artificial Sequence: Synthetic oligonucleotide
gagaaguaguacauguuuu

SEQ ID NO: 80604 - RNA, 19 nt, Artificial Sequence
  Description of Artificial Sequence: Synthetic oligonucleotide
cuuuugggauuuagccuga

SEQ ID NO: 80605 - RNA, 19 nt, Artificial Sequence
  Description of Artificial Sequence: Synthetic oligonucleotide
guaguggaauaggaggaaa

SEQ ID NO: 80606 - RNA, 19 nt, Artificial Sequence
  Description of Artificial Sequence: Synthetic oligonucleotide
guuuaccggcauugggauc

SEQ ID NO: 80607 - RNA, 19 nt, Artificial Sequence
  Description of Artificial Sequence: Synthetic oligonucleotide
uucuacccguacuccuccu

SEQ ID NO: 80608 - RNA, 19 nt, Artificial Sequence
  Description of Artificial Sequence: Synthetic oligonucleotide
ccacaauaauguuguguac

SEQ ID NO: 80609 - RNA, 19 nt, Artificial Sequence
  Description of Artificial Sequence: Synthetic oligonucleotide
acgugugaguacauuuccu

SEQ ID NO: 80610 - RNA, 19 nt, Artificial Sequence
  Description of Artificial Sequence: Synthetic oligonucleotide
gcagauguaggguaacacu

SEQ ID NO: 80611 - RNA, 19 nt, Artificial Sequence
  Description of Artificial Sequence: Synthetic oligonucleotide
gcaucaacccauaguaaca

SEQ ID NO: 80612 - RNA, 19 nt, Artificial Sequence
  Description of Artificial Sequence: Synthetic oligonucleotide
aaaagaccacgaacacuua

SEQ ID NO: 80613 - RNA, 19 nt, Artificial Sequence
  Description of Artificial Sequence: Synthetic oligonucleotide
ccacgugugaguacauuuc

SEQ ID NO: 80614 - RNA, 19 nt, Artificial Sequence
  Description of Artificial Sequence: Synthetic oligonucleotide
gcucaauaguuaaggaaca

SEQ ID NO: 80615 - RNA, 19 nt, Artificial Sequence
  Description of Artificial Sequence: Synthetic oligonucleotide
cuauauacgacgccucauu

SEQ ID NO: 80616 - RNA, 19 nt, Artificial Sequence
  Description of Artificial Sequence: Synthetic oligonucleotide
cgccucauuaaaccaaccc

SEQ ID NO: 80617 - RNA, 19 nt, Artificial Sequence
  Description of Artificial Sequence: Synthetic oligonucleotide
ggcugcaacauagcagagc

SEQ ID NO: 80618 - RNA, 19 nt, Artificial Sequence
  Description of Artificial Sequence: Synthetic oligonucleotide
aaacauggguuagcuccuu

SEQ ID NO: 80619 - RNA, 19 nt, Artificial Sequence
  Description of Artificial Sequence: Synthetic oligonucleotide
agccacuaaaccgcucccu

SEQ ID NO: 80620 - RNA, 19 nt, Artificial Sequence
  Description of Artificial Sequence: Synthetic oligonucleotide
cagcccuagagaacaaucu

SEQ ID NO: 80621 - RNA, 19 nt, Artificial Sequence
  Description of Artificial Sequence: Synthetic oligonucleotide
cccuauaaacauggguuag

SEQ ID NO: 80622 - RNA, 19 nt, Artificial Sequence
  Description of Artificial Sequence: Synthetic oligonucleotide
gggacuaaaaguacuaauu

SEQ ID NO: 80623 - RNA, 19 nt, Artificial Sequence
  Description of Artificial Sequence: Synthetic oligonucleotide
cuacccguacuccuccuaa

SEQ ID NO: 80624 - RNA, 19 nt, Artificial Sequence
  Description of Artificial Sequence: Synthetic oligonucleotide
cagcgucaaucagcuaagg

SEQ ID NO: 80625 - RNA, 19 nt, Artificial Sequence
  Description of Artificial Sequence: Synthetic oligonucleotide
cccuccugacuuucuaccc

SEQ ID NO: 80626 - RNA, 19 nt, Artificial Sequence
  Description of Artificial Sequence: Synthetic oligonucleotide
accgugacacaaaccuuca

SEQ ID NO: 80627 - RNA, 19 nt, Artificial Sequence
  Description of Artificial Sequence: Synthetic oligonucleotide
caugcguccgagaguccca

SEQ ID NO: 80628 - RNA, 19 nt, Artificial Sequence
  Description of Artificial Sequence: Synthetic oligonucleotide
auguuuggcuccagacugu

SEQ ID NO: 80629 - RNA, 19 nt, Artificial Sequence
  Description of Artificial Sequence: Synthetic oligonucleotide
caaccccacgugugaguac

SEQ ID NO: 80630 - RNA, 19 nt, Artificial Sequence
  Description of Artificial Sequence: Synthetic oligonucleotide
gauuuagccugagcuggcu

SEQ ID NO: 80631 - RNA, 19 nt, Artificial Sequence
  Description of Artificial Sequence: Synthetic oligonucleotide
ggauuuagccugagcuggc

SEQ ID NO: 80632 - RNA, 19 nt, Artificial Sequence
  Description of Artificial Sequence: Synthetic oligonucleotide
agcgcccauuuuccaucag

SEQ ID NO: 80633 - RNA, 19 nt, Artificial Sequence
  Description of Artificial Sequence: Synthetic oligonucleotide
cuuccaaccugccuguguu

SEQ ID NO: 80634 - RNA, 19 nt, Artificial Sequence
  Description of Artificial Sequence: Synthetic oligonucleotide
cugagaaguaguacauguu

SEQ ID NO: 80635 - RNA, 19 nt, Artificial Sequence
  Description of Artificial Sequence: Synthetic oligonucleotide
uuucagcgucaaucagcua

SEQ ID NO: 80636 - RNA, 19 nt, Artificial Sequence
  Description of Artificial Sequence: Synthetic oligonucleotide
acgucgauuucagcgucaa

SEQ ID NO: 80637 - RNA, 19 nt, Artificial Sequence
  Description of Artificial Sequence: Synthetic oligonucleotide
caucaacccauaguaacau

SEQ ID NO: 80638 - RNA, 19 nt, Artificial Sequence
  Description of Artificial Sequence: Synthetic oligonucleotide
ggauaacuucuucuggaau

SEQ ID NO: 80639 - RNA, 19 nt, Artificial Sequence
  Description of Artificial Sequence: Synthetic oligonucleotide
uuccguuagcagggaucug

SEQ ID NO: 80640 - RNA, 19 nt, Artificial Sequence
  Description of Artificial Sequence: Synthetic oligonucleotide
augguaccgaggggcauaa

SEQ ID NO: 80641 - RNA, 19 nt, Artificial Sequence
  Description of Artificial Sequence: Synthetic oligonucleotide
cuccugacuuucuacccgu

SEQ ID NO: 80642 - RNA, 19 nt, Artificial Sequence
  Description of Artificial Sequence: Synthetic oligonucleotide
ggaaaaugcaguggauggu

SEQ ID NO: 80643 - RNA, 19 nt, Artificial Sequence
  Description of Artificial Sequence: Synthetic oligonucleotide
aucacccuccugacuuucu

SEQ ID NO: 80644 - RNA, 19 nt, Artificial Sequence
  Description of Artificial Sequence: Synthetic oligonucleotide
acccucaaccaagggugga

SEQ ID NO: 80645 - RNA, 19 nt, Artificial Sequence
  Description of Artificial Sequence: Synthetic oligonucleotide
cagcgcccauuuuccauca

SEQ ID NO: 80646 - RNA, 19 nt, Artificial Sequence
  Description of Artificial Sequence: Synthetic oligonucleotide
ccccuauaaacauggguua

SEQ ID NO: 80647 - RNA, 19 nt, Artificial Sequence
  Description of Artificial Sequence: Synthetic oligonucleotide
ggccgcaaccggcugucug

SEQ ID NO: 80648 - RNA, 19 nt, Artificial Sequence
  Description of Artificial Sequence: Synthetic oligonucleotide
ccguggcuuucauagcuuc

SEQ ID NO: 80649 - RNA, 19 nt, Artificial Sequence
  Description of Artificial Sequence: Synthetic oligonucleotide
caguaaggcgcugaagcau

SEQ ID NO: 80650 - RNA, 19 nt, Artificial Sequence
  Description of Artificial Sequence: Synthetic oligonucleotide
ccuggaguaaccccuugua

SEQ ID NO: 80651 - RNA, 19 nt, Artificial Sequence
  Description of Artificial Sequence: Synthetic oligonucleotide
cccguacuccuccuaagga

SEQ ID NO: 80652 - RNA, 19 nt, Artificial Sequence
  Description of Artificial Sequence: Synthetic oligonucleotide
agaggggcaucaacccaua

SEQ ID NO: 80653 - RNA, 19 nt, Artificial Sequence
  Description of Artificial Sequence: Synthetic oligonucleotide
cacuaacuuucagccacua

SEQ ID NO: 80654 - RNA, 19 nt, Artificial Sequence
  Description of Artificial Sequence: Synthetic oligonucleotide
ggaaacggugaaggcugca

SEQ ID NO: 80655 - RNA, 19 nt, Artificial Sequence
  Description of Artificial Sequence: Synthetic oligonucleotide
ggcugaggcucaauaguua

SEQ ID NO: 80656 - RNA, 19 nt, Artificial Sequence
  Description of Artificial Sequence: Synthetic oligonucleotide
gccgcaaccggcugucugu

SEQ ID NO: 80657 - RNA, 19 nt, Artificial Sequence
  Description of Artificial Sequence: Synthetic oligonucleotide
ccgagagaaguagcuauaa

SEQ ID NO: 80658 - RNA, 19 nt, Artificial Sequence
  Description of Artificial Sequence: Synthetic oligonucleotide
ccgcacauccucugccguc

SEQ ID NO: 80659 - RNA, 19 nt, Artificial Sequence
  Description of Artificial Sequence: Synthetic oligonucleotide
uuaccggcauugggaucuu

SEQ ID NO: 80660 - RNA, 19 nt, Artificial Sequence
  Description of Artificial Sequence: Synthetic oligonucleotide
ccacuaaaccgcucccuua

SEQ ID NO: 80661 - RNA, 19 nt, Artificial Sequence
  Description of Artificial Sequence: Synthetic oligonucleotide
ggauugcacaaggguuaca

SEQ ID NO: 80662 - RNA, 19 nt, Artificial Sequence
  Description of Artificial Sequence: Synthetic oligonucleotide
cgacgccucauuaaaccaa

SEQ ID NO: 80663 - RNA, 19 nt, Artificial Sequence
  Description of Artificial Sequence: Synthetic oligonucleotide
ggagagugaacgacaucau

SEQ ID NO: 80664 - RNA, 19 nt, Artificial Sequence
  Description of Artificial Sequence: Synthetic oligonucleotide
gcgcugaagcauggacaag

SEQ ID NO: 80665 - RNA, 19 nt, Artificial Sequence
  Description of Artificial Sequence: Synthetic oligonucleotide
ggacacuacaagggagagu

SEQ ID NO: 80666 - RNA, 19 nt, Artificial Sequence
  Description of Artificial Sequence: Synthetic oligonucleotide
ccgcucccuuacaaacaug

SEQ ID NO: 80667 - RNA, 19 nt, Artificial Sequence
  Description of Artificial Sequence: Synthetic oligonucleotide
ccgcaaccggcugucugug

SEQ ID NO: 80668 - RNA, 19 nt, Artificial Sequence
  Description of Artificial Sequence: Synthetic oligonucleotide
cgauacccauucuccucca

SEQ ID NO: 80669 - RNA, 19 nt, Artificial Sequence
  Description of Artificial Sequence: Synthetic oligonucleotide
gggcgagcucugagaagua

SEQ ID NO: 80670 - RNA, 19 nt, Artificial Sequence
  Description of Artificial Sequence: Synthetic oligonucleotide
ccgauccacccucuuccuu

SEQ ID NO: 80671 - RNA, 19 nt, Artificial Sequence
  Description of Artificial Sequence: Synthetic oligonucleotide
aauauuaaggcucuuuccg

SEQ ID NO: 80672 - RNA, 19 nt, Artificial Sequence
  Description of Artificial Sequence: Synthetic oligonucleotide
aaauagauguguuacagug

SEQ ID NO: 80673 - RNA, 19 nt, Artificial Sequence
  Description of Artificial Sequence: Synthetic oligonucleotide
acuuggaagguacauaugc

SEQ ID NO: 80674 - RNA, 19 nt, Artificial Sequence
  Description of Artificial Sequence: Synthetic oligonucleotide
uuuguaacuagauuuuggg

SEQ ID NO: 80675 - RNA, 19 nt, Artificial Sequence
  Description of Artificial Sequence: Synthetic oligonucleotide
aacaaggacgucuauggcg

SEQ ID NO: 80676 - RNA, 19 nt, Artificial Sequence
  Description of Artificial Sequence: Synthetic oligonucleotide
aacaagguucccuacaguc

SEQ ID NO: 80677 - RNA, 19 nt, Artificial Sequence
  Description of Artificial Sequence: Synthetic oligonucleotide
uguaacuagauuuuggggu

SEQ ID NO: 80678 - RNA, 19 nt, Artificial Sequence
  Description of Artificial Sequence: Synthetic oligonucleotide
ucagcuacguggcagaagg

SEQ ID NO: 80679 - RNA, 19 nt, Artificial Sequence
  Description of Artificial Sequence: Synthetic oligonucleotide
uucuuggugacuuaaaucu

SEQ ID NO: 80680 - RNA, 19 nt, Artificial Sequence
  Description of Artificial Sequence: Synthetic oligonucleotide
aaguuuugagguuucuugg

SEQ ID NO: 80681 - RNA, 19 nt, Artificial Sequence
  Description of Artificial Sequence: Synthetic oligonucleotide
agauaagucguauuguguc

SEQ ID NO: 80682 - RNA, 19 nt, Artificial Sequence
  Description of Artificial Sequence: Synthetic oligonucleotide
aaucccagcaccucccacc

SEQ ID NO: 80683 - RNA, 19 nt, Artificial Sequence
  Description of Artificial Sequence: Synthetic oligonucleotide
acauaaaagauguaugcug

SEQ ID NO: 80684 - RNA, 19 nt, Artificial Sequence
  Description of Artificial Sequence: Synthetic oligonucleotide
aauucuauguucauagucu

SEQ ID NO: 80685 - RNA, 19 nt, Artificial Sequence
  Description of Artificial Sequence: Synthetic oligonucleotide
uucaaucgccucaacaccg

SEQ ID NO: 80686 - RNA, 19 nt, Artificial Sequence
  Description of Artificial Sequence: Synthetic oligonucleotide
acaauaguaugaucucucc

SEQ ID NO: 80687 - RNA, 19 nt, Artificial Sequence
  Description of Artificial Sequence: Synthetic oligonucleotide
aaacaaggacgucuauggc

SEQ ID NO: 80688 - RNA, 19 nt, Artificial Sequence
  Description of Artificial Sequence: Synthetic oligonucleotide
auaguaugaucucuccagc

SEQ ID NO: 80689 - RNA, 19 nt, Artificial Sequence
  Description of Artificial Sequence: Synthetic oligonucleotide
aaaggguugucauuucuug

SEQ ID NO: 80690 - RNA, 19 nt, Artificial Sequence
  Description of Artificial Sequence: Synthetic oligonucleotide
uuguaacuagauuuugggg

SEQ ID NO: 80691 - RNA, 19 nt, Artificial Sequence
  Description of Artificial Sequence: Synthetic oligonucleotide
agguucacugcccagggcc

SEQ ID NO: 80692 - RNA, 19 nt, Artificial Sequence
  Description of Artificial Sequence: Synthetic oligonucleotide
uaaucucacaaccauaaau

SEQ ID NO: 80693 - RNA, 19 nt, Artificial Sequence
  Description of Artificial Sequence: Synthetic oligonucleotide
uggaacgugacuuuguaac

SEQ ID NO: 80694 - RNA, 19 nt, Artificial Sequence
  Description of Artificial Sequence: Synthetic oligonucleotide
aggaucagaaauugggccg

SEQ ID NO: 80695 - RNA, 19 nt, Artificial Sequence
  Description of Artificial Sequence: Synthetic oligonucleotide
agaaauugggccgagaacu

SEQ ID NO: 80696 - RNA, 19 nt, Artificial Sequence
  Description of Artificial Sequence: Synthetic oligonucleotide
uuagaguugaugucguagc

SEQ ID NO: 80697 - RNA, 19 nt, Artificial Sequence
  Description of Artificial Sequence: Synthetic oligonucleotide
guuaagaaacuugagauuc

SEQ ID NO: 80698 - RNA, 19 nt, Artificial Sequence
  Description of Artificial Sequence: Synthetic oligonucleotide
aauagauguguuacagugg

SEQ ID NO: 80699 - RNA, 19 nt, Artificial Sequence
  Description of Artificial Sequence: Synthetic oligonucleotide
aagugguaaacuuucuccu

SEQ ID NO: 80700 - RNA, 19 nt, Artificial Sequence
  Description of Artificial Sequence: Synthetic oligonucleotide
aaagguuaagucgucaccu

SEQ ID NO: 80701 - RNA, 19 nt, Artificial Sequence
  Description of Artificial Sequence: Synthetic oligonucleotide
uguguacgugacaagauac

SEQ ID NO: 80702 - RNA, 19 nt, Artificial Sequence
  Description of Artificial Sequence: Synthetic oligonucleotide
aacugcucgcaucauguuc

SEQ ID NO: 80703 - RNA, 19 nt, Artificial Sequence
  Description of Artificial Sequence: Synthetic oligonucleotide
aaugcauaacaggaggaag

SEQ ID NO: 80704 - RNA, 19 nt, Artificial Sequence
  Description of Artificial Sequence: Synthetic oligonucleotide
uuagcgaccauuugucucc

SEQ ID NO: 80705 - RNA, 19 nt, Artificial Sequence
  Description of Artificial Sequence: Synthetic oligonucleotide
gcuuugauaacuaagaaac

SEQ ID NO: 80706 - RNA, 19 nt, Artificial Sequence
  Description of Artificial Sequence: Synthetic oligonucleotide
aacgcauguggucagggug

SEQ ID NO: 80707 - RNA, 19 nt, Artificial Sequence
  Description of Artificial Sequence: Synthetic oligonucleotide
ucuaauacaauaguaugau

SEQ ID NO: 80708 - RNA, 19 nt, Artificial Sequence
  Description of Artificial Sequence: Synthetic oligonucleotide
cuuagguaggauuucuggc

SEQ ID NO: 80709 - RNA, 19 nt, Artificial Sequence
  Description of Artificial Sequence: Synthetic oligonucleotide
gauaagucguauugugucc

SEQ ID NO: 80710 - RNA, 19 nt, Artificial Sequence
  Description of Artificial Sequence: Synthetic oligonucleotide
auacaacaacuucagcuac

SEQ ID NO: 80711 - RNA, 19 nt, Artificial Sequence
  Description of Artificial Sequence: Synthetic oligonucleotide
aagcguuugaacagcaacg

SEQ ID NO: 80712 - RNA, 19 nt, Artificial Sequence
  Description of Artificial Sequence: Synthetic oligonucleotide
acagauaagucguauugug

SEQ ID NO: 80713 - RNA, 19 nt, Artificial Sequence
  Description of Artificial Sequence: Synthetic oligonucleotide
uagaguugaugucguagcg

SEQ ID NO: 80714 - RNA, 19 nt, Artificial Sequence
  Description of Artificial Sequence: Synthetic oligonucleotide
aagcauucggaagagcagg

SEQ ID NO: 80715 - RNA, 19 nt, Artificial Sequence
  Description of Artificial Sequence: Synthetic oligonucleotide
ucuuuccgaauacauagcu

SEQ ID NO: 80716 - RNA, 19 nt, Artificial Sequence
  Description of Artificial Sequence: Synthetic oligonucleotide
auaagucguauuguguccc

SEQ ID NO: 80717 - RNA, 19 nt, Artificial Sequence
  Description of Artificial Sequence: Synthetic oligonucleotide
augcauacagugcugucac

SEQ ID NO: 80718 - RNA, 19 nt, Artificial Sequence
  Description of Artificial Sequence: Synthetic oligonucleotide
uacaguuauggcaugacuu

SEQ ID NO: 80719 - RNA, 19 nt, Artificial Sequence
  Description of Artificial Sequence: Synthetic oligonucleotide
uacaauaguaugaucucuc

SEQ ID NO: 80720 - RNA, 19 nt, Artificial Sequence
  Description of Artificial Sequence: Synthetic oligonucleotide
ggaaggaucagaaauuggg

SEQ ID NO: 80721 - RNA, 19 nt, Artificial Sequence
  Description of Artificial Sequence: Synthetic oligonucleotide
auucgguuguggcaucucc

SEQ ID NO: 80722 - RNA, 19 nt, Artificial Sequence
  Description of Artificial Sequence: Synthetic oligonucleotide
ugauaucuuuuguaacuag

SEQ ID NO: 80723 - RNA, 19 nt, Artificial Sequence
  Description of Artificial Sequence: Synthetic oligonucleotide
aauauaaggcagugaaauu

SEQ ID NO: 80724 - RNA, 19 nt, Artificial Sequence
  Description of Artificial Sequence: Synthetic oligonucleotide
ucccauugcaccaucuuug

SEQ ID NO: 80725 - RNA, 19 nt, Artificial Sequence
  Description of Artificial Sequence: Synthetic oligonucleotide
ugcggagagaauuugguuc

SEQ ID NO: 80726 - RNA, 19 nt, Artificial Sequence
  Description of Artificial Sequence: Synthetic oligonucleotide
gacgucuauggcgauaugg

SEQ ID NO: 80727 - RNA, 19 nt, Artificial Sequence
  Description of Artificial Sequence: Synthetic oligonucleotide
ugaagcaacgcggagaaaa

SEQ ID NO: 80728 - RNA, 19 nt, Artificial Sequence
  Description of Artificial Sequence: Synthetic oligonucleotide
agugguaaacuuucuccuc

SEQ ID NO: 80729 - RNA, 19 nt, Artificial Sequence
  Description of Artificial Sequence: Synthetic oligonucleotide
aauacauagcugcucugau

SEQ ID NO: 80730 - RNA, 19 nt, Artificial Sequence
  Description of Artificial Sequence: Synthetic oligonucleotide
aagauguaugcugcccugc

SEQ ID NO: 80731 - RNA, 19 nt, Artificial Sequence
  Description of Artificial Sequence: Synthetic oligonucleotide
uuaagucgucaccugaggu

SEQ ID NO: 80732 - RNA, 19 nt, Artificial Sequence
  Description of Artificial Sequence: Synthetic oligonucleotide
acauuguuggaucggaagu

SEQ ID NO: 80733 - RNA, 19 nt, Artificial Sequence
  Description of Artificial Sequence: Synthetic oligonucleotide
ugggguguaaccacguucu

SEQ ID NO: 80734 - RNA, 19 nt, Artificial Sequence
  Description of Artificial Sequence: Synthetic oligonucleotide
uggaucgcagauuaguagu

SEQ ID NO: 80735 - RNA, 19 nt, Artificial Sequence
  Description of Artificial Sequence: Synthetic oligonucleotide
cucuaauacaauaguauga

SEQ ID NO: 80736 - RNA, 19 nt, Artificial Sequence
  Description of Artificial Sequence: Synthetic oligonucleotide
gagggcgauacacaacacg

SEQ ID NO: 80737 - RNA, 19 nt, Artificial Sequence
  Description of Artificial Sequence: Synthetic oligonucleotide
guugguuguaucuccgucc

SEQ ID NO: 80738 - RNA, 19 nt, Artificial Sequence
  Description of Artificial Sequence: Synthetic oligonucleotide
ucauaugguccaaggacca

SEQ ID NO: 80739 - RNA, 19 nt, Artificial Sequence
  Description of Artificial Sequence: Synthetic oligonucleotide
uuaucugcaauuuggcaua

SEQ ID NO: 80740 - RNA, 19 nt, Artificial Sequence
  Description of Artificial Sequence: Synthetic oligonucleotide
uguacgugacaagauacug

SEQ ID NO: 80741 - RNA, 19 nt, Artificial Sequence
  Description of Artificial Sequence: Synthetic oligonucleotide
auauuaaggcucuuuccga

SEQ ID NO: 80742 - RNA, 19 nt, Artificial Sequence
  Description of Artificial Sequence: Synthetic oligonucleotide
ucgcagauuaguaguagga

SEQ ID NO: 80743 - RNA, 19 nt, Artificial Sequence
  Description of Artificial Sequence: Synthetic oligonucleotide
cuucaaucgccucaacacc

SEQ ID NO: 80744 - RNA, 19 nt, Artificial Sequence
  Description of Artificial Sequence: Synthetic oligonucleotide
gauucugcgcccuaaugca

SEQ ID NO: 80745 - RNA, 19 nt, Artificial Sequence
  Description of Artificial Sequence: Synthetic oligonucleotide
uaguaugaucucuccagcc

SEQ ID NO: 80746 - RNA, 19 nt, Artificial Sequence
  Description of Artificial Sequence: Synthetic oligonucleotide
ugucacuuagguaggauuu

SEQ ID NO: 80747 - RNA, 19 nt, Artificial Sequence
  Description of Artificial Sequence: Synthetic oligonucleotide
guuaagucgucaccugagg

SEQ ID NO: 80748 - RNA, 19 nt, Artificial Sequence
  Description of Artificial Sequence: Synthetic oligonucleotide
uuacaguuauggcaugacu

SEQ ID NO: 80749 - RNA, 19 nt, Artificial Sequence
  Description of Artificial Sequence: Synthetic oligonucleotide
aggaccaacuccccuaguc

SEQ ID NO: 80750 - RNA, 19 nt, Artificial Sequence
  Description of Artificial Sequence: Synthetic oligonucleotide
ucacgaucaggcagguacg

SEQ ID NO: 80751 - RNA, 19 nt, Artificial Sequence
  Description of Artificial Sequence: Synthetic oligonucleotide
aauaggcccaauagaagug

SEQ ID NO: 80752 - RNA, 19 nt, Artificial Sequence
  Description of Artificial Sequence: Synthetic oligonucleotide
uguuaagaaacuugagauu

SEQ ID NO: 80753 - RNA, 19 nt, Artificial Sequence
  Description of Artificial Sequence: Synthetic oligonucleotide
agggcgauacacaacacgg

SEQ ID NO: 80754 - RNA, 19 nt, Artificial Sequence
  Description of Artificial Sequence: Synthetic oligonucleotide
ugcgcccuaaugcauaaca

SEQ ID NO: 80755 - RNA, 19 nt, Artificial Sequence
  Description of Artificial Sequence: Synthetic oligonucleotide
uauuaaggcucuuuccgaa

SEQ ID NO: 80756 - RNA, 19 nt, Artificial Sequence
  Description of Artificial Sequence: Synthetic oligonucleotide
aagguuaagucgucaccug

SEQ ID NO: 80757 - RNA, 19 nt, Artificial Sequence
  Description of Artificial Sequence: Synthetic oligonucleotide
caagcguuugaacagcaac

SEQ ID NO: 80758 - RNA, 19 nt, Artificial Sequence
  Description of Artificial Sequence: Synthetic oligonucleotide
uccuucaaucgccucaaca

SEQ ID NO: 80759 - RNA, 19 nt, Artificial Sequence
  Description of Artificial Sequence: Synthetic oligonucleotide
gugguaaacuuucuccucc

SEQ ID NO: 80760 - RNA, 19 nt, Artificial Sequence
  Description of Artificial Sequence: Synthetic oligonucleotide
gaugaagcaacgcggagaa

SEQ ID NO: 80761 - RNA, 19 nt, Artificial Sequence
  Description of Artificial Sequence: Synthetic oligonucleotide
auaacuguucaugacuuca

SEQ ID NO: 80762 - RNA, 19 nt, Artificial Sequence
  Description of Artificial Sequence: Synthetic oligonucleotide
ugggauaauucgguugugg

SEQ ID NO: 80763 - RNA, 19 nt, Artificial Sequence
  Description of Artificial Sequence: Synthetic oligonucleotide
agucguauugugucccuuc

SEQ ID NO: 80764 - RNA, 19 nt, Artificial Sequence
  Description of Artificial Sequence: Synthetic oligonucleotide
gaguugaugucguagcguc

SEQ ID NO: 80765 - RNA, 19 nt, Artificial Sequence
  Description of Artificial Sequence: Synthetic oligonucleotide
agcguuugaacagcaacgg

SEQ ID NO: 80766 - RNA, 19 nt, Artificial Sequence
  Description of Artificial Sequence: Synthetic oligonucleotide
auacacaacacgguaguug

SEQ ID NO: 80767 - RNA, 19 nt, Artificial Sequence
  Description of Artificial Sequence: Synthetic oligonucleotide
guugcgauuugagugguag

SEQ ID NO: 80768 - RNA, 19 nt, Artificial Sequence
  Description of Artificial Sequence: Synthetic oligonucleotide
uguuguugcaagcguuuga

SEQ ID NO: 80769 - RNA, 19 nt, Artificial Sequence
  Description of Artificial Sequence: Synthetic oligonucleotide
cuuagcgaccauuugucuc

SEQ ID NO: 80770 - RNA, 19 nt, Artificial Sequence
  Description of Artificial Sequence: Synthetic oligonucleotide
aacucucaucguguguucg

SEQ ID NO: 80771 - RNA, 19 nt, Artificial Sequence
  Description of Artificial Sequence: Synthetic oligonucleotide
acccagauugaccuggucu

SEQ ID NO: 80772 - RNA, 19 nt, Artificial Sequence
  Description of Artificial Sequence: Synthetic oligonucleotide
aaacaagguucccuacagu

SEQ ID NO: 80773 - RNA, 19 nt, Artificial Sequence
  Description of Artificial Sequence: Synthetic oligonucleotide
augugcaagcauucggaag

SEQ ID NO: 80774 - RNA, 19 nt, Artificial Sequence
  Description of Artificial Sequence: Synthetic oligonucleotide
augcaauuccauuucugca

SEQ ID NO: 80775 - RNA, 19 nt, Artificial Sequence
  Description of Artificial Sequence: Synthetic oligonucleotide
uguugguuguaucuccguc

SEQ ID NO: 80776 - RNA, 19 nt, Artificial Sequence
  Description of Artificial Sequence: Synthetic oligonucleotide
gguguaaccacguucuuca

SEQ ID NO: 80777 - RNA, 19 nt, Artificial Sequence
  Description of Artificial Sequence: Synthetic oligonucleotide
aacgcggagaaaacaucac

SEQ ID NO: 80778 - RNA, 19 nt, Artificial Sequence
  Description of Artificial Sequence: Synthetic oligonucleotide
auuagcuguucgcagacuu

SEQ ID NO: 80779 - RNA, 19 nt, Artificial Sequence
  Description of Artificial Sequence: Synthetic oligonucleotide
auaaaagcagcaauucuau

SEQ ID NO: 80780 - RNA, 19 nt, Artificial Sequence
  Description of Artificial Sequence: Synthetic oligonucleotide
gaugcauacagugcuguca

SEQ ID NO: 80781 - RNA, 19 nt, Artificial Sequence
  Description of Artificial Sequence: Synthetic oligonucleotide
ggcgauauggaacaguauc

SEQ ID NO: 80782 - RNA, 19 nt, Artificial Sequence
  Description of Artificial Sequence: Synthetic oligonucleotide
ugcgauuugagugguaguc

SEQ ID NO: 80783 - RNA, 19 nt, Artificial Sequence
  Description of Artificial Sequence: Synthetic oligonucleotide
ucgguuguggcaucuccag

SEQ ID NO: 80784 - RNA, 19 nt, Artificial Sequence
  Description of Artificial Sequence: Synthetic oligonucleotide
auaugcacagcaaagguua

SEQ ID NO: 80785 - RNA, 19 nt, Artificial Sequence
  Description of Artificial Sequence: Synthetic oligonucleotide
cuagauuuugggguguaac

SEQ ID NO: 80786 - RNA, 19 nt, Artificial Sequence
  Description of Artificial Sequence: Synthetic oligonucleotide
gaauacauagcugcucuga

SEQ ID NO: 80787 - RNA, 19 nt, Artificial Sequence
  Description of Artificial Sequence: Synthetic oligonucleotide
ugguguguacgugacaaga

SEQ ID NO: 80788 - RNA, 19 nt, Artificial Sequence
  Description of Artificial Sequence: Synthetic oligonucleotide
ugcaacugcucgcaucaug

SEQ ID NO: 80789 - RNA, 19 nt, Artificial Sequence
  Description of Artificial Sequence: Synthetic oligonucleotide
uggaugaagcaacgcggag

SEQ ID NO: 80790 - RNA, 19 nt, Artificial Sequence
  Description of Artificial Sequence: Synthetic oligonucleotide
uuuguggaugaagcaacgc

SEQ ID NO: 80791 - RNA, 19 nt, Artificial Sequence
  Description of Artificial Sequence: Synthetic oligonucleotide
uucgguuguggcaucucca

SEQ ID NO: 80792 - RNA, 19 nt, Artificial Sequence
  Description of Artificial Sequence: Synthetic oligonucleotide
uuuugggguguaaccacgu

SEQ ID NO: 80793 - RNA, 19 nt, Artificial Sequence
  Description of Artificial Sequence: Synthetic oligonucleotide
aaaccugggaaggaucaga

SEQ ID NO: 80794 - RNA, 19 nt, Artificial Sequence
  Description of Artificial Sequence: Synthetic oligonucleotide
auuuguggaugaagcaacg

SEQ ID NO: 80795 - RNA, 19 nt, Artificial Sequence
  Description of Artificial Sequence: Synthetic oligonucleotide
accuuagcgaccauuuguc

SEQ ID NO: 80796 - RNA, 19 nt, Artificial Sequence
  Description of Artificial Sequence: Synthetic oligonucleotide
cugugaacagcauguguug

SEQ ID NO: 80797 - RNA, 19 nt, Artificial Sequence
  Description of Artificial Sequence: Synthetic oligonucleotide
uguguuguugcaagcguuu

SEQ ID NO: 80798 - RNA, 19 nt, Artificial Sequence
  Description of Artificial Sequence: Synthetic oligonucleotide
aucuccguccacaguaacc

SEQ ID NO: 80799 - RNA, 19 nt, Artificial Sequence
  Description of Artificial Sequence: Synthetic oligonucleotide
agucauuuggaaucugauu

SEQ ID NO: 80800 - RNA, 19 nt, Artificial Sequence
  Description of Artificial Sequence: Synthetic oligonucleotide
agcuacguggcagaagguc

SEQ ID NO: 80801 - RNA, 19 nt, Artificial Sequence
  Description of Artificial Sequence: Synthetic oligonucleotide
gagauucugcgcccuaaug

SEQ ID NO: 80802 - RNA, 19 nt, Artificial Sequence
  Description of Artificial Sequence: Synthetic oligonucleotide
uugacauuguuggaucgga

SEQ ID NO: 80803 - RNA, 19 nt, Artificial Sequence
  Description of Artificial Sequence: Synthetic oligonucleotide
cucuuuccgaauacauagc

SEQ ID NO: 80804 - RNA, 19 nt, Artificial Sequence
  Description of Artificial Sequence: Synthetic oligonucleotide
ugggccgagaacuguaaac

SEQ ID NO: 80805 - RNA, 19 nt, Artificial Sequence
  Description of Artificial Sequence: Synthetic oligonucleotide
auaauucgguuguggcauc

SEQ ID NO: 80806 - RNA, 19 nt, Artificial Sequence
  Description of Artificial Sequence: Synthetic oligonucleotide
acgcauguggucagggugc

SEQ ID NO: 80807 - RNA, 19 nt, Artificial Sequence
  Description of Artificial Sequence: Synthetic oligonucleotide
acuccccuagucuucuguc

SEQ ID NO: 80808 - RNA, 19 nt, Artificial Sequence
  Description of Artificial Sequence: Synthetic oligonucleotide
acaaggacgucuauggcga

SEQ ID NO: 80809 - RNA, 19 nt, Artificial Sequence
  Description of Artificial Sequence: Synthetic oligonucleotide
guacgugacaagauacugc

SEQ ID NO: 80810 - RNA, 19 nt, Artificial Sequence
  Description of Artificial Sequence: Synthetic oligonucleotide
cuuggaagguacauaugca

SEQ ID NO: 80811 - RNA, 19 nt, Artificial Sequence
  Description of Artificial Sequence: Synthetic oligonucleotide
aagucacucggaaacuuga

SEQ ID NO: 80812 - RNA, 19 nt, Artificial Sequence
  Description of Artificial Sequence: Synthetic oligonucleotide
uggugacuuaaaucuagaa

SEQ ID NO: 80813 - RNA, 19 nt, Artificial Sequence
  Description of Artificial Sequence: Synthetic oligonucleotide
gggauaauucgguuguggc

SEQ ID NO: 80814 - RNA, 19 nt, Artificial Sequence
  Description of Artificial Sequence: Synthetic oligonucleotide
aacccagauugaccugguc

SEQ ID NO: 80815 - RNA, 19 nt, Artificial Sequence
  Description of Artificial Sequence: Synthetic oligonucleotide
ugacccugccgucucaggu

SEQ ID NO: 80816 - RNA, 19 nt, Artificial Sequence
  Description of Artificial Sequence: Synthetic oligonucleotide
gaaauugggccgagaacug

SEQ ID NO: 80817 - RNA, 19 nt, Artificial Sequence
  Description of Artificial Sequence: Synthetic oligonucleotide
uuccgaauacauagcugcu

SEQ ID NO: 80818 - RNA, 19 nt, Artificial Sequence
  Description of Artificial Sequence: Synthetic oligonucleotide
ugcaagcguuugaacagca

SEQ ID NO: 80819 - RNA, 19 nt, Artificial Sequence
  Description of Artificial Sequence: Synthetic oligonucleotide
cagaaauugggccgagaac

SEQ ID NO: 80820 - RNA, 19 nt, Artificial Sequence
  Description of Artificial Sequence: Synthetic oligonucleotide
ucguauucugcuguccucu

SEQ ID NO: 80821 - RNA, 19 nt, Artificial Sequence
  Description of Artificial Sequence: Synthetic oligonucleotide
caauaggcccaauagaagu

SEQ ID NO: 80822 - RNA, 19 nt, Artificial Sequence
  Description of Artificial Sequence: Synthetic oligonucleotide
aaauugggccgagaacugu

SEQ ID NO: 80823 - RNA, 19 nt, Artificial Sequence
  Description of Artificial Sequence: Synthetic oligonucleotide
gucguauugugucccuucc

SEQ ID NO: 80824 - RNA, 19 nt, Artificial Sequence
  Description of Artificial Sequence: Synthetic oligonucleotide
cuccuagagggaaugucac

SEQ ID NO: 80825 - RNA, 19 nt, Artificial Sequence
  Description of Artificial Sequence: Synthetic oligonucleotide
auuugaccacuuauuagcu

SEQ ID NO: 80826 - RNA, 19 nt, Artificial Sequence
  Description of Artificial Sequence: Synthetic oligonucleotide
cacccucgggcacauaagg

SEQ ID NO: 80827 - RNA, 19 nt, Artificial Sequence
  Description of Artificial Sequence: Synthetic oligonucleotide
caacgcggagaaaacauca

SEQ ID NO: 80828 - RNA, 19 nt, Artificial Sequence
  Description of Artificial Sequence: Synthetic oligonucleotide
ucaaucgccucaacaccgu

SEQ ID NO: 80829 - RNA, 19 nt, Artificial Sequence
  Description of Artificial Sequence: Synthetic oligonucleotide
uguacccacgaaccaucug

SEQ ID NO: 80830 - RNA, 19 nt, Artificial Sequence
  Description of Artificial Sequence: Synthetic oligonucleotide
acaugugcaagcauucgga

SEQ ID NO: 80831 - RNA, 19 nt, Artificial Sequence
  Description of Artificial Sequence: Synthetic oligonucleotide
ugugguuguuaagaaacuu

SEQ ID NO: 80832 - RNA, 19 nt, Artificial Sequence
  Description of Artificial Sequence: Synthetic oligonucleotide
uacccacgaaccaucugga

SEQ ID NO: 80833 - RNA, 19 nt, Artificial Sequence
  Description of Artificial Sequence: Synthetic oligonucleotide
augagaaucccagcaccuc

SEQ ID NO: 80834 - RNA, 19 nt, Artificial Sequence
  Description of Artificial Sequence: Synthetic oligonucleotide
cguuugaacagcaacggug

SEQ ID NO: 80835 - RNA, 19 nt, Artificial Sequence
  Description of Artificial Sequence: Synthetic oligonucleotide
ccuaaauaacuguucauga

SEQ ID NO: 80836 - RNA, 19 nt, Artificial Sequence
  Description of Artificial Sequence: Synthetic oligonucleotide
caauaguaugaucucucca

SEQ ID NO: 80837 - RNA, 19 nt, Artificial Sequence
  Description of Artificial Sequence: Synthetic oligonucleotide
ugagcacaugaagaguacu

SEQ ID NO: 80838 - RNA, 19 nt, Artificial Sequence
  Description of Artificial Sequence: Synthetic oligonucleotide
gauuggaucgcagauuagu

SEQ ID NO: 80839 - RNA, 19 nt, Artificial Sequence
  Description of Artificial Sequence: Synthetic oligonucleotide
ucgucaccugaggugacgg

SEQ ID NO: 80840 - RNA, 19 nt, Artificial Sequence
  Description of Artificial Sequence: Synthetic oligonucleotide
acgcggagaaaacaucaca

SEQ ID NO: 80841 - RNA, 19 nt, Artificial Sequence
  Description of Artificial Sequence: Synthetic oligonucleotide
accguguugguuguaucuc

SEQ ID NO: 80842 - RNA, 19 nt, Artificial Sequence
  Description of Artificial Sequence: Synthetic oligonucleotide
ggauaauucgguuguggca

SEQ ID NO: 80843 - RNA, 19 nt, Artificial Sequence
  Description of Artificial Sequence: Synthetic oligonucleotide
aagcaacgcggagaaaaca

SEQ ID NO: 80844 - RNA, 19 nt, Artificial Sequence
  Description of Artificial Sequence: Synthetic oligonucleotide
aaguguccgugauaucuuu

SEQ ID NO: 80845 - RNA, 19 nt, Artificial Sequence
  Description of Artificial Sequence: Synthetic oligonucleotide
caaggaccaacuccccuag

SEQ ID NO: 80846 - RNA, 19 nt, Artificial Sequence
  Description of Artificial Sequence: Synthetic oligonucleotide
uguguucgguuucuucauc

SEQ ID NO: 80847 - RNA, 19 nt, Artificial Sequence
  Description of Artificial Sequence: Synthetic oligonucleotide
gaagcaacgcggagaaaac

SEQ ID NO: 80848 - RNA, 19 nt, Artificial Sequence
  Description of Artificial Sequence: Synthetic oligonucleotide
ggcccaauagaaguguccg

SEQ ID NO: 80849 - RNA, 19 nt, Artificial Sequence
  Description of Artificial Sequence: Synthetic oligonucleotide
uguccggccgggaagcccu

SEQ ID NO: 80850 - RNA, 19 nt, Artificial Sequence
  Description of Artificial Sequence: Synthetic oligonucleotide
ucguauugugucccuuccu

SEQ ID NO: 80851 - RNA, 19 nt, Artificial Sequence
  Description of Artificial Sequence: Synthetic oligonucleotide
gaugucguagcgucagaaa

SEQ ID NO: 80852 - RNA, 19 nt, Artificial Sequence
  Description of Artificial Sequence: Synthetic oligonucleotide
guggucuuggguugaaguc

SEQ ID NO: 80853 - RNA, 19 nt, Artificial Sequence
  Description of Artificial Sequence: Synthetic oligonucleotide
gucacucggaaacuugaca

SEQ ID NO: 80854 - RNA, 19 nt, Artificial Sequence
  Description of Artificial Sequence: Synthetic oligonucleotide
ucccuaaauaacuguucau

SEQ ID NO: 80855 - RNA, 19 nt, Artificial Sequence
  Description of Artificial Sequence: Synthetic oligonucleotide
cuacguggcagaaggucug

SEQ ID NO: 80856 - RNA, 19 nt, Artificial Sequence
  Description of Artificial Sequence: Synthetic oligonucleotide
acguaacucucaucgugug

SEQ ID NO: 80857 - RNA, 19 nt, Artificial Sequence
  Description of Artificial Sequence: Synthetic oligonucleotide
ugaugucguagcgucagaa

SEQ ID NO: 80858 - RNA, 19 nt, Artificial Sequence
  Description of Artificial Sequence: Synthetic oligonucleotide
cugagcacaugaagaguac

SEQ ID NO: 80859 - RNA, 19 nt, Artificial Sequence
  Description of Artificial Sequence: Synthetic oligonucleotide
ugcgagcuaggcugccugg

SEQ ID NO: 80860 - RNA, 19 nt, Artificial Sequence
  Description of Artificial Sequence: Synthetic oligonucleotide
agucacucggaaacuugac

SEQ ID NO: 80861 - RNA, 19 nt, Artificial Sequence
  Description of Artificial Sequence: Synthetic oligonucleotide
acgaucaggcagguacgcc

SEQ ID NO: 80862 - RNA, 19 nt, Artificial Sequence
  Description of Artificial Sequence: Synthetic oligonucleotide
cagauuaguaguaggaaau

SEQ ID NO: 80863 - RNA, 19 nt, Artificial Sequence
  Description of Artificial Sequence: Synthetic oligonucleotide
aacaccguguugguuguau

SEQ ID NO: 80864 - RNA, 19 nt, Artificial Sequence
  Description of Artificial Sequence: Synthetic oligonucleotide
uaagucguauugugucccu

SEQ ID NO: 80865 - RNA, 19 nt, Artificial Sequence
  Description of Artificial Sequence: Synthetic oligonucleotide
uccgaauacauagcugcuc

SEQ ID NO: 80866 - RNA, 19 nt, Artificial Sequence
  Description of Artificial Sequence: Synthetic oligonucleotide
ccacuuauuagcuguucgc

SEQ ID NO: 80867 - RNA, 19 nt, Artificial Sequence
  Description of Artificial Sequence: Synthetic oligonucleotide
augucguauguggucuugg

SEQ ID NO: 80868 - RNA, 19 nt, Artificial Sequence
  Description of Artificial Sequence: Synthetic oligonucleotide
gcagauuaguaguaggaaa

SEQ ID NO: 80869 - RNA, 19 nt, Artificial Sequence
  Description of Artificial Sequence: Synthetic oligonucleotide
cccuaaauaacuguucaug

SEQ ID NO: 80870 - RNA, 19 nt, Artificial Sequence
  Description of Artificial Sequence: Synthetic oligonucleotide
augugcggagagaauuugg

SEQ ID NO: 80871 - RNA, 19 nt, Artificial Sequence
  Description of Artificial Sequence: Synthetic oligonucleotide
cacuuauuagcuguucgca

SEQ ID NO: 80872 - RNA, 19 nt, Artificial Sequence
  Description of Artificial Sequence: Synthetic oligonucleotide
uaacuagauuuuggggugu

SEQ ID NO: 80873 - RNA, 19 nt, Artificial Sequence
  Description of Artificial Sequence: Synthetic oligonucleotide
uucugcgcccuaaugcaua

SEQ ID NO: 80874 - RNA, 19 nt, Artificial Sequence
  Description of Artificial Sequence: Synthetic oligonucleotide
aguuauggcaugacuugga

SEQ ID NO: 80875 - RNA, 19 nt, Artificial Sequence
  Description of Artificial Sequence: Synthetic oligonucleotide
ucggaaguuuugagguuuc

SEQ ID NO: 80876 - RNA, 19 nt, Artificial Sequence
  Description of Artificial Sequence: Synthetic oligonucleotide
aauugggccgagaacugua

SEQ ID NO: 80877 - RNA, 19 nt, Artificial Sequence
  Description of Artificial Sequence: Synthetic oligonucleotide
uugcgauuugagugguagu

SEQ ID NO: 80878 - RNA, 19 nt, Artificial Sequence
  Description of Artificial Sequence: Synthetic oligonucleotide
aucgccucaacaccguguu

SEQ ID NO: 80879 - RNA, 19 nt, Artificial Sequence
  Description of Artificial Sequence: Synthetic oligonucleotide
agcaacgcggagaaaacau

SEQ ID NO: 80880 - RNA, 19 nt, Artificial Sequence
  Description of Artificial Sequence: Synthetic oligonucleotide
uaacucucaucguguguuc

SEQ ID NO: 80881 - RNA, 19 nt, Artificial Sequence
  Description of Artificial Sequence: Synthetic oligonucleotide
ucugcgcccuaaugcauaa

SEQ ID NO: 80882 - RNA, 19 nt, Artificial Sequence
  Description of Artificial Sequence: Synthetic oligonucleotide
ugagggcgauacacaacac

SEQ ID NO: 80883 - RNA, 19 nt, Artificial Sequence
  Description of Artificial Sequence: Synthetic oligonucleotide
uaauucgguuguggcaucu

SEQ ID NO: 80884 - RNA, 19 nt, Artificial Sequence
  Description of Artificial Sequence: Synthetic oligonucleotide
cucguauucugcuguccuc

SEQ ID NO: 80885 - RNA, 19 nt, Artificial Sequence
  Description of Artificial Sequence: Synthetic oligonucleotide
gucguagcgucagaaacuc

SEQ ID NO: 80886 - RNA, 19 nt, Artificial Sequence
  Description of Artificial Sequence: Synthetic oligonucleotide
uaacccagauugaccuggu

SEQ ID NO: 80887 - RNA, 19 nt, Artificial Sequence
  Description of Artificial Sequence: Synthetic oligonucleotide
uccagucacgggcucuccu

SEQ ID NO: 80888 - RNA, 19 nt, Artificial Sequence
  Description of Artificial Sequence: Synthetic oligonucleotide
caugugcggagagaauuug

SEQ ID NO: 80889 - RNA, 19 nt, Artificial Sequence
  Description of Artificial Sequence: Synthetic oligonucleotide
auggcgauauggaacagua

SEQ ID NO: 80890 - RNA, 19 nt, Artificial Sequence
  Description of Artificial Sequence: Synthetic oligonucleotide
aggugacggcacuccaguc

SEQ ID NO: 80891 - RNA, 19 nt, Artificial Sequence
  Description of Artificial Sequence: Synthetic oligonucleotide
gguggugccugcccuaagc

SEQ ID NO: 80892 - RNA, 19 nt, Artificial Sequence
  Description of Artificial Sequence: Synthetic oligonucleotide
cccuaaugcauaacaggag

SEQ ID NO: 80893 - RNA, 19 nt, Artificial Sequence
  Description of Artificial Sequence: Synthetic oligonucleotide
guguguacgugacaagaua

SEQ ID NO: 80894 - RNA, 19 nt, Artificial Sequence
  Description of Artificial Sequence: Synthetic oligonucleotide
accaacuccccuagucuuc

SEQ ID NO: 80895 - RNA, 19 nt, Artificial Sequence
  Description of Artificial Sequence: Synthetic oligonucleotide
uccucguauucugcugucc

SEQ ID NO: 80896 - RNA, 19 nt, Artificial Sequence
  Description of Artificial Sequence: Synthetic oligonucleotide
cugguguguacgugacaag

SEQ ID NO: 80897 - RNA, 19 nt, Artificial Sequence
  Description of Artificial Sequence: Synthetic oligonucleotide
uauuagcuguucgcagacu

SEQ ID NO: 80898 - RNA, 19 nt, Artificial Sequence
  Description of Artificial Sequence: Synthetic oligonucleotide
acccacgaaccaucuggag

SEQ ID NO: 80899 - RNA, 19 nt, Artificial Sequence
  Description of Artificial Sequence: Synthetic oligonucleotide
ugucuacagacuggugcga

SEQ ID NO: 80900 - RNA, 19 nt, Artificial Sequence
  Description of Artificial Sequence: Synthetic oligonucleotide
agguacgccccacccucgg

SEQ ID NO: 80901 - RNA, 19 nt, Artificial Sequence
  Description of Artificial Sequence: Synthetic oligonucleotide
uugggccgagaacuguaaa

SEQ ID NO: 80902 - RNA, 19 nt, Artificial Sequence
  Description of Artificial Sequence: Synthetic oligonucleotide
guaggauggaacgugacuu

SEQ ID NO: 80903 - RNA, 19 nt, Artificial Sequence
  Description of Artificial Sequence: Synthetic oligonucleotide
uugucauuucuugcccaac

SEQ ID NO: 80904 - RNA, 19 nt, Artificial Sequence
  Description of Artificial Sequence: Synthetic oligonucleotide
cagauaagucguauugugu

SEQ ID NO: 80905 - RNA, 19 nt, Artificial Sequence
  Description of Artificial Sequence: Synthetic oligonucleotide
cacauaaaagauguaugcu

SEQ ID NO: 80906 - RNA, 19 nt, Artificial Sequence
  Description of Artificial Sequence: Synthetic oligonucleotide
ugccguggucuccagguuu

SEQ ID NO: 80907 - RNA, 19 nt, Artificial Sequence
  Description of Artificial Sequence: Synthetic oligonucleotide
gugauaucuuuuguaacua

SEQ ID NO: 80908 - RNA, 19 nt, Artificial Sequence
  Description of Artificial Sequence: Synthetic oligonucleotide
gcgauacacaacacgguag

SEQ ID NO: 80909 - RNA, 19 nt, Artificial Sequence
  Description of Artificial Sequence: Synthetic oligonucleotide
cucuccuagagggaauguc

SEQ ID NO: 80910 - RNA, 19 nt, Artificial Sequence
  Description of Artificial Sequence: Synthetic oligonucleotide
ccacguaacucucaucgug

SEQ ID NO: 80911 - RNA, 19 nt, Artificial Sequence
  Description of Artificial Sequence: Synthetic oligonucleotide
cccaauagaaguguccgug

SEQ ID NO: 80912 - RNA, 19 nt, Artificial Sequence
  Description of Artificial Sequence: Synthetic oligonucleotide
cgcccuaaugcauaacagg

SEQ ID NO: 80913 - RNA, 19 nt, Artificial Sequence
  Description of Artificial Sequence: Synthetic oligonucleotide
gagaacuguaaugucguau

SEQ ID NO: 80914 - RNA, 19 nt, Artificial Sequence
  Description of Artificial Sequence: Synthetic oligonucleotide
uggcgauauggaacaguau

SEQ ID NO: 80915 - RNA, 19 nt, Artificial Sequence
  Description of Artificial Sequence: Synthetic oligonucleotide
gcccuaaugcauaacagga

SEQ ID NO: 80916 - RNA, 19 nt, Artificial Sequence
  Description of Artificial Sequence: Synthetic oligonucleotide
ccuuucauccccuggcgac

SEQ ID NO: 80917 - RNA, 19 nt, Artificial Sequence
  Description of Artificial Sequence: Synthetic oligonucleotide
uugggauaauucgguugug

SEQ ID NO: 80918 - RNA, 19 nt, Artificial Sequence
  Description of Artificial Sequence: Synthetic oligonucleotide
ggcaugacuuggaagguac

SEQ ID NO: 80919 - RNA, 19 nt, Artificial Sequence
  Description of Artificial Sequence: Synthetic oligonucleotide
guccgugauaucuuuugua

SEQ ID NO: 80920 - RNA, 19 nt, Artificial Sequence
  Description of Artificial Sequence: Synthetic oligonucleotide
gucaccugaggugacggca

SEQ ID NO: 80921 - RNA, 19 nt, Artificial Sequence
  Description of Artificial Sequence: Synthetic oligonucleotide
uaaugucguauguggucuu

SEQ ID NO: 80922 - RNA, 19 nt, Artificial Sequence
  Description of Artificial Sequence: Synthetic oligonucleotide
cuggugcgagcuaggcugc

SEQ ID NO: 80923 - RNA, 19 nt, Artificial Sequence
  Description of Artificial Sequence: Synthetic oligonucleotide
gaggugacggcacuccagu

SEQ ID NO: 80924 - RNA, 19 nt, Artificial Sequence
  Description of Artificial Sequence: Synthetic oligonucleotide
ggccuguaucuccacgggg

SEQ ID NO: 80925 - RNA, 19 nt, Artificial Sequence
  Description of Artificial Sequence: Synthetic oligonucleotide
gcgucagaaacucuuaagu

SEQ ID NO: 80926 - RNA, 19 nt, Artificial Sequence
  Description of Artificial Sequence: Synthetic oligonucleotide
cacgaucaggcagguacgc

SEQ ID NO: 80927 - RNA, 19 nt, Artificial Sequence
  Description of Artificial Sequence: Synthetic oligonucleotide
ggaugaagcaacgcggaga

SEQ ID NO: 80928 - RNA, 19 nt, Artificial Sequence
  Description of Artificial Sequence: Synthetic oligonucleotide
gucgucaccugaggugacg

SEQ ID NO: 80929 - RNA, 19 nt, Artificial Sequence
  Description of Artificial Sequence: Synthetic oligonucleotide
gguugucauuucuugccca

SEQ ID NO: 80930 - RNA, 19 nt, Artificial Sequence
  Description of Artificial Sequence: Synthetic oligonucleotide
gacucuauagguggugccu

SEQ ID NO: 80931 - RNA, 19 nt, Artificial Sequence
  Description of Artificial Sequence: Synthetic oligonucleotide
caccucgaugacccugccg

SEQ ID NO: 80932 - RNA, 19 nt, Artificial Sequence
  Description of Artificial Sequence: Synthetic oligonucleotide
cacguaacucucaucgugu

SEQ ID NO: 80933 - RNA, 19 nt, Artificial Sequence
  Description of Artificial Sequence: Synthetic oligonucleotide
ucguagcgucagaaacucu

SEQ ID NO: 80934 - RNA, 19 nt, Artificial Sequence
  Description of Artificial Sequence: Synthetic oligonucleotide
ggcgauacacaacacggua

SEQ ID NO: 80935 - RNA, 19 nt, Artificial Sequence
  Description of Artificial Sequence: Synthetic oligonucleotide
gaccacuuauuagcuguuc

SEQ ID NO: 80936 - RNA, 19 nt, Artificial Sequence
  Description of Artificial Sequence: Synthetic oligonucleotide
ccgugauaucuuuuguaac

SEQ ID NO: 80937 - RNA, 19 nt, Artificial Sequence
  Description of Artificial Sequence: Synthetic oligonucleotide
cauguguuguugcaagcgu

SEQ ID NO: 80938 - RNA, 19 nt, Artificial Sequence
  Description of Artificial Sequence: Synthetic oligonucleotide
caccuuagcgaccauuugu

SEQ ID NO: 80939 - RNA, 19 nt, Artificial Sequence
  Description of Artificial Sequence: Synthetic oligonucleotide
ucgccucaacaccguguug

SEQ ID NO: 80940 - RNA, 19 nt, Artificial Sequence
  Description of Artificial Sequence: Synthetic oligonucleotide
gcagguacgccccacccuc

SEQ ID NO: 80941 - RNA, 19 nt, Artificial Sequence
  Description of Artificial Sequence: Synthetic oligonucleotide
auagguggugccugcccua

SEQ ID NO: 80942 - RNA, 19 nt, Artificial Sequence
  Description of Artificial Sequence: Synthetic oligonucleotide
gcugguguguacgugacaa

SEQ ID NO: 80943 - RNA, 19 nt, Artificial Sequence
  Description of Artificial Sequence: Synthetic oligonucleotide
ugguugcgauuugaguggu

SEQ ID NO: 80944 - RNA, 19 nt, Artificial Sequence
  Description of Artificial Sequence: Synthetic oligonucleotide
gggccgagaacuguaaaca

SEQ ID NO: 80945 - RNA, 19 nt, Artificial Sequence
  Description of Artificial Sequence: Synthetic oligonucleotide
cuccccuagucuucuguca

SEQ ID NO: 80946 - RNA, 19 nt, Artificial Sequence
  Description of Artificial Sequence: Synthetic oligonucleotide
caacgguguggaugucuac

SEQ ID NO: 80947 - RNA, 19 nt, Artificial Sequence
  Description of Artificial Sequence: Synthetic oligonucleotide
agguacauaugcacagcaa

SEQ ID NO: 80948 - RNA, 19 nt, Artificial Sequence
  Description of Artificial Sequence: Synthetic oligonucleotide
gcugucacagauaagucgu

SEQ ID NO: 80949 - RNA, 19 nt, Artificial Sequence
  Description of Artificial Sequence: Synthetic oligonucleotide
auguguuguugcaagcguu

SEQ ID NO: 80950 - RNA, 19 nt, Artificial Sequence
  Description of Artificial Sequence: Synthetic oligonucleotide
aaggacgucuauggcgaua

SEQ ID NO: 80951 - RNA, 19 nt, Artificial Sequence
  Description of Artificial Sequence: Synthetic oligonucleotide
gucguauguggucuugggu

SEQ ID NO: 80952 - RNA, 19 nt, Artificial Sequence
  Description of Artificial Sequence: Synthetic oligonucleotide
acaugugcggagagaauuu

SEQ ID NO: 80953 - RNA, 19 nt, Artificial Sequence
  Description of Artificial Sequence: Synthetic oligonucleotide
uauguggucuuggguugaa

SEQ ID NO: 80954 - RNA, 19 nt, Artificial Sequence
  Description of Artificial Sequence: Synthetic oligonucleotide
uggcaugacuuggaaggua

SEQ ID NO: 80955 - RNA, 19 nt, Artificial Sequence
  Description of Artificial Sequence: Synthetic oligonucleotide
cuauggcgauauggaacag

SEQ ID NO: 80956 - RNA, 19 nt, Artificial Sequence
  Description of Artificial Sequence: Synthetic oligonucleotide
gggccucuaggucccauug

SEQ ID NO: 80957 - RNA, 19 nt, Artificial Sequence
  Description of Artificial Sequence: Synthetic oligonucleotide
cuccucguauucugcuguc

SEQ ID NO: 80958 - RNA, 19 nt, Artificial Sequence
  Description of Artificial Sequence: Synthetic oligonucleotide
uagcgaccauuugucuccc

SEQ ID NO: 80959 - RNA, 19 nt, Artificial Sequence
  Description of Artificial Sequence: Synthetic oligonucleotide
cacagauaagucguauugu

SEQ ID NO: 80960 - RNA, 19 nt, Artificial Sequence
  Description of Artificial Sequence: Synthetic oligonucleotide
caccguguugguuguaucu

SEQ ID NO: 80961 - RNA, 19 nt, Artificial Sequence
  Description of Artificial Sequence: Synthetic oligonucleotide
caauagaaguguccgugau

SEQ ID NO: 80962 - RNA, 19 nt, Artificial Sequence
  Description of Artificial Sequence: Synthetic oligonucleotide
ggugacggcacuccagucu

SEQ ID NO: 80963 - RNA, 19 nt, Artificial Sequence
  Description of Artificial Sequence: Synthetic oligonucleotide
cugucacuuagguaggauu

SEQ ID NO: 80964 - RNA, 19 nt, Artificial Sequence
  Description of Artificial Sequence: Synthetic oligonucleotide
gcgaccauuugucucccuc

SEQ ID NO: 80965 - RNA, 19 nt, Artificial Sequence
  Description of Artificial Sequence: Synthetic oligonucleotide
guauguggucuuggguuga

SEQ ID NO: 80966 - RNA, 19 nt, Artificial Sequence
  Description of Artificial Sequence: Synthetic oligonucleotide
gcgccgccaacgcaugugg

SEQ ID NO: 80967 - RNA, 19 nt, Artificial Sequence
  Description of Artificial Sequence: Synthetic oligonucleotide
gcgcccuaaugcauaacag

SEQ ID NO: 80968 - RNA, 19 nt, Artificial Sequence
  Description of Artificial Sequence: Synthetic oligonucleotide
ggguguaaccacguucuuc

SEQ ID NO: 80969 - RNA, 19 nt, Artificial Sequence
  Description of Artificial Sequence: Synthetic oligonucleotide
cuguuuaaccuagaaguuu

SEQ ID NO: 80970 - RNA, 19 nt, Artificial Sequence
  Description of Artificial Sequence: Synthetic oligonucleotide
gguagucauuuggaaucug

SEQ ID NO: 80971 - RNA, 19 nt, Artificial Sequence
  Description of Artificial Sequence: Synthetic oligonucleotide
aggcucgucugcaccguag

SEQ ID NO: 80972 - RNA, 19 nt, Artificial Sequence
  Description of Artificial Sequence: Synthetic oligonucleotide
ggauuucuggcaaaucccu

SEQ ID NO: 80973 - RNA, 19 nt, Artificial Sequence
  Description of Artificial Sequence: Synthetic oligonucleotide
agguggugccugcccuaag

SEQ ID NO: 80974 - RNA, 19 nt, Artificial Sequence
  Description of Artificial Sequence: Synthetic oligonucleotide
auucugcgcccuaaugcau

SEQ ID NO: 80975 - RNA, 19 nt, Artificial Sequence
  Description of Artificial Sequence: Synthetic oligonucleotide
guaucuccguccacaguaa

SEQ ID NO: 80976 - RNA, 19 nt, Artificial Sequence
  Description of Artificial Sequence: Synthetic oligonucleotide
guguacgugacaagauacu

SEQ ID NO: 80977 - RNA, 19 nt, Artificial Sequence
  Description of Artificial Sequence: Synthetic oligonucleotide
cacaugugcggagagaauu

SEQ ID NO: 80978 - RNA, 19 nt, Artificial Sequence
  Description of Artificial Sequence: Synthetic oligonucleotide
gggagaacuguaaugucgu

SEQ ID NO: 80979 - RNA, 19 nt, Artificial Sequence
  Description of Artificial Sequence: Synthetic oligonucleotide
ggcauaaauguuagugugu

SEQ ID NO: 80980 - RNA, 19 nt, Artificial Sequence
  Description of Artificial Sequence: Synthetic oligonucleotide
ucggaagagcagggcauuu

SEQ ID NO: 80981 - RNA, 19 nt, Artificial Sequence
  Description of Artificial Sequence: Synthetic oligonucleotide
cacgaaccaucuggagcag

SEQ ID NO: 80982 - RNA, 19 nt, Artificial Sequence
  Description of Artificial Sequence: Synthetic oligonucleotide
aguguccgugauaucuuuu

SEQ ID NO: 80983 - RNA, 19 nt, Artificial Sequence
  Description of Artificial Sequence: Synthetic oligonucleotide
cuguccggccgggaagccc

SEQ ID NO: 80984 - RNA, 19 nt, Artificial Sequence
  Description of Artificial Sequence: Synthetic oligonucleotide
acgaaccaucuggagcaga

SEQ ID NO: 80985 - RNA, 19 nt, Artificial Sequence
  Description of Artificial Sequence: Synthetic oligonucleotide
cauuguuggaucggaaguu

SEQ ID NO: 80986 - RNA, 19 nt, Artificial Sequence
  Description of Artificial Sequence: Synthetic oligonucleotide
ccagauugaccuggucugc

SEQ ID NO: 80987 - RNA, 19 nt, Artificial Sequence
  Description of Artificial Sequence: Synthetic oligonucleotide
gcaacgcggagaaaacauc

SEQ ID NO: 80988 - RNA, 19 nt, Artificial Sequence
  Description of Artificial Sequence: Synthetic oligonucleotide
caacuccccuagucuucug

SEQ ID NO: 80989 - RNA, 19 nt, Artificial Sequence
  Description of Artificial Sequence: Synthetic oligonucleotide
gccgccaacgcaugugguc

SEQ ID NO: 80990 - RNA, 19 nt, Artificial Sequence
  Description of Artificial Sequence: Synthetic oligonucleotide
cugucacagauaagucgua

SEQ ID NO: 80991 - RNA, 19 nt, Artificial Sequence
  Description of Artificial Sequence: Synthetic oligonucleotide
gaacaguauccagcugaua

SEQ ID NO: 80992 - RNA, 19 nt, Artificial Sequence
  Description of Artificial Sequence: Synthetic oligonucleotide
caggcacgaugaagggcuc

SEQ ID NO: 80993 - RNA, 19 nt, Artificial Sequence
  Description of Artificial Sequence: Synthetic oligonucleotide
cagaugcauacagugcugu

SEQ ID NO: 80994 - RNA, 19 nt, Artificial Sequence
  Description of Artificial Sequence: Synthetic oligonucleotide
agggcgcgccgccaacgca

SEQ ID NO: 80995 - RNA, 19 nt, Artificial Sequence
  Description of Artificial Sequence: Synthetic oligonucleotide
cuccagucacgggcucucc

SEQ ID NO: 80996 - RNA, 19 nt, Artificial Sequence
  Description of Artificial Sequence: Synthetic oligonucleotide
cucgggcacauaaggcucu

SEQ ID NO: 80997 - RNA, 19 nt, Artificial Sequence
  Description of Artificial Sequence: Synthetic oligonucleotide
caacgcauguggucagggu

SEQ ID NO: 80998 - RNA, 19 nt, Artificial Sequence
  Description of Artificial Sequence: Synthetic oligonucleotide
cuguacccacgaaccaucu

SEQ ID NO: 80999 - RNA, 19 nt, Artificial Sequence
  Description of Artificial Sequence: Synthetic oligonucleotide
cacgguaguugacaacuuu

SEQ ID NO: 81000 - RNA, 19 nt, Artificial Sequence
  Description of Artificial Sequence: Synthetic oligonucleotide
cucucaucguguguucggu

SEQ ID NO: 81001 - RNA, 19 nt, Artificial Sequence
  Description of Artificial Sequence: Synthetic oligonucleotide
gcagggcgcgccgccaacg

SEQ ID NO: 81002 - RNA, 19 nt, Artificial Sequence
  Description of Artificial Sequence: Synthetic oligonucleotide
aucguguguucgguuucuu

SEQ ID NO: 81003 - RNA, 19 nt, Artificial Sequence
  Description of Artificial Sequence: Synthetic oligonucleotide
ccgcaucaccuuucauccc

SEQ ID NO: 81004 - RNA, 19 nt, Artificial Sequence
  Description of Artificial Sequence: Synthetic oligonucleotide
augaagcaacgcggagaaa

SEQ ID NO: 81005 - RNA, 19 nt, Artificial Sequence
  Description of Artificial Sequence: Synthetic oligonucleotide
cccucgggcacauaaggcu

SEQ ID NO: 81006 - RNA, 19 nt, Artificial Sequence
  Description of Artificial Sequence: Synthetic oligonucleotide
acgugacaagauacugcuu

SEQ ID NO: 81007 - RNA, 19 nt, Artificial Sequence
  Description of Artificial Sequence: Synthetic oligonucleotide
ccgauucaacauuacaguu

SEQ ID NO: 81008 - RNA, 19 nt, Artificial Sequence
  Description of Artificial Sequence: Synthetic oligonucleotide
gcaucugauugaaucugcu

SEQ ID NO: 81009 - RNA, 19 nt, Artificial Sequence
  Description of Artificial Sequence: Synthetic oligonucleotide
gcguuugaacagcaacggu

SEQ ID NO: 81010 - RNA, 19 nt, Artificial Sequence
  Description of Artificial Sequence: Synthetic oligonucleotide
cugcgcccuaaugcauaac

SEQ ID NO: 81011 - RNA, 19 nt, Artificial Sequence
  Description of Artificial Sequence: Synthetic oligonucleotide
caucguguguucgguuucu

SEQ ID NO: 81012 - RNA, 19 nt, Artificial Sequence
  Description of Artificial Sequence: Synthetic oligonucleotide
ccucguauucugcuguccu

SEQ ID NO: 81013 - RNA, 19 nt, Artificial Sequence
  Description of Artificial Sequence: Synthetic oligonucleotide
ggucugccguggucuccag

SEQ ID NO: 81014 - RNA, 19 nt, Artificial Sequence
  Description of Artificial Sequence: Synthetic oligonucleotide
cgcagauuaguaguaggaa

SEQ ID NO: 81015 - RNA, 19 nt, Artificial Sequence
  Description of Artificial Sequence: Synthetic oligonucleotide
caccguaguccuccucgua

SEQ ID NO: 81016 - RNA, 19 nt, Artificial Sequence
  Description of Artificial Sequence: Synthetic oligonucleotide
ggcucgucugcaccguagu

SEQ ID NO: 81017 - RNA, 19 nt, Artificial Sequence
  Description of Artificial Sequence: Synthetic oligonucleotide
gcccaauagaaguguccgu

SEQ ID NO: 81018 - RNA, 19 nt, Artificial Sequence
  Description of Artificial Sequence: Synthetic oligonucleotide
gcgagcuaggcugccugga

SEQ ID NO: 81019 - RNA, 19 nt, Artificial Sequence
  Description of Artificial Sequence: Synthetic oligonucleotide
cgccaacgcauguggucag

SEQ ID NO: 81020 - RNA, 19 nt, Artificial Sequence
  Description of Artificial Sequence: Synthetic oligonucleotide
cagcuacguggcagaaggu

SEQ ID NO: 81021 - RNA, 19 nt, Artificial Sequence
  Description of Artificial Sequence: Synthetic oligonucleotide
caaggacgucuauggcgau

SEQ ID NO: 81022 - RNA, 19 nt, Artificial Sequence
  Description of Artificial Sequence: Synthetic oligonucleotide
caggcucgucugcaccgua

SEQ ID NO: 81023 - RNA, 19 nt, Artificial Sequence
  Description of Artificial Sequence: Synthetic oligonucleotide
ccuguccggccgggaagcc

SEQ ID NO: 81024 - RNA, 19 nt, Artificial Sequence
  Description of Artificial Sequence: Synthetic oligonucleotide
ggugcgagcuaggcugccu

SEQ ID NO: 81025 - RNA, 19 nt, Artificial Sequence
  Description of Artificial Sequence: Synthetic oligonucleotide
gguugcgauuugaguggua

SEQ ID NO: 81026 - RNA, 19 nt, Artificial Sequence
  Description of Artificial Sequence: Synthetic oligonucleotide
ccaacuccccuagucuucu

SEQ ID NO: 81027 - RNA, 19 nt, Artificial Sequence
  Description of Artificial Sequence: Synthetic oligonucleotide
gggguguaaccacguucuu

SEQ ID NO: 81028 - RNA, 19 nt, Artificial Sequence
  Description of Artificial Sequence: Synthetic oligonucleotide
cucccgcaucaccuuucau

SEQ ID NO: 81029 - RNA, 19 nt, Artificial Sequence
  Description of Artificial Sequence: Synthetic oligonucleotide
agcccacccugggcguguu

SEQ ID NO: 81030 - RNA, 19 nt, Artificial Sequence
  Description of Artificial Sequence: Synthetic oligonucleotide
ggcucacgaucaggcaggu

SEQ ID NO: 81031 - RNA, 19 nt, Artificial Sequence
  Description of Artificial Sequence: Synthetic oligonucleotide
gccguggucuccagguuuu

SEQ ID NO: 81032 - RNA, 19 nt, Artificial Sequence
  Description of Artificial Sequence: Synthetic oligonucleotide
cccuggcgacccuguucuc

SEQ ID NO: 81033 - RNA, 19 nt, Artificial Sequence
  Description of Artificial Sequence: Synthetic oligonucleotide
gcucacgaucaggcaggua

SEQ ID NO: 81034 - RNA, 19 nt, Artificial Sequence
  Description of Artificial Sequence: Synthetic oligonucleotide
aacgucaacacucaacucc

SEQ ID NO: 81035 - RNA, 19 nt, Artificial Sequence
  Description of Artificial Sequence: Synthetic oligonucleotide
aaacuacucauauauacac

SEQ ID NO: 81036 - RNA, 19 nt, Artificial Sequence
  Description of Artificial Sequence: Synthetic oligonucleotide
aaauagaucagaauagucg

SEQ ID NO: 81037 - RNA, 19 nt, Artificial Sequence
  Description of Artificial Sequence: Synthetic oligonucleotide
aauuaugaagauucccuac

SEQ ID NO: 81038 - RNA, 19 nt, Artificial Sequence
  Description of Artificial Sequence: Synthetic oligonucleotide
cuaugaauaaggaaggagg

SEQ ID NO: 81039 - RNA, 19 nt, Artificial Sequence
  Description of Artificial Sequence: Synthetic oligonucleotide
aaucuuuagacgauauucc

SEQ ID NO: 81040 - RNA, 19 nt, Artificial Sequence
  Description of Artificial Sequence: Synthetic oligonucleotide
gaagucacgauuuucuggg

SEQ ID NO: 81041 - RNA, 19 nt, Artificial Sequence
  Description of Artificial Sequence: Synthetic oligonucleotide
gacucuagcaccuacuggg

SEQ ID NO: 81042 - RNA, 19 nt, Artificial Sequence
  Description of Artificial Sequence: Synthetic oligonucleotide
auaaaggcuuaacugaacg

SEQ ID NO: 81043 - RNA, 19 nt, Artificial Sequence
  Description of Artificial Sequence: Synthetic oligonucleotide
aauaggucucgggaaaucc

SEQ ID NO: 81044 - RNA, 19 nt, Artificial Sequence
  Description of Artificial Sequence: Synthetic oligonucleotide
acuccuaugaauaaggaag

SEQ ID NO: 81045 - RNA, 19 nt, Artificial Sequence
  Description of Artificial Sequence: Synthetic oligonucleotide
aguaucaccauacuggaga

SEQ ID NO: 81046 - RNA, 19 nt, Artificial Sequence
  Description of Artificial Sequence: Synthetic oligonucleotide
aaacgcagcgaucacaaug

SEQ ID NO: 81047 - RNA, 19 nt, Artificial Sequence
  Description of Artificial Sequence: Synthetic oligonucleotide
aauaaaagguuaauuugag

SEQ ID NO: 81048 - RNA, 19 nt, Artificial Sequence
  Description of Artificial Sequence: Synthetic oligonucleotide
acgacacugaacaagauac

SEQ ID NO: 81049 - RNA, 19 nt, Artificial Sequence
  Description of Artificial Sequence: Synthetic oligonucleotide
aaguacuucacucguucuc

SEQ ID NO: 81050 - RNA, 19 nt, Artificial Sequence
  Description of Artificial Sequence: Synthetic oligonucleotide
acaacgucaacacucaacu

SEQ ID NO: 81051 - RNA, 19 nt, Artificial Sequence
  Description of Artificial Sequence: Synthetic oligonucleotide
acuagaaacgcccaucugu

SEQ ID NO: 81052 - RNA, 19 nt, Artificial Sequence
  Description of Artificial Sequence: Synthetic oligonucleotide
uccuaaacuguuuaugaca

SEQ ID NO: 81053 - RNA, 19 nt, Artificial Sequence
  Description of Artificial Sequence: Synthetic oligonucleotide
ugcggagugacguugaaca

SEQ ID NO: 81054 - RNA, 19 nt, Artificial Sequence
  Description of Artificial Sequence: Synthetic oligonucleotide
auauagagaaaucuuuaga

SEQ ID NO: 81055 - RNA, 19 nt, Artificial Sequence
  Description of Artificial Sequence: Synthetic oligonucleotide
ucucuaaauguuccuuugg

SEQ ID NO: 81056 - RNA, 19 nt, Artificial Sequence
  Description of Artificial Sequence: Synthetic oligonucleotide
agugccgaaaacugggugg

SEQ ID NO: 81057 - RNA, 19 nt, Artificial Sequence
  Description of Artificial Sequence: Synthetic oligonucleotide
acuaaggcggccuucaugu

SEQ ID NO: 81058 - RNA, 19 nt, Artificial Sequence
  Description of Artificial Sequence: Synthetic oligonucleotide
acuucaaacgaaaggaagg

SEQ ID NO: 81059 - RNA, 19 nt, Artificial Sequence
  Description of Artificial Sequence: Synthetic oligonucleotide
auaacuuauaacugcuugu

SEQ ID NO: 81060 - RNA, 19 nt, Artificial Sequence
  Description of Artificial Sequence: Synthetic oligonucleotide
aaagaaacgcagcgaucac

SEQ ID NO: 81061 - RNA, 19 nt, Artificial Sequence
  Description of Artificial Sequence: Synthetic oligonucleotide
uagacgauauuccucuuug

SEQ ID NO: 81062 - RNA, 19 nt, Artificial Sequence
  Description of Artificial Sequence: Synthetic oligonucleotide
aauagucgucuguggaagg

SEQ ID NO: 81063 - RNA, 19 nt, Artificial Sequence
  Description of Artificial Sequence: Synthetic oligonucleotide
aaccucacgguuccagagc

SEQ ID NO: 81064 - RNA, 19 nt, Artificial Sequence
  Description of Artificial Sequence: Synthetic oligonucleotide
acgauauuccucuuugcuc

SEQ ID NO: 81065 - RNA, 19 nt, Artificial Sequence
  Description of Artificial Sequence: Synthetic oligonucleotide
agacggacgacacugaaca

SEQ ID NO: 81066 - RNA, 19 nt, Artificial Sequence
  Description of Artificial Sequence: Synthetic oligonucleotide
agaaagaaccugccuggcc

SEQ ID NO: 81067 - RNA, 19 nt, Artificial Sequence
  Description of Artificial Sequence: Synthetic oligonucleotide
cucgagaggggauaaaggc

SEQ ID NO: 81068 - RNA, 19 nt, Artificial Sequence
  Description of Artificial Sequence: Synthetic oligonucleotide
acaugcgagggacagacag

SEQ ID NO: 81069 - RNA, 19 nt, Artificial Sequence
  Description of Artificial Sequence: Synthetic oligonucleotide
aaggaaagcgcgccaagug

SEQ ID NO: 81070 - RNA, 19 nt, Artificial Sequence
  Description of Artificial Sequence: Synthetic oligonucleotide
gagaccuaaagaaacgcag

SEQ ID NO: 81071 - RNA, 19 nt, Artificial Sequence
  Description of Artificial Sequence: Synthetic oligonucleotide
aacuuauaacugcuuguca

SEQ ID NO: 81072 - RNA, 19 nt, Artificial Sequence
  Description of Artificial Sequence: Synthetic oligonucleotide
uuuggaaaauggguacucg

SEQ ID NO: 81073 - RNA, 19 nt, Artificial Sequence
  Description of Artificial Sequence: Synthetic oligonucleotide
caagcagcgggcuucaaag

SEQ ID NO: 81074 - RNA, 19 nt, Artificial Sequence
  Description of Artificial Sequence: Synthetic oligonucleotide
aacaaacgaacacuauuau

SEQ ID NO: 81075 - RNA, 19 nt, Artificial Sequence
  Description of Artificial Sequence: Synthetic oligonucleotide
ucagucgacuguaauaguc

SEQ ID NO: 81076 - RNA, 19 nt, Artificial Sequence
  Description of Artificial Sequence: Synthetic oligonucleotide
aaagggauaauuauauaua

SEQ ID NO: 81077 - RNA, 19 nt, Artificial Sequence
  Description of Artificial Sequence: Synthetic oligonucleotide
aacuccuaugaauaaggaa

SEQ ID NO: 81078 - RNA, 19 nt, Artificial Sequence
  Description of Artificial Sequence: Synthetic oligonucleotide
uguguuaucucauggcaaa

SEQ ID NO: 81079 - RNA, 19 nt, Artificial Sequence
  Description of Artificial Sequence: Synthetic oligonucleotide
acaaacuagccagucacgg

SEQ ID NO: 81080 - RNA, 19 nt, Artificial Sequence
  Description of Artificial Sequence: Synthetic oligonucleotide
aacugaacggcagacucag

SEQ ID NO: 81081 - RNA, 19 nt, Artificial Sequence
  Description of Artificial Sequence: Synthetic oligonucleotide
ucgggaaauccucucaaca

SEQ ID NO: 81082 - RNA, 19 nt, Artificial Sequence
  Description of Artificial Sequence: Synthetic oligonucleotide
uuaucucauggcaaacuac

SEQ ID NO: 81083 - RNA, 19 nt, Artificial Sequence
  Description of Artificial Sequence: Synthetic oligonucleotide
uugagcuugccuccuauga

SEQ ID NO: 81084 - RNA, 19 nt, Artificial Sequence
  Description of Artificial Sequence: Synthetic oligonucleotide
gaauagucgucuguggaag

SEQ ID NO: 81085 - RNA, 19 nt, Artificial Sequence
  Description of Artificial Sequence: Synthetic oligonucleotide
agaccuaaagaaacgcagc

SEQ ID NO: 81086 - RNA, 19 nt, Artificial Sequence
  Description of Artificial Sequence: Synthetic oligonucleotide
agacgauauuccucuuugc

SEQ ID NO: 81087 - RNA, 19 nt, Artificial Sequence
  Description of Artificial Sequence: Synthetic oligonucleotide
uuccggacagauuucaagu

SEQ ID NO: 81088 - RNA, 19 nt, Artificial Sequence
  Description of Artificial Sequence: Synthetic oligonucleotide
gaugcucacugcuuugacc

SEQ ID NO: 81089 - RNA, 19 nt, Artificial Sequence
  Description of Artificial Sequence: Synthetic oligonucleotide
ugucgagccgccaucacac

SEQ ID NO: 81090 - RNA, 19 nt, Artificial Sequence
  Description of Artificial Sequence: Synthetic oligonucleotide
uguucgugcacacgaguug

SEQ ID NO: 81091 - RNA, 19 nt, Artificial Sequence
  Description of Artificial Sequence: Synthetic oligonucleotide
acgccaugcgcucagcucg

SEQ ID NO: 81092 - RNA, 19 nt, Artificial Sequence
  Description of Artificial Sequence: Synthetic oligonucleotide
acacuuagcucugagaccu

SEQ ID NO: 81093 - RNA, 19 nt, Artificial Sequence
  Description of Artificial Sequence: Synthetic oligonucleotide
gcagcgaucacaauguccg

SEQ ID NO: 81094 - RNA, 19 nt, Artificial Sequence
  Description of Artificial Sequence: Synthetic oligonucleotide
aggagggucgcauguggcc

SEQ ID NO: 81095 - RNA, 19 nt, Artificial Sequence
  Description of Artificial Sequence: Synthetic oligonucleotide
ucaauagcugguaggaauu

SEQ ID NO: 81096 - RNA, 19 nt, Artificial Sequence
  Description of Artificial Sequence: Synthetic oligonucleotide
aacaaacuagccagucacg

SEQ ID NO: 81097 - RNA, 19 nt, Artificial Sequence
  Description of Artificial Sequence: Synthetic oligonucleotide
aacgcagcgaucacaaugu

SEQ ID NO: 81098 - RNA, 19 nt, Artificial Sequence
  Description of Artificial Sequence: Synthetic oligonucleotide
caaacuacucauauauaca

SEQ ID NO: 81099 - RNA, 19 nt, Artificial Sequence
  Description of Artificial Sequence: Synthetic oligonucleotide
ugcccucaaguacaugagg

SEQ ID NO: 81100 - RNA, 19 nt, Artificial Sequence
  Description of Artificial Sequence: Synthetic oligonucleotide
agugcguugagaguggugu

SEQ ID NO: 81101 - RNA, 19 nt, Artificial Sequence
  Description of Artificial Sequence: Synthetic oligonucleotide
cauacuggagaaggaaacg

SEQ ID NO: 81102 - RNA, 19 nt, Artificial Sequence
  Description of Artificial Sequence: Synthetic oligonucleotide
aggguaaggaaagcgcgcc

SEQ ID NO: 81103 - RNA, 19 nt, Artificial Sequence
  Description of Artificial Sequence: Synthetic oligonucleotide
uucagugcguugagagugg

SEQ ID NO: 81104 - RNA, 19 nt, Artificial Sequence
  Description of Artificial Sequence: Synthetic oligonucleotide
agaauagucgucuguggaa

SEQ ID NO: 81105 - RNA, 19 nt, Artificial Sequence
  Description of Artificial Sequence: Synthetic oligonucleotide
gacccaaauaggucucggg

SEQ ID NO: 81106 - RNA, 19 nt, Artificial Sequence
  Description of Artificial Sequence: Synthetic oligonucleotide
caucguaacugcuuucaug

SEQ ID NO: 81107 - RNA, 19 nt, Artificial Sequence
  Description of Artificial Sequence: Synthetic oligonucleotide
augcgagggacagacagac

SEQ ID NO: 81108 - RNA, 19 nt, Artificial Sequence
  Description of Artificial Sequence: Synthetic oligonucleotide
uguuaucucauggcaaacu

SEQ ID NO: 81109 - RNA, 19 nt, Artificial Sequence
  Description of Artificial Sequence: Synthetic oligonucleotide
gaaacuagaaacgcccauc

SEQ ID NO: 81110 - RNA, 19 nt, Artificial Sequence
  Description of Artificial Sequence: Synthetic oligonucleotide
uaugccgccucucugcaaa

SEQ ID NO: 81111 - RNA, 19 nt, Artificial Sequence
  Description of Artificial Sequence: Synthetic oligonucleotide
uccuaugccgccucucugc

SEQ ID NO: 81112 - RNA, 19 nt, Artificial Sequence
  Description of Artificial Sequence: Synthetic oligonucleotide
aaggaaacgguuagcaaau

SEQ ID NO: 81113 - RNA, 19 nt, Artificial Sequence
  Description of Artificial Sequence: Synthetic oligonucleotide
auagggagugccgaaaacu

SEQ ID NO: 81114 - RNA, 19 nt, Artificial Sequence
  Description of Artificial Sequence: Synthetic oligonucleotide
cuaaggaaacuugucauca

SEQ ID NO: 81115 - RNA, 19 nt, Artificial Sequence
  Description of Artificial Sequence: Synthetic oligonucleotide
gaaacgcccaucuguuccc

SEQ ID NO: 81116 - RNA, 19 nt, Artificial Sequence
  Description of Artificial Sequence: Synthetic oligonucleotide
gaagauucccuacaaugua

SEQ ID NO: 81117 - RNA, 19 nt, Artificial Sequence
  Description of Artificial Sequence: Synthetic oligonucleotide
aacuacucauauauacacu

SEQ ID NO: 81118 - RNA, 19 nt, Artificial Sequence
  Description of Artificial Sequence: Synthetic oligonucleotide
ucuguucgugcacacgagu

SEQ ID NO: 81119 - RNA, 19 nt, Artificial Sequence
  Description of Artificial Sequence: Synthetic oligonucleotide
ccuacuggauguaaagucc

SEQ ID NO: 81120 - RNA, 19 nt, Artificial Sequence
  Description of Artificial Sequence: Synthetic oligonucleotide
gucgcauguggccaggacc

SEQ ID NO: 81121 - RNA, 19 nt, Artificial Sequence
  Description of Artificial Sequence: Synthetic oligonucleotide
agcgcgccaagugaggacc

SEQ ID NO: 81122 - RNA, 19 nt, Artificial Sequence
  Description of Artificial Sequence: Synthetic oligonucleotide
acaugcgcuuuccauacca

SEQ ID NO: 81123 - RNA, 19 nt, Artificial Sequence
  Description of Artificial Sequence: Synthetic oligonucleotide
aggaaagcgcgccaaguga

SEQ ID NO: 81124 - RNA, 19 nt, Artificial Sequence
  Description of Artificial Sequence: Synthetic oligonucleotide
ugagcuugccuccuaugaa

SEQ ID NO: 81125 - RNA, 19 nt, Artificial Sequence
  Description of Artificial Sequence: Synthetic oligonucleotide
ucgaaggagggucgcaugu

SEQ ID NO: 81126 - RNA, 19 nt, Artificial Sequence
  Description of Artificial Sequence: Synthetic oligonucleotide
cuaaagaaacgcagcgauc

SEQ ID NO: 81127 - RNA, 19 nt, Artificial Sequence
  Description of Artificial Sequence: Synthetic oligonucleotide
aaggcuuaacugaacggca

SEQ ID NO: 81128 - RNA, 19 nt, Artificial Sequence
  Description of Artificial Sequence: Synthetic oligonucleotide
ucugcgcgcacagugaaga

SEQ ID NO: 81129 - RNA, 19 nt, Artificial Sequence
  Description of Artificial Sequence: Synthetic oligonucleotide
ugucgucccgagaugcugc

SEQ ID NO: 81130 - RNA, 19 nt, Artificial Sequence
  Description of Artificial Sequence: Synthetic oligonucleotide
ugacaggucucuaaauguu

SEQ ID NO: 81131 - RNA, 19 nt, Artificial Sequence
  Description of Artificial Sequence: Synthetic oligonucleotide
gauaaaggcuuaacugaac

SEQ ID NO: 81132 - RNA, 19 nt, Artificial Sequence
  Description of Artificial Sequence: Synthetic oligonucleotide
agguuaauuugagcuugcc

SEQ ID NO: 81133 - RNA, 19 nt, Artificial Sequence
  Description of Artificial Sequence: Synthetic oligonucleotide
ugccuucaugccgaggugg

SEQ ID NO: 81134 - RNA, 19 nt, Artificial Sequence
  Description of Artificial Sequence: Synthetic oligonucleotide
acgguuagcaaaucuggaa

SEQ ID NO: 81135 - RNA, 19 nt, Artificial Sequence
  Description of Artificial Sequence: Synthetic oligonucleotide
agggagacggacgacacug

SEQ ID NO: 81136 - RNA, 19 nt, Artificial Sequence
  Description of Artificial Sequence: Synthetic oligonucleotide
ucggggauagggagugccg

SEQ ID NO: 81137 - RNA, 19 nt, Artificial Sequence
  Description of Artificial Sequence: Synthetic oligonucleotide
aagauucccuacaauguau

SEQ ID NO: 81138 - RNA, 19 nt, Artificial Sequence
  Description of Artificial Sequence: Synthetic oligonucleotide
gacgauauuccucuuugcu

SEQ ID NO: 81139 - RNA, 19 nt, Artificial Sequence
  Description of Artificial Sequence: Synthetic oligonucleotide
acggacgacacugaacaag

SEQ ID NO: 81140 - RNA, 19 nt, Artificial Sequence
  Description of Artificial Sequence: Synthetic oligonucleotide
ugaacggcagacucaguua

SEQ ID NO: 81141 - RNA, 19 nt, Artificial Sequence
  Description of Artificial Sequence: Synthetic oligonucleotide
ucuugcacgugcuguguac

SEQ ID NO: 81142 - RNA, 19 nt, Artificial Sequence
  Description of Artificial Sequence: Synthetic oligonucleotide
augaauaaggaaggaggcu

SEQ ID NO: 81143 - RNA, 19 nt, Artificial Sequence
  Description of Artificial Sequence: Synthetic oligonucleotide
guagccacgguccaggugu

SEQ ID NO: 81144 - RNA, 19 nt, Artificial Sequence
  Description of Artificial Sequence: Synthetic oligonucleotide
aacgguuagcaaaucugga

SEQ ID NO: 81145 - RNA, 19 nt, Artificial Sequence
  Description of Artificial Sequence: Synthetic oligonucleotide
gagugccgaaaacugggug

SEQ ID NO: 81146 - RNA, 19 nt, Artificial Sequence
  Description of Artificial Sequence: Synthetic oligonucleotide
guuaucucauggcaaacua

SEQ ID NO: 81147 - RNA, 19 nt, Artificial Sequence
  Description of Artificial Sequence: Synthetic oligonucleotide
cacucaacuccuaugaaua

SEQ ID NO: 81148 - RNA, 19 nt, Artificial Sequence
  Description of Artificial Sequence: Synthetic oligonucleotide
guaaggaaagcgcgccaag

SEQ ID NO: 81149 - RNA, 19 nt, Artificial Sequence
  Description of Artificial Sequence: Synthetic oligonucleotide
gagcccgcgugccucagcg

SEQ ID NO: 81150 - RNA, 19 nt, Artificial Sequence
  Description of Artificial Sequence: Synthetic oligonucleotide
uccauaccaaagacaggac

SEQ ID NO: 81151 - RNA, 19 nt, Artificial Sequence
  Description of Artificial Sequence: Synthetic oligonucleotide
uacuguuuacacuguguua

SEQ ID NO: 81152 - RNA, 19 nt, Artificial Sequence
  Description of Artificial Sequence: Synthetic oligonucleotide
acagacaaauggauccuag

SEQ ID NO: 81153 - RNA, 19 nt, Artificial Sequence
  Description of Artificial Sequence: Synthetic oligonucleotide
aaagcgcgccaagugagga

SEQ ID NO: 81154 - RNA, 19 nt, Artificial Sequence
  Description of Artificial Sequence: Synthetic oligonucleotide
ugggugucuacuguuuaca

SEQ ID NO: 81155 - RNA, 19 nt, Artificial Sequence
  Description of Artificial Sequence: Synthetic oligonucleotide
aggaggcuugcucaaacau

SEQ ID NO: 81156 - RNA, 19 nt, Artificial Sequence
  Description of Artificial Sequence: Synthetic oligonucleotide
gaaagcgcgccaagugagg

SEQ ID NO: 81157 - RNA, 19 nt, Artificial Sequence
  Description of Artificial Sequence: Synthetic oligonucleotide
gauagccccaggcaggucu

SEQ ID NO: 81158 - RNA, 19 nt, Artificial Sequence
  Description of Artificial Sequence: Synthetic oligonucleotide
agcaucguaacugcuuuca

SEQ ID NO: 81159 - RNA, 19 nt, Artificial Sequence
  Description of Artificial Sequence: Synthetic oligonucleotide
uccgaacaaacuagccagu

SEQ ID NO: 81160 - RNA, 19 nt, Artificial Sequence
  Description of Artificial Sequence: Synthetic oligonucleotide
agaaacgcagcgaucacaa

SEQ ID NO: 81161 - RNA, 19 nt, Artificial Sequence
  Description of Artificial Sequence: Synthetic oligonucleotide
cagaauagucgucugugga

SEQ ID NO: 81162 - RNA, 19 nt, Artificial Sequence
  Description of Artificial Sequence: Synthetic oligonucleotide
uccuaugaauaaggaagga

SEQ ID NO: 81163 - RNA, 19 nt, Artificial Sequence
  Description of Artificial Sequence: Synthetic oligonucleotide
gaggguaaggaaagcgcgc

SEQ ID NO: 81164 - RNA, 19 nt, Artificial Sequence
  Description of Artificial Sequence: Synthetic oligonucleotide
aagucacgauuuucugggu

SEQ ID NO: 81165 - RNA, 19 nt, Artificial Sequence
  Description of Artificial Sequence: Synthetic oligonucleotide
ucugggugucuacuguuua

SEQ ID NO: 81166 - RNA, 19 nt, Artificial Sequence
  Description of Artificial Sequence: Synthetic oligonucleotide
uucaugccgagguggccag

SEQ ID NO: 81167 - RNA, 19 nt, Artificial Sequence
  Description of Artificial Sequence: Synthetic oligonucleotide
ccuaugaauaaggaaggag

SEQ ID NO: 81168 - RNA, 19 nt, Artificial Sequence
  Description of Artificial Sequence: Synthetic oligonucleotide
uggugucgucccgagaugc

SEQ ID NO: 81169 - RNA, 19 nt, Artificial Sequence
  Description of Artificial Sequence: Synthetic oligonucleotide
gcacuucucgaucagcuug

SEQ ID NO: 81170 - RNA, 19 nt, Artificial Sequence
  Description of Artificial Sequence: Synthetic oligonucleotide
ucacugacgccaggcaucc

SEQ ID NO: 81171 - RNA, 19 nt, Artificial Sequence
  Description of Artificial Sequence: Synthetic oligonucleotide
ucgugcacacgaguuguag

SEQ ID NO: 81172 - RNA, 19 nt, Artificial Sequence
  Description of Artificial Sequence: Synthetic oligonucleotide
gaagagugugggcggacuc

SEQ ID NO: 81173 - RNA, 19 nt, Artificial Sequence
  Description of Artificial Sequence: Synthetic oligonucleotide
gucaauagcugguaggaau

SEQ ID NO: 81174 - RNA, 19 nt, Artificial Sequence
  Description of Artificial Sequence: Synthetic oligonucleotide
uucagucgacuguaauagu

SEQ ID NO: 81175 - RNA, 19 nt, Artificial Sequence
  Description of Artificial Sequence: Synthetic oligonucleotide
ugacuuggcagguggccac

SEQ ID NO: 81176 - RNA, 19 nt, Artificial Sequence
  Description of Artificial Sequence: Synthetic oligonucleotide
gggagugccgaaaacuggg

SEQ ID NO: 81177 - RNA, 19 nt, Artificial Sequence
  Description of Artificial Sequence: Synthetic oligonucleotide
ugagagacgccaugcgcuc

SEQ ID NO: 81178 - RNA, 19 nt, Artificial Sequence
  Description of Artificial Sequence: Synthetic oligonucleotide
cugggugucuacuguuuac

SEQ ID NO: 81179 - RNA, 19 nt, Artificial Sequence
  Description of Artificial Sequence: Synthetic oligonucleotide
accuaaagaaacgcagcga

SEQ ID NO: 81180 - RNA, 19 nt, Artificial Sequence
  Description of Artificial Sequence: Synthetic oligonucleotide
cuacugggaaaucaaggaa

SEQ ID NO: 81181 - RNA, 19 nt, Artificial Sequence
  Description of Artificial Sequence: Synthetic oligonucleotide
caguaucaccauacuggag

SEQ ID NO: 81182 - RNA, 19 nt, Artificial Sequence
  Description of Artificial Sequence: Synthetic oligonucleotide
acggaggacaugaacucag

SEQ ID NO: 81183 - RNA, 19 nt, Artificial Sequence
  Description of Artificial Sequence: Synthetic oligonucleotide
uuucuaggggucaguccaa

SEQ ID NO: 81184 - RNA, 19 nt, Artificial Sequence
  Description of Artificial Sequence: Synthetic oligonucleotide
uugcacgugcuguguacug

SEQ ID NO: 81185 - RNA, 19 nt, Artificial Sequence
  Description of Artificial Sequence: Synthetic oligonucleotide
cacuaaggcggccuucaug

SEQ ID NO: 81186 - RNA, 19 nt, Artificial Sequence
  Description of Artificial Sequence: Synthetic oligonucleotide
aaacuccuaugccgccucu

SEQ ID NO: 81187 - RNA, 19 nt, Artificial Sequence
  Description of Artificial Sequence: Synthetic oligonucleotide
gcuugaaacuagaaacgcc

SEQ ID NO: 81188 - RNA, 19 nt, Artificial Sequence
  Description of Artificial Sequence: Synthetic oligonucleotide
ggaaagcgcgccaagugag

SEQ ID NO: 81189 - RNA, 19 nt, Artificial Sequence
  Description of Artificial Sequence: Synthetic oligonucleotide
cugacaggucucuaaaugu

SEQ ID NO: 81190 - RNA, 19 nt, Artificial Sequence
  Description of Artificial Sequence: Synthetic oligonucleotide
agcgaucacaauguccgcu

SEQ ID NO: 81191 - RNA, 19 nt, Artificial Sequence
  Description of Artificial Sequence: Synthetic oligonucleotide
acgucaacacucaacuccu

SEQ ID NO: 81192 - RNA, 19 nt, Artificial Sequence
  Description of Artificial Sequence: Synthetic oligonucleotide
caacuccuaugaauaagga

SEQ ID NO: 81193 - RNA, 19 nt, Artificial Sequence
  Description of Artificial Sequence: Synthetic oligonucleotide
uagaaacgcccaucuguuc

SEQ ID NO: 81194 - RNA, 19 nt, Artificial Sequence
  Description of Artificial Sequence: Synthetic oligonucleotide
ugccuuuagcagcucgcuc

SEQ ID NO: 81195 - RNA, 19 nt, Artificial Sequence
  Description of Artificial Sequence: Synthetic oligonucleotide
gagggucgcauguggccag

SEQ ID NO: 81196 - RNA, 19 nt, Artificial Sequence
  Description of Artificial Sequence: Synthetic oligonucleotide
gaggggauaaaggcuuaac

SEQ ID NO: 81197 - RNA, 19 nt, Artificial Sequence
  Description of Artificial Sequence: Synthetic oligonucleotide
auaggucucgggaaauccu

SEQ ID NO: 81198 - RNA, 19 nt, Artificial Sequence
  Description of Artificial Sequence: Synthetic oligonucleotide
caccagggaacacaacguc

SEQ ID NO: 81199 - RNA, 19 nt, Artificial Sequence
  Description of Artificial Sequence: Synthetic oligonucleotide
cucggggauagggagugcc

SEQ ID NO: 81200 - RNA, 19 nt, Artificial Sequence
  Description of Artificial Sequence: Synthetic oligonucleotide
gagacggacgacacugaac

SEQ ID NO: 81201 - RNA, 19 nt, Artificial Sequence
  Description of Artificial Sequence: Synthetic oligonucleotide
ucgagccgccaucacacau

SEQ ID NO: 81202 - RNA, 19 nt, Artificial Sequence
  Description of Artificial Sequence: Synthetic oligonucleotide
cacgguuccagagcccgcg

SEQ ID NO: 81203 - RNA, 19 nt, Artificial Sequence
  Description of Artificial Sequence: Synthetic oligonucleotide
gucacgauuuucugggugu

SEQ ID NO: 81204 - RNA, 19 nt, Artificial Sequence
  Description of Artificial Sequence: Synthetic oligonucleotide
gguuccagagcccgcgugc

SEQ ID NO: 81205 - RNA, 19 nt, Artificial Sequence
  Description of Artificial Sequence: Synthetic oligonucleotide
caaaccucacgguuccaga

SEQ ID NO: 81206 - RNA, 19 nt, Artificial Sequence
  Description of Artificial Sequence: Synthetic oligonucleotide
gugccgaaaacuggguggc

SEQ ID NO: 81207 - RNA, 19 nt, Artificial Sequence
  Description of Artificial Sequence: Synthetic oligonucleotide
aggaaacgguuagcaaauc

SEQ ID NO: 81208 - RNA, 19 nt, Artificial Sequence
  Description of Artificial Sequence: Synthetic oligonucleotide
gucgucccgagaugcugcg

SEQ ID NO: 81209 - RNA, 19 nt, Artificial Sequence
  Description of Artificial Sequence: Synthetic oligonucleotide
uccgcucgcuccacugcag

SEQ ID NO: 81210 - RNA, 19 nt, Artificial Sequence
  Description of Artificial Sequence: Synthetic oligonucleotide
uggugcggagugacguuga

SEQ ID NO: 81211 - RNA, 19 nt, Artificial Sequence
  Description of Artificial Sequence: Synthetic oligonucleotide
gugugggcggacucuagca

SEQ ID NO: 81212 - RNA, 19 nt, Artificial Sequence
  Description of Artificial Sequence: Synthetic oligonucleotide
ucugucgagccgccaucac

SEQ ID NO: 81213 - RNA, 19 nt, Artificial Sequence
  Description of Artificial Sequence: Synthetic oligonucleotide
agagcccgcgugccucagc

SEQ ID NO: 81214 - RNA, 19 nt, Artificial Sequence
  Description of Artificial Sequence: Synthetic oligonucleotide
cuucaugccgagguggcca

SEQ ID NO: 81215 - RNA, 19 nt, Artificial Sequence
  Description of Artificial Sequence: Synthetic oligonucleotide
ggaggcuugcucaaacaug

SEQ ID NO: 81216 - RNA, 19 nt, Artificial Sequence
  Description of Artificial Sequence: Synthetic oligonucleotide
aggucuguucgugcacacg

SEQ ID NO: 81217 - RNA, 19 nt, Artificial Sequence
  Description of Artificial Sequence: Synthetic oligonucleotide
acacuauuaugcagaugug

SEQ ID NO: 81218 - RNA, 19 nt, Artificial Sequence
  Description of Artificial Sequence: Synthetic oligonucleotide
uggguacucgagaggggau

SEQ ID NO: 81219 - RNA, 19 nt, Artificial Sequence
  Description of Artificial Sequence: Synthetic oligonucleotide
ugccgaaaacuggguggcg

SEQ ID NO: 81220 - RNA, 19 nt, Artificial Sequence
  Description of Artificial Sequence: Synthetic oligonucleotide
gcacaugcgagggacagac

SEQ ID NO: 81221 - RNA, 19 nt, Artificial Sequence
  Description of Artificial Sequence: Synthetic oligonucleotide
acgcagcgaucacaauguc

SEQ ID NO: 81222 - RNA, 19 nt, Artificial Sequence
  Description of Artificial Sequence: Synthetic oligonucleotide
aguuccucauguggaguca

SEQ ID NO: 81223 - RNA, 19 nt, Artificial Sequence
  Description of Artificial Sequence: Synthetic oligonucleotide
aaccuagucccaagcuccu

SEQ ID NO: 81224 - RNA, 19 nt, Artificial Sequence
  Description of Artificial Sequence: Synthetic oligonucleotide
cuagaaacgcccaucuguu

SEQ ID NO: 81225 - RNA, 19 nt, Artificial Sequence
  Description of Artificial Sequence: Synthetic oligonucleotide
agauucccuacaauguauu

SEQ ID NO: 81226 - RNA, 19 nt, Artificial Sequence
  Description of Artificial Sequence: Synthetic oligonucleotide
cacuauuaugcagaugugu

SEQ ID NO: 81227 - RNA, 19 nt, Artificial Sequence
  Description of Artificial Sequence: Synthetic oligonucleotide
ugccagcaucguaacugcu

SEQ ID NO: 81228 - RNA, 19 nt, Artificial Sequence
  Description of Artificial Sequence: Synthetic oligonucleotide
augccuuuagcagcucgcu

SEQ ID NO: 81229 - RNA, 19 nt, Artificial Sequence
  Description of Artificial Sequence: Synthetic oligonucleotide
gguaaacaugcgcuuucca

SEQ ID NO: 81230 - RNA, 19 nt, Artificial Sequence
  Description of Artificial Sequence: Synthetic oligonucleotide
ggaaacgguuagcaaaucu

SEQ ID NO: 81231 - RNA, 19 nt, Artificial Sequence
  Description of Artificial Sequence: Synthetic oligonucleotide
ucguaacugcuuucaugua

SEQ ID NO: 81232 - RNA, 19 nt, Artificial Sequence
  Description of Artificial Sequence: Synthetic oligonucleotide
gcuuaacugaacggcagac

SEQ ID NO: 81233 - RNA, 19 nt, Artificial Sequence
  Description of Artificial Sequence: Synthetic oligonucleotide
aaacgcccaucuguucccu

SEQ ID NO: 81234 - RNA, 19 nt, Artificial Sequence
  Description of Artificial Sequence: Synthetic oligonucleotide
ccaccaaggggugaacugg

SEQ ID NO: 81235 - RNA, 19 nt, Artificial Sequence
  Description of Artificial Sequence: Synthetic oligonucleotide
guguuaucucauggcaaac

SEQ ID NO: 81236 - RNA, 19 nt, Artificial Sequence
  Description of Artificial Sequence: Synthetic oligonucleotide
gcaaaccucacgguuccag

SEQ ID NO: 81237 - RNA, 19 nt, Artificial Sequence
  Description of Artificial Sequence: Synthetic oligonucleotide
acccaagacacaccacguu

SEQ ID NO: 81238 - RNA, 19 nt, Artificial Sequence
  Description of Artificial Sequence: Synthetic oligonucleotide
acuuagcucugagaccuaa

SEQ ID NO: 81239 - RNA, 19 nt, Artificial Sequence
  Description of Artificial Sequence: Synthetic oligonucleotide
guggugcggagugacguug

SEQ ID NO: 81240 - RNA, 19 nt, Artificial Sequence
  Description of Artificial Sequence: Synthetic oligonucleotide
cuccuaugccgccucucug

SEQ ID NO: 81241 - RNA, 19 nt, Artificial Sequence
  Description of Artificial Sequence: Synthetic oligonucleotide
acacuuccggacagauuuc

SEQ ID NO: 81242 - RNA, 19 nt, Artificial Sequence
  Description of Artificial Sequence: Synthetic oligonucleotide
acgcacacugacaggucuc

SEQ ID NO: 81243 - RNA, 19 nt, Artificial Sequence
  Description of Artificial Sequence: Synthetic oligonucleotide
augcaugguucagggagca

SEQ ID NO: 81244 - RNA, 19 nt, Artificial Sequence
  Description of Artificial Sequence: Synthetic oligonucleotide
guggugucgucccgagaug

SEQ ID NO: 81245 - RNA, 19 nt, Artificial Sequence
  Description of Artificial Sequence: Synthetic oligonucleotide
gggccuccgaacaaacuag

SEQ ID NO: 81246 - RNA, 19 nt, Artificial Sequence
  Description of Artificial Sequence: Synthetic oligonucleotide
ugcuuucauguaguguguu

SEQ ID NO: 81247 - RNA, 19 nt, Artificial Sequence
  Description of Artificial Sequence: Synthetic oligonucleotide
cugucgagccgccaucaca

SEQ ID NO: 81248 - RNA, 19 nt, Artificial Sequence
  Description of Artificial Sequence: Synthetic oligonucleotide
caccgugcaugugugggug

SEQ ID NO: 81249 - RNA, 19 nt, Artificial Sequence
  Description of Artificial Sequence: Synthetic oligonucleotide
ucagugcguugagaguggu

SEQ ID NO: 81250 - RNA, 19 nt, Artificial Sequence
  Description of Artificial Sequence: Synthetic oligonucleotide
gcgcgcacagugaagagug

SEQ ID NO: 81251 - RNA, 19 nt, Artificial Sequence
  Description of Artificial Sequence: Synthetic oligonucleotide
gcgaucacaauguccgcuc

SEQ ID NO: 81252 - RNA, 19 nt, Artificial Sequence
  Description of Artificial Sequence: Synthetic oligonucleotide
ccggacagauuucaaguuc

SEQ ID NO: 81253 - RNA, 19 nt, Artificial Sequence
  Description of Artificial Sequence: Synthetic oligonucleotide
ugcacaugcgagggacaga

SEQ ID NO: 81254 - RNA, 19 nt, Artificial Sequence
  Description of Artificial Sequence: Synthetic oligonucleotide
cugaacggcagacucaguu

SEQ ID NO: 81255 - RNA, 19 nt, Artificial Sequence
  Description of Artificial Sequence: Synthetic oligonucleotide
agucgucuguggaaggaaa

SEQ ID NO: 81256 - RNA, 19 nt, Artificial Sequence
  Description of Artificial Sequence: Synthetic oligonucleotide
cagaccaucuggaaagcau

SEQ ID NO: 81257 - RNA, 19 nt, Artificial Sequence
  Description of Artificial Sequence: Synthetic oligonucleotide
cagugcguugagaguggug

SEQ ID NO: 81258 - RNA, 19 nt, Artificial Sequence
  Description of Artificial Sequence: Synthetic oligonucleotide
gccgaaaacuggguggcgc

SEQ ID NO: 81259 - RNA, 19 nt, Artificial Sequence
  Description of Artificial Sequence: Synthetic oligonucleotide
cgcagcgaucacaaugucc

SEQ ID NO: 81260 - RNA, 19 nt, Artificial Sequence
  Description of Artificial Sequence: Synthetic oligonucleotide
cuuccugacuuggcaggug

SEQ ID NO: 81261 - RNA, 19 nt, Artificial Sequence
  Description of Artificial Sequence: Synthetic oligonucleotide
gguaaggaaagcgcgccaa

SEQ ID NO: 81262 - RNA, 19 nt, Artificial Sequence
  Description of Artificial Sequence: Synthetic oligonucleotide
cugacgccaggcauccaga

SEQ ID NO: 81263 - RNA, 19 nt, Artificial Sequence
  Description of Artificial Sequence: Synthetic oligonucleotide
accgugcaugugugggugu

SEQ ID NO: 81264 - RNA, 19 nt, Artificial Sequence
  Description of Artificial Sequence: Synthetic oligonucleotide
cgauauuccucuuugcucu

SEQ ID NO: 81265 - RNA, 19 nt, Artificial Sequence
  Description of Artificial Sequence: Synthetic oligonucleotide
cucaacaaacgaacacuau

SEQ ID NO: 81266 - RNA, 19 nt, Artificial Sequence
  Description of Artificial Sequence: Synthetic oligonucleotide
gacggacgacacugaacaa

SEQ ID NO: 81267 - RNA, 19 nt, Artificial Sequence
  Description of Artificial Sequence: Synthetic oligonucleotide
ggugacacgcacacugaca

SEQ ID NO: 81268 - RNA, 19 nt, Artificial Sequence
  Description of Artificial Sequence: Synthetic oligonucleotide
cacggaggagggcucccug

SEQ ID NO: 81269 - RNA, 19 nt, Artificial Sequence
  Description of Artificial Sequence: Synthetic oligonucleotide
guacugcaucaguucuuga

SEQ ID NO: 81270 - RNA, 19 nt, Artificial Sequence
  Description of Artificial Sequence: Synthetic oligonucleotide
cucggcugacugggcaugc

SEQ ID NO: 81271 - RNA, 19 nt, Artificial Sequence
  Description of Artificial Sequence: Synthetic oligonucleotide
cacgcacacugacaggucu

SEQ ID NO: 81272 - RNA, 19 nt, Artificial Sequence
  Description of Artificial Sequence: Synthetic oligonucleotide
gagagacgccaugcgcuca

SEQ ID NO: 81273 - RNA, 19 nt, Artificial Sequence
  Description of Artificial Sequence: Synthetic oligonucleotide
ggagggucgcauguggcca

SEQ ID NO: 81274 - RNA, 19 nt, Artificial Sequence
  Description of Artificial Sequence: Synthetic oligonucleotide
gccuccgaacaaacuagcc

SEQ ID NO: 81275 - RNA, 19 nt, Artificial Sequence
  Description of Artificial Sequence: Synthetic oligonucleotide
ggcggacucuagcaccuac

SEQ ID NO: 81276 - RNA, 19 nt, Artificial Sequence
  Description of Artificial Sequence: Synthetic oligonucleotide
gaagccaagcagcgggcuu

SEQ ID NO: 81277 - RNA, 19 nt, Artificial Sequence
  Description of Artificial Sequence: Synthetic oligonucleotide
ggagacggacgacacugaa

SEQ ID NO: 81278 - RNA, 19 nt, Artificial Sequence
  Description of Artificial Sequence: Synthetic oligonucleotide
cucugucgagccgccauca

SEQ ID NO: 81279 - RNA, 19 nt, Artificial Sequence
  Description of Artificial Sequence: Synthetic oligonucleotide
cggacgacacugaacaaga

SEQ ID NO: 81280 - RNA, 19 nt, Artificial Sequence
  Description of Artificial Sequence: Synthetic oligonucleotide
gguacucgagaggggauaa

SEQ ID NO: 81281 - RNA, 19 nt, Artificial Sequence
  Description of Artificial Sequence: Synthetic oligonucleotide
gaaacgcagcgaucacaau

SEQ ID NO: 81282 - RNA, 19 nt, Artificial Sequence
  Description of Artificial Sequence: Synthetic oligonucleotide
cgugccucagcgucugcgc

SEQ ID NO: 81283 - RNA, 19 nt, Artificial Sequence
  Description of Artificial Sequence: Synthetic oligonucleotide
cgagccgccaucacacaug

SEQ ID NO: 81284 - RNA, 19 nt, Artificial Sequence
  Description of Artificial Sequence: Synthetic oligonucleotide
cuugcacgugcuguguacu

SEQ ID NO: 81285 - RNA, 19 nt, Artificial Sequence
  Description of Artificial Sequence: Synthetic oligonucleotide
caugccgagguggccagaa

SEQ ID NO: 81286 - RNA, 19 nt, Artificial Sequence
  Description of Artificial Sequence: Synthetic oligonucleotide
cgagaugcugcgacaccag

SEQ ID NO: 81287 - RNA, 19 nt, Artificial Sequence
  Description of Artificial Sequence: Synthetic oligonucleotide
ggccaccgugcaugugugg

SEQ ID NO: 81288 - RNA, 19 nt, Artificial Sequence
  Description of Artificial Sequence: Synthetic oligonucleotide
caaauaggucucgggaaau

SEQ ID NO: 81289 - RNA, 19 nt, Artificial Sequence
  Description of Artificial Sequence: Synthetic oligonucleotide
cgucccgagaugcugcgac

SEQ ID NO: 81290 - RNA, 19 nt, Artificial Sequence
  Description of Artificial Sequence: Synthetic oligonucleotide
ucgucccgagaugcugcga

SEQ ID NO: 81291 - RNA, 19 nt, Artificial Sequence
  Description of Artificial Sequence: Synthetic oligonucleotide
gucgagccgccaucacaca

SEQ ID NO: 81292 - RNA, 19 nt, Artificial Sequence
  Description of Artificial Sequence: Synthetic oligonucleotide
ucaugccgagguggccaga

SEQ ID NO: 81293 - RNA, 19 nt, Artificial Sequence
  Description of Artificial Sequence: Synthetic oligonucleotide
gcccgcgugccucagcguc

SEQ ID NO: 81294 - RNA, 19 nt, Artificial Sequence
  Description of Artificial Sequence: Synthetic oligonucleotide
acugaacggcagacucagu

SEQ ID NO: 81295 - RNA, 19 nt, Artificial Sequence
  Description of Artificial Sequence: Synthetic oligonucleotide
guaguguguucagugcguu

SEQ ID NO: 81296 - RNA, 19 nt, Artificial Sequence
  Description of Artificial Sequence: Synthetic oligonucleotide
guacucgagaggggauaaa

SEQ ID NO: 81297 - RNA, 19 nt, Artificial Sequence
  Description of Artificial Sequence: Synthetic oligonucleotide
ccucugucgagccgccauc

SEQ ID NO: 81298 - RNA, 19 nt, Artificial Sequence
  Description of Artificial Sequence: Synthetic oligonucleotide
gcucggcugacugggcaug

SEQ ID NO: 81299 - RNA, 19 nt, Artificial Sequence
  Description of Artificial Sequence: Synthetic oligonucleotide
ggguacucgagaggggaua

SEQ ID NO: 81300 - RNA, 19 nt, Artificial Sequence
  Description of Artificial Sequence: Synthetic oligonucleotide
ggguccaccaaggggugaa

SEQ ID NO: 81301 - RNA, 19 nt, Artificial Sequence
  Description of Artificial Sequence: Synthetic oligonucleotide
cacuuagcucugagaccua

SEQ ID NO: 81302 - RNA, 19 nt, Artificial Sequence
  Description of Artificial Sequence: Synthetic oligonucleotide
ccagcaucguaacugcuuu

SEQ ID NO: 81303 - RNA, 19 nt, Artificial Sequence
  Description of Artificial Sequence: Synthetic oligonucleotide
gcaucguaacugcuuucau

SEQ ID NO: 81304 - RNA, 19 nt, Artificial Sequence
  Description of Artificial Sequence: Synthetic oligonucleotide
ccaggcauccagacgaguu

SEQ ID NO: 81305 - RNA, 19 nt, Artificial Sequence
  Description of Artificial Sequence: Synthetic oligonucleotide
ccaagacugcagguaagcu

SEQ ID NO: 81306 - RNA, 19 nt, Artificial Sequence
  Description of Artificial Sequence: Synthetic oligonucleotide
gcggagugacguugaacau

SEQ ID NO: 81307 - RNA, 19 nt, Artificial Sequence
  Description of Artificial Sequence: Synthetic oligonucleotide
ggugucgucccgagaugcu

SEQ ID NO: 81308 - RNA, 19 nt, Artificial Sequence
  Description of Artificial Sequence: Synthetic oligonucleotide
gcggacucuagcaccuacu

SEQ ID NO: 81309 - RNA, 19 nt, Artificial Sequence
  Description of Artificial Sequence: Synthetic oligonucleotide
cggggauagggagugccga

SEQ ID NO: 81310 - RNA, 19 nt, Artificial Sequence
  Description of Artificial Sequence: Synthetic oligonucleotide
cgucugcgcgcacagugaa

SEQ ID NO: 81311 - RNA, 19 nt, Artificial Sequence
  Description of Artificial Sequence: Synthetic oligonucleotide
cacugacgccaggcaucca

SEQ ID NO: 81312 - RNA, 19 nt, Artificial Sequence
  Description of Artificial Sequence: Synthetic oligonucleotide
gcgcgccaagugaggacca

SEQ ID NO: 81313 - RNA, 19 nt, Artificial Sequence
  Description of Artificial Sequence: Synthetic oligonucleotide
cgccaugcgcucagcucga

SEQ ID NO: 81314 - RNA, 19 nt, Artificial Sequence
  Description of Artificial Sequence: Synthetic oligonucleotide
cccgcgugccucagcgucu

SEQ ID NO: 81315 - RNA, 19 nt, Artificial Sequence
  Description of Artificial Sequence: Synthetic oligonucleotide
ccucagcgucugcgcgcac

SEQ ID NO: 81316 - RNA, 19 nt, Artificial Sequence
  Description of Artificial Sequence: Synthetic oligonucleotide
gccaagcagcgggcuucaa

SEQ ID NO: 81317 - RNA, 19 nt, Artificial Sequence
  Description of Artificial Sequence: Synthetic oligonucleotide
aaaauguuaaccuggcugc

SEQ ID NO: 81318 - RNA, 19 nt, Artificial Sequence
  Description of Artificial Sequence: Synthetic oligonucleotide
uuuuauucagccuauacgg

SEQ ID NO: 81319 - RNA, 19 nt, Artificial Sequence
  Description of Artificial Sequence: Synthetic oligonucleotide
uguauucagaacuugaucg

SEQ ID NO: 81320 - RNA, 19 nt, Artificial Sequence
  Description of Artificial Sequence: Synthetic oligonucleotide
acucaguaaacuuagauac

SEQ ID NO: 81321 - RNA, 19 nt, Artificial Sequence
  Description of Artificial Sequence: Synthetic oligonucleotide
aaguauaucuaacauccgc

SEQ ID NO: 81322 - RNA, 19 nt, Artificial Sequence
  Description of Artificial Sequence: Synthetic oligonucleotide
aauauaacaacagugucag

SEQ ID NO: 81323 - RNA, 19 nt, Artificial Sequence
  Description of Artificial Sequence: Synthetic oligonucleotide
uuaauuuuccgcuacuacg

SEQ ID NO: 81324 - RNA, 19 nt, Artificial Sequence
  Description of Artificial Sequence: Synthetic oligonucleotide
uacgauguaaacaaggagc

SEQ ID NO: 81325 - RNA, 19 nt, Artificial Sequence
  Description of Artificial Sequence: Synthetic oligonucleotide
uuuaaauggagucagucga

SEQ ID NO: 81326 - RNA, 19 nt, Artificial Sequence
  Description of Artificial Sequence: Synthetic oligonucleotide
ucuuaaggauugcagaucg

SEQ ID NO: 81327 - RNA, 19 nt, Artificial Sequence
  Description of Artificial Sequence: Synthetic oligonucleotide
aaaugugucugacagaagu

SEQ ID NO: 81328 - RNA, 19 nt, Artificial Sequence
  Description of Artificial Sequence: Synthetic oligonucleotide
cagaacuugagccagaucc

SEQ ID NO: 81329 - RNA, 19 nt, Artificial Sequence
  Description of Artificial Sequence: Synthetic oligonucleotide
ucuaguauguuccaguugu

SEQ ID NO: 81330 - RNA, 19 nt, Artificial Sequence
  Description of Artificial Sequence: Synthetic oligonucleotide
ucauguaaggcaauuacug

SEQ ID NO: 81331 - RNA, 19 nt, Artificial Sequence
  Description of Artificial Sequence: Synthetic oligonucleotide
aauauucaagcuugugacg

SEQ ID NO: 81332 - RNA, 19 nt, Artificial Sequence
  Description of Artificial Sequence: Synthetic oligonucleotide
uauaacaacagugucagca

SEQ ID NO: 81333 - RNA, 19 nt, Artificial Sequence
  Description of Artificial Sequence: Synthetic oligonucleotide
gacuaaaagaaagaagugg

SEQ ID NO: 81334 - RNA, 19 nt, Artificial Sequence
  Description of Artificial Sequence: Synthetic oligonucleotide
uuauggauccaucuaaucu

SEQ ID NO: 81335 - RNA, 19 nt, Artificial Sequence
  Description of Artificial Sequence: Synthetic oligonucleotide
uaaauuaucagcuucuguu

SEQ ID NO: 81336 - RNA, 19 nt, Artificial Sequence
  Description of Artificial Sequence: Synthetic oligonucleotide
uuuuaaaccaaaugugucu

SEQ ID NO: 81337 - RNA, 19 nt, Artificial Sequence
  Description of Artificial Sequence: Synthetic oligonucleotide
uuaauuagcgugcuuauau

SEQ ID NO: 81338 - RNA, 19 nt, Artificial Sequence
  Description of Artificial Sequence: Synthetic oligonucleotide
agucauguaaggcaauuac

SEQ ID NO: 81339 - RNA, 19 nt, Artificial Sequence
  Description of Artificial Sequence: Synthetic oligonucleotide
uccugaaacaugaucacag

SEQ ID NO: 81340 - RNA, 19 nt, Artificial Sequence
  Description of Artificial Sequence: Synthetic oligonucleotide
ucaacugaguguucaaacg

SEQ ID NO: 81341 - RNA, 19 nt, Artificial Sequence
  Description of Artificial Sequence: Synthetic oligonucleotide
uguacaaucagugugcacu

SEQ ID NO: 81342 - RNA, 19 nt, Artificial Sequence
  Description of Artificial Sequence: Synthetic oligonucleotide
uuuauucagccuauacggg

SEQ ID NO: 81343 - RNA, 19 nt, Artificial Sequence
  Description of Artificial Sequence: Synthetic oligonucleotide
gauuaaguguuguaaggcc

SEQ ID NO: 81344 - RNA, 19 nt, Artificial Sequence
  Description of Artificial Sequence: Synthetic oligonucleotide
auaaggagaccucugaucu

SEQ ID NO: 81345 - RNA, 19 nt, Artificial Sequence
  Description of Artificial Sequence: Synthetic oligonucleotide
uugacgauacuucaaauau

SEQ ID NO: 81346 - RNA, 19 nt, Artificial Sequence
  Description of Artificial Sequence: Synthetic oligonucleotide
ucuuaggcgaauuaacagc

SEQ ID NO: 81347 - RNA, 19 nt, Artificial Sequence
  Description of Artificial Sequence: Synthetic oligonucleotide
auuagcaguacagugcagc

SEQ ID NO: 81348 - RNA, 19 nt, Artificial Sequence
  Description of Artificial Sequence: Synthetic oligonucleotide
caggauuuaaauauucaag

SEQ ID NO: 81349 - RNA, 19 nt, Artificial Sequence
  Description of Artificial Sequence: Synthetic oligonucleotide
ugaucuaaaggugagcgag

SEQ ID NO: 81350 - RNA, 19 nt, Artificial Sequence
  Description of Artificial Sequence: Synthetic oligonucleotide
ugaguguucaaacggagac

SEQ ID NO: 81351 - RNA, 19 nt, Artificial Sequence
  Description of Artificial Sequence: Synthetic oligonucleotide
aaagaaaccgauaaucccu

SEQ ID NO: 81352 - RNA, 19 nt, Artificial Sequence
  Description of Artificial Sequence: Synthetic oligonucleotide
uguacgauguaaacaagga

SEQ ID NO: 81353 - RNA, 19 nt, Artificial Sequence
  Description of Artificial Sequence: Synthetic oligonucleotide
agggauaaaacauguaucu

SEQ ID NO: 81354 - RNA, 19 nt, Artificial Sequence
  Description of Artificial Sequence: Synthetic oligonucleotide
gaugguccgagugagaccg

SEQ ID NO: 81355 - RNA, 19 nt, Artificial Sequence
  Description of Artificial Sequence: Synthetic oligonucleotide
auauucaagcuugugacgg

SEQ ID NO: 81356 - RNA, 19 nt, Artificial Sequence
  Description of Artificial Sequence: Synthetic oligonucleotide
gagaccucugaucuaaagg

SEQ ID NO: 81357 - RNA, 19 nt, Artificial Sequence
  Description of Artificial Sequence: Synthetic oligonucleotide
uuacaauaacuuuuggcca

SEQ ID NO: 81358 - RNA, 19 nt, Artificial Sequence
  Description of Artificial Sequence: Synthetic oligonucleotide
ucugcaaguauaucuaaca

SEQ ID NO: 81359 - RNA, 19 nt, Artificial Sequence
  Description of Artificial Sequence: Synthetic oligonucleotide
cuuaauuugcucaggguug

SEQ ID NO: 81360 - RNA, 19 nt, Artificial Sequence
  Description of Artificial Sequence: Synthetic oligonucleotide
aauuagcgugcuuauauaa

SEQ ID NO: 81361 - RNA, 19 nt, Artificial Sequence
  Description of Artificial Sequence: Synthetic oligonucleotide
uguuagaugaagccgcgug

SEQ ID NO: 81362 - RNA, 19 nt, Artificial Sequence
  Description of Artificial Sequence: Synthetic oligonucleotide
ugggauaauagaccuugcg

SEQ ID NO: 81363 - RNA, 19 nt, Artificial Sequence
  Description of Artificial Sequence: Synthetic oligonucleotide
ucaaacggagaccuggagc

SEQ ID NO: 81364 - RNA, 19 nt, Artificial Sequence
  Description of Artificial Sequence: Synthetic oligonucleotide
cuagguuaaugccuaaacc

SEQ ID NO: 81365 - RNA, 19 nt, Artificial Sequence
  Description of Artificial Sequence: Synthetic oligonucleotide
gaagaauuaauuuuccgcu

SEQ ID NO: 81366 - RNA, 19 nt, Artificial Sequence
  Description of Artificial Sequence: Synthetic oligonucleotide
auugagucacuaucagagc

SEQ ID NO: 81367 - RNA, 19 nt, Artificial Sequence
  Description of Artificial Sequence: Synthetic oligonucleotide
uauucagccuauacgggag

SEQ ID NO: 81368 - RNA, 19 nt, Artificial Sequence
  Description of Artificial Sequence: Synthetic oligonucleotide
aaaaugaucuagugcuugu

SEQ ID NO: 81369 - RNA, 19 nt, Artificial Sequence
  Description of Artificial Sequence: Synthetic oligonucleotide
gaagaguagggucuuuucc

SEQ ID NO: 81370 - RNA, 19 nt, Artificial Sequence
  Description of Artificial Sequence: Synthetic oligonucleotide
agaccucugaucuaaaggu

SEQ ID NO: 81371 - RNA, 19 nt, Artificial Sequence
  Description of Artificial Sequence: Synthetic oligonucleotide
ucuuucaccgccuaauuuc

SEQ ID NO: 81372 - RNA, 19 nt, Artificial Sequence
  Description of Artificial Sequence: Synthetic oligonucleotide
ucucuuaggcgaauuaaca

SEQ ID NO: 81373 - RNA, 19 nt, Artificial Sequence
  Description of Artificial Sequence: Synthetic oligonucleotide
auagugaucccacucacga

SEQ ID NO: 81374 - RNA, 19 nt, Artificial Sequence
  Description of Artificial Sequence: Synthetic oligonucleotide
uuuaugauguguguauuca

SEQ ID NO: 81375 - RNA, 19 nt, Artificial Sequence
  Description of Artificial Sequence: Synthetic oligonucleotide
uuaaccuggcugcauagca

SEQ ID NO: 81376 - RNA, 19 nt, Artificial Sequence
  Description of Artificial Sequence: Synthetic oligonucleotide
aauaaauuaucagcuucug

SEQ ID NO: 81377 - RNA, 19 nt, Artificial Sequence
  Description of Artificial Sequence: Synthetic oligonucleotide
uuucgugaguuucagcucu

SEQ ID NO: 81378 - RNA, 19 nt, Artificial Sequence
  Description of Artificial Sequence: Synthetic oligonucleotide
uuauucagccuauacggga

SEQ ID NO: 81379 - RNA, 19 nt, Artificial Sequence
  Description of Artificial Sequence: Synthetic oligonucleotide
caacugaguguucaaacgg

SEQ ID NO: 81380 - RNA, 19 nt, Artificial Sequence
  Description of Artificial Sequence: Synthetic oligonucleotide
cauuuuguggauuccaauc

SEQ ID NO: 81381 - RNA, 19 nt, Artificial Sequence
  Description of Artificial Sequence: Synthetic oligonucleotide
cacuguuagaugaagccgc

SEQ ID NO: 81382 - RNA, 19 nt, Artificial Sequence
  Description of Artificial Sequence: Synthetic oligonucleotide
uccgguuccaauucaaugu

SEQ ID NO: 81383 - RNA, 19 nt, Artificial Sequence
  Description of Artificial Sequence: Synthetic oligonucleotide
uuaugauguguguauucag

SEQ ID NO: 81384 - RNA, 19 nt, Artificial Sequence
  Description of Artificial Sequence: Synthetic oligonucleotide
ucuuaucacaugaguagug

SEQ ID NO: 81385 - RNA, 19 nt, Artificial Sequence
  Description of Artificial Sequence: Synthetic oligonucleotide
ugucuaucagaagaauacg

SEQ ID NO: 81386 - RNA, 19 nt, Artificial Sequence
  Description of Artificial Sequence: Synthetic oligonucleotide
cauucuaaacaaugauucc

SEQ ID NO: 81387 - RNA, 19 nt, Artificial Sequence
  Description of Artificial Sequence: Synthetic oligonucleotide
uaugaucuauggcuaaaac

SEQ ID NO: 81388 - RNA, 19 nt, Artificial Sequence
  Description of Artificial Sequence: Synthetic oligonucleotide
ugaucuagugcuuguuucc

SEQ ID NO: 81389 - RNA, 19 nt, Artificial Sequence
  Description of Artificial Sequence: Synthetic oligonucleotide
aaaggggaauugacgauac

SEQ ID NO: 81390 - RNA, 19 nt, Artificial Sequence
  Description of Artificial Sequence: Synthetic oligonucleotide
uuggaaagugaacaaaguu

SEQ ID NO: 81391 - RNA, 19 nt, Artificial Sequence
  Description of Artificial Sequence: Synthetic oligonucleotide
aagguggucgcaguguacg

SEQ ID NO: 81392 - RNA, 19 nt, Artificial Sequence
  Description of Artificial Sequence: Synthetic oligonucleotide
uccaccuacccuuuuaaac

SEQ ID NO: 81393 - RNA, 19 nt, Artificial Sequence
  Description of Artificial Sequence: Synthetic oligonucleotide
cucuuaggcgaauuaacag

SEQ ID NO: 81394 - RNA, 19 nt, Artificial Sequence
  Description of Artificial Sequence: Synthetic oligonucleotide
uaggcgaauuaacagcuug

SEQ ID NO: 81395 - RNA, 19 nt, Artificial Sequence
  Description of Artificial Sequence: Synthetic oligonucleotide
aaaugaguacucgguugcc

SEQ ID NO: 81396 - RNA, 19 nt, Artificial Sequence
  Description of Artificial Sequence: Synthetic oligonucleotide
uucucuuaggcgaauuaac

SEQ ID NO: 81397 - RNA, 19 nt, Artificial Sequence
  Description of Artificial Sequence: Synthetic oligonucleotide
acauauuacccucaccagu

SEQ ID NO: 81398 - RNA, 19 nt, Artificial Sequence
  Description of Artificial Sequence: Synthetic oligonucleotide
aaugaucuagugcuuguuu

SEQ ID NO: 81399 - RNA, 19 nt, Artificial Sequence
  Description of Artificial Sequence: Synthetic oligonucleotide
uuauagugaucccacucac

SEQ ID NO: 81400 - RNA, 19 nt, Artificial Sequence
  Description of Artificial Sequence: Synthetic oligonucleotide
uuaagcucccuuccaaacu

SEQ ID NO: 81401 - RNA, 19 nt, Artificial Sequence
  Description of Artificial Sequence: Synthetic oligonucleotide
aauugacgauacuucaaau

SEQ ID NO: 81402 - RNA, 19 nt, Artificial Sequence
  Description of Artificial Sequence: Synthetic oligonucleotide
ugaccuaugcucucgacuc

SEQ ID NO: 81403 - RNA, 19 nt, Artificial Sequence
  Description of Artificial Sequence: Synthetic oligonucleotide
uggucauccaguuuucugu

SEQ ID NO: 81404 - RNA, 19 nt, Artificial Sequence
  Description of Artificial Sequence: Synthetic oligonucleotide
uccaaucuugauuaacacu

SEQ ID NO: 81405 - RNA, 19 nt, Artificial Sequence
  Description of Artificial Sequence: Synthetic oligonucleotide
auauccggauuucuuauca

SEQ ID NO: 81406 - RNA, 19 nt, Artificial Sequence
  Description of Artificial Sequence: Synthetic oligonucleotide
aggguuggaauacuccuuc

SEQ ID NO: 81407 - RNA, 19 nt, Artificial Sequence
  Description of Artificial Sequence: Synthetic oligonucleotide
aagaauuaauuuuccgcua

SEQ ID NO: 81408 - RNA, 19 nt, Artificial Sequence
  Description of Artificial Sequence: Synthetic oligonucleotide
ucccuuccaaacuugaccu

SEQ ID NO: 81409 - RNA, 19 nt, Artificial Sequence
  Description of Artificial Sequence: Synthetic oligonucleotide
guggcggucuuuaugaugg

SEQ ID NO: 81410 - RNA, 19 nt, Artificial Sequence
  Description of Artificial Sequence: Synthetic oligonucleotide
guacgauguaaacaaggag

SEQ ID NO: 81411 - RNA, 19 nt, Artificial Sequence
  Description of Artificial Sequence: Synthetic oligonucleotide
cuaaucgucuucuuugauc

SEQ ID NO: 81412 - RNA, 19 nt, Artificial Sequence
  Description of Artificial Sequence: Synthetic oligonucleotide
cacuguuuugcugagauuc

SEQ ID NO: 81413 - RNA, 19 nt, Artificial Sequence
  Description of Artificial Sequence: Synthetic oligonucleotide
ggauaauagaccuugcguc

SEQ ID NO: 81414 - RNA, 19 nt, Artificial Sequence
  Description of Artificial Sequence: Synthetic oligonucleotide
uuuuaauuagcgugcuuau

SEQ ID NO: 81415 - RNA, 19 nt, Artificial Sequence
  Description of Artificial Sequence: Synthetic oligonucleotide
uugaccuaugcucucgacu

SEQ ID NO: 81416 - RNA, 19 nt, Artificial Sequence
  Description of Artificial Sequence: Synthetic oligonucleotide
auugacgauacuucaaaua

SEQ ID NO: 81417 - RNA, 19 nt, Artificial Sequence
  Description of Artificial Sequence: Synthetic oligonucleotide
gaauugacgauacuucaaa

SEQ ID NO: 81418 - RNA, 19 nt, Artificial Sequence
  Description of Artificial Sequence: Synthetic oligonucleotide
auauugacuuccaaaagga

SEQ ID NO: 81419 - RNA, 19 nt, Artificial Sequence
  Description of Artificial Sequence: Synthetic oligonucleotide
cauaaggagaccucugauc

SEQ ID NO: 81420 - RNA, 19 nt, Artificial Sequence
  Description of Artificial Sequence: Synthetic oligonucleotide
guauaucuaacauccgcac

SEQ ID NO: 81421 - RNA, 19 nt, Artificial Sequence
  Description of Artificial Sequence: Synthetic oligonucleotide
uuagcaguacagugcagca

SEQ ID NO: 81422 - RNA, 19 nt, Artificial Sequence
  Description of Artificial Sequence: Synthetic oligonucleotide
uuccgguuccaauucaaug

SEQ ID NO: 81423 - RNA, 19 nt, Artificial Sequence
  Description of Artificial Sequence: Synthetic oligonucleotide
uaaucuuugaaaggggaau

SEQ ID NO: 81424 - RNA, 19 nt, Artificial Sequence
  Description of Artificial Sequence: Synthetic oligonucleotide
uaacaauacugcuacugau

SEQ ID NO: 81425 - RNA, 19 nt, Artificial Sequence
  Description of Artificial Sequence: Synthetic oligonucleotide
uucugcaaguauaucuaac

SEQ ID NO: 81426 - RNA, 19 nt, Artificial Sequence
  Description of Artificial Sequence: Synthetic oligonucleotide
uuuaccggcuacuccaggu

SEQ ID NO: 81427 - RNA, 19 nt, Artificial Sequence
  Description of Artificial Sequence: Synthetic oligonucleotide
aucuaaaggugagcgaggg

SEQ ID NO: 81428 - RNA, 19 nt, Artificial Sequence
  Description of Artificial Sequence: Synthetic oligonucleotide
uucaaacggagaccuggag

SEQ ID NO: 81429 - RNA, 19 nt, Artificial Sequence
  Description of Artificial Sequence: Synthetic oligonucleotide
gaccuugcguccuggaaag

SEQ ID NO: 81430 - RNA, 19 nt, Artificial Sequence
  Description of Artificial Sequence: Synthetic oligonucleotide
aagaaaccgauaaucccug

SEQ ID NO: 81431 - RNA, 19 nt, Artificial Sequence
  Description of Artificial Sequence: Synthetic oligonucleotide
caaguauaucuaacauccg

SEQ ID NO: 81432 - RNA, 19 nt, Artificial Sequence
  Description of Artificial Sequence: Synthetic oligonucleotide
caguguacgauguaaacaa

SEQ ID NO: 81433 - RNA, 19 nt, Artificial Sequence
  Description of Artificial Sequence: Synthetic oligonucleotide
uccggauuucuuaucacau

SEQ ID NO: 81434 - RNA, 19 nt, Artificial Sequence
  Description of Artificial Sequence: Synthetic oligonucleotide
augauguguguauucagaa

SEQ ID NO: 81435 - RNA, 19 nt, Artificial Sequence
  Description of Artificial Sequence: Synthetic oligonucleotide
uaugcucucgacuccugug

SEQ ID NO: 81436 - RNA, 19 nt, Artificial Sequence
  Description of Artificial Sequence: Synthetic oligonucleotide
cuaucagagccagaguacc

SEQ ID NO: 81437 - RNA, 19 nt, Artificial Sequence
  Description of Artificial Sequence: Synthetic oligonucleotide
uuacuguguugguuuauga

SEQ ID NO: 81438 - RNA, 19 nt, Artificial Sequence
  Description of Artificial Sequence: Synthetic oligonucleotide
cacauauuacccucaccag

SEQ ID NO: 81439 - RNA, 19 nt, Artificial Sequence
  Description of Artificial Sequence: Synthetic oligonucleotide
guaaacaaggagcuuugga

SEQ ID NO: 81440 - RNA, 19 nt, Artificial Sequence
  Description of Artificial Sequence: Synthetic oligonucleotide
acgggaagcggcaaggugg

SEQ ID NO: 81441 - RNA, 19 nt, Artificial Sequence
  Description of Artificial Sequence: Synthetic oligonucleotide
gaauucauuauuaucuggu

SEQ ID NO: 81442 - RNA, 19 nt, Artificial Sequence
  Description of Artificial Sequence: Synthetic oligonucleotide
aucccucagcauuaaaaug

SEQ ID NO: 81443 - RNA, 19 nt, Artificial Sequence
  Description of Artificial Sequence: Synthetic oligonucleotide
ugucacuauaguaccugcu

SEQ ID NO: 81444 - RNA, 19 nt, Artificial Sequence
  Description of Artificial Sequence: Synthetic oligonucleotide
uuauguuuuaccggcuacu

SEQ ID NO: 81445 - RNA, 19 nt, Artificial Sequence
  Description of Artificial Sequence: Synthetic oligonucleotide
aaugaguacucgguugccu

SEQ ID NO: 81446 - RNA, 19 nt, Artificial Sequence
  Description of Artificial Sequence: Synthetic oligonucleotide
aacauccgcaccaucugag

SEQ ID NO: 81447 - RNA, 19 nt, Artificial Sequence
  Description of Artificial Sequence: Synthetic oligonucleotide
ggcuauauuacagacauaa

SEQ ID NO: 81448 - RNA, 19 nt, Artificial Sequence
  Description of Artificial Sequence: Synthetic oligonucleotide
aacaggaaauucccggcua

SEQ ID NO: 81449 - RNA, 19 nt, Artificial Sequence
  Description of Artificial Sequence: Synthetic oligonucleotide
cugcuuauagugaucccac

SEQ ID NO: 81450 - RNA, 19 nt, Artificial Sequence
  Description of Artificial Sequence: Synthetic oligonucleotide
uuaccggcuacuccaggug

SEQ ID NO: 81451 - RNA, 19 nt, Artificial Sequence
  Description of Artificial Sequence: Synthetic oligonucleotide
aaucccuggaagauuuaug

SEQ ID NO: 81452 - RNA, 19 nt, Artificial Sequence
  Description of Artificial Sequence: Synthetic oligonucleotide
ccaccuacccuuuuaaacc

SEQ ID NO: 81453 - RNA, 19 nt, Artificial Sequence
  Description of Artificial Sequence: Synthetic oligonucleotide
gaaaccgauaaucccugga

SEQ ID NO: 81454 - RNA, 19 nt, Artificial Sequence
  Description of Artificial Sequence: Synthetic oligonucleotide
ggauuaaguguuguaaggc

SEQ ID NO: 81455 - RNA, 19 nt, Artificial Sequence
  Description of Artificial Sequence: Synthetic oligonucleotide
auucagccuauacgggagg

SEQ ID NO: 81456 - RNA, 19 nt, Artificial Sequence
  Description of Artificial Sequence: Synthetic oligonucleotide
cacugcuuaauuugcucag

SEQ ID NO: 81457 - RNA, 19 nt, Artificial Sequence
  Description of Artificial Sequence: Synthetic oligonucleotide
ugaagaguagggucuuuuc

SEQ ID NO: 81458 - RNA, 19 nt, Artificial Sequence
  Description of Artificial Sequence: Synthetic oligonucleotide
uaauuagcgugcuuauaua

SEQ ID NO: 81459 - RNA, 19 nt, Artificial Sequence
  Description of Artificial Sequence: Synthetic oligonucleotide
aacuugaucgauggucuga

SEQ ID NO: 81460 - RNA, 19 nt, Artificial Sequence
  Description of Artificial Sequence: Synthetic oligonucleotide
agaaaccgauaaucccugg

SEQ ID NO: 81461 - RNA, 19 nt, Artificial Sequence
  Description of Artificial Sequence: Synthetic oligonucleotide
uacgcuccgucccugcugc

SEQ ID NO: 81462 - RNA, 19 nt, Artificial Sequence
  Description of Artificial Sequence: Synthetic oligonucleotide
caacuuuuggugguuuugc

SEQ ID NO: 81463 - RNA, 19 nt, Artificial Sequence
  Description of Artificial Sequence: Synthetic oligonucleotide
aucuagugcuuguuuccuc

SEQ ID NO: 81464 - RNA, 19 nt, Artificial Sequence
  Description of Artificial Sequence: Synthetic oligonucleotide
uuuaugaucuauggcuaaa

SEQ ID NO: 81465 - RNA, 19 nt, Artificial Sequence
  Description of Artificial Sequence: Synthetic oligonucleotide
agaccuugcguccuggaaa

SEQ ID NO: 81466 - RNA, 19 nt, Artificial Sequence
  Description of Artificial Sequence: Synthetic oligonucleotide
aauacgcuccgucccugcu

SEQ ID NO: 81467 - RNA, 19 nt, Artificial Sequence
  Description of Artificial Sequence: Synthetic oligonucleotide
ucuuuccgguuccaauuca

SEQ ID NO: 81468 - RNA, 19 nt, Artificial Sequence
  Description of Artificial Sequence: Synthetic oligonucleotide
gcuacuacggauuaagugu

SEQ ID NO: 81469 - RNA, 19 nt, Artificial Sequence
  Description of Artificial Sequence: Synthetic oligonucleotide
cagaucgcugaacagccag

SEQ ID NO: 81470 - RNA, 19 nt, Artificial Sequence
  Description of Artificial Sequence: Synthetic oligonucleotide
uaauagaccuugcguccug

SEQ ID NO: 81471 - RNA, 19 nt, Artificial Sequence
  Description of Artificial Sequence: Synthetic oligonucleotide
ucccuguuauaguaaacau

SEQ ID NO: 81472 - RNA, 19 nt, Artificial Sequence
  Description of Artificial Sequence: Synthetic oligonucleotide
aaugcagucgaugguccga

SEQ ID NO: 81473 - RNA, 19 nt, Artificial Sequence
  Description of Artificial Sequence: Synthetic oligonucleotide
aaauguuaaccuggcugca

SEQ ID NO: 81474 - RNA, 19 nt, Artificial Sequence
  Description of Artificial Sequence: Synthetic oligonucleotide
ugucuaguauguuccaguu

SEQ ID NO: 81475 - RNA, 19 nt, Artificial Sequence
  Description of Artificial Sequence: Synthetic oligonucleotide
acugcuuaauuugcucagg

SEQ ID NO: 81476 - RNA, 19 nt, Artificial Sequence
  Description of Artificial Sequence: Synthetic oligonucleotide
ugacauuauugcccacaug

SEQ ID NO: 81477 - RNA, 19 nt, Artificial Sequence
  Description of Artificial Sequence: Synthetic oligonucleotide
ugacgauacuucaaauauu

SEQ ID NO: 81478 - RNA, 19 nt, Artificial Sequence
  Description of Artificial Sequence: Synthetic oligonucleotide
cucgagggaugguacgugg

SEQ ID NO: 81479 - RNA, 19 nt, Artificial Sequence
  Description of Artificial Sequence: Synthetic oligonucleotide
uuggucguuuccuuuccga

SEQ ID NO: 81480 - RNA, 19 nt, Artificial Sequence
  Description of Artificial Sequence: Synthetic oligonucleotide
uucuuaaggauugcagauc

SEQ ID NO: 81481 - RNA, 19 nt, Artificial Sequence
  Description of Artificial Sequence: Synthetic oligonucleotide
uacguggucucccacguuu

SEQ ID NO: 81482 - RNA, 19 nt, Artificial Sequence
  Description of Artificial Sequence: Synthetic oligonucleotide
ucuaaucgucuucuuugau

SEQ ID NO: 81483 - RNA, 19 nt, Artificial Sequence
  Description of Artificial Sequence: Synthetic oligonucleotide
gauguaucugauucagacu

SEQ ID NO: 81484 - RNA, 19 nt, Artificial Sequence
  Description of Artificial Sequence: Synthetic oligonucleotide
cuuaggcgaauuaacagcu

SEQ ID NO: 81485 - RNA, 19 nt, Artificial Sequence
  Description of Artificial Sequence: Synthetic oligonucleotide
uagugcuuguuuccucagc

SEQ ID NO: 81486 - RNA, 19 nt, Artificial Sequence
  Description of Artificial Sequence: Synthetic oligonucleotide
gguuuaaugagguagcaau

SEQ ID NO: 81487 - RNA, 19 nt, Artificial Sequence
  Description of Artificial Sequence: Synthetic oligonucleotide
acauaauauugacuuccaa

SEQ ID NO: 81488 - RNA, 19 nt, Artificial Sequence
  Description of Artificial Sequence: Synthetic oligonucleotide
cuuuaugauggucauggua

SEQ ID NO: 81489 - RNA, 19 nt, Artificial Sequence
  Description of Artificial Sequence: Synthetic oligonucleotide
aauguuaaccuggcugcau

SEQ ID NO: 81490 - RNA, 19 nt, Artificial Sequence
  Description of Artificial Sequence: Synthetic oligonucleotide
gcuagguuaaugccuaaac

SEQ ID NO: 81491 - RNA, 19 nt, Artificial Sequence
  Description of Artificial Sequence: Synthetic oligonucleotide
guggucauccaguuuucug

SEQ ID NO: 81492 - RNA, 19 nt, Artificial Sequence
  Description of Artificial Sequence: Synthetic oligonucleotide
ugaagccgcgugcaccugc

SEQ ID NO: 81493 - RNA, 19 nt, Artificial Sequence
  Description of Artificial Sequence: Synthetic oligonucleotide
cacuaucagagccagagua

SEQ ID NO: 81494 - RNA, 19 nt, Artificial Sequence
  Description of Artificial Sequence: Synthetic oligonucleotide
ugaguacucgguugccucu

SEQ ID NO: 81495 - RNA, 19 nt, Artificial Sequence
  Description of Artificial Sequence: Synthetic oligonucleotide
uacuacggauuaaguguug

SEQ ID NO: 81496 - RNA, 19 nt, Artificial Sequence
  Description of Artificial Sequence: Synthetic oligonucleotide
uaaguguuguaaggccucc

SEQ ID NO: 81497 - RNA, 19 nt, Artificial Sequence
  Description of Artificial Sequence: Synthetic oligonucleotide
gucuaguauguuccaguug

SEQ ID NO: 81498 - RNA, 19 nt, Artificial Sequence
  Description of Artificial Sequence: Synthetic oligonucleotide
cugguggcggucuuuauga

SEQ ID NO: 81499 - RNA, 19 nt, Artificial Sequence
  Description of Artificial Sequence: Synthetic oligonucleotide
uucuacuccgccucccuuc

SEQ ID NO: 81500 - RNA, 19 nt, Artificial Sequence
  Description of Artificial Sequence: Synthetic oligonucleotide
ucgucaugauuuguguucu

SEQ ID NO: 81501 - RNA, 19 nt, Artificial Sequence
  Description of Artificial Sequence: Synthetic oligonucleotide
cuuaucacaugaguaguga

SEQ ID NO: 81502 - RNA, 19 nt, Artificial Sequence
  Description of Artificial Sequence: Synthetic oligonucleotide
ggaagcggcaagguggucg

SEQ ID NO: 81503 - RNA, 19 nt, Artificial Sequence
  Description of Artificial Sequence: Synthetic oligonucleotide
uuuccgguuccaauucaau

SEQ ID NO: 81504 - RNA, 19 nt, Artificial Sequence
  Description of Artificial Sequence: Synthetic oligonucleotide
aaaugaucuagugcuuguu

SEQ ID NO: 81505 - RNA, 19 nt, Artificial Sequence
  Description of Artificial Sequence: Synthetic oligonucleotide
aggaacagucaaaagaaua

SEQ ID NO: 81506 - RNA, 19 nt, Artificial Sequence
  Description of Artificial Sequence: Synthetic oligonucleotide
cauauccggauuucuuauc

SEQ ID NO: 81507 - RNA, 19 nt, Artificial Sequence
  Description of Artificial Sequence: Synthetic oligonucleotide
aggggaauugacgauacuu

SEQ ID NO: 81508 - RNA, 19 nt, Artificial Sequence
  Description of Artificial Sequence: Synthetic oligonucleotide
uuucaccgccuaauuucug

SEQ ID NO: 81509 - RNA, 19 nt, Artificial Sequence
  Description of Artificial Sequence: Synthetic oligonucleotide
agcaaugguuacaacauuu

SEQ ID NO: 81510 - RNA, 19 nt, Artificial Sequence
  Description of Artificial Sequence: Synthetic oligonucleotide
acuacggauuaaguguugu

SEQ ID NO: 81511 - RNA, 19 nt, Artificial Sequence
  Description of Artificial Sequence: Synthetic oligonucleotide
ugcuuauagugaucccacu

SEQ ID NO: 81512 - RNA, 19 nt, Artificial Sequence
  Description of Artificial Sequence: Synthetic oligonucleotide
agcgugcuuauauaauuua

SEQ ID NO: 81513 - RNA, 19 nt, Artificial Sequence
  Description of Artificial Sequence: Synthetic oligonucleotide
augguacguggucucccac

SEQ ID NO: 81514 - RNA, 19 nt, Artificial Sequence
  Description of Artificial Sequence: Synthetic oligonucleotide
guggucgcaguguacgaug

SEQ ID NO: 81515 - RNA, 19 nt, Artificial Sequence
  Description of Artificial Sequence: Synthetic oligonucleotide
uucaagcuugugacgggaa

SEQ ID NO: 81516 - RNA, 19 nt, Artificial Sequence
  Description of Artificial Sequence: Synthetic oligonucleotide
ugguuuaaugagguagcaa

SEQ ID NO: 81517 - RNA, 19 nt, Artificial Sequence
  Description of Artificial Sequence: Synthetic oligonucleotide
uccgcaccaucugagaaaa

SEQ ID NO: 81518 - RNA, 19 nt, Artificial Sequence
  Description of Artificial Sequence: Synthetic oligonucleotide
uaaucccuggaagauuuau

SEQ ID NO: 81519 - RNA, 19 nt, Artificial Sequence
  Description of Artificial Sequence: Synthetic oligonucleotide
gcaaccuuaaacugggaaa

SEQ ID NO: 81520 - RNA, 19 nt, Artificial Sequence
  Description of Artificial Sequence: Synthetic oligonucleotide
acauaaguacaggauuuaa

SEQ ID NO: 81521 - RNA, 19 nt, Artificial Sequence
  Description of Artificial Sequence: Synthetic oligonucleotide
guuuauguuuuaccggcua

SEQ ID NO: 81522 - RNA, 19 nt, Artificial Sequence
  Description of Artificial Sequence: Synthetic oligonucleotide
gcuaucgucaugauuugug

SEQ ID NO: 81523 - RNA, 19 nt, Artificial Sequence
  Description of Artificial Sequence: Synthetic oligonucleotide
auuagcgugcuuauauaau

SEQ ID NO: 81524 - RNA, 19 nt, Artificial Sequence
  Description of Artificial Sequence: Synthetic oligonucleotide
aaggggaauugacgauacu

SEQ ID NO: 81525 - RNA, 19 nt, Artificial Sequence
  Description of Artificial Sequence: Synthetic oligonucleotide
uccgagauugagucacuau

SEQ ID NO: 81526 - RNA, 19 nt, Artificial Sequence
  Description of Artificial Sequence: Synthetic oligonucleotide
aguguacgauguaaacaag

SEQ ID NO: 81527 - RNA, 19 nt, Artificial Sequence
  Description of Artificial Sequence: Synthetic oligonucleotide
ggagaccucugaucuaaag

SEQ ID NO: 81528 - RNA, 19 nt, Artificial Sequence
  Description of Artificial Sequence: Synthetic oligonucleotide
ucacaugaguagugaugcu

SEQ ID NO: 81529 - RNA, 19 nt, Artificial Sequence
  Description of Artificial Sequence: Synthetic oligonucleotide
cauguaaggcaauuacugu

SEQ ID NO: 81530 - RNA, 19 nt, Artificial Sequence
  Description of Artificial Sequence: Synthetic oligonucleotide
cauauuacccucaccaguu

SEQ ID NO: 81531 - RNA, 19 nt, Artificial Sequence
  Description of Artificial Sequence: Synthetic oligonucleotide
acuugaccuaugcucucga

SEQ ID NO: 81532 - RNA, 19 nt, Artificial Sequence
  Description of Artificial Sequence: Synthetic oligonucleotide
cuugaccuaugcucucgac

SEQ ID NO: 81533 - RNA, 19 nt, Artificial Sequence
  Description of Artificial Sequence: Synthetic oligonucleotide
uugcucaggguuggaauac

SEQ ID NO: 81534 - RNA, 19 nt, Artificial Sequence
  Description of Artificial Sequence: Synthetic oligonucleotide
gggauaauagaccuugcgu

SEQ ID NO: 81535 - RNA, 19 nt, Artificial Sequence
  Description of Artificial Sequence: Synthetic oligonucleotide
uuaggcgaauuaacagcuu

SEQ ID NO: 81536 - RNA, 19 nt, Artificial Sequence
  Description of Artificial Sequence: Synthetic oligonucleotide
aggucccuguuauaguaaa

SEQ ID NO: 81537 - RNA, 19 nt, Artificial Sequence
  Description of Artificial Sequence: Synthetic oligonucleotide
ccgagauugagucacuauc

SEQ ID NO: 81538 - RNA, 19 nt, Artificial Sequence
  Description of Artificial Sequence: Synthetic oligonucleotide
ggauuucuuaucacaugag

SEQ ID NO: 81539 - RNA, 19 nt, Artificial Sequence
  Description of Artificial Sequence: Synthetic oligonucleotide
acauccgcaccaucugaga

SEQ ID NO: 81540 - RNA, 19 nt, Artificial Sequence
  Description of Artificial Sequence: Synthetic oligonucleotide
aggauugcagaucgcugaa

SEQ ID NO: 81541 - RNA, 19 nt, Artificial Sequence
  Description of Artificial Sequence: Synthetic oligonucleotide
auccgcaccaucugagaaa

SEQ ID NO: 81542 - RNA, 19 nt, Artificial Sequence
  Description of Artificial Sequence: Synthetic oligonucleotide
ccacuguuagaugaagccg

SEQ ID NO: 81543 - RNA, 19 nt, Artificial Sequence
  Description of Artificial Sequence: Synthetic oligonucleotide
aaguguuguaaggccuccu

SEQ ID NO: 81544 - RNA, 19 nt, Artificial Sequence
  Description of Artificial Sequence: Synthetic oligonucleotide
caaucagugugcacuguaa

SEQ ID NO: 81545 - RNA, 19 nt, Artificial Sequence
  Description of Artificial Sequence: Synthetic oligonucleotide
agugagaccgauggucaga

SEQ ID NO: 81546 - RNA, 19 nt, Artificial Sequence
  Description of Artificial Sequence: Synthetic oligonucleotide
cugcuaucgucaugauuug

SEQ ID NO: 81547 - RNA, 19 nt, Artificial Sequence
  Description of Artificial Sequence: Synthetic oligonucleotide
ucuuccgacuggcucgauu

SEQ ID NO: 81548 - RNA, 19 nt, Artificial Sequence
  Description of Artificial Sequence: Synthetic oligonucleotide
aacggagaccuggagccau

SEQ ID NO: 81549 - RNA, 19 nt, Artificial Sequence
  Description of Artificial Sequence: Synthetic oligonucleotide
augcagucgaugguccgag

SEQ ID NO: 81550 - RNA, 19 nt, Artificial Sequence
  Description of Artificial Sequence: Synthetic oligonucleotide
gguggcggucuuuaugaug

SEQ ID NO: 81551 - RNA, 19 nt, Artificial Sequence
  Description of Artificial Sequence: Synthetic oligonucleotide
gaucgcugaacagccagaa

SEQ ID NO: 81552 - RNA, 19 nt, Artificial Sequence
  Description of Artificial Sequence: Synthetic oligonucleotide
caagguggucgcaguguac

SEQ ID NO: 81553 - RNA, 19 nt, Artificial Sequence
  Description of Artificial Sequence: Synthetic oligonucleotide
uacuccgccucccuucauu

SEQ ID NO: 81554 - RNA, 19 nt, Artificial Sequence
  Description of Artificial Sequence: Synthetic oligonucleotide
cuuucaccgccuaauuucu

SEQ ID NO: 81555 - RNA, 19 nt, Artificial Sequence
  Description of Artificial Sequence: Synthetic oligonucleotide
uucgugaguuucagcucuc

SEQ ID NO: 81556 - RNA, 19 nt, Artificial Sequence
  Description of Artificial Sequence: Synthetic oligonucleotide
ugcuaucgucaugauuugu

SEQ ID NO: 81557 - RNA, 19 nt, Artificial Sequence
  Description of Artificial Sequence: Synthetic oligonucleotide
aggcgaauuaacagcuugu

SEQ ID NO: 81558 - RNA, 19 nt, Artificial Sequence
  Description of Artificial Sequence: Synthetic oligonucleotide
cuuuccgguuccaauucaa

SEQ ID NO: 81559 - RNA, 19 nt, Artificial Sequence
  Description of Artificial Sequence: Synthetic oligonucleotide
gcaauuacuguguugguuu

SEQ ID NO: 81560 - RNA, 19 nt, Artificial Sequence
  Description of Artificial Sequence: Synthetic oligonucleotide
ccuccuguuuauuauagaa

SEQ ID NO: 81561 - RNA, 19 nt, Artificial Sequence
  Description of Artificial Sequence: Synthetic oligonucleotide
caauacugcuacugauaga

SEQ ID NO: 81562 - RNA, 19 nt, Artificial Sequence
  Description of Artificial Sequence: Synthetic oligonucleotide
cgcuacuacggauuaagug

SEQ ID NO: 81563 - RNA, 19 nt, Artificial Sequence
  Description of Artificial Sequence: Synthetic oligonucleotide
agcggcaagguggucgcag

SEQ ID NO: 81564 - RNA, 19 nt, Artificial Sequence
  Description of Artificial Sequence: Synthetic oligonucleotide
uggucugaaugcagucgau

SEQ ID NO: 81565 - RNA, 19 nt, Artificial Sequence
  Description of Artificial Sequence: Synthetic oligonucleotide
caucgccuacugucagagg

SEQ ID NO: 81566 - RNA, 19 nt, Artificial Sequence
  Description of Artificial Sequence: Synthetic oligonucleotide
ggucugaaugcagucgaug

SEQ ID NO: 81567 - RNA, 19 nt, Artificial Sequence
  Description of Artificial Sequence: Synthetic oligonucleotide
gcuaaaacccaaguccaga

SEQ ID NO: 81568 - RNA, 19 nt, Artificial Sequence
  Description of Artificial Sequence: Synthetic oligonucleotide
gaucuagugcuuguuuccu

SEQ ID NO: 81569 - RNA, 19 nt, Artificial Sequence
  Description of Artificial Sequence: Synthetic oligonucleotide
cagaguaccgccugcuucu

SEQ ID NO: 81570 - RNA, 19 nt, Artificial Sequence
  Description of Artificial Sequence: Synthetic oligonucleotide
cuauaguaccugcuguccu

SEQ ID NO: 81571 - RNA, 19 nt, Artificial Sequence
  Description of Artificial Sequence: Synthetic oligonucleotide
gcuccccuuuuauggaucc

SEQ ID NO: 81572 - RNA, 19 nt, Artificial Sequence
  Description of Artificial Sequence: Synthetic oligonucleotide
cauccgcaccaucugagaa

SEQ ID NO: 81573 - RNA, 19 nt, Artificial Sequence
  Description of Artificial Sequence: Synthetic oligonucleotide
cagccuauacgggagggca

SEQ ID NO: 81574 - RNA, 19 nt, Artificial Sequence
  Description of Artificial Sequence: Synthetic oligonucleotide
agguggucgcaguguacga

SEQ ID NO: 81575 - RNA, 19 nt, Artificial Sequence
  Description of Artificial Sequence: Synthetic oligonucleotide
gcggucuuuaugaugguca

SEQ ID NO: 81576 - RNA, 19 nt, Artificial Sequence
  Description of Artificial Sequence: Synthetic oligonucleotide
ggcgaauuaacagcuuguc

SEQ ID NO: 81577 - RNA, 19 nt, Artificial Sequence
  Description of Artificial Sequence: Synthetic oligonucleotide
cgcugaacagccagaauac

SEQ ID NO: 81578 - RNA, 19 nt, Artificial Sequence
  Description of Artificial Sequence: Synthetic oligonucleotide
acaauaacuuuuggccauu

SEQ ID NO: 81579 - RNA, 19 nt, Artificial Sequence
  Description of Artificial Sequence: Synthetic oligonucleotide
ucgugaguuucagcucucu

SEQ ID NO: 81580 - RNA, 19 nt, Artificial Sequence
  Description of Artificial Sequence: Synthetic oligonucleotide
cuacuacggauuaaguguu

SEQ ID NO: 81581 - RNA, 19 nt, Artificial Sequence
  Description of Artificial Sequence: Synthetic oligonucleotide
gccgcgugcaccugcugcg

SEQ ID NO: 81582 - RNA, 19 nt, Artificial Sequence
  Description of Artificial Sequence: Synthetic oligonucleotide
agccuauacgggagggcag

SEQ ID NO: 81583 - RNA, 19 nt, Artificial Sequence
  Description of Artificial Sequence: Synthetic oligonucleotide
cuacggauuaaguguugua

SEQ ID NO: 81584 - RNA, 19 nt, Artificial Sequence
  Description of Artificial Sequence: Synthetic oligonucleotide
uuccgagauugagucacua

SEQ ID NO: 81585 - RNA, 19 nt, Artificial Sequence
  Description of Artificial Sequence: Synthetic oligonucleotide
ccggauuucuuaucacaug

SEQ ID NO: 81586 - RNA, 19 nt, Artificial Sequence
  Description of Artificial Sequence: Synthetic oligonucleotide
ccgauggucagaguggcac

SEQ ID NO: 81587 - RNA, 19 nt, Artificial Sequence
  Description of Artificial Sequence: Synthetic oligonucleotide
gaguaccgccugcuucuac

SEQ ID NO: 81588 - RNA, 19 nt, Artificial Sequence
  Description of Artificial Sequence: Synthetic oligonucleotide
gagccauaaggagaccucu

SEQ ID NO: 81589 - RNA, 19 nt, Artificial Sequence
  Description of Artificial Sequence: Synthetic oligonucleotide
ugagaccgauggucagagu

SEQ ID NO: 81590 - RNA, 19 nt, Artificial Sequence
  Description of Artificial Sequence: Synthetic oligonucleotide
cucaucgccuacugucaga

SEQ ID NO: 81591 - RNA, 19 nt, Artificial Sequence
  Description of Artificial Sequence: Synthetic oligonucleotide
cagaauacugggguuagau

SEQ ID NO: 81592 - RNA, 19 nt, Artificial Sequence
  Description of Artificial Sequence: Synthetic oligonucleotide
gccagaauacugggguuag

SEQ ID NO: 81593 - RNA, 19 nt, Artificial Sequence
  Description of Artificial Sequence: Synthetic oligonucleotide
ggucucccacguuucuuug

SEQ ID NO: 81594 - RNA, 19 nt, Artificial Sequence
  Description of Artificial Sequence: Synthetic oligonucleotide
ccgguuccaauucaauguc

SEQ ID NO: 81595 - RNA, 19 nt, Artificial Sequence
  Description of Artificial Sequence: Synthetic oligonucleotide
uuccaaaacucggcuccau

SEQ ID NO: 81596 - RNA, 19 nt, Artificial Sequence
  Description of Artificial Sequence: Synthetic oligonucleotide
gcgaauuaacagcuugucu

SEQ ID NO: 81597 - RNA, 19 nt, Artificial Sequence
  Description of Artificial Sequence: Synthetic oligonucleotide
ccggcuauauuacagacau

SEQ ID NO: 81598 - RNA, 19 nt, Artificial Sequence
  Description of Artificial Sequence: Synthetic oligonucleotide
ucucgacuccuguggucau

SEQ ID NO: 81599 - RNA, 19 nt, Artificial Sequence
  Description of Artificial Sequence: Synthetic oligonucleotide
ugguggcggucuuuaugau

SEQ ID NO: 81600 - RNA, 19 nt, Artificial Sequence
  Description of Artificial Sequence: Synthetic oligonucleotide
gcuugucuagaagaauuaa

SEQ ID NO: 81601 - RNA, 19 nt, Artificial Sequence
  Description of Artificial Sequence: Synthetic oligonucleotide
cucugucacuauaguaccu

SEQ ID NO: 81602 - RNA, 19 nt, Artificial Sequence
  Description of Artificial Sequence: Synthetic oligonucleotide
ucguuuccuuuccgagauu

SEQ ID NO: 81603 - RNA, 19 nt, Artificial Sequence
  Description of Artificial Sequence: Synthetic oligonucleotide
aggagggauaaaacaugua

SEQ ID NO: 81604 - RNA, 19 nt, Artificial Sequence
  Description of Artificial Sequence: Synthetic oligonucleotide
ggucccuguuauaguaaac

SEQ ID NO: 81605 - RNA, 19 nt, Artificial Sequence
  Description of Artificial Sequence: Synthetic oligonucleotide
caggugugcucagguguac

SEQ ID NO: 81606 - RNA, 19 nt, Artificial Sequence
  Description of Artificial Sequence: Synthetic oligonucleotide
cucuuucaccgccuaauuu

SEQ ID NO: 81607 - RNA, 19 nt, Artificial Sequence
  Description of Artificial Sequence: Synthetic oligonucleotide
ccgccuaauuucugcauca

SEQ ID NO: 81608 - RNA, 19 nt, Artificial Sequence
  Description of Artificial Sequence: Synthetic oligonucleotide
gccuccuguuuauuauaga

SEQ ID NO: 81609 - RNA, 19 nt, Artificial Sequence
  Description of Artificial Sequence: Synthetic oligonucleotide
cucgacuccuguggucauc

SEQ ID NO: 81610 - RNA, 19 nt, Artificial Sequence
  Description of Artificial Sequence: Synthetic oligonucleotide
cccggcuauauuacagaca

SEQ ID NO: 81611 - RNA, 19 nt, Artificial Sequence
  Description of Artificial Sequence: Synthetic oligonucleotide
ccuaugcucucgacuccug

SEQ ID NO: 81612 - RNA, 19 nt, Artificial Sequence
  Description of Artificial Sequence: Synthetic oligonucleotide
gguccgagugagaccgaug

SEQ ID NO: 81613 - RNA, 19 nt, Artificial Sequence
  Description of Artificial Sequence: Synthetic oligonucleotide
cugaucccucagcauuaaa

SEQ ID NO: 81614 - RNA, 19 nt, Artificial Sequence
  Description of Artificial Sequence: Synthetic oligonucleotide
cucucgagggaugguacgu

SEQ ID NO: 81615 - RNA, 19 nt, Artificial Sequence
  Description of Artificial Sequence: Synthetic oligonucleotide
accgauggucagaguggca

SEQ ID NO: 81616 - RNA, 19 nt, Artificial Sequence
  Description of Artificial Sequence: Synthetic oligonucleotide
caucuauaucccaccuguu

SEQ ID NO: 81617 - RNA, 19 nt, Artificial Sequence
  Description of Artificial Sequence: Synthetic oligonucleotide
cccuguuauaguaaacauu

SEQ ID NO: 81618 - RNA, 19 nt, Artificial Sequence
  Description of Artificial Sequence: Synthetic oligonucleotide
ccggcuacuccaggugugc

SEQ ID NO: 81619 - RNA, 19 nt, Artificial Sequence
  Description of Artificial Sequence: Synthetic oligonucleotide
aggagaccucugaucuaaa

SEQ ID NO: 81620 - RNA, 19 nt, Artificial Sequence
  Description of Artificial Sequence: Synthetic oligonucleotide
gcgugcuuauauaauuuau

SEQ ID NO: 81621 - RNA, 19 nt, Artificial Sequence
  Description of Artificial Sequence: Synthetic oligonucleotide
ccuauacgggagggcagug

SEQ ID NO: 81622 - RNA, 19 nt, Artificial Sequence
  Description of Artificial Sequence: Synthetic oligonucleotide
cuccccuuuuauggaucca

SEQ ID NO: 81623 - RNA, 19 nt, Artificial Sequence
  Description of Artificial Sequence: Synthetic oligonucleotide
gaguacucgguugccucuu

SEQ ID NO: 81624 - RNA, 19 nt, Artificial Sequence
  Description of Artificial Sequence: Synthetic oligonucleotide
gcagaucgcugaacagcca

SEQ ID NO: 81625 - RNA, 19 nt, Artificial Sequence
  Description of Artificial Sequence: Synthetic oligonucleotide
gcauagcacauuugacauu

SEQ ID NO: 81626 - RNA, 19 nt, Artificial Sequence
  Description of Artificial Sequence: Synthetic oligonucleotide
ccgauaaucccuggaagau

SEQ ID NO: 81627 - RNA, 19 nt, Artificial Sequence
  Description of Artificial Sequence: Synthetic oligonucleotide
gccuauacgggagggcagu

SEQ ID NO: 81628 - RNA, 19 nt, Artificial Sequence
  Description of Artificial Sequence: Synthetic oligonucleotide
gguggucgcaguguacgau

SEQ ID NO: 81629 - RNA, 19 nt, Artificial Sequence
  Description of Artificial Sequence: Synthetic oligonucleotide
cgccuaauuucugcaucac

SEQ ID NO: 81630 - RNA, 19 nt, Artificial Sequence
  Description of Artificial Sequence: Synthetic oligonucleotide
cacgaugguccuugccauu

SEQ ID NO: 81631 - RNA, 19 nt, Artificial Sequence
  Description of Artificial Sequence: Synthetic oligonucleotide
gcuccgucccugcugcuau

SEQ ID NO: 81632 - RNA, 19 nt, Artificial Sequence
  Description of Artificial Sequence: Synthetic oligonucleotide
cccacguuucuuuggucgu

SEQ ID NO: 81633 - RNA, 19 nt, Artificial Sequence
  Description of Artificial Sequence: Synthetic oligonucleotide
ccgcgugcaccugcugcgg

SEQ ID NO: 81634 - RNA, 19 nt, Artificial Sequence
  Description of Artificial Sequence: Synthetic oligonucleotide
ccagaauacugggguuaga

SEQ ID NO: 81635 - RNA, 19 nt, Artificial Sequence
  Description of Artificial Sequence: Synthetic oligonucleotide
gguacugcccuuggucauu

SEQ ID NO: 81636 - RNA, 19 nt, Artificial Sequence
  Description of Artificial Sequence: Synthetic oligonucleotide
gucagaggaccuggcucau

SEQ ID NO: 81637 - RNA, 19 nt, Artificial Sequence
  Description of Artificial Sequence: Synthetic oligonucleotide
ccgcuacuacggauuaagu

SEQ ID NO: 81638 - RNA, 19 nt, Artificial Sequence
  Description of Artificial Sequence: Synthetic oligonucleotide
gggaagcggcaaggugguc

SEQ ID NO: 81639 - RNA, 19 nt, Artificial Sequence
  Description of Artificial Sequence: Synthetic oligonucleotide
cgggaagcggcaagguggu

SEQ ID NO: 81640 - RNA, 19 nt, Artificial Sequence
  Description of Artificial Sequence: Synthetic oligonucleotide
gccgacccagaaucaucuu

SEQ ID NO: 81641 - RNA, 19 nt, Artificial Sequence
  Description of Artificial Sequence: Synthetic oligonucleotide
cggcuauauuacagacaua

SEQ ID NO: 81642 - RNA, 19 nt, Artificial Sequence
  Description of Artificial Sequence: Synthetic oligonucleotide
ugacauacaaaucagacgc

SEQ ID NO: 81643 - RNA, 19 nt, Artificial Sequence
  Description of Artificial Sequence: Synthetic oligonucleotide
gauaauaucaguucccggg

SEQ ID NO: 81644 - RNA, 19 nt, Artificial Sequence
  Description of Artificial Sequence: Synthetic oligonucleotide
aauaucagcuacaugaccc

SEQ ID NO: 81645 - RNA, 19 nt, Artificial Sequence
  Description of Artificial Sequence: Synthetic oligonucleotide
aauauuggaaaauaucuga

SEQ ID NO: 81646 - RNA, 19 nt, Artificial Sequence
  Description of Artificial Sequence: Synthetic oligonucleotide
aaauuguuccgucucuugc

SEQ ID NO: 81647 - RNA, 19 nt, Artificial Sequence
  Description of Artificial Sequence: Synthetic oligonucleotide
uuaagaggaauguaaaggc

SEQ ID NO: 81648 - RNA, 19 nt, Artificial Sequence
  Description of Artificial Sequence: Synthetic oligonucleotide
aaagcuccuuauuaagacc

SEQ ID NO: 81649 - RNA, 19 nt, Artificial Sequence
  Description of Artificial Sequence: Synthetic oligonucleotide
aaggcuaguugccuaaggc

SEQ ID NO: 81650 - RNA, 19 nt, Artificial Sequence
  Description of Artificial Sequence: Synthetic oligonucleotide
agagauaaggaagacagcg

SEQ ID NO: 81651 - RNA, 19 nt, Artificial Sequence
  Description of Artificial Sequence: Synthetic oligonucleotide
uaauauuggaaaauaucug

SEQ ID NO: 81652 - RNA, 19 nt, Artificial Sequence
  Description of Artificial Sequence: Synthetic oligonucleotide
uggacaucgaccaagggga

SEQ ID NO: 81653 - RNA, 19 nt, Artificial Sequence
  Description of Artificial Sequence: Synthetic oligonucleotide
aucacuuagauuaagagga

SEQ ID NO: 81654 - RNA, 19 nt, Artificial Sequence
  Description of Artificial Sequence: Synthetic oligonucleotide
ucugcuaauaaaccggaug

SEQ ID NO: 81655 - RNA, 19 nt, Artificial Sequence
  Description of Artificial Sequence: Synthetic oligonucleotide
aauuuugaguaugugggag

SEQ ID NO: 81656 - RNA, 19 nt, Artificial Sequence
  Description of Artificial Sequence: Synthetic oligonucleotide
cucaugauaaucagagugg

SEQ ID NO: 81657 - RNA, 19 nt, Artificial Sequence
  Description of Artificial Sequence: Synthetic oligonucleotide
ugaaugagggcuuuccaag

SEQ ID NO: 81658 - RNA, 19 nt, Artificial Sequence
  Description of Artificial Sequence: Synthetic oligonucleotide
uucgcuuguaacuugguga

SEQ ID NO: 81659 - RNA, 19 nt, Artificial Sequence
  Description of Artificial Sequence: Synthetic oligonucleotide
cugcuaauaaaccggaugc

SEQ ID NO: 81660 - RNA, 19 nt, Artificial Sequence
  Description of Artificial Sequence: Synthetic oligonucleotide
auaucagcuacaugacccc

SEQ ID NO: 81661 - RNA, 19 nt, Artificial Sequence
  Description of Artificial Sequence: Synthetic oligonucleotide
uaauaaaccggaugcagcu

SEQ ID NO: 81662 - RNA, 19 nt, Artificial Sequence
  Description of Artificial Sequence: Synthetic oligonucleotide
ucaugauaaucagaguggg

SEQ ID NO: 81663 - RNA, 19 nt, Artificial Sequence
  Description of Artificial Sequence: Synthetic oligonucleotide
aaaauguucucauguugga

SEQ ID NO: 81664 - RNA, 19 nt, Artificial Sequence
  Description of Artificial Sequence: Synthetic oligonucleotide
aggguaauguccuggagag

SEQ ID NO: 81665 - RNA, 19 nt, Artificial Sequence
  Description of Artificial Sequence: Synthetic oligonucleotide
cugugauaagugauuaagg

SEQ ID NO: 81666 - RNA, 19 nt, Artificial Sequence
  Description of Artificial Sequence: Synthetic oligonucleotide
ucgauaauaucaguucccg

SEQ ID NO: 81667 - RNA, 19 nt, Artificial Sequence
  Description of Artificial Sequence: Synthetic oligonucleotide
gaugcugguagcuccaccc

SEQ ID NO: 81668 - RNA, 19 nt, Artificial Sequence
  Description of Artificial Sequence: Synthetic oligonucleotide
uuuacagacuccauagaau

SEQ ID NO: 81669 - RNA, 19 nt, Artificial Sequence
  Description of Artificial Sequence: Synthetic oligonucleotide
ucgugaaauaaaauuguuc

SEQ ID NO: 81670 - RNA, 19 nt, Artificial Sequence
  Description of Artificial Sequence: Synthetic oligonucleotide
gaugaguccgucuaugcca

SEQ ID NO: 81671 - RNA, 19 nt, Artificial Sequence
  Description of Artificial Sequence: Synthetic oligonucleotide
auuuuccgaacugggaugc

SEQ ID NO: 81672 - RNA, 19 nt, Artificial Sequence
  Description of Artificial Sequence: Synthetic oligonucleotide
uuuccggauaugcacagcu

SEQ ID NO: 81673 - RNA, 19 nt, Artificial Sequence
  Description of Artificial Sequence: Synthetic oligonucleotide
ggaacuagcuauaaaauug

SEQ ID NO: 81674 - RNA, 19 nt, Artificial Sequence
  Description of Artificial Sequence: Synthetic oligonucleotide
accggaugcagcuuucuac

SEQ ID NO: 81675 - RNA, 19 nt, Artificial Sequence
  Description of Artificial Sequence: Synthetic oligonucleotide
uuagaggguaauguccugg

SEQ ID NO: 81676 - RNA, 19 nt, Artificial Sequence
  Description of Artificial Sequence: Synthetic oligonucleotide
cugagugagucuuagguuc

SEQ ID NO: 81677 - RNA, 19 nt, Artificial Sequence
  Description of Artificial Sequence: Synthetic oligonucleotide
auaaaauuguuccgucucu

SEQ ID NO: 81678 - RNA, 19 nt, Artificial Sequence
  Description of Artificial Sequence: Synthetic oligonucleotide
uucaagcauacauacaaua

SEQ ID NO: 81679 - RNA, 19 nt, Artificial Sequence
  Description of Artificial Sequence: Synthetic oligonucleotide
ucagacgccacaacauugc

SEQ ID NO: 81680 - RNA, 19 nt, Artificial Sequence
  Description of Artificial Sequence: Synthetic oligonucleotide
ucaaaguggauaagcgaga

SEQ ID NO: 81681 - RNA, 19 nt, Artificial Sequence
  Description of Artificial Sequence: Synthetic oligonucleotide
uccucuauuuuccgaacug

SEQ ID NO: 81682 - RNA, 19 nt, Artificial Sequence
  Description of Artificial Sequence: Synthetic oligonucleotide
acuuagauuaagaggaaug

SEQ ID NO: 81683 - RNA, 19 nt, Artificial Sequence
  Description of Artificial Sequence: Synthetic oligonucleotide
uccuauugguuccuacucc

SEQ ID NO: 81684 - RNA, 19 nt, Artificial Sequence
  Description of Artificial Sequence: Synthetic oligonucleotide
uuggugauuagguuccuac

SEQ ID NO: 81685 - RNA, 19 nt, Artificial Sequence
  Description of Artificial Sequence: Synthetic oligonucleotide
acaaaucagacgccacaac

SEQ ID NO: 81686 - RNA, 19 nt, Artificial Sequence
  Description of Artificial Sequence: Synthetic oligonucleotide
uccggauaugcacagcucu

SEQ ID NO: 81687 - RNA, 19 nt, Artificial Sequence
  Description of Artificial Sequence: Synthetic oligonucleotide
uccuuauuaagaccgggau

SEQ ID NO: 81688 - RNA, 19 nt, Artificial Sequence
  Description of Artificial Sequence: Synthetic oligonucleotide
ugcuucgcuuguaacuugg

SEQ ID NO: 81689 - RNA, 19 nt, Artificial Sequence
  Description of Artificial Sequence: Synthetic oligonucleotide
ggccauaucucccaugugg

SEQ ID NO: 81690 - RNA, 19 nt, Artificial Sequence
  Description of Artificial Sequence: Synthetic oligonucleotide
ugucugcuaauaaaccgga

SEQ ID NO: 81691 - RNA, 19 nt, Artificial Sequence
  Description of Artificial Sequence: Synthetic oligonucleotide
aagauaaauaucagcuaca

SEQ ID NO: 81692 - RNA, 19 nt, Artificial Sequence
  Description of Artificial Sequence: Synthetic oligonucleotide
ugguggucaagagacaaag

SEQ ID NO: 81693 - RNA, 19 nt, Artificial Sequence
  Description of Artificial Sequence: Synthetic oligonucleotide
auuaagaccgggauguucu

SEQ ID NO: 81694 - RNA, 19 nt, Artificial Sequence
  Description of Artificial Sequence: Synthetic oligonucleotide
agcuauggaguccauguca

SEQ ID NO: 81695 - RNA, 19 nt, Artificial Sequence
  Description of Artificial Sequence: Synthetic oligonucleotide
ugauuaaggaaggcaaaga

SEQ ID NO: 81696 - RNA, 19 nt, Artificial Sequence
  Description of Artificial Sequence: Synthetic oligonucleotide
ggugauuagguuccuaccc

SEQ ID NO: 81697 - RNA, 19 nt, Artificial Sequence
  Description of Artificial Sequence: Synthetic oligonucleotide
uggauaagcgagacugcag

SEQ ID NO: 81698 - RNA, 19 nt, Artificial Sequence
  Description of Artificial Sequence: Synthetic oligonucleotide
gauugugugugugugugug

SEQ ID NO: 81699 - RNA, 19 nt, Artificial Sequence
  Description of Artificial Sequence: Synthetic oligonucleotide
gaggguaauguccuggaga

SEQ ID NO: 81700 - RNA, 19 nt, Artificial Sequence
  Description of Artificial Sequence: Synthetic oligonucleotide
aaucagacgccacaacauu

SEQ ID NO: 81701 - RNA, 19 nt, Artificial Sequence
  Description of Artificial Sequence: Synthetic oligonucleotide
aauaucaguucccgggauu

SEQ ID NO: 81702 - RNA, 19 nt, Artificial Sequence
  Description of Artificial Sequence: Synthetic oligonucleotide
uugagcuacgccuggcaag

SEQ ID NO: 81703 - RNA, 19 nt, Artificial Sequence
  Description of Artificial Sequence: Synthetic oligonucleotide
cagucuucagcagagguag

SEQ ID NO: 81704 - RNA, 19 nt, Artificial Sequence
  Description of Artificial Sequence: Synthetic oligonucleotide
uuggauaaacaaacacagu

SEQ ID NO: 81705 - RNA, 19 nt, Artificial Sequence
  Description of Artificial Sequence: Synthetic oligonucleotide
uccauagaauugcuguacu

SEQ ID NO: 81706 - RNA, 19 nt, Artificial Sequence
  Description of Artificial Sequence: Synthetic oligonucleotide
aggaacuagcuauaaaauu

SEQ ID NO: 81707 - RNA, 19 nt, Artificial Sequence
  Description of Artificial Sequence: Synthetic oligonucleotide
aaaucagacgccacaacau

SEQ ID NO: 81708 - RNA, 19 nt, Artificial Sequence
  Description of Artificial Sequence: Synthetic oligonucleotide
caaaucagacgccacaaca

SEQ ID NO: 81709 - RNA, 19 nt, Artificial Sequence
  Description of Artificial Sequence: Synthetic oligonucleotide
ccuuaguugaccuuauuug

SEQ ID NO: 81710 - RNA, 19 nt, Artificial Sequence
  Description of Artificial Sequence: Synthetic oligonucleotide
auuguuccgucucuugcug

SEQ ID NO: 81711 - RNA, 19 nt, Artificial Sequence
  Description of Artificial Sequence: Synthetic oligonucleotide
gaagcucgcugguagagca

SEQ ID NO: 81712 - RNA, 19 nt, Artificial Sequence
  Description of Artificial Sequence: Synthetic oligonucleotide
ugagugagucuuagguuca

SEQ ID NO: 81713 - RNA, 19 nt, Artificial Sequence
  Description of Artificial Sequence: Synthetic oligonucleotide
acuaagccaagagguaaac

SEQ ID NO: 81714 - RNA, 19 nt, Artificial Sequence
  Description of Artificial Sequence: Synthetic oligonucleotide
ugguuagcucuccucuuag

SEQ ID NO: 81715 - RNA, 19 nt, Artificial Sequence
  Description of Artificial Sequence: Synthetic oligonucleotide
auaucaguucccgggauug

SEQ ID NO: 81716 - RNA, 19 nt, Artificial Sequence
  Description of Artificial Sequence: Synthetic oligonucleotide
uagccuaggucacaacacu

SEQ ID NO: 81717 - RNA, 19 nt, Artificial Sequence
  Description of Artificial Sequence: Synthetic oligonucleotide
gauggacaucgaccaaggg

SEQ ID NO: 81718 - RNA, 19 nt, Artificial Sequence
  Description of Artificial Sequence: Synthetic oligonucleotide
ugcaaccucaauuccaguu

SEQ ID NO: 81719 - RNA, 19 nt, Artificial Sequence
  Description of Artificial Sequence: Synthetic oligonucleotide
auaagcgagacugcaguug

SEQ ID NO: 81720 - RNA, 19 nt, Artificial Sequence
  Description of Artificial Sequence: Synthetic oligonucleotide
gauccaugccacgaggggc

SEQ ID NO: 81721 - RNA, 19 nt, Artificial Sequence
  Description of Artificial Sequence: Synthetic oligonucleotide
uacaaaucagacgccacaa

SEQ ID NO: 81722 - RNA, 19 nt, Artificial Sequence
  Description of Artificial Sequence: Synthetic oligonucleotide
aguacgcagggcccgguuc

SEQ ID NO: 81723 - RNA, 19 nt, Artificial Sequence
  Description of Artificial Sequence: Synthetic oligonucleotide
cuuguaacuuggugauuag

SEQ ID NO: 81724 - RNA, 19 nt, Artificial Sequence
  Description of Artificial Sequence: Synthetic oligonucleotide
gaacaguggguguuccagc

SEQ ID NO: 81725 - RNA, 19 nt, Artificial Sequence
  Description of Artificial Sequence: Synthetic oligonucleotide
auaaaccggaugcagcuuu

SEQ ID NO: 81726 - RNA, 19 nt, Artificial Sequence
  Description of Artificial Sequence: Synthetic oligonucleotide
ugauuagguuccuacccuc

SEQ ID NO: 81727 - RNA, 19 nt, Artificial Sequence
  Description of Artificial Sequence: Synthetic oligonucleotide
gauuagguuccuacccucc

SEQ ID NO: 81728 - RNA, 19 nt, Artificial Sequence
  Description of Artificial Sequence: Synthetic oligonucleotide
guucaggcuagcgugguag

SEQ ID NO: 81729 - RNA, 19 nt, Artificial Sequence
  Description of Artificial Sequence: Synthetic oligonucleotide
ugaaaguuucugagacugu

SEQ ID NO: 81730 - RNA, 19 nt, Artificial Sequence
  Description of Artificial Sequence: Synthetic oligonucleotide
ugugauccagacacucgga

SEQ ID NO: 81731 - RNA, 19 nt, Artificial Sequence
  Description of Artificial Sequence: Synthetic oligonucleotide
uugugugugugugugugug

SEQ ID NO: 81732 - RNA, 19 nt, Artificial Sequence
  Description of Artificial Sequence: Synthetic oligonucleotide
ucgcuuguaacuuggugau

SEQ ID NO: 81733 - RNA, 19 nt, Artificial Sequence
  Description of Artificial Sequence: Synthetic oligonucleotide
agaagcucgcugguagagc

SEQ ID NO: 81734 - RNA, 19 nt, Artificial Sequence
  Description of Artificial Sequence: Synthetic oligonucleotide
acaaagacgggaacugaag

SEQ ID NO: 81735 - RNA, 19 nt, Artificial Sequence
  Description of Artificial Sequence: Synthetic oligonucleotide
uaauaucaguucccgggau

SEQ ID NO: 81736 - RNA, 19 nt, Artificial Sequence
  Description of Artificial Sequence: Synthetic oligonucleotide
uauuaagaccgggauguuc

SEQ ID NO: 81737 - RNA, 19 nt, Artificial Sequence
  Description of Artificial Sequence: Synthetic oligonucleotide
agauuaagaggaauguaaa

SEQ ID NO: 81738 - RNA, 19 nt, Artificial Sequence
  Description of Artificial Sequence: Synthetic oligonucleotide
acucuaaaaggaacuagcu

SEQ ID NO: 81739 - RNA, 19 nt, Artificial Sequence
  Description of Artificial Sequence: Synthetic oligonucleotide
cucggaaaauuccuucaug

SEQ ID NO: 81740 - RNA, 19 nt, Artificial Sequence
  Description of Artificial Sequence: Synthetic oligonucleotide
cagauggacaucgaccaag

SEQ ID NO: 81741 - RNA, 19 nt, Artificial Sequence
  Description of Artificial Sequence: Synthetic oligonucleotide
accagaggaauugccuggc

SEQ ID NO: 81742 - RNA, 19 nt, Artificial Sequence
  Description of Artificial Sequence: Synthetic oligonucleotide
agauggacaucgaccaagg

SEQ ID NO: 81743 - RNA, 19 nt, Artificial Sequence
  Description of Artificial Sequence: Synthetic oligonucleotide
caaaguggauaagcgagac

SEQ ID NO: 81744 - RNA, 19 nt, Artificial Sequence
  Description of Artificial Sequence: Synthetic oligonucleotide
gacauacaaaucagacgcc

SEQ ID NO: 81745 - RNA, 19 nt, Artificial Sequence
  Description of Artificial Sequence: Synthetic oligonucleotide
cuucgcuuguaacuuggug

SEQ ID NO: 81746 - RNA, 19 nt, Artificial Sequence
  Description of Artificial Sequence: Synthetic oligonucleotide
accgggauguucuucuaca

SEQ ID NO: 81747 - RNA, 19 nt, Artificial Sequence
  Description of Artificial Sequence: Synthetic oligonucleotide
caaagacgggaacugaaga

SEQ ID NO: 81748 - RNA, 19 nt, Artificial Sequence
  Description of Artificial Sequence: Synthetic oligonucleotide
acgggaacugaagaaaagu

SEQ ID NO: 81749 - RNA, 19 nt, Artificial Sequence
  Description of Artificial Sequence: Synthetic oligonucleotide
cuuuaagaagcuuugcuuu

SEQ ID NO: 81750 - RNA, 19 nt, Artificial Sequence
  Description of Artificial Sequence: Synthetic oligonucleotide
gaacggagcuuguugaugu

SEQ ID NO: 81751 - RNA, 19 nt, Artificial Sequence
  Description of Artificial Sequence: Synthetic oligonucleotide
gaagaaaagucuguaaguu

SEQ ID NO: 81752 - RNA, 19 nt, Artificial Sequence
  Description of Artificial Sequence: Synthetic oligonucleotide
caguggguguuccagcccc

SEQ ID NO: 81753 - RNA, 19 nt, Artificial Sequence
  Description of Artificial Sequence: Synthetic oligonucleotide
gagauaaggaagacagcga

SEQ ID NO: 81754 - RNA, 19 nt, Artificial Sequence
  Description of Artificial Sequence: Synthetic oligonucleotide
cuacguagucaaacuuggc

SEQ ID NO: 81755 - RNA, 19 nt, Artificial Sequence
  Description of Artificial Sequence: Synthetic oligonucleotide
gguagccuaggucacaaca

SEQ ID NO: 81756 - RNA, 19 nt, Artificial Sequence
  Description of Artificial Sequence: Synthetic oligonucleotide
guaugugggagucaaaguu

SEQ ID NO: 81757 - RNA, 19 nt, Artificial Sequence
  Description of Artificial Sequence: Synthetic oligonucleotide
acauucgucaucacucgug

SEQ ID NO: 81758 - RNA, 19 nt, Artificial Sequence
  Description of Artificial Sequence: Synthetic oligonucleotide
aucagacgccacaacauug

SEQ ID NO: 81759 - RNA, 19 nt, Artificial Sequence
  Description of Artificial Sequence: Synthetic oligonucleotide
agaacggagcuuguugaug

SEQ ID NO: 81760 - RNA, 19 nt, Artificial Sequence
  Description of Artificial Sequence: Synthetic oligonucleotide
agcgagacugcaguuguug

SEQ ID NO: 81761 - RNA, 19 nt, Artificial Sequence
  Description of Artificial Sequence: Synthetic oligonucleotide
ggaugaguccgucuaugcc

SEQ ID NO: 81762 - RNA, 19 nt, Artificial Sequence
  Description of Artificial Sequence: Synthetic oligonucleotide
auugugugugugugugugu

SEQ ID NO: 81763 - RNA, 19 nt, Artificial Sequence
  Description of Artificial Sequence: Synthetic oligonucleotide
gguuccuacuccuuuuaac

SEQ ID NO: 81764 - RNA, 19 nt, Artificial Sequence
  Description of Artificial Sequence: Synthetic oligonucleotide
cuuagaggguaauguccug

SEQ ID NO: 81765 - RNA, 19 nt, Artificial Sequence
  Description of Artificial Sequence: Synthetic oligonucleotide
cacgguugagcuacgccug

SEQ ID NO: 81766 - RNA, 19 nt, Artificial Sequence
  Description of Artificial Sequence: Synthetic oligonucleotide
guguaaaaucacagugugc

SEQ ID NO: 81767 - RNA, 19 nt, Artificial Sequence
  Description of Artificial Sequence: Synthetic oligonucleotide
ccaacaucggcugagugag

SEQ ID NO: 81768 - RNA, 19 nt, Artificial Sequence
  Description of Artificial Sequence: Synthetic oligonucleotide
ggauccaugccacgagggg

SEQ ID NO: 81769 - RNA, 19 nt, Artificial Sequence
  Description of Artificial Sequence: Synthetic oligonucleotide
aauaaaccggaugcagcuu

SEQ ID NO: 81770 - RNA, 19 nt, Artificial Sequence
  Description of Artificial Sequence: Synthetic oligonucleotide
accaaucgucagaagcucg

SEQ ID NO: 81771 - RNA, 19 nt, Artificial Sequence
  Description of Artificial Sequence: Synthetic oligonucleotide
agcugagaggccauaucuc

SEQ ID NO: 81772 - RNA, 19 nt, Artificial Sequence
  Description of Artificial Sequence: Synthetic oligonucleotide
gacuuuccggauaugcaca

SEQ ID NO: 81773 - RNA, 19 nt, Artificial Sequence
  Description of Artificial Sequence: Synthetic oligonucleotide
uagcgugguagccuagguc

SEQ ID NO: 81774 - RNA, 19 nt, Artificial Sequence
  Description of Artificial Sequence: Synthetic oligonucleotide
uaaaccggaugcagcuuuc

SEQ ID NO: 81775 - RNA, 19 nt, Artificial Sequence
  Description of Artificial Sequence: Synthetic oligonucleotide
ugugugugugugugugugu

SEQ ID NO: 81776 - RNA, 19 nt, Artificial Sequence
  Description of Artificial Sequence: Synthetic oligonucleotide
ggagggaaccacuuguaca

SEQ ID NO: 81777 - RNA, 19 nt, Artificial Sequence
  Description of Artificial Sequence: Synthetic oligonucleotide
ucgucagaagcucgcuggu

SEQ ID NO: 81778 - RNA, 19 nt, Artificial Sequence
  Description of Artificial Sequence: Synthetic oligonucleotide
ggcuuugggguguaaaauc

SEQ ID NO: 81779 - RNA, 19 nt, Artificial Sequence
  Description of Artificial Sequence: Synthetic oligonucleotide
guugccuaaggccuggggu

SEQ ID NO: 81780 - RNA, 19 nt, Artificial Sequence
  Description of Artificial Sequence: Synthetic oligonucleotide
gccauaucucccauguggg

SEQ ID NO: 81781 - RNA, 19 nt, Artificial Sequence
  Description of Artificial Sequence: Synthetic oligonucleotide
gugugugugugugugugug

SEQ ID NO: 81782 - RNA, 19 nt, Artificial Sequence
  Description of Artificial Sequence: Synthetic oligonucleotide
uuccggauaugcacagcuc

SEQ ID NO: 81783 - RNA, 19 nt, Artificial Sequence
  Description of Artificial Sequence: Synthetic oligonucleotide
cugguuucgggcaagccua

SEQ ID NO: 81784 - RNA, 19 nt, Artificial Sequence
  Description of Artificial Sequence: Synthetic oligonucleotide
cugaucgauaauaucaguu

SEQ ID NO: 81785 - RNA, 19 nt, Artificial Sequence
  Description of Artificial Sequence: Synthetic oligonucleotide
agccaagagguaaacuuga

SEQ ID NO: 81786 - RNA, 19 nt, Artificial Sequence
  Description of Artificial Sequence: Synthetic oligonucleotide
aguccgucuaugccauugu

SEQ ID NO: 81787 - RNA, 19 nt, Artificial Sequence
  Description of Artificial Sequence: Synthetic oligonucleotide
ggaagcaucaugcugguuu

SEQ ID NO: 81788 - RNA, 19 nt, Artificial Sequence
  Description of Artificial Sequence: Synthetic oligonucleotide
ggauaaacaaacacagucu

SEQ ID NO: 81789 - RNA, 19 nt, Artificial Sequence
  Description of Artificial Sequence: Synthetic oligonucleotide
ccaaucgucagaagcucgc

SEQ ID NO: 81790 - RNA, 19 nt, Artificial Sequence
  Description of Artificial Sequence: Synthetic oligonucleotide
aaaccggaugcagcuuucu

SEQ ID NO: 81791 - RNA, 19 nt, Artificial Sequence
  Description of Artificial Sequence: Synthetic oligonucleotide
gauucuggcuuuggggaga

SEQ ID NO: 81792 - RNA, 19 nt, Artificial Sequence
  Description of Artificial Sequence: Synthetic oligonucleotide
cagaagcucgcugguagag

SEQ ID NO: 81793 - RNA, 19 nt, Artificial Sequence
  Description of Artificial Sequence: Synthetic oligonucleotide
acgacaccguccucggugu

SEQ ID NO: 81794 - RNA, 19 nt, Artificial Sequence
  Description of Artificial Sequence: Synthetic oligonucleotide
uggcuuuggggagauaauu

SEQ ID NO: 81795 - RNA, 19 nt, Artificial Sequence
  Description of Artificial Sequence: Synthetic oligonucleotide
gggcagaaaacauuguugu

SEQ ID NO: 81796 - RNA, 19 nt, Artificial Sequence
  Description of Artificial Sequence: Synthetic oligonucleotide
acgugggcuugacaggaca

SEQ ID NO: 81797 - RNA, 19 nt, Artificial Sequence
  Description of Artificial Sequence: Synthetic oligonucleotide
gggauugugugugugugug

SEQ ID NO: 81798 - RNA, 19 nt, Artificial Sequence
  Description of Artificial Sequence: Synthetic oligonucleotide
uccaugagucgcugcuugu

SEQ ID NO: 81799 - RNA, 19 nt, Artificial Sequence
  Description of Artificial Sequence: Synthetic oligonucleotide
agacccucaugcuuugauu

SEQ ID NO: 81800 - RNA, 19 nt, Artificial Sequence
  Description of Artificial Sequence: Synthetic oligonucleotide
gugauuagguuccuacccu

SEQ ID NO: 81801 - RNA, 19 nt, Artificial Sequence
  Description of Artificial Sequence: Synthetic oligonucleotide
ggauaagcgagacugcagu

SEQ ID NO: 81802 - RNA, 19 nt, Artificial Sequence
  Description of Artificial Sequence: Synthetic oligonucleotide
ggcugagugagucuuaggu

SEQ ID NO: 81803 - RNA, 19 nt, Artificial Sequence
  Description of Artificial Sequence: Synthetic oligonucleotide
guaacuuggugauuagguu

SEQ ID NO: 81804 - RNA, 19 nt, Artificial Sequence
  Description of Artificial Sequence: Synthetic oligonucleotide
gcaagccuaucugaggaag

SEQ ID NO: 81805 - RNA, 19 nt, Artificial Sequence
  Description of Artificial Sequence: Synthetic oligonucleotide
guccgucuaugccauugug

SEQ ID NO: 81806 - RNA, 19 nt, Artificial Sequence
  Description of Artificial Sequence: Synthetic oligonucleotide
gccuacguagucaaacuug

SEQ ID NO: 81807 - RNA, 19 nt, Artificial Sequence
  Description of Artificial Sequence: Synthetic oligonucleotide
agccuaggucacaacacug

SEQ ID NO: 81808 - RNA, 19 nt, Artificial Sequence
  Description of Artificial Sequence: Synthetic oligonucleotide
cccgguucaggcuagcgug

SEQ ID NO: 81809 - RNA, 19 nt, Artificial Sequence
  Description of Artificial Sequence: Synthetic oligonucleotide
ccuacuccuuuuaacagga

SEQ ID NO: 81810 - RNA, 19 nt, Artificial Sequence
  Description of Artificial Sequence: Synthetic oligonucleotide
aacggagcuuguugauguu

SEQ ID NO: 81811 - RNA, 19 nt, Artificial Sequence
  Description of Artificial Sequence: Synthetic oligonucleotide
ccauaucucccaugugggg

SEQ ID NO: 81812 - RNA, 19 nt, Artificial Sequence
  Description of Artificial Sequence: Synthetic oligonucleotide
uccgaacugggaugcuggu

SEQ ID NO: 81813 - RNA, 19 nt, Artificial Sequence
  Description of Artificial Sequence: Synthetic oligonucleotide
gguuagcucuccucuuagc

SEQ ID NO: 81814 - RNA, 19 nt, Artificial Sequence
  Description of Artificial Sequence: Synthetic oligonucleotide
uucuaccaccagaggaauu

SEQ ID NO: 81815 - RNA, 19 nt, Artificial Sequence
  Description of Artificial Sequence: Synthetic oligonucleotide
acccacaguaugcucuuua

SEQ ID NO: 81816 - RNA, 19 nt, Artificial Sequence
  Description of Artificial Sequence: Synthetic oligonucleotide
caccaaucgucagaagcuc

SEQ ID NO: 81817 - RNA, 19 nt, Artificial Sequence
  Description of Artificial Sequence: Synthetic oligonucleotide
cuuuccggauaugcacagc

SEQ ID NO: 81818 - RNA, 19 nt, Artificial Sequence
  Description of Artificial Sequence: Synthetic oligonucleotide
ccgaggaggacuugccucc

SEQ ID NO: 81819 - RNA, 19 nt, Artificial Sequence
  Description of Artificial Sequence: Synthetic oligonucleotide
auugccuggcuggaauccu

SEQ ID NO: 81820 - RNA, 19 nt, Artificial Sequence
  Description of Artificial Sequence: Synthetic oligonucleotide
accagcuauggaguccaug

SEQ ID NO: 81821 - RNA, 19 nt, Artificial Sequence
  Description of Artificial Sequence: Synthetic oligonucleotide
gcuucuuagaggguaaugu

SEQ ID NO: 81822 - RNA, 19 nt, Artificial Sequence
  Description of Artificial Sequence: Synthetic oligonucleotide
ucauucacgugggcuugac

SEQ ID NO: 81823 - RNA, 19 nt, Artificial Sequence
  Description of Artificial Sequence: Synthetic oligonucleotide
cuacgccuggcaagacuac

SEQ ID NO: 81824 - RNA, 19 nt, Artificial Sequence
  Description of Artificial Sequence: Synthetic oligonucleotide
gaggaauugccuggcugga

SEQ ID NO: 81825 - RNA, 19 nt, Artificial Sequence
  Description of Artificial Sequence: Synthetic oligonucleotide
uuauuaagaccgggauguu

SEQ ID NO: 81826 - RNA, 19 nt, Artificial Sequence
  Description of Artificial Sequence: Synthetic oligonucleotide
cuguccugccuacguaguc

SEQ ID NO: 81827 - RNA, 19 nt, Artificial Sequence
  Description of Artificial Sequence: Synthetic oligonucleotide
uuuuccgaacugggaugcu

SEQ ID NO: 81828 - RNA, 19 nt, Artificial Sequence
  Description of Artificial Sequence: Synthetic oligonucleotide
aaccucaauuccaguugaa

SEQ ID NO: 81829 - RNA, 19 nt, Artificial Sequence
  Description of Artificial Sequence: Synthetic oligonucleotide
gcuagcgugguagccuagg

SEQ ID NO: 81830 - RNA, 19 nt, Artificial Sequence
  Description of Artificial Sequence: Synthetic oligonucleotide
ugguuuuaaucagcucauu

SEQ ID NO: 81831 - RNA, 19 nt, Artificial Sequence
  Description of Artificial Sequence: Synthetic oligonucleotide
aggcuagcgugguagccua

SEQ ID NO: 81832 - RNA, 19 nt, Artificial Sequence
  Description of Artificial Sequence: Synthetic oligonucleotide
ucccuuaguugaccuuauu

SEQ ID NO: 81833 - RNA, 19 nt, Artificial Sequence
  Description of Artificial Sequence: Synthetic oligonucleotide
ggacuugccuccuauuggu

SEQ ID NO: 81834 - RNA, 19 nt, Artificial Sequence
  Description of Artificial Sequence: Synthetic oligonucleotide
ggacaaacaaggguggccu

SEQ ID NO: 81835 - RNA, 19 nt, Artificial Sequence
  Description of Artificial Sequence: Synthetic oligonucleotide
ucccgggauugugugugug

SEQ ID NO: 81836 - RNA, 19 nt, Artificial Sequence
  Description of Artificial Sequence: Synthetic oligonucleotide
gcuaguugccuaaggccug

SEQ ID NO: 81837 - RNA, 19 nt, Artificial Sequence
  Description of Artificial Sequence: Synthetic oligonucleotide
cugccuacguagucaaacu

SEQ ID NO: 81838 - RNA, 19 nt, Artificial Sequence
  Description of Artificial Sequence: Synthetic oligonucleotide
caauagcauccagacccuc

SEQ ID NO: 81839 - RNA, 19 nt, Artificial Sequence
  Description of Artificial Sequence: Synthetic oligonucleotide
uucccgggauugugugugu

SEQ ID NO: 81840 - RNA, 19 nt, Artificial Sequence
  Description of Artificial Sequence: Synthetic oligonucleotide
cagacgccacaacauugca

SEQ ID NO: 81841 - RNA, 19 nt, Artificial Sequence
  Description of Artificial Sequence: Synthetic oligonucleotide
ccgguucaggcuagcgugg

SEQ ID NO: 81842 - RNA, 19 nt, Artificial Sequence
  Description of Artificial Sequence: Synthetic oligonucleotide
gacacucggaaaauuccuu

SEQ ID NO: 81843 - RNA, 19 nt, Artificial Sequence
  Description of Artificial Sequence: Synthetic oligonucleotide
cuaugccauugugccggcc

SEQ ID NO: 81844 - RNA, 19 nt, Artificial Sequence
  Description of Artificial Sequence: Synthetic oligonucleotide
acuuggugauuagguuccu

SEQ ID NO: 81845 - RNA, 19 nt, Artificial Sequence
  Description of Artificial Sequence: Synthetic oligonucleotide
guagcuccaccccacuuuu

SEQ ID NO: 81846 - RNA, 19 nt, Artificial Sequence
  Description of Artificial Sequence: Synthetic oligonucleotide
gacaccuggucguggcccu

SEQ ID NO: 81847 - RNA, 19 nt, Artificial Sequence
  Description of Artificial Sequence: Synthetic oligonucleotide
ccaccaaucgucagaagcu

SEQ ID NO: 81848 - RNA, 19 nt, Artificial Sequence
  Description of Artificial Sequence: Synthetic oligonucleotide
gguggucaagagacaaaga

SEQ ID NO: 81849 - RNA, 19 nt, Artificial Sequence
  Description of Artificial Sequence: Synthetic oligonucleotide
ggggacaaacaaggguggc

SEQ ID NO: 81850 - RNA, 19 nt, Artificial Sequence
  Description of Artificial Sequence: Synthetic oligonucleotide
caucacucguguggugcuc

SEQ ID NO: 81851 - RNA, 19 nt, Artificial Sequence
  Description of Artificial Sequence: Synthetic oligonucleotide
agaccgggauguucuucua

SEQ ID NO: 81852 - RNA, 19 nt, Artificial Sequence
  Description of Artificial Sequence: Synthetic oligonucleotide
gcuacgccuggcaagacua

SEQ ID NO: 81853 - RNA, 19 nt, Artificial Sequence
  Description of Artificial Sequence: Synthetic oligonucleotide
ccgggauugugugugugug

SEQ ID NO: 81854 - RNA, 19 nt, Artificial Sequence
  Description of Artificial Sequence: Synthetic oligonucleotide
cuagcgugguagccuaggu

SEQ ID NO: 81855 - RNA, 19 nt, Artificial Sequence
  Description of Artificial Sequence: Synthetic oligonucleotide
ggcaagccuaucugaggaa

SEQ ID NO: 81856 - RNA, 19 nt, Artificial Sequence
  Description of Artificial Sequence: Synthetic oligonucleotide
ccccaauccaacaucggcu

SEQ ID NO: 81857 - RNA, 19 nt, Artificial Sequence
  Description of Artificial Sequence: Synthetic oligonucleotide
gaggaggacuugccuccua

SEQ ID NO: 81858 - RNA, 19 nt, Artificial Sequence
  Description of Artificial Sequence: Synthetic oligonucleotide
cagaacggagcuuguugau

SEQ ID NO: 81859 - RNA, 19 nt, Artificial Sequence
  Description of Artificial Sequence: Synthetic oligonucleotide
gaccucuccacgacaccgu

SEQ ID NO: 81860 - RNA, 19 nt, Artificial Sequence
  Description of Artificial Sequence: Synthetic oligonucleotide
gagcuacgccuggcaagac

SEQ ID NO: 81861 - RNA, 19 nt, Artificial Sequence
  Description of Artificial Sequence: Synthetic oligonucleotide
ggauugugugugugugugu

SEQ ID NO: 81862 - RNA, 19 nt, Artificial Sequence
  Description of Artificial Sequence: Synthetic oligonucleotide
caaucgucagaagcucgcu

SEQ ID NO: 81863 - RNA, 19 nt, Artificial Sequence
  Description of Artificial Sequence: Synthetic oligonucleotide
cccuuaguugaccuuauuu

SEQ ID NO: 81864 - RNA, 19 nt, Artificial Sequence
  Description of Artificial Sequence: Synthetic oligonucleotide
gugcaaccucaauuccagu

SEQ ID NO: 81865 - RNA, 19 nt, Artificial Sequence
  Description of Artificial Sequence: Synthetic oligonucleotide
caucuccagagagccuuaa

SEQ ID NO: 81866 - RNA, 19 nt, Artificial Sequence
  Description of Artificial Sequence: Synthetic oligonucleotide
ugccuccuauugguuccua

SEQ ID NO: 81867 - RNA, 19 nt, Artificial Sequence
  Description of Artificial Sequence: Synthetic oligonucleotide
gucugcuaauaaaccggau

SEQ ID NO: 81868 - RNA, 19 nt, Artificial Sequence
  Description of Artificial Sequence: Synthetic oligonucleotide
ggcccgaagcagauggcaa

SEQ ID NO: 81869 - RNA, 19 nt, Artificial Sequence
  Description of Artificial Sequence: Synthetic oligonucleotide
gguucaggcuagcguggua

SEQ ID NO: 81870 - RNA, 19 nt, Artificial Sequence
  Description of Artificial Sequence: Synthetic oligonucleotide
ccccaaagacugaguccac

SEQ ID NO: 81871 - RNA, 19 nt, Artificial Sequence
  Description of Artificial Sequence: Synthetic oligonucleotide
ggcuagcgugguagccuag

SEQ ID NO: 81872 - RNA, 19 nt, Artificial Sequence
  Description of Artificial Sequence: Synthetic oligonucleotide
ggguuaggagggaaccacu

SEQ ID NO: 81873 - RNA, 19 nt, Artificial Sequence
  Description of Artificial Sequence: Synthetic oligonucleotide
cagucacgaugucuugaau

SEQ ID NO: 81874 - RNA, 19 nt, Artificial Sequence
  Description of Artificial Sequence: Synthetic oligonucleotide
gcccgguucaggcuagcgu

SEQ ID NO: 81875 - RNA, 19 nt, Artificial Sequence
  Description of Artificial Sequence: Synthetic oligonucleotide
cagucucaaaaggcagggu

SEQ ID NO: 81876 - RNA, 19 nt, Artificial Sequence
  Description of Artificial Sequence: Synthetic oligonucleotide
gugccggccuucccaccaa

SEQ ID NO: 81877 - RNA, 19 nt, Artificial Sequence
  Description of Artificial Sequence: Synthetic oligonucleotide
caacaucggcugagugagu

SEQ ID NO: 81878 - RNA, 19 nt, Artificial Sequence
  Description of Artificial Sequence: Synthetic oligonucleotide
caccagggaaaggauccau

SEQ ID NO: 81879 - RNA, 19 nt, Artificial Sequence
  Description of Artificial Sequence: Synthetic oligonucleotide
cccgggauugugugugugu

SEQ ID NO: 81880 - RNA, 19 nt, Artificial Sequence
  Description of Artificial Sequence: Synthetic oligonucleotide
gcuucgcuuguaacuuggu

SEQ ID NO: 81881 - RNA, 19 nt, Artificial Sequence
  Description of Artificial Sequence: Synthetic oligonucleotide
caccuggucguggcccucu

SEQ ID NO: 81882 - RNA, 19 nt, Artificial Sequence
  Description of Artificial Sequence: Synthetic oligonucleotide
cgggauugugugugugugu

SEQ ID NO: 81883 - RNA, 19 nt, Artificial Sequence
  Description of Artificial Sequence: Synthetic oligonucleotide
cgacaccguccucgguguc

SEQ ID NO: 81884 - RNA, 19 nt, Artificial Sequence
  Description of Artificial Sequence: Synthetic oligonucleotide
auaaaauguguuuagcacc

SEQ ID NO: 81885 - RNA, 19 nt, Artificial Sequence
  Description of Artificial Sequence: Synthetic oligonucleotide
aaauuagucuguaaaaugg

SEQ ID NO: 81886 - RNA, 19 nt, Artificial Sequence
  Description of Artificial Sequence: Synthetic oligonucleotide
aacagcggcuucuagaaac

SEQ ID NO: 81887 - RNA, 19 nt, Artificial Sequence
  Description of Artificial Sequence: Synthetic oligonucleotide
aacguuauuaccaaaucag

SEQ ID NO: 81888 - RNA, 19 nt, Artificial Sequence
  Description of Artificial Sequence: Synthetic oligonucleotide
auucuaaggaauuucagcu

SEQ ID NO: 81889 - RNA, 19 nt, Artificial Sequence
  Description of Artificial Sequence: Synthetic oligonucleotide
  modified_base (3)..(3): a, c, u, g, unknown or other
canacaaaaggcaacuuag

SEQ ID NO: 81890 - RNA, 19 nt, Artificial Sequence
  Description of Artificial Sequence: Synthetic oligonucleotide
cuuaggucgagcaucaugc

SEQ ID NO: 81891 - RNA, 19 nt, Artificial Sequence
  Description of Artificial Sequence: Synthetic oligonucleotide
uauucuaaggaauuucagc

SEQ ID NO: 81892 - RNA, 19 nt, Artificial Sequence
  Description of Artificial Sequence: Synthetic oligonucleotide
acauugaaaacucaggaga

SEQ ID NO: 81893 - RNA, 19 nt, Artificial Sequence
  Description of Artificial Sequence: Synthetic oligonucleotide
aaacguuauuaccaaauca

SEQ ID NO: 81894 - RNA, 19 nt, Artificial Sequence
  Description of Artificial Sequence: Synthetic oligonucleotide
aguacaaaguuaaaaugcc

SEQ ID NO: 81895 - RNA, 19 nt, Artificial Sequence
  Description of Artificial Sequence: Synthetic oligonucleotide
aucacaagcauuucgagca

SEQ ID NO: 81896 - RNA, 19 nt, Artificial Sequence
  Description of Artificial Sequence: Synthetic oligonucleotide
gaaucuuugacaucaccag

SEQ ID NO: 81897 - RNA, 19 nt, Artificial Sequence
  Description of Artificial Sequence: Synthetic oligonucleotide
agaguugcaggucaguaac

SEQ ID NO: 81898 - RNA, 19 nt, Artificial Sequence
  Description of Artificial Sequence: Synthetic oligonucleotide
uguuucuauagaauucuag

SEQ ID NO: 81899 - RNA, 19 nt, Artificial Sequence
  Description of Artificial Sequence: Synthetic oligonucleotide
aaaucgcucacuuaguuuu

SEQ ID NO: 81900 - RNA, 19 nt, Artificial Sequence
  Description of Artificial Sequence: Synthetic oligonucleotide
augucccuuacacacaagc

SEQ ID NO: 81901 - RNA, 19 nt, Artificial Sequence
  Description of Artificial Sequence: Synthetic oligonucleotide
cuaggugagacuuagccac

SEQ ID NO: 81902 - RNA, 19 nt, Artificial Sequence
  Description of Artificial Sequence: Synthetic oligonucleotide
agcuaaaacacgugaaauc

SEQ ID NO: 81903 - RNA, 19 nt, Artificial Sequence
  Description of Artificial Sequence: Synthetic oligonucleotide
gacuaggugagacuuagcc

SEQ ID NO: 81904 - RNA, 19 nt, Artificial Sequence
  Description of Artificial Sequence: Synthetic oligonucleotide
uagacucagaccuaaacac

SEQ ID NO: 81905 - RNA, 19 nt, Artificial Sequence
  Description of Artificial Sequence: Synthetic oligonucleotide
uuagcugcguggaaugugg

SEQ ID NO: 81906 - RNA, 19 nt, Artificial Sequence
  Description of Artificial Sequence: Synthetic oligonucleotide
uuagucuguaaaaugggac

SEQ ID NO: 81907 - RNA, 19 nt, Artificial Sequence
  Description of Artificial Sequence: Synthetic oligonucleotide
uaaaacacgugaaaucgcu

SEQ ID NO: 81908 - RNA, 19 nt, Artificial Sequence
  Description of Artificial Sequence: Synthetic oligonucleotide
ucaagaaaucgugagaugu

SEQ ID NO: 81909 - RNA, 19 nt, Artificial Sequence
  Description of Artificial Sequence: Synthetic oligonucleotide
uuuauggaauuugaccugg

SEQ ID NO: 81910 - RNA, 19 nt, Artificial Sequence
  Description of Artificial Sequence: Synthetic oligonucleotide
cuucccacgagaaagcacc

SEQ ID NO: 81911 - RNA, 19 nt, Artificial Sequence
  Description of Artificial Sequence: Synthetic oligonucleotide
  modified_base (9)..(9): a, c, u, g, unknown or other
aaagaacanacaaaaggca

SEQ ID NO: 81912 - RNA, 19 nt, Artificial Sequence
  Description of Artificial Sequence: Synthetic oligonucleotide
auagaauuuucccucucuc

SEQ ID NO: 81913 - RNA, 19 nt, Artificial Sequence
  Description of Artificial Sequence: Synthetic oligonucleotide
gacuucagcaccuagcaac

SEQ ID NO: 81914 - RNA, 19 nt, Artificial Sequence
  Description of Artificial Sequence: Synthetic oligonucleotide
aagguuuccuauaugguag

SEQ ID NO: 81915 - RNA, 19 nt, Artificial Sequence
  Description of Artificial Sequence: Synthetic oligonucleotide
uguggaguaaaagccaccg

SEQ ID NO: 81916 - RNA, 19 nt, Artificial Sequence
  Description of Artificial Sequence: Synthetic oligonucleotide
aagggauagaacacagacc

SEQ ID NO: 81917 - RNA, 19 nt, Artificial Sequence
  Description of Artificial Sequence: Synthetic oligonucleotide
uguccaacccuuuugcaag

SEQ ID NO: 81918 - RNA, 19 nt, Artificial Sequence
  Description of Artificial Sequence: Synthetic oligonucleotide
uauugcacgagucuggaua

SEQ ID NO: 81919 - RNA, 19 nt, Artificial Sequence
  Description of Artificial Sequence: Synthetic oligonucleotide
uugucacuaacgcccaugg

SEQ ID NO: 81920 - RNA, 19 nt, Artificial Sequence
  Description of Artificial Sequence: Synthetic oligonucleotide
ucgccuguaacaguaaacg

SEQ ID NO: 81921 - RNA, 19 nt, Artificial Sequence
  Description of Artificial Sequence: Synthetic oligonucleotide
uauagaauuuucccucucu

SEQ ID NO: 81922 - RNA, 19 nt, Artificial Sequence
  Description of Artificial Sequence: Synthetic oligonucleotide
agcggcucauguuugagac

SEQ ID NO: 81923 - RNA, 19 nt, Artificial Sequence
  Description of Artificial Sequence: Synthetic oligonucleotide
ucugcauauucuaaggaau

SEQ ID NO: 81924 - RNA, 19 nt, Artificial Sequence
  Description of Artificial Sequence: Synthetic oligonucleotide
gcuaaaacacgugaaaucg

SEQ ID NO: 81925 - RNA, 19 nt, Artificial Sequence
  Description of Artificial Sequence: Synthetic oligonucleotide
uaauuauugcacgagucug

SEQ ID NO: 81926 - RNA, 19 nt, Artificial Sequence
  Description of Artificial Sequence: Synthetic oligonucleotide
auguguuagacugacugac

SEQ ID NO: 81927 - RNA, 19 nt, Artificial Sequence
  Description of Artificial Sequence: Synthetic oligonucleotide
aguacccucguaaaguccc

SEQ ID NO: 81928 - RNA, 19 nt, Artificial Sequence
  Description of Artificial Sequence: Synthetic oligonucleotide
aagguaauuauugcacgag

SEQ ID NO: 81929 - RNA, 19 nt, Artificial Sequence
  Description of Artificial Sequence: Synthetic oligonucleotide
uuguacaguaguuaacagu

SEQ ID NO: 81930 - RNA, 19 nt, Artificial Sequence
  Description of Artificial Sequence: Synthetic oligonucleotide
aaagccaccggggucaaag

SEQ ID NO: 81931 - RNA, 19 nt, Artificial Sequence
  Description of Artificial Sequence: Synthetic oligonucleotide
uccuaucugaucaggcuag

SEQ ID NO: 81932 - RNA, 19 nt, Artificial Sequence
  Description of Artificial Sequence: Synthetic oligonucleotide
uagacugacugacuggugu

SEQ ID NO: 81933 - RNA, 19 nt, Artificial Sequence
  Description of Artificial Sequence: Synthetic oligonucleotide
  modified_base (4)..(4): a, c, u, g, unknown or other
acanacaaaaggcaacuua

SEQ ID NO: 81934 - RNA, 19 nt, Artificial Sequence
  Description of Artificial Sequence: Synthetic oligonucleotide
ucguaaagucccuuucggg

SEQ ID NO: 81935 - RNA, 19 nt, Artificial Sequence
  Description of Artificial Sequence: Synthetic oligonucleotide
acgagucuggauaaagucc

SEQ ID NO: 81936 - RNA, 19 nt, Artificial Sequence
  Description of Artificial Sequence: Synthetic oligonucleotide
augacuggcacgcuccacg

SEQ ID NO: 81937 - RNA, 19 nt, Artificial Sequence
  Description of Artificial Sequence: Synthetic oligonucleotide
acggaguuuacuuugcagu

SEQ ID NO: 81938 - RNA, 19 nt, Artificial Sequence
  Description of Artificial Sequence: Synthetic oligonucleotide
uggggauucacuucuacuc

SEQ ID NO: 81939 - RNA, 19 nt, Artificial Sequence
  Description of Artificial Sequence: Synthetic oligonucleotide
aucgaaugggccccacucc

SEQ ID NO: 81940 - RNA, 19 nt, Artificial Sequence
  Description of Artificial Sequence: Synthetic oligonucleotide
caucacaagcauuucgagc

SEQ ID NO: 81941 - RNA, 19 nt, Artificial Sequence
  Description of Artificial Sequence: Synthetic oligonucleotide
cauauucuaaggaauuuca

SEQ ID NO: 81942 - RNA, 19 nt, Artificial Sequence
  Description of Artificial Sequence: Synthetic oligonucleotide
acguuauuaccaaaucagc

SEQ ID NO: 81943 - RNA, 19 nt, Artificial Sequence
  Description of Artificial Sequence: Synthetic oligonucleotide
acucucuggacauacggug

SEQ ID NO: 81944 - RNA, 19 nt, Artificial Sequence
  Description of Artificial Sequence: Synthetic oligonucleotide
gaguuuacuuugcaguaug

SEQ ID NO: 81945 - RNA, 19 nt, Artificial Sequence
  Description of Artificial Sequence: Synthetic oligonucleotide
ugagacgucuguguagugg

SEQ ID NO: 81946 - RNA, 19 nt, Artificial Sequence
  Description of Artificial Sequence: Synthetic oligonucleotide
gaucaggcuagagacaacc

SEQ ID NO: 81947 - RNA, 19 nt, Artificial Sequence
  Description of Artificial Sequence: Synthetic oligonucleotide
guuauuaccaaaucagcua

SEQ ID NO: 81948 - RNA, 19 nt, Artificial Sequence
  Description of Artificial Sequence: Synthetic oligonucleotide
uguccaagguauuacuacu

SEQ ID NO: 81949 - RNA, 19 nt, Artificial Sequence
  Description of Artificial Sequence: Synthetic oligonucleotide
auauaucucauagcuauca

SEQ ID NO: 81950 - RNA, 19 nt, Artificial Sequence
  Description of Artificial Sequence: Synthetic oligonucleotide
uuucugaucccacgaggag

SEQ ID NO: 81951 - RNA, 19 nt, Artificial Sequence
  Description of Artificial Sequence: Synthetic oligonucleotide
acgagaaagcacccgcuac

SEQ ID NO: 81952 - RNA, 19 nt, Artificial Sequence
  Description of Artificial Sequence: Synthetic oligonucleotide
cucguaaagucccuuucgg

SEQ ID NO: 81953 - RNA, 19 nt, Artificial Sequence
  Description of Artificial Sequence: Synthetic oligonucleotide
gucagucacagcaagaaac

SEQ ID NO: 81954 - RNA, 19 nt, Artificial Sequence
  Description of Artificial Sequence: Synthetic oligonucleotide
ggacauacgguguaguaag

SEQ ID NO: 81955 - RNA, 19 nt, Artificial Sequence
  Description of Artificial Sequence: Synthetic oligonucleotide
gauccuagggagaagugug

SEQ ID NO: 81956 - RNA, 19 nt, Artificial Sequence
  Description of Artificial Sequence: Synthetic oligonucleotide
aacucagcugggcugguca

SEQ ID NO: 81957 - RNA, 19 nt, Artificial Sequence
  Description of Artificial Sequence: Synthetic oligonucleotide
aaaacacgugaaaucgcuc

SEQ ID NO: 81958 - RNA, 19 nt, Artificial Sequence
  Description of Artificial Sequence: Synthetic oligonucleotide
gcauguguuagacugacug

SEQ ID NO: 81959 - RNA, 19 nt, Artificial Sequence
  Description of Artificial Sequence: Synthetic oligonucleotide
acuaggugagacuuagcca

SEQ ID NO: 81960 - RNA, 19 nt, Artificial Sequence
  Description of Artificial Sequence: Synthetic oligonucleotide
uccacgaucggcccagcag

SEQ ID NO: 81961 - RNA, 19 nt, Artificial Sequence
  Description of Artificial Sequence: Synthetic oligonucleotide
aaaucagcuacggaguuua

SEQ ID NO: 81962 - RNA, 19 nt, Artificial Sequence
  Description of Artificial Sequence: Synthetic oligonucleotide
acuuagacagaaagucacc

SEQ ID NO: 81963 - RNA, 19 nt, Artificial Sequence
  Description of Artificial Sequence: Synthetic oligonucleotide
uaggucgagcaucaugcag

SEQ ID NO: 81964 - RNA, 19 nt, Artificial Sequence
  Description of Artificial Sequence: Synthetic oligonucleotide
acucaagaaaucgugagau

SEQ ID NO: 81965 - RNA, 19 nt, Artificial Sequence
  Description of Artificial Sequence: Synthetic oligonucleotide
  modified_base (2)..(2): a, c, u, g, unknown or other
anacaaaaggcaacuuaga

SEQ ID NO: 81966 - RNA, 19 nt, Artificial Sequence
  Description of Artificial Sequence: Synthetic oligonucleotide
uacgguguaguaagaauau

SEQ ID NO: 81967 - RNA, 19 nt, Artificial Sequence
  Description of Artificial Sequence: Synthetic oligonucleotide
ugaaaucgcucacuuaguu

SEQ ID NO: 81968 - RNA, 19 nt, Artificial Sequence
  Description of Artificial Sequence: Synthetic oligonucleotide
ucgggaucgagucuaccug

SEQ ID NO: 81969 - RNA, 19 nt, Artificial Sequence
  Description of Artificial Sequence: Synthetic oligonucleotide
cauuuagcugcguggaaug

SEQ ID NO: 81970 - RNA, 19 nt, Artificial Sequence
  Description of Artificial Sequence: Synthetic oligonucleotide
accagaucgaaugggcccc

SEQ ID NO: 81971 - RNA, 19 nt, Artificial Sequence
  Description of Artificial Sequence: Synthetic oligonucleotide
uucgggaucgagucuaccu

SEQ ID NO: 81972 - RNA, 19 nt, Artificial Sequence
  Description of Artificial Sequence: Synthetic oligonucleotide
agguaauuauugcacgagu

SEQ ID NO: 81973 - RNA, 19 nt, Artificial Sequence
  Description of Artificial Sequence: Synthetic oligonucleotide
uguuugagacgucugugua

SEQ ID NO: 81974 - RNA, 19 nt, Artificial Sequence
  Description of Artificial Sequence: Synthetic oligonucleotide
uucugaucccacgaggagc

SEQ ID NO: 81975 - RNA, 19 nt, Artificial Sequence
  Description of Artificial Sequence: Synthetic oligonucleotide
aggcagucauuuuagauua

SEQ ID NO: 81976 - RNA, 19 nt, Artificial Sequence
  Description of Artificial Sequence: Synthetic oligonucleotide
ucugaucaggcuagagaca

SEQ ID NO: 81977 - RNA, 19 nt, Artificial Sequence
  Description of Artificial Sequence: Synthetic oligonucleotide
uguguuagacugacugacu

SEQ ID NO: 81978 - RNA, 19 nt, Artificial Sequence
  Description of Artificial Sequence: Synthetic oligonucleotide
gcaacuuagacagaaaguc

SEQ ID NO: 81979 - RNA, 19 nt, Artificial Sequence
  Description of Artificial Sequence: Synthetic oligonucleotide
ucauuacuucaguuugccc

SEQ ID NO: 81980 - RNA, 19 nt, Artificial Sequence
  Description of Artificial Sequence: Synthetic oligonucleotide
gguguaagagcugaacggg

SEQ ID NO: 81981 - RNA, 19 nt, Artificial Sequence
  Description of Artificial Sequence: Synthetic oligonucleotide
cucagaccuaaacacgggc

SEQ ID NO: 81982 - RNA, 19 nt, Artificial Sequence
  Description of Artificial Sequence: Synthetic oligonucleotide
guaaagucccuuucgggca

SEQ ID NO: 81983 - RNA, 19 nt, Artificial Sequence
  Description of Artificial Sequence: Synthetic oligonucleotide
gaaagagggccaagggagg

SEQ ID NO: 81984 - RNA, 19 nt, Artificial Sequence
  Description of Artificial Sequence: Synthetic oligonucleotide
auacuguagaaaaggucgg

SEQ ID NO: 81985 - RNA, 19 nt, Artificial Sequence
  Description of Artificial Sequence: Synthetic oligonucleotide
uugucagucacagcaagaa

SEQ ID NO: 81986 - RNA, 19 nt, Artificial Sequence
  Description of Artificial Sequence: Synthetic oligonucleotide
cuugaccccuuuuggacag

SEQ ID NO: 81987 - RNA, 19 nt, Artificial Sequence
  Description of Artificial Sequence: Synthetic oligonucleotide
ggacucaagaaaucgugag

SEQ ID NO: 81988 - RNA, 19 nt, Artificial Sequence
  Description of Artificial Sequence: Synthetic oligonucleotide
cgugaaaucgcucacuuag

SEQ ID NO: 81989 - RNA, 19 nt, Artificial Sequence
  Description of Artificial Sequence: Synthetic oligonucleotide
aagacggggaaaugcuggu

SEQ ID NO: 81990 - RNA, 19 nt, Artificial Sequence
  Description of Artificial Sequence: Synthetic oligonucleotide
guaauuauugcacgagucu

SEQ ID NO: 81991 - RNA, 19 nt, Artificial Sequence
  Description of Artificial Sequence: Synthetic oligonucleotide
ugugugacgcugcggacgu

SEQ ID NO: 81992 - RNA, 19 nt, Artificial Sequence
  Description of Artificial Sequence: Synthetic oligonucleotide
guaaaagccaccgggguca

SEQ ID NO: 81993 - RNA, 19 nt, Artificial Sequence
  Description of Artificial Sequence: Synthetic oligonucleotide
uaucaucauuacuucaguu

SEQ ID NO: 81994 - RNA, 19 nt, Artificial Sequence
  Description of Artificial Sequence: Synthetic oligonucleotide
ugcugcuauaacccucuug

SEQ ID NO: 81995 - RNA, 19 nt, Artificial Sequence
  Description of Artificial Sequence: Synthetic oligonucleotide
ugaaaucgccuguaacagu

SEQ ID NO: 81996 - RNA, 19 nt, Artificial Sequence
  Description of Artificial Sequence: Synthetic oligonucleotide
ggauaaaguccacacucag

SEQ ID NO: 81997 - RNA, 19 nt, Artificial Sequence
  Description of Artificial Sequence: Synthetic oligonucleotide
acuugacuggugccuagag

SEQ ID NO: 81998 - RNA, 19 nt, Artificial Sequence
  Description of Artificial Sequence: Synthetic oligonucleotide
ugguaggcaccugaaauac

SEQ ID NO: 81999 - RNA, 19 nt, Artificial Sequence
  Description of Artificial Sequence: Synthetic oligonucleotide
uuagacugacugacuggug

SEQ ID NO: 82000 - RNA, 19 nt, Artificial Sequence
  Description of Artificial Sequence: Synthetic oligonucleotide
agucggguuguacaguagu

SEQ ID NO: 82001 - RNA, 19 nt, Artificial Sequence
  Description of Artificial Sequence: Synthetic oligonucleotide
gaaaucgccuguaacagua

SEQ ID NO: 82002 - RNA, 19 nt, Artificial Sequence
  Description of Artificial Sequence: Synthetic oligonucleotide
uucuaaggaauuucagcuu

SEQ ID NO: 82003 - RNA, 19 nt, Artificial Sequence
  Description of Artificial Sequence: Synthetic oligonucleotide
guccgaacgccucagcuug

SEQ ID NO: 82004 - RNA, 19 nt, Artificial Sequence
  Description of Artificial Sequence: Synthetic oligonucleotide
ucccuuucgggcaggguug

SEQ ID NO: 82005 - RNA, 19 nt, Artificial Sequence
  Description of Artificial Sequence: Synthetic oligonucleotide
agaacacagaccugcuaga

SEQ ID NO: 82006 - RNA, 19 nt, Artificial Sequence
  Description of Artificial Sequence: Synthetic oligonucleotide
gacguacaugaucuuuccc

SEQ ID NO: 82007 - RNA, 19 nt, Artificial Sequence
  Description of Artificial Sequence: Synthetic oligonucleotide
aguaaacguuauuaccaaa

SEQ ID NO: 82008 - RNA, 19 nt, Artificial Sequence
  Description of Artificial Sequence: Synthetic oligonucleotide
ggugaugguccuuacuuug

SEQ ID NO: 82009 - RNA, 19 nt, Artificial Sequence
  Description of Artificial Sequence: Synthetic oligonucleotide
uccaagguauuacuacuuu

SEQ ID NO: 82010 - RNA, 19 nt, Artificial Sequence
  Description of Artificial Sequence: Synthetic oligonucleotide
uguuacugauuuugcugcu

SEQ ID NO: 82011 - RNA, 19 nt, Artificial Sequence
  Description of Artificial Sequence: Synthetic oligonucleotide
ugugacgcugcggacgucc

SEQ ID NO: 82012 - RNA, 19 nt, Artificial Sequence
  Description of Artificial Sequence: Synthetic oligonucleotide
aagcggcucauguuugaga

SEQ ID NO: 82013 - RNA, 19 nt, Artificial Sequence
  Description of Artificial Sequence: Synthetic oligonucleotide
auagaauucuagggcuggg

SEQ ID NO: 82014 - RNA, 19 nt, Artificial Sequence
  Description of Artificial Sequence: Synthetic oligonucleotide
ggaaucuuugacaucacca

SEQ ID NO: 82015 - RNA, 19 nt, Artificial Sequence
  Description of Artificial Sequence: Synthetic oligonucleotide
uucuacucucuggacauac

SEQ ID NO: 82016 - RNA, 19 nt, Artificial Sequence
  Description of Artificial Sequence: Synthetic oligonucleotide
caagguuuccuauauggua

SEQ ID NO: 82017 - RNA, 19 nt, Artificial Sequence
  Description of Artificial Sequence: Synthetic oligonucleotide
cuauaugguaggcaccuga

SEQ ID NO: 82018 - RNA, 19 nt, Artificial Sequence
  Description of Artificial Sequence: Synthetic oligonucleotide
guggaguaaaagccaccgg

SEQ ID NO: 82019 - RNA, 19 nt, Artificial Sequence
  Description of Artificial Sequence: Synthetic oligonucleotide
acguccccgacguacauga

SEQ ID NO: 82020 - RNA, 19 nt, Artificial Sequence
  Description of Artificial Sequence: Synthetic oligonucleotide
uccguccucucguucuugg

SEQ ID NO: 82021 - RNA, 19 nt, Artificial Sequence
  Description of Artificial Sequence: Synthetic oligonucleotide
aaucgcucacuuaguuuuc

SEQ ID NO: 82022 - RNA, 19 nt, Artificial Sequence
  Description of Artificial Sequence: Synthetic oligonucleotide
cguaaagucccuuucgggc

SEQ ID NO: 82023 - RNA, 19 nt, Artificial Sequence
  Description of Artificial Sequence: Synthetic oligonucleotide
auacgguguaguaagaaua

SEQ ID NO: 82024 - RNA, 19 nt, Artificial Sequence
  Description of Artificial Sequence: Synthetic oligonucleotide
augguaggcaccugaaaua

SEQ ID NO: 82025 - RNA, 19 nt, Artificial Sequence
  Description of Artificial Sequence: Synthetic oligonucleotide
ugaacgggccaacuccagu

SEQ ID NO: 82026 - RNA, 19 nt, Artificial Sequence
  Description of Artificial Sequence: Synthetic oligonucleotide
gguaauuauugcacgaguc

SEQ ID NO: 82027 - RNA, 19 nt, Artificial Sequence
  Description of Artificial Sequence: Synthetic oligonucleotide
cagaccugcuagaggaagc

SEQ ID NO: 82028 - RNA, 19 nt, Artificial Sequence
  Description of Artificial Sequence: Synthetic oligonucleotide
aacuucgggaucgagucua

SEQ ID NO: 82029 - RNA, 19 nt, Artificial Sequence
  Description of Artificial Sequence: Synthetic oligonucleotide
gaucuuucccuggugccgc

SEQ ID NO: 82030 - RNA, 19 nt, Artificial Sequence
  Description of Artificial Sequence: Synthetic oligonucleotide
ggucacguggcccugggcc

SEQ ID NO: 82031 - RNA, 19 nt, Artificial Sequence
  Description of Artificial Sequence: Synthetic oligonucleotide
gcugcuauaacccucuugu

SEQ ID NO: 82032 - RNA, 19 nt, Artificial Sequence
  Description of Artificial Sequence: Synthetic oligonucleotide
cgguguaguaagaauauag

SEQ ID NO: 82033 - RNA, 19 nt, Artificial Sequence
  Description of Artificial Sequence: Synthetic oligonucleotide
gguauuacuacuuucuguu

SEQ ID NO: 82034 - RNA, 19 nt, Artificial Sequence
  Description of Artificial Sequence: Synthetic oligonucleotide
cuaccugucaucagggcaa

SEQ ID NO: 82035 - RNA, 19 nt, Artificial Sequence
  Description of Artificial Sequence: Synthetic oligonucleotide
gaagucggguuguacagua

SEQ ID NO: 82036 - RNA, 19 nt, Artificial Sequence
  Description of Artificial Sequence: Synthetic oligonucleotide
ugacuugacuggugccuag

SEQ ID NO: 82037 - RNA, 19 nt, Artificial Sequence
  Description of Artificial Sequence: Synthetic oligonucleotide
ucgugagaugucccucuug

SEQ ID NO: 82038 - RNA, 19 nt, Artificial Sequence
  Description of Artificial Sequence: Synthetic oligonucleotide
gagcagucaagugcuagac

SEQ ID NO: 82039 - RNA, 19 nt, Artificial Sequence
  Description of Artificial Sequence: Synthetic oligonucleotide
agguccgaacgccucagcu

SEQ ID NO: 82040 - RNA, 19 nt, Artificial Sequence
  Description of Artificial Sequence: Synthetic oligonucleotide
auuccuucagcggagcgaa

SEQ ID NO: 82041 - RNA, 19 nt, Artificial Sequence
  Description of Artificial Sequence: Synthetic oligonucleotide
gcuagacucagaccuaaac

SEQ ID NO: 82042 - RNA, 19 nt, Artificial Sequence
  Description of Artificial Sequence: Synthetic oligonucleotide
agcagucaagugcuagacu

SEQ ID NO: 82043 - RNA, 19 nt, Artificial Sequence
  Description of Artificial Sequence: Synthetic oligonucleotide
uucccacgagaaagcaccc

SEQ ID NO: 82044 - RNA, 19 nt, Artificial Sequence
  Description of Artificial Sequence: Synthetic oligonucleotide
uucgaugccucagcuaaaa

SEQ ID NO: 82045 - RNA, 19 nt, Artificial Sequence
  Description of Artificial Sequence: Synthetic oligonucleotide
ugcauuuagcugcguggaa

SEQ ID NO: 82046 - RNA, 19 nt, Artificial Sequence
  Description of Artificial Sequence: Synthetic oligonucleotide
aacacgggccugcuuggaa

SEQ ID NO: 82047 - RNA, 19 nt, Artificial Sequence
  Description of Artificial Sequence: Synthetic oligonucleotide
ugacuucagcaccuagcaa

SEQ ID NO: 82048 - RNA, 19 nt, Artificial Sequence
  Description of Artificial Sequence: Synthetic oligonucleotide
guggcggaugacuggcacg

SEQ ID NO: 82049 - RNA, 19 nt, Artificial Sequence
  Description of Artificial Sequence: Synthetic oligonucleotide
acccuguagugccauaaaa

SEQ ID NO: 82050 - RNA, 19 nt, Artificial Sequence
  Description of Artificial Sequence: Synthetic oligonucleotide
caggcuagagacaaccaaa

SEQ ID NO: 82051 - RNA, 19 nt, Artificial Sequence
  Description of Artificial Sequence: Synthetic oligonucleotide
guugcaggucaguaaccac

SEQ ID NO: 82052 - RNA, 19 nt, Artificial Sequence
  Description of Artificial Sequence: Synthetic oligonucleotide
ugacuggcacgcuccacga

SEQ ID NO: 82053 - RNA, 19 nt, Artificial Sequence
  Description of Artificial Sequence: Synthetic oligonucleotide
ucuggacauacgguguagu

SEQ ID NO: 82054 - RNA, 19 nt, Artificial Sequence
  Description of Artificial Sequence: Synthetic oligonucleotide
acucagaccuaaacacggg

SEQ ID NO: 82055 - RNA, 19 nt, Artificial Sequence
  Description of Artificial Sequence: Synthetic oligonucleotide
gcggaaacccuuugcacag

SEQ ID NO: 82056 - RNA, 19 nt, Artificial Sequence
  Description of Artificial Sequence: Synthetic oligonucleotide
ugaagucggguuguacagu

SEQ ID NO: 82057 - RNA, 19 nt, Artificial Sequence
  Description of Artificial Sequence: Synthetic oligonucleotide
ucgaugccucagcuaaaac

SEQ ID NO: 82058 - RNA, 19 nt, Artificial Sequence
  Description of Artificial Sequence: Synthetic oligonucleotide
ucggguuguacaguaguua

SEQ ID NO: 82059 - RNA, 19 nt, Artificial Sequence
  Description of Artificial Sequence: Synthetic oligonucleotide
aggcuaacagaaggaaucu

SEQ ID NO: 82060 - RNA, 19 nt, Artificial Sequence
  Description of Artificial Sequence: Synthetic oligonucleotide
ccucguaaagucccuuucg

SEQ ID NO: 82061 - RNA, 19 nt, Artificial Sequence
  Description of Artificial Sequence: Synthetic oligonucleotide
ggcggaaacccuuugcaca

SEQ ID NO: 82062 - RNA, 19 nt, Artificial Sequence
  Description of Artificial Sequence: Synthetic oligonucleotide
ucccacgagaaagcacccg

SEQ ID NO: 82063 - RNA, 19 nt, Artificial Sequence
  Description of Artificial Sequence: Synthetic oligonucleotide
gagccggccaguacccucg

SEQ ID NO: 82064 - RNA, 19 nt, Artificial Sequence
  Description of Artificial Sequence: Synthetic oligonucleotide
uggugaugguccuuacuuu

SEQ ID NO: 82065 - RNA, 19 nt, Artificial Sequence
  Description of Artificial Sequence: Synthetic oligonucleotide
gcugauacuucucuccguc

SEQ ID NO: 82066 - RNA, 19 nt, Artificial Sequence
  Description of Artificial Sequence: Synthetic oligonucleotide
cugaucaggcuagagacaa

SEQ ID NO: 82067 - RNA, 19 nt, Artificial Sequence
  Description of Artificial Sequence: Synthetic oligonucleotide
gaaaucgcucacuuaguuu

SEQ ID NO: 82068 - RNA, 19 nt, Artificial Sequence
  Description of Artificial Sequence: Synthetic oligonucleotide
cuggcggaaacccuuugca

SEQ ID NO: 82069 - RNA, 19 nt, Artificial Sequence
  Description of Artificial Sequence: Synthetic oligonucleotide
accuagcaacuucgggauc

SEQ ID NO: 82070 - RNA, 19 nt, Artificial Sequence
  Description of Artificial Sequence: Synthetic oligonucleotide
aguuuacuuugcaguauga

SEQ ID NO: 82071 - RNA, 19 nt, Artificial Sequence
  Description of Artificial Sequence: Synthetic oligonucleotide
caccugcuuggaucaaacc

SEQ ID NO: 82072 - RNA, 19 nt, Artificial Sequence
  Description of Artificial Sequence: Synthetic oligonucleotide
agaucgaaugggccccacu

SEQ ID NO: 82073 - RNA, 19 nt, Artificial Sequence
  Description of Artificial Sequence: Synthetic oligonucleotide
aagucggguuguacaguag

SEQ ID NO: 82074 - RNA, 19 nt, Artificial Sequence
  Description of Artificial Sequence: Synthetic oligonucleotide
gaucgagucuaccugucau

SEQ ID NO: 82075 - RNA, 19 nt, Artificial Sequence
  Description of Artificial Sequence: Synthetic oligonucleotide
ugguccuuacuuugcugaa

SEQ ID NO: 82076 - RNA, 19 nt, Artificial Sequence
  Description of Artificial Sequence: Synthetic oligonucleotide
uacuucgaugccucagcua

SEQ ID NO: 82077 - RNA, 19 nt, Artificial Sequence
  Description of Artificial Sequence: Synthetic oligonucleotide
augccucagcuaaaacacg

SEQ ID NO: 82078 - RNA, 19 nt, Artificial Sequence
  Description of Artificial Sequence: Synthetic oligonucleotide
caaggccacgcccuccggc

SEQ ID NO: 82079 - RNA, 19 nt, Artificial Sequence
  Description of Artificial Sequence: Synthetic oligonucleotide
uugagacgucuguguagug

SEQ ID NO: 82080 - RNA, 19 nt, Artificial Sequence
  Description of Artificial Sequence: Synthetic oligonucleotide
uagcaccuuguugagucac

SEQ ID NO: 82081 - RNA, 19 nt, Artificial Sequence
  Description of Artificial Sequence: Synthetic oligonucleotide
acacgggccugcuuggaaa

SEQ ID NO: 82082 - RNA, 19 nt, Artificial Sequence
  Description of Artificial Sequence: Synthetic oligonucleotide
ucccuaauggaagcccagu

SEQ ID NO: 82083 - RNA, 19 nt, Artificial Sequence
  Description of Artificial Sequence: Synthetic oligonucleotide
cuccuuaggucgagcauca

SEQ ID NO: 82084 - RNA, 19 nt, Artificial Sequence
  Description of Artificial Sequence: Synthetic oligonucleotide
cauacgguguaguaagaau

SEQ ID NO: 82085 - RNA, 19 nt, Artificial Sequence
  Description of Artificial Sequence: Synthetic oligonucleotide
ugcuuggaucaaaccuccu

SEQ ID NO: 82086 - RNA, 19 nt, Artificial Sequence
  Description of Artificial Sequence: Synthetic oligonucleotide
uagcugcguggaaugugga

SEQ ID NO: 82087 - RNA, 19 nt, Artificial Sequence
  Description of Artificial Sequence: Synthetic oligonucleotide
aaggcaacuuagacagaaa

SEQ ID NO: 82088 - RNA, 19 nt, Artificial Sequence
  Description of Artificial Sequence: Synthetic oligonucleotide
cacgggccugcuuggaaac

SEQ ID NO: 82089 - RNA, 19 nt, Artificial Sequence
  Description of Artificial Sequence: Synthetic oligonucleotide
cacgggguuggacucaaga

SEQ ID NO: 82090 - RNA, 19 nt, Artificial Sequence
  Description of Artificial Sequence: Synthetic oligonucleotide
aaaucgccuguaacaguaa

SEQ ID NO: 82091 - RNA, 19 nt, Artificial Sequence
  Description of Artificial Sequence: Synthetic oligonucleotide
caugucccuuacacacaag

SEQ ID NO: 82092 - RNA, 19 nt, Artificial Sequence
  Description of Artificial Sequence: Synthetic oligonucleotide
cccucuugucacuaacgcc

SEQ ID NO: 82093 - RNA, 19 nt, Artificial Sequence
  Description of Artificial Sequence: Synthetic oligonucleotide
ucgcucacuuaguuuucaa

SEQ ID NO: 82094 - RNA, 19 nt, Artificial Sequence
  Description of Artificial Sequence: Synthetic oligonucleotide
ugggacuaggugagacuua

SEQ ID NO: 82095 - RNA, 19 nt, Artificial Sequence
  Description of Artificial Sequence: Synthetic oligonucleotide
aucgcucacuuaguuuuca

SEQ ID NO: 82096 - RNA, 19 nt, Artificial Sequence
  Description of Artificial Sequence: Synthetic oligonucleotide
ccuuuugcaaggccacgcc

SEQ ID NO: 82097 - RNA, 19 nt, Artificial Sequence
  Description of Artificial Sequence: Synthetic oligonucleotide
guuggacucaagaaaucgu

SEQ ID NO: 82098 - RNA, 19 nt, Artificial Sequence
  Description of Artificial Sequence: Synthetic oligonucleotide
agcgaagagguggcggaug

SEQ ID NO: 82099 - RNA, 19 nt, Artificial Sequence
  Description of Artificial Sequence: Synthetic oligonucleotide
cuggucacguggcccuggg

SEQ ID NO: 82100 - RNA, 19 nt, Artificial Sequence
  Description of Artificial Sequence: Synthetic oligonucleotide
aggggcggucaucucccuc

SEQ ID NO: 82101 - RNA, 19 nt, Artificial Sequence
  Description of Artificial Sequence: Synthetic oligonucleotide
aaacacgggccugcuugga

SEQ ID NO: 82102 - RNA, 19 nt, Artificial Sequence
  Description of Artificial Sequence: Synthetic oligonucleotide
gacauacgguguaguaaga

SEQ ID NO: 82103 - RNA, 19 nt, Artificial Sequence
  Description of Artificial Sequence: Synthetic oligonucleotide
caucucaccaaggcaguca

SEQ ID NO: 82104 - RNA, 19 nt, Artificial Sequence
  Description of Artificial Sequence: Synthetic oligonucleotide
acuucgggaucgagucuac

SEQ ID NO: 82105 - RNA, 19 nt, Artificial Sequence
  Description of Artificial Sequence: Synthetic oligonucleotide
acagcggcuucuagaaacu

SEQ ID NO: 82106 - RNA, 19 nt, Artificial Sequence
  Description of Artificial Sequence: Synthetic oligonucleotide
uccugauccuagggagaag

SEQ ID NO: 82107 - RNA, 19 nt, Artificial Sequence
  Description of Artificial Sequence: Synthetic oligonucleotide
cuacggaguuuacuuugca

SEQ ID NO: 82108 - RNA, 19 nt, Artificial Sequence
  Description of Artificial Sequence: Synthetic oligonucleotide
acgugaaaucgcucacuua

SEQ ID NO: 82109 - RNA, 19 nt, Artificial Sequence
  Description of Artificial Sequence: Synthetic oligonucleotide
uccgaacgccucagcuuga

SEQ ID NO: 82110 - RNA, 19 nt, Artificial Sequence
  Description of Artificial Sequence: Synthetic oligonucleotide
cagaccuaaacacgggccu

SEQ ID NO: 82111 - RNA, 19 nt, Artificial Sequence
  Description of Artificial Sequence: Synthetic oligonucleotide
cgaugccucagcuaaaaca

SEQ ID NO: 82112 - RNA, 19 nt, Artificial Sequence
  Description of Artificial Sequence: Synthetic oligonucleotide
cuggacauacgguguagua

SEQ ID NO: 82113 - RNA, 19 nt, Artificial Sequence
  Description of Artificial Sequence: Synthetic oligonucleotide
gguuuccuauaugguaggc

SEQ ID NO: 82114 - RNA, 19 nt, Artificial Sequence
  Description of Artificial Sequence: Synthetic oligonucleotide
acccucguaaagucccuuu

SEQ ID NO: 82115 - RNA, 19 nt, Artificial Sequence
  Description of Artificial Sequence: Synthetic oligonucleotide
gcuacggaguuuacuuugc

SEQ ID NO: 82116 - RNA, 19 nt, Artificial Sequence
  Description of Artificial Sequence: Synthetic oligonucleotide
cacuaacgcccauggccac

SEQ ID NO: 82117 - RNA, 19 nt, Artificial Sequence
  Description of Artificial Sequence: Synthetic oligonucleotide
ugggccccacuccuggaua

SEQ ID NO: 82118 - RNA, 19 nt, Artificial Sequence
  Description of Artificial Sequence: Synthetic oligonucleotide
ugcccaccgugauggaguc

SEQ ID NO: 82119 - RNA, 19 nt, Artificial Sequence
  Description of Artificial Sequence: Synthetic oligonucleotide
gacuugacuggugccuaga

SEQ ID NO: 82120 - RNA, 19 nt, Artificial Sequence
  Description of Artificial Sequence: Synthetic oligonucleotide
cuucgggaucgagucuacc

SEQ ID NO: 82121 - RNA, 19 nt, Artificial Sequence
  Description of Artificial Sequence: Synthetic oligonucleotide
ccaacccuuuugcaaggcc

SEQ ID NO: 82122 - RNA, 19 nt, Artificial Sequence
  Description of Artificial Sequence: Synthetic oligonucleotide
gaccugcuagaggaagcac

SEQ ID NO: 82123 - RNA, 19 nt, Artificial Sequence
  Description of Artificial Sequence: Synthetic oligonucleotide
cacgaggagccuucaaugu

SEQ ID NO: 82124 - RNA, 19 nt, Artificial Sequence
  Description of Artificial Sequence: Synthetic oligonucleotide
aucgugagaugucccucuu

SEQ ID NO: 82125 - RNA, 19 nt, Artificial Sequence
  Description of Artificial Sequence: Synthetic oligonucleotide
guugagucaccuccucccu

SEQ ID NO: 82126 - RNA, 19 nt, Artificial Sequence
  Description of Artificial Sequence: Synthetic oligonucleotide
uucgagcagucaagugcua

SEQ ID NO: 82127 - RNA, 19 nt, Artificial Sequence
  Description of Artificial Sequence: Synthetic oligonucleotide
ucacgggguuggacucaag

SEQ ID NO: 82128 - RNA, 19 nt, Artificial Sequence
  Description of Artificial Sequence: Synthetic oligonucleotide
cgacguacaugaucuuucc

SEQ ID NO: 82129 - RNA, 19 nt, Artificial Sequence
  Description of Artificial Sequence: Synthetic oligonucleotide
gcacgcuccacgaucggcc

SEQ ID NO: 82130 - RNA, 19 nt, Artificial Sequence
  Description of Artificial Sequence: Synthetic oligonucleotide
acccgcuacuucgaugccu

SEQ ID NO: 82131 - RNA, 19 nt, Artificial Sequence
  Description of Artificial Sequence: Synthetic oligonucleotide
ggaucgagucuaccuguca

SEQ ID NO: 82132 - RNA, 19 nt, Artificial Sequence
  Description of Artificial Sequence: Synthetic oligonucleotide
cacgagaaagcacccgcua

SEQ ID NO: 82133 - RNA, 19 nt, Artificial Sequence
  Description of Artificial Sequence: Synthetic oligonucleotide
gugccuagaguugcagguc

SEQ ID NO: 82134 - RNA, 19 nt, Artificial Sequence
  Description of Artificial Sequence: Synthetic oligonucleotide
gguccuuacuuugcugaac

SEQ ID NO: 82135 - RNA, 19 nt, Artificial Sequence
  Description of Artificial Sequence: Synthetic oligonucleotide
cucgccaagcggcucaugu

SEQ ID NO: 82136 - RNA, 19 nt, Artificial Sequence
  Description of Artificial Sequence: Synthetic oligonucleotide
acgguguaguaagaauaua

SEQ ID NO: 82137 - RNA, 19 nt, Artificial Sequence
  Description of Artificial Sequence: Synthetic oligonucleotide
ugcguggaauguggaguaa

SEQ ID NO: 82138 - RNA, 19 nt, Artificial Sequence
  Description of Artificial Sequence: Synthetic oligonucleotide
cccgcuacuucgaugccuc

SEQ ID NO: 82139 - RNA, 19 nt, Artificial Sequence
  Description of Artificial Sequence: Synthetic oligonucleotide
cagguccgaacgccucagc

SEQ ID NO: 82140 - RNA, 19 nt, Artificial Sequence
  Description of Artificial Sequence: Synthetic oligonucleotide
gggguuguuaaaggcugac

SEQ ID NO: 82141 - RNA, 19 nt, Artificial Sequence
  Description of Artificial Sequence: Synthetic oligonucleotide
gggguuaauggcagaucac

SEQ ID NO: 82142 - RNA, 19 nt, Artificial Sequence
  Description of Artificial Sequence: Synthetic oligonucleotide
gugaaaucgcucacuuagu

SEQ ID NO: 82143 - RNA, 19 nt, Artificial Sequence
  Description of Artificial Sequence: Synthetic oligonucleotide
cccucguaaagucccuuuc

SEQ ID NO: 82144 - RNA, 19 nt, Artificial Sequence
  Description of Artificial Sequence: Synthetic oligonucleotide
aucacgggguuggacucaa

SEQ ID NO: 82145 - RNA, 19 nt, Artificial Sequence
  Description of Artificial Sequence: Synthetic oligonucleotide
cacgugaaaucgcucacuu

SEQ ID NO: 82146 - RNA, 19 nt, Artificial Sequence
  Description of Artificial Sequence: Synthetic oligonucleotide
gccucagcuaaaacacgug

SEQ ID NO: 82147 - RNA, 19 nt, Artificial Sequence
  Description of Artificial Sequence: Synthetic oligonucleotide
cacccgcuacuucgaugcc

SEQ ID NO: 82148 - RNA, 19 nt, Artificial Sequence
  Description of Artificial Sequence: Synthetic oligonucleotide
uugcugcuauaacccucuu

SEQ ID NO: 82149 - RNA, 19 nt, Artificial Sequence
  Description of Artificial Sequence: Synthetic oligonucleotide
uacccucguaaagucccuu

SEQ ID NO: 82150 - RNA, 19 nt, Artificial Sequence
  Description of Artificial Sequence: Synthetic oligonucleotide
gcggacguccccgacguac

SEQ ID NO: 82151 - RNA, 19 nt, Artificial Sequence
  Description of Artificial Sequence: Synthetic oligonucleotide
ggaugacuggcacgcucca

SEQ ID NO: 82152 - RNA, 19 nt, Artificial Sequence
  Description of Artificial Sequence: Synthetic oligonucleotide
ggugccgcaccaugcccac

SEQ ID NO: 82153 - RNA, 19 nt, Artificial Sequence
  Description of Artificial Sequence: Synthetic oligonucleotide
gugacgcugcggacguccc

SEQ ID NO: 82154 - RNA, 19 nt, Artificial Sequence
  Description of Artificial Sequence: Synthetic oligonucleotide
caccauuaugaagucgggu

SEQ ID NO: 82155 - RNA, 19 nt, Artificial Sequence
  Description of Artificial Sequence: Synthetic oligonucleotide
ggcaaucaaauuagucugu

SEQ ID NO: 82156 - RNA, 19 nt, Artificial Sequence
  Description of Artificial Sequence: Synthetic oligonucleotide
cucccuccuuaggucgagc

SEQ ID NO: 82157 - RNA, 19 nt, Artificial Sequence
  Description of Artificial Sequence: Synthetic oligonucleotide
agucccuuucgggcagggu

SEQ ID NO: 82158 - RNA, 19 nt, Artificial Sequence
  Description of Artificial Sequence: Synthetic oligonucleotide
acgccucagcuugaccccu

SEQ ID NO: 82159 - RNA, 19 nt, Artificial Sequence
  Description of Artificial Sequence: Synthetic oligonucleotide
gccuagaguugcaggucag

SEQ ID NO: 82160 - RNA, 19 nt, Artificial Sequence
  Description of Artificial Sequence: Synthetic oligonucleotide
ggacuaggugagacuuagc

SEQ ID NO: 82161 - RNA, 19 nt, Artificial Sequence
  Description of Artificial Sequence: Synthetic oligonucleotide
caggugccaagugggacaa

SEQ ID NO: 82162 - RNA, 19 nt, Artificial Sequence
  Description of Artificial Sequence: Synthetic oligonucleotide
cugcggacguccccgacgu

SEQ ID NO: 82163 - RNA, 19 nt, Artificial Sequence
  Description of Artificial Sequence: Synthetic oligonucleotide
caaucaucacgggguugga

SEQ ID NO: 82164 - RNA, 19 nt, Artificial Sequence
  Description of Artificial Sequence: Synthetic oligonucleotide
cagaucgaaugggccccac

SEQ ID NO: 82165 - RNA, 19 nt, Artificial Sequence
  Description of Artificial Sequence: Synthetic oligonucleotide
cgagcagucaagugcuaga

SEQ ID NO: 82166 - RNA, 19 nt, Artificial Sequence
  Description of Artificial Sequence: Synthetic oligonucleotide
ccggccaguacccucguaa

SEQ ID NO: 82167 - RNA, 19 nt, Artificial Sequence
  Description of Artificial Sequence: Synthetic oligonucleotide
uccuuaggucgagcaucau

SEQ ID NO: 82168 - RNA, 19 nt, Artificial Sequence
  Description of Artificial Sequence: Synthetic oligonucleotide
cggaguuuacuuugcagua

SEQ ID NO: 82169 - RNA, 19 nt, Artificial Sequence
  Description of Artificial Sequence: Synthetic oligonucleotide
acgcugcggacguccccga

SEQ ID NO: 82170 - RNA, 19 nt, Artificial Sequence
  Description of Artificial Sequence: Synthetic oligonucleotide
ggaggggccuauuuugcuu

SEQ ID NO: 82171 - RNA, 19 nt, Artificial Sequence
  Description of Artificial Sequence: Synthetic oligonucleotide
caaaucagcuacggaguuu

SEQ ID NO: 82172 - RNA, 19 nt, Artificial Sequence
  Description of Artificial Sequence: Synthetic oligonucleotide
gguccgaacgccucagcuu

SEQ ID NO: 82173 - RNA, 19 nt, Artificial Sequence
  Description of Artificial Sequence: Synthetic oligonucleotide
  modified_base (19)..(19): a, c, u, g, unknown or other
ggggccucauaaagaacan

SEQ ID NO: 82174 - RNA, 19 nt, Artificial Sequence
  Description of Artificial Sequence: Synthetic oligonucleotide
gucggguuguacaguaguu

SEQ ID NO: 82175 - RNA, 19 nt, Artificial Sequence
  Description of Artificial Sequence: Synthetic oligonucleotide
agccggccaguacccucgu

SEQ ID NO: 82176 - RNA, 19 nt, Artificial Sequence
  Description of Artificial Sequence: Synthetic oligonucleotide
ggguuguuaaaggcugacu

SEQ ID NO: 82177 - RNA, 19 nt, Artificial Sequence
  Description of Artificial Sequence: Synthetic oligonucleotide
gggaggggccuauuuugcu

SEQ ID NO: 82178 - RNA, 19 nt, Artificial Sequence
  Description of Artificial Sequence: Synthetic oligonucleotide
ccaagcggcucauguuuga

SEQ ID NO: 82179 - RNA, 19 nt, Artificial Sequence
  Description of Artificial Sequence: Synthetic oligonucleotide
ccacgaucggcccagcagu

SEQ ID NO: 82180 - RNA, 19 nt, Artificial Sequence
  Description of Artificial Sequence: Synthetic oligonucleotide
gacuggcacgcuccacgau

SEQ ID NO: 82181 - RNA, 19 nt, Artificial Sequence
  Description of Artificial Sequence: Synthetic oligonucleotide
ugcggacguccccgacgua

SEQ ID NO: 82182 - RNA, 19 nt, Artificial Sequence
  Description of Artificial Sequence: Synthetic oligonucleotide
ugccucccgagggucucua

SEQ ID NO: 82183 - RNA, 19 nt, Artificial Sequence
  Description of Artificial Sequence: Synthetic oligonucleotide
guacccucguaaagucccu

SEQ ID NO: 82184 - RNA, 19 nt, Artificial Sequence
  Description of Artificial Sequence: Synthetic oligonucleotide
gugccgggagcucccuggu

SEQ ID NO: 82185 - RNA, 19 nt, Artificial Sequence
  Description of Artificial Sequence: Synthetic oligonucleotide
ccuaucugaucaggcuaga

SEQ ID NO: 82186 - RNA, 19 nt, Artificial Sequence
  Description of Artificial Sequence: Synthetic oligonucleotide
caccggggucaaagugaaa

SEQ ID NO: 82187 - RNA, 19 nt, Artificial Sequence
  Description of Artificial Sequence: Synthetic oligonucleotide
ccucccgagggucucuacu

SEQ ID NO: 82188 - RNA, 19 nt, Artificial Sequence
  Description of Artificial Sequence: Synthetic oligonucleotide
gugugacgcugcggacguc

SEQ ID NO: 82189 - RNA, 19 nt, Artificial Sequence
  Description of Artificial Sequence: Synthetic oligonucleotide
ccaccgugauggaguccuc

SEQ ID NO: 82190 - RNA, 19 nt, Artificial Sequence
  Description of Artificial Sequence: Synthetic oligonucleotide
cggccaguacccucguaaa

SEQ ID NO: 82191 - RNA, 19 nt, Artificial Sequence
  Description of Artificial Sequence: Synthetic oligonucleotide
ccagaucgaaugggcccca

SEQ ID NO: 82192 - RNA, 19 nt, Artificial Sequence
  Description of Artificial Sequence: Synthetic oligonucleotide
ccgcuacuucgaugccuca

SEQ ID NO: 82193 - RNA, 19 nt, Artificial Sequence
  Description of Artificial Sequence: Synthetic oligonucleotide
ccguccucucguucuuggu

SEQ ID NO: 82194 - RNA, 19 nt, Artificial Sequence
  Description of Artificial Sequence: Synthetic oligonucleotide
ccucgccaagcggcucaug

SEQ ID NO: 82195 - RNA, 19 nt, Artificial Sequence
  Description of Artificial Sequence: Synthetic oligonucleotide
gccggccaguacccucgua

SEQ ID NO: 82196 - RNA, 19 nt, Artificial Sequence
  Description of Artificial Sequence: Synthetic oligonucleotide
aauaacauaacauagggug

SEQ ID NO: 82197 - RNA, 19 nt, Artificial Sequence
  Description of Artificial Sequence: Synthetic oligonucleotide
aaucccuugaucuaaagac

SEQ ID NO: 82198 - RNA, 19 nt, Artificial Sequence
  Description of Artificial Sequence: Synthetic oligonucleotide
auagguuugauucagagag

SEQ ID NO: 82199 - RNA, 19 nt, Artificial Sequence
  Description of Artificial Sequence: Synthetic oligonucleotide
uaugcuaauaaacaaauga

SEQ ID NO: 82200 - RNA, 19 nt, Artificial Sequence
  Description of Artificial Sequence: Synthetic oligonucleotide
aguaagaugauacuucuac

SEQ ID NO: 82201 - RNA, 19 nt, Artificial Sequence
  Description of Artificial Sequence: Synthetic oligonucleotide
uuuaauaucagauuaguua

SEQ ID NO: 82202 - RNA, 19 nt, Artificial Sequence
  Description of Artificial Sequence: Synthetic oligonucleotide
auauuuagguaucugaauc

SEQ ID NO: 82203 - RNA, 19 nt, Artificial Sequence
  Description of Artificial Sequence: Synthetic oligonucleotide
aaauaccucuuuuacuacc

SEQ ID NO: 82204 - RNA, 19 nt, Artificial Sequence
  Description of Artificial Sequence: Synthetic oligonucleotide
auaaccuuaaauaguaucc

SEQ ID NO: 82205 - RNA, 19 nt, Artificial Sequence
  Description of Artificial Sequence: Synthetic oligonucleotide
cuuuuaaacaggcauaggc

SEQ ID NO: 82206 - RNA, 19 nt, Artificial Sequence
  Description of Artificial Sequence: Synthetic oligonucleotide
uuaauaucagauuaguuaa

SEQ ID NO: 82207 - RNA, 19 nt, Artificial Sequence
  Description of Artificial Sequence: Synthetic oligonucleotide
uauagaacgagauguaagc

SEQ ID NO: 82208 - RNA, 19 nt, Artificial Sequence
  Description of Artificial Sequence: Synthetic oligonucleotide
aaaucauucuuaugugagg

SEQ ID NO: 82209 - RNA, 19 nt, Artificial Sequence
  Description of Artificial Sequence: Synthetic oligonucleotide
ucacuaagugguuugauag

SEQ ID NO: 82210 - RNA, 19 nt, Artificial Sequence
  Description of Artificial Sequence: Synthetic oligonucleotide
aucggauagcucuugaagc

SEQ ID NO: 82211 - RNA, 19 nt, Artificial Sequence
  Description of Artificial Sequence: Synthetic oligonucleotide
uuauagaacgagauguaag

SEQ ID NO: 82212 - RNA, 19 nt, Artificial Sequence
  Description of Artificial Sequence: Synthetic oligonucleotide
auuauauuuagguaucuga

SEQ ID NO: 82213 - RNA, 19 nt, Artificial Sequence
  Description of Artificial Sequence: Synthetic oligonucleotide
ugaacuccuucucauaacg

SEQ ID NO: 82214 - RNA, 19 nt, Artificial Sequence
  Description of Artificial Sequence: Synthetic oligonucleotide
uuuauauacccugaucugg

SEQ ID NO: 82215 - RNA, 19 nt, Artificial Sequence
  Description of Artificial Sequence: Synthetic oligonucleotide
uuugauucagagagaacgg

SEQ ID NO: 82216 - RNA, 19 nt, Artificial Sequence
  Description of Artificial Sequence: Synthetic oligonucleotide
aagcauauuucugaguuac

SEQ ID NO: 82217 - RNA, 19 nt, Artificial Sequence
  Description of Artificial Sequence: Synthetic oligonucleotide
aguacguggaauuugguug

SEQ ID NO: 82218 - RNA, 19 nt, Artificial Sequence
  Description of Artificial Sequence: Synthetic oligonucleotide
agaucggaaagccacaagg

SEQ ID NO: 82219 - RNA, 19 nt, Artificial Sequence
  Description of Artificial Sequence: Synthetic oligonucleotide
aagaauuuguaauuaguaa

SEQ ID NO: 82220 - RNA, 19 nt, Artificial Sequence
  Description of Artificial Sequence: Synthetic oligonucleotide
aaauagugagagcacacug

SEQ ID NO: 82221 - RNA, 19 nt, Artificial Sequence
  Description of Artificial Sequence: Synthetic oligonucleotide
aaaaguacguggaauuugg

SEQ ID NO: 82222 - RNA, 19 nt, Artificial Sequence
  Description of Artificial Sequence: Synthetic oligonucleotide
acaaauaugauuccuugcu

SEQ ID NO: 82223 - RNA, 19 nt, Artificial Sequence
  Description of Artificial Sequence: Synthetic oligonucleotide
uuuauaucuuaucuguacu

SEQ ID NO: 82224 - RNA, 19 nt, Artificial Sequence
  Description of Artificial Sequence: Synthetic oligonucleotide
uuuuaguccacuuccaccu

SEQ ID NO: 82225 - RNA, 19 nt, Artificial Sequence
  Description of Artificial Sequence: Synthetic oligonucleotide
uuacauauguucuuguuaa

SEQ ID NO: 82226 - RNA, 19 nt, Artificial Sequence
  Description of Artificial Sequence: Synthetic oligonucleotide
uggguuacuucuaaaagca

SEQ ID NO: 82227 - RNA, 19 nt, Artificial Sequence
  Description of Artificial Sequence: Synthetic oligonucleotide
uaucggauagcucuugaag

SEQ ID NO: 82228 - RNA, 19 nt, Artificial Sequence
  Description of Artificial Sequence: Synthetic oligonucleotide
uuauguaacccaauaacau

SEQ ID NO: 82229 - RNA, 19 nt, Artificial Sequence
  Description of Artificial Sequence: Synthetic oligonucleotide
ucuguuauacuucaauuau

SEQ ID NO: 82230 - RNA, 19 nt, Artificial Sequence
  Description of Artificial Sequence: Synthetic oligonucleotide
aauuugacugaauugcaaa

SEQ ID NO: 82231 - RNA, 19 nt, Artificial Sequence
  Description of Artificial Sequence: Synthetic oligonucleotide
aaaauaguccaaaaugugu

SEQ ID NO: 82232 - RNA, 19 nt, Artificial Sequence
  Description of Artificial Sequence: Synthetic oligonucleotide
uguaauuaguaaauccgac

SEQ ID NO: 82233 - RNA, 19 nt, Artificial Sequence
  Description of Artificial Sequence: Synthetic oligonucleotide
agaugauacuucuacauga

SEQ ID NO: 82234 - RNA, 19 nt, Artificial Sequence
  Description of Artificial Sequence: Synthetic oligonucleotide
aacgagauguaagcuaagc

SEQ ID NO: 82235 - RNA, 19 nt, Artificial Sequence
  Description of Artificial Sequence: Synthetic oligonucleotide
gauacuucuacaugauagc

SEQ ID NO: 82236 - RNA, 19 nt, Artificial Sequence
  Description of Artificial Sequence: Synthetic oligonucleotide
augauagcauguuaagggg

SEQ ID NO: 82237 - RNA, 19 nt, Artificial Sequence
  Description of Artificial Sequence: Synthetic oligonucleotide
acuucuacaugauagcaug

SEQ ID NO: 82238 - RNA, 19 nt, Artificial Sequence
  Description of Artificial Sequence: Synthetic oligonucleotide
aaaacauaggugcacggaa

SEQ ID NO: 82239 - RNA, 19 nt, Artificial Sequence
  Description of Artificial Sequence: Synthetic oligonucleotide
aaauaguauccaucuuuuc

SEQ ID NO: 82240 - RNA, 19 nt, Artificial Sequence
  Description of Artificial Sequence: Synthetic oligonucleotide
uagcuaaauagugagagca

SEQ ID NO: 82241 - RNA, 19 nt, Artificial Sequence
  Description of Artificial Sequence: Synthetic oligonucleotide
auguguuuuauauacccug

SEQ ID NO: 82242 - RNA, 19 nt, Artificial Sequence
  Description of Artificial Sequence: Synthetic oligonucleotide
aagcugaccuguuaugcuc

SEQ ID NO: 82243 - RNA, 19 nt, Artificial Sequence
  Description of Artificial Sequence: Synthetic oligonucleotide
cuggguuacuucuaaaagc

SEQ ID NO: 82244 - RNA, 19 nt, Artificial Sequence
  Description of Artificial Sequence: Synthetic oligonucleotide
uuagaucauaugaaauaug

SEQ ID NO: 82245 - RNA, 19 nt, Artificial Sequence
  Description of Artificial Sequence: Synthetic oligonucleotide
aauaguaaucaaagagcgg

SEQ ID NO: 82246 - RNA, 19 nt, Artificial Sequence
  Description of Artificial Sequence: Synthetic oligonucleotide
uuagguaucugaauccuuc

SEQ ID NO: 82247 - RNA, 19 nt, Artificial Sequence
  Description of Artificial Sequence: Synthetic oligonucleotide
aaaauacgggccuuucuga

SEQ ID NO: 82248 - RNA, 19 nt, Artificial Sequence
  Description of Artificial Sequence: Synthetic oligonucleotide
cuuuggaggggcuagcggg

SEQ ID NO: 82249 - RNA, 19 nt, Artificial Sequence
  Description of Artificial Sequence: Synthetic oligonucleotide
agcccgaucagguuuaauc

SEQ ID NO: 82250 - RNA, 19 nt, Artificial Sequence
  Description of Artificial Sequence: Synthetic oligonucleotide
ucccuugaucuaaagacag

SEQ ID NO: 82251 - RNA, 19 nt, Artificial Sequence
  Description of Artificial Sequence: Synthetic oligonucleotide
uguguuuuauauacccuga

SEQ ID NO: 82252 - RNA, 19 nt, Artificial Sequence
  Description of Artificial Sequence: Synthetic oligonucleotide
guuugauaggaaaagguug

SEQ ID NO: 82253 - RNA, 19 nt, Artificial Sequence
  Description of Artificial Sequence: Synthetic oligonucleotide
ucuauguggauacuagaaa

SEQ ID NO: 82254 - RNA, 19 nt, Artificial Sequence
  Description of Artificial Sequence: Synthetic oligonucleotide
aaucuauguggauacuaga

SEQ ID NO: 82255 - RNA, 19 nt, Artificial Sequence
  Description of Artificial Sequence: Synthetic oligonucleotide
uaguaaauccgacacaguu

SEQ ID NO: 82256 - RNA, 19 nt, Artificial Sequence
  Description of Artificial Sequence: Synthetic oligonucleotide
uaaauaguauccaucuuuu

SEQ ID NO: 82257 - RNA, 19 nt, Artificial Sequence
  Description of Artificial Sequence: Synthetic oligonucleotide
aagacucuauuguuguucu

SEQ ID NO: 82258 - RNA, 19 nt, Artificial Sequence
  Description of Artificial Sequence: Synthetic oligonucleotide
aacuaccaaauugagguug

SEQ ID NO: 82259 - RNA, 19 nt, Artificial Sequence
  Description of Artificial Sequence: Synthetic oligonucleotide
aaccagguaaauauuuuag

SEQ ID NO: 82260 - RNA, 19 nt, Artificial Sequence
  Description of Artificial Sequence: Synthetic oligonucleotide
ccaauaacauaacauaggg

SEQ ID NO: 82261 - RNA, 19 nt, Artificial Sequence
  Description of Artificial Sequence: Synthetic oligonucleotide
ucaaagagcggagaguacc

SEQ ID NO: 82262 - RNA, 19 nt, Artificial Sequence
  Description of Artificial Sequence: Synthetic oligonucleotide
uguuaacaugugaggauag

SEQ ID NO: 82263 - RNA, 19 nt, Artificial Sequence
  Description of Artificial Sequence: Synthetic oligonucleotide
auaugauuuaauaucagau

SEQ ID NO: 82264 - RNA, 19 nt, Artificial Sequence
  Description of Artificial Sequence: Synthetic oligonucleotide
agaaaacauaggugcacgg

SEQ ID NO: 82265 - RNA, 19 nt, Artificial Sequence
  Description of Artificial Sequence: Synthetic oligonucleotide
aaugguagcuaaauaguga

SEQ ID NO: 82266 - RNA, 19 nt, Artificial Sequence
  Description of Artificial Sequence: Synthetic oligonucleotide
uuaugcucauaagacauug

SEQ ID NO: 82267 - RNA, 19 nt, Artificial Sequence
  Description of Artificial Sequence: Synthetic oligonucleotide
uucuaacuaaaacuucacu

SEQ ID NO: 82268 - RNA, 19 nt, Artificial Sequence
  Description of Artificial Sequence: Synthetic oligonucleotide
cuaaauagugagagcacac

SEQ ID NO: 82269 - RNA, 19 nt, Artificial Sequence
  Description of Artificial Sequence: Synthetic oligonucleotide
ucggaaagccacaagguaa

SEQ ID NO: 82270 - RNA, 19 nt, Artificial Sequence
  Description of Artificial Sequence: Synthetic oligonucleotide
auacgggccuuucugaauc

SEQ ID NO: 82271 - RNA, 19 nt, Artificial Sequence
  Description of Artificial Sequence: Synthetic oligonucleotide
aguuguaaaaugugcacau

SEQ ID NO: 82272 - RNA, 19 nt, Artificial Sequence
  Description of Artificial Sequence: Synthetic oligonucleotide
uagguuaggccauccaaag

SEQ ID NO: 82273 - RNA, 19 nt, Artificial Sequence
  Description of Artificial Sequence: Synthetic oligonucleotide
caaugguagcuaaauagug

SEQ ID NO: 82274 - RNA, 19 nt, Artificial Sequence
  Description of Artificial Sequence: Synthetic oligonucleotide
aauccgacacaguuauuca

SEQ ID NO: 82275 - RNA, 19 nt, Artificial Sequence
  Description of Artificial Sequence: Synthetic oligonucleotide
aaugcugcacaaauggaca

SEQ ID NO: 82276 - RNA, 19 nt, Artificial Sequence
  Description of Artificial Sequence: Synthetic oligonucleotide
ucggauagcucuugaagcc

SEQ ID NO: 82277 - RNA, 19 nt, Artificial Sequence
  Description of Artificial Sequence: Synthetic oligonucleotide
aauagugagagcacacuga

SEQ ID NO: 82278 - RNA, 19 nt, Artificial Sequence
  Description of Artificial Sequence: Synthetic oligonucleotide
acaccuaaugcuucuaacu

SEQ ID NO: 82279 - RNA, 19 nt, Artificial Sequence
  Description of Artificial Sequence: Synthetic oligonucleotide
uaauuugacugaauugcaa

SEQ ID NO: 82280 - RNA, 19 nt, Artificial Sequence
  Description of Artificial Sequence: Synthetic oligonucleotide
uaggaccauacaaacauaa

SEQ ID NO: 82281 - RNA, 19 nt, Artificial Sequence
  Description of Artificial Sequence: Synthetic oligonucleotide
auucagagagaacgggagg

SEQ ID NO: 82282 - RNA, 19 nt, Artificial Sequence
  Description of Artificial Sequence: Synthetic oligonucleotide
ugaauuauaucaacaucuu

SEQ ID NO: 82283 - RNA, 19 nt, Artificial Sequence
  Description of Artificial Sequence: Synthetic oligonucleotide
uaagugguuugauaggaaa

SEQ ID NO: 82284 - RNA, 19 nt, Artificial Sequence
  Description of Artificial Sequence: Synthetic oligonucleotide
gaaaaguacguggaauuug

SEQ ID NO: 82285 - RNA, 19 nt, Artificial Sequence
  Description of Artificial Sequence: Synthetic oligonucleotide
aacgggagggcucacgacu

SEQ ID NO: 82286 - RNA, 19 nt, Artificial Sequence
  Description of Artificial Sequence: Synthetic oligonucleotide
agccccuuaauacaaauau

SEQ ID NO: 82287 - RNA, 19 nt, Artificial Sequence
  Description of Artificial Sequence: Synthetic oligonucleotide
cuuugaguaaagacaugag

SEQ ID NO: 82288 - RNA, 19 nt, Artificial Sequence
  Description of Artificial Sequence: Synthetic oligonucleotide
ucuuuggaggggcuagcgg

SEQ ID NO: 82289 - RNA, 19 nt, Artificial Sequence
  Description of Artificial Sequence: Synthetic oligonucleotide
uguggauacuagaaauaac

SEQ ID NO: 82290 - RNA, 19 nt, Artificial Sequence
  Description of Artificial Sequence: Synthetic oligonucleotide
uauguggauacuagaaaua

SEQ ID NO: 82291 - RNA, 19 nt, Artificial Sequence
  Description of Artificial Sequence: Synthetic oligonucleotide
cucacgacucaucucaagc

SEQ ID NO: 82292 - RNA, 19 nt, Artificial Sequence
  Description of Artificial Sequence: Synthetic oligonucleotide
uuuauagaacgagauguaa

SEQ ID NO: 82293 - RNA, 19 nt, Artificial Sequence
  Description of Artificial Sequence: Synthetic oligonucleotide
uguaagcugaccuguuaug

SEQ ID NO: 82294 - RNA, 19 nt, Artificial Sequence
  Description of Artificial Sequence: Synthetic oligonucleotide
cuaggugcaugcaaauccc

SEQ ID NO: 82295 - RNA, 19 nt, Artificial Sequence
  Description of Artificial Sequence: Synthetic oligonucleotide
cauagggugaagucauuag

SEQ ID NO: 82296 - RNA, 19 nt, Artificial Sequence
  Description of Artificial Sequence: Synthetic oligonucleotide
gaagaauuuguaauuagua

SEQ ID NO: 82297 - RNA, 19 nt, Artificial Sequence
  Description of Artificial Sequence: Synthetic oligonucleotide
uauacccugaucuggugac

SEQ ID NO: 82298 - RNA, 19 nt, Artificial Sequence
  Description of Artificial Sequence: Synthetic oligonucleotide
agggcaagaccugaaauuc

SEQ ID NO: 82299 - RNA, 19 nt, Artificial Sequence
  Description of Artificial Sequence: Synthetic oligonucleotide
  modified_base (4)..(4): a, c, u, g, unknown or other
gccncaaaaggcaauauag

SEQ ID NO: 82300 - RNA, 19 nt, Artificial Sequence
  Description of Artificial Sequence: Synthetic oligonucleotide
aauaccucuuuuacuacca

SEQ ID NO: 82301 - RNA, 19 nt, Artificial Sequence
  Description of Artificial Sequence: Synthetic oligonucleotide
auccgacacaguuauucac

SEQ ID NO: 82302 - RNA, 19 nt, Artificial Sequence
  Description of Artificial Sequence: Synthetic oligonucleotide
uggauacuagaaauaacua

SEQ ID NO: 82303 - RNA, 19 nt, Artificial Sequence
  Description of Artificial Sequence: Synthetic oligonucleotide
cacacacuacaccuaaugc

SEQ ID NO: 82304 - RNA, 19 nt, Artificial Sequence
  Description of Artificial Sequence: Synthetic oligonucleotide
uacugguuuauagaacgag

SEQ ID NO: 82305 - RNA, 19 nt, Artificial Sequence
  Description of Artificial Sequence: Synthetic oligonucleotide
cuaacagcuuuccuagccc

SEQ ID NO: 82306 - RNA, 19 nt, Artificial Sequence
  Description of Artificial Sequence: Synthetic oligonucleotide
gaucagguuuaaucaacug

SEQ ID NO: 82307 - RNA, 19 nt, Artificial Sequence
  Description of Artificial Sequence: Synthetic oligonucleotide
cugaguguuauuucauaac

SEQ ID NO: 82308 - RNA, 19 nt, Artificial Sequence
  Description of Artificial Sequence: Synthetic oligonucleotide
cauauuaauguagguuagg

SEQ ID NO: 82309 - RNA, 19 nt, Artificial Sequence
  Description of Artificial Sequence: Synthetic oligonucleotide
ucacgacucaucucaagca

SEQ ID NO: 82310 - RNA, 19 nt, Artificial Sequence
  Description of Artificial Sequence: Synthetic oligonucleotide
gcuaggugcaugcaaaucc

SEQ ID NO: 82311 - RNA, 19 nt, Artificial Sequence
  Description of Artificial Sequence: Synthetic oligonucleotide
ccuguuaugcucauaagac

SEQ ID NO: 82312 - RNA, 19 nt, Artificial Sequence
  Description of Artificial Sequence: Synthetic oligonucleotide
cauaggugcacggaaagac

SEQ ID NO: 82313 - RNA, 19 nt, Artificial Sequence
  Description of Artificial Sequence: Synthetic oligonucleotide
aacuaagguaaacuauauu

SEQ ID NO: 82314 - RNA, 19 nt, Artificial Sequence
  Description of Artificial Sequence: Synthetic oligonucleotide
uccaacuagccagcaaugg

SEQ ID NO: 82315 - RNA, 19 nt, Artificial Sequence
  Description of Artificial Sequence: Synthetic oligonucleotide
acgagauguaagcuaagca

SEQ ID NO: 82316 - RNA, 19 nt, Artificial Sequence
  Description of Artificial Sequence: Synthetic oligonucleotide
aaggcuaagcuacuugaua

SEQ ID NO: 82317 - RNA, 19 nt, Artificial Sequence
  Description of Artificial Sequence: Synthetic oligonucleotide
uagcucgugaacuucugug

SEQ ID NO: 82318 - RNA, 19 nt, Artificial Sequence
  Description of Artificial Sequence: Synthetic oligonucleotide
uaaauagugagagcacacu

SEQ ID NO: 82319 - RNA, 19 nt, Artificial Sequence
  Description of Artificial Sequence: Synthetic oligonucleotide
cacuaagugguuugauagg

SEQ ID NO: 82320 - RNA, 19 nt, Artificial Sequence
  Description of Artificial Sequence: Synthetic oligonucleotide
acuaugcuaauaaacaaau

SEQ ID NO: 82321 - RNA, 19 nt, Artificial Sequence
  Description of Artificial Sequence: Synthetic oligonucleotide
augugguauagauaggcaa

SEQ ID NO: 82322 - RNA, 19 nt, Artificial Sequence
  Description of Artificial Sequence: Synthetic oligonucleotide
acuaagugguuugauagga

SEQ ID NO: 82323 - RNA, 19 nt, Artificial Sequence
  Description of Artificial Sequence: Synthetic oligonucleotide
cuaugcuaauaaacaaaug

SEQ ID NO: 82324 - RNA, 19 nt, Artificial Sequence
  Description of Artificial Sequence: Synthetic oligonucleotide
uacuucuacaugauagcau

SEQ ID NO: 82325 - RNA, 19 nt, Artificial Sequence
  Description of Artificial Sequence: Synthetic oligonucleotide
aaugucagguaccucugua

SEQ ID NO: 82326 - RNA, 19 nt, Artificial Sequence
  Description of Artificial Sequence: Synthetic oligonucleotide
gauacuagaaauaacuauu

SEQ ID NO: 82327 - RNA, 19 nt, Artificial Sequence
  Description of Artificial Sequence: Synthetic oligonucleotide
uaacauaacauagggugaa

SEQ ID NO: 82328 - RNA, 19 nt, Artificial Sequence
  Description of Artificial Sequence: Synthetic oligonucleotide
uugauuugagccaguacuu

SEQ ID NO: 82329 - RNA, 19 nt, Artificial Sequence
  Description of Artificial Sequence: Synthetic oligonucleotide
aucauucuuaugugaggag

SEQ ID NO: 82330 - RNA, 19 nt, Artificial Sequence
  Description of Artificial Sequence: Synthetic oligonucleotide
uagugagagcacacugacg

SEQ ID NO: 82331 - RNA, 19 nt, Artificial Sequence
  Description of Artificial Sequence: Synthetic oligonucleotide
agacaacuaagguaaacua

SEQ ID NO: 82332 - RNA, 19 nt, Artificial Sequence
  Description of Artificial Sequence: Synthetic oligonucleotide
uuccaccuauucaucauac

SEQ ID NO: 82333 - RNA, 19 nt, Artificial Sequence
  Description of Artificial Sequence: Synthetic oligonucleotide
ucucaagcauuccuguaaa

SEQ ID NO: 82334 - RNA, 19 nt, Artificial Sequence
  Description of Artificial Sequence: Synthetic oligonucleotide
accucuuuuacuaccaugu

SEQ ID NO: 82335 - RNA, 19 nt, Artificial Sequence
  Description of Artificial Sequence: Synthetic oligonucleotide
guagcuaaauagugagagc

SEQ ID NO: 82336 - RNA, 19 nt, Artificial Sequence
  Description of Artificial Sequence: Synthetic oligonucleotide
  modified_base (2)..(2): a, c, u, g, unknown or other
cncaaaaggcaauauagua

SEQ ID NO: 82337 - RNA, 19 nt, Artificial Sequence
  Description of Artificial Sequence: Synthetic oligonucleotide
uacaccuaaugcuucuaac

SEQ ID NO: 82338 - RNA, 19 nt, Artificial Sequence
  Description of Artificial Sequence: Synthetic oligonucleotide
aucucaagcauuccuguaa

SEQ ID NO: 82339 - RNA, 19 nt, Artificial Sequence
  Description of Artificial Sequence: Synthetic oligonucleotide
aacauaacauagggugaag

SEQ ID NO: 82340 - RNA, 19 nt, Artificial Sequence
  Description of Artificial Sequence: Synthetic oligonucleotide
uaggugcacggaaagacuc

SEQ ID NO: 82341 - RNA, 19 nt, Artificial Sequence
  Description of Artificial Sequence: Synthetic oligonucleotide
auggcuauaaaggcuacca

SEQ ID NO: 82342 - RNA, 19 nt, Artificial Sequence
  Description of Artificial Sequence: Synthetic oligonucleotide
guaagaugauacuucuaca

SEQ ID NO: 82343 - RNA, 19 nt, Artificial Sequence
  Description of Artificial Sequence: Synthetic oligonucleotide
augcaaacuaccaaauuga

SEQ ID NO: 82344 - RNA, 19 nt, Artificial Sequence
  Description of Artificial Sequence: Synthetic oligonucleotide
auaacauaacauaggguga

SEQ ID NO: 82345 - RNA, 19 nt, Artificial Sequence
  Description of Artificial Sequence: Synthetic oligonucleotide
auuuagguaucugaauccu

SEQ ID NO: 82346 - RNA, 19 nt, Artificial Sequence
  Description of Artificial Sequence: Synthetic oligonucleotide
uuccaugcccauauaaauu

SEQ ID NO: 82347 - RNA, 19 nt, Artificial Sequence
  Description of Artificial Sequence: Synthetic oligonucleotide
uauguaagcugaccuguua

SEQ ID NO: 82348 - RNA, 19 nt, Artificial Sequence
  Description of Artificial Sequence: Synthetic oligonucleotide
aauagcugguguacugcag

SEQ ID NO: 82349 - RNA, 19 nt, Artificial Sequence
  Description of Artificial Sequence: Synthetic oligonucleotide
auacuucuacaugauagca

SEQ ID NO: 82350 - RNA, 19 nt, Artificial Sequence
  Description of Artificial Sequence: Synthetic oligonucleotide
guggauacuagaaauaacu

SEQ ID NO: 82351 - RNA, 19 nt, Artificial Sequence
  Description of Artificial Sequence: Synthetic oligonucleotide
agcuaaauagugagagcac

SEQ ID NO: 82352 - RNA, 19 nt, Artificial Sequence
  Description of Artificial Sequence: Synthetic oligonucleotide
gaaaacauaggugcacgga

SEQ ID NO: 82353 - RNA, 19 nt, Artificial Sequence
  Description of Artificial Sequence: Synthetic oligonucleotide
agacauugaaucauaacua

SEQ ID NO: 82354 - RNA, 19 nt, Artificial Sequence
  Description of Artificial Sequence: Synthetic oligonucleotide
gagaguacccaaaauaccu

SEQ ID NO: 82355 - RNA, 19 nt, Artificial Sequence
  Description of Artificial Sequence: Synthetic oligonucleotide
aaacuaccaaauugagguu

SEQ ID NO: 82356 - RNA, 19 nt, Artificial Sequence
  Description of Artificial Sequence: Synthetic oligonucleotide
uuuggaggggcuagcggga

SEQ ID NO: 82357 - RNA, 19 nt, Artificial Sequence
  Description of Artificial Sequence: Synthetic oligonucleotide
gauaacaacucaguaagau

SEQ ID NO: 82358 - RNA, 19 nt, Artificial Sequence
  Description of Artificial Sequence: Synthetic oligonucleotide
agaguacccaaaauaccuc

SEQ ID NO: 82359 - RNA, 19 nt, Artificial Sequence
  Description of Artificial Sequence: Synthetic oligonucleotide
aguaaucaaagagcggaga

SEQ ID NO: 82360 - RNA, 19 nt, Artificial Sequence
  Description of Artificial Sequence: Synthetic oligonucleotide
accuaaugcuucuaacuaa

SEQ ID NO: 82361 - RNA, 19 nt, Artificial Sequence
  Description of Artificial Sequence: Synthetic oligonucleotide
uagucauucugguuugcaa

SEQ ID NO: 82362 - RNA, 19 nt, Artificial Sequence
  Description of Artificial Sequence: Synthetic oligonucleotide
aggcguguuggaaaacugc

SEQ ID NO: 82363 - RNA, 19 nt, Artificial Sequence
  Description of Artificial Sequence: Synthetic oligonucleotide
ugguagcuaaauagugaga

SEQ ID NO: 82364 - RNA, 19 nt, Artificial Sequence
  Description of Artificial Sequence: Synthetic oligonucleotide
agaacgagauguaagcuaa

SEQ ID NO: 82365 - RNA, 19 nt, Artificial Sequence
  Description of Artificial Sequence: Synthetic oligonucleotide
acagcuuagaucauaugaa

SEQ ID NO: 82366 - RNA, 19 nt, Artificial Sequence
  Description of Artificial Sequence: Synthetic oligonucleotide
auguggauacuagaaauaa

SEQ ID NO: 82367 - RNA, 19 nt, Artificial Sequence
  Description of Artificial Sequence: Synthetic oligonucleotide
gacauugaaucauaacuau

SEQ ID NO: 82368 - RNA, 19 nt, Artificial Sequence
  Description of Artificial Sequence: Synthetic oligonucleotide
uacuguguuggauccgugu

SEQ ID NO: 82369 - RNA, 19 nt, Artificial Sequence
  Description of Artificial Sequence: Synthetic oligonucleotide
acauaacauagggugaagu

SEQ ID NO: 82370 - RNA, 19 nt, Artificial Sequence
  Description of Artificial Sequence: Synthetic oligonucleotide
uccuagccccuuaauacaa

SEQ ID NO: 82371 - RNA, 19 nt, Artificial Sequence
  Description of Artificial Sequence: Synthetic oligonucleotide
aaacauaggugcacggaaa

SEQ ID NO: 82372 - RNA, 19 nt, Artificial Sequence
  Description of Artificial Sequence: Synthetic oligonucleotide
cuguuaugcucauaagaca

SEQ ID NO: 82373 - RNA, 19 nt, Artificial Sequence
  Description of Artificial Sequence: Synthetic oligonucleotide
aggaccauacaaacauaac

SEQ ID NO: 82374 - RNA, 19 nt, Artificial Sequence
  Description of Artificial Sequence: Synthetic oligonucleotide
  modified_base (18)..(18): a, c, u, g, unknown or other
ggaauuugguugcagccnc

SEQ ID NO: 82375 - RNA, 19 nt, Artificial Sequence
  Description of Artificial Sequence: Synthetic oligonucleotide
auucacuguccaacaaacg

SEQ ID NO: 82376 - RNA, 19 nt, Artificial Sequence
  Description of Artificial Sequence: Synthetic oligonucleotide
aguaucggauagcucuuga

SEQ ID NO: 82377 - RNA, 19 nt, Artificial Sequence
  Description of Artificial Sequence: Synthetic oligonucleotide
cagguucacacaaaugaga

SEQ ID NO: 82378 - RNA, 19 nt, Artificial Sequence
  Description of Artificial Sequence: Synthetic oligonucleotide
ugcacggaaagacucuauu

SEQ ID NO: 82379 - RNA, 19 nt, Artificial Sequence
  Description of Artificial Sequence: Synthetic oligonucleotide
aucggaaagccacaaggua

SEQ ID NO: 82380 - RNA, 19 nt, Artificial Sequence
  Description of Artificial Sequence: Synthetic oligonucleotide
guuaacaugugaggauagc

SEQ ID NO: 82381 - RNA, 19 nt, Artificial Sequence
  Description of Artificial Sequence: Synthetic oligonucleotide
cuauguggauacuagaaau

SEQ ID NO: 82382 - RNA, 19 nt, Artificial Sequence
  Description of Artificial Sequence: Synthetic oligonucleotide
ggcuaagcuacuugauagg

SEQ ID NO: 82383 - RNA, 19 nt, Artificial Sequence
  Description of Artificial Sequence: Synthetic oligonucleotide
uccguguauagcucgugaa

SEQ ID NO: 82384 - RNA, 19 nt, Artificial Sequence
  Description of Artificial Sequence: Synthetic oligonucleotide
uggcuauaaaggcuaccaa

SEQ ID NO: 82385 - RNA, 19 nt, Artificial Sequence
  Description of Artificial Sequence: Synthetic oligonucleotide
acggaaagacucuauuguu

SEQ ID NO: 82386 - RNA, 19 nt, Artificial Sequence
  Description of Artificial Sequence: Synthetic oligonucleotide
auguuaacaugugaggaua

SEQ ID NO: 82387 - RNA, 19 nt, Artificial Sequence
  Description of Artificial Sequence: Synthetic oligonucleotide
uuggauccguguauagcuc

SEQ ID NO: 82388 - RNA, 19 nt, Artificial Sequence
  Description of Artificial Sequence: Synthetic oligonucleotide
gccuggacuacagagaccc

SEQ ID NO: 82389 - RNA, 19 nt, Artificial Sequence
  Description of Artificial Sequence: Synthetic oligonucleotide
agauguaagcuaagcauau

SEQ ID NO: 82390 - RNA, 19 nt, Artificial Sequence
  Description of Artificial Sequence: Synthetic oligonucleotide
ggcuauaaaggcuaccaaa

SEQ ID NO: 82391 - RNA, 19 nt, Artificial Sequence
  Description of Artificial Sequence: Synthetic oligonucleotide
  modified_base (5)..(5): a, c, u, g, unknown or other
agccncaaaaggcaauaua

SEQ ID NO: 82392 - RNA, 19 nt, Artificial Sequence
  Description of Artificial Sequence: Synthetic oligonucleotide
auccguguauagcucguga

SEQ ID NO: 82393 - RNA, 19 nt, Artificial Sequence
  Description of Artificial Sequence: Synthetic oligonucleotide
uguguuggauccguguaua

SEQ ID NO: 82394 - RNA, 19 nt, Artificial Sequence
  Description of Artificial Sequence: Synthetic oligonucleotide
uacauauguucuuguuaau

SEQ ID NO: 82395 - RNA, 19 nt, Artificial Sequence
  Description of Artificial Sequence: Synthetic oligonucleotide
gcacggaaagacucuauug

SEQ ID NO: 82396 - RNA, 19 nt, Artificial Sequence
  Description of Artificial Sequence: Synthetic oligonucleotide
ggagaguacccaaaauacc

SEQ ID NO: 82397 - RNA, 19 nt, Artificial Sequence
  Description of Artificial Sequence: Synthetic oligonucleotide
guacugaaugucagguacc

SEQ ID NO: 82398 - RNA, 19 nt, Artificial Sequence
  Description of Artificial Sequence: Synthetic oligonucleotide
gauucacuaagugguuuga

SEQ ID NO: 82399 - RNA, 19 nt, Artificial Sequence
  Description of Artificial Sequence: Synthetic oligonucleotide
auagucauucugguuugca

SEQ ID NO: 82400 - RNA, 19 nt, Artificial Sequence
  Description of Artificial Sequence: Synthetic oligonucleotide
  modified_base (9)..(9): a, c, u, g, unknown or other
uugcagccncaaaaggcaa

SEQ ID NO: 82401 - RNA, 19 nt, Artificial Sequence
  Description of Artificial Sequence: Synthetic oligonucleotide
agguuaggccauccaaagu

SEQ ID NO: 82402 - RNA, 19 nt, Artificial Sequence
  Description of Artificial Sequence: Synthetic oligonucleotide
ggauacuagaaauaacuau

SEQ ID NO: 82403 - RNA, 19 nt, Artificial Sequence
  Description of Artificial Sequence: Synthetic oligonucleotide
ugccccaaauacacaggcu

SEQ ID NO: 82404 - RNA, 19 nt, Artificial Sequence
  Description of Artificial Sequence: Synthetic oligonucleotide
agggcucacgacucaucuc

SEQ ID NO: 82405 - RNA, 19 nt, Artificial Sequence
  Description of Artificial Sequence: Synthetic oligonucleotide
caauaacauaacauagggu

SEQ ID NO: 82406 - RNA, 19 nt, Artificial Sequence
  Description of Artificial Sequence: Synthetic oligonucleotide
cguguuggaaaacugcagc

SEQ ID NO: 82407 - RNA, 19 nt, Artificial Sequence
  Description of Artificial Sequence: Synthetic oligonucleotide
uuuugaggugugaggcaau

SEQ ID NO: 82408 - RNA, 19 nt, Artificial Sequence
  Description of Artificial Sequence: Synthetic oligonucleotide
uuuaguccacuuccaccua

SEQ ID NO: 82409 - RNA, 19 nt, Artificial Sequence
  Description of Artificial Sequence: Synthetic oligonucleotide
cacggaaagacucuauugu

SEQ ID NO: 82410 - RNA, 19 nt, Artificial Sequence
  Description of Artificial Sequence: Synthetic oligonucleotide
cggagaguacccaaaauac

SEQ ID NO: 82411 - RNA, 19 nt, Artificial Sequence
  Description of Artificial Sequence: Synthetic oligonucleotide
acuaccaaauugagguugu

SEQ ID NO: 82412 - RNA, 19 nt, Artificial Sequence
  Description of Artificial Sequence: Synthetic oligonucleotide
uagccccuuaauacaaaua

SEQ ID NO: 82413 - RNA, 19 nt, Artificial Sequence
  Description of Artificial Sequence: Synthetic oligonucleotide
cagcuuagaucauaugaaa

SEQ ID NO: 82414 - RNA, 19 nt, Artificial Sequence
  Description of Artificial Sequence: Synthetic oligonucleotide
ggcucuaacacuaagcccu

SEQ ID NO: 82415 - RNA, 19 nt, Artificial Sequence
  Description of Artificial Sequence: Synthetic oligonucleotide
auaggugcacggaaagacu

SEQ ID NO: 82416 - RNA, 19 nt, Artificial Sequence
  Description of Artificial Sequence: Synthetic oligonucleotide
gagauucacuguccaacaa

SEQ ID NO: 82417 - RNA, 19 nt, Artificial Sequence
  Description of Artificial Sequence: Synthetic oligonucleotide
  modified_base (8)..(8): a, c, u, g, unknown or other
ugcagccncaaaaggcaau

SEQ ID NO: 82418 - RNA, 19 nt, Artificial Sequence
  Description of Artificial Sequence: Synthetic oligonucleotide
guagguuaggccauccaaa

SEQ ID NO: 82419 - RNA, 19 nt, Artificial Sequence
  Description of Artificial Sequence: Synthetic oligonucleotide
caccuaaugcuucuaacua

SEQ ID NO: 82420 - RNA, 19 nt, Artificial Sequence
  Description of Artificial Sequence: Synthetic oligonucleotide
auaugauuccuugcuuuau

SEQ ID NO: 82421 - RNA, 19 nt, Artificial Sequence
  Description of Artificial Sequence: Synthetic oligonucleotide
ugaagccgaugugguauag

SEQ ID NO: 82422 - RNA, 19 nt, Artificial Sequence
  Description of Artificial Sequence: Synthetic oligonucleotide
gagaacgggagggcucacg

SEQ ID NO: 82423 - RNA, 19 nt, Artificial Sequence
  Description of Artificial Sequence: Synthetic oligonucleotide
ucucaagacagguguuauu

SEQ ID NO: 82424 - RNA, 19 nt, Artificial Sequence
  Description of Artificial Sequence: Synthetic oligonucleotide
gaacgagauguaagcuaag

SEQ ID NO: 82425 - RNA, 19 nt, Artificial Sequence
  Description of Artificial Sequence: Synthetic oligonucleotide
agaaccagguaaauauuuu

SEQ ID NO: 82426 - RNA, 19 nt, Artificial Sequence
  Description of Artificial Sequence: Synthetic oligonucleotide
guuuauagaacgagaugua

SEQ ID NO: 82427 - RNA, 19 nt, Artificial Sequence
  Description of Artificial Sequence: Synthetic oligonucleotide
gguugauuugagccaguac

SEQ ID NO: 82428 - RNA, 19 nt, Artificial Sequence
  Description of Artificial Sequence: Synthetic oligonucleotide
cagaucggaaagccacaag

SEQ ID NO: 82429 - RNA, 19 nt, Artificial Sequence
  Description of Artificial Sequence: Synthetic oligonucleotide
gaucggaaagccacaaggu

SEQ ID NO: 82430 - RNA, 19 nt, Artificial Sequence
  Description of Artificial Sequence: Synthetic oligonucleotide
acaaggcguguuggaaaac

SEQ ID NO: 82431 - RNA, 19 nt, Artificial Sequence
  Description of Artificial Sequence: Synthetic oligonucleotide
cuaagugguuugauaggaa

SEQ ID NO: 82432 - RNA, 19 nt, Artificial Sequence
  Description of Artificial Sequence: Synthetic oligonucleotide
auucuuaugugaggagaaa

SEQ ID NO: 82433 - RNA, 19 nt, Artificial Sequence
  Description of Artificial Sequence: Synthetic oligonucleotide
guaucggauagcucuugaa

SEQ ID NO: 82434 - RNA, 19 nt, Artificial Sequence
  Description of Artificial Sequence: Synthetic oligonucleotide
acauagggugaagucauua

SEQ ID NO: 82435 - RNA, 19 nt, Artificial Sequence
  Description of Artificial Sequence: Synthetic oligonucleotide
ucuagccacugagauucac

SEQ ID NO: 82436 - RNA, 19 nt, Artificial Sequence
  Description of Artificial Sequence: Synthetic oligonucleotide
gcccgaucagguuuaauca

SEQ ID NO: 82437 - RNA, 19 nt, Artificial Sequence
  Description of Artificial Sequence: Synthetic oligonucleotide
cacaaggcguguuggaaaa

SEQ ID NO: 82438 - RNA, 19 nt, Artificial Sequence
  Description of Artificial Sequence: Synthetic oligonucleotide
gauccguguauagcucgug

SEQ ID NO: 82439 - RNA, 19 nt, Artificial Sequence
  Description of Artificial Sequence: Synthetic oligonucleotide
gaugauacuucuacaugau

SEQ ID NO: 82440 - RNA, 19 nt, Artificial Sequence
  Description of Artificial Sequence: Synthetic oligonucleotide
cgaugugguauagauaggc

SEQ ID NO: 82441 - RNA, 19 nt, Artificial Sequence
  Description of Artificial Sequence: Synthetic oligonucleotide
gaacgggagggcucacgac

SEQ ID NO: 82442 - RNA, 19 nt, Artificial Sequence
  Description of Artificial Sequence: Synthetic oligonucleotide
uaauguagguuaggccauc

SEQ ID NO: 82443 - RNA, 19 nt, Artificial Sequence
  Description of Artificial Sequence: Synthetic oligonucleotide
gaauccuucugaguguuau

SEQ ID NO: 82444 - RNA, 19 nt, Artificial Sequence
  Description of Artificial Sequence: Synthetic oligonucleotide
ccgaucagguuuaaucaac

SEQ ID NO: 82445 - RNA, 19 nt, Artificial Sequence
  Description of Artificial Sequence: Synthetic oligonucleotide
accaaagacuugucuccaa

SEQ ID NO: 82446 - RNA, 19 nt, Artificial Sequence
  Description of Artificial Sequence: Synthetic oligonucleotide
acagaucggaaagccacaa

SEQ ID NO: 82447 - RNA, 19 nt, Artificial Sequence
  Description of Artificial Sequence: Synthetic oligonucleotide
cuagcgggagaugugaaua

SEQ ID NO: 82448 - RNA, 19 nt, Artificial Sequence
  Description of Artificial Sequence: Synthetic oligonucleotide
guugguaauugauuuucuu

SEQ ID NO: 82449 - RNA, 19 nt, Artificial Sequence
  Description of Artificial Sequence: Synthetic oligonucleotide
gcggagaguacccaaaaua

SEQ ID NO: 82450 - RNA, 19 nt, Artificial Sequence
  Description of Artificial Sequence: Synthetic oligonucleotide
ugaauccuucugaguguua

SEQ ID NO: 82451 - RNA, 19 nt, Artificial Sequence
  Description of Artificial Sequence: Synthetic oligonucleotide
uacgggccuuucugaaucu

SEQ ID NO: 82452 - RNA, 19 nt, Artificial Sequence
  Description of Artificial Sequence: Synthetic oligonucleotide
acacaguuauucacccaug

SEQ ID NO: 82453 - RNA, 19 nt, Artificial Sequence
  Description of Artificial Sequence: Synthetic oligonucleotide
cuacaccuaaugcuucuaa

SEQ ID NO: 82454 - RNA, 19 nt, Artificial Sequence
  Description of Artificial Sequence: Synthetic oligonucleotide
auggacagaaguacugguu

SEQ ID NO: 82455 - RNA, 19 nt, Artificial Sequence
  Description of Artificial Sequence: Synthetic oligonucleotide
  modified_base (17)..(17): a, c, u, g, unknown or other
gaauuugguugcagccnca

SEQ ID NO: 82456 - RNA, 19 nt, Artificial Sequence
  Description of Artificial Sequence: Synthetic oligonucleotide
agcuuuccuagccccuuaa

SEQ ID NO: 82457 - RNA, 19 nt, Artificial Sequence
  Description of Artificial Sequence: Synthetic oligonucleotide
guacugguuuauagaacga

SEQ ID NO: 82458 - RNA, 19 nt, Artificial Sequence
  Description of Artificial Sequence: Synthetic oligonucleotide
gaagccgaugugguauaga

SEQ ID NO: 82459 - RNA, 19 nt, Artificial Sequence
  Description of Artificial Sequence: Synthetic oligonucleotide
gcaauauaguagggaauac

SEQ ID NO: 82460 - RNA, 19 nt, Artificial Sequence
  Description of Artificial Sequence: Synthetic oligonucleotide
acguggaauuugguugcag

SEQ ID NO: 82461 - RNA, 19 nt, Artificial Sequence
  Description of Artificial Sequence: Synthetic oligonucleotide
agcuuaauuuugaccuggu

SEQ ID NO: 82462 - RNA, 19 nt, Artificial Sequence
  Description of Artificial Sequence: Synthetic oligonucleotide
ccguguauagcucgugaac

SEQ ID NO: 82463 - RNA, 19 nt, Artificial Sequence
  Description of Artificial Sequence: Synthetic oligonucleotide
uacguggaauuugguugca

SEQ ID NO: 82464 - RNA, 19 nt, Artificial Sequence
  Description of Artificial Sequence: Synthetic oligonucleotide
ggcguguuggaaaacugca

SEQ ID NO: 82465 - RNA, 19 nt, Artificial Sequence
  Description of Artificial Sequence: Synthetic oligonucleotide
aagguugauuugagccagu

SEQ ID NO: 82466 - RNA, 19 nt, Artificial Sequence
  Description of Artificial Sequence: Synthetic oligonucleotide
gcaaugguagcuaaauagu

SEQ ID NO: 82467 - RNA, 19 nt, Artificial Sequence
  Description of Artificial Sequence: Synthetic oligonucleotide
aguacccaaaauaccucuu

SEQ ID NO: 82468 - RNA, 19 nt, Artificial Sequence
  Description of Artificial Sequence: Synthetic oligonucleotide
auaggaccauacaaacaua

SEQ ID NO: 82469 - RNA, 19 nt, Artificial Sequence
  Description of Artificial Sequence: Synthetic oligonucleotide
acccaagcuugaaaauacu

SEQ ID NO: 82470 - RNA, 19 nt, Artificial Sequence
  Description of Artificial Sequence: Synthetic oligonucleotide
caucucaagcauuccugua

SEQ ID NO: 82471 - RNA, 19 nt, Artificial Sequence
  Description of Artificial Sequence: Synthetic oligonucleotide
gaacuccuucucauaacgu

SEQ ID NO: 82472 - RNA, 19 nt, Artificial Sequence
  Description of Artificial Sequence: Synthetic oligonucleotide
acuacaccuaaugcuucua

SEQ ID NO: 82473 - RNA, 19 nt, Artificial Sequence
  Description of Artificial Sequence: Synthetic oligonucleotide
agagaacgggagggcucac

SEQ ID NO: 82474 - RNA, 19 nt, Artificial Sequence
  Description of Artificial Sequence: Synthetic oligonucleotide
auacuguguuggauccgug

SEQ ID NO: 82475 - RNA, 19 nt, Artificial Sequence
  Description of Artificial Sequence: Synthetic oligonucleotide
auacccugaucuggugacu

SEQ ID NO: 82476 - RNA, 19 nt, Artificial Sequence
  Description of Artificial Sequence: Synthetic oligonucleotide
ccgaugugguauagauagg

SEQ ID NO: 82477 - RNA, 19 nt, Artificial Sequence
  Description of Artificial Sequence: Synthetic oligonucleotide
acgacucaucucaagcauu

SEQ ID NO: 82478 - RNA, 19 nt, Artificial Sequence
  Description of Artificial Sequence: Synthetic oligonucleotide
cacuacaccuaaugcuucu

SEQ ID NO: 82479 - RNA, 19 nt, Artificial Sequence
  Description of Artificial Sequence: Synthetic oligonucleotide
gcaaacugugcuaggugca

SEQ ID NO: 82480 - RNA, 19 nt, Artificial Sequence
  Description of Artificial Sequence: Synthetic oligonucleotide
gcuaagcuacuugauaggu

SEQ ID NO: 82481 - RNA, 19 nt, Artificial Sequence
  Description of Artificial Sequence: Synthetic oligonucleotide
  modified_base (3)..(3): a, c, u, g, unknown or other
ccncaaaaggcaauauagu

SEQ ID NO: 82482 - RNA, 19 nt, Artificial Sequence
  Description of Artificial Sequence: Synthetic oligonucleotide
ggauagcucuugaagccga

SEQ ID NO: 82483 - RNA, 19 nt, Artificial Sequence
  Description of Artificial Sequence: Synthetic oligonucleotide
cacgacucaucucaagcau

SEQ ID NO: 82484 - RNA, 19 nt, Artificial Sequence
  Description of Artificial Sequence: Synthetic oligonucleotide
caaggcuaagcuacuugau

SEQ ID NO: 82485 - RNA, 19 nt, Artificial Sequence
  Description of Artificial Sequence: Synthetic oligonucleotide
  modified_base (7)..(7): a, c, u, g, unknown or other
gcagccncaaaaggcaaua

SEQ ID NO: 82486 - RNA, 19 nt, Artificial Sequence
  Description of Artificial Sequence: Synthetic oligonucleotide
cggauagcucuugaagccg

SEQ ID NO: 82487 - RNA, 19 nt, Artificial Sequence
  Description of Artificial Sequence: Synthetic oligonucleotide
cuguguuggauccguguau

SEQ ID NO: 82488 - RNA, 19 nt, Artificial Sequence
  Description of Artificial Sequence: Synthetic oligonucleotide
ggaaaaguacguggaauuu

SEQ ID NO: 82489 - RNA, 19 nt, Artificial Sequence
  Description of Artificial Sequence: Synthetic oligonucleotide
agccgaugugguauagaua

SEQ ID NO: 82490 - RNA, 19 nt, Artificial Sequence
  Description of Artificial Sequence: Synthetic oligonucleotide
cccgaucagguuuaaucaa

SEQ ID NO: 82491 - RNA, 19 nt, Artificial Sequence
  Description of Artificial Sequence: Synthetic oligonucleotide
gcccuuaauauagguuuga

SEQ ID NO: 82492 - RNA, 19 nt, Artificial Sequence
  Description of Artificial Sequence: Synthetic oligonucleotide
gggcuagcgggagauguga

SEQ ID NO: 82493 - RNA, 19 nt, Artificial Sequence
  Description of Artificial Sequence: Synthetic oligonucleotide
gugcuaggugcaugcaaau

SEQ ID NO: 82494 - RNA, 19 nt, Artificial Sequence
  Description of Artificial Sequence: Synthetic oligonucleotide
cccuugaucuaaagacaga

SEQ ID NO: 82495 - RNA, 19 nt, Artificial Sequence
  Description of Artificial Sequence: Synthetic oligonucleotide
caaacugugcuaggugcau

SEQ ID NO: 82496 - RNA, 19 nt, Artificial Sequence
  Description of Artificial Sequence: Synthetic oligonucleotide
ccuauucaucauacugugu

SEQ ID NO: 82497 - RNA, 19 nt, Artificial Sequence
  Description of Artificial Sequence: Synthetic oligonucleotide
gcuagcgggagaugugaau

SEQ ID NO: 82498 - RNA, 19 nt, Artificial Sequence
  Description of Artificial Sequence: Synthetic oligonucleotide
cgaucagguuuaaucaacu

SEQ ID NO: 82499 - RNA, 19 nt, Artificial Sequence
  Description of Artificial Sequence: Synthetic oligonucleotide
ccuagccccuuaauacaaa

SEQ ID NO: 82500 - RNA, 19 nt, Artificial Sequence
  Description of Artificial Sequence: Synthetic oligonucleotide
ggauccguguauagcucgu

SEQ ID NO: 82501 - RNA, 19 nt, Artificial Sequence
  Description of Artificial Sequence: Synthetic oligonucleotide
  modified_base (6)..(6): a, c, u, g, unknown or other
cagccncaaaaggcaauau

SEQ ID NO: 82502 - RNA, 19 nt, Artificial Sequence
  Description of Artificial Sequence: Synthetic oligonucleotide
ggcuagcgggagaugugaa

SEQ ID NO: 82503 - RNA, 19 nt, Artificial Sequence
  Description of Artificial Sequence: Synthetic oligonucleotide
gcugaccuguuaugcucau

SEQ ID NO: 82504 - RNA, 19 nt, Artificial Sequence
  Description of Artificial Sequence: Synthetic oligonucleotide
cauccccacaaggcguguu

SEQ ID NO: 82505 - RNA, 19 nt, Artificial Sequence
  Description of Artificial Sequence: Synthetic oligonucleotide
uuugcagugauuaaaagag

SEQ ID NO: 82506 - RNA, 19 nt, Artificial Sequence
  Description of Artificial Sequence: Synthetic oligonucleotide
aaccacuuggcuuugaacc

SEQ ID NO: 82507 - RNA, 19 nt, Artificial Sequence
  Description of Artificial Sequence: Synthetic oligonucleotide
acgcauauuaaguaggucc

SEQ ID NO: 82508 - RNA, 19 nt, Artificial Sequence
  Description of Artificial Sequence: Synthetic oligonucleotide
uucuauaucgcauaagcag

SEQ ID NO: 82509 - RNA, 19 nt, Artificial Sequence
  Description of Artificial Sequence: Synthetic oligonucleotide
ucuuaagccauauuugagg

SEQ ID NO: 82510 - RNA, 19 nt, Artificial Sequence
  Description of Artificial Sequence: Synthetic oligonucleotide
aaugguaauagcaugagca

SEQ ID NO: 82511 - RNA, 19 nt, Artificial Sequence
  Description of Artificial Sequence: Synthetic oligonucleotide
auauuucacuucuauaucg

SEQ ID NO: 82512 - RNA, 19 nt, Artificial Sequence
  Description of Artificial Sequence: Synthetic oligonucleotide
uuuggcacuguguaaaggg

SEQ ID NO: 82513 - RNA, 19 nt, Artificial Sequence
  Description of Artificial Sequence: Synthetic oligonucleotide
uguauaggcagauauguca

SEQ ID NO: 82514 - RNA, 19 nt, Artificial Sequence
  Description of Artificial Sequence: Synthetic oligonucleotide
ucaacuaugcaauggagug

SEQ ID NO: 82515 - RNA, 19 nt, Artificial Sequence
  Description of Artificial Sequence: Synthetic oligonucleotide
ucuuaauuaucuuguaaag

SEQ ID NO: 82516 - RNA, 19 nt, Artificial Sequence
  Description of Artificial Sequence: Synthetic oligonucleotide
ugaaaguacccauuugggg

SEQ ID NO: 82517 - RNA, 19 nt, Artificial Sequence
  Description of Artificial Sequence: Synthetic oligonucleotide
cuuaagccauauuugaggg

SEQ ID NO: 82518 - RNA, 19 nt, Artificial Sequence
  Description of Artificial Sequence: Synthetic oligonucleotide
aaugcaaaccugucugccg

SEQ ID NO: 82519 - RNA, 19 nt, Artificial Sequence
  Description of Artificial Sequence: Synthetic oligonucleotide
uguuuaacuccuuggaacc

SEQ ID NO: 82520 - RNA, 19 nt, Artificial Sequence
  Description of Artificial Sequence: Synthetic oligonucleotide
aaauuuaaaauggucgaga

SEQ ID NO: 82521 - RNA, 19 nt, Artificial Sequence
  Description of Artificial Sequence: Synthetic oligonucleotide
uuaacuuuacucucugccc

SEQ ID NO: 82522 - RNA, 19 nt, Artificial Sequence
  Description of Artificial Sequence: Synthetic oligonucleotide
agagacgacaccuuugguc

SEQ ID NO: 82523 - RNA, 19 nt, Artificial Sequence
  Description of Artificial Sequence: Synthetic oligonucleotide
uguguaaaggguauggcuc

SEQ ID NO: 82524 - RNA, 19 nt, Artificial Sequence
  Description of Artificial Sequence: Synthetic oligonucleotide
ucuagaaauuccauguagu

SEQ ID NO: 82525 - RNA, 19 nt, Artificial Sequence
  Description of Artificial Sequence: Synthetic oligonucleotide
cuaugaaaggcugaggagg

SEQ ID NO: 82526 - RNA, 19 nt, Artificial Sequence
  Description of Artificial Sequence: Synthetic oligonucleotide
uaucgcauaagcagagagg

SEQ ID NO: 82527 - RNA, 19 nt, Artificial Sequence
  Description of Artificial Sequence: Synthetic oligonucleotide
uuaaagauucuuacauagc

SEQ ID NO: 82528 - RNA, 19 nt, Artificial Sequence
  Description of Artificial Sequence: Synthetic oligonucleotide
auuaaaagagauaaagaca

SEQ ID NO: 82529 - RNA, 19 nt, Artificial Sequence
  Description of Artificial Sequence: Synthetic oligonucleotide
uaaauggugaucacuucgc

SEQ ID NO: 82530 - RNA, 19 nt, Artificial Sequence
  Description of Artificial Sequence: Synthetic oligonucleotide
uucugacugaaaauuaugu

SEQ ID NO: 82531 - RNA, 19 nt, Artificial Sequence
  Description of Artificial Sequence: Synthetic oligonucleotide
uuuuagggacugaauaccc

SEQ ID NO: 82532 - RNA, 19 nt, Artificial Sequence
  Description of Artificial Sequence: Synthetic oligonucleotide
auagcagccgcugaguagc

SEQ ID NO: 82533 - RNA, 19 nt, Artificial Sequence
  Description of Artificial Sequence: Synthetic oligonucleotide
agcgcgagcaucuucacuc

SEQ ID NO: 82534 - RNA, 19 nt, Artificial Sequence
  Description of Artificial Sequence: Synthetic oligonucleotide
auaucgcauaagcagagag

SEQ ID NO: 82535 - RNA, 19 nt, Artificial Sequence
  Description of Artificial Sequence: Synthetic oligonucleotide
aaguuaguauaguuggcca

SEQ ID NO: 82536 - RNA, 19 nt, Artificial Sequence
  Description of Artificial Sequence: Synthetic oligonucleotide
uguaguuucuacucccugc

SEQ ID NO: 82537 - RNA, 19 nt, Artificial Sequence
  Description of Artificial Sequence: Synthetic oligonucleotide
ucgagaacagugcuuuacg

SEQ ID NO: 82538 - RNA, 19 nt, Artificial Sequence
  Description of Artificial Sequence: Synthetic oligonucleotide
uccuaugcugguaagccag

SEQ ID NO: 82539 - RNA, 19 nt, Artificial Sequence
  Description of Artificial Sequence: Synthetic oligonucleotide
gaacgaauguuacagccug

SEQ ID NO: 82540 - RNA, 19 nt, Artificial Sequence
  Description of Artificial Sequence: Synthetic oligonucleotide
auauuugaggguucucuuc

SEQ ID NO: 82541 - RNA, 19 nt, Artificial Sequence
  Description of Artificial Sequence: Synthetic oligonucleotide
gguaagacgaagaaagagg

SEQ ID NO: 82542 - RNA, 19 nt, Artificial Sequence
  Description of Artificial Sequence: Synthetic oligonucleotide
aguaggaaugguaauagca

SEQ ID NO: 82543 - RNA, 19 nt, Artificial Sequence
  Description of Artificial Sequence: Synthetic oligonucleotide
uguuacuaacucacuaccu

SEQ ID NO: 82544 - RNA, 19 nt, Artificial Sequence
  Description of Artificial Sequence: Synthetic oligonucleotide
ugagacuaauccugaauga

SEQ ID NO: 82545 - RNA, 19 nt, Artificial Sequence
  Description of Artificial Sequence: Synthetic oligonucleotide
ugacuugacccuuugcccc

SEQ ID NO: 82546 - RNA, 19 nt, Artificial Sequence
  Description of Artificial Sequence: Synthetic oligonucleotide
cuuuuagggaaaguaagac

SEQ ID NO: 82547 - RNA, 19 nt, Artificial Sequence
  Description of Artificial Sequence: Synthetic oligonucleotide
aauccugaaugauggauua

SEQ ID NO: 82548 - RNA, 19 nt, Artificial Sequence
  Description of Artificial Sequence: Synthetic oligonucleotide
cuuggggccauaagaauag

SEQ ID NO: 82549 - RNA, 19 nt, Artificial Sequence
  Description of Artificial Sequence: Synthetic oligonucleotide
aaaucuggccuaauaacca

SEQ ID NO: 82550 - RNA, 19 nt, Artificial Sequence
  Description of Artificial Sequence: Synthetic oligonucleotide
agaacagugcuuuacguuu

SEQ ID NO: 82551 - RNA, 19 nt, Artificial Sequence
  Description of Artificial Sequence: Synthetic oligonucleotide
cuauaucgcauaagcagag

SEQ ID NO: 82552 - RNA, 19 nt, Artificial Sequence
  Description of Artificial Sequence: Synthetic oligonucleotide
uauacucaacuaugcaaug

SEQ ID NO: 82553 - RNA, 19 nt, Artificial Sequence
  Description of Artificial Sequence: Synthetic oligonucleotide
uugucacucgaacugugcc

SEQ ID NO: 82554 - RNA, 19 nt, Artificial Sequence
  Description of Artificial Sequence: Synthetic oligonucleotide
agucacggacuuccuaugc

SEQ ID NO: 82555 - RNA, 19 nt, Artificial Sequence
  Description of Artificial Sequence: Synthetic oligonucleotide
gcccauauuuguuugauag

SEQ ID NO: 82556 - RNA, 19 nt, Artificial Sequence
  Description of Artificial Sequence: Synthetic oligonucleotide
uuucacuucuauaucgcau

SEQ ID NO: 82557 - RNA, 19 nt, Artificial Sequence
  Description of Artificial Sequence: Synthetic oligonucleotide
gaaugguaauagcaugagc

SEQ ID NO: 82558 - RNA, 19 nt, Artificial Sequence
  Description of Artificial Sequence: Synthetic oligonucleotide
uuacugcucagucacggac

SEQ ID NO: 82559 - RNA, 19 nt, Artificial Sequence
  Description of Artificial Sequence: Synthetic oligonucleotide
guuuuagggacugaauacc

SEQ ID NO: 82560 - RNA, 19 nt, Artificial Sequence
  Description of Artificial Sequence: Synthetic oligonucleotide
agggguagauguguuaggc

SEQ ID NO: 82561 - RNA, 19 nt, Artificial Sequence
  Description of Artificial Sequence: Synthetic oligonucleotide
uuagcuuguuaauuuugac

SEQ ID NO: 82562 - RNA, 19 nt, Artificial Sequence
  Description of Artificial Sequence: Synthetic oligonucleotide
aucgcauaagcagagagga

SEQ ID NO: 82563 - RNA, 19 nt, Artificial Sequence
  Description of Artificial Sequence: Synthetic oligonucleotide
accccuuuaacgccgggac

SEQ ID NO: 82564 - RNA, 19 nt, Artificial Sequence
  Description of Artificial Sequence: Synthetic oligonucleotide
agguaagacgaagaaagag

SEQ ID NO: 82565 - RNA, 19 nt, Artificial Sequence
  Description of Artificial Sequence: Synthetic oligonucleotide
auauguuacuaacucacua

SEQ ID NO: 82566 - RNA, 19 nt, Artificial Sequence
  Description of Artificial Sequence: Synthetic oligonucleotide
acguugaugauuucuugug

SEQ ID NO: 82567 - RNA, 19 nt, Artificial Sequence
  Description of Artificial Sequence: Synthetic oligonucleotide
auacucaacuaugcaaugg

SEQ ID NO: 82568 - RNA, 19 nt, Artificial Sequence
  Description of Artificial Sequence: Synthetic oligonucleotide
ugggacuuguuaacuauga

SEQ ID NO: 82569 - RNA, 19 nt, Artificial Sequence
  Description of Artificial Sequence: Synthetic oligonucleotide
acggaaggguguuuaacuc

SEQ ID NO: 82570 - RNA, 19 nt, Artificial Sequence
  Description of Artificial Sequence: Synthetic oligonucleotide
cuuccuaugcugguaagcc

SEQ ID NO: 82571 - RNA, 19 nt, Artificial Sequence
  Description of Artificial Sequence: Synthetic oligonucleotide
gguaauagcaugagcaugc

SEQ ID NO: 82572 - RNA, 19 nt, Artificial Sequence
  Description of Artificial Sequence: Synthetic oligonucleotide
cucacuaccuucagcagug

SEQ ID NO: 82573 - RNA, 19 nt, Artificial Sequence
  Description of Artificial Sequence: Synthetic oligonucleotide
acuaagaguaaauggugau

SEQ ID NO: 82574 - RNA, 19 nt, Artificial Sequence
  Description of Artificial Sequence: Synthetic oligonucleotide
augcucuagacagagauga

SEQ ID NO: 82575 - RNA, 19 nt, Artificial Sequence
  Description of Artificial Sequence: Synthetic oligonucleotide
uucacuucuauaucgcaua

SEQ ID NO: 82576 - RNA, 19 nt, Artificial Sequence
  Description of Artificial Sequence: Synthetic oligonucleotide
cuaugcaauggaguguugg

SEQ ID NO: 82577 - RNA, 19 nt, Artificial Sequence
  Description of Artificial Sequence: Synthetic oligonucleotide
acuuccuaugcugguaagc

SEQ ID NO: 82578 - RNA, 19 nt, Artificial Sequence
  Description of Artificial Sequence: Synthetic oligonucleotide
aguugggccacugugaaga

SEQ ID NO: 82579 - RNA, 19 nt, Artificial Sequence
  Description of Artificial Sequence: Synthetic oligonucleotide
aucauagaaccaugucuuc

SEQ ID NO: 82580 - RNA, 19 nt, Artificial Sequence
  Description of Artificial Sequence: Synthetic oligonucleotide
uuuuaggacuugaccauuc

SEQ ID NO: 82581 - RNA, 19 nt, Artificial Sequence
  Description of Artificial Sequence: Synthetic oligonucleotide
uccgcaagaauagaguggu

SEQ ID NO: 82582 - RNA, 19 nt, Artificial Sequence
  Description of Artificial Sequence: Synthetic oligonucleotide
auccgucucacauuggacu

SEQ ID NO: 82583 - RNA, 19 nt, Artificial Sequence
  Description of Artificial Sequence: Synthetic oligonucleotide
aggacuauacucaacuaug

SEQ ID NO: 82584 - RNA, 19 nt, Artificial Sequence
  Description of Artificial Sequence: Synthetic oligonucleotide
ucuaaucccucggugagga

SEQ ID NO: 82585 - RNA, 19 nt, Artificial Sequence
  Description of Artificial Sequence: Synthetic oligonucleotide
uuggggagaacgaauguua

SEQ ID NO: 82586 - RNA, 19 nt, Artificial Sequence
  Description of Artificial Sequence: Synthetic oligonucleotide
gggccauaagaauaggagg

SEQ ID NO: 82587 - RNA, 19 nt, Artificial Sequence
  Description of Artificial Sequence: Synthetic oligonucleotide
aaucuggccuaauaaccau

SEQ ID NO: 82588 - RNA, 19 nt, Artificial Sequence
  Description of Artificial Sequence: Synthetic oligonucleotide
auagacaugaaaugcucua

SEQ ID NO: 82589 - RNA, 19 nt, Artificial Sequence
  Description of Artificial Sequence: Synthetic oligonucleotide
uuuaggacuugaccauucu

SEQ ID NO: 82590 - RNA, 19 nt, Artificial Sequence
  Description of Artificial Sequence: Synthetic oligonucleotide
ucgaacugugccaaugaaa

SEQ ID NO: 82591 - RNA, 19 nt, Artificial Sequence
  Description of Artificial Sequence: Synthetic oligonucleotide
cuccgcaagaauagagugg

SEQ ID NO: 82592 - RNA, 19 nt, Artificial Sequence
  Description of Artificial Sequence: Synthetic oligonucleotide
aggugaguaccucaagucu

SEQ ID NO: 82593 - RNA, 19 nt, Artificial Sequence
  Description of Artificial Sequence: Synthetic oligonucleotide
auauuaaguagguccugga

SEQ ID NO: 82594 - RNA, 19 nt, Artificial Sequence
  Description of Artificial Sequence: Synthetic oligonucleotide
uguaaagaauaugaagguu

SEQ ID NO: 82595 - RNA, 19 nt, Artificial Sequence
  Description of Artificial Sequence: Synthetic oligonucleotide
ugaagaggccacacguuga

SEQ ID NO: 82596 - RNA, 19 nt, Artificial Sequence
  Description of Artificial Sequence: Synthetic oligonucleotide
aacgaauguuacagccugc

SEQ ID NO: 82597 - RNA, 19 nt, Artificial Sequence
  Description of Artificial Sequence: Synthetic oligonucleotide
ugguaauagcaugagcaug

SEQ ID NO: 82598 - RNA, 19 nt, Artificial Sequence
  Description of Artificial Sequence: Synthetic oligonucleotide
cugaaccccuuuaacgccg

SEQ ID NO: 82599 - RNA, 19 nt, Artificial Sequence
  Description of Artificial Sequence: Synthetic oligonucleotide
uggagugcagcacaauuua

SEQ ID NO: 82600 - RNA, 19 nt, Artificial Sequence
  Description of Artificial Sequence: Synthetic oligonucleotide
uauuuauccuugguccaag

SEQ ID NO: 82601 - RNA, 19 nt, Artificial Sequence
  Description of Artificial Sequence: Synthetic oligonucleotide
ugcgguugaggagagacga

SEQ ID NO: 82602 - RNA, 19 nt, Artificial Sequence
  Description of Artificial Sequence: Synthetic oligonucleotide
acucacuaccuucagcagu

SEQ ID NO: 82603 - RNA, 19 nt, Artificial Sequence
  Description of Artificial Sequence: Synthetic oligonucleotide
gagacgacaccuuuggucu

SEQ ID NO: 82604 - RNA, 19 nt, Artificial Sequence
  Description of Artificial Sequence: Synthetic oligonucleotide
uucuaucauauguuacuaa

SEQ ID NO: 82605 - RNA, 19 nt, Artificial Sequence
  Description of Artificial Sequence: Synthetic oligonucleotide
uccgucucacauuggacug

SEQ ID NO: 82606 - RNA, 19 nt, Artificial Sequence
  Description of Artificial Sequence: Synthetic oligonucleotide
cacuguguaaaggguaugg

SEQ ID NO: 82607 - RNA, 19 nt, Artificial Sequence
  Description of Artificial Sequence: Synthetic oligonucleotide
aaugcucuagacagagaug

SEQ ID NO: 82608 - RNA, 19 nt, Artificial Sequence
  Description of Artificial Sequence: Synthetic oligonucleotide
uuuggcuuagcuuguuaau

SEQ ID NO: 82609 - RNA, 19 nt, Artificial Sequence
  Description of Artificial Sequence: Synthetic oligonucleotide
uuagggacugaauacccuu

SEQ ID NO: 82610 - RNA, 19 nt, Artificial Sequence
  Description of Artificial Sequence: Synthetic oligonucleotide
uccccuaaggugcauuuuc

SEQ ID NO: 82611 - RNA, 19 nt, Artificial Sequence
  Description of Artificial Sequence: Synthetic oligonucleotide
caugcgguugaggagagac

SEQ ID NO: 82612 - RNA, 19 nt, Artificial Sequence
  Description of Artificial Sequence: Synthetic oligonucleotide
ggccauaagaauaggaggc

SEQ ID NO: 82613 - RNA, 19 nt, Artificial Sequence
  Description of Artificial Sequence: Synthetic oligonucleotide
uggaauccuuccauugacu

SEQ ID NO: 82614 - RNA, 19 nt, Artificial Sequence
  Description of Artificial Sequence: Synthetic oligonucleotide
uaugaagguuucacaugcu

SEQ ID NO: 82615 - RNA, 19 nt, Artificial Sequence
  Description of Artificial Sequence: Synthetic oligonucleotide
aggacaauugcaaaggcuu

SEQ ID NO: 82616 - RNA, 19 nt, Artificial Sequence
  Description of Artificial Sequence: Synthetic oligonucleotide
cuaagaguaaauggugauc

SEQ ID NO: 82617 - RNA, 19 nt, Artificial Sequence
  Description of Artificial Sequence: Synthetic oligonucleotide
ugaaccccuuuaacgccgg

SEQ ID NO: 82618 - RNA, 19 nt, Artificial Sequence
  Description of Artificial Sequence: Synthetic oligonucleotide
agacgaagaaagaggauca

SEQ ID NO: 82619 - RNA, 19 nt, Artificial Sequence
  Description of Artificial Sequence: Synthetic oligonucleotide
ugcuaccuugaguaggccu

SEQ ID NO: 82620 - RNA, 19 nt, Artificial Sequence
  Description of Artificial Sequence: Synthetic oligonucleotide
gagucuuuuagggaaagua

SEQ ID NO: 82621 - RNA, 19 nt, Artificial Sequence
  Description of Artificial Sequence: Synthetic oligonucleotide
aggaugguaucacuuuggu

SEQ ID NO: 82622 - RNA, 19 nt, Artificial Sequence
  Description of Artificial Sequence: Synthetic oligonucleotide
uuccuaugcugguaagcca

SEQ ID NO: 82623 - RNA, 19 nt, Artificial Sequence
  Description of Artificial Sequence: Synthetic oligonucleotide
gcuaugaaaggcugaggag

SEQ ID NO: 82624 - RNA, 19 nt, Artificial Sequence
  Description of Artificial Sequence: Synthetic oligonucleotide
uuuacggaaggguguuuaa

SEQ ID NO: 82625 - RNA, 19 nt, Artificial Sequence
  Description of Artificial Sequence: Synthetic oligonucleotide
guagacaugggagguagac

SEQ ID NO: 82626 - RNA, 19 nt, Artificial Sequence
  Description of Artificial Sequence: Synthetic oligonucleotide
caguaggaaugguaauagc

SEQ ID NO: 82627 - RNA, 19 nt, Artificial Sequence
  Description of Artificial Sequence: Synthetic oligonucleotide
ucuuccaagcgcgagcauc

SEQ ID NO: 82628 - RNA, 19 nt, Artificial Sequence
  Description of Artificial Sequence: Synthetic oligonucleotide
uggauguuccauguccuac

SEQ ID NO: 82629 - RNA, 19 nt, Artificial Sequence
  Description of Artificial Sequence: Synthetic oligonucleotide
uccggacgcauauuaagua

SEQ ID NO: 82630 - RNA, 19 nt, Artificial Sequence
  Description of Artificial Sequence: Synthetic oligonucleotide
caagaauagagugguagga

SEQ ID NO: 82631 - RNA, 19 nt, Artificial Sequence
  Description of Artificial Sequence: Synthetic oligonucleotide
aggacuugaccauucugau

SEQ ID NO: 82632 - RNA, 19 nt, Artificial Sequence
  Description of Artificial Sequence: Synthetic oligonucleotide
cacuacccagguaagacga

SEQ ID NO: 82633 - RNA, 19 nt, Artificial Sequence
  Description of Artificial Sequence: Synthetic oligonucleotide
auuacugcucagucacgga

SEQ ID NO: 82634 - RNA, 19 nt, Artificial Sequence
  Description of Artificial Sequence: Synthetic oligonucleotide
gaggacuauacucaacuau

SEQ ID NO: 82635 - RNA, 19 nt, Artificial Sequence
  Description of Artificial Sequence: Synthetic oligonucleotide
agaacgaauguuacagccu

SEQ ID NO: 82636 - RNA, 19 nt, Artificial Sequence
  Description of Artificial Sequence: Synthetic oligonucleotide
uauaucgcauaagcagaga

SEQ ID NO: 82637 - RNA, 19 nt, Artificial Sequence
  Description of Artificial Sequence: Synthetic oligonucleotide
uacaggguauggagugcag

SEQ ID NO: 82638 - RNA, 19 nt, Artificial Sequence
  Description of Artificial Sequence: Synthetic oligonucleotide
gccaagagcauaguugggg

SEQ ID NO: 82639 - RNA, 19 nt, Artificial Sequence
  Description of Artificial Sequence: Synthetic oligonucleotide
gguccggacgcauauuaag

SEQ ID NO: 82640 - RNA, 19 nt, Artificial Sequence
  Description of Artificial Sequence: Synthetic oligonucleotide
uuuaacgccgggaccccuc

SEQ ID NO: 82641 - RNA, 19 nt, Artificial Sequence
  Description of Artificial Sequence: Synthetic oligonucleotide
agauccuuaugcugcacuu

SEQ ID NO: 82642 - RNA, 19 nt, Artificial Sequence
  Description of Artificial Sequence: Synthetic oligonucleotide
cagcuccgcaagaauagag

SEQ ID NO: 82643 - RNA, 19 nt, Artificial Sequence
  Description of Artificial Sequence: Synthetic oligonucleotide
guagacacccaugaaagua

SEQ ID NO: 82644 - RNA, 19 nt, Artificial Sequence
  Description of Artificial Sequence: Synthetic oligonucleotide
uggcacuguguaaagggua

SEQ ID NO: 82645 - RNA, 19 nt, Artificial Sequence
  Description of Artificial Sequence: Synthetic oligonucleotide
caucauagaaccaugucuu

SEQ ID NO: 82646 - RNA, 19 nt, Artificial Sequence
  Description of Artificial Sequence: Synthetic oligonucleotide
aagccauauuugaggguuc

SEQ ID NO: 82647 - RNA, 19 nt, Artificial Sequence
  Description of Artificial Sequence: Synthetic oligonucleotide
gacuuccuaugcugguaag

SEQ ID NO: 82648 - RNA, 19 nt, Artificial Sequence
  Description of Artificial Sequence: Synthetic oligonucleotide
ggacuuguuaacuaugacu

SEQ ID NO: 82649 - RNA, 19 nt, Artificial Sequence
  Description of Artificial Sequence: Synthetic oligonucleotide
aaggaggacucgcucuaau

SEQ ID NO: 82650 - RNA, 19 nt, Artificial Sequence
  Description of Artificial Sequence: Synthetic oligonucleotide
gcaguacucaguccuagug

SEQ ID NO: 82651 - RNA, 19 nt, Artificial Sequence
  Description of Artificial Sequence: Synthetic oligonucleotide
gcuccgcaagaauagagug

SEQ ID NO: 82652 - RNA, 19 nt, Artificial Sequence
  Description of Artificial Sequence: Synthetic oligonucleotide
cacauagacaugaaaugcu

SEQ ID NO: 82653 - RNA, 19 nt, Artificial Sequence
  Description of Artificial Sequence: Synthetic oligonucleotide
agcauaguuggggcucagc

SEQ ID NO: 82654 - RNA, 19 nt, Artificial Sequence
  Description of Artificial Sequence: Synthetic oligonucleotide
gugaucacuucgcugccac

SEQ ID NO: 82655 - RNA, 19 nt, Artificial Sequence
  Description of Artificial Sequence: Synthetic oligonucleotide
cagaucauuggcucaggga

SEQ ID NO: 82656 - RNA, 19 nt, Artificial Sequence
  Description of Artificial Sequence: Synthetic oligonucleotide
aaccccuuuaacgccggga

SEQ ID NO: 82657 - RNA, 19 nt, Artificial Sequence
  Description of Artificial Sequence: Synthetic oligonucleotide
guaugcauccgucucacau

SEQ ID NO: 82658 - RNA, 19 nt, Artificial Sequence
  Description of Artificial Sequence: Synthetic oligonucleotide
acaaggaggacucgcucua

SEQ ID NO: 82659 - RNA, 19 nt, Artificial Sequence
  Description of Artificial Sequence: Synthetic oligonucleotide
uaccucaagucuucacuau

SEQ ID NO: 82660 - RNA, 19 nt, Artificial Sequence
  Description of Artificial Sequence: Synthetic oligonucleotide
guaccucaagucuucacua

SEQ ID NO: 82661 - RNA, 19 nt, Artificial Sequence
  Description of Artificial Sequence: Synthetic oligonucleotide
cacuaccuucagcagugcc

SEQ ID NO: 82662 - RNA, 19 nt, Artificial Sequence
  Description of Artificial Sequence: Synthetic oligonucleotide
uggcaguacucaguccuag

SEQ ID NO: 82663 - RNA, 19 nt, Artificial Sequence
  Description of Artificial Sequence: Synthetic oligonucleotide
cuguguaaaggguauggcu

SEQ ID NO: 82664 - RNA, 19 nt, Artificial Sequence
  Description of Artificial Sequence: Synthetic oligonucleotide
caaugcgcagaugguacag

SEQ ID NO: 82665 - RNA, 19 nt, Artificial Sequence
  Description of Artificial Sequence: Synthetic oligonucleotide
ugaucacuucgcugccacc

SEQ ID NO: 82666 - RNA, 19 nt, Artificial Sequence
  Description of Artificial Sequence: Synthetic oligonucleotide
gcugaaccccuuuaacgcc

SEQ ID NO: 82667 - RNA, 19 nt, Artificial Sequence
  Description of Artificial Sequence: Synthetic oligonucleotide
gguguuuaacuccuuggaa

SEQ ID NO: 82668 - RNA, 19 nt, Artificial Sequence
  Description of Artificial Sequence: Synthetic oligonucleotide
gacgaagaaagaggaucac

SEQ ID NO: 82669 - RNA, 19 nt, Artificial Sequence
  Description of Artificial Sequence: Synthetic oligonucleotide
gcauaagcagagaggauug

SEQ ID NO: 82670 - RNA, 19 nt, Artificial Sequence
  Description of Artificial Sequence: Synthetic oligonucleotide
gacgcauauuaaguagguc

SEQ ID NO: 82671 - RNA, 19 nt, Artificial Sequence
  Description of Artificial Sequence: Synthetic oligonucleotide
uccaagcgcgagcaucuuc

SEQ ID NO: 82672 - RNA, 19 nt, Artificial Sequence
  Description of Artificial Sequence: Synthetic oligonucleotide
cucuaaucccucggugagg

SEQ ID NO: 82673 - RNA, 19 nt, Artificial Sequence
  Description of Artificial Sequence: Synthetic oligonucleotide
gagaacagugcuuuacguu

SEQ ID NO: 82674 - RNA, 19 nt, Artificial Sequence
  Description of Artificial Sequence: Synthetic oligonucleotide
ccacuacccagguaagacg

SEQ ID NO: 82675 - RNA, 19 nt, Artificial Sequence
  Description of Artificial Sequence: Synthetic oligonucleotide
augggacuuguuaacuaug

SEQ ID NO: 82676 - RNA, 19 nt, Artificial Sequence
  Description of Artificial Sequence: Synthetic oligonucleotide
cagacucuauguaaacaaa

SEQ ID NO: 82677 - RNA, 19 nt, Artificial Sequence
  Description of Artificial Sequence: Synthetic oligonucleotide
gaucacuccaaaauauuuu

SEQ ID NO: 82678 - RNA, 19 nt, Artificial Sequence
  Description of Artificial Sequence: Synthetic oligonucleotide
guguaaaggguauggcucu

SEQ ID NO: 82679 - RNA, 19 nt, Artificial Sequence
  Description of Artificial Sequence: Synthetic oligonucleotide
acccuuuuaaagauucuua

SEQ ID NO: 82680 - RNA, 19 nt, Artificial Sequence
  Description of Artificial Sequence: Synthetic oligonucleotide
ugaguaccucaagucuuca

SEQ ID NO: 82681 - RNA, 19 nt, Artificial Sequence
  Description of Artificial Sequence: Synthetic oligonucleotide
ggacuugaccauucugaug

SEQ ID NO: 82682 - RNA, 19 nt, Artificial Sequence
  Description of Artificial Sequence: Synthetic oligonucleotide
ugguccggacgcauauuaa

SEQ ID NO: 82683 - RNA, 19 nt, Artificial Sequence
  Description of Artificial Sequence: Synthetic oligonucleotide
ccggacgcauauuaaguag

SEQ ID NO: 82684 - RNA, 19 nt, Artificial Sequence
  Description of Artificial Sequence: Synthetic oligonucleotide
ugcaaaccugucugccgcu

SEQ ID NO: 82685 - RNA, 19 nt, Artificial Sequence
  Description of Artificial Sequence: Synthetic oligonucleotide
aggguauggcucucccaug

SEQ ID NO: 82686 - RNA, 19 nt, Artificial Sequence
  Description of Artificial Sequence: Synthetic oligonucleotide
cagucacggacuuccuaug

SEQ ID NO: 82687 - RNA, 19 nt, Artificial Sequence
  Description of Artificial Sequence: Synthetic oligonucleotide
ccagacucuauguaaacaa

SEQ ID NO: 82688 - RNA, 19 nt, Artificial Sequence
  Description of Artificial Sequence: Synthetic oligonucleotide
cggacgcauauuaaguagg

SEQ ID NO: 82689 - RNA, 19 nt, Artificial Sequence
  Description of Artificial Sequence: Synthetic oligonucleotide
cccuuuaacgccgggaccc

SEQ ID NO: 82690 - RNA, 19 nt, Artificial Sequence
  Description of Artificial Sequence: Synthetic oligonucleotide
ucgcauaagcagagaggau

SEQ ID NO: 82691 - RNA, 19 nt, Artificial Sequence
  Description of Artificial Sequence: Synthetic oligonucleotide
ugcccauauuuguuugaua

SEQ ID NO: 82692 - RNA, 19 nt, Artificial Sequence
  Description of Artificial Sequence: Synthetic oligonucleotide
guauuuauccuugguccaa

SEQ ID NO: 82693 - RNA, 19 nt, Artificial Sequence
  Description of Artificial Sequence: Synthetic oligonucleotide
gaaccccuuuaacgccggg

SEQ ID NO: 82694 - RNA, 19 nt, Artificial Sequence
  Description of Artificial Sequence: Synthetic oligonucleotide
cauuggcucagggaaccac

SEQ ID NO: 82695 - RNA, 19 nt, Artificial Sequence
  Description of Artificial Sequence: Synthetic oligonucleotide
gcaucuucacucugacgcc

SEQ ID NO: 82696 - RNA, 19 nt, Artificial Sequence
  Description of Artificial Sequence: Synthetic oligonucleotide
ggaugguaucacuuugguc

SEQ ID NO: 82697 - RNA, 19 nt, Artificial Sequence
  Description of Artificial Sequence: Synthetic oligonucleotide
gcagccgcugaguagcagc

SEQ ID NO: 82698 - RNA, 19 nt, Artificial Sequence
  Description of Artificial Sequence: Synthetic oligonucleotide
gugaguaccucaagucuuc

SEQ ID NO: 82699 - RNA, 19 nt, Artificial Sequence
  Description of Artificial Sequence: Synthetic oligonucleotide
gcucccugugucaaguuag

SEQ ID NO: 82700 - RNA, 19 nt, Artificial Sequence
  Description of Artificial Sequence: Synthetic oligonucleotide
gggacuuguuaacuaugac

SEQ ID NO: 82701 - RNA, 19 nt, Artificial Sequence
  Description of Artificial Sequence: Synthetic oligonucleotide
ccaucauagaaccaugucu

SEQ ID NO: 82702 - RNA, 19 nt, Artificial Sequence
  Description of Artificial Sequence: Synthetic oligonucleotide
ggauccuuggggccauaag

SEQ ID NO: 82703 - RNA, 19 nt, Artificial Sequence
  Description of Artificial Sequence: Synthetic oligonucleotide
cuuccaagcgcgagcaucu

SEQ ID NO: 82704 - RNA, 19 nt, Artificial Sequence
  Description of Artificial Sequence: Synthetic oligonucleotide
agagcauaguuggggcuca

SEQ ID NO: 82705 - RNA, 19 nt, Artificial Sequence
  Description of Artificial Sequence: Synthetic oligonucleotide
gaagaggccacacguugau

SEQ ID NO: 82706 - RNA, 19 nt, Artificial Sequence
  Description of Artificial Sequence: Synthetic oligonucleotide
caugggacuuguuaacuau

SEQ ID NO: 82707 - RNA, 19 nt, Artificial Sequence
  Description of Artificial Sequence: Synthetic oligonucleotide
guuuggggagaacgaaugu

SEQ ID NO: 82708 - RNA, 19 nt, Artificial Sequence
  Description of Artificial Sequence: Synthetic oligonucleotide
ccaagcgcgagcaucuuca

SEQ ID NO: 82709 - RNA, 19 nt, Artificial Sequence
  Description of Artificial Sequence: Synthetic oligonucleotide
cugguccggacgcauauua

SEQ ID NO: 82710 - RNA, 19 nt, Artificial Sequence
  Description of Artificial Sequence: Synthetic oligonucleotide
guuuaacuccuuggaaccu

SEQ ID NO: 82711 - RNA, 19 nt, Artificial Sequence
  Description of Artificial Sequence: Synthetic oligonucleotide
accccucagagguggcagu

SEQ ID NO: 82712 - RNA, 19 nt, Artificial Sequence
  Description of Artificial Sequence: Synthetic oligonucleotide
ucccugugucaaguuagua

SEQ ID NO: 82713 - RNA, 19 nt, Artificial Sequence
  Description of Artificial Sequence: Synthetic oligonucleotide
uuggaaccuagaggacuau

SEQ ID NO: 82714 - RNA, 19 nt, Artificial Sequence
  Description of Artificial Sequence: Synthetic oligonucleotide
ugcuuaccucaggccaaug

SEQ ID NO: 82715 - RNA, 19 nt, Artificial Sequence
  Description of Artificial Sequence: Synthetic oligonucleotide
gccagacucuauguaaaca

SEQ ID NO: 82716 - RNA, 19 nt, Artificial Sequence
  Description of Artificial Sequence: Synthetic oligonucleotide
gagagacgacaccuuuggu

SEQ ID NO: 82717 - RNA, 19 nt, Artificial Sequence
  Description of Artificial Sequence: Synthetic oligonucleotide
gccgcugaguagcagcauc

SEQ ID NO: 82718 - RNA, 19 nt, Artificial Sequence
  Description of Artificial Sequence: Synthetic oligonucleotide
caguuuggggagaacgaau

SEQ ID NO: 82719 - RNA, 19 nt, Artificial Sequence
  Description of Artificial Sequence: Synthetic oligonucleotide
cucauauguauaggcagau

SEQ ID NO: 82720 - RNA, 19 nt, Artificial Sequence
  Description of Artificial Sequence: Synthetic oligonucleotide
cuuuacucucugcccauau

SEQ ID NO: 82721 - RNA, 19 nt, Artificial Sequence
  Description of Artificial Sequence: Synthetic oligonucleotide
ggaucacuccaaaauauuu

SEQ ID NO: 82722 - RNA, 19 nt, Artificial Sequence
  Description of Artificial Sequence: Synthetic oligonucleotide
cucgcucuaaucccucggu

SEQ ID NO: 82723 - RNA, 19 nt, Artificial Sequence
  Description of Artificial Sequence: Synthetic oligonucleotide
ccccuuuaacgccgggacc

SEQ ID NO: 82724 - RNA, 19 nt, Artificial Sequence
  Description of Artificial Sequence: Synthetic oligonucleotide
acuacccagguaagacgaa

SEQ ID NO: 82725 - RNA, 19 nt, Artificial Sequence
  Description of Artificial Sequence: Synthetic oligonucleotide
cugcuguaugcauccgucu

SEQ ID NO: 82726 - RNA, 19 nt, Artificial Sequence
  Description of Artificial Sequence: Synthetic oligonucleotide
ggugaguaccucaagucuu

SEQ ID NO: 82727 - RNA, 19 nt, Artificial Sequence
  Description of Artificial Sequence: Synthetic oligonucleotide
cgcauauuaaguagguccu

SEQ ID NO: 82728 - RNA, 19 nt, Artificial Sequence
  Description of Artificial Sequence: Synthetic oligonucleotide
cgcucuaaucccucgguga

SEQ ID NO: 82729 - RNA, 19 nt, Artificial Sequence
  Description of Artificial Sequence: Synthetic oligonucleotide
ccgucucacauuggacugg

SEQ ID NO: 82730 - RNA, 19 nt, Artificial Sequence
  Description of Artificial Sequence: Synthetic oligonucleotide
cuuccccuaaggugcauuu

SEQ ID NO: 82731 - RNA, 19 nt, Artificial Sequence
  Description of Artificial Sequence: Synthetic oligonucleotide
ggacgcauauuaaguaggu

SEQ ID NO: 82732 - RNA, 19 nt, Artificial Sequence
  Description of Artificial Sequence: Synthetic oligonucleotide
gguucccuuuggcuuagcu

SEQ ID NO: 82733 - RNA, 19 nt, Artificial Sequence
  Description of Artificial Sequence: Synthetic oligonucleotide
ccuuuaacgccgggacccc

SEQ ID NO: 82734 - RNA, 19 nt, Artificial Sequence
  Description of Artificial Sequence: Synthetic oligonucleotide
uuccaagcgcgagcaucuu

SEQ ID NO: 82735 - RNA, 19 nt, Artificial Sequence
  Description of Artificial Sequence: Synthetic oligonucleotide
caaggaggacucgcucuaa

SEQ ID NO: 82736 - RNA, 19 nt, Artificial Sequence
  Description of Artificial Sequence: Synthetic oligonucleotide
gccaugcgguugaggagag

SEQ ID NO: 82737 - RNA, 19 nt, Artificial Sequence
  Description of Artificial Sequence: Synthetic oligonucleotide
ggacucgcucuaaucccuc

SEQ ID NO: 82738 - RNA, 19 nt, Artificial Sequence
  Description of Artificial Sequence: Synthetic oligonucleotide
agccgcugaguagcagcau

SEQ ID NO: 82739 - RNA, 19 nt, Artificial Sequence
  Description of Artificial Sequence: Synthetic oligonucleotide
cuggccuaauaaccauuuu

SEQ ID NO: 82740 - RNA, 19 nt, Artificial Sequence
  Description of Artificial Sequence: Synthetic oligonucleotide
cuuuaacgccgggaccccu

SEQ ID NO: 82741 - RNA, 19 nt, Artificial Sequence
  Description of Artificial Sequence: Synthetic oligonucleotide
cgcauaagcagagaggauu

SEQ ID NO: 82742 - RNA, 19 nt, Artificial Sequence
  Description of Artificial Sequence: Synthetic oligonucleotide
cgcgagcaucuucacucug

SEQ ID NO: 82743 - RNA, 19 nt, Artificial Sequence
  Description of Artificial Sequence: Synthetic oligonucleotide
gucuuccaagcgcgagcau

SEQ ID NO: 82744 - RNA, 19 nt, Artificial Sequence
  Description of Artificial Sequence: Synthetic oligonucleotide
cugcuuaccucaggccaau

SEQ ID NO: 82745 - RNA, 19 nt, Artificial Sequence
  Description of Artificial Sequence: Synthetic oligonucleotide
ccgggaccccucagaggug

SEQ ID NO: 82746 - RNA, 19 nt, Artificial Sequence
  Description of Artificial Sequence: Synthetic oligonucleotide
ggacugguccggacgcaua

SEQ ID NO: 82747 - RNA, 19 nt, Artificial Sequence
  Description of Artificial Sequence: Synthetic oligonucleotide
cccggggaugccauguauu

SEQ ID NO: 82748 - RNA, 19 nt, Artificial Sequence
  Description of Artificial Sequence: Synthetic oligonucleotide
ccgcaagaauagaguggua

SEQ ID NO: 82749 - RNA, 19 nt, Artificial Sequence
  Description of Artificial Sequence: Synthetic oligonucleotide
ccuuccccuaaggugcauu

SEQ ID NO: 82750 - RNA, 19 nt, Artificial Sequence
  Description of Artificial Sequence: Synthetic oligonucleotide
gauacuaacacgcuuaugg

SEQ ID NO: 82751 - RNA, 19 nt, Artificial Sequence
  Description of Artificial Sequence: Synthetic oligonucleotide
aaaacacacacacacacac

SEQ ID NO: 82752 - RNA, 19 nt, Artificial Sequence
  Description of Artificial Sequence: Synthetic oligonucleotide
uuauaagauacuaacacgc

SEQ ID NO: 82753 - RNA, 19 nt, Artificial Sequence
  Description of Artificial Sequence: Synthetic oligonucleotide
uacacuaaccaucaaaagg

SEQ ID NO: 82754 - RNA, 19 nt, Artificial Sequence
  Description of Artificial Sequence: Synthetic oligonucleotide
aacacacacacacacacac

SEQ ID NO: 82755 - RNA, 19 nt, Artificial Sequence
  Description of Artificial Sequence: Synthetic oligonucleotide
aaauccaaaguuuagcugu

SEQ ID NO: 82756 - RNA, 19 nt, Artificial Sequence
  Description of Artificial Sequence: Synthetic oligonucleotide
uauuuagucaggcugacug

SEQ ID NO: 82757 - RNA, 19 nt, Artificial Sequence
  Description of Artificial Sequence: Synthetic oligonucleotide
aauccguaaguacuaagac

SEQ ID NO: 82758 - RNA, 19 nt, Artificial Sequence
  Description of Artificial Sequence: Synthetic oligonucleotide
gauagcuacagacugagug

SEQ ID NO: 82759 - RNA, 19 nt, Artificial Sequence
  Description of Artificial Sequence: Synthetic oligonucleotide
uguacaugaacuaggauac

SEQ ID NO: 82760 - RNA, 19 nt, Artificial Sequence
  Description of Artificial Sequence: Synthetic oligonucleotide
uuagagauaagucuaauuu

SEQ ID NO: 82761 - RNA, 19 nt, Artificial Sequence
  Description of Artificial Sequence: Synthetic oligonucleotide
aguauuuagcugaagaagc

SEQ ID NO: 82762 - RNA, 19 nt, Artificial Sequence
  Description of Artificial Sequence: Synthetic oligonucleotide
aauaguacaucucacccca

SEQ ID NO: 82763 - RNA, 19 nt, Artificial Sequence
  Description of Artificial Sequence: Synthetic oligonucleotide
ucgauaguuauuuagucag

SEQ ID NO: 82764 - RNA, 19 nt, Artificial Sequence
  Description of Artificial Sequence: Synthetic oligonucleotide
aauugcuucauagcuaugg

SEQ ID NO: 82765 - RNA, 19 nt, Artificial Sequence
  Description of Artificial Sequence: Synthetic oligonucleotide
augauaagacaauauacuc

SEQ ID NO: 82766 - RNA, 19 nt, Artificial Sequence
  Description of Artificial Sequence: Synthetic oligonucleotide
aauaguuaguuuaaccccg

SEQ ID NO: 82767 - RNA, 19 nt, Artificial Sequence
  Description of Artificial Sequence: Synthetic oligonucleotide
uaauaguuaguuuaacccc

SEQ ID NO: 82768 - RNA, 19 nt, Artificial Sequence
  Description of Artificial Sequence: Synthetic oligonucleotide
aaacuauagaacaugcagg

SEQ ID NO: 82769 - RNA, 19 nt, Artificial Sequence
  Description of Artificial Sequence: Synthetic oligonucleotide
aagauuaaagucauucgac

SEQ ID NO: 82770 - RNA, 19 nt, Artificial Sequence
  Description of Artificial Sequence: Synthetic oligonucleotide
uaugauguuuaucuggagc

SEQ ID NO: 82771 - RNA, 19 nt, Artificial Sequence
  Description of Artificial Sequence: Synthetic oligonucleotide
uuacucuauguuuauaugc

SEQ ID NO: 82772 - RNA, 19 nt, Artificial Sequence
  Description of Artificial Sequence: Synthetic oligonucleotide
gauuaaagucauucgacag

SEQ ID NO: 82773 - RNA, 19 nt, Artificial Sequence
  Description of Artificial Sequence: Synthetic oligonucleotide
aaguauuuagcugaagaag

SEQ ID NO: 82774 - RNA, 19 nt, Artificial Sequence
  Description of Artificial Sequence: Synthetic oligonucleotide
uuuuauuuauuuuauuuua

SEQ ID NO: 82775 - RNA, 19 nt, Artificial Sequence
  Description of Artificial Sequence: Synthetic oligonucleotide
agugucaugaauuucucug

SEQ ID NO: 82776 - RNA, 19 nt, Artificial Sequence
  Description of Artificial Sequence: Synthetic oligonucleotide
uuuauaugcuauuuucuca

SEQ ID NO: 82777 - RNA, 19 nt, Artificial Sequence
  Description of Artificial Sequence: Synthetic oligonucleotide
uguaauagccaacuguaac

SEQ ID NO: 82778 - RNA, 19 nt, Artificial Sequence
  Description of Artificial Sequence: Synthetic oligonucleotide
cuauggguuuacaaaaugg

SEQ ID NO: 82779 - RNA, 19 nt, Artificial Sequence
  Description of Artificial Sequence: Synthetic oligonucleotide
acauguaugcaacacauga

SEQ ID NO: 82780 - RNA, 19 nt, Artificial Sequence
  Description of Artificial Sequence: Synthetic oligonucleotide
aucguaugguuucaguacc

SEQ ID NO: 82781 - RNA, 19 nt, Artificial Sequence
  Description of Artificial Sequence: Synthetic oligonucleotide
auacuaacacgcuuauggc

SEQ ID NO: 82782 - RNA, 19 nt, Artificial Sequence
  Description of Artificial Sequence: Synthetic oligonucleotide
ucagaacaccauuuuaggg

SEQ ID NO: 82783 - RNA, 19 nt, Artificial Sequence
  Description of Artificial Sequence: Synthetic oligonucleotide
cuguauucuaagaacacag

SEQ ID NO: 82784 - RNA, 19 nt, Artificial Sequence
  Description of Artificial Sequence: Synthetic oligonucleotide
aaauccccguucuucaggg

SEQ ID NO: 82785 - RNA, 19 nt, Artificial Sequence
  Description of Artificial Sequence: Synthetic oligonucleotide
aguacuaagacaacuguuc

SEQ ID NO: 82786 - RNA, 19 nt, Artificial Sequence
  Description of Artificial Sequence: Synthetic oligonucleotide
aggauguccaacucuaagg

SEQ ID NO: 82787 - RNA, 19 nt, Artificial Sequence
  Description of Artificial Sequence: Synthetic oligonucleotide
ucacuaaccgcucuuaccu

SEQ ID NO: 82788 - RNA, 19 nt, Artificial Sequence
  Description of Artificial Sequence: Synthetic oligonucleotide
aaccaguauacaauguuac

SEQ ID NO: 82789 - RNA, 19 nt, Artificial Sequence
  Description of Artificial Sequence: Synthetic oligonucleotide
ucgggaaucccacuaaaag

SEQ ID NO: 82790 - RNA, 19 nt, Artificial Sequence
  Description of Artificial Sequence: Synthetic oligonucleotide
aaaauccguaaguacuaag

SEQ ID NO: 82791 - RNA, 19 nt, Artificial Sequence
  Description of Artificial Sequence: Synthetic oligonucleotide
ucuaguagguugcauuaag

SEQ ID NO: 82792 - RNA, 19 nt, Artificial Sequence
  Description of Artificial Sequence: Synthetic oligonucleotide
uuagccaauauaccaaagu

SEQ ID NO: 82793 - RNA, 19 nt, Artificial Sequence
  Description of Artificial Sequence: Synthetic oligonucleotide
uuaaaucucccuuuacuac

SEQ ID NO: 82794 - RNA, 19 nt, Artificial Sequence
  Description of Artificial Sequence: Synthetic oligonucleotide
acaugauagcuacagacug

SEQ ID NO: 82795 - RNA, 19 nt, Artificial Sequence
  Description of Artificial Sequence: Synthetic oligonucleotide
uacucuauguuuauaugcu

SEQ ID NO: 82796 - RNA, 19 nt, Artificial Sequence
  Description of Artificial Sequence: Synthetic oligonucleotide
ugcaacacaugauuguaag

SEQ ID NO: 82797 - RNA, 19 nt, Artificial Sequence
  Description of Artificial Sequence: Synthetic oligonucleotide
aauaagagucaaucaacaa

SEQ ID NO: 82798 - RNA, 19 nt, Artificial Sequence
  Description of Artificial Sequence: Synthetic oligonucleotide
auauaaaugucugagacua

SEQ ID NO: 82799 - RNA, 19 nt, Artificial Sequence
  Description of Artificial Sequence: Synthetic oligonucleotide
ucuuacucuauguuuauau

SEQ ID NO: 82800 - RNA, 19 nt, Artificial Sequence
  Description of Artificial Sequence: Synthetic oligonucleotide
agauugauuguuucuccac

SEQ ID NO: 82801 - RNA, 19 nt, Artificial Sequence
  Description of Artificial Sequence: Synthetic oligonucleotide
uauuaguuagcauucggau

SEQ ID NO: 82802 - RNA, 19 nt, Artificial Sequence
  Description of Artificial Sequence: Synthetic oligonucleotide
uaaauaaccuaguuuacuu

SEQ ID NO: 82803 - RNA, 19 nt, Artificial Sequence
  Description of Artificial Sequence: Synthetic oligonucleotide
auuaaagucauucgacaga

SEQ ID NO: 82804 - RNA, 19 nt, Artificial Sequence
  Description of Artificial Sequence: Synthetic oligonucleotide
uggagcauuaauaucugcu

SEQ ID NO: 82805 - RNA, 19 nt, Artificial Sequence
  Description of Artificial Sequence: Synthetic oligonucleotide
gagacauaaaauucaugug

SEQ ID NO: 82806 - RNA, 19 nt, Artificial Sequence
  Description of Artificial Sequence: Synthetic oligonucleotide
uguagcuaauugcuuaucu

SEQ ID NO: 82807 - RNA, 19 nt, Artificial Sequence
  Description of Artificial Sequence: Synthetic oligonucleotide
uauaagauacuaacacgcu

SEQ ID NO: 82808 - RNA, 19 nt, Artificial Sequence
  Description of Artificial Sequence: Synthetic oligonucleotide
aaagcccgaucacauuccc

SEQ ID NO: 82809 - RNA, 19 nt, Artificial Sequence
  Description of Artificial Sequence: Synthetic oligonucleotide
gauaguuauuuagucaggc

SEQ ID NO: 82810 - RNA, 19 nt, Artificial Sequence
  Description of Artificial Sequence: Synthetic oligonucleotide
uuugaagggacgagguucc

SEQ ID NO: 82811 - RNA, 19 nt, Artificial Sequence
  Description of Artificial Sequence: Synthetic oligonucleotide
auagaaucaggacaauuga

SEQ ID NO: 82812 - RNA, 19 nt, Artificial Sequence
  Description of Artificial Sequence: Synthetic oligonucleotide
ucuauacagaaccaguaua

SEQ ID NO: 82813 - RNA, 19 nt, Artificial Sequence
  Description of Artificial Sequence: Synthetic oligonucleotide
caaagguuucagaacaccc

SEQ ID NO: 82814 - RNA, 19 nt, Artificial Sequence
  Description of Artificial Sequence: Synthetic oligonucleotide
uaggauacuuaugagaaac

SEQ ID NO: 82815 - RNA, 19 nt, Artificial Sequence
  Description of Artificial Sequence: Synthetic oligonucleotide
auagcuauggguuuacaaa

SEQ ID NO: 82816 - RNA, 19 nt, Artificial Sequence
  Description of Artificial Sequence: Synthetic oligonucleotide
augaagaaaauccguaagu

SEQ ID NO: 82817 - RNA, 19 nt, Artificial Sequence
  Description of Artificial Sequence: Synthetic oligonucleotide
cugaucgauaguuauuuag

SEQ ID NO: 82818 - RNA, 19 nt, Artificial Sequence
  Description of Artificial Sequence: Synthetic oligonucleotide
aaugcacaaagcacuaguc

SEQ ID NO: 82819 - RNA, 19 nt, Artificial Sequence
  Description of Artificial Sequence: Synthetic oligonucleotide
ucuuaccuagccaggaacc

SEQ ID NO: 82820 - RNA, 19 nt, Artificial Sequence
  Description of Artificial Sequence: Synthetic oligonucleotide
uggugcacuacaaaaucag

SEQ ID NO: 82821 - RNA, 19 nt, Artificial Sequence
  Description of Artificial Sequence: Synthetic oligonucleotide
agggcuacccaauaaguag

SEQ ID NO: 82822 - RNA, 19 nt, Artificial Sequence
  Description of Artificial Sequence: Synthetic oligonucleotide
ugucaaaggaaugacgaug

SEQ ID NO: 82823 - RNA, 19 nt, Artificial Sequence
  Description of Artificial Sequence: Synthetic oligonucleotide
aacacaguauuaguuagca

SEQ ID NO: 82824 - RNA, 19 nt, Artificial Sequence
  Description of Artificial Sequence: Synthetic oligonucleotide
aaauccguaaguacuaaga

SEQ ID NO: 82825 - RNA, 19 nt, Artificial Sequence
  Description of Artificial Sequence: Synthetic oligonucleotide
gguaauaguuaguuuaacc

SEQ ID NO: 82826 - RNA, 19 nt, Artificial Sequence
  Description of Artificial Sequence: Synthetic oligonucleotide
aagagggguaauaugaugu

SEQ ID NO: 82827 - RNA, 19 nt, Artificial Sequence
  Description of Artificial Sequence: Synthetic oligonucleotide
uuauuaaugcguguaguac

SEQ ID NO: 82828 - RNA, 19 nt, Artificial Sequence
  Description of Artificial Sequence: Synthetic oligonucleotide
ucguuuuggcccaauaaga

SEQ ID NO: 82829 - RNA, 19 nt, Artificial Sequence
  Description of Artificial Sequence: Synthetic oligonucleotide
ugcauaaugaagaggcuuc

SEQ ID NO: 82830 - RNA, 19 nt, Artificial Sequence
  Description of Artificial Sequence: Synthetic oligonucleotide
uaguagguugcauuaagac

SEQ ID NO: 82831 - RNA, 19 nt, Artificial Sequence
  Description of Artificial Sequence: Synthetic oligonucleotide
aaaagcccgaucacauucc

SEQ ID NO: 82832 - RNA, 19 nt, Artificial Sequence
  Description of Artificial Sequence: Synthetic oligonucleotide
ucuugcaacacgaaacuua

SEQ ID NO: 82833 - RNA, 19 nt, Artificial Sequence
  Description of Artificial Sequence: Synthetic oligonucleotide
acaguauuaguuagcauuc

SEQ ID NO: 82834 - RNA, 19 nt, Artificial Sequence
  Description of Artificial Sequence: Synthetic oligonucleotide
caguauacaauguuacaug

SEQ ID NO: 82835 - RNA, 19 nt, Artificial Sequence
  Description of Artificial Sequence: Synthetic oligonucleotide
augauuguaagagaaacaa

SEQ ID NO: 82836 - RNA, 19 nt, Artificial Sequence
  Description of Artificial Sequence: Synthetic oligonucleotide
ucaacugaucgauaguuau

SEQ ID NO: 82837 - RNA, 19 nt, Artificial Sequence
  Description of Artificial Sequence: Synthetic oligonucleotide
aguaccauaaugacuguag

SEQ ID NO: 82838 - RNA, 19 nt, Artificial Sequence
  Description of Artificial Sequence: Synthetic oligonucleotide
uuaacucgggagcugagaa

SEQ ID NO: 82839 - RNA, 19 nt, Artificial Sequence
  Description of Artificial Sequence: Synthetic oligonucleotide
uuaagagaggcauuccaaa

SEQ ID NO: 82840 - RNA, 19 nt, Artificial Sequence
  Description of Artificial Sequence: Synthetic oligonucleotide
aguugguaacagcagccac

SEQ ID NO: 82841 - RNA, 19 nt, Artificial Sequence
  Description of Artificial Sequence: Synthetic oligonucleotide
aacucuaguagguugcauu

SEQ ID NO: 82842 - RNA, 19 nt, Artificial Sequence
  Description of Artificial Sequence: Synthetic oligonucleotide
uugauugccugguugucag

SEQ ID NO: 82843 - RNA, 19 nt, Artificial Sequence
  Description of Artificial Sequence: Synthetic oligonucleotide
ggggaaaacacacacacac

SEQ ID NO: 82844 - RNA, 19 nt, Artificial Sequence
  Description of Artificial Sequence: Synthetic oligonucleotide
uaguuuaaccccgcuauag

SEQ ID NO: 82845 - RNA, 19 nt, Artificial Sequence
  Description of Artificial Sequence: Synthetic oligonucleotide
auaaauuaacucgggagcu

SEQ ID NO: 82846 - RNA, 19 nt, Artificial Sequence
  Description of Artificial Sequence: Synthetic oligonucleotide
auagaaugcuguuuuaauu

SEQ ID NO: 82847 - RNA, 19 nt, Artificial Sequence
  Description of Artificial Sequence: Synthetic oligonucleotide
ggaaaacacacacacacac

SEQ ID NO: 82848 - RNA, 19 nt, Artificial Sequence
  Description of Artificial Sequence: Synthetic oligonucleotide
ugguuucaguaccauaaug

SEQ ID NO: 82849 - RNA, 19 nt, Artificial Sequence
  Description of Artificial Sequence: Synthetic oligonucleotide
acuaggauacuuaugagaa

SEQ ID NO: 82850 - RNA, 19 nt, Artificial Sequence
  Description of Artificial Sequence: Synthetic oligonucleotide
aaauuaacucgggagcuga

SEQ ID NO: 82851 - RNA, 19 nt, Artificial Sequence
  Description of Artificial Sequence: Synthetic oligonucleotide
uagagauaagucuaauuuu

SEQ ID NO: 82852 - RNA, 19 nt, Artificial Sequence
  Description of Artificial Sequence: Synthetic oligonucleotide
cacacacacacacacacac

SEQ ID NO: 82853 - RNA, 19 nt, Artificial Sequence
  Description of Artificial Sequence: Synthetic oligonucleotide
auaguuauuuagucaggcu

SEQ ID NO: 82854 - RNA, 19 nt, Artificial Sequence
  Description of Artificial Sequence: Synthetic oligonucleotide
uguuccgaauuucucuccc

SEQ ID NO: 82855 - RNA, 19 nt, Artificial Sequence
  Description of Artificial Sequence: Synthetic oligonucleotide
cauucgacagauuuucauc

SEQ ID NO: 82856 - RNA, 19 nt, Artificial Sequence
  Description of Artificial Sequence: Synthetic oligonucleotide
cuggcagauagaaagugac

SEQ ID NO: 82857 - RNA, 19 nt, Artificial Sequence
  Description of Artificial Sequence: Synthetic oligonucleotide
uuccacacacuaaugaaua

SEQ ID NO: 82858 - RNA, 19 nt, Artificial Sequence
  Description of Artificial Sequence: Synthetic oligonucleotide
acuaaccgcucuuaccuag

SEQ ID NO: 82859 - RNA, 19 nt, Artificial Sequence
  Description of Artificial Sequence: Synthetic oligonucleotide
auguaugcaacacaugauu

SEQ ID NO: 82860 - RNA, 19 nt, Artificial Sequence
  Description of Artificial Sequence: Synthetic oligonucleotide
caaggauaaacuguacaag

SEQ ID NO: 82861 - RNA, 19 nt, Artificial Sequence
  Description of Artificial Sequence: Synthetic oligonucleotide
cuugucgcacaucacugcg

SEQ ID NO: 82862 - RNA, 19 nt, Artificial Sequence
  Description of Artificial Sequence: Synthetic oligonucleotide
gacgagguuccaucuaucc

SEQ ID NO: 82863 - RNA, 19 nt, Artificial Sequence
  Description of Artificial Sequence: Synthetic oligonucleotide
acacgaaacuuaaacacag

SEQ ID NO: 82864 - RNA, 19 nt, Artificial Sequence
  Description of Artificial Sequence: Synthetic oligonucleotide
agcacccuaaguugguaac

SEQ ID NO: 82865 - RNA, 19 nt, Artificial Sequence
  Description of Artificial Sequence: Synthetic oligonucleotide
auccguaaguacuaagaca

SEQ ID NO: 82866 - RNA, 19 nt, Artificial Sequence
  Description of Artificial Sequence: Synthetic oligonucleotide
augaauaaauuaacucggg

SEQ ID NO: 82867 - RNA, 19 nt, Artificial Sequence
  Description of Artificial Sequence: Synthetic oligonucleotide
ucuggagcauuaauaucug

SEQ ID NO: 82868 - RNA, 19 nt, Artificial Sequence
  Description of Artificial Sequence: Synthetic oligonucleotide
ugucgcacaucacugcggc

SEQ ID NO: 82869 - RNA, 19 nt, Artificial Sequence
  Description of Artificial Sequence: Synthetic oligonucleotide
uauagaacaugcagguuuu

SEQ ID NO: 82870 - RNA, 19 nt, Artificial Sequence
  Description of Artificial Sequence: Synthetic oligonucleotide
agagucaaucaacaacuca

SEQ ID NO: 82871 - RNA, 19 nt, Artificial Sequence
  Description of Artificial Sequence: Synthetic oligonucleotide
auaagauacuaacacgcuu

SEQ ID NO: 82872 - RNA, 19 nt, Artificial Sequence
  Description of Artificial Sequence: Synthetic oligonucleotide
ucaauuuaggggugugcca

SEQ ID NO: 82873 - RNA, 19 nt, Artificial Sequence
  Description of Artificial Sequence: Synthetic oligonucleotide
ucgcacaucacugcggcgg

SEQ ID NO: 82874 - RNA, 19 nt, Artificial Sequence
  Description of Artificial Sequence: Synthetic oligonucleotide
acgaaacuuaaacacagua

SEQ ID NO: 82875 - RNA, 19 nt, Artificial Sequence
  Description of Artificial Sequence: Synthetic oligonucleotide
aagauacuaacacgcuuau

SEQ ID NO: 82876 - RNA, 19 nt, Artificial Sequence
  Description of Artificial Sequence: Synthetic oligonucleotide
auacuuaugagaaacccaa

SEQ ID NO: 82877 - RNA, 19 nt, Artificial Sequence
  Description of Artificial Sequence: Synthetic oligonucleotide
accuguuuugauacagugc

SEQ ID NO: 82878 - RNA, 19 nt, Artificial Sequence
  Description of Artificial Sequence: Synthetic oligonucleotide
uagggcacuguauucuaag

SEQ ID NO: 82879 - RNA, 19 nt, Artificial Sequence
  Description of Artificial Sequence: Synthetic oligonucleotide
aguuauuuagucaggcuga

SEQ ID NO: 82880 - RNA, 19 nt, Artificial Sequence
  Description of Artificial Sequence: Synthetic oligonucleotide
gggaaucccacuaaaagcc

SEQ ID NO: 82881 - RNA, 19 nt, Artificial Sequence
  Description of Artificial Sequence: Synthetic oligonucleotide
acacacacacaccaaccag

SEQ ID NO: 82882 - RNA, 19 nt, Artificial Sequence
  Description of Artificial Sequence: Synthetic oligonucleotide
uauuuagguaggagggcac

SEQ ID NO: 82883 - RNA, 19 nt, Artificial Sequence
  Description of Artificial Sequence: Synthetic oligonucleotide
acacacacacacaccaacc

SEQ ID NO: 82884 - RNA, 19 nt, Artificial Sequence
  Description of Artificial Sequence: Synthetic oligonucleotide
augcguguaguaccaaaag

SEQ ID NO: 82885 - RNA, 19 nt, Artificial Sequence
  Description of Artificial Sequence: Synthetic oligonucleotide
auaugauguuuaucuggag

SEQ ID NO: 82886 - RNA, 19 nt, Artificial Sequence
  Description of Artificial Sequence: Synthetic oligonucleotide
aguuuaaccccgcuauaga

SEQ ID NO: 82887 - RNA, 19 nt, Artificial Sequence
  Description of Artificial Sequence: Synthetic oligonucleotide
aagagucaaucaacaacuc

SEQ ID NO: 82888 - RNA, 19 nt, Artificial Sequence
  Description of Artificial Sequence: Synthetic oligonucleotide
auaguuaguuuaaccccgc

SEQ ID NO: 82889 - RNA, 19 nt, Artificial Sequence
  Description of Artificial Sequence: Synthetic oligonucleotide
caaaguuuagcuguccauc

SEQ ID NO: 82890 - RNA, 19 nt, Artificial Sequence
  Description of Artificial Sequence: Synthetic oligonucleotide
aacacccuggugcauuaca

SEQ ID NO: 82891 - RNA, 19 nt, Artificial Sequence
  Description of Artificial Sequence: Synthetic oligonucleotide
cugauucacucaaauagca

SEQ ID NO: 82892 - RNA, 19 nt, Artificial Sequence
  Description of Artificial Sequence: Synthetic oligonucleotide
auacugccuagaaagauug

SEQ ID NO: 82893 - RNA, 19 nt, Artificial Sequence
  Description of Artificial Sequence: Synthetic oligonucleotide
aauuuaggggugugccacu

SEQ ID NO: 82894 - RNA, 19 nt, Artificial Sequence
  Description of Artificial Sequence: Synthetic oligonucleotide
cagucuaucuuacucuaug

SEQ ID NO: 82895 - RNA, 19 nt, Artificial Sequence
  Description of Artificial Sequence: Synthetic oligonucleotide
uucuugguaauaguuaguu

SEQ ID NO: 82896 - RNA, 19 nt, Artificial Sequence
  Description of Artificial Sequence: Synthetic oligonucleotide
ggauguccaacucuaguag

SEQ ID NO: 82897 - RNA, 19 nt, Artificial Sequence
  Description of Artificial Sequence: Synthetic oligonucleotide
guuaguuuaaccccgcuau

SEQ ID NO: 82898 - RNA, 19 nt, Artificial Sequence
  Description of Artificial Sequence: Synthetic oligonucleotide
caaauccccguucuucagg

SEQ ID NO: 82899 - RNA, 19 nt, Artificial Sequence
  Description of Artificial Sequence: Synthetic oligonucleotide
acccuggugcauuacauga

SEQ ID NO: 82900 - RNA, 19 nt, Artificial Sequence
  Description of Artificial Sequence: Synthetic oligonucleotide
caauuuaggggugugccac

SEQ ID NO: 82901 - RNA, 19 nt, Artificial Sequence
  Description of Artificial Sequence: Synthetic oligonucleotide
cuggugcauuacaugauag

SEQ ID NO: 82902 - RNA, 19 nt, Artificial Sequence
  Description of Artificial Sequence: Synthetic oligonucleotide
ucccuuggguauaagcugu

SEQ ID NO: 82903 - RNA, 19 nt, Artificial Sequence
  Description of Artificial Sequence: Synthetic oligonucleotide
acgcuuauggcuaugauuu

SEQ ID NO: 82904 - RNA, 19 nt, Artificial Sequence
  Description of Artificial Sequence: Synthetic oligonucleotide
auuaaugcguguaguacca

SEQ ID NO: 82905 - RNA, 19 nt, Artificial Sequence
  Description of Artificial Sequence: Synthetic oligonucleotide
aaugcguguaguaccaaaa

SEQ ID NO: 82906 - RNA, 19 nt, Artificial Sequence
  Description of Artificial Sequence: Synthetic oligonucleotide
caagccuuugaaacagcag

SEQ ID NO: 82907 - RNA, 19 nt, Artificial Sequence
  Description of Artificial Sequence: Synthetic oligonucleotide
uugaucgggaaucccacua

SEQ ID NO: 82908 - RNA, 19 nt, Artificial Sequence
  Description of Artificial Sequence: Synthetic oligonucleotide
caaggauucccauacacua

SEQ ID NO: 82909 - RNA, 19 nt, Artificial Sequence
  Description of Artificial Sequence: Synthetic oligonucleotide
ggauacuuaugagaaaccc

SEQ ID NO: 82910 - RNA, 19 nt, Artificial Sequence
  Description of Artificial Sequence: Synthetic oligonucleotide
cacacacacacacacacca

SEQ ID NO: 82911 - RNA, 19 nt, Artificial Sequence
  Description of Artificial Sequence: Synthetic oligonucleotide
aaaucucccuuuacuacca

SEQ ID NO: 82912 - RNA, 19 nt, Artificial Sequence
  Description of Artificial Sequence: Synthetic oligonucleotide
ggaaugauaagacaauaua

SEQ ID NO: 82913 - RNA, 19 nt, Artificial Sequence
  Description of Artificial Sequence: Synthetic oligonucleotide
caguaugccaagaggugag

SEQ ID NO: 82914 - RNA, 19 nt, Artificial Sequence
  Description of Artificial Sequence: Synthetic oligonucleotide
cucuuaccuagccaggaac

SEQ ID NO: 82915 - RNA, 19 nt, Artificial Sequence
  Description of Artificial Sequence: Synthetic oligonucleotide
cuugcaacacgaaacuuaa

SEQ ID NO: 82916 - RNA, 19 nt, Artificial Sequence
  Description of Artificial Sequence: Synthetic oligonucleotide
caaaacuauagaacaugca

SEQ ID NO: 82917 - RNA, 19 nt, Artificial Sequence
  Description of Artificial Sequence: Synthetic oligonucleotide
cacacacacacacaccaac

SEQ ID NO: 82918 - RNA, 19 nt, Artificial Sequence
  Description of Artificial Sequence: Synthetic oligonucleotide
ucucaccccagugauagcu

SEQ ID NO: 82919 - RNA, 19 nt, Artificial Sequence
  Description of Artificial Sequence: Synthetic oligonucleotide
cuuaagagaggcauuccaa

SEQ ID NO: 82920 - RNA, 19 nt, Artificial Sequence
  Description of Artificial Sequence: Synthetic oligonucleotide
aaguuuagcuguccaucaa

SEQ ID NO: 82921 - RNA, 19 nt, Artificial Sequence
  Description of Artificial Sequence: Synthetic oligonucleotide
uaaugcguguaguaccaaa

SEQ ID NO: 82922 - RNA, 19 nt, Artificial Sequence
  Description of Artificial Sequence: Synthetic oligonucleotide
aguuaguuuaaccccgcua

SEQ ID NO: 82923 - RNA, 19 nt, Artificial Sequence
  Description of Artificial Sequence: Synthetic oligonucleotide
guuuaaccccgcuauagaa

SEQ ID NO: 82924 - RNA, 19 nt, Artificial Sequence
  Description of Artificial Sequence: Synthetic oligonucleotide
agacgacgcgccucgggcc

SEQ ID NO: 82925 - RNA, 19 nt, Artificial Sequence
  Description of Artificial Sequence: Synthetic oligonucleotide
cacaguauuaguuagcauu

SEQ ID NO: 82926 - RNA, 19 nt, Artificial Sequence
  Description of Artificial Sequence: Synthetic oligonucleotide
gagcagacgacgcgccucg

SEQ ID NO: 82927 - RNA, 19 nt, Artificial Sequence
  Description of Artificial Sequence: Synthetic oligonucleotide
aaguacuaagacaacuguu

SEQ ID NO: 82928 - RNA, 19 nt, Artificial Sequence
  Description of Artificial Sequence: Synthetic oligonucleotide
ggagcauuaauaucugcuc

SEQ ID NO: 82929 - RNA, 19 nt, Artificial Sequence
  Description of Artificial Sequence: Synthetic oligonucleotide
cuaaggauguccaacucua

SEQ ID NO: 82930 - RNA, 19 nt, Artificial Sequence
  Description of Artificial Sequence: Synthetic oligonucleotide
ucguaugguuucaguacca

SEQ ID NO: 82931 - RNA, 19 nt, Artificial Sequence
  Description of Artificial Sequence: Synthetic oligonucleotide
uuaguuuaaccccgcuaua

SEQ ID NO: 82932 - RNA, 19 nt, Artificial Sequence
  Description of Artificial Sequence: Synthetic oligonucleotide
cauuaggcagguggggucg

SEQ ID NO: 82933 - RNA, 19 nt, Artificial Sequence
  Description of Artificial Sequence: Synthetic oligonucleotide
agcugucuauuuuacuaga

SEQ ID NO: 82934 - RNA, 19 nt, Artificial Sequence
  Description of Artificial Sequence: Synthetic oligonucleotide
cuuaccuagccaggaaccc

SEQ ID NO: 82935 - RNA, 19 nt, Artificial Sequence
  Description of Artificial Sequence: Synthetic oligonucleotide
aacucagggaaaccuggua

SEQ ID NO: 82936 - RNA, 19 nt, Artificial Sequence
  Description of Artificial Sequence: Synthetic oligonucleotide
uccucagaacaccauuuua

SEQ ID NO: 82937 - RNA, 19 nt, Artificial Sequence
  Description of Artificial Sequence: Synthetic oligonucleotide
uaggaaugauaagacaaua

SEQ ID NO: 82938 - RNA, 19 nt, Artificial Sequence
  Description of Artificial Sequence: Synthetic oligonucleotide
uucgacagauuuucaucac

SEQ ID NO: 82939 - RNA, 19 nt, Artificial Sequence
  Description of Artificial Sequence: Synthetic oligonucleotide
gaaaacacacacacacaca

SEQ ID NO: 82940 - RNA, 19 nt, Artificial Sequence
  Description of Artificial Sequence: Synthetic oligonucleotide
ugaucgggaaucccacuaa

SEQ ID NO: 82941 - RNA, 19 nt, Artificial Sequence
  Description of Artificial Sequence: Synthetic oligonucleotide
cuauagaacaugcagguuu

SEQ ID NO: 82942 - RNA, 19 nt, Artificial Sequence
  Description of Artificial Sequence: Synthetic oligonucleotide
uggccuuguacagucagac

SEQ ID NO: 82943 - RNA, 19 nt, Artificial Sequence
  Description of Artificial Sequence: Synthetic oligonucleotide
aacacgcuuauggcuauga

SEQ ID NO: 82944 - RNA, 19 nt, Artificial Sequence
  Description of Artificial Sequence: Synthetic oligonucleotide
acuaacacgcuuauggcua

SEQ ID NO: 82945 - RNA, 19 nt, Artificial Sequence
  Description of Artificial Sequence: Synthetic oligonucleotide
agccaauauaccaaaguau

SEQ ID NO: 82946 - RNA, 19 nt, Artificial Sequence
  Description of Artificial Sequence: Synthetic oligonucleotide
gauagcuuuggugcacuac

SEQ ID NO: 82947 - RNA, 19 nt, Artificial Sequence
  Description of Artificial Sequence: Synthetic oligonucleotide
guaccauaaugacuguaga

SEQ ID NO: 82948 - RNA, 19 nt, Artificial Sequence
  Description of Artificial Sequence: Synthetic oligonucleotide
acacacacacacacacacc

SEQ ID NO: 82949 - RNA, 19 nt, Artificial Sequence
  Description of Artificial Sequence: Synthetic oligonucleotide
cuaaccgcucuuaccuagc

SEQ ID NO: 82950 - RNA, 19 nt, Artificial Sequence
  Description of Artificial Sequence: Synthetic oligonucleotide
uuuagucaggcugacuguu

SEQ ID NO: 82951 - RNA, 19 nt, Artificial Sequence
  Description of Artificial Sequence: Synthetic oligonucleotide
cuggagcauuaauaucugc

SEQ ID NO: 82952 - RNA, 19 nt, Artificial Sequence
  Description of Artificial Sequence: Synthetic oligonucleotide
caguauuaguuagcauucg

SEQ ID NO: 82953 - RNA, 19 nt, Artificial Sequence
  Description of Artificial Sequence: Synthetic oligonucleotide
auaagcauacuggaaugau

SEQ ID NO: 82954 - RNA, 19 nt, Artificial Sequence
  Description of Artificial Sequence: Synthetic oligonucleotide
caugauagcuacagacuga

SEQ ID NO: 82955 - RNA, 19 nt, Artificial Sequence
  Description of Artificial Sequence: Synthetic oligonucleotide
uaaccccgcuauagaaugc

SEQ ID NO: 82956 - RNA, 19 nt, Artificial Sequence
  Description of Artificial Sequence: Synthetic oligonucleotide
gcuauggguuuacaaaaug

SEQ ID NO: 82957 - RNA, 19 nt, Artificial Sequence
  Description of Artificial Sequence: Synthetic oligonucleotide
gacgaggggacacgagcag

SEQ ID NO: 82958 - RNA, 19 nt, Artificial Sequence
  Description of Artificial Sequence: Synthetic oligonucleotide
uaguuaguuuaaccccgcu

SEQ ID NO: 82959 - RNA, 19 nt, Artificial Sequence
  Description of Artificial Sequence: Synthetic oligonucleotide
aaacacacacacacacaca

SEQ ID NO: 82960 - RNA, 19 nt, Artificial Sequence
  Description of Artificial Sequence: Synthetic oligonucleotide
aggggacacgagcagacga

SEQ ID NO: 82961 - RNA, 19 nt, Artificial Sequence
  Description of Artificial Sequence: Synthetic oligonucleotide
caauauacucucuguaaua

SEQ ID NO: 82962 - RNA, 19 nt, Artificial Sequence
  Description of Artificial Sequence: Synthetic oligonucleotide
ugguaauaguuaguuuaac

SEQ ID NO: 82963 - RNA, 19 nt, Artificial Sequence
  Description of Artificial Sequence: Synthetic oligonucleotide
cccacuuacuaucaggaug

SEQ ID NO: 82964 - RNA, 19 nt, Artificial Sequence
  Description of Artificial Sequence: Synthetic oligonucleotide
aaccccgcuauagaaugcu

SEQ ID NO: 82965 - RNA, 19 nt, Artificial Sequence
  Description of Artificial Sequence: Synthetic oligonucleotide
gcugauucacucaaauagc

SEQ ID NO: 82966 - RNA, 19 nt, Artificial Sequence
  Description of Artificial Sequence: Synthetic oligonucleotide
acucuauguuuauaugcua

SEQ ID NO: 82967 - RNA, 19 nt, Artificial Sequence
  Description of Artificial Sequence: Synthetic oligonucleotide
guuugaucgggaaucccac

SEQ ID NO: 82968 - RNA, 19 nt, Artificial Sequence
  Description of Artificial Sequence: Synthetic oligonucleotide
guuccgaauuucucucccc

SEQ ID NO: 82969 - RNA, 19 nt, Artificial Sequence
  Description of Artificial Sequence: Synthetic oligonucleotide
cagacgacgcgccucgggc

SEQ ID NO: 82970 - RNA, 19 nt, Artificial Sequence
  Description of Artificial Sequence: Synthetic oligonucleotide
caucacuaaccgcucuuac

SEQ ID NO: 82971 - RNA, 19 nt, Artificial Sequence
  Description of Artificial Sequence: Synthetic oligonucleotide
cugagacuaaaggagaaaa

SEQ ID NO: 82972 - RNA, 19 nt, Artificial Sequence
  Description of Artificial Sequence: Synthetic oligonucleotide
uuauuuagucaggcugacu

SEQ ID NO: 82973 - RNA, 19 nt, Artificial Sequence
  Description of Artificial Sequence: Synthetic oligonucleotide
acuagucuuccuccauacu

SEQ ID NO: 82974 - RNA, 19 nt, Artificial Sequence
  Description of Artificial Sequence: Synthetic oligonucleotide
guacuaagacaacuguucu

SEQ ID NO: 82975 - RNA, 19 nt, Artificial Sequence
  Description of Artificial Sequence: Synthetic oligonucleotide
agcaguaugccaagaggug

SEQ ID NO: 82976 - RNA, 19 nt, Artificial Sequence
  Description of Artificial Sequence: Synthetic oligonucleotide
auuuagguaggagggcacu

SEQ ID NO: 82977 - RNA, 19 nt, Artificial Sequence
  Description of Artificial Sequence: Synthetic oligonucleotide
accccagugauagcuuugg

SEQ ID NO: 82978 - RNA, 19 nt, Artificial Sequence
  Description of Artificial Sequence: Synthetic oligonucleotide
agagggguaauaugauguu

SEQ ID NO: 82979 - RNA, 19 nt, Artificial Sequence
  Description of Artificial Sequence: Synthetic oligonucleotide
cuaguguccgguugacauc

SEQ ID NO: 82980 - RNA, 19 nt, Artificial Sequence
  Description of Artificial Sequence: Synthetic oligonucleotide
cacugcggcgggcaggacg

SEQ ID NO: 82981 - RNA, 19 nt, Artificial Sequence
  Description of Artificial Sequence: Synthetic oligonucleotide
uuuaggcuccuagaauuua

SEQ ID NO: 82982 - RNA, 19 nt, Artificial Sequence
  Description of Artificial Sequence: Synthetic oligonucleotide
acuaaccaucaaaagguaa

SEQ ID NO: 82983 - RNA, 19 nt, Artificial Sequence
  Description of Artificial Sequence: Synthetic oligonucleotide
ccccucuuaaaguauuuag

SEQ ID NO: 82984 - RNA, 19 nt, Artificial Sequence
  Description of Artificial Sequence: Synthetic oligonucleotide
gguugcauuaagacagcag

SEQ ID NO: 82985 - RNA, 19 nt, Artificial Sequence
  Description of Artificial Sequence: Synthetic oligonucleotide
cguguaguaccaaaagcag

SEQ ID NO: 82986 - RNA, 19 nt, Artificial Sequence
  Description of Artificial Sequence: Synthetic oligonucleotide
cacacacacacaccaacca

SEQ ID NO: 82987 - RNA, 19 nt, Artificial Sequence
  Description of Artificial Sequence: Synthetic oligonucleotide
uguuuaucuggagcauuaa

SEQ ID NO: 82988 - RNA, 19 nt, Artificial Sequence
  Description of Artificial Sequence: Synthetic oligonucleotide
uacugccuagaaagauuga

SEQ ID NO: 82989 - RNA, 19 nt, Artificial Sequence
  Description of Artificial Sequence: Synthetic oligonucleotide
gaaaauccguaaguacuaa

SEQ ID NO: 82990 - RNA, 19 nt, Artificial Sequence
  Description of Artificial Sequence: Synthetic oligonucleotide
ggcccaauaagagucaauc

SEQ ID NO: 82991 - RNA, 19 nt, Artificial Sequence
  Description of Artificial Sequence: Synthetic oligonucleotide
cagcaguaugccaagaggu

SEQ ID NO: 82992 - RNA, 19 nt, Artificial Sequence
  Description of Artificial Sequence: Synthetic oligonucleotide
auccauuacuggagaagag

SEQ ID NO: 82993 - RNA, 19 nt, Artificial Sequence
  Description of Artificial Sequence: Synthetic oligonucleotide
ggaucguaugguuucagua

SEQ ID NO: 82994 - RNA, 19 nt, Artificial Sequence
  Description of Artificial Sequence: Synthetic oligonucleotide
agauacuaacacgcuuaug

SEQ ID NO: 82995 - RNA, 19 nt, Artificial Sequence
  Description of Artificial Sequence: Synthetic oligonucleotide
agcuguccaucaauuuagg

SEQ ID NO: 82996 - RNA, 19 nt, Artificial Sequence
  Description of Artificial Sequence: Synthetic oligonucleotide
ugguuugaucgggaauccc

SEQ ID NO: 82997 - RNA, 19 nt, Artificial Sequence
  Description of Artificial Sequence: Synthetic oligonucleotide
aaucaacaacucagggaaa

SEQ ID NO: 82998 - RNA, 19 nt, Artificial Sequence
  Description of Artificial Sequence: Synthetic oligonucleotide
uuuaggggugugccacuua

SEQ ID NO: 82999 - RNA, 19 nt, Artificial Sequence
  Description of Artificial Sequence: Synthetic oligonucleotide
uaaagucauucgacagauu

SEQ ID NO: 83000 - RNA, 19 nt, Artificial Sequence
  Description of Artificial Sequence: Synthetic oligonucleotide
uugcaacacgaaacuuaaa

SEQ ID NO: 83001 - RNA, 19 nt, Artificial Sequence
  Description of Artificial Sequence: Synthetic oligonucleotide
cuagggcuacccaauaagu

SEQ ID NO: 83002 - RNA, 19 nt, Artificial Sequence
  Description of Artificial Sequence: Synthetic oligonucleotide
gauguccaacucuaaggau

SEQ ID NO: 83003 - RNA, 19 nt, Artificial Sequence
  Description of Artificial Sequence: Synthetic oligonucleotide
ucauagcuauggguuuaca

SEQ ID NO: 83004 - RNA, 19 nt, Artificial Sequence
  Description of Artificial Sequence: Synthetic oligonucleotide
guuuaucuggagcauuaau

SEQ ID NO: 83005 - RNA, 19 nt, Artificial Sequence
  Description of Artificial Sequence: Synthetic oligonucleotide
ggagucucaaaguguuuca

SEQ ID NO: 83006 - RNA, 19 nt, Artificial Sequence
  Description of Artificial Sequence: Synthetic oligonucleotide
uuggggcgggagaaaguuc

SEQ ID NO: 83007 - RNA, 19 nt, Artificial Sequence
  Description of Artificial Sequence: Synthetic oligonucleotide
gccgcgacgaccguugggg

SEQ ID NO: 83008 - RNA, 19 nt, Artificial Sequence
  Description of Artificial Sequence: Synthetic oligonucleotide
guugguaacagcagccacu

SEQ ID NO: 83009 - RNA, 19 nt, Artificial Sequence
  Description of Artificial Sequence: Synthetic oligonucleotide
uuaaugcguguaguaccaa

SEQ ID NO: 83010 - RNA, 19 nt, Artificial Sequence
  Description of Artificial Sequence: Synthetic oligonucleotide
cagugauagcuuuggugca

SEQ ID NO: 83011 - RNA, 19 nt, Artificial Sequence
  Description of Artificial Sequence: Synthetic oligonucleotide
ggucagucuaucuuacucu

SEQ ID NO: 83012 - RNA, 19 nt, Artificial Sequence
  Description of Artificial Sequence: Synthetic oligonucleotide
gucgcacaucacugcggcg

SEQ ID NO: 83013 - RNA, 19 nt, Artificial Sequence
  Description of Artificial Sequence: Synthetic oligonucleotide
cuguucacagcuagggcua

SEQ ID NO: 83014 - RNA, 19 nt, Artificial Sequence
  Description of Artificial Sequence: Synthetic oligonucleotide
agcuauggguuuacaaaau

SEQ ID NO: 83015 - RNA, 19 nt, Artificial Sequence
  Description of Artificial Sequence: Synthetic oligonucleotide
cauacugccuagaaagauu

SEQ ID NO: 83016 - RNA, 19 nt, Artificial Sequence
  Description of Artificial Sequence: Synthetic oligonucleotide
acacgcuuauggcuaugau

SEQ ID NO: 83017 - RNA, 19 nt, Artificial Sequence
  Description of Artificial Sequence: Synthetic oligonucleotide
aguaugccaagaggugaga

SEQ ID NO: 83018 - RNA, 19 nt, Artificial Sequence
  Description of Artificial Sequence: Synthetic oligonucleotide
auuacagggucaggcuagu

SEQ ID NO: 83019 - RNA, 19 nt, Artificial Sequence
  Description of Artificial Sequence: Synthetic oligonucleotide
uggcccaauaagagucaau

SEQ ID NO: 83020 - RNA, 19 nt, Artificial Sequence
  Description of Artificial Sequence: Synthetic oligonucleotide
cuucuaguguccgguugac

SEQ ID NO: 83021 - RNA, 19 nt, Artificial Sequence
  Description of Artificial Sequence: Synthetic oligonucleotide
agguugcauuaagacagca

SEQ ID NO: 83022 - RNA, 19 nt, Artificial Sequence
  Description of Artificial Sequence: Synthetic oligonucleotide
gcccaauaagagucaauca

SEQ ID NO: 83023 - RNA, 19 nt, Artificial Sequence
  Description of Artificial Sequence: Synthetic oligonucleotide
caccccagugauagcuuug

SEQ ID NO: 83024 - RNA, 19 nt, Artificial Sequence
  Description of Artificial Sequence: Synthetic oligonucleotide
ccccucaccccucuuaaag

SEQ ID NO: 83025 - RNA, 19 nt, Artificial Sequence
  Description of Artificial Sequence: Synthetic oligonucleotide
ccaagauuucaagcugucc

SEQ ID NO: 83026 - RNA, 19 nt, Artificial Sequence
  Description of Artificial Sequence: Synthetic oligonucleotide
auaguacaucucaccccag

SEQ ID NO: 83027 - RNA, 19 nt, Artificial Sequence
  Description of Artificial Sequence: Synthetic oligonucleotide
guaugccaagaggugagaa

SEQ ID NO: 83028 - RNA, 19 nt, Artificial Sequence
  Description of Artificial Sequence: Synthetic oligonucleotide
cuguagcuaauugcuuauc

SEQ ID NO: 83029 - RNA, 19 nt, Artificial Sequence
  Description of Artificial Sequence: Synthetic oligonucleotide
aucgggaaucccacuaaaa

SEQ ID NO: 83030 - RNA, 19 nt, Artificial Sequence
  Description of Artificial Sequence: Synthetic oligonucleotide
uaacacgcuuauggcuaug

SEQ ID NO: 83031 - RNA, 19 nt, Artificial Sequence
  Description of Artificial Sequence: Synthetic oligonucleotide
acacacacacacacacaca

SEQ ID NO: 83032 - RNA, 19 nt, Artificial Sequence
  Description of Artificial Sequence: Synthetic oligonucleotide
uacuaccaguaggagucuc

SEQ ID NO: 83033 - RNA, 19 nt, Artificial Sequence
  Description of Artificial Sequence: Synthetic oligonucleotide
gcacaaagcacuagucuuc

SEQ ID NO: 83034 - RNA, 19 nt, Artificial Sequence
  Description of Artificial Sequence: Synthetic oligonucleotide
cucgggagcugagaagguc

SEQ ID NO: 83035 - RNA, 19 nt, Artificial Sequence
  Description of Artificial Sequence: Synthetic oligonucleotide
ggguaauaugauguuuauc

SEQ ID NO: 83036 - RNA, 19 nt, Artificial Sequence
  Description of Artificial Sequence: Synthetic oligonucleotide
ggggugugccacuuaucug

SEQ ID NO: 83037 - RNA, 19 nt, Artificial Sequence
  Description of Artificial Sequence: Synthetic oligonucleotide
cacgcuuauggcuaugauu

SEQ ID NO: 83038 - RNA, 19 nt, Artificial Sequence
  Description of Artificial Sequence: Synthetic oligonucleotide
acgccggacgaggggacac

SEQ ID NO: 83039 - RNA, 19 nt, Artificial Sequence
  Description of Artificial Sequence: Synthetic oligonucleotide
guacaagggaucguauggu

SEQ ID NO: 83040 - RNA, 19 nt, Artificial Sequence
  Description of Artificial Sequence: Synthetic oligonucleotide
gcagacgacgcgccucggg

SEQ ID NO: 83041 - RNA, 19 nt, Artificial Sequence
  Description of Artificial Sequence: Synthetic oligonucleotide
gcgacgaccguuggggcgg

SEQ ID NO: 83042 - RNA, 19 nt, Artificial Sequence
  Description of Artificial Sequence: Synthetic oligonucleotide
gaggcugguuugaucggga

SEQ ID NO: 83043 - RNA, 19 nt, Artificial Sequence
  Description of Artificial Sequence: Synthetic oligonucleotide
gggaaaacacacacacaca

SEQ ID NO: 83044 - RNA, 19 nt, Artificial Sequence
  Description of Artificial Sequence: Synthetic oligonucleotide
cuaccaguaggagucucaa

SEQ ID NO: 83045 - RNA, 19 nt, Artificial Sequence
  Description of Artificial Sequence: Synthetic oligonucleotide
cuuuaggcuccuagaauuu

SEQ ID NO: 83046 - RNA, 19 nt, Artificial Sequence
  Description of Artificial Sequence: Synthetic oligonucleotide
gaccguuggggcgggagaa

SEQ ID NO: 83047 - RNA, 19 nt, Artificial Sequence
  Description of Artificial Sequence: Synthetic oligonucleotide
cacgaaacuuaaacacagu

SEQ ID NO: 83048 - RNA, 19 nt, Artificial Sequence
  Description of Artificial Sequence: Synthetic oligonucleotide
guucuugguaauaguuagu

SEQ ID NO: 83049 - RNA, 19 nt, Artificial Sequence
  Description of Artificial Sequence: Synthetic oligonucleotide
cucuaguagguugcauuaa

SEQ ID NO: 83050 - RNA, 19 nt, Artificial Sequence
  Description of Artificial Sequence: Synthetic oligonucleotide
auuaggcagguggggucgu

SEQ ID NO: 83051 - RNA, 19 nt, Artificial Sequence
  Description of Artificial Sequence: Synthetic oligonucleotide
acacacacacacacaccaa

SEQ ID NO: 83052 - RNA, 19 nt, Artificial Sequence
  Description of Artificial Sequence: Synthetic oligonucleotide
cccaacugugucaaaggaa

SEQ ID NO: 83053 - RNA, 19 nt, Artificial Sequence
  Description of Artificial Sequence: Synthetic oligonucleotide
ccguaaguacuaagacaac

SEQ ID NO: 83054 - RNA, 19 nt, Artificial Sequence
  Description of Artificial Sequence: Synthetic oligonucleotide
gcugucuauuuuacuagaa

SEQ ID NO: 83055 - RNA, 19 nt, Artificial Sequence
  Description of Artificial Sequence: Synthetic oligonucleotide
ggggacacgagcagacgac

SEQ ID NO: 83056 - RNA, 19 nt, Artificial Sequence
  Description of Artificial Sequence: Synthetic oligonucleotide
cacuaaccgcucuuaccua

SEQ ID NO: 83057 - RNA, 19 nt, Artificial Sequence
  Description of Artificial Sequence: Synthetic oligonucleotide
cuaacacgcuuauggcuau

SEQ ID NO: 83058 - RNA, 19 nt, Artificial Sequence
  Description of Artificial Sequence: Synthetic oligonucleotide
uuacagggucaggcuaguu

SEQ ID NO: 83059 - RNA, 19 nt, Artificial Sequence
  Description of Artificial Sequence: Synthetic oligonucleotide
ccaucaauuuaggggugug

SEQ ID NO: 83060 - RNA, 19 nt, Artificial Sequence
  Description of Artificial Sequence: Synthetic oligonucleotide
accccgcuauagaaugcug

SEQ ID NO: 83061 - RNA, 19 nt, Artificial Sequence
  Description of Artificial Sequence: Synthetic oligonucleotide
cacuuacuaucaggauguc

SEQ ID NO: 83062 - RNA, 19 nt, Artificial Sequence
  Description of Artificial Sequence: Synthetic oligonucleotide
ccgcucuuaccuagccagg

SEQ ID NO: 83063 - RNA, 19 nt, Artificial Sequence
  Description of Artificial Sequence: Synthetic oligonucleotide
ugugggccgcgacgaccgu

SEQ ID NO: 83064 - RNA, 19 nt, Artificial Sequence
  Description of Artificial Sequence: Synthetic oligonucleotide
caguaccauaaugacugua

SEQ ID NO: 83065 - RNA, 19 nt, Artificial Sequence
  Description of Artificial Sequence: Synthetic oligonucleotide
agcagacgacgcgccucgg

SEQ ID NO: 83066 - RNA, 19 nt, Artificial Sequence
  Description of Artificial Sequence: Synthetic oligonucleotide
gcacccuaaguugguaaca

SEQ ID NO: 83067 - RNA, 19 nt, Artificial Sequence
  Description of Artificial Sequence: Synthetic oligonucleotide
ggcccagccgaacggguuc

SEQ ID NO: 83068 - RNA, 19 nt, Artificial Sequence
  Description of Artificial Sequence: Synthetic oligonucleotide
ggccgcgacgaccguuggg

SEQ ID NO: 83069 - RNA, 19 nt, Artificial Sequence
  Description of Artificial Sequence: Synthetic oligonucleotide
cgcgacgaccguuggggcg

SEQ ID NO: 83070 - RNA, 19 nt, Artificial Sequence
  Description of Artificial Sequence: Synthetic oligonucleotide
cguaaguacuaagacaacu

SEQ ID NO: 83071 - RNA, 19 nt, Artificial Sequence
  Description of Artificial Sequence: Synthetic oligonucleotide
gcggggacgccggacgagg

SEQ ID NO: 83072 - RNA, 19 nt, Artificial Sequence
  Description of Artificial Sequence: Synthetic oligonucleotide
guacaugaacuaggauacu

SEQ ID NO: 83073 - RNA, 19 nt, Artificial Sequence
  Description of Artificial Sequence: Synthetic oligonucleotide
gacgccggacgaggggaca

SEQ ID NO: 83074 - RNA, 19 nt, Artificial Sequence
  Description of Artificial Sequence: Synthetic oligonucleotide
gggacgccggacgagggga

SEQ ID NO: 83075 - RNA, 19 nt, Artificial Sequence
  Description of Artificial Sequence: Synthetic oligonucleotide
ggacgagguuccaucuauc

SEQ ID NO: 83076 - RNA, 19 nt, Artificial Sequence
  Description of Artificial Sequence: Synthetic oligonucleotide
ggcugguuugaucgggaau

SEQ ID NO: 83077 - RNA, 19 nt, Artificial Sequence
  Description of Artificial Sequence: Synthetic oligonucleotide
ccggacgaggggacacgag

SEQ ID NO: 83078 - RNA, 19 nt, Artificial Sequence
  Description of Artificial Sequence: Synthetic oligonucleotide
gccacuuaucugagcuuuc

SEQ ID NO: 83079 - RNA, 19 nt, Artificial Sequence
  Description of Artificial Sequence: Synthetic oligonucleotide
cucaccccagugauagcuu

SEQ ID NO: 83080 - RNA, 19 nt, Artificial Sequence
  Description of Artificial Sequence: Synthetic oligonucleotide
cgcuauagaaugcuguuuu

SEQ ID NO: 83081 - RNA, 19 nt, Artificial Sequence
  Description of Artificial Sequence: Synthetic oligonucleotide
cagcagaguuagccaauau

SEQ ID NO: 83082 - RNA, 19 nt, Artificial Sequence
  Description of Artificial Sequence: Synthetic oligonucleotide
gggccgcgacgaccguugg

SEQ ID NO: 83083 - RNA, 19 nt, Artificial Sequence
  Description of Artificial Sequence: Synthetic oligonucleotide
caccccucuuaaaguauuu

SEQ ID NO: 83084 - RNA, 19 nt, Artificial Sequence
  Description of Artificial Sequence: Synthetic oligonucleotide
ccccgcuauagaaugcugu

SEQ ID NO: 83085 - RNA, 19 nt, Artificial Sequence
  Description of Artificial Sequence: Synthetic oligonucleotide
ccgcgacgaccguuggggc

SEQ ID NO: 83086 - RNA, 19 nt, Artificial Sequence
  Description of Artificial Sequence: Synthetic oligonucleotide
caacucuaguagguugcau

SEQ ID NO: 83087 - RNA, 19 nt, Artificial Sequence
  Description of Artificial Sequence: Synthetic oligonucleotide
cccucaccccucuuaaagu

SEQ ID NO: 83088 - RNA, 19 nt, Artificial Sequence
  Description of Artificial Sequence: Synthetic oligonucleotide
ggcugugggccgcgacgac

SEQ ID NO: 83089 - RNA, 19 nt, Artificial Sequence
  Description of Artificial Sequence: Synthetic oligonucleotide
ggacgccggacgaggggac

SEQ ID NO: 83090 - RNA, 19 nt, Artificial Sequence
  Description of Artificial Sequence: Synthetic oligonucleotide
cggggacgccggacgaggg

SEQ ID NO: 83091 - RNA, 19 nt, Artificial Sequence
  Description of Artificial Sequence: Synthetic oligonucleotide
cccagccgaacggguuccg

SEQ ID NO: 83092 - RNA, 19 nt, Artificial Sequence
  Description of Artificial Sequence: Synthetic oligonucleotide
cgaccguuggggcgggaga

SEQ ID NO: 83093 - RNA, 19 nt, Artificial Sequence
  Description of Artificial Sequence: Synthetic oligonucleotide
ccgcuauagaaugcuguuu

SEQ ID NO: 83094 - RNA, 19 nt, Artificial Sequence
  Description of Artificial Sequence: Synthetic oligonucleotide
cgcuuauggcuaugauuuu

SEQ ID NO: 83095 - RNA, 19 nt, Artificial Sequence
  Description of Artificial Sequence: Synthetic oligonucleotide
uauaacuuaccacagaagg

SEQ ID NO: 83096 - RNA, 19 nt, Artificial Sequence
  Description of Artificial Sequence: Synthetic oligonucleotide
aucaauauuacauuuagca

SEQ ID NO: 83097 - RNA, 19 nt, Artificial Sequence
  Description of Artificial Sequence: Synthetic oligonucleotide
ucaaguuagauucuugagg

SEQ ID NO: 83098 - RNA, 19 nt, Artificial Sequence
  Description of Artificial Sequence: Synthetic oligonucleotide
aaaucuauucagcuugccc

SEQ ID NO: 83099 - RNA, 19 nt, Artificial Sequence
  Description of Artificial Sequence: Synthetic oligonucleotide
aaagugucaacagaugaac

SEQ ID NO: 83100 - RNA, 19 nt, Artificial Sequence
  Description of Artificial Sequence: Synthetic oligonucleotide
caaguuagauucuugaggc

SEQ ID NO: 83101 - RNA, 19 nt, Artificial Sequence
  Description of Artificial Sequence: Synthetic oligonucleotide
uuacaaaucucaacuacag

SEQ ID NO: 83102 - RNA, 19 nt, Artificial Sequence
  Description of Artificial Sequence: Synthetic oligonucleotide
uguuuuacuccauugaggu

SEQ ID NO: 83103 - RNA, 19 nt, Artificial Sequence
  Description of Artificial Sequence: Synthetic oligonucleotide
uuaguuaaugcaacaaaca

SEQ ID NO: 83104 - RNA, 19 nt, Artificial Sequence
  Description of Artificial Sequence: Synthetic oligonucleotide
ucugauauguguuuuacuc

SEQ ID NO: 83105 - RNA, 19 nt, Artificial Sequence
  Description of Artificial Sequence: Synthetic oligonucleotide
uguacgaagaauuuaugcu

SEQ ID NO: 83106 - RNA, 19 nt, Artificial Sequence
  Description of Artificial Sequence: Synthetic oligonucleotide
uuauuaaagcagcuggacc

SEQ ID NO: 83107 - RNA, 19 nt, Artificial Sequence
  Description of Artificial Sequence: Synthetic oligonucleotide
ugaaguggaauauacacuc

SEQ ID NO: 83108 - RNA, 19 nt, Artificial Sequence
  Description of Artificial Sequence: Synthetic oligonucleotide
aacaucacugggugaauac

SEQ ID NO: 83109 - RNA, 19 nt, Artificial Sequence
  Description of Artificial Sequence: Synthetic oligonucleotide
uuguucuucgacucgacgg

SEQ ID NO: 83110 - RNA, 19 nt, Artificial Sequence
  Description of Artificial Sequence: Synthetic oligonucleotide
uuugcaauaugcccaauga

SEQ ID NO: 83111 - RNA, 19 nt, Artificial Sequence
  Description of Artificial Sequence: Synthetic oligonucleotide
uugguaagcaagaucaaug

SEQ ID NO: 83112 - RNA, 19 nt, Artificial Sequence
  Description of Artificial Sequence: Synthetic oligonucleotide
uggaauauacacucaauga

SEQ ID NO: 83113 - RNA, 19 nt, Artificial Sequence
  Description of Artificial Sequence: Synthetic oligonucleotide
uucagaauugcgaugguac

SEQ ID NO: 83114 - RNA, 19 nt, Artificial Sequence
  Description of Artificial Sequence: Synthetic oligonucleotide
aaauaugacauuucguauu

SEQ ID NO: 83115 - RNA, 19 nt, Artificial Sequence
  Description of Artificial Sequence: Synthetic oligonucleotide
aacugaucaacucuagaga

SEQ ID NO: 83116 - RNA, 19 nt, Artificial Sequence
  Description of Artificial Sequence: Synthetic oligonucleotide
uaagcaacgaucaaauaua

SEQ ID NO: 83117 - RNA, 19 nt, Artificial Sequence
  Description of Artificial Sequence: Synthetic oligonucleotide
aaguuagauucuugaggcc

SEQ ID NO: 83118 - RNA, 19 nt, Artificial Sequence
  Description of Artificial Sequence: Synthetic oligonucleotide
aauaggccagcucugauau

SEQ ID NO: 83119 - RNA, 19 nt, Artificial Sequence
  Description of Artificial Sequence: Synthetic oligonucleotide
uuuuacuccauugagguuc

SEQ ID NO: 83120 - RNA, 19 nt, Artificial Sequence
  Description of Artificial Sequence: Synthetic oligonucleotide
ugucaaacaucacugggug

SEQ ID NO: 83121 - RNA, 19 nt, Artificial Sequence
  Description of Artificial Sequence: Synthetic oligonucleotide
aaucuuagaacuccgugaa

SEQ ID NO: 83122 - RNA, 19 nt, Artificial Sequence
  Description of Artificial Sequence: Synthetic oligonucleotide
aaguuaaacaaaggguuuc

SEQ ID NO: 83123 - RNA, 19 nt, Artificial Sequence
  Description of Artificial Sequence: Synthetic oligonucleotide
guugcggacagccacaucc

SEQ ID NO: 83124 - RNA, 19 nt, Artificial Sequence
  Description of Artificial Sequence: Synthetic oligonucleotide
uguggauccaccagggugc

SEQ ID NO: 83125 - RNA, 19 nt, Artificial Sequence
  Description of Artificial Sequence: Synthetic oligonucleotide
aucaagagugaauacccgg

SEQ ID NO: 83126 - RNA, 19 nt, Artificial Sequence
  Description of Artificial Sequence: Synthetic oligonucleotide
aauaugacauuucguauuu

SEQ ID NO: 83127 - RNA, 19 nt, Artificial Sequence
  Description of Artificial Sequence: Synthetic oligonucleotide
uucaaguuagauucuugag

SEQ ID NO: 83128 - RNA, 19 nt, Artificial Sequence
  Description of Artificial Sequence: Synthetic oligonucleotide
uuuagaaagacuguacauc

SEQ ID NO: 83129 - RNA, 19 nt, Artificial Sequence
  Description of Artificial Sequence: Synthetic oligonucleotide
aagcuauagacacuugagu

SEQ ID NO: 83130 - RNA, 19 nt, Artificial Sequence
  Description of Artificial Sequence: Synthetic oligonucleotide
ucuaaauauguaaucucuc

SEQ ID NO: 83131 - RNA, 19 nt, Artificial Sequence
  Description of Artificial Sequence: Synthetic oligonucleotide
aagagaaacauggaaggcu

SEQ ID NO: 83132 - RNA, 19 nt, Artificial Sequence
  Description of Artificial Sequence: Synthetic oligonucleotide
auaugggagacagaguugg

SEQ ID NO: 83133 - RNA, 19 nt, Artificial Sequence
  Description of Artificial Sequence: Synthetic oligonucleotide
agacaaauggaaauauugg

SEQ ID NO: 83134 - RNA, 19 nt, Artificial Sequence
  Description of Artificial Sequence: Synthetic oligonucleotide
uccaauauacucucugaug

SEQ ID NO: 83135 - RNA, 19 nt, Artificial Sequence
  Description of Artificial Sequence: Synthetic oligonucleotide
aacauggaaggcugguuag

SEQ ID NO: 83136 - RNA, 19 nt, Artificial Sequence
  Description of Artificial Sequence: Synthetic oligonucleotide
uuaccauuagcugagggga

SEQ ID NO: 83137 - RNA, 19 nt, Artificial Sequence
  Description of Artificial Sequence: Synthetic oligonucleotide
uggaagugacauugaaucg

SEQ ID NO: 83138 - RNA, 19 nt, Artificial Sequence
  Description of Artificial Sequence: Synthetic oligonucleotide
caagcuauagacacuugag

SEQ ID NO: 83139 - RNA, 19 nt, Artificial Sequence
  Description of Artificial Sequence: Synthetic oligonucleotide
ucucccaugacucuauuau

SEQ ID NO: 83140 - RNA, 19 nt, Artificial Sequence
  Description of Artificial Sequence: Synthetic oligonucleotide
uacaauccauaauaggcca

SEQ ID NO: 83141 - RNA, 19 nt, Artificial Sequence
  Description of Artificial Sequence: Synthetic oligonucleotide
uguucuucgacucgacggc

SEQ ID NO: 83142 - RNA, 19 nt, Artificial Sequence
  Description of Artificial Sequence: Synthetic oligonucleotide
aggcugguuagccaaacac

SEQ ID NO: 83143 - RNA, 19 nt, Artificial Sequence
  Description of Artificial Sequence: Synthetic oligonucleotide
uugugaaacaagaaauuua

SEQ ID NO: 83144 - RNA, 19 nt, Artificial Sequence
  Description of Artificial Sequence: Synthetic oligonucleotide
ucaagagugaauacccggu

SEQ ID NO: 83145 - RNA, 19 nt, Artificial Sequence
  Description of Artificial Sequence: Synthetic oligonucleotide
guaucggauacaaagauca

SEQ ID NO: 83146 - RNA, 19 nt, Artificial Sequence
  Description of Artificial Sequence: Synthetic oligonucleotide
uuucggauaugggagacag

SEQ ID NO: 83147 - RNA, 19 nt, Artificial Sequence
  Description of Artificial Sequence: Synthetic oligonucleotide
aaauggaaauauugggaau

SEQ ID NO: 83148 - RNA, 19 nt, Artificial Sequence
  Description of Artificial Sequence: Synthetic oligonucleotide
augauuauacuuagaacuc

SEQ ID NO: 83149 - RNA, 19 nt, Artificial Sequence
  Description of Artificial Sequence: Synthetic oligonucleotide
cuaagagagcuaaagcaac

SEQ ID NO: 83150 - RNA, 19 nt, Artificial Sequence
  Description of Artificial Sequence: Synthetic oligonucleotide
auauuccucagagggaagc

SEQ ID NO: 83151 - RNA, 19 nt, Artificial Sequence
  Description of Artificial Sequence: Synthetic oligonucleotide
uaagcugcgccuaugacuu

SEQ ID NO: 83152 - RNA, 19 nt, Artificial Sequence
  Description of Artificial Sequence: Synthetic oligonucleotide
uguuccuuaaagaccagau

SEQ ID NO: 83153 - RNA, 19 nt, Artificial Sequence
  Description of Artificial Sequence: Synthetic oligonucleotide
uaagagagcuaaagcaaca

SEQ ID NO: 83154 - RNA, 19 nt, Artificial Sequence
  Description of Artificial Sequence: Synthetic oligonucleotide
agguugguaagcaagauca

SEQ ID NO: 83155 - RNA, 19 nt, Artificial Sequence
  Description of Artificial Sequence: Synthetic oligonucleotide
agcuauagacacuugaguu

SEQ ID NO: 83156 - RNA, 19 nt, Artificial Sequence
  Description of Artificial Sequence: Synthetic oligonucleotide
ucaaacaucacugggugaa

SEQ ID NO: 83157 - RNA, 19 nt, Artificial Sequence
  Description of Artificial Sequence: Synthetic oligonucleotide
gacaaaucggaaagaacag

SEQ ID NO: 83158 - RNA, 19 nt, Artificial Sequence
  Description of Artificial Sequence: Synthetic oligonucleotide
cuugucuaagcaacgauca

SEQ ID NO: 83159 - RNA, 19 nt, Artificial Sequence
  Description of Artificial Sequence: Synthetic oligonucleotide
uaagguguuugaauuugga

SEQ ID NO: 83160 - RNA, 19 nt, Artificial Sequence
  Description of Artificial Sequence: Synthetic oligonucleotide
uguaucggauacaaagauc

SEQ ID NO: 83161 - RNA, 19 nt, Artificial Sequence
  Description of Artificial Sequence: Synthetic oligonucleotide
ucuuagaacuccgugaaua

SEQ ID NO: 83162 - RNA, 19 nt, Artificial Sequence
  Description of Artificial Sequence: Synthetic oligonucleotide
cuaagguguuugaauuugg

SEQ ID NO: 83163 - RNA, 19 nt, Artificial Sequence
  Description of Artificial Sequence: Synthetic oligonucleotide
uuugcagaugcucuacaaa

SEQ ID NO: 83164 - RNA, 19 nt, Artificial Sequence
  Description of Artificial Sequence: Synthetic oligonucleotide
cuuauuaaagcagcuggac

SEQ ID NO: 83165 - RNA, 19 nt, Artificial Sequence
  Description of Artificial Sequence: Synthetic oligonucleotide
agacucuacacugaaaggu

SEQ ID NO: 83166 - RNA, 19 nt, Artificial Sequence
  Description of Artificial Sequence: Synthetic oligonucleotide
auauaauuguccaccauga

SEQ ID NO: 83167 - RNA, 19 nt, Artificial Sequence
  Description of Artificial Sequence: Synthetic oligonucleotide
agauucuugaggccagcuc

SEQ ID NO: 83168 - RNA, 19 nt, Artificial Sequence
  Description of Artificial Sequence: Synthetic oligonucleotide
cacgcuugagcucucauug

SEQ ID NO: 83169 - RNA, 19 nt, Artificial Sequence
  Description of Artificial Sequence: Synthetic oligonucleotide
uugcaauaugcccaaugac

SEQ ID NO: 83170 - RNA, 19 nt, Artificial Sequence
  Description of Artificial Sequence: Synthetic oligonucleotide
uuugugaacgccaggcaau

SEQ ID NO: 83171 - RNA, 19 nt, Artificial Sequence
  Description of Artificial Sequence: Synthetic oligonucleotide
ugcuucgaacaguaggugc

SEQ ID NO: 83172 - RNA, 19 nt, Artificial Sequence
  Description of Artificial Sequence: Synthetic oligonucleotide
acacuucaaguucucgcac

SEQ ID NO: 83173 - RNA, 19 nt, Artificial Sequence
  Description of Artificial Sequence: Synthetic oligonucleotide
agacuuuacauuccacugu

SEQ ID NO: 83174 - RNA, 19 nt, Artificial Sequence
  Description of Artificial Sequence: Synthetic oligonucleotide
agcucuaagagagcuaaag

SEQ ID NO: 83175 - RNA, 19 nt, Artificial Sequence
  Description of Artificial Sequence: Synthetic oligonucleotide
uacaaaucucaacuacagu

SEQ ID NO: 83176 - RNA, 19 nt, Artificial Sequence
  Description of Artificial Sequence: Synthetic oligonucleotide
aguucaugaguucccgcag

SEQ ID NO: 83177 - RNA, 19 nt, Artificial Sequence
  Description of Artificial Sequence: Synthetic oligonucleotide
agaucaaugucugcuuccg

SEQ ID NO: 83178 - RNA, 19 nt, Artificial Sequence
  Description of Artificial Sequence: Synthetic oligonucleotide
ucagaauugcgaugguacu

SEQ ID NO: 83179 - RNA, 19 nt, Artificial Sequence
  Description of Artificial Sequence: Synthetic oligonucleotide
gacauugaaucgcugcuca

SEQ ID NO: 83180 - RNA, 19 nt, Artificial Sequence
  Description of Artificial Sequence: Synthetic oligonucleotide
guaucaucgucagaggccc

SEQ ID NO: 83181 - RNA, 19 nt, Artificial Sequence
  Description of Artificial Sequence: Synthetic oligonucleotide
auuuucggauaugggagac

SEQ ID NO: 83182 - RNA, 19 nt, Artificial Sequence
  Description of Artificial Sequence: Synthetic oligonucleotide
ucuagagaccacugaaauc

SEQ ID NO: 83183 - RNA, 19 nt, Artificial Sequence
  Description of Artificial Sequence: Synthetic oligonucleotide
uguuuugcaauaugcccaa

SEQ ID NO: 83184 - RNA, 19 nt, Artificial Sequence
  Description of Artificial Sequence: Synthetic oligonucleotide
ugucuaagcaacgaucaaa

SEQ ID NO: 83185 - RNA, 19 nt, Artificial Sequence
  Description of Artificial Sequence: Synthetic oligonucleotide
  modified_base (19)..(19): a, c, u, g, unknown or other
uacuuagaacuccugggun

SEQ ID NO: 83186 - RNA, 19 nt, Artificial Sequence
  Description of Artificial Sequence: Synthetic oligonucleotide
gagaaauuuguagauucuc

SEQ ID NO: 83187 - RNA, 19 nt, Artificial Sequence
  Description of Artificial Sequence: Synthetic oligonucleotide
uccgugaauauuugugaac

SEQ ID NO: 83188 - RNA, 19 nt, Artificial Sequence
  Description of Artificial Sequence: Synthetic oligonucleotide
agaauugcgaugguacuca

SEQ ID NO: 83189 - RNA, 19 nt, Artificial Sequence
  Description of Artificial Sequence: Synthetic oligonucleotide
auaacuuaccacagaaggu

SEQ ID NO: 83190 - RNA, 19 nt, Artificial Sequence
  Description of Artificial Sequence: Synthetic oligonucleotide
ucgucagaggcccauuuuc

SEQ ID NO: 83191 - RNA, 19 nt, Artificial Sequence
  Description of Artificial Sequence: Synthetic oligonucleotide
gguaaagcuccuaagcugc

SEQ ID NO: 83192 - RNA, 19 nt, Artificial Sequence
  Description of Artificial Sequence: Synthetic oligonucleotide
cuguacaucucuuuuaaua

SEQ ID NO: 83193 - RNA, 19 nt, Artificial Sequence
  Description of Artificial Sequence: Synthetic oligonucleotide
cuaaauauguaaucucucu

SEQ ID NO: 83194 - RNA, 19 nt, Artificial Sequence
  Description of Artificial Sequence: Synthetic oligonucleotide
caauauacucucugaugug

SEQ ID NO: 83195 - RNA, 19 nt, Artificial Sequence
  Description of Artificial Sequence: Synthetic oligonucleotide
ggaagugacauugaaucgc

SEQ ID NO: 83196 - RNA, 19 nt, Artificial Sequence
  Description of Artificial Sequence: Synthetic oligonucleotide
gagugaauacccggugugg

SEQ ID NO: 83197 - RNA, 19 nt, Artificial Sequence
  Description of Artificial Sequence: Synthetic oligonucleotide
  modified_base (7)..(7): a, c, u, g, unknown or other
cagcagnuccuguucuucc

SEQ ID NO: 83198 - RNA, 19 nt, Artificial Sequence
  Description of Artificial Sequence: Synthetic oligonucleotide
aguuaaacaaaggguuuca

SEQ ID NO: 83199 - RNA, 19 nt, Artificial Sequence
  Description of Artificial Sequence: Synthetic oligonucleotide
ugaccuuuauuacuucauu

SEQ ID NO: 83200 - RNA, 19 nt, Artificial Sequence
  Description of Artificial Sequence: Synthetic oligonucleotide
ggaauuggcucaaaauuag

SEQ ID NO: 83201 - RNA, 19 nt, Artificial Sequence
  Description of Artificial Sequence: Synthetic oligonucleotide
agccuaagguguuugaauu

SEQ ID NO: 83202 - RNA, 19 nt, Artificial Sequence
  Description of Artificial Sequence: Synthetic oligonucleotide
acgcuugagcucucauugc

SEQ ID NO: 83203 - RNA, 19 nt, Artificial Sequence
  Description of Artificial Sequence: Synthetic oligonucleotide
agguaguucaugaguuccc

SEQ ID NO: 83204 - RNA, 19 nt, Artificial Sequence
  Description of Artificial Sequence: Synthetic oligonucleotide
cauggaaggcugguuagcc

SEQ ID NO: 83205 - RNA, 19 nt, Artificial Sequence
  Description of Artificial Sequence: Synthetic oligonucleotide
gcaacgaucaaauauaauu

SEQ ID NO: 83206 - RNA, 19 nt, Artificial Sequence
  Description of Artificial Sequence: Synthetic oligonucleotide
uccuaugauuauacuuaga

SEQ ID NO: 83207 - RNA, 19 nt, Artificial Sequence
  Description of Artificial Sequence: Synthetic oligonucleotide
gaugaacugaucaacucua

SEQ ID NO: 83208 - RNA, 19 nt, Artificial Sequence
  Description of Artificial Sequence: Synthetic oligonucleotide
uaucggauacaaagaucac

SEQ ID NO: 83209 - RNA, 19 nt, Artificial Sequence
  Description of Artificial Sequence: Synthetic oligonucleotide
cacacuucaaguucucgca

SEQ ID NO: 83210 - RNA, 19 nt, Artificial Sequence
  Description of Artificial Sequence: Synthetic oligonucleotide
gaacgccaggcaaugaaug

SEQ ID NO: 83211 - RNA, 19 nt, Artificial Sequence
  Description of Artificial Sequence: Synthetic oligonucleotide
ucgaacaguaggugccuug

SEQ ID NO: 83212 - RNA, 19 nt, Artificial Sequence
  Description of Artificial Sequence: Synthetic oligonucleotide
gcgccuaugacuuuuguuc

SEQ ID NO: 83213 - RNA, 19 nt, Artificial Sequence
  Description of Artificial Sequence: Synthetic oligonucleotide
uuccggauaaaugggucug

SEQ ID NO: 83214 - RNA, 19 nt, Artificial Sequence
  Description of Artificial Sequence: Synthetic oligonucleotide
aggcaaugaauguagcaua

SEQ ID NO: 83215 - RNA, 19 nt, Artificial Sequence
  Description of Artificial Sequence: Synthetic oligonucleotide
caauaaccuuauuuccuuc

SEQ ID NO: 83216 - RNA, 19 nt, Artificial Sequence
  Description of Artificial Sequence: Synthetic oligonucleotide
agggacugcaucaauauua

SEQ ID NO: 83217 - RNA, 19 nt, Artificial Sequence
  Description of Artificial Sequence: Synthetic oligonucleotide
gguaucaucgucagaggcc

SEQ ID NO: 83218 - RNA, 19 nt, Artificial Sequence
  Description of Artificial Sequence: Synthetic oligonucleotide
uuuaucaggcagugauaaa

SEQ ID NO: 83219 - RNA, 19 nt, Artificial Sequence
  Description of Artificial Sequence: Synthetic oligonucleotide
gaauugcgaugguacucag

SEQ ID NO: 83220 - RNA, 19 nt, Artificial Sequence
  Description of Artificial Sequence: Synthetic oligonucleotide
gguguggaaucuuagaacu

SEQ ID NO: 83221 - RNA, 19 nt, Artificial Sequence
  Description of Artificial Sequence: Synthetic oligonucleotide
cugguuagccaaacacaag

SEQ ID NO: 83222 - RNA, 19 nt, Artificial Sequence
  Description of Artificial Sequence: Synthetic oligonucleotide
cuggggugcugauugcccg

SEQ ID NO: 83223 - RNA, 19 nt, Artificial Sequence
  Description of Artificial Sequence: Synthetic oligonucleotide
auacaaguuuguauagacu

SEQ ID NO: 83224 - RNA, 19 nt, Artificial Sequence
  Description of Artificial Sequence: Synthetic oligonucleotide
ugaauacccgguguggaau

SEQ ID NO: 83225 - RNA, 19 nt, Artificial Sequence
  Description of Artificial Sequence: Synthetic oligonucleotide
ggaauauaauuguccacca

SEQ ID NO: 83226 - RNA, 19 nt, Artificial Sequence
  Description of Artificial Sequence: Synthetic oligonucleotide
uuuugacuucaaguuagau

SEQ ID NO: 83227 - RNA, 19 nt, Artificial Sequence
  Description of Artificial Sequence: Synthetic oligonucleotide
uucuuguacgaagaauuua

SEQ ID NO: 83228 - RNA, 19 nt, Artificial Sequence
  Description of Artificial Sequence: Synthetic oligonucleotide
ucuaagcaacgaucaaaua

SEQ ID NO: 83229 - RNA, 19 nt, Artificial Sequence
  Description of Artificial Sequence: Synthetic oligonucleotide
agugaauacccggugugga

SEQ ID NO: 83230 - RNA, 19 nt, Artificial Sequence
  Description of Artificial Sequence: Synthetic oligonucleotide
auaauaggccagcucugau

SEQ ID NO: 83231 - RNA, 19 nt, Artificial Sequence
  Description of Artificial Sequence: Synthetic oligonucleotide
uaaagcuccuaagcugcgc

SEQ ID NO: 83232 - RNA, 19 nt, Artificial Sequence
  Description of Artificial Sequence: Synthetic oligonucleotide
ucccuauguaacugacccc

SEQ ID NO: 83233 - RNA, 19 nt, Artificial Sequence
  Description of Artificial Sequence: Synthetic oligonucleotide
  modified_base (6)..(6): a, c, u, g, unknown or other
agcagnuccuguucuucca

SEQ ID NO: 83234 - RNA, 19 nt, Artificial Sequence
  Description of Artificial Sequence: Synthetic oligonucleotide
uugugaacgccaggcaaug

SEQ ID NO: 83235 - RNA, 19 nt, Artificial Sequence
  Description of Artificial Sequence: Synthetic oligonucleotide
guacgaagaauuuaugcuu

SEQ ID NO: 83236 - RNA, 19 nt, Artificial Sequence
  Description of Artificial Sequence: Synthetic oligonucleotide
aauacccgguguggaaucu

SEQ ID NO: 83237 - RNA, 19 nt, Artificial Sequence
  Description of Artificial Sequence: Synthetic oligonucleotide
caacagaugaacugaucaa

SEQ ID NO: 83238 - RNA, 19 nt, Artificial Sequence
  Description of Artificial Sequence: Synthetic oligonucleotide
cuguucguuguacuucuuc

SEQ ID NO: 83239 - RNA, 19 nt, Artificial Sequence
  Description of Artificial Sequence: Synthetic oligonucleotide
gcugcuagcagacgacucc

SEQ ID NO: 83240 - RNA, 19 nt, Artificial Sequence
  Description of Artificial Sequence: Synthetic oligonucleotide
cagaauugcgaugguacuc

SEQ ID NO: 83241 - RNA, 19 nt, Artificial Sequence
  Description of Artificial Sequence: Synthetic oligonucleotide
uugcuucgaacaguaggug

SEQ ID NO: 83242 - RNA, 19 nt, Artificial Sequence
  Description of Artificial Sequence: Synthetic oligonucleotide
agaacuccgugaauauuug

SEQ ID NO: 83243 - RNA, 19 nt, Artificial Sequence
  Description of Artificial Sequence: Synthetic oligonucleotide
guaaagcuccuaagcugcg

SEQ ID NO: 83244 - RNA, 19 nt, Artificial Sequence
  Description of Artificial Sequence: Synthetic oligonucleotide
uuuucggauaugggagaca

SEQ ID NO: 83245 - RNA, 19 nt, Artificial Sequence
  Description of Artificial Sequence: Synthetic oligonucleotide
ccuguaagagguugguaag

SEQ ID NO: 83246 - RNA, 19 nt, Artificial Sequence
  Description of Artificial Sequence: Synthetic oligonucleotide
ccuugucuaagcaacgauc

SEQ ID NO: 83247 - RNA, 19 nt, Artificial Sequence
  Description of Artificial Sequence: Synthetic oligonucleotide
ggcccauuuucggauaugg

SEQ ID NO: 83248 - RNA, 19 nt, Artificial Sequence
  Description of Artificial Sequence: Synthetic oligonucleotide
cccauuuucggauauggga

SEQ ID NO: 83249 - RNA, 19 nt, Artificial Sequence
  Description of Artificial Sequence: Synthetic oligonucleotide
gaaguggaauauacacuca

SEQ ID NO: 83250 - RNA, 19 nt, Artificial Sequence
  Description of Artificial Sequence: Synthetic oligonucleotide
uuagaacuccgugaauauu

SEQ ID NO: 83251 - RNA, 19 nt, Artificial Sequence
  Description of Artificial Sequence: Synthetic oligonucleotide
uagauucuugaggccagcu

SEQ ID NO: 83252 - RNA, 19 nt, Artificial Sequence
  Description of Artificial Sequence: Synthetic oligonucleotide
ugcgccuaugacuuuuguu

SEQ ID NO: 83253 - RNA, 19 nt, Artificial Sequence
  Description of Artificial Sequence: Synthetic oligonucleotide
uugcccguuuaguuacaug

SEQ ID NO: 83254 - RNA, 19 nt, Artificial Sequence
  Description of Artificial Sequence: Synthetic oligonucleotide
gacucuacacugaaaggua

SEQ ID NO: 83255 - RNA, 19 nt, Artificial Sequence
  Description of Artificial Sequence: Synthetic oligonucleotide
aguggaauauacacucaau

SEQ ID NO: 83256 - RNA, 19 nt, Artificial Sequence
  Description of Artificial Sequence: Synthetic oligonucleotide
agauccuugcacgcuugag

SEQ ID NO: 83257 - RNA, 19 nt, Artificial Sequence
  Description of Artificial Sequence: Synthetic oligonucleotide
ccguuuaguuacauguuug

SEQ ID NO: 83258 - RNA, 19 nt, Artificial Sequence
  Description of Artificial Sequence: Synthetic oligonucleotide
aaacaccucuauacaaguu

SEQ ID NO: 83259 - RNA, 19 nt, Artificial Sequence
  Description of Artificial Sequence: Synthetic oligonucleotide
guguaucggauacaaagau

SEQ ID NO: 83260 - RNA, 19 nt, Artificial Sequence
  Description of Artificial Sequence: Synthetic oligonucleotide
agccgcuucccucucucug

SEQ ID NO: 83261 - RNA, 19 nt, Artificial Sequence
  Description of Artificial Sequence: Synthetic oligonucleotide
auagaaccaauaaccuuau

SEQ ID NO: 83262 - RNA, 19 nt, Artificial Sequence
  Description of Artificial Sequence: Synthetic oligonucleotide
gaacaguaggugccuuguc

SEQ ID NO: 83263 - RNA, 19 nt, Artificial Sequence
  Description of Artificial Sequence: Synthetic oligonucleotide
ccuaagguguuugaauuug

SEQ ID NO: 83264 - RNA, 19 nt, Artificial Sequence
  Description of Artificial Sequence: Synthetic oligonucleotide
guuucucauagcuguugaa

SEQ ID NO: 83265 - RNA, 19 nt, Artificial Sequence
  Description of Artificial Sequence: Synthetic oligonucleotide
agggugcugacaaaucgga

SEQ ID NO: 83266 - RNA, 19 nt, Artificial Sequence
  Description of Artificial Sequence: Synthetic oligonucleotide
cuuagaacuccgugaauau

SEQ ID NO: 83267 - RNA, 19 nt, Artificial Sequence
  Description of Artificial Sequence: Synthetic oligonucleotide
gucuaagcaacgaucaaau

SEQ ID NO: 83268 - RNA, 19 nt, Artificial Sequence
  Description of Artificial Sequence: Synthetic oligonucleotide
gggugaauacuugauugac

SEQ ID NO: 83269 - RNA, 19 nt, Artificial Sequence
  Description of Artificial Sequence: Synthetic oligonucleotide
acauugaaucgcugcucau

SEQ ID NO: 83270 - RNA, 19 nt, Artificial Sequence
  Description of Artificial Sequence: Synthetic oligonucleotide
uacccgguguggaaucuua

SEQ ID NO: 83271 - RNA, 19 nt, Artificial Sequence
  Description of Artificial Sequence: Synthetic oligonucleotide
ggcgauuuaucaggcagug

SEQ ID NO: 83272 - RNA, 19 nt, Artificial Sequence
  Description of Artificial Sequence: Synthetic oligonucleotide
gugaauacccgguguggaa

SEQ ID NO: 83273 - RNA, 19 nt, Artificial Sequence
  Description of Artificial Sequence: Synthetic oligonucleotide
cucuacacugaaagguaaa

SEQ ID NO: 83274 - RNA, 19 nt, Artificial Sequence
  Description of Artificial Sequence: Synthetic oligonucleotide
guucucgcacaagggcugg

SEQ ID NO: 83275 - RNA, 19 nt, Artificial Sequence
  Description of Artificial Sequence: Synthetic oligonucleotide
gggacugcaucaauauuac

SEQ ID NO: 83276 - RNA, 19 nt, Artificial Sequence
  Description of Artificial Sequence: Synthetic oligonucleotide
aucgucagaggcccauuuu

SEQ ID NO: 83277 - RNA, 19 nt, Artificial Sequence
  Description of Artificial Sequence: Synthetic oligonucleotide
gcugguuagccaaacacaa

SEQ ID NO: 83278 - RNA, 19 nt, Artificial Sequence
  Description of Artificial Sequence: Synthetic oligonucleotide
gcuuauuaaagcagcugga

SEQ ID NO: 83279 - RNA, 19 nt, Artificial Sequence
  Description of Artificial Sequence: Synthetic oligonucleotide
aacugaccccugcuccaaa

SEQ ID NO: 83280 - RNA, 19 nt, Artificial Sequence
  Description of Artificial Sequence: Synthetic oligonucleotide
ggugucccuauguaacuga

SEQ ID NO: 83281 - RNA, 19 nt, Artificial Sequence
  Description of Artificial Sequence: Synthetic oligonucleotide
auaggccagcucugauaug

SEQ ID NO: 83282 - RNA, 19 nt, Artificial Sequence
  Description of Artificial Sequence: Synthetic oligonucleotide
cuaacuguucguuguacuu

SEQ ID NO: 83283 - RNA, 19 nt, Artificial Sequence
  Description of Artificial Sequence: Synthetic oligonucleotide
ugcacgcuugagcucucau

SEQ ID NO: 83284 - RNA, 19 nt, Artificial Sequence
  Description of Artificial Sequence: Synthetic oligonucleotide
agagauccuugcacgcuug

SEQ ID NO: 83285 - RNA, 19 nt, Artificial Sequence
  Description of Artificial Sequence: Synthetic oligonucleotide
aggcgauuuaucaggcagu

SEQ ID NO: 83286 - RNA, 19 nt, Artificial Sequence
  Description of Artificial Sequence: Synthetic oligonucleotide
uggcacuggguaucaucgu

SEQ ID NO: 83287 - RNA, 19 nt, Artificial Sequence
  Description of Artificial Sequence: Synthetic oligonucleotide
gaacuccgugaauauuugu

SEQ ID NO: 83288 - RNA, 19 nt, Artificial Sequence
  Description of Artificial Sequence: Synthetic oligonucleotide
guauagacuguggcuuuuc

SEQ ID NO: 83289 - RNA, 19 nt, Artificial Sequence
  Description of Artificial Sequence: Synthetic oligonucleotide
gagacuguggaggcgauuu

SEQ ID NO: 83290 - RNA, 19 nt, Artificial Sequence
  Description of Artificial Sequence: Synthetic oligonucleotide
ggcugguuagccaaacaca

SEQ ID NO: 83291 - RNA, 19 nt, Artificial Sequence
  Description of Artificial Sequence: Synthetic oligonucleotide
agcaacgaucaaauauaau

SEQ ID NO: 83292 - RNA, 19 nt, Artificial Sequence
  Description of Artificial Sequence: Synthetic oligonucleotide
cucugauauguguuuuacu

SEQ ID NO: 83293 - RNA, 19 nt, Artificial Sequence
  Description of Artificial Sequence: Synthetic oligonucleotide
gagcuaacuguucguugua

SEQ ID NO: 83294 - RNA, 19 nt, Artificial Sequence
  Description of Artificial Sequence: Synthetic oligonucleotide
agaggcccauuuucggaua

SEQ ID NO: 83295 - RNA, 19 nt, Artificial Sequence
  Description of Artificial Sequence: Synthetic oligonucleotide
gcccauguuucucauagcu

SEQ ID NO: 83296 - RNA, 19 nt, Artificial Sequence
  Description of Artificial Sequence: Synthetic oligonucleotide
uguugcggacagccacauc

SEQ ID NO: 83297 - RNA, 19 nt, Artificial Sequence
  Description of Artificial Sequence: Synthetic oligonucleotide
auugcccguuuaguuacau

SEQ ID NO: 83298 - RNA, 19 nt, Artificial Sequence
  Description of Artificial Sequence: Synthetic oligonucleotide
cguuuaguuacauguuuga

SEQ ID NO: 83299 - RNA, 19 nt, Artificial Sequence
  Description of Artificial Sequence: Synthetic oligonucleotide
agacuguggaggcgauuua

SEQ ID NO: 83300 - RNA, 19 nt, Artificial Sequence
  Description of Artificial Sequence: Synthetic oligonucleotide
ggugaauacuugauugacu

SEQ ID NO: 83301 - RNA, 19 nt, Artificial Sequence
  Description of Artificial Sequence: Synthetic oligonucleotide
ccuaagcugcgccuaugac

SEQ ID NO: 83302 - RNA, 19 nt, Artificial Sequence
  Description of Artificial Sequence: Synthetic oligonucleotide
aggugaugauuggaauaau

SEQ ID NO: 83303 - RNA, 19 nt, Artificial Sequence
  Description of Artificial Sequence: Synthetic oligonucleotide
cugaggggaaauaucuauu

SEQ ID NO: 83304 - RNA, 19 nt, Artificial Sequence
  Description of Artificial Sequence: Synthetic oligonucleotide
ccuauguaacugaccccug

SEQ ID NO: 83305 - RNA, 19 nt, Artificial Sequence
  Description of Artificial Sequence: Synthetic oligonucleotide
gauugcccguuuaguuaca

SEQ ID NO: 83306 - RNA, 19 nt, Artificial Sequence
  Description of Artificial Sequence: Synthetic oligonucleotide
ccgguguggaaucuuagaa

SEQ ID NO: 83307 - RNA, 19 nt, Artificial Sequence
  Description of Artificial Sequence: Synthetic oligonucleotide
agcuccuaagcugcgccua

SEQ ID NO: 83308 - RNA, 19 nt, Artificial Sequence
  Description of Artificial Sequence: Synthetic oligonucleotide
agcugcgccuaugacuuuu

SEQ ID NO: 83309 - RNA, 19 nt, Artificial Sequence
  Description of Artificial Sequence: Synthetic oligonucleotide
cuucgacucgacggcuuuc

SEQ ID NO: 83310 - RNA, 19 nt, Artificial Sequence
  Description of Artificial Sequence: Synthetic oligonucleotide
cuccuaagcugcgccuaug

SEQ ID NO: 83311 - RNA, 19 nt, Artificial Sequence
  Description of Artificial Sequence: Synthetic oligonucleotide
uugcacgcuugagcucuca

SEQ ID NO: 83312 - RNA, 19 nt, Artificial Sequence
  Description of Artificial Sequence: Synthetic oligonucleotide
gugaugagcaagugaucuu

SEQ ID NO: 83313 - RNA, 19 nt, Artificial Sequence
  Description of Artificial Sequence: Synthetic oligonucleotide
cgacucgacggcuuucuug

SEQ ID NO: 83314 - RNA, 19 nt, Artificial Sequence
  Description of Artificial Sequence: Synthetic oligonucleotide
ucgcaguggagagcacauc

SEQ ID NO: 83315 - RNA, 19 nt, Artificial Sequence
  Description of Artificial Sequence: Synthetic oligonucleotide
cauuagcugaggggaaaua

SEQ ID NO: 83316 - RNA, 19 nt, Artificial Sequence
  Description of Artificial Sequence: Synthetic oligonucleotide
gaggcccauuuucggauau

SEQ ID NO: 83317 - RNA, 19 nt, Artificial Sequence
  Description of Artificial Sequence: Synthetic oligonucleotide
ggcaaugaauguagcauau

SEQ ID NO: 83318 - RNA, 19 nt, Artificial Sequence
  Description of Artificial Sequence: Synthetic oligonucleotide
auacccgguguggaaucuu

SEQ ID NO: 83319 - RNA, 19 nt, Artificial Sequence
  Description of Artificial Sequence: Synthetic oligonucleotide
gcucaaggagaaauuugua

SEQ ID NO: 83320 - RNA, 19 nt, Artificial Sequence
  Description of Artificial Sequence: Synthetic oligonucleotide
cccgguguggaaucuuaga

SEQ ID NO: 83321 - RNA, 19 nt, Artificial Sequence
  Description of Artificial Sequence: Synthetic oligonucleotide
cccuccuaugauuauacuu

SEQ ID NO: 83322 - RNA, 19 nt, Artificial Sequence
  Description of Artificial Sequence: Synthetic oligonucleotide
gcugcgccuaugacuuuug

SEQ ID NO: 83323 - RNA, 19 nt, Artificial Sequence
  Description of Artificial Sequence: Synthetic oligonucleotide
gccuugucuaagcaacgau

SEQ ID NO: 83324 - RNA, 19 nt, Artificial Sequence
  Description of Artificial Sequence: Synthetic oligonucleotide
gcgauuuaucaggcaguga

SEQ ID NO: 83325 - RNA, 19 nt, Artificial Sequence
  Description of Artificial Sequence: Synthetic oligonucleotide
ccuugcacgcuugagcucu

SEQ ID NO: 83326 - RNA, 19 nt, Artificial Sequence
  Description of Artificial Sequence: Synthetic oligonucleotide
ccugauuauccuccuuccu

SEQ ID NO: 83327 - RNA, 19 nt, Artificial Sequence
  Description of Artificial Sequence: Synthetic oligonucleotide
gggugcugacaaaucggaa

SEQ ID NO: 83328 - RNA, 19 nt, Artificial Sequence
  Description of Artificial Sequence: Synthetic oligonucleotide
cccguuuaguuacauguuu

SEQ ID NO: 83329 - RNA, 19 nt, Artificial Sequence
  Description of Artificial Sequence: Synthetic oligonucleotide
ccuuugagcugaggauguc

SEQ ID NO: 83330 - RNA, 19 nt, Artificial Sequence
  Description of Artificial Sequence: Synthetic oligonucleotide
gcacgcuugagcucucauu

SEQ ID NO: 83331 - RNA, 19 nt, Artificial Sequence
  Description of Artificial Sequence: Synthetic oligonucleotide
cugcgccuaugacuuuugu

SEQ ID NO: 83332 - RNA, 19 nt, Artificial Sequence
  Description of Artificial Sequence: Synthetic oligonucleotide
ccgcuucccucucucuguc

SEQ ID NO: 83333 - RNA, 19 nt, Artificial Sequence
  Description of Artificial Sequence: Synthetic oligonucleotide
gccuaugacuuuuguucuu

SEQ ID NO: 83334 - RNA, 19 nt, Artificial Sequence
  Description of Artificial Sequence: Synthetic oligonucleotide
gcaaugaauguagcauauu

SEQ ID NO: 83335 - RNA, 19 nt, Artificial Sequence
  Description of Artificial Sequence: Synthetic oligonucleotide
gcuccuaagcugcgccuau

SEQ ID NO: 83336 - RNA, 19 nt, Artificial Sequence
  Description of Artificial Sequence: Synthetic oligonucleotide
cgaacaguaggugccuugu

SEQ ID NO: 83337 - RNA, 19 nt, Artificial Sequence
  Description of Artificial Sequence: Synthetic oligonucleotide
ccuugauccugggcuucga

SEQ ID NO: 83338 - RNA, 19 nt, Artificial Sequence
  Description of Artificial Sequence: Synthetic oligonucleotide
ccccuccuaugauuauacu

SEQ ID NO: 83339 - RNA, 19 nt, Artificial Sequence
  Description of Artificial Sequence: Synthetic oligonucleotide
aaagaagagguuuuaaauc

SEQ ID NO: 83340 - RNA, 19 nt, Artificial Sequence
  Description of Artificial Sequence: Synthetic oligonucleotide
auaacgauuguucugggac

SEQ ID NO: 83341 - RNA, 19 nt, Artificial Sequence
  Description of Artificial Sequence: Synthetic oligonucleotide
aaauguucugccaugaagg

SEQ ID NO: 83342 - RNA, 19 nt, Artificial Sequence
  Description of Artificial Sequence: Synthetic oligonucleotide
auucugaggagucugaacg

SEQ ID NO: 83343 - RNA, 19 nt, Artificial Sequence
  Description of Artificial Sequence: Synthetic oligonucleotide
aaaguuuaggauuugucgu

SEQ ID NO: 83344 - RNA, 19 nt, Artificial Sequence
  Description of Artificial Sequence: Synthetic oligonucleotide
aaagcuauccuauacguau

SEQ ID NO: 83345 - RNA, 19 nt, Artificial Sequence
  Description of Artificial Sequence: Synthetic oligonucleotide
uuugguauaacgauuguuc

SEQ ID NO: 83346 - RNA, 19 nt, Artificial Sequence
  Description of Artificial Sequence: Synthetic oligonucleotide
uuuagaucgauaaucuugu

SEQ ID NO: 83347 - RNA, 19 nt, Artificial Sequence
  Description of Artificial Sequence: Synthetic oligonucleotide
ucgauugcuauuuacagca

SEQ ID NO: 83348 - RNA, 19 nt, Artificial Sequence
  Description of Artificial Sequence: Synthetic oligonucleotide
cuuuagaucgauaaucuug

SEQ ID NO: 83349 - RNA, 19 nt, Artificial Sequence
  Description of Artificial Sequence: Synthetic oligonucleotide
guuuguuaaaaccaggcug

SEQ ID NO: 83350 - RNA, 19 nt, Artificial Sequence
  Description of Artificial Sequence: Synthetic oligonucleotide
aaugucgaaaguuuaggau

SEQ ID NO: 83351 - RNA, 19 nt, Artificial Sequence
  Description of Artificial Sequence: Synthetic oligonucleotide
aguuugaaacaccugcgac

SEQ ID NO: 83352 - RNA, 19 nt, Artificial Sequence
  Description of Artificial Sequence: Synthetic oligonucleotide
agcaucaugacuagggugc

SEQ ID NO: 83353 - RNA, 19 nt, Artificial Sequence
  Description of Artificial Sequence: Synthetic oligonucleotide
aauguugugucccuuguau

SEQ ID NO: 83354 - RNA, 19 nt, Artificial Sequence
  Description of Artificial Sequence: Synthetic oligonucleotide
auuguuuacagccuucugu

SEQ ID NO: 83355 - RNA, 19 nt, Artificial Sequence
  Description of Artificial Sequence: Synthetic oligonucleotide
uuagaaaaccaccuuacua

SEQ ID NO: 83356 - RNA, 19 nt, Artificial Sequence
  Description of Artificial Sequence: Synthetic oligonucleotide
aggccuaacuaauagcuac

SEQ ID NO: 83357 - RNA, 19 nt, Artificial Sequence
  Description of Artificial Sequence: Synthetic oligonucleotide
acguuuacuauccccaaac

SEQ ID NO: 83358 - RNA, 19 nt, Artificial Sequence
  Description of Artificial Sequence: Synthetic oligonucleotide
ugucgauugcuauuuacag

SEQ ID NO: 83359 - RNA, 19 nt, Artificial Sequence
  Description of Artificial Sequence: Synthetic oligonucleotide
uguuguagcacaucugagc

SEQ ID NO: 83360 - RNA, 19 nt, Artificial Sequence
  Description of Artificial Sequence: Synthetic oligonucleotide
uugacugguacgaugcucc

SEQ ID NO: 83361 - RNA, 19 nt, Artificial Sequence
  Description of Artificial Sequence: Synthetic oligonucleotide
ucauuaagucaaauucucc

SEQ ID NO: 83362 - RNA, 19 nt, Artificial Sequence
  Description of Artificial Sequence: Synthetic oligonucleotide
gaaaagguguuccuggaac

SEQ ID NO: 83363 - RNA, 19 nt, Artificial Sequence
  Description of Artificial Sequence: Synthetic oligonucleotide
uuuagggacagguuggccu

SEQ ID NO: 83364 - RNA, 19 nt, Artificial Sequence
  Description of Artificial Sequence: Synthetic oligonucleotide
ugcuuuagaucgauaaucu

SEQ ID NO: 83365 - RNA, 19 nt, Artificial Sequence
  Description of Artificial Sequence: Synthetic oligonucleotide
accgcuguaaugucgaaag

SEQ ID NO: 83366 - RNA, 19 nt, Artificial Sequence
  Description of Artificial Sequence: Synthetic oligonucleotide
ugucccuuguauuuggacc

SEQ ID NO: 83367 - RNA, 19 nt, Artificial Sequence
  Description of Artificial Sequence: Synthetic oligonucleotide
aaguacaaccccugaaugu

SEQ ID NO: 83368 - RNA, 19 nt, Artificial Sequence
  Description of Artificial Sequence: Synthetic oligonucleotide
ucuaucaucgaagccaagc

SEQ ID NO: 83369 - RNA, 19 nt, Artificial Sequence
  Description of Artificial Sequence: Synthetic oligonucleotide
uauucugcguaccagggaa

SEQ ID NO: 83370 - RNA, 19 nt, Artificial Sequence
  Description of Artificial Sequence: Synthetic oligonucleotide
gguacgaugcuccagcugg

SEQ ID NO: 83371 - RNA, 19 nt, Artificial Sequence
  Description of Artificial Sequence: Synthetic oligonucleotide
ucgauaaucuuguucuuug

SEQ ID NO: 83372 - RNA, 19 nt, Artificial Sequence
  Description of Artificial Sequence: Synthetic oligonucleotide
uaauguaguucacgguagg

SEQ ID NO: 83373 - RNA, 19 nt, Artificial Sequence
  Description of Artificial Sequence: Synthetic oligonucleotide
ugguguagaaccaaggcua

SEQ ID NO: 83374 - RNA, 19 nt, Artificial Sequence
  Description of Artificial Sequence: Synthetic oligonucleotide
uguacgaaucauuucuucu

SEQ ID NO: 83375 - RNA, 19 nt, Artificial Sequence
  Description of Artificial Sequence: Synthetic oligonucleotide
uaaaucggcuggcagagac

SEQ ID NO: 83376 - RNA, 19 nt, Artificial Sequence
  Description of Artificial Sequence: Synthetic oligonucleotide
uuggguuagaaaaccaccu

SEQ ID NO: 83377 - RNA, 19 nt, Artificial Sequence
  Description of Artificial Sequence: Synthetic oligonucleotide
uaaugucgaaaguuuagga

SEQ ID NO: 83378 - RNA, 19 nt, Artificial Sequence
  Description of Artificial Sequence: Synthetic oligonucleotide
uaaucuuguucuuugguau

SEQ ID NO: 83379 - RNA, 19 nt, Artificial Sequence
  Description of Artificial Sequence: Synthetic oligonucleotide
uuacuaaaucggcuggcag

SEQ ID NO: 83380 - RNA, 19 nt, Artificial Sequence
  Description of Artificial Sequence: Synthetic oligonucleotide
ucucugaaccgguugaccc

SEQ ID NO: 83381 - RNA, 19 nt, Artificial Sequence
  Description of Artificial Sequence: Synthetic oligonucleotide
cuuucacucgcucucgugg

SEQ ID NO: 83382 - RNA, 19 nt, Artificial Sequence
  Description of Artificial Sequence: Synthetic oligonucleotide
uguaguucacgguagguau

SEQ ID NO: 83383 - RNA, 19 nt, Artificial Sequence
  Description of Artificial Sequence: Synthetic oligonucleotide
uugucguaggagaagaguc

SEQ ID NO: 83384 - RNA, 19 nt, Artificial Sequence
  Description of Artificial Sequence: Synthetic oligonucleotide
cucauuaagucaaauucuc

SEQ ID NO: 83385 - RNA, 19 nt, Artificial Sequence
  Description of Artificial Sequence: Synthetic oligonucleotide
uagaucgauaaucuuguuc

SEQ ID NO: 83386 - RNA, 19 nt, Artificial Sequence
  Description of Artificial Sequence: Synthetic oligonucleotide
uuuaggauugggugacuag

SEQ ID NO: 83387 - RNA, 19 nt, Artificial Sequence
  Description of Artificial Sequence: Synthetic oligonucleotide
uacuaaaucggcuggcaga

SEQ ID NO: 83388 - RNA, 19 nt, Artificial Sequence
  Description of Artificial Sequence: Synthetic oligonucleotide
uuaggauugggugacuagc

SEQ ID NO: 83389 - RNA, 19 nt, Artificial Sequence
  Description of Artificial Sequence: Synthetic oligonucleotide
aauccgucguccaccaagc

SEQ ID NO: 83390 - RNA, 19 nt, Artificial Sequence
  Description of Artificial Sequence: Synthetic oligonucleotide
ugguucuauccacuugugg

SEQ ID NO: 83391 - RNA, 19 nt, Artificial Sequence
  Description of Artificial Sequence: Synthetic oligonucleotide
caggcugauagaaggaugc

SEQ ID NO: 83392 - RNA, 19 nt, Artificial Sequence
  Description of Artificial Sequence: Synthetic oligonucleotide
aaacaccugcgacauagga

SEQ ID NO: 83393 - RNA, 19 nt, Artificial Sequence
  Description of Artificial Sequence: Synthetic oligonucleotide
caaagauugauaauguugu

SEQ ID NO: 83394 - RNA, 19 nt, Artificial Sequence
  Description of Artificial Sequence: Synthetic oligonucleotide
uaucaucgaagccaagcac

SEQ ID NO: 83395 - RNA, 19 nt, Artificial Sequence
  Description of Artificial Sequence: Synthetic oligonucleotide
aacgugguggguaggacgg

SEQ ID NO: 83396 - RNA, 19 nt, Artificial Sequence
  Description of Artificial Sequence: Synthetic oligonucleotide
cuacgcucaccaaagacac

SEQ ID NO: 83397 - RNA, 19 nt, Artificial Sequence
  Description of Artificial Sequence: Synthetic oligonucleotide
uccuauacguauauacaaa

SEQ ID NO: 83398 - RNA, 19 nt, Artificial Sequence
  Description of Artificial Sequence: Synthetic oligonucleotide
augucgaaaguuuaggauu

SEQ ID NO: 83399 - RNA, 19 nt, Artificial Sequence
  Description of Artificial Sequence: Synthetic oligonucleotide
accuuacuaaaucggcugg

SEQ ID NO: 83400 - RNA, 19 nt, Artificial Sequence
  Description of Artificial Sequence: Synthetic oligonucleotide
gggauuagaugucagcagg

SEQ ID NO: 83401 - RNA, 19 nt, Artificial Sequence
  Description of Artificial Sequence: Synthetic oligonucleotide
aaguuuaggauuugucgua

SEQ ID NO: 83402 - RNA, 19 nt, Artificial Sequence
  Description of Artificial Sequence: Synthetic oligonucleotide
acuaaaucggcuggcagag

SEQ ID NO: 83403 - RNA, 19 nt, Artificial Sequence
  Description of Artificial Sequence: Synthetic oligonucleotide
aaccaccuuacuaaaucgg

SEQ ID NO: 83404 - RNA, 19 nt, Artificial Sequence
  Description of Artificial Sequence: Synthetic oligonucleotide
aacgauuguucugggacag

SEQ ID NO: 83405 - RNA, 19 nt, Artificial Sequence
  Description of Artificial Sequence: Synthetic oligonucleotide
uaaaaccaggcugauagaa

SEQ ID NO: 83406 - RNA, 19 nt, Artificial Sequence
  Description of Artificial Sequence: Synthetic oligonucleotide
guagaaccaaggcuacugg

SEQ ID NO: 83407 - RNA, 19 nt, Artificial Sequence
  Description of Artificial Sequence: Synthetic oligonucleotide
accaccuuacuaaaucggc

SEQ ID NO: 83408 - RNA, 19 nt, Artificial Sequence
  Description of Artificial Sequence: Synthetic oligonucleotide
agaacaacaucuaagucau

SEQ ID NO: 83409 - RNA, 19 nt, Artificial Sequence
  Description of Artificial Sequence: Synthetic oligonucleotide
ugggaaaccaauuggugau

SEQ ID NO: 83410 - RNA, 19 nt, Artificial Sequence
  Description of Artificial Sequence: Synthetic oligonucleotide
gagacggugauccuucuca

SEQ ID NO: 83411 - RNA, 19 nt, Artificial Sequence
  Description of Artificial Sequence: Synthetic oligonucleotide
ugucgaaaguuuaggauuu

SEQ ID NO: 83412 - RNA, 19 nt, Artificial Sequence
  Description of Artificial Sequence: Synthetic oligonucleotide
aggacggcuuguucgagac

SEQ ID NO: 83413 - RNA, 19 nt, Artificial Sequence
  Description of Artificial Sequence: Synthetic oligonucleotide
uauaacgauuguucuggga

SEQ ID NO: 83414 - RNA, 19 nt, Artificial Sequence
  Description of Artificial Sequence: Synthetic oligonucleotide
aggacaacaucccuuggga

SEQ ID NO: 83415 - RNA, 19 nt, Artificial Sequence
  Description of Artificial Sequence: Synthetic oligonucleotide
uccgucguccaccaagcag

SEQ ID NO: 83416 - RNA, 19 nt, Artificial Sequence
  Description of Artificial Sequence: Synthetic oligonucleotide
cagagacugacccuucucc

SEQ ID NO: 83417 - RNA, 19 nt, Artificial Sequence
  Description of Artificial Sequence: Synthetic oligonucleotide
aagcacggcaccuugucaa

SEQ ID NO: 83418 - RNA, 19 nt, Artificial Sequence
  Description of Artificial Sequence: Synthetic oligonucleotide
auguuauaaaagaaagacu

SEQ ID NO: 83419 - RNA, 19 nt, Artificial Sequence
  Description of Artificial Sequence: Synthetic oligonucleotide
auaauguugugucccuugu

SEQ ID NO: 83420 - RNA, 19 nt, Artificial Sequence
  Description of Artificial Sequence: Synthetic oligonucleotide
gaagaccgcuguaaugucg

SEQ ID NO: 83421 - RNA, 19 nt, Artificial Sequence
  Description of Artificial Sequence: Synthetic oligonucleotide
gucucggucucucaagucc

SEQ ID NO: 83422 - RNA, 19 nt, Artificial Sequence
  Description of Artificial Sequence: Synthetic oligonucleotide
caccuuacuaaaucggcug

SEQ ID NO: 83423 - RNA, 19 nt, Artificial Sequence
  Description of Artificial Sequence: Synthetic oligonucleotide
acgcaggguagagagaggc

SEQ ID NO: 83424 - RNA, 19 nt, Artificial Sequence
  Description of Artificial Sequence: Synthetic oligonucleotide
agaacugagcgcugcagcu

SEQ ID NO: 83425 - RNA, 19 nt, Artificial Sequence
  Description of Artificial Sequence: Synthetic oligonucleotide
gauugggugacuagcagca

SEQ ID NO: 83426 - RNA, 19 nt, Artificial Sequence
  Description of Artificial Sequence: Synthetic oligonucleotide
aauguaguucacgguaggu

SEQ ID NO: 83427 - RNA, 19 nt, Artificial Sequence
  Description of Artificial Sequence: Synthetic oligonucleotide
acaggccuaacuaauagcu

SEQ ID NO: 83428 - RNA, 19 nt, Artificial Sequence
  Description of Artificial Sequence: Synthetic oligonucleotide
gagcaggccgaacaauagg

SEQ ID NO: 83429 - RNA, 19 nt, Artificial Sequence
  Description of Artificial Sequence: Synthetic oligonucleotide
aaccaauuggugaugguau

SEQ ID NO: 83430 - RNA, 19 nt, Artificial Sequence
  Description of Artificial Sequence: Synthetic oligonucleotide
aggacgaggguuuaggauu

SEQ ID NO: 83431 - RNA, 19 nt, Artificial Sequence
  Description of Artificial Sequence: Synthetic oligonucleotide
uccuuugacugguacgaug

SEQ ID NO: 83432 - RNA, 19 nt, Artificial Sequence
  Description of Artificial Sequence: Synthetic oligonucleotide
cuuguucgagaccugcaag

SEQ ID NO: 83433 - RNA, 19 nt, Artificial Sequence
  Description of Artificial Sequence: Synthetic oligonucleotide
gaaaguacaaccccugaau

SEQ ID NO: 83434 - RNA, 19 nt, Artificial Sequence
  Description of Artificial Sequence: Synthetic oligonucleotide
gguaggacaacaucccuug

SEQ ID NO: 83435 - RNA, 19 nt, Artificial Sequence
  Description of Artificial Sequence: Synthetic oligonucleotide
ucucucaagucccgaaggu

SEQ ID NO: 83436 - RNA, 19 nt, Artificial Sequence
  Description of Artificial Sequence: Synthetic oligonucleotide
aaaggguacaaggguuguc

SEQ ID NO: 83437 - RNA, 19 nt, Artificial Sequence
  Description of Artificial Sequence: Synthetic oligonucleotide
cuaggaaucucagcugggg

SEQ ID NO: 83438 - RNA, 19 nt, Artificial Sequence
  Description of Artificial Sequence: Synthetic oligonucleotide
ugacuuugauacucgcugu

SEQ ID NO: 83439 - RNA, 19 nt, Artificial Sequence
  Description of Artificial Sequence: Synthetic oligonucleotide
uuuccucggugcaugggug

SEQ ID NO: 83440 - RNA, 19 nt, Artificial Sequence
  Description of Artificial Sequence: Synthetic oligonucleotide
acaaccccugaaugugagc

SEQ ID NO: 83441 - RNA, 19 nt, Artificial Sequence
  Description of Artificial Sequence: Synthetic oligonucleotide
gaagagguuuuaaauccac

SEQ ID NO: 83442 - RNA, 19 nt, Artificial Sequence
  Description of Artificial Sequence: Synthetic oligonucleotide
guauaacgauuguucuggg

SEQ ID NO: 83443 - RNA, 19 nt, Artificial Sequence
  Description of Artificial Sequence: Synthetic oligonucleotide
caauaggaacaugagggac

SEQ ID NO: 83444 - RNA, 19 nt, Artificial Sequence
  Description of Artificial Sequence: Synthetic oligonucleotide
ccuuugacugguacgaugc

SEQ ID NO: 83445 - RNA, 19 nt, Artificial Sequence
  Description of Artificial Sequence: Synthetic oligonucleotide
aggauugggugacuagcag

SEQ ID NO: 83446 - RNA, 19 nt, Artificial Sequence
  Description of Artificial Sequence: Synthetic oligonucleotide
cuaucaucgaagccaagca

SEQ ID NO: 83447 - RNA, 19 nt, Artificial Sequence
  Description of Artificial Sequence: Synthetic oligonucleotide
ucaguguacgaaucauuuc

SEQ ID NO: 83448 - RNA, 19 nt, Artificial Sequence
  Description of Artificial Sequence: Synthetic oligonucleotide
ugacacaggccuaacuaau

SEQ ID NO: 83449 - RNA, 19 nt, Artificial Sequence
  Description of Artificial Sequence: Synthetic oligonucleotide
gauaugggauuagauguca

SEQ ID NO: 83450 - RNA, 19 nt, Artificial Sequence
  Description of Artificial Sequence: Synthetic oligonucleotide
ugaugguauaggagcaaaa

SEQ ID NO: 83451 - RNA, 19 nt, Artificial Sequence
  Description of Artificial Sequence: Synthetic oligonucleotide
guauuuggaccguguaggc

SEQ ID NO: 83452 - RNA, 19 nt, Artificial Sequence
  Description of Artificial Sequence: Synthetic oligonucleotide
gggaaggucggucugauuc

SEQ ID NO: 83453 - RNA, 19 nt, Artificial Sequence
  Description of Artificial Sequence: Synthetic oligonucleotide
uuuggaccguguaggcucc

SEQ ID NO: 83454 - RNA, 19 nt, Artificial Sequence
  Description of Artificial Sequence: Synthetic oligonucleotide
ugcucgaguuugaaacacc

SEQ ID NO: 83455 - RNA, 19 nt, Artificial Sequence
  Description of Artificial Sequence: Synthetic oligonucleotide
ugcgacauaggaggagagg

SEQ ID NO: 83456 - RNA, 19 nt, Artificial Sequence
  Description of Artificial Sequence: Synthetic oligonucleotide
auuauccucccacugccaa

SEQ ID NO: 83457 - RNA, 19 nt, Artificial Sequence
  Description of Artificial Sequence: Synthetic oligonucleotide
caggccgaacaauaggaac

SEQ ID NO: 83458 - RNA, 19 nt, Artificial Sequence
  Description of Artificial Sequence: Synthetic oligonucleotide
aaagcccgggcagagauua

SEQ ID NO: 83459 - RNA, 19 nt, Artificial Sequence
  Description of Artificial Sequence: Synthetic oligonucleotide
gcgacauaggaggagaggg

SEQ ID NO: 83460 - RNA, 19 nt, Artificial Sequence
  Description of Artificial Sequence: Synthetic oligonucleotide
uucgacugacuuugggcug

SEQ ID NO: 83461 - RNA, 19 nt, Artificial Sequence
  Description of Artificial Sequence: Synthetic oligonucleotide
uuucaagauuucgacugac

SEQ ID NO: 83462 - RNA, 19 nt, Artificial Sequence
  Description of Artificial Sequence: Synthetic oligonucleotide
uuugacugguacgaugcuc

SEQ ID NO: 83463 - RNA, 19 nt, Artificial Sequence
  Description of Artificial Sequence: Synthetic oligonucleotide
ucguaggagaagagucuug

SEQ ID NO: 83464 - RNA, 19 nt, Artificial Sequence
  Description of Artificial Sequence: Synthetic oligonucleotide
guacgaaucauuucuucua

SEQ ID NO: 83465 - RNA, 19 nt, Artificial Sequence
  Description of Artificial Sequence: Synthetic oligonucleotide
aaaagcuauccuauacgua

SEQ ID NO: 83466 - RNA, 19 nt, Artificial Sequence
  Description of Artificial Sequence: Synthetic oligonucleotide
uauuuggaccguguaggcu

SEQ ID NO: 83467 - RNA, 19 nt, Artificial Sequence
  Description of Artificial Sequence: Synthetic oligonucleotide
ggauugggugacuagcagc

SEQ ID NO: 83468 - RNA, 19 nt, Artificial Sequence
  Description of Artificial Sequence: Synthetic oligonucleotide
acgcucaccaaagacacgu

SEQ ID NO: 83469 - RNA, 19 nt, Artificial Sequence
  Description of Artificial Sequence: Synthetic oligonucleotide
ucgaaaguuuaggauuugu

SEQ ID NO: 83470 - RNA, 19 nt, Artificial Sequence
  Description of Artificial Sequence: Synthetic oligonucleotide
ugagcugucgauugcuauu

SEQ ID NO: 83471 - RNA, 19 nt, Artificial Sequence
  Description of Artificial Sequence: Synthetic oligonucleotide
uacgcucaccaaagacacg

SEQ ID NO: 83472 - RNA, 19 nt, Artificial Sequence
  Description of Artificial Sequence: Synthetic oligonucleotide
cuucaaagauugauaaugu

SEQ ID NO: 83473 - RNA, 19 nt, Artificial Sequence
  Description of Artificial Sequence: Synthetic oligonucleotide
agggucuauacauuuuauu

SEQ ID NO: 83474 - RNA, 19 nt, Artificial Sequence
  Description of Artificial Sequence: Synthetic oligonucleotide
caauguaaaagcccauaaa

SEQ ID NO: 83475 - RNA, 19 nt, Artificial Sequence
  Description of Artificial Sequence: Synthetic oligonucleotide
caccauagguccagauggg

SEQ ID NO: 83476 - RNA, 19 nt, Artificial Sequence
  Description of Artificial Sequence: Synthetic oligonucleotide
ugguacgaugcuccagcug

SEQ ID NO: 83477 - RNA, 19 nt, Artificial Sequence
  Description of Artificial Sequence: Synthetic oligonucleotide
cugccgggaacauucugag

SEQ ID NO: 83478 - RNA, 19 nt, Artificial Sequence
  Description of Artificial Sequence: Synthetic oligonucleotide
agcuauccuauacguauau

SEQ ID NO: 83479 - RNA, 19 nt, Artificial Sequence
  Description of Artificial Sequence: Synthetic oligonucleotide
guaggacaacaucccuugg

SEQ ID NO: 83480 - RNA, 19 nt, Artificial Sequence
  Description of Artificial Sequence: Synthetic oligonucleotide
ugcagaacugagcgcugca

SEQ ID NO: 83481 - RNA, 19 nt, Artificial Sequence
  Description of Artificial Sequence: Synthetic oligonucleotide
guguacgaaucauuucuuc

SEQ ID NO: 83482 - RNA, 19 nt, Artificial Sequence
  Description of Artificial Sequence: Synthetic oligonucleotide
cuaacccugggugaagcug

SEQ ID NO: 83483 - RNA, 19 nt, Artificial Sequence
  Description of Artificial Sequence: Synthetic oligonucleotide
cucgaguuugaaacaccug

SEQ ID NO: 83484 - RNA, 19 nt, Artificial Sequence
  Description of Artificial Sequence: Synthetic oligonucleotide
aguauccucuuuagcauca

SEQ ID NO: 83485 - RNA, 19 nt, Artificial Sequence
  Description of Artificial Sequence: Synthetic oligonucleotide
uguucgagaccugcaaguc

SEQ ID NO: 83486 - RNA, 19 nt, Artificial Sequence
  Description of Artificial Sequence: Synthetic oligonucleotide
cuuaucgcugagacgguga

SEQ ID NO: 83487 - RNA, 19 nt, Artificial Sequence
  Description of Artificial Sequence: Synthetic oligonucleotide
cuucuaucaucgaagccaa

SEQ ID NO: 83488 - RNA, 19 nt, Artificial Sequence
  Description of Artificial Sequence: Synthetic oligonucleotide
ugaaccgguugacccagaa

SEQ ID NO: 83489 - RNA, 19 nt, Artificial Sequence
  Description of Artificial Sequence: Synthetic oligonucleotide
ugaagaccgcuguaauguc

SEQ ID NO: 83490 - RNA, 19 nt, Artificial Sequence
  Description of Artificial Sequence: Synthetic oligonucleotide
cuacuuuauguacagcugu

SEQ ID NO: 83491 - RNA, 19 nt, Artificial Sequence
  Description of Artificial Sequence: Synthetic oligonucleotide
ggguaggacggagaaaagg

SEQ ID NO: 83492 - RNA, 19 nt, Artificial Sequence
  Description of Artificial Sequence: Synthetic oligonucleotide
gagaggacggcuuguucga

SEQ ID NO: 83493 - RNA, 19 nt, Artificial Sequence
  Description of Artificial Sequence: Synthetic oligonucleotide
ugccaauccgucguccacc

SEQ ID NO: 83494 - RNA, 19 nt, Artificial Sequence
  Description of Artificial Sequence: Synthetic oligonucleotide
uccgcccugacgcagggua

SEQ ID NO: 83495 - RNA, 19 nt, Artificial Sequence
  Description of Artificial Sequence: Synthetic oligonucleotide
ucccugaccggcuuggguu

SEQ ID NO: 83496 - RNA, 19 nt, Artificial Sequence
  Description of Artificial Sequence: Synthetic oligonucleotide
ugcucagguaggacaacau

SEQ ID NO: 83497 - RNA, 19 nt, Artificial Sequence
  Description of Artificial Sequence: Synthetic oligonucleotide
ugccgggaacauucugagg

SEQ ID NO: 83498 - RNA, 19 nt, Artificial Sequence
  Description of Artificial Sequence: Synthetic oligonucleotide
ggcaugccacuucucaggg

SEQ ID NO: 83499 - RNA, 19 nt, Artificial Sequence
  Description of Artificial Sequence: Synthetic oligonucleotide
cucaccaaagacacguuua

SEQ ID NO: 83500 - RNA, 19 nt, Artificial Sequence
  Description of Artificial Sequence: Synthetic oligonucleotide
uggacuaacccugggugaa

SEQ ID NO: 83501 - RNA, 19 nt, Artificial Sequence
  Description of Artificial Sequence: Synthetic oligonucleotide
acuaacccugggugaagcu

SEQ ID NO: 83502 - RNA, 19 nt, Artificial Sequence
  Description of Artificial Sequence: Synthetic oligonucleotide
auuugucguaggagaagag

SEQ ID NO: 83503 - RNA, 19 nt, Artificial Sequence
  Description of Artificial Sequence: Synthetic oligonucleotide
uggugagcaggccgaacaa

SEQ ID NO: 83504 - RNA, 19 nt, Artificial Sequence
  Description of Artificial Sequence: Synthetic oligonucleotide
cucugguucuauccacuug

SEQ ID NO: 83505 - RNA, 19 nt, Artificial Sequence
  Description of Artificial Sequence: Synthetic oligonucleotide
aucgauaaucuuguucuuu

SEQ ID NO: 83506 - RNA, 19 nt, Artificial Sequence
  Description of Artificial Sequence: Synthetic oligonucleotide
gacggcuuguucgagaccu

SEQ ID NO: 83507 - RNA, 19 nt, Artificial Sequence
  Description of Artificial Sequence: Synthetic oligonucleotide
ccacugaaaguacaacccc

SEQ ID NO: 83508 - RNA, 19 nt, Artificial Sequence
  Description of Artificial Sequence: Synthetic oligonucleotide
aaaucggcuggcagagacu

SEQ ID NO: 83509 - RNA, 19 nt, Artificial Sequence
  Description of Artificial Sequence: Synthetic oligonucleotide
uuacagccuucugucauaa

SEQ ID NO: 83510 - RNA, 19 nt, Artificial Sequence
  Description of Artificial Sequence: Synthetic oligonucleotide
ugagacggugauccuucuc

SEQ ID NO: 83511 - RNA, 19 nt, Artificial Sequence
  Description of Artificial Sequence: Synthetic oligonucleotide
gggucuauacauuuuauuu

SEQ ID NO: 83512 - RNA, 19 nt, Artificial Sequence
  Description of Artificial Sequence: Synthetic oligonucleotide
acacguuuacuauccccaa

SEQ ID NO: 83513 - RNA, 19 nt, Artificial Sequence
  Description of Artificial Sequence: Synthetic oligonucleotide
uuagaucgauaaucuuguu

SEQ ID NO: 83514 - RNA, 19 nt, Artificial Sequence
  Description of Artificial Sequence: Synthetic oligonucleotide
augacuagggugccaccau

SEQ ID NO: 83515 - RNA, 19 nt, Artificial Sequence
  Description of Artificial Sequence: Synthetic oligonucleotide
cugcucgaguuugaaacac

SEQ ID NO: 83516 - RNA, 19 nt, Artificial Sequence
  Description of Artificial Sequence: Synthetic oligonucleotide
augccuuggaauggaucuc

SEQ ID NO: 83517 - RNA, 19 nt, Artificial Sequence
  Description of Artificial Sequence: Synthetic oligonucleotide
ccuauacguauauacaaaa

SEQ ID NO: 83518 - RNA, 19 nt, Artificial Sequence
  Description of Artificial Sequence: Synthetic oligonucleotide
gggcuaucagccuuuggac

SEQ ID NO: 83519 - RNA, 19 nt, Artificial Sequence
  Description of Artificial Sequence: Synthetic oligonucleotide
gauuagaugucagcagggu

SEQ ID NO: 83520 - RNA, 19 nt, Artificial Sequence
  Description of Artificial Sequence: Synthetic oligonucleotide
gacugguacgaugcuccag

SEQ ID NO: 83521 - RNA, 19 nt, Artificial Sequence
  Description of Artificial Sequence: Synthetic oligonucleotide
cacuaugccuuccuucaca

SEQ ID NO: 83522 - RNA, 19 nt, Artificial Sequence
  Description of Artificial Sequence: Synthetic oligonucleotide
caaggguugucccaggagu

SEQ ID NO: 83523 - RNA, 19 nt, Artificial Sequence
  Description of Artificial Sequence: Synthetic oligonucleotide
gcugucgauugcuauuuac

SEQ ID NO: 83524 - RNA, 19 nt, Artificial Sequence
  Description of Artificial Sequence: Synthetic oligonucleotide
uagaggagccaugucuauc

SEQ ID NO: 83525 - RNA, 19 nt, Artificial Sequence
  Description of Artificial Sequence: Synthetic oligonucleotide
caugacuagggugccacca

SEQ ID NO: 83526 - RNA, 19 nt, Artificial Sequence
  Description of Artificial Sequence: Synthetic oligonucleotide
ccaauuggugaugguaucc

SEQ ID NO: 83527 - RNA, 19 nt, Artificial Sequence
  Description of Artificial Sequence: Synthetic oligonucleotide
cucugaaccgguugaccca

SEQ ID NO: 83528 - RNA, 19 nt, Artificial Sequence
  Description of Artificial Sequence: Synthetic oligonucleotide
cuauucugcguaccaggga

SEQ ID NO: 83529 - RNA, 19 nt, Artificial Sequence
  Description of Artificial Sequence: Synthetic oligonucleotide
agacggugauccuucucaa

SEQ ID NO: 83530 - RNA, 19 nt, Artificial Sequence
  Description of Artificial Sequence: Synthetic oligonucleotide
ucgagaccugcaagucucu

SEQ ID NO: 83531 - RNA, 19 nt, Artificial Sequence
  Description of Artificial Sequence: Synthetic oligonucleotide
gaggacggcuuguucgaga

SEQ ID NO: 83532 - RNA, 19 nt, Artificial Sequence
  Description of Artificial Sequence: Synthetic oligonucleotide
aagucccgaagguccuuau

SEQ ID NO: 83533 - RNA, 19 nt, Artificial Sequence
  Description of Artificial Sequence: Synthetic oligonucleotide
ugauaauguugugucccuu

SEQ ID NO: 83534 - RNA, 19 nt, Artificial Sequence
  Description of Artificial Sequence: Synthetic oligonucleotide
cacugaaaguacaaccccu

SEQ ID NO: 83535 - RNA, 19 nt, Artificial Sequence
  Description of Artificial Sequence: Synthetic oligonucleotide
uuccccgaguucuguccag

SEQ ID NO: 83536 - RNA, 19 nt, Artificial Sequence
  Description of Artificial Sequence: Synthetic oligonucleotide
ucggaguccgucucugguu

SEQ ID NO: 83537 - RNA, 19 nt, Artificial Sequence
  Description of Artificial Sequence: Synthetic oligonucleotide
gguaggacggagaaaaggu

SEQ ID NO: 83538 - RNA, 19 nt, Artificial Sequence
  Description of Artificial Sequence: Synthetic oligonucleotide
ggacaacaucccuugggac

SEQ ID NO: 83539 - RNA, 19 nt, Artificial Sequence
  Description of Artificial Sequence: Synthetic oligonucleotide
guacgaugcuccagcuggg

SEQ ID NO: 83540 - RNA, 19 nt, Artificial Sequence
  Description of Artificial Sequence: Synthetic oligonucleotide
ggacuuccagaucggcggg

SEQ ID NO: 83541 - RNA, 19 nt, Artificial Sequence
  Description of Artificial Sequence: Synthetic oligonucleotide
auucugcguaccagggaag

SEQ ID NO: 83542 - RNA, 19 nt, Artificial Sequence
  Description of Artificial Sequence: Synthetic oligonucleotide
gagaaaggguacaaggguu

SEQ ID NO: 83543 - RNA, 19 nt, Artificial Sequence
  Description of Artificial Sequence: Synthetic oligonucleotide
aguguacgaaucauuucuu

SEQ ID NO: 83544 - RNA, 19 nt, Artificial Sequence
  Description of Artificial Sequence: Synthetic oligonucleotide
gaugacuuuggugggcaua

SEQ ID NO: 83545 - RNA, 19 nt, Artificial Sequence
  Description of Artificial Sequence: Synthetic oligonucleotide
uacgaugcuccagcuggga

SEQ ID NO: 83546 - RNA, 19 nt, Artificial Sequence
  Description of Artificial Sequence: Synthetic oligonucleotide
ccuaggaaucucagcuggg

SEQ ID NO: 83547 - RNA, 19 nt, Artificial Sequence
  Description of Artificial Sequence: Synthetic oligonucleotide
acauaagggucuauacauu

SEQ ID NO: 83548 - RNA, 19 nt, Artificial Sequence
  Description of Artificial Sequence: Synthetic oligonucleotide
gucugaacguugacaggug

SEQ ID NO: 83549 - RNA, 19 nt, Artificial Sequence
  Description of Artificial Sequence: Synthetic oligonucleotide
gacgaggguuuaggauugg

SEQ ID NO: 83550 - RNA, 19 nt, Artificial Sequence
  Description of Artificial Sequence: Synthetic oligonucleotide
agguaggacaacaucccuu

SEQ ID NO: 83551 - RNA, 19 nt, Artificial Sequence
  Description of Artificial Sequence: Synthetic oligonucleotide
guuuaggauugggugacua

SEQ ID NO: 83552 - RNA, 19 nt, Artificial Sequence
  Description of Artificial Sequence: Synthetic oligonucleotide
caguaggcuccaagcuccc

SEQ ID NO: 83553 - RNA, 19 nt, Artificial Sequence
  Description of Artificial Sequence: Synthetic oligonucleotide
gguguagaaccaaggcuac

SEQ ID NO: 83554 - RNA, 19 nt, Artificial Sequence
  Description of Artificial Sequence: Synthetic oligonucleotide
caaccccugaaugugagcu

SEQ ID NO: 83555 - RNA, 19 nt, Artificial Sequence
  Description of Artificial Sequence: Synthetic oligonucleotide
gccuucugucauaauguag

SEQ ID NO: 83556 - RNA, 19 nt, Artificial Sequence
  Description of Artificial Sequence: Synthetic oligonucleotide
uccgucgccuuguucuuuu

SEQ ID NO: 83557 - RNA, 19 nt, Artificial Sequence
  Description of Artificial Sequence: Synthetic oligonucleotide
cuguacauaagggucuaua

SEQ ID NO: 83558 - RNA, 19 nt, Artificial Sequence
  Description of Artificial Sequence: Synthetic oligonucleotide
caggugcugccugggaacc

SEQ ID NO: 83559 - RNA, 19 nt, Artificial Sequence
  Description of Artificial Sequence: Synthetic oligonucleotide
cuccccauaaggccacuga

SEQ ID NO: 83560 - RNA, 19 nt, Artificial Sequence
  Description of Artificial Sequence: Synthetic oligonucleotide
ggacgaggguuuaggauug

SEQ ID NO: 83561 - RNA, 19 nt, Artificial Sequence
  Description of Artificial Sequence: Synthetic oligonucleotide
agaggacggcuuguucgag

SEQ ID NO: 83562 - RNA, 19 nt, Artificial Sequence
  Description of Artificial Sequence: Synthetic oligonucleotide
guaccagggaaggucgguc

SEQ ID NO: 83563 - RNA, 19 nt, Artificial Sequence
  Description of Artificial Sequence: Synthetic oligonucleotide
ccuuacuaaaucggcuggc

SEQ ID NO: 83564 - RNA, 19 nt, Artificial Sequence
  Description of Artificial Sequence: Synthetic oligonucleotide
guacaaccccugaauguga

SEQ ID NO: 83565 - RNA, 19 nt, Artificial Sequence
  Description of Artificial Sequence: Synthetic oligonucleotide
gggaacauucugaggaguc

SEQ ID NO: 83566 - RNA, 19 nt, Artificial Sequence
  Description of Artificial Sequence: Synthetic oligonucleotide
cugaacguugacaggugcu

SEQ ID NO: 83567 - RNA, 19 nt, Artificial Sequence
  Description of Artificial Sequence: Synthetic oligonucleotide
cagagauuauccucccacu

SEQ ID NO: 83568 - RNA, 19 nt, Artificial Sequence
  Description of Artificial Sequence: Synthetic oligonucleotide
guagguauauggguccccu

SEQ ID NO: 83569 - RNA, 19 nt, Artificial Sequence
  Description of Artificial Sequence: Synthetic oligonucleotide
aggcugauagaaggaugcu

SEQ ID NO: 83570 - RNA, 19 nt, Artificial Sequence
  Description of Artificial Sequence: Synthetic oligonucleotide
aguucacgguagguauaug

SEQ ID NO: 83571 - RNA, 19 nt, Artificial Sequence
  Description of Artificial Sequence: Synthetic oligonucleotide
ucccuuguauuuggaccgu

SEQ ID NO: 83572 - RNA, 19 nt, Artificial Sequence
  Description of Artificial Sequence: Synthetic oligonucleotide
uaucgcugagacggugauc

SEQ ID NO: 83573 - RNA, 19 nt, Artificial Sequence
  Description of Artificial Sequence: Synthetic oligonucleotide
cacguuuacuauccccaaa

SEQ ID NO: 83574 - RNA, 19 nt, Artificial Sequence
  Description of Artificial Sequence: Synthetic oligonucleotide
aggacggagaaaagguguu

SEQ ID NO: 83575 - RNA, 19 nt, Artificial Sequence
  Description of Artificial Sequence: Synthetic oligonucleotide
gguauaggagcaaaauaau

SEQ ID NO: 83576 - RNA, 19 nt, Artificial Sequence
  Description of Artificial Sequence: Synthetic oligonucleotide
gguagguauaugggucccc

SEQ ID NO: 83577 - RNA, 19 nt, Artificial Sequence
  Description of Artificial Sequence: Synthetic oligonucleotide
gaccgcuguaaugucgaaa

SEQ ID NO: 83578 - RNA, 19 nt, Artificial Sequence
  Description of Artificial Sequence: Synthetic oligonucleotide
agaucggcgggagcugaca

SEQ ID NO: 83579 - RNA, 19 nt, Artificial Sequence
  Description of Artificial Sequence: Synthetic oligonucleotide
aaaagcccgggcagagauu

SEQ ID NO: 83580 - RNA, 19 nt, Artificial Sequence
  Description of Artificial Sequence: Synthetic oligonucleotide
cuugcgcaugccuuggaau

SEQ ID NO: 83581 - RNA, 19 nt, Artificial Sequence
  Description of Artificial Sequence: Synthetic oligonucleotide
gggaaaccaauuggugaug

SEQ ID NO: 83582 - RNA, 19 nt, Artificial Sequence
  Description of Artificial Sequence: Synthetic oligonucleotide
auccgucguccaccaagca

SEQ ID NO: 83583 - RNA, 19 nt, Artificial Sequence
  Description of Artificial Sequence: Synthetic oligonucleotide
cuaugccuuccuucacaga

SEQ ID NO: 83584 - RNA, 19 nt, Artificial Sequence
  Description of Artificial Sequence: Synthetic oligonucleotide
ccgggaacauucugaggag

SEQ ID NO: 83585 - RNA, 19 nt, Artificial Sequence
  Description of Artificial Sequence: Synthetic oligonucleotide
acggcaccuugucaagguu

SEQ ID NO: 83586 - RNA, 19 nt, Artificial Sequence
  Description of Artificial Sequence: Synthetic oligonucleotide
agcuccgcccugacgcagg

SEQ ID NO: 83587 - RNA, 19 nt, Artificial Sequence
  Description of Artificial Sequence: Synthetic oligonucleotide
guaguucacgguagguaua

SEQ ID NO: 83588 - RNA, 19 nt, Artificial Sequence
  Description of Artificial Sequence: Synthetic oligonucleotide
ggcuagaaagaagagguuu

SEQ ID NO: 83589 - RNA, 19 nt, Artificial Sequence
  Description of Artificial Sequence: Synthetic oligonucleotide
guagaggagccaugucuau

SEQ ID NO: 83590 - RNA, 19 nt, Artificial Sequence
  Description of Artificial Sequence: Synthetic oligonucleotide
gcacggcaccuugucaagg

SEQ ID NO: 83591 - RNA, 19 nt, Artificial Sequence
  Description of Artificial Sequence: Synthetic oligonucleotide
acgauuguucugggacagu

SEQ ID NO: 83592 - RNA, 19 nt, Artificial Sequence
  Description of Artificial Sequence: Synthetic oligonucleotide
ggacuaacccugggugaag

SEQ ID NO: 83593 - RNA, 19 nt, Artificial Sequence
  Description of Artificial Sequence: Synthetic oligonucleotide
aggcuagaaagaagagguu

SEQ ID NO: 83594 - RNA, 19 nt, Artificial Sequence
  Description of Artificial Sequence: Synthetic oligonucleotide
accgguugacccagaaguu

SEQ ID NO: 83595 - RNA, 19 nt, Artificial Sequence
  Description of Artificial Sequence: Synthetic oligonucleotide
gcugcuuuagaucgauaau

SEQ ID NO: 83596 - RNA, 19 nt, Artificial Sequence
  Description of Artificial Sequence: Synthetic oligonucleotide
cacggcaccuugucaaggu

SEQ ID NO: 83597 - RNA, 19 nt, Artificial Sequence
  Description of Artificial Sequence: Synthetic oligonucleotide
ggaacauucugaggagucu

SEQ ID NO: 83598 - RNA, 19 nt, Artificial Sequence
  Description of Artificial Sequence: Synthetic oligonucleotide
gccaauccgucguccacca

SEQ ID NO: 83599 - RNA, 19 nt, Artificial Sequence
  Description of Artificial Sequence: Synthetic oligonucleotide
ccuuaucgcugagacggug

SEQ ID NO: 83600 - RNA, 19 nt, Artificial Sequence
  Description of Artificial Sequence: Synthetic oligonucleotide
gcuugcgcaugccuuggaa

SEQ ID NO: 83601 - RNA, 19 nt, Artificial Sequence
  Description of Artificial Sequence: Synthetic oligonucleotide
cuaaaucggcuggcagaga

SEQ ID NO: 83602 - RNA, 19 nt, Artificial Sequence
  Description of Artificial Sequence: Synthetic oligonucleotide
gucguaggagaagagucuu

SEQ ID NO: 83603 - RNA, 19 nt, Artificial Sequence
  Description of Artificial Sequence: Synthetic oligonucleotide
ccaccuuacuaaaucggcu

SEQ ID NO: 83604 - RNA, 19 nt, Artificial Sequence
  Description of Artificial Sequence: Synthetic oligonucleotide
gguccugaugggaaaccaa

SEQ ID NO: 83605 - RNA, 19 nt, Artificial Sequence
  Description of Artificial Sequence: Synthetic oligonucleotide
cugguacgaugcuccagcu

SEQ ID NO: 83606 - RNA, 19 nt, Artificial Sequence
  Description of Artificial Sequence: Synthetic oligonucleotide
gaguccgucucugguucua

SEQ ID NO: 83607 - RNA, 19 nt, Artificial Sequence
  Description of Artificial Sequence: Synthetic oligonucleotide
acggcuuguucgagaccug

SEQ ID NO: 83608 - RNA, 19 nt, Artificial Sequence
  Description of Artificial Sequence: Synthetic oligonucleotide
ggccuaacuaauagcuacu

SEQ ID NO: 83609 - RNA, 19 nt, Artificial Sequence
  Description of Artificial Sequence: Synthetic oligonucleotide
gcaggccgaacaauaggaa

SEQ ID NO: 83610 - RNA, 19 nt, Artificial Sequence
  Description of Artificial Sequence: Synthetic oligonucleotide
cugaaccgguugacccaga

SEQ ID NO: 83611 - RNA, 19 nt, Artificial Sequence
  Description of Artificial Sequence: Synthetic oligonucleotide
gcuauccuauacguauaua

SEQ ID NO: 83612 - RNA, 19 nt, Artificial Sequence
  Description of Artificial Sequence: Synthetic oligonucleotide
aagcccgggcagagauuau

SEQ ID NO: 83613 - RNA, 19 nt, Artificial Sequence
  Description of Artificial Sequence: Synthetic oligonucleotide
gccaugaagggaguugaau

SEQ ID NO: 83614 - RNA, 19 nt, Artificial Sequence
  Description of Artificial Sequence: Synthetic oligonucleotide
ccgcccugacgcaggguag

SEQ ID NO: 83615 - RNA, 19 nt, Artificial Sequence
  Description of Artificial Sequence: Synthetic oligonucleotide
gcuccccauaaggccacug

SEQ ID NO: 83616 - RNA, 19 nt, Artificial Sequence
  Description of Artificial Sequence: Synthetic oligonucleotide
ggccgaacaauaggaacau

SEQ ID NO: 83617 - RNA, 19 nt, Artificial Sequence
  Description of Artificial Sequence: Synthetic oligonucleotide
ccuaacuaauagcuacuuu

SEQ ID NO: 83618 - RNA, 19 nt, Artificial Sequence
  Description of Artificial Sequence: Synthetic oligonucleotide
ccuuggauguagguagucu

SEQ ID NO: 83619 - RNA, 19 nt, Artificial Sequence
  Description of Artificial Sequence: Synthetic oligonucleotide
gguugacccagaaguuccu

SEQ ID NO: 83620 - RNA, 19 nt, Artificial Sequence
  Description of Artificial Sequence: Synthetic oligonucleotide
cguuuacuauccccaaacu

SEQ ID NO: 83621 - RNA, 19 nt, Artificial Sequence
  Description of Artificial Sequence: Synthetic oligonucleotide
gcucacuaguuuguugaau

SEQ ID NO: 83622 - RNA, 19 nt, Artificial Sequence
  Description of Artificial Sequence: Synthetic oligonucleotide
gcgcaugccuuggaaugga

SEQ ID NO: 83623 - RNA, 19 nt, Artificial Sequence
  Description of Artificial Sequence: Synthetic oligonucleotide
gccuaacuaauagcuacuu

SEQ ID NO: 83624 - RNA, 19 nt, Artificial Sequence
  Description of Artificial Sequence: Synthetic oligonucleotide
ccggaucacugaggugggg

SEQ ID NO: 83625 - RNA, 19 nt, Artificial Sequence
  Description of Artificial Sequence: Synthetic oligonucleotide
ggaguccgucucugguucu

SEQ ID NO: 83626 - RNA, 19 nt, Artificial Sequence
  Description of Artificial Sequence: Synthetic oligonucleotide
cagcacucagggguuuccu

SEQ ID NO: 83627 - RNA, 19 nt, Artificial Sequence
  Description of Artificial Sequence: Synthetic oligonucleotide
ccagaucggcgggagcuga

SEQ ID NO: 83628 - RNA, 19 nt, Artificial Sequence
  Description of Artificial Sequence: Synthetic oligonucleotide
ggaccguguaggcuccauu

SEQ ID NO: 83629 - RNA, 19 nt, Artificial Sequence
  Description of Artificial Sequence: Synthetic oligonucleotide
cuccuuugacugguacgau

SEQ ID NO: 83630 - RNA, 19 nt, Artificial Sequence
  Description of Artificial Sequence: Synthetic oligonucleotide
cccugaccggcuuggguua

SEQ ID NO: 83631 - RNA, 19 nt, Artificial Sequence
  Description of Artificial Sequence: Synthetic oligonucleotide
cgagaccugcaagucucuc

SEQ ID NO: 83632 - RNA, 19 nt, Artificial Sequence
  Description of Artificial Sequence: Synthetic oligonucleotide
gguugcuaauguggguguu

SEQ ID NO: 83633 - RNA, 19 nt, Artificial Sequence
  Description of Artificial Sequence: Synthetic oligonucleotide
ccaagcaggcgaagaccau

SEQ ID NO: 83634 - RNA, 19 nt, Artificial Sequence
  Description of Artificial Sequence: Synthetic oligonucleotide
guccgucgccuuguucuuu

SEQ ID NO: 83635 - RNA, 19 nt, Artificial Sequence
  Description of Artificial Sequence: Synthetic oligonucleotide
ccaauccgucguccaccaa

SEQ ID NO: 83636 - RNA, 19 nt, Artificial Sequence
  Description of Artificial Sequence: Synthetic oligonucleotide
cuccgcccugacgcagggu

SEQ ID NO: 83637 - RNA, 19 nt, Artificial Sequence
  Description of Artificial Sequence: Synthetic oligonucleotide
aaaugaucccaccuaauac

SEQ ID NO: 83638 - RNA, 19 nt, Artificial Sequence
  Description of Artificial Sequence: Synthetic oligonucleotide
uuuaguaauccccugaaga

SEQ ID NO: 83639 - RNA, 19 nt, Artificial Sequence
  Description of Artificial Sequence: Synthetic oligonucleotide
aguaauccgagguauaacg

SEQ ID NO: 83640 - RNA, 19 nt, Artificial Sequence
  Description of Artificial Sequence: Synthetic oligonucleotide
ugcuauuagauccauaacu

SEQ ID NO: 83641 - RNA, 19 nt, Artificial Sequence
  Description of Artificial Sequence: Synthetic oligonucleotide
uaacugaugaugaagccag

SEQ ID NO: 83642 - RNA, 19 nt, Artificial Sequence
  Description of Artificial Sequence: Synthetic oligonucleotide
aaugaucccaccuaauacu

SEQ ID NO: 83643 - RNA, 19 nt, Artificial Sequence
  Description of Artificial Sequence: Synthetic oligonucleotide
agcuagaucagauuuguuc

SEQ ID NO: 83644 - RNA, 19 nt, Artificial Sequence
  Description of Artificial Sequence: Synthetic oligonucleotide
aguuaauuccagaagaaac

SEQ ID NO: 83645 - RNA, 19 nt, Artificial Sequence
  Description of Artificial Sequence: Synthetic oligonucleotide
aucacacacacacacacac

SEQ ID NO: 83646 - RNA, 19 nt, Artificial Sequence
  Description of Artificial Sequence: Synthetic oligonucleotide
uaugaaaucaggcuacagu

SEQ ID NO: 83647 - RNA, 19 nt, Artificial Sequence
  Description of Artificial Sequence: Synthetic oligonucleotide
guaauagacucacaguagg

SEQ ID NO: 83648 - RNA, 19 nt, Artificial Sequence
  Description of Artificial Sequence: Synthetic oligonucleotide
uuucaucacacacacacac

SEQ ID NO: 83649 - RNA, 19 nt, Artificial Sequence
  Description of Artificial Sequence: Synthetic oligonucleotide
aaauucaauaacugaggca

SEQ ID NO: 83650 - RNA, 19 nt, Artificial Sequence
  Description of Artificial Sequence: Synthetic oligonucleotide
uuagauccauaacugauga

SEQ ID NO: 83651 - RNA, 19 nt, Artificial Sequence
  Description of Artificial Sequence: Synthetic oligonucleotide
gauucagggucuucgaggg

SEQ ID NO: 83652 - RNA, 19 nt, Artificial Sequence
  Description of Artificial Sequence: Synthetic oligonucleotide
ucuacaaauccugaaaaug

SEQ ID NO: 83653 - RNA, 19 nt, Artificial Sequence
  Description of Artificial Sequence: Synthetic oligonucleotide
caaucaguacagaacaucc

SEQ ID NO: 83654 - RNA, 19 nt, Artificial Sequence
  Description of Artificial Sequence: Synthetic oligonucleotide
uaauagacucacaguaggg

SEQ ID NO: 83655 - RNA, 19 nt, Artificial Sequence
  Description of Artificial Sequence: Synthetic oligonucleotide
ucuagaugcucccacagga

SEQ ID NO: 83656 - RNA, 19 nt, Artificial Sequence
  Description of Artificial Sequence: Synthetic oligonucleotide
auuaaccugauaugguuuc

SEQ ID NO: 83657 - RNA, 19 nt, Artificial Sequence
  Description of Artificial Sequence: Synthetic oligonucleotide
ugauucagggucuucgagg

SEQ ID NO: 83658 - RNA, 19 nt, Artificial Sequence
  Description of Artificial Sequence: Synthetic oligonucleotide
uaauccgagguauaacggg

SEQ ID NO: 83659 - RNA, 19 nt, Artificial Sequence
  Description of Artificial Sequence: Synthetic oligonucleotide
acacgcuacaucucuaagc

SEQ ID NO: 83660 - RNA, 19 nt, Artificial Sequence
  Description of Artificial Sequence: Synthetic oligonucleotide
ucaucacacacacacacac

SEQ ID NO: 83661 - RNA, 19 nt, Artificial Sequence
  Description of Artificial Sequence: Synthetic oligonucleotide
uuauuacucaugaugugac

SEQ ID NO: 83662 - RNA, 19 nt, Artificial Sequence
  Description of Artificial Sequence: Synthetic oligonucleotide
acggccacaaaacuagagc

SEQ ID NO: 83663 - RNA, 19 nt, Artificial Sequence
  Description of Artificial Sequence: Synthetic oligonucleotide
guuaaugcgucucucuggg

SEQ ID NO: 83664 - RNA, 19 nt, Artificial Sequence
  Description of Artificial Sequence: Synthetic oligonucleotide
uuacccagggcacacagug

SEQ ID NO: 83665 - RNA, 19 nt, Artificial Sequence
  Description of Artificial Sequence: Synthetic oligonucleotide
uuuauuaaggcaccugcau

SEQ ID NO: 83666 - RNA, 19 nt, Artificial Sequence
  Description of Artificial Sequence: Synthetic oligonucleotide
uacaagguaguuacaacca

SEQ ID NO: 83667 - RNA, 19 nt, Artificial Sequence
  Description of Artificial Sequence: Synthetic oligonucleotide
agauccauaacugaugaug

SEQ ID NO: 83668 - RNA, 19 nt, Artificial Sequence
  Description of Artificial Sequence: Synthetic oligonucleotide
uuaguaauccccugaagaa

SEQ ID NO: 83669 - RNA, 19 nt, Artificial Sequence
  Description of Artificial Sequence: Synthetic oligonucleotide
cuucgagggaaucugagag

SEQ ID NO: 83670 - RNA, 19 nt, Artificial Sequence
  Description of Artificial Sequence: Synthetic oligonucleotide
agguaauagacucacagua

SEQ ID NO: 83671 - RNA, 19 nt, Artificial Sequence
  Description of Artificial Sequence: Synthetic oligonucleotide
gaauguauguaagaguuca

SEQ ID NO: 83672 - RNA, 19 nt, Artificial Sequence
  Description of Artificial Sequence: Synthetic oligonucleotide
accuaauacucccugagca

SEQ ID NO: 83673 - RNA, 19 nt, Artificial Sequence
  Description of Artificial Sequence: Synthetic oligonucleotide
acaucucuaagcuaccuca

SEQ ID NO: 83674 - RNA, 19 nt, Artificial Sequence
  Description of Artificial Sequence: Synthetic oligonucleotide
augauaucggcccuggcug

SEQ ID NO: 83675 - RNA, 19 nt, Artificial Sequence
  Description of Artificial Sequence: Synthetic oligonucleotide
uccaauuugauugauucuc

SEQ ID NO: 83676 - RNA, 19 nt, Artificial Sequence
  Description of Artificial Sequence: Synthetic oligonucleotide
uuauuaaggcaccugcauc

SEQ ID NO: 83677 - RNA, 19 nt, Artificial Sequence
  Description of Artificial Sequence: Synthetic oligonucleotide
agcuccuaaauauuuugag

SEQ ID NO: 83678 - RNA, 19 nt, Artificial Sequence
  Description of Artificial Sequence: Synthetic oligonucleotide
ugugguuccaugaaacguc

SEQ ID NO: 83679 - RNA, 19 nt, Artificial Sequence
  Description of Artificial Sequence: Synthetic oligonucleotide
gacaacauagcugucugcc

SEQ ID NO: 83680 - RNA, 19 nt, Artificial Sequence
  Description of Artificial Sequence: Synthetic oligonucleotide
agacuuaucagugaguuaa

SEQ ID NO: 83681 - RNA, 19 nt, Artificial Sequence
  Description of Artificial Sequence: Synthetic oligonucleotide
caagucagcgagcugagag

SEQ ID NO: 83682 - RNA, 19 nt, Artificial Sequence
  Description of Artificial Sequence: Synthetic oligonucleotide
aauuguuuaaagcccuguu

SEQ ID NO: 83683 - RNA, 19 nt, Artificial Sequence
  Description of Artificial Sequence: Synthetic oligonucleotide
gaucccaccuaauacuccc

SEQ ID NO: 83684 - RNA, 19 nt, Artificial Sequence
  Description of Artificial Sequence: Synthetic oligonucleotide
ucugccuaacauacuaucu

SEQ ID NO: 83685 - RNA, 19 nt, Artificial Sequence
  Description of Artificial Sequence: Synthetic oligonucleotide
ugcucgauaccauagcuaa

SEQ ID NO: 83686 - RNA, 19 nt, Artificial Sequence
  Description of Artificial Sequence: Synthetic oligonucleotide
cacucaaucaguacagaac

SEQ ID NO: 83687 - RNA, 19 nt, Artificial Sequence
  Description of Artificial Sequence: Synthetic oligonucleotide
ucucuagaugcucccacag

SEQ ID NO: 83688 - RNA, 19 nt, Artificial Sequence
  Description of Artificial Sequence: Synthetic oligonucleotide
ucuuauuacucaugaugug

SEQ ID NO: 83689 - RNA, 19 nt, Artificial Sequence
  Description of Artificial Sequence: Synthetic oligonucleotide
acuugugguuccaugaaac

SEQ ID NO: 83690 - RNA, 19 nt, Artificial Sequence
  Description of Artificial Sequence: Synthetic oligonucleotide
gaugugacaaguccuccug

SEQ ID NO: 83691 - RNA, 19 nt, Artificial Sequence
  Description of Artificial Sequence: Synthetic oligonucleotide
agugccgcuccguucauac

SEQ ID NO: 83692 - RNA, 19 nt, Artificial Sequence
  Description of Artificial Sequence: Synthetic oligonucleotide
gacugcagguaauagacuc

SEQ ID NO: 83693 - RNA, 19 nt, Artificial Sequence
  Description of Artificial Sequence: Synthetic oligonucleotide
auagacucacaguagggga

SEQ ID NO: 83694 - RNA, 19 nt, Artificial Sequence
  Description of Artificial Sequence: Synthetic oligonucleotide
cuugugguuccaugaaacg

SEQ ID NO: 83695 - RNA, 19 nt, Artificial Sequence
  Description of Artificial Sequence: Synthetic oligonucleotide
gauuucaccacgaagguua

SEQ ID NO: 83696 - RNA, 19 nt, Artificial Sequence
  Description of Artificial Sequence: Synthetic oligonucleotide
cugaugaaagauuggcaag

SEQ ID NO: 83697 - RNA, 19 nt, Artificial Sequence
  Description of Artificial Sequence: Synthetic oligonucleotide
ugccgcuccguucauacag

SEQ ID NO: 83698 - RNA, 19 nt, Artificial Sequence
  Description of Artificial Sequence: Synthetic oligonucleotide
cacacacacacacacacac

SEQ ID NO: 83699 - RNA, 19 nt, Artificial Sequence
  Description of Artificial Sequence: Synthetic oligonucleotide
gcagguaauagacucacag

SEQ ID NO: 83700 - RNA, 19 nt, Artificial Sequence
  Description of Artificial Sequence: Synthetic oligonucleotide
cacacacacacacacacug

SEQ ID NO: 83701 - RNA, 19 nt, Artificial Sequence
  Description of Artificial Sequence: Synthetic oligonucleotide
guaguuacaaccaggcaug

SEQ ID NO: 83702 - RNA, 19 nt, Artificial Sequence
  Description of Artificial Sequence: Synthetic oligonucleotide
uauauagcugggauguuuu

SEQ ID NO: 83703 - RNA, 19 nt, Artificial Sequence
  Description of Artificial Sequence: Synthetic oligonucleotide
cccaauuagagcuuaagac

SEQ ID NO: 83704 - RNA, 19 nt, Artificial Sequence
  Description of Artificial Sequence: Synthetic oligonucleotide
auuagauccauaacugaug

SEQ ID NO: 83705 - RNA, 19 nt, Artificial Sequence
  Description of Artificial Sequence: Synthetic oligonucleotide
cacacacacacacacugcc

SEQ ID NO: 83706 - RNA, 19 nt, Artificial Sequence
  Description of Artificial Sequence: Synthetic oligonucleotide
aagauuggcaagacuuauc

SEQ ID NO: 83707 - RNA, 19 nt, Artificial Sequence
  Description of Artificial Sequence: Synthetic oligonucleotide
caugaugugacaaguccuc

SEQ ID NO: 83708 - RNA, 19 nt, Artificial Sequence
  Description of Artificial Sequence: Synthetic oligonucleotide
agcugucugccuaacauac

SEQ ID NO: 83709 - RNA, 19 nt, Artificial Sequence
  Description of Artificial Sequence: Synthetic oligonucleotide
guaauccgagguauaacgg

SEQ ID NO: 83710 - RNA, 19 nt, Artificial Sequence
  Description of Artificial Sequence: Synthetic oligonucleotide
gauccauaacugaugauga

SEQ ID NO: 83711 - RNA, 19 nt, Artificial Sequence
  Description of Artificial Sequence: Synthetic oligonucleotide
aaagauuggcaagacuuau

SEQ ID NO: 83712 - RNA, 19 nt, Artificial Sequence
  Description of Artificial Sequence: Synthetic oligonucleotide
auacuaucuacaaauccug

SEQ ID NO: 83713 - RNA, 19 nt, Artificial Sequence
  Description of Artificial Sequence: Synthetic oligonucleotide
aggaggauuauuugggaaa

SEQ ID NO: 83714 - RNA, 19 nt, Artificial Sequence
  Description of Artificial Sequence: Synthetic oligonucleotide
ucucauacuugagggacag

SEQ ID NO: 83715 - RNA, 19 nt, Artificial Sequence
  Description of Artificial Sequence: Synthetic oligonucleotide
uucaucacacacacacaca

SEQ ID NO: 83716 - RNA, 19 nt, Artificial Sequence
  Description of Artificial Sequence: Synthetic oligonucleotide
agguuaaugcgucucucug

SEQ ID NO: 83717 - RNA, 19 nt, Artificial Sequence
  Description of Artificial Sequence: Synthetic oligonucleotide
uuacccgccgucuugugga

SEQ ID NO: 83718 - RNA, 19 nt, Artificial Sequence
  Description of Artificial Sequence: Synthetic oligonucleotide
aagagcaucuggccagaug

SEQ ID NO: 83719 - RNA, 19 nt, Artificial Sequence
  Description of Artificial Sequence: Synthetic oligonucleotide
gaauugaauaggagaggag

SEQ ID NO: 83720 - RNA, 19 nt, Artificial Sequence
  Description of Artificial Sequence: Synthetic oligonucleotide
ugaaacgucuuuggaaugu

SEQ ID NO: 83721 - RNA, 19 nt, Artificial Sequence
  Description of Artificial Sequence: Synthetic oligonucleotide
gguuaaugcgucucucugg

SEQ ID NO: 83722 - RNA, 19 nt, Artificial Sequence
  Description of Artificial Sequence: Synthetic oligonucleotide
cacacacacacacugccag

SEQ ID NO: 83723 - RNA, 19 nt, Artificial Sequence
  Description of Artificial Sequence: Synthetic oligonucleotide
ucuucgagggaaucugaga

SEQ ID NO: 83724 - RNA, 19 nt, Artificial Sequence
  Description of Artificial Sequence: Synthetic oligonucleotide
aauccgagguauaacggga

SEQ ID NO: 83725 - RNA, 19 nt, Artificial Sequence
  Description of Artificial Sequence: Synthetic oligonucleotide
augaugugacaaguccucc

SEQ ID NO: 83726 - RNA, 19 nt, Artificial Sequence
  Description of Artificial Sequence: Synthetic oligonucleotide
auugaauaggagaggagga

SEQ ID NO: 83727 - RNA, 19 nt, Artificial Sequence
  Description of Artificial Sequence: Synthetic oligonucleotide
ugaugugacaaguccuccu

SEQ ID NO: 83728 - RNA, 19 nt, Artificial Sequence
  Description of Artificial Sequence: Synthetic oligonucleotide
uugugguuccaugaaacgu

SEQ ID NO: 83729 - RNA, 19 nt, Artificial Sequence
  Description of Artificial Sequence: Synthetic oligonucleotide
gaucucuagaugcucccac

SEQ ID NO: 83730 - RNA, 19 nt, Artificial Sequence
  Description of Artificial Sequence: Synthetic oligonucleotide
aacgggauucuggauaggu

SEQ ID NO: 83731 - RNA, 19 nt, Artificial Sequence
  Description of Artificial Sequence: Synthetic oligonucleotide
uaauuguuuaaagcccugu

SEQ ID NO: 83732 - RNA, 19 nt, Artificial Sequence
  Description of Artificial Sequence: Synthetic oligonucleotide
cuauuagauccauaacuga

SEQ ID NO: 83733 - RNA, 19 nt, Artificial Sequence
  Description of Artificial Sequence: Synthetic oligonucleotide
ugaucccaccuaauacucc

SEQ ID NO: 83734 - RNA, 19 nt, Artificial Sequence
  Description of Artificial Sequence: Synthetic oligonucleotide
augaaagauuggcaagacu

SEQ ID NO: 83735 - RNA, 19 nt, Artificial Sequence
  Description of Artificial Sequence: Synthetic oligonucleotide
augacggaaggguagucgu

SEQ ID NO: 83736 - RNA, 19 nt, Artificial Sequence
  Description of Artificial Sequence: Synthetic oligonucleotide
cugaacucauucacagccc

SEQ ID NO: 83737 - RNA, 19 nt, Artificial Sequence
  Description of Artificial Sequence: Synthetic oligonucleotide
gaugaaagauuggcaagac

SEQ ID NO: 83738 - RNA, 19 nt, Artificial Sequence
  Description of Artificial Sequence: Synthetic oligonucleotide
gguaauagacucacaguag

SEQ ID NO: 83739 - RNA, 19 nt, Artificial Sequence
  Description of Artificial Sequence: Synthetic oligonucleotide
augaucccaccuaauacuc

SEQ ID NO: 83740 - RNA, 19 nt, Artificial Sequence
  Description of Artificial Sequence: Synthetic oligonucleotide
ggauagguaggguugacuc

SEQ ID NO: 83741 - RNA, 19 nt, Artificial Sequence
  Description of Artificial Sequence: Synthetic oligonucleotide
uacuugugguuccaugaaa

SEQ ID NO: 83742 - RNA, 19 nt, Artificial Sequence
  Description of Artificial Sequence: Synthetic oligonucleotide
uccauggacaagaguuaug

SEQ ID NO: 83743 - RNA, 19 nt, Artificial Sequence
  Description of Artificial Sequence: Synthetic oligonucleotide
cuuacccgccgucuugugg

SEQ ID NO: 83744 - RNA, 19 nt, Artificial Sequence
  Description of Artificial Sequence: Synthetic oligonucleotide
ucacacacacacacacaca

SEQ ID NO: 83745 - RNA, 19 nt, Artificial Sequence
  Description of Artificial Sequence: Synthetic oligonucleotide
aaaacacuuuuggaccccu

SEQ ID NO: 83746 - RNA, 19 nt, Artificial Sequence
  Description of Artificial Sequence: Synthetic oligonucleotide
caugaaacgucuuuggaau

SEQ ID NO: 83747 - RNA, 19 nt, Artificial Sequence
  Description of Artificial Sequence: Synthetic oligonucleotide
acaucuuuucaccccaaua

SEQ ID NO: 83748 - RNA, 19 nt, Artificial Sequence
  Description of Artificial Sequence: Synthetic oligonucleotide
aagacuuaucagugaguua

SEQ ID NO: 83749 - RNA, 19 nt, Artificial Sequence
  Description of Artificial Sequence: Synthetic oligonucleotide
acacacacacacacacugc

SEQ ID NO: 83750 - RNA, 19 nt, Artificial Sequence
  Description of Artificial Sequence: Synthetic oligonucleotide
uaccauagcuaaugaagua

SEQ ID NO: 83751 - RNA, 19 nt, Artificial Sequence
  Description of Artificial Sequence: Synthetic oligonucleotide
uucgagggaaucugagagu

SEQ ID NO: 83752 - RNA, 19 nt, Artificial Sequence
  Description of Artificial Sequence: Synthetic oligonucleotide
caccuaauacucccugagc

SEQ ID NO: 83753 - RNA, 19 nt, Artificial Sequence
  Description of Artificial Sequence: Synthetic oligonucleotide
auauauagcugggauguuu

SEQ ID NO: 83754 - RNA, 19 nt, Artificial Sequence
  Description of Artificial Sequence: Synthetic oligonucleotide
ggagugcagcgucugauag

SEQ ID NO: 83755 - RNA, 19 nt, Artificial Sequence
  Description of Artificial Sequence: Synthetic oligonucleotide
gucugccuaacauacuauc

SEQ ID NO: 83756 - RNA, 19 nt, Artificial Sequence
  Description of Artificial Sequence: Synthetic oligonucleotide
ugucugccuaacauacuau

SEQ ID NO: 83757 - RNA, 19 nt, Artificial Sequence
  Description of Artificial Sequence: Synthetic oligonucleotide
agaugauacaagguaguua

SEQ ID NO: 83758 - RNA, 19 nt, Artificial Sequence
  Description of Artificial Sequence: Synthetic oligonucleotide
agagcuccauguagggagc

SEQ ID NO: 83759 - RNA, 19 nt, Artificial Sequence
  Description of Artificial Sequence: Synthetic oligonucleotide
cagcaugaauugaauagga

SEQ ID NO: 83760 - RNA, 19 nt, Artificial Sequence
  Description of Artificial Sequence: Synthetic oligonucleotide
cuaagcuaccucaguucug

SEQ ID NO: 83761 - RNA, 19 nt, Artificial Sequence
  Description of Artificial Sequence: Synthetic oligonucleotide
gaacuuguugccccaccca

SEQ ID NO: 83762 - RNA, 19 nt, Artificial Sequence
  Description of Artificial Sequence: Synthetic oligonucleotide
aauguauguaagaguucaa

SEQ ID NO: 83763 - RNA, 19 nt, Artificial Sequence
  Description of Artificial Sequence: Synthetic oligonucleotide
aguagucugucugcaaggu

SEQ ID NO: 83764 - RNA, 19 nt, Artificial Sequence
  Description of Artificial Sequence: Synthetic oligonucleotide
ugcuccacucaaucaguac

SEQ ID NO: 83765 - RNA, 19 nt, Artificial Sequence
  Description of Artificial Sequence: Synthetic oligonucleotide
ccugcuauuagauccauaa

SEQ ID NO: 83766 - RNA, 19 nt, Artificial Sequence
  Description of Artificial Sequence: Synthetic oligonucleotide
agguaguuacaaccaggca

SEQ ID NO: 83767 - RNA, 19 nt, Artificial Sequence
  Description of Artificial Sequence: Synthetic oligonucleotide
ccuaauacucccugagcag

SEQ ID NO: 83768 - RNA, 19 nt, Artificial Sequence
  Description of Artificial Sequence: Synthetic oligonucleotide
cuuucaucacacacacaca

SEQ ID NO: 83769 - RNA, 19 nt, Artificial Sequence
  Description of Artificial Sequence: Synthetic oligonucleotide
cgcuacaucucuaagcuac

SEQ ID NO: 83770 - RNA, 19 nt, Artificial Sequence
  Description of Artificial Sequence: Synthetic oligonucleotide
cuugcuugauggcaaagua

SEQ ID NO: 83771 - RNA, 19 nt, Artificial Sequence
  Description of Artificial Sequence: Synthetic oligonucleotide
cacgcuacaucucuaagcu

SEQ ID NO: 83772 - RNA, 19 nt, Artificial Sequence
  Description of Artificial Sequence: Synthetic oligonucleotide
uggauagguaggguugacu

SEQ ID NO: 83773 - RNA, 19 nt, Artificial Sequence
  Description of Artificial Sequence: Synthetic oligonucleotide
gacggaaggguagucguuc

SEQ ID NO: 83774 - RNA, 19 nt, Artificial Sequence
  Description of Artificial Sequence: Synthetic oligonucleotide
caucacccaaucccgaaca

SEQ ID NO: 83775 - RNA, 19 nt, Artificial Sequence
  Description of Artificial Sequence: Synthetic oligonucleotide
gagguauaacgggauucug

SEQ ID NO: 83776 - RNA, 19 nt, Artificial Sequence
  Description of Artificial Sequence: Synthetic oligonucleotide
cgggauucuggauagguag

SEQ ID NO: 83777 - RNA, 19 nt, Artificial Sequence
  Description of Artificial Sequence: Synthetic oligonucleotide
aauauauagcugggauguu

SEQ ID NO: 83778 - RNA, 19 nt, Artificial Sequence
  Description of Artificial Sequence: Synthetic oligonucleotide
gucuucgagggaaucugag

SEQ ID NO: 83779 - RNA, 19 nt, Artificial Sequence
  Description of Artificial Sequence: Synthetic oligonucleotide
auauagaccccaacacaga

SEQ ID NO: 83780 - RNA, 19 nt, Artificial Sequence
  Description of Artificial Sequence: Synthetic oligonucleotide
acauagcgcuuacccgccg

SEQ ID NO: 83781 - RNA, 19 nt, Artificial Sequence
  Description of Artificial Sequence: Synthetic oligonucleotide
guucuuagugauucagggu

SEQ ID NO: 83782 - RNA, 19 nt, Artificial Sequence
  Description of Artificial Sequence: Synthetic oligonucleotide
acacacacacacugccagu

SEQ ID NO: 83783 - RNA, 19 nt, Artificial Sequence
  Description of Artificial Sequence: Synthetic oligonucleotide
cugccuaacauacuaucua

SEQ ID NO: 83784 - RNA, 19 nt, Artificial Sequence
  Description of Artificial Sequence: Synthetic oligonucleotide
caaguuuguuguaacugcu

SEQ ID NO: 83785 - RNA, 19 nt, Artificial Sequence
  Description of Artificial Sequence: Synthetic oligonucleotide
auaucggcccuggcuguac

SEQ ID NO: 83786 - RNA, 19 nt, Artificial Sequence
  Description of Artificial Sequence: Synthetic oligonucleotide
ccuaacauacuaucuacaa

SEQ ID NO: 83787 - RNA, 19 nt, Artificial Sequence
  Description of Artificial Sequence: Synthetic oligonucleotide
uccauguagggagcucccc

SEQ ID NO: 83788 - RNA, 19 nt, Artificial Sequence
  Description of Artificial Sequence: Synthetic oligonucleotide
uguaucccagaaggcuuug

SEQ ID NO: 83789 - RNA, 19 nt, Artificial Sequence
  Description of Artificial Sequence: Synthetic oligonucleotide
ccaccuaauacucccugag

SEQ ID NO: 83790 - RNA, 19 nt, Artificial Sequence
  Description of Artificial Sequence: Synthetic oligonucleotide
uccgagguauaacgggauu

SEQ ID NO: 83791 - RNA, 19 nt, Artificial Sequence
  Description of Artificial Sequence: Synthetic oligonucleotide
agaucgacggccgccuuca

SEQ ID NO: 83792 - RNA, 19 nt, Artificial Sequence
  Description of Artificial Sequence: Synthetic oligonucleotide
aggcauguuucccuacuuu

SEQ ID NO: 83793 - RNA, 19 nt, Artificial Sequence
  Description of Artificial Sequence: Synthetic oligonucleotide
acggaaggguagucguucu

SEQ ID NO: 83794 - RNA, 19 nt, Artificial Sequence
  Description of Artificial Sequence: Synthetic oligonucleotide
caaugauaucggcccuggc

SEQ ID NO: 83795 - RNA, 19 nt, Artificial Sequence
  Description of Artificial Sequence: Synthetic oligonucleotide
caucacacacacacacaca

SEQ ID NO: 83796 - RNA, 19 nt, Artificial Sequence
  Description of Artificial Sequence: Synthetic oligonucleotide
gagcaaguuuguuguaacu

SEQ ID NO: 83797 - RNA, 19 nt, Artificial Sequence
  Description of Artificial Sequence: Synthetic oligonucleotide
acagacgaagcgguacaca

SEQ ID NO: 83798 - RNA, 19 nt, Artificial Sequence
  Description of Artificial Sequence: Synthetic oligonucleotide
gagaucgacggccgccuuc

SEQ ID NO: 83799 - RNA, 19 nt, Artificial Sequence
  Description of Artificial Sequence: Synthetic oligonucleotide
caugcucgauaccauagcu

SEQ ID NO: 83800 - RNA, 19 nt, Artificial Sequence
  Description of Artificial Sequence: Synthetic oligonucleotide
ugacggaaggguagucguu

SEQ ID NO: 83801 - RNA, 19 nt, Artificial Sequence
  Description of Artificial Sequence: Synthetic oligonucleotide
ccaugaaacgucuuuggaa

SEQ ID NO: 83802 - RNA, 19 nt, Artificial Sequence
  Description of Artificial Sequence: Synthetic oligonucleotide
agucggcuugagaucgacg

SEQ ID NO: 83803 - RNA, 19 nt, Artificial Sequence
  Description of Artificial Sequence: Synthetic oligonucleotide
cauccuuccucugaaguua

SEQ ID NO: 83804 - RNA, 19 nt, Artificial Sequence
  Description of Artificial Sequence: Synthetic oligonucleotide
ccaauuugauugauucuca

SEQ ID NO: 83805 - RNA, 19 nt, Artificial Sequence
  Description of Artificial Sequence: Synthetic oligonucleotide
cucuuccuaggauggucuc

SEQ ID NO: 83806 - RNA, 19 nt, Artificial Sequence
  Description of Artificial Sequence: Synthetic oligonucleotide
cacacacagguuaaugcgu

SEQ ID NO: 83807 - RNA, 19 nt, Artificial Sequence
  Description of Artificial Sequence: Synthetic oligonucleotide
cacauuccauauccgggga

SEQ ID NO: 83808 - RNA, 19 nt, Artificial Sequence
  Description of Artificial Sequence: Synthetic oligonucleotide
acacacacacacacugcca

SEQ ID NO: 83809 - RNA, 19 nt, Artificial Sequence
  Description of Artificial Sequence: Synthetic oligonucleotide
acccaaucccgaacauggg

SEQ ID NO: 83810 - RNA, 19 nt, Artificial Sequence
  Description of Artificial Sequence: Synthetic oligonucleotide
cacagacgaagcgguacac

SEQ ID NO: 83811 - RNA, 19 nt, Artificial Sequence
  Description of Artificial Sequence: Synthetic oligonucleotide
acgaagcgguacacauagc

SEQ ID NO: 83812 - RNA, 19 nt, Artificial Sequence
  Description of Artificial Sequence: Synthetic oligonucleotide
cagacgaagcgguacacau

SEQ ID NO: 83813 - RNA, 19 nt, Artificial Sequence
  Description of Artificial Sequence: Synthetic oligonucleotide
acacacacacacacacaca

SEQ ID NO: 83814 - RNA, 19 nt, Artificial Sequence
  Description of Artificial Sequence: Synthetic oligonucleotide
acacacacacacacacacu

SEQ ID NO: 83815 - RNA, 19 nt, Artificial Sequence
  Description of Artificial Sequence: Synthetic oligonucleotide
augggagugcagcgucuga

SEQ ID NO: 83816 - RNA, 19 nt, Artificial Sequence
  Description of Artificial Sequence: Synthetic oligonucleotide
ggcuugagaucgacggccg

SEQ ID NO: 83817 - RNA, 19 nt, Artificial Sequence
  Description of Artificial Sequence: Synthetic oligonucleotide
auggugccgggaguuggag

SEQ ID NO: 83818 - RNA, 19 nt, Artificial Sequence
  Description of Artificial Sequence: Synthetic oligonucleotide
ggccaauacagcugcagcu

SEQ ID NO: 83819 - RNA, 19 nt, Artificial Sequence
  Description of Artificial Sequence: Synthetic oligonucleotide
agcgucugauaggacucug

SEQ ID NO: 83820 - RNA, 19 nt, Artificial Sequence
  Description of Artificial Sequence: Synthetic oligonucleotide
cagguuaaugcgucucucu

SEQ ID NO: 83821 - RNA, 19 nt, Artificial Sequence
  Description of Artificial Sequence: Synthetic oligonucleotide
agacucacaguaggggauu

SEQ ID NO: 83822 - RNA, 19 nt, Artificial Sequence
  Description of Artificial Sequence: Synthetic oligonucleotide
augcucgauaccauagcua

SEQ ID NO: 83823 - RNA, 19 nt, Artificial Sequence
  Description of Artificial Sequence: Synthetic oligonucleotide
gugacaaguccuccugcua

SEQ ID NO: 83824 - RNA, 19 nt, Artificial Sequence
  Description of Artificial Sequence: Synthetic oligonucleotide
ccccaauuagagcuuaaga

SEQ ID NO: 83825 - RNA, 19 nt, Artificial Sequence
  Description of Artificial Sequence: Synthetic oligonucleotide
aaacacuuuuggaccccuu

SEQ ID NO: 83826 - RNA, 19 nt, Artificial Sequence
  Description of Artificial Sequence: Synthetic oligonucleotide
auuucaccacgaagguuaa

SEQ ID NO: 83827 - RNA, 19 nt, Artificial Sequence
  Description of Artificial Sequence: Synthetic oligonucleotide
acgcuacaucucuaagcua

SEQ ID NO: 83828 - RNA, 19 nt, Artificial Sequence
  Description of Artificial Sequence: Synthetic oligonucleotide
auccgagguauaacgggau

SEQ ID NO: 83829 - RNA, 19 nt, Artificial Sequence
  Description of Artificial Sequence: Synthetic oligonucleotide
ugagaucgacggccgccuu

SEQ ID NO: 83830 - RNA, 19 nt, Artificial Sequence
  Description of Artificial Sequence: Synthetic oligonucleotide
ugacuccauuaaccugaua

SEQ ID NO: 83831 - RNA, 19 nt, Artificial Sequence
  Description of Artificial Sequence: Synthetic oligonucleotide
ccgagguauaacgggauuc

SEQ ID NO: 83832 - RNA, 19 nt, Artificial Sequence
  Description of Artificial Sequence: Synthetic oligonucleotide
gccuaacauacuaucuaca

SEQ ID NO: 83833 - RNA, 19 nt, Artificial Sequence
  Description of Artificial Sequence: Synthetic oligonucleotide
gagcgccucugaucuagaa

SEQ ID NO: 83834 - RNA, 19 nt, Artificial Sequence
  Description of Artificial Sequence: Synthetic oligonucleotide
cugcaaggugucugucuga

SEQ ID NO: 83835 - RNA, 19 nt, Artificial Sequence
  Description of Artificial Sequence: Synthetic oligonucleotide
ggguguaucccagaaggcu

SEQ ID NO: 83836 - RNA, 19 nt, Artificial Sequence
  Description of Artificial Sequence: Synthetic oligonucleotide
acgggauucuggauaggua

SEQ ID NO: 83837 - RNA, 19 nt, Artificial Sequence
  Description of Artificial Sequence: Synthetic oligonucleotide
agcuuucaauugggacauc

SEQ ID NO: 83838 - RNA, 19 nt, Artificial Sequence
  Description of Artificial Sequence: Synthetic oligonucleotide
agguaggguugacuccauu

SEQ ID NO: 83839 - RNA, 19 nt, Artificial Sequence
  Description of Artificial Sequence: Synthetic oligonucleotide
agacgaagcgguacacaua

SEQ ID NO: 83840 - RNA, 19 nt, Artificial Sequence
  Description of Artificial Sequence: Synthetic oligonucleotide
gugguuccaugaaacgucu

SEQ ID NO: 83841 - RNA, 19 nt, Artificial Sequence
  Description of Artificial Sequence: Synthetic oligonucleotide
cauauccggggagggaaaa

SEQ ID NO: 83842 - RNA, 19 nt, Artificial Sequence
  Description of Artificial Sequence: Synthetic oligonucleotide
gauaucggcccuggcugua

SEQ ID NO: 83843 - RNA, 19 nt, Artificial Sequence
  Description of Artificial Sequence: Synthetic oligonucleotide
gcgagcugagaggugcaag

SEQ ID NO: 83844 - RNA, 19 nt, Artificial Sequence
  Description of Artificial Sequence: Synthetic oligonucleotide
gugccgggaguuggagggg

SEQ ID NO: 83845 - RNA, 19 nt, Artificial Sequence
  Description of Artificial Sequence: Synthetic oligonucleotide
gucacccagcuagaucaga

SEQ ID NO: 83846 - RNA, 19 nt, Artificial Sequence
  Description of Artificial Sequence: Synthetic oligonucleotide
gucagcgagcugagaggug

SEQ ID NO: 83847 - RNA, 19 nt, Artificial Sequence
  Description of Artificial Sequence: Synthetic oligonucleotide
augcuccacucaaucagua

SEQ ID NO: 83848 - RNA, 19 nt, Artificial Sequence
  Description of Artificial Sequence: Synthetic oligonucleotide
ggaucucuagaugcuccca

SEQ ID NO: 83849 - RNA, 19 nt, Artificial Sequence
  Description of Artificial Sequence: Synthetic oligonucleotide
gaagagcgccucugaucua

SEQ ID NO: 83850 - RNA, 19 nt, Artificial Sequence
  Description of Artificial Sequence: Synthetic oligonucleotide
ccuuguccaucacucguca

SEQ ID NO: 83851 - RNA, 19 nt, Artificial Sequence
  Description of Artificial Sequence: Synthetic oligonucleotide
uacccgccgucuuguggau

SEQ ID NO: 83852 - RNA, 19 nt, Artificial Sequence
  Description of Artificial Sequence: Synthetic oligonucleotide
cacgaagguuaaugcuuua

SEQ ID NO: 83853 - RNA, 19 nt, Artificial Sequence
  Description of Artificial Sequence: Synthetic oligonucleotide
agcgagcugagaggugcaa

SEQ ID NO: 83854 - RNA, 19 nt, Artificial Sequence
  Description of Artificial Sequence: Synthetic oligonucleotide
cauagcgcuuacccgccgu

SEQ ID NO: 83855 - RNA, 19 nt, Artificial Sequence
  Description of Artificial Sequence: Synthetic oligonucleotide
gcgcuuacccgccgucuug

SEQ ID NO: 83856 - RNA, 19 nt, Artificial Sequence
  Description of Artificial Sequence: Synthetic oligonucleotide
acagugccgcuccguucau

SEQ ID NO: 83857 - RNA, 19 nt, Artificial Sequence
  Description of Artificial Sequence: Synthetic oligonucleotide
gcgucucucugggaaaaca

SEQ ID NO: 83858 - RNA, 19 nt, Artificial Sequence
  Description of Artificial Sequence: Synthetic oligonucleotide
ggggauuucucagcaugaa

SEQ ID NO: 83859 - RNA, 19 nt, Artificial Sequence
  Description of Artificial Sequence: Synthetic oligonucleotide
cccgccgucuuguggauga

SEQ ID NO: 83860 - RNA, 19 nt, Artificial Sequence
  Description of Artificial Sequence: Synthetic oligonucleotide
gugccgcuccguucauaca

SEQ ID NO: 83861 - RNA, 19 nt, Artificial Sequence
  Description of Artificial Sequence: Synthetic oligonucleotide
gcuuacccgccgucuugug

SEQ ID NO: 83862 - RNA, 19 nt, Artificial Sequence
  Description of Artificial Sequence: Synthetic oligonucleotide
cccuuagcucccaccccug

SEQ ID NO: 83863 - RNA, 19 nt, Artificial Sequence
  Description of Artificial Sequence: Synthetic oligonucleotide
acccgccgucuuguggaug

SEQ ID NO: 83864 - RNA, 19 nt, Artificial Sequence
  Description of Artificial Sequence: Synthetic oligonucleotide
ggcgggaugagagcaaguu

SEQ ID NO: 83865 - RNA, 19 nt, Artificial Sequence
  Description of Artificial Sequence: Synthetic oligonucleotide
gcgggaugagagcaaguuu

SEQ ID NO: 83866 - RNA, 19 nt, Artificial Sequence
  Description of Artificial Sequence: Synthetic oligonucleotide
gccgcuccguucauacaga

SEQ ID NO: 83867 - RNA, 19 nt, Artificial Sequence
  Description of Artificial Sequence: Synthetic oligonucleotide
cgagguauaacgggauucu

SEQ ID NO: 83868 - RNA, 19 nt, Artificial Sequence
  Description of Artificial Sequence: Synthetic oligonucleotide
aggccacggcucaguuucu

SEQ ID NO: 83869 - RNA, 19 nt, Artificial Sequence
  Description of Artificial Sequence: Synthetic oligonucleotide
cgagggaaucugagaguca

SEQ ID NO: 83870 - RNA, 19 nt, Artificial Sequence
  Description of Artificial Sequence: Synthetic oligonucleotide
gcgucugauaggacucugu

SEQ ID NO: 83871 - RNA, 19 nt, Artificial Sequence
  Description of Artificial Sequence: Synthetic oligonucleotide
gaucgacggccgccuucau

SEQ ID NO: 83872 - RNA, 19 nt, Artificial Sequence
  Description of Artificial Sequence: Synthetic oligonucleotide
ccgcuccguucauacagaa

SEQ ID NO: 83873 - RNA, 19 nt, Artificial Sequence
  Description of Artificial Sequence: Synthetic oligonucleotide
cuccugcuauuagauccau

SEQ ID NO: 83874 - RNA, 19 nt, Artificial Sequence
  Description of Artificial Sequence: Synthetic oligonucleotide
gcucgauaccauagcuaau

SEQ ID NO: 83875 - RNA, 19 nt, Artificial Sequence
  Description of Artificial Sequence: Synthetic oligonucleotide
cccaccccugaaugugaaa

SEQ ID NO: 83876 - RNA, 19 nt, Artificial Sequence
  Description of Artificial Sequence: Synthetic oligonucleotide
cagugccgcuccguucaua

SEQ ID NO: 83877 - RNA, 19 nt, Artificial Sequence
  Description of Artificial Sequence: Synthetic oligonucleotide
cgcuuacccgccgucuugu

SEQ ID NO: 83878 - RNA, 19 nt, Artificial Sequence
  Description of Artificial Sequence: Synthetic oligonucleotide
uguacuuacaugcaaaggc

SEQ ID NO: 83879 - RNA, 19 nt, Artificial Sequence
  Description of Artificial Sequence: Synthetic oligonucleotide
ugaauaacaaaguagagaa

SEQ ID NO: 83880 - RNA, 19 nt, Artificial Sequence
  Description of Artificial Sequence: Synthetic oligonucleotide
gagaguaucguuuauuccg

SEQ ID NO: 83881 - RNA, 19 nt, Artificial Sequence
  Description of Artificial Sequence: Synthetic oligonucleotide
aaccccauaauaaaugucc

SEQ ID NO: 83882 - RNA, 19 nt, Artificial Sequence
  Description of Artificial Sequence: Synthetic oligonucleotide
aaagcgauaaguuccgaag

SEQ ID NO: 83883 - RNA, 19 nt, Artificial Sequence
  Description of Artificial Sequence: Synthetic oligonucleotide
ucuaaugcuguucacagcu

SEQ ID NO: 83884 - RNA, 19 nt, Artificial Sequence
  Description of Artificial Sequence: Synthetic oligonucleotide
uggugaauaacaaaguaga

SEQ ID NO: 83885 - RNA, 19 nt, Artificial Sequence
  Description of Artificial Sequence: Synthetic oligonucleotide
auacaauuauuuuaguucu

SEQ ID NO: 83886 - RNA, 19 nt, Artificial Sequence
  Description of Artificial Sequence: Synthetic oligonucleotide
ugucaaauccaacauggcc

SEQ ID NO: 83887 - RNA, 19 nt, Artificial Sequence
  Description of Artificial Sequence: Synthetic oligonucleotide
aaacugacaccugacaaac

SEQ ID NO: 83888 - RNA, 19 nt, Artificial Sequence
  Description of Artificial Sequence: Synthetic oligonucleotide
agacaagugucuaacaugc

SEQ ID NO: 83889 - RNA, 19 nt, Artificial Sequence
  Description of Artificial Sequence: Synthetic oligonucleotide
aaugguuagcuucagucgu

SEQ ID NO: 83890 - RNA, 19 nt, Artificial Sequence
  Description of Artificial Sequence: Synthetic oligonucleotide
agacuguacuuucaggacc

SEQ ID NO: 83891 - RNA, 19 nt, Artificial Sequence
  Description of Artificial Sequence: Synthetic oligonucleotide
acuagugauauaugcauag

SEQ ID NO: 83892 - RNA, 19 nt, Artificial Sequence
  Description of Artificial Sequence: Synthetic oligonucleotide
cuuuuaaccggacaccugg

SEQ ID NO: 83893 - RNA, 19 nt, Artificial Sequence
  Description of Artificial Sequence: Synthetic oligonucleotide
acucgaguuacucagcagg

SEQ ID NO: 83894 - RNA, 19 nt, Artificial Sequence
  Description of Artificial Sequence: Synthetic oligonucleotide
agagaugcgcuauuacugc

SEQ ID NO: 83895 - RNA, 19 nt, Artificial Sequence
  Description of Artificial Sequence: Synthetic oligonucleotide
uguucuaugguuuccuacc

SEQ ID NO: 83896 - RNA, 19 nt, Artificial Sequence
  Description of Artificial Sequence: Synthetic oligonucleotide
uaaucaagaaaaugcaagu

SEQ ID NO: 83897 - RNA, 19 nt, Artificial Sequence
  Description of Artificial Sequence: Synthetic oligonucleotide
ucaucgacuuuccagaaac

SEQ ID NO: 83898 - RNA, 19 nt, Artificial Sequence
  Description of Artificial Sequence: Synthetic oligonucleotide
uccucaacugcaaagaaaa

SEQ ID NO: 83899 - RNA, 19 nt, Artificial Sequence
  Description of Artificial Sequence: Synthetic oligonucleotide
gguaguugaagagagaacg

SEQ ID NO: 83900 - RNA, 19 nt, Artificial Sequence
  Description of Artificial Sequence: Synthetic oligonucleotide
aaacuagacucuguaggcc

SEQ ID NO: 83901 - RNA, 19 nt, Artificial Sequence
  Description of Artificial Sequence: Synthetic oligonucleotide
uuuagagugggcauucaga

SEQ ID NO: 83902 - RNA, 19 nt, Artificial Sequence
  Description of Artificial Sequence: Synthetic oligonucleotide
aagcguuugcuguuauccc

SEQ ID NO: 83903 - RNA, 19 nt, Artificial Sequence
  Description of Artificial Sequence: Synthetic oligonucleotide
uacagguaguauuuuaccc

SEQ ID NO: 83904 - RNA, 19 nt, Artificial Sequence
  Description of Artificial Sequence: Synthetic oligonucleotide
gaccaauuacugcagagcc

SEQ ID NO: 83905 - RNA, 19 nt, Artificial Sequence
  Description of Artificial Sequence: Synthetic oligonucleotide
acagacucgaguuacucag

SEQ ID NO: 83906 - RNA, 19 nt, Artificial Sequence
  Description of Artificial Sequence: Synthetic oligonucleotide
uacuuaagaggguaggagc

SEQ ID NO: 83907 - RNA, 19 nt, Artificial Sequence
  Description of Artificial Sequence: Synthetic oligonucleotide
uugugaauggcaaagccaa

SEQ ID NO: 83908 - RNA, 19 nt, Artificial Sequence
  Description of Artificial Sequence: Synthetic oligonucleotide
guaaaauauauuuccccgc

SEQ ID NO: 83909 - RNA, 19 nt, Artificial Sequence
  Description of Artificial Sequence: Synthetic oligonucleotide
uagugauauaugcauaggu

SEQ ID NO: 83910 - RNA, 19 nt, Artificial Sequence
  Description of Artificial Sequence: Synthetic oligonucleotide
aaguuguugucacggcuac

SEQ ID NO: 83911 - RNA, 19 nt, Artificial Sequence
  Description of Artificial Sequence: Synthetic oligonucleotide
ugagcuaagggcuacuggu

SEQ ID NO: 83912 - RNA, 19 nt, Artificial Sequence
  Description of Artificial Sequence: Synthetic oligonucleotide
caagugucuaacaugcagc

SEQ ID NO: 83913 - RNA, 19 nt, Artificial Sequence
  Description of Artificial Sequence: Synthetic oligonucleotide
auuagauuugagaguaucg

SEQ ID NO: 83914 - RNA, 19 nt, Artificial Sequence
  Description of Artificial Sequence: Synthetic oligonucleotide
aucaauguggauuugccaa

SEQ ID NO: 83915 - RNA, 19 nt, Artificial Sequence
  Description of Artificial Sequence: Synthetic oligonucleotide
uuagauuugagaguaucgu

SEQ ID NO: 83916 - RNA, 19 nt, Artificial Sequence
  Description of Artificial Sequence: Synthetic oligonucleotide
uuuaaggcauaucagcaua

SEQ ID NO: 83917 - RNA, 19 nt, Artificial Sequence
  Description of Artificial Sequence: Synthetic oligonucleotide
ugcgcuauuacugccaaag

SEQ ID NO: 83918 - RNA, 19 nt, Artificial Sequence
  Description of Artificial Sequence: Synthetic oligonucleotide
ugguguugaauaaaguguc

SEQ ID NO: 83919 - RNA, 19 nt, Artificial Sequence
  Description of Artificial Sequence: Synthetic oligonucleotide
cucauugugaguagcuggg

SEQ ID NO: 83920 - RNA, 19 nt, Artificial Sequence
  Description of Artificial Sequence: Synthetic oligonucleotide
augaaguaaaggcaggcgu

SEQ ID NO: 83921 - RNA, 19 nt, Artificial Sequence
  Description of Artificial Sequence: Synthetic oligonucleotide
uuagagugggcauucagau

SEQ ID NO: 83922 - RNA, 19 nt, Artificial Sequence
  Description of Artificial Sequence: Synthetic oligonucleotide
auuauuggaaugauguuca

SEQ ID NO: 83923 - RNA, 19 nt, Artificial Sequence
  Description of Artificial Sequence: Synthetic oligonucleotide
cuuuggaccaauuacugca

SEQ ID NO: 83924 - RNA, 19 nt, Artificial Sequence
  Description of Artificial Sequence: Synthetic oligonucleotide
auaccgaaagaaaagagca

SEQ ID NO: 83925 - RNA, 19 nt, Artificial Sequence
  Description of Artificial Sequence: Synthetic oligonucleotide
uuaacgguuggguaaaaua

SEQ ID NO: 83926 - RNA, 19 nt, Artificial Sequence
  Description of Artificial Sequence: Synthetic oligonucleotide
aggacuuuugaaaacugac

SEQ ID NO: 83927 - RNA, 19 nt, Artificial Sequence
  Description of Artificial Sequence: Synthetic oligonucleotide
agaccacacgcucagauca

SEQ ID NO: 83928 - RNA, 19 nt, Artificial Sequence
  Description of Artificial Sequence: Synthetic oligonucleotide
caagcguuugcuguuaucc

SEQ ID NO: 83929 - RNA, 19 nt, Artificial Sequence
  Description of Artificial Sequence: Synthetic oligonucleotide
ucguacguuacuuuccuga

SEQ ID NO: 83930 - RNA, 19 nt, Artificial Sequence
  Description of Artificial Sequence: Synthetic oligonucleotide
aggucauacaagugaaaag

SEQ ID NO: 83931 - RNA, 19 nt, Artificial Sequence
  Description of Artificial Sequence: Synthetic oligonucleotide
caccacaccauguuaacag

SEQ ID NO: 83932 - RNA, 19 nt, Artificial Sequence
  Description of Artificial Sequence: Synthetic oligonucleotide
acagagaugcgcuauuacu

SEQ ID NO: 83933 - RNA, 19 nt, Artificial Sequence
  Description of Artificial Sequence: Synthetic oligonucleotide
gaaaagcucaucugucccc

SEQ ID NO: 83934 - RNA, 19 nt, Artificial Sequence
  Description of Artificial Sequence: Synthetic oligonucleotide
aacagacucgaguuacuca

SEQ ID NO: 83935 - RNA, 19 nt, Artificial Sequence
  Description of Artificial Sequence: Synthetic oligonucleotide
agugaaaagcuaucaguga

SEQ ID NO: 83936 - RNA, 19 nt, Artificial Sequence
  Description of Artificial Sequence: Synthetic oligonucleotide
uugugcaauucguucuugg

SEQ ID NO: 83937 - RNA, 19 nt, Artificial Sequence
  Description of Artificial Sequence: Synthetic oligonucleotide
aaucucggccaccguuucc

SEQ ID NO: 83938 - RNA, 19 nt, Artificial Sequence
  Description of Artificial Sequence: Synthetic oligonucleotide
auaccuacauacaaacuag

SEQ ID NO: 83939 - RNA, 19 nt, Artificial Sequence
  Description of Artificial Sequence: Synthetic oligonucleotide
uacuuacaugcaaaggcga

SEQ ID NO: 83940 - RNA, 19 nt, Artificial Sequence
  Description of Artificial Sequence: Synthetic oligonucleotide
uuauccccuuguucuaugg

SEQ ID NO: 83941 - RNA, 19 nt, Artificial Sequence
  Description of Artificial Sequence: Synthetic oligonucleotide
uggaccaauuacugcagag

SEQ ID NO: 83942 - RNA, 19 nt, Artificial Sequence
  Description of Artificial Sequence: Synthetic oligonucleotide
ucaucguugcauuaaucuc

SEQ ID NO: 83943 - RNA, 19 nt, Artificial Sequence
  Description of Artificial Sequence: Synthetic oligonucleotide
aauggaacuaggacuuuug

SEQ ID NO: 83944 - RNA, 19 nt, Artificial Sequence
  Description of Artificial Sequence: Synthetic oligonucleotide
ucaggguuuuaguucagcu

SEQ ID NO: 83945 - RNA, 19 nt, Artificial Sequence
  Description of Artificial Sequence: Synthetic oligonucleotide
guuaacagacucgaguuac

SEQ ID NO: 83946 - RNA, 19 nt, Artificial Sequence
  Description of Artificial Sequence: Synthetic oligonucleotide
acgcucagaucaaauaacc

SEQ ID NO: 83947 - RNA, 19 nt, Artificial Sequence
  Description of Artificial Sequence: Synthetic oligonucleotide
ggaacuaggacuuuugaaa

SEQ ID NO: 83948 - RNA, 19 nt, Artificial Sequence
  Description of Artificial Sequence: Synthetic oligonucleotide
augagcuaagggcuacugg

SEQ ID NO: 83949 - RNA, 19 nt, Artificial Sequence
  Description of Artificial Sequence: Synthetic oligonucleotide
auauauuuccccgcuuuag

SEQ ID NO: 83950 - RNA, 19 nt, Artificial Sequence
  Description of Artificial Sequence: Synthetic oligonucleotide
auucccuucauaccuacau

SEQ ID NO: 83951 - RNA, 19 nt, Artificial Sequence
  Description of Artificial Sequence: Synthetic oligonucleotide
uugucacggcuacucaggg

SEQ ID NO: 83952 - RNA, 19 nt, Artificial Sequence
  Description of Artificial Sequence: Synthetic oligonucleotide
auaguggcgagugugcguc

SEQ ID NO: 83953 - RNA, 19 nt, Artificial Sequence
  Description of Artificial Sequence: Synthetic oligonucleotide
ucagucguacguuacuuuc

SEQ ID NO: 83954 - RNA, 19 nt, Artificial Sequence
  Description of Artificial Sequence: Synthetic oligonucleotide
cuaacaaccccauaauaaa

SEQ ID NO: 83955 - RNA, 19 nt, Artificial Sequence
  Description of Artificial Sequence: Synthetic oligonucleotide
uuuuaaccggacaccuggc

SEQ ID NO: 83956 - RNA, 19 nt, Artificial Sequence
  Description of Artificial Sequence: Synthetic oligonucleotide
aauccucgugucaugguag

SEQ ID NO: 83957 - RNA, 19 nt, Artificial Sequence
  Description of Artificial Sequence: Synthetic oligonucleotide
auuaaucucggccaccguu

SEQ ID NO: 83958 - RNA, 19 nt, Artificial Sequence
  Description of Artificial Sequence: Synthetic oligonucleotide
uuaaccggacaccuggcuc

SEQ ID NO: 83959 - RNA, 19 nt, Artificial Sequence
  Description of Artificial Sequence: Synthetic oligonucleotide
cuuacagcgccgauacagc

SEQ ID NO: 83960 - RNA, 19 nt, Artificial Sequence
  Description of Artificial Sequence: Synthetic oligonucleotide
gacucuguaggccauaacu

SEQ ID NO: 83961 - RNA, 19 nt, Artificial Sequence
  Description of Artificial Sequence: Synthetic oligonucleotide
uucuaugguuuccuacccc

SEQ ID NO: 83962 - RNA, 19 nt, Artificial Sequence
  Description of Artificial Sequence: Synthetic oligonucleotide
uuuaaccggacaccuggcu

SEQ ID NO: 83963 - RNA, 19 nt, Artificial Sequence
  Description of Artificial Sequence: Synthetic oligonucleotide
uggaacuaggacuuuugaa

SEQ ID NO: 83964 - RNA, 19 nt, Artificial Sequence
  Description of Artificial Sequence: Synthetic oligonucleotide
acacgcucagaucaaauaa

SEQ ID NO: 83965 - RNA, 19 nt, Artificial Sequence
  Description of Artificial Sequence: Synthetic oligonucleotide
uuguucuaugguuuccuac

SEQ ID NO: 83966 - RNA, 19 nt, Artificial Sequence
  Description of Artificial Sequence: Synthetic oligonucleotide
uaaccggacaccuggcuca

SEQ ID NO: 83967 - RNA, 19 nt, Artificial Sequence
  Description of Artificial Sequence: Synthetic oligonucleotide
uccuguacuuacaugcaaa

SEQ ID NO: 83968 - RNA, 19 nt, Artificial Sequence
  Description of Artificial Sequence: Synthetic oligonucleotide
agucuacccaucaaagggg

SEQ ID NO: 83969 - RNA, 19 nt, Artificial Sequence
  Description of Artificial Sequence: Synthetic oligonucleotide
agcuuacucagacuguacu

SEQ ID NO: 83970 - RNA, 19 nt, Artificial Sequence
  Description of Artificial Sequence: Synthetic oligonucleotide
ucuuacuccuguacuuaca

SEQ ID NO: 83971 - RNA, 19 nt, Artificial Sequence
  Description of Artificial Sequence: Synthetic oligonucleotide
ucgugaagcucuuucucug

SEQ ID NO: 83972 - RNA, 19 nt, Artificial Sequence
  Description of Artificial Sequence: Synthetic oligonucleotide
cucgaguuacucagcaggc

SEQ ID NO: 83973 - RNA, 19 nt, Artificial Sequence
  Description of Artificial Sequence: Synthetic oligonucleotide
uaccuacauacaaacuaga

SEQ ID NO: 83974 - RNA, 19 nt, Artificial Sequence
  Description of Artificial Sequence: Synthetic oligonucleotide
aaucaucgacuuuccagaa

SEQ ID NO: 83975 - RNA, 19 nt, Artificial Sequence
  Description of Artificial Sequence: Synthetic oligonucleotide
cuaggacuuuugaaaacug

SEQ ID NO: 83976 - RNA, 19 nt, Artificial Sequence
  Description of Artificial Sequence: Synthetic oligonucleotide
accaagucuacccaucaaa

SEQ ID NO: 83977 - RNA, 19 nt, Artificial Sequence
  Description of Artificial Sequence: Synthetic oligonucleotide
uguuaacagacucgaguua

SEQ ID NO: 83978 - RNA, 19 nt, Artificial Sequence
  Description of Artificial Sequence: Synthetic oligonucleotide
gugucuaacaugcagcuua

SEQ ID NO: 83979 - RNA, 19 nt, Artificial Sequence
  Description of Artificial Sequence: Synthetic oligonucleotide
uuaacagacucgaguuacu

SEQ ID NO: 83980 - RNA, 19 nt, Artificial Sequence
  Description of Artificial Sequence: Synthetic oligonucleotide
guucuaugguuuccuaccc

SEQ ID NO: 83981 - RNA, 19 nt, Artificial Sequence
  Description of Artificial Sequence: Synthetic oligonucleotide
uucuaaugcuguucacagc

SEQ ID NO: 83982 - RNA, 19 nt, Artificial Sequence
  Description of Artificial Sequence: Synthetic oligonucleotide
cacgcucagaucaaauaac

SEQ ID NO: 83983 - RNA, 19 nt, Artificial Sequence
  Description of Artificial Sequence: Synthetic oligonucleotide
cucugcggaacacuugggg

SEQ ID NO: 83984 - RNA, 19 nt, Artificial Sequence
  Description of Artificial Sequence: Synthetic oligonucleotide
uauuccgugcagagccagg

SEQ ID NO: 83985 - RNA, 19 nt, Artificial Sequence
  Description of Artificial Sequence: Synthetic oligonucleotide
cauacaugacaauucugca

SEQ ID NO: 83986 - RNA, 19 nt, Artificial Sequence
  Description of Artificial Sequence: Synthetic oligonucleotide
agucguacguuacuuuccu

SEQ ID NO: 83987 - RNA, 19 nt, Artificial Sequence
  Description of Artificial Sequence: Synthetic oligonucleotide
cuguacuuacaugcaaagg

SEQ ID NO: 83988 - RNA, 19 nt, Artificial Sequence
  Description of Artificial Sequence: Synthetic oligonucleotide
auuacucugucucccuaca

SEQ ID NO: 83989 - RNA, 19 nt, Artificial Sequence
  Description of Artificial Sequence: Synthetic oligonucleotide
uuuaccccacuguccuugg

SEQ ID NO: 83990 - RNA, 19 nt, Artificial Sequence
  Description of Artificial Sequence: Synthetic oligonucleotide
agggauucaaauggaccac

SEQ ID NO: 83991 - RNA, 19 nt, Artificial Sequence
  Description of Artificial Sequence: Synthetic oligonucleotide
gaaagcgauaaguuccgaa

SEQ ID NO: 83992 - RNA, 19 nt, Artificial Sequence
  Description of Artificial Sequence: Synthetic oligonucleotide
agaagcaaucccuggugga

SEQ ID NO: 83993 - RNA, 19 nt, Artificial Sequence
  Description of Artificial Sequence: Synthetic oligonucleotide
uuugagaguaucguuuauu

SEQ ID NO: 83994 - RNA, 19 nt, Artificial Sequence
  Description of Artificial Sequence: Synthetic oligonucleotide
cagucguacguuacuuucc

SEQ ID NO: 83995 - RNA, 19 nt, Artificial Sequence
  Description of Artificial Sequence: Synthetic oligonucleotide
ugugugagcaugagaugaa

SEQ ID NO: 83996 - RNA, 19 nt, Artificial Sequence
  Description of Artificial Sequence: Synthetic oligonucleotide
cuguaggccauaacucagc

SEQ ID NO: 83997 - RNA, 19 nt, Artificial Sequence
  Description of Artificial Sequence: Synthetic oligonucleotide
gugaauccucgugucaugg

SEQ ID NO: 83998 - RNA, 19 nt, Artificial Sequence
  Description of Artificial Sequence: Synthetic oligonucleotide
uuacagcgccgauacagcu

SEQ ID NO: 83999 - RNA, 19 nt, Artificial Sequence
  Description of Artificial Sequence: Synthetic oligonucleotide
auggaacuaggacuuuuga

SEQ ID NO: 84000 - RNA, 19 nt, Artificial Sequence
  Description of Artificial Sequence: Synthetic oligonucleotide
guuagcuucagucguacgu

SEQ ID NO: 84001 - RNA, 19 nt, Artificial Sequence
  Description of Artificial Sequence: Synthetic oligonucleotide
gaaaggcauagauaccgaa

SEQ ID NO: 84002 - RNA, 19 nt, Artificial Sequence
  Description of Artificial Sequence: Synthetic oligonucleotide
cucaucguugcauuaaucu

SEQ ID NO: 84003 - RNA, 19 nt, Artificial Sequence
  Description of Artificial Sequence: Synthetic oligonucleotide
aguaugaugcaggugggaa

SEQ ID NO: 84004 - RNA, 19 nt, Artificial Sequence
  Description of Artificial Sequence: Synthetic oligonucleotide
cauugugaguagcuggguc

SEQ ID NO: 84005 - RNA, 19 nt, Artificial Sequence
  Description of Artificial Sequence: Synthetic oligonucleotide
acaagcguuugcuguuauc

SEQ ID NO: 84006 - RNA, 19 nt, Artificial Sequence
  Description of Artificial Sequence: Synthetic oligonucleotide
aaaggcgaaagcacaucca

SEQ ID NO: 84007 - RNA, 19 nt, Artificial Sequence
  Description of Artificial Sequence: Synthetic oligonucleotide
ugccuaauuucaaggccac

SEQ ID NO: 84008 - RNA, 19 nt, Artificial Sequence
  Description of Artificial Sequence: Synthetic oligonucleotide
ccaagucuacccaucaaag

SEQ ID NO: 84009 - RNA, 19 nt, Artificial Sequence
  Description of Artificial Sequence: Synthetic oligonucleotide
uuauuggaaugauguucac

SEQ ID NO: 84010 - RNA, 19 nt, Artificial Sequence
  Description of Artificial Sequence: Synthetic oligonucleotide
uuagcuucagucguacguu

SEQ ID NO: 84011 - RNA, 19 nt, Artificial Sequence
  Description of Artificial Sequence: Synthetic oligonucleotide
agcgauaaguuccgaaguu

SEQ ID NO: 84012 - RNA, 19 nt, Artificial Sequence
  Description of Artificial Sequence: Synthetic oligonucleotide
ugagacgaccaagucuacc

SEQ ID NO: 84013 - RNA, 19 nt, Artificial Sequence
  Description of Artificial Sequence: Synthetic oligonucleotide
uaguugaagagagaacguu

SEQ ID NO: 84014 - RNA, 19 nt, Artificial Sequence
  Description of Artificial Sequence: Synthetic oligonucleotide
gguuggguaaaauauauuu

SEQ ID NO: 84015 - RNA, 19 nt, Artificial Sequence
  Description of Artificial Sequence: Synthetic oligonucleotide
cugugugagcaugagauga

SEQ ID NO: 84016 - RNA, 19 nt, Artificial Sequence
  Description of Artificial Sequence: Synthetic oligonucleotide
uaacagacucgaguuacuc

SEQ ID NO: 84017 - RNA, 19 nt, Artificial Sequence
  Description of Artificial Sequence: Synthetic oligonucleotide
aggcgugaauccucguguc

SEQ ID NO: 84018 - RNA, 19 nt, Artificial Sequence
  Description of Artificial Sequence: Synthetic oligonucleotide
ucauuacucugucucccua

SEQ ID NO: 84019 - RNA, 19 nt, Artificial Sequence
  Description of Artificial Sequence: Synthetic oligonucleotide
aacgguuggguaaaauaua

SEQ ID NO: 84020 - RNA, 19 nt, Artificial Sequence
  Description of Artificial Sequence: Synthetic oligonucleotide
agaguaucguuuauuccgu

SEQ ID NO: 84021 - RNA, 19 nt, Artificial Sequence
  Description of Artificial Sequence: Synthetic oligonucleotide
ugucucccuacagccacgg

SEQ ID NO: 84022 - RNA, 19 nt, Artificial Sequence
  Description of Artificial Sequence: Synthetic oligonucleotide
accacaccauguuaacaga

SEQ ID NO: 84023 - RNA, 19 nt, Artificial Sequence
  Description of Artificial Sequence: Synthetic oligonucleotide
uuuaacgguuggguaaaau

SEQ ID NO: 84024 - RNA, 19 nt, Artificial Sequence
  Description of Artificial Sequence: Synthetic oligonucleotide
ucuugguguguccgcuuca

SEQ ID NO: 84025 - RNA, 19 nt, Artificial Sequence
  Description of Artificial Sequence: Synthetic oligonucleotide
aucguuuauuccgugcaga

SEQ ID NO: 84026 - RNA, 19 nt, Artificial Sequence
  Description of Artificial Sequence: Synthetic oligonucleotide
agcuaucagugauguccac

SEQ ID NO: 84027 - RNA, 19 nt, Artificial Sequence
  Description of Artificial Sequence: Synthetic oligonucleotide
cauaggucaccugucacca

SEQ ID NO: 84028 - RNA, 19 nt, Artificial Sequence
  Description of Artificial Sequence: Synthetic oligonucleotide
acucaucguugcauuaauc

SEQ ID NO: 84029 - RNA, 19 nt, Artificial Sequence
  Description of Artificial Sequence: Synthetic oligonucleotide
gagugugcgucugcucucg

SEQ ID NO: 84030 - RNA, 19 nt, Artificial Sequence
  Description of Artificial Sequence: Synthetic oligonucleotide
uucagucguacguuacuuu

SEQ ID NO: 84031 - RNA, 19 nt, Artificial Sequence
  Description of Artificial Sequence: Synthetic oligonucleotide
ggaccaauuacugcagagc

SEQ ID NO: 84032 - RNA, 19 nt, Artificial Sequence
  Description of Artificial Sequence: Synthetic oligonucleotide
gccagaaagcgauaaguuc

SEQ ID NO: 84033 - RNA, 19 nt, Artificial Sequence
  Description of Artificial Sequence: Synthetic oligonucleotide
agcuucagucguacguuac

SEQ ID NO: 84034 - RNA, 19 nt, Artificial Sequence
  Description of Artificial Sequence: Synthetic oligonucleotide
cagacucgaguuacucagc

SEQ ID NO: 84035 - RNA, 19 nt, Artificial Sequence
  Description of Artificial Sequence: Synthetic oligonucleotide
ggugaauauaaccauguuu

SEQ ID NO: 84036 - RNA, 19 nt, Artificial Sequence
  Description of Artificial Sequence: Synthetic oligonucleotide
caaguuguugucacggcua

SEQ ID NO: 84037 - RNA, 19 nt, Artificial Sequence
  Description of Artificial Sequence: Synthetic oligonucleotide
acgguuggguaaaauauau

SEQ ID NO: 84038 - RNA, 19 nt, Artificial Sequence
  Description of Artificial Sequence: Synthetic oligonucleotide
ggaggucaaacuucucgug

SEQ ID NO: 84039 - RNA, 19 nt, Artificial Sequence
  Description of Artificial Sequence: Synthetic oligonucleotide
ugccccuuuggaccaauua

SEQ ID NO: 84040 - RNA, 19 nt, Artificial Sequence
  Description of Artificial Sequence: Synthetic oligonucleotide
cauucagcaaaaugagcua

SEQ ID NO: 84041 - RNA, 19 nt, Artificial Sequence
  Description of Artificial Sequence: Synthetic oligonucleotide
ucgaguuacucagcaggcu

SEQ ID NO: 84042 - RNA, 19 nt, Artificial Sequence
  Description of Artificial Sequence: Synthetic oligonucleotide
ugucacggcuacucagggu

SEQ ID NO: 84043 - RNA, 19 nt, Artificial Sequence
  Description of Artificial Sequence: Synthetic oligonucleotide
augcgggaguguccuuggc

SEQ ID NO: 84044 - RNA, 19 nt, Artificial Sequence
  Description of Artificial Sequence: Synthetic oligonucleotide
aggugaauauaaccauguu

SEQ ID NO: 84045 - RNA, 19 nt, Artificial Sequence
  Description of Artificial Sequence: Synthetic oligonucleotide
ucaagcuuacagcgccgau

SEQ ID NO: 84046 - RNA, 19 nt, Artificial Sequence
  Description of Artificial Sequence: Synthetic oligonucleotide
agccucacaagcguuugcu

SEQ ID NO: 84047 - RNA, 19 nt, Artificial Sequence
  Description of Artificial Sequence: Synthetic oligonucleotide
ugcucucgcaagucuucca

SEQ ID NO: 84048 - RNA, 19 nt, Artificial Sequence
  Description of Artificial Sequence: Synthetic oligonucleotide
agaaaggcauagauaccga

SEQ ID NO: 84049 - RNA, 19 nt, Artificial Sequence
  Description of Artificial Sequence: Synthetic oligonucleotide
gccccuuuggaccaauuac

SEQ ID NO: 84050 - RNA, 19 nt, Artificial Sequence
  Description of Artificial Sequence: Synthetic oligonucleotide
agggugcaacacaaaauca

SEQ ID NO: 84051 - RNA, 19 nt, Artificial Sequence
  Description of Artificial Sequence: Synthetic oligonucleotide
guucuacaacuacaguuua

SEQ ID NO: 84052 - RNA, 19 nt, Artificial Sequence
  Description of Artificial Sequence: Synthetic oligonucleotide
uagcuucagucguacguua

SEQ ID NO: 84053 - RNA, 19 nt, Artificial Sequence
  Description of Artificial Sequence: Synthetic oligonucleotide
agacaguaugaugcaggug

SEQ ID NO: 84054 - RNA, 19 nt, Artificial Sequence
  Description of Artificial Sequence: Synthetic oligonucleotide
gcgccgauacagcucauag

SEQ ID NO: 84055 - RNA, 19 nt, Artificial Sequence
  Description of Artificial Sequence: Synthetic oligonucleotide
cugucucccuacagccacg

SEQ ID NO: 84056 - RNA, 19 nt, Artificial Sequence
  Description of Artificial Sequence: Synthetic oligonucleotide
cuuggccggcuuuauguga

SEQ ID NO: 84057 - RNA, 19 nt, Artificial Sequence
  Description of Artificial Sequence: Synthetic oligonucleotide
ccgauacagcucauagugg

SEQ ID NO: 84058 - RNA, 19 nt, Artificial Sequence
  Description of Artificial Sequence: Synthetic oligonucleotide
ccgcuuuaggucuuggcac

SEQ ID NO: 84059 - RNA, 19 nt, Artificial Sequence
  Description of Artificial Sequence: Synthetic oligonucleotide
aaugcccgucucacccacg

SEQ ID NO: 84060 - RNA, 19 nt, Artificial Sequence
  Description of Artificial Sequence: Synthetic oligonucleotide
ccuguugccacuuggaaua

SEQ ID NO: 84061 - RNA, 19 nt, Artificial Sequence
  Description of Artificial Sequence: Synthetic oligonucleotide
cccuuuggaccaauuacug

SEQ ID NO: 84062 - RNA, 19 nt, Artificial Sequence
  Description of Artificial Sequence: Synthetic oligonucleotide
caccugucaccacaccaug

SEQ ID NO: 84063 - RNA, 19 nt, Artificial Sequence
  Description of Artificial Sequence: Synthetic oligonucleotide
uucuggcuuuuaaccggac

SEQ ID NO: 84064 - RNA, 19 nt, Artificial Sequence
  Description of Artificial Sequence: Synthetic oligonucleotide
cacacgcucagaucaaaua

SEQ ID NO: 84065 - RNA, 19 nt, Artificial Sequence
  Description of Artificial Sequence: Synthetic oligonucleotide
accacugcgaagggaagau

SEQ ID NO: 84066 - RNA, 19 nt, Artificial Sequence
  Description of Artificial Sequence: Synthetic oligonucleotide
gucguacguuacuuuccug

SEQ ID NO: 84067 - RNA, 19 nt, Artificial Sequence
  Description of Artificial Sequence: Synthetic oligonucleotide
agggacuacugugaagaaa

SEQ ID NO: 84068 - RNA, 19 nt, Artificial Sequence
  Description of Artificial Sequence: Synthetic oligonucleotide
ccuucauaccuacauacaa

SEQ ID NO: 84069 - RNA, 19 nt, Artificial Sequence
  Description of Artificial Sequence: Synthetic oligonucleotide
uuuuaacgguuggguaaaa

SEQ ID NO: 84070 - RNA, 19 nt, Artificial Sequence
  Description of Artificial Sequence: Synthetic oligonucleotide
gcaggcgugaauccucgug

SEQ ID NO: 84071 - RNA, 19 nt, Artificial Sequence
  Description of Artificial Sequence: Synthetic oligonucleotide
gcacuagugauauaugcau

SEQ ID NO: 84072 - RNA, 19 nt, Artificial Sequence
  Description of Artificial Sequence: Synthetic oligonucleotide
cuaugggcuuauagcuguc

SEQ ID NO: 84073 - RNA, 19 nt, Artificial Sequence
  Description of Artificial Sequence: Synthetic oligonucleotide
caucgacuuuccagaaaca

SEQ ID NO: 84074 - RNA, 19 nt, Artificial Sequence
  Description of Artificial Sequence: Synthetic oligonucleotide
acguuacuuuccugaaguu

SEQ ID NO: 84075 - RNA, 19 nt, Artificial Sequence
  Description of Artificial Sequence: Synthetic oligonucleotide
caacaaugguuagcuucag

SEQ ID NO: 84076 - RNA, 19 nt, Artificial Sequence
  Description of Artificial Sequence: Synthetic oligonucleotide
ggugaaugcgggagugucc

SEQ ID NO: 84077 - RNA, 19 nt, Artificial Sequence
  Description of Artificial Sequence: Synthetic oligonucleotide
acucugcggaacacuuggg

SEQ ID NO: 84078 - RNA, 19 nt, Artificial Sequence
  Description of Artificial Sequence: Synthetic oligonucleotide
cgaguuacucagcaggcug

SEQ ID NO: 84079 - RNA, 19 nt, Artificial Sequence
  Description of Artificial Sequence: Synthetic oligonucleotide
aggccauaacucagcuaac

SEQ ID NO: 84080 - RNA, 19 nt, Artificial Sequence
  Description of Artificial Sequence: Synthetic oligonucleotide
guaguugaagagagaacgu

SEQ ID NO: 84081 - RNA, 19 nt, Artificial Sequence
  Description of Artificial Sequence: Synthetic oligonucleotide
auuuuaccccacuguccuu

SEQ ID NO: 84082 - RNA, 19 nt, Artificial Sequence
  Description of Artificial Sequence: Synthetic oligonucleotide
uggccggcuuuaugugaag

SEQ ID NO: 84083 - RNA, 19 nt, Artificial Sequence
  Description of Artificial Sequence: Synthetic oligonucleotide
ccugucaauggaacuagga

SEQ ID NO: 84084 - RNA, 19 nt, Artificial Sequence
  Description of Artificial Sequence: Synthetic oligonucleotide
gcuacugguauguggggaa

SEQ ID NO: 84085 - RNA, 19 nt, Artificial Sequence
  Description of Artificial Sequence: Synthetic oligonucleotide
ggcucauugugaguagcug

SEQ ID NO: 84086 - RNA, 19 nt, Artificial Sequence
  Description of Artificial Sequence: Synthetic oligonucleotide
ggauuugccaaugcccguc

SEQ ID NO: 84087 - RNA, 19 nt, Artificial Sequence
  Description of Artificial Sequence: Synthetic oligonucleotide
gcgauaaguuccgaaguuc

SEQ ID NO: 84088 - RNA, 19 nt, Artificial Sequence
  Description of Artificial Sequence: Synthetic oligonucleotide
cuuacucagacuguacuuu

SEQ ID NO: 84089 - RNA, 19 nt, Artificial Sequence
  Description of Artificial Sequence: Synthetic oligonucleotide
ucacggcuacucaggguuu

SEQ ID NO: 84090 - RNA, 19 nt, Artificial Sequence
  Description of Artificial Sequence: Synthetic oligonucleotide
gcuacucaggguuuuaguu

SEQ ID NO: 84091 - RNA, 19 nt, Artificial Sequence
  Description of Artificial Sequence: Synthetic oligonucleotide
gagcuaagggcuacuggua

SEQ ID NO: 84092 - RNA, 19 nt, Artificial Sequence
  Description of Artificial Sequence: Synthetic oligonucleotide
ggccauaacucagcuaaca

SEQ ID NO: 84093 - RNA, 19 nt, Artificial Sequence
  Description of Artificial Sequence: Synthetic oligonucleotide
ccucaagcuuacagcgccg

SEQ ID NO: 84094 - RNA, 19 nt, Artificial Sequence
  Description of Artificial Sequence: Synthetic oligonucleotide
ggaaggguaugguucacau

SEQ ID NO: 84095 - RNA, 19 nt, Artificial Sequence
  Description of Artificial Sequence: Synthetic oligonucleotide
guaggccauaacucagcua

SEQ ID NO: 84096 - RNA, 19 nt, Artificial Sequence
  Description of Artificial Sequence: Synthetic oligonucleotide
cucaagcuuacagcgccga

SEQ ID NO: 84097 - RNA, 19 nt, Artificial Sequence
  Description of Artificial Sequence: Synthetic oligonucleotide
uuuccccgcuuuaggucuu

SEQ ID NO: 84098 - RNA, 19 nt, Artificial Sequence
  Description of Artificial Sequence: Synthetic oligonucleotide
cauaguggcgagugugcgu

SEQ ID NO: 84099 - RNA, 19 nt, Artificial Sequence
  Description of Artificial Sequence: Synthetic oligonucleotide
uaguggcgagugugcgucu

SEQ ID NO: 84100 - RNA, 19 nt, Artificial Sequence
  Description of Artificial Sequence: Synthetic oligonucleotide
cacugacucugcggaacac

SEQ ID NO: 84101 - RNA, 19 nt, Artificial Sequence
  Description of Artificial Sequence: Synthetic oligonucleotide
ggcgugaauccucguguca

SEQ ID NO: 84102 - RNA, 19 nt, Artificial Sequence
  Description of Artificial Sequence: Synthetic oligonucleotide
caguaugaugcagguggga

SEQ ID NO: 84103 - RNA, 19 nt, Artificial Sequence
  Description of Artificial Sequence: Synthetic oligonucleotide
cccuucauaccuacauaca

SEQ ID NO: 84104 - RNA, 19 nt, Artificial Sequence
  Description of Artificial Sequence: Synthetic oligonucleotide
gcuuacucagacuguacuu

SEQ ID NO: 84105 - RNA, 19 nt, Artificial Sequence
  Description of Artificial Sequence: Synthetic oligonucleotide
uuccccgcuuuaggucuug

SEQ ID NO: 84106 - RNA, 19 nt, Artificial Sequence
  Description of Artificial Sequence: Synthetic oligonucleotide
gcuucagucguacguuacu

SEQ ID NO: 84107 - RNA, 19 nt, Artificial Sequence
  Description of Artificial Sequence: Synthetic oligonucleotide
gcuaucagugauguccacu

SEQ ID NO: 84108 - RNA, 19 nt, Artificial Sequence
  Description of Artificial Sequence: Synthetic oligonucleotide
gaccacacgcucagaucaa

SEQ ID NO: 84109 - RNA, 19 nt, Artificial Sequence
  Description of Artificial Sequence: Synthetic oligonucleotide
ggcuacucaggguuuuagu

SEQ ID NO: 84110 - RNA, 19 nt, Artificial Sequence
  Description of Artificial Sequence: Synthetic oligonucleotide
cuucagucguacguuacuu

SEQ ID NO: 84111 - RNA, 19 nt, Artificial Sequence
  Description of Artificial Sequence: Synthetic oligonucleotide
cgugaauccucgugucaug

SEQ ID NO: 84112 - RNA, 19 nt, Artificial Sequence
  Description of Artificial Sequence: Synthetic oligonucleotide
ggaguguccuuggcuuggc

SEQ ID NO: 84113 - RNA, 19 nt, Artificial Sequence
  Description of Artificial Sequence: Synthetic oligonucleotide
gggagacugucaaauccaa

SEQ ID NO: 84114 - RNA, 19 nt, Artificial Sequence
  Description of Artificial Sequence: Synthetic oligonucleotide
cacucaccauucugccuaa

SEQ ID NO: 84115 - RNA, 19 nt, Artificial Sequence
  Description of Artificial Sequence: Synthetic oligonucleotide
cguacguuacuuuccugaa

SEQ ID NO: 84116 - RNA, 19 nt, Artificial Sequence
  Description of Artificial Sequence: Synthetic oligonucleotide
ggguaggagcagaccacac

SEQ ID NO: 84117 - RNA, 19 nt, Artificial Sequence
  Description of Artificial Sequence: Synthetic oligonucleotide
ggcgagugugcgucugcuc

SEQ ID NO: 84118 - RNA, 19 nt, Artificial Sequence
  Description of Artificial Sequence: Synthetic oligonucleotide
ccgucucacccacgcacag

SEQ ID NO: 84119 - RNA, 19 nt, Artificial Sequence
  Description of Artificial Sequence: Synthetic oligonucleotide
acggcuacucaggguuuua

SEQ ID NO: 84120 - RNA, 19 nt, Artificial Sequence
  Description of Artificial Sequence: Synthetic oligonucleotide
gcugaggcggugaguuuuc

SEQ ID NO: 84121 - RNA, 19 nt, Artificial Sequence
  Description of Artificial Sequence: Synthetic oligonucleotide
acucaccauucugccuaau

SEQ ID NO: 84122 - RNA, 19 nt, Artificial Sequence
  Description of Artificial Sequence: Synthetic oligonucleotide
gcgugaauccucgugucau

SEQ ID NO: 84123 - RNA, 19 nt, Artificial Sequence
  Description of Artificial Sequence: Synthetic oligonucleotide
gcgucugcucucgcaaguc

SEQ ID NO: 84124 - RNA, 19 nt, Artificial Sequence
  Description of Artificial Sequence: Synthetic oligonucleotide
ggccaccguuuccucaucu

SEQ ID NO: 84125 - RNA, 19 nt, Artificial Sequence
  Description of Artificial Sequence: Synthetic oligonucleotide
caggugaaugcgggagugu

SEQ ID NO: 84126 - RNA, 19 nt, Artificial Sequence
  Description of Artificial Sequence: Synthetic oligonucleotide
augccccuuuggaccaauu

SEQ ID NO: 84127 - RNA, 19 nt, Artificial Sequence
  Description of Artificial Sequence: Synthetic oligonucleotide
cacggcuacucaggguuuu

SEQ ID NO: 84128 - RNA, 19 nt, Artificial Sequence
  Description of Artificial Sequence: Synthetic oligonucleotide
ccccggacugcugggccug

SEQ ID NO: 84129 - RNA, 19 nt, Artificial Sequence
  Description of Artificial Sequence: Synthetic oligonucleotide
cgucugcucucgcaagucu

SEQ ID NO: 84130 - RNA, 19 nt, Artificial Sequence
  Description of Artificial Sequence: Synthetic oligonucleotide
cagcgccgauacagcucau

SEQ ID NO: 84131 - RNA, 19 nt, Artificial Sequence
  Description of Artificial Sequence: Synthetic oligonucleotide
uuaacuguaaguaauaggg

SEQ ID NO: 84132 - RNA, 19 nt, Artificial Sequence
  Description of Artificial Sequence: Synthetic oligonucleotide
aauauauauauauauauau

SEQ ID NO: 84133 - RNA, 19 nt, Artificial Sequence
  Description of Artificial Sequence: Synthetic oligonucleotide
uauauauauauauauaugu

SEQ ID NO: 84134 - RNA, 19 nt, Artificial Sequence
  Description of Artificial Sequence: Synthetic oligonucleotide
auuuauaauauauauauau

SEQ ID NO: 84135 - RNA, 19 nt, Artificial Sequence
  Description of Artificial Sequence: Synthetic oligonucleotide
uauaucuauauauauaucu

SEQ ID NO: 84136 - RNA, 19 nt, Artificial Sequence
  Description of Artificial Sequence: Synthetic oligonucleotide
uauauauaucuauauaucc

SEQ ID NO: 84137 - RNA, 19 nt, Artificial Sequence
  Description of Artificial Sequence: Synthetic oligonucleotide
uauauauauaucuauauau

SEQ ID NO: 84138 - RNA, 19 nt, Artificial Sequence
  Description of Artificial Sequence: Synthetic oligonucleotide
uauauauauauauauauau

SEQ ID NO: 84139 - RNA, 19 nt, Artificial Sequence
  Description of Artificial Sequence: Synthetic oligonucleotide
uauauauauauauauguac

SEQ ID NO: 84140 - RNA, 19 nt, Artificial Sequence
  Description of Artificial Sequence: Synthetic oligonucleotide
uauauaucuauauauauau

SEQ ID NO: 84141 - RNA, 19 nt, Artificial Sequence
  Description of Artificial Sequence: Synthetic oligonucleotide
aacauaaucgcauuguaga

SEQ ID NO: 84142 - RNA, 19 nt, Artificial Sequence
  Description of Artificial Sequence: Synthetic oligonucleotide
uuauaauauauauauauau

SEQ ID NO: 84143 - RNA, 19 nt, Artificial Sequence
  Description of Artificial Sequence: Synthetic oligonucleotide
auaauauauauauauauau

SEQ ID NO: 84144 - RNA, 19 nt, Artificial Sequence
  Description of Artificial Sequence: Synthetic oligonucleotide
uuccuaaucacuuagcacc

SEQ ID NO: 84145 - RNA, 19 nt, Artificial Sequence
  Description of Artificial Sequence: Synthetic oligonucleotide
auaaucgcauuguagaugg

SEQ ID NO: 84146 - RNA, 19 nt, Artificial Sequence
  Description of Artificial Sequence: Synthetic oligonucleotide
uguuuaaagguuagaaucc

SEQ ID NO: 84147 - RNA, 19 nt, Artificial Sequence
  Description of Artificial Sequence: Synthetic oligonucleotide
guuucucucaccuaguagg

SEQ ID NO: 84148 - RNA, 19 nt, Artificial Sequence
  Description of Artificial Sequence: Synthetic oligonucleotide
uauaauauauauauauaua

SEQ ID NO: 84149 - RNA, 19 nt, Artificial Sequence
  Description of Artificial Sequence: Synthetic oligonucleotide
uauauauaucuauauauau

SEQ ID NO: 84150 - RNA, 19 nt, Artificial Sequence
  Description of Artificial Sequence: Synthetic oligonucleotide
uauauauauauauguacac

SEQ ID NO: 84151 - RNA, 19 nt, Artificial Sequence
  Description of Artificial Sequence: Synthetic oligonucleotide
aaaucucauaagugguacc

SEQ ID NO: 84152 - RNA, 19 nt, Artificial Sequence
  Description of Artificial Sequence: Synthetic oligonucleotide
uaggaggacgguaaaagcg

SEQ ID NO: 84153 - RNA, 19 nt, Artificial Sequence
  Description of Artificial Sequence: Synthetic oligonucleotide
uuuauaauauauauauaua

SEQ ID NO: 84154 - RNA, 19 nt, Artificial Sequence
  Description of Artificial Sequence: Synthetic oligonucleotide
aagaggaacuaguacgagg

SEQ ID NO: 84155 - RNA, 19 nt, Artificial Sequence
  Description of Artificial Sequence: Synthetic oligonucleotide
uguuacaacagccauuggu

SEQ ID NO: 84156 - RNA, 19 nt, Artificial Sequence
  Description of Artificial Sequence: Synthetic oligonucleotide
ucuauauauauaucuauau

SEQ ID NO: 84157 - RNA, 19 nt, Artificial Sequence
  Description of Artificial Sequence: Synthetic oligonucleotide
auuuauacaugguaggggu

SEQ ID NO: 84158 - RNA, 19 nt, Artificial Sequence
  Description of Artificial Sequence: Synthetic oligonucleotide
uauuuauacaugguagggg

SEQ ID NO: 84159 - RNA, 19 nt, Artificial Sequence
  Description of Artificial Sequence: Synthetic oligonucleotide
uaauauauauauauauaua

SEQ ID NO: 84160 - RNA, 19 nt, Artificial Sequence
  Description of Artificial Sequence: Synthetic oligonucleotide
auauauauaucuauauauc

SEQ ID NO: 84161 - RNA, 19 nt, Artificial Sequence
  Description of Artificial Sequence: Synthetic oligonucleotide
ugucauaagauagacuucc

SEQ ID NO: 84162 - RNA, 19 nt, Artificial Sequence
  Description of Artificial Sequence: Synthetic oligonucleotide
uuauauauauaucuauaua

SEQ ID NO: 84163 - RNA, 19 nt, Artificial Sequence
  Description of Artificial Sequence: Synthetic oligonucleotide
gagacugcuauccucauug

SEQ ID NO: 84164 - RNA, 19 nt, Artificial Sequence
  Description of Artificial Sequence: Synthetic oligonucleotide
auauuuauacaugguaggg

SEQ ID NO: 84165 - RNA, 19 nt, Artificial Sequence
  Description of Artificial Sequence: Synthetic oligonucleotide
gucuuauaaaucaaagggg

SEQ ID NO: 84166 - RNA, 19 nt, Artificial Sequence
  Description of Artificial Sequence: Synthetic oligonucleotide
aagggaaggucuuauaaau

SEQ ID NO: 84167 - RNA, 19 nt, Artificial Sequence
  Description of Artificial Sequence: Synthetic oligonucleotide
auauauauauauauguaca

SEQ ID NO: 84168 - RNA, 19 nt, Artificial Sequence
  Description of Artificial Sequence: Synthetic oligonucleotide
uuaguugauaacugggaca

SEQ ID NO: 84169 - RNA, 19 nt, Artificial Sequence
  Description of Artificial Sequence: Synthetic oligonucleotide
cauugaucggcccagguag

SEQ ID NO: 84170 - RNA, 19 nt, Artificial Sequence
  Description of Artificial Sequence: Synthetic oligonucleotide
aaguagaucaaguucuuuu

SEQ ID NO: 84171 - RNA, 19 nt, Artificial Sequence
  Description of Artificial Sequence: Synthetic oligonucleotide
aaacauaaucgcauuguag

SEQ ID NO: 84172 - RNA, 19 nt, Artificial Sequence
  Description of Artificial Sequence: Synthetic oligonucleotide
uuuaucugaccaagaaccc

SEQ ID NO: 84173 - RNA, 19 nt, Artificial Sequence
  Description of Artificial Sequence: Synthetic oligonucleotide
ucgauauuuauacauggua

SEQ ID NO: 84174 - RNA, 19 nt, Artificial Sequence
  Description of Artificial Sequence: Synthetic oligonucleotide
auauauauauauauauaug

SEQ ID NO: 84175 - RNA, 19 nt, Artificial Sequence
  Description of Artificial Sequence: Synthetic oligonucleotide
uaagauagacuuccauugc

SEQ ID NO: 84176 - RNA, 19 nt, Artificial Sequence
  Description of Artificial Sequence: Synthetic oligonucleotide
auuuccuuaguugauaacu

SEQ ID NO: 84177 - RNA, 19 nt, Artificial Sequence
  Description of Artificial Sequence: Synthetic oligonucleotide
uuauacaugguagggguag

SEQ ID NO: 84178 - RNA, 19 nt, Artificial Sequence
  Description of Artificial Sequence: Synthetic oligonucleotide
cuauaagacauugaucggc

SEQ ID NO: 84179 - RNA, 19 nt, Artificial Sequence
  Description of Artificial Sequence: Synthetic oligonucleotide
ugucauagcggacuggcga

SEQ ID NO: 84180 - RNA, 19 nt, Artificial Sequence
  Description of Artificial Sequence: Synthetic oligonucleotide
guuccugcgaccaauacag

SEQ ID NO: 84181 - RNA, 19 nt, Artificial Sequence
  Description of Artificial Sequence: Synthetic oligonucleotide
acuaagcccaccacaaucc

SEQ ID NO: 84182 - RNA, 19 nt, Artificial Sequence
  Description of Artificial Sequence: Synthetic oligonucleotide
ugaacgaauggacugcaac

SEQ ID NO: 84183 - RNA, 19 nt, Artificial Sequence
  Description of Artificial Sequence: Synthetic oligonucleotide
aggugguacccucugaacg

SEQ ID NO: 84184 - RNA, 19 nt, Artificial Sequence
  Description of Artificial Sequence: Synthetic oligonucleotide
cuacuaucugcaauugagg

SEQ ID NO: 84185 - RNA, 19 nt, Artificial Sequence
  Description of Artificial Sequence: Synthetic oligonucleotide
gaauccguaacaauaauaa

SEQ ID NO: 84186 - RNA, 19 nt, Artificial Sequence
  Description of Artificial Sequence: Synthetic oligonucleotide
cuuaguugauaacugggac

SEQ ID NO: 84187 - RNA, 19 nt, Artificial Sequence
  Description of Artificial Sequence: Synthetic oligonucleotide
uuaaagggucucuguauag

SEQ ID NO: 84188 - RNA, 19 nt, Artificial Sequence
  Description of Artificial Sequence: Synthetic oligonucleotide
uauuuauaauauauauaua

SEQ ID NO: 84189 - RNA, 19 nt, Artificial Sequence
  Description of Artificial Sequence: Synthetic oligonucleotide
agggccccaacucucaacc

SEQ ID NO: 84190 - RNA, 19 nt, Artificial Sequence
  Description of Artificial Sequence: Synthetic oligonucleotide
aaaacaagccucauccucu

SEQ ID NO: 84191 - RNA, 19 nt, Artificial Sequence
  Description of Artificial Sequence: Synthetic oligonucleotide
ucguugggaaaauuccugg

SEQ ID NO: 84192 - RNA, 19 nt, Artificial Sequence
  Description of Artificial Sequence: Synthetic oligonucleotide
auauauauauauguacaca

SEQ ID NO: 84193 - RNA, 19 nt, Artificial Sequence
  Description of Artificial Sequence: Synthetic oligonucleotide
aggaacuaguacgaggggc

SEQ ID NO: 84194 - RNA, 19 nt, Artificial Sequence
  Description of Artificial Sequence: Synthetic oligonucleotide
uggagcucggaaaucaucu

SEQ ID NO: 84195 - RNA, 19 nt, Artificial Sequence
  Description of Artificial Sequence: Synthetic oligonucleotide
acuaguacgaggggcaugg

SEQ ID NO: 84196 - RNA, 19 nt, Artificial Sequence
  Description of Artificial Sequence: Synthetic oligonucleotide
ggucgauauuuauacaugg

SEQ ID NO: 84197 - RNA, 19 nt, Artificial Sequence
  Description of Artificial Sequence: Synthetic oligonucleotide
aucggaagcuuucuggcuc

SEQ ID NO: 84198 - RNA, 19 nt, Artificial Sequence
  Description of Artificial Sequence: Synthetic oligonucleotide
gauagacuuccauugcgug

SEQ ID NO: 84199 - RNA, 19 nt, Artificial Sequence
  Description of Artificial Sequence: Synthetic oligonucleotide
acugcaacuggcccaacuc

SEQ ID NO: 84200 - RNA, 19 nt, Artificial Sequence
  Description of Artificial Sequence: Synthetic oligonucleotide
caucugguuugccaaaacg

SEQ ID NO: 84201 - RNA, 19 nt, Artificial Sequence
  Description of Artificial Sequence: Synthetic oligonucleotide
uggucgauauuuauacaug

SEQ ID NO: 84202 - RNA, 19 nt, Artificial Sequence
  Description of Artificial Sequence: Synthetic oligonucleotide
ucuauauaucccucccuug

SEQ ID NO: 84203 - RNA, 19 nt, Artificial Sequence
  Description of Artificial Sequence: Synthetic oligonucleotide
uaagugguaccacccacgc

SEQ ID NO: 84204 - RNA, 19 nt, Artificial Sequence
  Description of Artificial Sequence: Synthetic oligonucleotide
aauccguaacaauaauaaa

SEQ ID NO: 84205 - RNA, 19 nt, Artificial Sequence
  Description of Artificial Sequence: Synthetic oligonucleotide
cuaaaggugggucuggcuc

SEQ ID NO: 84206 - RNA, 19 nt, Artificial Sequence
  Description of Artificial Sequence: Synthetic oligonucleotide
aagugguaccacccacgcc

SEQ ID NO: 84207 - RNA, 19 nt, Artificial Sequence
  Description of Artificial Sequence: Synthetic oligonucleotide
agaaacauaaucgcauugu

SEQ ID NO: 84208 - RNA, 19 nt, Artificial Sequence
  Description of Artificial Sequence: Synthetic oligonucleotide
aucaugaaacugugacccc

SEQ ID NO: 84209 - RNA, 19 nt, Artificial Sequence
  Description of Artificial Sequence: Synthetic oligonucleotide
aaacgugggugccucucgg

SEQ ID NO: 84210 - RNA, 19 nt, Artificial Sequence
  Description of Artificial Sequence: Synthetic oligonucleotide
cugguaacggagaagagga

SEQ ID NO: 84211 - RNA, 19 nt, Artificial Sequence
  Description of Artificial Sequence: Synthetic oligonucleotide
guagaccagagaaugaggc

SEQ ID NO: 84212 - RNA, 19 nt, Artificial Sequence
  Description of Artificial Sequence: Synthetic oligonucleotide
auaucuguaguuccugcga

SEQ ID NO: 84213 - RNA, 19 nt, Artificial Sequence
  Description of Artificial Sequence: Synthetic oligonucleotide
aacgugggugccucucggc

SEQ ID NO: 84214 - RNA, 19 nt, Artificial Sequence
  Description of Artificial Sequence: Synthetic oligonucleotide
ccuggguccauaaaggugg

SEQ ID NO: 84215 - RNA, 19 nt, Artificial Sequence
  Description of Artificial Sequence: Synthetic oligonucleotide
cugcuauccucauugguag

SEQ ID NO: 84216 - RNA, 19 nt, Artificial Sequence
  Description of Artificial Sequence: Synthetic oligonucleotide
ugggacuacugagaggugg

SEQ ID NO: 84217 - RNA, 19 nt, Artificial Sequence
  Description of Artificial Sequence: Synthetic oligonucleotide
gaaccccagacuuacccag

SEQ ID NO: 84218 - RNA, 19 nt, Artificial Sequence
  Description of Artificial Sequence: Synthetic oligonucleotide
auauaucuauauauauauc

SEQ ID NO: 84219 - RNA, 19 nt, Artificial Sequence
  Description of Artificial Sequence: Synthetic oligonucleotide
uuucucucaccuaguagga

SEQ ID NO: 84220 - RNA, 19 nt, Artificial Sequence
  Description of Artificial Sequence: Synthetic oligonucleotide
auuaaagggucucuguaua

SEQ ID NO: 84221 - RNA, 19 nt, Artificial Sequence
  Description of Artificial Sequence: Synthetic oligonucleotide
caugcaaaguaagggagcc

SEQ ID NO: 84222 - RNA, 19 nt, Artificial Sequence
  Description of Artificial Sequence: Synthetic oligonucleotide
uccuaaucacuuagcacca

SEQ ID NO: 84223 - RNA, 19 nt, Artificial Sequence
  Description of Artificial Sequence: Synthetic oligonucleotide
aagggagagguauagccua

SEQ ID NO: 84224 - RNA, 19 nt, Artificial Sequence
  Description of Artificial Sequence: Synthetic oligonucleotide
gagggugcuauuuccuuag

SEQ ID NO: 84225 - RNA, 19 nt, Artificial Sequence
  Description of Artificial Sequence: Synthetic oligonucleotide
gccuuaaccagauaaaaca

SEQ ID NO: 84226 - RNA, 19 nt, Artificial Sequence
  Description of Artificial Sequence: Synthetic oligonucleotide
auauauauauauauaugua

SEQ ID NO: 84227 - RNA, 19 nt, Artificial Sequence
  Description of Artificial Sequence: Synthetic oligonucleotide
auauauauaucuauauaua

SEQ ID NO: 84228 - RNA, 19 nt, Artificial Sequence
  Description of Artificial Sequence: Synthetic oligonucleotide
auagacuuccauugcgugu

SEQ ID NO: 84229 - RNA, 19 nt, Artificial Sequence
  Description of Artificial Sequence: Synthetic oligonucleotide
auauauauauauauauaua

SEQ ID NO: 84230 - RNA, 19 nt, Artificial Sequence
  Description of Artificial Sequence: Synthetic oligonucleotide
gcuacuaucugcaauugag

SEQ ID NO: 84231 - RNA, 19 nt, Artificial Sequence
  Description of Artificial Sequence: Synthetic oligonucleotide
auauauaucuauauauaua

SEQ ID NO: 84232 - RNA, 19 nt, Artificial Sequence
  Description of Artificial Sequence: Synthetic oligonucleotide
cuuauauauauaucuauau

SEQ ID NO: 84233 - RNA, 19 nt, Artificial Sequence
  Description of Artificial Sequence: Synthetic oligonucleotide
aaccccauggcauuuugua

SEQ ID NO: 84234 - RNA, 19 nt, Artificial Sequence
  Description of Artificial Sequence: Synthetic oligonucleotide
aguuccugcgaccaauaca

SEQ ID NO: 84235 - RNA, 19 nt, Artificial Sequence
  Description of Artificial Sequence: Synthetic oligonucleotide
uaguacgaggggcauggcc

SEQ ID NO: 84236 - RNA, 19 nt, Artificial Sequence
  Description of Artificial Sequence: Synthetic oligonucleotide
cuuuccuaaucacuuagca

SEQ ID NO: 84237 - RNA, 19 nt, Artificial Sequence
  Description of Artificial Sequence: Synthetic oligonucleotide
aucuauauaucccucccuu

SEQ ID NO: 84238 - RNA, 19 nt, Artificial Sequence
  Description of Artificial Sequence: Synthetic oligonucleotide
uguaaccuggucgauauuu

SEQ ID NO: 84239 - RNA, 19 nt, Artificial Sequence
  Description of Artificial Sequence: Synthetic oligonucleotide
cauaaucgcauuguagaug

SEQ ID NO: 84240 - RNA, 19 nt, Artificial Sequence
  Description of Artificial Sequence: Synthetic oligonucleotide
uggaucaaagugaaagcuu

SEQ ID NO: 84241 - RNA, 19 nt, Artificial Sequence
  Description of Artificial Sequence: Synthetic oligonucleotide
acggcuaacauuguuacaa

SEQ ID NO: 84242 - RNA, 19 nt, Artificial Sequence
  Description of Artificial Sequence: Synthetic oligonucleotide
cuauauauauaucuauaua

SEQ ID NO: 84243 - RNA, 19 nt, Artificial Sequence
  Description of Artificial Sequence: Synthetic oligonucleotide
acauaaucgcauuguagau

SEQ ID NO: 84244 - RNA, 19 nt, Artificial Sequence
  Description of Artificial Sequence: Synthetic oligonucleotide
uccucuuggaaucgguagu

SEQ ID NO: 84245 - RNA, 19 nt, Artificial Sequence
  Description of Artificial Sequence: Synthetic oligonucleotide
cucguugggaaaauuccug

SEQ ID NO: 84246 - RNA, 19 nt, Artificial Sequence
  Description of Artificial Sequence: Synthetic oligonucleotide
uugguugugcguccccuag

SEQ ID NO: 84247 - RNA, 19 nt, Artificial Sequence
  Description of Artificial Sequence: Synthetic oligonucleotide
gaaacauaaucgcauugua

SEQ ID NO: 84248 - RNA, 19 nt, Artificial Sequence
  Description of Artificial Sequence: Synthetic oligonucleotide
uugugcguccccuagccac

SEQ ID NO: 84249 - RNA, 19 nt, Artificial Sequence
  Description of Artificial Sequence: Synthetic oligonucleotide
agaaauaucuguaguuccu

SEQ ID NO: 84250 - RNA, 19 nt, Artificial Sequence
  Description of Artificial Sequence: Synthetic oligonucleotide
ggaacaucuaggaggacgg

SEQ ID NO: 84251 - RNA, 19 nt, Artificial Sequence
  Description of Artificial Sequence: Synthetic oligonucleotide
ucaugaaacugugaccccu

SEQ ID NO: 84252 - RNA, 19 nt, Artificial Sequence
  Description of Artificial Sequence: Synthetic oligonucleotide
aguaauagggaagcauuga

SEQ ID NO: 84253 - RNA, 19 nt, Artificial Sequence
  Description of Artificial Sequence: Synthetic oligonucleotide
agcugguuagaucaggauu

SEQ ID NO: 84254 - RNA, 19 nt, Artificial Sequence
  Description of Artificial Sequence: Synthetic oligonucleotide
uguguucgaagcccugugu

SEQ ID NO: 84255 - RNA, 19 nt, Artificial Sequence
  Description of Artificial Sequence: Synthetic oligonucleotide
agauugucauagcggacug

SEQ ID NO: 84256 - RNA, 19 nt, Artificial Sequence
  Description of Artificial Sequence: Synthetic oligonucleotide
gaauuuaccuguaaccugu

SEQ ID NO: 84257 - RNA, 19 nt, Artificial Sequence
  Description of Artificial Sequence: Synthetic oligonucleotide
aauggcuaaucagaauaaa

SEQ ID NO: 84258 - RNA, 19 nt, Artificial Sequence
  Description of Artificial Sequence: Synthetic oligonucleotide
uguaaguaauagggaagca

SEQ ID NO: 84259 - RNA, 19 nt, Artificial Sequence
  Description of Artificial Sequence: Synthetic oligonucleotide
gucauagcggacuggcgag

SEQ ID NO: 84260 - RNA, 19 nt, Artificial Sequence
  Description of Artificial Sequence: Synthetic oligonucleotide
gaacgaauggacugcaacu

SEQ ID NO: 84261 - RNA, 19 nt, Artificial Sequence
  Description of Artificial Sequence: Synthetic oligonucleotide
gcuauaagacauugaucgg

SEQ ID NO: 84262 - RNA, 19 nt, Artificial Sequence
  Description of Artificial Sequence: Synthetic oligonucleotide
acaccauuucaugcgcacc

SEQ ID NO: 84263 - RNA, 19 nt, Artificial Sequence
  Description of Artificial Sequence: Synthetic oligonucleotide
ugaaacugugaccccuuuc

SEQ ID NO: 84264 - RNA, 19 nt, Artificial Sequence
  Description of Artificial Sequence: Synthetic oligonucleotide
aucucauaagugguaccac

SEQ ID NO: 84265 - RNA, 19 nt, Artificial Sequence
  Description of Artificial Sequence: Synthetic oligonucleotide
gaugucaaugagccuagaa

SEQ ID NO: 84266 - RNA, 19 nt, Artificial Sequence
  Description of Artificial Sequence: Synthetic oligonucleotide
uagaauccguaacaauaau

SEQ ID NO: 84267 - RNA, 19 nt, Artificial Sequence
  Description of Artificial Sequence: Synthetic oligonucleotide
auugcgugucugauuggcc

SEQ ID NO: 84268 - RNA, 19 nt, Artificial Sequence
  Description of Artificial Sequence: Synthetic oligonucleotide
agcugggcgucccagagga

SEQ ID NO: 84269 - RNA, 19 nt, Artificial Sequence
  Description of Artificial Sequence: Synthetic oligonucleotide
ccuuaaccagauaaaacac

SEQ ID NO: 84270 - RNA, 19 nt, Artificial Sequence
  Description of Artificial Sequence: Synthetic oligonucleotide
agggugagcaauugcacaa

SEQ ID NO: 84271 - RNA, 19 nt, Artificial Sequence
  Description of Artificial Sequence: Synthetic oligonucleotide
ucccagaggagucuugcuc

SEQ ID NO: 84272 - RNA, 19 nt, Artificial Sequence
  Description of Artificial Sequence: Synthetic oligonucleotide
gaagaggaacuaguacgag

SEQ ID NO: 84273 - RNA, 19 nt, Artificial Sequence
  Description of Artificial Sequence: Synthetic oligonucleotide
ugacugucguagcagcuuc

SEQ ID NO: 84274 - RNA, 19 nt, Artificial Sequence
  Description of Artificial Sequence: Synthetic oligonucleotide
gcugucauaagauagacuu

SEQ ID NO: 84275 - RNA, 19 nt, Artificial Sequence
  Description of Artificial Sequence: Synthetic oligonucleotide
caacucucaaccccauggc

SEQ ID NO: 84276 - RNA, 19 nt, Artificial Sequence
  Description of Artificial Sequence: Synthetic oligonucleotide
uguucgaagcccuguguau

SEQ ID NO: 84277 - RNA, 19 nt, Artificial Sequence
  Description of Artificial Sequence: Synthetic oligonucleotide
aggacgguaaaagcggcag

SEQ ID NO: 84278 - RNA, 19 nt, Artificial Sequence
  Description of Artificial Sequence: Synthetic oligonucleotide
uggaaucgguaguuuaaaa

SEQ ID NO: 84279 - RNA, 19 nt, Artificial Sequence
  Description of Artificial Sequence: Synthetic oligonucleotide
cucuguauagaggcugggg

SEQ ID NO: 84280 - RNA, 19 nt, Artificial Sequence
  Description of Artificial Sequence: Synthetic oligonucleotide
auucacaccuccccggaau

SEQ ID NO: 84281 - RNA, 19 nt, Artificial Sequence
  Description of Artificial Sequence: Synthetic oligonucleotide
cucugaacgaauggacugc

SEQ ID NO: 84282 - RNA, 19 nt, Artificial Sequence
  Description of Artificial Sequence: Synthetic oligonucleotide
cuaagcccaccacaauccc

SEQ ID NO: 84283 - RNA, 19 nt, Artificial Sequence
  Description of Artificial Sequence: Synthetic oligonucleotide
uguaucgacucagguccgg

SEQ ID NO: 84284 - RNA, 19 nt, Artificial Sequence
  Description of Artificial Sequence: Synthetic oligonucleotide
agccuauacucuugggcug

SEQ ID NO: 84285 - RNA, 19 nt, Artificial Sequence
  Description of Artificial Sequence: Synthetic oligonucleotide
uggcgagacagauugucau

SEQ ID NO: 84286 - RNA, 19 nt, Artificial Sequence
  Description of Artificial Sequence: Synthetic oligonucleotide
augcaaaguaagggagccc

SEQ ID NO: 84287 - RNA, 19 nt, Artificial Sequence
  Description of Artificial Sequence: Synthetic oligonucleotide
acucagguccggcuuagga

SEQ ID NO: 84288 - RNA, 19 nt, Artificial Sequence
  Description of Artificial Sequence: Synthetic oligonucleotide
aacaucuaggaggacggua

SEQ ID NO: 84289 - RNA, 19 nt, Artificial Sequence
  Description of Artificial Sequence: Synthetic oligonucleotide
uucaagcuaucuccacgac

SEQ ID NO: 84290 - RNA, 19 nt, Artificial Sequence
  Description of Artificial Sequence: Synthetic oligonucleotide
agcaccauauugagguggg

SEQ ID NO: 84291 - RNA, 19 nt, Artificial Sequence
  Description of Artificial Sequence: Synthetic oligonucleotide
ggccccuuagcccaucugg

SEQ ID NO: 84292 - RNA, 19 nt, Artificial Sequence
  Description of Artificial Sequence: Synthetic oligonucleotide
cuuagacuuaguccuccuc

SEQ ID NO: 84293 - RNA, 19 nt, Artificial Sequence
  Description of Artificial Sequence: Synthetic oligonucleotide
cuaggcuucccuuagacuu

SEQ ID NO: 84294 - RNA, 19 nt, Artificial Sequence
  Description of Artificial Sequence: Synthetic oligonucleotide
gguauagccuaaagguggg

SEQ ID NO: 84295 - RNA, 19 nt, Artificial Sequence
  Description of Artificial Sequence: Synthetic oligonucleotide
uggaggaucgugagccacu

SEQ ID NO: 84296 - RNA, 19 nt, Artificial Sequence
  Description of Artificial Sequence: Synthetic oligonucleotide
agaauccguaacaauaaua

SEQ ID NO: 84297 - RNA, 19 nt, Artificial Sequence
  Description of Artificial Sequence: Synthetic oligonucleotide
uaucgacucagguccggcu

SEQ ID NO: 84298 - RNA, 19 nt, Artificial Sequence
  Description of Artificial Sequence: Synthetic oligonucleotide
gugaguaggcugucauaag

SEQ ID NO: 84299 - RNA, 19 nt, Artificial Sequence
  Description of Artificial Sequence: Synthetic oligonucleotide
ccugguaacggagaagagg

SEQ ID NO: 84300 - RNA, 19 nt, Artificial Sequence
  Description of Artificial Sequence: Synthetic oligonucleotide
aaaggaggucugauuacaa

SEQ ID NO: 84301 - RNA, 19 nt, Artificial Sequence
  Description of Artificial Sequence: Synthetic oligonucleotide
agcgguagcugggauggcg

SEQ ID NO: 84302 - RNA, 19 nt, Artificial Sequence
  Description of Artificial Sequence: Synthetic oligonucleotide
aacuaguacgaggggcaug

SEQ ID NO: 84303 - RNA, 19 nt, Artificial Sequence
  Description of Artificial Sequence: Synthetic oligonucleotide
accuccccggaauuuaccu

SEQ ID NO: 84304 - RNA, 19 nt, Artificial Sequence
  Description of Artificial Sequence: Synthetic oligonucleotide
caauugcacaaauguccac

SEQ ID NO: 84305 - RNA, 19 nt, Artificial Sequence
  Description of Artificial Sequence: Synthetic oligonucleotide
gguugugcguccccuagcc

SEQ ID NO: 84306 - RNA, 19 nt, Artificial Sequence
  Description of Artificial Sequence: Synthetic oligonucleotide
ggagagguauagccuaaag

SEQ ID NO: 84307 - RNA, 19 nt, Artificial Sequence
  Description of Artificial Sequence: Synthetic oligonucleotide
cuauauaucccucccuugu

SEQ ID NO: 84308 - RNA, 19 nt, Artificial Sequence
  Description of Artificial Sequence: Synthetic oligonucleotide
ccaauacaguuguucaccc

SEQ ID NO: 84309 - RNA, 19 nt, Artificial Sequence
  Description of Artificial Sequence: Synthetic oligonucleotide
cugagccuauacucuuggg

SEQ ID NO: 84310 - RNA, 19 nt, Artificial Sequence
  Description of Artificial Sequence: Synthetic oligonucleotide
cuggcgagggcucucggug

SEQ ID NO: 84311 - RNA, 19 nt, Artificial Sequence
  Description of Artificial Sequence: Synthetic oligonucleotide
uagccuaaaggugggucug

SEQ ID NO: 84312 - RNA, 19 nt, Artificial Sequence
  Description of Artificial Sequence: Synthetic oligonucleotide
ugguugugcguccccuagc

SEQ ID NO: 84313 - RNA, 19 nt, Artificial Sequence
  Description of Artificial Sequence: Synthetic oligonucleotide
agaaaucucauaaguggua

SEQ ID NO: 84314 - RNA, 19 nt, Artificial Sequence
  Description of Artificial Sequence: Synthetic oligonucleotide
agcuaucuccacgacucag

SEQ ID NO: 84315 - RNA, 19 nt, Artificial Sequence
  Description of Artificial Sequence: Synthetic oligonucleotide
guguguucgaagcccugug

SEQ ID NO: 84316 - RNA, 19 nt, Artificial Sequence
  Description of Artificial Sequence: Synthetic oligonucleotide
auugaucggcccagguagg

SEQ ID NO: 84317 - RNA, 19 nt, Artificial Sequence
  Description of Artificial Sequence: Synthetic oligonucleotide
aagcccaccacaaucccua

SEQ ID NO: 84318 - RNA, 19 nt, Artificial Sequence
  Description of Artificial Sequence: Synthetic oligonucleotide
ggugguacccucugaacga

SEQ ID NO: 84319 - RNA, 19 nt, Artificial Sequence
  Description of Artificial Sequence: Synthetic oligonucleotide
aaccuggucgauauuuaua

SEQ ID NO: 84320 - RNA, 19 nt, Artificial Sequence
  Description of Artificial Sequence: Synthetic oligonucleotide
gcuauccucauugguagcc

SEQ ID NO: 84321 - RNA, 19 nt, Artificial Sequence
  Description of Artificial Sequence: Synthetic oligonucleotide
gugggcuaagggguaaacc

SEQ ID NO: 84322 - RNA, 19 nt, Artificial Sequence
  Description of Artificial Sequence: Synthetic oligonucleotide
ggaacuaguacgaggggca

SEQ ID NO: 84323 - RNA, 19 nt, Artificial Sequence
  Description of Artificial Sequence: Synthetic oligonucleotide
gaagggagagguauagccu

SEQ ID NO: 84324 - RNA, 19 nt, Artificial Sequence
  Description of Artificial Sequence: Synthetic oligonucleotide
cuucccuguuuaaagguua

SEQ ID NO: 84325 - RNA, 19 nt, Artificial Sequence
  Description of Artificial Sequence: Synthetic oligonucleotide
acgugggugccucucggcu

SEQ ID NO: 84326 - RNA, 19 nt, Artificial Sequence
  Description of Artificial Sequence: Synthetic oligonucleotide
ggucuaaggaaagggaaga

SEQ ID NO: 84327 - RNA, 19 nt, Artificial Sequence
  Description of Artificial Sequence: Synthetic oligonucleotide
gacgguaaaagcggcaggu

SEQ ID NO: 84328 - RNA, 19 nt, Artificial Sequence
  Description of Artificial Sequence: Synthetic oligonucleotide
ggacgguaaaagcggcagg

SEQ ID NO: 84329 - RNA, 19 nt, Artificial Sequence
  Description of Artificial Sequence: Synthetic oligonucleotide
guaaaacaagccucauccu

SEQ ID NO: 84330 - RNA, 19 nt, Artificial Sequence
  Description of Artificial Sequence: Synthetic oligonucleotide
ugguaacggagaagaggaa

SEQ ID NO: 84331 - RNA, 19 nt, Artificial Sequence
  Description of Artificial Sequence: Synthetic oligonucleotide
auggcggcuacuaucugca

SEQ ID NO: 84332 - RNA, 19 nt, Artificial Sequence
  Description of Artificial Sequence: Synthetic oligonucleotide
uaaaagcggcagguggcac

SEQ ID NO: 84333 - RNA, 19 nt, Artificial Sequence
  Description of Artificial Sequence: Synthetic oligonucleotide
ccuaguaggacauuuaauu

SEQ ID NO: 84334 - RNA, 19 nt, Artificial Sequence
  Description of Artificial Sequence: Synthetic oligonucleotide
ggucugauuacaauugucu

SEQ ID NO: 84335 - RNA, 19 nt, Artificial Sequence
  Description of Artificial Sequence: Synthetic oligonucleotide
caccuaguaggacauuuaa

SEQ ID NO: 84336 - RNA, 19 nt, Artificial Sequence
  Description of Artificial Sequence: Synthetic oligonucleotide
ccgguuggcaccaaacgug

SEQ ID NO: 84337 - RNA, 19 nt, Artificial Sequence
  Description of Artificial Sequence: Synthetic oligonucleotide
agcccuguguaucgacuca

SEQ ID NO: 84338 - RNA, 19 nt, Artificial Sequence
  Description of Artificial Sequence: Synthetic oligonucleotide
ucguagcagcuucucucgu

SEQ ID NO: 84339 - RNA, 19 nt, Artificial Sequence
  Description of Artificial Sequence: Synthetic oligonucleotide
acgguaaaagcggcaggug

SEQ ID NO: 84340 - RNA, 19 nt, Artificial Sequence
  Description of Artificial Sequence: Synthetic oligonucleotide
gguaacggagaagaggaaa

SEQ ID NO: 84341 - RNA, 19 nt, Artificial Sequence
  Description of Artificial Sequence: Synthetic oligonucleotide
accuaguaggacauuuaau

SEQ ID NO: 84342 - RNA, 19 nt, Artificial Sequence
  Description of Artificial Sequence: Synthetic oligonucleotide
auugguugugcguccccua

SEQ ID NO: 84343 - RNA, 19 nt, Artificial Sequence
  Description of Artificial Sequence: Synthetic oligonucleotide
guaucgacucagguccggc

SEQ ID NO: 84344 - RNA, 19 nt, Artificial Sequence
  Description of Artificial Sequence: Synthetic oligonucleotide
ggauugccaccccugacuc

SEQ ID NO: 84345 - RNA, 19 nt, Artificial Sequence
  Description of Artificial Sequence: Synthetic oligonucleotide
guuagguuucucucaccua

SEQ ID NO: 84346 - RNA, 19 nt, Artificial Sequence
  Description of Artificial Sequence: Synthetic oligonucleotide
ugcuguaaccuggucgaua

SEQ ID NO: 84347 - RNA, 19 nt, Artificial Sequence
  Description of Artificial Sequence: Synthetic oligonucleotide
gcuaucuccacgacucagc

SEQ ID NO: 84348 - RNA, 19 nt, Artificial Sequence
  Description of Artificial Sequence: Synthetic oligonucleotide
caccuccccggaauuuacc

SEQ ID NO: 84349 - RNA, 19 nt, Artificial Sequence
  Description of Artificial Sequence: Synthetic oligonucleotide
cccggaauuuaccuguaac

SEQ ID NO: 84350 - RNA, 19 nt, Artificial Sequence
  Description of Artificial Sequence: Synthetic oligonucleotide
accauuucaugcgcaccug

SEQ ID NO: 84351 - RNA, 19 nt, Artificial Sequence
  Description of Artificial Sequence: Synthetic oligonucleotide
gguugguuccuucaagcua

SEQ ID NO: 84352 - RNA, 19 nt, Artificial Sequence
  Description of Artificial Sequence: Synthetic oligonucleotide
gacuggcgagggcucucgg

SEQ ID NO: 84353 - RNA, 19 nt, Artificial Sequence
  Description of Artificial Sequence: Synthetic oligonucleotide
ggcauggcggcugauguac

SEQ ID NO: 84354 - RNA, 19 nt, Artificial Sequence
  Description of Artificial Sequence: Synthetic oligonucleotide
gcgaccaauacaguuguuc

SEQ ID NO: 84355 - RNA, 19 nt, Artificial Sequence
  Description of Artificial Sequence: Synthetic oligonucleotide
cuauacucuugggcugccc

SEQ ID NO: 84356 - RNA, 19 nt, Artificial Sequence
  Description of Artificial Sequence: Synthetic oligonucleotide
ugguuagaucaggauuuau

SEQ ID NO: 84357 - RNA, 19 nt, Artificial Sequence
  Description of Artificial Sequence: Synthetic oligonucleotide
cacaaucccuaucacccaa

SEQ ID NO: 84358 - RNA, 19 nt, Artificial Sequence
  Description of Artificial Sequence: Synthetic oligonucleotide
ccuuagcccaucugguuug

SEQ ID NO: 84359 - RNA, 19 nt, Artificial Sequence
  Description of Artificial Sequence: Synthetic oligonucleotide
uggcgagggcucucggugu

SEQ ID NO: 84360 - RNA, 19 nt, Artificial Sequence
  Description of Artificial Sequence: Synthetic oligonucleotide
uuccugcgaccaauacagu

SEQ ID NO: 84361 - RNA, 19 nt, Artificial Sequence
  Description of Artificial Sequence: Synthetic oligonucleotide
gggacuacugagagguggc

SEQ ID NO: 84362 - RNA, 19 nt, Artificial Sequence
  Description of Artificial Sequence: Synthetic oligonucleotide
gauuggccagacucuuaua

SEQ ID NO: 84363 - RNA, 19 nt, Artificial Sequence
  Description of Artificial Sequence: Synthetic oligonucleotide
gacugcaacuggcccaacu

SEQ ID NO: 84364 - RNA, 19 nt, Artificial Sequence
  Description of Artificial Sequence: Synthetic oligonucleotide
cuccccggaauuuaccugu

SEQ ID NO: 84365 - RNA, 19 nt, Artificial Sequence
  Description of Artificial Sequence: Synthetic oligonucleotide
aucgucugaagaggaacua

SEQ ID NO: 84366 - RNA, 19 nt, Artificial Sequence
  Description of Artificial Sequence: Synthetic oligonucleotide
gucuaaggaaagggaagaa

SEQ ID NO: 84367 - RNA, 19 nt, Artificial Sequence
  Description of Artificial Sequence: Synthetic oligonucleotide
caaucccuaucacccaaaa

SEQ ID NO: 84368 - RNA, 19 nt, Artificial Sequence
  Description of Artificial Sequence: Synthetic oligonucleotide
guggcgagacagauuguca

SEQ ID NO: 84369 - RNA, 19 nt, Artificial Sequence
  Description of Artificial Sequence: Synthetic oligonucleotide
agggugcuauuuccuuagu

SEQ ID NO: 84370 - RNA, 19 nt, Artificial Sequence
  Description of Artificial Sequence: Synthetic oligonucleotide
gcuguaaccuggucgauau

SEQ ID NO: 84371 - RNA, 19 nt, Artificial Sequence
  Description of Artificial Sequence: Synthetic oligonucleotide
gguccggcuuaggaggagg

SEQ ID NO: 84372 - RNA, 19 nt, Artificial Sequence
  Description of Artificial Sequence: Synthetic oligonucleotide
gacucagguccggcuuagg

SEQ ID NO: 84373 - RNA, 19 nt, Artificial Sequence
  Description of Artificial Sequence: Synthetic oligonucleotide
cgaccaauacaguuguuca

SEQ ID NO: 84374 - RNA, 19 nt, Artificial Sequence
  Description of Artificial Sequence: Synthetic oligonucleotide
guugugcguccccuagcca

SEQ ID NO: 84375 - RNA, 19 nt, Artificial Sequence
  Description of Artificial Sequence: Synthetic oligonucleotide
caccauauugaggugggcu

SEQ ID NO: 84376 - RNA, 19 nt, Artificial Sequence
  Description of Artificial Sequence: Synthetic oligonucleotide
gaccccuuuccugggaaaa

SEQ ID NO: 84377 - RNA, 19 nt, Artificial Sequence
  Description of Artificial Sequence: Synthetic oligonucleotide
ggaggaucgugagccacug

SEQ ID NO: 84378 - RNA, 19 nt, Artificial Sequence
  Description of Artificial Sequence: Synthetic oligonucleotide
cugcgaccaauacaguugu

SEQ ID NO: 84379 - RNA, 19 nt, Artificial Sequence
  Description of Artificial Sequence: Synthetic oligonucleotide
gcugguuagaucaggauuu

SEQ ID NO: 84380 - RNA, 19 nt, Artificial Sequence
  Description of Artificial Sequence: Synthetic oligonucleotide
gagcugguuagaucaggau

SEQ ID NO: 84381 - RNA, 19 nt, Artificial Sequence
  Description of Artificial Sequence: Synthetic oligonucleotide
cugcaaugccacuuccucu

SEQ ID NO: 84382 - RNA, 19 nt, Artificial Sequence
  Description of Artificial Sequence: Synthetic oligonucleotide
uccccggaauuuaccugua

SEQ ID NO: 84383 - RNA, 19 nt, Artificial Sequence
  Description of Artificial Sequence: Synthetic oligonucleotide
acaaucccuaucacccaaa

SEQ ID NO: 84384 - RNA, 19 nt, Artificial Sequence
  Description of Artificial Sequence: Synthetic oligonucleotide
agcggacuggcgagggcuc

SEQ ID NO: 84385 - RNA, 19 nt, Artificial Sequence
  Description of Artificial Sequence: Synthetic oligonucleotide
ugcguccccuagccaccag

SEQ ID NO: 84386 - RNA, 19 nt, Artificial Sequence
  Description of Artificial Sequence: Synthetic oligonucleotide
aguggagcucggaaaucau

SEQ ID NO: 84387 - RNA, 19 nt, Artificial Sequence
  Description of Artificial Sequence: Synthetic oligonucleotide
ugggccgguuggcaccaaa

SEQ ID NO: 84388 - RNA, 19 nt, Artificial Sequence
  Description of Artificial Sequence: Synthetic oligonucleotide
caucuaggaggacgguaaa

SEQ ID NO: 84389 - RNA, 19 nt, Artificial Sequence
  Description of Artificial Sequence: Synthetic oligonucleotide
cuaguacgaggggcauggc

SEQ ID NO: 84390 - RNA, 19 nt, Artificial Sequence
  Description of Artificial Sequence: Synthetic oligonucleotide
cccuuagacuuaguccucc

SEQ ID NO: 84391 - RNA, 19 nt, Artificial Sequence
  Description of Artificial Sequence: Synthetic oligonucleotide
ugcgaccaauacaguuguu

SEQ ID NO: 84392 - RNA, 19 nt, Artificial Sequence
  Description of Artificial Sequence: Synthetic oligonucleotide
gagguguguucgaagcccu

SEQ ID NO: 84393 - RNA, 19 nt, Artificial Sequence
  Description of Artificial Sequence: Synthetic oligonucleotide
caauuggaggggccuaggu

SEQ ID NO: 84394 - RNA, 19 nt, Artificial Sequence
  Description of Artificial Sequence: Synthetic oligonucleotide
ggacuggcgagggcucucg

SEQ ID NO: 84395 - RNA, 19 nt, Artificial Sequence
  Description of Artificial Sequence: Synthetic oligonucleotide
guaguuccugcgaccaaua

SEQ ID NO: 84396 - RNA, 19 nt, Artificial Sequence
  Description of Artificial Sequence: Synthetic oligonucleotide
ggggauugccaccccugac

SEQ ID NO: 84397 - RNA, 19 nt, Artificial Sequence
  Description of Artificial Sequence: Synthetic oligonucleotide
ccuccccggaauuuaccug

SEQ ID NO: 84398 - RNA, 19 nt, Artificial Sequence
  Description of Artificial Sequence: Synthetic oligonucleotide
gcccuguguaucgacucag

SEQ ID NO: 84399 - RNA, 19 nt, Artificial Sequence
  Description of Artificial Sequence: Synthetic oligonucleotide
cagguccggcuuaggagga

SEQ ID NO: 84400 - RNA, 19 nt, Artificial Sequence
  Description of Artificial Sequence: Synthetic oligonucleotide
ggguaaaccccaggggaca

SEQ ID NO: 84401 - RNA, 19 nt, Artificial Sequence
  Description of Artificial Sequence: Synthetic oligonucleotide
caugaaacugugaccccuu

SEQ ID NO: 84402 - RNA, 19 nt, Artificial Sequence
  Description of Artificial Sequence: Synthetic oligonucleotide
agggagagguauagccuaa

SEQ ID NO: 84403 - RNA, 19 nt, Artificial Sequence
  Description of Artificial Sequence: Synthetic oligonucleotide
ggugggcuaagggguaaac

SEQ ID NO: 84404 - RNA, 19 nt, Artificial Sequence
  Description of Artificial Sequence: Synthetic oligonucleotide
ggcgagggcucucggugug

SEQ ID NO: 84405 - RNA, 19 nt, Artificial Sequence
  Description of Artificial Sequence: Synthetic oligonucleotide
gccgguuggcaccaaacgu

SEQ ID NO: 84406 - RNA, 19 nt, Artificial Sequence
  Description of Artificial Sequence: Synthetic oligonucleotide
gcggcuacuaucugcaauu

SEQ ID NO: 84407 - RNA, 19 nt, Artificial Sequence
  Description of Artificial Sequence: Synthetic oligonucleotide
gaacaucuaggaggacggu

SEQ ID NO: 84408 - RNA, 19 nt, Artificial Sequence
  Description of Artificial Sequence: Synthetic oligonucleotide
cugguuagaucaggauuua

SEQ ID NO: 84409 - RNA, 19 nt, Artificial Sequence
  Description of Artificial Sequence: Synthetic oligonucleotide
gugggacuacugagaggug

SEQ ID NO: 84410 - RNA, 19 nt, Artificial Sequence
  Description of Artificial Sequence: Synthetic oligonucleotide
cuguaguuccugcgaccaa

SEQ ID NO: 84411 - RNA, 19 nt, Artificial Sequence
  Description of Artificial Sequence: Synthetic oligonucleotide
gcucguugggaaaauuccu

SEQ ID NO: 84412 - RNA, 19 nt, Artificial Sequence
  Description of Artificial Sequence: Synthetic oligonucleotide
gacugucguagcagcuucu

SEQ ID NO: 84413 - RNA, 19 nt, Artificial Sequence
  Description of Artificial Sequence: Synthetic oligonucleotide
guauagccuaaaggugggu

SEQ ID NO: 84414 - RNA, 19 nt, Artificial Sequence
  Description of Artificial Sequence: Synthetic oligonucleotide
aggugggcuaagggguaaa

SEQ ID NO: 84415 - RNA, 19 nt, Artificial Sequence
  Description of Artificial Sequence: Synthetic oligonucleotide
auguggcgagacagauugu

SEQ ID NO: 84416 - RNA, 19 nt, Artificial Sequence
  Description of Artificial Sequence: Synthetic oligonucleotide
ggcggcuacuaucugcaau

SEQ ID NO: 84417 - RNA, 19 nt, Artificial Sequence
  Description of Artificial Sequence: Synthetic oligonucleotide
gggccgguuggcaccaaac

SEQ ID NO: 84418 - RNA, 19 nt, Artificial Sequence
  Description of Artificial Sequence: Synthetic oligonucleotide
gagcgguagcugggauggc

SEQ ID NO: 84419 - RNA, 19 nt, Artificial Sequence
  Description of Artificial Sequence: Synthetic oligonucleotide
gcaccauauugaggugggc

SEQ ID NO: 84420 - RNA, 19 nt, Artificial Sequence
  Description of Artificial Sequence: Synthetic oligonucleotide
aggggaagcugagccuaua

SEQ ID NO: 84421 - RNA, 19 nt, Artificial Sequence
  Description of Artificial Sequence: Synthetic oligonucleotide
ggcugucauaagauagacu

SEQ ID NO: 84422 - RNA, 19 nt, Artificial Sequence
  Description of Artificial Sequence: Synthetic oligonucleotide
cccaaauaccugggugcug

SEQ ID NO: 84423 - RNA, 19 nt, Artificial Sequence
  Description of Artificial Sequence: Synthetic oligonucleotide
gggagagguauagccuaaa

SEQ ID NO: 84424 - RNA, 19 nt, Artificial Sequence
  Description of Artificial Sequence: Synthetic oligonucleotide
gugcguccccuagccacca

SEQ ID NO: 84425 - RNA, 19 nt, Artificial Sequence
  Description of Artificial Sequence: Synthetic oligonucleotide
ggaugucaaugagccuaga

SEQ ID NO: 84426 - RNA, 19 nt, Artificial Sequence
  Description of Artificial Sequence: Synthetic oligonucleotide
ggggccuaggucugccacu

SEQ ID NO: 84427 - RNA, 19 nt, Artificial Sequence
  Description of Artificial Sequence: Synthetic oligonucleotide
ccuuagacuuaguccuccu

SEQ ID NO: 84428 - RNA, 19 nt, Artificial Sequence
  Description of Artificial Sequence: Synthetic oligonucleotide
ucgguguggugggccgguu

SEQ ID NO: 84429 - RNA, 19 nt, Artificial Sequence
  Description of Artificial Sequence: Synthetic oligonucleotide
cggcuacuaucugcaauug

SEQ ID NO: 84430 - RNA, 19 nt, Artificial Sequence
  Description of Artificial Sequence: Synthetic oligonucleotide
gccccuuagcccaucuggu

SEQ ID NO: 84431 - RNA, 19 nt, Artificial Sequence
  Description of Artificial Sequence: Synthetic oligonucleotide
gcaccaaacgugggugccu

SEQ ID NO: 84432 - RNA, 19 nt, Artificial Sequence
  Description of Artificial Sequence: Synthetic oligonucleotide
cucgguguggugggccggu

SEQ ID NO: 84433 - RNA, 19 nt, Artificial Sequence
  Description of Artificial Sequence: Synthetic oligonucleotide
cuguaaccuggucgauauu

SEQ ID NO: 84434 - RNA, 19 nt, Artificial Sequence
  Description of Artificial Sequence: Synthetic oligonucleotide
ccccaaauaccugggugcu

SEQ ID NO: 84435 - RNA, 19 nt, Artificial Sequence
  Description of Artificial Sequence: Synthetic oligonucleotide
ccucuuggaaucgguaguu

SEQ ID NO: 84436 - RNA, 19 nt, Artificial Sequence
  Description of Artificial Sequence: Synthetic oligonucleotide
ccccggaauuuaccuguaa

SEQ ID NO: 84437 - RNA, 19 nt, Artificial Sequence
  Description of Artificial Sequence: Synthetic oligonucleotide
gcauggcggcugauguacu

SEQ ID NO: 84438 - RNA, 19 nt, Artificial Sequence
  Description of Artificial Sequence: Synthetic oligonucleotide
cggccccuuagcccaucug

SEQ ID NO: 84439 - RNA, 19 nt, Artificial Sequence
  Description of Artificial Sequence: Synthetic oligonucleotide
ccccuuagcccaucugguu

SEQ ID NO: 84440 - RNA, 19 nt, Artificial Sequence
  Description of Artificial Sequence: Synthetic oligonucleotide
gugggccgguuggcaccaa

SEQ ID NO: 84441 - RNA, 19 nt, Artificial Sequence
  Description of Artificial Sequence: Synthetic oligonucleotide
ccggccccuuagcccaucu

SEQ ID NO: 84442 - RNA, 19 nt, Artificial Sequence
  Description of Artificial Sequence: Synthetic oligonucleotide
uguaaugucaguuugcuca

SEQ ID NO: 84443 - RNA, 19 nt, Artificial Sequence
  Description of Artificial Sequence: Synthetic oligonucleotide
aacuuaauacauuaaguug

SEQ ID NO: 84444 - RNA, 19 nt, Artificial Sequence
  Description of Artificial Sequence: Synthetic oligonucleotide
aagacagugaucauuauuc

SEQ ID NO: 84445 - RNA, 19 nt, Artificial Sequence
  Description of Artificial Sequence: Synthetic oligonucleotide
aaauugaugcugcuucccc

SEQ ID NO: 84446 - RNA, 19 nt, Artificial Sequence
  Description of Artificial Sequence: Synthetic oligonucleotide
aaacccacgugacaaauuc

SEQ ID NO: 84447 - RNA, 19 nt, Artificial Sequence
  Description of Artificial Sequence: Synthetic oligonucleotide
auagaugcaacgaugaaac

SEQ ID NO: 84448 - RNA, 19 nt, Artificial Sequence
  Description of Artificial Sequence: Synthetic oligonucleotide
gacuauucacaugagaugg

SEQ ID NO: 84449 - RNA, 19 nt, Artificial Sequence
  Description of Artificial Sequence: Synthetic oligonucleotide
agagauaguagccuugaac

SEQ ID NO: 84450 - RNA, 19 nt, Artificial Sequence
  Description of Artificial Sequence: Synthetic oligonucleotide
aaaggaaaugauacaagcg

SEQ ID NO: 84451 - RNA, 19 nt, Artificial Sequence
  Description of Artificial Sequence: Synthetic oligonucleotide
uaauacgcaugucuggugg

SEQ ID NO: 84452 - RNA, 19 nt, Artificial Sequence
  Description of Artificial Sequence: Synthetic oligonucleotide
uuuauacuacuuacuagag

SEQ ID NO: 84453 - RNA, 19 nt, Artificial Sequence
  Description of Artificial Sequence: Synthetic oligonucleotide
uguucgacggacuaguuug

SEQ ID NO: 84454 - RNA, 19 nt, Artificial Sequence
  Description of Artificial Sequence: Synthetic oligonucleotide
uucuuuauacugauccgcg

SEQ ID NO: 84455 - RNA, 19 nt, Artificial Sequence
  Description of Artificial Sequence: Synthetic oligonucleotide
uguuuauacuacuuacuag

SEQ ID NO: 84456 - RNA, 19 nt, Artificial Sequence
  Description of Artificial Sequence: Synthetic oligonucleotide
ucaaccugcaugaagauuu

SEQ ID NO: 84457 - RNA, 19 nt, Artificial Sequence
  Description of Artificial Sequence: Synthetic oligonucleotide
uuuguuuauacuacuuacu

SEQ ID NO: 84458 - RNA, 19 nt, Artificial Sequence
  Description of Artificial Sequence: Synthetic oligonucleotide
uuaagcugcuucauccugg

SEQ ID NO: 84459 - RNA, 19 nt, Artificial Sequence
  Description of Artificial Sequence: Synthetic oligonucleotide
cuuagguuaguuucuggcg

SEQ ID NO: 84460 - RNA, 19 nt, Artificial Sequence
  Description of Artificial Sequence: Synthetic oligonucleotide
agaaaagcugauugggccg

SEQ ID NO: 84461 - RNA, 19 nt, Artificial Sequence
  Description of Artificial Sequence: Synthetic oligonucleotide
aaagccuuaagacacgguu

SEQ ID NO: 84462 - RNA, 19 nt, Artificial Sequence
  Description of Artificial Sequence: Synthetic oligonucleotide
uuagguuaguuucuggcga

SEQ ID NO: 84463 - RNA, 19 nt, Artificial Sequence
  Description of Artificial Sequence: Synthetic oligonucleotide
ugauaugaagcacagucaa

SEQ ID NO: 84464 - RNA, 19 nt, Artificial Sequence
  Description of Artificial Sequence: Synthetic oligonucleotide
cuuaaugugucaugaagug

SEQ ID NO: 84465 - RNA, 19 nt, Artificial Sequence
  Description of Artificial Sequence: Synthetic oligonucleotide
aauaugggaguacaagaaa

SEQ ID NO: 84466 - RNA, 19 nt, Artificial Sequence
  Description of Artificial Sequence: Synthetic oligonucleotide
agaaauaugggaguacaag

SEQ ID NO: 84467 - RNA, 19 nt, Artificial Sequence
  Description of Artificial Sequence: Synthetic oligonucleotide
gguaaccccaaauugaugc

SEQ ID NO: 84468 - RNA, 19 nt, Artificial Sequence
  Description of Artificial Sequence: Synthetic oligonucleotide
aaagauauuugcagucagg

SEQ ID NO: 84469 - RNA, 19 nt, Artificial Sequence
  Description of Artificial Sequence: Synthetic oligonucleotide
ugauuacucuuguuuauug

SEQ ID NO: 84470 - RNA, 19 nt, Artificial Sequence
  Description of Artificial Sequence: Synthetic oligonucleotide
ucuaagagacuggaugugg

SEQ ID NO: 84471 - RNA, 19 nt, Artificial Sequence
  Description of Artificial Sequence: Synthetic oligonucleotide
gccaguacaauccauacag

SEQ ID NO: 84472 - RNA, 19 nt, Artificial Sequence
  Description of Artificial Sequence: Synthetic oligonucleotide
agaugcaacgaugaaacag

SEQ ID NO: 84473 - RNA, 19 nt, Artificial Sequence
  Description of Artificial Sequence: Synthetic oligonucleotide
ucggcuugaagaaaagcug

SEQ ID NO: 84474 - RNA, 19 nt, Artificial Sequence
  Description of Artificial Sequence: Synthetic oligonucleotide
gacguuaucuagcucauuc

SEQ ID NO: 84475 - RNA, 19 nt, Artificial Sequence
  Description of Artificial Sequence: Synthetic oligonucleotide
uuuaauacgcaugucuggu

SEQ ID NO: 84476 - RNA, 19 nt, Artificial Sequence
  Description of Artificial Sequence: Synthetic oligonucleotide
uauacugauccgcgugucg

SEQ ID NO: 84477 - RNA, 19 nt, Artificial Sequence
  Description of Artificial Sequence: Synthetic oligonucleotide
ugauacaagcgaagguuag

SEQ ID NO: 84478 - RNA, 19 nt, Artificial Sequence
  Description of Artificial Sequence: Synthetic oligonucleotide
  modified_base (3)..(3): a, c, u, g, unknown or other
cunaaggcuguucuucucc

SEQ ID NO: 84479 - RNA, 19 nt, Artificial Sequence
  Description of Artificial Sequence: Synthetic oligonucleotide
ugcuucuagacuuuugagu

SEQ ID NO: 84480 - RNA, 19 nt, Artificial Sequence
  Description of Artificial Sequence: Synthetic oligonucleotide
agaguggucuuucggaauc

SEQ ID NO: 84481 - RNA, 19 nt, Artificial Sequence
  Description of Artificial Sequence: Synthetic oligonucleotide
ugcaguugagacucgagac

SEQ ID NO: 84482 - RNA, 19 nt, Artificial Sequence
  Description of Artificial Sequence: Synthetic oligonucleotide
agacuauucacaugagaug

SEQ ID NO: 84483 - RNA, 19 nt, Artificial Sequence
  Description of Artificial Sequence: Synthetic oligonucleotide
uggagguguauauauaaaa

SEQ ID NO: 84484 - RNA, 19 nt, Artificial Sequence
  Description of Artificial Sequence: Synthetic oligonucleotide
uucuaguucgcgcugguaa

SEQ ID NO: 84485 - RNA, 19 nt, Artificial Sequence
  Description of Artificial Sequence: Synthetic oligonucleotide
aaauaugggaguacaagaa

SEQ ID NO: 84486 - RNA, 19 nt, Artificial Sequence
  Description of Artificial Sequence: Synthetic oligonucleotide
ggaguuuacgccgagaugc

SEQ ID NO: 84487 - RNA, 19 nt, Artificial Sequence
  Description of Artificial Sequence: Synthetic oligonucleotide
uguaccuagucugaagcag

SEQ ID NO: 84488 - RNA, 19 nt, Artificial Sequence
  Description of Artificial Sequence: Synthetic oligonucleotide
uacuacuuacuagagaggu

SEQ ID NO: 84489 - RNA, 19 nt, Artificial Sequence
  Description of Artificial Sequence: Synthetic oligonucleotide
uaucuauaaugaauaaauu

SEQ ID NO: 84490 - RNA, 19 nt, Artificial Sequence
  Description of Artificial Sequence: Synthetic oligonucleotide
ucccguaccugcuugagca

SEQ ID NO: 84491 - RNA, 19 nt, Artificial Sequence
  Description of Artificial Sequence: Synthetic oligonucleotide
ugucuuaguacuguagugu

SEQ ID NO: 84492 - RNA, 19 nt, Artificial Sequence
  Description of Artificial Sequence: Synthetic oligonucleotide
aagauuccaaacccacgug

SEQ ID NO: 84493 - RNA, 19 nt, Artificial Sequence
  Description of Artificial Sequence: Synthetic oligonucleotide
uccgggcucguucagauga

SEQ ID NO: 84494 - RNA, 19 nt, Artificial Sequence
  Description of Artificial Sequence: Synthetic oligonucleotide
gaugcguuggcacguguag

SEQ ID NO: 84495 - RNA, 19 nt, Artificial Sequence
  Description of Artificial Sequence: Synthetic oligonucleotide
uccagaagggucgagacgu

SEQ ID NO: 84496 - RNA, 19 nt, Artificial Sequence
  Description of Artificial Sequence: Synthetic oligonucleotide
auacugauccgcgugucgc

SEQ ID NO: 84497 - RNA, 19 nt, Artificial Sequence
  Description of Artificial Sequence: Synthetic oligonucleotide
  modified_base (8)..(8): a, c, u, g, unknown or other
ugcuccunaaggcuguucu

SEQ ID NO: 84498 - RNA, 19 nt, Artificial Sequence
  Description of Artificial Sequence: Synthetic oligonucleotide
ucccuuuggaguuuacgcc

SEQ ID NO: 84499 - RNA, 19 nt, Artificial Sequence
  Description of Artificial Sequence: Synthetic oligonucleotide
agauuccaaacccacguga

SEQ ID NO: 84500 - RNA, 19 nt, Artificial Sequence
  Description of Artificial Sequence: Synthetic oligonucleotide
uuggaguuuacgccgagau

SEQ ID NO: 84501 - RNA, 19 nt, Artificial Sequence
  Description of Artificial Sequence: Synthetic oligonucleotide
gagacucgagaccagcugc

SEQ ID NO: 84502 - RNA, 19 nt, Artificial Sequence
  Description of Artificial Sequence: Synthetic oligonucleotide
gagacuagcgcugaguuga

SEQ ID NO: 84503 - RNA, 19 nt, Artificial Sequence
  Description of Artificial Sequence: Synthetic oligonucleotide
aaauagaugcaacgaugaa

SEQ ID NO: 84504 - RNA, 19 nt, Artificial Sequence
  Description of Artificial Sequence: Synthetic oligonucleotide
gauuacucuuguuuauuga

SEQ ID NO: 84505 - RNA, 19 nt, Artificial Sequence
  Description of Artificial Sequence: Synthetic oligonucleotide
agauauuugcagucaggug

SEQ ID NO: 84506 - RNA, 19 nt, Artificial Sequence
  Description of Artificial Sequence: Synthetic oligonucleotide
cuaagccgguucuugagag

SEQ ID NO: 84507 - RNA, 19 nt, Artificial Sequence
  Description of Artificial Sequence: Synthetic oligonucleotide
gauccgacugcuuagguua

SEQ ID NO: 84508 - RNA, 19 nt, Artificial Sequence
  Description of Artificial Sequence: Synthetic oligonucleotide
ugagacucgagaccagcug

SEQ ID NO: 84509 - RNA, 19 nt, Artificial Sequence
  Description of Artificial Sequence: Synthetic oligonucleotide
uuaauacgcaugucuggug

SEQ ID NO: 84510 - RNA, 19 nt, Artificial Sequence
  Description of Artificial Sequence: Synthetic oligonucleotide
cucuaguugcccaaucuug

SEQ ID NO: 84511 - RNA, 19 nt, Artificial Sequence
  Description of Artificial Sequence: Synthetic oligonucleotide
aacuaagguaccugucaga

SEQ ID NO: 84512 - RNA, 19 nt, Artificial Sequence
  Description of Artificial Sequence: Synthetic oligonucleotide
uuugcucaccaagacagug

SEQ ID NO: 84513 - RNA, 19 nt, Artificial Sequence
  Description of Artificial Sequence: Synthetic oligonucleotide
ugucauuaacacugauuug

SEQ ID NO: 84514 - RNA, 19 nt, Artificial Sequence
  Description of Artificial Sequence: Synthetic oligonucleotide
acacgguugaucuuccugu

SEQ ID NO: 84515 - RNA, 19 nt, Artificial Sequence
  Description of Artificial Sequence: Synthetic oligonucleotide
ucuuaguacuguagugucu

SEQ ID NO: 84516 - RNA, 19 nt, Artificial Sequence
  Description of Artificial Sequence: Synthetic oligonucleotide
guuuguuuaauacgcaugu

SEQ ID NO: 84517 - RNA, 19 nt, Artificial Sequence
  Description of Artificial Sequence: Synthetic oligonucleotide
aauacgcaugucuggugga

SEQ ID NO: 84518 - RNA, 19 nt, Artificial Sequence
  Description of Artificial Sequence: Synthetic oligonucleotide
aguuuguuuaauacgcaug

SEQ ID NO: 84519 - RNA, 19 nt, Artificial Sequence
  Description of Artificial Sequence: Synthetic oligonucleotide
uaccugucagacgacagag

SEQ ID NO: 84520 - RNA, 19 nt, Artificial Sequence
  Description of Artificial Sequence: Synthetic oligonucleotide
uuuacgccgagaugcguug

SEQ ID NO: 84521 - RNA, 19 nt, Artificial Sequence
  Description of Artificial Sequence: Synthetic oligonucleotide
ugcaucucgaauuccuccu

SEQ ID NO: 84522 - RNA, 19 nt, Artificial Sequence
  Description of Artificial Sequence: Synthetic oligonucleotide
agccuuaagacacgguuga

SEQ ID NO: 84523 - RNA, 19 nt, Artificial Sequence
  Description of Artificial Sequence: Synthetic oligonucleotide
ucuagaaauaugggaguac

SEQ ID NO: 84524 - RNA, 19 nt, Artificial Sequence
  Description of Artificial Sequence: Synthetic oligonucleotide
uagaaauaugggaguacaa

SEQ ID NO: 84525 - RNA, 19 nt, Artificial Sequence
  Description of Artificial Sequence: Synthetic oligonucleotide
ucuuuauacugauccgcgu

SEQ ID NO: 84526 - RNA, 19 nt, Artificial Sequence
  Description of Artificial Sequence: Synthetic oligonucleotide
acagugaucauuauucaaa

SEQ ID NO: 84527 - RNA, 19 nt, Artificial Sequence
  Description of Artificial Sequence: Synthetic oligonucleotide
cacagucaaacuuaauaca

SEQ ID NO: 84528 - RNA, 19 nt, Artificial Sequence
  Description of Artificial Sequence: Synthetic oligonucleotide
aagacacgguugaucuucc

SEQ ID NO: 84529 - RNA, 19 nt, Artificial Sequence
  Description of Artificial Sequence: Synthetic oligonucleotide
  modified_base (5)..(5): a, c, u, g, unknown or other
uccunaaggcuguucuucu

SEQ ID NO: 84530 - RNA, 19 nt, Artificial Sequence
  Description of Artificial Sequence: Synthetic oligonucleotide
aaggguuaucuccucuuaa

SEQ ID NO: 84531 - RNA, 19 nt, Artificial Sequence
  Description of Artificial Sequence: Synthetic oligonucleotide
  modified_base (2)..(2): a, c, u, g, unknown or other
unaaggcuguucuucuccu

SEQ ID NO: 84532 - RNA, 19 nt, Artificial Sequence
  Description of Artificial Sequence: Synthetic oligonucleotide
uuguaccuagucugaagca

SEQ ID NO: 84533 - RNA, 19 nt, Artificial Sequence
  Description of Artificial Sequence: Synthetic oligonucleotide
uaguugcccaaucuuggcu

SEQ ID NO: 84534 - RNA, 19 nt, Artificial Sequence
  Description of Artificial Sequence: Synthetic oligonucleotide
auacaagcgaagguuaggu

SEQ ID NO: 84535 - RNA, 19 nt, Artificial Sequence
  Description of Artificial Sequence: Synthetic oligonucleotide
cuaguugcccaaucuuggc

SEQ ID NO: 84536 - RNA, 19 nt, Artificial Sequence
  Description of Artificial Sequence: Synthetic oligonucleotide
gcuuagguuaguuucuggc

SEQ ID NO: 84537 - RNA, 19 nt, Artificial Sequence
  Description of Artificial Sequence: Synthetic oligonucleotide
gaacacaccuccaacacaa

SEQ ID NO: 84538 - RNA, 19 nt, Artificial Sequence
  Description of Artificial Sequence: Synthetic oligonucleotide
ucggauagcuccagugaug

SEQ ID NO: 84539 - RNA, 19 nt, Artificial Sequence
  Description of Artificial Sequence: Synthetic oligonucleotide
uggaguuuacgccgagaug

SEQ ID NO: 84540 - RNA, 19 nt, Artificial Sequence
  Description of Artificial Sequence: Synthetic oligonucleotide
ucgucggauagcuccagug

SEQ ID NO: 84541 - RNA, 19 nt, Artificial Sequence
  Description of Artificial Sequence: Synthetic oligonucleotide
aauguguagcuggcgccgg

SEQ ID NO: 84542 - RNA, 19 nt, Artificial Sequence
  Description of Artificial Sequence: Synthetic oligonucleotide
uugcucaacuaucaaccaa

SEQ ID NO: 84543 - RNA, 19 nt, Artificial Sequence
  Description of Artificial Sequence: Synthetic oligonucleotide
caaggaucgggauuuguca

SEQ ID NO: 84544 - RNA, 19 nt, Artificial Sequence
  Description of Artificial Sequence: Synthetic oligonucleotide
gauuccaaacccacgugac

SEQ ID NO: 84545 - RNA, 19 nt, Artificial Sequence
  Description of Artificial Sequence: Synthetic oligonucleotide
uguugacgggcauugucac

SEQ ID NO: 84546 - RNA, 19 nt, Artificial Sequence
  Description of Artificial Sequence: Synthetic oligonucleotide
ucgacggacuaguuuguug

SEQ ID NO: 84547 - RNA, 19 nt, Artificial Sequence
  Description of Artificial Sequence: Synthetic oligonucleotide
cuagaaauaugggaguaca

SEQ ID NO: 84548 - RNA, 19 nt, Artificial Sequence
  Description of Artificial Sequence: Synthetic oligonucleotide
acuagcgcugaguugacuu

SEQ ID NO: 84549 - RNA, 19 nt, Artificial Sequence
  Description of Artificial Sequence: Synthetic oligonucleotide
uugacgggcauugucacuc

SEQ ID NO: 84550 - RNA, 19 nt, Artificial Sequence
  Description of Artificial Sequence: Synthetic oligonucleotide
aacuuggacuugacagccc

SEQ ID NO: 84551 - RNA, 19 nt, Artificial Sequence
  Description of Artificial Sequence: Synthetic oligonucleotide
gucuuaguacuguaguguc

SEQ ID NO: 84552 - RNA, 19 nt, Artificial Sequence
  Description of Artificial Sequence: Synthetic oligonucleotide
ccuuagcaaauuuaauacc

SEQ ID NO: 84553 - RNA, 19 nt, Artificial Sequence
  Description of Artificial Sequence: Synthetic oligonucleotide
acguuaucuagcucauucu

SEQ ID NO: 84554 - RNA, 19 nt, Artificial Sequence
  Description of Artificial Sequence: Synthetic oligonucleotide
uaccuagucugaagcagga

SEQ ID NO: 84555 - RNA, 19 nt, Artificial Sequence
  Description of Artificial Sequence: Synthetic oligonucleotide
aagggucgagacguuaucu

SEQ ID NO: 84556 - RNA, 19 nt, Artificial Sequence
  Description of Artificial Sequence: Synthetic oligonucleotide
ggaaaugauacaagcgaag

SEQ ID NO: 84557 - RNA, 19 nt, Artificial Sequence
  Description of Artificial Sequence: Synthetic oligonucleotide
augauaugaagcacaguca

SEQ ID NO: 84558 - RNA, 19 nt, Artificial Sequence
  Description of Artificial Sequence: Synthetic oligonucleotide
caauguguagcuggcgccg

SEQ ID NO: 84559 - RNA, 19 nt, Artificial Sequence
  Description of Artificial Sequence: Synthetic oligonucleotide
ucuaguucgcgcugguaau

SEQ ID NO: 84560 - RNA, 19 nt, Artificial Sequence
  Description of Artificial Sequence: Synthetic oligonucleotide
auuccaaacccacgugaca

SEQ ID NO: 84561 - RNA, 19 nt, Artificial Sequence
  Description of Artificial Sequence: Synthetic oligonucleotide
ugcacgagccucuucuagu

SEQ ID NO: 84562 - RNA, 19 nt, Artificial Sequence
  Description of Artificial Sequence: Synthetic oligonucleotide
gaucggcuugaagaaaagc

SEQ ID NO: 84563 - RNA, 19 nt, Artificial Sequence
  Description of Artificial Sequence: Synthetic oligonucleotide
cauuguaacacuguccaaa

SEQ ID NO: 84564 - RNA, 19 nt, Artificial Sequence
  Description of Artificial Sequence: Synthetic oligonucleotide
ggacaccauaaauuugagg

SEQ ID NO: 84565 - RNA, 19 nt, Artificial Sequence
  Description of Artificial Sequence: Synthetic oligonucleotide
aggguuaucuccucuuaau

SEQ ID NO: 84566 - RNA, 19 nt, Artificial Sequence
  Description of Artificial Sequence: Synthetic oligonucleotide
uacuuacuagagagguaca

SEQ ID NO: 84567 - RNA, 19 nt, Artificial Sequence
  Description of Artificial Sequence: Synthetic oligonucleotide
agauaguagccuugaacuu

SEQ ID NO: 84568 - RNA, 19 nt, Artificial Sequence
  Description of Artificial Sequence: Synthetic oligonucleotide
uuuguuuaauacgcauguc

SEQ ID NO: 84569 - RNA, 19 nt, Artificial Sequence
  Description of Artificial Sequence: Synthetic oligonucleotide
cuguugacgggcauuguca

SEQ ID NO: 84570 - RNA, 19 nt, Artificial Sequence
  Description of Artificial Sequence: Synthetic oligonucleotide
cuuucggaaucggucauug

SEQ ID NO: 84571 - RNA, 19 nt, Artificial Sequence
  Description of Artificial Sequence: Synthetic oligonucleotide
uacuagagagguacaugau

SEQ ID NO: 84572 - RNA, 19 nt, Artificial Sequence
  Description of Artificial Sequence: Synthetic oligonucleotide
gaguuuacgccgagaugcg

SEQ ID NO: 84573 - RNA, 19 nt, Artificial Sequence
  Description of Artificial Sequence: Synthetic oligonucleotide
uacgcaugucugguggagg

SEQ ID NO: 84574 - RNA, 19 nt, Artificial Sequence
  Description of Artificial Sequence: Synthetic oligonucleotide
augcacgagccucuucuag

SEQ ID NO: 84575 - RNA, 19 nt, Artificial Sequence
  Description of Artificial Sequence: Synthetic oligonucleotide
acguguagccuccucuuca

SEQ ID NO: 84576 - RNA, 19 nt, Artificial Sequence
  Description of Artificial Sequence: Synthetic oligonucleotide
augcguuggcacguguagc

SEQ ID NO: 84577 - RNA, 19 nt, Artificial Sequence
  Description of Artificial Sequence: Synthetic oligonucleotide
uacugauccgcgugucgcc

SEQ ID NO: 84578 - RNA, 19 nt, Artificial Sequence
  Description of Artificial Sequence: Synthetic oligonucleotide
gacggacuaguuuguuggc

SEQ ID NO: 84579 - RNA, 19 nt, Artificial Sequence
  Description of Artificial Sequence: Synthetic oligonucleotide
uaguucgcgcugguaaucc

SEQ ID NO: 84580 - RNA, 19 nt, Artificial Sequence
  Description of Artificial Sequence: Synthetic oligonucleotide
ucucuguucgacggacuag

SEQ ID NO: 84581 - RNA, 19 nt, Artificial Sequence
  Description of Artificial Sequence: Synthetic oligonucleotide
gggacaauuguaccuaguc

SEQ ID NO: 84582 - RNA, 19 nt, Artificial Sequence
  Description of Artificial Sequence: Synthetic oligonucleotide
agccaguacaauccauaca

SEQ ID NO: 84583 - RNA, 19 nt, Artificial Sequence
  Description of Artificial Sequence: Synthetic oligonucleotide
ggggaaaucaaagauucca

SEQ ID NO: 84584 - RNA, 19 nt, Artificial Sequence
  Description of Artificial Sequence: Synthetic oligonucleotide
aguaaacagagcaggcgca

SEQ ID NO: 84585 - RNA, 19 nt, Artificial Sequence
  Description of Artificial Sequence: Synthetic oligonucleotide
gaguggucuuucggaaucg

SEQ ID NO: 84586 - RNA, 19 nt, Artificial Sequence
  Description of Artificial Sequence: Synthetic oligonucleotide
gaaguggucucuugaggaa

SEQ ID NO: 84587 - RNA, 19 nt, Artificial Sequence
  Description of Artificial Sequence: Synthetic oligonucleotide
guagaguggucuuucggaa

SEQ ID NO: 84588 - RNA, 19 nt, Artificial Sequence
  Description of Artificial Sequence: Synthetic oligonucleotide
cagaacuaagguaccuguc

SEQ ID NO: 84589 - RNA, 19 nt, Artificial Sequence
  Description of Artificial Sequence: Synthetic oligonucleotide
guugagacucgagaccagc

SEQ ID NO: 84590 - RNA, 19 nt, Artificial Sequence
  Description of Artificial Sequence: Synthetic oligonucleotide
acugcuuagguuaguuucu

SEQ ID NO: 84591 - RNA, 19 nt, Artificial Sequence
  Description of Artificial Sequence: Synthetic oligonucleotide
ugaccucacggcucaggcc

SEQ ID NO: 84592 - RNA, 19 nt, Artificial Sequence
  Description of Artificial Sequence: Synthetic oligonucleotide
  modified_base (6)..(6): a, c, u, g, unknown or other
cuccunaaggcuguucuuc

SEQ ID NO: 84593 - RNA, 19 nt, Artificial Sequence
  Description of Artificial Sequence: Synthetic oligonucleotide
caugucuccgggcucguuc

SEQ ID NO: 84594 - RNA, 19 nt, Artificial Sequence
  Description of Artificial Sequence: Synthetic oligonucleotide
ggucuuucggaaucgguca

SEQ ID NO: 84595 - RNA, 19 nt, Artificial Sequence
  Description of Artificial Sequence: Synthetic oligonucleotide
uuuggaguuuacgccgaga

SEQ ID NO: 84596 - RNA, 19 nt, Artificial Sequence
  Description of Artificial Sequence: Synthetic oligonucleotide
gggucgagacguuaucuag

SEQ ID NO: 84597 - RNA, 19 nt, Artificial Sequence
  Description of Artificial Sequence: Synthetic oligonucleotide
gaagggucgagacguuauc

SEQ ID NO: 84598 - RNA, 19 nt, Artificial Sequence
  Description of Artificial Sequence: Synthetic oligonucleotide
cgacggacuaguuuguugg

SEQ ID NO: 84599 - RNA, 19 nt, Artificial Sequence
  Description of Artificial Sequence: Synthetic oligonucleotide
uacgccgagaugcguuggc

SEQ ID NO: 84600 - RNA, 19 nt, Artificial Sequence
  Description of Artificial Sequence: Synthetic oligonucleotide
cuuaguacuguagugucua

SEQ ID NO: 84601 - RNA, 19 nt, Artificial Sequence
  Description of Artificial Sequence: Synthetic oligonucleotide
uguucuuaacgggugcuuu

SEQ ID NO: 84602 - RNA, 19 nt, Artificial Sequence
  Description of Artificial Sequence: Synthetic oligonucleotide
cuagcgcugaguugacuuc

SEQ ID NO: 84603 - RNA, 19 nt, Artificial Sequence
  Description of Artificial Sequence: Synthetic oligonucleotide
acgcaugucugguggaggu

SEQ ID NO: 84604 - RNA, 19 nt, Artificial Sequence
  Description of Artificial Sequence: Synthetic oligonucleotide
ugcgaagcugcuugaucac

SEQ ID NO: 84605 - RNA, 19 nt, Artificial Sequence
  Description of Artificial Sequence: Synthetic oligonucleotide
cagaucggcuugaagaaaa

SEQ ID NO: 84606 - RNA, 19 nt, Artificial Sequence
  Description of Artificial Sequence: Synthetic oligonucleotide
gaugugguugaggggucag

SEQ ID NO: 84607 - RNA, 19 nt, Artificial Sequence
  Description of Artificial Sequence: Synthetic oligonucleotide
ucuuacuuucugugucauc

SEQ ID NO: 84608 - RNA, 19 nt, Artificial Sequence
  Description of Artificial Sequence: Synthetic oligonucleotide
uuaguacuguagugucuaa

SEQ ID NO: 84609 - RNA, 19 nt, Artificial Sequence
  Description of Artificial Sequence: Synthetic oligonucleotide
ggcucguucagaugaggcc

SEQ ID NO: 84610 - RNA, 19 nt, Artificial Sequence
  Description of Artificial Sequence: Synthetic oligonucleotide
cucuucuaguucgcgcugg

SEQ ID NO: 84611 - RNA, 19 nt, Artificial Sequence
  Description of Artificial Sequence: Synthetic oligonucleotide
aagcgaagguuagguucac

SEQ ID NO: 84612 - RNA, 19 nt, Artificial Sequence
  Description of Artificial Sequence: Synthetic oligonucleotide
auacgcaugucugguggag

SEQ ID NO: 84613 - RNA, 19 nt, Artificial Sequence
  Description of Artificial Sequence: Synthetic oligonucleotide
uacaagcgaagguuagguu

SEQ ID NO: 84614 - RNA, 19 nt, Artificial Sequence
  Description of Artificial Sequence: Synthetic oligonucleotide
ucgggcuuuguuggcagcc

SEQ ID NO: 84615 - RNA, 19 nt, Artificial Sequence
  Description of Artificial Sequence: Synthetic oligonucleotide
caguugagacucgagacca

SEQ ID NO: 84616 - RNA, 19 nt, Artificial Sequence
  Description of Artificial Sequence: Synthetic oligonucleotide
cugugucaucgucggauag

SEQ ID NO: 84617 - RNA, 19 nt, Artificial Sequence
  Description of Artificial Sequence: Synthetic oligonucleotide
agcugccggauccgacugc

SEQ ID NO: 84618 - RNA, 19 nt, Artificial Sequence
  Description of Artificial Sequence: Synthetic oligonucleotide
uaagccgguucuugagagu

SEQ ID NO: 84619 - RNA, 19 nt, Artificial Sequence
  Description of Artificial Sequence: Synthetic oligonucleotide
augauacaagcgaagguua

SEQ ID NO: 84620 - RNA, 19 nt, Artificial Sequence
  Description of Artificial Sequence: Synthetic oligonucleotide
cacgguugaucuuccugug

SEQ ID NO: 84621 - RNA, 19 nt, Artificial Sequence
  Description of Artificial Sequence: Synthetic oligonucleotide
augauuacucuuguuuauu

SEQ ID NO: 84622 - RNA, 19 nt, Artificial Sequence
  Description of Artificial Sequence: Synthetic oligonucleotide
cucuggaugcacgagccuc

SEQ ID NO: 84623 - RNA, 19 nt, Artificial Sequence
  Description of Artificial Sequence: Synthetic oligonucleotide
agaaugcuaaguguucauu

SEQ ID NO: 84624 - RNA, 19 nt, Artificial Sequence
  Description of Artificial Sequence: Synthetic oligonucleotide
cucaucucuggaugcacga

SEQ ID NO: 84625 - RNA, 19 nt, Artificial Sequence
  Description of Artificial Sequence: Synthetic oligonucleotide
gccgagaugcguuggcacg

SEQ ID NO: 84626 - RNA, 19 nt, Artificial Sequence
  Description of Artificial Sequence: Synthetic oligonucleotide
cgagacguuaucuagcuca

SEQ ID NO: 84627 - RNA, 19 nt, Artificial Sequence
  Description of Artificial Sequence: Synthetic oligonucleotide
gggaguacaagaaaagaua

SEQ ID NO: 84628 - RNA, 19 nt, Artificial Sequence
  Description of Artificial Sequence: Synthetic oligonucleotide
cuuuggaguuuacgccgag

SEQ ID NO: 84629 - RNA, 19 nt, Artificial Sequence
  Description of Artificial Sequence: Synthetic oligonucleotide
cuauccucucugugcgcag

SEQ ID NO: 84630 - RNA, 19 nt, Artificial Sequence
  Description of Artificial Sequence: Synthetic oligonucleotide
caguuugcucaccaagaca

SEQ ID NO: 84631 - RNA, 19 nt, Artificial Sequence
  Description of Artificial Sequence: Synthetic oligonucleotide
agggucgagacguuaucua

SEQ ID NO: 84632 - RNA, 19 nt, Artificial Sequence
  Description of Artificial Sequence: Synthetic oligonucleotide
uggacuugacagccccuuc

SEQ ID NO: 84633 - RNA, 19 nt, Artificial Sequence
  Description of Artificial Sequence: Synthetic oligonucleotide
ugccucgagcucccguacc

SEQ ID NO: 84634 - RNA, 19 nt, Artificial Sequence
  Description of Artificial Sequence: Synthetic oligonucleotide
gucgagacguuaucuagcu

SEQ ID NO: 84635 - RNA, 19 nt, Artificial Sequence
  Description of Artificial Sequence: Synthetic oligonucleotide
agaucggcuugaagaaaag

SEQ ID NO: 84636 - RNA, 19 nt, Artificial Sequence
  Description of Artificial Sequence: Synthetic oligonucleotide
augugguugaggggucagg

SEQ ID NO: 84637 - RNA, 19 nt, Artificial Sequence
  Description of Artificial Sequence: Synthetic oligonucleotide
cuuaauacauuaaguuguu

SEQ ID NO: 84638 - RNA, 19 nt, Artificial Sequence
  Description of Artificial Sequence: Synthetic oligonucleotide
ucgagacguuaucuagcuc

SEQ ID NO: 84639 - RNA, 19 nt, Artificial Sequence
  Description of Artificial Sequence: Synthetic oligonucleotide
ggacuaguuuguuggcagc

SEQ ID NO: 84640 - RNA, 19 nt, Artificial Sequence
  Description of Artificial Sequence: Synthetic oligonucleotide
ccaaggaucgggauuuguc

SEQ ID NO: 84641 - RNA, 19 nt, Artificial Sequence
  Description of Artificial Sequence: Synthetic oligonucleotide
caaccugcaugaagauuuc

SEQ ID NO: 84642 - RNA, 19 nt, Artificial Sequence
  Description of Artificial Sequence: Synthetic oligonucleotide
cguuaucuagcucauucug

SEQ ID NO: 84643 - RNA, 19 nt, Artificial Sequence
  Description of Artificial Sequence: Synthetic oligonucleotide
ggucgagacguuaucuagc

SEQ ID NO: 84644 - RNA, 19 nt, Artificial Sequence
  Description of Artificial Sequence: Synthetic oligonucleotide
uagccacuauccucucugu

SEQ ID NO: 84645 - RNA, 19 nt, Artificial Sequence
  Description of Artificial Sequence: Synthetic oligonucleotide
agaagggucgagacguuau

SEQ ID NO: 84646 - RNA, 19 nt, Artificial Sequence
  Description of Artificial Sequence: Synthetic oligonucleotide
ugauccgcgugucgccgcu

SEQ ID NO: 84647 - RNA, 19 nt, Artificial Sequence
  Description of Artificial Sequence: Synthetic oligonucleotide
aguucgcgcugguaauccu

SEQ ID NO: 84648 - RNA, 19 nt, Artificial Sequence
  Description of Artificial Sequence: Synthetic oligonucleotide
ugucuccgggcucguucag

SEQ ID NO: 84649 - RNA, 19 nt, Artificial Sequence
  Description of Artificial Sequence: Synthetic oligonucleotide
ggaaucggucauugagcag

SEQ ID NO: 84650 - RNA, 19 nt, Artificial Sequence
  Description of Artificial Sequence: Synthetic oligonucleotide
ucuguucgacggacuaguu

SEQ ID NO: 84651 - RNA, 19 nt, Artificial Sequence
  Description of Artificial Sequence: Synthetic oligonucleotide
cuaguucgcgcugguaauc

SEQ ID NO: 84652 - RNA, 19 nt, Artificial Sequence
  Description of Artificial Sequence: Synthetic oligonucleotide
cacgugacaaauucuuccu

SEQ ID NO: 84653 - RNA, 19 nt, Artificial Sequence
  Description of Artificial Sequence: Synthetic oligonucleotide
uauuugcagucaggugucu

SEQ ID NO: 84654 - RNA, 19 nt, Artificial Sequence
  Description of Artificial Sequence: Synthetic oligonucleotide
gacuaguuuguuggcagcu

SEQ ID NO: 84655 - RNA, 19 nt, Artificial Sequence
  Description of Artificial Sequence: Synthetic oligonucleotide
agccgguucuugagagugc

SEQ ID NO: 84656 - RNA, 19 nt, Artificial Sequence
  Description of Artificial Sequence: Synthetic oligonucleotide
accccaaauugaugcugcu

SEQ ID NO: 84657 - RNA, 19 nt, Artificial Sequence
  Description of Artificial Sequence: Synthetic oligonucleotide
uuuugucgcuccagcuguu

SEQ ID NO: 84658 - RNA, 19 nt, Artificial Sequence
  Description of Artificial Sequence: Synthetic oligonucleotide
aguuuacgccgagaugcgu

SEQ ID NO: 84659 - RNA, 19 nt, Artificial Sequence
  Description of Artificial Sequence: Synthetic oligonucleotide
aucgucggauagcuccagu

SEQ ID NO: 84660 - RNA, 19 nt, Artificial Sequence
  Description of Artificial Sequence: Synthetic oligonucleotide
cugauccgcgugucgccgc

SEQ ID NO: 84661 - RNA, 19 nt, Artificial Sequence
  Description of Artificial Sequence: Synthetic oligonucleotide
gauugggccgccccgccua

SEQ ID NO: 84662 - RNA, 19 nt, Artificial Sequence
  Description of Artificial Sequence: Synthetic oligonucleotide
ccuuaagacacgguugauc

SEQ ID NO: 84663 - RNA, 19 nt, Artificial Sequence
  Description of Artificial Sequence: Synthetic oligonucleotide
uggcgagucuccuccugaa

SEQ ID NO: 84664 - RNA, 19 nt, Artificial Sequence
  Description of Artificial Sequence: Synthetic oligonucleotide
ggcacugcguucugcugcc

SEQ ID NO: 84665 - RNA, 19 nt, Artificial Sequence
  Description of Artificial Sequence: Synthetic oligonucleotide
cggacuaguuuguuggcag

SEQ ID NO: 84666 - RNA, 19 nt, Artificial Sequence
  Description of Artificial Sequence: Synthetic oligonucleotide
gaugcacgagccucuucua

SEQ ID NO: 84667 - RNA, 19 nt, Artificial Sequence
  Description of Artificial Sequence: Synthetic oligonucleotide
cacguguagccuccucuuc

SEQ ID NO: 84668 - RNA, 19 nt, Artificial Sequence
  Description of Artificial Sequence: Synthetic oligonucleotide
agacuagcgcugaguugac

SEQ ID NO: 84669 - RNA, 19 nt, Artificial Sequence
  Description of Artificial Sequence: Synthetic oligonucleotide
gucggauagcuccagugau

SEQ ID NO: 84670 - RNA, 19 nt, Artificial Sequence
  Description of Artificial Sequence: Synthetic oligonucleotide
ucgcgcugguaauccuuca

SEQ ID NO: 84671 - RNA, 19 nt, Artificial Sequence
  Description of Artificial Sequence: Synthetic oligonucleotide
gccggauccgacugcuuag

SEQ ID NO: 84672 - RNA, 19 nt, Artificial Sequence
  Description of Artificial Sequence: Synthetic oligonucleotide
ccuagucugaagcaggaua

SEQ ID NO: 84673 - RNA, 19 nt, Artificial Sequence
  Description of Artificial Sequence: Synthetic oligonucleotide
cagcugccggauccgacug

SEQ ID NO: 84674 - RNA, 19 nt, Artificial Sequence
  Description of Artificial Sequence: Synthetic oligonucleotide
cacugaauguuuguuuaua

SEQ ID NO: 84675 - RNA, 19 nt, Artificial Sequence
  Description of Artificial Sequence: Synthetic oligonucleotide
auccgacugcuuagguuag

SEQ ID NO: 84676 - RNA, 19 nt, Artificial Sequence
  Description of Artificial Sequence: Synthetic oligonucleotide
gggcucguucagaugaggc

SEQ ID NO: 84677 - RNA, 19 nt, Artificial Sequence
  Description of Artificial Sequence: Synthetic oligonucleotide
ggcugcgucucauugacau

SEQ ID NO: 84678 - RNA, 19 nt, Artificial Sequence
  Description of Artificial Sequence: Synthetic oligonucleotide
gcaagcgcccgcuguuucc

SEQ ID NO: 84679 - RNA, 19 nt, Artificial Sequence
  Description of Artificial Sequence: Synthetic oligonucleotide
guguucauuguaacacugu

SEQ ID NO: 84680 - RNA, 19 nt, Artificial Sequence
  Description of Artificial Sequence: Synthetic oligonucleotide
agaugcguuggcacgugua

SEQ ID NO: 84681 - RNA, 19 nt, Artificial Sequence
  Description of Artificial Sequence: Synthetic oligonucleotide
cucuguucgacggacuagu

SEQ ID NO: 84682 - RNA, 19 nt, Artificial Sequence
  Description of Artificial Sequence: Synthetic oligonucleotide
guagccucauugacaaacu

SEQ ID NO: 84683 - RNA, 19 nt, Artificial Sequence
  Description of Artificial Sequence: Synthetic oligonucleotide
aucggucauugagcagcuc

SEQ ID NO: 84684 - RNA, 19 nt, Artificial Sequence
  Description of Artificial Sequence: Synthetic oligonucleotide
ggacuugacagccccuucu

SEQ ID NO: 84685 - RNA, 19 nt, Artificial Sequence
  Description of Artificial Sequence: Synthetic oligonucleotide
gcugaccucacggcucagg

SEQ ID NO: 84686 - RNA, 19 nt, Artificial Sequence
  Description of Artificial Sequence: Synthetic oligonucleotide
ggguaaccccaaauugaug

SEQ ID NO: 84687 - RNA, 19 nt, Artificial Sequence
  Description of Artificial Sequence: Synthetic oligonucleotide
ucugggcggcacugcguuc

SEQ ID NO: 84688 - RNA, 19 nt, Artificial Sequence
  Description of Artificial Sequence: Synthetic oligonucleotide
cggaaucggucauugagca

SEQ ID NO: 84689 - RNA, 19 nt, Artificial Sequence
  Description of Artificial Sequence: Synthetic oligonucleotide
guugacgggcauugucacu

SEQ ID NO: 84690 - RNA, 19 nt, Artificial Sequence
  Description of Artificial Sequence: Synthetic oligonucleotide
agcgcugaguugacuucug

SEQ ID NO: 84691 - RNA, 19 nt, Artificial Sequence
  Description of Artificial Sequence: Synthetic oligonucleotide
uccgacugcuuagguuagu

SEQ ID NO: 84692 - RNA, 19 nt, Artificial Sequence
  Description of Artificial Sequence: Synthetic oligonucleotide
gcugauugggccgccccgc

SEQ ID NO: 84693 - RNA, 19 nt, Artificial Sequence
  Description of Artificial Sequence: Synthetic oligonucleotide
guuuacgccgagaugcguu

SEQ ID NO: 84694 - RNA, 19 nt, Artificial Sequence
  Description of Artificial Sequence: Synthetic oligonucleotide
accuagucugaagcaggau

SEQ ID NO: 84695 - RNA, 19 nt, Artificial Sequence
  Description of Artificial Sequence: Synthetic oligonucleotide
acgccgagaugcguuggca

SEQ ID NO: 84696 - RNA, 19 nt, Artificial Sequence
  Description of Artificial Sequence: Synthetic oligonucleotide
gagacguuaucuagcucau

SEQ ID NO: 84697 - RNA, 19 nt, Artificial Sequence
  Description of Artificial Sequence: Synthetic oligonucleotide
ggcacguguagccuccucu

SEQ ID NO: 84698 - RNA, 19 nt, Artificial Sequence
  Description of Artificial Sequence: Synthetic oligonucleotide
ccuaagccgguucuugaga

SEQ ID NO: 84699 - RNA, 19 nt, Artificial Sequence
  Description of Artificial Sequence: Synthetic oligonucleotide
cuccgggcucguucagaug

SEQ ID NO: 84700 - RNA, 19 nt, Artificial Sequence
  Description of Artificial Sequence: Synthetic oligonucleotide
ugucgccgcucaucuucaa

SEQ ID NO: 84701 - RNA, 19 nt, Artificial Sequence
  Description of Artificial Sequence: Synthetic oligonucleotide
auugggccgccccgccuaa

SEQ ID NO: 84702 - RNA, 19 nt, Artificial Sequence
  Description of Artificial Sequence: Synthetic oligonucleotide
gagaugcguuggcacgugu

SEQ ID NO: 84703 - RNA, 19 nt, Artificial Sequence
  Description of Artificial Sequence: Synthetic oligonucleotide
ugcaggccgcaaagccuua

SEQ ID NO: 84704 - RNA, 19 nt, Artificial Sequence
  Description of Artificial Sequence: Synthetic oligonucleotide
gucuuucggaaucggucau

SEQ ID NO: 84705 - RNA, 19 nt, Artificial Sequence
  Description of Artificial Sequence: Synthetic oligonucleotide
gcaggcgcaaauaucuaua

SEQ ID NO: 84706 - RNA, 19 nt, Artificial Sequence
  Description of Artificial Sequence: Synthetic oligonucleotide
cagacuugccagaggcgcu

SEQ ID NO: 84707 - RNA, 19 nt, Artificial Sequence
  Description of Artificial Sequence: Synthetic oligonucleotide
ccggauccgacugcuuagg

SEQ ID NO: 84708 - RNA, 19 nt, Artificial Sequence
  Description of Artificial Sequence: Synthetic oligonucleotide
ccguaccugcuugagcagc

SEQ ID NO: 84709 - RNA, 19 nt, Artificial Sequence
  Description of Artificial Sequence: Synthetic oligonucleotide
agacguuaucuagcucauu

SEQ ID NO: 84710 - RNA, 19 nt, Artificial Sequence
  Description of Artificial Sequence: Synthetic oligonucleotide
ugcugaccucacggcucag

SEQ ID NO: 84711 - RNA, 19 nt, Artificial Sequence
  Description of Artificial Sequence: Synthetic oligonucleotide
ggauccgacugcuuagguu

SEQ ID NO: 84712 - RNA, 19 nt, Artificial Sequence
  Description of Artificial Sequence: Synthetic oligonucleotide
cgucggauagcuccaguga

SEQ ID NO: 84713 - RNA, 19 nt, Artificial Sequence
  Description of Artificial Sequence: Synthetic oligonucleotide
guucgacggacuaguuugu

SEQ ID NO: 84714 - RNA, 19 nt, Artificial Sequence
  Description of Artificial Sequence: Synthetic oligonucleotide
cagaagggucgagacguua

SEQ ID NO: 84715 - RNA, 19 nt, Artificial Sequence
  Description of Artificial Sequence: Synthetic oligonucleotide
gcggcacugcguucugcug

SEQ ID NO: 84716 - RNA, 19 nt, Artificial Sequence
  Description of Artificial Sequence: Synthetic oligonucleotide
uugggccgccccgccuaag

SEQ ID NO: 84717 - RNA, 19 nt, Artificial Sequence
  Description of Artificial Sequence: Synthetic oligonucleotide
cuucuaguucgcgcuggua

SEQ ID NO: 84718 - RNA, 19 nt, Artificial Sequence
  Description of Artificial Sequence: Synthetic oligonucleotide
cgccgagaugcguuggcac

SEQ ID NO: 84719 - RNA, 19 nt, Artificial Sequence
  Description of Artificial Sequence: Synthetic oligonucleotide
gacuagcgcugaguugacu

SEQ ID NO: 84720 - RNA, 19 nt, Artificial Sequence
  Description of Artificial Sequence: Synthetic oligonucleotide
  modified_base (7)..(7): a, c, u, g, unknown or other
gcuccunaaggcuguucuu

SEQ ID NO: 84721 - RNA, 19 nt, Artificial Sequence
  Description of Artificial Sequence: Synthetic oligonucleotide
guagugucuaaggcacuuu

SEQ ID NO: 84722 - RNA, 19 nt, Artificial Sequence
  Description of Artificial Sequence: Synthetic oligonucleotide
gacucgagaccagcugcau

SEQ ID NO: 84723 - RNA, 19 nt, Artificial Sequence
  Description of Artificial Sequence: Synthetic oligonucleotide
gauccgcgugucgccgcuc

SEQ ID NO: 84724 - RNA, 19 nt, Artificial Sequence
  Description of Artificial Sequence: Synthetic oligonucleotide
guucgcgcugguaauccuu

SEQ ID NO: 84725 - RNA, 19 nt, Artificial Sequence
  Description of Artificial Sequence: Synthetic oligonucleotide
ccgccuaagccgguucuug

SEQ ID NO: 84726 - RNA, 19 nt, Artificial Sequence
  Description of Artificial Sequence: Synthetic oligonucleotide
cgggcucguucagaugagg

SEQ ID NO: 84727 - RNA, 19 nt, Artificial Sequence
  Description of Artificial Sequence: Synthetic oligonucleotide
ccgagacuagcgcugaguu

SEQ ID NO: 84728 - RNA, 19 nt, Artificial Sequence
  Description of Artificial Sequence: Synthetic oligonucleotide
gccccgccuaagccgguuc

SEQ ID NO: 84729 - RNA, 19 nt, Artificial Sequence
  Description of Artificial Sequence: Synthetic oligonucleotide
cgagaugcguuggcacgug

SEQ ID NO: 84730 - RNA, 19 nt, Artificial Sequence
  Description of Artificial Sequence: Synthetic oligonucleotide
ccgagaugcguuggcacgu

SEQ ID NO: 84731 - RNA, 19 nt, Artificial Sequence
  Description of Artificial Sequence: Synthetic oligonucleotide
ccgacugcuuagguuaguu

SEQ ID NO: 84732 - RNA, 19 nt, Artificial Sequence
  Description of Artificial Sequence: Synthetic oligonucleotide
gcuggcguuuaagcugcuu

SEQ ID NO: 84733 - RNA, 19 nt, Artificial Sequence
  Description of Artificial Sequence: Synthetic oligonucleotide
ccccgccuaagccgguucu

SEQ ID NO: 84734 - RNA, 19 nt, Artificial Sequence
  Description of Artificial Sequence: Synthetic oligonucleotide
ccagaagggucgagacguu

SEQ ID NO: 84735 - RNA, 19 nt, Artificial Sequence
  Description of Artificial Sequence: Synthetic oligonucleotide
cggauccgacugcuuaggu

SEQ ID NO: 84736 - RNA, 19 nt, Artificial Sequence
  Description of Artificial Sequence: Synthetic oligonucleotide
ccggccagaucggcuugaa

SEQ ID NO: 84737 - RNA, 19 nt, Artificial Sequence
  Description of Artificial Sequence: Synthetic oligonucleotide
ccgccccgccuaagccggu

SEQ ID NO: 84738 - RNA, 19 nt, Artificial Sequence
  Description of Artificial Sequence: Synthetic oligonucleotide
aauaugagcaauuugacuc

SEQ ID NO: 84739 - RNA, 19 nt, Artificial Sequence
  Description of Artificial Sequence: Synthetic oligonucleotide
aaaacuacuaucuaggagu

SEQ ID NO: 84740 - RNA, 19 nt, Artificial Sequence
  Description of Artificial Sequence: Synthetic oligonucleotide
uguacgaacagccuggucg

SEQ ID NO: 84741 - RNA, 19 nt, Artificial Sequence
  Description of Artificial Sequence: Synthetic oligonucleotide
uaugagauagcccagacug

SEQ ID NO: 84742 - RNA, 19 nt, Artificial Sequence
  Description of Artificial Sequence: Synthetic oligonucleotide
aaagauauuuaaucuagag

SEQ ID NO: 84743 - RNA, 19 nt, Artificial Sequence
  Description of Artificial Sequence: Synthetic oligonucleotide
uauaauauccugcagccag

SEQ ID NO: 84744 - RNA, 19 nt, Artificial Sequence
  Description of Artificial Sequence: Synthetic oligonucleotide
aaggcaguaacaucaaauc

SEQ ID NO: 84745 - RNA, 19 nt, Artificial Sequence
  Description of Artificial Sequence: Synthetic oligonucleotide
aagauauuuaaucuagaga

SEQ ID NO: 84746 - RNA, 19 nt, Artificial Sequence
  Description of Artificial Sequence: Synthetic oligonucleotide
augacaauacauuauuggg

SEQ ID NO: 84747 - RNA, 19 nt, Artificial Sequence
  Description of Artificial Sequence: Synthetic oligonucleotide
aauaugcucaauaugagca

SEQ ID NO: 84748 - RNA, 19 nt, Artificial Sequence
  Description of Artificial Sequence: Synthetic oligonucleotide
uauaggaagggacugaacu

SEQ ID NO: 84749 - RNA, 19 nt, Artificial Sequence
  Description of Artificial Sequence: Synthetic oligonucleotide
uuaaggacuuccuauaggc

SEQ ID NO: 84750 - RNA, 19 nt, Artificial Sequence
  Description of Artificial Sequence: Synthetic oligonucleotide
aagauauccuuuccgacuc

SEQ ID NO: 84751 - RNA, 19 nt, Artificial Sequence
  Description of Artificial Sequence: Synthetic oligonucleotide
uguugguuauucuaaagag

SEQ ID NO: 84752 - RNA, 19 nt, Artificial Sequence
  Description of Artificial Sequence: Synthetic oligonucleotide
ucuagaaugcaucucuucc

SEQ ID NO: 84753 - RNA, 19 nt, Artificial Sequence
  Description of Artificial Sequence: Synthetic oligonucleotide
aagaucuaggccuggcacc

SEQ ID NO: 84754 - RNA, 19 nt, Artificial Sequence
  Description of Artificial Sequence: Synthetic oligonucleotide
aauuugauuuuccggucac

SEQ ID NO: 84755 - RNA, 19 nt, Artificial Sequence
  Description of Artificial Sequence: Synthetic oligonucleotide
auaugagcaauuugacucc

SEQ ID NO: 84756 - RNA, 19 nt, Artificial Sequence
  Description of Artificial Sequence: Synthetic oligonucleotide
uccaauaaguuacuguccc

SEQ ID NO: 84757 - RNA, 19 nt, Artificial Sequence
  Description of Artificial Sequence: Synthetic oligonucleotide
uucuauacagaguuuaaac

SEQ ID NO: 84758 - RNA, 19 nt, Artificial Sequence
  Description of Artificial Sequence: Synthetic oligonucleotide
uauacagaguuuaaacaug

SEQ ID NO: 84759 - RNA, 19 nt, Artificial Sequence
  Description of Artificial Sequence: Synthetic oligonucleotide
uugaguuggaucacaacag

SEQ ID NO: 84760 - RNA, 19 nt, Artificial Sequence
  Description of Artificial Sequence: Synthetic oligonucleotide
aauuguacgaacagccugg

SEQ ID NO: 84761 - RNA, 19 nt, Artificial Sequence
  Description of Artificial Sequence: Synthetic oligonucleotide
ucuccuaacacccauuagu

SEQ ID NO: 84762 - RNA, 19 nt, Artificial Sequence
  Description of Artificial Sequence: Synthetic oligonucleotide
acauguuuaauaugucaac

SEQ ID NO: 84763 - RNA, 19 nt, Artificial Sequence
  Description of Artificial Sequence: Synthetic oligonucleotide
ucaaguugcagccugucca

SEQ ID NO: 84764 - RNA, 19 nt, Artificial Sequence
  Description of Artificial Sequence: Synthetic oligonucleotide
aggccuaaagaucuaggcc

SEQ ID NO: 84765 - RNA, 19 nt, Artificial Sequence
  Description of Artificial Sequence: Synthetic oligonucleotide
agagagauguauccguugg

SEQ ID NO: 84766 - RNA, 19 nt, Artificial Sequence
  Description of Artificial Sequence: Synthetic oligonucleotide
aaacacaugauagcuacug

SEQ ID NO: 84767 - RNA, 19 nt, Artificial Sequence
  Description of Artificial Sequence: Synthetic oligonucleotide
agaggcauagcaguugucc

SEQ ID NO: 84768 - RNA, 19 nt, Artificial Sequence
  Description of Artificial Sequence: Synthetic oligonucleotide
ugccauaucagguaaaaua

SEQ ID NO: 84769 - RNA, 19 nt, Artificial Sequence
  Description of Artificial Sequence: Synthetic oligonucleotide
ucccagauaugacagacca

SEQ ID NO: 84770 - RNA, 19 nt, Artificial Sequence
  Description of Artificial Sequence: Synthetic oligonucleotide
aagcucuguacucaagaag

SEQ ID NO: 84771 - RNA, 19 nt, Artificial Sequence
  Description of Artificial Sequence: Synthetic oligonucleotide
ucuguacucaagaagcgcu

SEQ ID NO: 84772 - RNA, 19 nt, Artificial Sequence
  Description of Artificial Sequence: Synthetic oligonucleotide
caguuaaaguauuacgagc

SEQ ID NO: 84773 - RNA, 19 nt, Artificial Sequence
  Description of Artificial Sequence: Synthetic oligonucleotide
uucaaguagugucacguga

SEQ ID NO: 84774 - RNA, 19 nt, Artificial Sequence
  Description of Artificial Sequence: Synthetic oligonucleotide
cucaguuaaaguauuacga

SEQ ID NO: 84775 - RNA, 19 nt, Artificial Sequence
  Description of Artificial Sequence: Synthetic oligonucleotide
auugggaauauuucauaag

SEQ ID NO: 84776 - RNA, 19 nt, Artificial Sequence
  Description of Artificial Sequence: Synthetic oligonucleotide
ugggaauauuucauaagca

SEQ ID NO: 84777 - RNA, 19 nt, Artificial Sequence
  Description of Artificial Sequence: Synthetic oligonucleotide
uguuccucaguuaaaguau

SEQ ID NO: 84778 - RNA, 19 nt, Artificial Sequence
  Description of Artificial Sequence: Synthetic oligonucleotide
gacagaccagucuugagug

SEQ ID NO: 84779 - RNA, 19 nt, Artificial Sequence
  Description of Artificial Sequence: Synthetic oligonucleotide
uguguguugguuauucuaa

SEQ ID NO: 84780 - RNA, 19 nt, Artificial Sequence
  Description of Artificial Sequence: Synthetic oligonucleotide
ugacagaccagucuugagu

SEQ ID NO: 84781 - RNA, 19 nt, Artificial Sequence
  Description of Artificial Sequence: Synthetic oligonucleotide
gagauguauccguuggagg

SEQ ID NO: 84782 - RNA, 19 nt, Artificial Sequence
  Description of Artificial Sequence: Synthetic oligonucleotide
cuuaaaaccaagguaacca

SEQ ID NO: 84783 - RNA, 19 nt, Artificial Sequence
  Description of Artificial Sequence: Synthetic oligonucleotide
uguucaaguagugucacgu

SEQ ID NO: 84784 - RNA, 19 nt, Artificial Sequence
  Description of Artificial Sequence: Synthetic oligonucleotide
uccguaagaggcauagcag

SEQ ID NO: 84785 - RNA, 19 nt, Artificial Sequence
  Description of Artificial Sequence: Synthetic oligonucleotide
cuuaaggacuuccuauagg

SEQ ID NO: 84786 - RNA, 19 nt, Artificial Sequence
  Description of Artificial Sequence: Synthetic oligonucleotide
ugcagcuauccacaagagg

SEQ ID NO: 84787 - RNA, 19 nt, Artificial Sequence
  Description of Artificial Sequence: Synthetic oligonucleotide
ucaaguagugucacgugac

SEQ ID NO: 84788 - RNA, 19 nt, Artificial Sequence
  Description of Artificial Sequence: Synthetic oligonucleotide
uccacggacaaaauggauc

SEQ ID NO: 84789 - RNA, 19 nt, Artificial Sequence
  Description of Artificial Sequence: Synthetic oligonucleotide
agauaugacagaccagucu

SEQ ID NO: 84790 - RNA, 19 nt, Artificial Sequence
  Description of Artificial Sequence: Synthetic oligonucleotide
gaaagaguaaguaguggug

SEQ ID NO: 84791 - RNA, 19 nt, Artificial Sequence
  Description of Artificial Sequence: Synthetic oligonucleotide
gaguuuaugguguuccuca

SEQ ID NO: 84792 - RNA, 19 nt, Artificial Sequence
  Description of Artificial Sequence: Synthetic oligonucleotide
ucuugcuuugggaggauug

SEQ ID NO: 84793 - RNA, 19 nt, Artificial Sequence
  Description of Artificial Sequence: Synthetic oligonucleotide
ugugauggagcuaaaucua

SEQ ID NO: 84794 - RNA, 19 nt, Artificial Sequence
  Description of Artificial Sequence: Synthetic oligonucleotide
aagcgcuugauacaguuua

SEQ ID NO: 84795 - RNA, 19 nt, Artificial Sequence
  Description of Artificial Sequence: Synthetic oligonucleotide
ugucacgugaccaaugauu

SEQ ID NO: 84796 - RNA, 19 nt, Artificial Sequence
  Description of Artificial Sequence: Synthetic oligonucleotide
aauuccacagaguccguaa

SEQ ID NO: 84797 - RNA, 19 nt, Artificial Sequence
  Description of Artificial Sequence: Synthetic oligonucleotide
acuucaauccaagagcucu

SEQ ID NO: 84798 - RNA, 19 nt, Artificial Sequence
  Description of Artificial Sequence: Synthetic oligonucleotide
uaagaggcauagcaguugu

SEQ ID NO: 84799 - RNA, 19 nt, Artificial Sequence
  Description of Artificial Sequence: Synthetic oligonucleotide
uaaagucuagguuuuguuu

SEQ ID NO: 84800 - RNA, 19 nt, Artificial Sequence
  Description of Artificial Sequence: Synthetic oligonucleotide
cuaucuaggaguguucaag

SEQ ID NO: 84801 - RNA, 19 nt, Artificial Sequence
  Description of Artificial Sequence: Synthetic oligonucleotide
gagcuaaaucuauuuauuc

SEQ ID NO: 84802 - RNA, 19 nt, Artificial Sequence
  Description of Artificial Sequence: Synthetic oligonucleotide
ugaguuggaucacaacaga

SEQ ID NO: 84803 - RNA, 19 nt, Artificial Sequence
  Description of Artificial Sequence: Synthetic oligonucleotide
gauagcccagacugaaugc

SEQ ID NO: 84804 - RNA, 19 nt, Artificial Sequence
  Description of Artificial Sequence: Synthetic oligonucleotide
aucagagagauguauccgu

SEQ ID NO: 84805 - RNA, 19 nt, Artificial Sequence
  Description of Artificial Sequence: Synthetic oligonucleotide
ccuaagauggucuaacuac

SEQ ID NO: 84806 - RNA, 19 nt, Artificial Sequence
  Description of Artificial Sequence: Synthetic oligonucleotide
uuacgagcagcuucagucc

SEQ ID NO: 84807 - RNA, 19 nt, Artificial Sequence
  Description of Artificial Sequence: Synthetic oligonucleotide
ucuguauaggaagggacug

SEQ ID NO: 84808 - RNA, 19 nt, Artificial Sequence
  Description of Artificial Sequence: Synthetic oligonucleotide
aauugugauccuccugccu

SEQ ID NO: 84809 - RNA, 19 nt, Artificial Sequence
  Description of Artificial Sequence: Synthetic oligonucleotide
acaucgguucucuacggag

SEQ ID NO: 84810 - RNA, 19 nt, Artificial Sequence
  Description of Artificial Sequence: Synthetic oligonucleotide
acugaaugcaaaauuguga

SEQ ID NO: 84811 - RNA, 19 nt, Artificial Sequence
  Description of Artificial Sequence: Synthetic oligonucleotide
ucaugugaggugcagcuau

SEQ ID NO: 84812 - RNA, 19 nt, Artificial Sequence
  Description of Artificial Sequence: Synthetic oligonucleotide
gggauauaguuuuaaggag

SEQ ID NO: 84813 - RNA, 19 nt, Artificial Sequence
  Description of Artificial Sequence: Synthetic oligonucleotide
agagauguauccguuggag

SEQ ID NO: 84814 - RNA, 19 nt, Artificial Sequence
  Description of Artificial Sequence: Synthetic oligonucleotide
gggauuaaggaguucuggg

SEQ ID NO: 84815 - RNA, 19 nt, Artificial Sequence
  Description of Artificial Sequence: Synthetic oligonucleotide
uccugguaagcuaucagau

SEQ ID NO: 84816 - RNA, 19 nt, Artificial Sequence
  Description of Artificial Sequence: Synthetic oligonucleotide
ugugacaccguuguaggga

SEQ ID NO: 84817 - RNA, 19 nt, Artificial Sequence
  Description of Artificial Sequence: Synthetic oligonucleotide
uguccugguaagcuaucag

SEQ ID NO: 84818 - RNA, 19 nt, Artificial Sequence
  Description of Artificial Sequence: Synthetic oligonucleotide
uuuuaugagauagcccaga

SEQ ID NO: 84819 - RNA, 19 nt, Artificial Sequence
  Description of Artificial Sequence: Synthetic oligonucleotide
uggucuaacuacuuccuuc

SEQ ID NO: 84820 - RNA, 19 nt, Artificial Sequence
  Description of Artificial Sequence: Synthetic oligonucleotide
uugauggucucaguguaag

SEQ ID NO: 84821 - RNA, 19 nt, Artificial Sequence
  Description of Artificial Sequence: Synthetic oligonucleotide
uuugggcugaaacguaccu

SEQ ID NO: 84822 - RNA, 19 nt, Artificial Sequence
  Description of Artificial Sequence: Synthetic oligonucleotide
acuaucuagaaugcaucuc

SEQ ID NO: 84823 - RNA, 19 nt, Artificial Sequence
  Description of Artificial Sequence: Synthetic oligonucleotide
uggguucuaaauacuuucu

SEQ ID NO: 84824 - RNA, 19 nt, Artificial Sequence
  Description of Artificial Sequence: Synthetic oligonucleotide
ugguguuccucaguuaaag

SEQ ID NO: 84825 - RNA, 19 nt, Artificial Sequence
  Description of Artificial Sequence: Synthetic oligonucleotide
gcaacaucgguucucuacg

SEQ ID NO: 84826 - RNA, 19 nt, Artificial Sequence
  Description of Artificial Sequence: Synthetic oligonucleotide
cuugugaauagcuucaagu

SEQ ID NO: 84827 - RNA, 19 nt, Artificial Sequence
  Description of Artificial Sequence: Synthetic oligonucleotide
gauaggccuaaagaucuag

SEQ ID NO: 84828 - RNA, 19 nt, Artificial Sequence
  Description of Artificial Sequence: Synthetic oligonucleotide
aacguaccuugugaauagc

SEQ ID NO: 84829 - RNA, 19 nt, Artificial Sequence
  Description of Artificial Sequence: Synthetic oligonucleotide
agaccuauuuguuuccuau

SEQ ID NO: 84830 - RNA, 19 nt, Artificial Sequence
  Description of Artificial Sequence: Synthetic oligonucleotide
agauuuggcauuugacaga

SEQ ID NO: 84831 - RNA, 19 nt, Artificial Sequence
  Description of Artificial Sequence: Synthetic oligonucleotide
acagaccagucuugagugc

SEQ ID NO: 84832 - RNA, 19 nt, Artificial Sequence
  Description of Artificial Sequence: Synthetic oligonucleotide
ccucaguuaaaguauuacg

SEQ ID NO: 84833 - RNA, 19 nt, Artificial Sequence
  Description of Artificial Sequence: Synthetic oligonucleotide
agacggugccuuuucgugg

SEQ ID NO: 84834 - RNA, 19 nt, Artificial Sequence
  Description of Artificial Sequence: Synthetic oligonucleotide
aguguaaguucuugcuuug

SEQ ID NO: 84835 - RNA, 19 nt, Artificial Sequence
  Description of Artificial Sequence: Synthetic oligonucleotide
cuuguaaaagaaugauuga

SEQ ID NO: 84836 - RNA, 19 nt, Artificial Sequence
  Description of Artificial Sequence: Synthetic oligonucleotide
uguggaccagacuagggau

SEQ ID NO: 84837 - RNA, 19 nt, Artificial Sequence
  Description of Artificial Sequence: Synthetic oligonucleotide
uccacaagaggacucuauc

SEQ ID NO: 84838 - RNA, 19 nt, Artificial Sequence
  Description of Artificial Sequence: Synthetic oligonucleotide
gucacgugaccaaugauug

SEQ ID NO: 84839 - RNA, 19 nt, Artificial Sequence
  Description of Artificial Sequence: Synthetic oligonucleotide
ggucuaacuacuuccuucc

SEQ ID NO: 84840 - RNA, 19 nt, Artificial Sequence
  Description of Artificial Sequence: Synthetic oligonucleotide
aguuuaugguguuccucag

SEQ ID NO: 84841 - RNA, 19 nt, Artificial Sequence
  Description of Artificial Sequence: Synthetic oligonucleotide
auaucagguaaaauagcug

SEQ ID NO: 84842 - RNA, 19 nt, Artificial Sequence
  Description of Artificial Sequence: Synthetic oligonucleotide
ucaaguucgcggcgcggcg

SEQ ID NO: 84843 - RNA, 19 nt, Artificial Sequence
  Description of Artificial Sequence: Synthetic oligonucleotide
aaguagugucacgugacca

SEQ ID NO: 84844 - RNA, 19 nt, Artificial Sequence
  Description of Artificial Sequence: Synthetic oligonucleotide
ucuacggagcagguugugg

SEQ ID NO: 84845 - RNA, 19 nt, Artificial Sequence
  Description of Artificial Sequence: Synthetic oligonucleotide
aacaucgguucucuacgga

SEQ ID NO: 84846 - RNA, 19 nt, Artificial Sequence
  Description of Artificial Sequence: Synthetic oligonucleotide
ucuacuguagggaguuuau

SEQ ID NO: 84847 - RNA, 19 nt, Artificial Sequence
  Description of Artificial Sequence: Synthetic oligonucleotide
ggaacauagcauugaagug

SEQ ID NO: 84848 - RNA, 19 nt, Artificial Sequence
  Description of Artificial Sequence: Synthetic oligonucleotide
uggagcaguaaaguaggcc

SEQ ID NO: 84849 - RNA, 19 nt, Artificial Sequence
  Description of Artificial Sequence: Synthetic oligonucleotide
gacucccaagccuagguca

SEQ ID NO: 84850 - RNA, 19 nt, Artificial Sequence
  Description of Artificial Sequence: Synthetic oligonucleotide
caucgguucucuacggagc

SEQ ID NO: 84851 - RNA, 19 nt, Artificial Sequence
  Description of Artificial Sequence: Synthetic oligonucleotide
uagauugugccguccucag

SEQ ID NO: 84852 - RNA, 19 nt, Artificial Sequence
  Description of Artificial Sequence: Synthetic oligonucleotide
ucacgugaccaaugauugg

SEQ ID NO: 84853 - RNA, 19 nt, Artificial Sequence
  Description of Artificial Sequence: Synthetic oligonucleotide
uuucguggagcaguaaagu

SEQ ID NO: 84854 - RNA, 19 nt, Artificial Sequence
  Description of Artificial Sequence: Synthetic oligonucleotide
acuacuaucuaggaguguu

SEQ ID NO: 84855 - RNA, 19 nt, Artificial Sequence
  Description of Artificial Sequence: Synthetic oligonucleotide
accuauuuguuuccuauuu

SEQ ID NO: 84856 - RNA, 19 nt, Artificial Sequence
  Description of Artificial Sequence: Synthetic oligonucleotide
uccucaguuaaaguauuac

SEQ ID NO: 84857 - RNA, 19 nt, Artificial Sequence
  Description of Artificial Sequence: Synthetic oligonucleotide
ugaaacguaccuugugaau

SEQ ID NO: 84858 - RNA, 19 nt, Artificial Sequence
  Description of Artificial Sequence: Synthetic oligonucleotide
gcagcuauccacaagagga

SEQ ID NO: 84859 - RNA, 19 nt, Artificial Sequence
  Description of Artificial Sequence: Synthetic oligonucleotide
gucugaaccugaaagacuc

SEQ ID NO: 84860 - RNA, 19 nt, Artificial Sequence
  Description of Artificial Sequence: Synthetic oligonucleotide
auucuguagauugugccgu

SEQ ID NO: 84861 - RNA, 19 nt, Artificial Sequence
  Description of Artificial Sequence: Synthetic oligonucleotide
cacgguuuuaggcauagga

SEQ ID NO: 84862 - RNA, 19 nt, Artificial Sequence
  Description of Artificial Sequence: Synthetic oligonucleotide
acgcccgcgagcuguagcc

SEQ ID NO: 84863 - RNA, 19 nt, Artificial Sequence
  Description of Artificial Sequence: Synthetic oligonucleotide
uggugauugauggucucag

SEQ ID NO: 84864 - RNA, 19 nt, Artificial Sequence
  Description of Artificial Sequence: Synthetic oligonucleotide
augugaggugcagcuaucc

SEQ ID NO: 84865 - RNA, 19 nt, Artificial Sequence
  Description of Artificial Sequence: Synthetic oligonucleotide
aguuggaucacaacagagu

SEQ ID NO: 84866 - RNA, 19 nt, Artificial Sequence
  Description of Artificial Sequence: Synthetic oligonucleotide
uauuacgagcagcuucagu

SEQ ID NO: 84867 - RNA, 19 nt, Artificial Sequence
  Description of Artificial Sequence: Synthetic oligonucleotide
uccuauuuccuaagauggu

SEQ ID NO: 84868 - RNA, 19 nt, Artificial Sequence
  Description of Artificial Sequence: Synthetic oligonucleotide
accaugccauuauaauauc

SEQ ID NO: 84869 - RNA, 19 nt, Artificial Sequence
  Description of Artificial Sequence: Synthetic oligonucleotide
guaggccuuaaaaccaagg

SEQ ID NO: 84870 - RNA, 19 nt, Artificial Sequence
  Description of Artificial Sequence: Synthetic oligonucleotide
auaauauccugcagccagg

SEQ ID NO: 84871 - RNA, 19 nt, Artificial Sequence
  Description of Artificial Sequence: Synthetic oligonucleotide
caaguagugucacgugacc

SEQ ID NO: 84872 - RNA, 19 nt, Artificial Sequence
  Description of Artificial Sequence: Synthetic oligonucleotide
uucccagauaugacagacc

SEQ ID NO: 84873 - RNA, 19 nt, Artificial Sequence
  Description of Artificial Sequence: Synthetic oligonucleotide
caacagagugguacaacac

SEQ ID NO: 84874 - RNA, 19 nt, Artificial Sequence
  Description of Artificial Sequence: Synthetic oligonucleotide
ugggaagauuccagaaaac

SEQ ID NO: 84875 - RNA, 19 nt, Artificial Sequence
  Description of Artificial Sequence: Synthetic oligonucleotide
ccacggacaaaauggaucc

SEQ ID NO: 84876 - RNA, 19 nt, Artificial Sequence
  Description of Artificial Sequence: Synthetic oligonucleotide
cuucaauccaagagcucug

SEQ ID NO: 84877 - RNA, 19 nt, Artificial Sequence
  Description of Artificial Sequence: Synthetic oligonucleotide
auaggccuaaagaucuagg

SEQ ID NO: 84878 - RNA, 19 nt, Artificial Sequence
  Description of Artificial Sequence: Synthetic oligonucleotide
ugauagcuacuguuaagua

SEQ ID NO: 84879 - RNA, 19 nt, Artificial Sequence
  Description of Artificial Sequence: Synthetic oligonucleotide
caacaucgguucucuacgg

SEQ ID NO: 84880 - RNA, 19 nt, Artificial Sequence
  Description of Artificial Sequence: Synthetic oligonucleotide
gccauuaagagcuggccgc

SEQ ID NO: 84881 - RNA, 19 nt, Artificial Sequence
  Description of Artificial Sequence: Synthetic oligonucleotide
agguauaaucuugacuuga

SEQ ID NO: 84882 - RNA, 19 nt, Artificial Sequence
  Description of Artificial Sequence: Synthetic oligonucleotide
cuaacacccauuaguaaaa

SEQ ID NO: 84883 - RNA, 19 nt, Artificial Sequence
  Description of Artificial Sequence: Synthetic oligonucleotide
uucguggagcaguaaagua

SEQ ID NO: 84884 - RNA, 19 nt, Artificial Sequence
  Description of Artificial Sequence: Synthetic oligonucleotide
uuccuaagauggucuaacu

SEQ ID NO: 84885 - RNA, 19 nt, Artificial Sequence
  Description of Artificial Sequence: Synthetic oligonucleotide
guucaaguagugucacgug

SEQ ID NO: 84886 - RNA, 19 nt, Artificial Sequence
  Description of Artificial Sequence: Synthetic oligonucleotide
uucaaguucgcggcgcggc

SEQ ID NO: 84887 - RNA, 19 nt, Artificial Sequence
  Description of Artificial Sequence: Synthetic oligonucleotide
guaagaggcauagcaguug

SEQ ID NO: 84888 - RNA, 19 nt, Artificial Sequence
  Description of Artificial Sequence: Synthetic oligonucleotide
uucacgguguacugagaac

SEQ ID NO: 84889 - RNA, 19 nt, Artificial Sequence
  Description of Artificial Sequence: Synthetic oligonucleotide
cagauaggccuaaagaucu

SEQ ID NO: 84890 - RNA, 19 nt, Artificial Sequence
  Description of Artificial Sequence: Synthetic oligonucleotide
cagacggugccuuuucgug

SEQ ID NO: 84891 - RNA, 19 nt, Artificial Sequence
  Description of Artificial Sequence: Synthetic oligonucleotide
augacagaccagucuugag

SEQ ID NO: 84892 - RNA, 19 nt, Artificial Sequence
  Description of Artificial Sequence: Synthetic oligonucleotide
ugcuuucgaggcaguaucu

SEQ ID NO: 84893 - RNA, 19 nt, Artificial Sequence
  Description of Artificial Sequence: Synthetic oligonucleotide
guccaauaaguuacugucc

SEQ ID NO: 84894 - RNA, 19 nt, Artificial Sequence
  Description of Artificial Sequence: Synthetic oligonucleotide
gguugccaaacacuguacc

SEQ ID NO: 84895 - RNA, 19 nt, Artificial Sequence
  Description of Artificial Sequence: Synthetic oligonucleotide
ucaguccaauaaguuacug

SEQ ID NO: 84896 - RNA, 19 nt, Artificial Sequence
  Description of Artificial Sequence: Synthetic oligonucleotide
gugcuuucgaggcaguauc

SEQ ID NO: 84897 - RNA, 19 nt, Artificial Sequence
  Description of Artificial Sequence: Synthetic oligonucleotide
cagagagauguauccguug

SEQ ID NO: 84898 - RNA, 19 nt, Artificial Sequence
  Description of Artificial Sequence: Synthetic oligonucleotide
ugugaccauagaagucugu

SEQ ID NO: 84899 - RNA, 19 nt, Artificial Sequence
  Description of Artificial Sequence: Synthetic oligonucleotide
guguggaccagacuaggga

SEQ ID NO: 84900 - RNA, 19 nt, Artificial Sequence
  Description of Artificial Sequence: Synthetic oligonucleotide
cuacuaucuaggaguguuc

SEQ ID NO: 84901 - RNA, 19 nt, Artificial Sequence
  Description of Artificial Sequence: Synthetic oligonucleotide
cuacuguuaaguacugaaa

SEQ ID NO: 84902 - RNA, 19 nt, Artificial Sequence
  Description of Artificial Sequence: Synthetic oligonucleotide
cuaagauggucuaacuacu

SEQ ID NO: 84903 - RNA, 19 nt, Artificial Sequence
  Description of Artificial Sequence: Synthetic oligonucleotide
gcugaaacguaccuuguga

SEQ ID NO: 84904 - RNA, 19 nt, Artificial Sequence
  Description of Artificial Sequence: Synthetic oligonucleotide
ucgugggcuaggaaacacu

SEQ ID NO: 84905 - RNA, 19 nt, Artificial Sequence
  Description of Artificial Sequence: Synthetic oligonucleotide
aaaccaccaugccauuaua

SEQ ID NO: 84906 - RNA, 19 nt, Artificial Sequence
  Description of Artificial Sequence: Synthetic oligonucleotide
uucuacuguagggaguuua

SEQ ID NO: 84907 - RNA, 19 nt, Artificial Sequence
  Description of Artificial Sequence: Synthetic oligonucleotide
ugcucaauaugagcaauuu

SEQ ID NO: 84908 - RNA, 19 nt, Artificial Sequence
  Description of Artificial Sequence: Synthetic oligonucleotide
cugaaacguaccuugugaa

SEQ ID NO: 84909 - RNA, 19 nt, Artificial Sequence
  Description of Artificial Sequence: Synthetic oligonucleotide
cuuuccgacucuccaaaca

SEQ ID NO: 84910 - RNA, 19 nt, Artificial Sequence
  Description of Artificial Sequence: Synthetic oligonucleotide
agaucuaggccuggcacca

SEQ ID NO: 84911 - RNA, 19 nt, Artificial Sequence
  Description of Artificial Sequence: Synthetic oligonucleotide
guagauugugccguccuca

SEQ ID NO: 84912 - RNA, 19 nt, Artificial Sequence
  Description of Artificial Sequence: Synthetic oligonucleotide
gcaucgauguaaugaauuc

SEQ ID NO: 84913 - RNA, 19 nt, Artificial Sequence
  Description of Artificial Sequence: Synthetic oligonucleotide
gguguacugagaacagggg

SEQ ID NO: 84914 - RNA, 19 nt, Artificial Sequence
  Description of Artificial Sequence: Synthetic oligonucleotide
cuccuaacacccauuagua

SEQ ID NO: 84915 - RNA, 19 nt, Artificial Sequence
  Description of Artificial Sequence: Synthetic oligonucleotide
ugcaugcgcaacaucgguu

SEQ ID NO: 84916 - RNA, 19 nt, Artificial Sequence
  Description of Artificial Sequence: Synthetic oligonucleotide
cuugcacagaccccaccug

SEQ ID NO: 84917 - RNA, 19 nt, Artificial Sequence
  Description of Artificial Sequence: Synthetic oligonucleotide
gcucaauaugagcaauuug

SEQ ID NO: 84918 - RNA, 19 nt, Artificial Sequence
  Description of Artificial Sequence: Synthetic oligonucleotide
guauaaucuugacuugaua

SEQ ID NO: 84919 - RNA, 19 nt, Artificial Sequence
  Description of Artificial Sequence: Synthetic oligonucleotide
aucuaggaguguucaagua

SEQ ID NO: 84920 - RNA, 19 nt, Artificial Sequence
  Description of Artificial Sequence: Synthetic oligonucleotide
aaccaccaugccauuauaa

SEQ ID NO: 84921 - RNA, 19 nt, Artificial Sequence
  Description of Artificial Sequence: Synthetic oligonucleotide
uuccucaguuaaaguauua

SEQ ID NO: 84922 - RNA, 19 nt, Artificial Sequence
  Description of Artificial Sequence: Synthetic oligonucleotide
ucgccgaagaucccagaau

SEQ ID NO: 84923 - RNA, 19 nt, Artificial Sequence
  Description of Artificial Sequence: Synthetic oligonucleotide
gggcagauaggccuaaaga

SEQ ID NO: 84924 - RNA, 19 nt, Artificial Sequence
  Description of Artificial Sequence: Synthetic oligonucleotide
aacuacuaucuaggagugu

SEQ ID NO: 84925 - RNA, 19 nt, Artificial Sequence
  Description of Artificial Sequence: Synthetic oligonucleotide
gcagauaggccuaaagauc

SEQ ID NO: 84926 - RNA, 19 nt, Artificial Sequence
  Description of Artificial Sequence: Synthetic oligonucleotide
agcauugaagugggcucgg

SEQ ID NO: 84927 - RNA, 19 nt, Artificial Sequence
  Description of Artificial Sequence: Synthetic oligonucleotide
uaaggucgccgaagauccc

SEQ ID NO: 84928 - RNA, 19 nt, Artificial Sequence
  Description of Artificial Sequence: Synthetic oligonucleotide
cuacuguagggaguuuaug

SEQ ID NO: 84929 - RNA, 19 nt, Artificial Sequence
  Description of Artificial Sequence: Synthetic oligonucleotide
agauauccuuuccgacucu

SEQ ID NO: 84930 - RNA, 19 nt, Artificial Sequence
  Description of Artificial Sequence: Synthetic oligonucleotide
ugggauugcgggugugcac

SEQ ID NO: 84931 - RNA, 19 nt, Artificial Sequence
  Description of Artificial Sequence: Synthetic oligonucleotide
uguauccguuggaggggug

SEQ ID NO: 84932 - RNA, 19 nt, Artificial Sequence
  Description of Artificial Sequence: Synthetic oligonucleotide
ccaauaaguuacugucccc

SEQ ID NO: 84933 - RNA, 19 nt, Artificial Sequence
  Description of Artificial Sequence: Synthetic oligonucleotide
aguccacggacaaaaugga

SEQ ID NO: 84934 - RNA, 19 nt, Artificial Sequence
  Description of Artificial Sequence: Synthetic oligonucleotide
gggugaauuagugggaaga

SEQ ID NO: 84935 - RNA, 19 nt, Artificial Sequence
  Description of Artificial Sequence: Synthetic oligonucleotide
ccuauuuccuaagaugguc

SEQ ID NO: 84936 - RNA, 19 nt, Artificial Sequence
  Description of Artificial Sequence: Synthetic oligonucleotide
gggauugcgggugugcacc

SEQ ID NO: 84937 - RNA, 19 nt, Artificial Sequence
  Description of Artificial Sequence: Synthetic oligonucleotide
uugcgggugugcaccauua

SEQ ID NO: 84938 - RNA, 19 nt, Artificial Sequence
  Description of Artificial Sequence: Synthetic oligonucleotide
gaggugaguccacggacaa

SEQ ID NO: 84939 - RNA, 19 nt, Artificial Sequence
  Description of Artificial Sequence: Synthetic oligonucleotide
auuguacgaacagccuggu

SEQ ID NO: 84940 - RNA, 19 nt, Artificial Sequence
  Description of Artificial Sequence: Synthetic oligonucleotide
gguagggagcugcuucaag

SEQ ID NO: 84941 - RNA, 19 nt, Artificial Sequence
  Description of Artificial Sequence: Synthetic oligonucleotide
cuaaagucuagguuuuguu

SEQ ID NO: 84942 - RNA, 19 nt, Artificial Sequence
  Description of Artificial Sequence: Synthetic oligonucleotide
caguccaauaaguuacugu

SEQ ID NO: 84943 - RNA, 19 nt, Artificial Sequence
  Description of Artificial Sequence: Synthetic oligonucleotide
uccgacgcccgcgagcugu

SEQ ID NO: 84944 - RNA, 19 nt, Artificial Sequence
  Description of Artificial Sequence: Synthetic oligonucleotide
gacgcccgcgagcuguagc

SEQ ID NO: 84945 - RNA, 19 nt, Artificial Sequence
  Description of Artificial Sequence: Synthetic oligonucleotide
guaaguaguggugauugau

SEQ ID NO: 84946 - RNA, 19 nt, Artificial Sequence
  Description of Artificial Sequence: Synthetic oligonucleotide
guacgaacagccuggucgu

SEQ ID NO: 84947 - RNA, 19 nt, Artificial Sequence
  Description of Artificial Sequence: Synthetic oligonucleotide
cugcuuaaggacuuccuau

SEQ ID NO: 84948 - RNA, 19 nt, Artificial Sequence
  Description of Artificial Sequence: Synthetic oligonucleotide
gggccacauacugugaggc

SEQ ID NO: 84949 - RNA, 19 nt, Artificial Sequence
  Description of Artificial Sequence: Synthetic oligonucleotide
uauccguuggaggggugaa

SEQ ID NO: 84950 - RNA, 19 nt, Artificial Sequence
  Description of Artificial Sequence: Synthetic oligonucleotide
agcgguccuccugugaaga

SEQ ID NO: 84951 - RNA, 19 nt, Artificial Sequence
  Description of Artificial Sequence: Synthetic oligonucleotide
uugggcugaaacguaccuu

SEQ ID NO: 84952 - RNA, 19 nt, Artificial Sequence
  Description of Artificial Sequence: Synthetic oligonucleotide
ugucaacaaugugaccaua

SEQ ID NO: 84953 - RNA, 19 nt, Artificial Sequence
  Description of Artificial Sequence: Synthetic oligonucleotide
cgcaacaucgguucucuac

SEQ ID NO: 84954 - RNA, 19 nt, Artificial Sequence
  Description of Artificial Sequence: Synthetic oligonucleotide
ccgcuguucuacuguaggg

SEQ ID NO: 84955 - RNA, 19 nt, Artificial Sequence
  Description of Artificial Sequence: Synthetic oligonucleotide
caaguucgcggcgcggcgc

SEQ ID NO: 84956 - RNA, 19 nt, Artificial Sequence
  Description of Artificial Sequence: Synthetic oligonucleotide
ccagcaucgauguaaugaa

SEQ ID NO: 84957 - RNA, 19 nt, Artificial Sequence
  Description of Artificial Sequence: Synthetic oligonucleotide
guauccguuggagggguga

SEQ ID NO: 84958 - RNA, 19 nt, Artificial Sequence
  Description of Artificial Sequence: Synthetic oligonucleotide
gguagacugaacagaagua

SEQ ID NO: 84959 - RNA, 19 nt, Artificial Sequence
  Description of Artificial Sequence: Synthetic oligonucleotide
cuccccgcagaaaccagga

SEQ ID NO: 84960 - RNA, 19 nt, Artificial Sequence
  Description of Artificial Sequence: Synthetic oligonucleotide
caagguaaccagcaucgau

SEQ ID NO: 84961 - RNA, 19 nt, Artificial Sequence
  Description of Artificial Sequence: Synthetic oligonucleotide
gaaacacaugauagcuacu

SEQ ID NO: 84962 - RNA, 19 nt, Artificial Sequence
  Description of Artificial Sequence: Synthetic oligonucleotide
gaccuauuuguuuccuauu

SEQ ID NO: 84963 - RNA, 19 nt, Artificial Sequence
  Description of Artificial Sequence: Synthetic oligonucleotide
uggccgcuguucuacugua

SEQ ID NO: 84964 - RNA, 19 nt, Artificial Sequence
  Description of Artificial Sequence: Synthetic oligonucleotide
uacgaacagccuggucgug

SEQ ID NO: 84965 - RNA, 19 nt, Artificial Sequence
  Description of Artificial Sequence: Synthetic oligonucleotide
cgacucuccaaacacccac

SEQ ID NO: 84966 - RNA, 19 nt, Artificial Sequence
  Description of Artificial Sequence: Synthetic oligonucleotide
aggucgccgaagaucccag

SEQ ID NO: 84967 - RNA, 19 nt, Artificial Sequence
  Description of Artificial Sequence: Synthetic oligonucleotide
cgaaccagcccugacugcc

SEQ ID NO: 84968 - RNA, 19 nt, Artificial Sequence
  Description of Artificial Sequence: Synthetic oligonucleotide
ccccagauaccagccaucc

SEQ ID NO: 84969 - RNA, 19 nt, Artificial Sequence
  Description of Artificial Sequence: Synthetic oligonucleotide
gccacgguuuuaggcauag

SEQ ID NO: 84970 - RNA, 19 nt, Artificial Sequence
  Description of Artificial Sequence: Synthetic oligonucleotide
gguuuuaggcauaggaauu

SEQ ID NO: 84971 - RNA, 19 nt, Artificial Sequence
  Description of Artificial Sequence: Synthetic oligonucleotide
caccacugaauuguacgaa

SEQ ID NO: 84972 - RNA, 19 nt, Artificial Sequence
  Description of Artificial Sequence: Synthetic oligonucleotide
acacucagaggggucugaa

SEQ ID NO: 84973 - RNA, 19 nt, Artificial Sequence
  Description of Artificial Sequence: Synthetic oligonucleotide
agcgcuugauacaguuuau

SEQ ID NO: 84974 - RNA, 19 nt, Artificial Sequence
  Description of Artificial Sequence: Synthetic oligonucleotide
cucggcuuucaagcugcac

SEQ ID NO: 84975 - RNA, 19 nt, Artificial Sequence
  Description of Artificial Sequence: Synthetic oligonucleotide
cucuacggagcagguugug

SEQ ID NO: 84976 - RNA, 19 nt, Artificial Sequence
  Description of Artificial Sequence: Synthetic oligonucleotide
gugauggagcuaaaucuau

SEQ ID NO: 84977 - RNA, 19 nt, Artificial Sequence
  Description of Artificial Sequence: Synthetic oligonucleotide
gguauaaucuugacuugau

SEQ ID NO: 84978 - RNA, 19 nt, Artificial Sequence
  Description of Artificial Sequence: Synthetic oligonucleotide
gcuuucgaggcaguaucuc

SEQ ID NO: 84979 - RNA, 19 nt, Artificial Sequence
  Description of Artificial Sequence: Synthetic oligonucleotide
ccguaagaggcauagcagu

SEQ ID NO: 84980 - RNA, 19 nt, Artificial Sequence
  Description of Artificial Sequence: Synthetic oligonucleotide
aggagccuucaugaagaua

SEQ ID NO: 84981 - RNA, 19 nt, Artificial Sequence
  Description of Artificial Sequence: Synthetic oligonucleotide
ggugaauuagugggaagau

SEQ ID NO: 84982 - RNA, 19 nt, Artificial Sequence
  Description of Artificial Sequence: Synthetic oligonucleotide
gcauccaagccaggcuaag

SEQ ID NO: 84983 - RNA, 19 nt, Artificial Sequence
  Description of Artificial Sequence: Synthetic oligonucleotide
agauaggccuaaagaucua

SEQ ID NO: 84984 - RNA, 19 nt, Artificial Sequence
  Description of Artificial Sequence: Synthetic oligonucleotide
ccuauaggccugcucccuc

SEQ ID NO: 84985 - RNA, 19 nt, Artificial Sequence
  Description of Artificial Sequence: Synthetic oligonucleotide
gagugucccucuccuuccu

SEQ ID NO: 84986 - RNA, 19 nt, Artificial Sequence
  Description of Artificial Sequence: Synthetic oligonucleotide
cgguagacugaacagaagu

SEQ ID NO: 84987 - RNA, 19 nt, Artificial Sequence
  Description of Artificial Sequence: Synthetic oligonucleotide
ggauugcgggugugcacca

SEQ ID NO: 84988 - RNA, 19 nt, Artificial Sequence
  Description of Artificial Sequence: Synthetic oligonucleotide
caaucuccuaacacccauu

SEQ ID NO: 84989 - RNA, 19 nt, Artificial Sequence
  Description of Artificial Sequence: Synthetic oligonucleotide
cgguuuuaggcauaggaau

SEQ ID NO: 84990 - RNA, 19 nt, Artificial Sequence
  Description of Artificial Sequence: Synthetic oligonucleotide
cuuccgcggcccugggaca

SEQ ID NO: 84991 - RNA, 19 nt, Artificial Sequence
  Description of Artificial Sequence: Synthetic oligonucleotide
cagccuggucgugggcuag

SEQ ID NO: 84992 - RNA, 19 nt, Artificial Sequence
  Description of Artificial Sequence: Synthetic oligonucleotide
ccaagccuaggucaggccu

SEQ ID NO: 84993 - RNA, 19 nt, Artificial Sequence
  Description of Artificial Sequence: Synthetic oligonucleotide
gcggggaggugaguccacg

SEQ ID NO: 84994 - RNA, 19 nt, Artificial Sequence
  Description of Artificial Sequence: Synthetic oligonucleotide
gccagcggggaggugaguc

SEQ ID NO: 84995 - RNA, 19 nt, Artificial Sequence
  Description of Artificial Sequence: Synthetic oligonucleotide
ggccgcuguucuacuguag

SEQ ID NO: 84996 - RNA, 19 nt, Artificial Sequence
  Description of Artificial Sequence: Synthetic oligonucleotide
gccugacacagccuugagu

SEQ ID NO: 84997 - RNA, 19 nt, Artificial Sequence
  Description of Artificial Sequence: Synthetic oligonucleotide
ggucgugggcuaggaaaca

SEQ ID NO: 84998 - RNA, 19 nt, Artificial Sequence
  Description of Artificial Sequence: Synthetic oligonucleotide
ggauccgaaccagcccuga

SEQ ID NO: 84999 - RNA, 19 nt, Artificial Sequence
  Description of Artificial Sequence: Synthetic oligonucleotide
guccacggacaaaauggau

SEQ ID NO: 85000 - RNA, 19 nt, Artificial Sequence
  Description of Artificial Sequence: Synthetic oligonucleotide
ggucgccgaagaucccaga

SEQ ID NO: 85001 - RNA, 19 nt, Artificial Sequence
  Description of Artificial Sequence: Synthetic oligonucleotide
guucucuacggagcagguu

SEQ ID NO: 85002 - RNA, 19 nt, Artificial Sequence
  Description of Artificial Sequence: Synthetic oligonucleotide
ccacgguuuuaggcauagg

SEQ ID NO: 85003 - RNA, 19 nt, Artificial Sequence
  Description of Artificial Sequence: Synthetic oligonucleotide
agcaaggguugugguccuu

SEQ ID NO: 85004 - RNA, 19 nt, Artificial Sequence
  Description of Artificial Sequence: Synthetic oligonucleotide
agccacgguuuuaggcaua

SEQ ID NO: 85005 - RNA, 19 nt, Artificial Sequence
  Description of Artificial Sequence: Synthetic oligonucleotide
cguaagaggcauagcaguu

SEQ ID NO: 85006 - RNA, 19 nt, Artificial Sequence
  Description of Artificial Sequence: Synthetic oligonucleotide
ccguuggaggggugaauua

SEQ ID NO: 85007 - RNA, 19 nt, Artificial Sequence
  Description of Artificial Sequence: Synthetic oligonucleotide
gaucuaggccuggcaccau

SEQ ID NO: 85008 - RNA, 19 nt, Artificial Sequence
  Description of Artificial Sequence: Synthetic oligonucleotide
ccauuaagagcuggccgcu

SEQ ID NO: 85009 - RNA, 19 nt, Artificial Sequence
  Description of Artificial Sequence: Synthetic oligonucleotide
gcgcuugauacaguuuauu

SEQ ID NO: 85010 - RNA, 19 nt, Artificial Sequence
  Description of Artificial Sequence: Synthetic oligonucleotide
ccccaccugaaggguugcc

SEQ ID NO: 85011 - RNA, 19 nt, Artificial Sequence
  Description of Artificial Sequence: Synthetic oligonucleotide
ccuccgacgcccgcgagcu

SEQ ID NO: 85012 - RNA, 19 nt, Artificial Sequence
  Description of Artificial Sequence: Synthetic oligonucleotide
cggagcccuccgacgcccg

SEQ ID NO: 85013 - RNA, 19 nt, Artificial Sequence
  Description of Artificial Sequence: Synthetic oligonucleotide
cggcgcggagcccuccgac

SEQ ID NO: 85014 - RNA, 19 nt, Artificial Sequence
  Description of Artificial Sequence: Synthetic oligonucleotide
gcgcaacaucgguucucua

SEQ ID NO: 85015 - RNA, 19 nt, Artificial Sequence
  Description of Artificial Sequence: Synthetic oligonucleotide
ccgagcaggccagggccaa

SEQ ID NO: 85016 - RNA, 19 nt, Artificial Sequence
  Description of Artificial Sequence: Synthetic oligonucleotide
cgacgcccgcgagcuguag

SEQ ID NO: 85017 - RNA, 19 nt, Artificial Sequence
  Description of Artificial Sequence: Synthetic oligonucleotide
ccgacgcccgcgagcugua

SEQ ID NO: 85018 - RNA, 19 nt, Artificial Sequence
  Description of Artificial Sequence: Synthetic oligonucleotide
ucuaaggaaagucugaugg

SEQ ID NO: 85019 - RNA, 19 nt, Artificial Sequence
  Description of Artificial Sequence: Synthetic oligonucleotide
caauguaauagcuucaucg

SEQ ID NO: 85020 - RNA, 19 nt, Artificial Sequence
  Description of Artificial Sequence: Synthetic oligonucleotide
ugagauaccuuuuauuugg

SEQ ID NO: 85021 - RNA, 19 nt, Artificial Sequence
  Description of Artificial Sequence: Synthetic oligonucleotide
uuugacucagauaagaaac

SEQ ID NO: 85022 - RNA, 19 nt, Artificial Sequence
  Description of Artificial Sequence: Synthetic oligonucleotide
aauaaugacuuauuggggu

SEQ ID NO: 85023 - RNA, 19 nt, Artificial Sequence
  Description of Artificial Sequence: Synthetic oligonucleotide
uuuaacagcauuuuaggca

SEQ ID NO: 85024 - RNA, 19 nt, Artificial Sequence
  Description of Artificial Sequence: Synthetic oligonucleotide
aauggaaccagggaaacac

SEQ ID NO: 85025 - RNA, 19 nt, Artificial Sequence
  Description of Artificial Sequence: Synthetic oligonucleotide
aaauccuaaauccauagau

SEQ ID NO: 85026 - RNA, 19 nt, Artificial Sequence
  Description of Artificial Sequence: Synthetic oligonucleotide
uccaauaaugacuuauugg

SEQ ID NO: 85027 - RNA, 19 nt, Artificial Sequence
  Description of Artificial Sequence: Synthetic oligonucleotide
aacagguauacuuguaagg

SEQ ID NO: 85028 - RNA, 19 nt, Artificial Sequence
  Description of Artificial Sequence: Synthetic oligonucleotide
caugacuagaugaugaagg

SEQ ID NO: 85029 - RNA, 19 nt, Artificial Sequence
  Description of Artificial Sequence: Synthetic oligonucleotide
uguaaauuguaauaaggca

SEQ ID NO: 85030 - RNA, 19 nt, Artificial Sequence
  Description of Artificial Sequence: Synthetic oligonucleotide
gauuuaaugacuccugcag

SEQ ID NO: 85031 - RNA, 19 nt, Artificial Sequence
  Description of Artificial Sequence: Synthetic oligonucleotide
aaacauaagagugaguuca

SEQ ID NO: 85032 - RNA, 19 nt, Artificial Sequence
  Description of Artificial Sequence: Synthetic oligonucleotide
gauaagagagcccugauuc

SEQ ID NO: 85033 - RNA, 19 nt, Artificial Sequence
  Description of Artificial Sequence: Synthetic oligonucleotide
uuuaaguuagcuauguuua

SEQ ID NO: 85034 - RNA, 19 nt, Artificial Sequence
  Description of Artificial Sequence: Synthetic oligonucleotide
uucuaaugaaccaauaaaa

SEQ ID NO: 85035 - RNA, 19 nt, Artificial Sequence
  Description of Artificial Sequence: Synthetic oligonucleotide
aauguaauagcuucaucga

SEQ ID NO: 85036 - RNA, 19 nt, Artificial Sequence
  Description of Artificial Sequence: Synthetic oligonucleotide
auuaacgaaguccacaucu

SEQ ID NO: 85037 - RNA, 19 nt, Artificial Sequence
  Description of Artificial Sequence: Synthetic oligonucleotide
cuguaaauuguaauaaggc

SEQ ID NO: 85038 - RNA, 19 nt, Artificial Sequence
  Description of Artificial Sequence: Synthetic oligonucleotide
uaaagacuagagaugauac

SEQ ID NO: 85039 - RNA, 19 nt, Artificial Sequence
  Description of Artificial Sequence: Synthetic oligonucleotide
aauuugcucucuuaaauau

SEQ ID NO: 85040 - RNA, 19 nt, Artificial Sequence
  Description of Artificial Sequence: Synthetic oligonucleotide
ugggauauaaauccaauau

SEQ ID NO: 85041 - RNA, 19 nt, Artificial Sequence
  Description of Artificial Sequence: Synthetic oligonucleotide
uuggcaauagagaaggugu

SEQ ID NO: 85042 - RNA, 19 nt, Artificial Sequence
  Description of Artificial Sequence: Synthetic oligonucleotide
aaauccgccaggaucauac

SEQ ID NO: 85043 - RNA, 19 nt, Artificial Sequence
  Description of Artificial Sequence: Synthetic oligonucleotide
auuagaugaccguuuuccc

SEQ ID NO: 85044 - RNA, 19 nt, Artificial Sequence
  Description of Artificial Sequence: Synthetic oligonucleotide
augauaaucaggaaaagug

SEQ ID NO: 85045 - RNA, 19 nt, Artificial Sequence
  Description of Artificial Sequence: Synthetic oligonucleotide
uguauuaccuuguaucaca

SEQ ID NO: 85046 - RNA, 19 nt, Artificial Sequence
  Description of Artificial Sequence: Synthetic oligonucleotide
agagcaagucccuuauugc

SEQ ID NO: 85047 - RNA, 19 nt, Artificial Sequence
  Description of Artificial Sequence: Synthetic oligonucleotide
auguuuacuccuuugcuuc

SEQ ID NO: 85048 - RNA, 19 nt, Artificial Sequence
  Description of Artificial Sequence: Synthetic oligonucleotide
ugguguaaggacauaaaga

SEQ ID NO: 85049 - RNA, 19 nt, Artificial Sequence
  Description of Artificial Sequence: Synthetic oligonucleotide
uuaugaacuaccccaaauc

SEQ ID NO: 85050 - RNA, 19 nt, Artificial Sequence
  Description of Artificial Sequence: Synthetic oligonucleotide
ugagaaaauuuccauugca

SEQ ID NO: 85051 - RNA, 19 nt, Artificial Sequence
  Description of Artificial Sequence: Synthetic oligonucleotide
cauaagagugaguucagag

SEQ ID NO: 85052 - RNA, 19 nt, Artificial Sequence
  Description of Artificial Sequence: Synthetic oligonucleotide
agcacaaagcauuugugag

SEQ ID NO: 85053 - RNA, 19 nt, Artificial Sequence
  Description of Artificial Sequence: Synthetic oligonucleotide
gguguaaggacauaaagac

SEQ ID NO: 85054 - RNA, 19 nt, Artificial Sequence
  Description of Artificial Sequence: Synthetic oligonucleotide
cauuagaugaccguuuucc

SEQ ID NO: 85055 - RNA, 19 nt, Artificial Sequence
  Description of Artificial Sequence: Synthetic oligonucleotide
aaagcagcuucuaaugaac

SEQ ID NO: 85056 - RNA, 19 nt, Artificial Sequence
  Description of Artificial Sequence: Synthetic oligonucleotide
  modified_base (5)..(5): a, c, u, g, unknown or other
acaunuccagucuuccagc

SEQ ID NO: 85057 - RNA, 19 nt, Artificial Sequence
  Description of Artificial Sequence: Synthetic oligonucleotide
uuuaccucuugaaugguac

SEQ ID NO: 85058 - RNA, 19 nt, Artificial Sequence
  Description of Artificial Sequence: Synthetic oligonucleotide
uauacuuguaaggucauac

SEQ ID NO: 85059 - RNA, 19 nt, Artificial Sequence
  Description of Artificial Sequence: Synthetic oligonucleotide
caauaaugacuuauugggg

SEQ ID NO: 85060 - RNA, 19 nt, Artificial Sequence
  Description of Artificial Sequence: Synthetic oligonucleotide
uuucaaugccgguacaugc

SEQ ID NO: 85061 - RNA, 19 nt, Artificial Sequence
  Description of Artificial Sequence: Synthetic oligonucleotide
cauggaaauccuuuggaag

SEQ ID NO: 85062 - RNA, 19 nt, Artificial Sequence
  Description of Artificial Sequence: Synthetic oligonucleotide
auaagagagcccugauucc

SEQ ID NO: 85063 - RNA, 19 nt, Artificial Sequence
  Description of Artificial Sequence: Synthetic oligonucleotide
uacuuguaaggucauacac

SEQ ID NO: 85064 - RNA, 19 nt, Artificial Sequence
  Description of Artificial Sequence: Synthetic oligonucleotide
ugauggccagguauuaugg

SEQ ID NO: 85065 - RNA, 19 nt, Artificial Sequence
  Description of Artificial Sequence: Synthetic oligonucleotide
acucagauaagaaacaaug

SEQ ID NO: 85066 - RNA, 19 nt, Artificial Sequence
  Description of Artificial Sequence: Synthetic oligonucleotide
uuuaagaccguacugucuu

SEQ ID NO: 85067 - RNA, 19 nt, Artificial Sequence
  Description of Artificial Sequence: Synthetic oligonucleotide
aagauaaagacuagagaug

SEQ ID NO: 85068 - RNA, 19 nt, Artificial Sequence
  Description of Artificial Sequence: Synthetic oligonucleotide
ugucuauugcacauaguca

SEQ ID NO: 85069 - RNA, 19 nt, Artificial Sequence
  Description of Artificial Sequence: Synthetic oligonucleotide
gaacagguauacuuguaag

SEQ ID NO: 85070 - RNA, 19 nt, Artificial Sequence
  Description of Artificial Sequence: Synthetic oligonucleotide
uuguucuaaggaaagucug

SEQ ID NO: 85071 - RNA, 19 nt, Artificial Sequence
  Description of Artificial Sequence: Synthetic oligonucleotide
aaguuagcuauguuuauua

SEQ ID NO: 85072 - RNA, 19 nt, Artificial Sequence
  Description of Artificial Sequence: Synthetic oligonucleotide
aggacauaaagacuguugu

SEQ ID NO: 85073 - RNA, 19 nt, Artificial Sequence
  Description of Artificial Sequence: Synthetic oligonucleotide
uguuauccuaccacuuggg

SEQ ID NO: 85074 - RNA, 19 nt, Artificial Sequence
  Description of Artificial Sequence: Synthetic oligonucleotide
acacaccuaacacacuuac

SEQ ID NO: 85075 - RNA, 19 nt, Artificial Sequence
  Description of Artificial Sequence: Synthetic oligonucleotide
aguuacaucucuccuagga

SEQ ID NO: 85076 - RNA, 19 nt, Artificial Sequence
  Description of Artificial Sequence: Synthetic oligonucleotide
agugcuuagguggaacucc

SEQ ID NO: 85077 - RNA, 19 nt, Artificial Sequence
  Description of Artificial Sequence: Synthetic oligonucleotide
cuaaccauaugaacauccg

SEQ ID NO: 85078 - RNA, 19 nt, Artificial Sequence
  Description of Artificial Sequence: Synthetic oligonucleotide
uagccaaaggaugagauac

SEQ ID NO: 85079 - RNA, 19 nt, Artificial Sequence
  Description of Artificial Sequence: Synthetic oligonucleotide
uguucuaaggaaagucuga

SEQ ID NO: 85080 - RNA, 19 nt, Artificial Sequence
  Description of Artificial Sequence: Synthetic oligonucleotide
gugucuauugcacauaguc

SEQ ID NO: 85081 - RNA, 19 nt, Artificial Sequence
  Description of Artificial Sequence: Synthetic oligonucleotide
uguggugccacucgauuag

SEQ ID NO: 85082 - RNA, 19 nt, Artificial Sequence
  Description of Artificial Sequence: Synthetic oligonucleotide
cuugacaugugccacuggc

SEQ ID NO: 85083 - RNA, 19 nt, Artificial Sequence
  Description of Artificial Sequence: Synthetic oligonucleotide
uugugagcagaacacguug

SEQ ID NO: 85084 - RNA, 19 nt, Artificial Sequence
  Description of Artificial Sequence: Synthetic oligonucleotide
uugacucagauaagaaaca

SEQ ID NO: 85085 - RNA, 19 nt, Artificial Sequence
  Description of Artificial Sequence: Synthetic oligonucleotide
  modified_base (6)..(6): a, c, u, g, unknown or other
cacaunuccagucuuccag

SEQ ID NO: 85086 - RNA, 19 nt, Artificial Sequence
  Description of Artificial Sequence: Synthetic oligonucleotide
uuuuaagaccguacugucu

SEQ ID NO: 85087 - RNA, 19 nt, Artificial Sequence
  Description of Artificial Sequence: Synthetic oligonucleotide
auaaugaagucaaauccag

SEQ ID NO: 85088 - RNA, 19 nt, Artificial Sequence
  Description of Artificial Sequence: Synthetic oligonucleotide
uucaaugccgguacaugcc

SEQ ID NO: 85089 - RNA, 19 nt, Artificial Sequence
  Description of Artificial Sequence: Synthetic oligonucleotide
augagauaccuuuuauuug

SEQ ID NO: 85090 - RNA, 19 nt, Artificial Sequence
  Description of Artificial Sequence: Synthetic oligonucleotide
ucagggaacguucuuggcu

SEQ ID NO: 85091 - RNA, 19 nt, Artificial Sequence
  Description of Artificial Sequence: Synthetic oligonucleotide
agauuaacgaaguccacau

SEQ ID NO: 85092 - RNA, 19 nt, Artificial Sequence
  Description of Artificial Sequence: Synthetic oligonucleotide
accuaacacacuuacaaaa

SEQ ID NO: 85093 - RNA, 19 nt, Artificial Sequence
  Description of Artificial Sequence: Synthetic oligonucleotide
aaauuuuaaguuagcuaug

SEQ ID NO: 85094 - RNA, 19 nt, Artificial Sequence
  Description of Artificial Sequence: Synthetic oligonucleotide
uuuaggcacagguaucuga

SEQ ID NO: 85095 - RNA, 19 nt, Artificial Sequence
  Description of Artificial Sequence: Synthetic oligonucleotide
gaugagauaccuuuuauuu

SEQ ID NO: 85096 - RNA, 19 nt, Artificial Sequence
  Description of Artificial Sequence: Synthetic oligonucleotide
aaggacauaaagacuguug

SEQ ID NO: 85097 - RNA, 19 nt, Artificial Sequence
  Description of Artificial Sequence: Synthetic oligonucleotide
aucacuaucacuaaccaua

SEQ ID NO: 85098 - RNA, 19 nt, Artificial Sequence
  Description of Artificial Sequence: Synthetic oligonucleotide
cuguuauccuaccacuugg

SEQ ID NO: 85099 - RNA, 19 nt, Artificial Sequence
  Description of Artificial Sequence: Synthetic oligonucleotide
gaacacguugguuaguaca

SEQ ID NO: 85100 - RNA, 19 nt, Artificial Sequence
  Description of Artificial Sequence: Synthetic oligonucleotide
uauagagcaagucccuuau

SEQ ID NO: 85101 - RNA, 19 nt, Artificial Sequence
  Description of Artificial Sequence: Synthetic oligonucleotide
aagagugaguucagagacc

SEQ ID NO: 85102 - RNA, 19 nt, Artificial Sequence
  Description of Artificial Sequence: Synthetic oligonucleotide
uugguuaguacacuuucau

SEQ ID NO: 85103 - RNA, 19 nt, Artificial Sequence
  Description of Artificial Sequence: Synthetic oligonucleotide
aaccccauaauggaaccag

SEQ ID NO: 85104 - RNA, 19 nt, Artificial Sequence
  Description of Artificial Sequence: Synthetic oligonucleotide
uaaugaagucaaauccaga

SEQ ID NO: 85105 - RNA, 19 nt, Artificial Sequence
  Description of Artificial Sequence: Synthetic oligonucleotide
aauuauagagcaagucccu

SEQ ID NO: 85106 - RNA, 19 nt, Artificial Sequence
  Description of Artificial Sequence: Synthetic oligonucleotide
uaaccauaugaacauccgu

SEQ ID NO: 85107 - RNA, 19 nt, Artificial Sequence
  Description of Artificial Sequence: Synthetic oligonucleotide
  modified_base (11)..(11): a, c, u, g, unknown or other
ucuuccacaunuccagucu

SEQ ID NO: 85108 - RNA, 19 nt, Artificial Sequence
  Description of Artificial Sequence: Synthetic oligonucleotide
uuaaucucuccaacaguac

SEQ ID NO: 85109 - RNA, 19 nt, Artificial Sequence
  Description of Artificial Sequence: Synthetic oligonucleotide
augucgaacagguauacuu

SEQ ID NO: 85110 - RNA, 19 nt, Artificial Sequence
  Description of Artificial Sequence: Synthetic oligonucleotide
  modified_base (4)..(4): a, c, u, g, unknown or other
caunuccagucuuccagcc

SEQ ID NO: 85111 - RNA, 19 nt, Artificial Sequence
  Description of Artificial Sequence: Synthetic oligonucleotide
agucuauauguugguauac

SEQ ID NO: 85112 - RNA, 19 nt, Artificial Sequence
  Description of Artificial Sequence: Synthetic oligonucleotide
auaugaacauccgugauuu

SEQ ID NO: 85113 - RNA, 19 nt, Artificial Sequence
  Description of Artificial Sequence: Synthetic oligonucleotide
uuaggaaauugguuucaga

SEQ ID NO: 85114 - RNA, 19 nt, Artificial Sequence
  Description of Artificial Sequence: Synthetic oligonucleotide
auaccuuuuauuugggaua

SEQ ID NO: 85115 - RNA, 19 nt, Artificial Sequence
  Description of Artificial Sequence: Synthetic oligonucleotide
augagucucaucauuaacu

SEQ ID NO: 85116 - RNA, 19 nt, Artificial Sequence
  Description of Artificial Sequence: Synthetic oligonucleotide
aaggaugagauaccuuuua

SEQ ID NO: 85117 - RNA, 19 nt, Artificial Sequence
  Description of Artificial Sequence: Synthetic oligonucleotide
aaaggcgauaggccucauc

SEQ ID NO: 85118 - RNA, 19 nt, Artificial Sequence
  Description of Artificial Sequence: Synthetic oligonucleotide
aaugccgguacaugccuga

SEQ ID NO: 85119 - RNA, 19 nt, Artificial Sequence
  Description of Artificial Sequence: Synthetic oligonucleotide
aagugcuuagguggaacuc

SEQ ID NO: 85120 - RNA, 19 nt, Artificial Sequence
  Description of Artificial Sequence: Synthetic oligonucleotide
gguuaaacauaagagugag

SEQ ID NO: 85121 - RNA, 19 nt, Artificial Sequence
  Description of Artificial Sequence: Synthetic oligonucleotide
  modified_base (2)..(2): a, c, u, g, unknown or other
unuccagucuuccagccuu

SEQ ID NO: 85122 - RNA, 19 nt, Artificial Sequence
  Description of Artificial Sequence: Synthetic oligonucleotide
uauuauggggcaugccugu

SEQ ID NO: 85123 - RNA, 19 nt, Artificial Sequence
  Description of Artificial Sequence: Synthetic oligonucleotide
agaacacguugguuaguac

SEQ ID NO: 85124 - RNA, 19 nt, Artificial Sequence
  Description of Artificial Sequence: Synthetic oligonucleotide
ucaaugccgguacaugccu

SEQ ID NO: 85125 - RNA, 19 nt, Artificial Sequence
  Description of Artificial Sequence: Synthetic oligonucleotide
ucgauuaggaaggaaggaa

SEQ ID NO: 85126 - RNA, 19 nt, Artificial Sequence
  Description of Artificial Sequence: Synthetic oligonucleotide
acugccgaagugucuauug

SEQ ID NO: 85127 - RNA, 19 nt, Artificial Sequence
  Description of Artificial Sequence: Synthetic oligonucleotide
guacaugccugaaaauccg

SEQ ID NO: 85128 - RNA, 19 nt, Artificial Sequence
  Description of Artificial Sequence: Synthetic oligonucleotide
ccauagauuaacgaagucc

SEQ ID NO: 85129 - RNA, 19 nt, Artificial Sequence
  Description of Artificial Sequence: Synthetic oligonucleotide
ucgggcuuucacauagaag

SEQ ID NO: 85130 - RNA, 19 nt, Artificial Sequence
  Description of Artificial Sequence: Synthetic oligonucleotide
ucugguguaaggacauaaa

SEQ ID NO: 85131 - RNA, 19 nt, Artificial Sequence
  Description of Artificial Sequence: Synthetic oligonucleotide
uuaacgaaguccacaucua

SEQ ID NO: 85132 - RNA, 19 nt, Artificial Sequence
  Description of Artificial Sequence: Synthetic oligonucleotide
uccgcaagacacauugagu

SEQ ID NO: 85133 - RNA, 19 nt, Artificial Sequence
  Description of Artificial Sequence: Synthetic oligonucleotide
gaagcguaguggcauuagc

SEQ ID NO: 85134 - RNA, 19 nt, Artificial Sequence
  Description of Artificial Sequence: Synthetic oligonucleotide
aagaagcuuucugucucgg

SEQ ID NO: 85135 - RNA, 19 nt, Artificial Sequence
  Description of Artificial Sequence: Synthetic oligonucleotide
aagucaaauccagaucaga

SEQ ID NO: 85136 - RNA, 19 nt, Artificial Sequence
  Description of Artificial Sequence: Synthetic oligonucleotide
aguaccacaucaacauuuc

SEQ ID NO: 85137 - RNA, 19 nt, Artificial Sequence
  Description of Artificial Sequence: Synthetic oligonucleotide
cagggaacguucuuggcug

SEQ ID NO: 85138 - RNA, 19 nt, Artificial Sequence
  Description of Artificial Sequence: Synthetic oligonucleotide
ugacuagaugaugaaggug

SEQ ID NO: 85139 - RNA, 19 nt, Artificial Sequence
  Description of Artificial Sequence: Synthetic oligonucleotide
aagcguaguggcauuagca

SEQ ID NO: 85140 - RNA, 19 nt, Artificial Sequence
  Description of Artificial Sequence: Synthetic oligonucleotide
uguacucaacucugaaguc

SEQ ID NO: 85141 - RNA, 19 nt, Artificial Sequence
  Description of Artificial Sequence: Synthetic oligonucleotide
auguaauagcuucaucgau

SEQ ID NO: 85142 - RNA, 19 nt, Artificial Sequence
  Description of Artificial Sequence: Synthetic oligonucleotide
gggauauaaauccaauauc

SEQ ID NO: 85143 - RNA, 19 nt, Artificial Sequence
  Description of Artificial Sequence: Synthetic oligonucleotide
ggauauaaauccaauaucu

SEQ ID NO: 85144 - RNA, 19 nt, Artificial Sequence
  Description of Artificial Sequence: Synthetic oligonucleotide
ugucagaaguggcugcuuc

SEQ ID NO: 85145 - RNA, 19 nt, Artificial Sequence
  Description of Artificial Sequence: Synthetic oligonucleotide
guauuauggggcaugccug

SEQ ID NO: 85146 - RNA, 19 nt, Artificial Sequence
  Description of Artificial Sequence: Synthetic oligonucleotide
ugccgaagugucuauugca

SEQ ID NO: 85147 - RNA, 19 nt, Artificial Sequence
  Description of Artificial Sequence: Synthetic oligonucleotide
auuggggucuagcugaguu

SEQ ID NO: 85148 - RNA, 19 nt, Artificial Sequence
  Description of Artificial Sequence: Synthetic oligonucleotide
uggcggaugaagcguagug

SEQ ID NO: 85149 - RNA, 19 nt, Artificial Sequence
  Description of Artificial Sequence: Synthetic oligonucleotide
ugacuuauuggggucuagc

SEQ ID NO: 85150 - RNA, 19 nt, Artificial Sequence
  Description of Artificial Sequence: Synthetic oligonucleotide
caucgauguuuucaaugcc

SEQ ID NO: 85151 - RNA, 19 nt, Artificial Sequence
  Description of Artificial Sequence: Synthetic oligonucleotide
gucuagcugaguuacaucu

SEQ ID NO: 85152 - RNA, 19 nt, Artificial Sequence
  Description of Artificial Sequence: Synthetic oligonucleotide
agcguaguggcauuagcaa

SEQ ID NO: 85153 - RNA, 19 nt, Artificial Sequence
  Description of Artificial Sequence: Synthetic oligonucleotide
uuguauuaccuuguaucac

SEQ ID NO: 85154 - RNA, 19 nt, Artificial Sequence
  Description of Artificial Sequence: Synthetic oligonucleotide
accgcugagucauguuuac

SEQ ID NO: 85155 - RNA, 19 nt, Artificial Sequence
  Description of Artificial Sequence: Synthetic oligonucleotide
uaagaccguacugucuucc

SEQ ID NO: 85156 - RNA, 19 nt, Artificial Sequence
  Description of Artificial Sequence: Synthetic oligonucleotide
guuagcuauguuuauuacu

SEQ ID NO: 85157 - RNA, 19 nt, Artificial Sequence
  Description of Artificial Sequence: Synthetic oligonucleotide
uccacuguuguauuaccuu

SEQ ID NO: 85158 - RNA, 19 nt, Artificial Sequence
  Description of Artificial Sequence: Synthetic oligonucleotide
uuagccaaaggaugagaua

SEQ ID NO: 85159 - RNA, 19 nt, Artificial Sequence
  Description of Artificial Sequence: Synthetic oligonucleotide
uccauagauuaacgaaguc

SEQ ID NO: 85160 - RNA, 19 nt, Artificial Sequence
  Description of Artificial Sequence: Synthetic oligonucleotide
ucauuagaugaccguuuuc

SEQ ID NO: 85161 - RNA, 19 nt, Artificial Sequence
  Description of Artificial Sequence: Synthetic oligonucleotide
ugaccguuuucccaugaua

SEQ ID NO: 85162 - RNA, 19 nt, Artificial Sequence
  Description of Artificial Sequence: Synthetic oligonucleotide
gugauuuuaagaccguacu

SEQ ID NO: 85163 - RNA, 19 nt, Artificial Sequence
  Description of Artificial Sequence: Synthetic oligonucleotide
cagguauacuuguaagguc

SEQ ID NO: 85164 - RNA, 19 nt, Artificial Sequence
  Description of Artificial Sequence: Synthetic oligonucleotide
ugcuaacaggcucagcauu

SEQ ID NO: 85165 - RNA, 19 nt, Artificial Sequence
  Description of Artificial Sequence: Synthetic oligonucleotide
uaggaaaggugcucaguaa

SEQ ID NO: 85166 - RNA, 19 nt, Artificial Sequence
  Description of Artificial Sequence: Synthetic oligonucleotide
uuaccucuugaaugguacu

SEQ ID NO: 85167 - RNA, 19 nt, Artificial Sequence
  Description of Artificial Sequence: Synthetic oligonucleotide
accccagauuacuacauau

SEQ ID NO: 85168 - RNA, 19 nt, Artificial Sequence
  Description of Artificial Sequence: Synthetic oligonucleotide
gucggaacgcugaagauga

SEQ ID NO: 85169 - RNA, 19 nt, Artificial Sequence
  Description of Artificial Sequence: Synthetic oligonucleotide
uguuggcguccuuugucag

SEQ ID NO: 85170 - RNA, 19 nt, Artificial Sequence
  Description of Artificial Sequence: Synthetic oligonucleotide
agaguuuucagggaacguu

SEQ ID NO: 85171 - RNA, 19 nt, Artificial Sequence
  Description of Artificial Sequence: Synthetic oligonucleotide
agagcauguggguggguug

SEQ ID NO: 85172 - RNA, 19 nt, Artificial Sequence
  Description of Artificial Sequence: Synthetic oligonucleotide
gcaagucccuuauugcagg

SEQ ID NO: 85173 - RNA, 19 nt, Artificial Sequence
  Description of Artificial Sequence: Synthetic oligonucleotide
ugaugucgaacagguauac

SEQ ID NO: 85174 - RNA, 19 nt, Artificial Sequence
  Description of Artificial Sequence: Synthetic oligonucleotide
ugaagcguaguggcauuag

SEQ ID NO: 85175 - RNA, 19 nt, Artificial Sequence
  Description of Artificial Sequence: Synthetic oligonucleotide
ccaagucccaguuauuuug

SEQ ID NO: 85176 - RNA, 19 nt, Artificial Sequence
  Description of Artificial Sequence: Synthetic oligonucleotide
agccaaaggaugagauacc

SEQ ID NO: 85177 - RNA, 19 nt, Artificial Sequence
  Description of Artificial Sequence: Synthetic oligonucleotide
auccauagauuaacgaagu

SEQ ID NO: 85178 - RNA, 19 nt, Artificial Sequence
  Description of Artificial Sequence: Synthetic oligonucleotide
gguauuauggggcaugccu

SEQ ID NO: 85179 - RNA, 19 nt, Artificial Sequence
  Description of Artificial Sequence: Synthetic oligonucleotide
aagucccuuauugcaggag

SEQ ID NO: 85180 - RNA, 19 nt, Artificial Sequence
  Description of Artificial Sequence: Synthetic oligonucleotide
  modified_base (3)..(3): a, c, u, g, unknown or other
aunuccagucuuccagccu

SEQ ID NO: 85181 - RNA, 19 nt, Artificial Sequence
  Description of Artificial Sequence: Synthetic oligonucleotide
ggcgauaggccucaucuug

SEQ ID NO: 85182 - RNA, 19 nt, Artificial Sequence
  Description of Artificial Sequence: Synthetic oligonucleotide
ugcguuuucuggcaucauu

SEQ ID NO: 85183 - RNA, 19 nt, Artificial Sequence
  Description of Artificial Sequence: Synthetic oligonucleotide
guuauccuaccacuuggga

SEQ ID NO: 85184 - RNA, 19 nt, Artificial Sequence
  Description of Artificial Sequence: Synthetic oligonucleotide
uuuggcaaguguagugauu

SEQ ID NO: 85185 - RNA, 19 nt, Artificial Sequence
  Description of Artificial Sequence: Synthetic oligonucleotide
agcaugacuagaugaugaa

SEQ ID NO: 85186 - RNA, 19 nt, Artificial Sequence
  Description of Artificial Sequence: Synthetic oligonucleotide
cagucaccauaucuugagg

SEQ ID NO: 85187 - RNA, 19 nt, Artificial Sequence
  Description of Artificial Sequence: Synthetic oligonucleotide
uuguggugccacucgauua

SEQ ID NO: 85188 - RNA, 19 nt, Artificial Sequence
  Description of Artificial Sequence: Synthetic oligonucleotide
ucggaaaugucagcuugug

SEQ ID NO: 85189 - RNA, 19 nt, Artificial Sequence
  Description of Artificial Sequence: Synthetic oligonucleotide
ccgcaagacacauugaguc

SEQ ID NO: 85190 - RNA, 19 nt, Artificial Sequence
  Description of Artificial Sequence: Synthetic oligonucleotide
uuuuaggcacagguaucug

SEQ ID NO: 85191 - RNA, 19 nt, Artificial Sequence
  Description of Artificial Sequence: Synthetic oligonucleotide
agguauuauggggcaugcc

SEQ ID NO: 85192 - RNA, 19 nt, Artificial Sequence
  Description of Artificial Sequence: Synthetic oligonucleotide
gaguuacaucucuccuagg

SEQ ID NO: 85193 - RNA, 19 nt, Artificial Sequence
  Description of Artificial Sequence: Synthetic oligonucleotide
uccgugauuugcuccucug

SEQ ID NO: 85194 - RNA, 19 nt, Artificial Sequence
  Description of Artificial Sequence: Synthetic oligonucleotide
gcggaugaagcguaguggc

SEQ ID NO: 85195 - RNA, 19 nt, Artificial Sequence
  Description of Artificial Sequence: Synthetic oligonucleotide
uucaucccauggaaauccu

SEQ ID NO: 85196 - RNA, 19 nt, Artificial Sequence
  Description of Artificial Sequence: Synthetic oligonucleotide
uggcaauagagaagguguu

SEQ ID NO: 85197 - RNA, 19 nt, Artificial Sequence
  Description of Artificial Sequence: Synthetic oligonucleotide
gauggcauuacaggucgga

SEQ ID NO: 85198 - RNA, 19 nt, Artificial Sequence
  Description of Artificial Sequence: Synthetic oligonucleotide
aauccgccaggaucauacu

SEQ ID NO: 85199 - RNA, 19 nt, Artificial Sequence
  Description of Artificial Sequence: Synthetic oligonucleotide
ugcccuaguacagcugcag

SEQ ID NO: 85200 - RNA, 19 nt, Artificial Sequence
  Description of Artificial Sequence: Synthetic oligonucleotide
caaauccuaaauccauaga

SEQ ID NO: 85201 - RNA, 19 nt, Artificial Sequence
  Description of Artificial Sequence: Synthetic oligonucleotide
cauugcagccaugagucuc

SEQ ID NO: 85202 - RNA, 19 nt, Artificial Sequence
  Description of Artificial Sequence: Synthetic oligonucleotide
uuaagaccguacugucuuc

SEQ ID NO: 85203 - RNA, 19 nt, Artificial Sequence
  Description of Artificial Sequence: Synthetic oligonucleotide
acuguuguauuaccuugua

SEQ ID NO: 85204 - RNA, 19 nt, Artificial Sequence
  Description of Artificial Sequence: Synthetic oligonucleotide
gcauuugugagcagaacac

SEQ ID NO: 85205 - RNA, 19 nt, Artificial Sequence
  Description of Artificial Sequence: Synthetic oligonucleotide
caggucggaacgcugaaga

SEQ ID NO: 85206 - RNA, 19 nt, Artificial Sequence
  Description of Artificial Sequence: Synthetic oligonucleotide
ggcggaugaagcguagugg

SEQ ID NO: 85207 - RNA, 19 nt, Artificial Sequence
  Description of Artificial Sequence: Synthetic oligonucleotide
cccagauuacuacauauca

SEQ ID NO: 85208 - RNA, 19 nt, Artificial Sequence
  Description of Artificial Sequence: Synthetic oligonucleotide
ucuuuaccucuugaauggu

SEQ ID NO: 85209 - RNA, 19 nt, Artificial Sequence
  Description of Artificial Sequence: Synthetic oligonucleotide
acauaagagugaguucaga

SEQ ID NO: 85210 - RNA, 19 nt, Artificial Sequence
  Description of Artificial Sequence: Synthetic oligonucleotide
cagguauuauggggcaugc

SEQ ID NO: 85211 - RNA, 19 nt, Artificial Sequence
  Description of Artificial Sequence: Synthetic oligonucleotide
cuguuggcguccuuuguca

SEQ ID NO: 85212 - RNA, 19 nt, Artificial Sequence
  Description of Artificial Sequence: Synthetic oligonucleotide
uacaggucggaacgcugaa

SEQ ID NO: 85213 - RNA, 19 nt, Artificial Sequence
  Description of Artificial Sequence: Synthetic oligonucleotide
gcguuuucuggcaucauug

SEQ ID NO: 85214 - RNA, 19 nt, Artificial Sequence
  Description of Artificial Sequence: Synthetic oligonucleotide
uuggggucuagcugaguua

SEQ ID NO: 85215 - RNA, 19 nt, Artificial Sequence
  Description of Artificial Sequence: Synthetic oligonucleotide
agaugaccguuuucccaug

SEQ ID NO: 85216 - RNA, 19 nt, Artificial Sequence
  Description of Artificial Sequence: Synthetic oligonucleotide
agcuuguggugccacucga

SEQ ID NO: 85217 - RNA, 19 nt, Artificial Sequence
  Description of Artificial Sequence: Synthetic oligonucleotide
ccagcucuaaagauaaaga

SEQ ID NO: 85218 - RNA, 19 nt, Artificial Sequence
  Description of Artificial Sequence: Synthetic oligonucleotide
ggucggaacgcugaagaug

SEQ ID NO: 85219 - RNA, 19 nt, Artificial Sequence
  Description of Artificial Sequence: Synthetic oligonucleotide
gcaugacuagaugaugaag

SEQ ID NO: 85220 - RNA, 19 nt, Artificial Sequence
  Description of Artificial Sequence: Synthetic oligonucleotide
uugaguccgaauggucugu

SEQ ID NO: 85221 - RNA, 19 nt, Artificial Sequence
  Description of Artificial Sequence: Synthetic oligonucleotide
caaugccgguacaugccug

SEQ ID NO: 85222 - RNA, 19 nt, Artificial Sequence
  Description of Artificial Sequence: Synthetic oligonucleotide
aacacaccuaacacacuua

SEQ ID NO: 85223 - RNA, 19 nt, Artificial Sequence
  Description of Artificial Sequence: Synthetic oligonucleotide
gucagaucccaagcccagg

SEQ ID NO: 85224 - RNA, 19 nt, Artificial Sequence
  Description of Artificial Sequence: Synthetic oligonucleotide
ggguauuacaccauugaua

SEQ ID NO: 85225 - RNA, 19 nt, Artificial Sequence
  Description of Artificial Sequence: Synthetic oligonucleotide
gugcuuagguggaacuccc

SEQ ID NO: 85226 - RNA, 19 nt, Artificial Sequence
  Description of Artificial Sequence: Synthetic oligonucleotide
ugccgguacaugccugaaa

SEQ ID NO: 85227 - RNA, 19 nt, Artificial Sequence
  Description of Artificial Sequence: Synthetic oligonucleotide
cuuuuccaggccaauacuu

SEQ ID NO: 85228 - RNA, 19 nt, Artificial Sequence
  Description of Artificial Sequence: Synthetic oligonucleotide
gcguaguggcauuagcaac

SEQ ID NO: 85229 - RNA, 19 nt, Artificial Sequence
  Description of Artificial Sequence: Synthetic oligonucleotide
augaccguuuucccaugau

SEQ ID NO: 85230 - RNA, 19 nt, Artificial Sequence
  Description of Artificial Sequence: Synthetic oligonucleotide
gguucggauccgcaacuug

SEQ ID NO: 85231 - RNA, 19 nt, Artificial Sequence
  Description of Artificial Sequence: Synthetic oligonucleotide
aaacgccgcuccaggaacu

SEQ ID NO: 85232 - RNA, 19 nt, Artificial Sequence
  Description of Artificial Sequence: Synthetic oligonucleotide
ucucaaaccccugcccaua

SEQ ID NO: 85233 - RNA, 19 nt, Artificial Sequence
  Description of Artificial Sequence: Synthetic oligonucleotide
aggucggaacgcugaagau

SEQ ID NO: 85234 - RNA, 19 nt, Artificial Sequence
  Description of Artificial Sequence: Synthetic oligonucleotide
auagagcaagucccuuauu

SEQ ID NO: 85235 - RNA, 19 nt, Artificial Sequence
  Description of Artificial Sequence: Synthetic oligonucleotide
auggcauuacaggucggaa

SEQ ID NO: 85236 - RNA, 19 nt, Artificial Sequence
  Description of Artificial Sequence: Synthetic oligonucleotide
gcaauguaauagcuucauc

SEQ ID NO: 85237 - RNA, 19 nt, Artificial Sequence
  Description of Artificial Sequence: Synthetic oligonucleotide
cguugguuaguacacuuuc

SEQ ID NO: 85238 - RNA, 19 nt, Artificial Sequence
  Description of Artificial Sequence: Synthetic oligonucleotide
gggcuuguucuaaggaaag

SEQ ID NO: 85239 - RNA, 19 nt, Artificial Sequence
  Description of Artificial Sequence: Synthetic oligonucleotide
ggaacagguuaaacauaag

SEQ ID NO: 85240 - RNA, 19 nt, Artificial Sequence
  Description of Artificial Sequence: Synthetic oligonucleotide
ggugccacucgauuaggaa

SEQ ID NO: 85241 - RNA, 19 nt, Artificial Sequence
  Description of Artificial Sequence: Synthetic oligonucleotide
guggugccacucgauuagg

SEQ ID NO: 85242 - RNA, 19 nt, Artificial Sequence
  Description of Artificial Sequence: Synthetic oligonucleotide
caagucccuuauugcagga

SEQ ID NO: 85243 - RNA, 19 nt, Artificial Sequence
  Description of Artificial Sequence: Synthetic oligonucleotide
cacuguuguauuaccuugu

SEQ ID NO: 85244 - RNA, 19 nt, Artificial Sequence
  Description of Artificial Sequence: Synthetic oligonucleotide
cccuuauugcaggagacuc

SEQ ID NO: 85245 - RNA, 19 nt, Artificial Sequence
  Description of Artificial Sequence: Synthetic oligonucleotide
cuggagcggggugacuugc

SEQ ID NO: 85246 - RNA, 19 nt, Artificial Sequence
  Description of Artificial Sequence: Synthetic oligonucleotide
cagaacacguugguuagua

SEQ ID NO: 85247 - RNA, 19 nt, Artificial Sequence
  Description of Artificial Sequence: Synthetic oligonucleotide
ccccagauuacuacauauc

SEQ ID NO: 85248 - RNA, 19 nt, Artificial Sequence
  Description of Artificial Sequence: Synthetic oligonucleotide
ggaacguucuuggcugagc

SEQ ID NO: 85249 - RNA, 19 nt, Artificial Sequence
  Description of Artificial Sequence: Synthetic oligonucleotide
aaccagggaaacacaccua

SEQ ID NO: 85250 - RNA, 19 nt, Artificial Sequence
  Description of Artificial Sequence: Synthetic oligonucleotide
gcagggauaagagagcccu

SEQ ID NO: 85251 - RNA, 19 nt, Artificial Sequence
  Description of Artificial Sequence: Synthetic oligonucleotide
gccugguaaauuuuaaguu

SEQ ID NO: 85252 - RNA, 19 nt, Artificial Sequence
  Description of Artificial Sequence: Synthetic oligonucleotide
ggaugagauaccuuuuauu

SEQ ID NO: 85253 - RNA, 19 nt, Artificial Sequence
  Description of Artificial Sequence: Synthetic oligonucleotide
gauccgcaacuugcuaaca

SEQ ID NO: 85254 - RNA, 19 nt, Artificial Sequence
  Description of Artificial Sequence: Synthetic oligonucleotide
ccagguauuauggggcaug

SEQ ID NO: 85255 - RNA, 19 nt, Artificial Sequence
  Description of Artificial Sequence: Synthetic oligonucleotide
gcgauaggccucaucuugc

SEQ ID NO: 85256 - RNA, 19 nt, Artificial Sequence
  Description of Artificial Sequence: Synthetic oligonucleotide
ggagcggggugacuugcug

SEQ ID NO: 85257 - RNA, 19 nt, Artificial Sequence
  Description of Artificial Sequence: Synthetic oligonucleotide
guaguggcauuagcaacaa

SEQ ID NO: 85258 - RNA, 19 nt, Artificial Sequence
  Description of Artificial Sequence: Synthetic oligonucleotide
aguuggcggaugaagcgua

SEQ ID NO: 85259 - RNA, 19 nt, Artificial Sequence
  Description of Artificial Sequence: Synthetic oligonucleotide
caccgcugagucauguuua

SEQ ID NO: 85260 - RNA, 19 nt, Artificial Sequence
  Description of Artificial Sequence: Synthetic oligonucleotide
guaccacaucaacauuucu

SEQ ID NO: 85261 - RNA, 19 nt, Artificial Sequence
  Description of Artificial Sequence: Synthetic oligonucleotide
ccagggaaacacaccuaac

SEQ ID NO: 85262 - RNA, 19 nt, Artificial Sequence
  Description of Artificial Sequence: Synthetic oligonucleotide
acguugguuaguacacuuu

SEQ ID NO: 85263 - RNA, 19 nt, Artificial Sequence
  Description of Artificial Sequence: Synthetic oligonucleotide
guauuaccuuguaucacau

SEQ ID NO: 85264 - RNA, 19 nt, Artificial Sequence
  Description of Artificial Sequence: Synthetic oligonucleotide
gaucccaagcccagguuau

SEQ ID NO: 85265 - RNA, 19 nt, Artificial Sequence
  Description of Artificial Sequence: Synthetic oligonucleotide
  modified_base (7)..(7): a, c, u, g, unknown or other
ccacaunuccagucuucca

SEQ ID NO: 85266 - RNA, 19 nt, Artificial Sequence
  Description of Artificial Sequence: Synthetic oligonucleotide
gggguauuacaccauugau

SEQ ID NO: 85267 - RNA, 19 nt, Artificial Sequence
  Description of Artificial Sequence: Synthetic oligonucleotide
cuuguggugccacucgauu

SEQ ID NO: 85268 - RNA, 19 nt, Artificial Sequence
  Description of Artificial Sequence: Synthetic oligonucleotide
gggucuguauaggugaagu

SEQ ID NO: 85269 - RNA, 19 nt, Artificial Sequence
  Description of Artificial Sequence: Synthetic oligonucleotide
cacguugguuaguacacuu

SEQ ID NO: 85270 - RNA, 19 nt, Artificial Sequence
  Description of Artificial Sequence: Synthetic oligonucleotide
ccaagugauggccagguau

SEQ ID NO: 85271 - RNA, 19 nt, Artificial Sequence
  Description of Artificial Sequence: Synthetic oligonucleotide
ggaugaagcguaguggcau

SEQ ID NO: 85272 - RNA, 19 nt, Artificial Sequence
  Description of Artificial Sequence: Synthetic oligonucleotide
ggaacuuguuuggcuguga

SEQ ID NO: 85273 - RNA, 19 nt, Artificial Sequence
  Description of Artificial Sequence: Synthetic oligonucleotide
gggcaugccuguuauccua

SEQ ID NO: 85274 - RNA, 19 nt, Artificial Sequence
  Description of Artificial Sequence: Synthetic oligonucleotide
ccaugagucucaucauuaa

SEQ ID NO: 85275 - RNA, 19 nt, Artificial Sequence
  Description of Artificial Sequence: Synthetic oligonucleotide
guaagccgauggcagggau

SEQ ID NO: 85276 - RNA, 19 nt, Artificial Sequence
  Description of Artificial Sequence: Synthetic oligonucleotide
gggaacguucuuggcugag

SEQ ID NO: 85277 - RNA, 19 nt, Artificial Sequence
  Description of Artificial Sequence: Synthetic oligonucleotide
cugauuccgcaagacacau

SEQ ID NO: 85278 - RNA, 19 nt, Artificial Sequence
  Description of Artificial Sequence: Synthetic oligonucleotide
uggcguccuuugucagauc

SEQ ID NO: 85279 - RNA, 19 nt, Artificial Sequence
  Description of Artificial Sequence: Synthetic oligonucleotide
ccgugauuugcuccucuga

SEQ ID NO: 85280 - RNA, 19 nt, Artificial Sequence
  Description of Artificial Sequence: Synthetic oligonucleotide
ggaaagucugauggccucu

SEQ ID NO: 85281 - RNA, 19 nt, Artificial Sequence
  Description of Artificial Sequence: Synthetic oligonucleotide
augccgguacaugccugaa

SEQ ID NO: 85282 - RNA, 19 nt, Artificial Sequence
  Description of Artificial Sequence: Synthetic oligonucleotide
gguauacuuguaaggucau

SEQ ID NO: 85283 - RNA, 19 nt, Artificial Sequence
  Description of Artificial Sequence: Synthetic oligonucleotide
gggauaagagagcccugau

SEQ ID NO: 85284 - RNA, 19 nt, Artificial Sequence
  Description of Artificial Sequence: Synthetic oligonucleotide
gcccucccauaacugaugu

SEQ ID NO: 85285 - RNA, 19 nt, Artificial Sequence
  Description of Artificial Sequence: Synthetic oligonucleotide
gaagagcaugugggugggu

SEQ ID NO: 85286 - RNA, 19 nt, Artificial Sequence
  Description of Artificial Sequence: Synthetic oligonucleotide
cgggucuguauaggugaag

SEQ ID NO: 85287 - RNA, 19 nt, Artificial Sequence
  Description of Artificial Sequence: Synthetic oligonucleotide
cuucucggugggugaugau

SEQ ID NO: 85288 - RNA, 19 nt, Artificial Sequence
  Description of Artificial Sequence: Synthetic oligonucleotide
gccuguuauccuaccacuu

SEQ ID NO: 85289 - RNA, 19 nt, Artificial Sequence
  Description of Artificial Sequence: Synthetic oligonucleotide
gcgggucuguauaggugaa

SEQ ID NO: 85290 - RNA, 19 nt, Artificial Sequence
  Description of Artificial Sequence: Synthetic oligonucleotide
gcagaacacguugguuagu

SEQ ID NO: 85291 - RNA, 19 nt, Artificial Sequence
  Description of Artificial Sequence: Synthetic oligonucleotide
gcuuguggugccacucgau

SEQ ID NO: 85292 - RNA, 19 nt, Artificial Sequence
  Description of Artificial Sequence: Synthetic oligonucleotide
ccacucgauuaggaaggaa

SEQ ID NO: 85293 - RNA, 19 nt, Artificial Sequence
  Description of Artificial Sequence: Synthetic oligonucleotide
cacugccgaagugucuauu

SEQ ID NO: 85294 - RNA, 19 nt, Artificial Sequence
  Description of Artificial Sequence: Synthetic oligonucleotide
gccagguauuauggggcau

SEQ ID NO: 85295 - RNA, 19 nt, Artificial Sequence
  Description of Artificial Sequence: Synthetic oligonucleotide
ggguucggauccgcaacuu

SEQ ID NO: 85296 - RNA, 19 nt, Artificial Sequence
  Description of Artificial Sequence: Synthetic oligonucleotide
aguucuguacauuaguucc

SEQ ID NO: 85297 - RNA, 19 nt, Artificial Sequence
  Description of Artificial Sequence: Synthetic oligonucleotide
aaaagaauuacaugcacca

SEQ ID NO: 85298 - RNA, 19 nt, Artificial Sequence
  Description of Artificial Sequence: Synthetic oligonucleotide
uuaaaaguuauccaccuug

SEQ ID NO: 85299 - RNA, 19 nt, Artificial Sequence
  Description of Artificial Sequence: Synthetic oligonucleotide
auaauaguuuucuaggcuc

SEQ ID NO: 85300 - RNA, 19 nt, Artificial Sequence
  Description of Artificial Sequence: Synthetic oligonucleotide
uuugacuugucgaugauug

SEQ ID NO: 85301 - RNA, 19 nt, Artificial Sequence
  Description of Artificial Sequence: Synthetic oligonucleotide
gagguauaaaguuuuacag

SEQ ID NO: 85302 - RNA, 19 nt, Artificial Sequence
  Description of Artificial Sequence: Synthetic oligonucleotide
agaucaugaagccaaaauc

SEQ ID NO: 85303 - RNA, 19 nt, Artificial Sequence
  Description of Artificial Sequence: Synthetic oligonucleotide
uuaccuugcaaucugaaac

SEQ ID NO: 85304 - RNA, 19 nt, Artificial Sequence
  Description of Artificial Sequence: Synthetic oligonucleotide
acauuuaagcaacauguac

SEQ ID NO: 85305 - RNA, 19 nt, Artificial Sequence
  Description of Artificial Sequence: Synthetic oligonucleotide
uuagauaacugaaacuuca

SEQ ID NO: 85306 - RNA, 19 nt, Artificial Sequence
  Description of Artificial Sequence: Synthetic oligonucleotide
uacuauaggguauucagag

SEQ ID NO: 85307 - RNA, 19 nt, Artificial Sequence
  Description of Artificial Sequence: Synthetic oligonucleotide
ugaacuuacauuauucauc

SEQ ID NO: 85308 - RNA, 19 nt, Artificial Sequence
  Description of Artificial Sequence: Synthetic oligonucleotide
cauauaggcguccagagag

SEQ ID NO: 85309 - RNA, 19 nt, Artificial Sequence
  Description of Artificial Sequence: Synthetic oligonucleotide
cuauaggguauucagagag

SEQ ID NO: 85310 - RNA, 19 nt, Artificial Sequence
  Description of Artificial Sequence: Synthetic oligonucleotide
ugaucauugagaaagucau

SEQ ID NO: 85311 - RNA, 19 nt, Artificial Sequence
  Description of Artificial Sequence: Synthetic oligonucleotide
augguuaacgcuccgugcc

SEQ ID NO: 85312 - RNA, 19 nt, Artificial Sequence
  Description of Artificial Sequence: Synthetic oligonucleotide
auuaguuguaucuauuccu

SEQ ID NO: 85313 - RNA, 19 nt, Artificial Sequence
  Description of Artificial Sequence: Synthetic oligonucleotide
uuauucaucuauagcagug

SEQ ID NO: 85314 - RNA, 19 nt, Artificial Sequence
  Description of Artificial Sequence: Synthetic oligonucleotide
uuccauucugauuugauac

SEQ ID NO: 85315 - RNA, 19 nt, Artificial Sequence
  Description of Artificial Sequence: Synthetic oligonucleotide
uacugguuaauauugacaa

SEQ ID NO: 85316 - RNA, 19 nt, Artificial Sequence
  Description of Artificial Sequence: Synthetic oligonucleotide
aagauauuugccuugccau

SEQ ID NO: 85317 - RNA, 19 nt, Artificial Sequence
  Description of Artificial Sequence: Synthetic oligonucleotide
aaguaaguaucuucuaacu

SEQ ID NO: 85318 - RNA, 19 nt, Artificial Sequence
  Description of Artificial Sequence: Synthetic oligonucleotide
ucaucuauagcaguggaug

SEQ ID NO: 85319 - RNA, 19 nt, Artificial Sequence
  Description of Artificial Sequence: Synthetic oligonucleotide
cauuauucaucuauagcag

SEQ ID NO: 85320 - RNA, 19 nt, Artificial Sequence
  Description of Artificial Sequence: Synthetic oligonucleotide
uauaucuguauucccagac

SEQ ID NO: 85321 - RNA, 19 nt, Artificial Sequence
  Description of Artificial Sequence: Synthetic oligonucleotide
uaaaaguuauccaccuugc

SEQ ID NO: 85322 - RNA, 19 nt, Artificial Sequence
  Description of Artificial Sequence: Synthetic oligonucleotide
uguuaugaauucuacuucu

SEQ ID NO: 85323 - RNA, 19 nt, Artificial Sequence
  Description of Artificial Sequence: Synthetic oligonucleotide
aaaagucauaggcaugcug

SEQ ID NO: 85324 - RNA, 19 nt, Artificial Sequence
  Description of Artificial Sequence: Synthetic oligonucleotide
ugcaaaagaauuacaugca

SEQ ID NO: 85325 - RNA, 19 nt, Artificial Sequence
  Description of Artificial Sequence: Synthetic oligonucleotide
aucacauaaacuugcuguc

SEQ ID NO: 85326 - RNA, 19 nt, Artificial Sequence
  Description of Artificial Sequence: Synthetic oligonucleotide
aucuauugaacacugggga

SEQ ID NO: 85327 - RNA, 19 nt, Artificial Sequence
  Description of Artificial Sequence: Synthetic oligonucleotide
ugaaauuuucacucuguga

SEQ ID NO: 85328 - RNA, 19 nt, Artificial Sequence
  Description of Artificial Sequence: Synthetic oligonucleotide
uaauaguuuucuaggcucc

SEQ ID NO: 85329 - RNA, 19 nt, Artificial Sequence
  Description of Artificial Sequence: Synthetic oligonucleotide
aaaccacccagagaacucc

SEQ ID NO: 85330 - RNA, 19 nt, Artificial Sequence
  Description of Artificial Sequence: Synthetic oligonucleotide
gaucacauaaacuugcugu

SEQ ID NO: 85331 - RNA, 19 nt, Artificial Sequence
  Description of Artificial Sequence: Synthetic oligonucleotide
uuaguaagguguaugguua

SEQ ID NO: 85332 - RNA, 19 nt, Artificial Sequence
  Description of Artificial Sequence: Synthetic oligonucleotide
guaaaagucauaggcaugc

SEQ ID NO: 85333 - RNA, 19 nt, Artificial Sequence
  Description of Artificial Sequence: Synthetic oligonucleotide
uacauuacauuuuagccuu

SEQ ID NO: 85334 - RNA, 19 nt, Artificial Sequence
  Description of Artificial Sequence: Synthetic oligonucleotide
uaugaacuggguuuguaac

SEQ ID NO: 85335 - RNA, 19 nt, Artificial Sequence
  Description of Artificial Sequence: Synthetic oligonucleotide
ugcauauaggcguccagag

SEQ ID NO: 85336 - RNA, 19 nt, Artificial Sequence
  Description of Artificial Sequence: Synthetic oligonucleotide
ucaccguuacuaauaacug

SEQ ID NO: 85337 - RNA, 19 nt, Artificial Sequence
  Description of Artificial Sequence: Synthetic oligonucleotide
uccacucuaacuagguacc

SEQ ID NO: 85338 - RNA, 19 nt, Artificial Sequence
  Description of Artificial Sequence: Synthetic oligonucleotide
aauaacugcugauuccgau

SEQ ID NO: 85339 - RNA, 19 nt, Artificial Sequence
  Description of Artificial Sequence: Synthetic oligonucleotide
uuuacagucugugaggguc

SEQ ID NO: 85340 - RNA, 19 nt, Artificial Sequence
  Description of Artificial Sequence: Synthetic oligonucleotide
gaaccguauacagaagacg

SEQ ID NO: 85341 - RNA, 19 nt, Artificial Sequence
  Description of Artificial Sequence: Synthetic oligonucleotide
uuaguguucaccguuacua

SEQ ID NO: 85342 - RNA, 19 nt, Artificial Sequence
  Description of Artificial Sequence: Synthetic oligonucleotide
aagguguaugguuaacgcu

SEQ ID NO: 85343 - RNA, 19 nt, Artificial Sequence
  Description of Artificial Sequence: Synthetic oligonucleotide
uguuccgacuucuagccgc

SEQ ID NO: 85344 - RNA, 19 nt, Artificial Sequence
  Description of Artificial Sequence: Synthetic oligonucleotide
aaccguauacagaagacgu

SEQ ID NO: 85345 - RNA, 19 nt, Artificial Sequence
  Description of Artificial Sequence: Synthetic oligonucleotide
ucauucaggguaaaaucgu

SEQ ID NO: 85346 - RNA, 19 nt, Artificial Sequence
  Description of Artificial Sequence: Synthetic oligonucleotide
auuauucaucuauagcagu

SEQ ID NO: 85347 - RNA, 19 nt, Artificial Sequence
  Description of Artificial Sequence: Synthetic oligonucleotide
uaagggaguacagaguggc

SEQ ID NO: 85348 - RNA, 19 nt, Artificial Sequence
  Description of Artificial Sequence: Synthetic oligonucleotide
uggguuagaacagauacaa

SEQ ID NO: 85349 - RNA, 19 nt, Artificial Sequence
  Description of Artificial Sequence: Synthetic oligonucleotide
uucuaacuuaacaucccca

SEQ ID NO: 85350 - RNA, 19 nt, Artificial Sequence
  Description of Artificial Sequence: Synthetic oligonucleotide
aacgcuccgugccaggauc

SEQ ID NO: 85351 - RNA, 19 nt, Artificial Sequence
  Description of Artificial Sequence: Synthetic oligonucleotide
agauaacugaaacuucaca

SEQ ID NO: 85352 - RNA, 19 nt, Artificial Sequence
  Description of Artificial Sequence: Synthetic oligonucleotide
acucuaacuagguaccaug

SEQ ID NO: 85353 - RNA, 19 nt, Artificial Sequence
  Description of Artificial Sequence: Synthetic oligonucleotide
uuaguucuguacauuaguu

SEQ ID NO: 85354 - RNA, 19 nt, Artificial Sequence
  Description of Artificial Sequence: Synthetic oligonucleotide
uuaguuguaucuauuccuu

SEQ ID NO: 85355 - RNA, 19 nt, Artificial Sequence
  Description of Artificial Sequence: Synthetic oligonucleotide
uuuucuaggcuccguguca

SEQ ID NO: 85356 - RNA, 19 nt, Artificial Sequence
  Description of Artificial Sequence: Synthetic oligonucleotide
agguguaugguuaacgcuc

SEQ ID NO: 85357 - RNA, 19 nt, Artificial Sequence
  Description of Artificial Sequence: Synthetic oligonucleotide
ucuggcgccacacauguuc

SEQ ID NO: 85358 - RNA, 19 nt, Artificial Sequence
  Description of Artificial Sequence: Synthetic oligonucleotide
acugugaccuaauaaugca

SEQ ID NO: 85359 - RNA, 19 nt, Artificial Sequence
  Description of Artificial Sequence: Synthetic oligonucleotide
uaugguuaacgcuccgugc

SEQ ID NO: 85360 - RNA, 19 nt, Artificial Sequence
  Description of Artificial Sequence: Synthetic oligonucleotide
uauaggguauucagagagc

SEQ ID NO: 85361 - RNA, 19 nt, Artificial Sequence
  Description of Artificial Sequence: Synthetic oligonucleotide
uucuagaucuugaaaugaa

SEQ ID NO: 85362 - RNA, 19 nt, Artificial Sequence
  Description of Artificial Sequence: Synthetic oligonucleotide
cuucuaacuuaacaucccc

SEQ ID NO: 85363 - RNA, 19 nt, Artificial Sequence
  Description of Artificial Sequence: Synthetic oligonucleotide
gagcauaaguucuucugug

SEQ ID NO: 85364 - RNA, 19 nt, Artificial Sequence
  Description of Artificial Sequence: Synthetic oligonucleotide
aacaggaagcguguuagca

SEQ ID NO: 85365 - RNA, 19 nt, Artificial Sequence
  Description of Artificial Sequence: Synthetic oligonucleotide
ucuauugaacacuggggaa

SEQ ID NO: 85366 - RNA, 19 nt, Artificial Sequence
  Description of Artificial Sequence: Synthetic oligonucleotide
acauacaauccuccaacug

SEQ ID NO: 85367 - RNA, 19 nt, Artificial Sequence
  Description of Artificial Sequence: Synthetic oligonucleotide
aguaccuccgcuuauuguu

SEQ ID NO: 85368 - RNA, 19 nt, Artificial Sequence
  Description of Artificial Sequence: Synthetic oligonucleotide
auagcagcgguccaaugca

SEQ ID NO: 85369 - RNA, 19 nt, Artificial Sequence
  Description of Artificial Sequence: Synthetic oligonucleotide
uaguucuguacauuaguuc

SEQ ID NO: 85370 - RNA, 19 nt, Artificial Sequence
  Description of Artificial Sequence: Synthetic oligonucleotide
cagagcauaccguccaucc

SEQ ID NO: 85371 - RNA, 19 nt, Artificial Sequence
  Description of Artificial Sequence: Synthetic oligonucleotide
cacugauuuugacuugucg

SEQ ID NO: 85372 - RNA, 19 nt, Artificial Sequence
  Description of Artificial Sequence: Synthetic oligonucleotide
agaucacauaaacuugcug

SEQ ID NO: 85373 - RNA, 19 nt, Artificial Sequence
  Description of Artificial Sequence: Synthetic oligonucleotide
guaugguuaacgcuccgug

SEQ ID NO: 85374 - RNA, 19 nt, Artificial Sequence
  Description of Artificial Sequence: Synthetic oligonucleotide
ucuuggcacuuucuuagca

SEQ ID NO: 85375 - RNA, 19 nt, Artificial Sequence
  Description of Artificial Sequence: Synthetic oligonucleotide
gacggaauagcagcggucc

SEQ ID NO: 85376 - RNA, 19 nt, Artificial Sequence
  Description of Artificial Sequence: Synthetic oligonucleotide
ugaccuaauaaugcacugc

SEQ ID NO: 85377 - RNA, 19 nt, Artificial Sequence
  Description of Artificial Sequence: Synthetic oligonucleotide
agaaggaaaguagaucuca

SEQ ID NO: 85378 - RNA, 19 nt, Artificial Sequence
  Description of Artificial Sequence: Synthetic oligonucleotide
auagcaauaucuccugcaa

SEQ ID NO: 85379 - RNA, 19 nt, Artificial Sequence
  Description of Artificial Sequence: Synthetic oligonucleotide
uauuaguaagguguauggu

SEQ ID NO: 85380 - RNA, 19 nt, Artificial Sequence
  Description of Artificial Sequence: Synthetic oligonucleotide
cauagcaugcauuaguugu

SEQ ID NO: 85381 - RNA, 19 nt, Artificial Sequence
  Description of Artificial Sequence: Synthetic oligonucleotide
uacaguauggugaguggaa

SEQ ID NO: 85382 - RNA, 19 nt, Artificial Sequence
  Description of Artificial Sequence: Synthetic oligonucleotide
caccguuacuaauaacugc

SEQ ID NO: 85383 - RNA, 19 nt, Artificial Sequence
  Description of Artificial Sequence: Synthetic oligonucleotide
cacauaaacuugcugucac

SEQ ID NO: 85384 - RNA, 19 nt, Artificial Sequence
  Description of Artificial Sequence: Synthetic oligonucleotide
uccauagcaugcauuaguu

SEQ ID NO: 85385 - RNA, 19 nt, Artificial Sequence
  Description of Artificial Sequence: Synthetic oligonucleotide
uuuggcuugucagacuaug

SEQ ID NO: 85386 - RNA, 19 nt, Artificial Sequence
  Description of Artificial Sequence: Synthetic oligonucleotide
gauuuaagcugccagccua

SEQ ID NO: 85387 - RNA, 19 nt, Artificial Sequence
  Description of Artificial Sequence: Synthetic oligonucleotide
uauuaccuugcaaucugaa

SEQ ID NO: 85388 - RNA, 19 nt, Artificial Sequence
  Description of Artificial Sequence: Synthetic oligonucleotide
accguuacuaauaacugcu

SEQ ID NO: 85389 - RNA, 19 nt, Artificial Sequence
  Description of Artificial Sequence: Synthetic oligonucleotide
ucacggcuaaccuuucuca

SEQ ID NO: 85390 - RNA, 19 nt, Artificial Sequence
  Description of Artificial Sequence: Synthetic oligonucleotide
aaaauucuacugguuaaua

SEQ ID NO: 85391 - RNA, 19 nt, Artificial Sequence
  Description of Artificial Sequence: Synthetic oligonucleotide
gauuuacaagucuucgaaa

SEQ ID NO: 85392 - RNA, 19 nt, Artificial Sequence
  Description of Artificial Sequence: Synthetic oligonucleotide
acgugaaccauuugcugug

SEQ ID NO: 85393 - RNA, 19 nt, Artificial Sequence
  Description of Artificial Sequence: Synthetic oligonucleotide
aacuagguaccauguuccu

SEQ ID NO: 85394 - RNA, 19 nt, Artificial Sequence
  Description of Artificial Sequence: Synthetic oligonucleotide
ugauccucucuucaggauu

SEQ ID NO: 85395 - RNA, 19 nt, Artificial Sequence
  Description of Artificial Sequence: Synthetic oligonucleotide
aaccauuugcuguggcaga

SEQ ID NO: 85396 - RNA, 19 nt, Artificial Sequence
  Description of Artificial Sequence: Synthetic oligonucleotide
uuacagucugugaggguca

SEQ ID NO: 85397 - RNA, 19 nt, Artificial Sequence
  Description of Artificial Sequence: Synthetic oligonucleotide
acuauaggguauucagaga

SEQ ID NO: 85398 - RNA, 19 nt, Artificial Sequence
  Description of Artificial Sequence: Synthetic oligonucleotide
acaccgaugguugauccuc

SEQ ID NO: 85399 - RNA, 19 nt, Artificial Sequence
  Description of Artificial Sequence: Synthetic oligonucleotide
ucacaccgaugguugaucc

SEQ ID NO: 85400 - RNA, 19 nt, Artificial Sequence
  Description of Artificial Sequence: Synthetic oligonucleotide
gaggcgaguacugugccag

SEQ ID NO: 85401 - RNA, 19 nt, Artificial Sequence
  Description of Artificial Sequence: Synthetic oligonucleotide
uuggcuaagugaugugugu

SEQ ID NO: 85402 - RNA, 19 nt, Artificial Sequence
  Description of Artificial Sequence: Synthetic oligonucleotide
cauauugagaaggaaagua

SEQ ID NO: 85403 - RNA, 19 nt, Artificial Sequence
  Description of Artificial Sequence: Synthetic oligonucleotide
agggaguacagaguggcag

SEQ ID NO: 85404 - RNA, 19 nt, Artificial Sequence
  Description of Artificial Sequence: Synthetic oligonucleotide
uuguaucuauuccuucuau

SEQ ID NO: 85405 - RNA, 19 nt, Artificial Sequence
  Description of Artificial Sequence: Synthetic oligonucleotide
agaacauaauaguuuucua

SEQ ID NO: 85406 - RNA, 19 nt, Artificial Sequence
  Description of Artificial Sequence: Synthetic oligonucleotide
cugugaccuaauaaugcac

SEQ ID NO: 85407 - RNA, 19 nt, Artificial Sequence
  Description of Artificial Sequence: Synthetic oligonucleotide
uaaaggcgcauuuggccca

SEQ ID NO: 85408 - RNA, 19 nt, Artificial Sequence
  Description of Artificial Sequence: Synthetic oligonucleotide
uaaugcacugccccauccu

SEQ ID NO: 85409 - RNA, 19 nt, Artificial Sequence
  Description of Artificial Sequence: Synthetic oligonucleotide
uaggcuccgugucaguuac

SEQ ID NO: 85410 - RNA, 19 nt, Artificial Sequence
  Description of Artificial Sequence: Synthetic oligonucleotide
accuaauaaugcacugccc

SEQ ID NO: 85411 - RNA, 19 nt, Artificial Sequence
  Description of Artificial Sequence: Synthetic oligonucleotide
cuugugugacuuuaaggga

SEQ ID NO: 85412 - RNA, 19 nt, Artificial Sequence
  Description of Artificial Sequence: Synthetic oligonucleotide
ucuaacuagguaccauguu

SEQ ID NO: 85413 - RNA, 19 nt, Artificial Sequence
  Description of Artificial Sequence: Synthetic oligonucleotide
ggauuuacaagucuucgaa

SEQ ID NO: 85414 - RNA, 19 nt, Artificial Sequence
  Description of Artificial Sequence: Synthetic oligonucleotide
ugcgcuuacagcgcccacg

SEQ ID NO: 85415 - RNA, 19 nt, Artificial Sequence
  Description of Artificial Sequence: Synthetic oligonucleotide
gugaccuaauaaugcacug

SEQ ID NO: 85416 - RNA, 19 nt, Artificial Sequence
  Description of Artificial Sequence: Synthetic oligonucleotide
aacugcugaggcgaguacu

SEQ ID NO: 85417 - RNA, 19 nt, Artificial Sequence
  Description of Artificial Sequence: Synthetic oligonucleotide
aguauggugaguggaagau

SEQ ID NO: 85418 - RNA, 19 nt, Artificial Sequence
  Description of Artificial Sequence: Synthetic oligonucleotide
acaguauggugaguggaag

SEQ ID NO: 85419 - RNA, 19 nt, Artificial Sequence
  Description of Artificial Sequence: Synthetic oligonucleotide
aguuccaacuaucucuauu

SEQ ID NO: 85420 - RNA, 19 nt, Artificial Sequence
  Description of Artificial Sequence: Synthetic oligonucleotide
gguaaaaucguuaucauuu

SEQ ID NO: 85421 - RNA, 19 nt, Artificial Sequence
  Description of Artificial Sequence: Synthetic oligonucleotide
uggcaccagaacauuacuc

SEQ ID NO: 85422 - RNA, 19 nt, Artificial Sequence
  Description of Artificial Sequence: Synthetic oligonucleotide
cauuacauuuuagccuugc

SEQ ID NO: 85423 - RNA, 19 nt, Artificial Sequence
  Description of Artificial Sequence: Synthetic oligonucleotide
aguuggcuaagugaugugu

SEQ ID NO: 85424 - RNA, 19 nt, Artificial Sequence
  Description of Artificial Sequence: Synthetic oligonucleotide
acaggaagcguguuagcaa

SEQ ID NO: 85425 - RNA, 19 nt, Artificial Sequence
  Description of Artificial Sequence: Synthetic oligonucleotide
uguaugguuaacgcuccgu

SEQ ID NO: 85426 - RNA, 19 nt, Artificial Sequence
  Description of Artificial Sequence: Synthetic oligonucleotide
uaguguucaccguuacuaa

SEQ ID NO: 85427 - RNA, 19 nt, Artificial Sequence
  Description of Artificial Sequence: Synthetic oligonucleotide
gcaugugugucccacgaag

SEQ ID NO: 85428 - RNA, 19 nt, Artificial Sequence
  Description of Artificial Sequence: Synthetic oligonucleotide
guuggcuaagugaugugug

SEQ ID NO: 85429 - RNA, 19 nt, Artificial Sequence
  Description of Artificial Sequence: Synthetic oligonucleotide
uauaggcguccagagaggu

SEQ ID NO: 85430 - RNA, 19 nt, Artificial Sequence
  Description of Artificial Sequence: Synthetic oligonucleotide
accauuuccccaccauucu

SEQ ID NO: 85431 - RNA, 19 nt, Artificial Sequence
  Description of Artificial Sequence: Synthetic oligonucleotide
auaaacuugcugucacuuu

SEQ ID NO: 85432 - RNA, 19 nt, Artificial Sequence
  Description of Artificial Sequence: Synthetic oligonucleotide
gcuuacaguauggugagug

SEQ ID NO: 85433 - RNA, 19 nt, Artificial Sequence
  Description of Artificial Sequence: Synthetic oligonucleotide
agccuugcaaggagggugc

SEQ ID NO: 85434 - RNA, 19 nt, Artificial Sequence
  Description of Artificial Sequence: Synthetic oligonucleotide
aggguaaaaucguuaucau

SEQ ID NO: 85435 - RNA, 19 nt, Artificial Sequence
  Description of Artificial Sequence: Synthetic oligonucleotide
ugguuaacgcuccgugcca

SEQ ID NO: 85436 - RNA, 19 nt, Artificial Sequence
  Description of Artificial Sequence: Synthetic oligonucleotide
ggcuaagugaugugugucc

SEQ ID NO: 85437 - RNA, 19 nt, Artificial Sequence
  Description of Artificial Sequence: Synthetic oligonucleotide
ugauugucucuguuccgac

SEQ ID NO: 85438 - RNA, 19 nt, Artificial Sequence
  Description of Artificial Sequence: Synthetic oligonucleotide
gauuccgauucugcugcgg

SEQ ID NO: 85439 - RNA, 19 nt, Artificial Sequence
  Description of Artificial Sequence: Synthetic oligonucleotide
ucauuaguggaggggcgcc

SEQ ID NO: 85440 - RNA, 19 nt, Artificial Sequence
  Description of Artificial Sequence: Synthetic oligonucleotide
acuagccacuugaacuggc

SEQ ID NO: 85441 - RNA, 19 nt, Artificial Sequence
  Description of Artificial Sequence: Synthetic oligonucleotide
acggcuaaccuuucucaca

SEQ ID NO: 85442 - RNA, 19 nt, Artificial Sequence
  Description of Artificial Sequence: Synthetic oligonucleotide
ucuagccgcccaaugcagu

SEQ ID NO: 85443 - RNA, 19 nt, Artificial Sequence
  Description of Artificial Sequence: Synthetic oligonucleotide
uccgcuuauuguuggcaga

SEQ ID NO: 85444 - RNA, 19 nt, Artificial Sequence
  Description of Artificial Sequence: Synthetic oligonucleotide
gacuucuagccgcccaaug

SEQ ID NO: 85445 - RNA, 19 nt, Artificial Sequence
  Description of Artificial Sequence: Synthetic oligonucleotide
gaagcaagggaaccguaua

SEQ ID NO: 85446 - RNA, 19 nt, Artificial Sequence
  Description of Artificial Sequence: Synthetic oligonucleotide
caugcauauaggcguccag

SEQ ID NO: 85447 - RNA, 19 nt, Artificial Sequence
  Description of Artificial Sequence: Synthetic oligonucleotide
accuccgcuuauuguuggc

SEQ ID NO: 85448 - RNA, 19 nt, Artificial Sequence
  Description of Artificial Sequence: Synthetic oligonucleotide
uaguaccuccgcuuauugu

SEQ ID NO: 85449 - RNA, 19 nt, Artificial Sequence
  Description of Artificial Sequence: Synthetic oligonucleotide
agccaaaaucauucagggu

SEQ ID NO: 85450 - RNA, 19 nt, Artificial Sequence
  Description of Artificial Sequence: Synthetic oligonucleotide
guuaacgcuccgugccagg

SEQ ID NO: 85451 - RNA, 19 nt, Artificial Sequence
  Description of Artificial Sequence: Synthetic oligonucleotide
aaauuagacuucacugauu

SEQ ID NO: 85452 - RNA, 19 nt, Artificial Sequence
  Description of Artificial Sequence: Synthetic oligonucleotide
uugacuugucgaugauugu

SEQ ID NO: 85453 - RNA, 19 nt, Artificial Sequence
  Description of Artificial Sequence: Synthetic oligonucleotide
auauaggcguccagagagg

SEQ ID NO: 85454 - RNA, 19 nt, Artificial Sequence
  Description of Artificial Sequence: Synthetic oligonucleotide
uuaguggaggggcgccgag

SEQ ID NO: 85455 - RNA, 19 nt, Artificial Sequence
  Description of Artificial Sequence: Synthetic oligonucleotide
ugugaaaauguggguuaga

SEQ ID NO: 85456 - RNA, 19 nt, Artificial Sequence
  Description of Artificial Sequence: Synthetic oligonucleotide
uuuugacuugucgaugauu

SEQ ID NO: 85457 - RNA, 19 nt, Artificial Sequence
  Description of Artificial Sequence: Synthetic oligonucleotide
uuaacgcuccgugccagga

SEQ ID NO: 85458 - RNA, 19 nt, Artificial Sequence
  Description of Artificial Sequence: Synthetic oligonucleotide
cacggcuaaccuuucucac

SEQ ID NO: 85459 - RNA, 19 nt, Artificial Sequence
  Description of Artificial Sequence: Synthetic oligonucleotide
gcgcauuuggcccaaucag

SEQ ID NO: 85460 - RNA, 19 nt, Artificial Sequence
  Description of Artificial Sequence: Synthetic oligonucleotide
ccaaugguauacuucccag

SEQ ID NO: 85461 - RNA, 19 nt, Artificial Sequence
  Description of Artificial Sequence: Synthetic oligonucleotide
uaguuggcuaagugaugug

SEQ ID NO: 85462 - RNA, 19 nt, Artificial Sequence
  Description of Artificial Sequence: Synthetic oligonucleotide
gucacggcuaaccuuucuc

SEQ ID NO: 85463 - RNA, 19 nt, Artificial Sequence
  Description of Artificial Sequence: Synthetic oligonucleotide
aggggcgccgagcauaagu

SEQ ID NO: 85464 - RNA, 19 nt, Artificial Sequence
  Description of Artificial Sequence: Synthetic oligonucleotide
agaacuccuagugaauuuu

SEQ ID NO: 85465 - RNA, 19 nt, Artificial Sequence
  Description of Artificial Sequence: Synthetic oligonucleotide
agacuaugugaaauuuuca

SEQ ID NO: 85466 - RNA, 19 nt, Artificial Sequence
  Description of Artificial Sequence: Synthetic oligonucleotide
uaaaagucauaggcaugcu

SEQ ID NO: 85467 - RNA, 19 nt, Artificial Sequence
  Description of Artificial Sequence: Synthetic oligonucleotide
gagaaggaaaguagaucuc

SEQ ID NO: 85468 - RNA, 19 nt, Artificial Sequence
  Description of Artificial Sequence: Synthetic oligonucleotide
gggaaccguauacagaaga

SEQ ID NO: 85469 - RNA, 19 nt, Artificial Sequence
  Description of Artificial Sequence: Synthetic oligonucleotide
uggauucaauccaguucac

SEQ ID NO: 85470 - RNA, 19 nt, Artificial Sequence
  Description of Artificial Sequence: Synthetic oligonucleotide
uuuaagcugccagccuaug

SEQ ID NO: 85471 - RNA, 19 nt, Artificial Sequence
  Description of Artificial Sequence: Synthetic oligonucleotide
gcccacgugaaccauuugc

SEQ ID NO: 85472 - RNA, 19 nt, Artificial Sequence
  Description of Artificial Sequence: Synthetic oligonucleotide
cacaauccccaacauagaa

SEQ ID NO: 85473 - RNA, 19 nt, Artificial Sequence
  Description of Artificial Sequence: Synthetic oligonucleotide
agucaagccuugauuuaag

SEQ ID NO: 85474 - RNA, 19 nt, Artificial Sequence
  Description of Artificial Sequence: Synthetic oligonucleotide
cuacauuacauauuaccuu

SEQ ID NO: 85475 - RNA, 19 nt, Artificial Sequence
  Description of Artificial Sequence: Synthetic oligonucleotide
cuagccgcccaaugcaguc

SEQ ID NO: 85476 - RNA, 19 nt, Artificial Sequence
  Description of Artificial Sequence: Synthetic oligonucleotide
guguuagcaaguucagcaa

SEQ ID NO: 85477 - RNA, 19 nt, Artificial Sequence
  Description of Artificial Sequence: Synthetic oligonucleotide
cuaacuuaacauccccaaa

SEQ ID NO: 85478 - RNA, 19 nt, Artificial Sequence
  Description of Artificial Sequence: Synthetic oligonucleotide
cucagaacuagccuucaua

SEQ ID NO: 85479 - RNA, 19 nt, Artificial Sequence
  Description of Artificial Sequence: Synthetic oligonucleotide
gagucaagccuugauuuaa

SEQ ID NO: 85480 - RNA, 19 nt, Artificial Sequence
  Description of Artificial Sequence: Synthetic oligonucleotide
acacuaguaccuccgcuua

SEQ ID NO: 85481 - RNA, 19 nt, Artificial Sequence
  Description of Artificial Sequence: Synthetic oligonucleotide
uaggguauucagagagcau

SEQ ID NO: 85482 - RNA, 19 nt, Artificial Sequence
  Description of Artificial Sequence: Synthetic oligonucleotide
cuaaccuuucucacaccga

SEQ ID NO: 85483 - RNA, 19 nt, Artificial Sequence
  Description of Artificial Sequence: Synthetic oligonucleotide
cauucaguuacauuacauu

SEQ ID NO: 85484 - RNA, 19 nt, Artificial Sequence
  Description of Artificial Sequence: Synthetic oligonucleotide
cuuacagcgcccacgugaa

SEQ ID NO: 85485 - RNA, 19 nt, Artificial Sequence
  Description of Artificial Sequence: Synthetic oligonucleotide
gacacuaguaccuccgcuu

SEQ ID NO: 85486 - RNA, 19 nt, Artificial Sequence
  Description of Artificial Sequence: Synthetic oligonucleotide
uuagcagggcuuggaauau

SEQ ID NO: 85487 - RNA, 19 nt, Artificial Sequence
  Description of Artificial Sequence: Synthetic oligonucleotide
uggcuaagugauguguguc

SEQ ID NO: 85488 - RNA, 19 nt, Artificial Sequence
  Description of Artificial Sequence: Synthetic oligonucleotide
cauuaguggaggggcgccg

SEQ ID NO: 85489 - RNA, 19 nt, Artificial Sequence
  Description of Artificial Sequence: Synthetic oligonucleotide
gaacuccuagugaauuuuc

SEQ ID NO: 85490 - RNA, 19 nt, Artificial Sequence
  Description of Artificial Sequence: Synthetic oligonucleotide
accgaugguugauccucuc

SEQ ID NO: 85491 - RNA, 19 nt, Artificial Sequence
  Description of Artificial Sequence: Synthetic oligonucleotide
auauuaccuugcaaucuga

SEQ ID NO: 85492 - RNA, 19 nt, Artificial Sequence
  Description of Artificial Sequence: Synthetic oligonucleotide
aggcgcauuuggcccaauc

SEQ ID NO: 85493 - RNA, 19 nt, Artificial Sequence
  Description of Artificial Sequence: Synthetic oligonucleotide
gcaguggauguuaaaauga

SEQ ID NO: 85494 - RNA, 19 nt, Artificial Sequence
  Description of Artificial Sequence: Synthetic oligonucleotide
cugaacuuacauuauucau

SEQ ID NO: 85495 - RNA, 19 nt, Artificial Sequence
  Description of Artificial Sequence: Synthetic oligonucleotide
gacuugucgaugauugucu

SEQ ID NO: 85496 - RNA, 19 nt, Artificial Sequence
  Description of Artificial Sequence: Synthetic oligonucleotide
auuagacuucacugauuuu

SEQ ID NO: 85497 - RNA, 19 nt, Artificial Sequence
  Description of Artificial Sequence: Synthetic oligonucleotide
cagacccauaagagaacac

SEQ ID NO: 85498 - RNA, 19 nt, Artificial Sequence
  Description of Artificial Sequence: Synthetic oligonucleotide
caaugcacugagguagcac

SEQ ID NO: 85499 - RNA, 19 nt, Artificial Sequence
  Description of Artificial Sequence: Synthetic oligonucleotide
ugcaugcauauaggcgucc

SEQ ID NO: 85500 - RNA, 19 nt, Artificial Sequence
  Description of Artificial Sequence: Synthetic oligonucleotide
cacgugaaccauuugcugu

SEQ ID NO: 85501 - RNA, 19 nt, Artificial Sequence
  Description of Artificial Sequence: Synthetic oligonucleotide
ggucuggcauuuccugugg

SEQ ID NO: 85502 - RNA, 19 nt, Artificial Sequence
  Description of Artificial Sequence: Synthetic oligonucleotide
guguuugaaugcacaaguc

SEQ ID NO: 85503 - RNA, 19 nt, Artificial Sequence
  Description of Artificial Sequence: Synthetic oligonucleotide
ccgagcauaaguucuucug

SEQ ID NO: 85504 - RNA, 19 nt, Artificial Sequence
  Description of Artificial Sequence: Synthetic oligonucleotide
ggaaccguauacagaagac

SEQ ID NO: 85505 - RNA, 19 nt, Artificial Sequence
  Description of Artificial Sequence: Synthetic oligonucleotide
auagcaugcauuaguugua

SEQ ID NO: 85506 - RNA, 19 nt, Artificial Sequence
  Description of Artificial Sequence: Synthetic oligonucleotide
guucaccguuacuaauaac

SEQ ID NO: 85507 - RNA, 19 nt, Artificial Sequence
  Description of Artificial Sequence: Synthetic oligonucleotide
uccgagcuagagacuucug

SEQ ID NO: 85508 - RNA, 19 nt, Artificial Sequence
  Description of Artificial Sequence: Synthetic oligonucleotide
uagcagcgguccaaugcac

SEQ ID NO: 85509 - RNA, 19 nt, Artificial Sequence
  Description of Artificial Sequence: Synthetic oligonucleotide
aucuauagcaguggauguu

SEQ ID NO: 85510 - RNA, 19 nt, Artificial Sequence
  Description of Artificial Sequence: Synthetic oligonucleotide
ccgagcuagagacuucugc

SEQ ID NO: 85511 - RNA, 19 nt, Artificial Sequence
  Description of Artificial Sequence: Synthetic oligonucleotide
ggcgcauuuggcccaauca

SEQ ID NO: 85512 - RNA, 19 nt, Artificial Sequence
  Description of Artificial Sequence: Synthetic oligonucleotide
auuuaagcugccagccuau

SEQ ID NO: 85513 - RNA, 19 nt, Artificial Sequence
  Description of Artificial Sequence: Synthetic oligonucleotide
cucuaacuagguaccaugu

SEQ ID NO: 85514 - RNA, 19 nt, Artificial Sequence
  Description of Artificial Sequence: Synthetic oligonucleotide
ugccaacugcugaggcgag

SEQ ID NO: 85515 - RNA, 19 nt, Artificial Sequence
  Description of Artificial Sequence: Synthetic oligonucleotide
caucuauagcaguggaugu

SEQ ID NO: 85516 - RNA, 19 nt, Artificial Sequence
  Description of Artificial Sequence: Synthetic oligonucleotide
acgaaguccucggucaaaa

SEQ ID NO: 85517 - RNA, 19 nt, Artificial Sequence
  Description of Artificial Sequence: Synthetic oligonucleotide
auuaguggaggggcgccga

SEQ ID NO: 85518 - RNA, 19 nt, Artificial Sequence
  Description of Artificial Sequence: Synthetic oligonucleotide
ucaucucaugugguagauc

SEQ ID NO: 85519 - RNA, 19 nt, Artificial Sequence
  Description of Artificial Sequence: Synthetic oligonucleotide
guauggugaguggaagauc

SEQ ID NO: 85520 - RNA, 19 nt, Artificial Sequence
  Description of Artificial Sequence: Synthetic oligonucleotide
uaacgcuccgugccaggau

SEQ ID NO: 85521 - RNA, 19 nt, Artificial Sequence
  Description of Artificial Sequence: Synthetic oligonucleotide
acggaauagcagcggucca

SEQ ID NO: 85522 - RNA, 19 nt, Artificial Sequence
  Description of Artificial Sequence: Synthetic oligonucleotide
uggcaacaaguucccucac

SEQ ID NO: 85523 - RNA, 19 nt, Artificial Sequence
  Description of Artificial Sequence: Synthetic oligonucleotide
ccauagcaugcauuaguug

SEQ ID NO: 85524 - RNA, 19 nt, Artificial Sequence
  Description of Artificial Sequence: Synthetic oligonucleotide
cuauagcaguggauguuaa

SEQ ID NO: 85525 - RNA, 19 nt, Artificial Sequence
  Description of Artificial Sequence: Synthetic oligonucleotide
cucacaccgaugguugauc

SEQ ID NO: 85526 - RNA, 19 nt, Artificial Sequence
  Description of Artificial Sequence: Synthetic oligonucleotide
cagagaacugcagucucca

SEQ ID NO: 85527 - RNA, 19 nt, Artificial Sequence
  Description of Artificial Sequence: Synthetic oligonucleotide
acauuacauuuaagcaaca

SEQ ID NO: 85528 - RNA, 19 nt, Artificial Sequence
  Description of Artificial Sequence: Synthetic oligonucleotide
cucuuaguguucaccguua

SEQ ID NO: 85529 - RNA, 19 nt, Artificial Sequence
  Description of Artificial Sequence: Synthetic oligonucleotide
guuccgacuucuagccgcc

SEQ ID NO: 85530 - RNA, 19 nt, Artificial Sequence
  Description of Artificial Sequence: Synthetic oligonucleotide
caugugugucccacgaagu

SEQ ID NO: 85531 - RNA, 19 nt, Artificial Sequence
  Description of Artificial Sequence: Synthetic oligonucleotide
caucuggcgccacacaugu

SEQ ID NO: 85532 - RNA, 19 nt, Artificial Sequence
  Description of Artificial Sequence: Synthetic oligonucleotide
gcaccagcuuacaguaugg

SEQ ID NO: 85533 - RNA, 19 nt, Artificial Sequence
  Description of Artificial Sequence: Synthetic oligonucleotide
agccuugauuuaagaucac

SEQ ID NO: 85534 - RNA, 19 nt, Artificial Sequence
  Description of Artificial Sequence: Synthetic oligonucleotide
cauccuagccuggcccagg

SEQ ID NO: 85535 - RNA, 19 nt, Artificial Sequence
  Description of Artificial Sequence: Synthetic oligonucleotide
gguuaacgcuccgugccag

SEQ ID NO: 85536 - RNA, 19 nt, Artificial Sequence
  Description of Artificial Sequence: Synthetic oligonucleotide
uuacagcgcccacgugaac

SEQ ID NO: 85537 - RNA, 19 nt, Artificial Sequence
  Description of Artificial Sequence: Synthetic oligonucleotide
ccacgugaaccauuugcug

SEQ ID NO: 85538 - RNA, 19 nt, Artificial Sequence
  Description of Artificial Sequence: Synthetic oligonucleotide
uucuaggcuccgugucagu

SEQ ID NO: 85539 - RNA, 19 nt, Artificial Sequence
  Description of Artificial Sequence: Synthetic oligonucleotide
cuugucgaugauugucucu

SEQ ID NO: 85540 - RNA, 19 nt, Artificial Sequence
  Description of Artificial Sequence: Synthetic oligonucleotide
agcugcgcuuacagcgccc

SEQ ID NO: 85541 - RNA, 19 nt, Artificial Sequence
  Description of Artificial Sequence: Synthetic oligonucleotide
acauuacauuuuagccuug

SEQ ID NO: 85542 - RNA, 19 nt, Artificial Sequence
  Description of Artificial Sequence: Synthetic oligonucleotide
aaaggcgcauuuggcccaa

SEQ ID NO: 85543 - RNA, 19 nt, Artificial Sequence
  Description of Artificial Sequence: Synthetic oligonucleotide
ccguuacuaauaacugcug

SEQ ID NO: 85544 - RNA, 19 nt, Artificial Sequence
  Description of Artificial Sequence: Synthetic oligonucleotide
agggaaccguauacagaag

SEQ ID NO: 85545 - RNA, 19 nt, Artificial Sequence
  Description of Artificial Sequence: Synthetic oligonucleotide
guggcauauauagcaauau

SEQ ID NO: 85546 - RNA, 19 nt, Artificial Sequence
  Description of Artificial Sequence: Synthetic oligonucleotide
ggauucaauccaguucaca

SEQ ID NO: 85547 - RNA, 19 nt, Artificial Sequence
  Description of Artificial Sequence: Synthetic oligonucleotide
aggaagcguguuagcaagu

SEQ ID NO: 85548 - RNA, 19 nt, Artificial Sequence
  Description of Artificial Sequence: Synthetic oligonucleotide
agcauaccguccaucccaa

SEQ ID NO: 85549 - RNA, 19 nt, Artificial Sequence
  Description of Artificial Sequence: Synthetic oligonucleotide
gccuugauuuaagaucaca

SEQ ID NO: 85550 - RNA, 19 nt, Artificial Sequence
  Description of Artificial Sequence: Synthetic oligonucleotide
ggauuuaagcugccagccu

SEQ ID NO: 85551 - RNA, 19 nt, Artificial Sequence
  Description of Artificial Sequence: Synthetic oligonucleotide
ggguaaaaucguuaucauu

SEQ ID NO: 85552 - RNA, 19 nt, Artificial Sequence
  Description of Artificial Sequence: Synthetic oligonucleotide
cagaagcaagggaaccgua

SEQ ID NO: 85553 - RNA, 19 nt, Artificial Sequence
  Description of Artificial Sequence: Synthetic oligonucleotide
ccgugucaguuacauucag

SEQ ID NO: 85554 - RNA, 19 nt, Artificial Sequence
  Description of Artificial Sequence: Synthetic oligonucleotide
cacggaucuucuugcggua

SEQ ID NO: 85555 - RNA, 19 nt, Artificial Sequence
  Description of Artificial Sequence: Synthetic oligonucleotide
gcuaagugauguguguccu

SEQ ID NO: 85556 - RNA, 19 nt, Artificial Sequence
  Description of Artificial Sequence: Synthetic oligonucleotide
ggacacuaguaccuccgcu

SEQ ID NO: 85557 - RNA, 19 nt, Artificial Sequence
  Description of Artificial Sequence: Synthetic oligonucleotide
cccacgugaaccauuugcu

SEQ ID NO: 85558 - RNA, 19 nt, Artificial Sequence
  Description of Artificial Sequence: Synthetic oligonucleotide
cgcccaaugcagucauagg

SEQ ID NO: 85559 - RNA, 19 nt, Artificial Sequence
  Description of Artificial Sequence: Synthetic oligonucleotide
auaggcguccagagaggua

SEQ ID NO: 85560 - RNA, 19 nt, Artificial Sequence
  Description of Artificial Sequence: Synthetic oligonucleotide
cacaccgaugguugauccu

SEQ ID NO: 85561 - RNA, 19 nt, Artificial Sequence
  Description of Artificial Sequence: Synthetic oligonucleotide
cagcgguccaaugcacuga

SEQ ID NO: 85562 - RNA, 19 nt, Artificial Sequence
  Description of Artificial Sequence: Synthetic oligonucleotide
cugcgcuuacagcgcccac

SEQ ID NO: 85563 - RNA, 19 nt, Artificial Sequence
  Description of Artificial Sequence: Synthetic oligonucleotide
gggcgccgagcauaaguuc

SEQ ID NO: 85564 - RNA, 19 nt, Artificial Sequence
  Description of Artificial Sequence: Synthetic oligonucleotide
ggcgccgagcauaaguucu

SEQ ID NO: 85565 - RNA, 19 nt, Artificial Sequence
  Description of Artificial Sequence: Synthetic oligonucleotide
ccgauucugcugcgguagc

SEQ ID NO: 85566 - RNA, 19 nt, Artificial Sequence
  Description of Artificial Sequence: Synthetic oligonucleotide
gugugacuuuaagggagua

SEQ ID NO: 85567 - RNA, 19 nt, Artificial Sequence
  Description of Artificial Sequence: Synthetic oligonucleotide
caccgaugguugauccucu

SEQ ID NO: 85568 - RNA, 19 nt, Artificial Sequence
  Description of Artificial Sequence: Synthetic oligonucleotide
cacucuaacuagguaccau

SEQ ID NO: 85569 - RNA, 19 nt, Artificial Sequence
  Description of Artificial Sequence: Synthetic oligonucleotide
ccccauccuuccuacauua

SEQ ID NO: 85570 - RNA, 19 nt, Artificial Sequence
  Description of Artificial Sequence: Synthetic oligonucleotide
cguauacagaagacgugua

SEQ ID NO: 85571 - RNA, 19 nt, Artificial Sequence
  Description of Artificial Sequence: Synthetic oligonucleotide
gcugcgcuuacagcgccca

SEQ ID NO: 85572 - RNA, 19 nt, Artificial Sequence
  Description of Artificial Sequence: Synthetic oligonucleotide
gccgagcauaaguucuucu

SEQ ID NO: 85573 - RNA, 19 nt, Artificial Sequence
  Description of Artificial Sequence: Synthetic oligonucleotide
gcgcuuacagcgcccacgu

SEQ ID NO: 85574 - RNA, 19 nt, Artificial Sequence
  Description of Artificial Sequence: Synthetic oligonucleotide
cacuaguaccuccgcuuau

SEQ ID NO: 85575 - RNA, 19 nt, Artificial Sequence
  Description of Artificial Sequence: Synthetic oligonucleotide
gaggggcgccgagcauaag

SEQ ID NO: 85576 - RNA, 19 nt, Artificial Sequence
  Description of Artificial Sequence: Synthetic oligonucleotide
ggucacggcuaaccuuucu

SEQ ID NO: 85577 - RNA, 19 nt, Artificial Sequence
  Description of Artificial Sequence: Synthetic oligonucleotide
cccaucuacuauaggguau

SEQ ID NO: 85578 - RNA, 19 nt, Artificial Sequence
  Description of Artificial Sequence: Synthetic oligonucleotide
gcgguagcagggagucuug

SEQ ID NO: 85579 - RNA, 19 nt, Artificial Sequence
  Description of Artificial Sequence: Synthetic oligonucleotide
ccgcuuauuguuggcagaa

SEQ ID NO: 85580 - RNA, 19 nt, Artificial Sequence
  Description of Artificial Sequence: Synthetic oligonucleotide
ggaagcguguuagcaaguu

SEQ ID NO: 85581 - RNA, 19 nt, Artificial Sequence
  Description of Artificial Sequence: Synthetic oligonucleotide
gcguccagagagguauaaa

SEQ ID NO: 85582 - RNA, 19 nt, Artificial Sequence
  Description of Artificial Sequence: Synthetic oligonucleotide
ccgaugguugauccucucu

SEQ ID NO: 85583 - RNA, 19 nt, Artificial Sequence
  Description of Artificial Sequence: Synthetic oligonucleotide
gggcaacgauucccacauc

SEQ ID NO: 85584 - RNA, 19 nt, Artificial Sequence
  Description of Artificial Sequence: Synthetic oligonucleotide
gcucagaacuagccuucau

SEQ ID NO: 85585 - RNA, 19 nt, Artificial Sequence
  Description of Artificial Sequence: Synthetic oligonucleotide
cggaauagcagcgguccaa

SEQ ID NO: 85586 - RNA, 19 nt, Artificial Sequence
  Description of Artificial Sequence: Synthetic oligonucleotide
aucuggcgccacacauguu

SEQ ID NO: 85587 - RNA, 19 nt, Artificial Sequence
  Description of Artificial Sequence: Synthetic oligonucleotide
gccccauccuuccuacauu

SEQ ID NO: 85588 - RNA, 19 nt, Artificial Sequence
  Description of Artificial Sequence: Synthetic oligonucleotide
gcuccgugucaguuacauu

SEQ ID NO: 85589 - RNA, 19 nt, Artificial Sequence
  Description of Artificial Sequence: Synthetic oligonucleotide
cgcccacgugaaccauuug

SEQ ID NO: 85590 - RNA, 19 nt, Artificial Sequence
  Description of Artificial Sequence: Synthetic oligonucleotide
cugcgguagcagggagucu

SEQ ID NO: 85591 - RNA, 19 nt, Artificial Sequence
  Description of Artificial Sequence: Synthetic oligonucleotide
gcgcccacgugaaccauuu

SEQ ID NO: 85592 - RNA, 19 nt, Artificial Sequence
  Description of Artificial Sequence: Synthetic oligonucleotide
gcgccgagcauaaguucuu

SEQ ID NO: 85593 - RNA, 19 nt, Artificial Sequence
  Description of Artificial Sequence: Synthetic oligonucleotide
aauugauugaggucaaggg

SEQ ID NO: 85594 - RNA, 19 nt, Artificial Sequence
  Description of Artificial Sequence: Synthetic oligonucleotide
gacuaaaauaugcaggacg

SEQ ID NO: 85595 - RNA, 19 nt, Artificial Sequence
  Description of Artificial Sequence: Synthetic oligonucleotide
gaaacuuggggcuacaagc

SEQ ID NO: 85596 - RNA, 19 nt, Artificial Sequence
  Description of Artificial Sequence: Synthetic oligonucleotide
ucgcuuuucccucagaggg

SEQ ID NO: 85597 - RNA, 19 nt, Artificial Sequence
  Description of Artificial Sequence: Synthetic oligonucleotide
aaauucaccccgcaccagc

SEQ ID NO: 85598 - RNA, 19 nt, Artificial Sequence
  Description of Artificial Sequence: Synthetic oligonucleotide
auauggagggcuuucauuc

SEQ ID NO: 85599 - RNA, 19 nt, Artificial Sequence
  Description of Artificial Sequence: Synthetic oligonucleotide
auagacaguuuauuguggc

SEQ ID NO: 85600 - RNA, 19 nt, Artificial Sequence
  Description of Artificial Sequence: Synthetic oligonucleotide
uaugcuuggacacaucagc

SEQ ID NO: 85601 - RNA, 19 nt, Artificial Sequence
  Description of Artificial Sequence: Synthetic oligonucleotide
uuggccuuaagcaaccacg

SEQ ID NO: 85602 - RNA, 19 nt, Artificial Sequence
  Description of Artificial Sequence: Synthetic oligonucleotide
uguaaagugcuuauucuca

SEQ ID NO: 85603 - RNA, 19 nt, Artificial Sequence
  Description of Artificial Sequence: Synthetic oligonucleotide
uuuauuguggcuugguugu

SEQ ID NO: 85604 - RNA, 19 nt, Artificial Sequence
  Description of Artificial Sequence: Synthetic oligonucleotide
uguucuacaaugcaaggaa

SEQ ID NO: 85605 - RNA, 19 nt, Artificial Sequence
  Description of Artificial Sequence: Synthetic oligonucleotide
aagggaucuaguauuuucc

SEQ ID NO: 85606 - RNA, 19 nt, Artificial Sequence
  Description of Artificial Sequence: Synthetic oligonucleotide
uugguuguagaacacauaa

SEQ ID NO: 85607 - RNA, 19 nt, Artificial Sequence
  Description of Artificial Sequence: Synthetic oligonucleotide
cucauuaagacucaagauc

SEQ ID NO: 85608 - RNA, 19 nt, Artificial Sequence
  Description of Artificial Sequence: Synthetic oligonucleotide
aaacuuggggcuacaagcc

SEQ ID NO: 85609 - RNA, 19 nt, Artificial Sequence
  Description of Artificial Sequence: Synthetic oligonucleotide
ugagccgugauucaauuga

SEQ ID NO: 85610 - RNA, 19 nt, Artificial Sequence
  Description of Artificial Sequence: Synthetic oligonucleotide
ugauucaauugauugaggu

SEQ ID NO: 85611 - RNA, 19 nt, Artificial Sequence
  Description of Artificial Sequence: Synthetic oligonucleotide
aucauuuauguugucaccg

SEQ ID NO: 85612 - RNA, 19 nt, Artificial Sequence
  Description of Artificial Sequence: Synthetic oligonucleotide
guuuauuguggcuugguug

SEQ ID NO: 85613 - RNA, 19 nt, Artificial Sequence
  Description of Artificial Sequence: Synthetic oligonucleotide
caacaugucagauaggcuc

SEQ ID NO: 85614 - RNA, 19 nt, Artificial Sequence
  Description of Artificial Sequence: Synthetic oligonucleotide
ucuacaaugcaaggaaggg

SEQ ID NO: 85615 - RNA, 19 nt, Artificial Sequence
  Description of Artificial Sequence: Synthetic oligonucleotide
ugcaacaugucagauaggc

SEQ ID NO: 85616 - RNA, 19 nt, Artificial Sequence
  Description of Artificial Sequence: Synthetic oligonucleotide
gaccucgacacccaguugg

SEQ ID NO: 85617 - RNA, 19 nt, Artificial Sequence
  Description of Artificial Sequence: Synthetic oligonucleotide
ugugagacuuacaacccag

SEQ ID NO: 85618 - RNA, 19 nt, Artificial Sequence
  Description of Artificial Sequence: Synthetic oligonucleotide
aaucagguaggcagaacgc

SEQ ID NO: 85619 - RNA, 19 nt, Artificial Sequence
  Description of Artificial Sequence: Synthetic oligonucleotide
ucauuuauguugucaccgg

SEQ ID NO: 85620 - RNA, 19 nt, Artificial Sequence
  Description of Artificial Sequence: Synthetic oligonucleotide
uguguaaagugcuuauucu

SEQ ID NO: 85621 - RNA, 19 nt, Artificial Sequence
  Description of Artificial Sequence: Synthetic oligonucleotide
agaaccuuagaucccaugu

SEQ ID NO: 85622 - RNA, 19 nt, Artificial Sequence
  Description of Artificial Sequence: Synthetic oligonucleotide
ugggauagacaguuuauug

SEQ ID NO: 85623 - RNA, 19 nt, Artificial Sequence
  Description of Artificial Sequence: Synthetic oligonucleotide
ucuugcacuacacgaaucu

SEQ ID NO: 85624 - RNA, 19 nt, Artificial Sequence
  Description of Artificial Sequence: Synthetic oligonucleotide
aaccacgagagcuucucuc

SEQ ID NO: 85625 - RNA, 19 nt, Artificial Sequence
  Description of Artificial Sequence: Synthetic oligonucleotide
ugcccgaugggaaacuugg

SEQ ID NO: 85626 - RNA, 19 nt, Artificial Sequence
  Description of Artificial Sequence: Synthetic oligonucleotide
accaccgaaucacugaauc

SEQ ID NO: 85627 - RNA, 19 nt, Artificial Sequence
  Description of Artificial Sequence: Synthetic oligonucleotide
aacaugucagauaggcucg

SEQ ID NO: 85628 - RNA, 19 nt, Artificial Sequence
  Description of Artificial Sequence: Synthetic oligonucleotide
accacgagagcuucucucc

SEQ ID NO: 85629 - RNA, 19 nt, Artificial Sequence
  Description of Artificial Sequence: Synthetic oligonucleotide
  modified_base (4)..(4): a, c, u, g, unknown or other
ugcncuugccugcacaggc

SEQ ID NO: 85630 - RNA, 19 nt, Artificial Sequence
  Description of Artificial Sequence: Synthetic oligonucleotide
ucucuaauggggccaaagc

SEQ ID NO: 85631 - RNA, 19 nt, Artificial Sequence
  Description of Artificial Sequence: Synthetic oligonucleotide
gauagacaguuuauugugg

SEQ ID NO: 85632 - RNA, 19 nt, Artificial Sequence
  Description of Artificial Sequence: Synthetic oligonucleotide
uacgggauguuucuuggag

SEQ ID NO: 85633 - RNA, 19 nt, Artificial Sequence
  Description of Artificial Sequence: Synthetic oligonucleotide
gagacuuacaacccaggug

SEQ ID NO: 85634 - RNA, 19 nt, Artificial Sequence
  Description of Artificial Sequence: Synthetic oligonucleotide
uguugcuuuggcagcaaag

SEQ ID NO: 85635 - RNA, 19 nt, Artificial Sequence
  Description of Artificial Sequence: Synthetic oligonucleotide
uucaaguuaggagaaaguc

SEQ ID NO: 85636 - RNA, 19 nt, Artificial Sequence
  Description of Artificial Sequence: Synthetic oligonucleotide
ucuaauggggccaaagcuu

SEQ ID NO: 85637 - RNA, 19 nt, Artificial Sequence
  Description of Artificial Sequence: Synthetic oligonucleotide
  modified_base (16)..(16): a, c, u, g, unknown or other
ugugaaaggaccugcncuu

SEQ ID NO: 85638 - RNA, 19 nt, Artificial Sequence
  Description of Artificial Sequence: Synthetic oligonucleotide
gacacccuaagucaagggc

SEQ ID NO: 85639 - RNA, 19 nt, Artificial Sequence
  Description of Artificial Sequence: Synthetic oligonucleotide
guaggcagaacgcaguuug

SEQ ID NO: 85640 - RNA, 19 nt, Artificial Sequence
  Description of Artificial Sequence: Synthetic oligonucleotide
cuuugugacugaagaaccg

SEQ ID NO: 85641 - RNA, 19 nt, Artificial Sequence
  Description of Artificial Sequence: Synthetic oligonucleotide
ugcuuugugacugaagaac

SEQ ID NO: 85642 - RNA, 19 nt, Artificial Sequence
  Description of Artificial Sequence: Synthetic oligonucleotide
cucgaagaggccuaccugc

SEQ ID NO: 85643 - RNA, 19 nt, Artificial Sequence
  Description of Artificial Sequence: Synthetic oligonucleotide
uaaccccucaacauguaca

SEQ ID NO: 85644 - RNA, 19 nt, Artificial Sequence
  Description of Artificial Sequence: Synthetic oligonucleotide
agaguccagccauuaauuc

SEQ ID NO: 85645 - RNA, 19 nt, Artificial Sequence
  Description of Artificial Sequence: Synthetic oligonucleotide
aauaguuucuuaacuaauu

SEQ ID NO: 85646 - RNA, 19 nt, Artificial Sequence
  Description of Artificial Sequence: Synthetic oligonucleotide
agugagucaaccucgucca

SEQ ID NO: 85647 - RNA, 19 nt, Artificial Sequence
  Description of Artificial Sequence: Synthetic oligonucleotide
uaagggaucuaguauuuuc

SEQ ID NO: 85648 - RNA, 19 nt, Artificial Sequence
  Description of Artificial Sequence: Synthetic oligonucleotide
auaaccccucaacauguac

SEQ ID NO: 85649 - RNA, 19 nt, Artificial Sequence
  Description of Artificial Sequence: Synthetic oligonucleotide
auaguaaaauucaccccgc

SEQ ID NO: 85650 - RNA, 19 nt, Artificial Sequence
  Description of Artificial Sequence: Synthetic oligonucleotide
guugugacacccuaaguca

SEQ ID NO: 85651 - RNA, 19 nt, Artificial Sequence
  Description of Artificial Sequence: Synthetic oligonucleotide
aggacgucuaccuugcuga

SEQ ID NO: 85652 - RNA, 19 nt, Artificial Sequence
  Description of Artificial Sequence: Synthetic oligonucleotide
acuacacgaaucuccacug

SEQ ID NO: 85653 - RNA, 19 nt, Artificial Sequence
  Description of Artificial Sequence: Synthetic oligonucleotide
cuucccgucaggaauuacc

SEQ ID NO: 85654 - RNA, 19 nt, Artificial Sequence
  Description of Artificial Sequence: Synthetic oligonucleotide
augucagauaggcucgaac

SEQ ID NO: 85655 - RNA, 19 nt, Artificial Sequence
  Description of Artificial Sequence: Synthetic oligonucleotide
uuucacaccgauguaagaa

SEQ ID NO: 85656 - RNA, 19 nt, Artificial Sequence
  Description of Artificial Sequence: Synthetic oligonucleotide
cuaauggggccaaagcuug

SEQ ID NO: 85657 - RNA, 19 nt, Artificial Sequence
  Description of Artificial Sequence: Synthetic oligonucleotide
uguugagaccucgacaccc

SEQ ID NO: 85658 - RNA, 19 nt, Artificial Sequence
  Description of Artificial Sequence: Synthetic oligonucleotide
augucuuagguaugcagug

SEQ ID NO: 85659 - RNA, 19 nt, Artificial Sequence
  Description of Artificial Sequence: Synthetic oligonucleotide
agcggcgacuaaaauaugc

SEQ ID NO: 85660 - RNA, 19 nt, Artificial Sequence
  Description of Artificial Sequence: Synthetic oligonucleotide
caaguaggguccaaccugc

SEQ ID NO: 85661 - RNA, 19 nt, Artificial Sequence
  Description of Artificial Sequence: Synthetic oligonucleotide
accucaguugcuuugggga

SEQ ID NO: 85662 - RNA, 19 nt, Artificial Sequence
  Description of Artificial Sequence: Synthetic oligonucleotide
ccuuaagcaaccacgagag

SEQ ID NO: 85663 - RNA, 19 nt, Artificial Sequence
  Description of Artificial Sequence: Synthetic oligonucleotide
cacauaaccccucaacaug

SEQ ID NO: 85664 - RNA, 19 nt, Artificial Sequence
  Description of Artificial Sequence: Synthetic oligonucleotide
aagaaccuuagaucccaug

SEQ ID NO: 85665 - RNA, 19 nt, Artificial Sequence
  Description of Artificial Sequence: Synthetic oligonucleotide
uuucagaugccugccaccc

SEQ ID NO: 85666 - RNA, 19 nt, Artificial Sequence
  Description of Artificial Sequence: Synthetic oligonucleotide
cucgacacccaguugguag

SEQ ID NO: 85667 - RNA, 19 nt, Artificial Sequence
  Description of Artificial Sequence: Synthetic oligonucleotide
  modified_base (11)..(11): a, c, u, g, unknown or other
aaggaccugcncuugccug

SEQ ID NO: 85668 - RNA, 19 nt, Artificial Sequence
  Description of Artificial Sequence: Synthetic oligonucleotide
  modified_base (18)..(18): a, c, u, g, unknown or other
ugugugaaaggaccugcnc

SEQ ID NO: 85669 - RNA, 19 nt, Artificial Sequence
  Description of Artificial Sequence: Synthetic oligonucleotide
acgucuaccuugcugaggu

SEQ ID NO: 85670 - RNA, 19 nt, Artificial Sequence
  Description of Artificial Sequence: Synthetic oligonucleotide
  modified_base (12)..(12): a, c, u, g, unknown or other
aaaggaccugcncuugccu

SEQ ID NO: 85671 - RNA, 19 nt, Artificial Sequence
  Description of Artificial Sequence: Synthetic oligonucleotide
aaccccucaacauguacaa

SEQ ID NO: 85672 - RNA, 19 nt, Artificial Sequence
  Description of Artificial Sequence: Synthetic oligonucleotide
ucuagguacucaaccacau

SEQ ID NO: 85673 - RNA, 19 nt, Artificial Sequence
  Description of Artificial Sequence: Synthetic oligonucleotide
guaggguccaaccugcuca

SEQ ID NO: 85674 - RNA, 19 nt, Artificial Sequence
  Description of Artificial Sequence: Synthetic oligonucleotide
ggaucuaguauuuuccuuc

SEQ ID NO: 85675 - RNA, 19 nt, Artificial Sequence
  Description of Artificial Sequence: Synthetic oligonucleotide
uggcgaagagucugcacgg

SEQ ID NO: 85676 - RNA, 19 nt, Artificial Sequence
  Description of Artificial Sequence: Synthetic oligonucleotide
ugacacccuaagucaaggg

SEQ ID NO: 85677 - RNA, 19 nt, Artificial Sequence
  Description of Artificial Sequence: Synthetic oligonucleotide
ggcgacuaaaauaugcagg

SEQ ID NO: 85678 - RNA, 19 nt, Artificial Sequence
  Description of Artificial Sequence: Synthetic oligonucleotide
gaucuaguauuuuccuuca

SEQ ID NO: 85679 - RNA, 19 nt, Artificial Sequence
  Description of Artificial Sequence: Synthetic oligonucleotide
caccgauguaagaaucugg

SEQ ID NO: 85680 - RNA, 19 nt, Artificial Sequence
  Description of Artificial Sequence: Synthetic oligonucleotide
uggccuuaagcaaccacga

SEQ ID NO: 85681 - RNA, 19 nt, Artificial Sequence
  Description of Artificial Sequence: Synthetic oligonucleotide
cuugugugaaaggaccugc

SEQ ID NO: 85682 - RNA, 19 nt, Artificial Sequence
  Description of Artificial Sequence: Synthetic oligonucleotide
ugacucacugacacauuug

SEQ ID NO: 85683 - RNA, 19 nt, Artificial Sequence
  Description of Artificial Sequence: Synthetic oligonucleotide
uggcgauugcacagggagg

SEQ ID NO: 85684 - RNA, 19 nt, Artificial Sequence
  Description of Artificial Sequence: Synthetic oligonucleotide
uaguagguguuguucauua

SEQ ID NO: 85685 - RNA, 19 nt, Artificial Sequence
  Description of Artificial Sequence: Synthetic oligonucleotide
gccgugauucaauugauug

SEQ ID NO: 85686 - RNA, 19 nt, Artificial Sequence
  Description of Artificial Sequence: Synthetic oligonucleotide
cauggcgauaggcagcggc

SEQ ID NO: 85687 - RNA, 19 nt, Artificial Sequence
  Description of Artificial Sequence: Synthetic oligonucleotide
cugguugugacacccuaag

SEQ ID NO: 85688 - RNA, 19 nt, Artificial Sequence
  Description of Artificial Sequence: Synthetic oligonucleotide
aacaaggggucucacugua

SEQ ID NO: 85689 - RNA, 19 nt, Artificial Sequence
  Description of Artificial Sequence: Synthetic oligonucleotide
uagacaguuuauuguggcu

SEQ ID NO: 85690 - RNA, 19 nt, Artificial Sequence
  Description of Artificial Sequence: Synthetic oligonucleotide
caccgaaucacugaaucug

SEQ ID NO: 85691 - RNA, 19 nt, Artificial Sequence
  Description of Artificial Sequence: Synthetic oligonucleotide
agcggcagucauuuucuuc

SEQ ID NO: 85692 - RNA, 19 nt, Artificial Sequence
  Description of Artificial Sequence: Synthetic oligonucleotide
uggacuagccuugagccgu

SEQ ID NO: 85693 - RNA, 19 nt, Artificial Sequence
  Description of Artificial Sequence: Synthetic oligonucleotide
auuguguagcauugugccu

SEQ ID NO: 85694 - RNA, 19 nt, Artificial Sequence
  Description of Artificial Sequence: Synthetic oligonucleotide
gcggcagucauuuucuucc

SEQ ID NO: 85695 - RNA, 19 nt, Artificial Sequence
  Description of Artificial Sequence: Synthetic oligonucleotide
uucaauugauugaggucaa

SEQ ID NO: 85696 - RNA, 19 nt, Artificial Sequence
  Description of Artificial Sequence: Synthetic oligonucleotide
uucagaugccugccacccg

SEQ ID NO: 85697 - RNA, 19 nt, Artificial Sequence
  Description of Artificial Sequence: Synthetic oligonucleotide
uugugacacccuaagucaa

SEQ ID NO: 85698 - RNA, 19 nt, Artificial Sequence
  Description of Artificial Sequence: Synthetic oligonucleotide
gcaaaggggagaccaauag

SEQ ID NO: 85699 - RNA, 19 nt, Artificial Sequence
  Description of Artificial Sequence: Synthetic oligonucleotide
gauggcacauggcgauagg

SEQ ID NO: 85700 - RNA, 19 nt, Artificial Sequence
  Description of Artificial Sequence: Synthetic oligonucleotide
uugagccgugauucaauug

SEQ ID NO: 85701 - RNA, 19 nt, Artificial Sequence
  Description of Artificial Sequence: Synthetic oligonucleotide
gaaucgagcccagucuuug

SEQ ID NO: 85702 - RNA, 19 nt, Artificial Sequence
  Description of Artificial Sequence: Synthetic oligonucleotide
accgauguaagaaucuggu

SEQ ID NO: 85703 - RNA, 19 nt, Artificial Sequence
  Description of Artificial Sequence: Synthetic oligonucleotide
acauaaccccucaacaugu

SEQ ID NO: 85704 - RNA, 19 nt, Artificial Sequence
  Description of Artificial Sequence: Synthetic oligonucleotide
aaucgagcccagucuuugu

SEQ ID NO: 85705 - RNA, 19 nt, Artificial Sequence
  Description of Artificial Sequence: Synthetic oligonucleotide
ccuuagaucccauguacag

SEQ ID NO: 85706 - RNA, 19 nt, Artificial Sequence
  Description of Artificial Sequence: Synthetic oligonucleotide
cuaccaucucuuucccuag

SEQ ID NO: 85707 - RNA, 19 nt, Artificial Sequence
  Description of Artificial Sequence: Synthetic oligonucleotide
uugucaccggagcuuucag

SEQ ID NO: 85708 - RNA, 19 nt, Artificial Sequence
  Description of Artificial Sequence: Synthetic oligonucleotide
caccucaguugcuuugggg

SEQ ID NO: 85709 - RNA, 19 nt, Artificial Sequence
  Description of Artificial Sequence: Synthetic oligonucleotide
ugucgaaucucaccauauu

SEQ ID NO: 85710 - RNA, 19 nt, Artificial Sequence
  Description of Artificial Sequence: Synthetic oligonucleotide
ugguugugacacccuaagu

SEQ ID NO: 85711 - RNA, 19 nt, Artificial Sequence
  Description of Artificial Sequence: Synthetic oligonucleotide
gaaccuuagaucccaugua

SEQ ID NO: 85712 - RNA, 19 nt, Artificial Sequence
  Description of Artificial Sequence: Synthetic oligonucleotide
cuacacgaaucuccacugc

SEQ ID NO: 85713 - RNA, 19 nt, Artificial Sequence
  Description of Artificial Sequence: Synthetic oligonucleotide
ugucuuagguaugcagugu

SEQ ID NO: 85714 - RNA, 19 nt, Artificial Sequence
  Description of Artificial Sequence: Synthetic oligonucleotide
acuugugugaaaggaccug

SEQ ID NO: 85715 - RNA, 19 nt, Artificial Sequence
  Description of Artificial Sequence: Synthetic oligonucleotide
auggcgauaggcagcggcg

SEQ ID NO: 85716 - RNA, 19 nt, Artificial Sequence
  Description of Artificial Sequence: Synthetic oligonucleotide
acacccaguugguaguacu

SEQ ID NO: 85717 - RNA, 19 nt, Artificial Sequence
  Description of Artificial Sequence: Synthetic oligonucleotide
cuuaagcaaccacgagagc

SEQ ID NO: 85718 - RNA, 19 nt, Artificial Sequence
  Description of Artificial Sequence: Synthetic oligonucleotide
gauccauuccaccucaguu

SEQ ID NO: 85719 - RNA, 19 nt, Artificial Sequence
  Description of Artificial Sequence: Synthetic oligonucleotide
cacccuaagucaagggcug

SEQ ID NO: 85720 - RNA, 19 nt, Artificial Sequence
  Description of Artificial Sequence: Synthetic oligonucleotide
uggggcuacaagccuuucu

SEQ ID NO: 85721 - RNA, 19 nt, Artificial Sequence
  Description of Artificial Sequence: Synthetic oligonucleotide
ucagauaggcucgaaccuu

SEQ ID NO: 85722 - RNA, 19 nt, Artificial Sequence
  Description of Artificial Sequence: Synthetic oligonucleotide
agguguguaaagugcuuau

SEQ ID NO: 85723 - RNA, 19 nt, Artificial Sequence
  Description of Artificial Sequence: Synthetic oligonucleotide
cauuuauguugucaccgga

SEQ ID NO: 85724 - RNA, 19 nt, Artificial Sequence
  Description of Artificial Sequence: Synthetic oligonucleotide
guuugcaacaugucagaua

SEQ ID NO: 85725 - RNA, 19 nt, Artificial Sequence
  Description of Artificial Sequence: Synthetic oligonucleotide
guaggacuuugcuuuguga

SEQ ID NO: 85726 - RNA, 19 nt, Artificial Sequence
  Description of Artificial Sequence: Synthetic oligonucleotide
gccuuaagcaaccacgaga

SEQ ID NO: 85727 - RNA, 19 nt, Artificial Sequence
  Description of Artificial Sequence: Synthetic oligonucleotide
caggacgucuaccuugcug

SEQ ID NO: 85728 - RNA, 19 nt, Artificial Sequence
  Description of Artificial Sequence: Synthetic oligonucleotide
caguuaaggaggauggugu

SEQ ID NO: 85729 - RNA, 19 nt, Artificial Sequence
  Description of Artificial Sequence: Synthetic oligonucleotide
  modified_base (7)..(7): a, c, u, g, unknown or other
accugcncuugccugcaca

SEQ ID NO: 85730 - RNA, 19 nt, Artificial Sequence
  Description of Artificial Sequence: Synthetic oligonucleotide
agaacacauaaccccucaa

SEQ ID NO: 85731 - RNA, 19 nt, Artificial Sequence
  Description of Artificial Sequence: Synthetic oligonucleotide
cucuaauggggccaaagcu

SEQ ID NO: 85732 - RNA, 19 nt, Artificial Sequence
  Description of Artificial Sequence: Synthetic oligonucleotide
ucaccggagcuuucagaug

SEQ ID NO: 85733 - RNA, 19 nt, Artificial Sequence
  Description of Artificial Sequence: Synthetic oligonucleotide
gcuuugacgaacaucaucu

SEQ ID NO: 85734 - RNA, 19 nt, Artificial Sequence
  Description of Artificial Sequence: Synthetic oligonucleotide
gucagaagccacugagcac

SEQ ID NO: 85735 - RNA, 19 nt, Artificial Sequence
  Description of Artificial Sequence: Synthetic oligonucleotide
cccgaugggaaacuugggg

SEQ ID NO: 85736 - RNA, 19 nt, Artificial Sequence
  Description of Artificial Sequence: Synthetic oligonucleotide
ucauaugcuuggacacauc

SEQ ID NO: 85737 - RNA, 19 nt, Artificial Sequence
  Description of Artificial Sequence: Synthetic oligonucleotide
aguagguguuguucauuau

SEQ ID NO: 85738 - RNA, 19 nt, Artificial Sequence
  Description of Artificial Sequence: Synthetic oligonucleotide
ugucaucgcuguguauugc

SEQ ID NO: 85739 - RNA, 19 nt, Artificial Sequence
  Description of Artificial Sequence: Synthetic oligonucleotide
cuagguacucaaccacauc

SEQ ID NO: 85740 - RNA, 19 nt, Artificial Sequence
  Description of Artificial Sequence: Synthetic oligonucleotide
gaguguaagcagacaccag

SEQ ID NO: 85741 - RNA, 19 nt, Artificial Sequence
  Description of Artificial Sequence: Synthetic oligonucleotide
gccugguuacugcagcugg

SEQ ID NO: 85742 - RNA, 19 nt, Artificial Sequence
  Description of Artificial Sequence: Synthetic oligonucleotide
caaggggucucacuguaga

SEQ ID NO: 85743 - RNA, 19 nt, Artificial Sequence
  Description of Artificial Sequence: Synthetic oligonucleotide
cuugugagagguguugcca

SEQ ID NO: 85744 - RNA, 19 nt, Artificial Sequence
  Description of Artificial Sequence: Synthetic oligonucleotide
gggauagacaguuuauugu

SEQ ID NO: 85745 - RNA, 19 nt, Artificial Sequence
  Description of Artificial Sequence: Synthetic oligonucleotide
cuugcacuacacgaaucuc

SEQ ID NO: 85746 - RNA, 19 nt, Artificial Sequence
  Description of Artificial Sequence: Synthetic oligonucleotide
gugcuuauucucagugcag

SEQ ID NO: 85747 - RNA, 19 nt, Artificial Sequence
  Description of Artificial Sequence: Synthetic oligonucleotide
cacuacacgaaucuccacu

SEQ ID NO: 85748 - RNA, 19 nt, Artificial Sequence
  Description of Artificial Sequence: Synthetic oligonucleotide
accuuagaucccauguaca

SEQ ID NO: 85749 - RNA, 19 nt, Artificial Sequence
  Description of Artificial Sequence: Synthetic oligonucleotide
aucugguugugacacccua

SEQ ID NO: 85750 - RNA, 19 nt, Artificial Sequence
  Description of Artificial Sequence: Synthetic oligonucleotide
ugaucgcuuuucccucaga

SEQ ID NO: 85751 - RNA, 19 nt, Artificial Sequence
  Description of Artificial Sequence: Synthetic oligonucleotide
accgaaucacugaaucuga

SEQ ID NO: 85752 - RNA, 19 nt, Artificial Sequence
  Description of Artificial Sequence: Synthetic oligonucleotide
uccugcggcgggauucucu

SEQ ID NO: 85753 - RNA, 19 nt, Artificial Sequence
  Description of Artificial Sequence: Synthetic oligonucleotide
aggcagaacgcaguuugca

SEQ ID NO: 85754 - RNA, 19 nt, Artificial Sequence
  Description of Artificial Sequence: Synthetic oligonucleotide
cuuacaacccaggugugua

SEQ ID NO: 85755 - RNA, 19 nt, Artificial Sequence
  Description of Artificial Sequence: Synthetic oligonucleotide
aucgagcccagucuuuguu

SEQ ID NO: 85756 - RNA, 19 nt, Artificial Sequence
  Description of Artificial Sequence: Synthetic oligonucleotide
uuccggagcuacgggaugu

SEQ ID NO: 85757 - RNA, 19 nt, Artificial Sequence
  Description of Artificial Sequence: Synthetic oligonucleotide
cugugagacuuacaaccca

SEQ ID NO: 85758 - RNA, 19 nt, Artificial Sequence
  Description of Artificial Sequence: Synthetic oligonucleotide
ugccaugccccuguggaau

SEQ ID NO: 85759 - RNA, 19 nt, Artificial Sequence
  Description of Artificial Sequence: Synthetic oligonucleotide
gccauuaauucagucccag

SEQ ID NO: 85760 - RNA, 19 nt, Artificial Sequence
  Description of Artificial Sequence: Synthetic oligonucleotide
cugacuucaguuuccaguu

SEQ ID NO: 85761 - RNA, 19 nt, Artificial Sequence
  Description of Artificial Sequence: Synthetic oligonucleotide
cuugguuguagaacacaua

SEQ ID NO: 85762 - RNA, 19 nt, Artificial Sequence
  Description of Artificial Sequence: Synthetic oligonucleotide
gcacccuuaagggaucuag

SEQ ID NO: 85763 - RNA, 19 nt, Artificial Sequence
  Description of Artificial Sequence: Synthetic oligonucleotide
cugaucgcuuuucccucag

SEQ ID NO: 85764 - RNA, 19 nt, Artificial Sequence
  Description of Artificial Sequence: Synthetic oligonucleotide
agcucugcccgaugggaaa

SEQ ID NO: 85765 - RNA, 19 nt, Artificial Sequence
  Description of Artificial Sequence: Synthetic oligonucleotide
  modified_base (6)..(6): a, c, u, g, unknown or other
ccugcncuugccugcacag

SEQ ID NO: 85766 - RNA, 19 nt, Artificial Sequence
  Description of Artificial Sequence: Synthetic oligonucleotide
ucgaucagcuggugaccac

SEQ ID NO: 85767 - RNA, 19 nt, Artificial Sequence
  Description of Artificial Sequence: Synthetic oligonucleotide
gugagucaaccucguccag

SEQ ID NO: 85768 - RNA, 19 nt, Artificial Sequence
  Description of Artificial Sequence: Synthetic oligonucleotide
caggcaaguaggguccaac

SEQ ID NO: 85769 - RNA, 19 nt, Artificial Sequence
  Description of Artificial Sequence: Synthetic oligonucleotide
  modified_base (5)..(5): a, c, u, g, unknown or other
cugcncuugccugcacagg

SEQ ID NO: 85770 - RNA, 19 nt, Artificial Sequence
  Description of Artificial Sequence: Synthetic oligonucleotide
ggcagcggcgacuaaaaua

SEQ ID NO: 85771 - RNA, 19 nt, Artificial Sequence
  Description of Artificial Sequence: Synthetic oligonucleotide
agcugucgaaucucaccau

SEQ ID NO: 85772 - RNA, 19 nt, Artificial Sequence
  Description of Artificial Sequence: Synthetic oligonucleotide
acuagccuugagccgugau

SEQ ID NO: 85773 - RNA, 19 nt, Artificial Sequence
  Description of Artificial Sequence: Synthetic oligonucleotide
guugagaccucgacaccca

SEQ ID NO: 85774 - RNA, 19 nt, Artificial Sequence
  Description of Artificial Sequence: Synthetic oligonucleotide
cuuagaucccauguacagu

SEQ ID NO: 85775 - RNA, 19 nt, Artificial Sequence
  Description of Artificial Sequence: Synthetic oligonucleotide
ggucaaacugcacccuuaa

SEQ ID NO: 85776 - RNA, 19 nt, Artificial Sequence
  Description of Artificial Sequence: Synthetic oligonucleotide
ccugguuacugcagcuggc

SEQ ID NO: 85777 - RNA, 19 nt, Artificial Sequence
  Description of Artificial Sequence: Synthetic oligonucleotide
gcagcggcgacuaaaauau

SEQ ID NO: 85778 - RNA, 19 nt, Artificial Sequence
  Description of Artificial Sequence: Synthetic oligonucleotide
cucgaucagcuggugacca

SEQ ID NO: 85779 - RNA, 19 nt, Artificial Sequence
  Description of Artificial Sequence: Synthetic oligonucleotide
cuacgggauguuucuugga

SEQ ID NO: 85780 - RNA, 19 nt, Artificial Sequence
  Description of Artificial Sequence: Synthetic oligonucleotide
gggaguggcuugucagaag

SEQ ID NO: 85781 - RNA, 19 nt, Artificial Sequence
  Description of Artificial Sequence: Synthetic oligonucleotide
ggacgucuaccuugcugag

SEQ ID NO: 85782 - RNA, 19 nt, Artificial Sequence
  Description of Artificial Sequence: Synthetic oligonucleotide
augccaugccccuguggaa

SEQ ID NO: 85783 - RNA, 19 nt, Artificial Sequence
  Description of Artificial Sequence: Synthetic oligonucleotide
agccauuaauucaguccca

SEQ ID NO: 85784 - RNA, 19 nt, Artificial Sequence
  Description of Artificial Sequence: Synthetic oligonucleotide
gggcugugagacuuacaac

SEQ ID NO: 85785 - RNA, 19 nt, Artificial Sequence
  Description of Artificial Sequence: Synthetic oligonucleotide
cggcgacuaaaauaugcag

SEQ ID NO: 85786 - RNA, 19 nt, Artificial Sequence
  Description of Artificial Sequence: Synthetic oligonucleotide
ucuucccgucaggaauuac

SEQ ID NO: 85787 - RNA, 19 nt, Artificial Sequence
  Description of Artificial Sequence: Synthetic oligonucleotide
caugagggauagagaaaua

SEQ ID NO: 85788 - RNA, 19 nt, Artificial Sequence
  Description of Artificial Sequence: Synthetic oligonucleotide
cugacucacugacacauuu

SEQ ID NO: 85789 - RNA, 19 nt, Artificial Sequence
  Description of Artificial Sequence: Synthetic oligonucleotide
guagugccucauguuagaa

SEQ ID NO: 85790 - RNA, 19 nt, Artificial Sequence
  Description of Artificial Sequence: Synthetic oligonucleotide
ccuccgcucuggaugaaug

SEQ ID NO: 85791 - RNA, 19 nt, Artificial Sequence
  Description of Artificial Sequence: Synthetic oligonucleotide
gcggcgacuaaaauaugca

SEQ ID NO: 85792 - RNA, 19 nt, Artificial Sequence
  Description of Artificial Sequence: Synthetic oligonucleotide
ccacgagagcuucucuccc

SEQ ID NO: 85793 - RNA, 19 nt, Artificial Sequence
  Description of Artificial Sequence: Synthetic oligonucleotide
cauaaccccucaacaugua

SEQ ID NO: 85794 - RNA, 19 nt, Artificial Sequence
  Description of Artificial Sequence: Synthetic oligonucleotide
aggucaaacugcacccuua

SEQ ID NO: 85795 - RNA, 19 nt, Artificial Sequence
  Description of Artificial Sequence: Synthetic oligonucleotide
cucauguuagaagucugau

SEQ ID NO: 85796 - RNA, 19 nt, Artificial Sequence
  Description of Artificial Sequence: Synthetic oligonucleotide
cuugagccgugauucaauu

SEQ ID NO: 85797 - RNA, 19 nt, Artificial Sequence
  Description of Artificial Sequence: Synthetic oligonucleotide
ggcgauugcacagggaggu

SEQ ID NO: 85798 - RNA, 19 nt, Artificial Sequence
  Description of Artificial Sequence: Synthetic oligonucleotide
cagcggcgacuaaaauaug

SEQ ID NO: 85799 - RNA, 19 nt, Artificial Sequence
  Description of Artificial Sequence: Synthetic oligonucleotide
augccccaggcaugccaug

SEQ ID NO: 85800 - RNA, 19 nt, Artificial Sequence
  Description of Artificial Sequence: Synthetic oligonucleotide
ggcuugguuguagaacaca

SEQ ID NO: 85801 - RNA, 19 nt, Artificial Sequence
  Description of Artificial Sequence: Synthetic oligonucleotide
accucgacacccaguuggu

SEQ ID NO: 85802 - RNA, 19 nt, Artificial Sequence
  Description of Artificial Sequence: Synthetic oligonucleotide
ggggcuacaagccuuucuu

SEQ ID NO: 85803 - RNA, 19 nt, Artificial Sequence
  Description of Artificial Sequence: Synthetic oligonucleotide
gcucgaucagcuggugacc

SEQ ID NO: 85804 - RNA, 19 nt, Artificial Sequence
  Description of Artificial Sequence: Synthetic oligonucleotide
uccuccgcucuggaugaau

SEQ ID NO: 85805 - RNA, 19 nt, Artificial Sequence
  Description of Artificial Sequence: Synthetic oligonucleotide
acccuaagucaagggcugu

SEQ ID NO: 85806 - RNA, 19 nt, Artificial Sequence
  Description of Artificial Sequence: Synthetic oligonucleotide
agccgugauucaauugauu

SEQ ID NO: 85807 - RNA, 19 nt, Artificial Sequence
  Description of Artificial Sequence: Synthetic oligonucleotide
gauaggcagcggcgacuaa

SEQ ID NO: 85808 - RNA, 19 nt, Artificial Sequence
  Description of Artificial Sequence: Synthetic oligonucleotide
ccaauaggcugagcucugc

SEQ ID NO: 85809 - RNA, 19 nt, Artificial Sequence
  Description of Artificial Sequence: Synthetic oligonucleotide
gcacuacacgaaucuccac

SEQ ID NO: 85810 - RNA, 19 nt, Artificial Sequence
  Description of Artificial Sequence: Synthetic oligonucleotide
  modified_base (8)..(8): a, c, u, g, unknown or other
gaccugcncuugccugcac

SEQ ID NO: 85811 - RNA, 19 nt, Artificial Sequence
  Description of Artificial Sequence: Synthetic oligonucleotide
cuuugacgaacaucaucuu

SEQ ID NO: 85812 - RNA, 19 nt, Artificial Sequence
  Description of Artificial Sequence: Synthetic oligonucleotide
cugcggcgggauucucuug

SEQ ID NO: 85813 - RNA, 19 nt, Artificial Sequence
  Description of Artificial Sequence: Synthetic oligonucleotide
gguucccagcuuugaggca

SEQ ID NO: 85814 - RNA, 19 nt, Artificial Sequence
  Description of Artificial Sequence: Synthetic oligonucleotide
cuuccucauuaagacucaa

SEQ ID NO: 85815 - RNA, 19 nt, Artificial Sequence
  Description of Artificial Sequence: Synthetic oligonucleotide
ccuaagucaagggcuguga

SEQ ID NO: 85816 - RNA, 19 nt, Artificial Sequence
  Description of Artificial Sequence: Synthetic oligonucleotide
ugccacccgagagccuugu

SEQ ID NO: 85817 - RNA, 19 nt, Artificial Sequence
  Description of Artificial Sequence: Synthetic oligonucleotide
caugccccaggcaugccau

SEQ ID NO: 85818 - RNA, 19 nt, Artificial Sequence
  Description of Artificial Sequence: Synthetic oligonucleotide
uuggggcuacaagccuuuc

SEQ ID NO: 85819 - RNA, 19 nt, Artificial Sequence
  Description of Artificial Sequence: Synthetic oligonucleotide
ugcacccuuaagggaucua

SEQ ID NO: 85820 - RNA, 19 nt, Artificial Sequence
  Description of Artificial Sequence: Synthetic oligonucleotide
aucuucccgucaggaauua

SEQ ID NO: 85821 - RNA, 19 nt, Artificial Sequence
  Description of Artificial Sequence: Synthetic oligonucleotide
gagccgugauucaauugau

SEQ ID NO: 85822 - RNA, 19 nt, Artificial Sequence
  Description of Artificial Sequence: Synthetic oligonucleotide
cgacuaaaauaugcaggac

SEQ ID NO: 85823 - RNA, 19 nt, Artificial Sequence
  Description of Artificial Sequence: Synthetic oligonucleotide
ggugggauagacaguuuau

SEQ ID NO: 85824 - RNA, 19 nt, Artificial Sequence
  Description of Artificial Sequence: Synthetic oligonucleotide
caugucagauaggcucgaa

SEQ ID NO: 85825 - RNA, 19 nt, Artificial Sequence
  Description of Artificial Sequence: Synthetic oligonucleotide
ccaccaccgaaucacugaa

SEQ ID NO: 85826 - RNA, 19 nt, Artificial Sequence
  Description of Artificial Sequence: Synthetic oligonucleotide
gcucugcccgaugggaaac

SEQ ID NO: 85827 - RNA, 19 nt, Artificial Sequence
  Description of Artificial Sequence: Synthetic oligonucleotide
ggcaugccaugccccugug

SEQ ID NO: 85828 - RNA, 19 nt, Artificial Sequence
  Description of Artificial Sequence: Synthetic oligonucleotide
guguaggacuuugcuuugu

SEQ ID NO: 85829 - RNA, 19 nt, Artificial Sequence
  Description of Artificial Sequence: Synthetic oligonucleotide
aggcagcgacugaacuucu

SEQ ID NO: 85830 - RNA, 19 nt, Artificial Sequence
  Description of Artificial Sequence: Synthetic oligonucleotide
ccgucaggaauuaccucaa

SEQ ID NO: 85831 - RNA, 19 nt, Artificial Sequence
  Description of Artificial Sequence: Synthetic oligonucleotide
ccaccgaaucacugaaucu

SEQ ID NO: 85832 - RNA, 19 nt, Artificial Sequence
  Description of Artificial Sequence: Synthetic oligonucleotide
ggcagcgacugaacuucuc

SEQ ID NO: 85833 - RNA, 19 nt, Artificial Sequence
  Description of Artificial Sequence: Synthetic oligonucleotide
uuccuccgcucuggaugaa

SEQ ID NO: 85834 - RNA, 19 nt, Artificial Sequence
  Description of Artificial Sequence: Synthetic oligonucleotide
caccaccgaaucacugaau

SEQ ID NO: 85835 - RNA, 19 nt, Artificial Sequence
  Description of Artificial Sequence: Synthetic oligonucleotide
cggcgggauucucuugaag

SEQ ID NO: 85836 - RNA, 19 nt, Artificial Sequence
  Description of Artificial Sequence: Synthetic oligonucleotide
gccacccgagagccuugug

SEQ ID NO: 85837 - RNA, 19 nt, Artificial Sequence
  Description of Artificial Sequence: Synthetic oligonucleotide
gguccgaaggguggcuucu

SEQ ID NO: 85838 - RNA, 19 nt, Artificial Sequence
  Description of Artificial Sequence: Synthetic oligonucleotide
ccacgggaguggcuuguca

SEQ ID NO: 85839 - RNA, 19 nt, Artificial Sequence
  Description of Artificial Sequence: Synthetic oligonucleotide
gcgauugcacagggagguc

SEQ ID NO: 85840 - RNA, 19 nt, Artificial Sequence
  Description of Artificial Sequence: Synthetic oligonucleotide
guccgaaggguggcuucua

SEQ ID NO: 85841 - RNA, 19 nt, Artificial Sequence
  Description of Artificial Sequence: Synthetic oligonucleotide
ggaaucgagcccagucuuu

SEQ ID NO: 85842 - RNA, 19 nt, Artificial Sequence
  Description of Artificial Sequence: Synthetic oligonucleotide
cugcacccuuaagggaucu

SEQ ID NO: 85843 - RNA, 19 nt, Artificial Sequence
  Description of Artificial Sequence: Synthetic oligonucleotide
cuccugcggcgggauucuc

SEQ ID NO: 85844 - RNA, 19 nt, Artificial Sequence
  Description of Artificial Sequence: Synthetic oligonucleotide
cuggacgagggcggcggcu

SEQ ID NO: 85845 - RNA, 19 nt, Artificial Sequence
  Description of Artificial Sequence: Synthetic oligonucleotide
gacggacauggagggcauu

SEQ ID NO: 85846 - RNA, 19 nt, Artificial Sequence
  Description of Artificial Sequence: Synthetic oligonucleotide
ggcggcggcuugugagugu

SEQ ID NO: 85847 - RNA, 19 nt, Artificial Sequence
  Description of Artificial Sequence: Synthetic oligonucleotide
gcuccugcggcgggauucu

SEQ ID NO: 85848 - RNA, 19 nt, Artificial Sequence
  Description of Artificial Sequence: Synthetic oligonucleotide
ccucgacacccaguuggua

SEQ ID NO: 85849 - RNA, 19 nt, Artificial Sequence
  Description of Artificial Sequence: Synthetic oligonucleotide
ccggagcuacgggauguuu

SEQ ID NO: 85850 - RNA, 19 nt, Artificial Sequence
  Description of Artificial Sequence: Synthetic oligonucleotide
gugacuaucaaguuaaagg

SEQ ID NO: 85851 - RNA, 19 nt, Artificial Sequence
  Description of Artificial Sequence: Synthetic oligonucleotide
uauaacauagcaaugucca

SEQ ID NO: 85852 - RNA, 19 nt, Artificial Sequence
  Description of Artificial Sequence: Synthetic oligonucleotide
aauagguuauaacauagca

SEQ ID NO: 85853 - RNA, 19 nt, Artificial Sequence
  Description of Artificial Sequence: Synthetic oligonucleotide
auuacuuugguaaauuucc

SEQ ID NO: 85854 - RNA, 19 nt, Artificial Sequence
  Description of Artificial Sequence: Synthetic oligonucleotide
auuaccagaacuugguccc

SEQ ID NO: 85855 - RNA, 19 nt, Artificial Sequence
  Description of Artificial Sequence: Synthetic oligonucleotide
uuuccguuuacccaagugg

SEQ ID NO: 85856 - RNA, 19 nt, Artificial Sequence
  Description of Artificial Sequence: Synthetic oligonucleotide
gagaccaaguuguagaugg

SEQ ID NO: 85857 - RNA, 19 nt, Artificial Sequence
  Description of Artificial Sequence: Synthetic oligonucleotide
aaacugauaaguuuauaca

SEQ ID NO: 85858 - RNA, 19 nt, Artificial Sequence
  Description of Artificial Sequence: Synthetic oligonucleotide
uuauagcuaacucugaccu

SEQ ID NO: 85859 - RNA, 19 nt, Artificial Sequence
  Description of Artificial Sequence: Synthetic oligonucleotide
agauuugccacuuuaguag

SEQ ID NO: 85860 - RNA, 19 nt, Artificial Sequence
  Description of Artificial Sequence: Synthetic oligonucleotide
aauuacguucauguguugc

SEQ ID NO: 85861 - RNA, 19 nt, Artificial Sequence
  Description of Artificial Sequence: Synthetic oligonucleotide
uagguuauaacauagcaau

SEQ ID NO: 85862 - RNA, 19 nt, Artificial Sequence
  Description of Artificial Sequence: Synthetic oligonucleotide
aagaguuccucccacgccg

SEQ ID NO: 85863 - RNA, 19 nt, Artificial Sequence
  Description of Artificial Sequence: Synthetic oligonucleotide
acuauuaaaauauaugcuu

SEQ ID NO: 85864 - RNA, 19 nt, Artificial Sequence
  Description of Artificial Sequence: Synthetic oligonucleotide
uguuaggagaccaaguugu

SEQ ID NO: 85865 - RNA, 19 nt, Artificial Sequence
  Description of Artificial Sequence: Synthetic oligonucleotide
augaguaacuacuacuggg

SEQ ID NO: 85866 - RNA, 19 nt, Artificial Sequence
  Description of Artificial Sequence: Synthetic oligonucleotide
ugaaaucuagaucuucgag

SEQ ID NO: 85867 - RNA, 19 nt, Artificial Sequence
  Description of Artificial Sequence: Synthetic oligonucleotide
uuacagaccacaaucuggc

SEQ ID NO: 85868 - RNA, 19 nt, Artificial Sequence
  Description of Artificial Sequence: Synthetic oligonucleotide
ugaguaacuacuacugggc

SEQ ID NO: 85869 - RNA, 19 nt, Artificial Sequence
  Description of Artificial Sequence: Synthetic oligonucleotide
ucaguaaggguacacguug

SEQ ID NO: 85870 - RNA, 19 nt, Artificial Sequence
  Description of Artificial Sequence: Synthetic oligonucleotide
uuaggauauauuacagacc

SEQ ID NO: 85871 - RNA, 19 nt, Artificial Sequence
  Description of Artificial Sequence: Synthetic oligonucleotide
uagacuguucucuugagga

SEQ ID NO: 85872 - RNA, 19 nt, Artificial Sequence
  Description of Artificial Sequence: Synthetic oligonucleotide
aaugugacuaucaaguuaa

SEQ ID NO: 85873 - RNA, 19 nt, Artificial Sequence
  Description of Artificial Sequence: Synthetic oligonucleotide
agaacuuggucccugaacu

SEQ ID NO: 85874 - RNA, 19 nt, Artificial Sequence
  Description of Artificial Sequence: Synthetic oligonucleotide
caaaggagcaugcacaccc

SEQ ID NO: 85875 - RNA, 19 nt, Artificial Sequence
  Description of Artificial Sequence: Synthetic oligonucleotide
aaguuguagauggagaaug

SEQ ID NO: 85876 - RNA, 19 nt, Artificial Sequence
  Description of Artificial Sequence: Synthetic oligonucleotide
uguguagucauguuauuac

SEQ ID NO: 85877 - RNA, 19 nt, Artificial Sequence
  Description of Artificial Sequence: Synthetic oligonucleotide
uacugagucaugaucaaga

SEQ ID NO: 85878 - RNA, 19 nt, Artificial Sequence
  Description of Artificial Sequence: Synthetic oligonucleotide
ucgaguacgaggcuuuggg

SEQ ID NO: 85879 - RNA, 19 nt, Artificial Sequence
  Description of Artificial Sequence: Synthetic oligonucleotide
aagucaagucaauacugag

SEQ ID NO: 85880 - RNA, 19 nt, Artificial Sequence
  Description of Artificial Sequence: Synthetic oligonucleotide
aauugcacuuugcagacau

SEQ ID NO: 85881 - RNA, 19 nt, Artificial Sequence
  Description of Artificial Sequence: Synthetic oligonucleotide
uagauauagaaguugcagu

SEQ ID NO: 85882 - RNA, 19 nt, Artificial Sequence
  Description of Artificial Sequence: Synthetic oligonucleotide
augaaguauuaccagaacu

SEQ ID NO: 85883 - RNA, 19 nt, Artificial Sequence
  Description of Artificial Sequence: Synthetic oligonucleotide
auaugcuuauagcuaacuc

SEQ ID NO: 85884 - RNA, 19 nt, Artificial Sequence
  Description of Artificial Sequence: Synthetic oligonucleotide
uauuaggauauauuacaga

SEQ ID NO: 85885 - RNA, 19 nt, Artificial Sequence
  Description of Artificial Sequence: Synthetic oligonucleotide
aaguuaaagggcccaaggu

SEQ ID NO: 85886 - RNA, 19 nt, Artificial Sequence
  Description of Artificial Sequence: Synthetic oligonucleotide
ugaauuacguucauguguu

SEQ ID NO: 85887 - RNA, 19 nt, Artificial Sequence
  Description of Artificial Sequence: Synthetic oligonucleotide
ucuggucacuacaaaauga

SEQ ID NO: 85888 - RNA, 19 nt, Artificial Sequence
  Description of Artificial Sequence: Synthetic oligonucleotide
uucgguguaggcaaaauua

SEQ ID NO: 85889 - RNA, 19 nt, Artificial Sequence
  Description of Artificial Sequence: Synthetic oligonucleotide
ggucuuuuaaguuacaguc

SEQ ID NO: 85890 - RNA, 19 nt, Artificial Sequence
  Description of Artificial Sequence: Synthetic oligonucleotide
uuuguuaggagaccaaguu

SEQ ID NO: 85891 - RNA, 19 nt, Artificial Sequence
  Description of Artificial Sequence: Synthetic oligonucleotide
ugaugaaguauuaccagaa

SEQ ID NO: 85892 - RNA, 19 nt, Artificial Sequence
  Description of Artificial Sequence: Synthetic oligonucleotide
uguguggagaugcaugggc

SEQ ID NO: 85893 - RNA, 19 nt, Artificial Sequence
  Description of Artificial Sequence: Synthetic oligonucleotide
uuagaguguuguuucagca

SEQ ID NO: 85894 - RNA, 19 nt, Artificial Sequence
  Description of Artificial Sequence: Synthetic oligonucleotide
ucuugauggugaucgagag

SEQ ID NO: 85895 - RNA, 19 nt, Artificial Sequence
  Description of Artificial Sequence: Synthetic oligonucleotide
cuuccgagaauauuuguac

SEQ ID NO: 85896 - RNA, 19 nt, Artificial Sequence
  Description of Artificial Sequence: Synthetic oligonucleotide
uacuaugacaaacuuuguc

SEQ ID NO: 85897 - RNA, 19 nt, Artificial Sequence
  Description of Artificial Sequence: Synthetic oligonucleotide
guagaauugacuucuccac

SEQ ID NO: 85898 - RNA, 19 nt, Artificial Sequence
  Description of Artificial Sequence: Synthetic oligonucleotide
aggagcaucgcgucuaggg

SEQ ID NO: 85899 - RNA, 19 nt, Artificial Sequence
  Description of Artificial Sequence: Synthetic oligonucleotide
auggacuccgaucuuuugg

SEQ ID NO: 85900 - RNA, 19 nt, Artificial Sequence
  Description of Artificial Sequence: Synthetic oligonucleotide
agcaugcauauucuaacuc

SEQ ID NO: 85901 - RNA, 19 nt, Artificial Sequence
  Description of Artificial Sequence: Synthetic oligonucleotide
ucucucuaggagcaucgcg

SEQ ID NO: 85902 - RNA, 19 nt, Artificial Sequence
  Description of Artificial Sequence: Synthetic oligonucleotide
auuucuucgguaccgguca

SEQ ID NO: 85903 - RNA, 19 nt, Artificial Sequence
  Description of Artificial Sequence: Synthetic oligonucleotide
aacucauacugcaagguca

SEQ ID NO: 85904 - RNA, 19 nt, Artificial Sequence
  Description of Artificial Sequence: Synthetic oligonucleotide
uuguuaucuucacuaaagu

SEQ ID NO: 85905 - RNA, 19 nt, Artificial Sequence
  Description of Artificial Sequence: Synthetic oligonucleotide
guagcugagaaccaucaac

SEQ ID NO: 85906 - RNA, 19 nt, Artificial Sequence
  Description of Artificial Sequence: Synthetic oligonucleotide
uguguaucagaaaacucua

SEQ ID NO: 85907 - RNA, 19 nt, Artificial Sequence
  Description of Artificial Sequence: Synthetic oligonucleotide
acaaaaugagucgcacucc

SEQ ID NO: 85908 - RNA, 19 nt, Artificial Sequence
  Description of Artificial Sequence: Synthetic oligonucleotide
augaugaaguauuaccaga

SEQ ID NO: 85909 - RNA, 19 nt, Artificial Sequence
  Description of Artificial Sequence: Synthetic oligonucleotide
aauggguuacgcugcauau

SEQ ID NO: 85910 - RNA, 19 nt, Artificial Sequence
  Description of Artificial Sequence: Synthetic oligonucleotide
cuagcagacucucucuugg

SEQ ID NO: 85911 - RNA, 19 nt, Artificial Sequence
  Description of Artificial Sequence: Synthetic oligonucleotide
cagauuucgaucacaguug

SEQ ID NO: 85912 - RNA, 19 nt, Artificial Sequence
  Description of Artificial Sequence: Synthetic oligonucleotide
cuuaccgcccaacuggagg

SEQ ID NO: 85913 - RNA, 19 nt, Artificial Sequence
  Description of Artificial Sequence: Synthetic oligonucleotide
aaaugagucgcacuccaua

SEQ ID NO: 85914 - RNA, 19 nt, Artificial Sequence
  Description of Artificial Sequence: Synthetic oligonucleotide
ucuuuguuaggagaccaag

SEQ ID NO: 85915 - RNA, 19 nt, Artificial Sequence
  Description of Artificial Sequence: Synthetic oligonucleotide
uggguuacgcugcauauuc

SEQ ID NO: 85916 - RNA, 19 nt, Artificial Sequence
  Description of Artificial Sequence: Synthetic oligonucleotide
ugugacuaucaaguuaaag

SEQ ID NO: 85917 - RNA, 19 nt, Artificial Sequence
  Description of Artificial Sequence: Synthetic oligonucleotide
acugagucaugaucaagag

SEQ ID NO: 85918 - RNA, 19 nt, Artificial Sequence
  Description of Artificial Sequence: Synthetic oligonucleotide
aauacugagucaugaucaa

SEQ ID NO: 85919 - RNA, 19 nt, Artificial Sequence
  Description of Artificial Sequence: Synthetic oligonucleotide
gaugauuccauuucagacu

SEQ ID NO: 85920 - RNA, 19 nt, Artificial Sequence
  Description of Artificial Sequence: Synthetic oligonucleotide
acauggaucaaugugacua

SEQ ID NO: 85921 - RNA, 19 nt, Artificial Sequence
  Description of Artificial Sequence: Synthetic oligonucleotide
uggucuuuuaaguuacagu

SEQ ID NO: 85922 - RNA, 19 nt, Artificial Sequence
  Description of Artificial Sequence: Synthetic oligonucleotide
ucuguguaucagaaaacuc

SEQ ID NO: 85923 - RNA, 19 nt, Artificial Sequence
  Description of Artificial Sequence: Synthetic oligonucleotide
caggcguaccgaaagagag

SEQ ID NO: 85924 - RNA, 19 nt, Artificial Sequence
  Description of Artificial Sequence: Synthetic oligonucleotide
aggauguaaaagcaaugcu

SEQ ID NO: 85925 - RNA, 19 nt, Artificial Sequence
  Description of Artificial Sequence: Synthetic oligonucleotide
uggacuccgaucuuuuggc

SEQ ID NO: 85926 - RNA, 19 nt, Artificial Sequence
  Description of Artificial Sequence: Synthetic oligonucleotide
agaaccugcaacuccacaa

SEQ ID NO: 85927 - RNA, 19 nt, Artificial Sequence
  Description of Artificial Sequence: Synthetic oligonucleotide
guugaauuacguucaugug

SEQ ID NO: 85928 - RNA, 19 nt, Artificial Sequence
  Description of Artificial Sequence: Synthetic oligonucleotide
cuaucaaguuaaagggccc

SEQ ID NO: 85929 - RNA, 19 nt, Artificial Sequence
  Description of Artificial Sequence: Synthetic oligonucleotide
uccuaugcuuaucugugga

SEQ ID NO: 85930 - RNA, 19 nt, Artificial Sequence
  Description of Artificial Sequence: Synthetic oligonucleotide
ucacuacaaaaugagucgc

SEQ ID NO: 85931 - RNA, 19 nt, Artificial Sequence
  Description of Artificial Sequence: Synthetic oligonucleotide
uaagacuuguguagucaug

SEQ ID NO: 85932 - RNA, 19 nt, Artificial Sequence
  Description of Artificial Sequence: Synthetic oligonucleotide
aguauuaccagaacuuggu

SEQ ID NO: 85933 - RNA, 19 nt, Artificial Sequence
  Description of Artificial Sequence: Synthetic oligonucleotide
accgaaacggccucccuuc

SEQ ID NO: 85934 - RNA, 19 nt, Artificial Sequence
  Description of Artificial Sequence: Synthetic oligonucleotide
ucuagaucuucgaguacga

SEQ ID NO: 85935 - RNA, 19 nt, Artificial Sequence
  Description of Artificial Sequence: Synthetic oligonucleotide
uuucuaaugcagucucucu

SEQ ID NO: 85936 - RNA, 19 nt, Artificial Sequence
  Description of Artificial Sequence: Synthetic oligonucleotide
augaaaucuagaucuucga

SEQ ID NO: 85937 - RNA, 19 nt, Artificial Sequence
  Description of Artificial Sequence: Synthetic oligonucleotide
guuaaagggcccaagguuc

SEQ ID NO: 85938 - RNA, 19 nt, Artificial Sequence
  Description of Artificial Sequence: Synthetic oligonucleotide
uauaugcuuauagcuaacu

SEQ ID NO: 85939 - RNA, 19 nt, Artificial Sequence
  Description of Artificial Sequence: Synthetic oligonucleotide
aggcuuuaaccagauuugc

SEQ ID NO: 85940 - RNA, 19 nt, Artificial Sequence
  Description of Artificial Sequence: Synthetic oligonucleotide
acugauaaguuuauacaca

SEQ ID NO: 85941 - RNA, 19 nt, Artificial Sequence
  Description of Artificial Sequence: Synthetic oligonucleotide
auagaaguugcagugcaca

SEQ ID NO: 85942 - RNA, 19 nt, Artificial Sequence
  Description of Artificial Sequence: Synthetic oligonucleotide
auuccuaugcuuaucugug

SEQ ID NO: 85943 - RNA, 19 nt, Artificial Sequence
  Description of Artificial Sequence: Synthetic oligonucleotide
auaauggagaugauguggu

SEQ ID NO: 85944 - RNA, 19 nt, Artificial Sequence
  Description of Artificial Sequence: Synthetic oligonucleotide
accgaaagagaggucuugc

SEQ ID NO: 85945 - RNA, 19 nt, Artificial Sequence
  Description of Artificial Sequence: Synthetic oligonucleotide
agugggaaucuuuuaacuu

SEQ ID NO: 85946 - RNA, 19 nt, Artificial Sequence
  Description of Artificial Sequence: Synthetic oligonucleotide
gugguuguuaccagaacag

SEQ ID NO: 85947 - RNA, 19 nt, Artificial Sequence
  Description of Artificial Sequence: Synthetic oligonucleotide
aguaacuacuacugggcau

SEQ ID NO: 85948 - RNA, 19 nt, Artificial Sequence
  Description of Artificial Sequence: Synthetic oligonucleotide
gauuugccacuuuaguaga

SEQ ID NO: 85949 - RNA, 19 nt, Artificial Sequence
  Description of Artificial Sequence: Synthetic oligonucleotide
cagagucuuucuuaccgcc

SEQ ID NO: 85950 - RNA, 19 nt, Artificial Sequence
  Description of Artificial Sequence: Synthetic oligonucleotide
uccgagaauauuuguacuu

SEQ ID NO: 85951 - RNA, 19 nt, Artificial Sequence
  Description of Artificial Sequence: Synthetic oligonucleotide
auagguuauaacauagcaa

SEQ ID NO: 85952 - RNA, 19 nt, Artificial Sequence
  Description of Artificial Sequence: Synthetic oligonucleotide
uucuaucuuuagaaaucac

SEQ ID NO: 85953 - RNA, 19 nt, Artificial Sequence
  Description of Artificial Sequence: Synthetic oligonucleotide
uaucaaguuaaagggccca

SEQ ID NO: 85954 - RNA, 19 nt, Artificial Sequence
  Description of Artificial Sequence: Synthetic oligonucleotide
guaggggaugcucacucag

SEQ ID NO: 85955 - RNA, 19 nt, Artificial Sequence
  Description of Artificial Sequence: Synthetic oligonucleotide
ucauuccuaugcuuaucug

SEQ ID NO: 85956 - RNA, 19 nt, Artificial Sequence
  Description of Artificial Sequence: Synthetic oligonucleotide
uuacuaugacaaacuuugu

SEQ ID NO: 85957 - RNA, 19 nt, Artificial Sequence
  Description of Artificial Sequence: Synthetic oligonucleotide
cuuggacgugacuugauga

SEQ ID NO: 85958 - RNA, 19 nt, Artificial Sequence
  Description of Artificial Sequence: Synthetic oligonucleotide
auagcuaacucugaccuuu

SEQ ID NO: 85959 - RNA, 19 nt, Artificial Sequence
  Description of Artificial Sequence: Synthetic oligonucleotide
acuuacaugacaagcacuu

SEQ ID NO: 85960 - RNA, 19 nt, Artificial Sequence
  Description of Artificial Sequence: Synthetic oligonucleotide
gaguaacuacuacugggca

SEQ ID NO: 85961 - RNA, 19 nt, Artificial Sequence
  Description of Artificial Sequence: Synthetic oligonucleotide
uuuaaguuacaguccuguu

SEQ ID NO: 85962 - RNA, 19 nt, Artificial Sequence
  Description of Artificial Sequence: Synthetic oligonucleotide
ugcaggcguaccgaaagag

SEQ ID NO: 85963 - RNA, 19 nt, Artificial Sequence
  Description of Artificial Sequence: Synthetic oligonucleotide
agucaagucaauacugagu

SEQ ID NO: 85964 - RNA, 19 nt, Artificial Sequence
  Description of Artificial Sequence: Synthetic oligonucleotide
aagggguguacggcuuugc

SEQ ID NO: 85965 - RNA, 19 nt, Artificial Sequence
  Description of Artificial Sequence: Synthetic oligonucleotide
agcagguaagacuugugua

SEQ ID NO: 85966 - RNA, 19 nt, Artificial Sequence
  Description of Artificial Sequence: Synthetic oligonucleotide
uucuuaccgcccaacugga

SEQ ID NO: 85967 - RNA, 19 nt, Artificial Sequence
  Description of Artificial Sequence: Synthetic oligonucleotide
uuggacgugacuugaugau

SEQ ID NO: 85968 - RNA, 19 nt, Artificial Sequence
  Description of Artificial Sequence: Synthetic oligonucleotide
uauggacuccgaucuuuug

SEQ ID NO: 85969 - RNA, 19 nt, Artificial Sequence
  Description of Artificial Sequence: Synthetic oligonucleotide
uccguuuacccaaguggga

SEQ ID NO: 85970 - RNA, 19 nt, Artificial Sequence
  Description of Artificial Sequence: Synthetic oligonucleotide
ucgcgucuaggggauaugg

SEQ ID NO: 85971 - RNA, 19 nt, Artificial Sequence
  Description of Artificial Sequence: Synthetic oligonucleotide
caaaaugagucgcacucca

SEQ ID NO: 85972 - RNA, 19 nt, Artificial Sequence
  Description of Artificial Sequence: Synthetic oligonucleotide
ugguuguuaccagaacagc

SEQ ID NO: 85973 - RNA, 19 nt, Artificial Sequence
  Description of Artificial Sequence: Synthetic oligonucleotide
cuuaucuguggaauuugga

SEQ ID NO: 85974 - RNA, 19 nt, Artificial Sequence
  Description of Artificial Sequence: Synthetic oligonucleotide
ucccugaaagggguguacg

SEQ ID NO: 85975 - RNA, 19 nt, Artificial Sequence
  Description of Artificial Sequence: Synthetic oligonucleotide
cucgaucucuccucuggcc

SEQ ID NO: 85976 - RNA, 19 nt, Artificial Sequence
  Description of Artificial Sequence: Synthetic oligonucleotide
ggagcaucgcgucuagggg

SEQ ID NO: 85977 - RNA, 19 nt, Artificial Sequence
  Description of Artificial Sequence: Synthetic oligonucleotide
uuaguagaauugacuucuc

SEQ ID NO: 85978 - RNA, 19 nt, Artificial Sequence
  Description of Artificial Sequence: Synthetic oligonucleotide
guuaccagaacagcaacaa

SEQ ID NO: 85979 - RNA, 19 nt, Artificial Sequence
  Description of Artificial Sequence: Synthetic oligonucleotide
gaauggguuacgcugcaua

SEQ ID NO: 85980 - RNA, 19 nt, Artificial Sequence
  Description of Artificial Sequence: Synthetic oligonucleotide
uucgaguacgaggcuuugg

SEQ ID NO: 85981 - RNA, 19 nt, Artificial Sequence
  Description of Artificial Sequence: Synthetic oligonucleotide
agagaggucuugcucacuu

SEQ ID NO: 85982 - RNA, 19 nt, Artificial Sequence
  Description of Artificial Sequence: Synthetic oligonucleotide
guauuaccagaacuugguc

SEQ ID NO: 85983 - RNA, 19 nt, Artificial Sequence
  Description of Artificial Sequence: Synthetic oligonucleotide
gaauuacguucauguguug

SEQ ID NO: 85984 - RNA, 19 nt, Artificial Sequence
  Description of Artificial Sequence: Synthetic oligonucleotide
cacguugaauugcacuuug

SEQ ID NO: 85985 - RNA, 19 nt, Artificial Sequence
  Description of Artificial Sequence: Synthetic oligonucleotide
gagcaucgcgucuagggga

SEQ ID NO: 85986 - RNA, 19 nt, Artificial Sequence
  Description of Artificial Sequence: Synthetic oligonucleotide
uaggggaugcucacucaga

SEQ ID NO: 85987 - RNA, 19 nt, Artificial Sequence
  Description of Artificial Sequence: Synthetic oligonucleotide
auacugagucaugaucaag

SEQ ID NO: 85988 - RNA, 19 nt, Artificial Sequence
  Description of Artificial Sequence: Synthetic oligonucleotide
ucuuaccgcccaacuggag

SEQ ID NO: 85989 - RNA, 19 nt, Artificial Sequence
  Description of Artificial Sequence: Synthetic oligonucleotide
uuugccacuuuaguagaau

SEQ ID NO: 85990 - RNA, 19 nt, Artificial Sequence
  Description of Artificial Sequence: Synthetic oligonucleotide
ggauguuaauguaaucaug

SEQ ID NO: 85991 - RNA, 19 nt, Artificial Sequence
  Description of Artificial Sequence: Synthetic oligonucleotide
gcuuauagcuaacucugac

SEQ ID NO: 85992 - RNA, 19 nt, Artificial Sequence
  Description of Artificial Sequence: Synthetic oligonucleotide
ugagaaccaucaacuuggu

SEQ ID NO: 85993 - RNA, 19 nt, Artificial Sequence
  Description of Artificial Sequence: Synthetic oligonucleotide
cauuccuaugcuuaucugu

SEQ ID NO: 85994 - RNA, 19 nt, Artificial Sequence
  Description of Artificial Sequence: Synthetic oligonucleotide
caaugugacuaucaaguua

SEQ ID NO: 85995 - RNA, 19 nt, Artificial Sequence
  Description of Artificial Sequence: Synthetic oligonucleotide
acguugaauugcacuuugc

SEQ ID NO: 85996 - RNA, 19 nt, Artificial Sequence
  Description of Artificial Sequence: Synthetic oligonucleotide
ggauguaaaagcaaugcua

SEQ ID NO: 85997 - RNA, 19 nt, Artificial Sequence
  Description of Artificial Sequence: Synthetic oligonucleotide
cuaccugcaugagaggcac

SEQ ID NO: 85998 - RNA, 19 nt, Artificial Sequence
  Description of Artificial Sequence: Synthetic oligonucleotide
cacuuuaguagaauugacu

SEQ ID NO: 85999 - RNA, 19 nt, Artificial Sequence
  Description of Artificial Sequence: Synthetic oligonucleotide
accggucauuaccucgagg

SEQ ID NO: 86000 - RNA, 19 nt, Artificial Sequence
  Description of Artificial Sequence: Synthetic oligonucleotide
agguuauaacauagcaaug

SEQ ID NO: 86001 - RNA, 19 nt, Artificial Sequence
  Description of Artificial Sequence: Synthetic oligonucleotide
aaagggguguacggcuuug

SEQ ID NO: 86002 - RNA, 19 nt, Artificial Sequence
  Description of Artificial Sequence: Synthetic oligonucleotide
cauuguuaucuucacuaaa

SEQ ID NO: 86003 - RNA, 19 nt, Artificial Sequence
  Description of Artificial Sequence: Synthetic oligonucleotide
accuucagucaguguuuac

SEQ ID NO: 86004 - RNA, 19 nt, Artificial Sequence
  Description of Artificial Sequence: Synthetic oligonucleotide
uacgcugcauauucaucaa

SEQ ID NO: 86005 - RNA, 19 nt, Artificial Sequence
  Description of Artificial Sequence: Synthetic oligonucleotide
gguuguuaccagaacagca

SEQ ID NO: 86006 - RNA, 19 nt, Artificial Sequence
  Description of Artificial Sequence: Synthetic oligonucleotide
uauagcuaacucugaccuu

SEQ ID NO: 86007 - RNA, 19 nt, Artificial Sequence
  Description of Artificial Sequence: Synthetic oligonucleotide
uaccgaaagagaggucuug

SEQ ID NO: 86008 - RNA, 19 nt, Artificial Sequence
  Description of Artificial Sequence: Synthetic oligonucleotide
agaggguugcugcuccaca

SEQ ID NO: 86009 - RNA, 19 nt, Artificial Sequence
  Description of Artificial Sequence: Synthetic oligonucleotide
gcuuaucuguggaauuugg

SEQ ID NO: 86010 - RNA, 19 nt, Artificial Sequence
  Description of Artificial Sequence: Synthetic oligonucleotide
auguguugcugcaucauau

SEQ ID NO: 86011 - RNA, 19 nt, Artificial Sequence
  Description of Artificial Sequence: Synthetic oligonucleotide
uugccuggauguuaaugua

SEQ ID NO: 86012 - RNA, 19 nt, Artificial Sequence
  Description of Artificial Sequence: Synthetic oligonucleotide
ucgcacuccauagguacug

SEQ ID NO: 86013 - RNA, 19 nt, Artificial Sequence
  Description of Artificial Sequence: Synthetic oligonucleotide
guacacguugaauugcacu

SEQ ID NO: 86014 - RNA, 19 nt, Artificial Sequence
  Description of Artificial Sequence: Synthetic oligonucleotide
acgccgagaguaauaguuc

SEQ ID NO: 86015 - RNA, 19 nt, Artificial Sequence
  Description of Artificial Sequence: Synthetic oligonucleotide
cucucuaggagcaucgcgu

SEQ ID NO: 86016 - RNA, 19 nt, Artificial Sequence
  Description of Artificial Sequence: Synthetic oligonucleotide
ugaccugucugcaggcgua

SEQ ID NO: 86017 - RNA, 19 nt, Artificial Sequence
  Description of Artificial Sequence: Synthetic oligonucleotide
gaauugacuucuccacucu

SEQ ID NO: 86018 - RNA, 19 nt, Artificial Sequence
  Description of Artificial Sequence: Synthetic oligonucleotide
aucucucucgcucucucuu

SEQ ID NO: 86019 - RNA, 19 nt, Artificial Sequence
  Description of Artificial Sequence: Synthetic oligonucleotide
cugagucaugaucaagaga

SEQ ID NO: 86020 - RNA, 19 nt, Artificial Sequence
  Description of Artificial Sequence: Synthetic oligonucleotide
ccaagugggacagucauuc

SEQ ID NO: 86021 - RNA, 19 nt, Artificial Sequence
  Description of Artificial Sequence: Synthetic oligonucleotide
ucuaggggauauggacucc

SEQ ID NO: 86022 - RNA, 19 nt, Artificial Sequence
  Description of Artificial Sequence: Synthetic oligonucleotide
uaccggucauuaccucgag

SEQ ID NO: 86023 - RNA, 19 nt, Artificial Sequence
  Description of Artificial Sequence: Synthetic oligonucleotide
acgguuggagauccagcca

SEQ ID NO: 86024 - RNA, 19 nt, Artificial Sequence
  Description of Artificial Sequence: Synthetic oligonucleotide
aggcguaccgaaagagagg

SEQ ID NO: 86025 - RNA, 19 nt, Artificial Sequence
  Description of Artificial Sequence: Synthetic oligonucleotide
ucuguucgguguaggcaaa

SEQ ID NO: 86026 - RNA, 19 nt, Artificial Sequence
  Description of Artificial Sequence: Synthetic oligonucleotide
ggcuuuaaccagauuugcc

SEQ ID NO: 86027 - RNA, 19 nt, Artificial Sequence
  Description of Artificial Sequence: Synthetic oligonucleotide
ugcagugcacagcuauauu

SEQ ID NO: 86028 - RNA, 19 nt, Artificial Sequence
  Description of Artificial Sequence: Synthetic oligonucleotide
gagaccgaaacggccuccc

SEQ ID NO: 86029 - RNA, 19 nt, Artificial Sequence
  Description of Artificial Sequence: Synthetic oligonucleotide
ccggucauuaccucgagga

SEQ ID NO: 86030 - RNA, 19 nt, Artificial Sequence
  Description of Artificial Sequence: Synthetic oligonucleotide
guaagacuuguguagucau

SEQ ID NO: 86031 - RNA, 19 nt, Artificial Sequence
  Description of Artificial Sequence: Synthetic oligonucleotide
augcuuaucuguggaauuu

SEQ ID NO: 86032 - RNA, 19 nt, Artificial Sequence
  Description of Artificial Sequence: Synthetic oligonucleotide
gcaugcauauucuaacucu

SEQ ID NO: 86033 - RNA, 19 nt, Artificial Sequence
  Description of Artificial Sequence: Synthetic oligonucleotide
gcuuggacgugacuugaug

SEQ ID NO: 86034 - RNA, 19 nt, Artificial Sequence
  Description of Artificial Sequence: Synthetic oligonucleotide
uguucgguguaggcaaaau

SEQ ID NO: 86035 - RNA, 19 nt, Artificial Sequence
  Description of Artificial Sequence: Synthetic oligonucleotide
guacuugucuacauaggcu

SEQ ID NO: 86036 - RNA, 19 nt, Artificial Sequence
  Description of Artificial Sequence: Synthetic oligonucleotide
ccguacaaucucuuuguac

SEQ ID NO: 86037 - RNA, 19 nt, Artificial Sequence
  Description of Artificial Sequence: Synthetic oligonucleotide
cuacaaaaugagucgcacu

SEQ ID NO: 86038 - RNA, 19 nt, Artificial Sequence
  Description of Artificial Sequence: Synthetic oligonucleotide
uguaaucaugaugcucauu

SEQ ID NO: 86039 - RNA, 19 nt, Artificial Sequence
  Description of Artificial Sequence: Synthetic oligonucleotide
aucaaguuaaagggcccaa

SEQ ID NO: 86040 - RNA, 19 nt, Artificial Sequence
  Description of Artificial Sequence: Synthetic oligonucleotide
cagugggaaucuuuuaacu

SEQ ID NO: 86041 - RNA, 19 nt, Artificial Sequence
  Description of Artificial Sequence: Synthetic oligonucleotide
cuucgguaccggucauuac

SEQ ID NO: 86042 - RNA, 19 nt, Artificial Sequence
  Description of Artificial Sequence: Synthetic oligonucleotide
guguggagaugcaugggca

SEQ ID NO: 86043 - RNA, 19 nt, Artificial Sequence
  Description of Artificial Sequence: Synthetic oligonucleotide
cacgccgagaguaauaguu

SEQ ID NO: 86044 - RNA, 19 nt, Artificial Sequence
  Description of Artificial Sequence: Synthetic oligonucleotide
uuaccucuguaagugccuu

SEQ ID NO: 86045 - RNA, 19 nt, Artificial Sequence
  Description of Artificial Sequence: Synthetic oligonucleotide
uuucgcuuagaggguugcu

SEQ ID NO: 86046 - RNA, 19 nt, Artificial Sequence
  Description of Artificial Sequence: Synthetic oligonucleotide
guaacuacuacugggcauu

SEQ ID NO: 86047 - RNA, 19 nt, Artificial Sequence
  Description of Artificial Sequence: Synthetic oligonucleotide
aucuucgaguacgaggcuu

SEQ ID NO: 86048 - RNA, 19 nt, Artificial Sequence
  Description of Artificial Sequence: Synthetic oligonucleotide
guaccggucauuaccucga

SEQ ID NO: 86049 - RNA, 19 nt, Artificial Sequence
  Description of Artificial Sequence: Synthetic oligonucleotide
ucgaccacgguuggagauc

SEQ ID NO: 86050 - RNA, 19 nt, Artificial Sequence
  Description of Artificial Sequence: Synthetic oligonucleotide
ucucucucgcucucucuuu

SEQ ID NO: 86051 - RNA, 19 nt, Artificial Sequence
  Description of Artificial Sequence: Synthetic oligonucleotide
uaggagcaucgcgucuagg

SEQ ID NO: 86052 - RNA, 19 nt, Artificial Sequence
  Description of Artificial Sequence: Synthetic oligonucleotide
gauuucgaucacaguuguc

SEQ ID NO: 86053 - RNA, 19 nt, Artificial Sequence
  Description of Artificial Sequence: Synthetic oligonucleotide
cauuagaggcuuggacgug

SEQ ID NO: 86054 - RNA, 19 nt, Artificial Sequence
  Description of Artificial Sequence: Synthetic oligonucleotide
ccucucucuuuggagaccg

SEQ ID NO: 86055 - RNA, 19 nt, Artificial Sequence
  Description of Artificial Sequence: Synthetic oligonucleotide
cauguguugcugcaucaua

SEQ ID NO: 86056 - RNA, 19 nt, Artificial Sequence
  Description of Artificial Sequence: Synthetic oligonucleotide
ggaaaugguuuaaaugaua

SEQ ID NO: 86057 - RNA, 19 nt, Artificial Sequence
  Description of Artificial Sequence: Synthetic oligonucleotide
uuccaccgaggagaguaac

SEQ ID NO: 86058 - RNA, 19 nt, Artificial Sequence
  Description of Artificial Sequence: Synthetic oligonucleotide
ucccacgccgagaguaaua

SEQ ID NO: 86059 - RNA, 19 nt, Artificial Sequence
  Description of Artificial Sequence: Synthetic oligonucleotide
guagcugaccugcugggau

SEQ ID NO: 86060 - RNA, 19 nt, Artificial Sequence
  Description of Artificial Sequence: Synthetic oligonucleotide
gucuuucuuaccgcccaac

SEQ ID NO: 86061 - RNA, 19 nt, Artificial Sequence
  Description of Artificial Sequence: Synthetic oligonucleotide
acacguugaauugcacuuu

SEQ ID NO: 86062 - RNA, 19 nt, Artificial Sequence
  Description of Artificial Sequence: Synthetic oligonucleotide
agaccgaaacggccucccu

SEQ ID NO: 86063 - RNA, 19 nt, Artificial Sequence
  Description of Artificial Sequence: Synthetic oligonucleotide
gagcgagaccuggaccuug

SEQ ID NO: 86064 - RNA, 19 nt, Artificial Sequence
  Description of Artificial Sequence: Synthetic oligonucleotide
uuuacccaagugggacagu

SEQ ID NO: 86065 - RNA, 19 nt, Artificial Sequence
  Description of Artificial Sequence: Synthetic oligonucleotide
cuaugcuuaucuguggaau

SEQ ID NO: 86066 - RNA, 19 nt, Artificial Sequence
  Description of Artificial Sequence: Synthetic oligonucleotide
aacuacuacugggcauuuu

SEQ ID NO: 86067 - RNA, 19 nt, Artificial Sequence
  Description of Artificial Sequence: Synthetic oligonucleotide
cgaguacgaggcuuugggg

SEQ ID NO: 86068 - RNA, 19 nt, Artificial Sequence
  Description of Artificial Sequence: Synthetic oligonucleotide
ccguuuacccaagugggac

SEQ ID NO: 86069 - RNA, 19 nt, Artificial Sequence
  Description of Artificial Sequence: Synthetic oligonucleotide
cauuaccucgaggacaccu

SEQ ID NO: 86070 - RNA, 19 nt, Artificial Sequence
  Description of Artificial Sequence: Synthetic oligonucleotide
cuucgaguacgaggcuuug

SEQ ID NO: 86071 - RNA, 19 nt, Artificial Sequence
  Description of Artificial Sequence: Synthetic oligonucleotide
gcuacaguuucaaccuuca

SEQ ID NO: 86072 - RNA, 19 nt, Artificial Sequence
  Description of Artificial Sequence: Synthetic oligonucleotide
auggguuacgcugcauauu

SEQ ID NO: 86073 - RNA, 19 nt, Artificial Sequence
  Description of Artificial Sequence: Synthetic oligonucleotide
gguuacgcugcauauucau

SEQ ID NO: 86074 - RNA, 19 nt, Artificial Sequence
  Description of Artificial Sequence: Synthetic oligonucleotide
uaacuacuacugggcauuu

SEQ ID NO: 86075 - RNA, 19 nt, Artificial Sequence
  Description of Artificial Sequence: Synthetic oligonucleotide
cccacgccgagaguaauag

SEQ ID NO: 86076 - RNA, 19 nt, Artificial Sequence
  Description of Artificial Sequence: Synthetic oligonucleotide
gguaggggaugcucacuca

SEQ ID NO: 86077 - RNA, 19 nt, Artificial Sequence
  Description of Artificial Sequence: Synthetic oligonucleotide
cuccgaucuuuuggcuucc

SEQ ID NO: 86078 - RNA, 19 nt, Artificial Sequence
  Description of Artificial Sequence: Synthetic oligonucleotide
agcaucgcgucuaggggau

SEQ ID NO: 86079 - RNA, 19 nt, Artificial Sequence
  Description of Artificial Sequence: Synthetic oligonucleotide
gaucuucgaguacgaggcu

SEQ ID NO: 86080 - RNA, 19 nt, Artificial Sequence
  Description of Artificial Sequence: Synthetic oligonucleotide
ggcguaccgaaagagaggu

SEQ ID NO: 86081 - RNA, 19 nt, Artificial Sequence
  Description of Artificial Sequence: Synthetic oligonucleotide
cucauuacuuugguaaauu

SEQ ID NO: 86082 - RNA, 19 nt, Artificial Sequence
  Description of Artificial Sequence: Synthetic oligonucleotide
gguacacguugaauugcac

SEQ ID NO: 86083 - RNA, 19 nt, Artificial Sequence
  Description of Artificial Sequence: Synthetic oligonucleotide
gucuuuguuaggagaccaa

SEQ ID NO: 86084 - RNA, 19 nt, Artificial Sequence
  Description of Artificial Sequence: Synthetic oligonucleotide
gguguacggcuuugccacc

SEQ ID NO: 86085 - RNA, 19 nt, Artificial Sequence
  Description of Artificial Sequence: Synthetic oligonucleotide
guuaggagaccaaguugua

SEQ ID NO: 86086 - RNA, 19 nt, Artificial Sequence
  Description of Artificial Sequence: Synthetic oligonucleotide
aucgcgucuaggggauaug

SEQ ID NO: 86087 - RNA, 19 nt, Artificial Sequence
  Description of Artificial Sequence: Synthetic oligonucleotide
gaccgaaacggccucccuu

SEQ ID NO: 86088 - RNA, 19 nt, Artificial Sequence
  Description of Artificial Sequence: Synthetic oligonucleotide
uaccgcccaacuggaggca

SEQ ID NO: 86089 - RNA, 19 nt, Artificial Sequence
  Description of Artificial Sequence: Synthetic oligonucleotide
caaccuucagucaguguuu

SEQ ID NO: 86090 - RNA, 19 nt, Artificial Sequence
  Description of Artificial Sequence: Synthetic oligonucleotide
uucuucgguaccggucauu

SEQ ID NO: 86091 - RNA, 19 nt, Artificial Sequence
  Description of Artificial Sequence: Synthetic oligonucleotide
gcuaccugcaugagaggca

SEQ ID NO: 86092 - RNA, 19 nt, Artificial Sequence
  Description of Artificial Sequence: Synthetic oligonucleotide
cugcaggcguaccgaaaga

SEQ ID NO: 86093 - RNA, 19 nt, Artificial Sequence
  Description of Artificial Sequence: Synthetic oligonucleotide
gacugagcccgccucuuuu

SEQ ID NO: 86094 - RNA, 19 nt, Artificial Sequence
  Description of Artificial Sequence: Synthetic oligonucleotide
gagucgcacuccauaggua

SEQ ID NO: 86095 - RNA, 19 nt, Artificial Sequence
  Description of Artificial Sequence: Synthetic oligonucleotide
ccuaugcuuaucuguggaa

SEQ ID NO: 86096 - RNA, 19 nt, Artificial Sequence
  Description of Artificial Sequence: Synthetic oligonucleotide
cucgaccacgguuggagau

SEQ ID NO: 86097 - RNA, 19 nt, Artificial Sequence
  Description of Artificial Sequence: Synthetic oligonucleotide
ggagaccgaaacggccucc

SEQ ID NO: 86098 - RNA, 19 nt, Artificial Sequence
  Description of Artificial Sequence: Synthetic oligonucleotide
gcaggcguaccgaaagaga

SEQ ID NO: 86099 - RNA, 19 nt, Artificial Sequence
  Description of Artificial Sequence: Synthetic oligonucleotide
ccugaccugucugcaggcg

SEQ ID NO: 86100 - RNA, 19 nt, Artificial Sequence
  Description of Artificial Sequence: Synthetic oligonucleotide
cguaccgaaagagaggucu

SEQ ID NO: 86101 - RNA, 19 nt, Artificial Sequence
  Description of Artificial Sequence: Synthetic oligonucleotide
agagcgagaccuggaccuu

SEQ ID NO: 86102 - RNA, 19 nt, Artificial Sequence
  Description of Artificial Sequence: Synthetic oligonucleotide
caucucucucgcucucucu

SEQ ID NO: 86103 - RNA, 19 nt, Artificial Sequence
  Description of Artificial Sequence: Synthetic oligonucleotide
cguuuacccaagugggaca

SEQ ID NO: 86104 - RNA, 19 nt, Artificial Sequence
  Description of Artificial Sequence: Synthetic oligonucleotide
caccgaggagaguaacuau

SEQ ID NO: 86105 - RNA, 19 nt, Artificial Sequence
  Description of Artificial Sequence: Synthetic oligonucleotide
cugagcccgccucuuuucu

SEQ ID NO: 86106 - RNA, 19 nt, Artificial Sequence
  Description of Artificial Sequence: Synthetic oligonucleotide
cuguucgguguaggcaaaa

SEQ ID NO: 86107 - RNA, 19 nt, Artificial Sequence
  Description of Artificial Sequence: Synthetic oligonucleotide
gcucauuacuuugguaaau

SEQ ID NO: 86108 - RNA, 19 nt, Artificial Sequence
  Description of Artificial Sequence: Synthetic oligonucleotide
guaccgaaagagaggucuu

SEQ ID NO: 86109 - RNA, 19 nt, Artificial Sequence
  Description of Artificial Sequence: Synthetic oligonucleotide
caucgcgucuaggggauau

SEQ ID NO: 86110 - RNA, 19 nt, Artificial Sequence
  Description of Artificial Sequence: Synthetic oligonucleotide
ggccacuuaaaggcagaua

SEQ ID NO: 86111 - RNA, 19 nt, Artificial Sequence
  Description of Artificial Sequence: Synthetic oligonucleotide
ccucgaccacgguuggaga

SEQ ID NO: 86112 - RNA, 19 nt, Artificial Sequence
  Description of Artificial Sequence: Synthetic oligonucleotide
cgccgagaguaauaguucu

SEQ ID NO: 86113 - RNA, 19 nt, Artificial Sequence
  Description of Artificial Sequence: Synthetic oligonucleotide
ccucccacgccgagaguaa

SEQ ID NO: 86114 - RNA, 19 nt, Artificial Sequence
  Description of Artificial Sequence: Synthetic oligonucleotide
cugagggugcauggugaau

SEQ ID NO: 86115 - RNA, 19 nt, Artificial Sequence
  Description of Artificial Sequence: Synthetic oligonucleotide
guacgaggcuuuggggcuu

SEQ ID NO: 86116 - RNA, 19 nt, Artificial Sequence
  Description of Artificial Sequence: Synthetic oligonucleotide
ccguccucuagcagacucu

SEQ ID NO: 86117 - RNA, 19 nt, Artificial Sequence
  Description of Artificial Sequence: Synthetic oligonucleotide
ccgcccaacuggaggcaga

SEQ ID NO: 86118 - RNA, 19 nt, Artificial Sequence
  Description of Artificial Sequence: Synthetic oligonucleotide
cucccacgccgagaguaau

SEQ ID NO: 86119 - RNA, 19 nt, Artificial Sequence
  Description of Artificial Sequence: Synthetic oligonucleotide
ggcuuggacgugacuugau

SEQ ID NO: 86120 - RNA, 19 nt, Artificial Sequence
  Description of Artificial Sequence: Synthetic oligonucleotide
ccgaaacggccucccuucu

SEQ ID NO: 86121 - RNA, 19 nt, Artificial Sequence
  Description of Artificial Sequence: Synthetic oligonucleotide
ccaccuguucucgcucugu

SEQ ID NO: 86122 - RNA, 19 nt, Artificial Sequence
  Description of Artificial Sequence: Synthetic oligonucleotide
gcaucgcgucuaggggaua

SEQ ID NO: 86123 - RNA, 19 nt, Artificial Sequence
  Description of Artificial Sequence: Synthetic oligonucleotide
agacuuuacaguuacuacc

SEQ ID NO: 86124 - RNA, 19 nt, Artificial Sequence
  Description of Artificial Sequence: Synthetic oligonucleotide
uuauauucagguaaacucc

SEQ ID NO: 86125 - RNA, 19 nt, Artificial Sequence
  Description of Artificial Sequence: Synthetic oligonucleotide
caagacaucgacaagcucg

SEQ ID NO: 86126 - RNA, 19 nt, Artificial Sequence
  Description of Artificial Sequence: Synthetic oligonucleotide
auaacuagugcccugggac

SEQ ID NO: 86127 - RNA, 19 nt, Artificial Sequence
  Description of Artificial Sequence: Synthetic oligonucleotide
auaaguuagguguucggcc

SEQ ID NO: 86128 - RNA, 19 nt, Artificial Sequence
  Description of Artificial Sequence: Synthetic oligonucleotide
acauuauucaacaacguac

SEQ ID NO: 86129 - RNA, 19 nt, Artificial Sequence
  Description of Artificial Sequence: Synthetic oligonucleotide
uauggcaguauuaaguggc

SEQ ID NO: 86130 - RNA, 19 nt, Artificial Sequence
  Description of Artificial Sequence: Synthetic oligonucleotide
uggaccgucacucaaaggc

SEQ ID NO: 86131 - RNA, 19 nt, Artificial Sequence
  Description of Artificial Sequence: Synthetic oligonucleotide
gaguacacauccuagaagc

SEQ ID NO: 86132 - RNA, 19 nt, Artificial Sequence
  Description of Artificial Sequence: Synthetic oligonucleotide
uuuagaguacauauauaag

SEQ ID NO: 86133 - RNA, 19 nt, Artificial Sequence
  Description of Artificial Sequence: Synthetic oligonucleotide
uuuaaacuguaauaguucu

SEQ ID NO: 86134 - RNA, 19 nt, Artificial Sequence
  Description of Artificial Sequence: Synthetic oligonucleotide
agugcuauuguguuuagug

SEQ ID NO: 86135 - RNA, 19 nt, Artificial Sequence
  Description of Artificial Sequence: Synthetic oligonucleotide
uccaauacaagacaucgac

SEQ ID NO: 86136 - RNA, 19 nt, Artificial Sequence
  Description of Artificial Sequence: Synthetic oligonucleotide
uauaccgauguucuugagg

SEQ ID NO: 86137 - RNA, 19 nt, Artificial Sequence
  Description of Artificial Sequence: Synthetic oligonucleotide
acgucucagacuuauaaac

SEQ ID NO: 86138 - RNA, 19 nt, Artificial Sequence
  Description of Artificial Sequence: Synthetic oligonucleotide
acuaaaggccaucagugac

SEQ ID NO: 86139 - RNA, 19 nt, Artificial Sequence
  Description of Artificial Sequence: Synthetic oligonucleotide
uucuagaaugucuuuugcg

SEQ ID NO: 86140 - RNA, 19 nt, Artificial Sequence
  Description of Artificial Sequence: Synthetic oligonucleotide
acaaguuaggaccacacca

SEQ ID NO: 86141 - RNA, 19 nt, Artificial Sequence
  Description of Artificial Sequence: Synthetic oligonucleotide
aacacggaguaagagaggg

SEQ ID NO: 86142 - RNA, 19 nt, Artificial Sequence
  Description of Artificial Sequence: Synthetic oligonucleotide
uauacaacaugacauuuaa

SEQ ID NO: 86143 - RNA, 19 nt, Artificial Sequence
  Description of Artificial Sequence: Synthetic oligonucleotide
uugagguucagcuaaagau

SEQ ID NO: 86144 - RNA, 19 nt, Artificial Sequence
  Description of Artificial Sequence: Synthetic oligonucleotide
aaauauaccugcgugacaa

SEQ ID NO: 86145 - RNA, 19 nt, Artificial Sequence
  Description of Artificial Sequence: Synthetic oligonucleotide
uacauauauaaguuaggug

SEQ ID NO: 86146 - RNA, 19 nt, Artificial Sequence
  Description of Artificial Sequence: Synthetic oligonucleotide
guaacuauaacuagugccc

SEQ ID NO: 86147 - RNA, 19 nt, Artificial Sequence
  Description of Artificial Sequence: Synthetic oligonucleotide
agugccggcacucucuucc

SEQ ID NO: 86148 - RNA, 19 nt, Artificial Sequence
  Description of Artificial Sequence: Synthetic oligonucleotide
acuauggcaguauuaagug

SEQ ID NO: 86149 - RNA, 19 nt, Artificial Sequence
  Description of Artificial Sequence: Synthetic oligonucleotide
cauccaauacaagacaucg

SEQ ID NO: 86150 - RNA, 19 nt, Artificial Sequence
  Description of Artificial Sequence: Synthetic oligonucleotide
uccuucuuaagaucuaaag

SEQ ID NO: 86151 - RNA, 19 nt, Artificial Sequence
  Description of Artificial Sequence: Synthetic oligonucleotide
auaccgauguucuugaggu

SEQ ID NO: 86152 - RNA, 19 nt, Artificial Sequence
  Description of Artificial Sequence: Synthetic oligonucleotide
uuaugaaguacuucuguac

SEQ ID NO: 86153 - RNA, 19 nt, Artificial Sequence
  Description of Artificial Sequence: Synthetic oligonucleotide
ugcgugacaacuuuaugcc

SEQ ID NO: 86154 - RNA, 19 nt, Artificial Sequence
  Description of Artificial Sequence: Synthetic oligonucleotide
auacuauuuucacaaaacu

SEQ ID NO: 86155 - RNA, 19 nt, Artificial Sequence
  Description of Artificial Sequence: Synthetic oligonucleotide
ucaacaacguacuguauac

SEQ ID NO: 86156 - RNA, 19 nt, Artificial Sequence
  Description of Artificial Sequence: Synthetic oligonucleotide
aucgaaaacuaacuuaacu

SEQ ID NO: 86157 - RNA, 19 nt, Artificial Sequence
  Description of Artificial Sequence: Synthetic oligonucleotide
cugcgugacaacuuuaugc

SEQ ID NO: 86158 - RNA, 19 nt, Artificial Sequence
  Description of Artificial Sequence: Synthetic oligonucleotide
ucgucuauaugucaguuuc

SEQ ID NO: 86159 - RNA, 19 nt, Artificial Sequence
  Description of Artificial Sequence: Synthetic oligonucleotide
uauauucagguaaacuccu

SEQ ID NO: 86160 - RNA, 19 nt, Artificial Sequence
  Description of Artificial Sequence: Synthetic oligonucleotide
uuuuagugggacuaccucu

SEQ ID NO: 86161 - RNA, 19 nt, Artificial Sequence
  Description of Artificial Sequence: Synthetic oligonucleotide
uuuaaucacucauuaaaua

SEQ ID NO: 86162 - RNA, 19 nt, Artificial Sequence
  Description of Artificial Sequence: Synthetic oligonucleotide
uugacgagaacacucggga

SEQ ID NO: 86163 - RNA, 19 nt, Artificial Sequence
  Description of Artificial Sequence: Synthetic oligonucleotide
uguacacgucacaugauca

SEQ ID NO: 86164 - RNA, 19 nt, Artificial Sequence
  Description of Artificial Sequence: Synthetic oligonucleotide
augaaguacuucuguacac

SEQ ID NO: 86165 - RNA, 19 nt, Artificial Sequence
  Description of Artificial Sequence: Synthetic oligonucleotide
ucaugguccacuacugucc

SEQ ID NO: 86166 - RNA, 19 nt, Artificial Sequence
  Description of Artificial Sequence: Synthetic oligonucleotide
uuuuagaguacacauccua

SEQ ID NO: 86167 - RNA, 19 nt, Artificial Sequence
  Description of Artificial Sequence: Synthetic oligonucleotide
ucuaagaacgucucagacu

SEQ ID NO: 86168 - RNA, 19 nt, Artificial Sequence
  Description of Artificial Sequence: Synthetic oligonucleotide
guccguuuucucuauaagg

SEQ ID NO: 86169 - RNA, 19 nt, Artificial Sequence
  Description of Artificial Sequence: Synthetic oligonucleotide
aggcaagccuacuuuaucg

SEQ ID NO: 86170 - RNA, 19 nt, Artificial Sequence
  Description of Artificial Sequence: Synthetic oligonucleotide
ucuacaacuguccuccuuc

SEQ ID NO: 86171 - RNA, 19 nt, Artificial Sequence
  Description of Artificial Sequence: Synthetic oligonucleotide
aagguaacuauaacuagug

SEQ ID NO: 86172 - RNA, 19 nt, Artificial Sequence
  Description of Artificial Sequence: Synthetic oligonucleotide
agguaacuauaacuagugc

SEQ ID NO: 86173 - RNA, 19 nt, Artificial Sequence
  Description of Artificial Sequence: Synthetic oligonucleotide
aauucugauccacuuguau

SEQ ID NO: 86174 - RNA, 19 nt, Artificial Sequence
  Description of Artificial Sequence: Synthetic oligonucleotide
cuuacguuaucacuagcag

SEQ ID NO: 86175 - RNA, 19 nt, Artificial Sequence
  Description of Artificial Sequence: Synthetic oligonucleotide
uucaacaacguacuguaua

SEQ ID NO: 86176 - RNA, 19 nt, Artificial Sequence
  Description of Artificial Sequence: Synthetic oligonucleotide
agcuaucucgcgcugugcc

SEQ ID NO: 86177 - RNA, 19 nt, Artificial Sequence
  Description of Artificial Sequence: Synthetic oligonucleotide
aauauaccugcgugacaac

SEQ ID NO: 86178 - RNA, 19 nt, Artificial Sequence
  Description of Artificial Sequence: Synthetic oligonucleotide
ugacaauuucaccagggaa

SEQ ID NO: 86179 - RNA, 19 nt, Artificial Sequence
  Description of Artificial Sequence: Synthetic oligonucleotide
uuuuggucuagcaggcaag

SEQ ID NO: 86180 - RNA, 19 nt, Artificial Sequence
  Description of Artificial Sequence: Synthetic oligonucleotide
uaaacagguucuaacuggu

SEQ ID NO: 86181 - RNA, 19 nt, Artificial Sequence
  Description of Artificial Sequence: Synthetic oligonucleotide
acuauaacuagugcccugg

SEQ ID NO: 86182 - RNA, 19 nt, Artificial Sequence
  Description of Artificial Sequence: Synthetic oligonucleotide
cugguuacggaaaccaagc

SEQ ID NO: 86183 - RNA, 19 nt, Artificial Sequence
  Description of Artificial Sequence: Synthetic oligonucleotide
uucaucgugauuacaaguu

SEQ ID NO: 86184 - RNA, 19 nt, Artificial Sequence
  Description of Artificial Sequence: Synthetic oligonucleotide
uuacaaguuaggaccacac

SEQ ID NO: 86185 - RNA, 19 nt, Artificial Sequence
  Description of Artificial Sequence: Synthetic oligonucleotide
ucguuuagucccuugaaaa

SEQ ID NO: 86186 - RNA, 19 nt, Artificial Sequence
  Description of Artificial Sequence: Synthetic oligonucleotide
ucuauaugucaguuucugc

SEQ ID NO: 86187 - RNA, 19 nt, Artificial Sequence
  Description of Artificial Sequence: Synthetic oligonucleotide
cugagggcgacuaugggag

SEQ ID NO: 86188 - RNA, 19 nt, Artificial Sequence
  Description of Artificial Sequence: Synthetic oligonucleotide
aaaauauaccugcgugaca

SEQ ID NO: 86189 - RNA, 19 nt, Artificial Sequence
  Description of Artificial Sequence: Synthetic oligonucleotide
cuugacgagaacacucggg

SEQ ID NO: 86190 - RNA, 19 nt, Artificial Sequence
  Description of Artificial Sequence: Synthetic oligonucleotide
augcacaacaaaauccagc

SEQ ID NO: 86191 - RNA, 19 nt, Artificial Sequence
  Description of Artificial Sequence: Synthetic oligonucleotide
cugacgagaacuagugccg

SEQ ID NO: 86192 - RNA, 19 nt, Artificial Sequence
  Description of Artificial Sequence: Synthetic oligonucleotide
uuacguuaucacuagcagu

SEQ ID NO: 86193 - RNA, 19 nt, Artificial Sequence
  Description of Artificial Sequence: Synthetic oligonucleotide
caucgugauuacaaguuag

SEQ ID NO: 86194 - RNA, 19 nt, Artificial Sequence
  Description of Artificial Sequence: Synthetic oligonucleotide
aacuucgucuauaugucag

SEQ ID NO: 86195 - RNA, 19 nt, Artificial Sequence
  Description of Artificial Sequence: Synthetic oligonucleotide
uuucgaaguucccaaggcu

SEQ ID NO: 86196 - RNA, 19 nt, Artificial Sequence
  Description of Artificial Sequence: Synthetic oligonucleotide
uacaagacaucgacaagcu

SEQ ID NO: 86197 - RNA, 19 nt, Artificial Sequence
  Description of Artificial Sequence: Synthetic oligonucleotide
uauucagguaaacuccuau

SEQ ID NO: 86198 - RNA, 19 nt, Artificial Sequence
  Description of Artificial Sequence: Synthetic oligonucleotide
aacuauaacuagugcccug

SEQ ID NO: 86199 - RNA, 19 nt, Artificial Sequence
  Description of Artificial Sequence: Synthetic oligonucleotide
cuauggcaguauuaagugg

SEQ ID NO: 86200 - RNA, 19 nt, Artificial Sequence
  Description of Artificial Sequence: Synthetic oligonucleotide
ugucaucugagccgaagca

SEQ ID NO: 86201 - RNA, 19 nt, Artificial Sequence
  Description of Artificial Sequence: Synthetic oligonucleotide
guuacggaaaccaagcaca

SEQ ID NO: 86202 - RNA, 19 nt, Artificial Sequence
  Description of Artificial Sequence: Synthetic oligonucleotide
uauaacuagugcccuggga

SEQ ID NO: 86203 - RNA, 19 nt, Artificial Sequence
  Description of Artificial Sequence: Synthetic oligonucleotide
aagccuacuuuaucgaaaa

SEQ ID NO: 86204 - RNA, 19 nt, Artificial Sequence
  Description of Artificial Sequence: Synthetic oligonucleotide
gugaccaccggacagugag

SEQ ID NO: 86205 - RNA, 19 nt, Artificial Sequence
  Description of Artificial Sequence: Synthetic oligonucleotide
guuuacaagagcugaguca

SEQ ID NO: 86206 - RNA, 19 nt, Artificial Sequence
  Description of Artificial Sequence: Synthetic oligonucleotide
ucuggaccgucacucaaag

SEQ ID NO: 86207 - RNA, 19 nt, Artificial Sequence
  Description of Artificial Sequence: Synthetic oligonucleotide
gaggggaaaauuaucacca

SEQ ID NO: 86208 - RNA, 19 nt, Artificial Sequence
  Description of Artificial Sequence: Synthetic oligonucleotide
aaacuucgucuauauguca

SEQ ID NO: 86209 - RNA, 19 nt, Artificial Sequence
  Description of Artificial Sequence: Synthetic oligonucleotide
uuauggaucuugugcagac

SEQ ID NO: 86210 - RNA, 19 nt, Artificial Sequence
  Description of Artificial Sequence: Synthetic oligonucleotide
cacuugacgagaacacucg

SEQ ID NO: 86211 - RNA, 19 nt, Artificial Sequence
  Description of Artificial Sequence: Synthetic oligonucleotide
ggucagauggcacaugucc

SEQ ID NO: 86212 - RNA, 19 nt, Artificial Sequence
  Description of Artificial Sequence: Synthetic oligonucleotide
uuacucuggcauuaacuca

SEQ ID NO: 86213 - RNA, 19 nt, Artificial Sequence
  Description of Artificial Sequence: Synthetic oligonucleotide
aucagugaccaccggacag

SEQ ID NO: 86214 - RNA, 19 nt, Artificial Sequence
  Description of Artificial Sequence: Synthetic oligonucleotide
aacuagugcccugggacac

SEQ ID NO: 86215 - RNA, 19 nt, Artificial Sequence
  Description of Artificial Sequence: Synthetic oligonucleotide
guauaaaagaaugcuugug

SEQ ID NO: 86216 - RNA, 19 nt, Artificial Sequence
  Description of Artificial Sequence: Synthetic oligonucleotide
gacaauuucaccagggaaa

SEQ ID NO: 86217 - RNA, 19 nt, Artificial Sequence
  Description of Artificial Sequence: Synthetic oligonucleotide
uuaggaccacaccauuaag

SEQ ID NO: 86218 - RNA, 19 nt, Artificial Sequence
  Description of Artificial Sequence: Synthetic oligonucleotide
agucccuugaaaacucugc

SEQ ID NO: 86219 - RNA, 19 nt, Artificial Sequence
  Description of Artificial Sequence: Synthetic oligonucleotide
ucgacaagcucguuuaguc

SEQ ID NO: 86220 - RNA, 19 nt, Artificial Sequence
  Description of Artificial Sequence: Synthetic oligonucleotide
uucgaggcgaaguucucag

SEQ ID NO: 86221 - RNA, 19 nt, Artificial Sequence
  Description of Artificial Sequence: Synthetic oligonucleotide
aucauugguuaaaacuucg

SEQ ID NO: 86222 - RNA, 19 nt, Artificial Sequence
  Description of Artificial Sequence: Synthetic oligonucleotide
ucuauaaggagaugcgguu

SEQ ID NO: 86223 - RNA, 19 nt, Artificial Sequence
  Description of Artificial Sequence: Synthetic oligonucleotide
gguaaacuccuauacauga

SEQ ID NO: 86224 - RNA, 19 nt, Artificial Sequence
  Description of Artificial Sequence: Synthetic oligonucleotide
acucacuuacguuaucacu

SEQ ID NO: 86225 - RNA, 19 nt, Artificial Sequence
  Description of Artificial Sequence: Synthetic oligonucleotide
auuuacucuggcauuaacu

SEQ ID NO: 86226 - RNA, 19 nt, Artificial Sequence
  Description of Artificial Sequence: Synthetic oligonucleotide
aacuagugccggcacucuc

SEQ ID NO: 86227 - RNA, 19 nt, Artificial Sequence
  Description of Artificial Sequence: Synthetic oligonucleotide
aguuagcuuuaugaaguac

SEQ ID NO: 86228 - RNA, 19 nt, Artificial Sequence
  Description of Artificial Sequence: Synthetic oligonucleotide
ucuggguuucugaaucccc

SEQ ID NO: 86229 - RNA, 19 nt, Artificial Sequence
  Description of Artificial Sequence: Synthetic oligonucleotide
gugcuauuguguuuagugc

SEQ ID NO: 86230 - RNA, 19 nt, Artificial Sequence
  Description of Artificial Sequence: Synthetic oligonucleotide
agaguacauauauaaguua

SEQ ID NO: 86231 - RNA, 19 nt, Artificial Sequence
  Description of Artificial Sequence: Synthetic oligonucleotide
caucauugguuaaaacuuc

SEQ ID NO: 86232 - RNA, 19 nt, Artificial Sequence
  Description of Artificial Sequence: Synthetic oligonucleotide
uaauguugugaaccagacu

SEQ ID NO: 86233 - RNA, 19 nt, Artificial Sequence
  Description of Artificial Sequence: Synthetic oligonucleotide
augcccgaguguccgaacc

SEQ ID NO: 86234 - RNA, 19 nt, Artificial Sequence
  Description of Artificial Sequence: Synthetic oligonucleotide
uaacuagugcccugggaca

SEQ ID NO: 86235 - RNA, 19 nt, Artificial Sequence
  Description of Artificial Sequence: Synthetic oligonucleotide
cucacuuacguuaucacua

SEQ ID NO: 86236 - RNA, 19 nt, Artificial Sequence
  Description of Artificial Sequence: Synthetic oligonucleotide
gcagacuacauuuaaucac

SEQ ID NO: 86237 - RNA, 19 nt, Artificial Sequence
  Description of Artificial Sequence: Synthetic oligonucleotide
uauuuguaacucacaucgu

SEQ ID NO: 86238 - RNA, 19 nt, Artificial Sequence
  Description of Artificial Sequence: Synthetic oligonucleotide
acaucgacaagcucguuua

SEQ ID NO: 86239 - RNA, 19 nt, Artificial Sequence
  Description of Artificial Sequence: Synthetic oligonucleotide
gcaacacggaguaagagag

SEQ ID NO: 86240 - RNA, 19 nt, Artificial Sequence
  Description of Artificial Sequence: Synthetic oligonucleotide
uaacucacaucguucugga

SEQ ID NO: 86241 - RNA, 19 nt, Artificial Sequence
  Description of Artificial Sequence: Synthetic oligonucleotide
ucaucgugauuacaaguua

SEQ ID NO: 86242 - RNA, 19 nt, Artificial Sequence
  Description of Artificial Sequence: Synthetic oligonucleotide
aagaacgucucagacuuau

SEQ ID NO: 86243 - RNA, 19 nt, Artificial Sequence
  Description of Artificial Sequence: Synthetic oligonucleotide
ucgugauuacaaguuagga

SEQ ID NO: 86244 - RNA, 19 nt, Artificial Sequence
  Description of Artificial Sequence: Synthetic oligonucleotide
aucgugauuacaaguuagg

SEQ ID NO: 86245 - RNA, 19 nt, Artificial Sequence
  Description of Artificial Sequence: Synthetic oligonucleotide
acacaggcgaccucuuauc

SEQ ID NO: 86246 - RNA, 19 nt, Artificial Sequence
  Description of Artificial Sequence: Synthetic oligonucleotide
acaagacaucgacaagcuc

SEQ ID NO: 86247 - RNA, 19 nt, Artificial Sequence
  Description of Artificial Sequence: Synthetic oligonucleotide
cauuauucaacaacguacu

SEQ ID NO: 86248 - RNA, 19 nt, Artificial Sequence
  Description of Artificial Sequence: Synthetic oligonucleotide
aaguuagguguucggccug

SEQ ID NO: 86249 - RNA, 19 nt, Artificial Sequence
  Description of Artificial Sequence: Synthetic oligonucleotide
uuaaguggcccuuccucac

SEQ ID NO: 86250 - RNA, 19 nt, Artificial Sequence
  Description of Artificial Sequence: Synthetic oligonucleotide
gucuauaugucaguuucug

SEQ ID NO: 86251 - RNA, 19 nt, Artificial Sequence
  Description of Artificial Sequence: Synthetic oligonucleotide
aguuacuaccacuggcacu

SEQ ID NO: 86252 - RNA, 19 nt, Artificial Sequence
  Description of Artificial Sequence: Synthetic oligonucleotide
ugcaacacauaggaaccag

SEQ ID NO: 86253 - RNA, 19 nt, Artificial Sequence
  Description of Artificial Sequence: Synthetic oligonucleotide
cuugugaacucuugcucac

SEQ ID NO: 86254 - RNA, 19 nt, Artificial Sequence
  Description of Artificial Sequence: Synthetic oligonucleotide
caaaacugaaagcuacuga

SEQ ID NO: 86255 - RNA, 19 nt, Artificial Sequence
  Description of Artificial Sequence: Synthetic oligonucleotide
ugguuacggaaaccaagca

SEQ ID NO: 86256 - RNA, 19 nt, Artificial Sequence
  Description of Artificial Sequence: Synthetic oligonucleotide
uauaccugcgugacaacuu

SEQ ID NO: 86257 - RNA, 19 nt, Artificial Sequence
  Description of Artificial Sequence: Synthetic oligonucleotide
gacucacuuacguuaucac

SEQ ID NO: 86258 - RNA, 19 nt, Artificial Sequence
  Description of Artificial Sequence: Synthetic oligonucleotide
uaagaucuaaaggacuuuu

SEQ ID NO: 86259 - RNA, 19 nt, Artificial Sequence
  Description of Artificial Sequence: Synthetic oligonucleotide
guccgaaccgcacacagca

SEQ ID NO: 86260 - RNA, 19 nt, Artificial Sequence
  Description of Artificial Sequence: Synthetic oligonucleotide
uaacuauaacuagugcccu

SEQ ID NO: 86261 - RNA, 19 nt, Artificial Sequence
  Description of Artificial Sequence: Synthetic oligonucleotide
cuaagaacgucucagacuu

SEQ ID NO: 86262 - RNA, 19 nt, Artificial Sequence
  Description of Artificial Sequence: Synthetic oligonucleotide
uuagucccuugaaaacucu

SEQ ID NO: 86263 - RNA, 19 nt, Artificial Sequence
  Description of Artificial Sequence: Synthetic oligonucleotide
uucagcuaaagaugucauc

SEQ ID NO: 86264 - RNA, 19 nt, Artificial Sequence
  Description of Artificial Sequence: Synthetic oligonucleotide
ugacgagaacuagugccgg

SEQ ID NO: 86265 - RNA, 19 nt, Artificial Sequence
  Description of Artificial Sequence: Synthetic oligonucleotide
cuguacacgucacaugauc

SEQ ID NO: 86266 - RNA, 19 nt, Artificial Sequence
  Description of Artificial Sequence: Synthetic oligonucleotide
caccccaugagcugguuac

SEQ ID NO: 86267 - RNA, 19 nt, Artificial Sequence
  Description of Artificial Sequence: Synthetic oligonucleotide
cucgggagcucucaugccc

SEQ ID NO: 86268 - RNA, 19 nt, Artificial Sequence
  Description of Artificial Sequence: Synthetic oligonucleotide
cuauaacuagugcccuggg

SEQ ID NO: 86269 - RNA, 19 nt, Artificial Sequence
  Description of Artificial Sequence: Synthetic oligonucleotide
guaguuggggucaagguaa

SEQ ID NO: 86270 - RNA, 19 nt, Artificial Sequence
  Description of Artificial Sequence: Synthetic oligonucleotide
ucccgacaaaugaacauua

SEQ ID NO: 86271 - RNA, 19 nt, Artificial Sequence
  Description of Artificial Sequence: Synthetic oligonucleotide
auauaccugcgugacaacu

SEQ ID NO: 86272 - RNA, 19 nt, Artificial Sequence
  Description of Artificial Sequence: Synthetic oligonucleotide
agcuuuaguuagcuuuaug

SEQ ID NO: 86273 - RNA, 19 nt, Artificial Sequence
  Description of Artificial Sequence: Synthetic oligonucleotide
acuucgucuauaugucagu

SEQ ID NO: 86274 - RNA, 19 nt, Artificial Sequence
  Description of Artificial Sequence: Synthetic oligonucleotide
acuacccaaagaacauugg

SEQ ID NO: 86275 - RNA, 19 nt, Artificial Sequence
  Description of Artificial Sequence: Synthetic oligonucleotide
cacaucguucuggaaagcc

SEQ ID NO: 86276 - RNA, 19 nt, Artificial Sequence
  Description of Artificial Sequence: Synthetic oligonucleotide
caguucaucgugauuacaa

SEQ ID NO: 86277 - RNA, 19 nt, Artificial Sequence
  Description of Artificial Sequence: Synthetic oligonucleotide
guguccgaaccgcacacag

SEQ ID NO: 86278 - RNA, 19 nt, Artificial Sequence
  Description of Artificial Sequence: Synthetic oligonucleotide
caggcgaccucuuaucauc

SEQ ID NO: 86279 - RNA, 19 nt, Artificial Sequence
  Description of Artificial Sequence: Synthetic oligonucleotide
cuacccaaagaacauugga

SEQ ID NO: 86280 - RNA, 19 nt, Artificial Sequence
  Description of Artificial Sequence: Synthetic oligonucleotide
agccuacuuuaucgaaaac

SEQ ID NO: 86281 - RNA, 19 nt, Artificial Sequence
  Description of Artificial Sequence: Synthetic oligonucleotide
uguccgaaccgcacacagc

SEQ ID NO: 86282 - RNA, 19 nt, Artificial Sequence
  Description of Artificial Sequence: Synthetic oligonucleotide
ugguuaaaacuucgucuau

SEQ ID NO: 86283 - RNA, 19 nt, Artificial Sequence
  Description of Artificial Sequence: Synthetic oligonucleotide
ccuacaaggcucucugugg

SEQ ID NO: 86284 - RNA, 19 nt, Artificial Sequence
  Description of Artificial Sequence: Synthetic oligonucleotide
cgugauuacaaguuaggac

SEQ ID NO: 86285 - RNA, 19 nt, Artificial Sequence
  Description of Artificial Sequence: Synthetic oligonucleotide
caacacggaguaagagagg

SEQ ID NO: 86286 - RNA, 19 nt, Artificial Sequence
  Description of Artificial Sequence: Synthetic oligonucleotide
cuugagguucagcuaaaga

SEQ ID NO: 86287 - RNA, 19 nt, Artificial Sequence
  Description of Artificial Sequence: Synthetic oligonucleotide
uucuggaccgucacucaaa

SEQ ID NO: 86288 - RNA, 19 nt, Artificial Sequence
  Description of Artificial Sequence: Synthetic oligonucleotide
ggucaagguaacuauaacu

SEQ ID NO: 86289 - RNA, 19 nt, Artificial Sequence
  Description of Artificial Sequence: Synthetic oligonucleotide
uauucacucuggccucuga

SEQ ID NO: 86290 - RNA, 19 nt, Artificial Sequence
  Description of Artificial Sequence: Synthetic oligonucleotide
agguucuaacuggugaucu

SEQ ID NO: 86291 - RNA, 19 nt, Artificial Sequence
  Description of Artificial Sequence: Synthetic oligonucleotide
aaagaacauuggagucugg

SEQ ID NO: 86292 - RNA, 19 nt, Artificial Sequence
  Description of Artificial Sequence: Synthetic oligonucleotide
gacgagaacuagugccggc

SEQ ID NO: 86293 - RNA, 19 nt, Artificial Sequence
  Description of Artificial Sequence: Synthetic oligonucleotide
acaacguacuguauacaca

SEQ ID NO: 86294 - RNA, 19 nt, Artificial Sequence
  Description of Artificial Sequence: Synthetic oligonucleotide
caucacgaucaccaccuac

SEQ ID NO: 86295 - RNA, 19 nt, Artificial Sequence
  Description of Artificial Sequence: Synthetic oligonucleotide
uucgucuauaugucaguuu

SEQ ID NO: 86296 - RNA, 19 nt, Artificial Sequence
  Description of Artificial Sequence: Synthetic oligonucleotide
cucuauaaggagaugcggu

SEQ ID NO: 86297 - RNA, 19 nt, Artificial Sequence
  Description of Artificial Sequence: Synthetic oligonucleotide
cuacuuuaucgaaaacuaa

SEQ ID NO: 86298 - RNA, 19 nt, Artificial Sequence
  Description of Artificial Sequence: Synthetic oligonucleotide
acuggcggcucaugggaag

SEQ ID NO: 86299 - RNA, 19 nt, Artificial Sequence
  Description of Artificial Sequence: Synthetic oligonucleotide
acacgucacaugaucaucu

SEQ ID NO: 86300 - RNA, 19 nt, Artificial Sequence
  Description of Artificial Sequence: Synthetic oligonucleotide
uaucaucugagggcgacua

SEQ ID NO: 86301 - RNA, 19 nt, Artificial Sequence
  Description of Artificial Sequence: Synthetic oligonucleotide
gguauaccgauguucuuga

SEQ ID NO: 86302 - RNA, 19 nt, Artificial Sequence
  Description of Artificial Sequence: Synthetic oligonucleotide
guucaucgugauuacaagu

SEQ ID NO: 86303 - RNA, 19 nt, Artificial Sequence
  Description of Artificial Sequence: Synthetic oligonucleotide
uacacgucacaugaucauc

SEQ ID NO: 86304 - RNA, 19 nt, Artificial Sequence
  Description of Artificial Sequence: Synthetic oligonucleotide
ggcaacacggaguaagaga

SEQ ID NO: 86305 - RNA, 19 nt, Artificial Sequence
  Description of Artificial Sequence: Synthetic oligonucleotide
aacacucgggagcucucau

SEQ ID NO: 86306 - RNA, 19 nt, Artificial Sequence
  Description of Artificial Sequence: Synthetic oligonucleotide
aaggcaacacggaguaaga

SEQ ID NO: 86307 - RNA, 19 nt, Artificial Sequence
  Description of Artificial Sequence: Synthetic oligonucleotide
gguauggaagcccuauauc

SEQ ID NO: 86308 - RNA, 19 nt, Artificial Sequence
  Description of Artificial Sequence: Synthetic oligonucleotide
uagcaggcaagccuacuuu

SEQ ID NO: 86309 - RNA, 19 nt, Artificial Sequence
  Description of Artificial Sequence: Synthetic oligonucleotide
ggguauaccgauguucuug

SEQ ID NO: 86310 - RNA, 19 nt, Artificial Sequence
  Description of Artificial Sequence: Synthetic oligonucleotide
agcugcacuugacgagaac

SEQ ID NO: 86311 - RNA, 19 nt, Artificial Sequence
  Description of Artificial Sequence: Synthetic oligonucleotide
acaggagcggucaucgucu

SEQ ID NO: 86312 - RNA, 19 nt, Artificial Sequence
  Description of Artificial Sequence: Synthetic oligonucleotide
ucgcugguaacacucucuu

SEQ ID NO: 86313 - RNA, 19 nt, Artificial Sequence
  Description of Artificial Sequence: Synthetic oligonucleotide
caagccuacuuuaucgaaa

SEQ ID NO: 86314 - RNA, 19 nt, Artificial Sequence
  Description of Artificial Sequence: Synthetic oligonucleotide
acgagaacacucgggagcu

SEQ ID NO: 86315 - RNA, 19 nt, Artificial Sequence
  Description of Artificial Sequence: Synthetic oligonucleotide
cuauaucggccuucuucug

SEQ ID NO: 86316 - RNA, 19 nt, Artificial Sequence
  Description of Artificial Sequence: Synthetic oligonucleotide
guuacuaccacuggcacuu

SEQ ID NO: 86317 - RNA, 19 nt, Artificial Sequence
  Description of Artificial Sequence: Synthetic oligonucleotide
gguuaauguugugaaccag

SEQ ID NO: 86318 - RNA, 19 nt, Artificial Sequence
  Description of Artificial Sequence: Synthetic oligonucleotide
gguucuacaccacaguuau

SEQ ID NO: 86319 - RNA, 19 nt, Artificial Sequence
  Description of Artificial Sequence: Synthetic oligonucleotide
guauaccgauguucuugag

SEQ ID NO: 86320 - RNA, 19 nt, Artificial Sequence
  Description of Artificial Sequence: Synthetic oligonucleotide
ucguucuggaaagccuuug

SEQ ID NO: 86321 - RNA, 19 nt, Artificial Sequence
  Description of Artificial Sequence: Synthetic oligonucleotide
gagggcgacuaugggagcc

SEQ ID NO: 86322 - RNA, 19 nt, Artificial Sequence
  Description of Artificial Sequence: Synthetic oligonucleotide
cccuauaucggccuucuuc

SEQ ID NO: 86323 - RNA, 19 nt, Artificial Sequence
  Description of Artificial Sequence: Synthetic oligonucleotide
aucgacaagcucguuuagu

SEQ ID NO: 86324 - RNA, 19 nt, Artificial Sequence
  Description of Artificial Sequence: Synthetic oligonucleotide
cuuuaucgaaaacuaacuu

SEQ ID NO: 86325 - RNA, 19 nt, Artificial Sequence
  Description of Artificial Sequence: Synthetic oligonucleotide
acaggcgaccucuuaucau

SEQ ID NO: 86326 - RNA, 19 nt, Artificial Sequence
  Description of Artificial Sequence: Synthetic oligonucleotide
guacacauccuagaagcaa

SEQ ID NO: 86327 - RNA, 19 nt, Artificial Sequence
  Description of Artificial Sequence: Synthetic oligonucleotide
ugcccuucgaggcgaaguu

SEQ ID NO: 86328 - RNA, 19 nt, Artificial Sequence
  Description of Artificial Sequence: Synthetic oligonucleotide
ggguuaauguugugaacca

SEQ ID NO: 86329 - RNA, 19 nt, Artificial Sequence
  Description of Artificial Sequence: Synthetic oligonucleotide
accaccggacagugaguuc

SEQ ID NO: 86330 - RNA, 19 nt, Artificial Sequence
  Description of Artificial Sequence: Synthetic oligonucleotide
gggaaaauuaucaccauau

SEQ ID NO: 86331 - RNA, 19 nt, Artificial Sequence
  Description of Artificial Sequence: Synthetic oligonucleotide
acagucuagcagagaggcg

SEQ ID NO: 86332 - RNA, 19 nt, Artificial Sequence
  Description of Artificial Sequence: Synthetic oligonucleotide
ucuagcaggcaagccuacu

SEQ ID NO: 86333 - RNA, 19 nt, Artificial Sequence
  Description of Artificial Sequence: Synthetic oligonucleotide
ggaaaauuaucaccauaua

SEQ ID NO: 86334 - RNA, 19 nt, Artificial Sequence
  Description of Artificial Sequence: Synthetic oligonucleotide
cguuuagucccuugaaaac

SEQ ID NO: 86335 - RNA, 19 nt, Artificial Sequence
  Description of Artificial Sequence: Synthetic oligonucleotide
caaguuaggaccacaccau

SEQ ID NO: 86336 - RNA, 19 nt, Artificial Sequence
  Description of Artificial Sequence: Synthetic oligonucleotide
accgucacucaaaggcaac

SEQ ID NO: 86337 - RNA, 19 nt, Artificial Sequence
  Description of Artificial Sequence: Synthetic oligonucleotide
ugaccaccggacagugagu

SEQ ID NO: 86338 - RNA, 19 nt, Artificial Sequence
  Description of Artificial Sequence: Synthetic oligonucleotide
ugagggcgacuaugggagc

SEQ ID NO: 86339 - RNA, 19 nt, Artificial Sequence
  Description of Artificial Sequence: Synthetic oligonucleotide
auccaauacaagacaucga

SEQ ID NO: 86340 - RNA, 19 nt, Artificial Sequence
  Description of Artificial Sequence: Synthetic oligonucleotide
ucccgucaggcugacaguc

SEQ ID NO: 86341 - RNA, 19 nt, Artificial Sequence
  Description of Artificial Sequence: Synthetic oligonucleotide
cagucaaauagccugugau

SEQ ID NO: 86342 - RNA, 19 nt, Artificial Sequence
  Description of Artificial Sequence: Synthetic oligonucleotide
acacggaguaagagagggg

SEQ ID NO: 86343 - RNA, 19 nt, Artificial Sequence
  Description of Artificial Sequence: Synthetic oligonucleotide
cugagauuacucuccucaa

SEQ ID NO: 86344 - RNA, 19 nt, Artificial Sequence
  Description of Artificial Sequence: Synthetic oligonucleotide
agaacacucgggagcucuc

SEQ ID NO: 86345 - RNA, 19 nt, Artificial Sequence
  Description of Artificial Sequence: Synthetic oligonucleotide
cacauaggaaccagugcua

SEQ ID NO: 86346 - RNA, 19 nt, Artificial Sequence
  Description of Artificial Sequence: Synthetic oligonucleotide
agguucuacaccacaguua

SEQ ID NO: 86347 - RNA, 19 nt, Artificial Sequence
  Description of Artificial Sequence: Synthetic oligonucleotide
gagacucacuuacguuauc

SEQ ID NO: 86348 - RNA, 19 nt, Artificial Sequence
  Description of Artificial Sequence: Synthetic oligonucleotide
cauccgacgccuccuccac

SEQ ID NO: 86349 - RNA, 19 nt, Artificial Sequence
  Description of Artificial Sequence: Synthetic oligonucleotide
uaagaacgucucagacuua

SEQ ID NO: 86350 - RNA, 19 nt, Artificial Sequence
  Description of Artificial Sequence: Synthetic oligonucleotide
agcucucaugcccgagugu

SEQ ID NO: 86351 - RNA, 19 nt, Artificial Sequence
  Description of Artificial Sequence: Synthetic oligonucleotide
cacaggcgaccucuuauca

SEQ ID NO: 86352 - RNA, 19 nt, Artificial Sequence
  Description of Artificial Sequence: Synthetic oligonucleotide
gcuaucucgcgcugugccc

SEQ ID NO: 86353 - RNA, 19 nt, Artificial Sequence
  Description of Artificial Sequence: Synthetic oligonucleotide
guguucggccuggaacugg

SEQ ID NO: 86354 - RNA, 19 nt, Artificial Sequence
  Description of Artificial Sequence: Synthetic oligonucleotide
gcacuugacgagaacacuc

SEQ ID NO: 86355 - RNA, 19 nt, Artificial Sequence
  Description of Artificial Sequence: Synthetic oligonucleotide
cagguucuaacuggugauc

SEQ ID NO: 86356 - RNA, 19 nt, Artificial Sequence
  Description of Artificial Sequence: Synthetic oligonucleotide
gaccagaucugagcuauua

SEQ ID NO: 86357 - RNA, 19 nt, Artificial Sequence
  Description of Artificial Sequence: Synthetic oligonucleotide
cugugcagacuacauuuaa

SEQ ID NO: 86358 - RNA, 19 nt, Artificial Sequence
  Description of Artificial Sequence: Synthetic oligonucleotide
gagaacacucgggagcucu

SEQ ID NO: 86359 - RNA, 19 nt, Artificial Sequence
  Description of Artificial Sequence: Synthetic oligonucleotide
ccuauaucggccuucuucu

SEQ ID NO: 86360 - RNA, 19 nt, Artificial Sequence
  Description of Artificial Sequence: Synthetic oligonucleotide
uaccugcgugacaacuuua

SEQ ID NO: 86361 - RNA, 19 nt, Artificial Sequence
  Description of Artificial Sequence: Synthetic oligonucleotide
gccuacuuuaucgaaaacu

SEQ ID NO: 86362 - RNA, 19 nt, Artificial Sequence
  Description of Artificial Sequence: Synthetic oligonucleotide
ggcucaugggaagucauga

SEQ ID NO: 86363 - RNA, 19 nt, Artificial Sequence
  Description of Artificial Sequence: Synthetic oligonucleotide
gaacacucgggagcucuca

SEQ ID NO: 86364 - RNA, 19 nt, Artificial Sequence
  Description of Artificial Sequence: Synthetic oligonucleotide
cuacaaggcucucuguggu

SEQ ID NO: 86365 - RNA, 19 nt, Artificial Sequence
  Description of Artificial Sequence: Synthetic oligonucleotide
cgacaagcucguuuagucc

SEQ ID NO: 86366 - RNA, 19 nt, Artificial Sequence
  Description of Artificial Sequence: Synthetic oligonucleotide
cauauacacuggcggcuca

SEQ ID NO: 86367 - RNA, 19 nt, Artificial Sequence
  Description of Artificial Sequence: Synthetic oligonucleotide
gaccgucacucaaaggcaa

SEQ ID NO: 86368 - RNA, 19 nt, Artificial Sequence
  Description of Artificial Sequence: Synthetic oligonucleotide
acaagcucguuuagucccu

SEQ ID NO: 86369 - RNA, 19 nt, Artificial Sequence
  Description of Artificial Sequence: Synthetic oligonucleotide
guacacgucacaugaucau

SEQ ID NO: 86370 - RNA, 19 nt, Artificial Sequence
  Description of Artificial Sequence: Synthetic oligonucleotide
accugcgugacaacuuuau

SEQ ID NO: 86371 - RNA, 19 nt, Artificial Sequence
  Description of Artificial Sequence: Synthetic oligonucleotide
caacaacguacuguauaca

SEQ ID NO: 86372 - RNA, 19 nt, Artificial Sequence
  Description of Artificial Sequence: Synthetic oligonucleotide
caugcccgaguguccgaac

SEQ ID NO: 86373 - RNA, 19 nt, Artificial Sequence
  Description of Artificial Sequence: Synthetic oligonucleotide
cucgcgcugugcccugggg

SEQ ID NO: 86374 - RNA, 19 nt, Artificial Sequence
  Description of Artificial Sequence: Synthetic oligonucleotide
gcgaccucuuaucaucuga

SEQ ID NO: 86375 - RNA, 19 nt, Artificial Sequence
  Description of Artificial Sequence: Synthetic oligonucleotide
auauucagguaaacuccua

SEQ ID NO: 86376 - RNA, 19 nt, Artificial Sequence
  Description of Artificial Sequence: Synthetic oligonucleotide
caucguucuggaaagccuu

SEQ ID NO: 86377 - RNA, 19 nt, Artificial Sequence
  Description of Artificial Sequence: Synthetic oligonucleotide
acaccccaugagcugguua

SEQ ID NO: 86378 - RNA, 19 nt, Artificial Sequence
  Description of Artificial Sequence: Synthetic oligonucleotide
gcaagccuacuuuaucgaa

SEQ ID NO: 86379 - RNA, 19 nt, Artificial Sequence
  Description of Artificial Sequence: Synthetic oligonucleotide
ggaggguauuucaggagga

SEQ ID NO: 86380 - RNA, 19 nt, Artificial Sequence
  Description of Artificial Sequence: Synthetic oligonucleotide
aggcgaccucuuaucaucu

SEQ ID NO: 86381 - RNA, 19 nt, Artificial Sequence
  Description of Artificial Sequence: Synthetic oligonucleotide
gaauccccauuuccagcua

SEQ ID NO: 86382 - RNA, 19 nt, Artificial Sequence
  Description of Artificial Sequence: Synthetic oligonucleotide
acuagugcccugggacaca

SEQ ID NO: 86383 - RNA, 19 nt, Artificial Sequence
  Description of Artificial Sequence: Synthetic oligonucleotide
ggaccgucacucaaaggca

SEQ ID NO: 86384 - RNA, 19 nt, Artificial Sequence
  Description of Artificial Sequence: Synthetic oligonucleotide
cugcaacacauaggaacca

SEQ ID NO: 86385 - RNA, 19 nt, Artificial Sequence
  Description of Artificial Sequence: Synthetic oligonucleotide
ccugcgugacaacuuuaug

SEQ ID NO: 86386 - RNA, 19 nt, Artificial Sequence
  Description of Artificial Sequence: Synthetic oligonucleotide
cagcuaucucgcgcugugc

SEQ ID NO: 86387 - RNA, 19 nt, Artificial Sequence
  Description of Artificial Sequence: Synthetic oligonucleotide
cuuguaugguuugaacuuu

SEQ ID NO: 86388 - RNA, 19 nt, Artificial Sequence
  Description of Artificial Sequence: Synthetic oligonucleotide
auccgacgccuccuccaca

SEQ ID NO: 86389 - RNA, 19 nt, Artificial Sequence
  Description of Artificial Sequence: Synthetic oligonucleotide
cuauaaggagaugcgguuu

SEQ ID NO: 86390 - RNA, 19 nt, Artificial Sequence
  Description of Artificial Sequence: Synthetic oligonucleotide
ggaagcccuauaucggccu

SEQ ID NO: 86391 - RNA, 19 nt, Artificial Sequence
  Description of Artificial Sequence: Synthetic oligonucleotide
ggcgaccucuuaucaucug

SEQ ID NO: 86392 - RNA, 19 nt, Artificial Sequence
  Description of Artificial Sequence: Synthetic oligonucleotide
ccauauacacuggcggcuc

SEQ ID NO: 86393 - RNA, 19 nt, Artificial Sequence
  Description of Artificial Sequence: Synthetic oligonucleotide
cuaucucgcgcugugcccu

SEQ ID NO: 86394 - RNA, 19 nt, Artificial Sequence
  Description of Artificial Sequence: Synthetic oligonucleotide
gccgagacucuacuuccuc

SEQ ID NO: 86395 - RNA, 19 nt, Artificial Sequence
  Description of Artificial Sequence: Synthetic oligonucleotide
gaccaccggacagugaguu

SEQ ID NO: 86396 - RNA, 19 nt, Artificial Sequence
  Description of Artificial Sequence: Synthetic oligonucleotide
gaacuagugccggcacucu

SEQ ID NO: 86397 - RNA, 19 nt, Artificial Sequence
  Description of Artificial Sequence: Synthetic oligonucleotide
agaacgucucagacuuaua

SEQ ID NO: 86398 - RNA, 19 nt, Artificial Sequence
  Description of Artificial Sequence: Synthetic oligonucleotide
cuucgucuauaugucaguu

SEQ ID NO: 86399 - RNA, 19 nt, Artificial Sequence
  Description of Artificial Sequence: Synthetic oligonucleotide
cguacuguauacacagaua

SEQ ID NO: 86400 - RNA, 19 nt, Artificial Sequence
  Description of Artificial Sequence: Synthetic oligonucleotide
ggagcucucaugcccgagu

SEQ ID NO: 86401 - RNA, 19 nt, Artificial Sequence
  Description of Artificial Sequence: Synthetic oligonucleotide
cucaugcccgaguguccga

SEQ ID NO: 86402 - RNA, 19 nt, Artificial Sequence
  Description of Artificial Sequence: Synthetic oligonucleotide
gagcugcacuugacgagaa

SEQ ID NO: 86403 - RNA, 19 nt, Artificial Sequence
  Description of Artificial Sequence: Synthetic oligonucleotide
uuacuaccacuggcacuuu

SEQ ID NO: 86404 - RNA, 19 nt, Artificial Sequence
  Description of Artificial Sequence: Synthetic oligonucleotide
ccuucgaggcgaaguucuc

SEQ ID NO: 86405 - RNA, 19 nt, Artificial Sequence
  Description of Artificial Sequence: Synthetic oligonucleotide
gcgacuaugggagccuucu

SEQ ID NO: 86406 - RNA, 19 nt, Artificial Sequence
  Description of Artificial Sequence: Synthetic oligonucleotide
cagucgcugguaacacucu

SEQ ID NO: 86407 - RNA, 19 nt, Artificial Sequence
  Description of Artificial Sequence: Synthetic oligonucleotide
gggagcucucaugcccgag

SEQ ID NO: 86408 - RNA, 19 nt, Artificial Sequence
  Description of Artificial Sequence: Synthetic oligonucleotide
ggcggcucaugggaaguca

SEQ ID NO: 86409 - RNA, 19 nt, Artificial Sequence
  Description of Artificial Sequence: Synthetic oligonucleotide
cugcccuucgaggcgaagu

SEQ ID NO: 86410 - RNA, 19 nt, Artificial Sequence
  Description of Artificial Sequence: Synthetic oligonucleotide
cacgucacaugaucaucuu

SEQ ID NO: 86411 - RNA, 19 nt, Artificial Sequence
  Description of Artificial Sequence: Synthetic oligonucleotide
ccaugaaaacaggagcggu

SEQ ID NO: 86412 - RNA, 19 nt, Artificial Sequence
  Description of Artificial Sequence: Synthetic oligonucleotide
ccgcacacagcaccaacaa

SEQ ID NO: 86413 - RNA, 19 nt, Artificial Sequence
  Description of Artificial Sequence: Synthetic oligonucleotide
ccgucacucaaaggcaaca

SEQ ID NO: 86414 - RNA, 19 nt, Artificial Sequence
  Description of Artificial Sequence: Synthetic oligonucleotide
agaugucaucugagccgaa

SEQ ID NO: 86415 - RNA, 19 nt, Artificial Sequence
  Description of Artificial Sequence: Synthetic oligonucleotide
cacagcuaucucgcgcugu

SEQ ID NO: 86416 - RNA, 19 nt, Artificial Sequence
  Description of Artificial Sequence: Synthetic oligonucleotide
ccgaacacccuggauaggu

SEQ ID NO: 86417 - RNA, 19 nt, Artificial Sequence
  Description of Artificial Sequence: Synthetic oligonucleotide
ggcgacuaugggagccuuc

SEQ ID NO: 86418 - RNA, 19 nt, Artificial Sequence
  Description of Artificial Sequence: Synthetic oligonucleotide
cgacuaugggagccuucug

SEQ ID NO: 86419 - RNA, 19 nt, Artificial Sequence
  Description of Artificial Sequence: Synthetic oligonucleotide
gcgcugugcccuggggaag

SEQ ID NO: 86420 - RNA, 19 nt, Artificial Sequence
  Description of Artificial Sequence: Synthetic oligonucleotide
caccaacaaugaugccagu

SEQ ID NO: 86421 - RNA, 19 nt, Artificial Sequence
  Description of Artificial Sequence: Synthetic oligonucleotide
gcugcccuucgaggcgaag

SEQ ID NO: 86422 - RNA, 19 nt, Artificial Sequence
  Description of Artificial Sequence: Synthetic oligonucleotide
cccgacaaaugaacauuau

SEQ ID NO: 86423 - RNA, 19 nt, Artificial Sequence
  Description of Artificial Sequence: Synthetic oligonucleotide
caggagcggucaucgucuu

SEQ ID NO: 86424 - RNA, 19 nt, Artificial Sequence
  Description of Artificial Sequence: Synthetic oligonucleotide
caagcucguuuagucccuu

SEQ ID NO: 86425 - RNA, 19 nt, Artificial Sequence
  Description of Artificial Sequence: Synthetic oligonucleotide
gcggcucaugggaagucau

SEQ ID NO: 86426 - RNA, 19 nt, Artificial Sequence
  Description of Artificial Sequence: Synthetic oligonucleotide
cacaccccaugagcugguu

SEQ ID NO: 86427 - RNA, 19 nt, Artificial Sequence
  Description of Artificial Sequence: Synthetic oligonucleotide
gggcgacuaugggagccuu

SEQ ID NO: 86428 - RNA, 19 nt, Artificial Sequence
  Description of Artificial Sequence: Synthetic oligonucleotide
aaagcaacgugucugaagg

SEQ ID NO: 86429 - RNA, 19 nt, Artificial Sequence
  Description of Artificial Sequence: Synthetic oligonucleotide
auaucuaggaucuagaucu

SEQ ID NO: 86430 - RNA, 19 nt, Artificial Sequence
  Description of Artificial Sequence: Synthetic oligonucleotide
uuuacuagcugcaacaucc

SEQ ID NO: 86431 - RNA, 19 nt, Artificial Sequence
  Description of Artificial Sequence: Synthetic oligonucleotide
aauaguaaaaccaagcgca

SEQ ID NO: 86432 - RNA, 19 nt, Artificial Sequence
  Description of Artificial Sequence: Synthetic oligonucleotide
agguuaauuaaacauuucc

SEQ ID NO: 86433 - RNA, 19 nt, Artificial Sequence
  Description of Artificial Sequence: Synthetic oligonucleotide
aauaucuaggaucuagauc

SEQ ID NO: 86434 - RNA, 19 nt, Artificial Sequence
  Description of Artificial Sequence: Synthetic oligonucleotide
uuugacuauauacagaagu

SEQ ID NO: 86435 - RNA, 19 nt, Artificial Sequence
  Description of Artificial Sequence: Synthetic oligonucleotide
uguaaaguuaaauuggcca

SEQ ID NO: 86436 - RNA, 19 nt, Artificial Sequence
  Description of Artificial Sequence: Synthetic oligonucleotide
aauauuauguccuuagcau

SEQ ID NO: 86437 - RNA, 19 nt, Artificial Sequence
  Description of Artificial Sequence: Synthetic oligonucleotide
aaaucuaauaaauguagga

SEQ ID NO: 86438 - RNA, 19 nt, Artificial Sequence
  Description of Artificial Sequence: Synthetic oligonucleotide
ucacauaacaacuacaggu

SEQ ID NO: 86439 - RNA, 19 nt, Artificial Sequence
  Description of Artificial Sequence: Synthetic oligonucleotide
uauucuaauaucuaggauc

SEQ ID NO: 86440 - RNA, 19 nt, Artificial Sequence
  Description of Artificial Sequence: Synthetic oligonucleotide
ugcggaaagaacaagaucu

SEQ ID NO: 86441 - RNA, 19 nt, Artificial Sequence
  Description of Artificial Sequence: Synthetic oligonucleotide
uuauuuauaacaaggccug

SEQ ID NO: 86442 - RNA, 19 nt, Artificial Sequence
  Description of Artificial Sequence: Synthetic oligonucleotide
uaauauuauguccuuagca

SEQ ID NO: 86443 - RNA, 19 nt, Artificial Sequence
  Description of Artificial Sequence: Synthetic oligonucleotide
uucccuguaaccaacauug

SEQ ID NO: 86444 - RNA, 19 nt, Artificial Sequence
  Description of Artificial Sequence: Synthetic oligonucleotide
auaagcaacaaaauguggc

SEQ ID NO: 86445 - RNA, 19 nt, Artificial Sequence
  Description of Artificial Sequence: Synthetic oligonucleotide
auuacguaaacuuugagua

SEQ ID NO: 86446 - RNA, 19 nt, Artificial Sequence
  Description of Artificial Sequence: Synthetic oligonucleotide
acuacaauaacaugugaag

SEQ ID NO: 86447 - RNA, 19 nt, Artificial Sequence
  Description of Artificial Sequence: Synthetic oligonucleotide
ucccuuuugaauaacaugu

SEQ ID NO: 86448 - RNA, 19 nt, Artificial Sequence
  Description of Artificial Sequence: Synthetic oligonucleotide
aaaguggucggguugcugg

SEQ ID NO: 86449 - RNA, 19 nt, Artificial Sequence
  Description of Artificial Sequence: Synthetic oligonucleotide
ugugacuuuugacagaggc

SEQ ID NO: 86450 - RNA, 19 nt, Artificial Sequence
  Description of Artificial Sequence: Synthetic oligonucleotide
uguuauauaguagaguaug

SEQ ID NO: 86451 - RNA, 19 nt, Artificial Sequence
  Description of Artificial Sequence: Synthetic oligonucleotide
aaugguauucaauuguuaa

SEQ ID NO: 86452 - RNA, 19 nt, Artificial Sequence
  Description of Artificial Sequence: Synthetic oligonucleotide
auucauaugacacuacaug

SEQ ID NO: 86453 - RNA, 19 nt, Artificial Sequence
  Description of Artificial Sequence: Synthetic oligonucleotide
auaauauuauguccuuagc

SEQ ID NO: 86454 - RNA, 19 nt, Artificial Sequence
  Description of Artificial Sequence: Synthetic oligonucleotide
uaagaucuugcuauuauac

SEQ ID NO: 86455 - RNA, 19 nt, Artificial Sequence
  Description of Artificial Sequence: Synthetic oligonucleotide
auauuacucaauugucugc

SEQ ID NO: 86456 - RNA, 19 nt, Artificial Sequence
  Description of Artificial Sequence: Synthetic oligonucleotide
aguaaaaccaagcgcauug

SEQ ID NO: 86457 - RNA, 19 nt, Artificial Sequence
  Description of Artificial Sequence: Synthetic oligonucleotide
ugauguacagucuauggca

SEQ ID NO: 86458 - RNA, 19 nt, Artificial Sequence
  Description of Artificial Sequence: Synthetic oligonucleotide
uaugugaaaguuuaucugu

SEQ ID NO: 86459 - RNA, 19 nt, Artificial Sequence
  Description of Artificial Sequence: Synthetic oligonucleotide
ugaaaaucuaauaaaugua

SEQ ID NO: 86460 - RNA, 19 nt, Artificial Sequence
  Description of Artificial Sequence: Synthetic oligonucleotide
ucaaucauugugcugucag

SEQ ID NO: 86461 - RNA, 19 nt, Artificial Sequence
  Description of Artificial Sequence: Synthetic oligonucleotide
uaacuaacuacaauaacau

SEQ ID NO: 86462 - RNA, 19 nt, Artificial Sequence
  Description of Artificial Sequence: Synthetic oligonucleotide
aaaacugaguauguuauga

SEQ ID NO: 86463 - RNA, 19 nt, Artificial Sequence
  Description of Artificial Sequence: Synthetic oligonucleotide
agcaauuuugcucagucug

SEQ ID NO: 86464 - RNA, 19 nt, Artificial Sequence
  Description of Artificial Sequence: Synthetic oligonucleotide
uuauugauuaugcagcuua

SEQ ID NO: 86465 - RNA, 19 nt, Artificial Sequence
  Description of Artificial Sequence: Synthetic oligonucleotide
uucauaugacacuacaugu

SEQ ID NO: 86466 - RNA, 19 nt, Artificial Sequence
  Description of Artificial Sequence: Synthetic oligonucleotide
ugacagaggcuauaaauag

SEQ ID NO: 86467 - RNA, 19 nt, Artificial Sequence
  Description of Artificial Sequence: Synthetic oligonucleotide
auuaguacuagcaaauaag

SEQ ID NO: 86468 - RNA, 19 nt, Artificial Sequence
  Description of Artificial Sequence: Synthetic oligonucleotide
gaauggugcccuuugauug

SEQ ID NO: 86469 - RNA, 19 nt, Artificial Sequence
  Description of Artificial Sequence: Synthetic oligonucleotide
uugauguacagucuauggc

SEQ ID NO: 86470 - RNA, 19 nt, Artificial Sequence
  Description of Artificial Sequence: Synthetic oligonucleotide
ucuauaacggaacucucac

SEQ ID NO: 86471 - RNA, 19 nt, Artificial Sequence
  Description of Artificial Sequence: Synthetic oligonucleotide
uucuauaauguaacuaacu

SEQ ID NO: 86472 - RNA, 19 nt, Artificial Sequence
  Description of Artificial Sequence: Synthetic oligonucleotide
uauaacggaacucucacuu

SEQ ID NO: 86473 - RNA, 19 nt, Artificial Sequence
  Description of Artificial Sequence: Synthetic oligonucleotide
auguacuuaacccacccag

SEQ ID NO: 86474 - RNA, 19 nt, Artificial Sequence
  Description of Artificial Sequence: Synthetic oligonucleotide
ucuguauugaguuuguguu

SEQ ID NO: 86475 - RNA, 19 nt, Artificial Sequence
  Description of Artificial Sequence: Synthetic oligonucleotide
acggauauucauaugacac

SEQ ID NO: 86476 - RNA, 19 nt, Artificial Sequence
  Description of Artificial Sequence: Synthetic oligonucleotide
uuauaacaaggccugauau

SEQ ID NO: 86477 - RNA, 19 nt, Artificial Sequence
  Description of Artificial Sequence: Synthetic oligonucleotide
auauuuagaaaugcugaac

SEQ ID NO: 86478 - RNA, 19 nt, Artificial Sequence
  Description of Artificial Sequence: Synthetic oligonucleotide
uguuuauggauuaaauuuu

SEQ ID NO: 86479 - RNA, 19 nt, Artificial Sequence
  Description of Artificial Sequence: Synthetic oligonucleotide
auugauuaguacuagcaaa

SEQ ID NO: 86480 - RNA, 19 nt, Artificial Sequence
  Description of Artificial Sequence: Synthetic oligonucleotide
guaacuaacuacaauaaca

SEQ ID NO: 86481 - RNA, 19 nt, Artificial Sequence
  Description of Artificial Sequence: Synthetic oligonucleotide
auaaacugaaaugguauuc

SEQ ID NO: 86482 - RNA, 19 nt, Artificial Sequence
  Description of Artificial Sequence: Synthetic oligonucleotide
uccgcauuaacuucugugc

SEQ ID NO: 86483 - RNA, 19 nt, Artificial Sequence
  Description of Artificial Sequence: Synthetic oligonucleotide
uugcaagcaauuuugcuca

SEQ ID NO: 86484 - RNA, 19 nt, Artificial Sequence
  Description of Artificial Sequence: Synthetic oligonucleotide
aaacauuucccauuuucau

SEQ ID NO: 86485 - RNA, 19 nt, Artificial Sequence
  Description of Artificial Sequence: Synthetic oligonucleotide
uguaacuaacuacaauaac

SEQ ID NO: 86486 - RNA, 19 nt, Artificial Sequence
  Description of Artificial Sequence: Synthetic oligonucleotide
auaauacggauauucauau

SEQ ID NO: 86487 - RNA, 19 nt, Artificial Sequence
  Description of Artificial Sequence: Synthetic oligonucleotide
uuaagcaaacgugaaacca

SEQ ID NO: 86488 - RNA, 19 nt, Artificial Sequence
  Description of Artificial Sequence: Synthetic oligonucleotide
aagcauuuaagcaaacgug

SEQ ID NO: 86489 - RNA, 19 nt, Artificial Sequence
  Description of Artificial Sequence: Synthetic oligonucleotide
uaucaugcaucugaugacg

SEQ ID NO: 86490 - RNA, 19 nt, Artificial Sequence
  Description of Artificial Sequence: Synthetic oligonucleotide
gguacuuaaagccaugaug

SEQ ID NO: 86491 - RNA, 19 nt, Artificial Sequence
  Description of Artificial Sequence: Synthetic oligonucleotide
aguauggaaaguucuauaa

SEQ ID NO: 86492 - RNA, 19 nt, Artificial Sequence
  Description of Artificial Sequence: Synthetic oligonucleotide
aguucuauaacggaacucu

SEQ ID NO: 86493 - RNA, 19 nt, Artificial Sequence
  Description of Artificial Sequence: Synthetic oligonucleotide
acuagacaagaacaaugac

SEQ ID NO: 86494 - RNA, 19 nt, Artificial Sequence
  Description of Artificial Sequence: Synthetic oligonucleotide
uccuuguaauuauagacgu

SEQ ID NO: 86495 - RNA, 19 nt, Artificial Sequence
  Description of Artificial Sequence: Synthetic oligonucleotide
cauguuauauaguagagua

SEQ ID NO: 86496 - RNA, 19 nt, Artificial Sequence
  Description of Artificial Sequence: Synthetic oligonucleotide
agugcuaacucugugccac

SEQ ID NO: 86497 - RNA, 19 nt, Artificial Sequence
  Description of Artificial Sequence: Synthetic oligonucleotide
agaucuugcuauuauacau

SEQ ID NO: 86498 - RNA, 19 nt, Artificial Sequence
  Description of Artificial Sequence: Synthetic oligonucleotide
uucuauaacggaacucuca

SEQ ID NO: 86499 - RNA, 19 nt, Artificial Sequence
  Description of Artificial Sequence: Synthetic oligonucleotide
ucuaggaucuagaucuucu

SEQ ID NO: 86500 - RNA, 19 nt, Artificial Sequence
  Description of Artificial Sequence: Synthetic oligonucleotide
auauucauaugacacuaca

SEQ ID NO: 86501 - RNA, 19 nt, Artificial Sequence
  Description of Artificial Sequence: Synthetic oligonucleotide
ugugaaagucaauacuugu

SEQ ID NO: 86502 - RNA, 19 nt, Artificial Sequence
  Description of Artificial Sequence: Synthetic oligonucleotide
ugcacacacgcuaaaauuc

SEQ ID NO: 86503 - RNA, 19 nt, Artificial Sequence
  Description of Artificial Sequence: Synthetic oligonucleotide
uaaguugugauuacauaau

SEQ ID NO: 86504 - RNA, 19 nt, Artificial Sequence
  Description of Artificial Sequence: Synthetic oligonucleotide
ucuauggcacuucaugaga

SEQ ID NO: 86505 - RNA, 19 nt, Artificial Sequence
  Description of Artificial Sequence: Synthetic oligonucleotide
aagucacuaaacagguggc

SEQ ID NO: 86506 - RNA, 19 nt, Artificial Sequence
  Description of Artificial Sequence: Synthetic oligonucleotide
aacaacuacaggugugcug

SEQ ID NO: 86507 - RNA, 19 nt, Artificial Sequence
  Description of Artificial Sequence: Synthetic oligonucleotide
gcuauaagcaguuaaucug

SEQ ID NO: 86508 - RNA, 19 nt, Artificial Sequence
  Description of Artificial Sequence: Synthetic oligonucleotide
uuugauugauuaguacuag

SEQ ID NO: 86509 - RNA, 19 nt, Artificial Sequence
  Description of Artificial Sequence: Synthetic oligonucleotide
uauucauaugacacuacau

SEQ ID NO: 86510 - RNA, 19 nt, Artificial Sequence
  Description of Artificial Sequence: Synthetic oligonucleotide
aaacaaauugcagcccuag

SEQ ID NO: 86511 - RNA, 19 nt, Artificial Sequence
  Description of Artificial Sequence: Synthetic oligonucleotide
uccuuaacaacaugguacu

SEQ ID NO: 86512 - RNA, 19 nt, Artificial Sequence
  Description of Artificial Sequence: Synthetic oligonucleotide
aauccuuaacaacauggua

SEQ ID NO: 86513 - RNA, 19 nt, Artificial Sequence
  Description of Artificial Sequence: Synthetic oligonucleotide
accgauuugaauaauauua

SEQ ID NO: 86514 - RNA, 19 nt, Artificial Sequence
  Description of Artificial Sequence: Synthetic oligonucleotide
aaagucaacuacugcagua

SEQ ID NO: 86515 - RNA, 19 nt, Artificial Sequence
  Description of Artificial Sequence: Synthetic oligonucleotide
uuugcacacacgcuaaaau

SEQ ID NO: 86516 - RNA, 19 nt, Artificial Sequence
  Description of Artificial Sequence: Synthetic oligonucleotide
aacuacaauaacaugugaa

SEQ ID NO: 86517 - RNA, 19 nt, Artificial Sequence
  Description of Artificial Sequence: Synthetic oligonucleotide
aacccguaauguaauaauc

SEQ ID NO: 86518 - RNA, 19 nt, Artificial Sequence
  Description of Artificial Sequence: Synthetic oligonucleotide
uuauucuaauaucuaggau

SEQ ID NO: 86519 - RNA, 19 nt, Artificial Sequence
  Description of Artificial Sequence: Synthetic oligonucleotide
ugguauggguuccaacccg

SEQ ID NO: 86520 - RNA, 19 nt, Artificial Sequence
  Description of Artificial Sequence: Synthetic oligonucleotide
uugguauggguuccaaccc

SEQ ID NO: 86521 - RNA, 19 nt, Artificial Sequence
  Description of Artificial Sequence: Synthetic oligonucleotide
ucauuacguaaacuuugag

SEQ ID NO: 86522 - RNA, 19 nt, Artificial Sequence
  Description of Artificial Sequence: Synthetic oligonucleotide
uugauugauuaguacuagc

SEQ ID NO: 86523 - RNA, 19 nt, Artificial Sequence
  Description of Artificial Sequence: Synthetic oligonucleotide
ugauuucaccuuaauggcu

SEQ ID NO: 86524 - RNA, 19 nt, Artificial Sequence
  Description of Artificial Sequence: Synthetic oligonucleotide
ucccuuguucuauuuauug

SEQ ID NO: 86525 - RNA, 19 nt, Artificial Sequence
  Description of Artificial Sequence: Synthetic oligonucleotide
uucagcagaugaaaguggu

SEQ ID NO: 86526 - RNA, 19 nt, Artificial Sequence
  Description of Artificial Sequence: Synthetic oligonucleotide
ucauaugacacuacaugua

SEQ ID NO: 86527 - RNA, 19 nt, Artificial Sequence
  Description of Artificial Sequence: Synthetic oligonucleotide
uaaacagguggccagcauc

SEQ ID NO: 86528 - RNA, 19 nt, Artificial Sequence
  Description of Artificial Sequence: Synthetic oligonucleotide
aaguuaaauuggccauuuc

SEQ ID NO: 86529 - RNA, 19 nt, Artificial Sequence
  Description of Artificial Sequence: Synthetic oligonucleotide
cuauaagcaguuaaucuga

SEQ ID NO: 86530 - RNA, 19 nt, Artificial Sequence
  Description of Artificial Sequence: Synthetic oligonucleotide
gauugauuaguacuagcaa

SEQ ID NO: 86531 - RNA, 19 nt, Artificial Sequence
  Description of Artificial Sequence: Synthetic oligonucleotide
uauuuugaaugugacugug

SEQ ID NO: 86532 - RNA, 19 nt, Artificial Sequence
  Description of Artificial Sequence: Synthetic oligonucleotide
ugaguauuuggauuaucaa

SEQ ID NO: 86533 - RNA, 19 nt, Artificial Sequence
  Description of Artificial Sequence: Synthetic oligonucleotide
aaaguaaguugugauuaca

SEQ ID NO: 86534 - RNA, 19 nt, Artificial Sequence
  Description of Artificial Sequence: Synthetic oligonucleotide
gacuauauacagaagugca

SEQ ID NO: 86535 - RNA, 19 nt, Artificial Sequence
  Description of Artificial Sequence: Synthetic oligonucleotide
uaauaucuaggaucuagau

SEQ ID NO: 86536 - RNA, 19 nt, Artificial Sequence
  Description of Artificial Sequence: Synthetic oligonucleotide
agucuauggcacuucauga

SEQ ID NO: 86537 - RNA, 19 nt, Artificial Sequence
  Description of Artificial Sequence: Synthetic oligonucleotide
uacggauauucauaugaca

SEQ ID NO: 86538 - RNA, 19 nt, Artificial Sequence
  Description of Artificial Sequence: Synthetic oligonucleotide
uacaaucaguaaaaucaac

SEQ ID NO: 86539 - RNA, 19 nt, Artificial Sequence
  Description of Artificial Sequence: Synthetic oligonucleotide
gaucuugcuauuauacaug

SEQ ID NO: 86540 - RNA, 19 nt, Artificial Sequence
  Description of Artificial Sequence: Synthetic oligonucleotide
auaacggaacucucacuuc

SEQ ID NO: 86541 - RNA, 19 nt, Artificial Sequence
  Description of Artificial Sequence: Synthetic oligonucleotide
uguacuuaacccacccagu

SEQ ID NO: 86542 - RNA, 19 nt, Artificial Sequence
  Description of Artificial Sequence: Synthetic oligonucleotide
aguaaacuuggaaguaugg

SEQ ID NO: 86543 - RNA, 19 nt, Artificial Sequence
  Description of Artificial Sequence: Synthetic oligonucleotide
agaguuugcacacacgcua

SEQ ID NO: 86544 - RNA, 19 nt, Artificial Sequence
  Description of Artificial Sequence: Synthetic oligonucleotide
ugguugaccugguauuggg

SEQ ID NO: 86545 - RNA, 19 nt, Artificial Sequence
  Description of Artificial Sequence: Synthetic oligonucleotide
acgauugaaauuacauugg

SEQ ID NO: 86546 - RNA, 19 nt, Artificial Sequence
  Description of Artificial Sequence: Synthetic oligonucleotide
ugagaauccuuaacaacau

SEQ ID NO: 86547 - RNA, 19 nt, Artificial Sequence
  Description of Artificial Sequence: Synthetic oligonucleotide
uaacuacaauaacauguga

SEQ ID NO: 86548 - RNA, 19 nt, Artificial Sequence
  Description of Artificial Sequence: Synthetic oligonucleotide
uuggaaguauggaaaguuc

SEQ ID NO: 86549 - RNA, 19 nt, Artificial Sequence
  Description of Artificial Sequence: Synthetic oligonucleotide
guacuagcaaauaagcaac

SEQ ID NO: 86550 - RNA, 19 nt, Artificial Sequence
  Description of Artificial Sequence: Synthetic oligonucleotide
cucgguugcaauugccucg

SEQ ID NO: 86551 - RNA, 19 nt, Artificial Sequence
  Description of Artificial Sequence: Synthetic oligonucleotide
gaaaacuagacaagaacaa

SEQ ID NO: 86552 - RNA, 19 nt, Artificial Sequence
  Description of Artificial Sequence: Synthetic oligonucleotide
ugcaacauugguagccagc

SEQ ID NO: 86553 - RNA, 19 nt, Artificial Sequence
  Description of Artificial Sequence: Synthetic oligonucleotide
caagcaauuuugcucaguc

SEQ ID NO: 86554 - RNA, 19 nt, Artificial Sequence
  Description of Artificial Sequence: Synthetic oligonucleotide
uuaacacgauugaaauuac

SEQ ID NO: 86555 - RNA, 19 nt, Artificial Sequence
  Description of Artificial Sequence: Synthetic oligonucleotide
aggaugagcaaaccgacaa

SEQ ID NO: 86556 - RNA, 19 nt, Artificial Sequence
  Description of Artificial Sequence: Synthetic oligonucleotide
uaucccuuuugaauaacau

SEQ ID NO: 86557 - RNA, 19 nt, Artificial Sequence
  Description of Artificial Sequence: Synthetic oligonucleotide
uguuacuguaaaguuaaau

SEQ ID NO: 86558 - RNA, 19 nt, Artificial Sequence
  Description of Artificial Sequence: Synthetic oligonucleotide
guacuuaaagccaugaugu

SEQ ID NO: 86559 - RNA, 19 nt, Artificial Sequence
  Description of Artificial Sequence: Synthetic oligonucleotide
aaccgauuugaauaauauu

SEQ ID NO: 86560 - RNA, 19 nt, Artificial Sequence
  Description of Artificial Sequence: Synthetic oligonucleotide
uuauauuagaaagcaucuc

SEQ ID NO: 86561 - RNA, 19 nt, Artificial Sequence
  Description of Artificial Sequence: Synthetic oligonucleotide
auacggauauucauaugac

SEQ ID NO: 86562 - RNA, 19 nt, Artificial Sequence
  Description of Artificial Sequence: Synthetic oligonucleotide
cauuacucucuuaacacga

SEQ ID NO: 86563 - RNA, 19 nt, Artificial Sequence
  Description of Artificial Sequence: Synthetic oligonucleotide
uacuuaagaaagagaaguu

SEQ ID NO: 86564 - RNA, 19 nt, Artificial Sequence
  Description of Artificial Sequence: Synthetic oligonucleotide
caaagcaacgugucugaag

SEQ ID NO: 86565 - RNA, 19 nt, Artificial Sequence
  Description of Artificial Sequence: Synthetic oligonucleotide
cacacuagaacugccagug

SEQ ID NO: 86566 - RNA, 19 nt, Artificial Sequence
  Description of Artificial Sequence: Synthetic oligonucleotide
guaaccaacauuggugcag

SEQ ID NO: 86567 - RNA, 19 nt, Artificial Sequence
  Description of Artificial Sequence: Synthetic oligonucleotide
aauugccucgcugguacuc

SEQ ID NO: 86568 - RNA, 19 nt, Artificial Sequence
  Description of Artificial Sequence: Synthetic oligonucleotide
aagcaacgugucugaaggg

SEQ ID NO: 86569 - RNA, 19 nt, Artificial Sequence
  Description of Artificial Sequence: Synthetic oligonucleotide
gaguauguuaugaaggaaa

SEQ ID NO: 86570 - RNA, 19 nt, Artificial Sequence
  Description of Artificial Sequence: Synthetic oligonucleotide
gucaccauuacucucuuaa

SEQ ID NO: 86571 - RNA, 19 nt, Artificial Sequence
  Description of Artificial Sequence: Synthetic oligonucleotide
cuaauaucuaggaucuaga

SEQ ID NO: 86572 - RNA, 19 nt, Artificial Sequence
  Description of Artificial Sequence: Synthetic oligonucleotide
uaacacgauugaaauuaca

SEQ ID NO: 86573 - RNA, 19 nt, Artificial Sequence
  Description of Artificial Sequence: Synthetic oligonucleotide
cuuugauugauuaguacua

SEQ ID NO: 86574 - RNA, 19 nt, Artificial Sequence
  Description of Artificial Sequence: Synthetic oligonucleotide
aggaucuagaucuucucau

SEQ ID NO: 86575 - RNA, 19 nt, Artificial Sequence
  Description of Artificial Sequence: Synthetic oligonucleotide
auaagaucuugcuauuaua

SEQ ID NO: 86576 - RNA, 19 nt, Artificial Sequence
  Description of Artificial Sequence: Synthetic oligonucleotide
cacuagaacugccagugac

SEQ ID NO: 86577 - RNA, 19 nt, Artificial Sequence
  Description of Artificial Sequence: Synthetic oligonucleotide
uggguuccaacccguaaug

SEQ ID NO: 86578 - RNA, 19 nt, Artificial Sequence
  Description of Artificial Sequence: Synthetic oligonucleotide
aagucaacuacugcaguaa

SEQ ID NO: 86579 - RNA, 19 nt, Artificial Sequence
  Description of Artificial Sequence: Synthetic oligonucleotide
guagaguaugcauaaauau

SEQ ID NO: 86580 - RNA, 19 nt, Artificial Sequence
  Description of Artificial Sequence: Synthetic oligonucleotide
uaauacggauauucauaug

SEQ ID NO: 86581 - RNA, 19 nt, Artificial Sequence
  Description of Artificial Sequence: Synthetic oligonucleotide
guccgcauuaacuucugug

SEQ ID NO: 86582 - RNA, 19 nt, Artificial Sequence
  Description of Artificial Sequence: Synthetic oligonucleotide
acuacaggugugcugucug

SEQ ID NO: 86583 - RNA, 19 nt, Artificial Sequence
  Description of Artificial Sequence: Synthetic oligonucleotide
cauaugacacuacauguaa

SEQ ID NO: 86584 - RNA, 19 nt, Artificial Sequence
  Description of Artificial Sequence: Synthetic oligonucleotide
guacucucgacacaccuca

SEQ ID NO: 86585 - RNA, 19 nt, Artificial Sequence
  Description of Artificial Sequence: Synthetic oligonucleotide
cauuacguaaacuuugagu

SEQ ID NO: 86586 - RNA, 19 nt, Artificial Sequence
  Description of Artificial Sequence: Synthetic oligonucleotide
uaacaugugaagucaccau

SEQ ID NO: 86587 - RNA, 19 nt, Artificial Sequence
  Description of Artificial Sequence: Synthetic oligonucleotide
gacggugcuguucucuuug

SEQ ID NO: 86588 - RNA, 19 nt, Artificial Sequence
  Description of Artificial Sequence: Synthetic oligonucleotide
acaauguaaggaauaucug

SEQ ID NO: 86589 - RNA, 19 nt, Artificial Sequence
  Description of Artificial Sequence: Synthetic oligonucleotide
uacguaaacuuugaguauu

SEQ ID NO: 86590 - RNA, 19 nt, Artificial Sequence
  Description of Artificial Sequence: Synthetic oligonucleotide
ugucgguccgcauuaacuu

SEQ ID NO: 86591 - RNA, 19 nt, Artificial Sequence
  Description of Artificial Sequence: Synthetic oligonucleotide
ucgguccgcauuaacuucu

SEQ ID NO: 86592 - RNA, 19 nt, Artificial Sequence
  Description of Artificial Sequence: Synthetic oligonucleotide
aguagaguaugcauaaaua

SEQ ID NO: 86593 - RNA, 19 nt, Artificial Sequence
  Description of Artificial Sequence: Synthetic oligonucleotide
guaaacuuggaaguaugga

SEQ ID NO: 86594 - RNA, 19 nt, Artificial Sequence
  Description of Artificial Sequence: Synthetic oligonucleotide
ucaccauuacucucuuaac

SEQ ID NO: 86595 - RNA, 19 nt, Artificial Sequence
  Description of Artificial Sequence: Synthetic oligonucleotide
aguauguuaugaaggaaaa

SEQ ID NO: 86596 - RNA, 19 nt, Artificial Sequence
  Description of Artificial Sequence: Synthetic oligonucleotide
caccauuacucucuuaaca

SEQ ID NO: 86597 - RNA, 19 nt, Artificial Sequence
  Description of Artificial Sequence: Synthetic oligonucleotide
cuaggaucuagaucuucuc

SEQ ID NO: 86598 - RNA, 19 nt, Artificial Sequence
  Description of Artificial Sequence: Synthetic oligonucleotide
ucaccugcggaaagaacaa

SEQ ID NO: 86599 - RNA, 19 nt, Artificial Sequence
  Description of Artificial Sequence: Synthetic oligonucleotide
uacuuaacccacccaguua

SEQ ID NO: 86600 - RNA, 19 nt, Artificial Sequence
  Description of Artificial Sequence: Synthetic oligonucleotide
auguaacuaacuacaauaa

SEQ ID NO: 86601 - RNA, 19 nt, Artificial Sequence
  Description of Artificial Sequence: Synthetic oligonucleotide
ugcagcccuagacaaaaua

SEQ ID NO: 86602 - RNA, 19 nt, Artificial Sequence
  Description of Artificial Sequence: Synthetic oligonucleotide
ccauuacucucuuaacacg

SEQ ID NO: 86603 - RNA, 19 nt, Artificial Sequence
  Description of Artificial Sequence: Synthetic oligonucleotide
auggguuccaacccguaau

SEQ ID NO: 86604 - RNA, 19 nt, Artificial Sequence
  Description of Artificial Sequence: Synthetic oligonucleotide
ugaguauguuaugaaggaa

SEQ ID NO: 86605 - RNA, 19 nt, Artificial Sequence
  Description of Artificial Sequence: Synthetic oligonucleotide
aaacuacaagcuguccaca

SEQ ID NO: 86606 - RNA, 19 nt, Artificial Sequence
  Description of Artificial Sequence: Synthetic oligonucleotide
uggugucaaucauugugcu

SEQ ID NO: 86607 - RNA, 19 nt, Artificial Sequence
  Description of Artificial Sequence: Synthetic oligonucleotide
ugguacuuaaagccaugau

SEQ ID NO: 86608 - RNA, 19 nt, Artificial Sequence
  Description of Artificial Sequence: Synthetic oligonucleotide
gcaaacuacaagcugucca

SEQ ID NO: 86609 - RNA, 19 nt, Artificial Sequence
  Description of Artificial Sequence: Synthetic oligonucleotide
gaaauuggcagaaaccgau

SEQ ID NO: 86610 - RNA, 19 nt, Artificial Sequence
  Description of Artificial Sequence: Synthetic oligonucleotide
uugccauagcaacaacuua

SEQ ID NO: 86611 - RNA, 19 nt, Artificial Sequence
  Description of Artificial Sequence: Synthetic oligonucleotide
cagaggcuauaaauagaag

SEQ ID NO: 86612 - RNA, 19 nt, Artificial Sequence
  Description of Artificial Sequence: Synthetic oligonucleotide
ggcauaucccuuuugaaua

SEQ ID NO: 86613 - RNA, 19 nt, Artificial Sequence
  Description of Artificial Sequence: Synthetic oligonucleotide
ggggaauuccuuuggauga

SEQ ID NO: 86614 - RNA, 19 nt, Artificial Sequence
  Description of Artificial Sequence: Synthetic oligonucleotide
cuguaauauuaaaucagua

SEQ ID NO: 86615 - RNA, 19 nt, Artificial Sequence
  Description of Artificial Sequence: Synthetic oligonucleotide
gaagucaccauuacucucu

SEQ ID NO: 86616 - RNA, 19 nt, Artificial Sequence
  Description of Artificial Sequence: Synthetic oligonucleotide
uguacagucuauggcacuu

SEQ ID NO: 86617 - RNA, 19 nt, Artificial Sequence
  Description of Artificial Sequence: Synthetic oligonucleotide
ucuccucgguugcaauugc

SEQ ID NO: 86618 - RNA, 19 nt, Artificial Sequence
  Description of Artificial Sequence: Synthetic oligonucleotide
aacuacaggugugcugucu

SEQ ID NO: 86619 - RNA, 19 nt, Artificial Sequence
  Description of Artificial Sequence: Synthetic oligonucleotide
uuugaguauuuggauuauc

SEQ ID NO: 86620 - RNA, 19 nt, Artificial Sequence
  Description of Artificial Sequence: Synthetic oligonucleotide
cagaaaccgauuugaauaa

SEQ ID NO: 86621 - RNA, 19 nt, Artificial Sequence
  Description of Artificial Sequence: Synthetic oligonucleotide
auuucaccuuaauggcuga

SEQ ID NO: 86622 - RNA, 19 nt, Artificial Sequence
  Description of Artificial Sequence: Synthetic oligonucleotide
cugcggaaagaacaagauc

SEQ ID NO: 86623 - RNA, 19 nt, Artificial Sequence
  Description of Artificial Sequence: Synthetic oligonucleotide
ucugucgguccgcauuaac

SEQ ID NO: 86624 - RNA, 19 nt, Artificial Sequence
  Description of Artificial Sequence: Synthetic oligonucleotide
ucgguugcaauugccucgc

SEQ ID NO: 86625 - RNA, 19 nt, Artificial Sequence
  Description of Artificial Sequence: Synthetic oligonucleotide
cagcccuagacaaaauaca

SEQ ID NO: 86626 - RNA, 19 nt, Artificial Sequence
  Description of Artificial Sequence: Synthetic oligonucleotide
acgugucugaaggguaugg

SEQ ID NO: 86627 - RNA, 19 nt, Artificial Sequence
  Description of Artificial Sequence: Synthetic oligonucleotide
agcaguuaaucugaacaaa

SEQ ID NO: 86628 - RNA, 19 nt, Artificial Sequence
  Description of Artificial Sequence: Synthetic oligonucleotide
auaucccuuuugaauaaca

SEQ ID NO: 86629 - RNA, 19 nt, Artificial Sequence
  Description of Artificial Sequence: Synthetic oligonucleotide
aggguauggagugcuaacu

SEQ ID NO: 86630 - RNA, 19 nt, Artificial Sequence
  Description of Artificial Sequence: Synthetic oligonucleotide
uuaacccacccaguuacua

SEQ ID NO: 86631 - RNA, 19 nt, Artificial Sequence
  Description of Artificial Sequence: Synthetic oligonucleotide
aacgugucugaaggguaug

SEQ ID NO: 86632 - RNA, 19 nt, Artificial Sequence
  Description of Artificial Sequence: Synthetic oligonucleotide
auguacagucuauggcacu

SEQ ID NO: 86633 - RNA, 19 nt, Artificial Sequence
  Description of Artificial Sequence: Synthetic oligonucleotide
ggcuauaagcaguuaaucu

SEQ ID NO: 86634 - RNA, 19 nt, Artificial Sequence
  Description of Artificial Sequence: Synthetic oligonucleotide
ccuacucagcgauauuuag

SEQ ID NO: 86635 - RNA, 19 nt, Artificial Sequence
  Description of Artificial Sequence: Synthetic oligonucleotide
augacacuacauguaauuu

SEQ ID NO: 86636 - RNA, 19 nt, Artificial Sequence
  Description of Artificial Sequence: Synthetic oligonucleotide
auguuauauaguagaguau

SEQ ID NO: 86637 - RNA, 19 nt, Artificial Sequence
  Description of Artificial Sequence: Synthetic oligonucleotide
ggauauucauaugacacua

SEQ ID NO: 86638 - RNA, 19 nt, Artificial Sequence
  Description of Artificial Sequence: Synthetic oligonucleotide
cuuuucccgagaacaucuc

SEQ ID NO: 86639 - RNA, 19 nt, Artificial Sequence
  Description of Artificial Sequence: Synthetic oligonucleotide
gaaaguggucggguugcug

SEQ ID NO: 86640 - RNA, 19 nt, Artificial Sequence
  Description of Artificial Sequence: Synthetic oligonucleotide
gaaggguauggagugcuaa

SEQ ID NO: 86641 - RNA, 19 nt, Artificial Sequence
  Description of Artificial Sequence: Synthetic oligonucleotide
cgauuugaauaauauuaug

SEQ ID NO: 86642 - RNA, 19 nt, Artificial Sequence
  Description of Artificial Sequence: Synthetic oligonucleotide
gcagcccuagacaaaauac

SEQ ID NO: 86643 - RNA, 19 nt, Artificial Sequence
  Description of Artificial Sequence: Synthetic oligonucleotide
cuccucgguugcaauugcc

SEQ ID NO: 86644 - RNA, 19 nt, Artificial Sequence
  Description of Artificial Sequence: Synthetic oligonucleotide
cauaucccuuuugaauaac

SEQ ID NO: 86645 - RNA, 19 nt, Artificial Sequence
  Description of Artificial Sequence: Synthetic oligonucleotide
ccuuugauugauuaguacu

SEQ ID NO: 86646 - RNA, 19 nt, Artificial Sequence
  Description of Artificial Sequence: Synthetic oligonucleotide
caagaucuacagcaauuaa

SEQ ID NO: 86647 - RNA, 19 nt, Artificial Sequence
  Description of Artificial Sequence: Synthetic oligonucleotide
auaugacacuacauguaau

SEQ ID NO: 86648 - RNA, 19 nt, Artificial Sequence
  Description of Artificial Sequence: Synthetic oligonucleotide
gauuuggcccaauggaguu

SEQ ID NO: 86649 - RNA, 19 nt, Artificial Sequence
  Description of Artificial Sequence: Synthetic oligonucleotide
gucgguccgcauuaacuuc

SEQ ID NO: 86650 - RNA, 19 nt, Artificial Sequence
  Description of Artificial Sequence: Synthetic oligonucleotide
uggucggguugcuggaagu

SEQ ID NO: 86651 - RNA, 19 nt, Artificial Sequence
  Description of Artificial Sequence: Synthetic oligonucleotide
cacccaguuacuagguuaa

SEQ ID NO: 86652 - RNA, 19 nt, Artificial Sequence
  Description of Artificial Sequence: Synthetic oligonucleotide
cucccauuccacacuagaa

SEQ ID NO: 86653 - RNA, 19 nt, Artificial Sequence
  Description of Artificial Sequence: Synthetic oligonucleotide
ggguauggagugcuaacuc

SEQ ID NO: 86654 - RNA, 19 nt, Artificial Sequence
  Description of Artificial Sequence: Synthetic oligonucleotide
uccaacccguaauguaaua

SEQ ID NO: 86655 - RNA, 19 nt, Artificial Sequence
  Description of Artificial Sequence: Synthetic oligonucleotide
uuucaccuuaauggcugaa

SEQ ID NO: 86656 - RNA, 19 nt, Artificial Sequence
  Description of Artificial Sequence: Synthetic oligonucleotide
cugucgguccgcauuaacu

SEQ ID NO: 86657 - RNA, 19 nt, Artificial Sequence
  Description of Artificial Sequence: Synthetic oligonucleotide
ccucaagucugucgguccg

SEQ ID NO: 86658 - RNA, 19 nt, Artificial Sequence
  Description of Artificial Sequence: Synthetic oligonucleotide
uaacaauaauacggauauu

SEQ ID NO: 86659 - RNA, 19 nt, Artificial Sequence
  Description of Artificial Sequence: Synthetic oligonucleotide
guacuuaacccacccaguu

SEQ ID NO: 86660 - RNA, 19 nt, Artificial Sequence
  Description of Artificial Sequence: Synthetic oligonucleotide
caacccguaauguaauaau

SEQ ID NO: 86661 - RNA, 19 nt, Artificial Sequence
  Description of Artificial Sequence: Synthetic oligonucleotide
gcgcauuguccuuucagca

SEQ ID NO: 86662 - RNA, 19 nt, Artificial Sequence
  Description of Artificial Sequence: Synthetic oligonucleotide
gaccugguauugggcagcc

SEQ ID NO: 86663 - RNA, 19 nt, Artificial Sequence
  Description of Artificial Sequence: Synthetic oligonucleotide
cuauaacggaacucucacu

SEQ ID NO: 86664 - RNA, 19 nt, Artificial Sequence
  Description of Artificial Sequence: Synthetic oligonucleotide
gguugaccugguauugggc

SEQ ID NO: 86665 - RNA, 19 nt, Artificial Sequence
  Description of Artificial Sequence: Synthetic oligonucleotide
caccucaagucugucgguc

SEQ ID NO: 86666 - RNA, 19 nt, Artificial Sequence
  Description of Artificial Sequence: Synthetic oligonucleotide
acguaaacuuugaguauuu

SEQ ID NO: 86667 - RNA, 19 nt, Artificial Sequence
  Description of Artificial Sequence: Synthetic oligonucleotide
ugcuaacucugugccacuu

SEQ ID NO: 86668 - RNA, 19 nt, Artificial Sequence
  Description of Artificial Sequence: Synthetic oligonucleotide
caccugcggaaagaacaag

SEQ ID NO: 86669 - RNA, 19 nt, Artificial Sequence
  Description of Artificial Sequence: Synthetic oligonucleotide
ccucgguugcaauugccuc

SEQ ID NO: 86670 - RNA, 19 nt, Artificial Sequence
  Description of Artificial Sequence: Synthetic oligonucleotide
agcaaacgugaaaccauuu

SEQ ID NO: 86671 - RNA, 19 nt, Artificial Sequence
  Description of Artificial Sequence: Synthetic oligonucleotide
accaagcgcauuguccuuu

SEQ ID NO: 86672 - RNA, 19 nt, Artificial Sequence
  Description of Artificial Sequence: Synthetic oligonucleotide
agucaccauuacucucuua

SEQ ID NO: 86673 - RNA, 19 nt, Artificial Sequence
  Description of Artificial Sequence: Synthetic oligonucleotide
ccgauuugaauaauauuau

SEQ ID NO: 86674 - RNA, 19 nt, Artificial Sequence
  Description of Artificial Sequence: Synthetic oligonucleotide
gcuuuaaaacauggcagcu

SEQ ID NO: 86675 - RNA, 19 nt, Artificial Sequence
  Description of Artificial Sequence: Synthetic oligonucleotide
ccgcauuaacuucugugca

SEQ ID NO: 86676 - RNA, 19 nt, Artificial Sequence
  Description of Artificial Sequence: Synthetic oligonucleotide
uggugcccuuugauugauu

SEQ ID NO: 86677 - RNA, 19 nt, Artificial Sequence
  Description of Artificial Sequence: Synthetic oligonucleotide
uggccccuacucagcgaua

SEQ ID NO: 86678 - RNA, 19 nt, Artificial Sequence
  Description of Artificial Sequence: Synthetic oligonucleotide
guauggguuccaacccgua

SEQ ID NO: 86679 - RNA, 19 nt, Artificial Sequence
  Description of Artificial Sequence: Synthetic oligonucleotide
acccaguuacuagguuaau

SEQ ID NO: 86680 - RNA, 19 nt, Artificial Sequence
  Description of Artificial Sequence: Synthetic oligonucleotide
cggauauucauaugacacu

SEQ ID NO: 86681 - RNA, 19 nt, Artificial Sequence
  Description of Artificial Sequence: Synthetic oligonucleotide
gccuguuuauggauuaaau

SEQ ID NO: 86682 - RNA, 19 nt, Artificial Sequence
  Description of Artificial Sequence: Synthetic oligonucleotide
gggaaacaggccccaggua

SEQ ID NO: 86683 - RNA, 19 nt, Artificial Sequence
  Description of Artificial Sequence: Synthetic oligonucleotide
cccuacucagcgauauuua

SEQ ID NO: 86684 - RNA, 19 nt, Artificial Sequence
  Description of Artificial Sequence: Synthetic oligonucleotide
caauugccucgcugguacu

SEQ ID NO: 86685 - RNA, 19 nt, Artificial Sequence
  Description of Artificial Sequence: Synthetic oligonucleotide
gcuaacucugugccacuuu

SEQ ID NO: 86686 - RNA, 19 nt, Artificial Sequence
  Description of Artificial Sequence: Synthetic oligonucleotide
gguccgcauuaacuucugu

SEQ ID NO: 86687 - RNA, 19 nt, Artificial Sequence
  Description of Artificial Sequence: Synthetic oligonucleotide
gucugucgguccgcauuaa

SEQ ID NO: 86688 - RNA, 19 nt, Artificial Sequence
  Description of Artificial Sequence: Synthetic oligonucleotide
agaacuaucaaauagagau

SEQ ID NO: 86689 - RNA, 19 nt, Artificial Sequence
  Description of Artificial Sequence: Synthetic oligonucleotide
aaugagacuucucugcuac

SEQ ID NO: 86690 - RNA, 19 nt, Artificial Sequence
  Description of Artificial Sequence: Synthetic oligonucleotide
cacacuuauacuuauaagc

SEQ ID NO: 86691 - RNA, 19 nt, Artificial Sequence
  Description of Artificial Sequence: Synthetic oligonucleotide
uguguuauauucuuauccg

SEQ ID NO: 86692 - RNA, 19 nt, Artificial Sequence
  Description of Artificial Sequence: Synthetic oligonucleotide
uuuacagaaagugacgugg

SEQ ID NO: 86693 - RNA, 19 nt, Artificial Sequence
  Description of Artificial Sequence: Synthetic oligonucleotide
  modified_base (4)..(4): a, c, u, g, unknown or other
aacncagcagaacugggcg

SEQ ID NO: 86694 - RNA, 19 nt, Artificial Sequence
  Description of Artificial Sequence: Synthetic oligonucleotide
aauuccgcgaaccacguag

SEQ ID NO: 86695 - RNA, 19 nt, Artificial Sequence
  Description of Artificial Sequence: Synthetic oligonucleotide
ucaucggugauacacacag

SEQ ID NO: 86696 - RNA, 19 nt, Artificial Sequence
  Description of Artificial Sequence: Synthetic oligonucleotide
gaaagagagagagagagag

SEQ ID NO: 86697 - RNA, 19 nt, Artificial Sequence
  Description of Artificial Sequence: Synthetic oligonucleotide
aagagagagagagagagag

SEQ ID NO: 86698 - RNA, 19 nt, Artificial Sequence
  Description of Artificial Sequence: Synthetic oligonucleotide
gauucggucaaauucaaac

SEQ ID NO: 86699 - RNA, 19 nt, Artificial Sequence
  Description of Artificial Sequence: Synthetic oligonucleotide
uuauugaacaugcuggacu

SEQ ID NO: 86700 - RNA, 19 nt, Artificial Sequence
  Description of Artificial Sequence: Synthetic oligonucleotide
gcuaucaucaacuuuaagc

SEQ ID NO: 86701 - RNA, 19 nt, Artificial Sequence
  Description of Artificial Sequence: Synthetic oligonucleotide
aguauauaugaaucagugg

SEQ ID NO: 86702 - RNA, 19 nt, Artificial Sequence
  Description of Artificial Sequence: Synthetic oligonucleotide
aucacaaucuaguucuucg

SEQ ID NO: 86703 - RNA, 19 nt, Artificial Sequence
  Description of Artificial Sequence: Synthetic oligonucleotide
uccgaagacauucauauuc

SEQ ID NO: 86704 - RNA, 19 nt, Artificial Sequence
  Description of Artificial Sequence: Synthetic oligonucleotide
ucuuauccgaaaacuaucc

SEQ ID NO: 86705 - RNA, 19 nt, Artificial Sequence
  Description of Artificial Sequence: Synthetic oligonucleotide
aaggggaaagauucgauca

SEQ ID NO: 86706 - RNA, 19 nt, Artificial Sequence
  Description of Artificial Sequence: Synthetic oligonucleotide
acaggaaagagagagagag

SEQ ID NO: 86707 - RNA, 19 nt, Artificial Sequence
  Description of Artificial Sequence: Synthetic oligonucleotide
aagucaugauccaugaaac

SEQ ID NO: 86708 - RNA, 19 nt, Artificial Sequence
  Description of Artificial Sequence: Synthetic oligonucleotide
gauucgaucauaaguagag

SEQ ID NO: 86709 - RNA, 19 nt, Artificial Sequence
  Description of Artificial Sequence: Synthetic oligonucleotide
caauguaagccauugguag

SEQ ID NO: 86710 - RNA, 19 nt, Artificial Sequence
  Description of Artificial Sequence: Synthetic oligonucleotide
uuaagcaugggaucauagg

SEQ ID NO: 86711 - RNA, 19 nt, Artificial Sequence
  Description of Artificial Sequence: Synthetic oligonucleotide
uuaagugcaagccacucac

SEQ ID NO: 86712 - RNA, 19 nt, Artificial Sequence
  Description of Artificial Sequence: Synthetic oligonucleotide
aaagauucgaucauaagua

SEQ ID NO: 86713 - RNA, 19 nt, Artificial Sequence
  Description of Artificial Sequence: Synthetic oligonucleotide
aaucucaugcuuccgaaga

SEQ ID NO: 86714 - RNA, 19 nt, Artificial Sequence
  Description of Artificial Sequence: Synthetic oligonucleotide
acguggaaaauauuguagg

SEQ ID NO: 86715 - RNA, 19 nt, Artificial Sequence
  Description of Artificial Sequence: Synthetic oligonucleotide
uauacauugcagcaucuga

SEQ ID NO: 86716 - RNA, 19 nt, Artificial Sequence
  Description of Artificial Sequence: Synthetic oligonucleotide
aguguuuuaucucacauua

SEQ ID NO: 86717 - RNA, 19 nt, Artificial Sequence
  Description of Artificial Sequence: Synthetic oligonucleotide
uauuguaggaucugcacac

SEQ ID NO: 86718 - RNA, 19 nt, Artificial Sequence
  Description of Artificial Sequence: Synthetic oligonucleotide
gagagagagagagagagag

SEQ ID NO: 86719 - RNA, 19 nt, Artificial Sequence
  Description of Artificial Sequence: Synthetic oligonucleotide
aggaaagagagagagagag

SEQ ID NO: 86720 - RNA, 19 nt, Artificial Sequence
  Description of Artificial Sequence: Synthetic oligonucleotide
uucacaacacuacugcagc

SEQ ID NO: 86721 - RNA, 19 nt, Artificial Sequence
  Description of Artificial Sequence: Synthetic oligonucleotide
ugauuggaaagugaucucg

SEQ ID NO: 86722 - RNA, 19 nt, Artificial Sequence
  Description of Artificial Sequence: Synthetic oligonucleotide
aacuaucaaauagagauaa

SEQ ID NO: 86723 - RNA, 19 nt, Artificial Sequence
  Description of Artificial Sequence: Synthetic oligonucleotide
acuuugacaggaaagagag

SEQ ID NO: 86724 - RNA, 19 nt, Artificial Sequence
  Description of Artificial Sequence: Synthetic oligonucleotide
auugguagcacucucaauu

SEQ ID NO: 86725 - RNA, 19 nt, Artificial Sequence
  Description of Artificial Sequence: Synthetic oligonucleotide
ucgaucauaaguagaguug

SEQ ID NO: 86726 - RNA, 19 nt, Artificial Sequence
  Description of Artificial Sequence: Synthetic oligonucleotide
uuauccgaaaacuaucccu

SEQ ID NO: 86727 - RNA, 19 nt, Artificial Sequence
  Description of Artificial Sequence: Synthetic oligonucleotide
ugugucggcaaaaugguac

SEQ ID NO: 86728 - RNA, 19 nt, Artificial Sequence
  Description of Artificial Sequence: Synthetic oligonucleotide
uccugauucggucaaauuc

SEQ ID NO: 86729 - RNA, 19 nt, Artificial Sequence
  Description of Artificial Sequence: Synthetic oligonucleotide
  modified_base (7)..(7): a, c, u, g, unknown or other
caaaacncagcagaacugg

SEQ ID NO: 86730 - RNA, 19 nt, Artificial Sequence
  Description of Artificial Sequence: Synthetic oligonucleotide
acauccagcggauagggag

SEQ ID NO: 86731 - RNA, 19 nt, Artificial Sequence
  Description of Artificial Sequence: Synthetic oligonucleotide
agauaauguguggaaauac

SEQ ID NO: 86732 - RNA, 19 nt, Artificial Sequence
  Description of Artificial Sequence: Synthetic oligonucleotide
uuugguauaucaaguaaua

SEQ ID NO: 86733 - RNA, 19 nt, Artificial Sequence
  Description of Artificial Sequence: Synthetic oligonucleotide
aagucugccucccuugguc

SEQ ID NO: 86734 - RNA, 19 nt, Artificial Sequence
  Description of Artificial Sequence: Synthetic oligonucleotide
aguugugaaagaaacaugu

SEQ ID NO: 86735 - RNA, 19 nt, Artificial Sequence
  Description of Artificial Sequence: Synthetic oligonucleotide
aaaguuccugauucgguca

SEQ ID NO: 86736 - RNA, 19 nt, Artificial Sequence
  Description of Artificial Sequence: Synthetic oligonucleotide
uauuaccuaacacuuuggu

SEQ ID NO: 86737 - RNA, 19 nt, Artificial Sequence
  Description of Artificial Sequence: Synthetic oligonucleotide
aucaacuuuaagcauggga

SEQ ID NO: 86738 - RNA, 19 nt, Artificial Sequence
  Description of Artificial Sequence: Synthetic oligonucleotide
uauccgaaaacuaucccuc

SEQ ID NO: 86739 - RNA, 19 nt, Artificial Sequence
  Description of Artificial Sequence: Synthetic oligonucleotide
ucacaaucuaguucuucgg

SEQ ID NO: 86740 - RNA, 19 nt, Artificial Sequence
  Description of Artificial Sequence: Synthetic oligonucleotide
aguaaaguuccugauucgg

SEQ ID NO: 86741 - RNA, 19 nt, Artificial Sequence
  Description of Artificial Sequence: Synthetic oligonucleotide
cacuucacauagaugaacc

SEQ ID NO: 86742 - RNA, 19 nt, Artificial Sequence
  Description of Artificial Sequence: Synthetic oligonucleotide
gagagagagagagagagac

SEQ ID NO: 86743 - RNA, 19 nt, Artificial Sequence
  Description of Artificial Sequence: Synthetic oligonucleotide
uauugaacaugcuggacuc

SEQ ID NO: 86744 - RNA, 19 nt, Artificial Sequence
  Description of Artificial Sequence: Synthetic oligonucleotide
ucaauguaagccauuggua

SEQ ID NO: 86745 - RNA, 19 nt, Artificial Sequence
  Description of Artificial Sequence: Synthetic oligonucleotide
auuucgucauccagcaucc

SEQ ID NO: 86746 - RNA, 19 nt, Artificial Sequence
  Description of Artificial Sequence: Synthetic oligonucleotide
gacggaguggcuuagaugu

SEQ ID NO: 86747 - RNA, 19 nt, Artificial Sequence
  Description of Artificial Sequence: Synthetic oligonucleotide
uagggguuuacauuugugu

SEQ ID NO: 86748 - RNA, 19 nt, Artificial Sequence
  Description of Artificial Sequence: Synthetic oligonucleotide
uaguaaaguuccugauucg

SEQ ID NO: 86749 - RNA, 19 nt, Artificial Sequence
  Description of Artificial Sequence: Synthetic oligonucleotide
gaggcaaaagucuggugag

SEQ ID NO: 86750 - RNA, 19 nt, Artificial Sequence
  Description of Artificial Sequence: Synthetic oligonucleotide
ugacauaacugaccguggc

SEQ ID NO: 86751 - RNA, 19 nt, Artificial Sequence
  Description of Artificial Sequence: Synthetic oligonucleotide
uucgaucauaaguagaguu

SEQ ID NO: 86752 - RNA, 19 nt, Artificial Sequence
  Description of Artificial Sequence: Synthetic oligonucleotide
gaugaaccuccccaaacug

SEQ ID NO: 86753 - RNA, 19 nt, Artificial Sequence
  Description of Artificial Sequence: Synthetic oligonucleotide
  modified_base (6)..(6): a, c, u, g, unknown or other
aaaacncagcagaacuggg

SEQ ID NO: 86754 - RNA, 19 nt, Artificial Sequence
  Description of Artificial Sequence: Synthetic oligonucleotide
gagagagagagagagacca

SEQ ID NO: 86755 - RNA, 19 nt, Artificial Sequence
  Description of Artificial Sequence: Synthetic oligonucleotide
ucugcucauuccaaaguca

SEQ ID NO: 86756 - RNA, 19 nt, Artificial Sequence
  Description of Artificial Sequence: Synthetic oligonucleotide
acacuuauacuuauaagca

SEQ ID NO: 86757 - RNA, 19 nt, Artificial Sequence
  Description of Artificial Sequence: Synthetic oligonucleotide
acaaucuaguucuucggca

SEQ ID NO: 86758 - RNA, 19 nt, Artificial Sequence
  Description of Artificial Sequence: Synthetic oligonucleotide
ugguaaucagggcgaaggg

SEQ ID NO: 86759 - RNA, 19 nt, Artificial Sequence
  Description of Artificial Sequence: Synthetic oligonucleotide
gauucacuaugucagcuuc

SEQ ID NO: 86760 - RNA, 19 nt, Artificial Sequence
  Description of Artificial Sequence: Synthetic oligonucleotide
auccgaaaacuaucccucc

SEQ ID NO: 86761 - RNA, 19 nt, Artificial Sequence
  Description of Artificial Sequence: Synthetic oligonucleotide
uguucacuuggugaugagg

SEQ ID NO: 86762 - RNA, 19 nt, Artificial Sequence
  Description of Artificial Sequence: Synthetic oligonucleotide
aagguguauuucuuggaau

SEQ ID NO: 86763 - RNA, 19 nt, Artificial Sequence
  Description of Artificial Sequence: Synthetic oligonucleotide
ucacauuagggguuuacau

SEQ ID NO: 86764 - RNA, 19 nt, Artificial Sequence
  Description of Artificial Sequence: Synthetic oligonucleotide
uuacagaaagugacgugga

SEQ ID NO: 86765 - RNA, 19 nt, Artificial Sequence
  Description of Artificial Sequence: Synthetic oligonucleotide
agaugaaccuccccaaacu

SEQ ID NO: 86766 - RNA, 19 nt, Artificial Sequence
  Description of Artificial Sequence: Synthetic oligonucleotide
cucguggcgggaaagaaac

SEQ ID NO: 86767 - RNA, 19 nt, Artificial Sequence
  Description of Artificial Sequence: Synthetic oligonucleotide
uuaaagaucuucacaccuu

SEQ ID NO: 86768 - RNA, 19 nt, Artificial Sequence
  Description of Artificial Sequence: Synthetic oligonucleotide
gaaggggaaagauucgauc

SEQ ID NO: 86769 - RNA, 19 nt, Artificial Sequence
  Description of Artificial Sequence: Synthetic oligonucleotide
acuccuguucacuugguga

SEQ ID NO: 86770 - RNA, 19 nt, Artificial Sequence
  Description of Artificial Sequence: Synthetic oligonucleotide
guaguucuugcccacuaag

SEQ ID NO: 86771 - RNA, 19 nt, Artificial Sequence
  Description of Artificial Sequence: Synthetic oligonucleotide
ugggucaucggugauacac

SEQ ID NO: 86772 - RNA, 19 nt, Artificial Sequence
  Description of Artificial Sequence: Synthetic oligonucleotide
auagucaagaguugugaaa

SEQ ID NO: 86773 - RNA, 19 nt, Artificial Sequence
  Description of Artificial Sequence: Synthetic oligonucleotide
cacaaucuaguucuucggc

SEQ ID NO: 86774 - RNA, 19 nt, Artificial Sequence
  Description of Artificial Sequence: Synthetic oligonucleotide
agaguguuuuaucucacau

SEQ ID NO: 86775 - RNA, 19 nt, Artificial Sequence
  Description of Artificial Sequence: Synthetic oligonucleotide
gaucagucuagacggcucc

SEQ ID NO: 86776 - RNA, 19 nt, Artificial Sequence
  Description of Artificial Sequence: Synthetic oligonucleotide
auuaccuaacacuuuggua

SEQ ID NO: 86777 - RNA, 19 nt, Artificial Sequence
  Description of Artificial Sequence: Synthetic oligonucleotide
ucuagagcagaugccacgc

SEQ ID NO: 86778 - RNA, 19 nt, Artificial Sequence
  Description of Artificial Sequence: Synthetic oligonucleotide
uuaucucacauuagggguu

SEQ ID NO: 86779 - RNA, 19 nt, Artificial Sequence
  Description of Artificial Sequence: Synthetic oligonucleotide
ucggcaaaaugguacuggc

SEQ ID NO: 86780 - RNA, 19 nt, Artificial Sequence
  Description of Artificial Sequence: Synthetic oligonucleotide
uaagagacggaugauguuu

SEQ ID NO: 86781 - RNA, 19 nt, Artificial Sequence
  Description of Artificial Sequence: Synthetic oligonucleotide
ucuggguagccauaaacuu

SEQ ID NO: 86782 - RNA, 19 nt, Artificial Sequence
  Description of Artificial Sequence: Synthetic oligonucleotide
gaagguguauuucuuggaa

SEQ ID NO: 86783 - RNA, 19 nt, Artificial Sequence
  Description of Artificial Sequence: Synthetic oligonucleotide
cauaaauguccagacggag

SEQ ID NO: 86784 - RNA, 19 nt, Artificial Sequence
  Description of Artificial Sequence: Synthetic oligonucleotide
aguuaagugcaagccacuc

SEQ ID NO: 86785 - RNA, 19 nt, Artificial Sequence
  Description of Artificial Sequence: Synthetic oligonucleotide
auaaucucaugcuuccgaa

SEQ ID NO: 86786 - RNA, 19 nt, Artificial Sequence
  Description of Artificial Sequence: Synthetic oligonucleotide
ucacucuagagcagaugcc

SEQ ID NO: 86787 - RNA, 19 nt, Artificial Sequence
  Description of Artificial Sequence: Synthetic oligonucleotide
gaacaugcuggacucgcug

SEQ ID NO: 86788 - RNA, 19 nt, Artificial Sequence
  Description of Artificial Sequence: Synthetic oligonucleotide
acacgugguauucaugggu

SEQ ID NO: 86789 - RNA, 19 nt, Artificial Sequence
  Description of Artificial Sequence: Synthetic oligonucleotide
accuucauaguaguaaagu

SEQ ID NO: 86790 - RNA, 19 nt, Artificial Sequence
  Description of Artificial Sequence: Synthetic oligonucleotide
acuaagcaguuucgagugg

SEQ ID NO: 86791 - RNA, 19 nt, Artificial Sequence
  Description of Artificial Sequence: Synthetic oligonucleotide
ucuggcccuagaacuauca

SEQ ID NO: 86792 - RNA, 19 nt, Artificial Sequence
  Description of Artificial Sequence: Synthetic oligonucleotide
uagcacucucaauuccgcg

SEQ ID NO: 86793 - RNA, 19 nt, Artificial Sequence
  Description of Artificial Sequence: Synthetic oligonucleotide
cuucacauagaugaaccuc

SEQ ID NO: 86794 - RNA, 19 nt, Artificial Sequence
  Description of Artificial Sequence: Synthetic oligonucleotide
uggcaaaaggugaaaguuu

SEQ ID NO: 86795 - RNA, 19 nt, Artificial Sequence
  Description of Artificial Sequence: Synthetic oligonucleotide
aagagacggaugauguuug

SEQ ID NO: 86796 - RNA, 19 nt, Artificial Sequence
  Description of Artificial Sequence: Synthetic oligonucleotide
acuuauacuuauaagcaua

SEQ ID NO: 86797 - RNA, 19 nt, Artificial Sequence
  Description of Artificial Sequence: Synthetic oligonucleotide
cuggguagccauaaacuuc

SEQ ID NO: 86798 - RNA, 19 nt, Artificial Sequence
  Description of Artificial Sequence: Synthetic oligonucleotide
guaaucagggcgaagggga

SEQ ID NO: 86799 - RNA, 19 nt, Artificial Sequence
  Description of Artificial Sequence: Synthetic oligonucleotide
auaacugaccguggcauug

SEQ ID NO: 86800 - RNA, 19 nt, Artificial Sequence
  Description of Artificial Sequence: Synthetic oligonucleotide
ggugaguuaagugcaagcc

SEQ ID NO: 86801 - RNA, 19 nt, Artificial Sequence
  Description of Artificial Sequence: Synthetic oligonucleotide
agucaugcuguacccaaca

SEQ ID NO: 86802 - RNA, 19 nt, Artificial Sequence
  Description of Artificial Sequence: Synthetic oligonucleotide
uccgaaaacuaucccuccu

SEQ ID NO: 86803 - RNA, 19 nt, Artificial Sequence
  Description of Artificial Sequence: Synthetic oligonucleotide
ucuagacggcuccugguaa

SEQ ID NO: 86804 - RNA, 19 nt, Artificial Sequence
  Description of Artificial Sequence: Synthetic oligonucleotide
gaguugugaaagaaacaug

SEQ ID NO: 86805 - RNA, 19 nt, Artificial Sequence
  Description of Artificial Sequence: Synthetic oligonucleotide
ugaucagucuagacggcuc

SEQ ID NO: 86806 - RNA, 19 nt, Artificial Sequence
  Description of Artificial Sequence: Synthetic oligonucleotide
agagagagagagagagacc

SEQ ID NO: 86807 - RNA, 19 nt, Artificial Sequence
  Description of Artificial Sequence: Synthetic oligonucleotide
ucaauuccgcgaaccacgu

SEQ ID NO: 86808 - RNA, 19 nt, Artificial Sequence
  Description of Artificial Sequence: Synthetic oligonucleotide
cuuccgaagacauucauau

SEQ ID NO: 86809 - RNA, 19 nt, Artificial Sequence
  Description of Artificial Sequence: Synthetic oligonucleotide
uagagauaauguguggaaa

SEQ ID NO: 86810 - RNA, 19 nt, Artificial Sequence
  Description of Artificial Sequence: Synthetic oligonucleotide
uguugcuaucaucaacuuu

SEQ ID NO: 86811 - RNA, 19 nt, Artificial Sequence
  Description of Artificial Sequence: Synthetic oligonucleotide
augaaccuccccaaacugg

SEQ ID NO: 86812 - RNA, 19 nt, Artificial Sequence
  Description of Artificial Sequence: Synthetic oligonucleotide
cacaacacuacugcagccc

SEQ ID NO: 86813 - RNA, 19 nt, Artificial Sequence
  Description of Artificial Sequence: Synthetic oligonucleotide
agcauaaccuuuauaaauu

SEQ ID NO: 86814 - RNA, 19 nt, Artificial Sequence
  Description of Artificial Sequence: Synthetic oligonucleotide
aggagacggcaguagguuc

SEQ ID NO: 86815 - RNA, 19 nt, Artificial Sequence
  Description of Artificial Sequence: Synthetic oligonucleotide
agagacggaugauguuugg

SEQ ID NO: 86816 - RNA, 19 nt, Artificial Sequence
  Description of Artificial Sequence: Synthetic oligonucleotide
uaaauuaucugagccucua

SEQ ID NO: 86817 - RNA, 19 nt, Artificial Sequence
  Description of Artificial Sequence: Synthetic oligonucleotide
ucacuaugucagcuucugc

SEQ ID NO: 86818 - RNA, 19 nt, Artificial Sequence
  Description of Artificial Sequence: Synthetic oligonucleotide
uaaguaccauuugaauucu

SEQ ID NO: 86819 - RNA, 19 nt, Artificial Sequence
  Description of Artificial Sequence: Synthetic oligonucleotide
ugagccucuagccuuuauu

SEQ ID NO: 86820 - RNA, 19 nt, Artificial Sequence
  Description of Artificial Sequence: Synthetic oligonucleotide
acauaacugaccguggcau

SEQ ID NO: 86821 - RNA, 19 nt, Artificial Sequence
  Description of Artificial Sequence: Synthetic oligonucleotide
uacagaaagugacguggaa

SEQ ID NO: 86822 - RNA, 19 nt, Artificial Sequence
  Description of Artificial Sequence: Synthetic oligonucleotide
gguaaucagggcgaagggg

SEQ ID NO: 86823 - RNA, 19 nt, Artificial Sequence
  Description of Artificial Sequence: Synthetic oligonucleotide
aaagagagagagagagaga

SEQ ID NO: 86824 - RNA, 19 nt, Artificial Sequence
  Description of Artificial Sequence: Synthetic oligonucleotide
gacggcuccugguaaucag

SEQ ID NO: 86825 - RNA, 19 nt, Artificial Sequence
  Description of Artificial Sequence: Synthetic oligonucleotide
cuaccaaguauuuuccuua

SEQ ID NO: 86826 - RNA, 19 nt, Artificial Sequence
  Description of Artificial Sequence: Synthetic oligonucleotide
gagccucuagccuuuauua

SEQ ID NO: 86827 - RNA, 19 nt, Artificial Sequence
  Description of Artificial Sequence: Synthetic oligonucleotide
gagagagagagaccaaaua

SEQ ID NO: 86828 - RNA, 19 nt, Artificial Sequence
  Description of Artificial Sequence: Synthetic oligonucleotide
gaaguggaggaggcaagag

SEQ ID NO: 86829 - RNA, 19 nt, Artificial Sequence
  Description of Artificial Sequence: Synthetic oligonucleotide
uuaagggaugagagauacu

SEQ ID NO: 86830 - RNA, 19 nt, Artificial Sequence
  Description of Artificial Sequence: Synthetic oligonucleotide
uuucgaguggccagaucuc

SEQ ID NO: 86831 - RNA, 19 nt, Artificial Sequence
  Description of Artificial Sequence: Synthetic oligonucleotide
acgaugauagccagcagga

SEQ ID NO: 86832 - RNA, 19 nt, Artificial Sequence
  Description of Artificial Sequence: Synthetic oligonucleotide
cagucuagacggcuccugg

SEQ ID NO: 86833 - RNA, 19 nt, Artificial Sequence
  Description of Artificial Sequence: Synthetic oligonucleotide
uuuggguccuugagccgag

SEQ ID NO: 86834 - RNA, 19 nt, Artificial Sequence
  Description of Artificial Sequence: Synthetic oligonucleotide
gucaugauccaugaaacua

SEQ ID NO: 86835 - RNA, 19 nt, Artificial Sequence
  Description of Artificial Sequence: Synthetic oligonucleotide
gacuccuguucacuuggug

SEQ ID NO: 86836 - RNA, 19 nt, Artificial Sequence
  Description of Artificial Sequence: Synthetic oligonucleotide
agacauucauauucuucaa

SEQ ID NO: 86837 - RNA, 19 nt, Artificial Sequence
  Description of Artificial Sequence: Synthetic oligonucleotide
cacacaucacuugcugugg

SEQ ID NO: 86838 - RNA, 19 nt, Artificial Sequence
  Description of Artificial Sequence: Synthetic oligonucleotide
agauucgaucauaaguaga

SEQ ID NO: 86839 - RNA, 19 nt, Artificial Sequence
  Description of Artificial Sequence: Synthetic oligonucleotide
gccucuagccuuuauuacc

SEQ ID NO: 86840 - RNA, 19 nt, Artificial Sequence
  Description of Artificial Sequence: Synthetic oligonucleotide
cuuagauguguguggguga

SEQ ID NO: 86841 - RNA, 19 nt, Artificial Sequence
  Description of Artificial Sequence: Synthetic oligonucleotide
ucuggugaguuaagugcaa

SEQ ID NO: 86842 - RNA, 19 nt, Artificial Sequence
  Description of Artificial Sequence: Synthetic oligonucleotide
gucaugcuguacccaacag

SEQ ID NO: 86843 - RNA, 19 nt, Artificial Sequence
  Description of Artificial Sequence: Synthetic oligonucleotide
ccuccuccuauuaaguacc

SEQ ID NO: 86844 - RNA, 19 nt, Artificial Sequence
  Description of Artificial Sequence: Synthetic oligonucleotide
  modified_base (2)..(2): a, c, u, g, unknown or other
cncagcagaacugggcgag

SEQ ID NO: 86845 - RNA, 19 nt, Artificial Sequence
  Description of Artificial Sequence: Synthetic oligonucleotide
ugauucggucaaauucaaa

SEQ ID NO: 86846 - RNA, 19 nt, Artificial Sequence
  Description of Artificial Sequence: Synthetic oligonucleotide
gaaucagugguagggagua

SEQ ID NO: 86847 - RNA, 19 nt, Artificial Sequence
  Description of Artificial Sequence: Synthetic oligonucleotide
caauaaccugcucaucuga

SEQ ID NO: 86848 - RNA, 19 nt, Artificial Sequence
  Description of Artificial Sequence: Synthetic oligonucleotide
gcuuagaugugugugggug

SEQ ID NO: 86849 - RNA, 19 nt, Artificial Sequence
  Description of Artificial Sequence: Synthetic oligonucleotide
aggggaaagauucgaucau

SEQ ID NO: 86850 - RNA, 19 nt, Artificial Sequence
  Description of Artificial Sequence: Synthetic oligonucleotide
agucuagacggcuccuggu

SEQ ID NO: 86851 - RNA, 19 nt, Artificial Sequence
  Description of Artificial Sequence: Synthetic oligonucleotide
gcuguggaaugccaagucc

SEQ ID NO: 86852 - RNA, 19 nt, Artificial Sequence
  Description of Artificial Sequence: Synthetic oligonucleotide
  modified_base (3)..(3): a, c, u, g, unknown or other
acncagcagaacugggcga

SEQ ID NO: 86853 - RNA, 19 nt, Artificial Sequence
  Description of Artificial Sequence: Synthetic oligonucleotide
aguucuucggcaagcacaa

SEQ ID NO: 86854 - RNA, 19 nt, Artificial Sequence
  Description of Artificial Sequence: Synthetic oligonucleotide
uaccuaacacuuugguaua

SEQ ID NO: 86855 - RNA, 19 nt, Artificial Sequence
  Description of Artificial Sequence: Synthetic oligonucleotide
agugcaagccacucacuuu

SEQ ID NO: 86856 - RNA, 19 nt, Artificial Sequence
  Description of Artificial Sequence: Synthetic oligonucleotide
guagcacucucaauuccgc

SEQ ID NO: 86857 - RNA, 19 nt, Artificial Sequence
  Description of Artificial Sequence: Synthetic oligonucleotide
  modified_base (19)..(19): a, c, u, g, unknown or other
cuucggcaagcacaaaacn

SEQ ID NO: 86858 - RNA, 19 nt, Artificial Sequence
  Description of Artificial Sequence: Synthetic oligonucleotide
auucgaucauaaguagagu

SEQ ID NO: 86859 - RNA, 19 nt, Artificial Sequence
  Description of Artificial Sequence: Synthetic oligonucleotide
ucucacauuagggguuuac

SEQ ID NO: 86860 - RNA, 19 nt, Artificial Sequence
  Description of Artificial Sequence: Synthetic oligonucleotide
ggcaaaaggugaaaguuuc

SEQ ID NO: 86861 - RNA, 19 nt, Artificial Sequence
  Description of Artificial Sequence: Synthetic oligonucleotide
agagcggaaguagcacugg

SEQ ID NO: 86862 - RNA, 19 nt, Artificial Sequence
  Description of Artificial Sequence: Synthetic oligonucleotide
uccccuuguugaagaagca

SEQ ID NO: 86863 - RNA, 19 nt, Artificial Sequence
  Description of Artificial Sequence: Synthetic oligonucleotide
ucggugauacacacagcua

SEQ ID NO: 86864 - RNA, 19 nt, Artificial Sequence
  Description of Artificial Sequence: Synthetic oligonucleotide
gagagagagagagaccaaa

SEQ ID NO: 86865 - RNA, 19 nt, Artificial Sequence
  Description of Artificial Sequence: Synthetic oligonucleotide
ggcuaggggcuucauaagc

SEQ ID NO: 86866 - RNA, 19 nt, Artificial Sequence
  Description of Artificial Sequence: Synthetic oligonucleotide
uauucacuugugggcuagg

SEQ ID NO: 86867 - RNA, 19 nt, Artificial Sequence
  Description of Artificial Sequence: Synthetic oligonucleotide
ccuaaagguauuuuacaga

SEQ ID NO: 86868 - RNA, 19 nt, Artificial Sequence
  Description of Artificial Sequence: Synthetic oligonucleotide
cuagccauucggugguguc

SEQ ID NO: 86869 - RNA, 19 nt, Artificial Sequence
  Description of Artificial Sequence: Synthetic oligonucleotide
ggugauacacacagcuaag

SEQ ID NO: 86870 - RNA, 19 nt, Artificial Sequence
  Description of Artificial Sequence: Synthetic oligonucleotide
ugucggcaaaaugguacug

SEQ ID NO: 86871 - RNA, 19 nt, Artificial Sequence
  Description of Artificial Sequence: Synthetic oligonucleotide
caugugucggcaaaauggu

SEQ ID NO: 86872 - RNA, 19 nt, Artificial Sequence
  Description of Artificial Sequence: Synthetic oligonucleotide
acgugguauucaugggucu

SEQ ID NO: 86873 - RNA, 19 nt, Artificial Sequence
  Description of Artificial Sequence: Synthetic oligonucleotide
cgguuguuauugaacaugc

SEQ ID NO: 86874 - RNA, 19 nt, Artificial Sequence
  Description of Artificial Sequence: Synthetic oligonucleotide
agacagaaucauucagaua

SEQ ID NO: 86875 - RNA, 19 nt, Artificial Sequence
  Description of Artificial Sequence: Synthetic oligonucleotide
uguugcaguggaccuucau

SEQ ID NO: 86876 - RNA, 19 nt, Artificial Sequence
  Description of Artificial Sequence: Synthetic oligonucleotide
agcgguuguuauugaacau

SEQ ID NO: 86877 - RNA, 19 nt, Artificial Sequence
  Description of Artificial Sequence: Synthetic oligonucleotide
augaaacuagaaguuucaa

SEQ ID NO: 86878 - RNA, 19 nt, Artificial Sequence
  Description of Artificial Sequence: Synthetic oligonucleotide
cuggugaguuaagugcaag

SEQ ID NO: 86879 - RNA, 19 nt, Artificial Sequence
  Description of Artificial Sequence: Synthetic oligonucleotide
cccacuaagcaguuucgag

SEQ ID NO: 86880 - RNA, 19 nt, Artificial Sequence
  Description of Artificial Sequence: Synthetic oligonucleotide
ggagauaagucugccuccc

SEQ ID NO: 86881 - RNA, 19 nt, Artificial Sequence
  Description of Artificial Sequence: Synthetic oligonucleotide
caucggugauacacacagc

SEQ ID NO: 86882 - RNA, 19 nt, Artificial Sequence
  Description of Artificial Sequence: Synthetic oligonucleotide
gcuaggggcuucauaagcc

SEQ ID NO: 86883 - RNA, 19 nt, Artificial Sequence
  Description of Artificial Sequence: Synthetic oligonucleotide
agagagagagagaccaaau

SEQ ID NO: 86884 - RNA, 19 nt, Artificial Sequence
  Description of Artificial Sequence: Synthetic oligonucleotide
cuguggaaugccaaguccu

SEQ ID NO: 86885 - RNA, 19 nt, Artificial Sequence
  Description of Artificial Sequence: Synthetic oligonucleotide
gaugaggagcgguuguuau

SEQ ID NO: 86886 - RNA, 19 nt, Artificial Sequence
  Description of Artificial Sequence: Synthetic oligonucleotide
cuccugguaaucagggcga

SEQ ID NO: 86887 - RNA, 19 nt, Artificial Sequence
  Description of Artificial Sequence: Synthetic oligonucleotide
gcgguuguuauugaacaug

SEQ ID NO: 86888 - RNA, 19 nt, Artificial Sequence
  Description of Artificial Sequence: Synthetic oligonucleotide
cucacauuagggguuuaca

SEQ ID NO: 86889 - RNA, 19 nt, Artificial Sequence
  Description of Artificial Sequence: Synthetic oligonucleotide
uaucucacauuagggguuu

SEQ ID NO: 86890 - RNA, 19 nt, Artificial Sequence
  Description of Artificial Sequence: Synthetic oligonucleotide
ggaccuucauaguaguaaa

SEQ ID NO: 86891 - RNA, 19 nt, Artificial Sequence
  Description of Artificial Sequence: Synthetic oligonucleotide
cgaaaacuaucccuccucc

SEQ ID NO: 86892 - RNA, 19 nt, Artificial Sequence
  Description of Artificial Sequence: Synthetic oligonucleotide
acacagcuaagagacggau

SEQ ID NO: 86893 - RNA, 19 nt, Artificial Sequence
  Description of Artificial Sequence: Synthetic oligonucleotide
cacuuauacuuauaagcau

SEQ ID NO: 86894 - RNA, 19 nt, Artificial Sequence
  Description of Artificial Sequence: Synthetic oligonucleotide
gcugacugucauuucguca

SEQ ID NO: 86895 - RNA, 19 nt, Artificial Sequence
  Description of Artificial Sequence: Synthetic oligonucleotide
agaaacaugucuggcccua

SEQ ID NO: 86896 - RNA, 19 nt, Artificial Sequence
  Description of Artificial Sequence: Synthetic oligonucleotide
ggaugagagauacuucaua

SEQ ID NO: 86897 - RNA, 19 nt, Artificial Sequence
  Description of Artificial Sequence: Synthetic oligonucleotide
uuccgcgaaccacguaguc

SEQ ID NO: 86898 - RNA, 19 nt, Artificial Sequence
  Description of Artificial Sequence: Synthetic oligonucleotide
uccagacggaguggcuuag

SEQ ID NO: 86899 - RNA, 19 nt, Artificial Sequence
  Description of Artificial Sequence: Synthetic oligonucleotide
gcauaaccuuuauaaauua

SEQ ID NO: 86900 - RNA, 19 nt, Artificial Sequence
  Description of Artificial Sequence: Synthetic oligonucleotide
ccaguauucucaauaaccu

SEQ ID NO: 86901 - RNA, 19 nt, Artificial Sequence
  Description of Artificial Sequence: Synthetic oligonucleotide
caggaaagagagagagaga

SEQ ID NO: 86902 - RNA, 19 nt, Artificial Sequence
  Description of Artificial Sequence: Synthetic oligonucleotide
ugucuggcccuagaacuau

SEQ ID NO: 86903 - RNA, 19 nt, Artificial Sequence
  Description of Artificial Sequence: Synthetic oligonucleotide
agagagagagagagagaga

SEQ ID NO: 86904 - RNA, 19 nt, Artificial Sequence
  Description of Artificial Sequence: Synthetic oligonucleotide
ccgguaguagucaccacug

SEQ ID NO: 86905 - RNA, 19 nt, Artificial Sequence
  Description of Artificial Sequence: Synthetic oligonucleotide
guauucucaauaaccugcu

SEQ ID NO: 86906 - RNA, 19 nt, Artificial Sequence
  Description of Artificial Sequence: Synthetic oligonucleotide
cacauuagggguuuacauu

SEQ ID NO: 86907 - RNA, 19 nt, Artificial Sequence
  Description of Artificial Sequence: Synthetic oligonucleotide
ggaaguagcacuggaccuc

SEQ ID NO: 86908 - RNA, 19 nt, Artificial Sequence
  Description of Artificial Sequence: Synthetic oligonucleotide
auacacagagucggggcaa

SEQ ID NO: 86909 - RNA, 19 nt, Artificial Sequence
  Description of Artificial Sequence: Synthetic oligonucleotide
gacggcaguagguuccacu

SEQ ID NO: 86910 - RNA, 19 nt, Artificial Sequence
  Description of Artificial Sequence: Synthetic oligonucleotide
acuagccauucgguggugu

SEQ ID NO: 86911 - RNA, 19 nt, Artificial Sequence
  Description of Artificial Sequence: Synthetic oligonucleotide
gcuaagagacggaugaugu

SEQ ID NO: 86912 - RNA, 19 nt, Artificial Sequence
  Description of Artificial Sequence: Synthetic oligonucleotide
cuuaagcagggcagcuuaa

SEQ ID NO: 86913 - RNA, 19 nt, Artificial Sequence
  Description of Artificial Sequence: Synthetic oligonucleotide
ucgguggugucacgucauc

SEQ ID NO: 86914 - RNA, 19 nt, Artificial Sequence
  Description of Artificial Sequence: Synthetic oligonucleotide
uagacggcuccugguaauc

SEQ ID NO: 86915 - RNA, 19 nt, Artificial Sequence
  Description of Artificial Sequence: Synthetic oligonucleotide
ggcgaaggggaaagauucg

SEQ ID NO: 86916 - RNA, 19 nt, Artificial Sequence
  Description of Artificial Sequence: Synthetic oligonucleotide
cacucacuuugacaggaaa

SEQ ID NO: 86917 - RNA, 19 nt, Artificial Sequence
  Description of Artificial Sequence: Synthetic oligonucleotide
gugucggcaaaaugguacu

SEQ ID NO: 86918 - RNA, 19 nt, Artificial Sequence
  Description of Artificial Sequence: Synthetic oligonucleotide
ccgaaaacuaucccuccuc

SEQ ID NO: 86919 - RNA, 19 nt, Artificial Sequence
  Description of Artificial Sequence: Synthetic oligonucleotide
gggaaagauucgaucauaa

SEQ ID NO: 86920 - RNA, 19 nt, Artificial Sequence
  Description of Artificial Sequence: Synthetic oligonucleotide
gaggaggcaaaagucuggu

SEQ ID NO: 86921 - RNA, 19 nt, Artificial Sequence
  Description of Artificial Sequence: Synthetic oligonucleotide
aucagucuagacggcuccu

SEQ ID NO: 86922 - RNA, 19 nt, Artificial Sequence
  Description of Artificial Sequence: Synthetic oligonucleotide
auuccgcgaaccacguagu

SEQ ID NO: 86923 - RNA, 19 nt, Artificial Sequence
  Description of Artificial Sequence: Synthetic oligonucleotide
cuuuucccgagagcagguc

SEQ ID NO: 86924 - RNA, 19 nt, Artificial Sequence
  Description of Artificial Sequence: Synthetic oligonucleotide
agacggcuccugguaauca

SEQ ID NO: 86925 - RNA, 19 nt, Artificial Sequence
  Description of Artificial Sequence: Synthetic oligonucleotide
aagugacguggaaaauauu

SEQ ID NO: 86926 - RNA, 19 nt, Artificial Sequence
  Description of Artificial Sequence: Synthetic oligonucleotide
ggcccuagaacuaucaaau

SEQ ID NO: 86927 - RNA, 19 nt, Artificial Sequence
  Description of Artificial Sequence: Synthetic oligonucleotide
gggaucauagguugugggu

SEQ ID NO: 86928 - RNA, 19 nt, Artificial Sequence
  Description of Artificial Sequence: Synthetic oligonucleotide
ggaaagagagagagagaga

SEQ ID NO: 86929 - RNA, 19 nt, Artificial Sequence
  Description of Artificial Sequence: Synthetic oligonucleotide
accuaacacuuugguauau

SEQ ID NO: 86930 - RNA, 19 nt, Artificial Sequence
  Description of Artificial Sequence: Synthetic oligonucleotide
ucccuccacuucacauaga

SEQ ID NO: 86931 - RNA, 19 nt, Artificial Sequence
  Description of Artificial Sequence: Synthetic oligonucleotide
gaguggcuuagaugugugu

SEQ ID NO: 86932 - RNA, 19 nt, Artificial Sequence
  Description of Artificial Sequence: Synthetic oligonucleotide
ccauaagaaaguccuggaa

SEQ ID NO: 86933 - RNA, 19 nt, Artificial Sequence
  Description of Artificial Sequence: Synthetic oligonucleotide
cuccuccuauuaaguacca

SEQ ID NO: 86934 - RNA, 19 nt, Artificial Sequence
  Description of Artificial Sequence: Synthetic oligonucleotide
uccugguaaucagggcgaa

SEQ ID NO: 86935 - RNA, 19 nt, Artificial Sequence
  Description of Artificial Sequence: Synthetic oligonucleotide
caacacuacugcagcccga

SEQ ID NO: 86936 - RNA, 19 nt, Artificial Sequence
  Description of Artificial Sequence: Synthetic oligonucleotide
agagagagagagagaccaa

SEQ ID NO: 86937 - RNA, 19 nt, Artificial Sequence
  Description of Artificial Sequence: Synthetic oligonucleotide
gaguuaagugcaagccacu

SEQ ID NO: 86938 - RNA, 19 nt, Artificial Sequence
  Description of Artificial Sequence: Synthetic oligonucleotide
gcuaccaaguauuuuccuu

SEQ ID NO: 86939 - RNA, 19 nt, Artificial Sequence
  Description of Artificial Sequence: Synthetic oligonucleotide
cggugauacacacagcuaa

SEQ ID NO: 86940 - RNA, 19 nt, Artificial Sequence
  Description of Artificial Sequence: Synthetic oligonucleotide
cuaagagacggaugauguu

SEQ ID NO: 86941 - RNA, 19 nt, Artificial Sequence
  Description of Artificial Sequence: Synthetic oligonucleotide
cagaugccacgcaggcauc

SEQ ID NO: 86942 - RNA, 19 nt, Artificial Sequence
  Description of Artificial Sequence: Synthetic oligonucleotide
gcgaaggggaaagauucga

SEQ ID NO: 86943 - RNA, 19 nt, Artificial Sequence
  Description of Artificial Sequence: Synthetic oligonucleotide
ggauccgaguguugcuauc

SEQ ID NO: 86944 - RNA, 19 nt, Artificial Sequence
  Description of Artificial Sequence: Synthetic oligonucleotide
ccucuagccuuuauuaccu

SEQ ID NO: 86945 - RNA, 19 nt, Artificial Sequence
  Description of Artificial Sequence: Synthetic oligonucleotide
gccauugguagcacucuca

SEQ ID NO: 86946 - RNA, 19 nt, Artificial Sequence
  Description of Artificial Sequence: Synthetic oligonucleotide
cuauuaucauguagcccuu

SEQ ID NO: 86947 - RNA, 19 nt, Artificial Sequence
  Description of Artificial Sequence: Synthetic oligonucleotide
augugucggcaaaauggua

SEQ ID NO: 86948 - RNA, 19 nt, Artificial Sequence
  Description of Artificial Sequence: Synthetic oligonucleotide
acggaguggcuuagaugug

SEQ ID NO: 86949 - RNA, 19 nt, Artificial Sequence
  Description of Artificial Sequence: Synthetic oligonucleotide
cacagagucggggcaaaua

SEQ ID NO: 86950 - RNA, 19 nt, Artificial Sequence
  Description of Artificial Sequence: Synthetic oligonucleotide
cugccucccuuggucucgg

SEQ ID NO: 86951 - RNA, 19 nt, Artificial Sequence
  Description of Artificial Sequence: Synthetic oligonucleotide
aggccacacgugguauuca

SEQ ID NO: 86952 - RNA, 19 nt, Artificial Sequence
  Description of Artificial Sequence: Synthetic oligonucleotide
cauugguagcacucucaau

SEQ ID NO: 86953 - RNA, 19 nt, Artificial Sequence
  Description of Artificial Sequence: Synthetic oligonucleotide
caaucaggauccgaguguu

SEQ ID NO: 86954 - RNA, 19 nt, Artificial Sequence
  Description of Artificial Sequence: Synthetic oligonucleotide
cauaacugaccguggcauu

SEQ ID NO: 86955 - RNA, 19 nt, Artificial Sequence
  Description of Artificial Sequence: Synthetic oligonucleotide
ggggaaagauucgaucaua

SEQ ID NO: 86956 - RNA, 19 nt, Artificial Sequence
  Description of Artificial Sequence: Synthetic oligonucleotide
ggccuaguccuucagucau

SEQ ID NO: 86957 - RNA, 19 nt, Artificial Sequence
  Description of Artificial Sequence: Synthetic oligonucleotide
gccauucgguggugucacg

SEQ ID NO: 86958 - RNA, 19 nt, Artificial Sequence
  Description of Artificial Sequence: Synthetic oligonucleotide
cagacggaguggcuuagau

SEQ ID NO: 86959 - RNA, 19 nt, Artificial Sequence
  Description of Artificial Sequence: Synthetic oligonucleotide
ggcuaccaaguauuuuccu

SEQ ID NO: 86960 - RNA, 19 nt, Artificial Sequence
  Description of Artificial Sequence: Synthetic oligonucleotide
gcccuagaacuaucaaaua

SEQ ID NO: 86961 - RNA, 19 nt, Artificial Sequence
  Description of Artificial Sequence: Synthetic oligonucleotide
gucuggcccuagaacuauc

SEQ ID NO: 86962 - RNA, 19 nt, Artificial Sequence
  Description of Artificial Sequence: Synthetic oligonucleotide
ccugguaaucagggcgaag

SEQ ID NO: 86963 - RNA, 19 nt, Artificial Sequence
  Description of Artificial Sequence: Synthetic oligonucleotide
cacuagccauucgguggug

SEQ ID NO: 86964 - RNA, 19 nt, Artificial Sequence
  Description of Artificial Sequence: Synthetic oligonucleotide
gucggggcaaauagcuggu

SEQ ID NO: 86965 - RNA, 19 nt, Artificial Sequence
  Description of Artificial Sequence: Synthetic oligonucleotide
caauuccgcgaaccacgua

SEQ ID NO: 86966 - RNA, 19 nt, Artificial Sequence
  Description of Artificial Sequence: Synthetic oligonucleotide
gcucguggcgggaaagaaa

SEQ ID NO: 86967 - RNA, 19 nt, Artificial Sequence
  Description of Artificial Sequence: Synthetic oligonucleotide
aucucacauuagggguuua

SEQ ID NO: 86968 - RNA, 19 nt, Artificial Sequence
  Description of Artificial Sequence: Synthetic oligonucleotide
gccgagacaugaucuuuau

SEQ ID NO: 86969 - RNA, 19 nt, Artificial Sequence
  Description of Artificial Sequence: Synthetic oligonucleotide
cggaaguagcacuggaccu

SEQ ID NO: 86970 - RNA, 19 nt, Artificial Sequence
  Description of Artificial Sequence: Synthetic oligonucleotide
guucuucggcaagcacaaa

SEQ ID NO: 86971 - RNA, 19 nt, Artificial Sequence
  Description of Artificial Sequence: Synthetic oligonucleotide
ccacucacuuugacaggaa

SEQ ID NO: 86972 - RNA, 19 nt, Artificial Sequence
  Description of Artificial Sequence: Synthetic oligonucleotide
ccagcggauagggagcacu

SEQ ID NO: 86973 - RNA, 19 nt, Artificial Sequence
  Description of Artificial Sequence: Synthetic oligonucleotide
cggcaguagguuccacuca

SEQ ID NO: 86974 - RNA, 19 nt, Artificial Sequence
  Description of Artificial Sequence: Synthetic oligonucleotide
cgcaggcaucagugucauu

SEQ ID NO: 86975 - RNA, 19 nt, Artificial Sequence
  Description of Artificial Sequence: Synthetic oligonucleotide
uugcuuaugacucugauca

SEQ ID NO: 86976 - RNA, 19 nt, Artificial Sequence
  Description of Artificial Sequence: Synthetic oligonucleotide
ucuauuuugaaguagcucu

SEQ ID NO: 86977 - RNA, 19 nt, Artificial Sequence
  Description of Artificial Sequence: Synthetic oligonucleotide
acuagaacuaaucaaauca

SEQ ID NO: 86978 - RNA, 19 nt, Artificial Sequence
  Description of Artificial Sequence: Synthetic oligonucleotide
uuaaccucuauuuugaagu

SEQ ID NO: 86979 - RNA, 19 nt, Artificial Sequence
  Description of Artificial Sequence: Synthetic oligonucleotide
ucuggcucaauaaucagcg

SEQ ID NO: 86980 - RNA, 19 nt, Artificial Sequence
  Description of Artificial Sequence: Synthetic oligonucleotide
cuaacagugaccuaucagc

SEQ ID NO: 86981 - RNA, 19 nt, Artificial Sequence
  Description of Artificial Sequence: Synthetic oligonucleotide
uucuagauauccuaaaaug

SEQ ID NO: 86982 - RNA, 19 nt, Artificial Sequence
  Description of Artificial Sequence: Synthetic oligonucleotide
aagucaggcuacuauaagg

SEQ ID NO: 86983 - RNA, 19 nt, Artificial Sequence
  Description of Artificial Sequence: Synthetic oligonucleotide
cauauuuguaucauguagc

SEQ ID NO: 86984 - RNA, 19 nt, Artificial Sequence
  Description of Artificial Sequence: Synthetic oligonucleotide
ucuagauauccuaaaaugu

SEQ ID NO: 86985 - RNA, 19 nt, Artificial Sequence
  Description of Artificial Sequence: Synthetic oligonucleotide
uguuuagcugacuugaagc

SEQ ID NO: 86986 - RNA, 19 nt, Artificial Sequence
  Description of Artificial Sequence: Synthetic oligonucleotide
acaggagugagguaugacc

SEQ ID NO: 86987 - RNA, 19 nt, Artificial Sequence
  Description of Artificial Sequence: Synthetic oligonucleotide
cuaaaauucgacaugcuuc

SEQ ID NO: 86988 - RNA, 19 nt, Artificial Sequence
  Description of Artificial Sequence: Synthetic oligonucleotide
uguaguuugaaguuggaaa

SEQ ID NO: 86989 - RNA, 19 nt, Artificial Sequence
  Description of Artificial Sequence: Synthetic oligonucleotide
aacgauuugagguacugcu

SEQ ID NO: 86990 - RNA, 19 nt, Artificial Sequence
  Description of Artificial Sequence: Synthetic oligonucleotide
agauuguccacuaaaauuc

SEQ ID NO: 86991 - RNA, 19 nt, Artificial Sequence
  Description of Artificial Sequence: Synthetic oligonucleotide
aaacuccuagauaagaggg

SEQ ID NO: 86992 - RNA, 19 nt, Artificial Sequence
  Description of Artificial Sequence: Synthetic oligonucleotide
ucuguauagccuuuggcag

SEQ ID NO: 86993 - RNA, 19 nt, Artificial Sequence
  Description of Artificial Sequence: Synthetic oligonucleotide
uguaucauguagcugugcc

SEQ ID NO: 86994 - RNA, 19 nt, Artificial Sequence
  Description of Artificial Sequence: Synthetic oligonucleotide
aacaccuugccgauuaacc

SEQ ID NO: 86995 - RNA, 19 nt, Artificial Sequence
  Description of Artificial Sequence: Synthetic oligonucleotide
aguuauaccuacaagacug

SEQ ID NO: 86996 - RNA, 19 nt, Artificial Sequence
  Description of Artificial Sequence: Synthetic oligonucleotide
aauucgacaugcuucuucu

SEQ ID NO: 86997 - RNA, 19 nt, Artificial Sequence
  Description of Artificial Sequence: Synthetic oligonucleotide
uucuaaguaacuauaugaa

SEQ ID NO: 86998 - RNA, 19 nt, Artificial Sequence
  Description of Artificial Sequence: Synthetic oligonucleotide
ugagcauuaguuacagaag

SEQ ID NO: 86999 - RNA, 19 nt, Artificial Sequence
  Description of Artificial Sequence: Synthetic oligonucleotide
auaccgaucacuugaugac

SEQ ID NO: 87000 - RNA, 19 nt, Artificial Sequence
  Description of Artificial Sequence: Synthetic oligonucleotide
ucuaacagugaccuaucag

SEQ ID NO: 87001 - RNA, 19 nt, Artificial Sequence
  Description of Artificial Sequence: Synthetic oligonucleotide
uguaacguguauaagucuc

SEQ ID NO: 87002 - RNA, 19 nt, Artificial Sequence
  Description of Artificial Sequence: Synthetic oligonucleotide
ucguguaagaacuacuugu

SEQ ID NO: 87003 - RNA, 19 nt, Artificial Sequence
  Description of Artificial Sequence: Synthetic oligonucleotide
uuucucaguacuauccuca

SEQ ID NO: 87004 - RNA, 19 nt, Artificial Sequence
  Description of Artificial Sequence: Synthetic oligonucleotide
uguagaacgacuucuuccu

SEQ ID NO: 87005 - RNA, 19 nt, Artificial Sequence
  Description of Artificial Sequence: Synthetic oligonucleotide
uuuaaaacuucuguauagc

SEQ ID NO: 87006 - RNA, 19 nt, Artificial Sequence
  Description of Artificial Sequence: Synthetic oligonucleotide
gauaagagggcauuuggca

SEQ ID NO: 87007 - RNA, 19 nt, Artificial Sequence
  Description of Artificial Sequence: Synthetic oligonucleotide
uuguaggugcaacauacgc

SEQ ID NO: 87008 - RNA, 19 nt, Artificial Sequence
  Description of Artificial Sequence: Synthetic oligonucleotide
ucuuucguuaauccccggg

SEQ ID NO: 87009 - RNA, 19 nt, Artificial Sequence
  Description of Artificial Sequence: Synthetic oligonucleotide
uucuagacugucuugcuug

SEQ ID NO: 87010 - RNA, 19 nt, Artificial Sequence
  Description of Artificial Sequence: Synthetic oligonucleotide
auaagagggcauuuggcag

SEQ ID NO: 87011 - RNA, 19 nt, Artificial Sequence
  Description of Artificial Sequence: Synthetic oligonucleotide
uuagaugcggugauuucag

SEQ ID NO: 87012 - RNA, 19 nt, Artificial Sequence
  Description of Artificial Sequence: Synthetic oligonucleotide
gaaguuauaccuacaagac

SEQ ID NO: 87013 - RNA, 19 nt, Artificial Sequence
  Description of Artificial Sequence: Synthetic oligonucleotide
gauuguaggugcaacauac

SEQ ID NO: 87014 - RNA, 19 nt, Artificial Sequence
  Description of Artificial Sequence: Synthetic oligonucleotide
aaacgauuugagguacugc

SEQ ID NO: 87015 - RNA, 19 nt, Artificial Sequence
  Description of Artificial Sequence: Synthetic oligonucleotide
uaaacgaguuuucucaguc

SEQ ID NO: 87016 - RNA, 19 nt, Artificial Sequence
  Description of Artificial Sequence: Synthetic oligonucleotide
ugaccuaucagcaaaucuu

SEQ ID NO: 87017 - RNA, 19 nt, Artificial Sequence
  Description of Artificial Sequence: Synthetic oligonucleotide
ugucuucuaccaaaggagc

SEQ ID NO: 87018 - RNA, 19 nt, Artificial Sequence
  Description of Artificial Sequence: Synthetic oligonucleotide
ugucguaacagcugcagga

SEQ ID NO: 87019 - RNA, 19 nt, Artificial Sequence
  Description of Artificial Sequence: Synthetic oligonucleotide
uucgucucuaacaggagug

SEQ ID NO: 87020 - RNA, 19 nt, Artificial Sequence
  Description of Artificial Sequence: Synthetic oligonucleotide
accuacaagacuguuuggc

SEQ ID NO: 87021 - RNA, 19 nt, Artificial Sequence
  Description of Artificial Sequence: Synthetic oligonucleotide
ugcuuuaacaugaaacaau

SEQ ID NO: 87022 - RNA, 19 nt, Artificial Sequence
  Description of Artificial Sequence: Synthetic oligonucleotide
agaacuaaucaaaucaucu

SEQ ID NO: 87023 - RNA, 19 nt, Artificial Sequence
  Description of Artificial Sequence: Synthetic oligonucleotide
uguucgcaaacuugaagag

SEQ ID NO: 87024 - RNA, 19 nt, Artificial Sequence
  Description of Artificial Sequence: Synthetic oligonucleotide
uuuagauccguuaguucca

SEQ ID NO: 87025 - RNA, 19 nt, Artificial Sequence
  Description of Artificial Sequence: Synthetic oligonucleotide
cauacgcaagucuuguucc

SEQ ID NO: 87026 - RNA, 19 nt, Artificial Sequence
  Description of Artificial Sequence: Synthetic oligonucleotide
aauaucuaauggugugucu

SEQ ID NO: 87027 - RNA, 19 nt, Artificial Sequence
  Description of Artificial Sequence: Synthetic oligonucleotide
aacuccuagauaagagggc

SEQ ID NO: 87028 - RNA, 19 nt, Artificial Sequence
  Description of Artificial Sequence: Synthetic oligonucleotide
aacgaguuuucucagucau

SEQ ID NO: 87029 - RNA, 19 nt, Artificial Sequence
  Description of Artificial Sequence: Synthetic oligonucleotide
caccauaucaacauuguca

SEQ ID NO: 87030 - RNA, 19 nt, Artificial Sequence
  Description of Artificial Sequence: Synthetic oligonucleotide
caucucuaagcauuauucc

SEQ ID NO: 87031 - RNA, 19 nt, Artificial Sequence
  Description of Artificial Sequence: Synthetic oligonucleotide
uggucuugauaaccaaggg

SEQ ID NO: 87032 - RNA, 19 nt, Artificial Sequence
  Description of Artificial Sequence: Synthetic oligonucleotide
uccacugcggaguaugugc

SEQ ID NO: 87033 - RNA, 19 nt, Artificial Sequence
  Description of Artificial Sequence: Synthetic oligonucleotide
uaucuaauggugugucucc

SEQ ID NO: 87034 - RNA, 19 nt, Artificial Sequence
  Description of Artificial Sequence: Synthetic oligonucleotide
ucaauuaguggagauuucu

SEQ ID NO: 87035 - RNA, 19 nt, Artificial Sequence
  Description of Artificial Sequence: Synthetic oligonucleotide
caucauaugaucuggaaua

SEQ ID NO: 87036 - RNA, 19 nt, Artificial Sequence
  Description of Artificial Sequence: Synthetic oligonucleotide
agcugaacguaucacaccu

SEQ ID NO: 87037 - RNA, 19 nt, Artificial Sequence
  Description of Artificial Sequence: Synthetic oligonucleotide
ugugaccacuauuuaacca

SEQ ID NO: 87038 - RNA, 19 nt, Artificial Sequence
  Description of Artificial Sequence: Synthetic oligonucleotide
acuaaaauucgacaugcuu

SEQ ID NO: 87039 - RNA, 19 nt, Artificial Sequence
  Description of Artificial Sequence: Synthetic oligonucleotide
ugaagucaggcuacuauaa

SEQ ID NO: 87040 - RNA, 19 nt, Artificial Sequence
  Description of Artificial Sequence: Synthetic oligonucleotide
ggucuugauaaccaagggg

SEQ ID NO: 87041 - RNA, 19 nt, Artificial Sequence
  Description of Artificial Sequence: Synthetic oligonucleotide
uccguuaguuccauauuug

SEQ ID NO: 87042 - RNA, 19 nt, Artificial Sequence
  Description of Artificial Sequence: Synthetic oligonucleotide
ugcgguaggagcacugucc

SEQ ID NO: 87043 - RNA, 19 nt, Artificial Sequence
  Description of Artificial Sequence: Synthetic oligonucleotide
ugcaacauacgcaagucuu

SEQ ID NO: 87044 - RNA, 19 nt, Artificial Sequence
  Description of Artificial Sequence: Synthetic oligonucleotide
ugugcuggaaaguaggcuu

SEQ ID NO: 87045 - RNA, 19 nt, Artificial Sequence
  Description of Artificial Sequence: Synthetic oligonucleotide
ucaggcuacuauaagguuu

SEQ ID NO: 87046 - RNA, 19 nt, Artificial Sequence
  Description of Artificial Sequence: Synthetic oligonucleotide
ugguugucugcuuuuaagu

SEQ ID NO: 87047 - RNA, 19 nt, Artificial Sequence
  Description of Artificial Sequence: Synthetic oligonucleotide
aguguuacgcccuguguug

SEQ ID NO: 87048 - RNA, 19 nt, Artificial Sequence
  Description of Artificial Sequence: Synthetic oligonucleotide
agucucaucauaugaucug

SEQ ID NO: 87049 - RNA, 19 nt, Artificial Sequence
  Description of Artificial Sequence: Synthetic oligonucleotide
cauaccgaucacuugauga

SEQ ID NO: 87050 - RNA, 19 nt, Artificial Sequence
  Description of Artificial Sequence: Synthetic oligonucleotide
aaacgaguuuucucaguca

SEQ ID NO: 87051 - RNA, 19 nt, Artificial Sequence
  Description of Artificial Sequence: Synthetic oligonucleotide
uagugcuugugcuggaaag

SEQ ID NO: 87052 - RNA, 19 nt, Artificial Sequence
  Description of Artificial Sequence: Synthetic oligonucleotide
auugaugugaccacuauuu

SEQ ID NO: 87053 - RNA, 19 nt, Artificial Sequence
  Description of Artificial Sequence: Synthetic oligonucleotide
cuuguucgcaaacuugaag

SEQ ID NO: 87054 - RNA, 19 nt, Artificial Sequence
  Description of Artificial Sequence: Synthetic oligonucleotide
acguaucacaccugcagag

SEQ ID NO: 87055 - RNA, 19 nt, Artificial Sequence
  Description of Artificial Sequence: Synthetic oligonucleotide
aauccccgggaguaggcag

SEQ ID NO: 87056 - RNA, 19 nt, Artificial Sequence
  Description of Artificial Sequence: Synthetic oligonucleotide
gaaucauaccgaucacuug

SEQ ID NO: 87057 - RNA, 19 nt, Artificial Sequence
  Description of Artificial Sequence: Synthetic oligonucleotide
gguugauugauauuugcuc

SEQ ID NO: 87058 - RNA, 19 nt, Artificial Sequence
  Description of Artificial Sequence: Synthetic oligonucleotide
guauaagucucaucauaug

SEQ ID NO: 87059 - RNA, 19 nt, Artificial Sequence
  Description of Artificial Sequence: Synthetic oligonucleotide
guuuagcugacuugaagca

SEQ ID NO: 87060 - RNA, 19 nt, Artificial Sequence
  Description of Artificial Sequence: Synthetic oligonucleotide
cuaaucaaaucaucuuguc

SEQ ID NO: 87061 - RNA, 19 nt, Artificial Sequence
  Description of Artificial Sequence: Synthetic oligonucleotide
aaacagaauccgucugugu

SEQ ID NO: 87062 - RNA, 19 nt, Artificial Sequence
  Description of Artificial Sequence: Synthetic oligonucleotide
ugaccucugauguggagga

SEQ ID NO: 87063 - RNA, 19 nt, Artificial Sequence
  Description of Artificial Sequence: Synthetic oligonucleotide
cuauaugaaccagagcgac

SEQ ID NO: 87064 - RNA, 19 nt, Artificial Sequence
  Description of Artificial Sequence: Synthetic oligonucleotide
cagaaguuauaccuacaag

SEQ ID NO: 87065 - RNA, 19 nt, Artificial Sequence
  Description of Artificial Sequence: Synthetic oligonucleotide
gccaaugugguccacugcg

SEQ ID NO: 87066 - RNA, 19 nt, Artificial Sequence
  Description of Artificial Sequence: Synthetic oligonucleotide
aucucuaacagugaccuau

SEQ ID NO: 87067 - RNA, 19 nt, Artificial Sequence
  Description of Artificial Sequence: Synthetic oligonucleotide
uucucguguaagaacuacu

SEQ ID NO: 87068 - RNA, 19 nt, Artificial Sequence
  Description of Artificial Sequence: Synthetic oligonucleotide
acucaauuaguggagauuu

SEQ ID NO: 87069 - RNA, 19 nt, Artificial Sequence
  Description of Artificial Sequence: Synthetic oligonucleotide
ucucugauugauuuagcuu

SEQ ID NO: 87070 - RNA, 19 nt, Artificial Sequence
  Description of Artificial Sequence: Synthetic oligonucleotide
aaagguucuuucggguguc

SEQ ID NO: 87071 - RNA, 19 nt, Artificial Sequence
  Description of Artificial Sequence: Synthetic oligonucleotide
ugaccaucuccauaucaca

SEQ ID NO: 87072 - RNA, 19 nt, Artificial Sequence
  Description of Artificial Sequence: Synthetic oligonucleotide
acaggaauggucacugcgg

SEQ ID NO: 87073 - RNA, 19 nt, Artificial Sequence
  Description of Artificial Sequence: Synthetic oligonucleotide
auugaugucggcgccgcgg

SEQ ID NO: 87074 - RNA, 19 nt, Artificial Sequence
  Description of Artificial Sequence: Synthetic oligonucleotide
uucguuaauccccgggagu

SEQ ID NO: 87075 - RNA, 19 nt, Artificial Sequence
  Description of Artificial Sequence: Synthetic oligonucleotide
ugcaacuuuagauccguua

SEQ ID NO: 87076 - RNA, 19 nt, Artificial Sequence
  Description of Artificial Sequence: Synthetic oligonucleotide
uaugaccugcgucucuccc

SEQ ID NO: 87077 - RNA, 19 nt, Artificial Sequence
  Description of Artificial Sequence: Synthetic oligonucleotide
aaguggugagcauuaguua

SEQ ID NO: 87078 - RNA, 19 nt, Artificial Sequence
  Description of Artificial Sequence: Synthetic oligonucleotide
gaaacuccagucgaccgcc

SEQ ID NO: 87079 - RNA, 19 nt, Artificial Sequence
  Description of Artificial Sequence: Synthetic oligonucleotide
cacuauuuaaccauugccu

SEQ ID NO: 87080 - RNA, 19 nt, Artificial Sequence
  Description of Artificial Sequence: Synthetic oligonucleotide
ucuccguccuauuuggaaa

SEQ ID NO: 87081 - RNA, 19 nt, Artificial Sequence
  Description of Artificial Sequence: Synthetic oligonucleotide
uaccgaucacuugaugacg

SEQ ID NO: 87082 - RNA, 19 nt, Artificial Sequence
  Description of Artificial Sequence: Synthetic oligonucleotide
agcagcuugacucauccuu

SEQ ID NO: 87083 - RNA, 19 nt, Artificial Sequence
  Description of Artificial Sequence: Synthetic oligonucleotide
uuaauccccgggaguaggc

SEQ ID NO: 87084 - RNA, 19 nt, Artificial Sequence
  Description of Artificial Sequence: Synthetic oligonucleotide
guuuggcccacuuuguuga

SEQ ID NO: 87085 - RNA, 19 nt, Artificial Sequence
  Description of Artificial Sequence: Synthetic oligonucleotide
aacagugaccuaucagcaa

SEQ ID NO: 87086 - RNA, 19 nt, Artificial Sequence
  Description of Artificial Sequence: Synthetic oligonucleotide
agagacucgaugcgggaug

SEQ ID NO: 87087 - RNA, 19 nt, Artificial Sequence
  Description of Artificial Sequence: Synthetic oligonucleotide
gauuugagguacugcucug

SEQ ID NO: 87088 - RNA, 19 nt, Artificial Sequence
  Description of Artificial Sequence: Synthetic oligonucleotide
cuagauaagagggcauuug

SEQ ID NO: 87089 - RNA, 19 nt, Artificial Sequence
  Description of Artificial Sequence: Synthetic oligonucleotide
uggcuagucgccuugggau

SEQ ID NO: 87090 - RNA, 19 nt, Artificial Sequence
  Description of Artificial Sequence: Synthetic oligonucleotide
ucaguguuacgcccugugu

SEQ ID NO: 87091 - RNA, 19 nt, Artificial Sequence
  Description of Artificial Sequence: Synthetic oligonucleotide
uggcugauuauuuuccaua

SEQ ID NO: 87092 - RNA, 19 nt, Artificial Sequence
  Description of Artificial Sequence: Synthetic oligonucleotide
uguggugcuuggaacacua

SEQ ID NO: 87093 - RNA, 19 nt, Artificial Sequence
  Description of Artificial Sequence: Synthetic oligonucleotide
uagaacgacuucuuccuau

SEQ ID NO: 87094 - RNA, 19 nt, Artificial Sequence
  Description of Artificial Sequence: Synthetic oligonucleotide
cuguguugaccuucuagac

SEQ ID NO: 87095 - RNA, 19 nt, Artificial Sequence
  Description of Artificial Sequence: Synthetic oligonucleotide
guuaauccccgggaguagg

SEQ ID NO: 87096 - RNA, 19 nt, Artificial Sequence
  Description of Artificial Sequence: Synthetic oligonucleotide
gaguaugugcaaguccugc

SEQ ID NO: 87097 - RNA, 19 nt, Artificial Sequence
  Description of Artificial Sequence: Synthetic oligonucleotide
ccacuauuuaaccauugcc

SEQ ID NO: 87098 - RNA, 19 nt, Artificial Sequence
  Description of Artificial Sequence: Synthetic oligonucleotide
gacacuggucuguaacgug

SEQ ID NO: 87099 - RNA, 19 nt, Artificial Sequence
  Description of Artificial Sequence: Synthetic oligonucleotide
ugccugcggaggaagaccc

SEQ ID NO: 87100 - RNA, 19 nt, Artificial Sequence
  Description of Artificial Sequence: Synthetic oligonucleotide
guaauugaugucggcgccg

SEQ ID NO: 87101 - RNA, 19 nt, Artificial Sequence
  Description of Artificial Sequence: Synthetic oligonucleotide
ugugcuccuugaccaauca

SEQ ID NO: 87102 - RNA, 19 nt, Artificial Sequence
  Description of Artificial Sequence: Synthetic oligonucleotide
gacaaaguaggugucguaa

SEQ ID NO: 87103 - RNA, 19 nt, Artificial Sequence
  Description of Artificial Sequence: Synthetic oligonucleotide
gauaaccaagggguggggc

SEQ ID NO: 87104 - RNA, 19 nt, Artificial Sequence
  Description of Artificial Sequence: Synthetic oligonucleotide
ucauaccgaucacuugaug

SEQ ID NO: 87105 - RNA, 19 nt, Artificial Sequence
  Description of Artificial Sequence: Synthetic oligonucleotide
caauaucuaaugguguguc

SEQ ID NO: 87106 - RNA, 19 nt, Artificial Sequence
  Description of Artificial Sequence: Synthetic oligonucleotide
uucuccguccuauuuggaa

SEQ ID NO: 87107 - RNA, 19 nt, Artificial Sequence
  Description of Artificial Sequence: Synthetic oligonucleotide
acuauaugaaccagagcga

SEQ ID NO: 87108 - RNA, 19 nt, Artificial Sequence
  Description of Artificial Sequence: Synthetic oligonucleotide
agauuucuuaucccguuuu

SEQ ID NO: 87109 - RNA, 19 nt, Artificial Sequence
  Description of Artificial Sequence: Synthetic oligonucleotide
gauaucgggaaaugagucu

SEQ ID NO: 87110 - RNA, 19 nt, Artificial Sequence
  Description of Artificial Sequence: Synthetic oligonucleotide
uuuaaccauugccuugcau

SEQ ID NO: 87111 - RNA, 19 nt, Artificial Sequence
  Description of Artificial Sequence: Synthetic oligonucleotide
uaauugaugucggcgccgc

SEQ ID NO: 87112 - RNA, 19 nt, Artificial Sequence
  Description of Artificial Sequence: Synthetic oligonucleotide
agcaaggaaucauaccgau

SEQ ID NO: 87113 - RNA, 19 nt, Artificial Sequence
  Description of Artificial Sequence: Synthetic oligonucleotide
cuuucguuaauccccggga

SEQ ID NO: 87114 - RNA, 19 nt, Artificial Sequence
  Description of Artificial Sequence: Synthetic oligonucleotide
ggcguaauugaugucggcg

SEQ ID NO: 87115 - RNA, 19 nt, Artificial Sequence
  Description of Artificial Sequence: Synthetic oligonucleotide
uaccuacaagacuguuugg

SEQ ID NO: 87116 - RNA, 19 nt, Artificial Sequence
  Description of Artificial Sequence: Synthetic oligonucleotide
cuccguccuauuuggaaag

SEQ ID NO: 87117 - RNA, 19 nt, Artificial Sequence
  Description of Artificial Sequence: Synthetic oligonucleotide
uuuagcugacuugaagcau

SEQ ID NO: 87118 - RNA, 19 nt, Artificial Sequence
  Description of Artificial Sequence: Synthetic oligonucleotide
agcguugugguagaagcug

SEQ ID NO: 87119 - RNA, 19 nt, Artificial Sequence
  Description of Artificial Sequence: Synthetic oligonucleotide
gguauucagacucuucguc

SEQ ID NO: 87120 - RNA, 19 nt, Artificial Sequence
  Description of Artificial Sequence: Synthetic oligonucleotide
aggauaucgggaaaugagu

SEQ ID NO: 87121 - RNA, 19 nt, Artificial Sequence
  Description of Artificial Sequence: Synthetic oligonucleotide
ucucuaacagugaccuauc

SEQ ID NO: 87122 - RNA, 19 nt, Artificial Sequence
  Description of Artificial Sequence: Synthetic oligonucleotide
ugacucaauuaguggagau

SEQ ID NO: 87123 - RNA, 19 nt, Artificial Sequence
  Description of Artificial Sequence: Synthetic oligonucleotide
gauguaggcguccccugac

SEQ ID NO: 87124 - RNA, 19 nt, Artificial Sequence
  Description of Artificial Sequence: Synthetic oligonucleotide
aaguccuaaccuccaggau

SEQ ID NO: 87125 - RNA, 19 nt, Artificial Sequence
  Description of Artificial Sequence: Synthetic oligonucleotide
uaaccucuauuuugaagua

SEQ ID NO: 87126 - RNA, 19 nt, Artificial Sequence
  Description of Artificial Sequence: Synthetic oligonucleotide
uucuuucggguguccagug

SEQ ID NO: 87127 - RNA, 19 nt, Artificial Sequence
  Description of Artificial Sequence: Synthetic oligonucleotide
caccuugccgauuaaccuc

SEQ ID NO: 87128 - RNA, 19 nt, Artificial Sequence
  Description of Artificial Sequence: Synthetic oligonucleotide
accccgugggacucuuugc

SEQ ID NO: 87129 - RNA, 19 nt, Artificial Sequence
  Description of Artificial Sequence: Synthetic oligonucleotide
agugaccuaucagcaaauc

SEQ ID NO: 87130 - RNA, 19 nt, Artificial Sequence
  Description of Artificial Sequence: Synthetic oligonucleotide
auuuucggcuaaaauuugu

SEQ ID NO: 87131 - RNA, 19 nt, Artificial Sequence
  Description of Artificial Sequence: Synthetic oligonucleotide
gcguaauugaugucggcgc

SEQ ID NO: 87132 - RNA, 19 nt, Artificial Sequence
  Description of Artificial Sequence: Synthetic oligonucleotide
ucgccuugggauuguaggu

SEQ ID NO: 87133 - RNA, 19 nt, Artificial Sequence
  Description of Artificial Sequence: Synthetic oligonucleotide
acgauuugagguacugcuc

SEQ ID NO: 87134 - RNA, 19 nt, Artificial Sequence
  Description of Artificial Sequence: Synthetic oligonucleotide
aacauacgcaagucuuguu

SEQ ID NO: 87135 - RNA, 19 nt, Artificial Sequence
  Description of Artificial Sequence: Synthetic oligonucleotide
ucguuaauccccgggagua

SEQ ID NO: 87136 - RNA, 19 nt, Artificial Sequence
  Description of Artificial Sequence: Synthetic oligonucleotide
acugcggaguaugugcaag

SEQ ID NO: 87137 - RNA, 19 nt, Artificial Sequence
  Description of Artificial Sequence: Synthetic oligonucleotide
gauuaaccucuauuuugaa

SEQ ID NO: 87138 - RNA, 19 nt, Artificial Sequence
  Description of Artificial Sequence: Synthetic oligonucleotide
cuucuguauccgacugccg

SEQ ID NO: 87139 - RNA, 19 nt, Artificial Sequence
  Description of Artificial Sequence: Synthetic oligonucleotide
ucuaagcauuauuccuuuc

SEQ ID NO: 87140 - RNA, 19 nt, Artificial Sequence
  Description of Artificial Sequence: Synthetic oligonucleotide
ugaccacuauuuaaccauu

SEQ ID NO: 87141 - RNA, 19 nt, Artificial Sequence
  Description of Artificial Sequence: Synthetic oligonucleotide
cucaauuaguggagauuuc

SEQ ID NO: 87142 - RNA, 19 nt, Artificial Sequence
  Description of Artificial Sequence: Synthetic oligonucleotide
uccuuagaugcggugauuu

SEQ ID NO: 87143 - RNA, 19 nt, Artificial Sequence
  Description of Artificial Sequence: Synthetic oligonucleotide
gaccccgugggacucuuug

SEQ ID NO: 87144 - RNA, 19 nt, Artificial Sequence
  Description of Artificial Sequence: Synthetic oligonucleotide
gcuuaugacucugaucaag

SEQ ID NO: 87145 - RNA, 19 nt, Artificial Sequence
  Description of Artificial Sequence: Synthetic oligonucleotide
acuggcuagucgccuuggg

SEQ ID NO: 87146 - RNA, 19 nt, Artificial Sequence
  Description of Artificial Sequence: Synthetic oligonucleotide
auuaguuacagaagccauu

SEQ ID NO: 87147 - RNA, 19 nt, Artificial Sequence
  Description of Artificial Sequence: Synthetic oligonucleotide
cagauuguccacuaaaauu

SEQ ID NO: 87148 - RNA, 19 nt, Artificial Sequence
  Description of Artificial Sequence: Synthetic oligonucleotide
cucugcaauaucuaauggu

SEQ ID NO: 87149 - RNA, 19 nt, Artificial Sequence
  Description of Artificial Sequence: Synthetic oligonucleotide
uagaugcggugauuucagc

SEQ ID NO: 87150 - RNA, 19 nt, Artificial Sequence
  Description of Artificial Sequence: Synthetic oligonucleotide
cucaucauaugaucuggaa

SEQ ID NO: 87151 - RNA, 19 nt, Artificial Sequence
  Description of Artificial Sequence: Synthetic oligonucleotide
uuguaucauguagcugugc

SEQ ID NO: 87152 - RNA, 19 nt, Artificial Sequence
  Description of Artificial Sequence: Synthetic oligonucleotide
uguacuggcuagucgccuu

SEQ ID NO: 87153 - RNA, 19 nt, Artificial Sequence
  Description of Artificial Sequence: Synthetic oligonucleotide
uauccgacugccgcucuug

SEQ ID NO: 87154 - RNA, 19 nt, Artificial Sequence
  Description of Artificial Sequence: Synthetic oligonucleotide
ucgucucuaacaggaguga

SEQ ID NO: 87155 - RNA, 19 nt, Artificial Sequence
  Description of Artificial Sequence: Synthetic oligonucleotide
ggauaucgggaaaugaguc

SEQ ID NO: 87156 - RNA, 19 nt, Artificial Sequence
  Description of Artificial Sequence: Synthetic oligonucleotide
gagacucgaugcgggaugc

SEQ ID NO: 87157 - RNA, 19 nt, Artificial Sequence
  Description of Artificial Sequence: Synthetic oligonucleotide
uccuagauaagagggcauu

SEQ ID NO: 87158 - RNA, 19 nt, Artificial Sequence
  Description of Artificial Sequence: Synthetic oligonucleotide
gcccacaaacgauuugagg

SEQ ID NO: 87159 - RNA, 19 nt, Artificial Sequence
  Description of Artificial Sequence: Synthetic oligonucleotide
cccacaaacgauuugaggu

SEQ ID NO: 87160 - RNA, 19 nt, Artificial Sequence
  Description of Artificial Sequence: Synthetic oligonucleotide
auuuaaccauugccuugca

SEQ ID NO: 87161 - RNA, 19 nt, Artificial Sequence
  Description of Artificial Sequence: Synthetic oligonucleotide
gcagaaguuauaccuacaa

SEQ ID NO: 87162 - RNA, 19 nt, Artificial Sequence
  Description of Artificial Sequence: Synthetic oligonucleotide
ggugucguaacagcugcag

SEQ ID NO: 87163 - RNA, 19 nt, Artificial Sequence
  Description of Artificial Sequence: Synthetic oligonucleotide
augugguccacugcggagu

SEQ ID NO: 87164 - RNA, 19 nt, Artificial Sequence
  Description of Artificial Sequence: Synthetic oligonucleotide
uggcguaauugaugucggc

SEQ ID NO: 87165 - RNA, 19 nt, Artificial Sequence
  Description of Artificial Sequence: Synthetic oligonucleotide
caacaggaauggucacugc

SEQ ID NO: 87166 - RNA, 19 nt, Artificial Sequence
  Description of Artificial Sequence: Synthetic oligonucleotide
gugaccuaucagcaaaucu

SEQ ID NO: 87167 - RNA, 19 nt, Artificial Sequence
  Description of Artificial Sequence: Synthetic oligonucleotide
cagcaaggaaucauaccga

SEQ ID NO: 87168 - RNA, 19 nt, Artificial Sequence
  Description of Artificial Sequence: Synthetic oligonucleotide
cauuaguuacagaagccau

SEQ ID NO: 87169 - RNA, 19 nt, Artificial Sequence
  Description of Artificial Sequence: Synthetic oligonucleotide
aagcauagagugagcugcu

SEQ ID NO: 87170 - RNA, 19 nt, Artificial Sequence
  Description of Artificial Sequence: Synthetic oligonucleotide
aucuaauggugugucuccu

SEQ ID NO: 87171 - RNA, 19 nt, Artificial Sequence
  Description of Artificial Sequence: Synthetic oligonucleotide
uaauccccgggaguaggca

SEQ ID NO: 87172 - RNA, 19 nt, Artificial Sequence
  Description of Artificial Sequence: Synthetic oligonucleotide
gugcagggcggugaguccg

SEQ ID NO: 87173 - RNA, 19 nt, Artificial Sequence
  Description of Artificial Sequence: Synthetic oligonucleotide
gagugagcugcugacagua

SEQ ID NO: 87174 - RNA, 19 nt, Artificial Sequence
  Description of Artificial Sequence: Synthetic oligonucleotide
guacuggcuagucgccuug

SEQ ID NO: 87175 - RNA, 19 nt, Artificial Sequence
  Description of Artificial Sequence: Synthetic oligonucleotide
accgaucacuugaugacgu

SEQ ID NO: 87176 - RNA, 19 nt, Artificial Sequence
  Description of Artificial Sequence: Synthetic oligonucleotide
uuagauccguuaguuccau

SEQ ID NO: 87177 - RNA, 19 nt, Artificial Sequence
  Description of Artificial Sequence: Synthetic oligonucleotide
aguggauccuucauugauu

SEQ ID NO: 87178 - RNA, 19 nt, Artificial Sequence
  Description of Artificial Sequence: Synthetic oligonucleotide
ucgggaaaugagucuccaa

SEQ ID NO: 87179 - RNA, 19 nt, Artificial Sequence
  Description of Artificial Sequence: Synthetic oligonucleotide
ugcggaguaugugcaaguc

SEQ ID NO: 87180 - RNA, 19 nt, Artificial Sequence
  Description of Artificial Sequence: Synthetic oligonucleotide
guaaacgaguuuucucagu

SEQ ID NO: 87181 - RNA, 19 nt, Artificial Sequence
  Description of Artificial Sequence: Synthetic oligonucleotide
aaaauucgacaugcuucuu

SEQ ID NO: 87182 - RNA, 19 nt, Artificial Sequence
  Description of Artificial Sequence: Synthetic oligonucleotide
ugcggugauuucagccagu

SEQ ID NO: 87183 - RNA, 19 nt, Artificial Sequence
  Description of Artificial Sequence: Synthetic oligonucleotide
ggugcaacauacgcaaguc

SEQ ID NO: 87184 - RNA, 19 nt, Artificial Sequence
  Description of Artificial Sequence: Synthetic oligonucleotide
cuagauguuucugacuccu

SEQ ID NO: 87185 - RNA, 19 nt, Artificial Sequence
  Description of Artificial Sequence: Synthetic oligonucleotide
cucuaacagugaccuauca

SEQ ID NO: 87186 - RNA, 19 nt, Artificial Sequence
  Description of Artificial Sequence: Synthetic oligonucleotide
acgcaagucuuguuccuuu

SEQ ID NO: 87187 - RNA, 19 nt, Artificial Sequence
  Description of Artificial Sequence: Synthetic oligonucleotide
agcauagagugagcugcug

SEQ ID NO: 87188 - RNA, 19 nt, Artificial Sequence
  Description of Artificial Sequence: Synthetic oligonucleotide
cuggcuagucgccuuggga

SEQ ID NO: 87189 - RNA, 19 nt, Artificial Sequence
  Description of Artificial Sequence: Synthetic oligonucleotide
uccgucgcucucugauuga

SEQ ID NO: 87190 - RNA, 19 nt, Artificial Sequence
  Description of Artificial Sequence: Synthetic oligonucleotide
gugccugcggaggaagacc

SEQ ID NO: 87191 - RNA, 19 nt, Artificial Sequence
  Description of Artificial Sequence: Synthetic oligonucleotide
gagauuucuuaucccguuu

SEQ ID NO: 87192 - RNA, 19 nt, Artificial Sequence
  Description of Artificial Sequence: Synthetic oligonucleotide
ugaugucggcgccgcggug

SEQ ID NO: 87193 - RNA, 19 nt, Artificial Sequence
  Description of Artificial Sequence: Synthetic oligonucleotide
gaucuggaauacuuuuguu

SEQ ID NO: 87194 - RNA, 19 nt, Artificial Sequence
  Description of Artificial Sequence: Synthetic oligonucleotide
guuugcuuaugacucugau

SEQ ID NO: 87195 - RNA, 19 nt, Artificial Sequence
  Description of Artificial Sequence: Synthetic oligonucleotide
ggccuguuuagcugacuug

SEQ ID NO: 87196 - RNA, 19 nt, Artificial Sequence
  Description of Artificial Sequence: Synthetic oligonucleotide
aucauaccgaucacuugau

SEQ ID NO: 87197 - RNA, 19 nt, Artificial Sequence
  Description of Artificial Sequence: Synthetic oligonucleotide
cuguaacguguauaagucu

SEQ ID NO: 87198 - RNA, 19 nt, Artificial Sequence
  Description of Artificial Sequence: Synthetic oligonucleotide
ucuccgucgcucucugauu

SEQ ID NO: 87199 - RNA, 19 nt, Artificial Sequence
  Description of Artificial Sequence: Synthetic oligonucleotide
ggucuguaacguguauaag

SEQ ID NO: 87200 - RNA, 19 nt, Artificial Sequence
  Description of Artificial Sequence: Synthetic oligonucleotide
uccguccuauuuggaaagu

SEQ ID NO: 87201 - RNA, 19 nt, Artificial Sequence
  Description of Artificial Sequence: Synthetic oligonucleotide
gacccagcaaggaaucaua

SEQ ID NO: 87202 - RNA, 19 nt, Artificial Sequence
  Description of Artificial Sequence: Synthetic oligonucleotide
cuguauccgacugccgcuc

SEQ ID NO: 87203 - RNA, 19 nt, Artificial Sequence
  Description of Artificial Sequence: Synthetic oligonucleotide
gauccguuaguuccauauu

SEQ ID NO: 87204 - RNA, 19 nt, Artificial Sequence
  Description of Artificial Sequence: Synthetic oligonucleotide
gugcaacauacgcaagucu

SEQ ID NO: 87205 - RNA, 19 nt, Artificial Sequence
  Description of Artificial Sequence: Synthetic oligonucleotide
auccgacugccgcucuugu

SEQ ID NO: 87206 - RNA, 19 nt, Artificial Sequence
  Description of Artificial Sequence: Synthetic oligonucleotide
caggcuacuauaagguuuu

SEQ ID NO: 87207 - RNA, 19 nt, Artificial Sequence
  Description of Artificial Sequence: Synthetic oligonucleotide
uuaccccaaugagcugcag

SEQ ID NO: 87208 - RNA, 19 nt, Artificial Sequence
  Description of Artificial Sequence: Synthetic oligonucleotide
ggauuguaggugcaacaua

SEQ ID NO: 87209 - RNA, 19 nt, Artificial Sequence
  Description of Artificial Sequence: Synthetic oligonucleotide
gacucaauuaguggagauu

SEQ ID NO: 87210 - RNA, 19 nt, Artificial Sequence
  Description of Artificial Sequence: Synthetic oligonucleotide
guagaacgacuucuuccua

SEQ ID NO: 87211 - RNA, 19 nt, Artificial Sequence
  Description of Artificial Sequence: Synthetic oligonucleotide
guucuuucggguguccagu

SEQ ID NO: 87212 - RNA, 19 nt, Artificial Sequence
  Description of Artificial Sequence: Synthetic oligonucleotide
uccguccacauuggcguaa

SEQ ID NO: 87213 - RNA, 19 nt, Artificial Sequence
  Description of Artificial Sequence: Synthetic oligonucleotide
gguggggcagaaaaugaaa

SEQ ID NO: 87214 - RNA, 19 nt, Artificial Sequence
  Description of Artificial Sequence: Synthetic oligonucleotide
ccuuagaugcggugauuuc

SEQ ID NO: 87215 - RNA, 19 nt, Artificial Sequence
  Description of Artificial Sequence: Synthetic oligonucleotide
gcuagucgccuugggauug

SEQ ID NO: 87216 - RNA, 19 nt, Artificial Sequence
  Description of Artificial Sequence: Synthetic oligonucleotide
uagauccguuaguuccaua

SEQ ID NO: 87217 - RNA, 19 nt, Artificial Sequence
  Description of Artificial Sequence: Synthetic oligonucleotide
aaacuccagucgaccgccu

SEQ ID NO: 87218 - RNA, 19 nt, Artificial Sequence
  Description of Artificial Sequence: Synthetic oligonucleotide
caguguuacgcccuguguu

SEQ ID NO: 87219 - RNA, 19 nt, Artificial Sequence
  Description of Artificial Sequence: Synthetic oligonucleotide
guguuacgcccuguguuga

SEQ ID NO: 87220 - RNA, 19 nt, Artificial Sequence
  Description of Artificial Sequence: Synthetic oligonucleotide
acguggaacugcugucaua

SEQ ID NO: 87221 - RNA, 19 nt, Artificial Sequence
  Description of Artificial Sequence: Synthetic oligonucleotide
ccacaaacgauuugaggua

SEQ ID NO: 87222 - RNA, 19 nt, Artificial Sequence
  Description of Artificial Sequence: Synthetic oligonucleotide
cucgaugcgggaugcauuu

SEQ ID NO: 87223 - RNA, 19 nt, Artificial Sequence
  Description of Artificial Sequence: Synthetic oligonucleotide
ucacugcgguaggagcacu

SEQ ID NO: 87224 - RNA, 19 nt, Artificial Sequence
  Description of Artificial Sequence: Synthetic oligonucleotide
acucgaugcgggaugcauu

SEQ ID NO: 87225 - RNA, 19 nt, Artificial Sequence
  Description of Artificial Sequence: Synthetic oligonucleotide
caguugcagagguaacugu

SEQ ID NO: 87226 - RNA, 19 nt, Artificial Sequence
  Description of Artificial Sequence: Synthetic oligonucleotide
gcggugauuucagccagug

SEQ ID NO: 87227 - RNA, 19 nt, Artificial Sequence
  Description of Artificial Sequence: Synthetic oligonucleotide
ccuauuuggaaaguuugcu

SEQ ID NO: 87228 - RNA, 19 nt, Artificial Sequence
  Description of Artificial Sequence: Synthetic oligonucleotide
gcaaggaaucauaccgauc

SEQ ID NO: 87229 - RNA, 19 nt, Artificial Sequence
  Description of Artificial Sequence: Synthetic oligonucleotide
gucaggcuacuauaagguu

SEQ ID NO: 87230 - RNA, 19 nt, Artificial Sequence
  Description of Artificial Sequence: Synthetic oligonucleotide
gacucgaugcgggaugcau

SEQ ID NO: 87231 - RNA, 19 nt, Artificial Sequence
  Description of Artificial Sequence: Synthetic oligonucleotide
gccuccuuagaugcgguga

SEQ ID NO: 87232 - RNA, 19 nt, Artificial Sequence
  Description of Artificial Sequence: Synthetic oligonucleotide
ugucaacaccuugccgauu

SEQ ID NO: 87233 - RNA, 19 nt, Artificial Sequence
  Description of Artificial Sequence: Synthetic oligonucleotide
caugccggacaucauugau

SEQ ID NO: 87234 - RNA, 19 nt, Artificial Sequence
  Description of Artificial Sequence: Synthetic oligonucleotide
ggagugguauccagccuuc

SEQ ID NO: 87235 - RNA, 19 nt, Artificial Sequence
  Description of Artificial Sequence: Synthetic oligonucleotide
gccugccuguauuaaaagu

SEQ ID NO: 87236 - RNA, 19 nt, Artificial Sequence
  Description of Artificial Sequence: Synthetic oligonucleotide
cagcguugugguagaagcu

SEQ ID NO: 87237 - RNA, 19 nt, Artificial Sequence
  Description of Artificial Sequence: Synthetic oligonucleotide
ccgaucacuugaugacgug

SEQ ID NO: 87238 - RNA, 19 nt, Artificial Sequence
  Description of Artificial Sequence: Synthetic oligonucleotide
ggcuacuauaagguuuucu

SEQ ID NO: 87239 - RNA, 19 nt, Artificial Sequence
  Description of Artificial Sequence: Synthetic oligonucleotide
aagcccaguugcagaggua

SEQ ID NO: 87240 - RNA, 19 nt, Artificial Sequence
  Description of Artificial Sequence: Synthetic oligonucleotide
agacucgaugcgggaugca

SEQ ID NO: 87241 - RNA, 19 nt, Artificial Sequence
  Description of Artificial Sequence: Synthetic oligonucleotide
cgucucuaacaggagugag

SEQ ID NO: 87242 - RNA, 19 nt, Artificial Sequence
  Description of Artificial Sequence: Synthetic oligonucleotide
cgcaaacuugaagagucuc

SEQ ID NO: 87243 - RNA, 19 nt, Artificial Sequence
  Description of Artificial Sequence: Synthetic oligonucleotide
cagugaccuaucagcaaau

SEQ ID NO: 87244 - RNA, 19 nt, Artificial Sequence
  Description of Artificial Sequence: Synthetic oligonucleotide
caucucuaacagugaccua

SEQ ID NO: 87245 - RNA, 19 nt, Artificial Sequence
  Description of Artificial Sequence: Synthetic oligonucleotide
ccguuaguuccauauuugu

SEQ ID NO: 87246 - RNA, 19 nt, Artificial Sequence
  Description of Artificial Sequence: Synthetic oligonucleotide
cucagcccacaaacgauuu

SEQ ID NO: 87247 - RNA, 19 nt, Artificial Sequence
  Description of Artificial Sequence: Synthetic oligonucleotide
cuggcucaauaaucagcgu

SEQ ID NO: 87248 - RNA, 19 nt, Artificial Sequence
  Description of Artificial Sequence: Synthetic oligonucleotide
gcgguaggagcacuguccu

SEQ ID NO: 87249 - RNA, 19 nt, Artificial Sequence
  Description of Artificial Sequence: Synthetic oligonucleotide
ccuguuuagcugacuugaa

SEQ ID NO: 87250 - RNA, 19 nt, Artificial Sequence
  Description of Artificial Sequence: Synthetic oligonucleotide
cuaugguaaguggauccuu

SEQ ID NO: 87251 - RNA, 19 nt, Artificial Sequence
  Description of Artificial Sequence: Synthetic oligonucleotide
ccccgugggacucuuugca

SEQ ID NO: 87252 - RNA, 19 nt, Artificial Sequence
  Description of Artificial Sequence: Synthetic oligonucleotide
cuucauuaucagguugauu

SEQ ID NO: 87253 - RNA, 19 nt, Artificial Sequence
  Description of Artificial Sequence: Synthetic oligonucleotide
cguuaauccccgggaguag

SEQ ID NO: 87254 - RNA, 19 nt, Artificial Sequence
  Description of Artificial Sequence: Synthetic oligonucleotide
guccguccacauuggcgua

SEQ ID NO: 87255 - RNA, 19 nt, Artificial Sequence
  Description of Artificial Sequence: Synthetic oligonucleotide
ccacauuggcguaauugau

SEQ ID NO: 87256 - RNA, 19 nt, Artificial Sequence
  Description of Artificial Sequence: Synthetic oligonucleotide
ggcuagucgccuugggauu

SEQ ID NO: 87257 - RNA, 19 nt, Artificial Sequence
  Description of Artificial Sequence: Synthetic oligonucleotide
gcgacccagcaaggaauca

SEQ ID NO: 87258 - RNA, 19 nt, Artificial Sequence
  Description of Artificial Sequence: Synthetic oligonucleotide
cuagucgccuugggauugu

SEQ ID NO: 87259 - RNA, 19 nt, Artificial Sequence
  Description of Artificial Sequence: Synthetic oligonucleotide
ccuagauaagagggcauuu

SEQ ID NO: 87260 - RNA, 19 nt, Artificial Sequence
  Description of Artificial Sequence: Synthetic oligonucleotide
gguccacugcggaguaugu

SEQ ID NO: 87261 - RNA, 19 nt, Artificial Sequence
  Description of Artificial Sequence: Synthetic oligonucleotide
cgggaguaggcagaaguua

SEQ ID NO: 87262 - RNA, 19 nt, Artificial Sequence
  Description of Artificial Sequence: Synthetic oligonucleotide
cuccuuagaugcggugauu

SEQ ID NO: 87263 - RNA, 19 nt, Artificial Sequence
  Description of Artificial Sequence: Synthetic oligonucleotide
gcgcggugccuccaguauu

SEQ ID NO: 87264 - RNA, 19 nt, Artificial Sequence
  Description of Artificial Sequence: Synthetic oligonucleotide
gcagggcggugaguccguc

SEQ ID NO: 87265 - RNA, 19 nt, Artificial Sequence
  Description of Artificial Sequence: Synthetic oligonucleotide
gugguccacugcggaguau

SEQ ID NO: 87266 - RNA, 19 nt, Artificial Sequence
  Description of Artificial Sequence: Synthetic oligonucleotide
gccucccuuccgacucaga

SEQ ID NO: 87267 - RNA, 19 nt, Artificial Sequence
  Description of Artificial Sequence: Synthetic oligonucleotide
cugccacguggagcgcggu

SEQ ID NO: 87268 - RNA, 19 nt, Artificial Sequence
  Description of Artificial Sequence: Synthetic oligonucleotide
ccgucgcucucugauugau

SEQ ID NO: 87269 - RNA, 19 nt, Artificial Sequence
  Description of Artificial Sequence: Synthetic oligonucleotide
ccccaaugagcugcagcau

SEQ ID NO: 87270 - RNA, 19 nt, Artificial Sequence
  Description of Artificial Sequence: Synthetic oligonucleotide
cgucgcucucugauugauu

SEQ ID NO: 87271 - RNA, 19 nt, Artificial Sequence
  Description of Artificial Sequence: Synthetic oligonucleotide
aauaacuaucaauagaugc

SEQ ID NO: 87272 - RNA, 19 nt, Artificial Sequence
  Description of Artificial Sequence: Synthetic oligonucleotide
uauaacauaauucacuuag

SEQ ID NO: 87273 - RNA, 19 nt, Artificial Sequence
  Description of Artificial Sequence: Synthetic oligonucleotide
uuguauaacauuaaaagag

SEQ ID NO: 87274 - RNA, 19 nt, Artificial Sequence
  Description of Artificial Sequence: Synthetic oligonucleotide
aauaacagaaugcucuucc

SEQ ID NO: 87275 - RNA, 19 nt, Artificial Sequence
  Description of Artificial Sequence: Synthetic oligonucleotide
uguauuacaaaugaaaucu

SEQ ID NO: 87276 - RNA, 19 nt, Artificial Sequence
  Description of Artificial Sequence: Synthetic oligonucleotide
uauuuauacacacacacac

SEQ ID NO: 87277 - RNA, 19 nt, Artificial Sequence
  Description of Artificial Sequence: Synthetic oligonucleotide
acauaauucacuuagacaa

SEQ ID NO: 87278 - RNA, 19 nt, Artificial Sequence
  Description of Artificial Sequence: Synthetic oligonucleotide
uauuguaguguacagaacc

SEQ ID NO: 87279 - RNA, 19 nt, Artificial Sequence
  Description of Artificial Sequence: Synthetic oligonucleotide
uuaaccaugcacuacacag

SEQ ID NO: 87280 - RNA, 19 nt, Artificial Sequence
  Description of Artificial Sequence: Synthetic oligonucleotide
aaguguggcaguuuuauuc

SEQ ID NO: 87281 - RNA, 19 nt, Artificial Sequence
  Description of Artificial Sequence: Synthetic oligonucleotide
cugauuaagcauuugaagg

SEQ ID NO: 87282 - RNA, 19 nt, Artificial Sequence
  Description of Artificial Sequence: Synthetic oligonucleotide
uauacacacacacacacag

SEQ ID NO: 87283 - RNA, 19 nt, Artificial Sequence
  Description of Artificial Sequence: Synthetic oligonucleotide
uuaaaagaugagaugauca

SEQ ID NO: 87284 - RNA, 19 nt, Artificial Sequence
  Description of Artificial Sequence: Synthetic oligonucleotide
uaauaaacuacauaguagu

SEQ ID NO: 87285 - RNA, 19 nt, Artificial Sequence
  Description of Artificial Sequence: Synthetic oligonucleotide
acuagacaauguuagaggc

SEQ ID NO: 87286 - RNA, 19 nt, Artificial Sequence
  Description of Artificial Sequence: Synthetic oligonucleotide
uuuuaaauguacuugaaua

SEQ ID NO: 87287 - RNA, 19 nt, Artificial Sequence
  Description of Artificial Sequence: Synthetic oligonucleotide
aaaggagugucauacagug

SEQ ID NO: 87288 - RNA, 19 nt, Artificial Sequence
  Description of Artificial Sequence: Synthetic oligonucleotide
uuaggcucaaauaugaaga

SEQ ID NO: 87289 - RNA, 19 nt, Artificial Sequence
  Description of Artificial Sequence: Synthetic oligonucleotide
aucaauaggaaauggaaag

SEQ ID NO: 87290 - RNA, 19 nt, Artificial Sequence
  Description of Artificial Sequence: Synthetic oligonucleotide
uuuauacacacacacacac

SEQ ID NO: 87291 - RNA, 19 nt, Artificial Sequence
  Description of Artificial Sequence: Synthetic oligonucleotide
ugacaauagaucaagacaa

SEQ ID NO: 87292 - RNA, 19 nt, Artificial Sequence
  Description of Artificial Sequence: Synthetic oligonucleotide
ugaaaucuaauucagggaa

SEQ ID NO: 87293 - RNA, 19 nt, Artificial Sequence
  Description of Artificial Sequence: Synthetic oligonucleotide
ugagauuuugcuuauucag

SEQ ID NO: 87294 - RNA, 19 nt, Artificial Sequence
  Description of Artificial Sequence: Synthetic oligonucleotide
aauugcaacacuuugcuuu

SEQ ID NO: 87295 - RNA, 19 nt, Artificial Sequence
  Description of Artificial Sequence: Synthetic oligonucleotide
uguacauacacuuauuuau

SEQ ID NO: 87296 - RNA, 19 nt, Artificial Sequence
  Description of Artificial Sequence: Synthetic oligonucleotide
acuauuacuuauugaaaac

SEQ ID NO: 87297 - RNA, 19 nt, Artificial Sequence
  Description of Artificial Sequence: Synthetic oligonucleotide
aacuauuacuuauugaaaa

SEQ ID NO: 87298 - RNA, 19 nt, Artificial Sequence
  Description of Artificial Sequence: Synthetic oligonucleotide
ugcauuuauaacauaauuc

SEQ ID NO: 87299 - RNA, 19 nt, Artificial Sequence
  Description of Artificial Sequence: Synthetic oligonucleotide
uacacauuauucaaaggag

SEQ ID NO: 87300 - RNA, 19 nt, Artificial Sequence
  Description of Artificial Sequence: Synthetic oligonucleotide
aacauuaacauguacuuua

SEQ ID NO: 87301 - RNA, 19 nt, Artificial Sequence
  Description of Artificial Sequence: Synthetic oligonucleotide
auuauuaacauuucuguaa

SEQ ID NO: 87302 - RNA, 19 nt, Artificial Sequence
  Description of Artificial Sequence: Synthetic oligonucleotide
aaauuagagggucagagua

SEQ ID NO: 87303 - RNA, 19 nt, Artificial Sequence
  Description of Artificial Sequence: Synthetic oligonucleotide
uagaucaagacaaaggaaa

SEQ ID NO: 87304 - RNA, 19 nt, Artificial Sequence
  Description of Artificial Sequence: Synthetic oligonucleotide
aacagaaugcucuuccaag

SEQ ID NO: 87305 - RNA, 19 nt, Artificial Sequence
  Description of Artificial Sequence: Synthetic oligonucleotide
uccaauauaacuccaugug

SEQ ID NO: 87306 - RNA, 19 nt, Artificial Sequence
  Description of Artificial Sequence: Synthetic oligonucleotide
gacuuuacugaaauuaugg

SEQ ID NO: 87307 - RNA, 19 nt, Artificial Sequence
  Description of Artificial Sequence: Synthetic oligonucleotide
aaugcuauacuuguuagga

SEQ ID NO: 87308 - RNA, 19 nt, Artificial Sequence
  Description of Artificial Sequence: Synthetic oligonucleotide
aauuaagacuacagaaggc

SEQ ID NO: 87309 - RNA, 19 nt, Artificial Sequence
  Description of Artificial Sequence: Synthetic oligonucleotide
uuugaucauacauugguga

SEQ ID NO: 87310 - RNA, 19 nt, Artificial Sequence
  Description of Artificial Sequence: Synthetic oligonucleotide
uuaauauagugucuuguga

SEQ ID NO: 87311 - RNA, 19 nt, Artificial Sequence
  Description of Artificial Sequence: Synthetic oligonucleotide
auucauaaguaccuguuag

SEQ ID NO: 87312 - RNA, 19 nt, Artificial Sequence
  Description of Artificial Sequence: Synthetic oligonucleotide
uaagagauaaguuuguaua

SEQ ID NO: 87313 - RNA, 19 nt, Artificial Sequence
  Description of Artificial Sequence: Synthetic oligonucleotide
agauacacauuauucaaag

SEQ ID NO: 87314 - RNA, 19 nt, Artificial Sequence
  Description of Artificial Sequence: Synthetic oligonucleotide
ugauauaauuuauaagugu

SEQ ID NO: 87315 - RNA, 19 nt, Artificial Sequence
  Description of Artificial Sequence: Synthetic oligonucleotide
uucaacacuauuauaauuu

SEQ ID NO: 87316 - RNA, 19 nt, Artificial Sequence
  Description of Artificial Sequence: Synthetic oligonucleotide
gucuaaaauucacagagag

SEQ ID NO: 87317 - RNA, 19 nt, Artificial Sequence
  Description of Artificial Sequence: Synthetic oligonucleotide
aaacccuuaaaauccaaga

SEQ ID NO: 87318 - RNA, 19 nt, Artificial Sequence
  Description of Artificial Sequence: Synthetic oligonucleotide
ugauuaagcauuugaagga

SEQ ID NO: 87319 - RNA, 19 nt, Artificial Sequence
  Description of Artificial Sequence: Synthetic oligonucleotide
auuaauauagugucuugug

SEQ ID NO: 87320 - RNA, 19 nt, Artificial Sequence
  Description of Artificial Sequence: Synthetic oligonucleotide
ucuuuuagcacaacaguga

SEQ ID NO: 87321 - RNA, 19 nt, Artificial Sequence
  Description of Artificial Sequence: Synthetic oligonucleotide
agaauacuaaaagugaaag

SEQ ID NO: 87322 - RNA, 19 nt, Artificial Sequence
  Description of Artificial Sequence: Synthetic oligonucleotide
ucaucaauaggaaauggaa

SEQ ID NO: 87323 - RNA, 19 nt, Artificial Sequence
  Description of Artificial Sequence: Synthetic oligonucleotide
aaagaguuacuuuugugaa

SEQ ID NO: 87324 - RNA, 19 nt, Artificial Sequence
  Description of Artificial Sequence: Synthetic oligonucleotide
auaaacuacauaguaguuc

SEQ ID NO: 87325 - RNA, 19 nt, Artificial Sequence
  Description of Artificial Sequence: Synthetic oligonucleotide
aaagaugagaugaucaacu

SEQ ID NO: 87326 - RNA, 19 nt, Artificial Sequence
  Description of Artificial Sequence: Synthetic oligonucleotide
uuuaaaagacagcugaguu

SEQ ID NO: 87327 - RNA, 19 nt, Artificial Sequence
  Description of Artificial Sequence: Synthetic oligonucleotide
aagaugagaugaucaacuc

SEQ ID NO: 87328 - RNA, 19 nt, Artificial Sequence
  Description of Artificial Sequence: Synthetic oligonucleotide
uucauaaguaccuguuagg

SEQ ID NO: 87329 - RNA, 19 nt, Artificial Sequence
  Description of Artificial Sequence: Synthetic oligonucleotide
accaaguuauucccaaacc

SEQ ID NO: 87330 - RNA, 19 nt, Artificial Sequence
  Description of Artificial Sequence: Synthetic oligonucleotide
aacccaacugaaugagugc

SEQ ID NO: 87331 - RNA, 19 nt, Artificial Sequence
  Description of Artificial Sequence: Synthetic oligonucleotide
ugcuuguauaacuaguuug

SEQ ID NO: 87332 - RNA, 19 nt, Artificial Sequence
  Description of Artificial Sequence: Synthetic oligonucleotide
aauuaauauagugucuugu

SEQ ID NO: 87333 - RNA, 19 nt, Artificial Sequence
  Description of Artificial Sequence: Synthetic oligonucleotide
aacuauuugcuuguauaac

SEQ ID NO: 87334 - RNA, 19 nt, Artificial Sequence
  Description of Artificial Sequence: Synthetic oligonucleotide
cuuuacugaaauuaugguc

SEQ ID NO: 87335 - RNA, 19 nt, Artificial Sequence
  Description of Artificial Sequence: Synthetic oligonucleotide
uuguguuucuuuuagcaca

SEQ ID NO: 87336 - RNA, 19 nt, Artificial Sequence
  Description of Artificial Sequence: Synthetic oligonucleotide
uacacacacacacacagac

SEQ ID NO: 87337 - RNA, 19 nt, Artificial Sequence
  Description of Artificial Sequence: Synthetic oligonucleotide
ggcacauaaacuuuggucc

SEQ ID NO: 87338 - RNA, 19 nt, Artificial Sequence
  Description of Artificial Sequence: Synthetic oligonucleotide
cacuuauuuauacacacac

SEQ ID NO: 87339 - RNA, 19 nt, Artificial Sequence
  Description of Artificial Sequence: Synthetic oligonucleotide
cugagauacucuuuaaaag

SEQ ID NO: 87340 - RNA, 19 nt, Artificial Sequence
  Description of Artificial Sequence: Synthetic oligonucleotide
cuuaggcucaaauaugaag

SEQ ID NO: 87341 - RNA, 19 nt, Artificial Sequence
  Description of Artificial Sequence: Synthetic oligonucleotide
aaagacugcaaacagucuu

SEQ ID NO: 87342 - RNA, 19 nt, Artificial Sequence
  Description of Artificial Sequence: Synthetic oligonucleotide
uuauuaacauuucuguaau

SEQ ID NO: 87343 - RNA, 19 nt, Artificial Sequence
  Description of Artificial Sequence: Synthetic oligonucleotide
aaaggcaugcuacaaugcu

SEQ ID NO: 87344 - RNA, 19 nt, Artificial Sequence
  Description of Artificial Sequence: Synthetic oligonucleotide
uguaguguacagaaccuug

SEQ ID NO: 87345 - RNA, 19 nt, Artificial Sequence
  Description of Artificial Sequence: Synthetic oligonucleotide
auagaccugaauauuuucc

SEQ ID NO: 87346 - RNA, 19 nt, Artificial Sequence
  Description of Artificial Sequence: Synthetic oligonucleotide
auaaguaccuguuaggauu

SEQ ID NO: 87347 - RNA, 19 nt, Artificial Sequence
  Description of Artificial Sequence: Synthetic oligonucleotide
aauggaaagucaaggccgc

SEQ ID NO: 87348 - RNA, 19 nt, Artificial Sequence
  Description of Artificial Sequence: Synthetic oligonucleotide
aucucuacaccaaagcacc

SEQ ID NO: 87349 - RNA, 19 nt, Artificial Sequence
  Description of Artificial Sequence: Synthetic oligonucleotide
aaagggaauuuuaugaaca

SEQ ID NO: 87350 - RNA, 19 nt, Artificial Sequence
  Description of Artificial Sequence: Synthetic oligonucleotide
aguuauauacaaucuaaau

SEQ ID NO: 87351 - RNA, 19 nt, Artificial Sequence
  Description of Artificial Sequence: Synthetic oligonucleotide
acaaaugaaaucugguacu

SEQ ID NO: 87352 - RNA, 19 nt, Artificial Sequence
  Description of Artificial Sequence: Synthetic oligonucleotide
uuguuaggaaaagagacug

SEQ ID NO: 87353 - RNA, 19 nt, Artificial Sequence
  Description of Artificial Sequence: Synthetic oligonucleotide
aucacauuacauuacuuga

SEQ ID NO: 87354 - RNA, 19 nt, Artificial Sequence
  Description of Artificial Sequence: Synthetic oligonucleotide
cacacacacacacagacgc

SEQ ID NO: 87355 - RNA, 19 nt, Artificial Sequence
  Description of Artificial Sequence: Synthetic oligonucleotide
uugugaaagaggcagaauu

SEQ ID NO: 87356 - RNA, 19 nt, Artificial Sequence
  Description of Artificial Sequence: Synthetic oligonucleotide
cacuuuauauguuaacuug

SEQ ID NO: 87357 - RNA, 19 nt, Artificial Sequence
  Description of Artificial Sequence: Synthetic oligonucleotide
agucuauucaucaauagga

SEQ ID NO: 87358 - RNA, 19 nt, Artificial Sequence
  Description of Artificial Sequence: Synthetic oligonucleotide
uaauaacuaucaauagaug

SEQ ID NO: 87359 - RNA, 19 nt, Artificial Sequence
  Description of Artificial Sequence: Synthetic oligonucleotide
gucaauuaagacuacagaa

SEQ ID NO: 87360 - RNA, 19 nt, Artificial Sequence
  Description of Artificial Sequence: Synthetic oligonucleotide
aacacuuugcuuuuccaaa

SEQ ID NO: 87361 - RNA, 19 nt, Artificial Sequence
  Description of Artificial Sequence: Synthetic oligonucleotide
auuaagacuacagaaggca

SEQ ID NO: 87362 - RNA, 19 nt, Artificial Sequence
  Description of Artificial Sequence: Synthetic oligonucleotide
uuacaugucaugaauuaau

SEQ ID NO: 87363 - RNA, 19 nt, Artificial Sequence
  Description of Artificial Sequence: Synthetic oligonucleotide
aggagugucauacagugga

SEQ ID NO: 87364 - RNA, 19 nt, Artificial Sequence
  Description of Artificial Sequence: Synthetic oligonucleotide
acuuauguaucccuggaga

SEQ ID NO: 87365 - RNA, 19 nt, Artificial Sequence
  Description of Artificial Sequence: Synthetic oligonucleotide
uuuaacagauucaggcuga

SEQ ID NO: 87366 - RNA, 19 nt, Artificial Sequence
  Description of Artificial Sequence: Synthetic oligonucleotide
uuaaaagccuucacugagc

SEQ ID NO: 87367 - RNA, 19 nt, Artificial Sequence
  Description of Artificial Sequence: Synthetic oligonucleotide
uugaucauacauuggugag

SEQ ID NO: 87368 - RNA, 19 nt, Artificial Sequence
  Description of Artificial Sequence: Synthetic oligonucleotide
auaugauagaccugaauau

SEQ ID NO: 87369 - RNA, 19 nt, Artificial Sequence
  Description of Artificial Sequence: Synthetic oligonucleotide
aacccacuuucucauacuc

SEQ ID NO: 87370 - RNA, 19 nt, Artificial Sequence
  Description of Artificial Sequence: Synthetic oligonucleotide
aaaccacucacccuucucu

SEQ ID NO: 87371 - RNA, 19 nt, Artificial Sequence
  Description of Artificial Sequence: Synthetic oligonucleotide
caaagaguuacuuuuguga

SEQ ID NO: 87372 - RNA, 19 nt, Artificial Sequence
  Description of Artificial Sequence: Synthetic oligonucleotide
uccaagcccaccuaaaaga

SEQ ID NO: 87373 - RNA, 19 nt, Artificial Sequence
  Description of Artificial Sequence: Synthetic oligonucleotide
auuacuuauugaaaaccac

SEQ ID NO: 87374 - RNA, 19 nt, Artificial Sequence
  Description of Artificial Sequence: Synthetic oligonucleotide
aacagaccauguaaaacac

SEQ ID NO: 87375 - RNA, 19 nt, Artificial Sequence
  Description of Artificial Sequence: Synthetic oligonucleotide
ugaaugagugccaucuuac

SEQ ID NO: 87376 - RNA, 19 nt, Artificial Sequence
  Description of Artificial Sequence: Synthetic oligonucleotide
aaucccacuuauguauccc

SEQ ID NO: 87377 - RNA, 19 nt, Artificial Sequence
  Description of Artificial Sequence: Synthetic oligonucleotide
ucaacucugagaauacuaa

SEQ ID NO: 87378 - RNA, 19 nt, Artificial Sequence
  Description of Artificial Sequence: Synthetic oligonucleotide
ggguggacaaaauugaucc

SEQ ID NO: 87379 - RNA, 19 nt, Artificial Sequence
  Description of Artificial Sequence: Synthetic oligonucleotide
uaucccuggagacaauugc

SEQ ID NO: 87380 - RNA, 19 nt, Artificial Sequence
  Description of Artificial Sequence: Synthetic oligonucleotide
uuauaaguguccuuuugaa

SEQ ID NO: 87381 - RNA, 19 nt, Artificial Sequence
  Description of Artificial Sequence: Synthetic oligonucleotide
agcaauccaaauuuaaaau

SEQ ID NO: 87382 - RNA, 19 nt, Artificial Sequence
  Description of Artificial Sequence: Synthetic oligonucleotide
gagaagauacacauuauuc

SEQ ID NO: 87383 - RNA, 19 nt, Artificial Sequence
  Description of Artificial Sequence: Synthetic oligonucleotide
auaacuaucaauagaugca

SEQ ID NO: 87384 - RNA, 19 nt, Artificial Sequence
  Description of Artificial Sequence: Synthetic oligonucleotide
cuaaaagaagaccuuacca

SEQ ID NO: 87385 - RNA, 19 nt, Artificial Sequence
  Description of Artificial Sequence: Synthetic oligonucleotide
ugcuauacuuguuaggaaa

SEQ ID NO: 87386 - RNA, 19 nt, Artificial Sequence
  Description of Artificial Sequence: Synthetic oligonucleotide
guuauauauaauaacuauc

SEQ ID NO: 87387 - RNA, 19 nt, Artificial Sequence
  Description of Artificial Sequence: Synthetic oligonucleotide
ggaaaagagacugagauuc

SEQ ID NO: 87388 - RNA, 19 nt, Artificial Sequence
  Description of Artificial Sequence: Synthetic oligonucleotide
ucacauuacauuacuugac

SEQ ID NO: 87389 - RNA, 19 nt, Artificial Sequence
  Description of Artificial Sequence: Synthetic oligonucleotide
aauuuuaugaacagaccau

SEQ ID NO: 87390 - RNA, 19 nt, Artificial Sequence
  Description of Artificial Sequence: Synthetic oligonucleotide
auauacaagacaaucgcug

SEQ ID NO: 87391 - RNA, 19 nt, Artificial Sequence
  Description of Artificial Sequence: Synthetic oligonucleotide
auacuaaaagugaaagagg

SEQ ID NO: 87392 - RNA, 19 nt, Artificial Sequence
  Description of Artificial Sequence: Synthetic oligonucleotide
caucucuacaccaaagcac

SEQ ID NO: 87393 - RNA, 19 nt, Artificial Sequence
  Description of Artificial Sequence: Synthetic oligonucleotide
cauaugauagaccugaaua

SEQ ID NO: 87394 - RNA, 19 nt, Artificial Sequence
  Description of Artificial Sequence: Synthetic oligonucleotide
aauguuggaaagaugcaga

SEQ ID NO: 87395 - RNA, 19 nt, Artificial Sequence
  Description of Artificial Sequence: Synthetic oligonucleotide
uauaacuaguuugugggac

SEQ ID NO: 87396 - RNA, 19 nt, Artificial Sequence
  Description of Artificial Sequence: Synthetic oligonucleotide
aauaaagaagcaauccaaa

SEQ ID NO: 87397 - RNA, 19 nt, Artificial Sequence
  Description of Artificial Sequence: Synthetic oligonucleotide
uuuaugaacagaccaugua

SEQ ID NO: 87398 - RNA, 19 nt, Artificial Sequence
  Description of Artificial Sequence: Synthetic oligonucleotide
uacuuauugaaaaccacuu

SEQ ID NO: 87399 - RNA, 19 nt, Artificial Sequence
  Description of Artificial Sequence: Synthetic oligonucleotide
uguuagaggcuucuagcug

SEQ ID NO: 87400 - RNA, 19 nt, Artificial Sequence
  Description of Artificial Sequence: Synthetic oligonucleotide
cuuagacaaucacagaauc

SEQ ID NO: 87401 - RNA, 19 nt, Artificial Sequence
  Description of Artificial Sequence: Synthetic oligonucleotide
uuccaagcccaccuaaaag

SEQ ID NO: 87402 - RNA, 19 nt, Artificial Sequence
  Description of Artificial Sequence: Synthetic oligonucleotide
ugcuggauguuacauguca

SEQ ID NO: 87403 - RNA, 19 nt, Artificial Sequence
  Description of Artificial Sequence: Synthetic oligonucleotide
uguuacaugucaugaauua

SEQ ID NO: 87404 - RNA, 19 nt, Artificial Sequence
  Description of Artificial Sequence: Synthetic oligonucleotide
cuuauguaucccuggagac

SEQ ID NO: 87405 - RNA, 19 nt, Artificial Sequence
  Description of Artificial Sequence: Synthetic oligonucleotide
agacaauugcaacacuuug

SEQ ID NO: 87406 - RNA, 19 nt, Artificial Sequence
  Description of Artificial Sequence: Synthetic oligonucleotide
cuuugcauuuauaacauaa

SEQ ID NO: 87407 - RNA, 19 nt, Artificial Sequence
  Description of Artificial Sequence: Synthetic oligonucleotide
uauaacuccaugugguuau

SEQ ID NO: 87408 - RNA, 19 nt, Artificial Sequence
  Description of Artificial Sequence: Synthetic oligonucleotide
uauacuuguuaggaaaaga

SEQ ID NO: 87409 - RNA, 19 nt, Artificial Sequence
  Description of Artificial Sequence: Synthetic oligonucleotide
aguaguucccaacucaaaa

SEQ ID NO: 87410 - RNA, 19 nt, Artificial Sequence
  Description of Artificial Sequence: Synthetic oligonucleotide
guaauuaguacuuccugga

SEQ ID NO: 87411 - RNA, 19 nt, Artificial Sequence
  Description of Artificial Sequence: Synthetic oligonucleotide
uuugcuuauucaguuauaa

SEQ ID NO: 87412 - RNA, 19 nt, Artificial Sequence
  Description of Artificial Sequence: Synthetic oligonucleotide
uacagaaccuugaauuaac

SEQ ID NO: 87413 - RNA, 19 nt, Artificial Sequence
  Description of Artificial Sequence: Synthetic oligonucleotide
caauguuagaggcuucuag

SEQ ID NO: 87414 - RNA, 19 nt, Artificial Sequence
  Description of Artificial Sequence: Synthetic oligonucleotide
caucuuacgaucuuucuga

SEQ ID NO: 87415 - RNA, 19 nt, Artificial Sequence
  Description of Artificial Sequence: Synthetic oligonucleotide
aaguguaacugagauuuug

SEQ ID NO: 87416 - RNA, 19 nt, Artificial Sequence
  Description of Artificial Sequence: Synthetic oligonucleotide
acaauagaucaagacaaag

SEQ ID NO: 87417 - RNA, 19 nt, Artificial Sequence
  Description of Artificial Sequence: Synthetic oligonucleotide
ucaacacuauuauaauuuc

SEQ ID NO: 87418 - RNA, 19 nt, Artificial Sequence
  Description of Artificial Sequence: Synthetic oligonucleotide
uauaaguguccuuuugaaa

SEQ ID NO: 87419 - RNA, 19 nt, Artificial Sequence
  Description of Artificial Sequence: Synthetic oligonucleotide
agcugaguuacacuuuaag

SEQ ID NO: 87420 - RNA, 19 nt, Artificial Sequence
  Description of Artificial Sequence: Synthetic oligonucleotide
ugaaagaggcagaauuggu

SEQ ID NO: 87421 - RNA, 19 nt, Artificial Sequence
  Description of Artificial Sequence: Synthetic oligonucleotide
uuauacacacacacacaca

SEQ ID NO: 87422 - RNA, 19 nt, Artificial Sequence
  Description of Artificial Sequence: Synthetic oligonucleotide
acccaacugaaugagugcc

SEQ ID NO: 87423 - RNA, 19 nt, Artificial Sequence
  Description of Artificial Sequence: Synthetic oligonucleotide
gcaauccaaauuuaaaaug

SEQ ID NO: 87424 - RNA, 19 nt, Artificial Sequence
  Description of Artificial Sequence: Synthetic oligonucleotide
uauaacuauuugcuuguau

SEQ ID NO: 87425 - RNA, 19 nt, Artificial Sequence
  Description of Artificial Sequence: Synthetic oligonucleotide
auacuccaaauaugugggc

SEQ ID NO: 87426 - RNA, 19 nt, Artificial Sequence
  Description of Artificial Sequence: Synthetic oligonucleotide
uucuaagagauaaguuugu

SEQ ID NO: 87427 - RNA, 19 nt, Artificial Sequence
  Description of Artificial Sequence: Synthetic oligonucleotide
ugugccugaagacuuuacu

SEQ ID NO: 87428 - RNA, 19 nt, Artificial Sequence
  Description of Artificial Sequence: Synthetic oligonucleotide
cauuaaaagaguauaugua

SEQ ID NO: 87429 - RNA, 19 nt, Artificial Sequence
  Description of Artificial Sequence: Synthetic oligonucleotide
aggaaaacggaaccaauau

SEQ ID NO: 87430 - RNA, 19 nt, Artificial Sequence
  Description of Artificial Sequence: Synthetic oligonucleotide
uaccuuaggcucaaauaug

SEQ ID NO: 87431 - RNA, 19 nt, Artificial Sequence
  Description of Artificial Sequence: Synthetic oligonucleotide
auguuagaggcuucuagcu

SEQ ID NO: 87432 - RNA, 19 nt, Artificial Sequence
  Description of Artificial Sequence: Synthetic oligonucleotide
aaguuauucccaaaccacu

SEQ ID NO: 87433 - RNA, 19 nt, Artificial Sequence
  Description of Artificial Sequence: Synthetic oligonucleotide
aaaccuuugaucauacauu

SEQ ID NO: 87434 - RNA, 19 nt, Artificial Sequence
  Description of Artificial Sequence: Synthetic oligonucleotide
uauguaucccuggagacaa

SEQ ID NO: 87435 - RNA, 19 nt, Artificial Sequence
  Description of Artificial Sequence: Synthetic oligonucleotide
caugugguuauauauaaua

SEQ ID NO: 87436 - RNA, 19 nt, Artificial Sequence
  Description of Artificial Sequence: Synthetic oligonucleotide
uaacuaucaauagaugcaa

SEQ ID NO: 87437 - RNA, 19 nt, Artificial Sequence
  Description of Artificial Sequence: Synthetic oligonucleotide
ugaucaacucugagaauac

SEQ ID NO: 87438 - RNA, 19 nt, Artificial Sequence
  Description of Artificial Sequence: Synthetic oligonucleotide
uuaaguguggcaguuuuau

SEQ ID NO: 87439 - RNA, 19 nt, Artificial Sequence
  Description of Artificial Sequence: Synthetic oligonucleotide
aagaguuacuuuugugaaa

SEQ ID NO: 87440 - RNA, 19 nt, Artificial Sequence
  Description of Artificial Sequence: Synthetic oligonucleotide
uauguuaacuuguucccua

SEQ ID NO: 87441 - RNA, 19 nt, Artificial Sequence
  Description of Artificial Sequence: Synthetic oligonucleotide
uguguuucuuuuagcacaa

SEQ ID NO: 87442 - RNA, 19 nt, Artificial Sequence
  Description of Artificial Sequence: Synthetic oligonucleotide
cacuuuaaguuauauacaa

SEQ ID NO: 87443 - RNA, 19 nt, Artificial Sequence
  Description of Artificial Sequence: Synthetic oligonucleotide
uguuaggaaaagagacuga

SEQ ID NO: 87444 - RNA, 19 nt, Artificial Sequence
  Description of Artificial Sequence: Synthetic oligonucleotide
uucucuaagcagucuauuc

SEQ ID NO: 87445 - RNA, 19 nt, Artificial Sequence
  Description of Artificial Sequence: Synthetic oligonucleotide
auaacuaguuugugggaca

SEQ ID NO: 87446 - RNA, 19 nt, Artificial Sequence
  Description of Artificial Sequence: Synthetic oligonucleotide
ucuaucccaucucuacacc

SEQ ID NO: 87447 - RNA, 19 nt, Artificial Sequence
  Description of Artificial Sequence: Synthetic oligonucleotide
aaacuauuacuuauugaaa

SEQ ID NO: 87448 - RNA, 19 nt, Artificial Sequence
  Description of Artificial Sequence: Synthetic oligonucleotide
agaaguaucucuuguuuua

SEQ ID NO: 87449 - RNA, 19 nt, Artificial Sequence
  Description of Artificial Sequence: Synthetic oligonucleotide
aguacagaugccaugacau

SEQ ID NO: 87450 - RNA, 19 nt, Artificial Sequence
  Description of Artificial Sequence: Synthetic oligonucleotide
augagugccaucuuacgau

SEQ ID NO: 87451 - RNA, 19 nt, Artificial Sequence
  Description of Artificial Sequence: Synthetic oligonucleotide
ccaauauaacuccaugugg

SEQ ID NO: 87452 - RNA, 19 nt, Artificial Sequence
  Description of Artificial Sequence: Synthetic oligonucleotide
ugugggacaacauucucuu

SEQ ID NO: 87453 - RNA, 19 nt, Artificial Sequence
  Description of Artificial Sequence: Synthetic oligonucleotide
cuacauaguaguucccaac

SEQ ID NO: 87454 - RNA, 19 nt, Artificial Sequence
  Description of Artificial Sequence: Synthetic oligonucleotide
acagaaccuugaauuaacc

SEQ ID NO: 87455 - RNA, 19 nt, Artificial Sequence
  Description of Artificial Sequence: Synthetic oligonucleotide
ucuacacaaaucccugaaa

SEQ ID NO: 87456 - RNA, 19 nt, Artificial Sequence
  Description of Artificial Sequence: Synthetic oligonucleotide
agugucauacaguggaaaa

SEQ ID NO: 87457 - RNA, 19 nt, Artificial Sequence
  Description of Artificial Sequence: Synthetic oligonucleotide
aguaccuguuaggauuugc

SEQ ID NO: 87458 - RNA, 19 nt, Artificial Sequence
  Description of Artificial Sequence: Synthetic oligonucleotide
aaggcacauaaacuuuggu

SEQ ID NO: 87459 - RNA, 19 nt, Artificial Sequence
  Description of Artificial Sequence: Synthetic oligonucleotide
cuugguguggucagcaauc

SEQ ID NO: 87460 - RNA, 19 nt, Artificial Sequence
  Description of Artificial Sequence: Synthetic oligonucleotide
caauccaaauuuaaaaugu

SEQ ID NO: 87461 - RNA, 19 nt, Artificial Sequence
  Description of Artificial Sequence: Synthetic oligonucleotide
aaauaccaaugcuaccuua

SEQ ID NO: 87462 - RNA, 19 nt, Artificial Sequence
  Description of Artificial Sequence: Synthetic oligonucleotide
uacuccaaauaugugggca

SEQ ID NO: 87463 - RNA, 19 nt, Artificial Sequence
  Description of Artificial Sequence: Synthetic oligonucleotide
cacuuagacaaucacagaa

SEQ ID NO: 87464 - RNA, 19 nt, Artificial Sequence
  Description of Artificial Sequence: Synthetic oligonucleotide
aauugaucccuuugacaaa

SEQ ID NO: 87465 - RNA, 19 nt, Artificial Sequence
  Description of Artificial Sequence: Synthetic oligonucleotide
ugaucccuuugacaaauuc

SEQ ID NO: 87466 - RNA, 19 nt, Artificial Sequence
  Description of Artificial Sequence: Synthetic oligonucleotide
ugauagaccugaauauuuu

SEQ ID NO: 87467 - RNA, 19 nt, Artificial Sequence
  Description of Artificial Sequence: Synthetic oligonucleotide
gaaucccacuuauguaucc

SEQ ID NO: 87468 - RNA, 19 nt, Artificial Sequence
  Description of Artificial Sequence: Synthetic oligonucleotide
cugaaauuaugguccaguc

SEQ ID NO: 87469 - RNA, 19 nt, Artificial Sequence
  Description of Artificial Sequence: Synthetic oligonucleotide
uuuugugaaagaggcagaa

SEQ ID NO: 87470 - RNA, 19 nt, Artificial Sequence
  Description of Artificial Sequence: Synthetic oligonucleotide
acugaaauuaugguccagu

SEQ ID NO: 87471 - RNA, 19 nt, Artificial Sequence
  Description of Artificial Sequence: Synthetic oligonucleotide
ugaucauacauuggugaga

SEQ ID NO: 87472 - RNA, 19 nt, Artificial Sequence
  Description of Artificial Sequence: Synthetic oligonucleotide
uggcugaaaauagaagucu

SEQ ID NO: 87473 - RNA, 19 nt, Artificial Sequence
  Description of Artificial Sequence: Synthetic oligonucleotide
ccuugaauuaaccaugcac

SEQ ID NO: 87474 - RNA, 19 nt, Artificial Sequence
  Description of Artificial Sequence: Synthetic oligonucleotide
ucucagguggugauucucu

SEQ ID NO: 87475 - RNA, 19 nt, Artificial Sequence
  Description of Artificial Sequence: Synthetic oligonucleotide
auaacagaaugcucuucca

SEQ ID NO: 87476 - RNA, 19 nt, Artificial Sequence
  Description of Artificial Sequence: Synthetic oligonucleotide
uagcaguacacccuggguu

SEQ ID NO: 87477 - RNA, 19 nt, Artificial Sequence
  Description of Artificial Sequence: Synthetic oligonucleotide
cagacgcacacauaucuac

SEQ ID NO: 87478 - RNA, 19 nt, Artificial Sequence
  Description of Artificial Sequence: Synthetic oligonucleotide
uaugauagaccugaauauu

SEQ ID NO: 87479 - RNA, 19 nt, Artificial Sequence
  Description of Artificial Sequence: Synthetic oligonucleotide
auaacuugguguggucagc

SEQ ID NO: 87480 - RNA, 19 nt, Artificial Sequence
  Description of Artificial Sequence: Synthetic oligonucleotide
auuaauggcugaaaauaga

SEQ ID NO: 87481 - RNA, 19 nt, Artificial Sequence
  Description of Artificial Sequence: Synthetic oligonucleotide
aauaaacuacauaguaguu

SEQ ID NO: 87482 - RNA, 19 nt, Artificial Sequence
  Description of Artificial Sequence: Synthetic oligonucleotide
acuuauugaaaaccacuua

SEQ ID NO: 87483 - RNA, 19 nt, Artificial Sequence
  Description of Artificial Sequence: Synthetic oligonucleotide
caauauaacuccauguggu

SEQ ID NO: 87484 - RNA, 19 nt, Artificial Sequence
  Description of Artificial Sequence: Synthetic oligonucleotide
auuaaccaugcacuacaca

SEQ ID NO: 87485 - RNA, 19 nt, Artificial Sequence
  Description of Artificial Sequence: Synthetic oligonucleotide
uugcuuauucaguuauaac

SEQ ID NO: 87486 - RNA, 19 nt, Artificial Sequence
  Description of Artificial Sequence: Synthetic oligonucleotide
ugguccagucuaaaauuca

SEQ ID NO: 87487 - RNA, 19 nt, Artificial Sequence
  Description of Artificial Sequence: Synthetic oligonucleotide
uaccacaaacuguauuaca

SEQ ID NO: 87488 - RNA, 19 nt, Artificial Sequence
  Description of Artificial Sequence: Synthetic oligonucleotide
aagauacacauuauucaaa

SEQ ID NO: 87489 - RNA, 19 nt, Artificial Sequence
  Description of Artificial Sequence: Synthetic oligonucleotide
uacuuuugugaaagaggca

SEQ ID NO: 87490 - RNA, 19 nt, Artificial Sequence
  Description of Artificial Sequence: Synthetic oligonucleotide
caucaauaggaaauggaaa

SEQ ID NO: 87491 - RNA, 19 nt, Artificial Sequence
  Description of Artificial Sequence: Synthetic oligonucleotide
ugaaucccacuuauguauc

SEQ ID NO: 87492 - RNA, 19 nt, Artificial Sequence
  Description of Artificial Sequence: Synthetic oligonucleotide
ucuaagcagucuauucauc

SEQ ID NO: 87493 - RNA, 19 nt, Artificial Sequence
  Description of Artificial Sequence: Synthetic oligonucleotide
uaaguaccuguuaggauuu

SEQ ID NO: 87494 - RNA, 19 nt, Artificial Sequence
  Description of Artificial Sequence: Synthetic oligonucleotide
ucugaucacaggcaugcuu

SEQ ID NO: 87495 - RNA, 19 nt, Artificial Sequence
  Description of Artificial Sequence: Synthetic oligonucleotide
cacauuacauuacuugaca

SEQ ID NO: 87496 - RNA, 19 nt, Artificial Sequence
  Description of Artificial Sequence: Synthetic oligonucleotide
aucuaauucagggaauuaa

SEQ ID NO: 87497 - RNA, 19 nt, Artificial Sequence
  Description of Artificial Sequence: Synthetic oligonucleotide
cuauacuuguuaggaaaag

SEQ ID NO: 87498 - RNA, 19 nt, Artificial Sequence
  Description of Artificial Sequence: Synthetic oligonucleotide
uacaggugcacaccaaguu

SEQ ID NO: 87499 - RNA, 19 nt, Artificial Sequence
  Description of Artificial Sequence: Synthetic oligonucleotide
aucuacacaaaucccugaa

SEQ ID NO: 87500 - RNA, 19 nt, Artificial Sequence
  Description of Artificial Sequence: Synthetic oligonucleotide
aauuagagggucagaguau

SEQ ID NO: 87501 - RNA, 19 nt, Artificial Sequence
  Description of Artificial Sequence: Synthetic oligonucleotide
gaguacagaugccaugaca

SEQ ID NO: 87502 - RNA, 19 nt, Artificial Sequence
  Description of Artificial Sequence: Synthetic oligonucleotide
acacccuggguuuucuaag

SEQ ID NO: 87503 - RNA, 19 nt, Artificial Sequence
  Description of Artificial Sequence: Synthetic oligonucleotide
uucaaaggagugucauaca

SEQ ID NO: 87504 - RNA, 19 nt, Artificial Sequence
  Description of Artificial Sequence: Synthetic oligonucleotide
guauuacaaaugaaaucug

SEQ ID NO: 87505 - RNA, 19 nt, Artificial Sequence
  Description of Artificial Sequence: Synthetic oligonucleotide
aaggucaauuaagacuaca

SEQ ID NO: 87506 - RNA, 19 nt, Artificial Sequence
  Description of Artificial Sequence: Synthetic oligonucleotide
ucccacuuauguaucccug

SEQ ID NO: 87507 - RNA, 19 nt, Artificial Sequence
  Description of Artificial Sequence: Synthetic oligonucleotide
guuauucccaaaccacuca

SEQ ID NO: 87508 - RNA, 19 nt, Artificial Sequence
  Description of Artificial Sequence: Synthetic oligonucleotide
agaggcuucuagcugugcu

SEQ ID NO: 87509 - RNA, 19 nt, Artificial Sequence
  Description of Artificial Sequence: Synthetic oligonucleotide
agaaggcacauaaacuuug

SEQ ID NO: 87510 - RNA, 19 nt, Artificial Sequence
  Description of Artificial Sequence: Synthetic oligonucleotide
uuuaaguguggcaguuuua

SEQ ID NO: 87511 - RNA, 19 nt, Artificial Sequence
  Description of Artificial Sequence: Synthetic oligonucleotide
augguccagucuaaaauuc

SEQ ID NO: 87512 - RNA, 19 nt, Artificial Sequence
  Description of Artificial Sequence: Synthetic oligonucleotide
auuuauacacacacacaca

SEQ ID NO: 87513 - RNA, 19 nt, Artificial Sequence
  Description of Artificial Sequence: Synthetic oligonucleotide
aaaagacugcaaacagucu

SEQ ID NO: 87514 - RNA, 19 nt, Artificial Sequence
  Description of Artificial Sequence: Synthetic oligonucleotide
gaaaagagacugagauucc

SEQ ID NO: 87515 - RNA, 19 nt, Artificial Sequence
  Description of Artificial Sequence: Synthetic oligonucleotide
gagauuccaaguaacaggu

SEQ ID NO: 87516 - RNA, 19 nt, Artificial Sequence
  Description of Artificial Sequence: Synthetic oligonucleotide
auagcaguacacccugggu

SEQ ID NO: 87517 - RNA, 19 nt, Artificial Sequence
  Description of Artificial Sequence: Synthetic oligonucleotide
ccuaaaagaagaccuuacc

SEQ ID NO: 87518 - RNA, 19 nt, Artificial Sequence
  Description of Artificial Sequence: Synthetic oligonucleotide
aacuaguuugugggacaac

SEQ ID NO: 87519 - RNA, 19 nt, Artificial Sequence
  Description of Artificial Sequence: Synthetic oligonucleotide
aaggagugucauacagugg

SEQ ID NO: 87520 - RNA, 19 nt, Artificial Sequence
  Description of Artificial Sequence: Synthetic oligonucleotide
gugucuugugauaagaaaa

SEQ ID NO: 87521 - RNA, 19 nt, Artificial Sequence
  Description of Artificial Sequence: Synthetic oligonucleotide
gguuauauauaauaacuau

SEQ ID NO: 87522 - RNA, 19 nt, Artificial Sequence
  Description of Artificial Sequence: Synthetic oligonucleotide
cugagauuuugcuuauuca

SEQ ID NO: 87523 - RNA, 19 nt, Artificial Sequence
  Description of Artificial Sequence: Synthetic oligonucleotide
acacuuuaaguuauauaca

SEQ ID NO: 87524 - RNA, 19 nt, Artificial Sequence
  Description of Artificial Sequence: Synthetic oligonucleotide
auauguuaacuuguucccu

SEQ ID NO: 87525 - RNA, 19 nt, Artificial Sequence
  Description of Artificial Sequence: Synthetic oligonucleotide
acuuauuuauacacacaca

SEQ ID NO: 87526 - RNA, 19 nt, Artificial Sequence
  Description of Artificial Sequence: Synthetic oligonucleotide
uacacccuggguuuucuaa

SEQ ID NO: 87527 - RNA, 19 nt, Artificial Sequence
  Description of Artificial Sequence: Synthetic oligonucleotide
uucagggaauuaaauuauu

SEQ ID NO: 87528 - RNA, 19 nt, Artificial Sequence
  Description of Artificial Sequence: Synthetic oligonucleotide
ucccuuugacaaauucugu

SEQ ID NO: 87529 - RNA, 19 nt, Artificial Sequence
  Description of Artificial Sequence: Synthetic oligonucleotide
acuuaugcuggauguuaca

SEQ ID NO: 87530 - RNA, 19 nt, Artificial Sequence
  Description of Artificial Sequence: Synthetic oligonucleotide
auagaucaagacaaaggaa

SEQ ID NO: 87531 - RNA, 19 nt, Artificial Sequence
  Description of Artificial Sequence: Synthetic oligonucleotide
gcuuaucaaaauauacaag

SEQ ID NO: 87532 - RNA, 19 nt, Artificial Sequence
  Description of Artificial Sequence: Synthetic oligonucleotide
ucuaagagauaaguuugua

SEQ ID NO: 87533 - RNA, 19 nt, Artificial Sequence
  Description of Artificial Sequence: Synthetic oligonucleotide
ugagugccaucuuacgauc

SEQ ID NO: 87534 - RNA, 19 nt, Artificial Sequence
  Description of Artificial Sequence: Synthetic oligonucleotide
cagaaccuugaauuaacca

SEQ ID NO: 87535 - RNA, 19 nt, Artificial Sequence
  Description of Artificial Sequence: Synthetic oligonucleotide
ugcuaccuuaggcucaaau

SEQ ID NO: 87536 - RNA, 19 nt, Artificial Sequence
  Description of Artificial Sequence: Synthetic oligonucleotide
guauaacuaguuuguggga

SEQ ID NO: 87537 - RNA, 19 nt, Artificial Sequence
  Description of Artificial Sequence: Synthetic oligonucleotide
ucuuuguaauuaguacuuc

SEQ ID NO: 87538 - RNA, 19 nt, Artificial Sequence
  Description of Artificial Sequence: Synthetic oligonucleotide
gcuacacuuaugcuggaug

SEQ ID NO: 87539 - RNA, 19 nt, Artificial Sequence
  Description of Artificial Sequence: Synthetic oligonucleotide
cuaccuuaggcucaaauau

SEQ ID NO: 87540 - RNA, 19 nt, Artificial Sequence
  Description of Artificial Sequence: Synthetic oligonucleotide
cauuggugagaaaaucaga

SEQ ID NO: 87541 - RNA, 19 nt, Artificial Sequence
  Description of Artificial Sequence: Synthetic oligonucleotide
acuuagacaaucacagaau

SEQ ID NO: 87542 - RNA, 19 nt, Artificial Sequence
  Description of Artificial Sequence: Synthetic oligonucleotide
gaaagucaaggccgcucgc

SEQ ID NO: 87543 - RNA, 19 nt, Artificial Sequence
  Description of Artificial Sequence: Synthetic oligonucleotide
cagaacccaacugaaugag

SEQ ID NO: 87544 - RNA, 19 nt, Artificial Sequence
  Description of Artificial Sequence: Synthetic oligonucleotide
ucuuacgaucuuucugaaa

SEQ ID NO: 87545 - RNA, 19 nt, Artificial Sequence
  Description of Artificial Sequence: Synthetic oligonucleotide
agaagcaauccaaauuuaa

SEQ ID NO: 87546 - RNA, 19 nt, Artificial Sequence
  Description of Artificial Sequence: Synthetic oligonucleotide
uaguaguucccaacucaaa

SEQ ID NO: 87547 - RNA, 19 nt, Artificial Sequence
  Description of Artificial Sequence: Synthetic oligonucleotide
caugcauguuuauaaaccu

SEQ ID NO: 87548 - RNA, 19 nt, Artificial Sequence
  Description of Artificial Sequence: Synthetic oligonucleotide
cuuguuaggaaaagagacu

SEQ ID NO: 87549 - RNA, 19 nt, Artificial Sequence
  Description of Artificial Sequence: Synthetic oligonucleotide
gguacugcugcuuaucaaa

SEQ ID NO: 87550 - RNA, 19 nt, Artificial Sequence
  Description of Artificial Sequence: Synthetic oligonucleotide
uguuaggauuugcucugaa

SEQ ID NO: 87551 - RNA, 19 nt, Artificial Sequence
  Description of Artificial Sequence: Synthetic oligonucleotide
ucucuacaccaaagcacca

SEQ ID NO: 87552 - RNA, 19 nt, Artificial Sequence
  Description of Artificial Sequence: Synthetic oligonucleotide
cugaaucccacuuauguau

SEQ ID NO: 87553 - RNA, 19 nt, Artificial Sequence
  Description of Artificial Sequence: Synthetic oligonucleotide
aagagaagauacacauuau

SEQ ID NO: 87554 - RNA, 19 nt, Artificial Sequence
  Description of Artificial Sequence: Synthetic oligonucleotide
guauaacauuaaaagagua

SEQ ID NO: 87555 - RNA, 19 nt, Artificial Sequence
  Description of Artificial Sequence: Synthetic oligonucleotide
aaauuaugguccagucuaa

SEQ ID NO: 87556 - RNA, 19 nt, Artificial Sequence
  Description of Artificial Sequence: Synthetic oligonucleotide
augauagaccugaauauuu

SEQ ID NO: 87557 - RNA, 19 nt, Artificial Sequence
  Description of Artificial Sequence: Synthetic oligonucleotide
gcuacaaugcuauacuugu

SEQ ID NO: 87558 - RNA, 19 nt, Artificial Sequence
  Description of Artificial Sequence: Synthetic oligonucleotide
cacacacacacagacgcac

SEQ ID NO: 87559 - RNA, 19 nt, Artificial Sequence
  Description of Artificial Sequence: Synthetic oligonucleotide
aggccuacaggugcacacc

SEQ ID NO: 87560 - RNA, 19 nt, Artificial Sequence
  Description of Artificial Sequence: Synthetic oligonucleotide
acacacacacacacagacg

SEQ ID NO: 87561 - RNA, 19 nt, Artificial Sequence
  Description of Artificial Sequence: Synthetic oligonucleotide
uaacuaguuugugggacaa

SEQ ID NO: 87562 - RNA, 19 nt, Artificial Sequence
  Description of Artificial Sequence: Synthetic oligonucleotide
gauucaggcugaaucccac

SEQ ID NO: 87563 - RNA, 19 nt, Artificial Sequence
  Description of Artificial Sequence: Synthetic oligonucleotide
uaagggccuggauugcuuc

SEQ ID NO: 87564 - RNA, 19 nt, Artificial Sequence
  Description of Artificial Sequence: Synthetic oligonucleotide
aucaacucugagaauacua

SEQ ID NO: 87565 - RNA, 19 nt, Artificial Sequence
  Description of Artificial Sequence: Synthetic oligonucleotide
auuagagggucagaguaua

SEQ ID NO: 87566 - RNA, 19 nt, Artificial Sequence
  Description of Artificial Sequence: Synthetic oligonucleotide
agucaaggccgcucgcucu

SEQ ID NO: 87567 - RNA, 19 nt, Artificial Sequence
  Description of Artificial Sequence: Synthetic oligonucleotide
uacugaaauuaugguccag

SEQ ID NO: 87568 - RNA, 19 nt, Artificial Sequence
  Description of Artificial Sequence: Synthetic oligonucleotide
augcuauacuuguuaggaa

SEQ ID NO: 87569 - RNA, 19 nt, Artificial Sequence
  Description of Artificial Sequence: Synthetic oligonucleotide
uggucagagcaaugaggug

SEQ ID NO: 87570 - RNA, 19 nt, Artificial Sequence
  Description of Artificial Sequence: Synthetic oligonucleotide
uguggucagcaaucuuugu

SEQ ID NO: 87571 - RNA, 19 nt, Artificial Sequence
  Description of Artificial Sequence: Synthetic oligonucleotide
aguucccaacucaaaauaa

SEQ ID NO: 87572 - RNA, 19 nt, Artificial Sequence
  Description of Artificial Sequence: Synthetic oligonucleotide
ccuguuaggauuugcucug

SEQ ID NO: 87573 - RNA, 19 nt, Artificial Sequence
  Description of Artificial Sequence: Synthetic oligonucleotide
ccaucuuacgaucuuucug

SEQ ID NO: 87574 - RNA, 19 nt, Artificial Sequence
  Description of Artificial Sequence: Synthetic oligonucleotide
acacuuauuuauacacaca

SEQ ID NO: 87575 - RNA, 19 nt, Artificial Sequence
  Description of Artificial Sequence: Synthetic oligonucleotide
ugguacugcugcuuaucaa

SEQ ID NO: 87576 - RNA, 19 nt, Artificial Sequence
  Description of Artificial Sequence: Synthetic oligonucleotide
augcuacaaugcuauacuu

SEQ ID NO: 87577 - RNA, 19 nt, Artificial Sequence
  Description of Artificial Sequence: Synthetic oligonucleotide
cucaauaagggccuggauu

SEQ ID NO: 87578 - RNA, 19 nt, Artificial Sequence
  Description of Artificial Sequence: Synthetic oligonucleotide
gucuauucaucaauaggaa

SEQ ID NO: 87579 - RNA, 19 nt, Artificial Sequence
  Description of Artificial Sequence: Synthetic oligonucleotide
acacuuaugcuggauguua

SEQ ID NO: 87580 - RNA, 19 nt, Artificial Sequence
  Description of Artificial Sequence: Synthetic oligonucleotide
gaaacucucagguggugau

SEQ ID NO: 87581 - RNA, 19 nt, Artificial Sequence
  Description of Artificial Sequence: Synthetic oligonucleotide
guaucccuggagacaauug

SEQ ID NO: 87582 - RNA, 19 nt, Artificial Sequence
  Description of Artificial Sequence: Synthetic oligonucleotide
gacaauagaucaagacaaa

SEQ ID NO: 87583 - RNA, 19 nt, Artificial Sequence
  Description of Artificial Sequence: Synthetic oligonucleotide
gcugaguuacacuuuaagu

SEQ ID NO: 87584 - RNA, 19 nt, Artificial Sequence
  Description of Artificial Sequence: Synthetic oligonucleotide
aucuuacgaucuuucugaa

SEQ ID NO: 87585 - RNA, 19 nt, Artificial Sequence
  Description of Artificial Sequence: Synthetic oligonucleotide
guggacaaaauugaucccu

SEQ ID NO: 87586 - RNA, 19 nt, Artificial Sequence
  Description of Artificial Sequence: Synthetic oligonucleotide
ggacaacauucucuuaaac

SEQ ID NO: 87587 - RNA, 19 nt, Artificial Sequence
  Description of Artificial Sequence: Synthetic oligonucleotide
cuccaugugguuauauaua

SEQ ID NO: 87588 - RNA, 19 nt, Artificial Sequence
  Description of Artificial Sequence: Synthetic oligonucleotide
agagcucauggaaaaugcu

SEQ ID NO: 87589 - RNA, 19 nt, Artificial Sequence
  Description of Artificial Sequence: Synthetic oligonucleotide
cucagauuuaaaggccauc

SEQ ID NO: 87590 - RNA, 19 nt, Artificial Sequence
  Description of Artificial Sequence: Synthetic oligonucleotide
agacaaucgcuguuuucua

SEQ ID NO: 87591 - RNA, 19 nt, Artificial Sequence
  Description of Artificial Sequence: Synthetic oligonucleotide
agcucaauaagggccugga

SEQ ID NO: 87592 - RNA, 19 nt, Artificial Sequence
  Description of Artificial Sequence: Synthetic oligonucleotide
ggcugaaucccacuuaugu

SEQ ID NO: 87593 - RNA, 19 nt, Artificial Sequence
  Description of Artificial Sequence: Synthetic oligonucleotide
guucccaacucaaaauaaa

SEQ ID NO: 87594 - RNA, 19 nt, Artificial Sequence
  Description of Artificial Sequence: Synthetic oligonucleotide
agauucaggcugaauccca

SEQ ID NO: 87595 - RNA, 19 nt, Artificial Sequence
  Description of Artificial Sequence: Synthetic oligonucleotide
caauaagggccuggauugc

SEQ ID NO: 87596 - RNA, 19 nt, Artificial Sequence
  Description of Artificial Sequence: Synthetic oligonucleotide
aucugucaaaccauaugau

SEQ ID NO: 87597 - RNA, 19 nt, Artificial Sequence
  Description of Artificial Sequence: Synthetic oligonucleotide
uuaguacuuccuggauaug

SEQ ID NO: 87598 - RNA, 19 nt, Artificial Sequence
  Description of Artificial Sequence: Synthetic oligonucleotide
gcuaccuuaggcucaaaua

SEQ ID NO: 87599 - RNA, 19 nt, Artificial Sequence
  Description of Artificial Sequence: Synthetic oligonucleotide
augauuaauuaugcugaua

SEQ ID NO: 87600 - RNA, 19 nt, Artificial Sequence
  Description of Artificial Sequence: Synthetic oligonucleotide
cuagacaauguuagaggcu

SEQ ID NO: 87601 - RNA, 19 nt, Artificial Sequence
  Description of Artificial Sequence: Synthetic oligonucleotide
ggaaccaauauuguagugu

SEQ ID NO: 87602 - RNA, 19 nt, Artificial Sequence
  Description of Artificial Sequence: Synthetic oligonucleotide
gucaaggccgcucgcucug

SEQ ID NO: 87603 - RNA, 19 nt, Artificial Sequence
  Description of Artificial Sequence: Synthetic oligonucleotide
acacagacgcacacauauc

SEQ ID NO: 87604 - RNA, 19 nt, Artificial Sequence
  Description of Artificial Sequence: Synthetic oligonucleotide
acccuuuaaaagacagcug

SEQ ID NO: 87605 - RNA, 19 nt, Artificial Sequence
  Description of Artificial Sequence: Synthetic oligonucleotide
agcagucuauucaucaaua

SEQ ID NO: 87606 - RNA, 19 nt, Artificial Sequence
  Description of Artificial Sequence: Synthetic oligonucleotide
agacgcacacauaucuaca

SEQ ID NO: 87607 - RNA, 19 nt, Artificial Sequence
  Description of Artificial Sequence: Synthetic oligonucleotide
acuacagaaggcacauaaa

SEQ ID NO: 87608 - RNA, 19 nt, Artificial Sequence
  Description of Artificial Sequence: Synthetic oligonucleotide
uccaaguaacagguaucaa

SEQ ID NO: 87609 - RNA, 19 nt, Artificial Sequence
  Description of Artificial Sequence: Synthetic oligonucleotide
aggcagaauuggucuugag

SEQ ID NO: 87610 - RNA, 19 nt, Artificial Sequence
  Description of Artificial Sequence: Synthetic oligonucleotide
aaguaccuguuaggauuug

SEQ ID NO: 87611 - RNA, 19 nt, Artificial Sequence
  Description of Artificial Sequence: Synthetic oligonucleotide
cauaaguaccuguuaggau

SEQ ID NO: 87612 - RNA, 19 nt, Artificial Sequence
  Description of Artificial Sequence: Synthetic oligonucleotide
cucuaagcagucuauucau

SEQ ID NO: 87613 - RNA, 19 nt, Artificial Sequence
  Description of Artificial Sequence: Synthetic oligonucleotide
augagaugaucaacucuga

SEQ ID NO: 87614 - RNA, 19 nt, Artificial Sequence
  Description of Artificial Sequence: Synthetic oligonucleotide
auacacacacacacacaga

SEQ ID NO: 87615 - RNA, 19 nt, Artificial Sequence
  Description of Artificial Sequence: Synthetic oligonucleotide
aaaguguaacugagauuuu

SEQ ID NO: 87616 - RNA, 19 nt, Artificial Sequence
  Description of Artificial Sequence: Synthetic oligonucleotide
aaacucucagguggugauu

SEQ ID NO: 87617 - RNA, 19 nt, Artificial Sequence
  Description of Artificial Sequence: Synthetic oligonucleotide
gaguuacacuuuaaguuau

SEQ ID NO: 87618 - RNA, 19 nt, Artificial Sequence
  Description of Artificial Sequence: Synthetic oligonucleotide
cacccuggguuuucuaaga

SEQ ID NO: 87619 - RNA, 19 nt, Artificial Sequence
  Description of Artificial Sequence: Synthetic oligonucleotide
ugcuacacuuaugcuggau

SEQ ID NO: 87620 - RNA, 19 nt, Artificial Sequence
  Description of Artificial Sequence: Synthetic oligonucleotide
uugcuacacuuaugcugga

SEQ ID NO: 87621 - RNA, 19 nt, Artificial Sequence
  Description of Artificial Sequence: Synthetic oligonucleotide
aggaaacucucagguggug

SEQ ID NO: 87622 - RNA, 19 nt, Artificial Sequence
  Description of Artificial Sequence: Synthetic oligonucleotide
gcuauacuuguuaggaaaa

SEQ ID NO: 87623 - RNA, 19 nt, Artificial Sequence
  Description of Artificial Sequence: Synthetic oligonucleotide
caggugcacaccaaguuau

SEQ ID NO: 87624 - RNA, 19 nt, Artificial Sequence
  Description of Artificial Sequence: Synthetic oligonucleotide
ccucaaauacaguacugaa

SEQ ID NO: 87625 - RNA, 19 nt, Artificial Sequence
  Description of Artificial Sequence: Synthetic oligonucleotide
caccuaaaagaagaccuua

SEQ ID NO: 87626 - RNA, 19 nt, Artificial Sequence
  Description of Artificial Sequence: Synthetic oligonucleotide
gggacaacauucucuuaaa

SEQ ID NO: 87627 - RNA, 19 nt, Artificial Sequence
  Description of Artificial Sequence: Synthetic oligonucleotide
ggugcacaccaaguuauuc

SEQ ID NO: 87628 - RNA, 19 nt, Artificial Sequence
  Description of Artificial Sequence: Synthetic oligonucleotide
acacacacacacagacgca

SEQ ID NO: 87629 - RNA, 19 nt, Artificial Sequence
  Description of Artificial Sequence: Synthetic oligonucleotide
aguuacacuuuaaguuaua

SEQ ID NO: 87630 - RNA, 19 nt, Artificial Sequence
  Description of Artificial Sequence: Synthetic oligonucleotide
agcaaauuugggagacuuu

SEQ ID NO: 87631 - RNA, 19 nt, Artificial Sequence
  Description of Artificial Sequence: Synthetic oligonucleotide
ucaaggccgcucgcucugc

SEQ ID NO: 87632 - RNA, 19 nt, Artificial Sequence
  Description of Artificial Sequence: Synthetic oligonucleotide
acagacgcacacauaucua

SEQ ID NO: 87633 - RNA, 19 nt, Artificial Sequence
  Description of Artificial Sequence: Synthetic oligonucleotide
accagaacaggcagucuuu

SEQ ID NO: 87634 - RNA, 19 nt, Artificial Sequence
  Description of Artificial Sequence: Synthetic oligonucleotide
auaagggccuggauugcuu

SEQ ID NO: 87635 - RNA, 19 nt, Artificial Sequence
  Description of Artificial Sequence: Synthetic oligonucleotide
gcaaauuugggagacuuuu

SEQ ID NO: 87636 - RNA, 19 nt, Artificial Sequence
  Description of Artificial Sequence: Synthetic oligonucleotide
agaggccuacaggugcaca

SEQ ID NO: 87637 - RNA, 19 nt, Artificial Sequence
  Description of Artificial Sequence: Synthetic oligonucleotide
auggaaagucaaggccgcu

SEQ ID NO: 87638 - RNA, 19 nt, Artificial Sequence
  Description of Artificial Sequence: Synthetic oligonucleotide
ccaagcccaccuaaaagaa

SEQ ID NO: 87639 - RNA, 19 nt, Artificial Sequence
  Description of Artificial Sequence: Synthetic oligonucleotide
ggagacaauugcaacacuu

SEQ ID NO: 87640 - RNA, 19 nt, Artificial Sequence
  Description of Artificial Sequence: Synthetic oligonucleotide
ggcagucuuuggucagagc

SEQ ID NO: 87641 - RNA, 19 nt, Artificial Sequence
  Description of Artificial Sequence: Synthetic oligonucleotide
auaacuccaugugguuaua

SEQ ID NO: 87642 - RNA, 19 nt, Artificial Sequence
  Description of Artificial Sequence: Synthetic oligonucleotide
gugaaagaggguggacaaa

SEQ ID NO: 87643 - RNA, 19 nt, Artificial Sequence
  Description of Artificial Sequence: Synthetic oligonucleotide
guacagaugccaugacauu

SEQ ID NO: 87644 - RNA, 19 nt, Artificial Sequence
  Description of Artificial Sequence: Synthetic oligonucleotide
caacauuaacauguacuuu

SEQ ID NO: 87645 - RNA, 19 nt, Artificial Sequence
  Description of Artificial Sequence: Synthetic oligonucleotide
cuguuaggauuugcucuga

SEQ ID NO: 87646 - RNA, 19 nt, Artificial Sequence
  Description of Artificial Sequence: Synthetic oligonucleotide
gagcucagaugguggacuu

SEQ ID NO: 87647 - RNA, 19 nt, Artificial Sequence
  Description of Artificial Sequence: Synthetic oligonucleotide
cggaaccaauauuguagug

SEQ ID NO: 87648 - RNA, 19 nt, Artificial Sequence
  Description of Artificial Sequence: Synthetic oligonucleotide
gccaucuuacgaucuuucu

SEQ ID NO: 87649 - RNA, 19 nt, Artificial Sequence
  Description of Artificial Sequence: Synthetic oligonucleotide
cccaacugaaugagugcca

SEQ ID NO: 87650 - RNA, 19 nt, Artificial Sequence
  Description of Artificial Sequence: Synthetic oligonucleotide
gugggacaacauucucuua

SEQ ID NO: 87651 - RNA, 19 nt, Artificial Sequence
  Description of Artificial Sequence: Synthetic oligonucleotide
guacacccuggguuuucua

SEQ ID NO: 87652 - RNA, 19 nt, Artificial Sequence
  Description of Artificial Sequence: Synthetic oligonucleotide
ggagugucauacaguggaa

SEQ ID NO: 87653 - RNA, 19 nt, Artificial Sequence
  Description of Artificial Sequence: Synthetic oligonucleotide
accaugcacuacacaguua

SEQ ID NO: 87654 - RNA, 19 nt, Artificial Sequence
  Description of Artificial Sequence: Synthetic oligonucleotide
caugauugugaagcucaau

SEQ ID NO: 87655 - RNA, 19 nt, Artificial Sequence
  Description of Artificial Sequence: Synthetic oligonucleotide
ggacaaaauugaucccuuu

SEQ ID NO: 87656 - RNA, 19 nt, Artificial Sequence
  Description of Artificial Sequence: Synthetic oligonucleotide
ggcaugcuacaaugcuaua

SEQ ID NO: 87657 - RNA, 19 nt, Artificial Sequence
  Description of Artificial Sequence: Synthetic oligonucleotide
ccaccuaaaagaagaccuu

SEQ ID NO: 87658 - RNA, 19 nt, Artificial Sequence
  Description of Artificial Sequence: Synthetic oligonucleotide
cucugaucacaggcaugcu

SEQ ID NO: 87659 - RNA, 19 nt, Artificial Sequence
  Description of Artificial Sequence: Synthetic oligonucleotide
augcuaccuuaggcucaaa

SEQ ID NO: 87660 - RNA, 19 nt, Artificial Sequence
  Description of Artificial Sequence: Synthetic oligonucleotide
gcaguacacccuggguuuu

SEQ ID NO: 87661 - RNA, 19 nt, Artificial Sequence
  Description of Artificial Sequence: Synthetic oligonucleotide
uuaauuuagaauuagaacg

SEQ ID NO: 87662 - RNA, 19 nt, Artificial Sequence
  Description of Artificial Sequence: Synthetic oligonucleotide
aaaucguaccauuagaacc

SEQ ID NO: 87663 - RNA, 19 nt, Artificial Sequence
  Description of Artificial Sequence: Synthetic oligonucleotide
uuagauuucuaccacaggg

SEQ ID NO: 87664 - RNA, 19 nt, Artificial Sequence
  Description of Artificial Sequence: Synthetic oligonucleotide
aagaauauuauuaugagca

SEQ ID NO: 87665 - RNA, 19 nt, Artificial Sequence
  Description of Artificial Sequence: Synthetic oligonucleotide
uuugcaucaaauaaugaag

SEQ ID NO: 87666 - RNA, 19 nt, Artificial Sequence
  Description of Artificial Sequence: Synthetic oligonucleotide
aagucuaacauucagugug

SEQ ID NO: 87667 - RNA, 19 nt, Artificial Sequence
  Description of Artificial Sequence: Synthetic oligonucleotide
cauaggacaaaccagaugc

SEQ ID NO: 87668 - RNA, 19 nt, Artificial Sequence
  Description of Artificial Sequence: Synthetic oligonucleotide
uuuguauaacccaugaaag

SEQ ID NO: 87669 - RNA, 19 nt, Artificial Sequence
  Description of Artificial Sequence: Synthetic oligonucleotide
uuaauuaucaacagugccc

SEQ ID NO: 87670 - RNA, 19 nt, Artificial Sequence
  Description of Artificial Sequence: Synthetic oligonucleotide
uauuguacgauaaaguucu

SEQ ID NO: 87671 - RNA, 19 nt, Artificial Sequence
  Description of Artificial Sequence: Synthetic oligonucleotide
aacaguucuaguuacauau

SEQ ID NO: 87672 - RNA, 19 nt, Artificial Sequence
  Description of Artificial Sequence: Synthetic oligonucleotide
uauuguuuaaagaucgaag

SEQ ID NO: 87673 - RNA, 19 nt, Artificial Sequence
  Description of Artificial Sequence: Synthetic oligonucleotide
aaugcauuauguuccuccc

SEQ ID NO: 87674 - RNA, 19 nt, Artificial Sequence
  Description of Artificial Sequence: Synthetic oligonucleotide
auuauauugcuccacguuc

SEQ ID NO: 87675 - RNA, 19 nt, Artificial Sequence
  Description of Artificial Sequence: Synthetic oligonucleotide
uuuagaauuagaacgcuca

SEQ ID NO: 87676 - RNA, 19 nt, Artificial Sequence
  Description of Artificial Sequence: Synthetic oligonucleotide
uauguguuuaucaguaggg

SEQ ID NO: 87677 - RNA, 19 nt, Artificial Sequence
  Description of Artificial Sequence: Synthetic oligonucleotide
cauguaaagaccucuaggc

SEQ ID NO: 87678 - RNA, 19 nt, Artificial Sequence
  Description of Artificial Sequence: Synthetic oligonucleotide
uguacgauaaaguucuuca

SEQ ID NO: 87679 - RNA, 19 nt, Artificial Sequence
  Description of Artificial Sequence: Synthetic oligonucleotide
uaaaggauucacaaaaccu

SEQ ID NO: 87680 - RNA, 19 nt, Artificial Sequence
  Description of Artificial Sequence: Synthetic oligonucleotide
augggugaacuuuaaaggc

SEQ ID NO: 87681 - RNA, 19 nt, Artificial Sequence
  Description of Artificial Sequence: Synthetic oligonucleotide
uguuuaaguuuauuguacg

SEQ ID NO: 87682 - RNA, 19 nt, Artificial Sequence
  Description of Artificial Sequence: Synthetic oligonucleotide
uguauaacccaugaaagcc

SEQ ID NO: 87683 - RNA, 19 nt, Artificial Sequence
  Description of Artificial Sequence: Synthetic oligonucleotide
agaacgcucauauuugggc

SEQ ID NO: 87684 - RNA, 19 nt, Artificial Sequence
  Description of Artificial Sequence: Synthetic oligonucleotide
agaaagguauccuuguggg

SEQ ID NO: 87685 - RNA, 19 nt, Artificial Sequence
  Description of Artificial Sequence: Synthetic oligonucleotide
aacggaaguuuccuuaaac

SEQ ID NO: 87686 - RNA, 19 nt, Artificial Sequence
  Description of Artificial Sequence: Synthetic oligonucleotide
auauguguuuaucaguagg

SEQ ID NO: 87687 - RNA, 19 nt, Artificial Sequence
  Description of Artificial Sequence: Synthetic oligonucleotide
uauacuaacccuaacuaaa

SEQ ID NO: 87688 - RNA, 19 nt, Artificial Sequence
  Description of Artificial Sequence: Synthetic oligonucleotide
ugagauaaugcccauauuu

SEQ ID NO: 87689 - RNA, 19 nt, Artificial Sequence
  Description of Artificial Sequence: Synthetic oligonucleotide
uauauacuaacccuaacua

SEQ ID NO: 87690 - RNA, 19 nt, Artificial Sequence
  Description of Artificial Sequence: Synthetic oligonucleotide
uuaauugcuacuuuacuaa

SEQ ID NO: 87691 - RNA, 19 nt, Artificial Sequence
  Description of Artificial Sequence: Synthetic oligonucleotide
aucuugcuaacauaaugcc

SEQ ID NO: 87692 - RNA, 19 nt, Artificial Sequence
  Description of Artificial Sequence: Synthetic oligonucleotide
uguuagauuucuaccacag

SEQ ID NO: 87693 - RNA, 19 nt, Artificial Sequence
  Description of Artificial Sequence: Synthetic oligonucleotide
uacacauacuaucugaggu

SEQ ID NO: 87694 - RNA, 19 nt, Artificial Sequence
  Description of Artificial Sequence: Synthetic oligonucleotide
uguagacuugacaucaaag

SEQ ID NO: 87695 - RNA, 19 nt, Artificial Sequence
  Description of Artificial Sequence: Synthetic oligonucleotide
aaaggauaaugcuaucaug

SEQ ID NO: 87696 - RNA, 19 nt, Artificial Sequence
  Description of Artificial Sequence: Synthetic oligonucleotide
aaugcccauauuuuaaccu

SEQ ID NO: 87697 - RNA, 19 nt, Artificial Sequence
  Description of Artificial Sequence: Synthetic oligonucleotide
acuaaacucaaacauagaa

SEQ ID NO: 87698 - RNA, 19 nt, Artificial Sequence
  Description of Artificial Sequence: Synthetic oligonucleotide
uuauuguacgauaaaguuc

SEQ ID NO: 87699 - RNA, 19 nt, Artificial Sequence
  Description of Artificial Sequence: Synthetic oligonucleotide
aacagauugguguggacug

SEQ ID NO: 87700 - RNA, 19 nt, Artificial Sequence
  Description of Artificial Sequence: Synthetic oligonucleotide
ucauauuugggcaacuuuc

SEQ ID NO: 87701 - RNA, 19 nt, Artificial Sequence
  Description of Artificial Sequence: Synthetic oligonucleotide
aauuccacauaugguauac

SEQ ID NO: 87702 - RNA, 19 nt, Artificial Sequence
  Description of Artificial Sequence: Synthetic oligonucleotide
aaggauaaugcuaucaugu

SEQ ID NO: 87703 - RNA, 19 nt, Artificial Sequence
  Description of Artificial Sequence: Synthetic oligonucleotide
auguguguuagauuucuac

SEQ ID NO: 87704 - RNA, 19 nt, Artificial Sequence
  Description of Artificial Sequence: Synthetic oligonucleotide
agugagauuuuauauauaa

SEQ ID NO: 87705 - RNA, 19 nt, Artificial Sequence
  Description of Artificial Sequence: Synthetic oligonucleotide
uguguguuagauuucuacc

SEQ ID NO: 87706 - RNA, 19 nt, Artificial Sequence
  Description of Artificial Sequence: Synthetic oligonucleotide
uuauauugcuccacguucc

SEQ ID NO: 87707 - RNA, 19 nt, Artificial Sequence
  Description of Artificial Sequence: Synthetic oligonucleotide
aaacaccuaguauuucaac

SEQ ID NO: 87708 - RNA, 19 nt, Artificial Sequence
  Description of Artificial Sequence: Synthetic oligonucleotide
aauaagacaagaauauuau

SEQ ID NO: 87709 - RNA, 19 nt, Artificial Sequence
  Description of Artificial Sequence: Synthetic oligonucleotide
gacaagaauauuauuauga

SEQ ID NO: 87710 - RNA, 19 nt, Artificial Sequence
  Description of Artificial Sequence: Synthetic oligonucleotide
ucacauacauacuauguac

SEQ ID NO: 87711 - RNA, 19 nt, Artificial Sequence
  Description of Artificial Sequence: Synthetic oligonucleotide
ucuaguuacauauucccaa

SEQ ID NO: 87712 - RNA, 19 nt, Artificial Sequence
  Description of Artificial Sequence: Synthetic oligonucleotide
aagaucguaaagcaauggu

SEQ ID NO: 87713 - RNA, 19 nt, Artificial Sequence
  Description of Artificial Sequence: Synthetic oligonucleotide
cauaaugcccauaagucug

SEQ ID NO: 87714 - RNA, 19 nt, Artificial Sequence
  Description of Artificial Sequence: Synthetic oligonucleotide
ugguguaaaacucauugaa

SEQ ID NO: 87715 - RNA, 19 nt, Artificial Sequence
  Description of Artificial Sequence: Synthetic oligonucleotide
guaaaggauucacaaaacc

SEQ ID NO: 87716 - RNA, 19 nt, Artificial Sequence
  Description of Artificial Sequence: Synthetic oligonucleotide
aaagaucguaaagcaaugg

SEQ ID NO: 87717 - RNA, 19 nt, Artificial Sequence
  Description of Artificial Sequence: Synthetic oligonucleotide
uuguauaacccaugaaagc

SEQ ID NO: 87718 - RNA, 19 nt, Artificial Sequence
  Description of Artificial Sequence: Synthetic oligonucleotide
auaaugaagcaaaucguac

SEQ ID NO: 87719 - RNA, 19 nt, Artificial Sequence
  Description of Artificial Sequence: Synthetic oligonucleotide
ugcauauuguuuaaagauc

SEQ ID NO: 87720 - RNA, 19 nt, Artificial Sequence
  Description of Artificial Sequence: Synthetic oligonucleotide
aguauuucaacuguagacu

SEQ ID NO: 87721 - RNA, 19 nt, Artificial Sequence
  Description of Artificial Sequence: Synthetic oligonucleotide
auggcaaugaguucucauc

SEQ ID NO: 87722 - RNA, 19 nt, Artificial Sequence
  Description of Artificial Sequence: Synthetic oligonucleotide
agauuucuaccacagggag

SEQ ID NO: 87723 - RNA, 19 nt, Artificial Sequence
  Description of Artificial Sequence: Synthetic oligonucleotide
aguucuaguuacauauucc

SEQ ID NO: 87724 - RNA, 19 nt, Artificial Sequence
  Description of Artificial Sequence: Synthetic oligonucleotide
uugauuauacagaaaggua

SEQ ID NO: 87725 - RNA, 19 nt, Artificial Sequence
  Description of Artificial Sequence: Synthetic oligonucleotide
agcuuuuaaaagguuggcc

SEQ ID NO: 87726 - RNA, 19 nt, Artificial Sequence
  Description of Artificial Sequence: Synthetic oligonucleotide
ugugaaaucuggauuugac

SEQ ID NO: 87727 - RNA, 19 nt, Artificial Sequence
  Description of Artificial Sequence: Synthetic oligonucleotide
gaacucucagcacaauggg

SEQ ID NO: 87728 - RNA, 19 nt, Artificial Sequence
  Description of Artificial Sequence: Synthetic oligonucleotide
aaguuaagacuacaaaaua

SEQ ID NO: 87729 - RNA, 19 nt, Artificial Sequence
  Description of Artificial Sequence: Synthetic oligonucleotide
ugcucauaggacaaaccag

SEQ ID NO: 87730 - RNA, 19 nt, Artificial Sequence
  Description of Artificial Sequence: Synthetic oligonucleotide
ugacagauacaccaucagc

SEQ ID NO: 87731 - RNA, 19 nt, Artificial Sequence
  Description of Artificial Sequence: Synthetic oligonucleotide
uauguacacauacuaucug

SEQ ID NO: 87732 - RNA, 19 nt, Artificial Sequence
  Description of Artificial Sequence: Synthetic oligonucleotide
uguggcauaugaacuauga

SEQ ID NO: 87733 - RNA, 19 nt, Artificial Sequence
  Description of Artificial Sequence: Synthetic oligonucleotide
agaacucucagcacaaugg

SEQ ID NO: 87734 - RNA, 19 nt, Artificial Sequence
  Description of Artificial Sequence: Synthetic oligonucleotide
uagacuugacaucaaagau

SEQ ID NO: 87735 - RNA, 19 nt, Artificial Sequence
  Description of Artificial Sequence: Synthetic oligonucleotide
aacccaugaaagccauacc

SEQ ID NO: 87736 - RNA, 19 nt, Artificial Sequence
  Description of Artificial Sequence: Synthetic oligonucleotide
ugagguguccauaaaccug

SEQ ID NO: 87737 - RNA, 19 nt, Artificial Sequence
  Description of Artificial Sequence: Synthetic oligonucleotide
accugcaacagguaagagg

SEQ ID NO: 87738 - RNA, 19 nt, Artificial Sequence
  Description of Artificial Sequence: Synthetic oligonucleotide
uguguuagauuucuaccac

SEQ ID NO: 87739 - RNA, 19 nt, Artificial Sequence
  Description of Artificial Sequence: Synthetic oligonucleotide
acauaaugcccauaagucu

SEQ ID NO: 87740 - RNA, 19 nt, Artificial Sequence
  Description of Artificial Sequence: Synthetic oligonucleotide
uuuacugcugguguaaaac

SEQ ID NO: 87741 - RNA, 19 nt, Artificial Sequence
  Description of Artificial Sequence: Synthetic oligonucleotide
augccaacaggguuaacgg

SEQ ID NO: 87742 - RNA, 19 nt, Artificial Sequence
  Description of Artificial Sequence: Synthetic oligonucleotide
cuguaugacagauacacca

SEQ ID NO: 87743 - RNA, 19 nt, Artificial Sequence
  Description of Artificial Sequence: Synthetic oligonucleotide
uuacgagacaaaaugcaaa

SEQ ID NO: 87744 - RNA, 19 nt, Artificial Sequence
  Description of Artificial Sequence: Synthetic oligonucleotide
auucagugugguuauaacu

SEQ ID NO: 87745 - RNA, 19 nt, Artificial Sequence
  Description of Artificial Sequence: Synthetic oligonucleotide
agagguaaaauaugcuuca

SEQ ID NO: 87746 - RNA, 19 nt, Artificial Sequence
  Description of Artificial Sequence: Synthetic oligonucleotide
aacacagccgauuggucug

SEQ ID NO: 87747 - RNA, 19 nt, Artificial Sequence
  Description of Artificial Sequence: Synthetic oligonucleotide
acggaugagcguuucuugc

SEQ ID NO: 87748 - RNA, 19 nt, Artificial Sequence
  Description of Artificial Sequence: Synthetic oligonucleotide
aaaggauucacaaaaccua

SEQ ID NO: 87749 - RNA, 19 nt, Artificial Sequence
  Description of Artificial Sequence: Synthetic oligonucleotide
gauaaugcuaucauguaaa

SEQ ID NO: 87750 - RNA, 19 nt, Artificial Sequence
  Description of Artificial Sequence: Synthetic oligonucleotide
accuaaagaucguaaagca

SEQ ID NO: 87751 - RNA, 19 nt, Artificial Sequence
  Description of Artificial Sequence: Synthetic oligonucleotide
uucuaguuacauauuccca

SEQ ID NO: 87752 - RNA, 19 nt, Artificial Sequence
  Description of Artificial Sequence: Synthetic oligonucleotide
ucuuaacugugccacagaa

SEQ ID NO: 87753 - RNA, 19 nt, Artificial Sequence
  Description of Artificial Sequence: Synthetic oligonucleotide
acaacccaaaccuuccauc

SEQ ID NO: 87754 - RNA, 19 nt, Artificial Sequence
  Description of Artificial Sequence: Synthetic oligonucleotide
gugccuaucucccaagagg

SEQ ID NO: 87755 - RNA, 19 nt, Artificial Sequence
  Description of Artificial Sequence: Synthetic oligonucleotide
aauuuagaauuagaacgcu

SEQ ID NO: 87756 - RNA, 19 nt, Artificial Sequence
  Description of Artificial Sequence: Synthetic oligonucleotide
acaugcuuauauuuaggug

SEQ ID NO: 87757 - RNA, 19 nt, Artificial Sequence
  Description of Artificial Sequence: Synthetic oligonucleotide
aagaccucuaggcucucag

SEQ ID NO: 87758 - RNA, 19 nt, Artificial Sequence
  Description of Artificial Sequence: Synthetic oligonucleotide
caugcuuauauuuaggugu

SEQ ID NO: 87759 - RNA, 19 nt, Artificial Sequence
  Description of Artificial Sequence: Synthetic oligonucleotide
agacaagaauauuauuaug

SEQ ID NO: 87760 - RNA, 19 nt, Artificial Sequence
  Description of Artificial Sequence: Synthetic oligonucleotide
uuauggucccuacuguaug

SEQ ID NO: 87761 - RNA, 19 nt, Artificial Sequence
  Description of Artificial Sequence: Synthetic oligonucleotide
auauacuaacccuaacuaa

SEQ ID NO: 87762 - RNA, 19 nt, Artificial Sequence
  Description of Artificial Sequence: Synthetic oligonucleotide
aaagagugugcuuguauua

SEQ ID NO: 87763 - RNA, 19 nt, Artificial Sequence
  Description of Artificial Sequence: Synthetic oligonucleotide
gauaccagaacaacugcug

SEQ ID NO: 87764 - RNA, 19 nt, Artificial Sequence
  Description of Artificial Sequence: Synthetic oligonucleotide
cuaagugcaacacagccga

SEQ ID NO: 87765 - RNA, 19 nt, Artificial Sequence
  Description of Artificial Sequence: Synthetic oligonucleotide
aacagcuacugguaacuga

SEQ ID NO: 87766 - RNA, 19 nt, Artificial Sequence
  Description of Artificial Sequence: Synthetic oligonucleotide
acacauacuaucugaggug

SEQ ID NO: 87767 - RNA, 19 nt, Artificial Sequence
  Description of Artificial Sequence: Synthetic oligonucleotide
uguauauacuaacccuaac

SEQ ID NO: 87768 - RNA, 19 nt, Artificial Sequence
  Description of Artificial Sequence: Synthetic oligonucleotide
aucuuagcacauaauguac

SEQ ID NO: 87769 - RNA, 19 nt, Artificial Sequence
  Description of Artificial Sequence: Synthetic oligonucleotide
ccuacuguaugacagauac

SEQ ID NO: 87770 - RNA, 19 nt, Artificial Sequence
  Description of Artificial Sequence: Synthetic oligonucleotide
uuuaucaguaggguacccc

SEQ ID NO: 87771 - RNA, 19 nt, Artificial Sequence
  Description of Artificial Sequence: Synthetic oligonucleotide
guuagauuucuaccacagg

SEQ ID NO: 87772 - RNA, 19 nt, Artificial Sequence
  Description of Artificial Sequence: Synthetic oligonucleotide
auuuagaauuagaacgcuc

SEQ ID NO: 87773 - RNA, 19 nt, Artificial Sequence
  Description of Artificial Sequence: Synthetic oligonucleotide
uuauaacucaguguaacuu

SEQ ID NO: 87774 - RNA, 19 nt, Artificial Sequence
  Description of Artificial Sequence: Synthetic oligonucleotide
uauuuguauaacccaugaa

SEQ ID NO: 87775 - RNA, 19 nt, Artificial Sequence
  Description of Artificial Sequence: Synthetic oligonucleotide
uuuaaagaucgaagaucug

SEQ ID NO: 87776 - RNA, 19 nt, Artificial Sequence
  Description of Artificial Sequence: Synthetic oligonucleotide
uucccuaucuggcuguugu

SEQ ID NO: 87777 - RNA, 19 nt, Artificial Sequence
  Description of Artificial Sequence: Synthetic oligonucleotide
uuagaauuagaacgcucau

SEQ ID NO: 87778 - RNA, 19 nt, Artificial Sequence
  Description of Artificial Sequence: Synthetic oligonucleotide
gagcaauuauaauaaaacu

SEQ ID NO: 87779 - RNA, 19 nt, Artificial Sequence
  Description of Artificial Sequence: Synthetic oligonucleotide
aguaggguaccccacuuga

SEQ ID NO: 87780 - RNA, 19 nt, Artificial Sequence
  Description of Artificial Sequence: Synthetic oligonucleotide
gacacuuaugucaaaggca

SEQ ID NO: 87781 - RNA, 19 nt, Artificial Sequence
  Description of Artificial Sequence: Synthetic oligonucleotide
agaguuaaagcuucacuua

SEQ ID NO: 87782 - RNA, 19 nt, Artificial Sequence
  Description of Artificial Sequence: Synthetic oligonucleotide
uuaacggaaguuuccuuaa

SEQ ID NO: 87783 - RNA, 19 nt, Artificial Sequence
  Description of Artificial Sequence: Synthetic oligonucleotide
aggaauacguuuugcaaau

SEQ ID NO: 87784 - RNA, 19 nt, Artificial Sequence
  Description of Artificial Sequence: Synthetic oligonucleotide
uuaucaacagugccccacu

SEQ ID NO: 87785 - RNA, 19 nt, Artificial Sequence
  Description of Artificial Sequence: Synthetic oligonucleotide
acuacagguaaaguggcug

SEQ ID NO: 87786 - RNA, 19 nt, Artificial Sequence
  Description of Artificial Sequence: Synthetic oligonucleotide
cuaaagaucguaaagcaau

SEQ ID NO: 87787 - RNA, 19 nt, Artificial Sequence
  Description of Artificial Sequence: Synthetic oligonucleotide
auuaagguccuuagugcac

SEQ ID NO: 87788 - RNA, 19 nt, Artificial Sequence
  Description of Artificial Sequence: Synthetic oligonucleotide
aaugcccauaagucuggug

SEQ ID NO: 87789 - RNA, 19 nt, Artificial Sequence
  Description of Artificial Sequence: Synthetic oligonucleotide
gaucguaaagcaaugguua

SEQ ID NO: 87790 - RNA, 19 nt, Artificial Sequence
  Description of Artificial Sequence: Synthetic oligonucleotide
augagcguuucuugcaaag

SEQ ID NO: 87791 - RNA, 19 nt, Artificial Sequence
  Description of Artificial Sequence: Synthetic oligonucleotide
cugcccaucacacuuuuac

SEQ ID NO: 87792 - RNA, 19 nt, Artificial Sequence
  Description of Artificial Sequence: Synthetic oligonucleotide
uggauuugacugcccauca

SEQ ID NO: 87793 - RNA, 19 nt, Artificial Sequence
  Description of Artificial Sequence: Synthetic oligonucleotide
acugguaacugacuacaga

SEQ ID NO: 87794 - RNA, 19 nt, Artificial Sequence
  Description of Artificial Sequence: Synthetic oligonucleotide
agaaaggugacaguccgcu

SEQ ID NO: 87795 - RNA, 19 nt, Artificial Sequence
  Description of Artificial Sequence: Synthetic oligonucleotide
aggguuaacggaaguuucc

SEQ ID NO: 87796 - RNA, 19 nt, Artificial Sequence
  Description of Artificial Sequence: Synthetic oligonucleotide
uguuuaucaguaggguacc

SEQ ID NO: 87797 - RNA, 19 nt, Artificial Sequence
  Description of Artificial Sequence: Synthetic oligonucleotide
aaggccuuaugggugaacu

SEQ ID NO: 87798 - RNA, 19 nt, Artificial Sequence
  Description of Artificial Sequence: Synthetic oligonucleotide
cauugagugcaggucaucc

SEQ ID NO: 87799 - RNA, 19 nt, Artificial Sequence
  Description of Artificial Sequence: Synthetic oligonucleotide
auuacuacaggaagaauuu

SEQ ID NO: 87800 - RNA, 19 nt, Artificial Sequence
  Description of Artificial Sequence: Synthetic oligonucleotide
caguucuaguuacauauuc

SEQ ID NO: 87801 - RNA, 19 nt, Artificial Sequence
  Description of Artificial Sequence: Synthetic oligonucleotide
caucuuagcacauaaugua

SEQ ID NO: 87802 - RNA, 19 nt, Artificial Sequence
  Description of Artificial Sequence: Synthetic oligonucleotide
gcaaugguuauacaucagc

SEQ ID NO: 87803 - RNA, 19 nt, Artificial Sequence
  Description of Artificial Sequence: Synthetic oligonucleotide
auacuaacccuaacuaaag

SEQ ID NO: 87804 - RNA, 19 nt, Artificial Sequence
  Description of Artificial Sequence: Synthetic oligonucleotide
cauaaaccuggaauaugug

SEQ ID NO: 87805 - RNA, 19 nt, Artificial Sequence
  Description of Artificial Sequence: Synthetic oligonucleotide
augaguucucauccaaaca

SEQ ID NO: 87806 - RNA, 19 nt, Artificial Sequence
  Description of Artificial Sequence: Synthetic oligonucleotide
caaguuaagacuacaaaau

SEQ ID NO: 87807 - RNA, 19 nt, Artificial Sequence
  Description of Artificial Sequence: Synthetic oligonucleotide
caucggcagagcaaaauuc

SEQ ID NO: 87808 - RNA, 19 nt, Artificial Sequence
  Description of Artificial Sequence: Synthetic oligonucleotide
auuggggacacuaucauuu

SEQ ID NO: 87809 - RNA, 19 nt, Artificial Sequence
  Description of Artificial Sequence: Synthetic oligonucleotide
guuaacggaaguuuccuua

SEQ ID NO: 87810 - RNA, 19 nt, Artificial Sequence
  Description of Artificial Sequence: Synthetic oligonucleotide
gugcauauuguuuaaagau

SEQ ID NO: 87811 - RNA, 19 nt, Artificial Sequence
  Description of Artificial Sequence: Synthetic oligonucleotide
cauuauguuccucccuuug

SEQ ID NO: 87812 - RNA, 19 nt, Artificial Sequence
  Description of Artificial Sequence: Synthetic oligonucleotide
ucaauuccagaccgaucug

SEQ ID NO: 87813 - RNA, 19 nt, Artificial Sequence
  Description of Artificial Sequence: Synthetic oligonucleotide
ucagucucccuuacuacau

SEQ ID NO: 87814 - RNA, 19 nt, Artificial Sequence
  Description of Artificial Sequence: Synthetic oligonucleotide
agucuaacauucagugugg

SEQ ID NO: 87815 - RNA, 19 nt, Artificial Sequence
  Description of Artificial Sequence: Synthetic oligonucleotide
agucuaagugcaacacagc

SEQ ID NO: 87816 - RNA, 19 nt, Artificial Sequence
  Description of Artificial Sequence: Synthetic oligonucleotide
accaccuaaagaucguaaa

SEQ ID NO: 87817 - RNA, 19 nt, Artificial Sequence
  Description of Artificial Sequence: Synthetic oligonucleotide
aucguaaagcaaugguuau

SEQ ID NO: 87818 - RNA, 19 nt, Artificial Sequence
  Description of Artificial Sequence: Synthetic oligonucleotide
auaacucaguguaacuucu

SEQ ID NO: 87819 - RNA, 19 nt, Artificial Sequence
  Description of Artificial Sequence: Synthetic oligonucleotide
agaggcagcaauaccaccu

SEQ ID NO: 87820 - RNA, 19 nt, Artificial Sequence
  Description of Artificial Sequence: Synthetic oligonucleotide
uuucaugcccagacuucug

SEQ ID NO: 87821 - RNA, 19 nt, Artificial Sequence
  Description of Artificial Sequence: Synthetic oligonucleotide
uaccaccuaaagaucguaa

SEQ ID NO: 87822 - RNA, 19 nt, Artificial Sequence
  Description of Artificial Sequence: Synthetic oligonucleotide
caggaauacguuuugcaaa

SEQ ID NO: 87823 - RNA, 19 nt, Artificial Sequence
  Description of Artificial Sequence: Synthetic oligonucleotide
ucaaucaaagagugugcuu

SEQ ID NO: 87824 - RNA, 19 nt, Artificial Sequence
  Description of Artificial Sequence: Synthetic oligonucleotide
ugaagguaaacagcaguua

SEQ ID NO: 87825 - RNA, 19 nt, Artificial Sequence
  Description of Artificial Sequence: Synthetic oligonucleotide
uaacaguucuaguuacaua

SEQ ID NO: 87826 - RNA, 19 nt, Artificial Sequence
  Description of Artificial Sequence: Synthetic oligonucleotide
caccucuaucagcacaagg

SEQ ID NO: 87827 - RNA, 19 nt, Artificial Sequence
  Description of Artificial Sequence: Synthetic oligonucleotide
ugguuauaacucaguguaa

SEQ ID NO: 87828 - RNA, 19 nt, Artificial Sequence
  Description of Artificial Sequence: Synthetic oligonucleotide
agaucguaaagcaaugguu

SEQ ID NO: 87829 - RNA, 19 nt, Artificial Sequence
  Description of Artificial Sequence: Synthetic oligonucleotide
ucuaacauucagugugguu

SEQ ID NO: 87830 - RNA, 19 nt, Artificial Sequence
  Description of Artificial Sequence: Synthetic oligonucleotide
gcaauacuaacaguucuag

SEQ ID NO: 87831 - RNA, 19 nt, Artificial Sequence
  Description of Artificial Sequence: Synthetic oligonucleotide
caccgaguugacuauuuuc

SEQ ID NO: 87832 - RNA, 19 nt, Artificial Sequence
  Description of Artificial Sequence: Synthetic oligonucleotide
gucuaagucuuccuauauc

SEQ ID NO: 87833 - RNA, 19 nt, Artificial Sequence
  Description of Artificial Sequence: Synthetic oligonucleotide
agcuacugguaacugacua

SEQ ID NO: 87834 - RNA, 19 nt, Artificial Sequence
  Description of Artificial Sequence: Synthetic oligonucleotide
aaacauguaaagaccucua

SEQ ID NO: 87835 - RNA, 19 nt, Artificial Sequence
  Description of Artificial Sequence: Synthetic oligonucleotide
aggauaaugcuaucaugua

SEQ ID NO: 87836 - RNA, 19 nt, Artificial Sequence
  Description of Artificial Sequence: Synthetic oligonucleotide
aacaggguuaacggaaguu

SEQ ID NO: 87837 - RNA, 19 nt, Artificial Sequence
  Description of Artificial Sequence: Synthetic oligonucleotide
accuugaaccacaauguca

SEQ ID NO: 87838 - RNA, 19 nt, Artificial Sequence
  Description of Artificial Sequence: Synthetic oligonucleotide
guauaacccaugaaagcca

SEQ ID NO: 87839 - RNA, 19 nt, Artificial Sequence
  Description of Artificial Sequence: Synthetic oligonucleotide
aaaugguauuuuggcuuug

SEQ ID NO: 87840 - RNA, 19 nt, Artificial Sequence
  Description of Artificial Sequence: Synthetic oligonucleotide
uuaaaagguuggccugauc

SEQ ID NO: 87841 - RNA, 19 nt, Artificial Sequence
  Description of Artificial Sequence: Synthetic oligonucleotide
ggucccuacuguaugacag

SEQ ID NO: 87842 - RNA, 19 nt, Artificial Sequence
  Description of Artificial Sequence: Synthetic oligonucleotide
uggcaugcccauuugggua

SEQ ID NO: 87843 - RNA, 19 nt, Artificial Sequence
  Description of Artificial Sequence: Synthetic oligonucleotide
ugccaacaggguuaacgga

SEQ ID NO: 87844 - RNA, 19 nt, Artificial Sequence
  Description of Artificial Sequence: Synthetic oligonucleotide
augcuuauauuuaggugug

SEQ ID NO: 87845 - RNA, 19 nt, Artificial Sequence
  Description of Artificial Sequence: Synthetic oligonucleotide
uacuaggacaauguacuuu

SEQ ID NO: 87846 - RNA, 19 nt, Artificial Sequence
  Description of Artificial Sequence: Synthetic oligonucleotide
cacggaugagcguuucuug

SEQ ID NO: 87847 - RNA, 19 nt, Artificial Sequence
  Description of Artificial Sequence: Synthetic oligonucleotide
cuaacccuaacuaaagcau

SEQ ID NO: 87848 - RNA, 19 nt, Artificial Sequence
  Description of Artificial Sequence: Synthetic oligonucleotide
guguuagauuucuaccaca

SEQ ID NO: 87849 - RNA, 19 nt, Artificial Sequence
  Description of Artificial Sequence: Synthetic oligonucleotide
cuacugguaacugacuaca

SEQ ID NO: 87850 - RNA, 19 nt, Artificial Sequence
  Description of Artificial Sequence: Synthetic oligonucleotide
accuauuuguauaacccau

SEQ ID NO: 87851 - RNA, 19 nt, Artificial Sequence
  Description of Artificial Sequence: Synthetic oligonucleotide
cagaguuaaagcuucacuu

SEQ ID NO: 87852 - RNA, 19 nt, Artificial Sequence
  Description of Artificial Sequence: Synthetic oligonucleotide
gaacagauugguguggacu

SEQ ID NO: 87853 - RNA, 19 nt, Artificial Sequence
  Description of Artificial Sequence: Synthetic oligonucleotide
augcaaaucuacaugcuua

SEQ ID NO: 87854 - RNA, 19 nt, Artificial Sequence
  Description of Artificial Sequence: Synthetic oligonucleotide
agggacuacuaggacaaug

SEQ ID NO: 87855 - RNA, 19 nt, Artificial Sequence
  Description of Artificial Sequence: Synthetic oligonucleotide
augcauuauguuccucccu

SEQ ID NO: 87856 - RNA, 19 nt, Artificial Sequence
  Description of Artificial Sequence: Synthetic oligonucleotide
gaccgaucugcagauacca

SEQ ID NO: 87857 - RNA, 19 nt, Artificial Sequence
  Description of Artificial Sequence: Synthetic oligonucleotide
ccaccuaaagaucguaaag

SEQ ID NO: 87858 - RNA, 19 nt, Artificial Sequence
  Description of Artificial Sequence: Synthetic oligonucleotide
ccuauuuguauaacccaug

SEQ ID NO: 87859 - RNA, 19 nt, Artificial Sequence
  Description of Artificial Sequence: Synthetic oligonucleotide
aagugcaacacagccgauu

SEQ ID NO: 87860 - RNA, 19 nt, Artificial Sequence
  Description of Artificial Sequence: Synthetic oligonucleotide
auguauauacuaacccuaa

SEQ ID NO: 87861 - RNA, 19 nt, Artificial Sequence
  Description of Artificial Sequence: Synthetic oligonucleotide
agucucccuuacuacauuu

SEQ ID NO: 87862 - RNA, 19 nt, Artificial Sequence
  Description of Artificial Sequence: Synthetic oligonucleotide
acagccgauuggucugggg

SEQ ID NO: 87863 - RNA, 19 nt, Artificial Sequence
  Description of Artificial Sequence: Synthetic oligonucleotide
ucguaccauuagaaccuca

SEQ ID NO: 87864 - RNA, 19 nt, Artificial Sequence
  Description of Artificial Sequence: Synthetic oligonucleotide
agugugguuauaacucagu

SEQ ID NO: 87865 - RNA, 19 nt, Artificial Sequence
  Description of Artificial Sequence: Synthetic oligonucleotide
gcuacugguaacugacuac

SEQ ID NO: 87866 - RNA, 19 nt, Artificial Sequence
  Description of Artificial Sequence: Synthetic oligonucleotide
cauagugccuaucucccaa

SEQ ID NO: 87867 - RNA, 19 nt, Artificial Sequence
  Description of Artificial Sequence: Synthetic oligonucleotide
uccaccgaguugacuauuu

SEQ ID NO: 87868 - RNA, 19 nt, Artificial Sequence
  Description of Artificial Sequence: Synthetic oligonucleotide
agacaugccaacaggguua

SEQ ID NO: 87869 - RNA, 19 nt, Artificial Sequence
  Description of Artificial Sequence: Synthetic oligonucleotide
gaugagcguuucuugcaaa

SEQ ID NO: 87870 - RNA, 19 nt, Artificial Sequence
  Description of Artificial Sequence: Synthetic oligonucleotide
cucccuuuguacuguccac

SEQ ID NO: 87871 - RNA, 19 nt, Artificial Sequence
  Description of Artificial Sequence: Synthetic oligonucleotide
ucguaaagcaaugguuaua

SEQ ID NO: 87872 - RNA, 19 nt, Artificial Sequence
  Description of Artificial Sequence: Synthetic oligonucleotide
acuaacaguucuaguuaca

SEQ ID NO: 87873 - RNA, 19 nt, Artificial Sequence
  Description of Artificial Sequence: Synthetic oligonucleotide
uauuaggcugcugguuuaa

SEQ ID NO: 87874 - RNA, 19 nt, Artificial Sequence
  Description of Artificial Sequence: Synthetic oligonucleotide
agaccucuaggcucucagu

SEQ ID NO: 87875 - RNA, 19 nt, Artificial Sequence
  Description of Artificial Sequence: Synthetic oligonucleotide
guuuaucaguaggguaccc

SEQ ID NO: 87876 - RNA, 19 nt, Artificial Sequence
  Description of Artificial Sequence: Synthetic oligonucleotide
cacaauggguuaaugucua

SEQ ID NO: 87877 - RNA, 19 nt, Artificial Sequence
  Description of Artificial Sequence: Synthetic oligonucleotide
ggagacuugcucauaggac

SEQ ID NO: 87878 - RNA, 19 nt, Artificial Sequence
  Description of Artificial Sequence: Synthetic oligonucleotide
gacaguccgcuccuuugca

SEQ ID NO: 87879 - RNA, 19 nt, Artificial Sequence
  Description of Artificial Sequence: Synthetic oligonucleotide
agcaaugguuauacaucag

SEQ ID NO: 87880 - RNA, 19 nt, Artificial Sequence
  Description of Artificial Sequence: Synthetic oligonucleotide
auuuucaauuccagaccga

SEQ ID NO: 87881 - RNA, 19 nt, Artificial Sequence
  Description of Artificial Sequence: Synthetic oligonucleotide
cagcaauaccaccucuauc

SEQ ID NO: 87882 - RNA, 19 nt, Artificial Sequence
  Description of Artificial Sequence: Synthetic oligonucleotide
ucccuacuguaugacagau

SEQ ID NO: 87883 - RNA, 19 nt, Artificial Sequence
  Description of Artificial Sequence: Synthetic oligonucleotide
ugcaccuaauuuggguccu

SEQ ID NO: 87884 - RNA, 19 nt, Artificial Sequence
  Description of Artificial Sequence: Synthetic oligonucleotide
ugcacggaugagcguuucu

SEQ ID NO: 87885 - RNA, 19 nt, Artificial Sequence
  Description of Artificial Sequence: Synthetic oligonucleotide
guaggguaccccacuugag

SEQ ID NO: 87886 - RNA, 19 nt, Artificial Sequence
  Description of Artificial Sequence: Synthetic oligonucleotide
uuucagucuugugguacaa

SEQ ID NO: 87887 - RNA, 19 nt, Artificial Sequence
  Description of Artificial Sequence: Synthetic oligonucleotide
aauguguguuagauuucua

SEQ ID NO: 87888 - RNA, 19 nt, Artificial Sequence
  Description of Artificial Sequence: Synthetic oligonucleotide
caguaggguaccccacuug

SEQ ID NO: 87889 - RNA, 19 nt, Artificial Sequence
  Description of Artificial Sequence: Synthetic oligonucleotide
aaaguggacuuggcacaga

SEQ ID NO: 87890 - RNA, 19 nt, Artificial Sequence
  Description of Artificial Sequence: Synthetic oligonucleotide
cugcuggcucucacuacag

SEQ ID NO: 87891 - RNA, 19 nt, Artificial Sequence
  Description of Artificial Sequence: Synthetic oligonucleotide
ugcugguguaaaacucauu

SEQ ID NO: 87892 - RNA, 19 nt, Artificial Sequence
  Description of Artificial Sequence: Synthetic oligonucleotide
gggugaacuuuaaaggcca

SEQ ID NO: 87893 - RNA, 19 nt, Artificial Sequence
  Description of Artificial Sequence: Synthetic oligonucleotide
cagguaagaggcagcaaua

SEQ ID NO: 87894 - RNA, 19 nt, Artificial Sequence
  Description of Artificial Sequence: Synthetic oligonucleotide
cucaaucaaagagugugcu

SEQ ID NO: 87895 - RNA, 19 nt, Artificial Sequence
  Description of Artificial Sequence: Synthetic oligonucleotide
cuaacaguucuaguuacau

SEQ ID NO: 87896 - RNA, 19 nt, Artificial Sequence
  Description of Artificial Sequence: Synthetic oligonucleotide
ggauuugacugcccaucac

SEQ ID NO: 87897 - RNA, 19 nt, Artificial Sequence
  Description of Artificial Sequence: Synthetic oligonucleotide
cugacucagaaguucccua

SEQ ID NO: 87898 - RNA, 19 nt, Artificial Sequence
  Description of Artificial Sequence: Synthetic oligonucleotide
gaucgaagaucuggcaacu

SEQ ID NO: 87899 - RNA, 19 nt, Artificial Sequence
  Description of Artificial Sequence: Synthetic oligonucleotide
gguccuuagugcacggaug

SEQ ID NO: 87900 - RNA, 19 nt, Artificial Sequence
  Description of Artificial Sequence: Synthetic oligonucleotide
ggguaccccacuugagcag

SEQ ID NO: 87901 - RNA, 19 nt, Artificial Sequence
  Description of Artificial Sequence: Synthetic oligonucleotide
auguggcauaugaacuaug

SEQ ID NO: 87902 - RNA, 19 nt, Artificial Sequence
  Description of Artificial Sequence: Synthetic oligonucleotide
ucccgaugcucuugauuau

SEQ ID NO: 87903 - RNA, 19 nt, Artificial Sequence
  Description of Artificial Sequence: Synthetic oligonucleotide
ccucuaucagcacaaggga

SEQ ID NO: 87904 - RNA, 19 nt, Artificial Sequence
  Description of Artificial Sequence: Synthetic oligonucleotide
caccuaguauuucaacugu

SEQ ID NO: 87905 - RNA, 19 nt, Artificial Sequence
  Description of Artificial Sequence: Synthetic oligonucleotide
guuauggucccuacuguau

SEQ ID NO: 87906 - RNA, 19 nt, Artificial Sequence
  Description of Artificial Sequence: Synthetic oligonucleotide
ggaugagcguuucuugcaa

SEQ ID NO: 87907 - RNA, 19 nt, Artificial Sequence
  Description of Artificial Sequence: Synthetic oligonucleotide
cuauaucaccaaugugugu

SEQ ID NO: 87908 - RNA, 19 nt, Artificial Sequence
  Description of Artificial Sequence: Synthetic oligonucleotide
gguuucccgaugcucuuga

SEQ ID NO: 87909 - RNA, 19 nt, Artificial Sequence
  Description of Artificial Sequence: Synthetic oligonucleotide
aaccuuccauccaccugca

SEQ ID NO: 87910 - RNA, 19 nt, Artificial Sequence
  Description of Artificial Sequence: Synthetic oligonucleotide
caggacauuggggacacua

SEQ ID NO: 87911 - RNA, 19 nt, Artificial Sequence
  Description of Artificial Sequence: Synthetic oligonucleotide
ccauuagaaccucaaaagu

SEQ ID NO: 87912 - RNA, 19 nt, Artificial Sequence
  Description of Artificial Sequence: Synthetic oligonucleotide
gccaacaggguuaacggaa

SEQ ID NO: 87913 - RNA, 19 nt, Artificial Sequence
  Description of Artificial Sequence: Synthetic oligonucleotide
ggcaugcccauuuggguaa

SEQ ID NO: 87914 - RNA, 19 nt, Artificial Sequence
  Description of Artificial Sequence: Synthetic oligonucleotide
auuaggcugcugguuuaau

SEQ ID NO: 87915 - RNA, 19 nt, Artificial Sequence
  Description of Artificial Sequence: Synthetic oligonucleotide
cagacaugccaacaggguu

SEQ ID NO: 87916 - RNA, 19 nt, Artificial Sequence
  Description of Artificial Sequence: Synthetic oligonucleotide
ggguuaaugucuaagucuu

SEQ ID NO: 87917 - RNA, 19 nt, Artificial Sequence
  Description of Artificial Sequence: Synthetic oligonucleotide
ggacuacuaggacaaugua

SEQ ID NO: 87918 - RNA, 19 nt, Artificial Sequence
  Description of Artificial Sequence: Synthetic oligonucleotide
cagauacaccaucagcuuu

SEQ ID NO: 87919 - RNA, 19 nt, Artificial Sequence
  Description of Artificial Sequence: Synthetic oligonucleotide
aucgaagaucuggcaacuu

SEQ ID NO: 87920 - RNA, 19 nt, Artificial Sequence
  Description of Artificial Sequence: Synthetic oligonucleotide
cacuacagguaaaguggcu

SEQ ID NO: 87921 - RNA, 19 nt, Artificial Sequence
  Description of Artificial Sequence: Synthetic oligonucleotide
gguguccauaaaccuggaa

SEQ ID NO: 87922 - RNA, 19 nt, Artificial Sequence
  Description of Artificial Sequence: Synthetic oligonucleotide
cauguggcauaugaacuau

SEQ ID NO: 87923 - RNA, 19 nt, Artificial Sequence
  Description of Artificial Sequence: Synthetic oligonucleotide
cauuggggacacuaucauu

SEQ ID NO: 87924 - RNA, 19 nt, Artificial Sequence
  Description of Artificial Sequence: Synthetic oligonucleotide
cacaacccagggacuacua

SEQ ID NO: 87925 - RNA, 19 nt, Artificial Sequence
  Description of Artificial Sequence: Synthetic oligonucleotide
gcucugaaacaccuaguau

SEQ ID NO: 87926 - RNA, 19 nt, Artificial Sequence
  Description of Artificial Sequence: Synthetic oligonucleotide
gcccagacuucugaggguc

SEQ ID NO: 87927 - RNA, 19 nt, Artificial Sequence
  Description of Artificial Sequence: Synthetic oligonucleotide
gcccauauuuuaaccuuga

SEQ ID NO: 87928 - RNA, 19 nt, Artificial Sequence
  Description of Artificial Sequence: Synthetic oligonucleotide
ggguuaacggaaguuuccu

SEQ ID NO: 87929 - RNA, 19 nt, Artificial Sequence
  Description of Artificial Sequence: Synthetic oligonucleotide
auaacccaugaaagccaua

SEQ ID NO: 87930 - RNA, 19 nt, Artificial Sequence
  Description of Artificial Sequence: Synthetic oligonucleotide
gucuaacauucaguguggu

SEQ ID NO: 87931 - RNA, 19 nt, Artificial Sequence
  Description of Artificial Sequence: Synthetic oligonucleotide
ggugggugucuaacauggc

SEQ ID NO: 87932 - RNA, 19 nt, Artificial Sequence
  Description of Artificial Sequence: Synthetic oligonucleotide
auuguacgauaaaguucuu

SEQ ID NO: 87933 - RNA, 19 nt, Artificial Sequence
  Description of Artificial Sequence: Synthetic oligonucleotide
gguuaacggaaguuuccuu

SEQ ID NO: 87934 - RNA, 19 nt, Artificial Sequence
  Description of Artificial Sequence: Synthetic oligonucleotide
ccgaguugacuauuuucaa

SEQ ID NO: 87935 - RNA, 19 nt, Artificial Sequence
  Description of Artificial Sequence: Synthetic oligonucleotide
gcucucuauccuccauaga

SEQ ID NO: 87936 - RNA, 19 nt, Artificial Sequence
  Description of Artificial Sequence: Synthetic oligonucleotide
ggggauccguucuccucuc

SEQ ID NO: 87937 - RNA, 19 nt, Artificial Sequence
  Description of Artificial Sequence: Synthetic oligonucleotide
gcccauaagucuggugaga

SEQ ID NO: 87938 - RNA, 19 nt, Artificial Sequence
  Description of Artificial Sequence: Synthetic oligonucleotide
gcacggaugagcguuucuu

SEQ ID NO: 87939 - RNA, 19 nt, Artificial Sequence
  Description of Artificial Sequence: Synthetic oligonucleotide
cagucucccuuacuacauu

SEQ ID NO: 87940 - RNA, 19 nt, Artificial Sequence
  Description of Artificial Sequence: Synthetic oligonucleotide
cccuacuguaugacagaua

SEQ ID NO: 87941 - RNA, 19 nt, Artificial Sequence
  Description of Artificial Sequence: Synthetic oligonucleotide
cccauaagucuggugagau

SEQ ID NO: 87942 - RNA, 19 nt, Artificial Sequence
  Description of Artificial Sequence: Synthetic oligonucleotide
cccgaugcucuugauuaua

SEQ ID NO: 87943 - RNA, 19 nt, Artificial Sequence
  Description of Artificial Sequence: Synthetic oligonucleotide
gggauccguucuccucucu

SEQ ID NO: 87944 - RNA, 19 nt, Artificial Sequence
  Description of Artificial Sequence: Synthetic oligonucleotide
ccaccgaguugacuauuuu

SEQ ID NO: 87945 - RNA, 19 nt, Artificial Sequence
  Description of Artificial Sequence: Synthetic oligonucleotide
cagggacuacuaggacaau

SEQ ID NO: 87946 - RNA, 19 nt, Artificial Sequence
  Description of Artificial Sequence: Synthetic oligonucleotide
gcaccuaauuuggguccuu

SEQ ID NO: 87947 - RNA, 19 nt, Artificial Sequence
  Description of Artificial Sequence: Synthetic oligonucleotide
cgcucauauuugggcaacu

SEQ ID NO: 87948 - RNA, 19 nt, Artificial Sequence
  Description of Artificial Sequence: Synthetic oligonucleotide
uuuauuugcacacauauag

SEQ ID NO: 87949 - RNA, 19 nt, Artificial Sequence
  Description of Artificial Sequence: Synthetic oligonucleotide
uauacaaguguuaacaagg

SEQ ID NO: 87950 - RNA, 19 nt, Artificial Sequence
  Description of Artificial Sequence: Synthetic oligonucleotide
acaaguacuaaucuuaaac

SEQ ID NO: 87951 - RNA, 19 nt, Artificial Sequence
  Description of Artificial Sequence: Synthetic oligonucleotide
ugcaaauaggcuaagaaag

SEQ ID NO: 87952 - RNA, 19 nt, Artificial Sequence
  Description of Artificial Sequence: Synthetic oligonucleotide
aauaaccugagguggaggc

SEQ ID NO: 87953 - RNA, 19 nt, Artificial Sequence
  Description of Artificial Sequence: Synthetic oligonucleotide
aguguuaacaaggacaucc

SEQ ID NO: 87954 - RNA, 19 nt, Artificial Sequence
  Description of Artificial Sequence: Synthetic oligonucleotide
guuguuaucacacaaguag

SEQ ID NO: 87955 - RNA, 19 nt, Artificial Sequence
  Description of Artificial Sequence: Synthetic oligonucleotide
acagucacaagucuaagcc

SEQ ID NO: 87956 - RNA, 19 nt, Artificial Sequence
  Description of Artificial Sequence: Synthetic oligonucleotide
uuuuauagacucuauagga

SEQ ID NO: 87957 - RNA, 19 nt, Artificial Sequence
  Description of Artificial Sequence: Synthetic oligonucleotide
ucuacaaaagcaauguaug

SEQ ID NO: 87958 - RNA, 19 nt, Artificial Sequence
  Description of Artificial Sequence: Synthetic oligonucleotide
aucgcuaugaacuacaccu

SEQ ID NO: 87959 - RNA, 19 nt, Artificial Sequence
  Description of Artificial Sequence: Synthetic oligonucleotide
aauucuuaaggcagcaucc

SEQ ID NO: 87960 - RNA, 19 nt, Artificial Sequence
  Description of Artificial Sequence: Synthetic oligonucleotide
aaugcucucauaugcauag

SEQ ID NO: 87961 - RNA, 19 nt, Artificial Sequence
  Description of Artificial Sequence: Synthetic oligonucleotide
uauacuguuuaaauuaucu

SEQ ID NO: 87962 - RNA, 19 nt, Artificial Sequence
  Description of Artificial Sequence: Synthetic oligonucleotide
aacuauuccucgucaaagc

SEQ ID NO: 87963 - RNA, 19 nt, Artificial Sequence
  Description of Artificial Sequence: Synthetic oligonucleotide
cauauuuugauccuggaug

SEQ ID NO: 87964 - RNA, 19 nt, Artificial Sequence
  Description of Artificial Sequence: Synthetic oligonucleotide
aauaaugaaagaugcacau

SEQ ID NO: 87965 - RNA, 19 nt, Artificial Sequence
  Description of Artificial Sequence: Synthetic oligonucleotide
gaggugauaacuaugacag

SEQ ID NO: 87966 - RNA, 19 nt, Artificial Sequence
  Description of Artificial Sequence: Synthetic oligonucleotide
guuuuauagacucuauagg

SEQ ID NO: 87967 - RNA, 19 nt, Artificial Sequence
  Description of Artificial Sequence: Synthetic oligonucleotide
auuacgcaccaccugaugc

SEQ ID NO: 87968 - RNA, 19 nt, Artificial Sequence
  Description of Artificial Sequence: Synthetic oligonucleotide
ucuaauuauguucaguauc

SEQ ID NO: 87969 - RNA, 19 nt, Artificial Sequence
  Description of Artificial Sequence: Synthetic oligonucleotide
agugaugaaacuuucaaaa

SEQ ID NO: 87970 - RNA, 19 nt, Artificial Sequence
  Description of Artificial Sequence: Synthetic oligonucleotide
uuugucuuaguucuuauau

SEQ ID NO: 87971 - RNA, 19 nt, Artificial Sequence
  Description of Artificial Sequence: Synthetic oligonucleotide
aguaauaggguauuuaaaa

SEQ ID NO: 87972 - RNA, 19 nt, Artificial Sequence
  Description of Artificial Sequence: Synthetic oligonucleotide
ugcaaaacugcuaauggca

SEQ ID NO: 87973 - RNA, 19 nt, Artificial Sequence
  Description of Artificial Sequence: Synthetic oligonucleotide
agauacuccaaguccauac

SEQ ID NO: 87974 - RNA, 19 nt, Artificial Sequence
  Description of Artificial Sequence: Synthetic oligonucleotide
ucucauaugcauaggaaug

SEQ ID NO: 87975 - RNA, 19 nt, Artificial Sequence
  Description of Artificial Sequence: Synthetic oligonucleotide
acuaucugagaauccacgc

SEQ ID NO: 87976 - RNA, 19 nt, Artificial Sequence
  Description of Artificial Sequence: Synthetic oligonucleotide
uuaaaauaguaagauagga

SEQ ID NO: 87977 - RNA, 19 nt, Artificial Sequence
  Description of Artificial Sequence: Synthetic oligonucleotide
ugucuuaguucuuauauac

SEQ ID NO: 87978 - RNA, 19 nt, Artificial Sequence
  Description of Artificial Sequence: Synthetic oligonucleotide
acuacuaccaccuuuggaa

SEQ ID NO: 87979 - RNA, 19 nt, Artificial Sequence
  Description of Artificial Sequence: Synthetic oligonucleotide
aucucagggaguuuuauag

SEQ ID NO: 87980 - RNA, 19 nt, Artificial Sequence
  Description of Artificial Sequence: Synthetic oligonucleotide
uucaguuauagucaacaga

SEQ ID NO: 87981 - RNA, 19 nt, Artificial Sequence
  Description of Artificial Sequence: Synthetic oligonucleotide
aacauucuaauuauguuca

SEQ ID NO: 87982 - RNA, 19 nt, Artificial Sequence
  Description of Artificial Sequence: Synthetic oligonucleotide
auaacuaugacagauuuau

SEQ ID NO: 87983 - RNA, 19 nt, Artificial Sequence
  Description of Artificial Sequence: Synthetic oligonucleotide
auauagaacaaauggggcu

SEQ ID NO: 87984 - RNA, 19 nt, Artificial Sequence
  Description of Artificial Sequence: Synthetic oligonucleotide
uuuauagacucuauaggaa

SEQ ID NO: 87985 - RNA, 19 nt, Artificial Sequence
  Description of Artificial Sequence: Synthetic oligonucleotide
aauacaaguacuaaucuua

SEQ ID NO: 87986 - RNA, 19 nt, Artificial Sequence
  Description of Artificial Sequence: Synthetic oligonucleotide
aacaaaguuaaugaucacu

SEQ ID NO: 87987 - RNA, 19 nt, Artificial Sequence
  Description of Artificial Sequence: Synthetic oligonucleotide
aguccauacaaauuuauaa

SEQ ID NO: 87988 - RNA, 19 nt, Artificial Sequence
  Description of Artificial Sequence: Synthetic oligonucleotide
uuuuguaucucuacuacua

SEQ ID NO: 87989 - RNA, 19 nt, Artificial Sequence
  Description of Artificial Sequence: Synthetic oligonucleotide
aguuauagucaacagaaaa

SEQ ID NO: 87990 - RNA, 19 nt, Artificial Sequence
  Description of Artificial Sequence: Synthetic oligonucleotide
uucuauacuuucaacuuga

SEQ ID NO: 87991 - RNA, 19 nt, Artificial Sequence
  Description of Artificial Sequence: Synthetic oligonucleotide
uucauuacgcaccaccuga

SEQ ID NO: 87992 - RNA, 19 nt, Artificial Sequence
  Description of Artificial Sequence: Synthetic oligonucleotide
aaagcaauguaugguacag

SEQ ID NO: 87993 - RNA, 19 nt, Artificial Sequence
  Description of Artificial Sequence: Synthetic oligonucleotide
uguaugguacagaacauaa

SEQ ID NO: 87994 - RNA, 19 nt, Artificial Sequence
  Description of Artificial Sequence: Synthetic oligonucleotide
uucuacaucauugugcuga

SEQ ID NO: 87995 - RNA, 19 nt, Artificial Sequence
  Description of Artificial Sequence: Synthetic oligonucleotide
acaagccaaauauucgucg

SEQ ID NO: 87996 - RNA, 19 nt, Artificial Sequence
  Description of Artificial Sequence: Synthetic oligonucleotide
agacucuauaggaaaaucc

SEQ ID NO: 87997 - RNA, 19 nt, Artificial Sequence
  Description of Artificial Sequence: Synthetic oligonucleotide
uucuuucuaguccugaagu

SEQ ID NO: 87998 - RNA, 19 nt, Artificial Sequence
  Description of Artificial Sequence: Synthetic oligonucleotide
cugguaacuguuaucaggc

SEQ ID NO: 87999 - RNA, 19 nt, Artificial Sequence
  Description of Artificial Sequence: Synthetic oligonucleotide
uuaaaugcucucauaugca

SEQ ID NO: 88000 - RNA, 19 nt, Artificial Sequence
  Description of Artificial Sequence: Synthetic oligonucleotide
uuuccugucugauuuucgg

SEQ ID NO: 88001 - RNA, 19 nt, Artificial Sequence
  Description of Artificial Sequence: Synthetic oligonucleotide
acuaugacagauuuauaca

SEQ ID NO: 88002 - RNA, 19 nt, Artificial Sequence
  Description of Artificial Sequence: Synthetic oligonucleotide
uggcucaacaucaaacucc

SEQ ID NO: 88003 - RNA, 19 nt, Artificial Sequence
  Description of Artificial Sequence: Synthetic oligonucleotide
uuauagacucuauaggaaa

SEQ ID NO: 88004 - RNA, 19 nt, Artificial Sequence
  Description of Artificial Sequence: Synthetic oligonucleotide
cauagucaagccuagauga

SEQ ID NO: 88005 - RNA, 19 nt, Artificial Sequence
  Description of Artificial Sequence: Synthetic oligonucleotide
uuaucacacaaguagcugu

SEQ ID NO: 88006 - RNA, 19 nt, Artificial Sequence
  Description of Artificial Sequence: Synthetic oligonucleotide
ugaagggugcccaucaaca

SEQ ID NO: 88007 - RNA, 19 nt, Artificial Sequence
  Description of Artificial Sequence: Synthetic oligonucleotide
augguuuaaaugaaaacag

SEQ ID NO: 88008 - RNA, 19 nt, Artificial Sequence
  Description of Artificial Sequence: Synthetic oligonucleotide
agaaugauguucccauaac

SEQ ID NO: 88009 - RNA, 19 nt, Artificial Sequence
  Description of Artificial Sequence: Synthetic oligonucleotide
aagucuaagccacauuuau

SEQ ID NO: 88010 - RNA, 19 nt, Artificial Sequence
  Description of Artificial Sequence: Synthetic oligonucleotide
auucgaugcgucuaccuuc

SEQ ID NO: 88011 - RNA, 19 nt, Artificial Sequence
  Description of Artificial Sequence: Synthetic oligonucleotide
ugucugguaaacaaacagu

SEQ ID NO: 88012 - RNA, 19 nt, Artificial Sequence
  Description of Artificial Sequence: Synthetic oligonucleotide
ugauaacuaugacagauuu

SEQ ID NO: 88013 - RNA, 19 nt, Artificial Sequence
  Description of Artificial Sequence: Synthetic oligonucleotide
aaaauucgaugcgucuacc

SEQ ID NO: 88014 - RNA, 19 nt, Artificial Sequence
  Description of Artificial Sequence: Synthetic oligonucleotide
uuugcacacauauaguaau

SEQ ID NO: 88015 - RNA, 19 nt, Artificial Sequence
  Description of Artificial Sequence: Synthetic oligonucleotide
uuuugaagggugcccauca

SEQ ID NO: 88016 - RNA, 19 nt, Artificial Sequence
  Description of Artificial Sequence: Synthetic oligonucleotide
caacagauacuccaagucc

SEQ ID NO: 88017 - RNA, 19 nt, Artificial Sequence
  Description of Artificial Sequence: Synthetic oligonucleotide
ugauuagucuccauuacuu

SEQ ID NO: 88018 - RNA, 19 nt, Artificial Sequence
  Description of Artificial Sequence: Synthetic oligonucleotide
cuuagcaauaaacuaccac

SEQ ID NO: 88019 - RNA, 19 nt, Artificial Sequence
  Description of Artificial Sequence: Synthetic oligonucleotide
gauacuuuuaccgcucccc

SEQ ID NO: 88020 - RNA, 19 nt, Artificial Sequence
  Description of Artificial Sequence: Synthetic oligonucleotide
ucuaccaacugaaugguuu

SEQ ID NO: 88021 - RNA, 19 nt, Artificial Sequence
  Description of Artificial Sequence: Synthetic oligonucleotide
gaugcgucuaccuucaaaa

SEQ ID NO: 88022 - RNA, 19 nt, Artificial Sequence
  Description of Artificial Sequence: Synthetic oligonucleotide
uacacuauguuguuaucac

SEQ ID NO: 88023 - RNA, 19 nt, Artificial Sequence
  Description of Artificial Sequence: Synthetic oligonucleotide
aguaagauaggaaauaauu

SEQ ID NO: 88024 - RNA, 19 nt, Artificial Sequence
  Description of Artificial Sequence: Synthetic oligonucleotide
uauagacucuauaggaaaa

SEQ ID NO: 88025 - RNA, 19 nt, Artificial Sequence
  Description of Artificial Sequence: Synthetic oligonucleotide
aacagauacuccaagucca

SEQ ID NO: 88026 - RNA, 19 nt, Artificial Sequence
  Description of Artificial Sequence: Synthetic oligonucleotide
uuuguaucucuacuacuac

SEQ ID NO: 88027 - RNA, 19 nt, Artificial Sequence
  Description of Artificial Sequence: Synthetic oligonucleotide
acauauaguaaugggcaac

SEQ ID NO: 88028 - RNA, 19 nt, Artificial Sequence
  Description of Artificial Sequence: Synthetic oligonucleotide
uaucacacaaguagcugug

SEQ ID NO: 88029 - RNA, 19 nt, Artificial Sequence
  Description of Artificial Sequence: Synthetic oligonucleotide
ucgucaaagcuguaaagac

SEQ ID NO: 88030 - RNA, 19 nt, Artificial Sequence
  Description of Artificial Sequence: Synthetic oligonucleotide
ucuacaggcaucucaggga

SEQ ID NO: 88031 - RNA, 19 nt, Artificial Sequence
  Description of Artificial Sequence: Synthetic oligonucleotide
cacuaucugagaauccacg

SEQ ID NO: 88032 - RNA, 19 nt, Artificial Sequence
  Description of Artificial Sequence: Synthetic oligonucleotide
caagccaaauauucgucgg

SEQ ID NO: 88033 - RNA, 19 nt, Artificial Sequence
  Description of Artificial Sequence: Synthetic oligonucleotide
agucacaagucuaagccac

SEQ ID NO: 88034 - RNA, 19 nt, Artificial Sequence
  Description of Artificial Sequence: Synthetic oligonucleotide
cauaggaauguuaauacaa

SEQ ID NO: 88035 - RNA, 19 nt, Artificial Sequence
  Description of Artificial Sequence: Synthetic oligonucleotide
ugaucgacuacuuucugau

SEQ ID NO: 88036 - RNA, 19 nt, Artificial Sequence
  Description of Artificial Sequence: Synthetic oligonucleotide
gcaauaaacuaccacgucc

SEQ ID NO: 88037 - RNA, 19 nt, Artificial Sequence
  Description of Artificial Sequence: Synthetic oligonucleotide
acaucauuugggucccgcc

SEQ ID NO: 88038 - RNA, 19 nt, Artificial Sequence
  Description of Artificial Sequence: Synthetic oligonucleotide
aauaaccacugccauuuaa

SEQ ID NO: 88039 - RNA, 19 nt, Artificial Sequence
  Description of Artificial Sequence: Synthetic oligonucleotide
ucccauaaccaugaaauga

SEQ ID NO: 88040 - RNA, 19 nt, Artificial Sequence
  Description of Artificial Sequence: Synthetic oligonucleotide
cugacuauccuguugcuuc

SEQ ID NO: 88041 - RNA, 19 nt, Artificial Sequence
  Description of Artificial Sequence: Synthetic oligonucleotide
ucuuucuaguccugaagug

SEQ ID NO: 88042 - RNA, 19 nt, Artificial Sequence
  Description of Artificial Sequence: Synthetic oligonucleotide
aacauauacuggcauguuu

SEQ ID NO: 88043 - RNA, 19 nt, Artificial Sequence
  Description of Artificial Sequence: Synthetic oligonucleotide
agcacgucucuccucaaac

SEQ ID NO: 88044 - RNA, 19 nt, Artificial Sequence
  Description of Artificial Sequence: Synthetic oligonucleotide
gaagucgcaguucugucug

SEQ ID NO: 88045 - RNA, 19 nt, Artificial Sequence
  Description of Artificial Sequence: Synthetic oligonucleotide
cucagggaguuuuauagac

SEQ ID NO: 88046 - RNA, 19 nt, Artificial Sequence
  Description of Artificial Sequence: Synthetic oligonucleotide
agauacuuuuaccgcuccc

SEQ ID NO: 88047 - RNA, 19 nt, Artificial Sequence
  Description of Artificial Sequence: Synthetic oligonucleotide
uaaacuaccacguccucua

SEQ ID NO: 88048 - RNA, 19 nt, Artificial Sequence
  Description of Artificial Sequence: Synthetic oligonucleotide
uaauacaaguacuaaucuu

SEQ ID NO: 88049 - RNA, 19 nt, Artificial Sequence
  Description of Artificial Sequence: Synthetic oligonucleotide
uauucgucgguuccuuugc

SEQ ID NO: 88050 - RNA, 19 nt, Artificial Sequence
  Description of Artificial Sequence: Synthetic oligonucleotide
uuaccugucuccuccaacu

SEQ ID NO: 88051 - RNA, 19 nt, Artificial Sequence
  Description of Artificial Sequence: Synthetic oligonucleotide
auuuugauaaauaacucuu

SEQ ID NO: 88052 - RNA, 19 nt, Artificial Sequence
  Description of Artificial Sequence: Synthetic oligonucleotide
acagaaaagacaagaccac

SEQ ID NO: 88053 - RNA, 19 nt, Artificial Sequence
  Description of Artificial Sequence: Synthetic oligonucleotide
guucuauacuuucaacuug

SEQ ID NO: 88054 - RNA, 19 nt, Artificial Sequence
  Description of Artificial Sequence: Synthetic oligonucleotide
uguaaagaccugguaacug

SEQ ID NO: 88055 - RNA, 19 nt, Artificial Sequence
  Description of Artificial Sequence: Synthetic oligonucleotide
guacuaaucuuaaacaguc

SEQ ID NO: 88056 - RNA, 19 nt, Artificial Sequence
  Description of Artificial Sequence: Synthetic oligonucleotide
aauucgaugcgucuaccuu

SEQ ID NO: 88057 - RNA, 19 nt, Artificial Sequence
  Description of Artificial Sequence: Synthetic oligonucleotide
guaaacuuccauacaauac

SEQ ID NO: 88058 - RNA, 19 nt, Artificial Sequence
  Description of Artificial Sequence: Synthetic oligonucleotide
acuugauuagucuccauua

SEQ ID NO: 88059 - RNA, 19 nt, Artificial Sequence
  Description of Artificial Sequence: Synthetic oligonucleotide
acuauuccucgucaaagcu

SEQ ID NO: 88060 - RNA, 19 nt, Artificial Sequence
  Description of Artificial Sequence: Synthetic oligonucleotide
caaaagcaauguaugguac

SEQ ID NO: 88061 - RNA, 19 nt, Artificial Sequence
  Description of Artificial Sequence: Synthetic oligonucleotide
ugcuacucgaacugcuccg

SEQ ID NO: 88062 - RNA, 19 nt, Artificial Sequence
  Description of Artificial Sequence: Synthetic oligonucleotide
uggcauuaugcucauucca

SEQ ID NO: 88063 - RNA, 19 nt, Artificial Sequence
  Description of Artificial Sequence: Synthetic oligonucleotide
acacaaguagcugugagga

SEQ ID NO: 88064 - RNA, 19 nt, Artificial Sequence
  Description of Artificial Sequence: Synthetic oligonucleotide
aaucuggcuuggaugggcc

SEQ ID NO: 88065 - RNA, 19 nt, Artificial Sequence
  Description of Artificial Sequence: Synthetic oligonucleotide
auauucgucgguuccuuug

SEQ ID NO: 88066 - RNA, 19 nt, Artificial Sequence
  Description of Artificial Sequence: Synthetic oligonucleotide
cauuaugcucauuccauuc

SEQ ID NO: 88067 - RNA, 19 nt, Artificial Sequence
  Description of Artificial Sequence: Synthetic oligonucleotide
gagagugcagcugagggug

SEQ ID NO: 88068 - RNA, 19 nt, Artificial Sequence
  Description of Artificial Sequence: Synthetic oligonucleotide
uacauucuuuaucuggcuc

SEQ ID NO: 88069 - RNA, 19 nt, Artificial Sequence
  Description of Artificial Sequence: Synthetic oligonucleotide
ugcuuagauuaaaauagua

SEQ ID NO: 88070 - RNA, 19 nt, Artificial Sequence
  Description of Artificial Sequence: Synthetic oligonucleotide
auucuuauccuuugauccu

SEQ ID NO: 88071 - RNA, 19 nt, Artificial Sequence
  Description of Artificial Sequence: Synthetic oligonucleotide
uuggcauuaugcucauucc

SEQ ID NO: 88072 - RNA, 19 nt, Artificial Sequence
  Description of Artificial Sequence: Synthetic oligonucleotide
acugcuaauggcaaagucu

SEQ ID NO: 88073 - RNA, 19 nt, Artificial Sequence
  Description of Artificial Sequence: Synthetic oligonucleotide
uacguguacgcucuuugga

SEQ ID NO: 88074 - RNA, 19 nt, Artificial Sequence
  Description of Artificial Sequence: Synthetic oligonucleotide
uccacuaucugagaaucca

SEQ ID NO: 88075 - RNA, 19 nt, Artificial Sequence
  Description of Artificial Sequence: Synthetic oligonucleotide
ugcaucgcuaugaacuaca

SEQ ID NO: 88076 - RNA, 19 nt, Artificial Sequence
  Description of Artificial Sequence: Synthetic oligonucleotide
augaaaacaggaaaaugcu

SEQ ID NO: 88077 - RNA, 19 nt, Artificial Sequence
  Description of Artificial Sequence: Synthetic oligonucleotide
cugaauguacugucaagac

SEQ ID NO: 88078 - RNA, 19 nt, Artificial Sequence
  Description of Artificial Sequence: Synthetic oligonucleotide
acguguacgcucuuuggag

SEQ ID NO: 88079 - RNA, 19 nt, Artificial Sequence
  Description of Artificial Sequence: Synthetic oligonucleotide
uuuacauauuuuggaaccu

SEQ ID NO: 88080 - RNA, 19 nt, Artificial Sequence
  Description of Artificial Sequence: Synthetic oligonucleotide
uucuaauuauguucaguau

SEQ ID NO: 88081 - RNA, 19 nt, Artificial Sequence
  Description of Artificial Sequence: Synthetic oligonucleotide
uacuaaucuuaaacaguca

SEQ ID NO: 88082 - RNA, 19 nt, Artificial Sequence
  Description of Artificial Sequence: Synthetic oligonucleotide
ugguagaacugcuacugga

SEQ ID NO: 88083 - RNA, 19 nt, Artificial Sequence
  Description of Artificial Sequence: Synthetic oligonucleotide
cuuagccuccauuuccugc

SEQ ID NO: 88084 - RNA, 19 nt, Artificial Sequence
  Description of Artificial Sequence: Synthetic oligonucleotide
cuaaucuuaaacagucaca

SEQ ID NO: 88085 - RNA, 19 nt, Artificial Sequence
  Description of Artificial Sequence: Synthetic oligonucleotide
ugcaaaauucgaugcgucu

SEQ ID NO: 88086 - RNA, 19 nt, Artificial Sequence
  Description of Artificial Sequence: Synthetic oligonucleotide
agggugcccaucaacaagc

SEQ ID NO: 88087 - RNA, 19 nt, Artificial Sequence
  Description of Artificial Sequence: Synthetic oligonucleotide
auaacucuuacaaaauuau

SEQ ID NO: 88088 - RNA, 19 nt, Artificial Sequence
  Description of Artificial Sequence: Synthetic oligonucleotide
aacuacaccugcuuccuuu

SEQ ID NO: 88089 - RNA, 19 nt, Artificial Sequence
  Description of Artificial Sequence: Synthetic oligonucleotide
uccauuacuuccugcucag

SEQ ID NO: 88090 - RNA, 19 nt, Artificial Sequence
  Description of Artificial Sequence: Synthetic oligonucleotide
cagaagacugcagugcugg

SEQ ID NO: 88091 - RNA, 19 nt, Artificial Sequence
  Description of Artificial Sequence: Synthetic oligonucleotide
aauguacugucaagacugg

SEQ ID NO: 88092 - RNA, 19 nt, Artificial Sequence
  Description of Artificial Sequence: Synthetic oligonucleotide
aacgccuuuugucuuuccu

SEQ ID NO: 88093 - RNA, 19 nt, Artificial Sequence
  Description of Artificial Sequence: Synthetic oligonucleotide
aucaggcaaauccaaguga

SEQ ID NO: 88094 - RNA, 19 nt, Artificial Sequence
  Description of Artificial Sequence: Synthetic oligonucleotide
aguacaagaaugucuggua

SEQ ID NO: 88095 - RNA, 19 nt, Artificial Sequence
  Description of Artificial Sequence: Synthetic oligonucleotide
caucauuugggucccgccc

SEQ ID NO: 88096 - RNA, 19 nt, Artificial Sequence
  Description of Artificial Sequence: Synthetic oligonucleotide
ucagggaguuuuauagacu

SEQ ID NO: 88097 - RNA, 19 nt, Artificial Sequence
  Description of Artificial Sequence: Synthetic oligonucleotide
ucuuucacuucuugaagau

SEQ ID NO: 88098 - RNA, 19 nt, Artificial Sequence
  Description of Artificial Sequence: Synthetic oligonucleotide
uacaagaaugucugguaaa

SEQ ID NO: 88099 - RNA, 19 nt, Artificial Sequence
  Description of Artificial Sequence: Synthetic oligonucleotide
uacuacuaccaccuuugga

SEQ ID NO: 88100 - RNA, 19 nt, Artificial Sequence
  Description of Artificial Sequence: Synthetic oligonucleotide
ugcgucuaccuucaaaaua

SEQ ID NO: 88101 - RNA, 19 nt, Artificial Sequence
  Description of Artificial Sequence: Synthetic oligonucleotide
gaccugguaacuguuauca

SEQ ID NO: 88102 - RNA, 19 nt, Artificial Sequence
  Description of Artificial Sequence: Synthetic oligonucleotide
ugcaacgguagauucuugu

SEQ ID NO: 88103 - RNA, 19 nt, Artificial Sequence
  Description of Artificial Sequence: Synthetic oligonucleotide
guaagauaggaaauaauua

SEQ ID NO: 88104 - RNA, 19 nt, Artificial Sequence
  Description of Artificial Sequence: Synthetic oligonucleotide
uuuauuuguucugcaaaau

SEQ ID NO: 88105 - RNA, 19 nt, Artificial Sequence
  Description of Artificial Sequence: Synthetic oligonucleotide
ugaauaaccugagguggag

SEQ ID NO: 88106 - RNA, 19 nt, Artificial Sequence
  Description of Artificial Sequence: Synthetic oligonucleotide
uucgaugcgucuaccuuca

SEQ ID NO: 88107 - RNA, 19 nt, Artificial Sequence
  Description of Artificial Sequence: Synthetic oligonucleotide
ucaaaucuucugcugcaaa

SEQ ID NO: 88108 - RNA, 19 nt, Artificial Sequence
  Description of Artificial Sequence: Synthetic oligonucleotide
caucauugugcugauuacc

SEQ ID NO: 88109 - RNA, 19 nt, Artificial Sequence
  Description of Artificial Sequence: Synthetic oligonucleotide
uuacgcaccaccugaugcu

SEQ ID NO: 88110 - RNA, 19 nt, Artificial Sequence
  Description of Artificial Sequence: Synthetic oligonucleotide
uucuaguccugaagugucc

SEQ ID NO: 88111 - RNA, 19 nt, Artificial Sequence
  Description of Artificial Sequence: Synthetic oligonucleotide
ucgcugagccaccuuaccc

SEQ ID NO: 88112 - RNA, 19 nt, Artificial Sequence
  Description of Artificial Sequence: Synthetic oligonucleotide
cauuguguaaacuuccaua

SEQ ID NO: 88113 - RNA, 19 nt, Artificial Sequence
  Description of Artificial Sequence: Synthetic oligonucleotide
ugucagaucgggaauucuu

SEQ ID NO: 88114 - RNA, 19 nt, Artificial Sequence
  Description of Artificial Sequence: Synthetic oligonucleotide
uaaccacugccauuuaaau

SEQ ID NO: 88115 - RNA, 19 nt, Artificial Sequence
  Description of Artificial Sequence: Synthetic oligonucleotide
ggaggugauaacuaugaca

SEQ ID NO: 88116 - RNA, 19 nt, Artificial Sequence
  Description of Artificial Sequence: Synthetic oligonucleotide
guucccauaaccaugaaau

SEQ ID NO: 88117 - RNA, 19 nt, Artificial Sequence
  Description of Artificial Sequence: Synthetic oligonucleotide
ucauuugggucccgcccgg

SEQ ID NO: 88118 - RNA, 19 nt, Artificial Sequence
  Description of Artificial Sequence: Synthetic oligonucleotide
uguccgacgcuccccaccc

SEQ ID NO: 88119 - RNA, 19 nt, Artificial Sequence
  Description of Artificial Sequence: Synthetic oligonucleotide
uuuugccugaucgacuacu

SEQ ID NO: 88120 - RNA, 19 nt, Artificial Sequence
  Description of Artificial Sequence: Synthetic oligonucleotide
acauucuaauuauguucag

SEQ ID NO: 88121 - RNA, 19 nt, Artificial Sequence
  Description of Artificial Sequence: Synthetic oligonucleotide
auaaacuaccacguccucu

SEQ ID NO: 88122 - RNA, 19 nt, Artificial Sequence
  Description of Artificial Sequence: Synthetic oligonucleotide
uaucuaccaacugaauggu

SEQ ID NO: 88123 - RNA, 19 nt, Artificial Sequence
  Description of Artificial Sequence: Synthetic oligonucleotide
cucuaccuccaccaggacc

SEQ ID NO: 88124 - RNA, 19 nt, Artificial Sequence
  Description of Artificial Sequence: Synthetic oligonucleotide
uggagguagcuacaacaga

SEQ ID NO: 88125 - RNA, 19 nt, Artificial Sequence
  Description of Artificial Sequence: Synthetic oligonucleotide
ucuaguccugaaguguccc

SEQ ID NO: 88126 - RNA, 19 nt, Artificial Sequence
  Description of Artificial Sequence: Synthetic oligonucleotide
ucuuguccgacgcucccca

SEQ ID NO: 88127 - RNA, 19 nt, Artificial Sequence
  Description of Artificial Sequence: Synthetic oligonucleotide
cauuacuuccugcucagca

SEQ ID NO: 88128 - RNA, 19 nt, Artificial Sequence
  Description of Artificial Sequence: Synthetic oligonucleotide
ucgcuaugaacuacaccug

SEQ ID NO: 88129 - RNA, 19 nt, Artificial Sequence
  Description of Artificial Sequence: Synthetic oligonucleotide
guagcuacaacagaagacu

SEQ ID NO: 88130 - RNA, 19 nt, Artificial Sequence
  Description of Artificial Sequence: Synthetic oligonucleotide
gauuuucggucucuuucac

SEQ ID NO: 88131 - RNA, 19 nt, Artificial Sequence
  Description of Artificial Sequence: Synthetic oligonucleotide
uuuuggaaccucacauaau

SEQ ID NO: 88132 - RNA, 19 nt, Artificial Sequence
  Description of Artificial Sequence: Synthetic oligonucleotide
ugaacuacaccugcuuccu

SEQ ID NO: 88133 - RNA, 19 nt, Artificial Sequence
  Description of Artificial Sequence: Synthetic oligonucleotide
augaucacuugguacacuu

SEQ ID NO: 88134 - RNA, 19 nt, Artificial Sequence
  Description of Artificial Sequence: Synthetic oligonucleotide
cuuagcacgucucuccuca

SEQ ID NO: 88135 - RNA, 19 nt, Artificial Sequence
  Description of Artificial Sequence: Synthetic oligonucleotide
acgccuuuugucuuuccug

SEQ ID NO: 88136 - RNA, 19 nt, Artificial Sequence
  Description of Artificial Sequence: Synthetic oligonucleotide
gagguagcuacaacagaag

SEQ ID NO: 88137 - RNA, 19 nt, Artificial Sequence
  Description of Artificial Sequence: Synthetic oligonucleotide
cucuuuugccuuucaguug

SEQ ID NO: 88138 - RNA, 19 nt, Artificial Sequence
  Description of Artificial Sequence: Synthetic oligonucleotide
gaauccacgccuuagcaau

SEQ ID NO: 88139 - RNA, 19 nt, Artificial Sequence
  Description of Artificial Sequence: Synthetic oligonucleotide
ccaaauauucgucgguucc

SEQ ID NO: 88140 - RNA, 19 nt, Artificial Sequence
  Description of Artificial Sequence: Synthetic oligonucleotide
uacaaguacuaaucuuaaa

SEQ ID NO: 88141 - RNA, 19 nt, Artificial Sequence
  Description of Artificial Sequence: Synthetic oligonucleotide
uacugacugccccuuccag

SEQ ID NO: 88142 - RNA, 19 nt, Artificial Sequence
  Description of Artificial Sequence: Synthetic oligonucleotide
ucagaucgggaauucuuau

SEQ ID NO: 88143 - RNA, 19 nt, Artificial Sequence
  Description of Artificial Sequence: Synthetic oligonucleotide
cauauaguaaugggcaaca

SEQ ID NO: 88144 - RNA, 19 nt, Artificial Sequence
  Description of Artificial Sequence: Synthetic oligonucleotide
uaaugaucacuugguacac

SEQ ID NO: 88145 - RNA, 19 nt, Artificial Sequence
  Description of Artificial Sequence: Synthetic oligonucleotide
cuuaguucuuauauacuua

SEQ ID NO: 88146 - RNA, 19 nt, Artificial Sequence
  Description of Artificial Sequence: Synthetic oligonucleotide
cugcuacucgaacugcucc

SEQ ID NO: 88147 - RNA, 19 nt, Artificial Sequence
  Description of Artificial Sequence: Synthetic oligonucleotide
guacaagaaugucugguaa

SEQ ID NO: 88148 - RNA, 19 nt, Artificial Sequence
  Description of Artificial Sequence: Synthetic oligonucleotide
agucaagccuagaugagcu

SEQ ID NO: 88149 - RNA, 19 nt, Artificial Sequence
  Description of Artificial Sequence: Synthetic oligonucleotide
aauauucgucgguuccuuu

SEQ ID NO: 88150 - RNA, 19 nt, Artificial Sequence
  Description of Artificial Sequence: Synthetic oligonucleotide
auauacuggcauguuucag

SEQ ID NO: 88151 - RNA, 19 nt, Artificial Sequence
  Description of Artificial Sequence: Synthetic oligonucleotide
aauuaucuaccaacugaau

SEQ ID NO: 88152 - RNA, 19 nt, Artificial Sequence
  Description of Artificial Sequence: Synthetic oligonucleotide
caucgcuaugaacuacacc

SEQ ID NO: 88153 - RNA, 19 nt, Artificial Sequence
  Description of Artificial Sequence: Synthetic oligonucleotide
auaaccacugccauuuaaa

SEQ ID NO: 88154 - RNA, 19 nt, Artificial Sequence
  Description of Artificial Sequence: Synthetic oligonucleotide
aaugaucacuugguacacu

SEQ ID NO: 88155 - RNA, 19 nt, Artificial Sequence
  Description of Artificial Sequence: Synthetic oligonucleotide
uaguucuuauauacuuaau

SEQ ID NO: 88156 - RNA, 19 nt, Artificial Sequence
  Description of Artificial Sequence: Synthetic oligonucleotide
ucuauacuuucaacuugau

SEQ ID NO: 88157 - RNA, 19 nt, Artificial Sequence
  Description of Artificial Sequence: Synthetic oligonucleotide
ugcuuagcacgucucuccu

SEQ ID NO: 88158 - RNA, 19 nt, Artificial Sequence
  Description of Artificial Sequence: Synthetic oligonucleotide
ugcuacugguagaacugcu

SEQ ID NO: 88159 - RNA, 19 nt, Artificial Sequence
  Description of Artificial Sequence: Synthetic oligonucleotide
uggcgugauucucuucuug

SEQ ID NO: 88160 - RNA, 19 nt, Artificial Sequence
  Description of Artificial Sequence: Synthetic oligonucleotide
ucucgguuauguccucggc

SEQ ID NO: 88161 - RNA, 19 nt, Artificial Sequence
  Description of Artificial Sequence: Synthetic oligonucleotide
ugacuauccuguugcuucu

SEQ ID NO: 88162 - RNA, 19 nt, Artificial Sequence
  Description of Artificial Sequence: Synthetic oligonucleotide
uacucgaacugcuccgacu

SEQ ID NO: 88163 - RNA, 19 nt, Artificial Sequence
  Description of Artificial Sequence: Synthetic oligonucleotide
acgccuuagcaauaaacua

SEQ ID NO: 88164 - RNA, 19 nt, Artificial Sequence
  Description of Artificial Sequence: Synthetic oligonucleotide
uucugacugaagaguaaua

SEQ ID NO: 88165 - RNA, 19 nt, Artificial Sequence
  Description of Artificial Sequence: Synthetic oligonucleotide
cugcaaaauucgaugcguc

SEQ ID NO: 88166 - RNA, 19 nt, Artificial Sequence
  Description of Artificial Sequence: Synthetic oligonucleotide
agacaagaccacaaauuca

SEQ ID NO: 88167 - RNA, 19 nt, Artificial Sequence
  Description of Artificial Sequence: Synthetic oligonucleotide
cuuucuaucucgguuaugu

SEQ ID NO: 88168 - RNA, 19 nt, Artificial Sequence
  Description of Artificial Sequence: Synthetic oligonucleotide
ugaucacuugguacacuuc

SEQ ID NO: 88169 - RNA, 19 nt, Artificial Sequence
  Description of Artificial Sequence: Synthetic oligonucleotide
cuugugacaaacugaaaau

SEQ ID NO: 88170 - RNA, 19 nt, Artificial Sequence
  Description of Artificial Sequence: Synthetic oligonucleotide
ccuccuuacaagguaaucc

SEQ ID NO: 88171 - RNA, 19 nt, Artificial Sequence
  Description of Artificial Sequence: Synthetic oligonucleotide
aaguccauacaaauuuaua

SEQ ID NO: 88172 - RNA, 19 nt, Artificial Sequence
  Description of Artificial Sequence: Synthetic oligonucleotide
gacuggagcacagguuggg

SEQ ID NO: 88173 - RNA, 19 nt, Artificial Sequence
  Description of Artificial Sequence: Synthetic oligonucleotide
gaguaauaggguauuuaaa

SEQ ID NO: 88174 - RNA, 19 nt, Artificial Sequence
  Description of Artificial Sequence: Synthetic oligonucleotide
cuacuacuaccaccuuugg

SEQ ID NO: 88175 - RNA, 19 nt, Artificial Sequence
  Description of Artificial Sequence: Synthetic oligonucleotide
cucuaacacauccauaacu

SEQ ID NO: 88176 - RNA, 19 nt, Artificial Sequence
  Description of Artificial Sequence: Synthetic oligonucleotide
ucauuacgcaccaccugau

SEQ ID NO: 88177 - RNA, 19 nt, Artificial Sequence
  Description of Artificial Sequence: Synthetic oligonucleotide
gcuuagauuaaaauaguaa

SEQ ID NO: 88178 - RNA, 19 nt, Artificial Sequence
  Description of Artificial Sequence: Synthetic oligonucleotide
ugguacacuucugaauagu

SEQ ID NO: 88179 - RNA, 19 nt, Artificial Sequence
  Description of Artificial Sequence: Synthetic oligonucleotide
ugguaacuguuaucaggca

SEQ ID NO: 88180 - RNA, 19 nt, Artificial Sequence
  Description of Artificial Sequence: Synthetic oligonucleotide
uccauacaauacuuccuua

SEQ ID NO: 88181 - RNA, 19 nt, Artificial Sequence
  Description of Artificial Sequence: Synthetic oligonucleotide
cuuggaugggccucacauc

SEQ ID NO: 88182 - RNA, 19 nt, Artificial Sequence
  Description of Artificial Sequence: Synthetic oligonucleotide
gcaaauaggcuaagaaagc

SEQ ID NO: 88183 - RNA, 19 nt, Artificial Sequence
  Description of Artificial Sequence: Synthetic oligonucleotide
ugcugauuaccugucuccu

SEQ ID NO: 88184 - RNA, 19 nt, Artificial Sequence
  Description of Artificial Sequence: Synthetic oligonucleotide
aucgggaauucuuauccuu

SEQ ID NO: 88185 - RNA, 19 nt, Artificial Sequence
  Description of Artificial Sequence: Synthetic oligonucleotide
cugaauaaccugaggugga

SEQ ID NO: 88186 - RNA, 19 nt, Artificial Sequence
  Description of Artificial Sequence: Synthetic oligonucleotide
aggaaauaauuaaaugcuu

SEQ ID NO: 88187 - RNA, 19 nt, Artificial Sequence
  Description of Artificial Sequence: Synthetic oligonucleotide
cagaucgggaauucuuauc

SEQ ID NO: 88188 - RNA, 19 nt, Artificial Sequence
  Description of Artificial Sequence: Synthetic oligonucleotide
cugaucgacuacuuucuga

SEQ ID NO: 88189 - RNA, 19 nt, Artificial Sequence
  Description of Artificial Sequence: Synthetic oligonucleotide
ucugcuuagcacgucucuc

SEQ ID NO: 88190 - RNA, 19 nt, Artificial Sequence
  Description of Artificial Sequence: Synthetic oligonucleotide
acugcuacucgaacugcuc

SEQ ID NO: 88191 - RNA, 19 nt, Artificial Sequence
  Description of Artificial Sequence: Synthetic oligonucleotide
cuuaaacagucacaagucu

SEQ ID NO: 88192 - RNA, 19 nt, Artificial Sequence
  Description of Artificial Sequence: Synthetic oligonucleotide
ggaaaauccuuccgcucag

SEQ ID NO: 88193 - RNA, 19 nt, Artificial Sequence
  Description of Artificial Sequence: Synthetic oligonucleotide
cuccacuaucugagaaucc

SEQ ID NO: 88194 - RNA, 19 nt, Artificial Sequence
  Description of Artificial Sequence: Synthetic oligonucleotide
uccuuacaagguaauccuu

SEQ ID NO: 88195 - RNA, 19 nt, Artificial Sequence
  Description of Artificial Sequence: Synthetic oligonucleotide
auacaaguacuaaucuuaa

SEQ ID NO: 88196 - RNA, 19 nt, Artificial Sequence
  Description of Artificial Sequence: Synthetic oligonucleotide
auaaugaaagaugcacauu

SEQ ID NO: 88197 - RNA, 19 nt, Artificial Sequence
  Description of Artificial Sequence: Synthetic oligonucleotide
ugucugcuuagcacgucuc

SEQ ID NO: 88198 - RNA, 19 nt, Artificial Sequence
  Description of Artificial Sequence: Synthetic oligonucleotide
ucgaacugcuccgacuacu

SEQ ID NO: 88199 - RNA, 19 nt, Artificial Sequence
  Description of Artificial Sequence: Synthetic oligonucleotide
augcuuagauuaaaauagu

SEQ ID NO: 88200 - RNA, 19 nt, Artificial Sequence
  Description of Artificial Sequence: Synthetic oligonucleotide
caugcagagaauuaacauu

SEQ ID NO: 88201 - RNA, 19 nt, Artificial Sequence
  Description of Artificial Sequence: Synthetic oligonucleotide
acuaccaccuuuggaagau

SEQ ID NO: 88202 - RNA, 19 nt, Artificial Sequence
  Description of Artificial Sequence: Synthetic oligonucleotide
gaagggugcccaucaacaa

SEQ ID NO: 88203 - RNA, 19 nt, Artificial Sequence
  Description of Artificial Sequence: Synthetic oligonucleotide
ucgacuacuuucugauaua

SEQ ID NO: 88204 - RNA, 19 nt, Artificial Sequence
  Description of Artificial Sequence: Synthetic oligonucleotide
gccuuagcaauaaacuacc

SEQ ID NO: 88205 - RNA, 19 nt, Artificial Sequence
  Description of Artificial Sequence: Synthetic oligonucleotide
cauuacgcaccaccugaug

SEQ ID NO: 88206 - RNA, 19 nt, Artificial Sequence
  Description of Artificial Sequence: Synthetic oligonucleotide
aguugcaacgguagauucu

SEQ ID NO: 88207 - RNA, 19 nt, Artificial Sequence
  Description of Artificial Sequence: Synthetic oligonucleotide
uaacuguuaucaggcaaau

SEQ ID NO: 88208 - RNA, 19 nt, Artificial Sequence
  Description of Artificial Sequence: Synthetic oligonucleotide
cuccuuacaagguaauccu

SEQ ID NO: 88209 - RNA, 19 nt, Artificial Sequence
  Description of Artificial Sequence: Synthetic oligonucleotide
ggcucuacaggcaucucag

SEQ ID NO: 88210 - RNA, 19 nt, Artificial Sequence
  Description of Artificial Sequence: Synthetic oligonucleotide
ucuaggccuagccuccauu

SEQ ID NO: 88211 - RNA, 19 nt, Artificial Sequence
  Description of Artificial Sequence: Synthetic oligonucleotide
agagaaugauguucccaua

SEQ ID NO: 88212 - RNA, 19 nt, Artificial Sequence
  Description of Artificial Sequence: Synthetic oligonucleotide
guagcugugaggacagaga

SEQ ID NO: 88213 - RNA, 19 nt, Artificial Sequence
  Description of Artificial Sequence: Synthetic oligonucleotide
cacauauaguaaugggcaa

SEQ ID NO: 88214 - RNA, 19 nt, Artificial Sequence
  Description of Artificial Sequence: Synthetic oligonucleotide
guacgcucuuuggagguag

SEQ ID NO: 88215 - RNA, 19 nt, Artificial Sequence
  Description of Artificial Sequence: Synthetic oligonucleotide
gagaauuaacauucucuuu

SEQ ID NO: 88216 - RNA, 19 nt, Artificial Sequence
  Description of Artificial Sequence: Synthetic oligonucleotide
auguaugguacagaacaua

SEQ ID NO: 88217 - RNA, 19 nt, Artificial Sequence
  Description of Artificial Sequence: Synthetic oligonucleotide
uuucggucucuuucacuuc

SEQ ID NO: 88218 - RNA, 19 nt, Artificial Sequence
  Description of Artificial Sequence: Synthetic oligonucleotide
uugcaacgguagauucuug

SEQ ID NO: 88219 - RNA, 19 nt, Artificial Sequence
  Description of Artificial Sequence: Synthetic oligonucleotide
cucgcugagccaccuuacc

SEQ ID NO: 88220 - RNA, 19 nt, Artificial Sequence
  Description of Artificial Sequence: Synthetic oligonucleotide
cgccuuagcaauaaacuac

SEQ ID NO: 88221 - RNA, 19 nt, Artificial Sequence
  Description of Artificial Sequence: Synthetic oligonucleotide
uucuuguccgacgcucccc

SEQ ID NO: 88222 - RNA, 19 nt, Artificial Sequence
  Description of Artificial Sequence: Synthetic oligonucleotide
uuccgcucaggcaguagau

SEQ ID NO: 88223 - RNA, 19 nt, Artificial Sequence
  Description of Artificial Sequence: Synthetic oligonucleotide
cacaaguagcugugaggac

SEQ ID NO: 88224 - RNA, 19 nt, Artificial Sequence
  Description of Artificial Sequence: Synthetic oligonucleotide
gcauaggaauguuaauaca

SEQ ID NO: 88225 - RNA, 19 nt, Artificial Sequence
  Description of Artificial Sequence: Synthetic oligonucleotide
acaagggauguuaaucuuu

SEQ ID NO: 88226 - RNA, 19 nt, Artificial Sequence
  Description of Artificial Sequence: Synthetic oligonucleotide
acuacaccugcuuccuuuu

SEQ ID NO: 88227 - RNA, 19 nt, Artificial Sequence
  Description of Artificial Sequence: Synthetic oligonucleotide
cacaucauuugggucccgc

SEQ ID NO: 88228 - RNA, 19 nt, Artificial Sequence
  Description of Artificial Sequence: Synthetic oligonucleotide
gggguagcuggacacauuc

SEQ ID NO: 88229 - RNA, 19 nt, Artificial Sequence
  Description of Artificial Sequence: Synthetic oligonucleotide
auucgucgguuccuuugcu

SEQ ID NO: 88230 - RNA, 19 nt, Artificial Sequence
  Description of Artificial Sequence: Synthetic oligonucleotide
aggugauaacuaugacaga

SEQ ID NO: 88231 - RNA, 19 nt, Artificial Sequence
  Description of Artificial Sequence: Synthetic oligonucleotide
gguucuauacuuucaacuu

SEQ ID NO: 88232 - RNA, 19 nt, Artificial Sequence
  Description of Artificial Sequence: Synthetic oligonucleotide
cuuccgcucaggcaguaga

SEQ ID NO: 88233 - RNA, 19 nt, Artificial Sequence
  Description of Artificial Sequence: Synthetic oligonucleotide
cuuucuaguccugaagugu

SEQ ID NO: 88234 - RNA, 19 nt, Artificial Sequence
  Description of Artificial Sequence: Synthetic oligonucleotide
caagucuaagccacauuua

SEQ ID NO: 88235 - RNA, 19 nt, Artificial Sequence
  Description of Artificial Sequence: Synthetic oligonucleotide
gcgucuaccuucaaaauaa

SEQ ID NO: 88236 - RNA, 19 nt, Artificial Sequence
  Description of Artificial Sequence: Synthetic oligonucleotide
ggucucuacguguacgcuc

SEQ ID NO: 88237 - RNA, 19 nt, Artificial Sequence
  Description of Artificial Sequence: Synthetic oligonucleotide
acagaacauaaaggaacaa

SEQ ID NO: 88238 - RNA, 19 nt, Artificial Sequence
  Description of Artificial Sequence: Synthetic oligonucleotide
ccacgccuuagcaauaaac

SEQ ID NO: 88239 - RNA, 19 nt, Artificial Sequence
  Description of Artificial Sequence: Synthetic oligonucleotide
gauuaccugucuccuccaa

SEQ ID NO: 88240 - RNA, 19 nt, Artificial Sequence
  Description of Artificial Sequence: Synthetic oligonucleotide
cuccgacuacugcugcugc

SEQ ID NO: 88241 - RNA, 19 nt, Artificial Sequence
  Description of Artificial Sequence: Synthetic oligonucleotide
aucaaaucuucugcugcaa

SEQ ID NO: 88242 - RNA, 19 nt, Artificial Sequence
  Description of Artificial Sequence: Synthetic oligonucleotide
agccugaacuucaaguuuu

SEQ ID NO: 88243 - RNA, 19 nt, Artificial Sequence
  Description of Artificial Sequence: Synthetic oligonucleotide
uugccugaucgacuacuuu

SEQ ID NO: 88244 - RNA, 19 nt, Artificial Sequence
  Description of Artificial Sequence: Synthetic oligonucleotide
cguguacgcucuuuggagg

SEQ ID NO: 88245 - RNA, 19 nt, Artificial Sequence
  Description of Artificial Sequence: Synthetic oligonucleotide
ugcucgaccucugcuucug

SEQ ID NO: 88246 - RNA, 19 nt, Artificial Sequence
  Description of Artificial Sequence: Synthetic oligonucleotide
cuacucgaacugcuccgac

SEQ ID NO: 88247 - RNA, 19 nt, Artificial Sequence
  Description of Artificial Sequence: Synthetic oligonucleotide
ccuacugacugccccuucc

SEQ ID NO: 88248 - RNA, 19 nt, Artificial Sequence
  Description of Artificial Sequence: Synthetic oligonucleotide
gguagauucuuguuugaau

SEQ ID NO: 88249 - RNA, 19 nt, Artificial Sequence
  Description of Artificial Sequence: Synthetic oligonucleotide
gggccucacaucauuuggg

SEQ ID NO: 88250 - RNA, 19 nt, Artificial Sequence
  Description of Artificial Sequence: Synthetic oligonucleotide
ccauacaauacuuccuuaa

SEQ ID NO: 88251 - RNA, 19 nt, Artificial Sequence
  Description of Artificial Sequence: Synthetic oligonucleotide
agcauccuccuuacaaggu

SEQ ID NO: 88252 - RNA, 19 nt, Artificial Sequence
  Description of Artificial Sequence: Synthetic oligonucleotide
uuauguccucggccccuac

SEQ ID NO: 88253 - RNA, 19 nt, Artificial Sequence
  Description of Artificial Sequence: Synthetic oligonucleotide
gugacaaacugaaaaugau

SEQ ID NO: 88254 - RNA, 19 nt, Artificial Sequence
  Description of Artificial Sequence: Synthetic oligonucleotide
gucagaucgggaauucuua

SEQ ID NO: 88255 - RNA, 19 nt, Artificial Sequence
  Description of Artificial Sequence: Synthetic oligonucleotide
gaucgacuacuuucugaua

SEQ ID NO: 88256 - RNA, 19 nt, Artificial Sequence
  Description of Artificial Sequence: Synthetic oligonucleotide
uuccucucgcugagccacc

SEQ ID NO: 88257 - RNA, 19 nt, Artificial Sequence
  Description of Artificial Sequence: Synthetic oligonucleotide
cccuugcuccugaauaacc

SEQ ID NO: 88258 - RNA, 19 nt, Artificial Sequence
  Description of Artificial Sequence: Synthetic oligonucleotide
uacgcaccaccugaugcuc

SEQ ID NO: 88259 - RNA, 19 nt, Artificial Sequence
  Description of Artificial Sequence: Synthetic oligonucleotide
uccacgccuuagcaauaaa

SEQ ID NO: 88260 - RNA, 19 nt, Artificial Sequence
  Description of Artificial Sequence: Synthetic oligonucleotide
cuuucugauauagaccuuu

SEQ ID NO: 88261 - RNA, 19 nt, Artificial Sequence
  Description of Artificial Sequence: Synthetic oligonucleotide
ccacuaucugagaauccac

SEQ ID NO: 88262 - RNA, 19 nt, Artificial Sequence
  Description of Artificial Sequence: Synthetic oligonucleotide
acgucucuccucaaacagu

SEQ ID NO: 88263 - RNA, 19 nt, Artificial Sequence
  Description of Artificial Sequence: Synthetic oligonucleotide
agagugcagcugagggugg

SEQ ID NO: 88264 - RNA, 19 nt, Artificial Sequence
  Description of Artificial Sequence: Synthetic oligonucleotide
cucgaacugcuccgacuac

SEQ ID NO: 88265 - RNA, 19 nt, Artificial Sequence
  Description of Artificial Sequence: Synthetic oligonucleotide
cgcuaugaacuacaccugc

SEQ ID NO: 88266 - RNA, 19 nt, Artificial Sequence
  Description of Artificial Sequence: Synthetic oligonucleotide
ggcuucuacucuuacuugu

SEQ ID NO: 88267 - RNA, 19 nt, Artificial Sequence
  Description of Artificial Sequence: Synthetic oligonucleotide
guugcaacgguagauucuu

SEQ ID NO: 88268 - RNA, 19 nt, Artificial Sequence
  Description of Artificial Sequence: Synthetic oligonucleotide
cuaugaacuacaccugcuu

SEQ ID NO: 88269 - RNA, 19 nt, Artificial Sequence
  Description of Artificial Sequence: Synthetic oligonucleotide
ggcaacagauacuccaagu

SEQ ID NO: 88270 - RNA, 19 nt, Artificial Sequence
  Description of Artificial Sequence: Synthetic oligonucleotide
cugcaucgcuaugaacuac

SEQ ID NO: 88271 - RNA, 19 nt, Artificial Sequence
  Description of Artificial Sequence: Synthetic oligonucleotide
caaauauucgucgguuccu

SEQ ID NO: 88272 - RNA, 19 nt, Artificial Sequence
  Description of Artificial Sequence: Synthetic oligonucleotide
gcaaaauucgaugcgucua

SEQ ID NO: 88273 - RNA, 19 nt, Artificial Sequence
  Description of Artificial Sequence: Synthetic oligonucleotide
cuauacuuucaacuugauu

SEQ ID NO: 88274 - RNA, 19 nt, Artificial Sequence
  Description of Artificial Sequence: Synthetic oligonucleotide
aauccacgccuuagcaaua

SEQ ID NO: 88275 - RNA, 19 nt, Artificial Sequence
  Description of Artificial Sequence: Synthetic oligonucleotide
gcuuggaugggccucacau

SEQ ID NO: 88276 - RNA, 19 nt, Artificial Sequence
  Description of Artificial Sequence: Synthetic oligonucleotide
gucucuacguguacgcucu

SEQ ID NO: 88277 - RNA, 19 nt, Artificial Sequence
  Description of Artificial Sequence: Synthetic oligonucleotide
aggucucuacguguacgcu

SEQ ID NO: 88278 - RNA, 19 nt, Artificial Sequence
  Description of Artificial Sequence: Synthetic oligonucleotide
uccgccuucuggucuucau

SEQ ID NO: 88279 - RNA, 19 nt, Artificial Sequence
  Description of Artificial Sequence: Synthetic oligonucleotide
uguacgcucuuuggaggua

SEQ ID NO: 88280 - RNA, 19 nt, Artificial Sequence
  Description of Artificial Sequence: Synthetic oligonucleotide
ucccuucgcuuccggucca

SEQ ID NO: 88281 - RNA, 19 nt, Artificial Sequence
  Description of Artificial Sequence: Synthetic oligonucleotide
gcugauuaccugucuccuc

SEQ ID NO: 88282 - RNA, 19 nt, Artificial Sequence
  Description of Artificial Sequence: Synthetic oligonucleotide
gcgugauucucuucuuguc

SEQ ID NO: 88283 - RNA, 19 nt, Artificial Sequence
  Description of Artificial Sequence: Synthetic oligonucleotide
cuuguccgacgcuccccac

SEQ ID NO: 88284 - RNA, 19 nt, Artificial Sequence
  Description of Artificial Sequence: Synthetic oligonucleotide
cuccucucauuuucaaccu

SEQ ID NO: 88285 - RNA, 19 nt, Artificial Sequence
  Description of Artificial Sequence: Synthetic oligonucleotide
caaauggggcuuugucuua

SEQ ID NO: 88286 - RNA, 19 nt, Artificial Sequence
  Description of Artificial Sequence: Synthetic oligonucleotide
agccuagaugagcuuccuu

SEQ ID NO: 88287 - RNA, 19 nt, Artificial Sequence
  Description of Artificial Sequence: Synthetic oligonucleotide
gacuauccuguugcuucuc

SEQ ID NO: 88288 - RNA, 19 nt, Artificial Sequence
  Description of Artificial Sequence: Synthetic oligonucleotide
gcacgucucuccucaaaca

SEQ ID NO: 88289 - RNA, 19 nt, Artificial Sequence
  Description of Artificial Sequence: Synthetic oligonucleotide
ggcgugauucucuucuugu

SEQ ID NO: 88290 - RNA, 19 nt, Artificial Sequence
  Description of Artificial Sequence: Synthetic oligonucleotide
gucugcuuagcacgucucu

SEQ ID NO: 88291 - RNA, 19 nt, Artificial Sequence
  Description of Artificial Sequence: Synthetic oligonucleotide
auccacgccuuagcaauaa

SEQ ID NO: 88292 - RNA, 19 nt, Artificial Sequence
  Description of Artificial Sequence: Synthetic oligonucleotide
cagcugugcaagcucaacu

SEQ ID NO: 88293 - RNA, 19 nt, Artificial Sequence
  Description of Artificial Sequence: Synthetic oligonucleotide
accuuacccucuucuuguu

SEQ ID NO: 88294 - RNA, 19 nt, Artificial Sequence
  Description of Artificial Sequence: Synthetic oligonucleotide
gguuccuuugcuuucccuu

SEQ ID NO: 88295 - RNA, 19 nt, Artificial Sequence
  Description of Artificial Sequence: Synthetic oligonucleotide
gccucacaucauuuggguc

SEQ ID NO: 88296 - RNA, 19 nt, Artificial Sequence
  Description of Artificial Sequence: Synthetic oligonucleotide
ucggccccuacugcgacuu

SEQ ID NO: 88297 - RNA, 19 nt, Artificial Sequence
  Description of Artificial Sequence: Synthetic oligonucleotide
cucuacuacuaccaccuuu

SEQ ID NO: 88298 - RNA, 19 nt, Artificial Sequence
  Description of Artificial Sequence: Synthetic oligonucleotide
gcuccgacuacugcugcug

SEQ ID NO: 88299 - RNA, 19 nt, Artificial Sequence
  Description of Artificial Sequence: Synthetic oligonucleotide
ggcauuaugcucauuccau

SEQ ID NO: 88300 - RNA, 19 nt, Artificial Sequence
  Description of Artificial Sequence: Synthetic oligonucleotide
uccucucgcugagccaccu

SEQ ID NO: 88301 - RNA, 19 nt, Artificial Sequence
  Description of Artificial Sequence: Synthetic oligonucleotide
gugauaacuaugacagauu

SEQ ID NO: 88302 - RNA, 19 nt, Artificial Sequence
  Description of Artificial Sequence: Synthetic oligonucleotide
cuaggccuagccuccauuu

SEQ ID NO: 88303 - RNA, 19 nt, Artificial Sequence
  Description of Artificial Sequence: Synthetic oligonucleotide
ggugcccaucaacaagcca

SEQ ID NO: 88304 - RNA, 19 nt, Artificial Sequence
  Description of Artificial Sequence: Synthetic oligonucleotide
ccugaucgacuacuuucug

SEQ ID NO: 88305 - RNA, 19 nt, Artificial Sequence
  Description of Artificial Sequence: Synthetic oligonucleotide
ccuuagcaauaaacuacca

SEQ ID NO: 88306 - RNA, 19 nt, Artificial Sequence
  Description of Artificial Sequence: Synthetic oligonucleotide
aucuaccaacugaaugguu

SEQ ID NO: 88307 - RNA, 19 nt, Artificial Sequence
  Description of Artificial Sequence: Synthetic oligonucleotide
ucucuacguguacgcucuu

SEQ ID NO: 88308 - RNA, 19 nt, Artificial Sequence
  Description of Artificial Sequence: Synthetic oligonucleotide
ucgaugcgucuaccuucaa

SEQ ID NO: 88309 - RNA, 19 nt, Artificial Sequence
  Description of Artificial Sequence: Synthetic oligonucleotide
gguuggggcugagagugca

SEQ ID NO: 88310 - RNA, 19 nt, Artificial Sequence
  Description of Artificial Sequence: Synthetic oligonucleotide
ggccucacaucauuugggu

SEQ ID NO: 88311 - RNA, 19 nt, Artificial Sequence
  Description of Artificial Sequence: Synthetic oligonucleotide
gaugggccucacaucauuu

SEQ ID NO: 88312 - RNA, 19 nt, Artificial Sequence
  Description of Artificial Sequence: Synthetic oligonucleotide
ccuuacccucuucuuguuc

SEQ ID NO: 88313 - RNA, 19 nt, Artificial Sequence
  Description of Artificial Sequence: Synthetic oligonucleotide
cuggcuuggaugggccuca

SEQ ID NO: 88314 - RNA, 19 nt, Artificial Sequence
  Description of Artificial Sequence: Synthetic oligonucleotide
gcaucgcuaugaacuacac

SEQ ID NO: 88315 - RNA, 19 nt, Artificial Sequence
  Description of Artificial Sequence: Synthetic oligonucleotide
ccauaggcucagguugggg

SEQ ID NO: 88316 - RNA, 19 nt, Artificial Sequence
  Description of Artificial Sequence: Synthetic oligonucleotide
gcuacugguagaacugcua

SEQ ID NO: 88317 - RNA, 19 nt, Artificial Sequence
  Description of Artificial Sequence: Synthetic oligonucleotide
gcuacucgaacugcuccga

SEQ ID NO: 88318 - RNA, 19 nt, Artificial Sequence
  Description of Artificial Sequence: Synthetic oligonucleotide
gcuaugaacuacaccugcu

SEQ ID NO: 88319 - RNA, 19 nt, Artificial Sequence
  Description of Artificial Sequence: Synthetic oligonucleotide
gguacacuucugaauaguu

SEQ ID NO: 88320 - RNA, 19 nt, Artificial Sequence
  Description of Artificial Sequence: Synthetic oligonucleotide
gcuccaauucuuugcuagu

SEQ ID NO: 88321 - RNA, 19 nt, Artificial Sequence
  Description of Artificial Sequence: Synthetic oligonucleotide
cuggcauguuucaguuaua

SEQ ID NO: 88322 - RNA, 19 nt, Artificial Sequence
  Description of Artificial Sequence: Synthetic oligonucleotide
acgcaccaccugaugcucu

SEQ ID NO: 88323 - RNA, 19 nt, Artificial Sequence
  Description of Artificial Sequence: Synthetic oligonucleotide
cuccaauucuuugcuaguu

SEQ ID NO: 88324 - RNA, 19 nt, Artificial Sequence
  Description of Artificial Sequence: Synthetic oligonucleotide
cagccuacugacugccccu

SEQ ID NO: 88325 - RNA, 19 nt, Artificial Sequence
  Description of Artificial Sequence: Synthetic oligonucleotide
ggaguuuuauagacucuau

SEQ ID NO: 88326 - RNA, 19 nt, Artificial Sequence
  Description of Artificial Sequence: Synthetic oligonucleotide
agccuacugacugccccuu

SEQ ID NO: 88327 - RNA, 19 nt, Artificial Sequence
  Description of Artificial Sequence: Synthetic oligonucleotide
gccugaucgacuacuuucu

SEQ ID NO: 88328 - RNA, 19 nt, Artificial Sequence
  Description of Artificial Sequence: Synthetic oligonucleotide
gcucagguuggggcucagg

SEQ ID NO: 88329 - RNA, 19 nt, Artificial Sequence
  Description of Artificial Sequence: Synthetic oligonucleotide
gaacuacaccugcuuccuu

SEQ ID NO: 88330 - RNA, 19 nt, Artificial Sequence
  Description of Artificial Sequence: Synthetic oligonucleotide
cacaagucuaagccacauu

SEQ ID NO: 88331 - RNA, 19 nt, Artificial Sequence
  Description of Artificial Sequence: Synthetic oligonucleotide
ccgacuacugcugcugcca

SEQ ID NO: 88332 - RNA, 19 nt, Artificial Sequence
  Description of Artificial Sequence: Synthetic oligonucleotide
uggcuuggaugggccucac

SEQ ID NO: 88333 - RNA, 19 nt, Artificial Sequence
  Description of Artificial Sequence: Synthetic oligonucleotide
cugucagaucgggaauucu

SEQ ID NO: 88334 - RNA, 19 nt, Artificial Sequence
  Description of Artificial Sequence: Synthetic oligonucleotide
ccccuacugcgacuucuac

SEQ ID NO: 88335 - RNA, 19 nt, Artificial Sequence
  Description of Artificial Sequence: Synthetic oligonucleotide
gucgcuuuccuggcgugau

SEQ ID NO: 88336 - RNA, 19 nt, Artificial Sequence
  Description of Artificial Sequence: Synthetic oligonucleotide
gucgcaguucugucugcuu

SEQ ID NO: 88337 - RNA, 19 nt, Artificial Sequence
  Description of Artificial Sequence: Synthetic oligonucleotide
ccucggccccuacugcgac

SEQ ID NO: 88338 - RNA, 19 nt, Artificial Sequence
  Description of Artificial Sequence: Synthetic oligonucleotide
guccgacgcuccccaccca

SEQ ID NO: 88339 - RNA, 19 nt, Artificial Sequence
  Description of Artificial Sequence: Synthetic oligonucleotide
gcugacuauccuguugcuu

SEQ ID NO: 88340 - RNA, 19 nt, Artificial Sequence
  Description of Artificial Sequence: Synthetic oligonucleotide
ggccuagccuccauuuuau

SEQ ID NO: 88341 - RNA, 19 nt, Artificial Sequence
  Description of Artificial Sequence: Synthetic oligonucleotide
cgucuaccuucaaaauaaa

SEQ ID NO: 88342 - RNA, 19 nt, Artificial Sequence
  Description of Artificial Sequence: Synthetic oligonucleotide
cucuacguguacgcucuuu

SEQ ID NO: 88343 - RNA, 19 nt, Artificial Sequence
  Description of Artificial Sequence: Synthetic oligonucleotide
cucggccccuacugcgacu

SEQ ID NO: 88344 - RNA, 19 nt, Artificial Sequence
  Description of Artificial Sequence: Synthetic oligonucleotide
cgguagauucuuguuugaa

SEQ ID NO: 88345 - RNA, 19 nt, Artificial Sequence
  Description of Artificial Sequence: Synthetic oligonucleotide
gccuagccuccauuuuauu

SEQ ID NO: 88346 - RNA, 19 nt, Artificial Sequence
  Description of Artificial Sequence: Synthetic oligonucleotide
gcccaucaacaagccaaau

SEQ ID NO: 88347 - RNA, 19 nt, Artificial Sequence
  Description of Artificial Sequence: Synthetic oligonucleotide
cggccccuacugcgacuuc

SEQ ID NO: 88348 - RNA, 19 nt, Artificial Sequence
  Description of Artificial Sequence: Synthetic oligonucleotide
ucucuuauuaaaauuaacc

SEQ ID NO: 88349 - RNA, 19 nt, Artificial Sequence
  Description of Artificial Sequence: Synthetic oligonucleotide
uguaauauugcuuacuuca

SEQ ID NO: 88350 - RNA, 19 nt, Artificial Sequence
  Description of Artificial Sequence: Synthetic oligonucleotide
aauugaguguuauaaacag

SEQ ID NO: 88351 - RNA, 19 nt, Artificial Sequence
  Description of Artificial Sequence: Synthetic oligonucleotide
auuacuacauacaaggugc

SEQ ID NO: 88352 - RNA, 19 nt, Artificial Sequence
  Description of Artificial Sequence: Synthetic oligonucleotide
uuuacuuacauaaugguau

SEQ ID NO: 88353 - RNA, 19 nt, Artificial Sequence
  Description of Artificial Sequence: Synthetic oligonucleotide
uguauugauucccaaaucc

SEQ ID NO: 88354 - RNA, 19 nt, Artificial Sequence
  Description of Artificial Sequence: Synthetic oligonucleotide
  modified_base (7)..(7): a, c, u, g, unknown or other
uagggunugauuuacaaac

SEQ ID NO: 88355 - RNA, 19 nt, Artificial Sequence
  Description of Artificial Sequence: Synthetic oligonucleotide
aguaagauauuaaagugcc

SEQ ID NO: 88356 - RNA, 19 nt, Artificial Sequence
  Description of Artificial Sequence: Synthetic oligonucleotide
uuuuauauagguaaucauc

SEQ ID NO: 88357 - RNA, 19 nt, Artificial Sequence
  Description of Artificial Sequence: Synthetic oligonucleotide
aagauauuaaagugccuac

SEQ ID NO: 88358 - RNA, 19 nt, Artificial Sequence
  Description of Artificial Sequence: Synthetic oligonucleotide
caaaccuuaauuacuaggg

SEQ ID NO: 88359 - RNA, 19 nt, Artificial Sequence
  Description of Artificial Sequence: Synthetic oligonucleotide
aaaccuacuauaaccagcc

SEQ ID NO: 88360 - RNA, 19 nt, Artificial Sequence
  Description of Artificial Sequence: Synthetic oligonucleotide
uguuugucagacaacaaag

SEQ ID NO: 88361 - RNA, 19 nt, Artificial Sequence
  Description of Artificial Sequence: Synthetic oligonucleotide
ugauuuacuuuguagaagc

SEQ ID NO: 88362 - RNA, 19 nt, Artificial Sequence
  Description of Artificial Sequence: Synthetic oligonucleotide
cuuaaucuagcuaauuggg

SEQ ID NO: 88363 - RNA, 19 nt, Artificial Sequence
  Description of Artificial Sequence: Synthetic oligonucleotide
ugaguaagauauuaaagug

SEQ ID NO: 88364 - RNA, 19 nt, Artificial Sequence
  Description of Artificial Sequence: Synthetic oligonucleotide
acuauaaccagccucaaca

SEQ ID NO: 88365 - RNA, 19 nt, Artificial Sequence
  Description of Artificial Sequence: Synthetic oligonucleotide
uaaggaagcacaaauuuca

SEQ ID NO: 88366 - RNA, 19 nt, Artificial Sequence
  Description of Artificial Sequence: Synthetic oligonucleotide
aucuauuguaaauugagug

SEQ ID NO: 88367 - RNA, 19 nt, Artificial Sequence
  Description of Artificial Sequence: Synthetic oligonucleotide
aguuucuacacacacgagg

SEQ ID NO: 88368 - RNA, 19 nt, Artificial Sequence
  Description of Artificial Sequence: Synthetic oligonucleotide
aauacaauaucaucucgca

SEQ ID NO: 88369 - RNA, 19 nt, Artificial Sequence
  Description of Artificial Sequence: Synthetic oligonucleotide
aaaaugaacaggacuggcc

SEQ ID NO: 88370 - RNA, 19 nt, Artificial Sequence
  Description of Artificial Sequence: Synthetic oligonucleotide
ucuaagaugcuacauugcc

SEQ ID NO: 88371 - RNA, 19 nt, Artificial Sequence
  Description of Artificial Sequence: Synthetic oligonucleotide
uugaguguuauaaacaguc

SEQ ID NO: 88372 - RNA, 19 nt, Artificial Sequence
  Description of Artificial Sequence: Synthetic oligonucleotide
aacagcgugauuuaaaaua

SEQ ID NO: 88373 - RNA, 19 nt, Artificial Sequence
  Description of Artificial Sequence: Synthetic oligonucleotide
aauuaugaauacuuucacu

SEQ ID NO: 88374 - RNA, 19 nt, Artificial Sequence
  Description of Artificial Sequence: Synthetic oligonucleotide
aacacagaguguuauuauc

SEQ ID NO: 88375 - RNA, 19 nt, Artificial Sequence
  Description of Artificial Sequence: Synthetic oligonucleotide
  modified_base (3)..(3): a, c, u, g, unknown or other
gunugauuuacaaacacag

SEQ ID NO: 88376 - RNA, 19 nt, Artificial Sequence
  Description of Artificial Sequence: Synthetic oligonucleotide
aauaccgguugacagcugg

SEQ ID NO: 88377 - RNA, 19 nt, Artificial Sequence
  Description of Artificial Sequence: Synthetic oligonucleotide
ucuauuguaaauugagugu

SEQ ID NO: 88378 - RNA, 19 nt, Artificial Sequence
  Description of Artificial Sequence: Synthetic oligonucleotide
cuaggaauuacccugguac

SEQ ID NO: 88379 - RNA, 19 nt, Artificial Sequence
  Description of Artificial Sequence: Synthetic oligonucleotide
aaauccuuguuaaugggac

SEQ ID NO: 88380 - RNA, 19 nt, Artificial Sequence
  Description of Artificial Sequence: Synthetic oligonucleotide
aaccgauucaccaaccagc

SEQ ID NO: 88381 - RNA, 19 nt, Artificial Sequence
  Description of Artificial Sequence: Synthetic oligonucleotide
gacauaguaauuugugucc

SEQ ID NO: 88382 - RNA, 19 nt, Artificial Sequence
  Description of Artificial Sequence: Synthetic oligonucleotide
auacaguucauaucuauug

SEQ ID NO: 88383 - RNA, 19 nt, Artificial Sequence
  Description of Artificial Sequence: Synthetic oligonucleotide
ucuucuuaaggaagggccg

SEQ ID NO: 88384 - RNA, 19 nt, Artificial Sequence
  Description of Artificial Sequence: Synthetic oligonucleotide
uaaagauuuagcaaccgau

SEQ ID NO: 88385 - RNA, 19 nt, Artificial Sequence
  Description of Artificial Sequence: Synthetic oligonucleotide
cagaguaucaaguauucag

SEQ ID NO: 88386 - RNA, 19 nt, Artificial Sequence
  Description of Artificial Sequence: Synthetic oligonucleotide
ugcuuaaucuagcuaauug

SEQ ID NO: 88387 - RNA, 19 nt, Artificial Sequence
  Description of Artificial Sequence: Synthetic oligonucleotide
gaguguuauaaacagucag

SEQ ID NO: 88388 - RNA, 19 nt, Artificial Sequence
  Description of Artificial Sequence: Synthetic oligonucleotide
uugcuuuaacuuuuaaucc

SEQ ID NO: 88389 - RNA, 19 nt, Artificial Sequence
  Description of Artificial Sequence: Synthetic oligonucleotide
agaucaguaacuuuuaaua

SEQ ID NO: 88390 - RNA, 19 nt, Artificial Sequence
  Description of Artificial Sequence: Synthetic oligonucleotide
uaaucuagcuaauugggac

SEQ ID NO: 88391 - RNA, 19 nt, Artificial Sequence
  Description of Artificial Sequence: Synthetic oligonucleotide
ucuccgacaaauuuuauau

SEQ ID NO: 88392 - RNA, 19 nt, Artificial Sequence
  Description of Artificial Sequence: Synthetic oligonucleotide
auauuuaacagcgugauuu

SEQ ID NO: 88393 - RNA, 19 nt, Artificial Sequence
  Description of Artificial Sequence: Synthetic oligonucleotide
uacacuaaaugucuucuca

SEQ ID NO: 88394 - RNA, 19 nt, Artificial Sequence
  Description of Artificial Sequence: Synthetic oligonucleotide
uuuuacuuacauaauggua

SEQ ID NO: 88395 - RNA, 19 nt, Artificial Sequence
  Description of Artificial Sequence: Synthetic oligonucleotide
uaaacuauccugguaagga

SEQ ID NO: 88396 - RNA, 19 nt, Artificial Sequence
  Description of Artificial Sequence: Synthetic oligonucleotide
aggaauaccgguugacagc

SEQ ID NO: 88397 - RNA, 19 nt, Artificial Sequence
  Description of Artificial Sequence: Synthetic oligonucleotide
uuauuauagaaaaccuacu

SEQ ID NO: 88398 - RNA, 19 nt, Artificial Sequence
  Description of Artificial Sequence: Synthetic oligonucleotide
uccuacaacugccacauca

SEQ ID NO: 88399 - RNA, 19 nt, Artificial Sequence
  Description of Artificial Sequence: Synthetic oligonucleotide
aaucuagcuaauugggacu

SEQ ID NO: 88400 - RNA, 19 nt, Artificial Sequence
  Description of Artificial Sequence: Synthetic oligonucleotide
uuaaucuagcuaauuggga

SEQ ID NO: 88401 - RNA, 19 nt, Artificial Sequence
  Description of Artificial Sequence: Synthetic oligonucleotide
caucuaagaugcuacauug

SEQ ID NO: 88402 - RNA, 19 nt, Artificial Sequence
  Description of Artificial Sequence: Synthetic oligonucleotide
  modified_base (9)..(9): a, c, u, g, unknown or other
uuuagggunugauuuacaa

SEQ ID NO: 88403 - RNA, 19 nt, Artificial Sequence
  Description of Artificial Sequence: Synthetic oligonucleotide
ucaaguaaacacuucuccu

SEQ ID NO: 88404 - RNA, 19 nt, Artificial Sequence
  Description of Artificial Sequence: Synthetic oligonucleotide
uguacuccacuggagaugg

SEQ ID NO: 88405 - RNA, 19 nt, Artificial Sequence
  Description of Artificial Sequence: Synthetic oligonucleotide
gcuuaaucuagcuaauugg

SEQ ID NO: 88406 - RNA, 19 nt, Artificial Sequence
  Description of Artificial Sequence: Synthetic oligonucleotide
uuagagcugagacaccuug

SEQ ID NO: 88407 - RNA, 19 nt, Artificial Sequence
  Description of Artificial Sequence: Synthetic oligonucleotide
uuaacagcgugauuuaaaa

SEQ ID NO: 88408 - RNA, 19 nt, Artificial Sequence
  Description of Artificial Sequence: Synthetic oligonucleotide
agggccaaaccuuaauuac

SEQ ID NO: 88409 - RNA, 19 nt, Artificial Sequence
  Description of Artificial Sequence: Synthetic oligonucleotide
uaacaaucauacugcaucc

SEQ ID NO: 88410 - RNA, 19 nt, Artificial Sequence
  Description of Artificial Sequence: Synthetic oligonucleotide
  modified_base (2)..(2): a, c, u, g, unknown or other
unugauuuacaaacacaga

SEQ ID NO: 88411 - RNA, 19 nt, Artificial Sequence
  Description of Artificial Sequence: Synthetic oligonucleotide
uaagauauuaaagugccua

SEQ ID NO: 88412 - RNA, 19 nt, Artificial Sequence
  Description of Artificial Sequence: Synthetic oligonucleotide
gauagcauagugucagggc

SEQ ID NO: 88413 - RNA, 19 nt, Artificial Sequence
  Description of Artificial Sequence: Synthetic oligonucleotide
ugcuuuaacuuuuaauccu

SEQ ID NO: 88414 - RNA, 19 nt, Artificial Sequence
  Description of Artificial Sequence: Synthetic oligonucleotide
auagcauagugucagggca

SEQ ID NO: 88415 - RNA, 19 nt, Artificial Sequence
  Description of Artificial Sequence: Synthetic oligonucleotide
agcgaugagaucccacugc

SEQ ID NO: 88416 - RNA, 19 nt, Artificial Sequence
  Description of Artificial Sequence: Synthetic oligonucleotide
aagaccggggaguuugaac

SEQ ID NO: 88417 - RNA, 19 nt, Artificial Sequence
  Description of Artificial Sequence: Synthetic oligonucleotide
uuaauuacuagggucuucu

SEQ ID NO: 88418 - RNA, 19 nt, Artificial Sequence
  Description of Artificial Sequence: Synthetic oligonucleotide
ugggacauaguaauuugug

SEQ ID NO: 88419 - RNA, 19 nt, Artificial Sequence
  Description of Artificial Sequence: Synthetic oligonucleotide
agcuaaacuauccugguaa

SEQ ID NO: 88420 - RNA, 19 nt, Artificial Sequence
  Description of Artificial Sequence: Synthetic oligonucleotide
auugccauauccaugcuag

SEQ ID NO: 88421 - RNA, 19 nt, Artificial Sequence
  Description of Artificial Sequence: Synthetic oligonucleotide
acaagcagggaacuccugg

SEQ ID NO: 88422 - RNA, 19 nt, Artificial Sequence
  Description of Artificial Sequence: Synthetic oligonucleotide
agugccuacacuaaauguc

SEQ ID NO: 88423 - RNA, 19 nt, Artificial Sequence
  Description of Artificial Sequence: Synthetic oligonucleotide
auuuaccacuuucaaauga

SEQ ID NO: 88424 - RNA, 19 nt, Artificial Sequence
  Description of Artificial Sequence: Synthetic oligonucleotide
uuacccugguaccaucugg

SEQ ID NO: 88425 - RNA, 19 nt, Artificial Sequence
  Description of Artificial Sequence: Synthetic oligonucleotide
acuuacauaaugguaucuc

SEQ ID NO: 88426 - RNA, 19 nt, Artificial Sequence
  Description of Artificial Sequence: Synthetic oligonucleotide
uacuacaccggcuaagcga

SEQ ID NO: 88427 - RNA, 19 nt, Artificial Sequence
  Description of Artificial Sequence: Synthetic oligonucleotide
ugcgcagacacgaucaacu

SEQ ID NO: 88428 - RNA, 19 nt, Artificial Sequence
  Description of Artificial Sequence: Synthetic oligonucleotide
ucguagacacuguagggag

SEQ ID NO: 88429 - RNA, 19 nt, Artificial Sequence
  Description of Artificial Sequence: Synthetic oligonucleotide
aaacucugcaccaaguaga

SEQ ID NO: 88430 - RNA, 19 nt, Artificial Sequence
  Description of Artificial Sequence: Synthetic oligonucleotide
ggguaaauggcacugcacg

SEQ ID NO: 88431 - RNA, 19 nt, Artificial Sequence
  Description of Artificial Sequence: Synthetic oligonucleotide
uauugugcaacauuauauu

SEQ ID NO: 88432 - RNA, 19 nt, Artificial Sequence
  Description of Artificial Sequence: Synthetic oligonucleotide
uuuaaggaaaggucugagu

SEQ ID NO: 88433 - RNA, 19 nt, Artificial Sequence
  Description of Artificial Sequence: Synthetic oligonucleotide
aguccuucgggucccauuc

SEQ ID NO: 88434 - RNA, 19 nt, Artificial Sequence
  Description of Artificial Sequence: Synthetic oligonucleotide
uaagcgaugagaucccacu

SEQ ID NO: 88435 - RNA, 19 nt, Artificial Sequence
  Description of Artificial Sequence: Synthetic oligonucleotide
cagacuuauuuuguaaacg

SEQ ID NO: 88436 - RNA, 19 nt, Artificial Sequence
  Description of Artificial Sequence: Synthetic oligonucleotide
agaccggggaguuugaacu

SEQ ID NO: 88437 - RNA, 19 nt, Artificial Sequence
  Description of Artificial Sequence: Synthetic oligonucleotide
agaguccgcucguagacac

SEQ ID NO: 88438 - RNA, 19 nt, Artificial Sequence
  Description of Artificial Sequence: Synthetic oligonucleotide
aaacuaagaugagcuuccc

SEQ ID NO: 88439 - RNA, 19 nt, Artificial Sequence
  Description of Artificial Sequence: Synthetic oligonucleotide
uaggaauuacccugguacc

SEQ ID NO: 88440 - RNA, 19 nt, Artificial Sequence
  Description of Artificial Sequence: Synthetic oligonucleotide
ucaugcuaauauauuucca

SEQ ID NO: 88441 - RNA, 19 nt, Artificial Sequence
  Description of Artificial Sequence: Synthetic oligonucleotide
uguugccugacaauauugu

SEQ ID NO: 88442 - RNA, 19 nt, Artificial Sequence
  Description of Artificial Sequence: Synthetic oligonucleotide
aaagcucgauuucaucaca

SEQ ID NO: 88443 - RNA, 19 nt, Artificial Sequence
  Description of Artificial Sequence: Synthetic oligonucleotide
gucacauuaggugaagcag

SEQ ID NO: 88444 - RNA, 19 nt, Artificial Sequence
  Description of Artificial Sequence: Synthetic oligonucleotide
uuaaggaagggccguugug

SEQ ID NO: 88445 - RNA, 19 nt, Artificial Sequence
  Description of Artificial Sequence: Synthetic oligonucleotide
acauaaaguauuuggucau

SEQ ID NO: 88446 - RNA, 19 nt, Artificial Sequence
  Description of Artificial Sequence: Synthetic oligonucleotide
uaacuuaaugggcugcguc

SEQ ID NO: 88447 - RNA, 19 nt, Artificial Sequence
  Description of Artificial Sequence: Synthetic oligonucleotide
agauagcauagugucaggg

SEQ ID NO: 88448 - RNA, 19 nt, Artificial Sequence
  Description of Artificial Sequence: Synthetic oligonucleotide
aaacgcuaguucaagaaaa

SEQ ID NO: 88449 - RNA, 19 nt, Artificial Sequence
  Description of Artificial Sequence: Synthetic oligonucleotide
agcgugauuuaaaauacag

SEQ ID NO: 88450 - RNA, 19 nt, Artificial Sequence
  Description of Artificial Sequence: Synthetic oligonucleotide
ucgggucccauucucuagg

SEQ ID NO: 88451 - RNA, 19 nt, Artificial Sequence
  Description of Artificial Sequence: Synthetic oligonucleotide
aacuauccugguaaggaug

SEQ ID NO: 88452 - RNA, 19 nt, Artificial Sequence
  Description of Artificial Sequence: Synthetic oligonucleotide
auccaugcuagaacggucc

SEQ ID NO: 88453 - RNA, 19 nt, Artificial Sequence
  Description of Artificial Sequence: Synthetic oligonucleotide
ugacugcccuguaauauug

SEQ ID NO: 88454 - RNA, 19 nt, Artificial Sequence
  Description of Artificial Sequence: Synthetic oligonucleotide
  modified_base (8)..(8): a, c, u, g, unknown or other
uuagggunugauuuacaaa

SEQ ID NO: 88455 - RNA, 19 nt, Artificial Sequence
  Description of Artificial Sequence: Synthetic oligonucleotide
agauaagcuagcaacaaaa

SEQ ID NO: 88456 - RNA, 19 nt, Artificial Sequence
  Description of Artificial Sequence: Synthetic oligonucleotide
gggaguuugaacucagucc

SEQ ID NO: 88457 - RNA, 19 nt, Artificial Sequence
  Description of Artificial Sequence: Synthetic oligonucleotide
caaagcucgauuucaucac

SEQ ID NO: 88458 - RNA, 19 nt, Artificial Sequence
  Description of Artificial Sequence: Synthetic oligonucleotide
ucucgcauuguguugccug

SEQ ID NO: 88459 - RNA, 19 nt, Artificial Sequence
  Description of Artificial Sequence: Synthetic oligonucleotide
aaagauuuagcaaccgauu

SEQ ID NO: 88460 - RNA, 19 nt, Artificial Sequence
  Description of Artificial Sequence: Synthetic oligonucleotide
ugaacgucuguucuucauc

SEQ ID NO: 88461 - RNA, 19 nt, Artificial Sequence
  Description of Artificial Sequence: Synthetic oligonucleotide
aguaucaaguauucagaaa

SEQ ID NO: 88462 - RNA, 19 nt, Artificial Sequence
  Description of Artificial Sequence: Synthetic oligonucleotide
uuacuuacauaaugguauc

SEQ ID NO: 88463 - RNA, 19 nt, Artificial Sequence
  Description of Artificial Sequence: Synthetic oligonucleotide
uccuuuuagcauucaguca

SEQ ID NO: 88464 - RNA, 19 nt, Artificial Sequence
  Description of Artificial Sequence: Synthetic oligonucleotide
gagaccguccaacagguga

SEQ ID NO: 88465 - RNA, 19 nt, Artificial Sequence
  Description of Artificial Sequence: Synthetic oligonucleotide
uguuggguaaauggcacug

SEQ ID NO: 88466 - RNA, 19 nt, Artificial Sequence
  Description of Artificial Sequence: Synthetic oligonucleotide
auuuaauccuugaacgucu

SEQ ID NO: 88467 - RNA, 19 nt, Artificial Sequence
  Description of Artificial Sequence: Synthetic oligonucleotide
ggacauaguaauuuguguc

SEQ ID NO: 88468 - RNA, 19 nt, Artificial Sequence
  Description of Artificial Sequence: Synthetic oligonucleotide
gaacgguccacaauccucc

SEQ ID NO: 88469 - RNA, 19 nt, Artificial Sequence
  Description of Artificial Sequence: Synthetic oligonucleotide
gacagggcgccucagaguc

SEQ ID NO: 88470 - RNA, 19 nt, Artificial Sequence
  Description of Artificial Sequence: Synthetic oligonucleotide
uggaucucgcagccaaggg

SEQ ID NO: 88471 - RNA, 19 nt, Artificial Sequence
  Description of Artificial Sequence: Synthetic oligonucleotide
cuagaacgguccacaaucc

SEQ ID NO: 88472 - RNA, 19 nt, Artificial Sequence
  Description of Artificial Sequence: Synthetic oligonucleotide
ggcguuuuagaucaguaac

SEQ ID NO: 88473 - RNA, 19 nt, Artificial Sequence
  Description of Artificial Sequence: Synthetic oligonucleotide
uaaugggacauaguaauuu

SEQ ID NO: 88474 - RNA, 19 nt, Artificial Sequence
  Description of Artificial Sequence: Synthetic oligonucleotide
guuucuacacacacgagga

SEQ ID NO: 88475 - RNA, 19 nt, Artificial Sequence
  Description of Artificial Sequence: Synthetic oligonucleotide
aagacuucgucagagcuuu

SEQ ID NO: 88476 - RNA, 19 nt, Artificial Sequence
  Description of Artificial Sequence: Synthetic oligonucleotide
uauuguaaauugaguguua

SEQ ID NO: 88477 - RNA, 19 nt, Artificial Sequence
  Description of Artificial Sequence: Synthetic oligonucleotide
ucaauggagaccguccaac

SEQ ID NO: 88478 - RNA, 19 nt, Artificial Sequence
  Description of Artificial Sequence: Synthetic oligonucleotide
uuaaugggcugcgucuagg

SEQ ID NO: 88479 - RNA, 19 nt, Artificial Sequence
  Description of Artificial Sequence: Synthetic oligonucleotide
uccuccgacccgcugaagc

SEQ ID NO: 88480 - RNA, 19 nt, Artificial Sequence
  Description of Artificial Sequence: Synthetic oligonucleotide
uccgacguacuacaccggc

SEQ ID NO: 88481 - RNA, 19 nt, Artificial Sequence
  Description of Artificial Sequence: Synthetic oligonucleotide
uacugagcccuucaaugga

SEQ ID NO: 88482 - RNA, 19 nt, Artificial Sequence
  Description of Artificial Sequence: Synthetic oligonucleotide
cuacauugccauauccaug

SEQ ID NO: 88483 - RNA, 19 nt, Artificial Sequence
  Description of Artificial Sequence: Synthetic oligonucleotide
ucucuagguggcuggaucu

SEQ ID NO: 88484 - RNA, 19 nt, Artificial Sequence
  Description of Artificial Sequence: Synthetic oligonucleotide
uggagaccguccaacaggu

SEQ ID NO: 88485 - RNA, 19 nt, Artificial Sequence
  Description of Artificial Sequence: Synthetic oligonucleotide
agaacgguccacaauccuc

SEQ ID NO: 88486 - RNA, 19 nt, Artificial Sequence
  Description of Artificial Sequence: Synthetic oligonucleotide
uuacuagggucuucuuaag

SEQ ID NO: 88487 - RNA, 19 nt, Artificial Sequence
  Description of Artificial Sequence: Synthetic oligonucleotide
gguaaggauggagaguugg

SEQ ID NO: 88488 - RNA, 19 nt, Artificial Sequence
  Description of Artificial Sequence: Synthetic oligonucleotide
uucucuagguggcuggauc

SEQ ID NO: 88489 - RNA, 19 nt, Artificial Sequence
  Description of Artificial Sequence: Synthetic oligonucleotide
cugcgucuaggaauuaccc

SEQ ID NO: 88490 - RNA, 19 nt, Artificial Sequence
  Description of Artificial Sequence: Synthetic oligonucleotide
cuaagaugcuacauugcca

SEQ ID NO: 88491 - RNA, 19 nt, Artificial Sequence
  Description of Artificial Sequence: Synthetic oligonucleotide
uacccugguaccaucugga

SEQ ID NO: 88492 - RNA, 19 nt, Artificial Sequence
  Description of Artificial Sequence: Synthetic oligonucleotide
ugccugacaauauuguauu

SEQ ID NO: 88493 - RNA, 19 nt, Artificial Sequence
  Description of Artificial Sequence: Synthetic oligonucleotide
acuuagagcugagacaccu

SEQ ID NO: 88494 - RNA, 19 nt, Artificial Sequence
  Description of Artificial Sequence: Synthetic oligonucleotide
uugcguacuggcuccuccg

SEQ ID NO: 88495 - RNA, 19 nt, Artificial Sequence
  Description of Artificial Sequence: Synthetic oligonucleotide
uaauccugaggaugugcgc

SEQ ID NO: 88496 - RNA, 19 nt, Artificial Sequence
  Description of Artificial Sequence: Synthetic oligonucleotide
acacagaguguuauuauca

SEQ ID NO: 88497 - RNA, 19 nt, Artificial Sequence
  Description of Artificial Sequence: Synthetic oligonucleotide
uggguaacuuaaugggcug

SEQ ID NO: 88498 - RNA, 19 nt, Artificial Sequence
  Description of Artificial Sequence: Synthetic oligonucleotide
ugagacaccuugcggggca

SEQ ID NO: 88499 - RNA, 19 nt, Artificial Sequence
  Description of Artificial Sequence: Synthetic oligonucleotide
guaaggaagcacaaauuuc

SEQ ID NO: 88500 - RNA, 19 nt, Artificial Sequence
  Description of Artificial Sequence: Synthetic oligonucleotide
ugcaaacgcuaguucaaga

SEQ ID NO: 88501 - RNA, 19 nt, Artificial Sequence
  Description of Artificial Sequence: Synthetic oligonucleotide
auuguguugccugacaaua

SEQ ID NO: 88502 - RNA, 19 nt, Artificial Sequence
  Description of Artificial Sequence: Synthetic oligonucleotide
uccuguauugauucccaaa

SEQ ID NO: 88503 - RNA, 19 nt, Artificial Sequence
  Description of Artificial Sequence: Synthetic oligonucleotide
gucuauucaccaucuaaga

SEQ ID NO: 88504 - RNA, 19 nt, Artificial Sequence
  Description of Artificial Sequence: Synthetic oligonucleotide
ugacaauauuguauugguu

SEQ ID NO: 88505 - RNA, 19 nt, Artificial Sequence
  Description of Artificial Sequence: Synthetic oligonucleotide
aacaaucauacugcaucca

SEQ ID NO: 88506 - RNA, 19 nt, Artificial Sequence
  Description of Artificial Sequence: Synthetic oligonucleotide
uaaugagacucagccauac

SEQ ID NO: 88507 - RNA, 19 nt, Artificial Sequence
  Description of Artificial Sequence: Synthetic oligonucleotide
ugcgucuaggaauuacccu

SEQ ID NO: 88508 - RNA, 19 nt, Artificial Sequence
  Description of Artificial Sequence: Synthetic oligonucleotide
uucaccaucuaagaugcua

SEQ ID NO: 88509 - RNA, 19 nt, Artificial Sequence
  Description of Artificial Sequence: Synthetic oligonucleotide
uagcauagugucagggcac

SEQ ID NO: 88510 - RNA, 19 nt, Artificial Sequence
  Description of Artificial Sequence: Synthetic oligonucleotide
aauuacccugguaccaucu

SEQ ID NO: 88511 - RNA, 19 nt, Artificial Sequence
  Description of Artificial Sequence: Synthetic oligonucleotide
caaccgauucaccaaccag

SEQ ID NO: 88512 - RNA, 19 nt, Artificial Sequence
  Description of Artificial Sequence: Synthetic oligonucleotide
auacaauaucaucucgcau

SEQ ID NO: 88513 - RNA, 19 nt, Artificial Sequence
  Description of Artificial Sequence: Synthetic oligonucleotide
uuguggaauggccugucau

SEQ ID NO: 88514 - RNA, 19 nt, Artificial Sequence
  Description of Artificial Sequence: Synthetic oligonucleotide
uaaugggcugcgucuagga

SEQ ID NO: 88515 - RNA, 19 nt, Artificial Sequence
  Description of Artificial Sequence: Synthetic oligonucleotide
auagugucagggcacuuaa

SEQ ID NO: 88516 - RNA, 19 nt, Artificial Sequence
  Description of Artificial Sequence: Synthetic oligonucleotide
aggcaagaguuuucucugg

SEQ ID NO: 88517 - RNA, 19 nt, Artificial Sequence
  Description of Artificial Sequence: Synthetic oligonucleotide
guacuacaccggcuaagcg

SEQ ID NO: 88518 - RNA, 19 nt, Artificial Sequence
  Description of Artificial Sequence: Synthetic oligonucleotide
uagaacgguccacaauccu

SEQ ID NO: 88519 - RNA, 19 nt, Artificial Sequence
  Description of Artificial Sequence: Synthetic oligonucleotide
agguuuccgacguacuaca

SEQ ID NO: 88520 - RNA, 19 nt, Artificial Sequence
  Description of Artificial Sequence: Synthetic oligonucleotide
ugcccgacaagaccgggga

SEQ ID NO: 88521 - RNA, 19 nt, Artificial Sequence
  Description of Artificial Sequence: Synthetic oligonucleotide
gcgaggacgaggaauaccg

SEQ ID NO: 88522 - RNA, 19 nt, Artificial Sequence
  Description of Artificial Sequence: Synthetic oligonucleotide
uuguacuccacuggagaug

SEQ ID NO: 88523 - RNA, 19 nt, Artificial Sequence
  Description of Artificial Sequence: Synthetic oligonucleotide
aucuccgacaaauuuuaua

SEQ ID NO: 88524 - RNA, 19 nt, Artificial Sequence
  Description of Artificial Sequence: Synthetic oligonucleotide
cuugcguacuggcuccucc

SEQ ID NO: 88525 - RNA, 19 nt, Artificial Sequence
  Description of Artificial Sequence: Synthetic oligonucleotide
aagggccguuguguuaggc

SEQ ID NO: 88526 - RNA, 19 nt, Artificial Sequence
  Description of Artificial Sequence: Synthetic oligonucleotide
uaacagcgugauuuaaaau

SEQ ID NO: 88527 - RNA, 19 nt, Artificial Sequence
  Description of Artificial Sequence: Synthetic oligonucleotide
  modified_base (5)..(5): a, c, u, g, unknown or other
gggunugauuuacaaacac

SEQ ID NO: 88528 - RNA, 19 nt, Artificial Sequence
  Description of Artificial Sequence: Synthetic oligonucleotide
auuacccugguaccaucug

SEQ ID NO: 88529 - RNA, 19 nt, Artificial Sequence
  Description of Artificial Sequence: Synthetic oligonucleotide
cuguauugauucccaaauc

SEQ ID NO: 88530 - RNA, 19 nt, Artificial Sequence
  Description of Artificial Sequence: Synthetic oligonucleotide
agaccguccaacaggugac

SEQ ID NO: 88531 - RNA, 19 nt, Artificial Sequence
  Description of Artificial Sequence: Synthetic oligonucleotide
caccuugaaaaguaauaca

SEQ ID NO: 88532 - RNA, 19 nt, Artificial Sequence
  Description of Artificial Sequence: Synthetic oligonucleotide
cacacgaggacuuccauua

SEQ ID NO: 88533 - RNA, 19 nt, Artificial Sequence
  Description of Artificial Sequence: Synthetic oligonucleotide
  modified_base (4)..(4): a, c, u, g, unknown or other
ggunugauuuacaaacaca

SEQ ID NO: 88534 - RNA, 19 nt, Artificial Sequence
  Description of Artificial Sequence: Synthetic oligonucleotide
acggucuaucucuugggga

SEQ ID NO: 88535 - RNA, 19 nt, Artificial Sequence
  Description of Artificial Sequence: Synthetic oligonucleotide
aggaauuacccugguacca

SEQ ID NO: 88536 - RNA, 19 nt, Artificial Sequence
  Description of Artificial Sequence: Synthetic oligonucleotide
ugcggagagauugggguca

SEQ ID NO: 88537 - RNA, 19 nt, Artificial Sequence
  Description of Artificial Sequence: Synthetic oligonucleotide
gucacugcgcggcaaggcc

SEQ ID NO: 88538 - RNA, 19 nt, Artificial Sequence
  Description of Artificial Sequence: Synthetic oligonucleotide
caucagacuuauuuuguaa

SEQ ID NO: 88539 - RNA, 19 nt, Artificial Sequence
  Description of Artificial Sequence: Synthetic oligonucleotide
gcuaaacuauccugguaag

SEQ ID NO: 88540 - RNA, 19 nt, Artificial Sequence
  Description of Artificial Sequence: Synthetic oligonucleotide
cuggaucucgcagccaagg

SEQ ID NO: 88541 - RNA, 19 nt, Artificial Sequence
  Description of Artificial Sequence: Synthetic oligonucleotide
uccaugcuagaacggucca

SEQ ID NO: 88542 - RNA, 19 nt, Artificial Sequence
  Description of Artificial Sequence: Synthetic oligonucleotide
cuagguggcuggaucucgc

SEQ ID NO: 88543 - RNA, 19 nt, Artificial Sequence
  Description of Artificial Sequence: Synthetic oligonucleotide
aacgcuaguucaagaaaau

SEQ ID NO: 88544 - RNA, 19 nt, Artificial Sequence
  Description of Artificial Sequence: Synthetic oligonucleotide
uacaccggcuaagcgauga

SEQ ID NO: 88545 - RNA, 19 nt, Artificial Sequence
  Description of Artificial Sequence: Synthetic oligonucleotide
cuucacacuauugauuuaa

SEQ ID NO: 88546 - RNA, 19 nt, Artificial Sequence
  Description of Artificial Sequence: Synthetic oligonucleotide
aaccuacuauaaccagccu

SEQ ID NO: 88547 - RNA, 19 nt, Artificial Sequence
  Description of Artificial Sequence: Synthetic oligonucleotide
gaguuguacuccacuggag

SEQ ID NO: 88548 - RNA, 19 nt, Artificial Sequence
  Description of Artificial Sequence: Synthetic oligonucleotide
agcaaccgauucaccaacc

SEQ ID NO: 88549 - RNA, 19 nt, Artificial Sequence
  Description of Artificial Sequence: Synthetic oligonucleotide
ccgacuguucauuugguug

SEQ ID NO: 88550 - RNA, 19 nt, Artificial Sequence
  Description of Artificial Sequence: Synthetic oligonucleotide
acuacaccggcuaagcgau

SEQ ID NO: 88551 - RNA, 19 nt, Artificial Sequence
  Description of Artificial Sequence: Synthetic oligonucleotide
ccaaagcucgauuucauca

SEQ ID NO: 88552 - RNA, 19 nt, Artificial Sequence
  Description of Artificial Sequence: Synthetic oligonucleotide
gcaccuugaaaaguaauac

SEQ ID NO: 88553 - RNA, 19 nt, Artificial Sequence
  Description of Artificial Sequence: Synthetic oligonucleotide
cuucaauggagaccgucca

SEQ ID NO: 88554 - RNA, 19 nt, Artificial Sequence
  Description of Artificial Sequence: Synthetic oligonucleotide
caaacgcuaguucaagaaa

SEQ ID NO: 88555 - RNA, 19 nt, Artificial Sequence
  Description of Artificial Sequence: Synthetic oligonucleotide
uggccugucauagcggaac

SEQ ID NO: 88556 - RNA, 19 nt, Artificial Sequence
  Description of Artificial Sequence: Synthetic oligonucleotide
ggaguuguacuccacugga

SEQ ID NO: 88557 - RNA, 19 nt, Artificial Sequence
  Description of Artificial Sequence: Synthetic oligonucleotide
augcaaacgcuaguucaag

SEQ ID NO: 88558 - RNA, 19 nt, Artificial Sequence
  Description of Artificial Sequence: Synthetic oligonucleotide
gcaugucuagucuauucac

SEQ ID NO: 88559 - RNA, 19 nt, Artificial Sequence
  Description of Artificial Sequence: Synthetic oligonucleotide
aggucugaguaagauauua

SEQ ID NO: 88560 - RNA, 19 nt, Artificial Sequence
  Description of Artificial Sequence: Synthetic oligonucleotide
cguuguguuaggcugugcg

SEQ ID NO: 88561 - RNA, 19 nt, Artificial Sequence
  Description of Artificial Sequence: Synthetic oligonucleotide
agggccguuguguuaggcu

SEQ ID NO: 88562 - RNA, 19 nt, Artificial Sequence
  Description of Artificial Sequence: Synthetic oligonucleotide
ucccaaagcucgauuucau

SEQ ID NO: 88563 - RNA, 19 nt, Artificial Sequence
  Description of Artificial Sequence: Synthetic oligonucleotide
ccaccgacuguucauuugg

SEQ ID NO: 88564 - RNA, 19 nt, Artificial Sequence
  Description of Artificial Sequence: Synthetic oligonucleotide
ggggaguuugaacucaguc

SEQ ID NO: 88565 - RNA, 19 nt, Artificial Sequence
  Description of Artificial Sequence: Synthetic oligonucleotide
agcugagaagcuaaacuau

SEQ ID NO: 88566 - RNA, 19 nt, Artificial Sequence
  Description of Artificial Sequence: Synthetic oligonucleotide
  modified_base (6)..(6): a, c, u, g, unknown or other
agggunugauuuacaaaca

SEQ ID NO: 88567 - RNA, 19 nt, Artificial Sequence
  Description of Artificial Sequence: Synthetic oligonucleotide
gaguuucuacacacacgag

SEQ ID NO: 88568 - RNA, 19 nt, Artificial Sequence
  Description of Artificial Sequence: Synthetic oligonucleotide
ccuuguuaaugggacauag

SEQ ID NO: 88569 - RNA, 19 nt, Artificial Sequence
  Description of Artificial Sequence: Synthetic oligonucleotide
augggacauaguaauuugu

SEQ ID NO: 88570 - RNA, 19 nt, Artificial Sequence
  Description of Artificial Sequence: Synthetic oligonucleotide
ggacgaggaauaccgguug

SEQ ID NO: 88571 - RNA, 19 nt, Artificial Sequence
  Description of Artificial Sequence: Synthetic oligonucleotide
gugacggggauacuggugu

SEQ ID NO: 88572 - RNA, 19 nt, Artificial Sequence
  Description of Artificial Sequence: Synthetic oligonucleotide
aagaugcuacauugccaua

SEQ ID NO: 88573 - RNA, 19 nt, Artificial Sequence
  Description of Artificial Sequence: Synthetic oligonucleotide
aagcucgauuucaucacaa

SEQ ID NO: 88574 - RNA, 19 nt, Artificial Sequence
  Description of Artificial Sequence: Synthetic oligonucleotide
acguacuacaccggcuaag

SEQ ID NO: 88575 - RNA, 19 nt, Artificial Sequence
  Description of Artificial Sequence: Synthetic oligonucleotide
acacacgaggacuuccauu

SEQ ID NO: 88576 - RNA, 19 nt, Artificial Sequence
  Description of Artificial Sequence: Synthetic oligonucleotide
gggccguuguguuaggcug

SEQ ID NO: 88577 - RNA, 19 nt, Artificial Sequence
  Description of Artificial Sequence: Synthetic oligonucleotide
uggaucccaaagcucgauu

SEQ ID NO: 88578 - RNA, 19 nt, Artificial Sequence
  Description of Artificial Sequence: Synthetic oligonucleotide
uccgcucguagacacugua

SEQ ID NO: 88579 - RNA, 19 nt, Artificial Sequence
  Description of Artificial Sequence: Synthetic oligonucleotide
ggacucauggaagcagggg

SEQ ID NO: 88580 - RNA, 19 nt, Artificial Sequence
  Description of Artificial Sequence: Synthetic oligonucleotide
accggcuaagcgaugagau

SEQ ID NO: 88581 - RNA, 19 nt, Artificial Sequence
  Description of Artificial Sequence: Synthetic oligonucleotide
cucggaggugacagggaug

SEQ ID NO: 88582 - RNA, 19 nt, Artificial Sequence
  Description of Artificial Sequence: Synthetic oligonucleotide
gaccguccaacaggugacg

SEQ ID NO: 88583 - RNA, 19 nt, Artificial Sequence
  Description of Artificial Sequence: Synthetic oligonucleotide
accguccaacaggugacgg

SEQ ID NO: 88584 - RNA, 19 nt, Artificial Sequence
  Description of Artificial Sequence: Synthetic oligonucleotide
cucgcagccaaggguuugg

SEQ ID NO: 88585 - RNA, 19 nt, Artificial Sequence
  Description of Artificial Sequence: Synthetic oligonucleotide
auggccaccgacuguucau

SEQ ID NO: 88586 - RNA, 19 nt, Artificial Sequence
  Description of Artificial Sequence: Synthetic oligonucleotide
gaagggccguuguguuagg

SEQ ID NO: 88587 - RNA, 19 nt, Artificial Sequence
  Description of Artificial Sequence: Synthetic oligonucleotide
agcauagugucagggcacu

SEQ ID NO: 88588 - RNA, 19 nt, Artificial Sequence
  Description of Artificial Sequence: Synthetic oligonucleotide
cucgcauuguguugccuga

SEQ ID NO: 88589 - RNA, 19 nt, Artificial Sequence
  Description of Artificial Sequence: Synthetic oligonucleotide
gcugcgucuaggaauuacc

SEQ ID NO: 88590 - RNA, 19 nt, Artificial Sequence
  Description of Artificial Sequence: Synthetic oligonucleotide
accgacuguucauuugguu

SEQ ID NO: 88591 - RNA, 19 nt, Artificial Sequence
  Description of Artificial Sequence: Synthetic oligonucleotide
acaccggcuaagcgaugag

SEQ ID NO: 88592 - RNA, 19 nt, Artificial Sequence
  Description of Artificial Sequence: Synthetic oligonucleotide
ugccuacacuaaaugucuu

SEQ ID NO: 88593 - RNA, 19 nt, Artificial Sequence
  Description of Artificial Sequence: Synthetic oligonucleotide
gaccggggaguuugaacuc

SEQ ID NO: 88594 - RNA, 19 nt, Artificial Sequence
  Description of Artificial Sequence: Synthetic oligonucleotide
cuuguuaaugggacauagu

SEQ ID NO: 88595 - RNA, 19 nt, Artificial Sequence
  Description of Artificial Sequence: Synthetic oligonucleotide
aggugcggagagauugggg

SEQ ID NO: 88596 - RNA, 19 nt, Artificial Sequence
  Description of Artificial Sequence: Synthetic oligonucleotide
acggggauacugguguugu

SEQ ID NO: 88597 - RNA, 19 nt, Artificial Sequence
  Description of Artificial Sequence: Synthetic oligonucleotide
ucucgcagccaaggguuug

SEQ ID NO: 88598 - RNA, 19 nt, Artificial Sequence
  Description of Artificial Sequence: Synthetic oligonucleotide
cagcgugauuuaaaauaca

SEQ ID NO: 88599 - RNA, 19 nt, Artificial Sequence
  Description of Artificial Sequence: Synthetic oligonucleotide
gcuacauugccauauccau

SEQ ID NO: 88600 - RNA, 19 nt, Artificial Sequence
  Description of Artificial Sequence: Synthetic oligonucleotide
guggcucggaggugacagg

SEQ ID NO: 88601 - RNA, 19 nt, Artificial Sequence
  Description of Artificial Sequence: Synthetic oligonucleotide
aucaucgcagguacauaga

SEQ ID NO: 88602 - RNA, 19 nt, Artificial Sequence
  Description of Artificial Sequence: Synthetic oligonucleotide
gaucucgcagccaaggguu

SEQ ID NO: 88603 - RNA, 19 nt, Artificial Sequence
  Description of Artificial Sequence: Synthetic oligonucleotide
gugccuacacuaaaugucu

SEQ ID NO: 88604 - RNA, 19 nt, Artificial Sequence
  Description of Artificial Sequence: Synthetic oligonucleotide
caccucaaaccagcgggag

SEQ ID NO: 88605 - RNA, 19 nt, Artificial Sequence
  Description of Artificial Sequence: Synthetic oligonucleotide
caccaucuaagaugcuaca

SEQ ID NO: 88606 - RNA, 19 nt, Artificial Sequence
  Description of Artificial Sequence: Synthetic oligonucleotide
gacguacuacaccggcuaa

SEQ ID NO: 88607 - RNA, 19 nt, Artificial Sequence
  Description of Artificial Sequence: Synthetic oligonucleotide
aggacgaggaauaccgguu

SEQ ID NO: 88608 - RNA, 19 nt, Artificial Sequence
  Description of Artificial Sequence: Synthetic oligonucleotide
gccuacacuaaaugucuuc

SEQ ID NO: 88609 - RNA, 19 nt, Artificial Sequence
  Description of Artificial Sequence: Synthetic oligonucleotide
cuuaaggaagggccguugu

SEQ ID NO: 88610 - RNA, 19 nt, Artificial Sequence
  Description of Artificial Sequence: Synthetic oligonucleotide
uucuuaaggaagggccguu

SEQ ID NO: 88611 - RNA, 19 nt, Artificial Sequence
  Description of Artificial Sequence: Synthetic oligonucleotide
cugagacaccuugcggggc

SEQ ID NO: 88612 - RNA, 19 nt, Artificial Sequence
  Description of Artificial Sequence: Synthetic oligonucleotide
acgcuaguucaagaaaauu

SEQ ID NO: 88613 - RNA, 19 nt, Artificial Sequence
  Description of Artificial Sequence: Synthetic oligonucleotide
gcuaguucaagaaaauuuu

SEQ ID NO: 88614 - RNA, 19 nt, Artificial Sequence
  Description of Artificial Sequence: Synthetic oligonucleotide
accggggaguuugaacuca

SEQ ID NO: 88615 - RNA, 19 nt, Artificial Sequence
  Description of Artificial Sequence: Synthetic oligonucleotide
cauagugucagggcacuua

SEQ ID NO: 88616 - RNA, 19 nt, Artificial Sequence
  Description of Artificial Sequence: Synthetic oligonucleotide
uccuuguuaaugggacaua

SEQ ID NO: 88617 - RNA, 19 nt, Artificial Sequence
  Description of Artificial Sequence: Synthetic oligonucleotide
cauggccaccgacuguuca

SEQ ID NO: 88618 - RNA, 19 nt, Artificial Sequence
  Description of Artificial Sequence: Synthetic oligonucleotide
cguacuacaccggcuaagc

SEQ ID NO: 88619 - RNA, 19 nt, Artificial Sequence
  Description of Artificial Sequence: Synthetic oligonucleotide
aggaagggccguuguguua

SEQ ID NO: 88620 - RNA, 19 nt, Artificial Sequence
  Description of Artificial Sequence: Synthetic oligonucleotide
uggcacugcacggucuauc

SEQ ID NO: 88621 - RNA, 19 nt, Artificial Sequence
  Description of Artificial Sequence: Synthetic oligonucleotide
gcauagaucugcaaauacu

SEQ ID NO: 88622 - RNA, 19 nt, Artificial Sequence
  Description of Artificial Sequence: Synthetic oligonucleotide
ucgcauuguguugccugac

SEQ ID NO: 88623 - RNA, 19 nt, Artificial Sequence
  Description of Artificial Sequence: Synthetic oligonucleotide
guaagauauuaaagugccu

SEQ ID NO: 88624 - RNA, 19 nt, Artificial Sequence
  Description of Artificial Sequence: Synthetic oligonucleotide
aaggucugaguaagauauu

SEQ ID NO: 88625 - RNA, 19 nt, Artificial Sequence
  Description of Artificial Sequence: Synthetic oligonucleotide
gaauaccgguugacagcug

SEQ ID NO: 88626 - RNA, 19 nt, Artificial Sequence
  Description of Artificial Sequence: Synthetic oligonucleotide
ccuguauugauucccaaau

SEQ ID NO: 88627 - RNA, 19 nt, Artificial Sequence
  Description of Artificial Sequence: Synthetic oligonucleotide
ggaucucgcagccaagggu

SEQ ID NO: 88628 - RNA, 19 nt, Artificial Sequence
  Description of Artificial Sequence: Synthetic oligonucleotide
ggaggguucuuuugcuuaa

SEQ ID NO: 88629 - RNA, 19 nt, Artificial Sequence
  Description of Artificial Sequence: Synthetic oligonucleotide
gccaccgacuguucauuug

SEQ ID NO: 88630 - RNA, 19 nt, Artificial Sequence
  Description of Artificial Sequence: Synthetic oligonucleotide
agaagcucuggcacucgau

SEQ ID NO: 88631 - RNA, 19 nt, Artificial Sequence
  Description of Artificial Sequence: Synthetic oligonucleotide
gcugugcgcagacacgauc

SEQ ID NO: 88632 - RNA, 19 nt, Artificial Sequence
  Description of Artificial Sequence: Synthetic oligonucleotide
cuacacacacgaggacuuc

SEQ ID NO: 88633 - RNA, 19 nt, Artificial Sequence
  Description of Artificial Sequence: Synthetic oligonucleotide
cuccgacccgcugaagcug

SEQ ID NO: 88634 - RNA, 19 nt, Artificial Sequence
  Description of Artificial Sequence: Synthetic oligonucleotide
ugacggggauacugguguu

SEQ ID NO: 88635 - RNA, 19 nt, Artificial Sequence
  Description of Artificial Sequence: Synthetic oligonucleotide
guccuguauugauucccaa

SEQ ID NO: 88636 - RNA, 19 nt, Artificial Sequence
  Description of Artificial Sequence: Synthetic oligonucleotide
ccauuuaauccuugaacgu

SEQ ID NO: 88637 - RNA, 19 nt, Artificial Sequence
  Description of Artificial Sequence: Synthetic oligonucleotide
gcguuuuagaucaguaacu

SEQ ID NO: 88638 - RNA, 19 nt, Artificial Sequence
  Description of Artificial Sequence: Synthetic oligonucleotide
ccgcucguagacacuguag

SEQ ID NO: 88639 - RNA, 19 nt, Artificial Sequence
  Description of Artificial Sequence: Synthetic oligonucleotide
cuacaccggcuaagcgaug

SEQ ID NO: 88640 - RNA, 19 nt, Artificial Sequence
  Description of Artificial Sequence: Synthetic oligonucleotide
guaacuuaaugggcugcgu

SEQ ID NO: 88641 - RNA, 19 nt, Artificial Sequence
  Description of Artificial Sequence: Synthetic oligonucleotide
cuagucuauucaccaucua

SEQ ID NO: 88642 - RNA, 19 nt, Artificial Sequence
  Description of Artificial Sequence: Synthetic oligonucleotide
gugcgcagacacgaucaac

SEQ ID NO: 88643 - RNA, 19 nt, Artificial Sequence
  Description of Artificial Sequence: Synthetic oligonucleotide
ccgacauguucuuggcuuc

SEQ ID NO: 88644 - RNA, 19 nt, Artificial Sequence
  Description of Artificial Sequence: Synthetic oligonucleotide
aucucgcauuguguugccu

SEQ ID NO: 88645 - RNA, 19 nt, Artificial Sequence
  Description of Artificial Sequence: Synthetic oligonucleotide
agacucagccauacuucau

SEQ ID NO: 88646 - RNA, 19 nt, Artificial Sequence
  Description of Artificial Sequence: Synthetic oligonucleotide
uggccaccgacuguucauu

SEQ ID NO: 88647 - RNA, 19 nt, Artificial Sequence
  Description of Artificial Sequence: Synthetic oligonucleotide
guuaggcugugcgcagaca

SEQ ID NO: 88648 - RNA, 19 nt, Artificial Sequence
  Description of Artificial Sequence: Synthetic oligonucleotide
gcgaugagaucccacugcu

SEQ ID NO: 88649 - RNA, 19 nt, Artificial Sequence
  Description of Artificial Sequence: Synthetic oligonucleotide
caccggcuaagcgaugaga

SEQ ID NO: 88650 - RNA, 19 nt, Artificial Sequence
  Description of Artificial Sequence: Synthetic oligonucleotide
ccuacacuaaaugucuucu

SEQ ID NO: 88651 - RNA, 19 nt, Artificial Sequence
  Description of Artificial Sequence: Synthetic oligonucleotide
guacuccacuggagauggg

SEQ ID NO: 88652 - RNA, 19 nt, Artificial Sequence
  Description of Artificial Sequence: Synthetic oligonucleotide
ggcugcgucuaggaauuac

SEQ ID NO: 88653 - RNA, 19 nt, Artificial Sequence
  Description of Artificial Sequence: Synthetic oligonucleotide
cgcuaguucaagaaaauuu

SEQ ID NO: 88654 - RNA, 19 nt, Artificial Sequence
  Description of Artificial Sequence: Synthetic oligonucleotide
ggagggccaaaccuuaauu

SEQ ID NO: 88655 - RNA, 19 nt, Artificial Sequence
  Description of Artificial Sequence: Synthetic oligonucleotide
gguuuccgacguacuacac

SEQ ID NO: 88656 - RNA, 19 nt, Artificial Sequence
  Description of Artificial Sequence: Synthetic oligonucleotide
ccggcuaagcgaugagauc

SEQ ID NO: 88657 - RNA, 19 nt, Artificial Sequence
  Description of Artificial Sequence: Synthetic oligonucleotide
cagcgaggacgaggaauac

SEQ ID NO: 88658 - RNA, 19 nt, Artificial Sequence
  Description of Artificial Sequence: Synthetic oligonucleotide
ccggggaguuugaacucag

SEQ ID NO: 88659 - RNA, 19 nt, Artificial Sequence
  Description of Artificial Sequence: Synthetic oligonucleotide
ggaauuacccugguaccau

SEQ ID NO: 88660 - RNA, 19 nt, Artificial Sequence
  Description of Artificial Sequence: Synthetic oligonucleotide
guagaugggcugggcugca

SEQ ID NO: 88661 - RNA, 19 nt, Artificial Sequence
  Description of Artificial Sequence: Synthetic oligonucleotide
cuuagagcugagacaccuu

SEQ ID NO: 88662 - RNA, 19 nt, Artificial Sequence
  Description of Artificial Sequence: Synthetic oligonucleotide
ccaucuaagaugcuacauu

SEQ ID NO: 88663 - RNA, 19 nt, Artificial Sequence
  Description of Artificial Sequence: Synthetic oligonucleotide
ccaugcuagaacgguccac

SEQ ID NO: 88664 - RNA, 19 nt, Artificial Sequence
  Description of Artificial Sequence: Synthetic oligonucleotide
gccugaauacaagcaggga

SEQ ID NO: 88665 - RNA, 19 nt, Artificial Sequence
  Description of Artificial Sequence: Synthetic oligonucleotide
cuugcggggcaggggucug

SEQ ID NO: 88666 - RNA, 19 nt, Artificial Sequence
  Description of Artificial Sequence: Synthetic oligonucleotide
gcccgacaagaccggggag

SEQ ID NO: 88667 - RNA, 19 nt, Artificial Sequence
  Description of Artificial Sequence: Synthetic oligonucleotide
gcuaagcgaugagauccca

SEQ ID NO: 88668 - RNA, 19 nt, Artificial Sequence
  Description of Artificial Sequence: Synthetic oligonucleotide
ccaccucaaaccagcggga

SEQ ID NO: 88669 - RNA, 19 nt, Artificial Sequence
  Description of Artificial Sequence: Synthetic oligonucleotide
caccgacuguucauuuggu

SEQ ID NO: 88670 - RNA, 19 nt, Artificial Sequence
  Description of Artificial Sequence: Synthetic oligonucleotide
gggagaugccagguaaacu

SEQ ID NO: 88671 - RNA, 19 nt, Artificial Sequence
  Description of Artificial Sequence: Synthetic oligonucleotide
caagaccggggaguuugaa

SEQ ID NO: 88672 - RNA, 19 nt, Artificial Sequence
  Description of Artificial Sequence: Synthetic oligonucleotide
aucucgcagccaaggguuu

SEQ ID NO: 88673 - RNA, 19 nt, Artificial Sequence
  Description of Artificial Sequence: Synthetic oligonucleotide
ccucaaaccagcgggagau

SEQ ID NO: 88674 - RNA, 19 nt, Artificial Sequence
  Description of Artificial Sequence: Synthetic oligonucleotide
ggacagggcgccucagagu

SEQ ID NO: 88675 - RNA, 19 nt, Artificial Sequence
  Description of Artificial Sequence: Synthetic oligonucleotide
ggagaccguccaacaggug

SEQ ID NO: 88676 - RNA, 19 nt, Artificial Sequence
  Description of Artificial Sequence: Synthetic oligonucleotide
guccuucgggucccauucu

SEQ ID NO: 88677 - RNA, 19 nt, Artificial Sequence
  Description of Artificial Sequence: Synthetic oligonucleotide
agggcgccucagaguccgc

SEQ ID NO: 88678 - RNA, 19 nt, Artificial Sequence
  Description of Artificial Sequence: Synthetic oligonucleotide
cgacguacuacaccggcua

SEQ ID NO: 88679 - RNA, 19 nt, Artificial Sequence
  Description of Artificial Sequence: Synthetic oligonucleotide
gggagggccaaaccuuaau

SEQ ID NO: 88680 - RNA, 19 nt, Artificial Sequence
  Description of Artificial Sequence: Synthetic oligonucleotide
ccuucacacuauugauuua

SEQ ID NO: 88681 - RNA, 19 nt, Artificial Sequence
  Description of Artificial Sequence: Synthetic oligonucleotide
caccauccgacauguucuu

SEQ ID NO: 88682 - RNA, 19 nt, Artificial Sequence
  Description of Artificial Sequence: Synthetic oligonucleotide
ccuccgacccgcugaagcu

SEQ ID NO: 88683 - RNA, 19 nt, Artificial Sequence
  Description of Artificial Sequence: Synthetic oligonucleotide
acugcgcggcaaggcccca

SEQ ID NO: 88684 - RNA, 19 nt, Artificial Sequence
  Description of Artificial Sequence: Synthetic oligonucleotide
gcggagagauuggggucac

SEQ ID NO: 88685 - RNA, 19 nt, Artificial Sequence
  Description of Artificial Sequence: Synthetic oligonucleotide
ccguuguguuaggcugugc

SEQ ID NO: 88686 - RNA, 19 nt, Artificial Sequence
  Description of Artificial Sequence: Synthetic oligonucleotide
ccgacguacuacaccggcu

SEQ ID NO: 88687 - RNA, 19 nt, Artificial Sequence
  Description of Artificial Sequence: Synthetic oligonucleotide
gcgcagacacgaucaacuu

SEQ ID NO: 88688 - RNA, 19 nt, Artificial Sequence
  Description of Artificial Sequence: Synthetic oligonucleotide
ggccguuguguuaggcugu

SEQ ID NO: 88689 - RNA, 19 nt, Artificial Sequence
  Description of Artificial Sequence: Synthetic oligonucleotide
ggggagggccaaaccuuaa

SEQ ID NO: 88690 - RNA, 19 nt, Artificial Sequence
  Description of Artificial Sequence: Synthetic oligonucleotide
ggccaccgacuguucauuu

SEQ ID NO: 88691 - RNA, 19 nt, Artificial Sequence
  Description of Artificial Sequence: Synthetic oligonucleotide
ccacuggagaugggguaaa

SEQ ID NO: 88692 - RNA, 19 nt, Artificial Sequence
  Description of Artificial Sequence: Synthetic oligonucleotide
gccucagaguccgcucgua

SEQ ID NO: 88693 - RNA, 19 nt, Artificial Sequence
  Description of Artificial Sequence: Synthetic oligonucleotide
ccgacaagaccggggaguu

SEQ ID NO: 88694 - RNA, 19 nt, Artificial Sequence
  Description of Artificial Sequence: Synthetic oligonucleotide
gggcugcgucuaggaauua

SEQ ID NO: 88695 - RNA, 19 nt, Artificial Sequence
  Description of Artificial Sequence: Synthetic oligonucleotide
cugcgcggcaaggccccau

SEQ ID NO: 88696 - RNA, 19 nt, Artificial Sequence
  Description of Artificial Sequence: Synthetic oligonucleotide
  modified_base (1)..(1): a, c, u, g, unknown or other
nugauuuacaaacacagag

SEQ ID NO: 88697 - RNA, 19 nt, Artificial Sequence
  Description of Artificial Sequence: Synthetic oligonucleotide
ugugauaacagucuguagg

SEQ ID NO: 88698 - RNA, 19 nt, Artificial Sequence
  Description of Artificial Sequence: Synthetic oligonucleotide
uauauauacacacacacac

SEQ ID NO: 88699 - RNA, 19 nt, Artificial Sequence
  Description of Artificial Sequence: Synthetic oligonucleotide
uuuguaauacccaaugagg

SEQ ID NO: 88700 - RNA, 19 nt, Artificial Sequence
  Description of Artificial Sequence: Synthetic oligonucleotide
aaggcauuaauuucuacac

SEQ ID NO: 88701 - RNA, 19 nt, Artificial Sequence
  Description of Artificial Sequence: Synthetic oligonucleotide
uuuuguaauacccaaugag

SEQ ID NO: 88702 - RNA, 19 nt, Artificial Sequence
  Description of Artificial Sequence: Synthetic oligonucleotide
agcauauacacacacacac

SEQ ID NO: 88703 - RNA, 19 nt, Artificial Sequence
  Description of Artificial Sequence: Synthetic oligonucleotide
uauauacacacacacacgc

SEQ ID NO: 88704 - RNA, 19 nt, Artificial Sequence
  Description of Artificial Sequence: Synthetic oligonucleotide
uuaaguaaguaccuaaugu

SEQ ID NO: 88705 - RNA, 19 nt, Artificial Sequence
  Description of Artificial Sequence: Synthetic oligonucleotide
uacacauacacacacacac

SEQ ID NO: 88706 - RNA, 19 nt, Artificial Sequence
  Description of Artificial Sequence: Synthetic oligonucleotide
aagaugucaaguuuaucuc

SEQ ID NO: 88707 - RNA, 19 nt, Artificial Sequence
  Description of Artificial Sequence: Synthetic oligonucleotide
uugcuuaccaaucucacag

SEQ ID NO: 88708 - RNA, 19 nt, Artificial Sequence
  Description of Artificial Sequence: Synthetic oligonucleotide
aguaccuaaugucaaacac

SEQ ID NO: 88709 - RNA, 19 nt, Artificial Sequence
  Description of Artificial Sequence: Synthetic oligonucleotide
aagccuuuuaugcaauuac

SEQ ID NO: 88710 - RNA, 19 nt, Artificial Sequence
  Description of Artificial Sequence: Synthetic oligonucleotide
acgugaguaucuuauaccc

SEQ ID NO: 88711 - RNA, 19 nt, Artificial Sequence
  Description of Artificial Sequence: Synthetic oligonucleotide
uauacacacacacacacac

SEQ ID NO: 88712 - RNA, 19 nt, Artificial Sequence
  Description of Artificial Sequence: Synthetic oligonucleotide
uaaagugcuguaaaggccc

SEQ ID NO: 88713 - RNA, 19 nt, Artificial Sequence
  Description of Artificial Sequence: Synthetic oligonucleotide
cuuaccuaacauuugauug

SEQ ID NO: 88714 - RNA, 19 nt, Artificial Sequence
  Description of Artificial Sequence: Synthetic oligonucleotide
aguaaccuuggguaaagcc

SEQ ID NO: 88715 - RNA, 19 nt, Artificial Sequence
  Description of Artificial Sequence: Synthetic oligonucleotide
uuuaucucgguuaaugugu

SEQ ID NO: 88716 - RNA, 19 nt, Artificial Sequence
  Description of Artificial Sequence: Synthetic oligonucleotide
uuuacuaauguauugcuua

SEQ ID NO: 88717 - RNA, 19 nt, Artificial Sequence
  Description of Artificial Sequence: Synthetic oligonucleotide
uuguaauacccaaugagga

SEQ ID NO: 88718 - RNA, 19 nt, Artificial Sequence
  Description of Artificial Sequence: Synthetic oligonucleotide
gauagaaccgacgggaugg

SEQ ID NO: 88719 - RNA, 19 nt, Artificial Sequence
  Description of Artificial Sequence: Synthetic oligonucleotide
aggguaucgauuccgaugg

SEQ ID NO: 88720 - RNA, 19 nt, Artificial Sequence
  Description of Artificial Sequence: Synthetic oligonucleotide
ucagcauuucgaaagaccu

SEQ ID NO: 88721 - RNA, 19 nt, Artificial Sequence
  Description of Artificial Sequence: Synthetic oligonucleotide
uaaguaaguaccuaauguc

SEQ ID NO: 88722 - RNA, 19 nt, Artificial Sequence
  Description of Artificial Sequence: Synthetic oligonucleotide
caucaauuugagcugaugc

SEQ ID NO: 88723 - RNA, 19 nt, Artificial Sequence
  Description of Artificial Sequence: Synthetic oligonucleotide
aaacaucccucccaauugg

SEQ ID NO: 88724 - RNA, 19 nt, Artificial Sequence
  Description of Artificial Sequence: Synthetic oligonucleotide
uauacacacacacacgcac

SEQ ID NO: 88725 - RNA, 19 nt, Artificial Sequence
  Description of Artificial Sequence: Synthetic oligonucleotide
ucuguaucuauuugcagug

SEQ ID NO: 88726 - RNA, 19 nt, Artificial Sequence
  Description of Artificial Sequence: Synthetic oligonucleotide
cauauacacacacacacac

SEQ ID NO: 88727 - RNA, 19 nt, Artificial Sequence
  Description of Artificial Sequence: Synthetic oligonucleotide
aucaucuauuuagauaugc

SEQ ID NO: 88728 - RNA, 19 nt, Artificial Sequence
  Description of Artificial Sequence: Synthetic oligonucleotide
uaccuaaugucaaacacgu

SEQ ID NO: 88729 - RNA, 19 nt, Artificial Sequence
  Description of Artificial Sequence: Synthetic oligonucleotide
aaugaggugagaaaucucu

SEQ ID NO: 88730 - RNA, 19 nt, Artificial Sequence
  Description of Artificial Sequence: Synthetic oligonucleotide
acaucuuguuccuuuacuc

SEQ ID NO: 88731 - RNA, 19 nt, Artificial Sequence
  Description of Artificial Sequence: Synthetic oligonucleotide
acuaauguauugcuuacca

SEQ ID NO: 88732 - RNA, 19 nt, Artificial Sequence
  Description of Artificial Sequence: Synthetic oligonucleotide
uacacacacacacacacac

SEQ ID NO: 88733 - RNA, 19 nt, Artificial Sequence
  Description of Artificial Sequence: Synthetic oligonucleotide
ucucggaguaagcagauga

SEQ ID NO: 88734 - RNA, 19 nt, Artificial Sequence
  Description of Artificial Sequence: Synthetic oligonucleotide
uacacacacacacauauau

SEQ ID NO: 88735 - RNA, 19 nt, Artificial Sequence
  Description of Artificial Sequence: Synthetic oligonucleotide
ucucauaauagucagcguu

SEQ ID NO: 88736 - RNA, 19 nt, Artificial Sequence
  Description of Artificial Sequence: Synthetic oligonucleotide
aagggaaugaucucauaga

SEQ ID NO: 88737 - RNA, 19 nt, Artificial Sequence
  Description of Artificial Sequence: Synthetic oligonucleotide
uuuacuuguaaagaacaca

SEQ ID NO: 88738 - RNA, 19 nt, Artificial Sequence
  Description of Artificial Sequence: Synthetic oligonucleotide
uucuaucuaaaugagccag

SEQ ID NO: 88739 - RNA, 19 nt, Artificial Sequence
  Description of Artificial Sequence: Synthetic oligonucleotide
gugaguaucuuauacccag

SEQ ID NO: 88740 - RNA, 19 nt, Artificial Sequence
  Description of Artificial Sequence: Synthetic oligonucleotide
uuaccuaacauuugauugu

SEQ ID NO: 88741 - RNA, 19 nt, Artificial Sequence
  Description of Artificial Sequence: Synthetic oligonucleotide
ucuguucuuacauuuuaca

SEQ ID NO: 88742 - RNA, 19 nt, Artificial Sequence
  Description of Artificial Sequence: Synthetic oligonucleotide
cuaaugucaaacacgugac

SEQ ID NO: 88743 - RNA, 19 nt, Artificial Sequence
  Description of Artificial Sequence: Synthetic oligonucleotide
aggcauuaauuucuacacc

SEQ ID NO: 88744 - RNA, 19 nt, Artificial Sequence
  Description of Artificial Sequence: Synthetic oligonucleotide
acaugcgaucuccagcucc

SEQ ID NO: 88745 - RNA, 19 nt, Artificial Sequence
  Description of Artificial Sequence: Synthetic oligonucleotide
aaguaaguaccuaauguca

SEQ ID NO: 88746 - RNA, 19 nt, Artificial Sequence
  Description of Artificial Sequence: Synthetic oligonucleotide
acagcguagugucuuuugc

SEQ ID NO: 88747 - RNA, 19 nt, Artificial Sequence
  Description of Artificial Sequence: Synthetic oligonucleotide
ucaucuauuuagauaugcu

SEQ ID NO: 88748 - RNA, 19 nt, Artificial Sequence
  Description of Artificial Sequence: Synthetic oligonucleotide
cacacacacacacauauac

SEQ ID NO: 88749 - RNA, 19 nt, Artificial Sequence
  Description of Artificial Sequence: Synthetic oligonucleotide
ucauugguccagcauuggg

SEQ ID NO: 88750 - RNA, 19 nt, Artificial Sequence
  Description of Artificial Sequence: Synthetic oligonucleotide
gguauaaacaaagugcgcc

SEQ ID NO: 88751 - RNA, 19 nt, Artificial Sequence
  Description of Artificial Sequence: Synthetic oligonucleotide
cacacacacacacacacgc

SEQ ID NO: 88752 - RNA, 19 nt, Artificial Sequence
  Description of Artificial Sequence: Synthetic oligonucleotide
caaucaagggcaaagcguc

SEQ ID NO: 88753 - RNA, 19 nt, Artificial Sequence
  Description of Artificial Sequence: Synthetic oligonucleotide
gagcugaugccucaugccg

SEQ ID NO: 88754 - RNA, 19 nt, Artificial Sequence
  Description of Artificial Sequence: Synthetic oligonucleotide
uugugauagaaccgacggg

SEQ ID NO: 88755 - RNA, 19 nt, Artificial Sequence
  Description of Artificial Sequence: Synthetic oligonucleotide
aaugaggauguguuuacua

SEQ ID NO: 88756 - RNA, 19 nt, Artificial Sequence
  Description of Artificial Sequence: Synthetic oligonucleotide
guaccuaaugucaaacacg

SEQ ID NO: 88757 - RNA, 19 nt, Artificial Sequence
  Description of Artificial Sequence: Synthetic oligonucleotide
cauugugauagaaccgacg

SEQ ID NO: 88758 - RNA, 19 nt, Artificial Sequence
  Description of Artificial Sequence: Synthetic oligonucleotide
agcgucgucaucauaaggg

SEQ ID NO: 88759 - RNA, 19 nt, Artificial Sequence
  Description of Artificial Sequence: Synthetic oligonucleotide
aaguaccuaaugucaaaca

SEQ ID NO: 88760 - RNA, 19 nt, Artificial Sequence
  Description of Artificial Sequence: Synthetic oligonucleotide
ucccaauuggggauuuacg

SEQ ID NO: 88761 - RNA, 19 nt, Artificial Sequence
  Description of Artificial Sequence: Synthetic oligonucleotide
ugaguaucuuauacccagg

SEQ ID NO: 88762 - RNA, 19 nt, Artificial Sequence
  Description of Artificial Sequence: Synthetic oligonucleotide
aguuaggacaucauugguc

SEQ ID NO: 88763 - RNA, 19 nt, Artificial Sequence
  Description of Artificial Sequence: Synthetic oligonucleotide
uaauacccaaugaggaucu

SEQ ID NO: 88764 - RNA, 19 nt, Artificial Sequence
  Description of Artificial Sequence: Synthetic oligonucleotide
acaaucacccugacgaagc

SEQ ID NO: 88765 - RNA, 19 nt, Artificial Sequence
  Description of Artificial Sequence: Synthetic oligonucleotide
aauaggccuuucguaagcg

SEQ ID NO: 88766 - RNA, 19 nt, Artificial Sequence
  Description of Artificial Sequence: Synthetic oligonucleotide
acacacacacacaauacac

SEQ ID NO: 88767 - RNA, 19 nt, Artificial Sequence
  Description of Artificial Sequence: Synthetic oligonucleotide
gaaccgacgggauggagag

SEQ ID NO: 88768 - RNA, 19 nt, Artificial Sequence
  Description of Artificial Sequence: Synthetic oligonucleotide
uaauaggccuuucguaagc

SEQ ID NO: 88769 - RNA, 19 nt, Artificial Sequence
  Description of Artificial Sequence: Synthetic oligonucleotide
ugcauauguauguuugaga

SEQ ID NO: 88770 - RNA, 19 nt, Artificial Sequence
  Description of Artificial Sequence: Synthetic oligonucleotide
uauugcuuaccaaucucac

SEQ ID NO: 88771 - RNA, 19 nt, Artificial Sequence
  Description of Artificial Sequence: Synthetic oligonucleotide
augucaaacacgugaccgg

SEQ ID NO: 88772 - RNA, 19 nt, Artificial Sequence
  Description of Artificial Sequence: Synthetic oligonucleotide
agggauuuucucaaggagg

SEQ ID NO: 88773 - RNA, 19 nt, Artificial Sequence
  Description of Artificial Sequence: Synthetic oligonucleotide
gaagaucugugcuaggcga

SEQ ID NO: 88774 - RNA, 19 nt, Artificial Sequence
  Description of Artificial Sequence: Synthetic oligonucleotide
uuucuaucuaaaugagcca

SEQ ID NO: 88775 - RNA, 19 nt, Artificial Sequence
  Description of Artificial Sequence: Synthetic oligonucleotide
uacauaacuuggcacauuu

SEQ ID NO: 88776 - RNA, 19 nt, Artificial Sequence
  Description of Artificial Sequence: Synthetic oligonucleotide
uuuccgcaaucacacagcc

SEQ ID NO: 88777 - RNA, 19 nt, Artificial Sequence
  Description of Artificial Sequence: Synthetic oligonucleotide
agccgauaaucacagaugu

SEQ ID NO: 88778 - RNA, 19 nt, Artificial Sequence
  Description of Artificial Sequence: Synthetic oligonucleotide
auauauacacacacacacg

SEQ ID NO: 88779 - RNA, 19 nt, Artificial Sequence
  Description of Artificial Sequence: Synthetic oligonucleotide
cacacacacacacacacac

SEQ ID NO: 88780 - RNA, 19 nt, Artificial Sequence
  Description of Artificial Sequence: Synthetic oligonucleotide
ucgauucuaaagaugucaa

SEQ ID NO: 88781 - RNA, 19 nt, Artificial Sequence
  Description of Artificial Sequence: Synthetic oligonucleotide
uaggccuuucguaagcggc

SEQ ID NO: 88782 - RNA, 19 nt, Artificial Sequence
  Description of Artificial Sequence: Synthetic oligonucleotide
ucuaucuaaaugagccaga

SEQ ID NO: 88783 - RNA, 19 nt, Artificial Sequence
  Description of Artificial Sequence: Synthetic oligonucleotide
uuaucucgguuaaugugug

SEQ ID NO: 88784 - RNA, 19 nt, Artificial Sequence
  Description of Artificial Sequence: Synthetic oligonucleotide
uggacaugcgaucuccagc

SEQ ID NO: 88785 - RNA, 19 nt, Artificial Sequence
  Description of Artificial Sequence: Synthetic oligonucleotide
cacaguaugguuugugaac

SEQ ID NO: 88786 - RNA, 19 nt, Artificial Sequence
  Description of Artificial Sequence: Synthetic oligonucleotide
cuuaguccuaccucccucc

SEQ ID NO: 88787 - RNA, 19 nt, Artificial Sequence
  Description of Artificial Sequence: Synthetic oligonucleotide
guaauaggccuuucguaag

SEQ ID NO: 88788 - RNA, 19 nt, Artificial Sequence
  Description of Artificial Sequence: Synthetic oligonucleotide
ugccguuucucccacaauc

SEQ ID NO: 88789 - RNA, 19 nt, Artificial Sequence
  Description of Artificial Sequence: Synthetic oligonucleotide
cagacaugcagacuaacuc

SEQ ID NO: 88790 - RNA, 19 nt, Artificial Sequence
  Description of Artificial Sequence: Synthetic oligonucleotide
ugcccuuaguccuaccucc

SEQ ID NO: 88791 - RNA, 19 nt, Artificial Sequence
  Description of Artificial Sequence: Synthetic oligonucleotide
uuuggugcagacaggguau

SEQ ID NO: 88792 - RNA, 19 nt, Artificial Sequence
  Description of Artificial Sequence: Synthetic oligonucleotide
agcaugucagcgucaaaag

SEQ ID NO: 88793 - RNA, 19 nt, Artificial Sequence
  Description of Artificial Sequence: Synthetic oligonucleotide
ugcacuuaccuaacauuug

SEQ ID NO: 88794 - RNA, 19 nt, Artificial Sequence
  Description of Artificial Sequence: Synthetic oligonucleotide
acacacacacaauacacau

SEQ ID NO: 88795 - RNA, 19 nt, Artificial Sequence
  Description of Artificial Sequence: Synthetic oligonucleotide
ggaaagaguaaugaggaug

SEQ ID NO: 88796 - RNA, 19 nt, Artificial Sequence
  Description of Artificial Sequence: Synthetic oligonucleotide
gucaucucggaguaagcag

SEQ ID NO: 88797 - RNA, 19 nt, Artificial Sequence
  Description of Artificial Sequence: Synthetic oligonucleotide
auuccuagugugguccucc

SEQ ID NO: 88798 - RNA, 19 nt, Artificial Sequence
  Description of Artificial Sequence: Synthetic oligonucleotide
guacaaugcuucucuacag

SEQ ID NO: 88799 - RNA, 19 nt, Artificial Sequence
  Description of Artificial Sequence: Synthetic oligonucleotide
gugauaacagucuguagga

SEQ ID NO: 88800 - RNA, 19 nt, Artificial Sequence
  Description of Artificial Sequence: Synthetic oligonucleotide
uuguaauaggccuuucgua

SEQ ID NO: 88801 - RNA, 19 nt, Artificial Sequence
  Description of Artificial Sequence: Synthetic oligonucleotide
cauuuaaugcuagacuuuc

SEQ ID NO: 88802 - RNA, 19 nt, Artificial Sequence
  Description of Artificial Sequence: Synthetic oligonucleotide
uacacacacacacgcacac

SEQ ID NO: 88803 - RNA, 19 nt, Artificial Sequence
  Description of Artificial Sequence: Synthetic oligonucleotide
ucgugguaauguacaaugc

SEQ ID NO: 88804 - RNA, 19 nt, Artificial Sequence
  Description of Artificial Sequence: Synthetic oligonucleotide
ugaccaaaggcaaaccguu

SEQ ID NO: 88805 - RNA, 19 nt, Artificial Sequence
  Description of Artificial Sequence: Synthetic oligonucleotide
gauaacagucuguaggacu

SEQ ID NO: 88806 - RNA, 19 nt, Artificial Sequence
  Description of Artificial Sequence: Synthetic oligonucleotide
acauugaauuuuaagcucu

SEQ ID NO: 88807 - RNA, 19 nt, Artificial Sequence
  Description of Artificial Sequence: Synthetic oligonucleotide
acaagccuacuuccucucc

SEQ ID NO: 88808 - RNA, 19 nt, Artificial Sequence
  Description of Artificial Sequence: Synthetic oligonucleotide
uuaugcaauuacauccaau

SEQ ID NO: 88809 - RNA, 19 nt, Artificial Sequence
  Description of Artificial Sequence: Synthetic oligonucleotide
uuuaugcaauuacauccaa

SEQ ID NO: 88810 - RNA, 19 nt, Artificial Sequence
  Description of Artificial Sequence: Synthetic oligonucleotide
aagaaaccacuccgauggg

SEQ ID NO: 88811 - RNA, 19 nt, Artificial Sequence
  Description of Artificial Sequence: Synthetic oligonucleotide
agaguggcacccgaaauag

SEQ ID NO: 88812 - RNA, 19 nt, Artificial Sequence
  Description of Artificial Sequence: Synthetic oligonucleotide
cacacacgcacacacacac

SEQ ID NO: 88813 - RNA, 19 nt, Artificial Sequence
  Description of Artificial Sequence: Synthetic oligonucleotide
ucgaaagaccuugagcaug

SEQ ID NO: 88814 - RNA, 19 nt, Artificial Sequence
  Description of Artificial Sequence: Synthetic oligonucleotide
agguuaaguaaguaccuaa

SEQ ID NO: 88815 - RNA, 19 nt, Artificial Sequence
  Description of Artificial Sequence: Synthetic oligonucleotide
guaaugaggauguguuuac

SEQ ID NO: 88816 - RNA, 19 nt, Artificial Sequence
  Description of Artificial Sequence: Synthetic oligonucleotide
cacacacacacgcacacac

SEQ ID NO: 88817 - RNA, 19 nt, Artificial Sequence
  Description of Artificial Sequence: Synthetic oligonucleotide
cuugcccuagaucuuuuag

SEQ ID NO: 88818 - RNA, 19 nt, Artificial Sequence
  Description of Artificial Sequence: Synthetic oligonucleotide
aggaaauauauuagcagca

SEQ ID NO: 88819 - RNA, 19 nt, Artificial Sequence
  Description of Artificial Sequence: Synthetic oligonucleotide
ugcuagacuuucaaggauu

SEQ ID NO: 88820 - RNA, 19 nt, Artificial Sequence
  Description of Artificial Sequence: Synthetic oligonucleotide
cacacgcacacacacacac

SEQ ID NO: 88821 - RNA, 19 nt, Artificial Sequence
  Description of Artificial Sequence: Synthetic oligonucleotide
acacacacacacacaauac

SEQ ID NO: 88822 - RNA, 19 nt, Artificial Sequence
  Description of Artificial Sequence: Synthetic oligonucleotide
ugaggauguguuuacuaau

SEQ ID NO: 88823 - RNA, 19 nt, Artificial Sequence
  Description of Artificial Sequence: Synthetic oligonucleotide
caggguaucgauuccgaug

SEQ ID NO: 88824 - RNA, 19 nt, Artificial Sequence
  Description of Artificial Sequence: Synthetic oligonucleotide
uguacaguuaggacaucau

SEQ ID NO: 88825 - RNA, 19 nt, Artificial Sequence
  Description of Artificial Sequence: Synthetic oligonucleotide
auaggccuuucguaagcgg

SEQ ID NO: 88826 - RNA, 19 nt, Artificial Sequence
  Description of Artificial Sequence: Synthetic oligonucleotide
cacgcacacacacacacac

SEQ ID NO: 88827 - RNA, 19 nt, Artificial Sequence
  Description of Artificial Sequence: Synthetic oligonucleotide
augcauauguauguuugag

SEQ ID NO: 88828 - RNA, 19 nt, Artificial Sequence
  Description of Artificial Sequence: Synthetic oligonucleotide
guuuuguaauacccaauga

SEQ ID NO: 88829 - RNA, 19 nt, Artificial Sequence
  Description of Artificial Sequence: Synthetic oligonucleotide
cacacacacgcacacacac

SEQ ID NO: 88830 - RNA, 19 nt, Artificial Sequence
  Description of Artificial Sequence: Synthetic oligonucleotide
agcguucagacuuccagga

SEQ ID NO: 88831 - RNA, 19 nt, Artificial Sequence
  Description of Artificial Sequence: Synthetic oligonucleotide
uagauaugcuuuucuguaa

SEQ ID NO: 88832 - RNA, 19 nt, Artificial Sequence
  Description of Artificial Sequence: Synthetic oligonucleotide
ucauugugauagaaccgac

SEQ ID NO: 88833 - RNA, 19 nt, Artificial Sequence
  Description of Artificial Sequence: Synthetic oligonucleotide
aaagugcccuuaguccuac

SEQ ID NO: 88834 - RNA, 19 nt, Artificial Sequence
  Description of Artificial Sequence: Synthetic oligonucleotide
gaugaucgcccuccguucc

SEQ ID NO: 88835 - RNA, 19 nt, Artificial Sequence
  Description of Artificial Sequence: Synthetic oligonucleotide
ggacugucggacuggaugg

SEQ ID NO: 88836 - RNA, 19 nt, Artificial Sequence
  Description of Artificial Sequence: Synthetic oligonucleotide
cacacacacacacacgcac

SEQ ID NO: 88837 - RNA, 19 nt, Artificial Sequence
  Description of Artificial Sequence: Synthetic oligonucleotide
agaguaaugaggauguguu

SEQ ID NO: 88838 - RNA, 19 nt, Artificial Sequence
  Description of Artificial Sequence: Synthetic oligonucleotide
gagaguaagagaccggacu

SEQ ID NO: 88839 - RNA, 19 nt, Artificial Sequence
  Description of Artificial Sequence: Synthetic oligonucleotide
uggcacccgaaauagcuca

SEQ ID NO: 88840 - RNA, 19 nt, Artificial Sequence
  Description of Artificial Sequence: Synthetic oligonucleotide
ggucaagagacugggaggg

SEQ ID NO: 88841 - RNA, 19 nt, Artificial Sequence
  Description of Artificial Sequence: Synthetic oligonucleotide
uccacacgcagagaguaag

SEQ ID NO: 88842 - RNA, 19 nt, Artificial Sequence
  Description of Artificial Sequence: Synthetic oligonucleotide
aacaucccucccaauuggg

SEQ ID NO: 88843 - RNA, 19 nt, Artificial Sequence
  Description of Artificial Sequence: Synthetic oligonucleotide
gagccguucccguugguug

SEQ ID NO: 88844 - RNA, 19 nt, Artificial Sequence
  Description of Artificial Sequence: Synthetic oligonucleotide
gagcgucgucaucauaagg

SEQ ID NO: 88845 - RNA, 19 nt, Artificial Sequence
  Description of Artificial Sequence: Synthetic oligonucleotide
gagugguggguuucauggg

SEQ ID NO: 88846 - RNA, 19 nt, Artificial Sequence
  Description of Artificial Sequence: Synthetic oligonucleotide
aagaucugugcuaggcgag

SEQ ID NO: 88847 - RNA, 19 nt, Artificial Sequence
  Description of Artificial Sequence: Synthetic oligonucleotide
ccgauaaucacagauguac

SEQ ID NO: 88848 - RNA, 19 nt, Artificial Sequence
  Description of Artificial Sequence: Synthetic oligonucleotide
agaucugugcuaggcgagc

SEQ ID NO: 88849 - RNA, 19 nt, Artificial Sequence
  Description of Artificial Sequence: Synthetic oligonucleotide
auagaguggcacccgaaau

SEQ ID NO: 88850 - RNA, 19 nt, Artificial Sequence
  Description of Artificial Sequence: Synthetic oligonucleotide
gacagcguagugucuuuug

SEQ ID NO: 88851 - RNA, 19 nt, Artificial Sequence
  Description of Artificial Sequence: Synthetic oligonucleotide
uuuacgcccauaguauuuc

SEQ ID NO: 88852 - RNA, 19 nt, Artificial Sequence
  Description of Artificial Sequence: Synthetic oligonucleotide
cauuggggaaagaguaaug

SEQ ID NO: 88853 - RNA, 19 nt, Artificial Sequence
  Description of Artificial Sequence: Synthetic oligonucleotide
ugaugccucaugccgggca

SEQ ID NO: 88854 - RNA, 19 nt, Artificial Sequence
  Description of Artificial Sequence: Synthetic oligonucleotide
cauacacacacacacauau

SEQ ID NO: 88855 - RNA, 19 nt, Artificial Sequence
  Description of Artificial Sequence: Synthetic oligonucleotide
augccgggcauuguaauag

SEQ ID NO: 88856 - RNA, 19 nt, Artificial Sequence
  Description of Artificial Sequence: Synthetic oligonucleotide
agagcgucgucaucauaag

SEQ ID NO: 88857 - RNA, 19 nt, Artificial Sequence
  Description of Artificial Sequence: Synthetic oligonucleotide
agacuaacucuguaucuau

SEQ ID NO: 88858 - RNA, 19 nt, Artificial Sequence
  Description of Artificial Sequence: Synthetic oligonucleotide
uccgauggaucuuguaaaa

SEQ ID NO: 88859 - RNA, 19 nt, Artificial Sequence
  Description of Artificial Sequence: Synthetic oligonucleotide
aggaugaucgcccuccguu

SEQ ID NO: 88860 - RNA, 19 nt, Artificial Sequence
  Description of Artificial Sequence: Synthetic oligonucleotide
gacggaauuuugccgcccc

SEQ ID NO: 88861 - RNA, 19 nt, Artificial Sequence
  Description of Artificial Sequence: Synthetic oligonucleotide
gagagucacuuccgaaagc

SEQ ID NO: 88862 - RNA, 19 nt, Artificial Sequence
  Description of Artificial Sequence: Synthetic oligonucleotide
aguaaguaccuaaugucaa

SEQ ID NO: 88863 - RNA, 19 nt, Artificial Sequence
  Description of Artificial Sequence: Synthetic oligonucleotide
ucgauuccgauggaucuug

SEQ ID NO: 88864 - RNA, 19 nt, Artificial Sequence
  Description of Artificial Sequence: Synthetic oligonucleotide
uguuccuuugagagucacu

SEQ ID NO: 88865 - RNA, 19 nt, Artificial Sequence
  Description of Artificial Sequence: Synthetic oligonucleotide
agucaucucggaguaagca

SEQ ID NO: 88866 - RNA, 19 nt, Artificial Sequence
  Description of Artificial Sequence: Synthetic oligonucleotide
uucucauaauagucagcgu

SEQ ID NO: 88867 - RNA, 19 nt, Artificial Sequence
  Description of Artificial Sequence: Synthetic oligonucleotide
cacacacacacacacacaa

SEQ ID NO: 88868 - RNA, 19 nt, Artificial Sequence
  Description of Artificial Sequence: Synthetic oligonucleotide
aucauaaggggaaggaaau

SEQ ID NO: 88869 - RNA, 19 nt, Artificial Sequence
  Description of Artificial Sequence: Synthetic oligonucleotide
cacacacacacauauauau

SEQ ID NO: 88870 - RNA, 19 nt, Artificial Sequence
  Description of Artificial Sequence: Synthetic oligonucleotide
cauaccgagacugaggucu

SEQ ID NO: 88871 - RNA, 19 nt, Artificial Sequence
  Description of Artificial Sequence: Synthetic oligonucleotide
aagguuaaguaaguaccua

SEQ ID NO: 88872 - RNA, 19 nt, Artificial Sequence
  Description of Artificial Sequence: Synthetic oligonucleotide
aucaggugugcgccgacug

SEQ ID NO: 88873 - RNA, 19 nt, Artificial Sequence
  Description of Artificial Sequence: Synthetic oligonucleotide
cacacacacacacgcacac

SEQ ID NO: 88874 - RNA, 19 nt, Artificial Sequence
  Description of Artificial Sequence: Synthetic oligonucleotide
cacacacacacaauacaca

SEQ ID NO: 88875 - RNA, 19 nt, Artificial Sequence
  Description of Artificial Sequence: Synthetic oligonucleotide
uaccuaacauuugauuguc

SEQ ID NO: 88876 - RNA, 19 nt, Artificial Sequence
  Description of Artificial Sequence: Synthetic oligonucleotide
guaauguacaaugcuucuc

SEQ ID NO: 88877 - RNA, 19 nt, Artificial Sequence
  Description of Artificial Sequence: Synthetic oligonucleotide
cacccgaaauagcucauug

SEQ ID NO: 88878 - RNA, 19 nt, Artificial Sequence
  Description of Artificial Sequence: Synthetic oligonucleotide
acccgaaauagcucauugu

SEQ ID NO: 88879 - RNA, 19 nt, Artificial Sequence
  Description of Artificial Sequence: Synthetic oligonucleotide
cacacacacacacaauaca

SEQ ID NO: 88880 - RNA, 19 nt, Artificial Sequence
  Description of Artificial Sequence: Synthetic oligonucleotide
gcagacaggguaucgauuc

SEQ ID NO: 88881 - RNA, 19 nt, Artificial Sequence
  Description of Artificial Sequence: Synthetic oligonucleotide
guaucgauuccgauggauc

SEQ ID NO: 88882 - RNA, 19 nt, Artificial Sequence
  Description of Artificial Sequence: Synthetic oligonucleotide
ucgguuaaugugugauaac

SEQ ID NO: 88883 - RNA, 19 nt, Artificial Sequence
  Description of Artificial Sequence: Synthetic oligonucleotide
cacaaucacccugacgaag

SEQ ID NO: 88884 - RNA, 19 nt, Artificial Sequence
  Description of Artificial Sequence: Synthetic oligonucleotide
cacacacacacacacaaua

SEQ ID NO: 88885 - RNA, 19 nt, Artificial Sequence
  Description of Artificial Sequence: Synthetic oligonucleotide
ugccgggcauuguaauagg

SEQ ID NO: 88886 - RNA, 19 nt, Artificial Sequence
  Description of Artificial Sequence: Synthetic oligonucleotide
aagguaggucacaucgaug

SEQ ID NO: 88887 - RNA, 19 nt, Artificial Sequence
  Description of Artificial Sequence: Synthetic oligonucleotide
ggaucuauggcauccccuc

SEQ ID NO: 88888 - RNA, 19 nt, Artificial Sequence
  Description of Artificial Sequence: Synthetic oligonucleotide
aucucgguuaaugugugau

SEQ ID NO: 88889 - RNA, 19 nt, Artificial Sequence
  Description of Artificial Sequence: Synthetic oligonucleotide
gaguaucuuauacccaggu

SEQ ID NO: 88890 - RNA, 19 nt, Artificial Sequence
  Description of Artificial Sequence: Synthetic oligonucleotide
uuucuauggugcugagauc

SEQ ID NO: 88891 - RNA, 19 nt, Artificial Sequence
  Description of Artificial Sequence: Synthetic oligonucleotide
cacacacacacauauacau

SEQ ID NO: 88892 - RNA, 19 nt, Artificial Sequence
  Description of Artificial Sequence: Synthetic oligonucleotide
gguaccucccuguccacag

SEQ ID NO: 88893 - RNA, 19 nt, Artificial Sequence
  Description of Artificial Sequence: Synthetic oligonucleotide
acaucccucccaauugggg

SEQ ID NO: 88894 - RNA, 19 nt, Artificial Sequence
  Description of Artificial Sequence: Synthetic oligonucleotide
agaaccgacgggauggaga

SEQ ID NO: 88895 - RNA, 19 nt, Artificial Sequence
  Description of Artificial Sequence: Synthetic oligonucleotide
ucucgguuaaugugugaua

SEQ ID NO: 88896 - RNA, 19 nt, Artificial Sequence
  Description of Artificial Sequence: Synthetic oligonucleotide
gaagguaggucacaucgau

SEQ ID NO: 88897 - RNA, 19 nt, Artificial Sequence
  Description of Artificial Sequence: Synthetic oligonucleotide
gcaaucacacagccuacag

SEQ ID NO: 88898 - RNA, 19 nt, Artificial Sequence
  Description of Artificial Sequence: Synthetic oligonucleotide
gguaaagccagaggagaag

SEQ ID NO: 88899 - RNA, 19 nt, Artificial Sequence
  Description of Artificial Sequence: Synthetic oligonucleotide
gugcuaggcgagcugcccg

SEQ ID NO: 88900 - RNA, 19 nt, Artificial Sequence
  Description of Artificial Sequence: Synthetic oligonucleotide
auauacacacacacacaca

SEQ ID NO: 88901 - RNA, 19 nt, Artificial Sequence
  Description of Artificial Sequence: Synthetic oligonucleotide
uucaaggauugagaugcaa

SEQ ID NO: 88902 - RNA, 19 nt, Artificial Sequence
  Description of Artificial Sequence: Synthetic oligonucleotide
auauacacacacacacgca

SEQ ID NO: 88903 - RNA, 19 nt, Artificial Sequence
  Description of Artificial Sequence: Synthetic oligonucleotide
cuuugggucucccuuuaca

SEQ ID NO: 88904 - RNA, 19 nt, Artificial Sequence
  Description of Artificial Sequence: Synthetic oligonucleotide
cucgguuaaugugugauaa

SEQ ID NO: 88905 - RNA, 19 nt, Artificial Sequence
  Description of Artificial Sequence: Synthetic oligonucleotide
agguacacacaaucacccu

SEQ ID NO: 88906 - RNA, 19 nt, Artificial Sequence
  Description of Artificial Sequence: Synthetic oligonucleotide
guaagcggcaaacaucccu

SEQ ID NO: 88907 - RNA, 19 nt, Artificial Sequence
  Description of Artificial Sequence: Synthetic oligonucleotide
caaacacgugaccggacuc

SEQ ID NO: 88908 - RNA, 19 nt, Artificial Sequence
  Description of Artificial Sequence: Synthetic oligonucleotide
uuacgcccauaguauuucu

SEQ ID NO: 88909 - RNA, 19 nt, Artificial Sequence
  Description of Artificial Sequence: Synthetic oligonucleotide
cauaaggggaaggaaaugu

SEQ ID NO: 88910 - RNA, 19 nt, Artificial Sequence
  Description of Artificial Sequence: Synthetic oligonucleotide
ugcuauuccuagugugguc

SEQ ID NO: 88911 - RNA, 19 nt, Artificial Sequence
  Description of Artificial Sequence: Synthetic oligonucleotide
acacacacacacacacacg

SEQ ID NO: 88912 - RNA, 19 nt, Artificial Sequence
  Description of Artificial Sequence: Synthetic oligonucleotide
uaucucgguuaauguguga

SEQ ID NO: 88913 - RNA, 19 nt, Artificial Sequence
  Description of Artificial Sequence: Synthetic oligonucleotide
cuuugagagucacuuccga

SEQ ID NO: 88914 - RNA, 19 nt, Artificial Sequence
  Description of Artificial Sequence: Synthetic oligonucleotide
auacacauacacacacaca

SEQ ID NO: 88915 - RNA, 19 nt, Artificial Sequence
  Description of Artificial Sequence: Synthetic oligonucleotide
auaggugugcugacuuguc

SEQ ID NO: 88916 - RNA, 19 nt, Artificial Sequence
  Description of Artificial Sequence: Synthetic oligonucleotide
cagacaggguaucgauucc

SEQ ID NO: 88917 - RNA, 19 nt, Artificial Sequence
  Description of Artificial Sequence: Synthetic oligonucleotide
acgcagagaguaagagacc

SEQ ID NO: 88918 - RNA, 19 nt, Artificial Sequence
  Description of Artificial Sequence: Synthetic oligonucleotide
cucccaauuggggauuuac

SEQ ID NO: 88919 - RNA, 19 nt, Artificial Sequence
  Description of Artificial Sequence: Synthetic oligonucleotide
gcacuuaccuaacauuuga

SEQ ID NO: 88920 - RNA, 19 nt, Artificial Sequence
  Description of Artificial Sequence: Synthetic oligonucleotide
ucaugccgggcauuguaau

SEQ ID NO: 88921 - RNA, 19 nt, Artificial Sequence
  Description of Artificial Sequence: Synthetic oligonucleotide
cacacacacacacacauau

SEQ ID NO: 88922 - RNA, 19 nt, Artificial Sequence
  Description of Artificial Sequence: Synthetic oligonucleotide
acacacacacacauauaca

SEQ ID NO: 88923 - RNA, 19 nt, Artificial Sequence
  Description of Artificial Sequence: Synthetic oligonucleotide
cauagaguggcacccgaaa

SEQ ID NO: 88924 - RNA, 19 nt, Artificial Sequence
  Description of Artificial Sequence: Synthetic oligonucleotide
auacacacacacacgcaca

SEQ ID NO: 88925 - RNA, 19 nt, Artificial Sequence
  Description of Artificial Sequence: Synthetic oligonucleotide
gcugaugccucaugccggg

SEQ ID NO: 88926 - RNA, 19 nt, Artificial Sequence
  Description of Artificial Sequence: Synthetic oligonucleotide
cacauacacacacacacau

SEQ ID NO: 88927 - RNA, 19 nt, Artificial Sequence
  Description of Artificial Sequence: Synthetic oligonucleotide
acacauacacacacacaca

SEQ ID NO: 88928 - RNA, 19 nt, Artificial Sequence
  Description of Artificial Sequence: Synthetic oligonucleotide
ccgggcauuguaauaggcc

SEQ ID NO: 88929 - RNA, 19 nt, Artificial Sequence
  Description of Artificial Sequence: Synthetic oligonucleotide
aggugugcgccgacugucc

SEQ ID NO: 88930 - RNA, 19 nt, Artificial Sequence
  Description of Artificial Sequence: Synthetic oligonucleotide
ggucaaauguuucuaucua

SEQ ID NO: 88931 - RNA, 19 nt, Artificial Sequence
  Description of Artificial Sequence: Synthetic oligonucleotide
acaggguaucgauuccgau

SEQ ID NO: 88932 - RNA, 19 nt, Artificial Sequence
  Description of Artificial Sequence: Synthetic oligonucleotide
acacaaucacccugacgaa

SEQ ID NO: 88933 - RNA, 19 nt, Artificial Sequence
  Description of Artificial Sequence: Synthetic oligonucleotide
uccacacgugaguaucuua

SEQ ID NO: 88934 - RNA, 19 nt, Artificial Sequence
  Description of Artificial Sequence: Synthetic oligonucleotide
guuccuuugagagucacuu

SEQ ID NO: 88935 - RNA, 19 nt, Artificial Sequence
  Description of Artificial Sequence: Synthetic oligonucleotide
gcccuagaucuuuuagggg

SEQ ID NO: 88936 - RNA, 19 nt, Artificial Sequence
  Description of Artificial Sequence: Synthetic oligonucleotide
caggugugcuggcuaacug

SEQ ID NO: 88937 - RNA, 19 nt, Artificial Sequence
  Description of Artificial Sequence: Synthetic oligonucleotide
cacacacacacacacacau

SEQ ID NO: 88938 - RNA, 19 nt, Artificial Sequence
  Description of Artificial Sequence: Synthetic oligonucleotide
auccaauguuaaaauuggu

SEQ ID NO: 88939 - RNA, 19 nt, Artificial Sequence
  Description of Artificial Sequence: Synthetic oligonucleotide
uucgagcguucagacuucc

SEQ ID NO: 88940 - RNA, 19 nt, Artificial Sequence
  Description of Artificial Sequence: Synthetic oligonucleotide
auacacacacacacacaca

SEQ ID NO: 88941 - RNA, 19 nt, Artificial Sequence
  Description of Artificial Sequence: Synthetic oligonucleotide
ucgagcguucagacuucca

SEQ ID NO: 88942 - RNA, 19 nt, Artificial Sequence
  Description of Artificial Sequence: Synthetic oligonucleotide
gugcccuuaguccuaccuc

SEQ ID NO: 88943 - RNA, 19 nt, Artificial Sequence
  Description of Artificial Sequence: Synthetic oligonucleotide
cuugccguuucucccacaa

SEQ ID NO: 88944 - RNA, 19 nt, Artificial Sequence
  Description of Artificial Sequence: Synthetic oligonucleotide
uuccuagugugguccuccu

SEQ ID NO: 88945 - RNA, 19 nt, Artificial Sequence
  Description of Artificial Sequence: Synthetic oligonucleotide
uagaaccgacgggauggag

SEQ ID NO: 88946 - RNA, 19 nt, Artificial Sequence
  Description of Artificial Sequence: Synthetic oligonucleotide
cuucgagcguucagacuuc

SEQ ID NO: 88947 - RNA, 19 nt, Artificial Sequence
  Description of Artificial Sequence: Synthetic oligonucleotide
acacacacacacacgcaca

SEQ ID NO: 88948 - RNA, 19 nt, Artificial Sequence
  Description of Artificial Sequence: Synthetic oligonucleotide
acggaauuuugccgccccu

SEQ ID NO: 88949 - RNA, 19 nt, Artificial Sequence
  Description of Artificial Sequence: Synthetic oligonucleotide
cgcacacacacacacacac

SEQ ID NO: 88950 - RNA, 19 nt, Artificial Sequence
  Description of Artificial Sequence: Synthetic oligonucleotide
ggggcggaaauaaugguga

SEQ ID NO: 88951 - RNA, 19 nt, Artificial Sequence
  Description of Artificial Sequence: Synthetic oligonucleotide
cucggaguaagcagaugaa

SEQ ID NO: 88952 - RNA, 19 nt, Artificial Sequence
  Description of Artificial Sequence: Synthetic oligonucleotide
ggcggaaauaauggugacc

SEQ ID NO: 88953 - RNA, 19 nt, Artificial Sequence
  Description of Artificial Sequence: Synthetic oligonucleotide
gaccggacuuguuggcuuc

SEQ ID NO: 88954 - RNA, 19 nt, Artificial Sequence
  Description of Artificial Sequence: Synthetic oligonucleotide
augaucgcccuccguuccu

SEQ ID NO: 88955 - RNA, 19 nt, Artificial Sequence
  Description of Artificial Sequence: Synthetic oligonucleotide
gcuucgagcguucagacuu

SEQ ID NO: 88956 - RNA, 19 nt, Artificial Sequence
  Description of Artificial Sequence: Synthetic oligonucleotide
ggucucgugguaauguaca

SEQ ID NO: 88957 - RNA, 19 nt, Artificial Sequence
  Description of Artificial Sequence: Synthetic oligonucleotide
ggaugaucgcccuccguuc

SEQ ID NO: 88958 - RNA, 19 nt, Artificial Sequence
  Description of Artificial Sequence: Synthetic oligonucleotide
uauuccuagugugguccuc

SEQ ID NO: 88959 - RNA, 19 nt, Artificial Sequence
  Description of Artificial Sequence: Synthetic oligonucleotide
cagacuaacucuguaucua

SEQ ID NO: 88960 - RNA, 19 nt, Artificial Sequence
  Description of Artificial Sequence: Synthetic oligonucleotide
cagcgucaaaagcuuccac

SEQ ID NO: 88961 - RNA, 19 nt, Artificial Sequence
  Description of Artificial Sequence: Synthetic oligonucleotide
ugagccguucccguugguu

SEQ ID NO: 88962 - RNA, 19 nt, Artificial Sequence
  Description of Artificial Sequence: Synthetic oligonucleotide
cuacagacaugcagacuaa

SEQ ID NO: 88963 - RNA, 19 nt, Artificial Sequence
  Description of Artificial Sequence: Synthetic oligonucleotide
acacacacacacauauaua

SEQ ID NO: 88964 - RNA, 19 nt, Artificial Sequence
  Description of Artificial Sequence: Synthetic oligonucleotide
ccuuucguaagcggcaaac

SEQ ID NO: 88965 - RNA, 19 nt, Artificial Sequence
  Description of Artificial Sequence: Synthetic oligonucleotide
augacagcguagugucuuu

SEQ ID NO: 88966 - RNA, 19 nt, Artificial Sequence
  Description of Artificial Sequence: Synthetic oligonucleotide
acacacacacacacacaca

SEQ ID NO: 88967 - RNA, 19 nt, Artificial Sequence
  Description of Artificial Sequence: Synthetic oligonucleotide
ggggaucuauggcaucccc

SEQ ID NO: 88968 - RNA, 19 nt, Artificial Sequence
  Description of Artificial Sequence: Synthetic oligonucleotide
auagaaccgacgggaugga

SEQ ID NO: 88969 - RNA, 19 nt, Artificial Sequence
  Description of Artificial Sequence: Synthetic oligonucleotide
aggccuuucguaagcggca

SEQ ID NO: 88970 - RNA, 19 nt, Artificial Sequence
  Description of Artificial Sequence: Synthetic oligonucleotide
gaguaaugaggauguguuu

SEQ ID NO: 88971 - RNA, 19 nt, Artificial Sequence
  Description of Artificial Sequence: Synthetic oligonucleotide
acacacacacacacacgca

SEQ ID NO: 88972 - RNA, 19 nt, Artificial Sequence
  Description of Artificial Sequence: Synthetic oligonucleotide
gucucgugguaauguacaa

SEQ ID NO: 88973 - RNA, 19 nt, Artificial Sequence
  Description of Artificial Sequence: Synthetic oligonucleotide
gacaugcgaucuccagcuc

SEQ ID NO: 88974 - RNA, 19 nt, Artificial Sequence
  Description of Artificial Sequence: Synthetic oligonucleotide
caaucacccugacgaagca

SEQ ID NO: 88975 - RNA, 19 nt, Artificial Sequence
  Description of Artificial Sequence: Synthetic oligonucleotide
gcauauacacacacacaca

SEQ ID NO: 88976 - RNA, 19 nt, Artificial Sequence
  Description of Artificial Sequence: Synthetic oligonucleotide
ggauuuacgcccauaguau

SEQ ID NO: 88977 - RNA, 19 nt, Artificial Sequence
  Description of Artificial Sequence: Synthetic oligonucleotide
caggugugcgccgacuguc

SEQ ID NO: 88978 - RNA, 19 nt, Artificial Sequence
  Description of Artificial Sequence: Synthetic oligonucleotide
acauacacacacacacaua

SEQ ID NO: 88979 - RNA, 19 nt, Artificial Sequence
  Description of Artificial Sequence: Synthetic oligonucleotide
acacacacacacgcacaca

SEQ ID NO: 88980 - RNA, 19 nt, Artificial Sequence
  Description of Artificial Sequence: Synthetic oligonucleotide
acacacacgcacacacaca

SEQ ID NO: 88981 - RNA, 19 nt, Artificial Sequence
  Description of Artificial Sequence: Synthetic oligonucleotide
aucgauuccgauggaucuu

SEQ ID NO: 88982 - RNA, 19 nt, Artificial Sequence
  Description of Artificial Sequence: Synthetic oligonucleotide
caaagugcccuuaguccua

SEQ ID NO: 88983 - RNA, 19 nt, Artificial Sequence
  Description of Artificial Sequence: Synthetic oligonucleotide
uggcuaacuggggcucuug

SEQ ID NO: 88984 - RNA, 19 nt, Artificial Sequence
  Description of Artificial Sequence: Synthetic oligonucleotide
aucucggaguaagcagaug

SEQ ID NO: 88985 - RNA, 19 nt, Artificial Sequence
  Description of Artificial Sequence: Synthetic oligonucleotide
acacacacacgcacacaca

SEQ ID NO: 88986 - RNA, 19 nt, Artificial Sequence
  Description of Artificial Sequence: Synthetic oligonucleotide
caugccgggcauuguaaua

SEQ ID NO: 88987 - RNA, 19 nt, Artificial Sequence
  Description of Artificial Sequence: Synthetic oligonucleotide
auacacacacacacauaua

SEQ ID NO: 88988 - RNA, 19 nt, Artificial Sequence
  Description of Artificial Sequence: Synthetic oligonucleotide
ggaaauauauuagcagcau

SEQ ID NO: 88989 - RNA, 19 nt, Artificial Sequence
  Description of Artificial Sequence: Synthetic oligonucleotide
cuguaucuauuugcaguga

SEQ ID NO: 88990 - RNA, 19 nt, Artificial Sequence
  Description of Artificial Sequence: Synthetic oligonucleotide
ggugcagacaggguaucga

SEQ ID NO: 88991 - RNA, 19 nt, Artificial Sequence
  Description of Artificial Sequence: Synthetic oligonucleotide
ggucccaacuacagccucc

SEQ ID NO: 88992 - RNA, 19 nt, Artificial Sequence
  Description of Artificial Sequence: Synthetic oligonucleotide
gucccaacuacagccucca

SEQ ID NO: 88993 - RNA, 19 nt, Artificial Sequence
  Description of Artificial Sequence: Synthetic oligonucleotide
guggcacccgaaauagcuc

SEQ ID NO: 88994 - RNA, 19 nt, Artificial Sequence
  Description of Artificial Sequence: Synthetic oligonucleotide
ugaucgcccuccguuccuc

SEQ ID NO: 88995 - RNA, 19 nt, Artificial Sequence
  Description of Artificial Sequence: Synthetic oligonucleotide
acacacacacacacacaau

SEQ ID NO: 88996 - RNA, 19 nt, Artificial Sequence
  Description of Artificial Sequence: Synthetic oligonucleotide
gaucugugcuaggcgagcu

SEQ ID NO: 88997 - RNA, 19 nt, Artificial Sequence
  Description of Artificial Sequence: Synthetic oligonucleotide
acacgcacacacacacaca

SEQ ID NO: 88998 - RNA, 19 nt, Artificial Sequence
  Description of Artificial Sequence: Synthetic oligonucleotide
uugagccguucccguuggu

SEQ ID NO: 88999 - RNA, 19 nt, Artificial Sequence
  Description of Artificial Sequence: Synthetic oligonucleotide
gggcggaaauaauggugac

SEQ ID NO: 89000 - RNA, 19 nt, Artificial Sequence
  Description of Artificial Sequence: Synthetic oligonucleotide
ggcuaacuggggcucuuga

SEQ ID NO: 89001 - RNA, 19 nt, Artificial Sequence
  Description of Artificial Sequence: Synthetic oligonucleotide
gccgccccuguccacacgc

SEQ ID NO: 89002 - RNA, 19 nt, Artificial Sequence
  Description of Artificial Sequence: Synthetic oligonucleotide
ucccaacuacagccuccaa

SEQ ID NO: 89003 - RNA, 19 nt, Artificial Sequence
  Description of Artificial Sequence: Synthetic oligonucleotide
gagaccggacuuguuggcu

SEQ ID NO: 89004 - RNA, 19 nt, Artificial Sequence
  Description of Artificial Sequence: Synthetic oligonucleotide
acacacacacacacauaua

SEQ ID NO: 89005 - RNA, 19 nt, Artificial Sequence
  Description of Artificial Sequence: Synthetic oligonucleotide
acacacgcacacacacaca

SEQ ID NO: 89006 - RNA, 19 nt, Artificial Sequence
  Description of Artificial Sequence: Synthetic oligonucleotide
acacacacacacacacaua

SEQ ID NO: 89007 - RNA, 19 nt, Artificial Sequence
  Description of Artificial Sequence: Synthetic oligonucleotide
acgcacacacacacacaca

SEQ ID NO: 89008 - RNA, 19 nt, Artificial Sequence
  Description of Artificial Sequence: Synthetic oligonucleotide
ucgcaguuuccugccggau

SEQ ID NO: 89009 - RNA, 19 nt, Artificial Sequence
  Description of Artificial Sequence: Synthetic oligonucleotide
cugcuauuccuaguguggu

SEQ ID NO: 89010 - RNA, 19 nt, Artificial Sequence
  Description of Artificial Sequence: Synthetic oligonucleotide
ggacggaauuuugccgccc

SEQ ID NO: 89011 - RNA, 19 nt, Artificial Sequence
  Description of Artificial Sequence: Synthetic oligonucleotide
gcgccuucgcaguuuccug

SEQ ID NO: 89012 - RNA, 19 nt, Artificial Sequence
  Description of Artificial Sequence: Synthetic oligonucleotide
accggacuuguuggcuuca

SEQ ID NO: 89013 - RNA, 19 nt, Artificial Sequence
  Description of Artificial Sequence: Synthetic oligonucleotide
cacagccuacagacaugca

SEQ ID NO: 89014 - RNA, 19 nt, Artificial Sequence
  Description of Artificial Sequence: Synthetic oligonucleotide
gguaucgauuccgauggau

SEQ ID NO: 89015 - RNA, 19 nt, Artificial Sequence
  Description of Artificial Sequence: Synthetic oligonucleotide
ucccucccaauuggggauu

SEQ ID NO: 89016 - RNA, 19 nt, Artificial Sequence
  Description of Artificial Sequence: Synthetic oligonucleotide
ggggauuuacgcccauagu

SEQ ID NO: 89017 - RNA, 19 nt, Artificial Sequence
  Description of Artificial Sequence: Synthetic oligonucleotide
gaucgcccuccguuccucu

SEQ ID NO: 89018 - RNA, 19 nt, Artificial Sequence
  Description of Artificial Sequence: Synthetic oligonucleotide
acgugaccggacuccccuu

SEQ ID NO: 89019 - RNA, 19 nt, Artificial Sequence
  Description of Artificial Sequence: Synthetic oligonucleotide
gggccgagggaucaugggu

SEQ ID NO: 89020 - RNA, 19 nt, Artificial Sequence
  Description of Artificial Sequence: Synthetic oligonucleotide
ccgacgggauggagagugg

SEQ ID NO: 89021 - RNA, 19 nt, Artificial Sequence
  Description of Artificial Sequence: Synthetic oligonucleotide
gcccuuaguccuaccuccc

SEQ ID NO: 89022 - RNA, 19 nt, Artificial Sequence
  Description of Artificial Sequence: Synthetic oligonucleotide
gcacacacacacacacaca

SEQ ID NO: 89023 - RNA, 19 nt, Artificial Sequence
  Description of Artificial Sequence: Synthetic oligonucleotide
cguaagcggcaaacauccc

SEQ ID NO: 89024 - RNA, 19 nt, Artificial Sequence
  Description of Artificial Sequence: Synthetic oligonucleotide
ccauuuaaugcuagacuuu

SEQ ID NO: 89025 - RNA, 19 nt, Artificial Sequence
  Description of Artificial Sequence: Synthetic oligonucleotide
gccguuucucccacaaucu

SEQ ID NO: 89026 - RNA, 19 nt, Artificial Sequence
  Description of Artificial Sequence: Synthetic oligonucleotide
gugugcgccgacugucccu

SEQ ID NO: 89027 - RNA, 19 nt, Artificial Sequence
  Description of Artificial Sequence: Synthetic oligonucleotide
gucggacuggauggccauc

SEQ ID NO: 89028 - RNA, 19 nt, Artificial Sequence
  Description of Artificial Sequence: Synthetic oligonucleotide
ggcauuguaauaggccuuu

SEQ ID NO: 89029 - RNA, 19 nt, Artificial Sequence
  Description of Artificial Sequence: Synthetic oligonucleotide
aguggggccgagggaucau

SEQ ID NO: 89030 - RNA, 19 nt, Artificial Sequence
  Description of Artificial Sequence: Synthetic oligonucleotide
cgugaccggacuccccuug

SEQ ID NO: 89031 - RNA, 19 nt, Artificial Sequence
  Description of Artificial Sequence: Synthetic oligonucleotide
ggcuucgagcguucagacu

SEQ ID NO: 89032 - RNA, 19 nt, Artificial Sequence
  Description of Artificial Sequence: Synthetic oligonucleotide
guagugcuuugccccgcau

SEQ ID NO: 89033 - RNA, 19 nt, Artificial Sequence
  Description of Artificial Sequence: Synthetic oligonucleotide
gccgauaaucacagaugua

SEQ ID NO: 89034 - RNA, 19 nt, Artificial Sequence
  Description of Artificial Sequence: Synthetic oligonucleotide
caucaggugugcgccgacu

SEQ ID NO: 89035 - RNA, 19 nt, Artificial Sequence
  Description of Artificial Sequence: Synthetic oligonucleotide
ggcaaacaucccucccaau

SEQ ID NO: 89036 - RNA, 19 nt, Artificial Sequence
  Description of Artificial Sequence: Synthetic oligonucleotide
gccuacagacaugcagacu

SEQ ID NO: 89037 - RNA, 19 nt, Artificial Sequence
  Description of Artificial Sequence: Synthetic oligonucleotide
gugcgccgacugucccuca

SEQ ID NO: 89038 - RNA, 19 nt, Artificial Sequence
  Description of Artificial Sequence: Synthetic oligonucleotide
cccugacgaagcagcaagu

SEQ ID NO: 89039 - RNA, 19 nt, Artificial Sequence
  Description of Artificial Sequence: Synthetic oligonucleotide
cccuuaguccuaccucccu

SEQ ID NO: 89040 - RNA, 19 nt, Artificial Sequence
  Description of Artificial Sequence: Synthetic oligonucleotide
ccuugccguuucucccaca

SEQ ID NO: 89041 - RNA, 19 nt, Artificial Sequence
  Description of Artificial Sequence: Synthetic oligonucleotide
cuggcuaacuggggcucuu

SEQ ID NO: 89042 - RNA, 19 nt, Artificial Sequence
  Description of Artificial Sequence: Synthetic oligonucleotide
ccgccccuguccacacgca

SEQ ID NO: 89043 - RNA, 19 nt, Artificial Sequence
  Description of Artificial Sequence: Synthetic oligonucleotide
ccccuugccuggacggaau

SEQ ID NO: 89044 - RNA, 19 nt, Artificial Sequence
  Description of Artificial Sequence: Synthetic oligonucleotide
cccuugccuggacggaauu

SEQ ID NO: 89045 - RNA, 19 nt, Artificial Sequence
  Description of Artificial Sequence: Synthetic oligonucleotide
cccucccaauuggggauuu

SEQ ID NO: 89046 - RNA, 19 nt, Artificial Sequence
  Description of Artificial Sequence: Synthetic oligonucleotide
aucuuauugucauauaucc

SEQ ID NO: 89047 - RNA, 19 nt, Artificial Sequence
  Description of Artificial Sequence: Synthetic oligonucleotide
aauaauuggauuuccaugu

SEQ ID NO: 89048 - RNA, 19 nt, Artificial Sequence
  Description of Artificial Sequence: Synthetic oligonucleotide
auuacuaucugucuuaauc

SEQ ID NO: 89049 - RNA, 19 nt, Artificial Sequence
  Description of Artificial Sequence: Synthetic oligonucleotide
uauuagauucuauaggugg

SEQ ID NO: 89050 - RNA, 19 nt, Artificial Sequence
  Description of Artificial Sequence: Synthetic oligonucleotide
uucuauacagccuagacca

SEQ ID NO: 89051 - RNA, 19 nt, Artificial Sequence
  Description of Artificial Sequence: Synthetic oligonucleotide
uuuuaaguuacgauguuag

SEQ ID NO: 89052 - RNA, 19 nt, Artificial Sequence
  Description of Artificial Sequence: Synthetic oligonucleotide
aaugcuaaaacacccagcu

SEQ ID NO: 89053 - RNA, 19 nt, Artificial Sequence
  Description of Artificial Sequence: Synthetic oligonucleotide
aacguauuagauucuauag

SEQ ID NO: 89054 - RNA, 19 nt, Artificial Sequence
  Description of Artificial Sequence: Synthetic oligonucleotide
uguuaugucgaacaauagg

SEQ ID NO: 89055 - RNA, 19 nt, Artificial Sequence
  Description of Artificial Sequence: Synthetic oligonucleotide
guuaugucgaacaauaggg

SEQ ID NO: 89056 - RNA, 19 nt, Artificial Sequence
  Description of Artificial Sequence: Synthetic oligonucleotide
acaaguaugacaucuguag

SEQ ID NO: 89057 - RNA, 19 nt, Artificial Sequence
  Description of Artificial Sequence: Synthetic oligonucleotide
gauuguguaauuucaauac

SEQ ID NO: 89058 - RNA, 19 nt, Artificial Sequence
  Description of Artificial Sequence: Synthetic oligonucleotide
aaguccgacauuuucacag

SEQ ID NO: 89059 - RNA, 19 nt, Artificial Sequence
  Description of Artificial Sequence: Synthetic oligonucleotide
uauauaaucguuuccacaa

SEQ ID NO: 89060 - RNA, 19 nt, Artificial Sequence
  Description of Artificial Sequence: Synthetic oligonucleotide
aacgcauugccauaaaugu

SEQ ID NO: 89061 - RNA, 19 nt, Artificial Sequence
  Description of Artificial Sequence: Synthetic oligonucleotide
uggaucauuagcaaguuca

SEQ ID NO: 89062 - RNA, 19 nt, Artificial Sequence
  Description of Artificial Sequence: Synthetic oligonucleotide
guugcgucuaauuuuaggg

SEQ ID NO: 89063 - RNA, 19 nt, Artificial Sequence
  Description of Artificial Sequence: Synthetic oligonucleotide
agguaauccauacaccugc

SEQ ID NO: 89064 - RNA, 19 nt, Artificial Sequence
  Description of Artificial Sequence: Synthetic oligonucleotide
acuacaugagauuaaagca

SEQ ID NO: 89065 - RNA, 19 nt, Artificial Sequence
  Description of Artificial Sequence: Synthetic oligonucleotide
uacgauguuagaauggcag

SEQ ID NO: 89066 - RNA, 19 nt, Artificial Sequence
  Description of Artificial Sequence: Synthetic oligonucleotide
uuuucguggacauauauuc

SEQ ID NO: 89067 - RNA, 19 nt, Artificial Sequence
  Description of Artificial Sequence: Synthetic oligonucleotide
uuuguuaucuuucauuguc

SEQ ID NO: 89068 - RNA, 19 nt, Artificial Sequence
  Description of Artificial Sequence: Synthetic oligonucleotide
uuuugaaugcugcacagga

SEQ ID NO: 89069 - RNA, 19 nt, Artificial Sequence
  Description of Artificial Sequence: Synthetic oligonucleotide
uguuauauaaaguccgaca

SEQ ID NO: 89070 - RNA, 19 nt, Artificial Sequence
  Description of Artificial Sequence: Synthetic oligonucleotide
aauagccucaaucgguuag

SEQ ID NO: 89071 - RNA, 19 nt, Artificial Sequence
  Description of Artificial Sequence: Synthetic oligonucleotide
ugcaugaucuguuauauaa

SEQ ID NO: 89072 - RNA, 19 nt, Artificial Sequence
  Description of Artificial Sequence: Synthetic oligonucleotide
aaaguugagucucuagugu

SEQ ID NO: 89073 - RNA, 19 nt, Artificial Sequence
  Description of Artificial Sequence: Synthetic oligonucleotide
uguaggauuacuaucuguc

SEQ ID NO: 89074 - RNA, 19 nt, Artificial Sequence
  Description of Artificial Sequence: Synthetic oligonucleotide
auaguaucguaauacagca

SEQ ID NO: 89075 - RNA, 19 nt, Artificial Sequence
  Description of Artificial Sequence: Synthetic oligonucleotide
acguauuagauucuauagg

SEQ ID NO: 89076 - RNA, 19 nt, Artificial Sequence
  Description of Artificial Sequence: Synthetic oligonucleotide
acaaaagcaauugguaccc

SEQ ID NO: 89077 - RNA, 19 nt, Artificial Sequence
  Description of Artificial Sequence: Synthetic oligonucleotide
auuugguagaauuuaccag

SEQ ID NO: 89078 - RNA, 19 nt, Artificial Sequence
  Description of Artificial Sequence: Synthetic oligonucleotide
uaacgcauugccauaaaug

SEQ ID NO: 89079 - RNA, 19 nt, Artificial Sequence
  Description of Artificial Sequence: Synthetic oligonucleotide
agcggcucuacaaagaucc

SEQ ID NO: 89080 - RNA, 19 nt, Artificial Sequence
  Description of Artificial Sequence: Synthetic oligonucleotide
gaaagaacguacauacugg

SEQ ID NO: 89081 - RNA, 19 nt, Artificial Sequence
  Description of Artificial Sequence: Synthetic oligonucleotide
aauagggcaacuguuuguc

SEQ ID NO: 89082 - RNA, 19 nt, Artificial Sequence
  Description of Artificial Sequence: Synthetic oligonucleotide
uuguguaauuucaauaccu

SEQ ID NO: 89083 - RNA, 19 nt, Artificial Sequence
  Description of Artificial Sequence: Synthetic oligonucleotide
ugugcuucggaugauacag

SEQ ID NO: 89084 - RNA, 19 nt, Artificial Sequence
  Description of Artificial Sequence: Synthetic oligonucleotide
ugagguaauccauacaccu

SEQ ID NO: 89085 - RNA, 19 nt, Artificial Sequence
  Description of Artificial Sequence: Synthetic oligonucleotide
ugaauacauaugauuguag

SEQ ID NO: 89086 - RNA, 19 nt, Artificial Sequence
  Description of Artificial Sequence: Synthetic oligonucleotide
uaguguaggauuacuaucu

SEQ ID NO: 89087 - RNA, 19 nt, Artificial Sequence
  Description of Artificial Sequence: Synthetic oligonucleotide
uguguaauuucaauaccug

SEQ ID NO: 89088 - RNA, 19 nt, Artificial Sequence
  Description of Artificial Sequence: Synthetic oligonucleotide
ugacuauuagugcugauaa

SEQ ID NO: 89089 - RNA, 19 nt, Artificial Sequence
  Description of Artificial Sequence: Synthetic oligonucleotide
aaguuacgauguuagaaug

SEQ ID NO: 89090 - RNA, 19 nt, Artificial Sequence
  Description of Artificial Sequence: Synthetic oligonucleotide
gaugucguuaucuucuagc

SEQ ID NO: 89091 - RNA, 19 nt, Artificial Sequence
  Description of Artificial Sequence: Synthetic oligonucleotide
aauuggaucauuagcaagu

SEQ ID NO: 89092 - RNA, 19 nt, Artificial Sequence
  Description of Artificial Sequence: Synthetic oligonucleotide
caugaguacaguuacagca

SEQ ID NO: 89093 - RNA, 19 nt, Artificial Sequence
  Description of Artificial Sequence: Synthetic oligonucleotide
ugauagugggacaugcucc

SEQ ID NO: 89094 - RNA, 19 nt, Artificial Sequence
  Description of Artificial Sequence: Synthetic oligonucleotide
acuacugcaagucggacug

SEQ ID NO: 89095 - RNA, 19 nt, Artificial Sequence
  Description of Artificial Sequence: Synthetic oligonucleotide
ugguauuuuguuaugucga

SEQ ID NO: 89096 - RNA, 19 nt, Artificial Sequence
  Description of Artificial Sequence: Synthetic oligonucleotide
ugguaucuguacaaaauug

SEQ ID NO: 89097 - RNA, 19 nt, Artificial Sequence
  Description of Artificial Sequence: Synthetic oligonucleotide
uucgcauaggcuuuuaccu

SEQ ID NO: 89098 - RNA, 19 nt, Artificial Sequence
  Description of Artificial Sequence: Synthetic oligonucleotide
ugugucuguaucaugagua

SEQ ID NO: 89099 - RNA, 19 nt, Artificial Sequence
  Description of Artificial Sequence: Synthetic oligonucleotide
cauauaaugugucuguauc

SEQ ID NO: 89100 - RNA, 19 nt, Artificial Sequence
  Description of Artificial Sequence: Synthetic oligonucleotide
caggaugcaucauagggcg

SEQ ID NO: 89101 - RNA, 19 nt, Artificial Sequence
  Description of Artificial Sequence: Synthetic oligonucleotide
ugugcugcaacguauuaga

SEQ ID NO: 89102 - RNA, 19 nt, Artificial Sequence
  Description of Artificial Sequence: Synthetic oligonucleotide
uugcgucuaauuuuagggg

SEQ ID NO: 89103 - RNA, 19 nt, Artificial Sequence
  Description of Artificial Sequence: Synthetic oligonucleotide
uguugcgucuaauuuuagg

SEQ ID NO: 89104 - RNA, 19 nt, Artificial Sequence
  Description of Artificial Sequence: Synthetic oligonucleotide
gaagcguuuacacacacaa

SEQ ID NO: 89105 - RNA, 19 nt, Artificial Sequence
  Description of Artificial Sequence: Synthetic oligonucleotide
auaggcuuuuaccucaaag

SEQ ID NO: 89106 - RNA, 19 nt, Artificial Sequence
  Description of Artificial Sequence: Synthetic oligonucleotide
uacaauugcugaaaacucu

SEQ ID NO: 89107 - RNA, 19 nt, Artificial Sequence
  Description of Artificial Sequence: Synthetic oligonucleotide
uauucccugugcaugaucu

SEQ ID NO: 89108 - RNA, 19 nt, Artificial Sequence
  Description of Artificial Sequence: Synthetic oligonucleotide
aguaucguaauacagcaua

SEQ ID NO: 89109 - RNA, 19 nt, Artificial Sequence
  Description of Artificial Sequence: Synthetic oligonucleotide
aauuuuguugcgucuaauu

SEQ ID NO: 89110 - RNA, 19 nt, Artificial Sequence
  Description of Artificial Sequence: Synthetic oligonucleotide
gacaugaguacaguuacag

SEQ ID NO: 89111 - RNA, 19 nt, Artificial Sequence
  Description of Artificial Sequence: Synthetic oligonucleotide
aaugcuaguuaguuguaaa

SEQ ID NO: 89112 - RNA, 19 nt, Artificial Sequence
  Description of Artificial Sequence: Synthetic oligonucleotide
aagauaagcccaucaaaau

SEQ ID NO: 89113 - RNA, 19 nt, Artificial Sequence
  Description of Artificial Sequence: Synthetic oligonucleotide
ugcucgaugaccaaaguuu

SEQ ID NO: 89114 - RNA, 19 nt, Artificial Sequence
  Description of Artificial Sequence: Synthetic oligonucleotide
gaauuccccuuauuguugg

SEQ ID NO: 89115 - RNA, 19 nt, Artificial Sequence
  Description of Artificial Sequence: Synthetic oligonucleotide
ugauuguguaauuucaaua

SEQ ID NO: 89116 - RNA, 19 nt, Artificial Sequence
  Description of Artificial Sequence: Synthetic oligonucleotide
uuuguugcgucuaauuuua

SEQ ID NO: 89117 - RNA, 19 nt, Artificial Sequence
  Description of Artificial Sequence: Synthetic oligonucleotide
ucuucaauaguaucguaau

SEQ ID NO: 89118 - RNA, 19 nt, Artificial Sequence
  Description of Artificial Sequence: Synthetic oligonucleotide
uuaguguaggauuacuauc

SEQ ID NO: 89119 - RNA, 19 nt, Artificial Sequence
  Description of Artificial Sequence: Synthetic oligonucleotide
ucuuauugucauauaucca

SEQ ID NO: 89120 - RNA, 19 nt, Artificial Sequence
  Description of Artificial Sequence: Synthetic oligonucleotide
aggguugaaucuuauuguc

SEQ ID NO: 89121 - RNA, 19 nt, Artificial Sequence
  Description of Artificial Sequence: Synthetic oligonucleotide
ucauagugucaacugaccu

SEQ ID NO: 89122 - RNA, 19 nt, Artificial Sequence
  Description of Artificial Sequence: Synthetic oligonucleotide
ucuguuauauaaaguccga

SEQ ID NO: 89123 - RNA, 19 nt, Artificial Sequence
  Description of Artificial Sequence: Synthetic oligonucleotide
aacaaacuacaugagauua

SEQ ID NO: 89124 - RNA, 19 nt, Artificial Sequence
  Description of Artificial Sequence: Synthetic oligonucleotide
gucguuaucuucuagcaca

SEQ ID NO: 89125 - RNA, 19 nt, Artificial Sequence
  Description of Artificial Sequence: Synthetic oligonucleotide
uugauagugggacaugcuc

SEQ ID NO: 89126 - RNA, 19 nt, Artificial Sequence
  Description of Artificial Sequence: Synthetic oligonucleotide
cuucauagugucaacugac

SEQ ID NO: 89127 - RNA, 19 nt, Artificial Sequence
  Description of Artificial Sequence: Synthetic oligonucleotide
ucuguacaaaauugcagcu

SEQ ID NO: 89128 - RNA, 19 nt, Artificial Sequence
  Description of Artificial Sequence: Synthetic oligonucleotide
uuuguccuaaucugaauuc

SEQ ID NO: 89129 - RNA, 19 nt, Artificial Sequence
  Description of Artificial Sequence: Synthetic oligonucleotide
ugggauagcugguauaacu

SEQ ID NO: 89130 - RNA, 19 nt, Artificial Sequence
  Description of Artificial Sequence: Synthetic oligonucleotide
ucuauuacaccuugucccu

SEQ ID NO: 89131 - RNA, 19 nt, Artificial Sequence
  Description of Artificial Sequence: Synthetic oligonucleotide
uucguggacauauauuccu

SEQ ID NO: 89132 - RNA, 19 nt, Artificial Sequence
  Description of Artificial Sequence: Synthetic oligonucleotide
ugaaguugaggcacccucc

SEQ ID NO: 89133 - RNA, 19 nt, Artificial Sequence
  Description of Artificial Sequence: Synthetic oligonucleotide
uuuacacacacaagcggcu

SEQ ID NO: 89134 - RNA, 19 nt, Artificial Sequence
  Description of Artificial Sequence: Synthetic oligonucleotide
gauguuacaaugcuugaua

SEQ ID NO: 89135 - RNA, 19 nt, Artificial Sequence
  Description of Artificial Sequence: Synthetic oligonucleotide
acgauguuagaauggcagg

SEQ ID NO: 89136 - RNA, 19 nt, Artificial Sequence
  Description of Artificial Sequence: Synthetic oligonucleotide
cauacugggacaugaguac

SEQ ID NO: 89137 - RNA, 19 nt, Artificial Sequence
  Description of Artificial Sequence: Synthetic oligonucleotide
ugauuggagauucaauaua

SEQ ID NO: 89138 - RNA, 19 nt, Artificial Sequence
  Description of Artificial Sequence: Synthetic oligonucleotide
auacuguucuuuguagggc

SEQ ID NO: 89139 - RNA, 19 nt, Artificial Sequence
  Description of Artificial Sequence: Synthetic oligonucleotide
auagugucaacugaccuug

SEQ ID NO: 89140 - RNA, 19 nt, Artificial Sequence
  Description of Artificial Sequence: Synthetic oligonucleotide
uccgucuuaauaauuggau

SEQ ID NO: 89141 - RNA, 19 nt, Artificial Sequence
  Description of Artificial Sequence: Synthetic oligonucleotide
aucguaauacagcauauuu

SEQ ID NO: 89142 - RNA, 19 nt, Artificial Sequence
  Description of Artificial Sequence: Synthetic oligonucleotide
uuagugcugauaagaacac

SEQ ID NO: 89143 - RNA, 19 nt, Artificial Sequence
  Description of Artificial Sequence: Synthetic oligonucleotide
uuuaaguuacgauguuaga

SEQ ID NO: 89144 - RNA, 19 nt, Artificial Sequence
  Description of Artificial Sequence: Synthetic oligonucleotide
ugcgucuaauuuuaggggu

SEQ ID NO: 89145 - RNA, 19 nt, Artificial Sequence
  Description of Artificial Sequence: Synthetic oligonucleotide
agauuugucaucaggguug

SEQ ID NO: 89146 - RNA, 19 nt, Artificial Sequence
  Description of Artificial Sequence: Synthetic oligonucleotide
uuguuaugucgaacaauag

SEQ ID NO: 89147 - RNA, 19 nt, Artificial Sequence
  Description of Artificial Sequence: Synthetic oligonucleotide
acaauagggcaacuguuug

SEQ ID NO: 89148 - RNA, 19 nt, Artificial Sequence
  Description of Artificial Sequence: Synthetic oligonucleotide
ugauggcacuucuuaaugc

SEQ ID NO: 89149 - RNA, 19 nt, Artificial Sequence
  Description of Artificial Sequence: Synthetic oligonucleotide
ucguaauacagcauauuuu

SEQ ID NO: 89150 - RNA, 19 nt, Artificial Sequence
  Description of Artificial Sequence: Synthetic oligonucleotide
ucggacugcauucaaugcu

SEQ ID NO: 89151 - RNA, 19 nt, Artificial Sequence
  Description of Artificial Sequence: Synthetic oligonucleotide
aaagcaauugguacccaug

SEQ ID NO: 89152 - RNA, 19 nt, Artificial Sequence
  Description of Artificial Sequence: Synthetic oligonucleotide
guuacgauguuagaauggc

SEQ ID NO: 89153 - RNA, 19 nt, Artificial Sequence
  Description of Artificial Sequence: Synthetic oligonucleotide
ucauagggcggguauauuc

SEQ ID NO: 89154 - RNA, 19 nt, Artificial Sequence
  Description of Artificial Sequence: Synthetic oligonucleotide
auaauagucuuaacuuuuc

SEQ ID NO: 89155 - RNA, 19 nt, Artificial Sequence
  Description of Artificial Sequence: Synthetic oligonucleotide
uguuagaauggcaggacuu

SEQ ID NO: 89156 - RNA, 19 nt, Artificial Sequence
  Description of Artificial Sequence: Synthetic oligonucleotide
uauaaauuguccucuccuu

SEQ ID NO: 89157 - RNA, 19 nt, Artificial Sequence
  Description of Artificial Sequence: Synthetic oligonucleotide
agagucauauaaugugucu

SEQ ID NO: 89158 - RNA, 19 nt, Artificial Sequence
  Description of Artificial Sequence: Synthetic oligonucleotide
ccagcuaacgcauuauugg

SEQ ID NO: 89159 - RNA, 19 nt, Artificial Sequence
  Description of Artificial Sequence: Synthetic oligonucleotide
ucauauaaugugucuguau

SEQ ID NO: 89160 - RNA, 19 nt, Artificial Sequence
  Description of Artificial Sequence: Synthetic oligonucleotide
ugcuguaaacuucauucuc

SEQ ID NO: 89161 - RNA, 19 nt, Artificial Sequence
  Description of Artificial Sequence: Synthetic oligonucleotide
uacagccuagaccagaauu

SEQ ID NO: 89162 - RNA, 19 nt, Artificial Sequence
  Description of Artificial Sequence: Synthetic oligonucleotide
ugucuguaucaugaguagg

SEQ ID NO: 89163 - RNA, 19 nt, Artificial Sequence
  Description of Artificial Sequence: Synthetic oligonucleotide
aguuacgauguuagaaugg

SEQ ID NO: 89164 - RNA, 19 nt, Artificial Sequence
  Description of Artificial Sequence: Synthetic oligonucleotide
uaauuggauuuccauguau

SEQ ID NO: 89165 - RNA, 19 nt, Artificial Sequence
  Description of Artificial Sequence: Synthetic oligonucleotide
aaaucugauuguguaauuu

SEQ ID NO: 89166 - RNA, 19 nt, Artificial Sequence
  Description of Artificial Sequence: Synthetic oligonucleotide
uugguagaauuuaccaggu

SEQ ID NO: 89167 - RNA, 19 nt, Artificial Sequence
  Description of Artificial Sequence: Synthetic oligonucleotide
augucguuaucuucuagca

SEQ ID NO: 89168 - RNA, 19 nt, Artificial Sequence
  Description of Artificial Sequence: Synthetic oligonucleotide
cacuauuugagguaaucca

SEQ ID NO: 89169 - RNA, 19 nt, Artificial Sequence
  Description of Artificial Sequence: Synthetic oligonucleotide
uguccuaaucugaauuccu

SEQ ID NO: 89170 - RNA, 19 nt, Artificial Sequence
  Description of Artificial Sequence: Synthetic oligonucleotide
agaauuuaccagguucagg

SEQ ID NO: 89171 - RNA, 19 nt, Artificial Sequence
  Description of Artificial Sequence: Synthetic oligonucleotide
ugugcauugugaugcugag

SEQ ID NO: 89172 - RNA, 19 nt, Artificial Sequence
  Description of Artificial Sequence: Synthetic oligonucleotide
auaauagggcuacaguuua

SEQ ID NO: 89173 - RNA, 19 nt, Artificial Sequence
  Description of Artificial Sequence: Synthetic oligonucleotide
aaacuacaugagauuaaag

SEQ ID NO: 89174 - RNA, 19 nt, Artificial Sequence
  Description of Artificial Sequence: Synthetic oligonucleotide
ugcuucggaugauacagug

SEQ ID NO: 89175 - RNA, 19 nt, Artificial Sequence
  Description of Artificial Sequence: Synthetic oligonucleotide
aagucaugcaugggauagc

SEQ ID NO: 89176 - RNA, 19 nt, Artificial Sequence
  Description of Artificial Sequence: Synthetic oligonucleotide
aaguugagucucuaguguu

SEQ ID NO: 89177 - RNA, 19 nt, Artificial Sequence
  Description of Artificial Sequence: Synthetic oligonucleotide
uaggauuacuaucugucuu

SEQ ID NO: 89178 - RNA, 19 nt, Artificial Sequence
  Description of Artificial Sequence: Synthetic oligonucleotide
auaaauuguccucuccuuu

SEQ ID NO: 89179 - RNA, 19 nt, Artificial Sequence
  Description of Artificial Sequence: Synthetic oligonucleotide
uuguccuaaucugaauucc

SEQ ID NO: 89180 - RNA, 19 nt, Artificial Sequence
  Description of Artificial Sequence: Synthetic oligonucleotide
ugugcaugaucuguuauau

SEQ ID NO: 89181 - RNA, 19 nt, Artificial Sequence
  Description of Artificial Sequence: Synthetic oligonucleotide
gguaucuguacaaaauugc

SEQ ID NO: 89182 - RNA, 19 nt, Artificial Sequence
  Description of Artificial Sequence: Synthetic oligonucleotide
caugaucgaauguagaaua

SEQ ID NO: 89183 - RNA, 19 nt, Artificial Sequence
  Description of Artificial Sequence: Synthetic oligonucleotide
ugucuuaauccagacgcca

SEQ ID NO: 89184 - RNA, 19 nt, Artificial Sequence
  Description of Artificial Sequence: Synthetic oligonucleotide
ucuaauuuuagggguugcu

SEQ ID NO: 89185 - RNA, 19 nt, Artificial Sequence
  Description of Artificial Sequence: Synthetic oligonucleotide
uuccugcuaacgcauugcc

SEQ ID NO: 89186 - RNA, 19 nt, Artificial Sequence
  Description of Artificial Sequence: Synthetic oligonucleotide
ugcacauaaaucccaccau

SEQ ID NO: 89187 - RNA, 19 nt, Artificial Sequence
  Description of Artificial Sequence: Synthetic oligonucleotide
gauguuagaauggcaggac

SEQ ID NO: 89188 - RNA, 19 nt, Artificial Sequence
  Description of Artificial Sequence: Synthetic oligonucleotide
agggcuacaguuuacugua

SEQ ID NO: 89189 - RNA, 19 nt, Artificial Sequence
  Description of Artificial Sequence: Synthetic oligonucleotide
cugaauuccugcuaacgca

SEQ ID NO: 89190 - RNA, 19 nt, Artificial Sequence
  Description of Artificial Sequence: Synthetic oligonucleotide
aguguaggauuacuaucug

SEQ ID NO: 89191 - RNA, 19 nt, Artificial Sequence
  Description of Artificial Sequence: Synthetic oligonucleotide
auuagauucuauaggugga

SEQ ID NO: 89192 - RNA, 19 nt, Artificial Sequence
  Description of Artificial Sequence: Synthetic oligonucleotide
uguauccgguuucuucuca

SEQ ID NO: 89193 - RNA, 19 nt, Artificial Sequence
  Description of Artificial Sequence: Synthetic oligonucleotide
gugucuguaucaugaguag

SEQ ID NO: 89194 - RNA, 19 nt, Artificial Sequence
  Description of Artificial Sequence: Synthetic oligonucleotide
guauuagauucuauaggug

SEQ ID NO: 89195 - RNA, 19 nt, Artificial Sequence
  Description of Artificial Sequence: Synthetic oligonucleotide
auauucccugugcaugauc

SEQ ID NO: 89196 - RNA, 19 nt, Artificial Sequence
  Description of Artificial Sequence: Synthetic oligonucleotide
aaauaacccaugccaugau

SEQ ID NO: 89197 - RNA, 19 nt, Artificial Sequence
  Description of Artificial Sequence: Synthetic oligonucleotide
aagucuaggugugcuaaca

SEQ ID NO: 89198 - RNA, 19 nt, Artificial Sequence
  Description of Artificial Sequence: Synthetic oligonucleotide
uuacaugugcgccuuuaua

SEQ ID NO: 89199 - RNA, 19 nt, Artificial Sequence
  Description of Artificial Sequence: Synthetic oligonucleotide
guugaggcacccuccauac

SEQ ID NO: 89200 - RNA, 19 nt, Artificial Sequence
  Description of Artificial Sequence: Synthetic oligonucleotide
agauccugagucaauauau

SEQ ID NO: 89201 - RNA, 19 nt, Artificial Sequence
  Description of Artificial Sequence: Synthetic oligonucleotide
aggauuacuaucugucuua

SEQ ID NO: 89202 - RNA, 19 nt, Artificial Sequence
  Description of Artificial Sequence: Synthetic oligonucleotide
uagguucaccagcuaaugu

SEQ ID NO: 89203 - RNA, 19 nt, Artificial Sequence
  Description of Artificial Sequence: Synthetic oligonucleotide
ucgaacaauagggcaacug

SEQ ID NO: 89204 - RNA, 19 nt, Artificial Sequence
  Description of Artificial Sequence: Synthetic oligonucleotide
cacaagcggcucuacaaag

SEQ ID NO: 89205 - RNA, 19 nt, Artificial Sequence
  Description of Artificial Sequence: Synthetic oligonucleotide
uagauucuauagguggagc

SEQ ID NO: 89206 - RNA, 19 nt, Artificial Sequence
  Description of Artificial Sequence: Synthetic oligonucleotide
acuauuugagguaauccau

SEQ ID NO: 89207 - RNA, 19 nt, Artificial Sequence
  Description of Artificial Sequence: Synthetic oligonucleotide
guuacaaguaugacaucug

SEQ ID NO: 89208 - RNA, 19 nt, Artificial Sequence
  Description of Artificial Sequence: Synthetic oligonucleotide
agacuggaugacuauuagu

SEQ ID NO: 89209 - RNA, 19 nt, Artificial Sequence
  Description of Artificial Sequence: Synthetic oligonucleotide
uccauaacggcagcaacaa

SEQ ID NO: 89210 - RNA, 19 nt, Artificial Sequence
  Description of Artificial Sequence: Synthetic oligonucleotide
cacgcuuugcucgaugacc

SEQ ID NO: 89211 - RNA, 19 nt, Artificial Sequence
  Description of Artificial Sequence: Synthetic oligonucleotide
uuugcucgaugaccaaagu

SEQ ID NO: 89212 - RNA, 19 nt, Artificial Sequence
  Description of Artificial Sequence: Synthetic oligonucleotide
auuacuacugcaagucgga

SEQ ID NO: 89213 - RNA, 19 nt, Artificial Sequence
  Description of Artificial Sequence: Synthetic oligonucleotide
ugucccuucaaaagucuuu

SEQ ID NO: 89214 - RNA, 19 nt, Artificial Sequence
  Description of Artificial Sequence: Synthetic oligonucleotide
uccugcuaacgcauugcca

SEQ ID NO: 89215 - RNA, 19 nt, Artificial Sequence
  Description of Artificial Sequence: Synthetic oligonucleotide
ugucgaacaauagggcaac

SEQ ID NO: 89216 - RNA, 19 nt, Artificial Sequence
  Description of Artificial Sequence: Synthetic oligonucleotide
cuguuauauaaaguccgac

SEQ ID NO: 89217 - RNA, 19 nt, Artificial Sequence
  Description of Artificial Sequence: Synthetic oligonucleotide
ugcagaagugcuagcucac

SEQ ID NO: 89218 - RNA, 19 nt, Artificial Sequence
  Description of Artificial Sequence: Synthetic oligonucleotide
cauagggcggguauauuca

SEQ ID NO: 89219 - RNA, 19 nt, Artificial Sequence
  Description of Artificial Sequence: Synthetic oligonucleotide
gccuuuauacaauugcuga

SEQ ID NO: 89220 - RNA, 19 nt, Artificial Sequence
  Description of Artificial Sequence: Synthetic oligonucleotide
cuauaaauuguccucuccu

SEQ ID NO: 89221 - RNA, 19 nt, Artificial Sequence
  Description of Artificial Sequence: Synthetic oligonucleotide
caacguauuagauucuaua

SEQ ID NO: 89222 - RNA, 19 nt, Artificial Sequence
  Description of Artificial Sequence: Synthetic oligonucleotide
ugcagcuuacuuucuucac

SEQ ID NO: 89223 - RNA, 19 nt, Artificial Sequence
  Description of Artificial Sequence: Synthetic oligonucleotide
aaauagccucaaucgguua

SEQ ID NO: 89224 - RNA, 19 nt, Artificial Sequence
  Description of Artificial Sequence: Synthetic oligonucleotide
ucguggacauauauuccuc

SEQ ID NO: 89225 - RNA, 19 nt, Artificial Sequence
  Description of Artificial Sequence: Synthetic oligonucleotide
aagauacuguucagcaggu

SEQ ID NO: 89226 - RNA, 19 nt, Artificial Sequence
  Description of Artificial Sequence: Synthetic oligonucleotide
aguugaggcacccuccaua

SEQ ID NO: 89227 - RNA, 19 nt, Artificial Sequence
  Description of Artificial Sequence: Synthetic oligonucleotide
uuggaucauuagcaaguuc

SEQ ID NO: 89228 - RNA, 19 nt, Artificial Sequence
  Description of Artificial Sequence: Synthetic oligonucleotide
gccucaaucgguuaguuaa

SEQ ID NO: 89229 - RNA, 19 nt, Artificial Sequence
  Description of Artificial Sequence: Synthetic oligonucleotide
agggcggguauauucaaau

SEQ ID NO: 89230 - RNA, 19 nt, Artificial Sequence
  Description of Artificial Sequence: Synthetic oligonucleotide
guauccgguuucuucucag

SEQ ID NO: 89231 - RNA, 19 nt, Artificial Sequence
  Description of Artificial Sequence: Synthetic oligonucleotide
gaagugcuagcucacauuu

SEQ ID NO: 89232 - RNA, 19 nt, Artificial Sequence
  Description of Artificial Sequence: Synthetic oligonucleotide
cagagccuuccauuaaaac

SEQ ID NO: 89233 - RNA, 19 nt, Artificial Sequence
  Description of Artificial Sequence: Synthetic oligonucleotide
acuuccauauauaaucguu

SEQ ID NO: 89234 - RNA, 19 nt, Artificial Sequence
  Description of Artificial Sequence: Synthetic oligonucleotide
uaacgcauuauuggaaauu

SEQ ID NO: 89235 - RNA, 19 nt, Artificial Sequence
  Description of Artificial Sequence: Synthetic oligonucleotide
augacuauuagugcugaua

SEQ ID NO: 89236 - RNA, 19 nt, Artificial Sequence
  Description of Artificial Sequence: Synthetic oligonucleotide
auaauuggauuuccaugua

SEQ ID NO: 89237 - RNA, 19 nt, Artificial Sequence
  Description of Artificial Sequence: Synthetic oligonucleotide
ugacuuccgucuuaauaau

SEQ ID NO: 89238 - RNA, 19 nt, Artificial Sequence
  Description of Artificial Sequence: Synthetic oligonucleotide
ucgcauaggcuuuuaccuc

SEQ ID NO: 89239 - RNA, 19 nt, Artificial Sequence
  Description of Artificial Sequence: Synthetic oligonucleotide
auaaucguuuccacaaaau

SEQ ID NO: 89240 - RNA, 19 nt, Artificial Sequence
  Description of Artificial Sequence: Synthetic oligonucleotide
uuguugcgucuaauuuuag

SEQ ID NO: 89241 - RNA, 19 nt, Artificial Sequence
  Description of Artificial Sequence: Synthetic oligonucleotide
guagguucaccagcuaaug

SEQ ID NO: 89242 - RNA, 19 nt, Artificial Sequence
  Description of Artificial Sequence: Synthetic oligonucleotide
gucuuaauccagacgccag

SEQ ID NO: 89243 - RNA, 19 nt, Artificial Sequence
  Description of Artificial Sequence: Synthetic oligonucleotide
acacaagcggcucuacaaa

SEQ ID NO: 89244 - RNA, 19 nt, Artificial Sequence
  Description of Artificial Sequence: Synthetic oligonucleotide
uggcuuuacaugugcgccu

SEQ ID NO: 89245 - RNA, 19 nt, Artificial Sequence
  Description of Artificial Sequence: Synthetic oligonucleotide
ugcuauccuguuucugugu

SEQ ID NO: 89246 - RNA, 19 nt, Artificial Sequence
  Description of Artificial Sequence: Synthetic oligonucleotide
uaguaucguaauacagcau

SEQ ID NO: 89247 - RNA, 19 nt, Artificial Sequence
  Description of Artificial Sequence: Synthetic oligonucleotide
ugaccuuguguauccacuu

SEQ ID NO: 89248 - RNA, 19 nt, Artificial Sequence
  Description of Artificial Sequence: Synthetic oligonucleotide
ugcucccuugaccacuaac

SEQ ID NO: 89249 - RNA, 19 nt, Artificial Sequence
  Description of Artificial Sequence: Synthetic oligonucleotide
ucuggcacgcuuugcucga

SEQ ID NO: 89250 - RNA, 19 nt, Artificial Sequence
  Description of Artificial Sequence: Synthetic oligonucleotide
guuuguccuaaucugaauu

SEQ ID NO: 89251 - RNA, 19 nt, Artificial Sequence
  Description of Artificial Sequence: Synthetic oligonucleotide
auauauccauucaucagua

SEQ ID NO: 89252 - RNA, 19 nt, Artificial Sequence
  Description of Artificial Sequence: Synthetic oligonucleotide
gcguuuacacacacaagcg

SEQ ID NO: 89253 - RNA, 19 nt, Artificial Sequence
  Description of Artificial Sequence: Synthetic oligonucleotide
cacacaagcggcucuacaa

SEQ ID NO: 89254 - RNA, 19 nt, Artificial Sequence
  Description of Artificial Sequence: Synthetic oligonucleotide
aguagguucaccagcuaau

SEQ ID NO: 89255 - RNA, 19 nt, Artificial Sequence
  Description of Artificial Sequence: Synthetic oligonucleotide
uaucguaauacagcauauu

SEQ ID NO: 89256 - RNA, 19 nt, Artificial Sequence
  Description of Artificial Sequence: Synthetic oligonucleotide
augucgaacaauagggcaa

SEQ ID NO: 89257 - RNA, 19 nt, Artificial Sequence
  Description of Artificial Sequence: Synthetic oligonucleotide
guuuuaaguuacgauguua

SEQ ID NO: 89258 - RNA, 19 nt, Artificial Sequence
  Description of Artificial Sequence: Synthetic oligonucleotide
augaguacaguuacagcaa

SEQ ID NO: 89259 - RNA, 19 nt, Artificial Sequence
  Description of Artificial Sequence: Synthetic oligonucleotide
ucuguaucaugaguagguu

SEQ ID NO: 89260 - RNA, 19 nt, Artificial Sequence
  Description of Artificial Sequence: Synthetic oligonucleotide
cuugcaggguuacuguaga

SEQ ID NO: 89261 - RNA, 19 nt, Artificial Sequence
  Description of Artificial Sequence: Synthetic oligonucleotide
guaggauuacuaucugucu

SEQ ID NO: 89262 - RNA, 19 nt, Artificial Sequence
  Description of Artificial Sequence: Synthetic oligonucleotide
augggauagcugguauaac

SEQ ID NO: 89263 - RNA, 19 nt, Artificial Sequence
  Description of Artificial Sequence: Synthetic oligonucleotide
ugcuaacgcauugccauaa

SEQ ID NO: 89264 - RNA, 19 nt, Artificial Sequence
  Description of Artificial Sequence: Synthetic oligonucleotide
cuaaucugaauuccugcua

SEQ ID NO: 89265 - RNA, 19 nt, Artificial Sequence
  Description of Artificial Sequence: Synthetic oligonucleotide
gugauuggagauucaauau

SEQ ID NO: 89266 - RNA, 19 nt, Artificial Sequence
  Description of Artificial Sequence: Synthetic oligonucleotide
ucucaguacuggugugcug

SEQ ID NO: 89267 - RNA, 19 nt, Artificial Sequence
  Description of Artificial Sequence: Synthetic oligonucleotide
caaccugcuugccacugug

SEQ ID NO: 89268 - RNA, 19 nt, Artificial Sequence
  Description of Artificial Sequence: Synthetic oligonucleotide
acacacaagcggcucuaca

SEQ ID NO: 89269 - RNA, 19 nt, Artificial Sequence
  Description of Artificial Sequence: Synthetic oligonucleotide
auacugggacaugaguaca

SEQ ID NO: 89270 - RNA, 19 nt, Artificial Sequence
  Description of Artificial Sequence: Synthetic oligonucleotide
uuggagauccugagucaau

SEQ ID NO: 89271 - RNA, 19 nt, Artificial Sequence
  Description of Artificial Sequence: Synthetic oligonucleotide
auagccucaaucgguuagu

SEQ ID NO: 89272 - RNA, 19 nt, Artificial Sequence
  Description of Artificial Sequence: Synthetic oligonucleotide
accugcaaaguuguucgca

SEQ ID NO: 89273 - RNA, 19 nt, Artificial Sequence
  Description of Artificial Sequence: Synthetic oligonucleotide
ccgacauuuucacagucac

SEQ ID NO: 89274 - RNA, 19 nt, Artificial Sequence
  Description of Artificial Sequence: Synthetic oligonucleotide
gucuguaucaugaguaggu

SEQ ID NO: 89275 - RNA, 19 nt, Artificial Sequence
  Description of Artificial Sequence: Synthetic oligonucleotide
guguauguugcaacuuuca

SEQ ID NO: 89276 - RNA, 19 nt, Artificial Sequence
  Description of Artificial Sequence: Synthetic oligonucleotide
auagggcggguauauucaa

SEQ ID NO: 89277 - RNA, 19 nt, Artificial Sequence
  Description of Artificial Sequence: Synthetic oligonucleotide
gucuaauuuuagggguugc

SEQ ID NO: 89278 - RNA, 19 nt, Artificial Sequence
  Description of Artificial Sequence: Synthetic oligonucleotide
ugguagaauuuaccagguu

SEQ ID NO: 89279 - RNA, 19 nt, Artificial Sequence
  Description of Artificial Sequence: Synthetic oligonucleotide
uagggcggguauauucaaa

SEQ ID NO: 89280 - RNA, 19 nt, Artificial Sequence
  Description of Artificial Sequence: Synthetic oligonucleotide
gccaugaucgaauguagaa

SEQ ID NO: 89281 - RNA, 19 nt, Artificial Sequence
  Description of Artificial Sequence: Synthetic oligonucleotide
acaagcggcucuacaaaga

SEQ ID NO: 89282 - RNA, 19 nt, Artificial Sequence
  Description of Artificial Sequence: Synthetic oligonucleotide
cguauuagauucuauaggu

SEQ ID NO: 89283 - RNA, 19 nt, Artificial Sequence
  Description of Artificial Sequence: Synthetic oligonucleotide
agcuaacgcauuauuggaa

SEQ ID NO: 89284 - RNA, 19 nt, Artificial Sequence
  Description of Artificial Sequence: Synthetic oligonucleotide
cugugcaugaucuguuaua

SEQ ID NO: 89285 - RNA, 19 nt, Artificial Sequence
  Description of Artificial Sequence: Synthetic oligonucleotide
cauagugucaacugaccuu

SEQ ID NO: 89286 - RNA, 19 nt, Artificial Sequence
  Description of Artificial Sequence: Synthetic oligonucleotide
cagcuaauguacaaggauu

SEQ ID NO: 89287 - RNA, 19 nt, Artificial Sequence
  Description of Artificial Sequence: Synthetic oligonucleotide
uggcacgcuuugcucgaug

SEQ ID NO: 89288 - RNA, 19 nt, Artificial Sequence
  Description of Artificial Sequence: Synthetic oligonucleotide
caucgaaccacugugggau

SEQ ID NO: 89289 - RNA, 19 nt, Artificial Sequence
  Description of Artificial Sequence: Synthetic oligonucleotide
ucgaaccacugugggauuc

SEQ ID NO: 89290 - RNA, 19 nt, Artificial Sequence
  Description of Artificial Sequence: Synthetic oligonucleotide
gcucccuugaccacuaaca

SEQ ID NO: 89291 - RNA, 19 nt, Artificial Sequence
  Description of Artificial Sequence: Synthetic oligonucleotide
auauggcauuucgaucugu

SEQ ID NO: 89292 - RNA, 19 nt, Artificial Sequence
  Description of Artificial Sequence: Synthetic oligonucleotide
cugauaaaucuugugacuu

SEQ ID NO: 89293 - RNA, 19 nt, Artificial Sequence
  Description of Artificial Sequence: Synthetic oligonucleotide
cuugauagugggacaugcu

SEQ ID NO: 89294 - RNA, 19 nt, Artificial Sequence
  Description of Artificial Sequence: Synthetic oligonucleotide
gucauauaaugugucugua

SEQ ID NO: 89295 - RNA, 19 nt, Artificial Sequence
  Description of Artificial Sequence: Synthetic oligonucleotide
ccuuuauacaauugcugaa

SEQ ID NO: 89296 - RNA, 19 nt, Artificial Sequence
  Description of Artificial Sequence: Synthetic oligonucleotide
acaugagauuaaagcauua

SEQ ID NO: 89297 - RNA, 19 nt, Artificial Sequence
  Description of Artificial Sequence: Synthetic oligonucleotide
guugugcugcaacguauua

SEQ ID NO: 89298 - RNA, 19 nt, Artificial Sequence
  Description of Artificial Sequence: Synthetic oligonucleotide
cuaauuuuagggguugcuu

SEQ ID NO: 89299 - RNA, 19 nt, Artificial Sequence
  Description of Artificial Sequence: Synthetic oligonucleotide
cucaaucgguuaguuaaaa

SEQ ID NO: 89300 - RNA, 19 nt, Artificial Sequence
  Description of Artificial Sequence: Synthetic oligonucleotide
cagauuugucaucaggguu

SEQ ID NO: 89301 - RNA, 19 nt, Artificial Sequence
  Description of Artificial Sequence: Synthetic oligonucleotide
acaaagcugcuugucuauu

SEQ ID NO: 89302 - RNA, 19 nt, Artificial Sequence
  Description of Artificial Sequence: Synthetic oligonucleotide
guaucguaauacagcauau

SEQ ID NO: 89303 - RNA, 19 nt, Artificial Sequence
  Description of Artificial Sequence: Synthetic oligonucleotide
gaguacaguuacagcaagu

SEQ ID NO: 89304 - RNA, 19 nt, Artificial Sequence
  Description of Artificial Sequence: Synthetic oligonucleotide
acgccagccauugcauugu

SEQ ID NO: 89305 - RNA, 19 nt, Artificial Sequence
  Description of Artificial Sequence: Synthetic oligonucleotide
ggaugacuauuagugcuga

SEQ ID NO: 89306 - RNA, 19 nt, Artificial Sequence
  Description of Artificial Sequence: Synthetic oligonucleotide
cugugcaugugcuucggau

SEQ ID NO: 89307 - RNA, 19 nt, Artificial Sequence
  Description of Artificial Sequence: Synthetic oligonucleotide
gaugacuauuagugcugau

SEQ ID NO: 89308 - RNA, 19 nt, Artificial Sequence
  Description of Artificial Sequence: Synthetic oligonucleotide
gcuauccuguuucugugua

SEQ ID NO: 89309 - RNA, 19 nt, Artificial Sequence
  Description of Artificial Sequence: Synthetic oligonucleotide
aucgaaccacugugggauu

SEQ ID NO: 89310 - RNA, 19 nt, Artificial Sequence
  Description of Artificial Sequence: Synthetic oligonucleotide
gguaauccauacaccugca

SEQ ID NO: 89311 - RNA, 19 nt, Artificial Sequence
  Description of Artificial Sequence: Synthetic oligonucleotide
ggauuacuaucugucuuaa

SEQ ID NO: 89312 - RNA, 19 nt, Artificial Sequence
  Description of Artificial Sequence: Synthetic oligonucleotide
acgcauuauuggaaauuuu

SEQ ID NO: 89313 - RNA, 19 nt, Artificial Sequence
  Description of Artificial Sequence: Synthetic oligonucleotide
gggucacuauuugagguaa

SEQ ID NO: 89314 - RNA, 19 nt, Artificial Sequence
  Description of Artificial Sequence: Synthetic oligonucleotide
ggugugcauugugaugcug

SEQ ID NO: 89315 - RNA, 19 nt, Artificial Sequence
  Description of Artificial Sequence: Synthetic oligonucleotide
gaccuuguguauccacuuu

SEQ ID NO: 89316 - RNA, 19 nt, Artificial Sequence
  Description of Artificial Sequence: Synthetic oligonucleotide
cgaacaauagggcaacugu

SEQ ID NO: 89317 - RNA, 19 nt, Artificial Sequence
  Description of Artificial Sequence: Synthetic oligonucleotide
aucauagggcggguauauu

SEQ ID NO: 89318 - RNA, 19 nt, Artificial Sequence
  Description of Artificial Sequence: Synthetic oligonucleotide
cuaagcaguggugugcauu

SEQ ID NO: 89319 - RNA, 19 nt, Artificial Sequence
  Description of Artificial Sequence: Synthetic oligonucleotide
caucauagggcggguauau

SEQ ID NO: 89320 - RNA, 19 nt, Artificial Sequence
  Description of Artificial Sequence: Synthetic oligonucleotide
cgauguuagaauggcagga

SEQ ID NO: 89321 - RNA, 19 nt, Artificial Sequence
  Description of Artificial Sequence: Synthetic oligonucleotide
cgucuaauuuuagggguug

SEQ ID NO: 89322 - RNA, 19 nt, Artificial Sequence
  Description of Artificial Sequence: Synthetic oligonucleotide
ggagauccugagucaauau

SEQ ID NO: 89323 - RNA, 19 nt, Artificial Sequence
  Description of Artificial Sequence: Synthetic oligonucleotide
gggcggguauauucaaaua

SEQ ID NO: 89324 - RNA, 19 nt, Artificial Sequence
  Description of Artificial Sequence: Synthetic oligonucleotide
ccucaaucgguuaguuaaa

SEQ ID NO: 89325 - RNA, 19 nt, Artificial Sequence
  Description of Artificial Sequence: Synthetic oligonucleotide
augcaucauagggcgggua

SEQ ID NO: 89326 - RNA, 19 nt, Artificial Sequence
  Description of Artificial Sequence: Synthetic oligonucleotide
gcgccuuuauacaauugcu

SEQ ID NO: 89327 - RNA, 19 nt, Artificial Sequence
  Description of Artificial Sequence: Synthetic oligonucleotide
cugucccuucaaaagucuu

SEQ ID NO: 89328 - RNA, 19 nt, Artificial Sequence
  Description of Artificial Sequence: Synthetic oligonucleotide
cggcucuacaaagauccug

SEQ ID NO: 89329 - RNA, 19 nt, Artificial Sequence
  Description of Artificial Sequence: Synthetic oligonucleotide
ccaugaucgaauguagaau

SEQ ID NO: 89330 - RNA, 19 nt, Artificial Sequence
  Description of Artificial Sequence: Synthetic oligonucleotide
gugcuucggaugauacagu

SEQ ID NO: 89331 - RNA, 19 nt, Artificial Sequence
  Description of Artificial Sequence: Synthetic oligonucleotide
gucgaacaauagggcaacu

SEQ ID NO: 89332 - RNA, 19 nt, Artificial Sequence
  Description of Artificial Sequence: Synthetic oligonucleotide
cuauuacaccuugucccuu

SEQ ID NO: 89333 - RNA, 19 nt, Artificial Sequence
  Description of Artificial Sequence: Synthetic oligonucleotide
gggcaacuguuuguccuaa

SEQ ID NO: 89334 - RNA, 19 nt, Artificial Sequence
  Description of Artificial Sequence: Synthetic oligonucleotide
cggguauauucaaauacuu

SEQ ID NO: 89335 - RNA, 19 nt, Artificial Sequence
  Description of Artificial Sequence: Synthetic oligonucleotide
gugcugcaccaaucauagu

SEQ ID NO: 89336 - RNA, 19 nt, Artificial Sequence
  Description of Artificial Sequence: Synthetic oligonucleotide
gcgucuaauuuuagggguu

SEQ ID NO: 89337 - RNA, 19 nt, Artificial Sequence
  Description of Artificial Sequence: Synthetic oligonucleotide
ccucuacuaacaguccuuu

SEQ ID NO: 89338 - RNA, 19 nt, Artificial Sequence
  Description of Artificial Sequence: Synthetic oligonucleotide
gcggcucuacaaagauccu

SEQ ID NO: 89339 - RNA, 19 nt, Artificial Sequence
  Description of Artificial Sequence: Synthetic oligonucleotide
cuggcacgcuuugcucgau

SEQ ID NO: 89340 - RNA, 19 nt, Artificial Sequence
  Description of Artificial Sequence: Synthetic oligonucleotide
aaggagauuauacugaucc

SEQ ID NO: 89341 - RNA, 19 nt, Artificial Sequence
  Description of Artificial Sequence: Synthetic oligonucleotide
ugaaaugcccaaaagaagg

SEQ ID NO: 89342 - RNA, 19 nt, Artificial Sequence
  Description of Artificial Sequence: Synthetic oligonucleotide
uuuacaaugaaauuaccag

SEQ ID NO: 89343 - RNA, 19 nt, Artificial Sequence
  Description of Artificial Sequence: Synthetic oligonucleotide
aacaauacuaaaucccggc

SEQ ID NO: 89344 - RNA, 19 nt, Artificial Sequence
  Description of Artificial Sequence: Synthetic oligonucleotide
aaugacauaaucucuacca

SEQ ID NO: 89345 - RNA, 19 nt, Artificial Sequence
  Description of Artificial Sequence: Synthetic oligonucleotide
aauaucauguauucuggac

SEQ ID NO: 89346 - RNA, 19 nt, Artificial Sequence
  Description of Artificial Sequence: Synthetic oligonucleotide
uguagaauggcaauggugc

SEQ ID NO: 89347 - RNA, 19 nt, Artificial Sequence
  Description of Artificial Sequence: Synthetic oligonucleotide
aguagaaucaauucuuuac

SEQ ID NO: 89348 - RNA, 19 nt, Artificial Sequence
  Description of Artificial Sequence: Synthetic oligonucleotide
cauguuaacacauugcugc

SEQ ID NO: 89349 - RNA, 19 nt, Artificial Sequence
  Description of Artificial Sequence: Synthetic oligonucleotide
aauugaaaugcccaaaaga

SEQ ID NO: 89350 - RNA, 19 nt, Artificial Sequence
  Description of Artificial Sequence: Synthetic oligonucleotide
aagcuagauauccuggucc

SEQ ID NO: 89351 - RNA, 19 nt, Artificial Sequence
  Description of Artificial Sequence: Synthetic oligonucleotide
uauuaucugacuuacaccu

SEQ ID NO: 89352 - RNA, 19 nt, Artificial Sequence
  Description of Artificial Sequence: Synthetic oligonucleotide
acaacaauugguuuggguc

SEQ ID NO: 89353 - RNA, 19 nt, Artificial Sequence
  Description of Artificial Sequence: Synthetic oligonucleotide
auacguugaauauaugagc

SEQ ID NO: 89354 - RNA, 19 nt, Artificial Sequence
  Description of Artificial Sequence: Synthetic oligonucleotide
aaguuuugaaguaagauca

SEQ ID NO: 89355 - RNA, 19 nt, Artificial Sequence
  Description of Artificial Sequence: Synthetic oligonucleotide
auuagugaaugcuuucugc

SEQ ID NO: 89356 - RNA, 19 nt, Artificial Sequence
  Description of Artificial Sequence: Synthetic oligonucleotide
uaucaaagaguccuuuucg

SEQ ID NO: 89357 - RNA, 19 nt, Artificial Sequence
  Description of Artificial Sequence: Synthetic oligonucleotide
ucuaacuugucuuucuccg

SEQ ID NO: 89358 - RNA, 19 nt, Artificial Sequence
  Description of Artificial Sequence: Synthetic oligonucleotide
gaaucauauucuuauagug

SEQ ID NO: 89359 - RNA, 19 nt, Artificial Sequence
  Description of Artificial Sequence: Synthetic oligonucleotide
ugaacauaaauaaaacuuc

SEQ ID NO: 89360 - RNA, 19 nt, Artificial Sequence
  Description of Artificial Sequence: Synthetic oligonucleotide
aauaguggacgguagaagu

SEQ ID NO: 89361 - RNA, 19 nt, Artificial Sequence
  Description of Artificial Sequence: Synthetic oligonucleotide
aagaaaaccagccauguua

SEQ ID NO: 89362 - RNA, 19 nt, Artificial Sequence
  Description of Artificial Sequence: Synthetic oligonucleotide
aaacucaugaucaaauauc

SEQ ID NO: 89363 - RNA, 19 nt, Artificial Sequence
  Description of Artificial Sequence: Synthetic oligonucleotide
aauguggcccuauugaaug

SEQ ID NO: 89364 - RNA, 19 nt, Artificial Sequence
  Description of Artificial Sequence: Synthetic oligonucleotide
uucaccauggacaugagaa

SEQ ID NO: 89365 - RNA, 19 nt, Artificial Sequence
  Description of Artificial Sequence: Synthetic oligonucleotide
aauguguuacugcaauggg

SEQ ID NO: 89366 - RNA, 19 nt, Artificial Sequence
  Description of Artificial Sequence: Synthetic oligonucleotide
ucagauaacgcuuuaauuu

SEQ ID NO: 89367 - RNA, 19 nt, Artificial Sequence
  Description of Artificial Sequence: Synthetic oligonucleotide
uuacaaugaaauuaccagc

SEQ ID NO: 89368 - RNA, 19 nt, Artificial Sequence
  Description of Artificial Sequence: Synthetic oligonucleotide
aauacuaaaucccggcugu

SEQ ID NO: 89369 - RNA, 19 nt, Artificial Sequence
  Description of Artificial Sequence: Synthetic oligonucleotide
cacagcguaacacaaaugg

SEQ ID NO: 89370 - RNA, 19 nt, Artificial Sequence
  Description of Artificial Sequence: Synthetic oligonucleotide
ucauacguugaauauauga

SEQ ID NO: 89371 - RNA, 19 nt, Artificial Sequence
  Description of Artificial Sequence: Synthetic oligonucleotide
cauacguugaauauaugag

SEQ ID NO: 89372 - RNA, 19 nt, Artificial Sequence
  Description of Artificial Sequence: Synthetic oligonucleotide
uacuauaccuccaucacug

SEQ ID NO: 89373 - RNA, 19 nt, Artificial Sequence
  Description of Artificial Sequence: Synthetic oligonucleotide
aucucuaccaucccuaggg

SEQ ID NO: 89374 - RNA, 19 nt, Artificial Sequence
  Description of Artificial Sequence: Synthetic oligonucleotide
aaacacucacucuacacug

SEQ ID NO: 89375 - RNA, 19 nt, Artificial Sequence
  Description of Artificial Sequence: Synthetic oligonucleotide
uggaguauaacucauguuu

SEQ ID NO: 89376 - RNA, 19 nt, Artificial Sequence
  Description of Artificial Sequence: Synthetic oligonucleotide
aaggugcauucacagaagc

SEQ ID NO: 89377 - RNA, 19 nt, Artificial Sequence
  Description of Artificial Sequence: Synthetic oligonucleotide
uguguuacugcaaugggac

SEQ ID NO: 89378 - RNA, 19 nt, Artificial Sequence
  Description of Artificial Sequence: Synthetic oligonucleotide
aguauuuauggucucgguc

SEQ ID NO: 89379 - RNA, 19 nt, Artificial Sequence
  Description of Artificial Sequence: Synthetic oligonucleotide
cugacuuacaccuauucag

SEQ ID NO: 89380 - RNA, 19 nt, Artificial Sequence
  Description of Artificial Sequence: Synthetic oligonucleotide
gcaaauuauauuuugggag

SEQ ID NO: 89381 - RNA, 19 nt, Artificial Sequence
  Description of Artificial Sequence: Synthetic oligonucleotide
ugauuuagaaacaaugauu

SEQ ID NO: 89382 - RNA, 19 nt, Artificial Sequence
  Description of Artificial Sequence: Synthetic oligonucleotide
aauauaugagccuuccuua

SEQ ID NO: 89383 - RNA, 19 nt, Artificial Sequence
  Description of Artificial Sequence: Synthetic oligonucleotide
uugaaaugcccaaaagaag

SEQ ID NO: 89384 - RNA, 19 nt, Artificial Sequence
  Description of Artificial Sequence: Synthetic oligonucleotide
uuucauacguugaauauau

SEQ ID NO: 89385 - RNA, 19 nt, Artificial Sequence
  Description of Artificial Sequence: Synthetic oligonucleotide
uguguuaguacugaaguca

SEQ ID NO: 89386 - RNA, 19 nt, Artificial Sequence
  Description of Artificial Sequence: Synthetic oligonucleotide
uccacaugaaguuagaguu

SEQ ID NO: 89387 - RNA, 19 nt, Artificial Sequence
  Description of Artificial Sequence: Synthetic oligonucleotide
uuaccuguugcaucaauag

SEQ ID NO: 89388 - RNA, 19 nt, Artificial Sequence
  Description of Artificial Sequence: Synthetic oligonucleotide
uaaacucaugaucaaauau

SEQ ID NO: 89389 - RNA, 19 nt, Artificial Sequence
  Description of Artificial Sequence: Synthetic oligonucleotide
aguaagaucaaacaaucuu

SEQ ID NO: 89390 - RNA, 19 nt, Artificial Sequence
  Description of Artificial Sequence: Synthetic oligonucleotide
acaucaguaguuuuagcag

SEQ ID NO: 89391 - RNA, 19 nt, Artificial Sequence
  Description of Artificial Sequence: Synthetic oligonucleotide
auaucauguauucuggacu

SEQ ID NO: 89392 - RNA, 19 nt, Artificial Sequence
  Description of Artificial Sequence: Synthetic oligonucleotide
aaaugcccaaaagaagggc

SEQ ID NO: 89393 - RNA, 19 nt, Artificial Sequence
  Description of Artificial Sequence: Synthetic oligonucleotide
auagccuuaguaauaacac

SEQ ID NO: 89394 - RNA, 19 nt, Artificial Sequence
  Description of Artificial Sequence: Synthetic oligonucleotide
ugaccaaccagaauuuuca

SEQ ID NO: 89395 - RNA, 19 nt, Artificial Sequence
  Description of Artificial Sequence: Synthetic oligonucleotide
auguagauuggucacuuuc

SEQ ID NO: 89396 - RNA, 19 nt, Artificial Sequence
  Description of Artificial Sequence: Synthetic oligonucleotide
ugacaggauuuucugaucc
